United States Patent Application Publication US 2015/0232836 A1 - sequence listing, part 23

SEQ ID NO: 840737 - DNA, 15 bp, Homo sapiens
tgagctcctagaatg

SEQ ID NO: 840738 - DNA, 15 bp, Homo sapiens
ctgagctcctagaat

SEQ ID NO: 840739 - DNA, 15 bp, Homo sapiens
actgagctcctagaa

SEQ ID NO: 840740 - DNA, 15 bp, Homo sapiens
tactgagctcctaga

SEQ ID NO: 840741 - DNA, 15 bp, Homo sapiens
gtactgagctcctag

SEQ ID NO: 840742 - DNA, 15 bp, Homo sapiens
tgtactgagctccta

SEQ ID NO: 840743 - DNA, 15 bp, Homo sapiens
atgtactgagctcct

SEQ ID NO: 840744 - DNA, 15 bp, Homo sapiens
tatgtactgagctcc

SEQ ID NO: 840745 - DNA, 15 bp, Homo sapiens
atatgtactgagctc

SEQ ID NO: 840746 - DNA, 15 bp, Homo sapiens
aatatgtactgagct

SEQ ID NO: 840747 - DNA, 15 bp, Homo sapiens
aaatatgtactgagc

SEQ ID NO: 840748 - DNA, 15 bp, Homo sapiens
caaatatgtactgag

SEQ ID NO: 840749 - DNA, 15 bp, Homo sapiens
tcaaatatgtactga

SEQ ID NO: 840750 - DNA, 15 bp, Homo sapiens
atcaaatatgtactg

SEQ ID NO: 840751 - DNA, 15 bp, Homo sapiens
tatcaaatatgtact

SEQ ID NO: 840752 - DNA, 15 bp, Homo sapiens
ttatcaaatatgtac

SEQ ID NO: 840753 - DNA, 15 bp, Homo sapiens
tttatcaaatatgta

SEQ ID NO: 840754 - DNA, 15 bp, Homo sapiens
atttatcaaatatgt

SEQ ID NO: 840755 - DNA, 15 bp, Homo sapiens
catttatcaaatatg

SEQ ID NO: 840756 - DNA, 15 bp, Homo sapiens
tcatttatcaaatat

SEQ ID NO: 840757 - DNA, 15 bp, Homo sapiens
ttcatttatcaaata

SEQ ID NO: 840758 - DNA, 15 bp, Homo sapiens
attcatttatcaaat

SEQ ID NO: 840759 - DNA, 15 bp, Homo sapiens
cattcatttatcaaa

SEQ ID NO: 840760 - DNA, 15 bp, Homo sapiens
tcattcatttatcaa

SEQ ID NO: 840761 - DNA, 15 bp, Homo sapiens
ttcattcatttatca

SEQ ID NO: 840762 - DNA, 15 bp, Homo sapiens
attcattcatttatc

SEQ ID NO: 840763 - DNA, 15 bp, Homo sapiens
aattcattcatttat

SEQ ID NO: 840764 - DNA, 15 bp, Homo sapiens
caattcattcattta

SEQ ID NO: 840765 - DNA, 15 bp, Homo sapiens
acaattcattcattt

SEQ ID NO: 840766 - DNA, 15 bp, Homo sapiens
aacaattcattcatt

SEQ ID NO: 840767 - DNA, 15 bp, Homo sapiens
caacaattcattcat

SEQ ID NO: 840768 - DNA, 15 bp, Homo sapiens
tcaacaattcattca

SEQ ID NO: 840769 - DNA, 15 bp, Homo sapiens
ctcaacaattcattc

SEQ ID NO: 840770 - DNA, 15 bp, Homo sapiens
cctcaacaattcatt

SEQ ID NO: 840771 - DNA, 15 bp, Homo sapiens
acctcaacaattcat

SEQ ID NO: 840772 - DNA, 15 bp, Homo sapiens
aacctcaacaattca

SEQ ID NO: 840773 - DNA, 15 bp, Homo sapiens
caacctcaacaattc

SEQ ID NO: 840774 - DNA, 15 bp, Homo sapiens
tcaacctcaacaatt

SEQ ID NO: 840775 - DNA, 15 bp, Homo sapiens
gtcaacctcaacaat

SEQ ID NO: 840776 - DNA, 15 bp, Homo sapiens
tgtcaacctcaacaa

SEQ ID NO: 840777 - DNA, 15 bp, Homo sapiens
ctgtcaacctcaaca

SEQ ID NO: 840778 - DNA, 15 bp, Homo sapiens
actgtcaacctcaac

SEQ ID NO: 840779 - DNA, 15 bp, Homo sapiens
aactgtcaacctcaa

SEQ ID NO: 840780 - DNA, 15 bp, Homo sapiens
taactgtcaacctca

SEQ ID NO: 840781 - DNA, 15 bp, Homo sapiens
gtaactgtcaacctc

SEQ ID NO: 840782 - DNA, 15 bp, Homo sapiens
ggtaactgtcaacct

SEQ ID NO: 840783 - DNA, 15 bp, Homo sapiens
gggtaactgtcaacc

SEQ ID NO: 840784 - DNA, 15 bp, Homo sapiens
tgggtaactgtcaac

SEQ ID NO: 840785 - DNA, 15 bp, Homo sapiens
ctgggtaactgtcaa

SEQ ID NO: 840786 - DNA, 15 bp, Homo sapiens
cctgggtaactgtca

SEQ ID NO: 840787 - DNA, 15 bp, Homo sapiens
tcctgggtaactgtc

SEQ ID NO: 840788 - DNA, 15 bp, Homo sapiens
gtcctgggtaactgt

SEQ ID NO: 840789 - DNA, 15 bp, Homo sapiens
agtcctgggtaactg

SEQ ID NO: 840790 - DNA, 15 bp, Homo sapiens
cagtcctgggtaact

SEQ ID NO: 840791 - DNA, 15 bp, Homo sapiens
ccagtcctgggtaac

SEQ ID NO: 840792 - DNA, 15 bp, Homo sapiens
gccagtcctgggtaa

SEQ ID NO: 840793 - DNA, 15 bp, Homo sapiens
tgccagtcctgggta

SEQ ID NO: 840794 - DNA, 15 bp, Homo sapiens
atgccagtcctgggt

SEQ ID NO: 840795 - DNA, 15 bp, Homo sapiens
aatgccagtcctggg

SEQ ID NO: 840796 - DNA, 15 bp, Homo sapiens
taatgccagtcctgg

SEQ ID NO: 840797 - DNA, 15 bp, Homo sapiens
ctaatgccagtcctg

SEQ ID NO: 840798 - DNA, 15 bp, Homo sapiens
cctaatgccagtcct

SEQ ID NO: 840799 - DNA, 15 bp, Homo sapiens
tcctaatgccagtcc

SEQ ID NO: 840800 - DNA, 15 bp, Homo sapiens
ttcctaatgccagtc

SEQ ID NO: 840801 - DNA, 15 bp, Homo sapiens
gttcctaatgccagt

SEQ ID NO: 840802 - DNA, 15 bp, Homo sapiens
tgttcctaatgccag

SEQ ID NO: 840803 - DNA, 15 bp, Homo sapiens
gtgttcctaatgcca

SEQ ID NO: 840804 - DNA, 15 bp, Homo sapiens
tgtgttcctaatgcc

SEQ ID NO: 840805 - DNA, 15 bp, Homo sapiens
ctgtgttcctaatgc

SEQ ID NO: 840806 - DNA, 15 bp, Homo sapiens
tctgtgttcctaatg

SEQ ID NO: 840807 - DNA, 15 bp, Homo sapiens
ctctgtgttcctaat

SEQ ID NO: 840808 - DNA, 15 bp, Homo sapiens
gctctgtgttcctaa

SEQ ID NO: 840809 - DNA, 15 bp, Homo sapiens
agctctgtgttccta

SEQ ID NO: 840810 - DNA, 15 bp, Homo sapiens
cagctctgtgttcct

SEQ ID NO: 840811 - DNA, 15 bp, Homo sapiens
tcagctctgtgttcc

SEQ ID NO: 840812 - DNA, 15 bp, Homo sapiens
ttcagctctgtgttc

SEQ ID NO: 840813 - DNA, 15 bp, Homo sapiens
cttcagctctgtgtt

SEQ ID NO: 840814 - DNA, 15 bp, Homo sapiens
tcttcagctctgtgt

SEQ ID NO: 840815 - DNA, 15 bp, Homo sapiens
ctcttcagctctgtg

SEQ ID NO: 840816 - DNA, 15 bp, Homo sapiens
gctcttcagctctgt

SEQ ID NO: 840817 - DNA, 15 bp, Homo sapiens
tgctcttcagctctg

SEQ ID NO: 840818 - DNA, 15 bp, Homo sapiens
gtgctcttcagctct

SEQ ID NO: 840819 - DNA, 15 bp, Homo sapiens
cgtgctcttcagctc

SEQ ID NO: 840820 - DNA, 15 bp, Homo sapiens
acgtgctcttcagct

SEQ ID NO: 840821 - DNA, 15 bp, Homo sapiens
aacgtgctcttcagc

SEQ ID NO: 840822 - DNA, 15 bp, Homo sapiens
aaacgtgctcttcag

SEQ ID NO: 840823 - DNA, 15 bp, Homo sapiens
aaaacgtgctcttca

SEQ ID NO: 840824 - DNA, 15 bp, Homo sapiens
aaaaacgtgctcttc

SEQ ID NO: 840825 - DNA, 15 bp, Homo sapiens
taaaaacgtgctctt

SEQ ID NO: 840826 - DNA, 15 bp, Homo sapiens
gtaaaaacgtgctct

SEQ ID NO: 840827 - DNA, 15 bp, Homo sapiens
ggtaaaaacgtgctc

SEQ ID NO: 840828 - DNA, 15 bp, Homo sapiens
gggtaaaaacgtgct

SEQ ID NO: 840829 - DNA, 15 bp, Homo sapiens
agggtaaaaacgtgc

SEQ ID NO: 840830 - DNA, 15 bp, Homo sapiens
gagggtaaaaacgtg

SEQ ID NO: 840831 - DNA, 15 bp, Homo sapiens
tgagggtaaaaacgt

SEQ ID NO: 840832 - DNA, 15 bp, Homo sapiens
ttgagggtaaaaacg

SEQ ID NO: 840833 - DNA, 15 bp, Homo sapiens
cttgagggtaaaaac

SEQ ID NO: 840834 - DNA, 15 bp, Homo sapiens
tcttgagggtaaaaa

SEQ ID NO: 840835 - DNA, 15 bp, Homo sapiens
ttcttgagggtaaaa

SEQ ID NO: 840836 - DNA, 15 bp, Homo sapiens
cttcttgagggtaaa

SEQ ID NO: 840837 - DNA, 15 bp, Homo sapiens
gcttcttgagggtaa

SEQ ID NO: 840838 - DNA, 15 bp, Homo sapiens
agcttcttgagggta

SEQ ID NO: 840839 - DNA, 15 bp, Homo sapiens
aagcttcttgagggt

SEQ ID NO: 840840 - DNA, 15 bp, Homo sapiens
taagcttcttgaggg

SEQ ID NO: 840841 - DNA, 15 bp, Homo sapiens
gtaagcttcttgagg

SEQ ID NO: 840842 - DNA, 15 bp, Homo sapiens
tgtaagcttcttgag

SEQ ID NO: 840843 - DNA, 15 bp, Homo sapiens
ctgtaagcttcttga

SEQ ID NO: 840844 - DNA, 15 bp, Homo sapiens
actgtaagcttcttg

SEQ ID NO: 840845 - DNA, 15 bp, Homo sapiens
gactgtaagcttctt

SEQ ID NO: 840846 - DNA, 15 bp, Homo sapiens
agactgtaagcttct

SEQ ID NO: 840847 - DNA, 15 bp, Homo sapiens
tagactgtaagcttc

SEQ ID NO: 840848 - DNA, 15 bp, Homo sapiens
ttagactgtaagctt

SEQ ID NO: 840849 - DNA, 15 bp, Homo sapiens
gttagactgtaagct

SEQ ID NO: 840850 - DNA, 15 bp, Homo sapiens
cgttagactgtaagc

SEQ ID NO: 840851 - DNA, 15 bp, Homo sapiens
tcgttagactgtaag

SEQ ID NO: 840852 - DNA, 15 bp, Homo sapiens
ctcgttagactgtaa

SEQ ID NO: 840853 - DNA, 15 bp, Homo sapiens
cctcgttagactgta

SEQ ID NO: 840854 - DNA, 15 bp, Homo sapiens
ccctcgttagactgt

SEQ ID NO: 840855 - DNA, 15 bp, Homo sapiens
tccctcgttagactg

SEQ ID NO: 840856 - DNA, 15 bp, Homo sapiens
ttccctcgttagact

SEQ ID NO: 840857 - DNA, 15 bp, Homo sapiens
gttccctcgttagac

SEQ ID NO: 840858 - DNA, 15 bp, Homo sapiens
agttccctcgttaga

SEQ ID NO: 840859 - DNA, 15 bp, Homo sapiens
aagttccctcgttag

SEQ ID NO: 840860 - DNA, 15 bp, Homo sapiens
caagttccctcgtta

SEQ ID NO: 840861 - DNA, 15 bp, Homo sapiens
gcaagttccctcgtt

SEQ ID NO: 840862 - DNA, 15 bp, Homo sapiens
tgcaagttccctcgt

SEQ ID NO: 840863 - DNA, 15 bp, Homo sapiens
gtgcaagttccctcg

SEQ ID NO: 840864 - DNA, 15 bp, Homo sapiens
tgtgcaagttccctc

SEQ ID NO: 840865 - DNA, 15 bp, Homo sapiens
ttgtgcaagttccct

SEQ ID NO: 840866 - DNA, 15 bp, Homo sapiens
tttgtgcaagttccc

SEQ ID NO: 840867 - DNA, 15 bp, Homo sapiens
atttgtgcaagttcc

SEQ ID NO: 840868 - DNA, 15 bp, Homo sapiens
tatttgtgcaagttc

SEQ ID NO: 840869 - DNA, 15 bp, Homo sapiens
gtatttgtgcaagtt

SEQ ID NO: 840870 - DNA, 15 bp, Homo sapiens
agtatttgtgcaagt

SEQ ID NO: 840871 - DNA, 15 bp, Homo sapiens
tagtatttgtgcaag

SEQ ID NO: 840872 - DNA, 15 bp, Homo sapiens
gtagtatttgtgcaa

SEQ ID NO: 840873 - DNA, 15 bp, Homo sapiens
agtagtatttgtgca

SEQ ID NO: 840874 - DNA, 15 bp, Homo sapiens
tagtagtatttgtgc

SEQ ID NO: 840875 - DNA, 15 bp, Homo sapiens
atagtagtatttgtg

SEQ ID NO: 840876 - DNA, 15 bp, Homo sapiens
gatagtagtatttgt

SEQ ID NO: 840877 - DNA, 15 bp, Homo sapiens
tgatagtagtatttg

SEQ ID NO: 840878 - DNA, 15 bp, Homo sapiens
gtgatagtagtattt

SEQ ID NO: 840879 - DNA, 15 bp, Homo sapiens
agtgatagtagtatt

SEQ ID NO: 840880 - DNA, 15 bp, Homo sapiens
tagtgatagtagtat

SEQ ID NO: 840881 - DNA, 15 bp, Homo sapiens
ctagtgatagtagta

SEQ ID NO: 840882 - DNA, 15 bp, Homo sapiens
cctagtgatagtagt

SEQ ID NO: 840883 - DNA, 15 bp, Homo sapiens
acctagtgatagtag

SEQ ID NO: 840884 - DNA, 15 bp, Homo sapiens
cacctagtgatagta

SEQ ID NO: 840885 - DNA, 15 bp, Homo sapiens
gcacctagtgatagt

SEQ ID NO: 840886 - DNA, 15 bp, Homo sapiens
ggcacctagtgatag

SEQ ID NO: 840887 - DNA, 15 bp, Homo sapiens
aggcacctagtgata

SEQ ID NO: 840888 - DNA, 15 bp, Homo sapiens
caggcacctagtgat

SEQ ID NO: 840889 - DNA, 15 bp, Homo sapiens
ccaggcacctagtga

SEQ ID NO: 840890 - DNA, 15 bp, Homo sapiens
accaggcacctagtg

SEQ ID NO: 840891 - DNA, 15 bp, Homo sapiens
aaccaggcacctagt

SEQ ID NO: 840892 - DNA, 15 bp, Homo sapiens
caaccaggcacctag

SEQ ID NO: 840893 - DNA, 15 bp, Homo sapiens
tcaaccaggcaccta

SEQ ID NO: 840894 - DNA, 15 bp, Homo sapiens
ttcaaccaggcacct

SEQ ID NO: 840895 - DNA, 15 bp, Homo sapiens
attcaaccaggcacc

SEQ ID NO: 840896 - DNA, 15 bp, Homo sapiens
cattcaaccaggcac

SEQ ID NO: 840897 - DNA, 15 bp, Homo sapiens
ccattcaaccaggca

SEQ ID NO: 840898 - DNA, 15 bp, Homo sapiens
gccattcaaccaggc

SEQ ID NO: 840899 - DNA, 15 bp, Homo sapiens
agccattcaaccagg

SEQ ID NO: 840900 - DNA, 15 bp, Homo sapiens
aagccattcaaccag

SEQ ID NO: 840901 - DNA, 15 bp, Homo sapiens
taagccattcaacca

SEQ ID NO: 840902 - DNA, 15 bp, Homo sapiens
ttaagccattcaacc

SEQ ID NO: 840903 - DNA, 15 bp, Homo sapiens
cttaagccattcaac

SEQ ID NO: 840904 - DNA, 15 bp, Homo sapiens
tcttaagccattcaa

SEQ ID NO: 840905 - DNA, 15 bp, Homo sapiens
ctcttaagccattca

SEQ ID NO: 840906 - DNA, 15 bp, Homo sapiens
tctcttaagccattc

SEQ ID NO: 840907 - DNA, 15 bp, Homo sapiens
atctcttaagccatt

SEQ ID NO: 840908 - DNA, 15 bp, Homo sapiens
catctcttaagccat

SEQ ID NO: 840909 - DNA, 15 bp, Homo sapiens
tcatctcttaagcca

SEQ ID NO: 840910 - DNA, 15 bp, Homo sapiens
atcatctcttaagcc

SEQ ID NO: 840911 - DNA, 15 bp, Homo sapiens
gatcatctcttaagc

SEQ ID NO: 840912 - DNA, 15 bp, Homo sapiens
tgatcatctcttaag

SEQ ID NO: 840913 - DNA, 15 bp, Homo sapiens
ctgatcatctcttaa

SEQ ID NO: 840914 - DNA, 15 bp, Homo sapiens
cctgatcatctctta

SEQ ID NO: 840915 - DNA, 15 bp, Homo sapiens
ccctgatcatctctt

SEQ ID NO: 840916 - DNA, 15 bp, Homo sapiens
tccctgatcatctct

SEQ ID NO: 840917 - DNA, 15 bp, Homo sapiens
atccctgatcatctc

SEQ ID NO: 840918 - DNA, 15 bp, Homo sapiens
tatccctgatcatct

SEQ ID NO: 840919 - DNA, 15 bp, Homo sapiens
atatccctgatcatc

SEQ ID NO: 840920 - DNA, 15 bp, Homo sapiens
aatatccctgatcat

SEQ ID NO: 840921 - DNA, 15 bp, Homo sapiens
gaatatccctgatca

SEQ ID NO: 840922 - DNA, 15 bp, Homo sapiens
tgaatatccctgatc

SEQ ID NO: 840923 - DNA, 15 bp, Homo sapiens
ctgaatatccctgat

SEQ ID NO: 840924 - DNA, 15 bp, Homo sapiens
tctgaatatccctga

SEQ ID NO: 840925 - DNA, 15 bp, Homo sapiens
ttctgaatatccctg

SEQ ID NO: 840926 - DNA, 15 bp, Homo sapiens
cttctgaatatccct

SEQ ID NO: 840927 - DNA, 15 bp, Homo sapiens
ccttctgaatatccc

SEQ ID NO: 840928 - DNA, 15 bp, Homo sapiens
tccttctgaatatcc

SEQ ID NO: 840929 - DNA, 15 bp, Homo sapiens
atccttctgaatatc

SEQ ID NO: 840930 - DNA, 15 bp, Homo sapiens
tatccttctgaatat

SEQ ID NO: 840931 - DNA, 15 bp, Homo sapiens
atatccttctgaata

SEQ ID NO: 840932 - DNA, 15 bp, Homo sapiens
catatccttctgaat

SEQ ID NO: 840933 - DNA, 15 bp, Homo sapiens
acatatccttctgaa

SEQ ID NO: 840934 - DNA, 15 bp, Homo sapiens
gacatatccttctga

SEQ ID NO: 840935 - DNA, 15 bp, Homo sapiens
tgacatatccttctg

SEQ ID NO: 840936 - DNA, 15 bp, Homo sapiens
ctgacatatccttct

SEQ ID NO: 840937 - DNA, 15 bp, Homo sapiens
cctgacatatccttc

SEQ ID NO: 840938 - DNA, 15 bp, Homo sapiens
gcctgacatatcctt

SEQ ID NO: 840939 - DNA, 15 bp, Homo sapiens
agcctgacatatcct

SEQ ID NO: 840940 - DNA, 15 bp, Homo sapiens
gagcctgacatatcc

SEQ ID NO: 840941 - DNA, 15 bp, Homo sapiens
tgagcctgacatatc

SEQ ID NO: 840942 - DNA, 15 bp, Homo sapiens
ctgagcctgacatat

SEQ ID NO: 840943 - DNA, 15 bp, Homo sapiens
gctgagcctgacata

SEQ ID NO: 840944 - DNA, 15 bp, Homo sapiens
tgctgagcctgacat

SEQ ID NO: 840945 - DNA, 15 bp, Homo sapiens
ttgctgagcctgaca

SEQ ID NO: 840946 - DNA, 15 bp, Homo sapiens
attgctgagcctgac

SEQ ID NO: 840947 - DNA, 15 bp, Homo sapiens
cattgctgagcctga

SEQ ID NO: 840948 - DNA, 15 bp, Homo sapiens
ccattgctgagcctg

SEQ ID NO: 840949 - DNA, 15 bp, Homo sapiens
gccattgctgagcct

SEQ ID NO: 840950 - DNA, 15 bp, Homo sapiens
tgccattgctgagcc

SEQ ID NO: 840951 - DNA, 15 bp, Homo sapiens
atgccattgctgagc

SEQ ID NO: 840952 - DNA, 15 bp, Homo sapiens
gatgccattgctgag

SEQ ID NO: 840953 - DNA, 15 bp, Homo sapiens
tgatgccattgctga

SEQ ID NO: 840954 - DNA, 15 bp, Homo sapiens
gtgatgccattgctg

SEQ ID NO: 840955 - DNA, 15 bp, Homo sapiens
agtgatgccattgct

SEQ ID NO: 840956 - DNA, 15 bp, Homo sapiens
aagtgatgccattgc

SEQ ID NO: 840957 - DNA, 15 bp, Homo sapiens
caagtgatgccattg

SEQ ID NO: 840958 - DNA, 15 bp, Homo sapiens
tcaagtgatgccatt

SEQ ID NO: 840959 - DNA, 15 bp, Homo sapiens
ctcaagtgatgccat

SEQ ID NO: 840960 - DNA, 15 bp, Homo sapiens
tctcaagtgatgcca

SEQ ID NO: 840961 - DNA, 15 bp, Homo sapiens
ctctcaagtgatgcc

SEQ ID NO: 840962 - DNA, 15 bp, Homo sapiens
gctctcaagtgatgc

SEQ ID NO: 840963 - DNA, 15 bp, Homo sapiens
tgctctcaagtgatg

SEQ ID NO: 840964 - DNA, 15 bp, Homo sapiens
atgctctcaagtgat

SEQ ID NO: 840965 - DNA, 15 bp, Homo sapiens
gatgctctcaagtga

SEQ ID NO: 840966 - DNA, 15 bp, Homo sapiens
tgatgctctcaagtg

SEQ ID NO: 840967 - DNA, 15 bp, Homo sapiens
ttgatgctctcaagt

SEQ ID NO: 840968 - DNA, 15 bp, Homo sapiens
cttgatgctctcaag

SEQ ID NO: 840969 - DNA, 15 bp, Homo sapiens
ccttgatgctctcaa

SEQ ID NO: 840970 - DNA, 15 bp, Homo sapiens
accttgatgctctca

SEQ ID NO: 840971 - DNA, 15 bp, Homo sapiens
caccttgatgctctc

SEQ ID NO: 840972 - DNA, 15 bp, Homo sapiens
acaccttgatgctct

SEQ ID NO: 840973 - DNA, 15 bp, Homo sapiens
aacaccttgatgctc

SEQ ID NO: 840974 - DNA, 15 bp, Homo sapiens
aaacaccttgatgct

SEQ ID NO: 840975 - DNA, 15 bp, Homo sapiens
taaacaccttgatgc

SEQ ID NO: 840976 - DNA, 15 bp, Homo sapiens
ctaaacaccttgatg

SEQ ID NO: 840977 - DNA, 15 bp, Homo sapiens
cctaaacaccttgat

SEQ ID NO: 840978 - DNA, 15 bp, Homo sapiens
ccctaaacaccttga

SEQ ID NO: 840979 - DNA, 15 bp, Homo sapiens
tccctaaacaccttg

SEQ ID NO: 840980 - DNA, 15 bp, Homo sapiens
ttccctaaacacctt

SEQ ID NO: 840981 - DNA, 15 bp, Homo sapiens
gttccctaaacacct

SEQ ID NO: 840982 - DNA, 15 bp, Homo sapiens
agttccctaaacacc

SEQ ID NO: 840983 - DNA, 15 bp, Homo sapiens
tagttccctaaacac

SEQ ID NO: 840984 - DNA, 15 bp, Homo sapiens
gtagttccctaaaca

SEQ ID NO: 840985 - DNA, 15 bp, Homo sapiens
tgtagttccctaaac

SEQ ID NO: 840986 - DNA, 15 bp, Homo sapiens
ttgtagttccctaaa

SEQ ID NO: 840987 - DNA, 15 bp, Homo sapiens
cttgtagttccctaa

SEQ ID NO: 840988 - DNA, 15 bp, Homo sapiens
tcttgtagttcccta

SEQ ID NO: 840989 - DNA, 15 bp, Homo sapiens
atcttgtagttccct

SEQ ID NO: 840990 - DNA, 15 bp, Homo sapiens
catcttgtagttccc

SEQ ID NO: 840991 - DNA, 15 bp, Homo sapiens
acatcttgtagttcc

SEQ ID NO: 840992 - DNA, 15 bp, Homo sapiens
aacatcttgtagttc

SEQ ID NO: 840993 - DNA, 15 bp, Homo sapiens
aaacatcttgtagtt

SEQ ID NO: 840994 - DNA, 15 bp, Homo sapiens
caaacatcttgtagt

SEQ ID NO: 840995 - DNA, 15 bp, Homo sapiens
ccaaacatcttgtag

SEQ ID NO: 840996 - DNA, 15 bp, Homo sapiens
accaaacatcttgta

SEQ ID NO: 840997 - DNA, 15 bp, Homo sapiens
aaccaaacatcttgt

SEQ ID NO: 840998 - DNA, 15 bp, Homo sapiens
gaaccaaacatcttg

SEQ ID NO: 840999 - DNA, 15 bp, Homo sapiens
agaaccaaacatctt

SEQ ID NO: 841000 - DNA, 15 bp, Homo sapiens
cagaaccaaacatct

SEQ ID NO: 841001 - DNA, 15 bp, Homo sapiens
gcagaaccaaacatc

SEQ ID NO: 841002 - DNA, 15 bp, Homo sapiens
agcagaaccaaacat

SEQ ID NO: 841003 - DNA, 15 bp, Homo sapiens
cagcagaaccaaaca

SEQ ID NO: 841004 - DNA, 15 bp, Homo sapiens
ccagcagaaccaaac

SEQ ID NO: 841005 - DNA, 15 bp, Homo sapiens
cccagcagaaccaaa

SEQ ID NO: 841006 - DNA, 15 bp, Homo sapiens
tcccagcagaaccaa

SEQ ID NO: 841007 - DNA, 15 bp, Homo sapiens
ttcccagcagaacca

SEQ ID NO: 841008 - DNA, 15 bp, Homo sapiens
attcccagcagaacc

SEQ ID NO: 841009 - DNA, 15 bp, Homo sapiens
tattcccagcagaac

SEQ ID NO: 841010 - DNA, 15 bp, Homo sapiens
ttattcccagcagaa

SEQ ID NO: 841011 - DNA, 15 bp, Homo sapiens
cttattcccagcaga

SEQ ID NO: 841012 - DNA, 15 bp, Homo sapiens
tcttattcccagcag

SEQ ID NO: 841013 - DNA, 15 bp, Homo sapiens
ctcttattcccagca

SEQ ID NO: 841014 - DNA, 15 bp, Homo sapiens
actcttattcccagc

SEQ ID NO: 841015 - DNA, 15 bp, Homo sapiens
cactcttattcccag

SEQ ID NO: 841016 - DNA, 15 bp, Homo sapiens
tcactcttattccca

SEQ ID NO: 841017 - DNA, 15 bp, Homo sapiens
ttcactcttattccc

SEQ ID NO: 841018 - DNA, 15 bp, Homo sapiens
cttcactcttattcc

SEQ ID NO: 841019 - DNA, 15 bp, Homo sapiens
ccttcactcttattc

SEQ ID NO: 841020 - DNA, 15 bp, Homo sapiens
cccttcactcttatt

SEQ ID NO: 841021 - DNA, 15 bp, Homo sapiens
ccccttcactcttat

SEQ ID NO: 841022 - DNA, 15 bp, Homo sapiens
cccccttcactctta

SEQ ID NO: 841023 - DNA, 15 bp, Homo sapiens
gcccccttcactctt

SEQ ID NO: 841024 - DNA, 15 bp, Homo sapiens
agcccccttcactct

SEQ ID NO: 841025 - DNA, 15 bp, Homo sapiens
gagcccccttcactc

SEQ ID NO: 841026 - DNA, 15 bp, Homo sapiens
ggagcccccttcact

SEQ ID NO: 841027 - DNA, 15 bp, Homo sapiens
tggagcccccttcac

SEQ ID NO: 841028 - DNA, 15 bp, Homo sapiens
atggagcccccttca

SEQ ID NO: 841029 - DNA, 15 bp, Homo sapiens
aatggagcccccttc

SEQ ID NO: 841030 - DNA, 15 bp, Homo sapiens
aaatggagccccctt

SEQ ID NO: 841031 - DNA, 15 bp, Homo sapiens
caaatggagccccct

SEQ ID NO: 841032 - DNA, 15 bp, Homo sapiens
ccaaatggagccccc

SEQ ID NO: 841033 - DNA, 15 bp, Homo sapiens
tccaaatggagcccc

SEQ ID NO: 841034 - DNA, 15 bp, Homo sapiens
atccaaatggagccc

SEQ ID NO: 841035 - DNA, 15 bp, Homo sapiens
catccaaatggagcc

SEQ ID NO: 841036 - DNA, 15 bp, Homo sapiens
gcatccaaatggagc

SEQ ID NO: 841037 - DNA, 15 bp, Homo sapiens
ggcatccaaatggag

SEQ ID NO: 841038 - DNA, 15 bp, Homo sapiens
aggcatccaaatgga

SEQ ID NO: 841039 - DNA, 15 bp, Homo sapiens
gaggcatccaaatgg

SEQ ID NO: 841040 - DNA, 15 bp, Homo sapiens
tgaggcatccaaatg

SEQ ID NO: 841041 - DNA, 15 bp, Homo sapiens
atgaggcatccaaat

SEQ ID NO: 841042 - DNA, 15 bp, Homo sapiens
tatgaggcatccaaa

SEQ ID NO: 841043 - DNA, 15 bp, Homo sapiens
gtatgaggcatccaa

SEQ ID NO: 841044 - DNA, 15 bp, Homo sapiens
tgtatgaggcatcca

SEQ ID NO: 841045 - DNA, 15 bp, Homo sapiens
gtgtatgaggcatcc

SEQ ID NO: 841046 - DNA, 15 bp, Homo sapiens
ggtgtatgaggcatc

SEQ ID NO: 841047 - DNA, 15 bp, Homo sapiens
tggtgtatgaggcat

SEQ ID NO: 841048 - DNA, 15 bp, Homo sapiens
ctggtgtatgaggca

SEQ ID NO: 841049 - DNA, 15 bp, Homo sapiens
cctggtgtatgaggc

SEQ ID NO: 841050 - DNA, 15 bp, Homo sapiens
acctggtgtatgagg

SEQ ID NO: 841051 - DNA, 15 bp, Homo sapiens
cacctggtgtatgag

SEQ ID NO: 841052 - DNA, 15 bp, Homo sapiens
tcacctggtgtatga

SEQ ID NO: 841053 - DNA, 15 bp, Homo sapiens
ctcacctggtgtatg

SEQ ID NO: 841054 - DNA, 15 bp, Homo sapiens
tctcacctggtgtat

SEQ ID NO: 841055 - DNA, 15 bp, Homo sapiens
ctctcacctggtgta

SEQ ID NO: 841056 - DNA, 15 bp, Homo sapiens
tctctcacctggtgt

SEQ ID NO: 841057 - DNA, 15 bp, Homo sapiens
atctctcacctggtg

SEQ ID NO: 841058 - DNA, 15 bp, Homo sapiens
gatctctcacctggt

SEQ ID NO: 841059 - DNA, 15 bp, Homo sapiens
agatctctcacctgg

SEQ ID NO: 841060 - DNA, 15 bp, Homo sapiens
aagatctctcacctg

SEQ ID NO: 841061 - DNA, 15 bp, Homo sapiens
taagatctctcacct

SEQ ID NO: 841062 - DNA, 15 bp, Homo sapiens
ctaagatctctcacc

SEQ ID NO: 841063 - DNA, 15 bp, Homo sapiens
tctaagatctctcac

SEQ ID NO: 841064 - DNA, 15 bp, Homo sapiens
atctaagatctctca

SEQ ID NO: 841065 - DNA, 15 bp, Homo sapiens
aatctaagatctctc

SEQ ID NO: 841066 - DNA, 15 bp, Homo sapiens
aaatctaagatctct

SEQ ID NO: 841067 - DNA, 15 bp, Homo sapiens
aaaatctaagatctc

SEQ ID NO: 841068 - DNA, 15 bp, Homo sapiens
taaaatctaagatct

SEQ ID NO: 841069 - DNA, 15 bp, Homo sapiens
ataaaatctaagatc

SEQ ID NO: 841070 - DNA, 15 bp, Homo sapiens
aataaaatctaagat

SEQ ID NO: 841071 - DNA, 15 bp, Homo sapiens
gaataaaatctaaga

SEQ ID NO: 841072 - DNA, 15 bp, Homo sapiens
ggaataaaatctaag

SEQ ID NO: 841073 - DNA, 15 bp, Homo sapiens
tggaataaaatctaa

SEQ ID NO: 841074 - DNA, 15 bp, Homo sapiens
gtggaataaaatcta

SEQ ID NO: 841075 - DNA, 15 bp, Homo sapiens
ggtggaataaaatct

SEQ ID NO: 841076 - DNA, 15 bp, Homo sapiens
tggtggaataaaatc

SEQ ID NO: 841077 - DNA, 15 bp, Homo sapiens
ctggtggaataaaat

SEQ ID NO: 841078 - DNA, 15 bp, Homo sapiens
cctggtggaataaaa

SEQ ID NO: 841079 - DNA, 15 bp, Homo sapiens
tcctggtggaataaa

SEQ ID NO: 841080 - DNA, 15 bp, Homo sapiens
ctcctggtggaataa

SEQ ID NO: 841081 - DNA, 15 bp, Homo sapiens
cctcctggtggaata

SEQ ID NO: 841082 - DNA, 15 bp, Homo sapiens
tcctcctggtggaat

SEQ ID NO: 841083 - DNA, 15 bp, Homo sapiens
ctcctcctggtggaa

SEQ ID NO: 841084 - DNA, 15 bp, Homo sapiens
tctcctcctggtgga

SEQ ID NO: 841085 - DNA, 15 bp, Homo sapiens
ttctcctcctggtgg

SEQ ID NO: 841086 - DNA, 15 bp, Homo sapiens
gttctcctcctggtg

SEQ ID NO: 841087 - DNA, 15 bp, Homo sapiens
agttctcctcctggt

SEQ ID NO: 841088 - DNA, 15 bp, Homo sapiens
tagttctcctcctgg

SEQ ID NO: 841089 - DNA, 15 bp, Homo sapiens
gtagttctcctcctg

SEQ ID NO: 841090 - DNA, 15 bp, Homo sapiens
ggtagttctcctcct

SEQ ID NO: 841091 - DNA, 15 bp, Homo sapiens
tggtagttctcctcc

SEQ ID NO: 841092 - DNA, 15 bp, Homo sapiens
atggtagttctcctc

SEQ ID NO: 841093 - DNA, 15 bp, Homo sapiens
tatggtagttctcct

SEQ ID NO: 841094 - DNA, 15 bp, Homo sapiens
ctatggtagttctcc

SEQ ID NO: 841095 - DNA, 15 bp, Homo sapiens
cctatggtagttctc

SEQ ID NO: 841096 - DNA, 15 bp, Homo sapiens
tcctatggtagttct

SEQ ID NO: 841097 - DNA, 15 bp, Homo sapiens
atcctatggtagttc

SEQ ID NO: 841098 - DNA, 15 bp, Homo sapiens
aatcctatggtagtt

SEQ ID NO: 841099 - DNA, 15 bp, Homo sapiens
aaatcctatggtagt

SEQ ID NO: 841100 - DNA, 15 bp, Homo sapiens
taaatcctatggtag

SEQ ID NO: 841101 - DNA, 15 bp, Homo sapiens
ttaaatcctatggta

SEQ ID NO: 841102 - DNA, 15 bp, Homo sapiens
tttaaatcctatggt

SEQ ID NO: 841103 - DNA, 15 bp, Homo sapiens
ttttaaatcctatgg

SEQ ID NO: 841104 - DNA, 15 bp, Homo sapiens
gttttaaatcctatg

SEQ ID NO: 841105 - DNA, 15 bp, Homo sapiens
tgttttaaatcctat

SEQ ID NO: 841106 - DNA, 15 bp, Homo sapiens
ctgttttaaatccta

SEQ ID NO: 841107 - DNA, 15 bp, Homo sapiens
tctgttttaaatcct

SEQ ID NO: 841108 - DNA, 15 bp, Homo sapiens
ttctgttttaaatcc

SEQ ID NO: 841109 - DNA, 15 bp, Homo sapiens
tttctgttttaaatc

SEQ ID NO: 841110 - DNA, 15 bp, Homo sapiens
atttctgttttaaat

SEQ ID NO: 841111 - DNA, 15 bp, Homo sapiens
catttctgttttaaa

SEQ ID NO: 841112 - DNA, 15 bp, Homo sapiens
tcatttctgttttaa

SEQ ID NO: 841113 - DNA, 15 bp, Homo sapiens
atcatttctgtttta

SEQ ID NO: 841114 - DNA, 15 bp, Homo sapiens
tatcatttctgtttt

SEQ ID NO: 841115 - DNA, 15 bp, Homo sapiens
atatcatttctgttt

SEQ ID NO: 841116 - DNA, 15 bp, Homo sapiens
catatcatttctgtt

SEQ ID NO: 841117 - DNA, 15 bp, Homo sapiens
ccatatcatttctgt

SEQ ID NO: 841118 - DNA, 15 bp, Homo sapiens
accatatcatttctg

SEQ ID NO: 841119 - DNA, 15 bp, Homo sapiens
gaccatatcatttct

SEQ ID NO: 841120 - DNA, 15 bp, Homo sapiens
tgaccatatcatttc

SEQ ID NO: 841121 - DNA, 15 bp, Homo sapiens
ttgaccatatcattt

SEQ ID NO: 841122 - DNA, 15 bp, Homo sapiens
tttgaccatatcatt

SEQ ID NO: 841123 - DNA, 15 bp, Homo sapiens
gtttgaccatatcat

SEQ ID NO: 841124 - DNA, 15 bp, Homo sapiens
ggtttgaccatatca

SEQ ID NO: 841125 - DNA, 15 bp, Homo sapiens
aggtttgaccatatc

SEQ ID NO: 841126 - DNA, 15 bp, Homo sapiens
taggtttgaccatat

SEQ ID NO: 841127 - DNA, 15 bp, Homo sapiens
gtaggtttgaccata

SEQ ID NO: 841128 - DNA, 15 bp, Homo sapiens
tgtaggtttgaccat

SEQ ID NO: 841129 - DNA, 15 bp, Homo sapiens
atgtaggtttgacca

SEQ ID NO: 841130 - DNA, 15 bp, Homo sapiens
gatgtaggtttgacc

SEQ ID NO: 841131 - DNA, 15 bp, Homo sapiens
agatgtaggtttgac

SEQ ID NO: 841132 - DNA, 15 bp, Homo sapiens
aagatgtaggtttga

SEQ ID NO: 841133 - DNA, 15 bp, Homo sapiens
taagatgtaggtttg

SEQ ID NO: 841134 - DNA, 15 bp, Homo sapiens
ctaagatgtaggttt

SEQ ID NO: 841135 - DNA, 15 bp, Homo sapiens
cctaagatgtaggtt

SEQ ID NO: 841136 - DNA, 15 bp, Homo sapiens
tcctaagatgtaggt

SEQ ID NO: 841137 - DNA, 15 bp, Homo sapiens
ttcctaagatgtagg

SEQ ID NO: 841138 - DNA, 15 bp, Homo sapiens
cttcctaagatgtag

SEQ ID NO: 841139 - DNA, 15 bp, Homo sapiens
tcttcctaagatgta

SEQ ID NO: 841140 - DNA, 15 bp, Homo sapiens
atcttcctaagatgt

SEQ ID NO: 841141 - DNA, 15 bp, Homo sapiens
gatcttcctaagatg

SEQ ID NO: 841142 - DNA, 15 bp, Homo sapiens
ggatcttcctaagat

SEQ ID NO: 841143 - DNA, 15 bp, Homo sapiens
gggatcttcctaaga

SEQ ID NO: 841144 - DNA, 15 bp, Homo sapiens
agggatcttcctaag

SEQ ID NO: 841145 - DNA, 15 bp, Homo sapiens
cagggatcttcctaa

SEQ ID NO: 841146 - DNA, 15 bp, Homo sapiens
ccagggatcttccta

SEQ ID NO: 841147 - DNA, 15 bp, Homo sapiens
cccagggatcttcct

SEQ ID NO: 841148 - DNA, 15 bp, Homo sapiens
ccccagggatcttcc

SEQ ID NO: 841149 - DNA, 15 bp, Homo sapiens
accccagggatcttc

SEQ ID NO: 841150 - DNA, 15 bp, Homo sapiens
caccccagggatctt

SEQ ID NO: 841151 - DNA, 15 bp, Homo sapiens
acaccccagggatct

SEQ ID NO: 841152 - DNA, 15 bp, Homo sapiens
aacaccccagggatc

SEQ ID NO: 841153 - DNA, 15 bp, Homo sapiens
aaacaccccagggat

SEQ ID NO: 841154 - DNA, 15 bp, Homo sapiens
caaacaccccaggga

SEQ ID NO: 841155 - DNA, 15 bp, Homo sapiens
acaaacaccccaggg

SEQ ID NO: 841156 - DNA, 15 bp, Homo sapiens
tacaaacaccccagg

SEQ ID NO: 841157 - DNA, 15 bp, Homo sapiens
atacaaacaccccag

SEQ ID NO: 841158 - DNA, 15 bp, Homo sapiens
catacaaacacccca

SEQ ID NO: 841159 - DNA, 15 bp, Homo sapiens
ccatacaaacacccc

SEQ ID NO: 841160 - DNA, 15 bp, Homo sapiens
accatacaaacaccc

SEQ ID NO: 841161 - DNA, 15 bp, Homo sapiens
caccatacaaacacc

SEQ ID NO: 841162 - DNA, 15 bp, Homo sapiens
ccaccatacaaacac

SEQ ID NO: 841163 - DNA, 15 bp, Homo sapiens
tccaccatacaaaca

SEQ ID NO: 841164 - DNA, 15 bp, Homo sapiens
gtccaccatacaaac

SEQ ID NO: 841165 - DNA, 15 bp, Homo sapiens
agtccaccatacaaa

SEQ ID NO: 841166 - DNA, 15 bp, Homo sapiens
aagtccaccatacaa

SEQ ID NO: 841167 - DNA, 15 bp, Homo sapiens
caagtccaccataca

SEQ ID NO: 841168 - DNA, 15 bp, Homo sapiens
gcaagtccaccatac

SEQ ID NO: 841169 - DNA, 15 bp, Homo sapiens
tgcaagtccaccata

SEQ ID NO: 841170 - DNA, 15 bp, Homo sapiens
ttgcaagtccaccat

SEQ ID NO: 841171 - DNA, 15 bp, Homo sapiens
attgcaagtccacca

SEQ ID NO: 841172 - DNA, 15 bp, Homo sapiens
aattgcaagtccacc

SEQ ID NO: 841173 - DNA, 15 bp, Homo sapiens
aaattgcaagtccac

SEQ ID NO: 841174 - DNA, 15 bp, Homo sapiens
caaattgcaagtcca

SEQ ID NO: 841175 - DNA, 15 bp, Homo sapiens
tcaaattgcaagtcc

SEQ ID NO: 841176 - DNA, 15 bp, Homo sapiens
gtcaaattgcaagtc

SEQ ID NO: 841177 - DNA, 15 bp, Homo sapiens
agtcaaattgcaagt

SEQ ID NO: 841178 - DNA, 15 bp, Homo sapiens
tagtcaaattgcaag

SEQ ID NO: 841179 - DNA, 15 bp, Homo sapiens
ttagtcaaattgcaa

SEQ ID NO: 841180 - DNA, 15 bp, Homo sapiens
attagtcaaattgca

SEQ ID NO: 841181 - DNA, 15 bp, Homo sapiens
aattagtcaaattgc

SEQ ID NO: 841182 - DNA, 15 bp, Homo sapiens
caattagtcaaattg

SEQ ID NO: 841183 - DNA, 15 bp, Homo sapiens
tcaattagtcaaatt

SEQ ID NO: 841184 - DNA, 15 bp, Homo sapiens
ctcaattagtcaaat

SEQ ID NO: 841185 - DNA, 15 bp, Homo sapiens
tctcaattagtcaaa

SEQ ID NO: 841186 - DNA, 15 bp, Homo sapiens
atctcaattagtcaa

SEQ ID NO: 841187 - DNA, 15 bp, Homo sapiens
aatctcaattagtca

SEQ ID NO: 841188 - DNA, 15 bp, Homo sapiens
aaatctcaattagtc

SEQ ID NO: 841189 - DNA, 15 bp, Homo sapiens
caaatctcaattagt

SEQ ID NO: 841190 - DNA, 15 bp, Homo sapiens
acaaatctcaattag

SEQ ID NO: 841191 - DNA, 15 bp, Homo sapiens
tacaaatctcaatta

SEQ ID NO: 841192 - DNA, 15 bp, Homo sapiens
ctacaaatctcaatt

SEQ ID NO: 841193 - DNA, 15 bp, Homo sapiens
cctacaaatctcaat

SEQ ID NO: 841194 - DNA, 15 bp, Homo sapiens
tcctacaaatctcaa

SEQ ID NO: 841195 - DNA, 15 bp, Homo sapiens
atcctacaaatctca

SEQ ID NO: 841196 - DNA, 15 bp, Homo sapiens
catcctacaaatctc

SEQ ID NO: 841197 - DNA, 15 bp, Homo sapiens
tcatcctacaaatct

SEQ ID NO: 841198 - DNA, 15 bp, Homo sapiens
atcatcctacaaatc

SEQ ID NO: 841199 - DNA, 15 bp, Homo sapiens
aatcatcctacaaat

SEQ ID NO: 841200 - DNA, 15 bp, Homo sapiens
gaatcatcctacaaa

SEQ ID NO: 841201 - DNA, 15 bp, Homo sapiens
agaatcatcctacaa

SEQ ID NO: 841202 - DNA, 15 bp, Homo sapiens
aagaatcatcctaca

SEQ ID NO: 841203 - DNA, 15 bp, Homo sapiens
taagaatcatcctac

SEQ ID NO: 841204 - DNA, 15 bp, Homo sapiens
ttaagaatcatccta

SEQ ID NO: 841205 - DNA, 15 bp, Homo sapiens
cttaagaatcatcct

SEQ ID NO: 841206 - DNA, 15 bp, Homo sapiens
tcttaagaatcatcc

SEQ ID NO: 841207 - DNA, 15 bp, Homo sapiens
ctcttaagaatcatc

SEQ ID NO: 841208 - DNA, 15 bp, Homo sapiens
tctcttaagaatcat

SEQ ID NO: 841209 - DNA, 15 bp, Homo sapiens
atctcttaagaatca

SEQ ID NO: 841210 - DNA, 15 bp, Homo sapiens
catctcttaagaatc

SEQ ID NO: 841211 - DNA, 15 bp, Homo sapiens
tcatctcttaagaat

SEQ ID NO: 841212 - DNA, 15 bp, Homo sapiens
atcatctcttaagaa

SEQ ID NO: 841213 - DNA, 15 bp, Homo sapiens
catcatctcttaaga

SEQ ID NO: 841214 - DNA, 15 bp, Homo sapiens
tcatcatctcttaag

SEQ ID NO: 841215 - DNA, 15 bp, Homo sapiens
atcatcatctcttaa

SEQ ID NO: 841216 - DNA, 15 bp, Homo sapiens
catcatcatctctta

SEQ ID NO: 841217 - DNA, 15 bp, Homo sapiens
tcatcatcatctctt

SEQ ID NO: 841218 - DNA, 15 bp, Homo sapiens
gtcatcatcatctct

SEQ ID NO: 841219 - DNA, 15 bp, Homo sapiens
ggtcatcatcatctc

SEQ ID NO: 841220 - DNA, 15 bp, Homo sapiens
gggtcatcatcatct

SEQ ID NO: 841221 - DNA, 15 bp, Homo sapiens
tgggtcatcatcatc

SEQ ID NO: 841222 - DNA, 15 bp, Homo sapiens
ctgggtcatcatcat

SEQ ID NO: 841223 - DNA, 15 bp, Homo sapiens
tctgggtcatcatca

SEQ ID NO: 841224 - DNA, 15 bp, Homo sapiens
gtctgggtcatcatc

SEQ ID NO: 841225 - DNA, 15 bp, Homo sapiens
agtctgggtcatcat

SEQ ID NO: 841226 - DNA, 15 bp, Homo sapiens
cagtctgggtcatca

SEQ ID NO: 841227 - DNA, 15 bp, Homo sapiens
ccagtctgggtcatc

SEQ ID NO: 841228 - DNA, 15 bp, Homo sapiens
cccagtctgggtcat

SEQ ID NO: 841229 - DNA, 15 bp, Homo sapiens
tcccagtctgggtca

SEQ ID NO: 841230 - DNA, 15 bp, Homo sapiens
atcccagtctgggtc

SEQ ID NO: 841231 - DNA, 15 bp, Homo sapiens
gatcccagtctgggt

SEQ ID NO: 841232 - DNA, 15 bp, Homo sapiens
tgatcccagtctggg

SEQ ID NO: 841233 - DNA, 15 bp, Homo sapiens
gtgatcccagtctgg

SEQ ID NO: 841234 - DNA, 15 bp, Homo sapiens
agtgatcccagtctg

SEQ ID NO: 841235 - DNA, 15 bp, Homo sapiens
tagtgatcccagtct

SEQ ID NO: 841236 - DNA, 15 bp, Homo sapiens
atagtgatcccagtc

SEQ ID NO: 841237 - DNA, 15 bp, Homo sapiens
tatagtgatcccagt

SEQ ID NO: 841238 - DNA, 15 bp, Homo sapiens
ttatagtgatcccag

SEQ ID NO: 841239 - DNA, 15 bp, Homo sapiens
attatagtgatccca

SEQ ID NO: 841240 - DNA, 15 bp, Homo sapiens
tattatagtgatccc

SEQ ID NO: 841241 - DNA, 15 bp, Homo sapiens
ctattatagtgatcc

SEQ ID NO: 841242 - DNA, 15 bp, Homo sapiens
tctattatagtgatc

SEQ ID NO: 841243 - DNA, 15 bp, Homo sapiens
ctctattatagtgat

SEQ ID NO: 841244 - DNA, 15 bp, Homo sapiens
actctattatagtga

SEQ ID NO: 841245 - DNA, 15 bp, Homo sapiens
aactctattatagtg

SEQ ID NO: 841246 - DNA, 15 bp, Homo sapiens
caactctattatagt

SEQ ID NO: 841247 - DNA, 15 bp, Homo sapiens
ccaactctattatag

SEQ ID NO: 841248 - DNA, 15 bp, Homo sapiens
accaactctattata

SEQ ID NO: 841249 - DNA, 15 bp, Homo sapiens
taccaactctattat

SEQ ID NO: 841250 - DNA, 15 bp, Homo sapiens
ttaccaactctatta

SEQ ID NO: 841251 - DNA, 15 bp, Homo sapiens
cttaccaactctatt

SEQ ID NO: 841252 - DNA, 15 bp, Homo sapiens
ccttaccaactctat

SEQ ID NO: 841253 - DNA, 15 bp, Homo sapiens
tccttaccaactcta

SEQ ID NO: 841254 - DNA, 15 bp, Homo sapiens
ctccttaccaactct

SEQ ID NO: 841255 - DNA, 15 bp, Homo sapiens
cctccttaccaactc

SEQ ID NO: 841256 - DNA, 15 bp, Homo sapiens
tcctccttaccaact

SEQ ID NO: 841257 - DNA, 15 bp, Homo sapiens
ctcctccttaccaac

SEQ ID NO: 841258 - DNA, 15 bp, Homo sapiens
tctcctccttaccaa

SEQ ID NO: 841259 - DNA, 15 bp, Homo sapiens
ttctcctccttacca

SEQ ID NO: 841260 - DNA, 15 bp, Homo sapiens
attctcctccttacc

SEQ ID NO: 841261 - DNA, 15 bp, Homo sapiens
cattctcctccttac

SEQ ID NO: 841262 - DNA, 15 bp, Homo sapiens
tcattctcctcctta

SEQ ID NO: 841263 - DNA, 15 bp, Homo sapiens
atcattctcctcctt

SEQ ID NO: 841264 - DNA, 15 bp, Homo sapiens
aatcattctcctcct

SEQ ID NO: 841265 - DNA, 15 bp, Homo sapiens
aaatcattctcctcc

SEQ ID NO: 841266 - DNA, 15 bp, Homo sapiens
taaatcattctcctc

SEQ ID NO: 841267 - DNA, 15 bp, Homo sapiens
ttaaatcattctcct

SEQ ID NO: 841268 - DNA, 15 bp, Homo sapiens
tttaaatcattctcc

SEQ ID NO: 841269 - DNA, 15 bp, Homo sapiens
ttttaaatcattctc

SEQ ID NO: 841270 - DNA, 15 bp, Homo sapiens
tttttaaatcattct

SEQ ID NO: 841271 - DNA, 15 bp, Homo sapiens
ctttttaaatcattc

SEQ ID NO: 841272 - DNA, 15 bp, Homo sapiens
actttttaaatcatt

SEQ ID NO: 841273 - DNA, 15 bp, Homo sapiens
tactttttaaatcat

SEQ ID NO: 841274 - DNA, 15 bp, Homo sapiens
ctactttttaaatca

SEQ ID NO: 841275 - DNA, 15 bp, Homo sapiens
actactttttaaatc

SEQ ID NO: 841276 - DNA, 15 bp, Homo sapiens
aactactttttaaat

SEQ ID NO: 841277 - DNA, 15 bp, Homo sapiens
caactactttttaaa

SEQ ID NO: 841278 - DNA, 15 bp, Homo sapiens
ccaactactttttaa

SEQ ID NO: 841279 - DNA, 15 bp, Homo sapiens
tccaactacttttta

SEQ ID NO: 841280 - DNA, 15 bp, Homo sapiens
ttccaactacttttt

SEQ ID NO: 841281 - DNA, 15 bp, Homo sapiens
cttccaactactttt

SEQ ID NO: 841282 - DNA, 15 bp, Homo sapiens
tcttccaactacttt

SEQ ID NO: 841283 - DNA, 15 bp, Homo sapiens
ttcttccaactactt

SEQ ID NO: 841284 - DNA, 15 bp, Homo sapiens
attcttccaactact

SEQ ID NO: 841285 - DNA, 15 bp, Homo sapiens
aattcttccaactac

SEQ ID NO: 841286 - DNA, 15 bp, Homo sapiens
gaattcttccaacta

SEQ ID NO: 841287 - DNA, 15 bp, Homo sapiens
agaattcttccaact

SEQ ID NO: 841288 - DNA, 15 bp, Homo sapiens
tagaattcttccaac

SEQ ID NO: 841289 - DNA, 15 bp, Homo sapiens
ctagaattcttccaa

SEQ ID NO: 841290 - DNA, 15 bp, Homo sapiens
cctagaattcttcca

SEQ ID NO: 841291 - DNA, 15 bp, Homo sapiens
ccctagaattcttcc

SEQ ID NO: 841292 - DNA, 15 bp, Homo sapiens
tccctagaattcttc

SEQ ID NO: 841293 - DNA, 15 bp, Homo sapiens
atccctagaattctt

SEQ ID NO: 841294 - DNA, 15 bp, Homo sapiens
catccctagaattct

SEQ ID NO: 841295 - DNA, 15 bp, Homo sapiens
ccatccctagaattc

SEQ ID NO: 841296 - DNA, 15 bp, Homo sapiens
tccatccctagaatt

SEQ ID NO: 841297 - DNA, 15 bp, Homo sapiens
ctccatccctagaat

SEQ ID NO: 841298 - DNA, 15 bp, Homo sapiens
tctccatccctagaa

SEQ ID NO: 841299 - DNA, 15 bp, Homo sapiens
atctccatccctaga

SEQ ID NO: 841300 - DNA, 15 bp, Homo sapiens
tatctccatccctag

SEQ ID NO: 841301 - DNA, 15 bp, Homo sapiens
ttatctccatcccta

SEQ ID NO: 841302 - DNA, 15 bp, Homo sapiens
tttatctccatccct

SEQ ID NO: 841303 - DNA, 15 bp, Homo sapiens
gtttatctccatccc

SEQ ID NO: 841304 - DNA, 15 bp, Homo sapiens
tgtttatctccatcc

SEQ ID NO: 841305 - DNA, 15 bp, Homo sapiens
atgtttatctccatc

SEQ ID NO: 841306 - DNA, 15 bp, Homo sapiens
aatgtttatctccat

SEQ ID NO: 841307 - DNA, 15 bp, Homo sapiens
aaatgtttatctcca

SEQ ID NO: 841308 - DNA, 15 bp, Homo sapiens
caaatgtttatctcc

SEQ ID NO: 841309 - DNA, 15 bp, Homo sapiens
tcaaatgtttatctc

SEQ ID NO: 841310 - DNA, 15 bp, Homo sapiens
ttcaaatgtttatct

SEQ ID NO: 841311 - DNA, 15 bp, Homo sapiens
tttcaaatgtttatc

SEQ ID NO: 841312 - DNA, 15 bp, Homo sapiens
ttttcaaatgtttat

SEQ ID NO: 841313 - DNA, 15 bp, Homo sapiens
attttcaaatgttta

SEQ ID NO: 841314 - DNA, 15 bp, Homo sapiens
aattttcaaatgttt

SEQ ID NO: 841315 - DNA, 15 bp, Homo sapiens
taattttcaaatgtt

SEQ ID NO: 841316 - DNA, 15 bp, Homo sapiens
ataattttcaaatgt

SEQ ID NO: 841317 - DNA, 15 bp, Homo sapiens
aataattttcaaatg

SEQ ID NO: 841318 - DNA, 15 bp, Homo sapiens
taataattttcaaat

SEQ ID NO: 841319 - DNA, 15 bp, Homo sapiens
ttaataattttcaaa

SEQ ID NO: 841320 - DNA, 15 bp, Homo sapiens
gttaataattttcaa

SEQ ID NO: 841321 - DNA, 15 bp, Homo sapiens
agttaataattttca

SEQ ID NO: 841322 - DNA, 15 bp, Homo sapiens
aagttaataattttc

SEQ ID NO: 841323 - DNA, 15 bp, Homo sapiens
taagttaataatttt

SEQ ID NO: 841324 - DNA, 15 bp, Homo sapiens
ataagttaataattt

SEQ ID NO: 841325 - DNA, 15 bp, Homo sapiens
tataagttaataatt

SEQ ID NO: 841326 - DNA, 15 bp, Homo sapiens
ctataagttaataat

SEQ ID NO: 841327 - DNA, 15 bp, Homo sapiens
cctataagttaataa

SEQ ID NO: 841328 - DNA, 15 bp, Homo sapiens
acctataagttaata

SEQ ID NO: 841329 - DNA, 15 bp, Homo sapiens
cacctataagttaat

SEQ ID NO: 841330 - DNA, 15 bp, Homo sapiens
ccacctataagttaa

SEQ ID NO: 841331 - DNA, 15 bp, Homo sapiens
accacctataagtta

SEQ ID NO: 841332 - DNA, 15 bp, Homo sapiens
gaccacctataagtt

SEQ ID NO: 841333 - DNA, 15 bp, Homo sapiens
tgaccacctataagt

SEQ ID NO: 841334 - DNA, 15 bp, Homo sapiens
atgaccacctataag

SEQ ID NO: 841335 - DNA, 15 bp, Homo sapiens
gatgaccacctataa

SEQ ID NO: 841336 - DNA, 15 bp, Homo sapiens
tgatgaccacctata

SEQ ID NO: 841337 - DNA, 15 bp, Homo sapiens
ttgatgaccacctat

SEQ ID NO: 841338 - DNA, 15 bp, Homo sapiens
attgatgaccaccta

SEQ ID NO: 841339 - DNA, 15 bp, Homo sapiens
tattgatgaccacct

SEQ ID NO: 841340 - DNA, 15 bp, Homo sapiens
gtattgatgaccacc

SEQ ID NO: 841341 - DNA, 15 bp, Homo sapiens
ggtattgatgaccac

SEQ ID NO: 841342 - DNA, 15 bp, Homo sapiens
gggtattgatgacca

SEQ ID NO: 841343 - DNA, 15 bp, Homo sapiens
agggtattgatgacc

SEQ ID NO: 841344 - DNA, 15 bp, Homo sapiens
cagggtattgatgac

SEQ ID NO: 841345 - DNA, 15 bp, Homo sapiens
tcagggtattgatga

SEQ ID NO: 841346 - DNA, 15 bp, Homo sapiens
ttcagggtattgatg

SEQ ID NO: 841347 - DNA, 15 bp, Homo sapiens
tttcagggtattgat

SEQ ID NO: 841348 - DNA, 15 bp, Homo sapiens
ttttcagggtattga

SEQ ID NO: 841349 - DNA, 15 bp, Homo sapiens
attttcagggtattg

SEQ ID NO: 841350 - DNA, 15 bp, Homo sapiens
cattttcagggtatt

SEQ ID NO: 841351 - DNA, 15 bp, Homo sapiens
tcattttcagggtat

SEQ ID NO: 841352 - DNA, 15 bp, Homo sapiens
gtcattttcagggta

SEQ ID NO: 841353 - DNA, 15 bp, Homo sapiens
agtcattttcagggt

SEQ ID NO: 841354 - DNA, 15 bp, Homo sapiens
cagtcattttcaggg

SEQ ID NO: 841355 - DNA, 15 bp, Homo sapiens
ccagtcattttcagg

SEQ ID NO: 841356 - DNA, 15 bp, Homo sapiens
cccagtcattttcag

SEQ ID NO: 841357 - DNA, 15 bp, Homo sapiens
tcccagtcattttca

SEQ ID NO: 841358 - DNA, 15 bp, Homo sapiens
atcccagtcattttc

SEQ ID NO: 841359 - DNA, 15 bp, Homo sapiens
gatcccagtcatttt

SEQ ID NO: 841360 - DNA, 15 bp, Homo sapiens
agatcccagtcattt

SEQ ID NO: 841361 - DNA, 15 bp, Homo sapiens
gagatcccagtcatt

SEQ ID NO: 841362 - DNA, 15 bp, Homo sapiens
tgagatcccagtcat

SEQ ID NO: 841363 - DNA, 15 bp, Homo sapiens
ctgagatcccagtca

SEQ ID NO: 841364 - DNA, 15 bp, Homo sapiens
tctgagatcccagtc

SEQ ID NO: 841365 - DNA, 15 bp, Homo sapiens
ctctgagatcccagt

SEQ ID NO: 841366 - DNA, 15 bp, Homo sapiens
cctctgagatcccag

SEQ ID NO: 841367 - DNA, 15 bp, Homo sapiens
tcctctgagatccca

SEQ ID NO: 841368 - DNA, 15 bp, Homo sapiens
ctcctctgagatccc

SEQ ID NO: 841369 - DNA, 15 bp, Homo sapiens
tctcctctgagatcc

SEQ ID NO: 841370 - DNA, 15 bp, Homo sapiens
ctctcctctgagatc

SEQ ID NO: 841371 - DNA, 15 bp, Homo sapiens
actctcctctgagat

SEQ ID NO: 841372 - DNA, 15 bp, Homo sapiens
gactctcctctgaga

SEQ ID NO: 841373 - DNA, 15 bp, Homo sapiens
agactctcctctgag

SEQ ID NO: 841374 - DNA, 15 bp, Homo sapiens
cagactctcctctga

SEQ ID NO: 841375 - DNA, 15 bp, Homo sapiens
ccagactctcctctg

SEQ ID NO: 841376 - DNA, 15 bp, Homo sapiens
tccagactctcctct

SEQ ID NO: 841377 - DNA, 15 bp, Homo sapiens
ctccagactctcctc

SEQ ID NO: 841378 - DNA, 15 bp, Homo sapiens
tctccagactctcct

SEQ ID NO: 841379 - DNA, 15 bp, Homo sapiens
ctctccagactctcc

SEQ ID NO: 841380 - DNA, 15 bp, Homo sapiens
actctccagactctc

SEQ ID NO: 841381 - DNA, 15 bp, Homo sapiens
aactctccagactct

SEQ ID NO: 841382 - DNA, 15 bp, Homo sapiens
caactctccagactc

SEQ ID NO: 841383 - DNA, 15 bp, Homo sapiens
ccaactctccagact

SEQ ID NO: 841384 - DNA, 15 bp, Homo sapiens
tccaactctccagac

SEQ ID NO: 841385 - DNA, 15 bp, Homo sapiens
ttccaactctccaga

SEQ ID NO: 841386 - DNA, 15 bp, Homo sapiens
tttccaactctccag

SEQ ID NO: 841387 - DNA, 15 bp, Homo sapiens
atttccaactctcca

SEQ ID NO: 841388 - DNA, 15 bp, Homo sapiens
catttccaactctcc

SEQ ID NO: 841389 - DNA, 15 bp, Homo sapiens
tcatttccaactctc

SEQ ID NO: 841390 - DNA, 15 bp, Homo sapiens
gtcatttccaactct

SEQ ID NO: 841391 - DNA, 15 bp, Homo sapiens
tgtcatttccaactc

SEQ ID NO: 841392 - DNA, 15 bp, Homo sapiens
ttgtcatttccaact

SEQ ID NO: 841393 - DNA, 15 bp, Homo sapiens
tttgtcatttccaac

SEQ ID NO: 841394 - DNA, 15 bp, Homo sapiens
ctttgtcatttccaa

SEQ ID NO: 841395 - DNA, 15 bp, Homo sapiens
tctttgtcatttcca

SEQ ID NO: 841396 - DNA, 15 bp, Homo sapiens
gtctttgtcatttcc

SEQ ID NO: 841397 - DNA, 15 bp, Homo sapiens
agtctttgtcatttc

SEQ ID NO: 841398 - DNA, 15 bp, Homo sapiens
tagtctttgtcattt

SEQ ID NO: 841399 - DNA, 15 bp, Homo sapiens
ttagtctttgtcatt

SEQ ID NO: 841400 - DNA, 15 bp, Homo sapiens
attagtctttgtcat

SEQ ID NO: 841401 - DNA, 15 bp, Homo sapiens
tattagtctttgtca

SEQ ID NO: 841402 - DNA, 15 bp, Homo sapiens
atattagtctttgtc

SEQ ID NO: 841403 - DNA, 15 bp, Homo sapiens
aatattagtctttgt

SEQ ID NO: 841404 - DNA, 15 bp, Homo sapiens
gaatattagtctttg

SEQ ID NO: 841405 - DNA, 15 bp, Homo sapiens
tgaatattagtcttt

SEQ ID NO: 841406 - DNA, 15 bp, Homo sapiens
ttgaatattagtctt

SEQ ID NO: 841407 - DNA, 15 bp, Homo sapiens
cttgaatattagtct

SEQ ID NO: 841408 - DNA, 15 bp, Homo sapiens
ccttgaatattagtc

SEQ ID NO: 841409 - DNA, 15 bp, Homo sapiens
cccttgaatattagt

SEQ ID NO: 841410 - DNA, 15 bp, Homo sapiens
ccccttgaatattag

SEQ ID NO: 841411 - DNA, 15 bp, Homo sapiens
cccccttgaatatta

SEQ ID NO: 841412 - DNA, 15 bp, Homo sapiens
gcccccttgaatatt

SEQ ID NO: 841413 - DNA, 15 bp, Homo sapiens
tgcccccttgaatat

SEQ ID NO: 841414 - DNA, 15 bp, Homo sapiens
ctgcccccttgaata

SEQ ID NO: 841415 - DNA, 15 bp, Homo sapiens
cctgcccccttgaat

SEQ ID NO: 841416 - DNA, 15 bp, Homo sapiens
tcctgcccccttgaa

SEQ ID NO: 841417 - DNA, 15 bp, Homo sapiens
ttcctgcccccttga

SEQ ID NO: 841418 - DNA, 15 bp, Homo sapiens
cttcctgcccccttg

SEQ ID NO: 841419 - DNA, 15 bp, Homo sapiens
tcttcctgccccctt

SEQ ID NO: 841420 - DNA, 15 bp, Homo sapiens
ctcttcctgccccct

SEQ ID NO: 841421 - DNA, 15 bp, Homo sapiens
cctcttcctgccccc

SEQ ID NO: 841422 - DNA, 15 bp, Homo sapiens
ccctcttcctgcccc

SEQ ID NO: 841423 - DNA, 15 bp, Homo sapiens
tccctcttcctgccc

SEQ ID NO: 841424 - DNA, 15 bp, Homo sapiens
ctccctcttcctgcc

SEQ ID NO: 841425 - DNA, 15 bp, Homo sapiens
tctccctcttcctgc

SEQ ID NO: 841426 - DNA, 15 bp, Homo sapiens
ctctccctcttcctg

SEQ ID NO: 841427 - DNA, 15 bp, Homo sapiens
actctccctcttcct

SEQ ID NO: 841428 - DNA, 15 bp, Homo sapiens
aactctccctcttcc

SEQ ID NO: 841429 - DNA, 15 bp, Homo sapiens
caactctccctcttc

SEQ ID NO: 841430 - DNA, 15 bp, Homo sapiens
acaactctccctctt

SEQ ID NO: 841431 - DNA, 15 bp, Homo sapiens
aacaactctccctct

SEQ ID NO: 841432 - DNA, 15 bp, Homo sapiens
gaacaactctccctc

SEQ ID NO: 841433 - DNA, 15 bp, Homo sapiens
tgaacaactctccct

SEQ ID NO: 841434 - DNA, 15 bp, Homo sapiens
gtgaacaactctccc

SEQ ID NO: 841435 - DNA, 15 bp, Homo sapiens
tgtgaacaactctcc

SEQ ID NO: 841436 - DNA, 15 bp, Homo sapiens
gtgtgaacaactctc

SEQ ID NO: 841437 - DNA, 15 bp, Homo sapiens
tgtgtgaacaactct

SEQ ID NO: 841438 - DNA, 15 bp, Homo sapiens
atgtgtgaacaactc

SEQ ID NO: 841439 - DNA, 15 bp, Homo sapiens
catgtgtgaacaact

SEQ ID NO: 841440 - DNA, 15 bp, Homo sapiens
tcatgtgtgaacaac

SEQ ID NO: 841441 - DNA, 15 bp, Homo sapiens
gtcatgtgtgaacaa

SEQ ID NO: 841442 - DNA, 15 bp, Homo sapiens
tgtcatgtgtgaaca

SEQ ID NO: 841443 - DNA, 15 bp, Homo sapiens
ttgtcatgtgtgaac

SEQ ID NO: 841444 - DNA, 15 bp, Homo sapiens
attgtcatgtgtgaa

SEQ ID NO: 841445 - DNA, 15 bp, Homo sapiens
tattgtcatgtgtga

SEQ ID NO: 841446 - DNA, 15 bp, Homo sapiens
ctattgtcatgtgtg

SEQ ID NO: 841447 - DNA, 15 bp, Homo sapiens
cctattgtcatgtgt

SEQ ID NO: 841448 - DNA, 15 bp, Homo sapiens
tcctattgtcatgtg

SEQ ID NO: 841449 - DNA, 15 bp, Homo sapiens
ttcctattgtcatgt

SEQ ID NO: 841450 - DNA, 15 bp, Homo sapiens
cttcctattgtcatg

SEQ ID NO: 841451 - DNA, 15 bp, Homo sapiens
tcttcctattgtcat

SEQ ID NO: 841452 - DNA, 15 bp, Homo sapiens
ttcttcctattgtca

SEQ ID NO: 841453 - DNA, 15 bp, Homo sapiens
tttcttcctattgtc

SEQ ID NO: 841454 - DNA, 15 bp, Homo sapiens
atttcttcctattgt

SEQ ID NO: 841455 - DNA, 15 bp, Homo sapiens
catttcttcctattg

SEQ ID NO: 841456 - DNA, 15 bp, Homo sapiens
ccatttcttcctatt

SEQ ID NO: 841457 - DNA, 15 bp, Homo sapiens
gccatttcttcctat

SEQ ID NO: 841458 - DNA, 15 bp, Homo sapiens
ggccatttcttccta

SEQ ID NO: 841459 - DNA, 15 bp, Homo sapiens
tggccatttcttcct

SEQ ID NO: 841460 - DNA, 15 bp, Homo sapiens
atggccatttcttcc

SEQ ID NO: 841461 - DNA, 15 bp, Homo sapiens
tatggccatttcttc

SEQ ID NO: 841462 - DNA, 15 bp, Homo sapiens
ctatggccatttctt

SEQ ID NO: 841463 - DNA, 15 bp, Homo sapiens
tctatggccatttct

SEQ ID NO: 841464 - DNA, 15 bp, Homo sapiens
ctctatggccatttc

SEQ ID NO: 841465 - DNA, 15 bp, Homo sapiens
actctatggccattt

SEQ ID NO: 841466 - DNA, 15 bp, Homo sapiens
cactctatggccatt

SEQ ID NO: 841467 - DNA, 15 bp, Homo sapiens
acactctatggccat

SEQ ID NO: 841468 - DNA, 15 bp, Homo sapiens
cacactctatggcca

SEQ ID NO: 841469 - DNA, 15 bp, Homo sapiens
acacactctatggcc

SEQ ID NO: 841470 - DNA, 15 bp, Homo sapiens
cacacactctatggc

SEQ ID NO: 841471 - DNA, 15 bp, Homo sapiens
ccacacactctatgg

SEQ ID NO: 841472 - DNA, 15 bp, Homo sapiens
accacacactctatg

SEQ ID NO: 841473 - DNA, 15 bp, Homo sapiens
aaccacacactctat

SEQ ID NO: 841474 - DNA, 15 bp, Homo sapiens
aaaccacacactcta

SEQ ID NO: 841475 - DNA, 15 bp, Homo sapiens
gaaaccacacactct

SEQ ID NO: 841476 - DNA, 15 bp, Homo sapiens
agaaaccacacactc

SEQ ID NO: 841477 - DNA, 15 bp, Homo sapiens
gagaaaccacacact

SEQ ID NO: 841478 - DNA, 15 bp, Homo sapiens
agagaaaccacacac

SEQ ID NO: 841479 - DNA, 15 bp, Homo sapiens
gagagaaaccacaca

SEQ ID NO: 841480 - DNA, 15 bp, Homo sapiens
tgagagaaaccacac

SEQ ID NO: 841481 - DNA, 15 bp, Homo sapiens
ttgagagaaaccaca

SEQ ID NO: 841482 - DNA, 15 bp, Homo sapiens
cttgagagaaaccac

SEQ ID NO: 841483 - DNA, 15 bp, Homo sapiens
gcttgagagaaacca

SEQ ID NO: 841484 - DNA, 15 bp, Homo sapiens
ggcttgagagaaacc

SEQ ID NO: 841485 - DNA, 15 bp, Homo sapiens
tggcttgagagaaac

SEQ ID NO: 841486 - DNA, 15 bp, Homo sapiens
ttggcttgagagaaa

SEQ ID NO: 841487 - DNA, 15 bp, Homo sapiens
cttggcttgagagaa

SEQ ID NO: 841488 - DNA, 15 bp, Homo sapiens
ccttggcttgagaga

SEQ ID NO: 841489 - DNA, 15 bp, Homo sapiens
tccttggcttgagag

SEQ ID NO: 841490 - DNA, 15 bp, Homo sapiens
ttccttggcttgaga

SEQ ID NO: 841491 - DNA, 15 bp, Homo sapiens
attccttggcttgag

SEQ ID NO: 841492 - DNA, 15 bp, Homo sapiens
tattccttggcttga

SEQ ID NO: 841493 - DNA, 15 bp, Homo sapiens
ctattccttggcttg

SEQ ID NO: 841494 - DNA, 15 bp, Homo sapiens
tctattccttggctt

SEQ ID NO: 841495 - DNA, 15 bp, Homo sapiens
atctattccttggct

SEQ ID NO: 841496 - DNA, 15 bp, Homo sapiens
catctattccttggc

SEQ ID NO: 841497 - DNA, 15 bp, Homo sapiens
acatctattccttgg

SEQ ID NO: 841498 - DNA, 15 bp, Homo sapiens
aacatctattccttg

SEQ ID NO: 841499 - DNA, 15 bp, Homo sapiens
aaacatctattcctt

SEQ ID NO: 841500 - DNA, 15 bp, Homo sapiens
aaaacatctattcct

SEQ ID NO: 841501 - DNA, 15 bp, Homo sapiens
taaaacatctattcc

SEQ ID NO: 841502 - DNA, 15 bp, Homo sapiens
ttaaaacatctattc

SEQ ID NO: 841503 - DNA, 15 bp, Homo sapiens
cttaaaacatctatt

SEQ ID NO: 841504 - DNA, 15 bp, Homo sapiens
tcttaaaacatctat

SEQ ID NO: 841505 - DNA, 15 bp, Homo sapiens
ttcttaaaacatcta

SEQ ID NO: 841506 - DNA, 15 bp, Homo sapiens
tttcttaaaacatct

SEQ ID NO: 841507 - DNA, 15 bp, Homo sapiens
ctttcttaaaacatc

SEQ ID NO: 841508 - DNA, 15 bp, Homo sapiens
cctttcttaaaacat

SEQ ID NO: 841509 - DNA, 15 bp, Homo sapiens
tcctttcttaaaaca

SEQ ID NO: 841510 - DNA, 15 bp, Homo sapiens
ttcctttcttaaaac

SEQ ID NO: 841511 - DNA, 15 bp, Homo sapiens
tttcctttcttaaaa

SEQ ID NO: 841512 - DNA, 15 bp, Homo sapiens
ttttcctttcttaaa

SEQ ID NO: 841513 - DNA, 15 bp, Homo sapiens
attttcctttcttaa

SEQ ID NO: 841514 - DNA, 15 bp, Homo sapiens
aattttcctttctta

SEQ ID NO: 841515 - DNA, 15 bp, Homo sapiens
gaattttcctttctt

SEQ ID NO: 841516 - DNA, 15 bp, Homo sapiens
agaattttcctttct

SEQ ID NO: 841517 - DNA, 15 bp, Homo sapiens
aagaattttcctttc

SEQ ID NO: 841518 - DNA, 15 bp, Homo sapiens
caagaattttccttt

SEQ ID NO: 841519 - DNA, 15 bp, Homo sapiens
acaagaattttcctt

SEQ ID NO: 841520 - DNA, 15 bp, Homo sapiens
cacaagaattttcct

SEQ ID NO: 841521 - DNA, 15 bp, Homo sapiens
ccacaagaattttcc

SEQ ID NO: 841522 - DNA, 15 bp, Homo sapiens
accacaagaattttc

SEQ ID NO: 841523 - DNA, 15 bp, Homo sapiens
caccacaagaatttt

SEQ ID NO: 841524 - DNA, 15 bp, Homo sapiens
ccaccacaagaattt

SEQ ID NO: 841525 - DNA, 15 bp, Homo sapiens
cccaccacaagaatt

SEQ ID NO: 841526 - DNA, 15 bp, Homo sapiens
tcccaccacaagaat

SEQ ID NO: 841527 - DNA, 15 bp, Homo sapiens
ttcccaccacaagaa

SEQ ID NO: 841528 - DNA, 15 bp, Homo sapiens
cttcccaccacaaga

SEQ ID NO: 841529 - DNA, 15 bp, Homo sapiens
gcttcccaccacaag

SEQ ID NO: 841530 - DNA, 15 bp, Homo sapiens
tgcttcccaccacaa

SEQ ID NO: 841531 - DNA, 15 bp, Homo sapiens
ctgcttcccaccaca

SEQ ID NO: 841532 - DNA, 15 bp, Homo sapiens
actgcttcccaccac

SEQ ID NO: 841533 - DNA, 15 bp, Homo sapiens
tactgcttcccacca

SEQ ID NO: 841534 - DNA, 15 bp, Homo sapiens
ctactgcttcccacc

SEQ ID NO: 841535 - DNA, 15 bp, Homo sapiens
tctactgcttcccac

SEQ ID NO: 841536 - DNA, 15 bp, Homo sapiens
ctctactgcttccca

SEQ ID NO: 841537 - DNA, 15 bp, Homo sapiens
tctctactgcttccc

SEQ ID NO: 841538 - DNA, 15 bp, Homo sapiens
atctctactgcttcc

SEQ ID NO: 841539 - DNA, 15 bp, Homo sapiens
catctctactgcttc

SEQ ID NO: 841540 - DNA, 15 bp, Homo sapiens
tcatctctactgctt

SEQ ID NO: 841541 - DNA, 15 bp, Homo sapiens
gtcatctctactgct

SEQ ID NO: 841542 - DNA, 15 bp, Homo sapiens
tgtcatctctactgc

SEQ ID NO: 841543 - DNA, 15 bp, Homo sapiens
ctgtcatctctactg

SEQ ID NO: 841544 - DNA, 15 bp, Homo sapiens
tctgtcatctctact

SEQ ID NO: 841545 - DNA, 15 bp, Homo sapiens
atctgtcatctctac

SEQ ID NO: 841546 - DNA, 15 bp, Homo sapiens
tatctgtcatctcta

SEQ ID NO: 841547 - DNA, 15 bp, Homo sapiens
gtatctgtcatctct

SEQ ID NO: 841548 - DNA, 15 bp, Homo sapiens
tgtatctgtcatctc

SEQ ID NO: 841549 - DNA, 15 bp, Homo sapiens
gtgtatctgtcatct

SEQ ID NO: 841550 - DNA, 15 bp, Homo sapiens
tgtgtatctgtcatc

SEQ ID NO: 841551 - DNA, 15 bp, Homo sapiens
atgtgtatctgtcat

SEQ ID NO: 841552 - DNA, 15 bp, Homo sapiens
aatgtgtatctgtca

SEQ ID NO: 841553 - DNA, 15 bp, Homo sapiens
taatgtgtatctgtc

SEQ ID NO: 841554 - DNA, 15 bp, Homo sapiens
ttaatgtgtatctgt

SEQ ID NO: 841555 - DNA, 15 bp, Homo sapiens
attaatgtgtatctg

SEQ ID NO: 841556 - DNA, 15 bp, Homo sapiens
aattaatgtgtatct

SEQ ID NO: 841557 - DNA, 15 bp, Homo sapiens
aaattaatgtgtatc

SEQ ID NO: 841558 - DNA, 15 bp, Homo sapiens
gaaattaatgtgtat

SEQ ID NO: 841559 - DNA, 15 bp, Homo sapiens
agaaattaatgtgta

SEQ ID NO: 841560 - DNA, 15 bp, Homo sapiens
aagaaattaatgtgt

SEQ ID NO: 841561 - DNA, 15 bp, Homo sapiens
caagaaattaatgtg

SEQ ID NO: 841562 - DNA, 15 bp, Homo sapiens
tcaagaaattaatgt

SEQ ID NO: 841563 - DNA, 15 bp, Homo sapiens
ctcaagaaattaatg

SEQ ID NO: 841564 - DNA, 15 bp, Homo sapiens
tctcaagaaattaat

SEQ ID NO: 841565 - DNA, 15 bp, Homo sapiens
atctcaagaaattaa

SEQ ID NO: 841566 - DNA, 15 bp, Homo sapiens
aatctcaagaaatta

SEQ ID NO: 841567 - DNA, 15 bp, Homo sapiens
aaatctcaagaaatt

SEQ ID NO: 841568 - DNA, 15 bp, Homo sapiens
gaaatctcaagaaat

SEQ ID NO: 841569 - DNA, 15 bp, Homo sapiens
agaaatctcaagaaa

SEQ ID NO: 841570 - DNA, 15 bp, Homo sapiens
tagaaatctcaagaa

SEQ ID NO: 841571 - DNA, 15 bp, Homo sapiens
ctagaaatctcaaga

SEQ ID NO: 841572 - DNA, 15 bp, Homo sapiens
tctagaaatctcaag

SEQ ID NO: 841573 - DNA, 15 bp, Homo sapiens
atctagaaatctcaa

SEQ ID NO: 841574 - DNA, 15 bp, Homo sapiens
catctagaaatctca

SEQ ID NO: 841575 - DNA, 15 bp, Homo sapiens
tcatctagaaatctc

SEQ ID NO: 841576 - DNA, 15 bp, Homo sapiens
gtcatctagaaatct

SEQ ID NO: 841577 - DNA, 15 bp, Homo sapiens
agtcatctagaaatc

SEQ ID NO: 841578 - DNA, 15 bp, Homo sapiens
tagtcatctagaaat

SEQ ID NO: 841579 - DNA, 15 bp, Homo sapiens
ttagtcatctagaaa

SEQ ID NO: 841580 - DNA, 15 bp, Homo sapiens
tttagtcatctagaa

SEQ ID NO: 841581 - DNA, 15 bp, Homo sapiens
atttagtcatctaga

SEQ ID NO: 841582 - DNA, 15 bp, Homo sapiens
catttagtcatctag

SEQ ID NO: 841583 - DNA, 15 bp, Homo sapiens
ccatttagtcatcta

SEQ ID NO: 841584 - DNA, 15 bp, Homo sapiens
cccatttagtcatct

SEQ ID NO: 841585 - DNA, 15 bp, Homo sapiens
gcccatttagtcatc

SEQ ID NO: 841586 - DNA, 15 bp, Homo sapiens
tgcccatttagtcat

SEQ ID NO: 841587 - DNA, 15 bp, Homo sapiens
ctgcccatttagtca

SEQ ID NO: 841588 - DNA, 15 bp, Homo sapiens
tctgcccatttagtc

SEQ ID NO: 841589 - DNA, 15 bp, Homo sapiens
atctgcccatttagt

SEQ ID NO: 841590 - DNA, 15 bp, Homo sapiens
catctgcccatttag

SEQ ID NO: 841591 - DNA, 15 bp, Homo sapiens
acatctgcccattta

SEQ ID NO: 841592 - DNA, 15 bp, Homo sapiens
aacatctgcccattt

SEQ ID NO: 841593 - DNA, 15 bp, Homo sapiens
caacatctgcccatt

SEQ ID NO: 841594 - DNA, 15 bp, Homo sapiens
tcaacatctgcccat

SEQ ID NO: 841595 - DNA, 15 bp, Homo sapiens
ttcaacatctgccca

SEQ ID NO: 841596 - DNA, 15 bp, Homo sapiens
attcaacatctgccc

SEQ ID NO: 841597 - DNA, 15 bp, Homo sapiens
cattcaacatctgcc

SEQ ID NO: 841598 - DNA, 15 bp, Homo sapiens
tcattcaacatctgc

SEQ ID NO: 841599 - DNA, 15 bp, Homo sapiens
atcattcaacatctg

SEQ ID NO: 841600 - DNA, 15 bp, Homo sapiens
tatcattcaacatct

SEQ ID NO: 841601 - DNA, 15 bp, Homo sapiens
ctatcattcaacatc

SEQ ID NO: 841602 - DNA, 15 bp, Homo sapiens
gctatcattcaacat

SEQ ID NO: 841603 - DNA, 15 bp, Homo sapiens
agctatcattcaaca

SEQ ID NO: 841604 - DNA, 15 bp, Homo sapiens
tagctatcattcaac

SEQ ID NO: 841605 - DNA, 15 bp, Homo sapiens
ttagctatcattcaa

SEQ ID NO: 841606 - DNA, 15 bp, Homo sapiens
tttagctatcattca

SEQ ID NO: 841607 - DNA, 15 bp, Homo sapiens
ctttagctatcattc

SEQ ID NO: 841608 - DNA, 15 bp, Homo sapiens
cctttagctatcatt

SEQ ID NO: 841609 - DNA, 15 bp, Homo sapiens
tcctttagctatcat

SEQ ID NO: 841610 - DNA, 15 bp, Homo sapiens
ctcctttagctatca

SEQ ID NO: 841611 - DNA, 15 bp, Homo sapiens
tctcctttagctatc

SEQ ID NO: 841612 - DNA, 15 bp, Homo sapiens
ttctcctttagctat

SEQ ID NO: 841613 - DNA, 15 bp, Homo sapiens
gttctcctttagcta

SEQ ID NO: 841614 - DNA, 15 bp, Homo sapiens
ggttctcctttagct

SEQ ID NO: 841615 - DNA, 15 bp, Homo sapiens
gggttctcctttagc

SEQ ID NO: 841616 - DNA, 15 bp, Homo sapiens
tgggttctcctttag

SEQ ID NO: 841617 - DNA, 15 bp, Homo sapiens
ctgggttctccttta

SEQ ID NO: 841618 - DNA, 15 bp, Homo sapiens
tctgggttctccttt

SEQ ID NO: 841619 - DNA, 15 bp, Homo sapiens
ttctgggttctcctt

SEQ ID NO: 841620 - DNA, 15 bp, Homo sapiens
tttctgggttctcct

SEQ ID NO: 841621 - DNA, 15 bp, Homo sapiens
gtttctgggttctcc

SEQ ID NO: 841622 - DNA, 15 bp, Homo sapiens
tgtttctgggttctc

SEQ ID NO: 841623 - DNA, 15 bp, Homo sapiens
ttgtttctgggttct

SEQ ID NO: 841624 - DNA, 15 bp, Homo sapiens
cttgtttctgggttc

SEQ ID NO: 841625 - DNA, 15 bp, Homo sapiens
ccttgtttctgggtt

SEQ ID NO: 841626 - DNA, 15 bp, Homo sapiens
cccttgtttctgggt

SEQ ID NO: 841627 - DNA, 15 bp, Homo sapiens
tcccttgtttctggg

SEQ ID NO: 841628 - DNA, 15 bp, Homo sapiens
ctcccttgtttctgg

SEQ ID NO: 841629 - DNA, 15 bp, Homo sapiens
cctcccttgtttctg

SEQ ID NO: 841630 - DNA, 15 bp, Homo sapiens
ccctcccttgtttct

SEQ ID NO: 841631 - DNA, 15 bp, Homo sapiens
tccctcccttgtttc

SEQ ID NO: 841632 - DNA, 15 bp, Homo sapiens
atccctcccttgttt

SEQ ID NO: 841633 - DNA, 15 bp, Homo sapiens
aatccctcccttgtt

SEQ ID NO: 841634 - DNA, 15 bp, Homo sapiens
aaatccctcccttgt

SEQ ID NO: 841635 - DNA, 15 bp, Homo sapiens
aaaatccctcccttg

SEQ ID NO: 841636 - DNA, 15 bp, Homo sapiens
caaaatccctccctt

SEQ ID NO: 841637 - DNA, 15 bp, Homo sapiens
acaaaatccctccct

SEQ ID NO: 841638 - DNA, 15 bp, Homo sapiens
aacaaaatccctccc

SEQ ID NO: 841639 - DNA, 15 bp, Homo sapiens
aaacaaaatccctcc

SEQ ID NO: 841640 - DNA, 15 bp, Homo sapiens
aaaacaaaatccctc

SEQ ID NO: 841641 - DNA, 15 bp, Homo sapiens
aaaaacaaaatccct

SEQ ID NO: 841642 - DNA, 15 bp, Homo sapiens
caaaaacaaaatccc

SEQ ID NO: 841643 - DNA, 15 bp, Homo sapiens
acaaaaacaaaatcc

SEQ ID NO: 841644 - DNA, 15 bp, Homo sapiens
aacaaaaacaaaatc

SEQ ID NO: 841645 - DNA, 15 bp, Homo sapiens
aaacaaaaacaaaat

SEQ ID NO: 841646 - DNA, 15 bp, Homo sapiens
aaaaaacaaaaacaa

SEQ ID NO: 841647 - DNA, 15 bp, Homo sapiens
taaaaaacaaaaaca

SEQ ID NO: 841648 - DNA, 15 bp, Homo sapiens
ttaaaaaacaaaaac

SEQ ID NO: 841649 - DNA, 15 bp, Homo sapiens
tttaaaaaacaaaaa

SEQ ID NO: 841650 - DNA, 15 bp, Homo sapiens
ttttaaaaaacaaaa

SEQ ID NO: 841651 - DNA, 15 bp, Homo sapiens
tttttaaaaaacaaa

SEQ ID NO: 841652 - DNA, 15 bp, Homo sapiens
ttttttaaaaaacaa

SEQ ID NO: 841653 - DNA, 15 bp, Homo sapiens
cttttttaaaaaaca

SEQ ID NO: 841654 - DNA, 15 bp, Homo sapiens
tcttttttaaaaaac

SEQ ID NO: 841655 - DNA, 15 bp, Homo sapiens
atcttttttaaaaaa

SEQ ID NO: 841656 - DNA, 15 bp, Homo sapiens
tatcttttttaaaaa

SEQ ID NO: 841657 - DNA, 15 bp, Homo sapiens
ctatcttttttaaaa

SEQ ID NO: 841658 - DNA, 15 bp, Homo sapiens
tctatcttttttaaa

SEQ ID NO: 841659 - DNA, 15 bp, Homo sapiens
gtctatcttttttaa

SEQ ID NO: 841660 - DNA, 15 bp, Homo sapiens
ggtctatctttttta

SEQ ID NO: 841661 - DNA, 15 bp, Homo sapiens
tggtctatctttttt

SEQ ID NO: 841662 - DNA, 15 bp, Homo sapiens
atggtctatcttttt

SEQ ID NO: 841663 - DNA, 15 bp, Homo sapiens
tatggtctatctttt

SEQ ID NO: 841664 - DNA, 15 bp, Homo sapiens
ctatggtctatcttt

SEQ ID NO: 841665 - DNA, 15 bp, Homo sapiens
gctatggtctatctt

SEQ ID NO: 841666 - DNA, 15 bp, Homo sapiens
tgctatggtctatct

SEQ ID NO: 841667 - DNA, 15 bp, Homo sapiens
ctgctatggtctatc

SEQ ID NO: 841668 - DNA, 15 bp, Homo sapiens
gctgctatggtctat

SEQ ID NO: 841669 - DNA, 15 bp, Homo sapiens
agctgctatggtcta

SEQ ID NO: 841670 - DNA, 15 bp, Homo sapiens
aagctgctatggtct

SEQ ID NO: 841671 - DNA, 15 bp, Homo sapiens
gaagctgctatggtc

SEQ ID NO: 841672 - DNA, 15 bp, Homo sapiens
tgaagctgctatggt

SEQ ID NO: 841673 - DNA, 15 bp, Homo sapiens
atgaagctgctatgg

SEQ ID NO: 841674 - DNA, 15 bp, Homo sapiens
tatgaagctgctatg

SEQ ID NO: 841675 - DNA, 15 bp, Homo sapiens
ctatgaagctgctat

SEQ ID NO: 841676 - DNA, 15 bp, Homo sapiens
tctatgaagctgcta

SEQ ID NO: 841677 - DNA, 15 bp, Homo sapiens
gtctatgaagctgct

SEQ ID NO: 841678 - DNA, 15 bp, Homo sapiens
agtctatgaagctgc

SEQ ID NO: 841679 - DNA, 15 bp, Homo sapiens
cagtctatgaagctg

SEQ ID NO: 841680 - DNA, 15 bp, Homo sapiens
tcagtctatgaagct

SEQ ID NO: 841681 - DNA, 15 bp, Homo sapiens
ttcagtctatgaagc

SEQ ID NO: 841682 - DNA, 15 bp, Homo sapiens
tttcagtctatgaag

SEQ ID NO: 841683 - DNA, 15 bp, Homo sapiens
gtttcagtctatgaa

SEQ ID NO: 841684 - DNA, 15 bp, Homo sapiens
tgtttcagtctatga

SEQ ID NO: 841685 - DNA, 15 bp, Homo sapiens
ttgtttcagtctatg

SEQ ID NO: 841686 - DNA, 15 bp, Homo sapiens
attgtttcagtctat

SEQ ID NO: 841687 - DNA, 15 bp, Homo sapiens
tattgtttcagtcta

SEQ ID NO: 841688 - DNA, 15 bp, Homo sapiens
ttattgtttcagtct

SEQ ID NO: 841689 - DNA, 15 bp, Homo sapiens
tttattgtttcagtc

SEQ ID NO: 841690 - DNA, 15 bp, Homo sapiens
ttttattgtttcagt

SEQ ID NO: 841691 - DNA, 15 bp, Homo sapiens
tttttattgtttcag

SEQ ID NO: 841692 - DNA, 15 bp, Homo sapiens
ttttttattgtttca

SEQ ID NO: 841693 - DNA, 15 bp, Homo sapiens
cttttttattgtttc

SEQ ID NO: 841694 - DNA, 15 bp, Homo sapiens
acttttttattgttt

SEQ ID NO: 841695 - DNA, 15 bp, Homo sapiens
aacttttttattgtt

SEQ ID NO: 841696 - DNA, 15 bp, Homo sapiens
caacttttttattgt

SEQ ID NO: 841697 - DNA, 15 bp, Homo sapiens
tcaacttttttattg

SEQ ID NO: 841698 - DNA, 15 bp, Homo sapiens
ttcaacttttttatt

SEQ ID NO: 841699 - DNA, 15 bp, Homo sapiens
cttcaacttttttat

SEQ ID NO: 841700 - DNA, 15 bp, Homo sapiens
ccttcaactttttta

SEQ ID NO: 841701 - DNA, 15 bp, Homo sapiens
gccttcaactttttt

SEQ ID NO: 841702 - DNA, 15 bp, Homo sapiens
tgccttcaacttttt

SEQ ID NO: 841703 - DNA, 15 bp, Homo sapiens
gtgccttcaactttt

SEQ ID NO: 841704 - DNA, 15 bp, Homo sapiens
tgtgccttcaacttt

SEQ ID NO: 841705 - DNA, 15 bp, Homo sapiens
ttgtgccttcaactt

SEQ ID NO: 841706 - DNA, 15 bp, Homo sapiens
tttgtgccttcaact

SEQ ID NO: 841707 - DNA, 15 bp, Homo sapiens
ctttgtgccttcaac

SEQ ID NO: 841708 - DNA, 15 bp, Homo sapiens
tctttgtgccttcaa

SEQ ID NO: 841709 - DNA, 15 bp, Homo sapiens
ttctttgtgccttca

SEQ ID NO: 841710 - DNA, 15 bp, Homo sapiens
tttctttgtgccttc

SEQ ID NO: 841711 - DNA, 15 bp, Homo sapiens
ctttctttgtgcctt

SEQ ID NO: 841712 - DNA, 15 bp, Homo sapiens
tctttctttgtgcct

SEQ ID NO: 841713 - DNA, 15 bp, Homo sapiens
gtctttctttgtgcc

SEQ ID NO: 841714 - DNA, 15 bp, Homo sapiens
tgtctttctttgtgc

SEQ ID NO: 841715 - DNA, 15 bp, Homo sapiens
gtgtctttctttgtg

SEQ ID NO: 841716 - DNA, 15 bp, Homo sapiens
tgtgtctttctttgt

SEQ ID NO: 841717 - DNA, 15 bp, Homo sapiens
ctgtgtctttctttg

SEQ ID NO: 841718 - DNA, 15 bp, Homo sapiens
cctgtgtctttcttt

SEQ ID NO: 841719 - DNA, 15 bp, Homo sapiens
acctgtgtctttctt

SEQ ID NO: 841720 - DNA, 15 bp, Homo sapiens
gacctgtgtctttct

SEQ ID NO: 841721 - DNA, 15 bp, Homo sapiens
ggacctgtgtctttc

SEQ ID NO: 841722 - DNA, 15 bp, Homo sapiens
aggacctgtgtcttt

SEQ ID NO: 841723 - DNA, 15 bp, Homo sapiens
gaggacctgtgtctt

SEQ ID NO: 841724 - DNA, 15 bp, Homo sapiens
agaggacctgtgtct

SEQ ID NO: 841725 - DNA, 15 bp, Homo sapiens
tagaggacctgtgtc

SEQ ID NO: 841726 - DNA, 15 bp, Homo sapiens
ttagaggacctgtgt

SEQ ID NO: 841727 - DNA, 15 bp, Homo sapiens
gttagaggacctgtg

SEQ ID NO: 841728 - DNA, 15 bp, Homo sapiens
agttagaggacctgt

SEQ ID NO: 841729 - DNA, 15 bp, Homo sapiens
gagttagaggacctg

SEQ ID NO: 841730 - DNA, 15 bp, Homo sapiens
ggagttagaggacct

SEQ ID NO: 841731 - DNA, 15 bp, Homo sapiens
gggagttagaggacc

SEQ ID NO: 841732 - DNA, 15 bp, Homo sapiens
agggagttagaggac

SEQ ID NO: 841733 - DNA, 15 bp, Homo sapiens
cagggagttagagga

SEQ ID NO: 841734 - DNA, 15 bp, Homo sapiens
gcagggagttagagg

SEQ ID NO: 841735 - DNA, 15 bp, Homo sapiens
ggcagggagttagag

SEQ ID NO: 841736 - DNA, 15 bp, Homo sapiens
gggcagggagttaga

SEQ ID NO: 841737 - DNA, 15 bp, Homo sapiens
tgggcagggagttag

SEQ ID NO: 841738 - DNA, 15 bp, Homo sapiens
ctgggcagggagtta

SEQ ID NO: 841739 - DNA, 15 bp, Homo sapiens
actgggcagggagtt

SEQ ID NO: 841740 - DNA, 15 bp, Homo sapiens
cactgggcagggagt

SEQ ID NO: 841741 - DNA, 15 bp, Homo sapiens
gcactgggcagggag

SEQ ID NO: 841742 - DNA, 15 bp, Homo sapiens
ggcactgggcaggga

SEQ ID NO: 841743 - DNA, 15 bp, Homo sapiens
gggcactgggcaggg

SEQ ID NO: 841744 - DNA, 15 bp, Homo sapiens
agggcactgggcagg

SEQ ID NO: 841745 - DNA, 15 bp, Homo sapiens
aagggcactgggcag

SEQ ID NO: 841746 - DNA, 15 bp, Homo sapiens
aaagggcactgggca

SEQ ID NO: 841747 - DNA, 15 bp, Homo sapiens
taaagggcactgggc

SEQ ID NO: 841748 - DNA, 15 bp, Homo sapiens
ataaagggcactggg

SEQ ID NO: 841749 - DNA, 15 bp, Homo sapiens
aataaagggcactgg

SEQ ID NO: 841750 - DNA, 15 bp, Homo sapiens
gaataaagggcactg

SEQ ID NO: 841751 - DNA, 15 bp, Homo sapiens
tgaataaagggcact

SEQ ID NO: 841752 - DNA, 15 bp, Homo sapiens
atgaataaagggcac

SEQ ID NO: 841753 - DNA, 15 bp, Homo sapiens
tatgaataaagggca

SEQ ID NO: 841754 - DNA, 15 bp, Homo sapiens
atatgaataaagggc

SEQ ID NO: 841755 - DNA, 15 bp, Homo sapiens
aatatgaataaaggg

SEQ ID NO: 841756 - DNA, 15 bp, Homo sapiens
gaatatgaataaagg

SEQ ID NO: 841757 - DNA, 15 bp, Homo sapiens
agaatatgaataaag

SEQ ID NO: 841758 - DNA, 15 bp, Homo sapiens
gagaatatgaataaa

SEQ ID NO: 841759 - DNA, 15 bp, Homo sapiens
tgagaatatgaataa

SEQ ID NO: 841760 - DNA, 15 bp, Homo sapiens
ctgagaatatgaata

SEQ ID NO: 841761 - DNA, 15 bp, Homo sapiens
gctgagaatatgaat

SEQ ID NO: 841762 - DNA, 15 bp, Homo sapiens
tgctgagaatatgaa

SEQ ID NO: 841763 - DNA, 15 bp, Homo sapiens
gtgctgagaatatga

SEQ ID NO: 841764 - DNA, 15 bp, Homo sapiens
agtgctgagaatatg

SEQ ID NO: 841765 - DNA, 15 bp, Homo sapiens
aagtgctgagaatat

SEQ ID NO: 841766 - DNA, 15 bp, Homo sapiens
caagtgctgagaata

SEQ ID NO: 841767 - DNA, 15 bp, Homo sapiens
acaagtgctgagaat

SEQ ID NO: 841768 - DNA, 15 bp, Homo sapiens
tacaagtgctgagaa

SEQ ID NO: 841769 - DNA, 15 bp, Homo sapiens
atacaagtgctgaga

SEQ ID NO: 841770 - DNA, 15 bp, Homo sapiens
aatacaagtgctgag

SEQ ID NO: 841771 - DNA, 15 bp, Homo sapiens
aaatacaagtgctga

SEQ ID NO: 841772 - DNA, 15 bp, Homo sapiens
gaaatacaagtgctg

SEQ ID NO: 841773 - DNA, 15 bp, Homo sapiens
agaaatacaagtgct

SEQ ID NO: 841774 - DNA, 15 bp, Homo sapiens
tagaaatacaagtgc

SEQ ID NO: 841775 - DNA, 15 bp, Homo sapiens
ttagaaatacaagtg

SEQ ID NO: 841776 - DNA, 15 bp, Homo sapiens
cttagaaatacaagt

SEQ ID NO: 841777 - DNA, 15 bp, Homo sapiens
acttagaaatacaag

SEQ ID NO: 841778 - DNA, 15 bp, Homo sapiens
aacttagaaatacaa

SEQ ID NO: 841779 - DNA, 15 bp, Homo sapiens
aaacttagaaataca

SEQ ID NO: 841780 - DNA, 15 bp, Homo sapiens
aaaacttagaaatac

SEQ ID NO: 841781 - DNA, 15 bp, Homo sapiens
taaaacttagaaata

SEQ ID NO: 841782 - DNA, 15 bp, Homo sapiens
ataaaacttagaaat

SEQ ID NO: 841783 - DNA, 15 bp, Homo sapiens
cataaaacttagaaa

SEQ ID NO: 841784 - DNA, 15 bp, Homo sapiens
acataaaacttagaa

SEQ ID NO: 841785 - DNA, 15 bp, Homo sapiens
aacataaaacttaga

SEQ ID NO: 841786 - DNA, 15 bp, Homo sapiens
aaacataaaacttag

SEQ ID NO: 841787 - DNA, 15 bp, Homo sapiens
caaacataaaactta

SEQ ID NO: 841788 - DNA, 15 bp, Homo sapiens
tcaaacataaaactt

SEQ ID NO: 841789 - DNA, 15 bp, Homo sapiens
ctcaaacataaaact

SEQ ID NO: 841790 - DNA, 15 bp, Homo sapiens
actcaaacataaaac

SEQ ID NO: 841791 - DNA, 15 bp, Homo sapiens
gactcaaacataaaa

SEQ ID NO: 841792 - DNA, 15 bp, Homo sapiens
agactcaaacataaa

SEQ ID NO: 841793 - DNA, 15 bp, Homo sapiens
aagactcaaacataa

SEQ ID NO: 841794 - DNA, 15 bp, Homo sapiens
gaagactcaaacata

SEQ ID NO: 841795 - DNA, 15 bp, Homo sapiens
cgaagactcaaacat

SEQ ID NO: 841796 - DNA, 15 bp, Homo sapiens
ccgaagactcaaaca

SEQ ID NO: 841797 - DNA, 15 bp, Homo sapiens
cccgaagactcaaac

SEQ ID NO: 841798 - DNA, 15 bp, Homo sapiens
ccccgaagactcaaa

SEQ ID NO: 841799 - DNA, 15 bp, Homo sapiens
tccccgaagactcaa

SEQ ID NO: 841800 - DNA, 15 bp, Homo sapiens
atccccgaagactca

SEQ ID NO: 841801 - DNA, 15 bp, Homo sapiens
tatccccgaagactc

SEQ ID NO: 841802 - DNA, 15 bp, Homo sapiens
gtatccccgaagact

SEQ ID NO: 841803 - DNA, 15 bp, Homo sapiens
tgtatccccgaagac

SEQ ID NO: 841804 - DNA, 15 bp, Homo sapiens
atgtatccccgaaga

SEQ ID NO: 841805 - DNA, 15 bp, Homo sapiens
gatgtatccccgaag

SEQ ID NO: 841806 - DNA, 15 bp, Homo sapiens
tgatgtatccccgaa

SEQ ID NO: 841807 - DNA, 15 bp, Homo sapiens
ctgatgtatccccga

SEQ ID NO: 841808 - DNA, 15 bp, Homo sapiens
tctgatgtatccccg

SEQ ID NO: 841809 - DNA, 15 bp, Homo sapiens
ctctgatgtatcccc

SEQ ID NO: 841810 - DNA, 15 bp, Homo sapiens
actctgatgtatccc

SEQ ID NO: 841811 - DNA, 15 bp, Homo sapiens
tactctgatgtatcc

SEQ ID NO: 841812 - DNA, 15 bp, Homo sapiens
ctactctgatgtatc

SEQ ID NO: 841813 - DNA, 15 bp, Homo sapiens
actactctgatgtat

SEQ ID NO: 841814 - DNA, 15 bp, Homo sapiens
gactactctgatgta

SEQ ID NO: 841815 - DNA, 15 bp, Homo sapiens
ggactactctgatgt

SEQ ID NO: 841816 - DNA, 15 bp, Homo sapiens
gggactactctgatg

SEQ ID NO: 841817 - DNA, 15 bp, Homo sapiens
ggggactactctgat

SEQ ID NO: 841818 - DNA, 15 bp, Homo sapiens
gggggactactctga

SEQ ID NO: 841819 - DNA, 15 bp, Homo sapiens
agggggactactctg

SEQ ID NO: 841820 - DNA, 15 bp, Homo sapiens
aagggggactactct

SEQ ID NO: 841821 - DNA, 15 bp, Homo sapiens
caagggggactactc

SEQ ID NO: 841822 - DNA, 15 bp, Homo sapiens
acaagggggactact

SEQ ID NO: 841823 - DNA, 15 bp, Homo sapiens
gacaagggggactac

SEQ ID NO: 841824 - DNA, 15 bp, Homo sapiens
agacaagggggacta

SEQ ID NO: 841825 - DNA, 15 bp, Homo sapiens
tagacaagggggact

SEQ ID NO: 841826 - DNA, 15 bp, Homo sapiens
ttagacaagggggac

SEQ ID NO: 841827 - DNA, 15 bp, Homo sapiens
attagacaaggggga

SEQ ID NO: 841828 - DNA, 15 bp, Homo sapiens
tattagacaaggggg

SEQ ID NO: 841829 - DNA, 15 bp, Homo sapiens
ttattagacaagggg

SEQ ID NO: 841830 - DNA, 15 bp, Homo sapiens
tttattagacaaggg

SEQ ID NO: 841831 - DNA, 15 bp, Homo sapiens
atttattagacaagg

SEQ ID NO: 841832 - DNA, 15 bp, Homo sapiens
catttattagacaag

SEQ ID NO: 841833 - DNA, 15 bp, Homo sapiens
acatttattagacaa

SEQ ID NO: 841834 - DNA, 15 bp, Homo sapiens
cacatttattagaca

SEQ ID NO: 841835 - DNA, 15 bp, Homo sapiens
acacatttattagac

SEQ ID NO: 841836 - DNA, 15 bp, Homo sapiens
aacacatttattaga

SEQ ID NO: 841837 - DNA, 15 bp, Homo sapiens
aaacacatttattag

SEQ ID NO: 841838 - DNA, 15 bp, Homo sapiens
taaacacatttatta

SEQ ID NO: 841839 - DNA, 15 bp, Homo sapiens
gtaaacacatttatt

SEQ ID NO: 841840 - DNA, 15 bp, Homo sapiens
tgtaaacacatttat

SEQ ID NO: 841841 - DNA, 15 bp, Homo sapiens
atgtaaacacattta

SEQ ID NO: 841842 - DNA, 15 bp, Homo sapiens
aatgtaaacacattt

SEQ ID NO: 841843 - DNA, 15 bp, Homo sapiens
aaatgtaaacacatt

SEQ ID NO: 841844 - DNA, 15 bp, Homo sapiens
gaaatgtaaacacat

SEQ ID NO: 841845 - DNA, 15 bp, Homo sapiens
ggaaatgtaaacaca

SEQ ID NO: 841846 - DNA, 15 bp, Homo sapiens
aggaaatgtaaacac

SEQ ID NO: 841847 - DNA, 15 bp, Homo sapiens
caggaaatgtaaaca

SEQ ID NO: 841848 - DNA, 15 bp, Homo sapiens
gcaggaaatgtaaac

SEQ ID NO: 841849 - DNA, 15 bp, Homo sapiens
ggcaggaaatgtaaa

SEQ ID NO: 841850 - DNA, 15 bp, Homo sapiens
tggcaggaaatgtaa

SEQ ID NO: 841851 - DNA, 15 bp, Homo sapiens
atggcaggaaatgta

SEQ ID NO: 841852 - DNA, 15 bp, Homo sapiens
tatggcaggaaatgt

SEQ ID NO: 841853 - DNA, 15 bp, Homo sapiens
gtatggcaggaaatg

SEQ ID NO: 841854 - DNA, 15 bp, Homo sapiens
ggtatggcaggaaat

SEQ ID NO: 841855 - DNA, 15 bp, Homo sapiens
tggtatggcaggaaa

SEQ ID NO: 841856 - DNA, 15 bp, Homo sapiens
ctggtatggcaggaa

SEQ ID NO: 841857 - DNA, 15 bp, Homo sapiens
tctggtatggcagga

SEQ ID NO: 841858 - DNA, 15 bp, Homo sapiens
ttctggtatggcagg

SEQ ID NO: 841859 - DNA, 15 bp, Homo sapiens
tttctggtatggcag

SEQ ID NO: 841860 - DNA, 15 bp, Homo sapiens
gtttctggtatggca

SEQ ID NO: 841861 - DNA, 15 bp, Homo sapiens
ggtttctggtatggc

SEQ ID NO: 841862 - DNA, 15 bp, Homo sapiens
gggtttctggtatgg

SEQ ID NO: 841863 - DNA, 15 bp, Homo sapiens
agggtttctggtatg

SEQ ID NO: 841864 - DNA, 15 bp, Homo sapiens
aagggtttctggtat

SEQ ID NO: 841865 - DNA, 15 bp, Homo sapiens
gaagggtttctggta

SEQ ID NO: 841866 - DNA, 15 bp, Homo sapiens
agaagggtttctggt

SEQ ID NO: 841867 - DNA, 15 bp, Homo sapiens
gagaagggtttctgg

SEQ ID NO: 841868 - DNA, 15 bp, Homo sapiens
tgagaagggtttctg

SEQ ID NO: 841869 - DNA, 15 bp, Homo sapiens
ttgagaagggtttct

SEQ ID NO: 841870 - DNA, 15 bp, Homo sapiens
tttgagaagggtttc

SEQ ID NO: 841871 - DNA, 15 bp, Homo sapiens
gtttgagaagggttt

SEQ ID NO: 841872 - DNA, 15 bp, Homo sapiens
agtttgagaagggtt

SEQ ID NO: 841873 - DNA, 15 bp, Homo sapiens
aagtttgagaagggt

SEQ ID NO: 841874 - DNA, 15 bp, Homo sapiens
aaagtttgagaaggg

SEQ ID NO: 841875 - DNA, 15 bp, Homo sapiens
taaagtttgagaagg

SEQ ID NO: 841876 - DNA, 15 bp, Homo sapiens
ttaaagtttgagaag

SEQ ID NO: 841877 - DNA, 15 bp, Homo sapiens
attaaagtttgagaa

SEQ ID NO: 841878 - DNA, 15 bp, Homo sapiens
cattaaagtttgaga

SEQ ID NO: 841879 - DNA, 15 bp, Homo sapiens
tcattaaagtttgag

SEQ ID NO: 841880 - DNA, 15 bp, Homo sapiens
ttcattaaagtttga

SEQ ID NO: 841881 - DNA, 15 bp, Homo sapiens
attcattaaagtttg

SEQ ID NO: 841882 - DNA, 15 bp, Homo sapiens
aattcattaaagttt

SEQ ID NO: 841883 - DNA, 15 bp, Homo sapiens
aaattcattaaagtt

SEQ ID NO: 841884 - DNA, 15 bp, Homo sapiens
gaaattcattaaagt

SEQ ID NO: 841885 - DNA, 15 bp, Homo sapiens
agaaattcattaaag

SEQ ID NO: 841886 - DNA, 15 bp, Homo sapiens
tagaaattcattaaa

SEQ ID NO: 841887 - DNA, 15 bp, Homo sapiens
gtagaaattcattaa

SEQ ID NO: 841888 - DNA, 15 bp, Homo sapiens
tgtagaaattcatta

SEQ ID NO: 841889 - DNA, 15 bp, Homo sapiens
ttgtagaaattcatt

SEQ ID NO: 841890 - DNA, 15 bp, Homo sapiens
cttgtagaaattcat

SEQ ID NO: 841891 - DNA, 15 bp, Homo sapiens
ccttgtagaaattca

SEQ ID NO: 841892 - DNA, 15 bp, Homo sapiens
accttgtagaaattc

SEQ ID NO: 841893 - DNA, 15 bp, Homo sapiens
caccttgtagaaatt

SEQ ID NO: 841894 - DNA, 15 bp, Homo sapiens
tcaccttgtagaaat

SEQ ID NO: 841895 - DNA, 15 bp, Homo sapiens
ctcaccttgtagaaa

SEQ ID NO: 841896 - DNA, 15 bp, Homo sapiens
tctcaccttgtagaa

SEQ ID NO: 841897 - DNA, 15 bp, Homo sapiens
atctcaccttgtaga

SEQ ID NO: 841898 - DNA, 15 bp, Homo sapiens
aatctcaccttgtag

SEQ ID NO: 841899 - DNA, 15 bp, Homo sapiens
taatctcaccttgta

SEQ ID NO: 841900 - DNA, 15 bp, Homo sapiens
gtaatctcaccttgt

SEQ ID NO: 841901 - DNA, 15 bp, Homo sapiens
agtaatctcaccttg

SEQ ID NO: 841902 - DNA, 15 bp, Homo sapiens
aagtaatctcacctt

SEQ ID NO: 841903 - DNA, 15 bp, Homo sapiens
aaagtaatctcacct

SEQ ID NO: 841904 - DNA, 15 bp, Homo sapiens
taaagtaatctcacc

SEQ ID NO: 841905 - DNA, 15 bp, Homo sapiens
ttaaagtaatctcac

SEQ ID NO: 841906 - DNA, 15 bp, Homo sapiens
attaaagtaatctca

SEQ ID NO: 841907 - DNA, 15 bp, Homo sapiens
cattaaagtaatctc

SEQ ID NO: 841908 - DNA, 15 bp, Homo sapiens
tcattaaagtaatct

SEQ ID NO: 841909 - DNA, 15 bp, Homo sapiens
ctcattaaagtaatc

SEQ ID NO: 841910 - DNA, 15 bp, Homo sapiens
tctcattaaagtaat

SEQ ID NO: 841911 - DNA, 15 bp, Homo sapiens
ttctcattaaagtaa

SEQ ID NO: 841912 - DNA, 15 bp, Homo sapiens
tttctcattaaagta

SEQ ID NO: 841913 - DNA, 15 bp, Homo sapiens
gtttctcattaaagt

SEQ ID NO: 841914 - DNA, 15 bp, Homo sapiens
ggtttctcattaaag

SEQ ID NO: 841915 - DNA, 15 bp, Homo sapiens
tggtttctcattaaa

SEQ ID NO: 841916 - DNA, 15 bp, Homo sapiens
ttggtttctcattaa

SEQ ID NO: 841917 - DNA, 15 bp, Homo sapiens
gttggtttctcatta

SEQ ID NO: 841918 - DNA, 15 bp, Homo sapiens
ggttggtttctcatt

SEQ ID NO: 841919 - DNA, 15 bp, Homo sapiens
tggttggtttctcat

SEQ ID NO: 841920 - DNA, 15 bp, Homo sapiens
ttggttggtttctca

SEQ ID NO: 841921 - DNA, 15 bp, Homo sapiens
cttggttggtttctc

SEQ ID NO: 841922 - DNA, 15 bp, Homo sapiens
ccttggttggtttct

SEQ ID NO: 841923 - DNA, 15 bp, Homo sapiens
tccttggttggtttc

SEQ ID NO: 841924 - DNA, 15 bp, Homo sapiens
ttccttggttggttt

SEQ ID NO: 841925 - DNA, 15 bp, Homo sapiens
tttccttggttggtt

SEQ ID NO: 841926 - DNA, 15 bp, Homo sapiens
ctttccttggttggt

SEQ ID NO: 841927 - DNA, 15 bp, Homo sapiens
cctttccttggttgg

SEQ ID NO: 841928 - DNA, 15 bp, Homo sapiens
tcctttccttggttg

SEQ ID NO: 841929 - DNA, 15 bp, Homo sapiens
ctcctttccttggtt

SEQ ID NO: 841930 - DNA, 15 bp, Homo sapiens
actcctttccttggt

SEQ ID NO: 841931 - DNA, 15 bp, Homo sapiens
tactcctttccttgg

SEQ ID NO: 841932 - DNA, 15 bp, Homo sapiens
atactcctttccttg

SEQ ID NO: 841933 - DNA, 15 bp, Homo sapiens
gatactcctttcctt

SEQ ID NO: 841934 - DNA, 15 bp, Homo sapiens
tgatactcctttcct

SEQ ID NO: 841935 - DNA, 15 bp, Homo sapiens
atgatactcctttcc

SEQ ID NO: 841936 - DNA, 15 bp, Homo sapiens
gatgatactcctttc

SEQ ID NO: 841937 - DNA, 15 bp, Homo sapiens
agatgatactccttt

SEQ ID NO: 841938 - DNA, 15 bp, Homo sapiens
cagatgatactcctt

SEQ ID NO: 841939 - DNA, 15 bp, Homo sapiens
gcagatgatactcct

SEQ ID NO: 841940 - DNA, 15 bp, Homo sapiens
tgcagatgatactcc

SEQ ID NO: 841941 - DNA, 15 bp, Homo sapiens
ttgcagatgatactc

SEQ ID NO: 841942 - DNA, 15 bp, Homo sapiens
attgcagatgatact

SEQ ID NO: 841943 - DNA, 15 bp, Homo sapiens
tattgcagatgatac

SEQ ID NO: 841944 - DNA, 15 bp, Homo sapiens
atattgcagatgata

SEQ ID NO: 841945 - DNA, 15 bp, Homo sapiens
tatattgcagatgat

SEQ ID NO: 841946 - DNA, 15 bp, Homo sapiens
gtatattgcagatga

SEQ ID NO: 841947 - DNA, 15 bp, Homo sapiens
agtatattgcagatg

SEQ ID NO: 841948 - DNA, 15 bp, Homo sapiens
aagtatattgcagat

SEQ ID NO: 841949 - DNA, 15 bp, Homo sapiens
aaagtatattgcaga

SEQ ID NO: 841950 - DNA, 15 bp, Homo sapiens
gaaagtatattgcag

SEQ ID NO: 841951 - DNA, 15 bp, Homo sapiens
tgaaagtatattgca

SEQ ID NO: 841952 - DNA, 15 bp, Homo sapiens
ttgaaagtatattgc

SEQ ID NO: 841953 - DNA, 15 bp, Homo sapiens
tttgaaagtatattg

SEQ ID NO: 841954 - DNA, 15 bp, Homo sapiens
atttgaaagtatatt

SEQ ID NO: 841955 - DNA, 15 bp, Homo sapiens
catttgaaagtatat

SEQ ID NO: 841956 - DNA, 15 bp, Homo sapiens
acatttgaaagtata

SEQ ID NO: 841957 - DNA, 15 bp, Homo sapiens
aacatttgaaagtat

SEQ ID NO: 841958 - DNA, 15 bp, Homo sapiens
aaacatttgaaagta

SEQ ID NO: 841959 - DNA, 15 bp, Homo sapiens
aaaacatttgaaagt

SEQ ID NO: 841960 - DNA, 15 bp, Homo sapiens
aaaaacatttgaaag

SEQ ID NO: 841961 - DNA, 15 bp, Homo sapiens
aaaaaacatttgaaa

SEQ ID NO: 841962 - DNA, 15 bp, Homo sapiens
caaaaaacatttgaa

SEQ ID NO: 841963 - DNA, 15 bp, Homo sapiens
gcaaaaaacatttga

SEQ ID NO: 841964 - DNA, 15 bp, Homo sapiens
agcaaaaaacatttg

SEQ ID NO: 841965 - DNA, 15 bp, Homo sapiens
aagcaaaaaacattt

SEQ ID NO: 841966 - DNA, 15 bp, Homo sapiens
caagcaaaaaacatt

SEQ ID NO: 841967 - DNA, 15 bp, Homo sapiens
acaagcaaaaaacat

SEQ ID NO: 841968 - DNA, 15 bp, Homo sapiens
aacaagcaaaaaaca

SEQ ID NO: 841969 - DNA, 15 bp, Homo sapiens
aaacaagcaaaaaac

SEQ ID NO: 841970 - DNA, 15 bp, Homo sapiens
caaacaagcaaaaaa

SEQ ID NO: 841971 - DNA, 15 bp, Homo sapiens
acaaacaagcaaaaa

SEQ ID NO: 841972 - DNA, 15 bp, Homo sapiens
aacaaacaagcaaaa

SEQ ID NO: 841973 - DNA, 15 bp, Homo sapiens
aaacaaacaagcaaa

SEQ ID NO: 841974 - DNA, 15 bp, Homo sapiens
gaaacaaacaagcaa

SEQ ID NO: 841975 - DNA, 15 bp, Homo sapiens
agaaacaaacaagca

SEQ ID NO: 841976 - DNA, 15 bp, Homo sapiens
aagaaacaaacaagc

SEQ ID NO: 841977 - DNA, 15 bp, Homo sapiens
caagaaacaaacaag

SEQ ID NO: 841978 - DNA, 15 bp, Homo sapiens
acaagaaacaaacaa

SEQ ID NO: 841979 - DNA, 15 bp, Homo sapiens
gacaagaaacaaaca

SEQ ID NO: 841980 - DNA, 15 bp, Homo sapiens
ggacaagaaacaaac

SEQ ID NO: 841981 - DNA, 15 bp, Homo sapiens
tggacaagaaacaaa

SEQ ID NO: 841982 - DNA, 15 bp, Homo sapiens
ctggacaagaaacaa

SEQ ID NO: 841983 - DNA, 15 bp, Homo sapiens
gctggacaagaaaca

SEQ ID NO: 841984 - DNA, 15 bp, Homo sapiens
agctggacaagaaac

SEQ ID NO: 841985 - DNA, 15 bp, Homo sapiens
tagctggacaagaaa

SEQ ID NO: 841986 - DNA, 15 bp, Homo sapiens
ttagctggacaagaa

SEQ ID NO: 841987 - DNA, 15 bp, Homo sapiens
tttagctggacaaga

SEQ ID NO: 841988 - DNA, 15 bp, Homo sapiens
ttttagctggacaag

SEQ ID NO: 841989 - DNA, 15 bp, Homo sapiens
tttttagctggacaa

SEQ ID NO: 841990 - DNA, 15 bp, Homo sapiens
ttttttagctggaca

SEQ ID NO: 841991 - DNA, 15 bp, Homo sapiens
tttttttagctggac

SEQ ID NO: 841992 - DNA, 15 bp, Homo sapiens
ttttttttagctgga

SEQ ID NO: 841993 - DNA, 15 bp, Homo sapiens
tttttttttagctgg

SEQ ID NO: 841994 - DNA, 15 bp, Homo sapiens
ttttttttttagctg

SEQ ID NO: 841995 - DNA, 15 bp, Homo sapiens
tttttttttttagct

SEQ ID NO: 841996 - DNA, 15 bp, Homo sapiens
ttttttttttttagc

SEQ ID NO: 841997 - DNA, 15 bp, Homo sapiens
cttgttttttttttt

SEQ ID NO: 841998 - DNA, 15 bp, Homo sapiens
gcttgtttttttttt

SEQ ID NO: 841999 - DNA, 15 bp, Homo sapiens
ggcttgttttttttt

SEQ ID NO: 842000 - DNA, 15 bp, Homo sapiens
tggcttgtttttttt

SEQ ID NO: 842001 - DNA, 15 bp, Homo sapiens
atggcttgttttttt

SEQ ID NO: 842002 - DNA, 15 bp, Homo sapiens
aatggcttgtttttt

SEQ ID NO: 842003 - DNA, 15 bp, Homo sapiens
caatggcttgttttt

SEQ ID NO: 842004 - DNA, 15 bp, Homo sapiens
ccaatggcttgtttt

SEQ ID NO: 842005 - DNA, 15 bp, Homo sapiens
accaatggcttgttt

SEQ ID NO: 842006 - DNA, 15 bp, Homo sapiens
gaccaatggcttgtt

SEQ ID NO: 842007 - DNA, 15 bp, Homo sapiens
ggaccaatggcttgt

SEQ ID NO: 842008 - DNA, 15 bp, Homo sapiens
aggaccaatggcttg

SEQ ID NO: 842009 - DNA, 15 bp, Homo sapiens
taggaccaatggctt

SEQ ID NO: 842010 - DNA, 15 bp, Homo sapiens
ttaggaccaatggct

SEQ ID NO: 842011 - DNA, 15 bp, Homo sapiens
gttaggaccaatggc

SEQ ID NO: 842012 - DNA, 15 bp, Homo sapiens
aatgtttgttgttgt

SEQ ID NO: 842013 - DNA, 15 bp, Homo sapiens
atgtttgttgttgtt

SEQ ID NO: 842014 - DNA, 15 bp, Homo sapiens
tgtttgttgttgttg

SEQ ID NO: 842015 - DNA, 15 bp, Homo sapiens
gtttgttgttgttgt

SEQ ID NO: 842016 - DNA, 15 bp, Homo sapiens
tttgttgttgttgtt

SEQ ID NO: 842017 - DNA, 15 bp, Homo sapiens
ttgttgttgttgttg

SEQ ID NO: 842018 - DNA, 15 bp, Homo sapiens
tgttgttgttgttgc

SEQ ID NO: 842019 - DNA, 15 bp, Homo sapiens
gttgttgttgttgct

SEQ ID NO: 842020 - DNA, 15 bp, Homo sapiens
ttgttgttgttgctg

SEQ ID NO: 842021 - DNA, 15 bp, Homo sapiens
tgttgttgttgctgt

SEQ ID NO: 842022 - DNA, 15 bp, Homo sapiens
gttgttgttgctgtt

SEQ ID NO: 842023 - DNA, 15 bp, Homo sapiens
ttgttgttgctgttg

SEQ ID NO: 842024 - DNA, 15 bp, Homo sapiens
tgttgttgctgttgt

SEQ ID NO: 842025 - DNA, 15 bp, Homo sapiens
gttgttgctgttgtt

SEQ ID NO: 842026 - DNA, 15 bp, Homo sapiens
ttgttgctgttgttt

SEQ ID NO: 842027 - DNA, 15 bp, Homo sapiens
tgttgctgttgtttt

SEQ ID NO: 842028 - DNA, 15 bp, Homo sapiens
gttgctgttgttttt

SEQ ID NO: 842029 - DNA, 15 bp, Homo sapiens
ttgctgttgtttttg

SEQ ID NO: 842030 - DNA, 15 bp, Homo sapiens
tgctgttgtttttga

SEQ ID NO: 842031 - DNA, 15 bp, Homo sapiens
gctgttgtttttgag

SEQ ID NO: 842032 - DNA, 15 bp, Homo sapiens
ctgttgtttttgaga

SEQ ID NO: 842033 - DNA, 15 bp, Homo sapiens
tgttgtttttgagac

SEQ ID NO: 842034 - DNA, 15 bp, Homo sapiens
gttgtttttgagaca

SEQ ID NO: 842035 - DNA, 15 bp, Homo sapiens
ttgtttttgagacag

SEQ ID NO: 842036 - DNA, 15 bp, Homo sapiens
tgtttttgagacaga

SEQ ID NO: 842037 - DNA, 15 bp, Homo sapiens
gtttttgagacagag

SEQ ID NO: 842038 - DNA, 15 bp, Homo sapiens
tttttgagacagagt

SEQ ID NO: 842039 - DNA, 15 bp, Homo sapiens
ttttgagacagagtc

SEQ ID NO: 842040 - DNA, 15 bp, Homo sapiens
tttgagacagagtct

SEQ ID NO: 842041 - DNA, 15 bp, Homo sapiens
ttgagacagagtctt

SEQ ID NO: 842042 - DNA, 15 bp, Homo sapiens
tgagacagagtcttg

SEQ ID NO: 842043 - DNA, 15 bp, Homo sapiens
gagacagagtcttgc

SEQ ID NO: 842044 - DNA, 15 bp, Homo sapiens
agacagagtcttgct

SEQ ID NO: 842045 - DNA, 15 bp, Homo sapiens
gacagagtcttgctc

SEQ ID NO: 842046 - DNA, 15 bp, Homo sapiens
acagagtcttgctct

SEQ ID NO: 842047 - DNA, 15 bp, Homo sapiens
cagagtcttgctctg

SEQ ID NO: 842048 - DNA, 15 bp, Homo sapiens
agagtcttgctctgt

SEQ ID NO: 842049 - DNA, 15 bp, Homo sapiens
gagtcttgctctgtt

SEQ ID NO: 842050 - DNA, 15 bp, Homo sapiens
agtcttgctctgttg

SEQ ID NO: 842051 - DNA, 15 bp, Homo sapiens
gtcttgctctgttgc

SEQ ID NO: 842052 - DNA, 15 bp, Homo sapiens
tcttgctctgttgcc

SEQ ID NO: 842053 - DNA, 15 bp, Homo sapiens
cccaggctggagtgt

SEQ ID NO: 842054 - DNA, 15 bp, Homo sapiens
ccaggctggagtgta

SEQ ID NO: 842055 - DNA, 15 bp, Homo sapiens
caggctggagtgtaa

SEQ ID NO: 842056 - DNA, 15 bp, Homo sapiens
aggctggagtgtaat

SEQ ID NO: 842057 - DNA, 15 bp, Homo sapiens
ggctggagtgtaatg

SEQ ID NO: 842058 - DNA, 15 bp, Homo sapiens
gctggagtgtaatgg

SEQ ID NO: 842059 - DNA, 15 bp, Homo sapiens
ctggagtgtaatggt

SEQ ID NO: 842060 - DNA, 15 bp, Homo sapiens
tggagtgtaatggtg

SEQ ID NO: 842061 - DNA, 15 bp, Homo sapiens
ggagtgtaatggtgc

SEQ ID NO: 842062 - DNA, 15 bp, Homo sapiens
gagtgtaatggtgca

SEQ ID NO: 842063 - DNA, 15 bp, Homo sapiens
agtgtaatggtgcaa

SEQ ID NO: 842064 - DNA, 15 bp, Homo sapiens
gtgtaatggtgcaat

SEQ ID NO: 842065 - DNA, 15 bp, Homo sapiens
tgtaatggtgcaatt

SEQ ID NO: 842066 - DNA, 15 bp, Homo sapiens
gtaatggtgcaattt

SEQ ID NO: 842067 - DNA, 15 bp, Homo sapiens
taatggtgcaatttt

SEQ ID NO: 842068 - DNA, 15 bp, Homo sapiens
aatggtgcaattttg

SEQ ID NO: 842069 - DNA, 15 bp, Homo sapiens
atggtgcaattttgg

SEQ ID NO: 842070 - DNA, 15 bp, Homo sapiens
tggtgcaattttggc

SEQ ID NO: 842071 - DNA, 15 bp, Homo sapiens
ggtgcaattttggct

SEQ ID NO: 842072 - DNA, 15 bp, Homo sapiens
gtgcaattttggctc

SEQ ID NO: 842073 - DNA, 15 bp, Homo sapiens
tgcaattttggctca

SEQ ID NO: 842074 - DNA, 15 bp, Homo sapiens
gcaattttggctcac

SEQ ID NO: 842075 - DNA, 15 bp, Homo sapiens
caattttggctcact

SEQ ID NO: 842076 - DNA, 15 bp, Homo sapiens
aattttggctcactg

SEQ ID NO: 842077 - DNA, 15 bp, Homo sapiens
attttggctcactgc

SEQ ID NO: 842078 - DNA, 15 bp, Homo sapiens
ttttggctcactgca

SEQ ID NO: 842079 - DNA, 15 bp, Homo sapiens
tttggctcactgcaa

SEQ ID NO: 842080 - DNA, 15 bp, Homo sapiens
ttggctcactgcaaa

SEQ ID NO: 842081 - DNA, 15 bp, Homo sapiens
tggctcactgcaaac

SEQ ID NO: 842082 - DNA, 15 bp, Homo sapiens
ggctcactgcaaact

SEQ ID NO: 842083 - DNA, 15 bp, Homo sapiens
gctcactgcaaactt

SEQ ID NO: 842084 - DNA, 15 bp, Homo sapiens
ctcactgcaaacttc

SEQ ID NO: 842085 - DNA, 15 bp, Homo sapiens
tcactgcaaacttcg

SEQ ID NO: 842086 - DNA, 15 bp, Homo sapiens
cactgcaaacttcgt

SEQ ID NO: 842087 - DNA, 15 bp, Homo sapiens
actgcaaacttcgtc

SEQ ID NO: 842088 - DNA, 15 bp, Homo sapiens
ctgcaaacttcgtct

SEQ ID NO: 842089 - DNA, 15 bp, Homo sapiens
tgcaaacttcgtctc

SEQ ID NO: 842090 - DNA, 15 bp, Homo sapiens
gcaaacttcgtctcc

SEQ ID NO: 842091 - DNA, 15 bp, Homo sapiens
caaacttcgtctcct

SEQ ID NO: 842092 - DNA, 15 bp, Homo sapiens
aaacttcgtctcctg

SEQ ID NO: 842093 - DNA, 15 bp, Homo sapiens
aacttcgtctcctgg

SEQ ID NO: 842094 - DNA, 15 bp, Homo sapiens
acttcgtctcctggg

SEQ ID NO: 842095 - DNA, 15 bp, Homo sapiens
cttcgtctcctgggt

SEQ ID NO: 842096 - DNA, 15 bp, Homo sapiens
ttcgtctcctgggtt

SEQ ID NO: 842097 - DNA, 15 bp, Homo sapiens
tcgtctcctgggttc

SEQ ID NO: 842098 - DNA, 15 bp, Homo sapiens
cgtctcctgggttca

SEQ ID NO: 842099 - DNA, 15 bp, Homo sapiens
gtctcctgggttcaa

SEQ ID NO: 842100 - DNA, 15 bp, Homo sapiens
tctcctgggttcaag

SEQ ID NO: 842101 - DNA, 15 bp, Homo sapiens
ctcctgggttcaagt

SEQ ID NO: 842102 - DNA, 15 bp, Homo sapiens
tcctgggttcaagtg

SEQ ID NO: 842103 - DNA, 15 bp, Homo sapiens
cctgggttcaagtga

SEQ ID NO: 842104 - DNA, 15 bp, Homo sapiens
ctgggttcaagtgat

SEQ ID NO: 842105 - DNA, 15 bp, Homo sapiens
tgggttcaagtgatt

SEQ ID NO: 842106 - DNA, 15 bp, Homo sapiens
gggttcaagtgattc

SEQ ID NO: 842107 - DNA, 15 bp, Homo sapiens
ggttcaagtgattct

SEQ ID NO: 842108 - DNA, 15 bp, Homo sapiens
gttcaagtgattctc

SEQ ID NO: 842109 - DNA, 15 bp, Homo sapiens
ttcaagtgattctcc

SEQ ID NO: 842110 - DNA, 15 bp, Homo sapiens
tcaagtgattctcct

SEQ ID NO: 842111 - DNA, 15 bp, Homo sapiens
caagtgattctcctg

SEQ ID NO: 842112 - DNA, 15 bp, Homo sapiens
aagtgattctcctgc

SEQ ID NO: 842113 - DNA, 15 bp, Homo sapiens
agtgattctcctgcc

SEQ ID NO: 842114 - DNA, 15 bp, Homo sapiens
gtgattctcctgcct

SEQ ID NO: 842115 - DNA, 15 bp, Homo sapiens
tgattctcctgcctc

SEQ ID NO: 842116 - DNA, 15 bp, Homo sapiens
cctgcctcagcctct

SEQ ID NO: 842117 - DNA, 15 bp, Homo sapiens
ctgcctcagcctctc

SEQ ID NO: 842118 - DNA, 15 bp, Homo sapiens
tgcctcagcctctcg

SEQ ID NO: 842119 - DNA, 15 bp, Homo sapiens
gcctcagcctctcga

SEQ ID NO: 842120 - DNA, 15 bp, Homo sapiens
cctcagcctctcgag

SEQ ID NO: 842121 - DNA, 15 bp, Homo sapiens
ctcagcctctcgagt

SEQ ID NO: 842122 - DNA, 15 bp, Homo sapiens
tcagcctctcgagta

SEQ ID NO: 842123 - DNA, 15 bp, Homo sapiens
cagcctctcgagtag

SEQ ID NO: 842124 - DNA, 15 bp, Homo sapiens
agcctctcgagtagc

SEQ ID NO: 842125 - DNA, 15 bp, Homo sapiens
gcctctcgagtagct

SEQ ID NO: 842126 - DNA, 15 bp, Homo sapiens
cctctcgagtagctg

SEQ ID NO: 842127 - DNA, 15 bp, Homo sapiens
ctctcgagtagctgg

SEQ ID NO: 842128 - DNA, 15 bp, Homo sapiens
tctcgagtagctggg

SEQ ID NO: 842129 - DNA, 15 bp, Homo sapiens
ctcgagtagctgggt

SEQ ID NO: 842130 - DNA, 15 bp, Homo sapiens
tcgagtagctgggtt

SEQ ID NO: 842131 - DNA, 15 bp, Homo sapiens
cgagtagctgggttt

SEQ ID NO: 842132 - DNA, 15 bp, Homo sapiens
gagtagctgggttta

SEQ ID NO: 842133 - DNA, 15 bp, Homo sapiens
agtagctgggtttac

SEQ ID NO: 842134 - DNA, 15 bp, Homo sapiens
gtagctgggtttaca

SEQ ID NO: 842135 - DNA, 15 bp, Homo sapiens
tagctgggtttacag

SEQ ID NO: 842136 - DNA, 15 bp, Homo sapiens
agctgggtttacagg

SEQ ID NO: 842137 - DNA, 15 bp, Homo sapiens
gctgggtttacaggc

SEQ ID NO: 842138 - DNA, 15 bp, Homo sapiens
ctgggtttacaggca

SEQ ID NO: 842139 - DNA, 15 bp, Homo sapiens
tgggtttacaggcac

SEQ ID NO: 842140 - DNA, 15 bp, Homo sapiens
gggtttacaggcact

SEQ ID NO: 842141 - DNA, 15 bp, Homo sapiens
ggtttacaggcactc

SEQ ID NO: 842142 - DNA, 15 bp, Homo sapiens
gtttacaggcactcg

SEQ ID NO: 842143 - DNA, 15 bp, Homo sapiens
tttacaggcactcgc

SEQ ID NO: 842144 - DNA, 15 bp, Homo sapiens
ttacaggcactcgcc

SEQ ID NO: 842145 - DNA, 15 bp, Homo sapiens
tacaggcactcgcca

SEQ ID NO: 842146 - DNA, 15 bp, Homo sapiens
acaggcactcgccac

SEQ ID NO: 842147 - DNA, 15 bp, Homo sapiens
caggcactcgccaca

SEQ ID NO: 842148 - DNA, 15 bp, Homo sapiens
aggcactcgccacaa

SEQ ID NO: 842149 - DNA, 15 bp, Homo sapiens
ggcactcgccacaat

SEQ ID NO: 842150 - DNA, 15 bp, Homo sapiens
gcactcgccacaatg

SEQ ID NO: 842151 - DNA, 15 bp, Homo sapiens
cactcgccacaatgc

SEQ ID NO: 842152 - DNA, 15 bp, Homo sapiens
actcgccacaatgcc

SEQ ID NO: 842153 - DNA, 15 bp, Homo sapiens
ctcgccacaatgcct

SEQ ID NO: 842154 - DNA, 15 bp, Homo sapiens
tcgccacaatgcctg

SEQ ID NO: 842155 - DNA, 15 bp, Homo sapiens
cgccacaatgcctgg

SEQ ID NO: 842156 - DNA, 15 bp, Homo sapiens
gccacaatgcctggc

SEQ ID NO: 842157 - DNA, 15 bp, Homo sapiens
ccacaatgcctggct

SEQ ID NO: 842158 - DNA, 15 bp, Homo sapiens
cacaatgcctggcta

SEQ ID NO: 842159 - DNA, 15 bp, Homo sapiens
acaatgcctggctaa

SEQ ID NO: 842160 - DNA, 15 bp, Homo sapiens
caatgcctggctaat

SEQ ID NO: 842161 - DNA, 15 bp, Homo sapiens
aatgcctggctaatt

SEQ ID NO: 842162 - DNA, 15 bp, Homo sapiens
cctggctaatttttg

SEQ ID NO: 842163 - DNA, 15 bp, Homo sapiens
ctggctaatttttgt

SEQ ID NO: 842164 - DNA, 15 bp, Homo sapiens
tggctaatttttgta

SEQ ID NO: 842165 - DNA, 15 bp, Homo sapiens
ggctaatttttgtat

SEQ ID NO: 842166 - DNA, 15 bp, Homo sapiens
aatttttgtatttta

SEQ ID NO: 842167 - DNA, 15 bp, Homo sapiens
atttttgtattttag

SEQ ID NO: 842168 - DNA, 15 bp, Homo sapiens
tttttgtattttagt

SEQ ID NO: 842169 - DNA, 15 bp, Homo sapiens
ttttgtattttagta

SEQ ID NO: 842170 - DNA, 15 bp, Homo sapiens
tttgtattttagtag

SEQ ID NO: 842171 - DNA, 15 bp, Homo sapiens
ttgtattttagtaga

SEQ ID NO: 842172 - DNA, 15 bp, Homo sapiens
tgtattttagtagat

SEQ ID NO: 842173 - DNA, 15 bp, Homo sapiens
gtattttagtagatg

SEQ ID NO: 842174 - DNA, 15 bp, Homo sapiens
tattttagtagatgt

SEQ ID NO: 842175 - DNA, 15 bp, Homo sapiens
attttagtagatgtg

SEQ ID NO: 842176 - DNA, 15 bp, Homo sapiens
ttttagtagatgtgg

SEQ ID NO: 842177 - DNA, 15 bp, Homo sapiens
tttagtagatgtgga

SEQ ID NO: 842178 - DNA, 15 bp, Homo sapiens
ttagtagatgtggag

SEQ ID NO: 842179 - DNA, 15 bp, Homo sapiens
tagtagatgtggagt

SEQ ID NO: 842180 - DNA, 15 bp, Homo sapiens
agtagatgtggagtt

SEQ ID NO: 842181 - DNA, 15 bp, Homo sapiens
gtagatgtggagttt

SEQ ID NO: 842182 - DNA, 15 bp, Homo sapiens
tagatgtggagtttc

SEQ ID NO: 842183 - DNA, 15 bp, Homo sapiens
agatgtggagtttcg

SEQ ID NO: 842184 - DNA, 15 bp, Homo sapiens
gatgtggagtttcgc

SEQ ID NO: 842185 - DNA, 15 bp, Homo sapiens
atgtggagtttcgcc

SEQ ID NO: 842186 - DNA, 15 bp, Homo sapiens
tgtggagtttcgcca

SEQ ID NO: 842187 - DNA, 15 bp, Homo sapiens
gtggagtttcgccat

SEQ ID NO: 842188 - DNA, 15 bp, Homo sapiens
tggagtttcgccatg

SEQ ID NO: 842189 - DNA, 15 bp, Homo sapiens
ggagtttcgccatgt

SEQ ID NO: 842190 - DNA, 15 bp, Homo sapiens
gagtttcgccatgtt

SEQ ID NO: 842191 - DNA, 15 bp, Homo sapiens
agtttcgccatgttg

SEQ ID NO: 842192 - DNA, 15 bp, Homo sapiens
gtttcgccatgttgg

SEQ ID NO: 842193 - DNA, 15 bp, Homo sapiens
tttcgccatgttggc

SEQ ID NO: 842194 - DNA, 15 bp, Homo sapiens
ttcgccatgttggcc

SEQ ID NO: 842195 - DNA, 15 bp, Homo sapiens
tcgccatgttggcca

SEQ ID NO: 842196 - DNA, 15 bp, Homo sapiens
cgccatgttggccag

SEQ ID NO: 842197 - DNA, 15 bp, Homo sapiens
gccatgttggccagg

SEQ ID NO: 842198 - DNA, 15 bp, Homo sapiens
ttggccaggctggtc

SEQ ID NO: 842199 - DNA, 15 bp, Homo sapiens
tggccaggctggtct

SEQ ID NO: 842200 - DNA, 15 bp, Homo sapiens
ggccaggctggtctt

SEQ ID NO: 842201 - DNA, 15 bp, Homo sapiens
gccaggctggtcttg

SEQ ID NO: 842202 - DNA, 15 bp, Homo sapiens
ccaggctggtcttga

SEQ ID NO: 842203 - DNA, 15 bp, Homo sapiens
caggctggtcttgaa

SEQ ID NO: 842204 - DNA, 15 bp, Homo sapiens
aggctggtcttgaac

SEQ ID NO: 842205 - DNA, 15 bp, Homo sapiens
ggctggtcttgaact

SEQ ID NO: 842206 - DNA, 15 bp, Homo sapiens
gctggtcttgaactc

SEQ ID NO: 842207 - DNA, 15 bp, Homo sapiens
ctggtcttgaactcc

SEQ ID NO: 842208 - DNA, 15 bp, Homo sapiens
tggtcttgaactcct

SEQ ID NO: 842209 - DNA, 15 bp, Homo sapiens
ggtcttgaactcctg

SEQ ID NO: 842210 - DNA, 15 bp, Homo sapiens
gtcttgaactcctga

SEQ ID NO: 842211 - DNA, 15 bp, Homo sapiens
tcttgaactcctgac

SEQ ID NO: 842212 - DNA, 15 bp, Homo sapiens
cttgaactcctgacc

SEQ ID NO: 842213 - DNA, 15 bp, Homo sapiens
ttgaactcctgacct

SEQ ID NO: 842214 - DNA, 15 bp, Homo sapiens
tgaactcctgacctc

SEQ ID NO: 842215 - DNA, 15 bp, Homo sapiens
aactcctgacctcaa

SEQ ID NO: 842216 - DNA, 15 bp, Homo sapiens
actcctgacctcaag

SEQ ID NO: 842217 - DNA, 15 bp, Homo sapiens
ctcctgacctcaagt

SEQ ID NO: 842218 - DNA, 15 bp, Homo sapiens
tcctgacctcaagtg

SEQ ID NO: 842219 - DNA, 15 bp, Homo sapiens
cctgacctcaagtga

SEQ ID NO: 842220 - DNA, 15 bp, Homo sapiens
ctgacctcaagtgat

SEQ ID NO: 842221 - DNA, 15 bp, Homo sapiens
tgacctcaagtgatc

SEQ ID NO: 842222 - DNA, 15 bp, Homo sapiens
gacctcaagtgatct

SEQ ID NO: 842223 - DNA, 15 bp, Homo sapiens
acctcaagtgatctg

SEQ ID NO: 842224 - DNA, 15 bp, Homo sapiens
cctcaagtgatctgc

SEQ ID NO: 842225 - DNA, 15 bp, Homo sapiens
ctcaagtgatctgcc

SEQ ID NO: 842226 - DNA, 15 bp, Homo sapiens
tcaagtgatctgccc

SEQ ID NO: 842227 - DNA, 15 bp, Homo sapiens
caagtgatctgccca

SEQ ID NO: 842228 - DNA, 15 bp, Homo sapiens
aagtgatctgcccac

SEQ ID NO: 842229 - DNA, 15 bp, Homo sapiens
agtgatctgcccacc

SEQ ID NO: 842230 - DNA, 15 bp, Homo sapiens
gtgatctgcccacct

SEQ ID NO: 842231 - DNA, 15 bp, Homo sapiens
tgatctgcccacctt

SEQ ID NO: 842232 - DNA, 15 bp, Homo sapiens
gatctgcccaccttg

SEQ ID NO: 842233 - DNA, 15 bp, Homo sapiens
atctgcccaccttgg

SEQ ID NO: 842234 - DNA, 15 bp, Homo sapiens
tctgcccaccttggc

SEQ ID NO: 842235 - DNA, 15 bp, Homo sapiens
ctgcccaccttggcc

SEQ ID NO: 842236 - DNA, 15 bp, Homo sapiens
tgcccaccttggcct

SEQ ID NO: 842237 - DNA, 15 bp, Homo sapiens
gcccaccttggcctc

SEQ ID NO: 842238 - DNA, 15 bp, Homo sapiens
cccaccttggcctcc

SEQ ID NO: 842239 - DNA, 15 bp, Homo sapiens
ccaccttggcctccc

SEQ ID NO: 842240 - DNA, 15 bp, Homo sapiens
caccttggcctccca

SEQ ID NO: 842241 - DNA, 15 bp, Homo sapiens
accttggcctcccaa

SEQ ID NO: 842242 - DNA, 15 bp, Homo sapiens
ccttggcctcccaaa

SEQ ID NO: 842243 - DNA, 15 bp, Homo sapiens
cttggcctcccaaaa

SEQ ID NO: 842244 - DNA, 15 bp, Homo sapiens
ttggcctcccaaaat

SEQ ID NO: 842245 - DNA, 15 bp, Homo sapiens
tggcctcccaaaatg

SEQ ID NO: 842246 - DNA, 15 bp, Homo sapiens
ggcctcccaaaatgc

SEQ ID NO: 842247 - DNA, 15 bp, Homo sapiens
gcctcccaaaatgct

SEQ ID NO: 842248 - DNA, 15 bp, Homo sapiens
cctcccaaaatgctg

SEQ ID NO: 842249 - DNA, 15 bp, Homo sapiens
ctcccaaaatgctgg

SEQ ID NO: 842250 - DNA, 15 bp, Homo sapiens
tcccaaaatgctggg

SEQ ID NO: 842251 - DNA, 15 bp, Homo sapiens
cccaaaatgctggga

SEQ ID NO: 842252 - DNA, 15 bp, Homo sapiens
ccaaaatgctgggat

SEQ ID NO: 842253 - DNA, 15 bp, Homo sapiens
caaaatgctgggatt

SEQ ID NO: 842254 - DNA, 15 bp, Homo sapiens
aaaatgctgggatta

SEQ ID NO: 842255 - DNA, 15 bp, Homo sapiens
aaatgctgggattat

SEQ ID NO: 842256 - DNA, 15 bp, Homo sapiens
aatgctgggattata

SEQ ID NO: 842257 - DNA, 15 bp, Homo sapiens
atgctgggattatag

SEQ ID NO: 842258 - DNA, 15 bp, Homo sapiens
taggtgtgagccact

SEQ ID NO: 842259 - DNA, 15 bp, Homo sapiens
aggtgtgagccacta

SEQ ID NO: 842260 - DNA, 15 bp, Homo sapiens
ggtgtgagccactat

SEQ ID NO: 842261 - DNA, 15 bp, Homo sapiens
gtgtgagccactatg

SEQ ID NO: 842262 - DNA, 15 bp, Homo sapiens
tgtgagccactatgc

SEQ ID NO: 842263 - DNA, 15 bp, Homo sapiens
gagccactatgccca

SEQ ID NO: 842264 - DNA, 15 bp, Homo sapiens
agccactatgcccag

SEQ ID NO: 842265 - DNA, 15 bp, Homo sapiens
gccactatgcccagc

SEQ ID NO: 842266 - DNA, 15 bp, Homo sapiens
ccactatgcccagct

SEQ ID NO: 842267 - DNA, 15 bp, Homo sapiens
cactatgcccagctt

SEQ ID NO: 842268 - DNA, 15 bp, Homo sapiens
actatgcccagcttt

SEQ ID NO: 842269 - DNA, 15 bp, Homo sapiens
ctatgcccagctttg

SEQ ID NO: 842270 - DNA, 15 bp, Homo sapiens
tatgcccagctttga

SEQ ID NO: 842271 - DNA, 15 bp, Homo sapiens
atgcccagctttgaa

SEQ ID NO: 842272 - DNA, 15 bp, Homo sapiens
tgcccagctttgaat

SEQ ID NO: 842273 - DNA, 15 bp, Homo sapiens
gcccagctttgaata

SEQ ID NO: 842274 - DNA, 15 bp, Homo sapiens
cccagctttgaatat

SEQ ID NO: 842275 - DNA, 15 bp, Homo sapiens
ccagctttgaatatc

SEQ ID NO: 842276 - DNA, 15 bp, Homo sapiens
cagctttgaatatct

SEQ ID NO: 842277 - DNA, 15 bp, Homo sapiens
agctttgaatatcta

SEQ ID NO: 842278 - DNA, 15 bp, Homo sapiens
gctttgaatatctaa

SEQ ID NO: 842279 - DNA, 15 bp, Homo sapiens
ctttgaatatctaag

SEQ ID NO: 842280 - DNA, 15 bp, Homo sapiens
tttgaatatctaagt

SEQ ID NO: 842281 - DNA, 15 bp, Homo sapiens
ttgaatatctaagtt

SEQ ID NO: 842282 - DNA, 15 bp, Homo sapiens
tgaatatctaagttt

SEQ ID NO: 842283 - DNA, 15 bp, Homo sapiens
gaatatctaagtttt

SEQ ID NO: 842284 - DNA, 15 bp, Homo sapiens
aatatctaagtttta

SEQ ID NO: 842285 - DNA, 15 bp, Homo sapiens
atatctaagttttaa

SEQ ID NO: 842286 - DNA, 15 bp, Homo sapiens
tatctaagttttaat

SEQ ID NO: 842287 - DNA, 15 bp, Homo sapiens
atctaagttttaatt

SEQ ID NO: 842288 - DNA, 15 bp, Homo sapiens
tctaagttttaattg

SEQ ID NO: 842289 - DNA, 15 bp, Homo sapiens
ctaagttttaattgg

SEQ ID NO: 842290 - DNA, 15 bp, Homo sapiens
taagttttaattgga

SEQ ID NO: 842291 - DNA, 15 bp, Homo sapiens
aagttttaattggat

SEQ ID NO: 842292 - DNA, 15 bp, Homo sapiens
agttttaattggatg

SEQ ID NO: 842293 - DNA, 15 bp, Homo sapiens
gttttaattggatgc

SEQ ID NO: 842294 - DNA, 15 bp, Homo sapiens
ttttaattggatgct

SEQ ID NO: 842295 - DNA, 15 bp, Homo sapiens
tttaattggatgctg

SEQ ID NO: 842296 - DNA, 15 bp, Homo sapiens
ttaattggatgctga

SEQ ID NO: 842297 - DNA, 15 bp, Homo sapiens
taattggatgctgag

SEQ ID NO: 842298 - DNA, 15 bp, Homo sapiens
aattggatgctgagg

SEQ ID NO: 842299 - DNA, 15 bp, Homo sapiens
attggatgctgaggg

SEQ ID NO: 842300 - DNA, 15 bp, Homo sapiens
ttggatgctgaggga

SEQ ID NO: 842301 - DNA, 15 bp, Homo sapiens
tggatgctgagggaa

SEQ ID NO: 842302 - DNA, 15 bp, Homo sapiens
ggatgctgagggaat

SEQ ID NO: 842303 - DNA, 15 bp, Homo sapiens
gatgctgagggaatg

SEQ ID NO: 842304 - DNA, 15 bp, Homo sapiens
atgctgagggaatga

SEQ ID NO: 842305 - DNA, 15 bp, Homo sapiens
tgctgagggaatgat

SEQ ID NO: 842306 - DNA, 15 bp, Homo sapiens
gctgagggaatgatt

SEQ ID NO: 842307 - DNA, 15 bp, Homo sapiens
ctgagggaatgatta

SEQ ID NO: 842308 - DNA, 15 bp, Homo sapiens
tgagggaatgattaa

SEQ ID NO: 842309 - DNA, 15 bp, Homo sapiens
gagggaatgattaat

SEQ ID NO: 842310 - DNA, 15 bp, Homo sapiens
agggaatgattaatc

SEQ ID NO: 842311 - DNA, 15 bp, Homo sapiens
gggaatgattaatca

SEQ ID NO: 842312 - DNA, 15 bp, Homo sapiens
ggaatgattaatcag

SEQ ID NO: 842313 - DNA, 15 bp, Homo sapiens
gaatgattaatcaga

SEQ ID NO: 842314 - DNA, 15 bp, Homo sapiens
aatgattaatcagag

SEQ ID NO: 842315 - DNA, 15 bp, Homo sapiens
atgattaatcagagt

SEQ ID NO: 842316 - DNA, 15 bp, Homo sapiens
tgattaatcagagta

SEQ ID NO: 842317 - DNA, 15 bp, Homo sapiens
gattaatcagagtag

SEQ ID NO: 842318 - DNA, 15 bp, Homo sapiens
attaatcagagtagg

SEQ ID NO: 842319 - DNA, 15 bp, Homo sapiens
ttaatcagagtaggg

SEQ ID NO: 842320 - DNA, 15 bp, Homo sapiens
taatcagagtagggc

SEQ ID NO: 842321 - DNA, 15 bp, Homo sapiens
aatcagagtagggct

SEQ ID NO: 842322 - DNA, 15 bp, Homo sapiens
atcagagtagggctg

SEQ ID NO: 842323 - DNA, 15 bp, Homo sapiens
tcagagtagggctgg

SEQ ID NO: 842324 - DNA, 15 bp, Homo sapiens
cagagtagggctggg

SEQ ID NO: 842325 - DNA, 15 bp, Homo sapiens
agagtagggctgggt

SEQ ID NO: 842326 - DNA, 15 bp, Homo sapiens
gagtagggctgggtt

SEQ ID NO: 842327 - DNA, 15 bp, Homo sapiens
agtagggctgggtta

SEQ ID NO: 842328 - DNA, 15 bp, Homo sapiens
gtagggctgggttaa

SEQ ID NO: 842329 - DNA, 15 bp, Homo sapiens
tagggctgggttaat

SEQ ID NO: 842330 - DNA, 15 bp, Homo sapiens
agggctgggttaatt

SEQ ID NO: 842331 - DNA, 15 bp, Homo sapiens
gggctgggttaattg

SEQ ID NO: 842332 - DNA, 15 bp, Homo sapiens
ggctgggttaattga

SEQ ID NO: 842333 - DNA, 15 bp, Homo sapiens
gctgggttaattgaa

SEQ ID NO: 842334 - DNA, 15 bp, Homo sapiens
ctgggttaattgaaa

SEQ ID NO: 842335 - DNA, 15 bp, Homo sapiens
tgggttaattgaaaa

SEQ ID NO: 842336 - DNA, 15 bp, Homo sapiens
gggttaattgaaaaa

SEQ ID NO: 842337 - DNA, 15 bp, Homo sapiens
ggttaattgaaaaat

SEQ ID NO: 842338 - DNA, 15 bp, Homo sapiens
gttaattgaaaaatg

SEQ ID NO: 842339 - DNA, 15 bp, Homo sapiens
ttaattgaaaaatgt

SEQ ID NO: 842340 - DNA, 15 bp, Homo sapiens
taattgaaaaatgtg

SEQ ID NO: 842341 - DNA, 15 bp, Homo sapiens
aattgaaaaatgtga

SEQ ID NO: 842342 - DNA, 15 bp, Homo sapiens
attgaaaaatgtgat

SEQ ID NO: 842343 - DNA, 15 bp, Homo sapiens
ttgaaaaatgtgata

SEQ ID NO: 842344 - DNA, 15 bp, Homo sapiens
tgaaaaatgtgatac

SEQ ID NO: 842345 - DNA, 15 bp, Homo sapiens
gaaaaatgtgataca

SEQ ID NO: 842346 - DNA, 15 bp, Homo sapiens
aaaaatgtgatacat

SEQ ID NO: 842347 - DNA, 15 bp, Homo sapiens
aaaatgtgatacatt

SEQ ID NO: 842348 - DNA, 15 bp, Homo sapiens
aaatgtgatacattt

SEQ ID NO: 842349 - DNA, 15 bp, Homo sapiens
aatgtgatacatttg

SEQ ID NO: 842350 - DNA, 15 bp, Homo sapiens
atgtgatacatttgt

SEQ ID NO: 842351 - DNA, 15 bp, Homo sapiens
tgtgatacatttgta

SEQ ID NO: 842352 - DNA, 15 bp, Homo sapiens
gtgatacatttgtat

SEQ ID NO: 842353 - DNA, 15 bp, Homo sapiens
tgatacatttgtatt

SEQ ID NO: 842354 - DNA, 15 bp, Homo sapiens
gatacatttgtattt

SEQ ID NO: 842355 - DNA, 15 bp, Homo sapiens
atacatttgtattta

SEQ ID NO: 842356 - DNA, 15 bp, Homo sapiens
tacatttgtatttat

SEQ ID NO: 842357 - DNA, 15 bp, Homo sapiens
acatttgtatttatg

SEQ ID NO: 842358 - DNA, 15 bp, Homo sapiens
catttgtatttatgg

SEQ ID NO: 842359 - DNA, 15 bp, Homo sapiens
atttgtatttatggc

SEQ ID NO: 842360 - DNA, 15 bp, Homo sapiens
tttgtatttatggcc

SEQ ID NO: 842361 - DNA, 15 bp, Homo sapiens
ttgtatttatggcca

SEQ ID NO: 842362 - DNA, 15 bp, Homo sapiens
tgtatttatggccag

SEQ ID NO: 842363 - DNA, 15 bp, Homo sapiens
gtatttatggccaga

SEQ ID NO: 842364 - DNA, 15 bp, Homo sapiens
tatttatggccagat

SEQ ID NO: 842365 - DNA, 15 bp, Homo sapiens
atttatggccagata

SEQ ID NO: 842366 - DNA, 15 bp, Homo sapiens
tttatggccagatag

SEQ ID NO: 842367 - DNA, 15 bp, Homo sapiens
ttatggccagataga

SEQ ID NO: 842368 - DNA, 15 bp, Homo sapiens
tatggccagatagag

SEQ ID NO: 842369 - DNA, 15 bp, Homo sapiens
atggccagatagaga

SEQ ID NO: 842370 - DNA, 15 bp, Homo sapiens
tggccagatagagaa

SEQ ID NO: 842371 - DNA, 15 bp, Homo sapiens
ggccagatagagaac

SEQ ID NO: 842372 - DNA, 15 bp, Homo sapiens
gccagatagagaaca

SEQ ID NO: 842373 - DNA, 15 bp, Homo sapiens
ccagatagagaacat

SEQ ID NO: 842374 - DNA, 15 bp, Homo sapiens
cagatagagaacatg

SEQ ID NO: 842375 - DNA, 15 bp, Homo sapiens
agatagagaacatga

SEQ ID NO: 842376 - DNA, 15 bp, Homo sapiens
gatagagaacatgaa

SEQ ID NO: 842377 - DNA, 15 bp, Homo sapiens
atagagaacatgaat

SEQ ID NO: 842378 - DNA, 15 bp, Homo sapiens
tagagaacatgaatc

SEQ ID NO: 842379 - DNA, 15 bp, Homo sapiens
agagaacatgaatct

SEQ ID NO: 842380 - DNA, 15 bp, Homo sapiens
gagaacatgaatctg

SEQ ID NO: 842381 - DNA, 15 bp, Homo sapiens
agaacatgaatctga

SEQ ID NO: 842382 - DNA, 15 bp, Homo sapiens
gaacatgaatctgaa

SEQ ID NO: 842383 - DNA, 15 bp, Homo sapiens
aacatgaatctgaat

SEQ ID NO: 842384 - DNA, 15 bp, Homo sapiens
acatgaatctgaatt

SEQ ID NO: 842385 - DNA, 15 bp, Homo sapiens
catgaatctgaattt

SEQ ID NO: 842386 - DNA, 15 bp, Homo sapiens
atgaatctgaatttg

SEQ ID NO: 842387 - DNA, 15 bp, Homo sapiens
tgaatctgaatttgc

SEQ ID NO: 842388 - DNA, 15 bp, Homo sapiens
gaatctgaatttgca

SEQ ID NO: 842389 - DNA, 15 bp, Homo sapiens
aatctgaatttgcag

SEQ ID NO: 842390 - DNA, 15 bp, Homo sapiens
atctgaatttgcaga

SEQ ID NO: 842391 - DNA, 15 bp, Homo sapiens
tctgaatttgcagaa

SEQ ID NO: 842392 - DNA, 15 bp, Homo sapiens
ctgaatttgcagaat

SEQ ID NO: 842393 - DNA, 15 bp, Homo sapiens
tgaatttgcagaatt

SEQ ID NO: 842394 - DNA, 15 bp, Homo sapiens
gaatttgcagaatta

SEQ ID NO: 842395 - DNA, 15 bp, Homo sapiens
aatttgcagaattat

SEQ ID NO: 842396 - DNA, 15 bp, Homo sapiens
atttgcagaattatc

SEQ ID NO: 842397 - DNA, 15 bp, Homo sapiens
tttgcagaattatct

SEQ ID NO: 842398 - DNA, 15 bp, Homo sapiens
ttgcagaattatctg

SEQ ID NO: 842399 - DNA, 15 bp, Homo sapiens
tgcagaattatctgg

SEQ ID NO: 842400 - DNA, 15 bp, Homo sapiens
gcagaattatctggc

SEQ ID NO: 842401 - DNA, 15 bp, Homo sapiens
cagaattatctggct

SEQ ID NO: 842402 - DNA, 15 bp, Homo sapiens
agaattatctggctt

SEQ ID NO: 842403 - DNA, 15 bp, Homo sapiens
gaattatctggctta

SEQ ID NO: 842404 - DNA, 15 bp, Homo sapiens
aattatctggcttaa

SEQ ID NO: 842405 - DNA, 15 bp, Homo sapiens
attatctggcttaac

SEQ ID NO: 842406 - DNA, 15 bp, Homo sapiens
ttatctggcttaaca

SEQ ID NO: 842407 - DNA, 15 bp, Homo sapiens
tatctggcttaacat

SEQ ID NO: 842408 - DNA, 15 bp, Homo sapiens
atctggcttaacatt

SEQ ID NO: 842409 - DNA, 15 bp, Homo sapiens
tctggcttaacattt

SEQ ID NO: 842410 - DNA, 15 bp, Homo sapiens
ctggcttaacatttt

SEQ ID NO: 842411 - DNA, 15 bp, Homo sapiens
tggcttaacattttt

SEQ ID NO: 842412 - DNA, 15 bp, Homo sapiens
ggcttaacatttttt

SEQ ID NO: 842413 - DNA, 15 bp, Homo sapiens
gcttaacattttttt

SEQ ID NO: 842414 - DNA, 15 bp, Homo sapiens
cttaacatttttttc

SEQ ID NO: 842415 - DNA, 15 bp, Homo sapiens
ttaacatttttttct

SEQ ID NO: 842416 - DNA, 15 bp, Homo sapiens
taacatttttttctt

SEQ ID NO: 842417 - DNA, 15 bp, Homo sapiens
aacatttttttcttt

SEQ ID NO: 842418 - DNA, 15 bp, Homo sapiens
acatttttttctttc

SEQ ID NO: 842419 - DNA, 15 bp, Homo sapiens
catttttttctttcc

SEQ ID NO: 842420 - DNA, 15 bp, Homo sapiens
atttttttctttcca

SEQ ID NO: 842421 - DNA, 15 bp, Homo sapiens
tttttttctttccag

SEQ ID NO: 842422 - DNA, 15 bp, Homo sapiens
ttttttctttccagt

SEQ ID NO: 842423 - DNA, 15 bp, Homo sapiens
tttttctttccagtt

SEQ ID NO: 842424 - DNA, 15 bp, Homo sapiens
ttttctttccagttt

SEQ ID NO: 842425 - DNA, 15 bp, Homo sapiens
tttctttccagtttt

SEQ ID NO: 842426 - DNA, 15 bp, Homo sapiens
ttctttccagttttc

SEQ ID NO: 842427 - DNA, 15 bp, Homo sapiens
tctttccagttttca

SEQ ID NO: 842428 - DNA, 15 bp, Homo sapiens
ctttccagttttcac

SEQ ID NO: 842429 - DNA, 15 bp, Homo sapiens
tttccagttttcact

SEQ ID NO: 842430 - DNA, 15 bp, Homo sapiens
ttccagttttcactg

SEQ ID NO: 842431 - DNA, 15 bp, Homo sapiens
tccagttttcactgt

SEQ ID NO: 842432 - DNA, 15 bp, Homo sapiens
ccagttttcactgta

SEQ ID NO: 842433 - DNA, 15 bp, Homo sapiens
cagttttcactgtat

SEQ ID NO: 842434 - DNA, 15 bp, Homo sapiens
agttttcactgtatc

SEQ ID NO: 842435 - DNA, 15 bp, Homo sapiens
gttttcactgtatcc

SEQ ID NO: 842436 - DNA, 15 bp, Homo sapiens
ttttcactgtatccc

SEQ ID NO: 842437 - DNA, 15 bp, Homo sapiens
tttcactgtatcccc

SEQ ID NO: 842438 - DNA, 15 bp, Homo sapiens
ttcactgtatccccc

SEQ ID NO: 842439 - DNA, 15 bp, Homo sapiens
tcactgtatccccca

SEQ ID NO: 842440 - DNA, 15 bp, Homo sapiens
cactgtatcccccat

SEQ ID NO: 842441 - DNA, 15 bp, Homo sapiens
actgtatcccccatg

SEQ ID NO: 842442 - DNA, 15 bp, Homo sapiens
ctgtatcccccatgt

SEQ ID NO: 842443 - DNA, 15 bp, Homo sapiens
tgtatcccccatgtt

SEQ ID NO: 842444 - DNA, 15 bp, Homo sapiens
gtatcccccatgttg

SEQ ID NO: 842445 - DNA, 15 bp, Homo sapiens
tatcccccatgttga

SEQ ID NO: 842446 - DNA, 15 bp, Homo sapiens
atcccccatgttgat

SEQ ID NO: 842447 - DNA, 15 bp, Homo sapiens
tcccccatgttgatt

SEQ ID NO: 842448 - DNA, 15 bp, Homo sapiens
cccccatgttgattc

SEQ ID NO: 842449 - DNA, 15 bp, Homo sapiens
ccccatgttgattca

SEQ ID NO: 842450 - DNA, 15 bp, Homo sapiens
cccatgttgattcaa

SEQ ID NO: 842451 - DNA, 15 bp, Homo sapiens
ccatgttgattcaat

SEQ ID NO: 842452 - DNA, 15 bp, Homo sapiens
catgttgattcaatt

SEQ ID NO: 842453 - DNA, 15 bp, Homo sapiens
atgttgattcaattt

SEQ ID NO: 842454 - DNA, 15 bp, Homo sapiens
tgttgattcaattta

SEQ ID NO: 842455 - DNA, 15 bp, Homo sapiens
gttgattcaatttaa

SEQ ID NO: 842456 - DNA, 15 bp, Homo sapiens
ttgattcaatttaaa

SEQ ID NO: 842457 - DNA, 15 bp, Homo sapiens
tgattcaatttaaaa

SEQ ID NO: 842458 - DNA, 15 bp, Homo sapiens
gattcaatttaaaaa

SEQ ID NO: 842459 - DNA, 15 bp, Homo sapiens
attcaatttaaaaaa

SEQ ID NO: 842460 - DNA, 15 bp, Homo sapiens
ttcaatttaaaaaat

SEQ ID NO: 842461 - DNA, 15 bp, Homo sapiens
tcaatttaaaaaata

SEQ ID NO: 842462 - DNA, 15 bp, Homo sapiens
caatttaaaaaatat

SEQ ID NO: 842463 - DNA, 15 bp, Homo sapiens
aatttaaaaaatata

SEQ ID NO: 842464 - DNA, 15 bp, Homo sapiens
atttaaaaaatatac

SEQ ID NO: 842465 - DNA, 15 bp, Homo sapiens
tttaaaaaatatacc

SEQ ID NO: 842466 - DNA, 15 bp, Homo sapiens
ttaaaaaatatacct

SEQ ID NO: 842467 - DNA, 15 bp, Homo sapiens
taaaaaatataccta

SEQ ID NO: 842468 - DNA, 15 bp, Homo sapiens
aaaaaatatacctat

SEQ ID NO: 842469 - DNA, 15 bp, Homo sapiens
aaaaatatacctatt

SEQ ID NO: 842470 - DNA, 15 bp, Homo sapiens
aaaatatacctattt

SEQ ID NO: 842471 - DNA, 15 bp, Homo sapiens
aaatatacctatttt

SEQ ID NO: 842472 - DNA, 15 bp, Homo sapiens
aatatacctatttta

SEQ ID NO: 842473 - DNA, 15 bp, Homo sapiens
atatacctattttac

SEQ ID NO: 842474 - DNA, 15 bp, Homo sapiens
tatacctattttact

SEQ ID NO: 842475 - DNA, 15 bp, Homo sapiens
atacctattttactt

SEQ ID NO: 842476 - DNA, 15 bp, Homo sapiens
tacctattttacttc

SEQ ID NO: 842477 - DNA, 15 bp, Homo sapiens
acctattttacttca

SEQ ID NO: 842478 - DNA, 15 bp, Homo sapiens
cctattttacttcaa

SEQ ID NO: 842479 - DNA, 15 bp, Homo sapiens
ctattttacttcaat

SEQ ID NO: 842480 - DNA, 15 bp, Homo sapiens
tattttacttcaatt

SEQ ID NO: 842481 - DNA, 15 bp, Homo sapiens
attttacttcaattc

SEQ ID NO: 842482 - DNA, 15 bp, Homo sapiens
ttttacttcaattca

SEQ ID NO: 842483 - DNA, 15 bp, Homo sapiens
tttacttcaattcaa

SEQ ID NO: 842484 - DNA, 15 bp, Homo sapiens
ttacttcaattcaac

SEQ ID NO: 842485 - DNA, 15 bp, Homo sapiens
tacttcaattcaaca

SEQ ID NO: 842486 - DNA, 15 bp, Homo sapiens
acttcaattcaacaa

SEQ ID NO: 842487 - DNA, 15 bp, Homo sapiens
cttcaattcaacaat

SEQ ID NO: 842488 - DNA, 15 bp, Homo sapiens
ttcaattcaacaatg

SEQ ID NO: 842489 - DNA, 15 bp, Homo sapiens
tcaattcaacaatgc

SEQ ID NO: 842490 - DNA, 15 bp, Homo sapiens
caattcaacaatgct

SEQ ID NO: 842491 - DNA, 15 bp, Homo sapiens
aattcaacaatgcta

SEQ ID NO: 842492 - DNA, 15 bp, Homo sapiens
attcaacaatgctat

SEQ ID NO: 842493 - DNA, 15 bp, Homo sapiens
ttcaacaatgctatg

SEQ ID NO: 842494 - DNA, 15 bp, Homo sapiens
tcaacaatgctatgc

SEQ ID NO: 842495 - DNA, 15 bp, Homo sapiens
caacaatgctatgcc

SEQ ID NO: 842496 - DNA, 15 bp, Homo sapiens
aacaatgctatgcca

SEQ ID NO: 842497 - DNA, 15 bp, Homo sapiens
acaatgctatgccag

SEQ ID NO: 842498 - DNA, 15 bp, Homo sapiens
caatgctatgccagt

SEQ ID NO: 842499 - DNA, 15 bp, Homo sapiens
aatgctatgccagta

SEQ ID NO: 842500 - DNA, 15 bp, Homo sapiens
atgctatgccagtac

SEQ ID NO: 842501 - DNA, 15 bp, Homo sapiens
tgctatgccagtaca

SEQ ID NO: 842502 - DNA, 15 bp, Homo sapiens
gctatgccagtacaa

SEQ ID NO: 842503 - DNA, 15 bp, Homo sapiens
ctatgccagtacaaa

SEQ ID NO: 842504 - DNA, 15 bp, Homo sapiens
tatgccagtacaaac

SEQ ID NO: 842505 - DNA, 15 bp, Homo sapiens
atgccagtacaaacc

SEQ ID NO: 842506 - DNA, 15 bp, Homo sapiens
tgccagtacaaaccc

SEQ ID NO: 842507 - DNA, 15 bp, Homo sapiens
gccagtacaaaccca

SEQ ID NO: 842508 - DNA, 15 bp, Homo sapiens
ccagtacaaacccat

SEQ ID NO: 842509 - DNA, 15 bp, Homo sapiens
cagtacaaacccata

SEQ ID NO: 842510 - DNA, 15 bp, Homo sapiens
agtacaaacccatac

SEQ ID NO: 842511 - DNA, 15 bp, Homo sapiens
gtacaaacccatacg

SEQ ID NO: 842512 - DNA, 15 bp, Homo sapiens
tacaaacccatacgt

SEQ ID NO: 842513 - DNA, 15 bp, Homo sapiens
acaaacccatacgtt

SEQ ID NO: 842514 - DNA, 15 bp, Homo sapiens
caaacccatacgttc

SEQ ID NO: 842515 - DNA, 15 bp, Homo sapiens
aaacccatacgttct

SEQ ID NO: 842516 - DNA, 15 bp, Homo sapiens
aacccatacgttcta

SEQ ID NO: 842517 - DNA, 15 bp, Homo sapiens
acccatacgttctat

SEQ ID NO: 842518 - DNA, 15 bp, Homo sapiens
cccatacgttctatt

SEQ ID NO: 842519 - DNA, 15 bp, Homo sapiens
ccatacgttctatta

SEQ ID NO: 842520 - DNA, 15 bp, Homo sapiens
catacgttctattat

SEQ ID NO: 842521 - DNA, 15 bp, Homo sapiens
atacgttctattatt

SEQ ID NO: 842522 - DNA, 15 bp, Homo sapiens
tacgttctattattt

SEQ ID NO: 842523 - DNA, 15 bp, Homo sapiens
acgttctattatttt

SEQ ID NO: 842524 - DNA, 15 bp, Homo sapiens
cgttctattattttt

SEQ ID NO: 842525 - DNA, 15 bp, Homo sapiens
gttctattatttttg

SEQ ID NO: 842526 - DNA, 15 bp, Homo sapiens
ttctattatttttgt

SEQ ID NO: 842527 - DNA, 15 bp, Homo sapiens
tctattatttttgtt

SEQ ID NO: 842528 - DNA, 15 bp, Homo sapiens
ctattatttttgttt

SEQ ID NO: 842529 - DNA, 15 bp, Homo sapiens
tattatttttgtttt

SEQ ID NO: 842530 - DNA, 15 bp, Homo sapiens
attatttttgttttg

SEQ ID NO: 842531 - DNA, 15 bp, Homo sapiens
ttatttttgttttgt

SEQ ID NO: 842532 - DNA, 15 bp, Homo sapiens
tatttttgttttgtt

SEQ ID NO: 842533 - DNA, 15 bp, Homo sapiens
atttttgttttgttt

SEQ ID NO: 842534 - DNA, 15 bp, Homo sapiens
tttttgttttgtttt

SEQ ID NO: 842535 - DNA, 15 bp, Homo sapiens
ttttgttttgttttg

SEQ ID NO: 842536 - DNA, 15 bp, Homo sapiens
tttgttttgttttgt

SEQ ID NO: 842537 - DNA, 15 bp, Homo sapiens
ttgttttgttttgtt

SEQ ID NO: 842538 - DNA, 15 bp, Homo sapiens
tgttttgttttgttt

SEQ ID NO: 842539 - DNA, 15 bp, Homo sapiens
gttttgttttgtttt

SEQ ID NO: 842540 - DNA, 15 bp, Homo sapiens
ttttgttttgttttt

SEQ ID NO: 842541 - DNA, 15 bp, Homo sapiens
tttgttttgtttttg

SEQ ID NO: 842542 - DNA, 15 bp, Homo sapiens
ttgttttgtttttgt

SEQ ID NO: 842543 - DNA, 15 bp, Homo sapiens
tgttttgtttttgta

SEQ ID NO: 842544 - DNA, 15 bp, Homo sapiens
gttttgtttttgtat

SEQ ID NO: 842545 - DNA, 15 bp, Homo sapiens
ttttgtttttgtatc

SEQ ID NO: 842546 - DNA, 15 bp, Homo sapiens
tttgtttttgtatct

SEQ ID NO: 842547 - DNA, 15 bp, Homo sapiens
ttgtttttgtatctc

SEQ ID NO: 842548 - DNA, 15 bp, Homo sapiens
tgtttttgtatctcc

SEQ ID NO: 842549 - DNA, 15 bp, Homo sapiens
gtttttgtatctcca

SEQ ID NO: 842550 - DNA, 15 bp, Homo sapiens
tttttgtatctccac

SEQ ID NO: 842551 - DNA, 15 bp, Homo sapiens
ttttgtatctccacc

SEQ ID NO: 842552 - DNA, 15 bp, Homo sapiens
tttgtatctccaccc

SEQ ID NO: 842553 - DNA, 15 bp, Homo sapiens
ttgtatctccaccct

SEQ ID NO: 842554 - DNA, 15 bp, Homo sapiens
tgtatctccaccctg

SEQ ID NO: 842555 - DNA, 15 bp, Homo sapiens
gtatctccaccctgt

SEQ ID NO: 842556 - DNA, 15 bp, Homo sapiens
tatctccaccctgtt

SEQ ID NO: 842557 - DNA, 15 bp, Homo sapiens
atctccaccctgtta

SEQ ID NO: 842558 - DNA, 15 bp, Homo sapiens
tctccaccctgttac

SEQ ID NO: 842559 - DNA, 15 bp, Homo sapiens
ctccaccctgttact

SEQ ID NO: 842560 - DNA, 15 bp, Homo sapiens
tccaccctgttactt

SEQ ID NO: 842561 - DNA, 15 bp, Homo sapiens
ccaccctgttacttc

SEQ ID NO: 842562 - DNA, 15 bp, Homo sapiens
caccctgttacttct

SEQ ID NO: 842563 - DNA, 15 bp, Homo sapiens
accctgttacttctt

SEQ ID NO: 842564 - DNA, 15 bp, Homo sapiens
ccctgttacttcttt

SEQ ID NO: 842565 - DNA, 15 bp, Homo sapiens
cctgttacttctttt

SEQ ID NO: 842566 - DNA, 15 bp, Homo sapiens
ctgttacttcttttc

SEQ ID NO: 842567 - DNA, 15 bp, Homo sapiens
tgttacttcttttct

SEQ ID NO: 842568 - DNA, 15 bp, Homo sapiens
gttacttcttttctt

SEQ ID NO: 842569 - DNA, 15 bp, Homo sapiens
ttacttcttttctta

SEQ ID NO: 842570 - DNA, 15 bp, Homo sapiens
tacttcttttcttat

SEQ ID NO: 842571 - DNA, 15 bp, Homo sapiens
acttcttttcttata

SEQ ID NO: 842572 - DNA, 15 bp, Homo sapiens
cttcttttcttataa

SEQ ID NO: 842573 - DNA, 15 bp, Homo sapiens
ttcttttcttataaa

SEQ ID NO: 842574 - DNA, 15 bp, Homo sapiens
tcttttcttataaaa

SEQ ID NO: 842575 - DNA, 15 bp, Homo sapiens
cttttcttataaaat

SEQ ID NO: 842576 - DNA, 15 bp, Homo sapiens
ttttcttataaaatt

SEQ ID NO: 842577 - DNA, 15 bp, Homo sapiens
tttcttataaaattg

SEQ ID NO: 842578 - DNA, 15 bp, Homo sapiens
ttcttataaaattgg

SEQ ID NO: 842579 - DNA, 15 bp, Homo sapiens
tcttataaaattggt

SEQ ID NO: 842580 - DNA, 15 bp, Homo sapiens
cttataaaattggta

SEQ ID NO: 842581 - DNA, 15 bp, Homo sapiens
ttataaaattggtat

SEQ ID NO: 842582 - DNA, 15 bp, Homo sapiens
tataaaattggtatt

SEQ ID NO: 842583 - DNA, 15 bp, Homo sapiens
ataaaattggtattt

SEQ ID NO: 842584 - DNA, 15 bp, Homo sapiens
taaaattggtatttg

SEQ ID NO: 842585 - DNA, 15 bp, Homo sapiens
aaaattggtatttga

SEQ ID NO: 842586 - DNA, 15 bp, Homo sapiens
aaattggtatttgaa

SEQ ID NO: 842587 - DNA, 15 bp, Homo sapiens
aattggtatttgaaa

SEQ ID NO: 842588 - DNA, 15 bp, Homo sapiens
attggtatttgaaat

SEQ ID NO: 842589 - DNA, 15 bp, Homo sapiens
ttggtatttgaaatt

SEQ ID NO: 842590 - DNA, 15 bp, Homo sapiens
tggtatttgaaattt

SEQ ID NO: 842591 - DNA, 15 bp, Homo sapiens
ggtatttgaaattta

SEQ ID NO: 842592 - DNA, 15 bp, Homo sapiens
gtatttgaaatttat

SEQ ID NO: 842593 - DNA, 15 bp, Homo sapiens
tatttgaaatttatt

SEQ ID NO: 842594 - DNA, 15 bp, Homo sapiens
atttgaaatttattg

SEQ ID NO: 842595 - DNA, 15 bp, Homo sapiens
tttgaaatttattga

SEQ ID NO: 842596 - DNA, 15 bp, Homo sapiens
ttgaaatttattgaa

SEQ ID NO: 842597 - DNA, 15 bp, Homo sapiens
tgaaatttattgaaa

SEQ ID NO: 842598 - DNA, 15 bp, Homo sapiens
gaaatttattgaaat

SEQ ID NO: 842599 - DNA, 15 bp, Homo sapiens
aaatttattgaaata

SEQ ID NO: 842600 - DNA, 15 bp, Homo sapiens
aatttattgaaatat

SEQ ID NO: 842601 - DNA, 15 bp, Homo sapiens
atttattgaaatatt

SEQ ID NO: 842602 - DNA, 15 bp, Homo sapiens
tttattgaaatattt

SEQ ID NO: 842603 - DNA, 15 bp, Homo sapiens
ttattgaaatatttt

SEQ ID NO: 842604 - DNA, 15 bp, Homo sapiens
tattgaaatattttg

SEQ ID NO: 842605 - DNA, 15 bp, Homo sapiens
attgaaatattttgg

SEQ ID NO: 842606 - DNA, 15 bp, Homo sapiens
ttgaaatattttgga

SEQ ID NO: 842607 - DNA, 15 bp, Homo sapiens
tgaaatattttggaa

SEQ ID NO: 842608 - DNA, 15 bp, Homo sapiens
gaaatattttggaag

SEQ ID NO: 842609 - DNA, 15 bp, Homo sapiens
aaatattttggaaga

SEQ ID NO: 842610 - DNA, 15 bp, Homo sapiens
aatattttggaagag

SEQ ID NO: 842611 - DNA, 15 bp, Homo sapiens
atattttggaagagt

SEQ ID NO: 842612 - DNA, 15 bp, Homo sapiens
tattttggaagagtg

SEQ ID NO: 842613 - DNA, 15 bp, Homo sapiens
attttggaagagtga

SEQ ID NO: 842614 - DNA, 15 bp, Homo sapiens
ttttggaagagtgac

SEQ ID NO: 842615 - DNA, 15 bp, Homo sapiens
tttggaagagtgaca

SEQ ID NO: 842616 - DNA, 15 bp, Homo sapiens
ttggaagagtgacat

SEQ ID NO: 842617 - DNA, 15 bp, Homo sapiens
tggaagagtgacata

SEQ ID NO: 842618 - DNA, 15 bp, Homo sapiens
ggaagagtgacatac

SEQ ID NO: 842619 - DNA, 15 bp, Homo sapiens
gaagagtgacatacc

SEQ ID NO: 842620 - DNA, 15 bp, Homo sapiens
aagagtgacatacca

SEQ ID NO: 842621 - DNA, 15 bp, Homo sapiens
agagtgacataccat

SEQ ID NO: 842622 - DNA, 15 bp, Homo sapiens
gagtgacataccatt

SEQ ID NO: 842623 - DNA, 15 bp, Homo sapiens
agtgacataccattt

SEQ ID NO: 842624 - DNA, 15 bp, Homo sapiens
gtgacataccatttt

SEQ ID NO: 842625 - DNA, 15 bp, Homo sapiens
tgacataccattttt

SEQ ID NO: 842626 - DNA, 15 bp, Homo sapiens
gacataccatttttg

SEQ ID NO: 842627 - DNA, 15 bp, Homo sapiens
acataccatttttgg

SEQ ID NO: 842628 - DNA, 15 bp, Homo sapiens
cataccatttttggt

SEQ ID NO: 842629 - DNA, 15 bp, Homo sapiens
ataccatttttggta

SEQ ID NO: 842630 - DNA, 15 bp, Homo sapiens
taccatttttggtac

SEQ ID NO: 842631 - DNA, 15 bp, Homo sapiens
accatttttggtact

SEQ ID NO: 842632 - DNA, 15 bp, Homo sapiens
ccatttttggtactt

SEQ ID NO: 842633 - DNA, 15 bp, Homo sapiens
catttttggtacttt

SEQ ID NO: 842634 - DNA, 15 bp, Homo sapiens
atttttggtactttg

SEQ ID NO: 842635 - DNA, 15 bp, Homo sapiens
tttttggtactttgt

SEQ ID NO: 842636 - DNA, 15 bp, Homo sapiens
ttttggtactttgta

SEQ ID NO: 842637 - DNA, 15 bp, Homo sapiens
tttggtactttgtac

SEQ ID NO: 842638 - DNA, 15 bp, Homo sapiens
ttggtactttgtacc

SEQ ID NO: 842639 - DNA, 15 bp, Homo sapiens
tggtactttgtacct

SEQ ID NO: 842640 - DNA, 15 bp, Homo sapiens
ggtactttgtacctc

SEQ ID NO: 842641 - DNA, 15 bp, Homo sapiens
gtactttgtacctct

SEQ ID NO: 842642 - DNA, 15 bp, Homo sapiens
tactttgtacctctg

SEQ ID NO: 842643 - DNA, 15 bp, Homo sapiens
actttgtacctctgc

SEQ ID NO: 842644 - DNA, 15 bp, Homo sapiens
ctttgtacctctgca

SEQ ID NO: 842645 - DNA, 15 bp, Homo sapiens
tttgtacctctgcac

SEQ ID NO: 842646 - DNA, 15 bp, Homo sapiens
ttgtacctctgcacc

SEQ ID NO: 842647 - DNA, 15 bp, Homo sapiens
tgtacctctgcaccc

SEQ ID NO: 842648 - DNA, 15 bp, Homo sapiens
gtacctctgcaccct

SEQ ID NO: 842649 - DNA, 15 bp, Homo sapiens
tacctctgcaccctt

SEQ ID NO: 842650 - DNA, 15 bp, Homo sapiens
acctctgcacccttg

SEQ ID NO: 842651 - DNA, 15 bp, Homo sapiens
cctctgcacccttgg

SEQ ID NO: 842652 - DNA, 15 bp, Homo sapiens
ctctgcacccttggg

SEQ ID NO: 842653 - DNA, 15 bp, Homo sapiens
tctgcacccttggga

SEQ ID NO: 842654 - DNA, 15 bp, Homo sapiens
ctgcacccttgggaa

SEQ ID NO: 842655 - DNA, 15 bp, Homo sapiens
tgcacccttgggaag

SEQ ID NO: 842656 - DNA, 15 bp, Homo sapiens
gcacccttgggaagt

SEQ ID NO: 842657 - DNA, 15 bp, Homo sapiens
cacccttgggaagtg

SEQ ID NO: 842658 - DNA, 15 bp, Homo sapiens
acccttgggaagtga

SEQ ID NO: 842659 - DNA, 15 bp, Homo sapiens
cccttgggaagtgac

SEQ ID NO: 842660 - DNA, 15 bp, Homo sapiens
ccttgggaagtgacc

SEQ ID NO: 842661 - DNA, 15 bp, Homo sapiens
cttgggaagtgaccc

SEQ ID NO: 842662 - DNA, 15 bp, Homo sapiens
ttgggaagtgaccct

SEQ ID NO: 842663 - DNA, 15 bp, Homo sapiens
tgggaagtgaccctg

SEQ ID NO: 842664 - DNA, 15 bp, Homo sapiens
gggaagtgaccctgg

SEQ ID NO: 842665 - DNA, 15 bp, Homo sapiens
ggaagtgaccctggc

SEQ ID NO: 842666 - DNA, 15 bp, Homo sapiens
gaagtgaccctggct

SEQ ID NO: 842667 - DNA, 15 bp, Homo sapiens
aagtgaccctggctt

SEQ ID NO: 842668 - DNA, 15 bp, Homo sapiens
agtgaccctggcttc

SEQ ID NO: 842669 - DNA, 15 bp, Homo sapiens
gtgaccctggcttca

SEQ ID NO: 842670 - DNA, 15 bp, Homo sapiens
tgaccctggcttcac

SEQ ID NO: 842671 - DNA, 15 bp, Homo sapiens
gaccctggcttcaca

SEQ ID NO: 842672 - DNA, 15 bp, Homo sapiens
accctggcttcacat

SEQ ID NO: 842673 - DNA, 15 bp, Homo sapiens
ccctggcttcacatt

SEQ ID NO: 842674 - DNA, 15 bp, Homo sapiens
cctggcttcacattt

SEQ ID NO: 842675 - DNA, 15 bp, Homo sapiens
ctggcttcacatttc

SEQ ID NO: 842676 - DNA, 15 bp, Homo sapiens
tggcttcacatttca

SEQ ID NO: 842677 - DNA, 15 bp, Homo sapiens
ggcttcacatttcat

SEQ ID NO: 842678 - DNA, 15 bp, Homo sapiens
gcttcacatttcata

SEQ ID NO: 842679 - DNA, 15 bp, Homo sapiens
cttcacatttcataa

SEQ ID NO: 842680 - DNA, 15 bp, Homo sapiens
ttcacatttcataac

SEQ ID NO: 842681 - DNA, 15 bp, Homo sapiens
tcacatttcataact

SEQ ID NO: 842682 - DNA, 15 bp, Homo sapiens
cacatttcataactg

SEQ ID NO: 842683 - DNA, 15 bp, Homo sapiens
acatttcataactgc

SEQ ID NO: 842684 - DNA, 15 bp, Homo sapiens
catttcataactgcc

SEQ ID NO: 842685 - DNA, 15 bp, Homo sapiens
atttcataactgcct

SEQ ID NO: 842686 - DNA, 15 bp, Homo sapiens
tttcataactgcctt

SEQ ID NO: 842687 - DNA, 15 bp, Homo sapiens
ttcataactgccttg

SEQ ID NO: 842688 - DNA, 15 bp, Homo sapiens
tcataactgccttgt

SEQ ID NO: 842689 - DNA, 15 bp, Homo sapiens
cataactgccttgtg

SEQ ID NO: 842690 - DNA, 15 bp, Homo sapiens
ataactgccttgtga

SEQ ID NO: 842691 - DNA, 15 bp, Homo sapiens
taactgccttgtgac

SEQ ID NO: 842692 - DNA, 15 bp, Homo sapiens
aactgccttgtgacc

SEQ ID NO: 842693 - DNA, 15 bp, Homo sapiens
actgccttgtgacca

SEQ ID NO: 842694 - DNA, 15 bp, Homo sapiens
ctgccttgtgaccat

SEQ ID NO: 842695 - DNA, 15 bp, Homo sapiens
tgccttgtgaccatg

SEQ ID NO: 842696 - DNA, 15 bp, Homo sapiens
gccttgtgaccatgg

SEQ ID NO: 842697 - DNA, 15 bp, Homo sapiens
ccttgtgaccatggc

SEQ ID NO: 842698 - DNA, 15 bp, Homo sapiens
cttgtgaccatggcc

SEQ ID NO: 842699 - DNA, 15 bp, Homo sapiens
ttgtgaccatggccc

SEQ ID NO: 842700 - DNA, 15 bp, Homo sapiens
tgtgaccatggccct

SEQ ID NO: 842701 - DNA, 15 bp, Homo sapiens
gtgaccatggccctc

SEQ ID NO: 842702 - DNA, 15 bp, Homo sapiens
tgaccatggccctca

SEQ ID NO: 842703 - DNA, 15 bp, Homo sapiens
gaccatggccctcaa

SEQ ID NO: 842704 - DNA, 15 bp, Homo sapiens
accatggccctcaag

SEQ ID NO: 842705 - DNA, 15 bp, Homo sapiens
ccatggccctcaagt

SEQ ID NO: 842706 - DNA, 15 bp, Homo sapiens
catggccctcaagtg

SEQ ID NO: 842707 - DNA, 15 bp, Homo sapiens
atggccctcaagtgg

SEQ ID NO: 842708 - DNA, 15 bp, Homo sapiens
tggccctcaagtggt

SEQ ID NO: 842709 - DNA, 15 bp, Homo sapiens
ggccctcaagtggtt

SEQ ID NO: 842710 - DNA, 15 bp, Homo sapiens
gccctcaagtggttg

SEQ ID NO: 842711 - DNA, 15 bp, Homo sapiens
ccctcaagtggttgc

SEQ ID NO: 842712 - DNA, 15 bp, Homo sapiens
cctcaagtggttgcc

SEQ ID NO: 842713 - DNA, 15 bp, Homo sapiens
ctcaagtggttgcca

SEQ ID NO: 842714 - DNA, 15 bp, Homo sapiens
tcaagtggttgccag

SEQ ID NO: 842715 - DNA, 15 bp, Homo sapiens
caagtggttgccaga

SEQ ID NO: 842716 - DNA, 15 bp, Homo sapiens
aagtggttgccagat

SEQ ID NO: 842717 - DNA, 15 bp, Homo sapiens
agtggttgccagatg

SEQ ID NO: 842718 - DNA, 15 bp, Homo sapiens
gtggttgccagatgg

SEQ ID NO: 842719 - DNA, 15 bp, Homo sapiens
tggttgccagatggt

SEQ ID NO: 842720 - DNA, 15 bp, Homo sapiens
ggttgccagatggtt

SEQ ID NO: 842721 - DNA, 15 bp, Homo sapiens
gttgccagatggttg

SEQ ID NO: 842722 - DNA, 15 bp, Homo sapiens
ttgccagatggttga

SEQ ID NO: 842723 - DNA, 15 bp, Homo sapiens
tgccagatggttgaa

SEQ ID NO: 842724 - DNA, 15 bp, Homo sapiens
gccagatggttgaag

SEQ ID NO: 842725 - DNA, 15 bp, Homo sapiens
ccagatggttgaaga

SEQ ID NO: 842726 - DNA, 15 bp, Homo sapiens
cagatggttgaagaa

SEQ ID NO: 842727 - DNA, 15 bp, Homo sapiens
agatggttgaagaac

SEQ ID NO: 842728 - DNA, 15 bp, Homo sapiens
gatggttgaagaaca

SEQ ID NO: 842729 - DNA, 15 bp, Homo sapiens
atggttgaagaacat

SEQ ID NO: 842730 - DNA, 15 bp, Homo sapiens
tggttgaagaacatt

SEQ ID NO: 842731 - DNA, 15 bp, Homo sapiens
ggttgaagaacatta

SEQ ID NO: 842732 - DNA, 15 bp, Homo sapiens
gttgaagaacattaa

SEQ ID NO: 842733 - DNA, 15 bp, Homo sapiens
ttgaagaacattaac

SEQ ID NO: 842734 - DNA, 15 bp, Homo sapiens
tgaagaacattaacc

SEQ ID NO: 842735 - DNA, 15 bp, Homo sapiens
gaagaacattaacct

SEQ ID NO: 842736 - DNA, 15 bp, Homo sapiens
aagaacattaaccta

SEQ ID NO: 842737 - DNA, 15 bp, Homo sapiens
agaacattaacctat

SEQ ID NO: 842738 - DNA, 15 bp, Homo sapiens
gaacattaacctatc

SEQ ID NO: 842739 - DNA, 15 bp, Homo sapiens
aacattaacctatct

SEQ ID NO: 842740 - DNA, 15 bp, Homo sapiens
acattaacctatctg

SEQ ID NO: 842741 - DNA, 15 bp, Homo sapiens
cattaacctatctgg

SEQ ID NO: 842742 - DNA, 15 bp, Homo sapiens
attaacctatctggc

SEQ ID NO: 842743 - DNA, 15 bp, Homo sapiens
ttaacctatctggct

SEQ ID NO: 842744 - DNA, 15 bp, Homo sapiens
taacctatctggctc

SEQ ID NO: 842745 - DNA, 15 bp, Homo sapiens
aacctatctggctca

SEQ ID NO: 842746 - DNA, 15 bp, Homo sapiens
acctatctggctcaa

SEQ ID NO: 842747 - DNA, 15 bp, Homo sapiens
cctatctggctcaat

SEQ ID NO: 842748 - DNA, 15 bp, Homo sapiens
ctatctggctcaatt

SEQ ID NO: 842749 - DNA, 15 bp, Homo sapiens
tatctggctcaattt

SEQ ID NO: 842750 - DNA, 15 bp, Homo sapiens
atctggctcaatttt

SEQ ID NO: 842751 - DNA, 15 bp, Homo sapiens
tctggctcaattttg

SEQ ID NO: 842752 - DNA, 15 bp, Homo sapiens
ctggctcaattttgt

SEQ ID NO: 842753 - DNA, 15 bp, Homo sapiens
tggctcaattttgtg

SEQ ID NO: 842754 - DNA, 15 bp, Homo sapiens
ggctcaattttgtga

SEQ ID NO: 842755 - DNA, 15 bp, Homo sapiens
gctcaattttgtgac

SEQ ID NO: 842756 - DNA, 15 bp, Homo sapiens
ctcaattttgtgacc

SEQ ID NO: 842757 - DNA, 15 bp, Homo sapiens
tcaattttgtgacca

SEQ ID NO: 842758 - DNA, 15 bp, Homo sapiens
caattttgtgaccat

SEQ ID NO: 842759 - DNA, 15 bp, Homo sapiens
aattttgtgaccatg

SEQ ID NO: 842760 - DNA, 15 bp, Homo sapiens
attttgtgaccatgg

SEQ ID NO: 842761 - DNA, 15 bp, Homo sapiens
ttttgtgaccatgga

SEQ ID NO: 842762 - DNA, 15 bp, Homo sapiens
tttgtgaccatggat

SEQ ID NO: 842763 - DNA, 15 bp, Homo sapiens
ttgtgaccatggatt

SEQ ID NO: 842764 - DNA, 15 bp, Homo sapiens
tgtgaccatggattg

SEQ ID NO: 842765 - DNA, 15 bp, Homo sapiens
gtgaccatggattga

SEQ ID NO: 842766 - DNA, 15 bp, Homo sapiens
tgaccatggattgaa

SEQ ID NO: 842767 - DNA, 15 bp, Homo sapiens
gaccatggattgaat

SEQ ID NO: 842768 - DNA, 15 bp, Homo sapiens
accatggattgaatc

SEQ ID NO: 842769 - DNA, 15 bp, Homo sapiens
ccatggattgaatcc

SEQ ID NO: 842770 - DNA, 15 bp, Homo sapiens
catggattgaatcct

SEQ ID NO: 842771 - DNA, 15 bp, Homo sapiens
atggattgaatcctc

SEQ ID NO: 842772 - DNA, 15 bp, Homo sapiens
tggattgaatcctct

SEQ ID NO: 842773 - DNA, 15 bp, Homo sapiens
ggattgaatcctcta

SEQ ID NO: 842774 - DNA, 15 bp, Homo sapiens
gattgaatcctctac

SEQ ID NO: 842775 - DNA, 15 bp, Homo sapiens
attgaatcctctaca

SEQ ID NO: 842776 - DNA, 15 bp, Homo sapiens
ttgaatcctctacat

SEQ ID NO: 842777 - DNA, 15 bp, Homo sapiens
tgaatcctctacata

SEQ ID NO: 842778 - DNA, 15 bp, Homo sapiens
gaatcctctacataa

SEQ ID NO: 842779 - DNA, 15 bp, Homo sapiens
aatcctctacataac

SEQ ID NO: 842780 - DNA, 15 bp, Homo sapiens
atcctctacataact

SEQ ID NO: 842781 - DNA, 15 bp, Homo sapiens
tcctctacataactg

SEQ ID NO: 842782 - DNA, 15 bp, Homo sapiens
cctctacataactgc

SEQ ID NO: 842783 - DNA, 15 bp, Homo sapiens
ctctacataactgca

SEQ ID NO: 842784 - DNA, 15 bp, Homo sapiens
tctacataactgcag

SEQ ID NO: 842785 - DNA, 15 bp, Homo sapiens
ctacataactgcagt

SEQ ID NO: 842786 - DNA, 15 bp, Homo sapiens
tacataactgcagtg

SEQ ID NO: 842787 - DNA, 15 bp, Homo sapiens
acataactgcagtgt

SEQ ID NO: 842788 - DNA, 15 bp, Homo sapiens
cataactgcagtgtg

SEQ ID NO: 842789 - DNA, 15 bp, Homo sapiens
ataactgcagtgtgc

SEQ ID NO: 842790 - DNA, 15 bp, Homo sapiens
taactgcagtgtgca

SEQ ID NO: 842791 - DNA, 15 bp, Homo sapiens
aactgcagtgtgcaa

SEQ ID NO: 842792 - DNA, 15 bp, Homo sapiens
actgcagtgtgcaaa

SEQ ID NO: 842793 - DNA, 15 bp, Homo sapiens
ctgcagtgtgcaaac

SEQ ID NO: 842794 - DNA, 15 bp, Homo sapiens
tgcagtgtgcaaacc

SEQ ID NO: 842795 - DNA, 15 bp, Homo sapiens
gcagtgtgcaaacca

SEQ ID NO: 842796 - DNA, 15 bp, Homo sapiens
cagtgtgcaaaccac

SEQ ID NO: 842797 - DNA, 15 bp, Homo sapiens
agtgtgcaaaccaca

SEQ ID NO: 842798 - DNA, 15 bp, Homo sapiens
gtgtgcaaaccacac

SEQ ID NO: 842799 - DNA, 15 bp, Homo sapiens
tgtgcaaaccacaca

SEQ ID NO: 842800 - DNA, 15 bp, Homo sapiens
gtgcaaaccacacat

SEQ ID NO: 842801 - DNA, 15 bp, Homo sapiens
tgcaaaccacacatc

SEQ ID NO: 842802 - DNA, 15 bp, Homo sapiens
gcaaaccacacatcc

SEQ ID NO: 842803 - DNA, 15 bp, Homo sapiens
caaaccacacatccg

SEQ ID NO: 842804 - DNA, 15 bp, Homo sapiens
aaaccacacatccgt

SEQ ID NO: 842805 - DNA, 15 bp, Homo sapiens
aaccacacatccgtt

SEQ ID NO: 842806 - DNA, 15 bp, Homo sapiens
accacacatccgttc

SEQ ID NO: 842807 - DNA, 15 bp, Homo sapiens
ccacacatccgttcc

SEQ ID NO: 842808 - DNA, 15 bp, Homo sapiens
cacacatccgttcca

SEQ ID NO: 842809 - DNA, 15 bp, Homo sapiens
acacatccgttccaa

SEQ ID NO: 842810 - DNA, 15 bp, Homo sapiens
cacatccgttccaag

SEQ ID NO: 842811 - DNA, 15 bp, Homo sapiens
acatccgttccaaga

SEQ ID NO: 842812 - DNA, 15 bp, Homo sapiens
catccgttccaagat

SEQ ID NO: 842813 - DNA, 15 bp, Homo sapiens
atccgttccaagatt

SEQ ID NO: 842814 - DNA, 15 bp, Homo sapiens
tccgttccaagattg

SEQ ID NO: 842815 - DNA, 15 bp, Homo sapiens
ccgttccaagattgt

SEQ ID NO: 842816 - DNA, 15 bp, Homo sapiens
cgttccaagattgta

SEQ ID NO: 842817 - DNA, 15 bp, Homo sapiens
gttccaagattgtag

SEQ ID NO: 842818 - DNA, 15 bp, Homo sapiens
ttccaagattgtagt

SEQ ID NO: 842819 - DNA, 15 bp, Homo sapiens
tccaagattgtagtc

SEQ ID NO: 842820 - DNA, 15 bp, Homo sapiens
ccaagattgtagtca

SEQ ID NO: 842821 - DNA, 15 bp, Homo sapiens
caagattgtagtcag

SEQ ID NO: 842822 - DNA, 15 bp, Homo sapiens
aagattgtagtcagg

SEQ ID NO: 842823 - DNA, 15 bp, Homo sapiens
agattgtagtcagga

SEQ ID NO: 842824 - DNA, 15 bp, Homo sapiens
gattgtagtcaggat

SEQ ID NO: 842825 - DNA, 15 bp, Homo sapiens
attgtagtcaggata

SEQ ID NO: 842826 - DNA, 15 bp, Homo sapiens
ttgtagtcaggatat

SEQ ID NO: 842827 - DNA, 15 bp, Homo sapiens
tgtagtcaggatatg

SEQ ID NO: 842828 - DNA, 15 bp, Homo sapiens
gtagtcaggatatga

SEQ ID NO: 842829 - DNA, 15 bp, Homo sapiens
tagtcaggatatgaa

SEQ ID NO: 842830 - DNA, 15 bp, Homo sapiens
agtcaggatatgaac

SEQ ID NO: 842831 - DNA, 15 bp, Homo sapiens
gtcaggatatgaact

SEQ ID NO: 842832 - DNA, 15 bp, Homo sapiens
tcaggatatgaactt

SEQ ID NO: 842833 - DNA, 15 bp, Homo sapiens
caggatatgaacttt

SEQ ID NO: 842834 - DNA, 15 bp, Homo sapiens
aggatatgaactttt

SEQ ID NO: 842835 - DNA, 15 bp, Homo sapiens
ggatatgaacttttt

SEQ ID NO: 842836 - DNA, 15 bp, Homo sapiens
gatatgaacttttta

SEQ ID NO: 842837 - DNA, 15 bp, Homo sapiens
atatgaactttttaa

SEQ ID NO: 842838 - DNA, 15 bp, Homo sapiens
tatgaactttttaag

SEQ ID NO: 842839 - DNA, 15 bp, Homo sapiens
atgaactttttaaga

SEQ ID NO: 842840 - DNA, 15 bp, Homo sapiens
tgaactttttaagaa

SEQ ID NO: 842841 - DNA, 15 bp, Homo sapiens
gaactttttaagaat

SEQ ID NO: 842842 - DNA, 15 bp, Homo sapiens
aactttttaagaata

SEQ ID NO: 842843 - DNA, 15 bp, Homo sapiens
actttttaagaataa

SEQ ID NO: 842844 - DNA, 15 bp, Homo sapiens
ctttttaagaataaa

SEQ ID NO: 842845 - DNA, 15 bp, Homo sapiens
tttttaagaataaaa

SEQ ID NO: 842846 - DNA, 15 bp, Homo sapiens
ttttaagaataaaac

SEQ ID NO: 842847 - DNA, 15 bp, Homo sapiens
tttaagaataaaact

SEQ ID NO: 842848 - DNA, 15 bp, Homo sapiens
ttaagaataaaactt

SEQ ID NO: 842849 - DNA, 15 bp, Homo sapiens
taagaataaaacttc

SEQ ID NO: 842850 - DNA, 15 bp, Homo sapiens
aagaataaaacttct

SEQ ID NO: 842851 - DNA, 15 bp, Homo sapiens
agaataaaacttctt

SEQ ID NO: 842852 - DNA, 15 bp, Homo sapiens
gaataaaacttcttc

SEQ ID NO: 842853 - DNA, 15 bp, Homo sapiens
aataaaacttcttcc

SEQ ID NO: 842854 - DNA, 15 bp, Homo sapiens
ataaaacttcttccc

SEQ ID NO: 842855 - DNA, 15 bp, Homo sapiens
taaaacttcttccct

SEQ ID NO: 842856 - DNA, 15 bp, Homo sapiens
aaaacttcttccctt

SEQ ID NO: 842857 - DNA, 15 bp, Homo sapiens
aaacttcttcccttc

SEQ ID NO: 842858 - DNA, 15 bp, Homo sapiens
aacttcttcccttct

SEQ ID NO: 842859 - DNA, 15 bp, Homo sapiens
acttcttcccttctg

SEQ ID NO: 842860 - DNA, 15 bp, Homo sapiens
cttcttcccttctga

SEQ ID NO: 842861 - DNA, 15 bp, Homo sapiens
ttcttcccttctgat

SEQ ID NO: 842862 - DNA, 15 bp, Homo sapiens
tcttcccttctgatc

SEQ ID NO: 842863 - DNA, 15 bp, Homo sapiens
cttcccttctgatct

SEQ ID NO: 842864 - DNA, 15 bp, Homo sapiens
ttcccttctgatctg

SEQ ID NO: 842865 - DNA, 15 bp, Homo sapiens
tcccttctgatctgg

SEQ ID NO: 842866 - DNA, 15 bp, Homo sapiens
cccttctgatctggg

SEQ ID NO: 842867 - DNA, 15 bp, Homo sapiens
ccttctgatctgggc

SEQ ID NO: 842868 - DNA, 15 bp, Homo sapiens
cttctgatctgggcc

SEQ ID NO: 842869 - DNA, 15 bp, Homo sapiens
ttctgatctgggcct

SEQ ID NO: 842870 - DNA, 15 bp, Homo sapiens
tctgatctgggcctg

SEQ ID NO: 842871 - DNA, 15 bp, Homo sapiens
ctgatctgggcctgg

SEQ ID NO: 842872 - DNA, 15 bp, Homo sapiens
tgatctgggcctggt

SEQ ID NO: 842873 - DNA, 15 bp, Homo sapiens
gatctgggcctggta

SEQ ID NO: 842874 - DNA, 15 bp, Homo sapiens
atctgggcctggtat

SEQ ID NO: 842875 - DNA, 15 bp, Homo sapiens
tctgggcctggtatg

SEQ ID NO: 842876 - DNA, 15 bp, Homo sapiens
ctgggcctggtatgt

SEQ ID NO: 842877 - DNA, 15 bp, Homo sapiens
tgggcctggtatgtg

SEQ ID NO: 842878 - DNA, 15 bp, Homo sapiens
gggcctggtatgtgg

SEQ ID NO: 842879 - DNA, 15 bp, Homo sapiens
ggcctggtatgtggt

SEQ ID NO: 842880 - DNA, 15 bp, Homo sapiens
gcctggtatgtggtc

SEQ ID NO: 842881 - DNA, 15 bp, Homo sapiens
cctggtatgtggtcc

SEQ ID NO: 842882 - DNA, 15 bp, Homo sapiens
ctggtatgtggtcct

SEQ ID NO: 842883 - DNA, 15 bp, Homo sapiens
tggtatgtggtccta

SEQ ID NO: 842884 - DNA, 15 bp, Homo sapiens
ggtatgtggtcctac

SEQ ID NO: 842885 - DNA, 15 bp, Homo sapiens
gtatgtggtcctact

SEQ ID NO: 842886 - DNA, 15 bp, Homo sapiens
tatgtggtcctacta

SEQ ID NO: 842887 - DNA, 15 bp, Homo sapiens
atgtggtcctactag

SEQ ID NO: 842888 - DNA, 15 bp, Homo sapiens
tgtggtcctactaga

SEQ ID NO: 842889 - DNA, 15 bp, Homo sapiens
gtggtcctactagaa

SEQ ID NO: 842890 - DNA, 15 bp, Homo sapiens
tggtcctactagaac

SEQ ID NO: 842891 - DNA, 15 bp, Homo sapiens
ggtcctactagaacc

SEQ ID NO: 842892 - DNA, 15 bp, Homo sapiens
gtcctactagaacca

SEQ ID NO: 842893 - DNA, 15 bp, Homo sapiens
tcctactagaaccac

SEQ ID NO: 842894 - DNA, 15 bp, Homo sapiens
cctactagaaccaca

SEQ ID NO: 842895 - DNA, 15 bp, Homo sapiens
ctactagaaccacat

SEQ ID NO: 842896 - DNA, 15 bp, Homo sapiens
tactagaaccacatc

SEQ ID NO: 842897 - DNA, 15 bp, Homo sapiens
actagaaccacatca

SEQ ID NO: 842898 - DNA, 15 bp, Homo sapiens
ctagaaccacatcac

SEQ ID NO: 842899 - DNA, 15 bp, Homo sapiens
tagaaccacatcacc

SEQ ID NO: 842900 - DNA, 15 bp, Homo sapiens
agaaccacatcacct

SEQ ID NO: 842901 - DNA, 15 bp, Homo sapiens
gaaccacatcaccta

SEQ ID NO: 842902 - DNA, 15 bp, Homo sapiens
aaccacatcacctac

SEQ ID NO: 842903 - DNA, 15 bp, Homo sapiens
accacatcacctact

SEQ ID NO: 842904 - DNA, 15 bp, Homo sapiens
ccacatcacctactc

SEQ ID NO: 842905 - DNA, 15 bp, Homo sapiens
cacatcacctactct

SEQ ID NO: 842906 - DNA, 15 bp, Homo sapiens
acatcacctactctt

SEQ ID NO: 842907 - DNA, 15 bp, Homo sapiens
catcacctactcttg

SEQ ID NO: 842908 - DNA, 15 bp, Homo sapiens
atcacctactcttgg

SEQ ID NO: 842909 - DNA, 15 bp, Homo sapiens
tcacctactcttggt

SEQ ID NO: 842910 - DNA, 15 bp, Homo sapiens
cacctactcttggtg

SEQ ID NO: 842911 - DNA, 15 bp, Homo sapiens
acctactcttggtgc

SEQ ID NO: 842912 - DNA, 15 bp, Homo sapiens
cctactcttggtgct

SEQ ID NO: 842913 - DNA, 15 bp, Homo sapiens
ctactcttggtgcta

SEQ ID NO: 842914 - DNA, 15 bp, Homo sapiens
tactcttggtgctaa

SEQ ID NO: 842915 - DNA, 15 bp, Homo sapiens
actcttggtgctaac

SEQ ID NO: 842916 - DNA, 15 bp, Homo sapiens
ctcttggtgctaaca

SEQ ID NO: 842917 - DNA, 15 bp, Homo sapiens
tcttggtgctaacaa

SEQ ID NO: 842918 - DNA, 15 bp, Homo sapiens
cttggtgctaacaat

SEQ ID NO: 842919 - DNA, 15 bp, Homo sapiens
ttggtgctaacaatt

SEQ ID NO: 842920 - DNA, 15 bp, Homo sapiens
tggtgctaacaattt

SEQ ID NO: 842921 - DNA, 15 bp, Homo sapiens
ggtgctaacaatttg

SEQ ID NO: 842922 - DNA, 15 bp, Homo sapiens
gtgctaacaatttgt

SEQ ID NO: 842923 - DNA, 15 bp, Homo sapiens
tgctaacaatttgtg

SEQ ID NO: 842924 - DNA, 15 bp, Homo sapiens
gctaacaatttgtgg

SEQ ID NO: 842925 - DNA, 15 bp, Homo sapiens
ctaacaatttgtggc

SEQ ID NO: 842926 - DNA, 15 bp, Homo sapiens
taacaatttgtggca

SEQ ID NO: 842927 - DNA, 15 bp, Homo sapiens
aacaatttgtggcac

SEQ ID NO: 842928 - DNA, 15 bp, Homo sapiens
acaatttgtggcacc

SEQ ID NO: 842929 - DNA, 15 bp, Homo sapiens
caatttgtggcacca

SEQ ID NO: 842930 - DNA, 15 bp, Homo sapiens
aatttgtggcaccaa

SEQ ID NO: 842931 - DNA, 15 bp, Homo sapiens
atttgtggcaccaag

SEQ ID NO: 842932 - DNA, 15 bp, Homo sapiens
tttgtggcaccaagt

SEQ ID NO: 842933 - DNA, 15 bp, Homo sapiens
ttgtggcaccaagtt

SEQ ID NO: 842934 - DNA, 15 bp, Homo sapiens
tgtggcaccaagttg

SEQ ID NO: 842935 - DNA, 15 bp, Homo sapiens
gtggcaccaagttgt

SEQ ID NO: 842936 - DNA, 15 bp, Homo sapiens
tggcaccaagttgtt

SEQ ID NO: 842937 - DNA, 15 bp, Homo sapiens
ggcaccaagttgttc

SEQ ID NO: 842938 - DNA, 15 bp, Homo sapiens
gcaccaagttgttca

SEQ ID NO: 842939 - DNA, 15 bp, Homo sapiens
caccaagttgttcaa

SEQ ID NO: 842940 - DNA, 15 bp, Homo sapiens
accaagttgttcaag

SEQ ID NO: 842941 - DNA, 15 bp, Homo sapiens
ccaagttgttcaagt

SEQ ID NO: 842942 - DNA, 15 bp, Homo sapiens
caagttgttcaagtt

SEQ ID NO: 842943 - DNA, 15 bp, Homo sapiens
aagttgttcaagttt

SEQ ID NO: 842944 - DNA, 15 bp, Homo sapiens
agttgttcaagtttc

SEQ ID NO: 842945 - DNA, 15 bp, Homo sapiens
gttgttcaagtttca

SEQ ID NO: 842946 - DNA, 15 bp, Homo sapiens
ttgttcaagtttcac

SEQ ID NO: 842947 - DNA, 15 bp, Homo sapiens
tgttcaagtttcacc

SEQ ID NO: 842948 - DNA, 15 bp, Homo sapiens
gttcaagtttcaccc

SEQ ID NO: 842949 - DNA, 15 bp, Homo sapiens
ttcaagtttcaccca

SEQ ID NO: 842950 - DNA, 15 bp, Homo sapiens
tcaagtttcacccat

SEQ ID NO: 842951 - DNA, 15 bp, Homo sapiens
caagtttcacccatt

SEQ ID NO: 842952 - DNA, 15 bp, Homo sapiens
aagtttcacccatta

SEQ ID NO: 842953 - DNA, 15 bp, Homo sapiens
agtttcacccattaa

SEQ ID NO: 842954 - DNA, 15 bp, Homo sapiens
gtttcacccattaaa

SEQ ID NO: 842955 - DNA, 15 bp, Homo sapiens
tttcacccattaaag

SEQ ID NO: 842956 - DNA, 15 bp, Homo sapiens
ttcacccattaaaga

SEQ ID NO: 842957 - DNA, 15 bp, Homo sapiens
tcacccattaaagaa

SEQ ID NO: 842958 - DNA, 15 bp, Homo sapiens
cacccattaaagaaa

SEQ ID NO: 842959 - DNA, 15 bp, Homo sapiens
acccattaaagaaat

SEQ ID NO: 842960 - DNA, 15 bp, Homo sapiens
cccattaaagaaatt

SEQ ID NO: 842961 - DNA, 15 bp, Homo sapiens
ccattaaagaaattc

SEQ ID NO: 842962 - DNA, 15 bp, Homo sapiens
cattaaagaaattcc

SEQ ID NO: 842963 - DNA, 15 bp, Homo sapiens
attaaagaaattccc

SEQ ID NO: 842964 - DNA, 15 bp, Homo sapiens
ttaaagaaattcccc

SEQ ID NO: 842965 - DNA, 15 bp, Homo sapiens
taaagaaattccccg

SEQ ID NO: 842966 - DNA, 15 bp, Homo sapiens
aaagaaattccccga

SEQ ID NO: 842967 - DNA, 15 bp, Homo sapiens
aagaaattccccgac

SEQ ID NO: 842968 - DNA, 15 bp, Homo sapiens
agaaattccccgacc

SEQ ID NO: 842969 - DNA, 15 bp, Homo sapiens
gaaattccccgacct

SEQ ID NO: 842970 - DNA, 15 bp, Homo sapiens
aaattccccgacctt

SEQ ID NO: 842971 - DNA, 15 bp, Homo sapiens
aattccccgaccttg

SEQ ID NO: 842972 - DNA, 15 bp, Homo sapiens
attccccgaccttgc

SEQ ID NO: 842973 - DNA, 15 bp, Homo sapiens
ttccccgaccttgcc

SEQ ID NO: 842974 - DNA, 15 bp, Homo sapiens
tccccgaccttgcct

SEQ ID NO: 842975 - DNA, 15 bp, Homo sapiens
ccccgaccttgcctt

SEQ ID NO: 842976 - DNA, 15 bp, Homo sapiens
cccgaccttgccttc

SEQ ID NO: 842977 - DNA, 15 bp, Homo sapiens
ccgaccttgccttct

SEQ ID NO: 842978 - DNA, 15 bp, Homo sapiens
cgaccttgccttctc

SEQ ID NO: 842979 - DNA, 15 bp, Homo sapiens
gaccttgccttctcc

SEQ ID NO: 842980 - DNA, 15 bp, Homo sapiens
accttgccttctcct

SEQ ID NO: 842981 - DNA, 15 bp, Homo sapiens
ccttgccttctcctc

SEQ ID NO: 842982 - DNA, 15 bp, Homo sapiens
cttgccttctcctca

SEQ ID NO: 842983 - DNA, 15 bp, Homo sapiens
ttgccttctcctcag

SEQ ID NO: 842984 - DNA, 15 bp, Homo sapiens
tgccttctcctcagg

SEQ ID NO: 842985 - DNA, 15 bp, Homo sapiens
gccttctcctcaggt

SEQ ID NO: 842986 - DNA, 15 bp, Homo sapiens
ccttctcctcaggta

SEQ ID NO: 842987 - DNA, 15 bp, Homo sapiens
cttctcctcaggtaa

SEQ ID NO: 842988 - DNA, 15 bp, Homo sapiens
ttctcctcaggtaac

SEQ ID NO: 842989 - DNA, 15 bp, Homo sapiens
tctcctcaggtaact

SEQ ID NO: 842990 - DNA, 15 bp, Homo sapiens
ctcctcaggtaacta

SEQ ID NO: 842991 - DNA, 15 bp, Homo sapiens
tcctcaggtaactac

SEQ ID NO: 842992 - DNA, 15 bp, Homo sapiens
cctcaggtaactacc

SEQ ID NO: 842993 - DNA, 15 bp, Homo sapiens
ctcaggtaactaccc

SEQ ID NO: 842994 - DNA, 15 bp, Homo sapiens
tcaggtaactacccc

SEQ ID NO: 842995 - DNA, 15 bp, Homo sapiens
caggtaactacccca

SEQ ID NO: 842996 - DNA, 15 bp, Homo sapiens
aggtaactaccccat

SEQ ID NO: 842997 - DNA, 15 bp, Homo sapiens
ggtaactaccccatt

SEQ ID NO: 842998 - DNA, 15 bp, Homo sapiens
gtaactaccccattc

SEQ ID NO: 842999 - DNA, 15 bp, Homo sapiens
taactaccccattct

SEQ ID NO: 843000 - DNA, 15 bp, Homo sapiens
aactaccccattcta

SEQ ID NO: 843001 - DNA, 15 bp, Homo sapiens
actaccccattctat

SEQ ID NO: 843002 - DNA, 15 bp, Homo sapiens
ctaccccattctatt

SEQ ID NO: 843003 - DNA, 15 bp, Homo sapiens
taccccattctattt

SEQ ID NO: 843004 - DNA, 15 bp, Homo sapiens
accccattctatttt

SEQ ID NO: 843005 - DNA, 15 bp, Homo sapiens
ccccattctattttt

SEQ ID NO: 843006 - DNA, 15 bp, Homo sapiens
cccattctatttttt

SEQ ID NO: 843007 - DNA, 15 bp, Homo sapiens
ccattctattttttc

SEQ ID NO: 843008 - DNA, 15 bp, Homo sapiens
cattctattttttct

SEQ ID NO: 843009 - DNA, 15 bp, Homo sapiens
attctattttttctt

SEQ ID NO: 843010 - DNA, 15 bp, Homo sapiens
ttctattttttcttt

SEQ ID NO: 843011 - DNA, 15 bp, Homo sapiens
tctattttttctttc

SEQ ID NO: 843012 - DNA, 15 bp, Homo sapiens
ctattttttctttca

SEQ ID NO: 843013 - DNA, 15 bp, Homo sapiens
tattttttctttcat

SEQ ID NO: 843014 - DNA, 15 bp, Homo sapiens
attttttctttcata

SEQ ID NO: 843015 - DNA, 15 bp, Homo sapiens
ttttttctttcatag

SEQ ID NO: 843016 - DNA, 15 bp, Homo sapiens
tttttctttcatagc

SEQ ID NO: 843017 - DNA, 15 bp, Homo sapiens
ttttctttcatagct

SEQ ID NO: 843018 - DNA, 15 bp, Homo sapiens
tttctttcatagcta

SEQ ID NO: 843019 - DNA, 15 bp, Homo sapiens
ttctttcatagctaa

SEQ ID NO: 843020 - DNA, 15 bp, Homo sapiens
tctttcatagctaac

SEQ ID NO: 843021 - DNA, 15 bp, Homo sapiens
ctttcatagctaaca

SEQ ID NO: 843022 - DNA, 15 bp, Homo sapiens
tttcatagctaacat

SEQ ID NO: 843023 - DNA, 15 bp, Homo sapiens
ttcatagctaacatt

SEQ ID NO: 843024 - DNA, 15 bp, Homo sapiens
tcatagctaacattc

SEQ ID NO: 843025 - DNA, 15 bp, Homo sapiens
catagctaacattct

SEQ ID NO: 843026 - DNA, 15 bp, Homo sapiens
atagctaacattctc

SEQ ID NO: 843027 - DNA, 15 bp, Homo sapiens
tagctaacattctct

SEQ ID NO: 843028 - DNA, 15 bp, Homo sapiens
agctaacattctctg

SEQ ID NO: 843029 - DNA, 15 bp, Homo sapiens
gctaacattctctgc

SEQ ID NO: 843030 - DNA, 15 bp, Homo sapiens
ctaacattctctgct

SEQ ID NO: 843031 - DNA, 15 bp, Homo sapiens
taacattctctgctc

SEQ ID NO: 843032 - DNA, 15 bp, Homo sapiens
aacattctctgctct

SEQ ID NO: 843033 - DNA, 15 bp, Homo sapiens
acattctctgctctc

SEQ ID NO: 843034 - DNA, 15 bp, Homo sapiens
cattctctgctctcc

SEQ ID NO: 843035 - DNA, 15 bp, Homo sapiens
attctctgctctcct

SEQ ID NO: 843036 - DNA, 15 bp, Homo sapiens
ttctctgctctcctg

SEQ ID NO: 843037 - DNA, 15 bp, Homo sapiens
tctctgctctcctgg

SEQ ID NO: 843038 - DNA, 15 bp, Homo sapiens
ctctgctctcctggt

SEQ ID NO: 843039 - DNA, 15 bp, Homo sapiens
tctgctctcctggtc

SEQ ID NO: 843040 - DNA, 15 bp, Homo sapiens
ctgctctcctggtct

SEQ ID NO: 843041 - DNA, 15 bp, Homo sapiens
tgctctcctggtctc

SEQ ID NO: 843042 - DNA, 15 bp, Homo sapiens
gctctcctggtctct

SEQ ID NO: 843043 - DNA, 15 bp, Homo sapiens
ctctcctggtctctc

SEQ ID NO: 843044 - DNA, 15 bp, Homo sapiens
tctcctggtctctct

SEQ ID NO: 843045 - DNA, 15 bp, Homo sapiens
ctcctggtctctcta

SEQ ID NO: 843046 - DNA, 15 bp, Homo sapiens
tcctggtctctctac

SEQ ID NO: 843047 - DNA, 15 bp, Homo sapiens
cctggtctctctact

SEQ ID NO: 843048 - DNA, 15 bp, Homo sapiens
ctggtctctctactt

SEQ ID NO: 843049 - DNA, 15 bp, Homo sapiens
tggtctctctacttc

SEQ ID NO: 843050 - DNA, 15 bp, Homo sapiens
ggtctctctacttca

SEQ ID NO: 843051 - DNA, 15 bp, Homo sapiens
gtctctctacttcac

SEQ ID NO: 843052 - DNA, 15 bp, Homo sapiens
tctctctacttcact

SEQ ID NO: 843053 - DNA, 15 bp, Homo sapiens
ctctctacttcactt

SEQ ID NO: 843054 - DNA, 15 bp, Homo sapiens
tctctacttcacttt

SEQ ID NO: 843055 - DNA, 15 bp, Homo sapiens
ctctacttcactttc

SEQ ID NO: 843056 - DNA, 15 bp, Homo sapiens
tctacttcactttca

SEQ ID NO: 843057 - DNA, 15 bp, Homo sapiens
ctacttcactttcat

SEQ ID NO: 843058 - DNA, 15 bp, Homo sapiens
tacttcactttcatt

SEQ ID NO: 843059 - DNA, 15 bp, Homo sapiens
acttcactttcattt

SEQ ID NO: 843060 - DNA, 15 bp, Homo sapiens
cttcactttcattta

SEQ ID NO: 843061 - DNA, 15 bp, Homo sapiens
ttcactttcatttac

SEQ ID NO: 843062 - DNA, 15 bp, Homo sapiens
tcactttcatttaca

SEQ ID NO: 843063 - DNA, 15 bp, Homo sapiens
cactttcatttacat

SEQ ID NO: 843064 - DNA, 15 bp, Homo sapiens
actttcatttacatc

SEQ ID NO: 843065 - DNA, 15 bp, Homo sapiens
ctttcatttacatct

SEQ ID NO: 843066 - DNA, 15 bp, Homo sapiens
tttcatttacatctc

SEQ ID NO: 843067 - DNA, 15 bp, Homo sapiens
ttcatttacatctca

SEQ ID NO: 843068 - DNA, 15 bp, Homo sapiens
tcatttacatctcag

SEQ ID NO: 843069 - DNA, 15 bp, Homo sapiens
catttacatctcagc

SEQ ID NO: 843070 - DNA, 15 bp, Homo sapiens
atttacatctcagct

SEQ ID NO: 843071 - DNA, 15 bp, Homo sapiens
tttacatctcagctc

SEQ ID NO: 843072 - DNA, 15 bp, Homo sapiens
ttacatctcagctcc

SEQ ID NO: 843073 - DNA, 15 bp, Homo sapiens
tacatctcagctcct

SEQ ID NO: 843074 - DNA, 15 bp, Homo sapiens
acatctcagctcctg

SEQ ID NO: 843075 - DNA, 15 bp, Homo sapiens
catctcagctcctga

SEQ ID NO: 843076 - DNA, 15 bp, Homo sapiens
atctcagctcctgaa

SEQ ID NO: 843077 - DNA, 15 bp, Homo sapiens
tctcagctcctgaag

SEQ ID NO: 843078 - DNA, 15 bp, Homo sapiens
ctcagctcctgaagt

SEQ ID NO: 843079 - DNA, 15 bp, Homo sapiens
tcagctcctgaagta

SEQ ID NO: 843080 - DNA, 15 bp, Homo sapiens
cagctcctgaagtat

SEQ ID NO: 843081 - DNA, 15 bp, Homo sapiens
agctcctgaagtatg

SEQ ID NO: 843082 - DNA, 15 bp, Homo sapiens
gctcctgaagtatgg

SEQ ID NO: 843083 - DNA, 15 bp, Homo sapiens
ctcctgaagtatggt

SEQ ID NO: 843084 - DNA, 15 bp, Homo sapiens
tcctgaagtatggtt

SEQ ID NO: 843085 - DNA, 15 bp, Homo sapiens
cctgaagtatggttt

SEQ ID NO: 843086 - DNA, 15 bp, Homo sapiens
ctgaagtatggtttc

SEQ ID NO: 843087 - DNA, 15 bp, Homo sapiens
tgaagtatggtttcc

SEQ ID NO: 843088 - DNA, 15 bp, Homo sapiens
gaagtatggtttcca

SEQ ID NO: 843089 - DNA, 15 bp, Homo sapiens
aagtatggtttccac

SEQ ID NO: 843090 - DNA, 15 bp, Homo sapiens
agtatggtttccacc

SEQ ID NO: 843091 - DNA, 15 bp, Homo sapiens
gtatggtttccacca

SEQ ID NO: 843092 - DNA, 15 bp, Homo sapiens
tatggtttccaccat

SEQ ID NO: 843093 - DNA, 15 bp, Homo sapiens
atggtttccaccatg

SEQ ID NO: 843094 - DNA, 15 bp, Homo sapiens
tggtttccaccatgt

SEQ ID NO: 843095 - DNA, 15 bp, Homo sapiens
ggtttccaccatgtt

SEQ ID NO: 843096 - DNA, 15 bp, Homo sapiens
gtttccaccatgttc

SEQ ID NO: 843097 - DNA, 15 bp, Homo sapiens
tttccaccatgttcc

SEQ ID NO: 843098 - DNA, 15 bp, Homo sapiens
ttccaccatgttcct

SEQ ID NO: 843099 - DNA, 15 bp, Homo sapiens
tccaccatgttccta

SEQ ID NO: 843100 - DNA, 15 bp, Homo sapiens
ccaccatgttcctaa

SEQ ID NO: 843101 - DNA, 15 bp, Homo sapiens
caccatgttcctaaa

SEQ ID NO: 843102 - DNA, 15 bp, Homo sapiens
accatgttcctaaaa

SEQ ID NO: 843103 - DNA, 15 bp, Homo sapiens
ccatgttcctaaaac

SEQ ID NO: 843104 - DNA, 15 bp, Homo sapiens
catgttcctaaaact

SEQ ID NO: 843105 - DNA, 15 bp, Homo sapiens
atgttcctaaaacta

SEQ ID NO: 843106 - DNA, 15 bp, Homo sapiens
tgttcctaaaactac

SEQ ID NO: 843107 - DNA, 15 bp, Homo sapiens
gttcctaaaactaca

SEQ ID NO: 843108 - DNA, 15 bp, Homo sapiens
ttcctaaaactacat

SEQ ID NO: 843109 - DNA, 15 bp, Homo sapiens
tcctaaaactacatt

SEQ ID NO: 843110 - DNA, 15 bp, Homo sapiens
cctaaaactacattg

SEQ ID NO: 843111 - DNA, 15 bp, Homo sapiens
ctaaaactacattgc

SEQ ID NO: 843112 - DNA, 15 bp, Homo sapiens
taaaactacattgcc

SEQ ID NO: 843113 - DNA, 15 bp, Homo sapiens
aaaactacattgccc

SEQ ID NO: 843114 - DNA, 15 bp, Homo sapiens
aaactacattgccca

SEQ ID NO: 843115 - DNA, 15 bp, Homo sapiens
aactacattgcccag

SEQ ID NO: 843116 - DNA, 15 bp, Homo sapiens
actacattgcccagg

SEQ ID NO: 843117 - DNA, 15 bp, Homo sapiens
ctacattgcccaggg

SEQ ID NO: 843118 - DNA, 15 bp, Homo sapiens
tacattgcccagggt

SEQ ID NO: 843119 - DNA, 15 bp, Homo sapiens
acattgcccagggtc

SEQ ID NO: 843120 - DNA, 15 bp, Homo sapiens
cattgcccagggtca

SEQ ID NO: 843121 - DNA, 15 bp, Homo sapiens
attgcccagggtcac

SEQ ID NO: 843122 - DNA, 15 bp, Homo sapiens
ttgcccagggtcact

SEQ ID NO: 843123 - DNA, 15 bp, Homo sapiens
tgcccagggtcacta

SEQ ID NO: 843124 - DNA, 15 bp, Homo sapiens
gcccagggtcactag

SEQ ID NO: 843125 - DNA, 15 bp, Homo sapiens
cccagggtcactaga

SEQ ID NO: 843126 - DNA, 15 bp, Homo sapiens
ccagggtcactagag

SEQ ID NO: 843127 - DNA, 15 bp, Homo sapiens
cagggtcactagaga

SEQ ID NO: 843128 - DNA, 15 bp, Homo sapiens
agggtcactagagac

SEQ ID NO: 843129 - DNA, 15 bp, Homo sapiens
gggtcactagagacc

SEQ ID NO: 843130 - DNA, 15 bp, Homo sapiens
ggtcactagagacct

SEQ ID NO: 843131 - DNA, 15 bp, Homo sapiens
gtcactagagacctc

SEQ ID NO: 843132 - DNA, 15 bp, Homo sapiens
tcactagagacctct

SEQ ID NO: 843133 - DNA, 15 bp, Homo sapiens
cactagagacctctt

SEQ ID NO: 843134 - DNA, 15 bp, Homo sapiens
actagagacctctta

SEQ ID NO: 843135 - DNA, 15 bp, Homo sapiens
ctagagacctcttat

SEQ ID NO: 843136 - DNA, 15 bp, Homo sapiens
tagagacctcttatg

SEQ ID NO: 843137 - DNA, 15 bp, Homo sapiens
agagacctcttatga

SEQ ID NO: 843138 - DNA, 15 bp, Homo sapiens
gagacctcttatgaa

SEQ ID NO: 843139 - DNA, 15 bp, Homo sapiens
agacctcttatgaaa

SEQ ID NO: 843140 - DNA, 15 bp, Homo sapiens
gacctcttatgaaat

SEQ ID NO: 843141 - DNA, 15 bp, Homo sapiens
acctcttatgaaata

SEQ ID NO: 843142 - DNA, 15 bp, Homo sapiens
cctcttatgaaatat

SEQ ID NO: 843143 - DNA, 15 bp, Homo sapiens
ctcttatgaaatata

SEQ ID NO: 843144 - DNA, 15 bp, Homo sapiens
tcttatgaaatataa

SEQ ID NO: 843145 - DNA, 15 bp, Homo sapiens
cttatgaaatataac

SEQ ID NO: 843146 - DNA, 15 bp, Homo sapiens
ttatgaaatataaca

SEQ ID NO: 843147 - DNA, 15 bp, Homo sapiens
tatgaaatataacaa

SEQ ID NO: 843148 - DNA, 15 bp, Homo sapiens
atgaaatataacaac

SEQ ID NO: 843149 - DNA, 15 bp, Homo sapiens
tgaaatataacaaca

SEQ ID NO: 843150 - DNA, 15 bp, Homo sapiens
gaaatataacaacac

SEQ ID NO: 843151 - DNA, 15 bp, Homo sapiens
aaatataacaacacc

SEQ ID NO: 843152 - DNA, 15 bp, Homo sapiens
aatataacaacacct

SEQ ID NO: 843153 - DNA, 15 bp, Homo sapiens
atataacaacacctt

SEQ ID NO: 843154 - DNA, 15 bp, Homo sapiens
tataacaacaccttt

SEQ ID NO: 843155 - DNA, 15 bp, Homo sapiens
ataacaacacctttc

SEQ ID NO: 843156 - DNA, 15 bp, Homo sapiens
taacaacacctttct

SEQ ID NO: 843157 - DNA, 15 bp, Homo sapiens
aacaacacctttcta

SEQ ID NO: 843158 - DNA, 15 bp, Homo sapiens
acaacacctttctac

SEQ ID NO: 843159 - DNA, 15 bp, Homo sapiens
caacacctttctaca

SEQ ID NO: 843160 - DNA, 15 bp, Homo sapiens
aacacctttctacat

SEQ ID NO: 843161 - DNA, 15 bp, Homo sapiens
acacctttctacatt

SEQ ID NO: 843162 - DNA, 15 bp, Homo sapiens
cacctttctacatta

SEQ ID NO: 843163 - DNA, 15 bp, Homo sapiens
acctttctacattac

SEQ ID NO: 843164 - DNA, 15 bp, Homo sapiens
cctttctacattact

SEQ ID NO: 843165 - DNA, 15 bp, Homo sapiens
ctttctacattactt

SEQ ID NO: 843166 - DNA, 15 bp, Homo sapiens
tttctacattacttc

SEQ ID NO: 843167 - DNA, 15 bp, Homo sapiens
ttctacattacttcc

SEQ ID NO: 843168 - DNA, 15 bp, Homo sapiens
tctacattacttccg

SEQ ID NO: 843169 - DNA, 15 bp, Homo sapiens
ctacattacttccgt

SEQ ID NO: 843170 - DNA, 15 bp, Homo sapiens
tacattacttccgtg

SEQ ID NO: 843171 - DNA, 15 bp, Homo sapiens
acattacttccgtgt

SEQ ID NO: 843172 - DNA, 15 bp, Homo sapiens
cattacttccgtgtg

SEQ ID NO: 843173 - DNA, 15 bp, Homo sapiens
attacttccgtgtgg

SEQ ID NO: 843174 - DNA, 15 bp, Homo sapiens
ttacttccgtgtgga

SEQ ID NO: 843175 - DNA, 15 bp, Homo sapiens
tacttccgtgtggac

SEQ ID NO: 843176 - DNA, 15 bp, Homo sapiens
acttccgtgtggacc

SEQ ID NO: 843177 - DNA, 15 bp, Homo sapiens
cttccgtgtggacca

SEQ ID NO: 843178 - DNA, 15 bp, Homo sapiens
ttccgtgtggaccac

SEQ ID NO: 843179 - DNA, 15 bp, Homo sapiens
tccgtgtggaccact

SEQ ID NO: 843180 - DNA, 15 bp, Homo sapiens
ccgtgtggaccactt

SEQ ID NO: 843181 - DNA, 15 bp, Homo sapiens
cgtgtggaccacttt

SEQ ID NO: 843182 - DNA, 15 bp, Homo sapiens
gtgtggaccactttt

SEQ ID NO: 843183 - DNA, 15 bp, Homo sapiens
tgtggaccacttttt

SEQ ID NO: 843184 - DNA, 15 bp, Homo sapiens
gtggaccactttttc

SEQ ID NO: 843185 - DNA, 15 bp, Homo sapiens
tggaccactttttca

SEQ ID NO: 843186 - DNA, 15 bp, Homo sapiens
ggaccactttttcac

SEQ ID NO: 843187 - DNA, 15 bp, Homo sapiens
gaccactttttcaca

SEQ ID NO: 843188 - DNA, 15 bp, Homo sapiens
accactttttcacat

SEQ ID NO: 843189 - DNA, 15 bp, Homo sapiens
ccactttttcacatt

SEQ ID NO: 843190 - DNA, 15 bp, Homo sapiens
cactttttcacattg

SEQ ID NO: 843191 - DNA, 15 bp, Homo sapiens
actttttcacattga

SEQ ID NO: 843192 - DNA, 15 bp, Homo sapiens
ctttttcacattgaa

SEQ ID NO: 843193 - DNA, 15 bp, Homo sapiens
tttttcacattgaac

SEQ ID NO: 843194 - DNA, 15 bp, Homo sapiens
ttttcacattgaacc

SEQ ID NO: 843195 - DNA, 15 bp, Homo sapiens
tttcacattgaaccc

SEQ ID NO: 843196 - DNA, 15 bp, Homo sapiens
ttcacattgaaccca

SEQ ID NO: 843197 - DNA, 15 bp, Homo sapiens
tcacattgaacccat

SEQ ID NO: 843198 - DNA, 15 bp, Homo sapiens
cacattgaacccatt

SEQ ID NO: 843199 - DNA, 15 bp, Homo sapiens
acattgaacccattt

SEQ ID NO: 843200 - DNA, 15 bp, Homo sapiens
cattgaacccatttt

SEQ ID NO: 843201 - DNA, 15 bp, Homo sapiens
attgaacccattttg

SEQ ID NO: 843202 - DNA, 15 bp, Homo sapiens
ttgaacccattttgt

SEQ ID NO: 843203 - DNA, 15 bp, Homo sapiens
tgaacccattttgtt

SEQ ID NO: 843204 - DNA, 15 bp, Homo sapiens
gaacccattttgttg

SEQ ID NO: 843205 - DNA, 15 bp, Homo sapiens
aacccattttgttgg

SEQ ID NO: 843206 - DNA, 15 bp, Homo sapiens
acccattttgttggt

SEQ ID NO: 843207 - DNA, 15 bp, Homo sapiens
cccattttgttggtt

SEQ ID NO: 843208 - DNA, 15 bp, Homo sapiens
ccattttgttggttt

SEQ ID NO: 843209 - DNA, 15 bp, Homo sapiens
cattttgttggttta

SEQ ID NO: 843210 - DNA, 15 bp, Homo sapiens
attttgttggtttat

SEQ ID NO: 843211 - DNA, 15 bp, Homo sapiens
ttttgttggtttatg

SEQ ID NO: 843212 - DNA, 15 bp, Homo sapiens
tttgttggtttatgt

SEQ ID NO: 843213 - DNA, 15 bp, Homo sapiens
ttgttggtttatgta

SEQ ID NO: 843214 - DNA, 15 bp, Homo sapiens
tgttggtttatgtac

SEQ ID NO: 843215 - DNA, 15 bp, Homo sapiens
gttggtttatgtaca

SEQ ID NO: 843216 - DNA, 15 bp, Homo sapiens
ttggtttatgtacac

SEQ ID NO: 843217 - DNA, 15 bp, Homo sapiens
tggtttatgtacaca

SEQ ID NO: 843218 - DNA, 15 bp, Homo sapiens
ggtttatgtacacac

SEQ ID NO: 843219 - DNA, 15 bp, Homo sapiens
gtttatgtacacacc

SEQ ID NO: 843220 - DNA, 15 bp, Homo sapiens
tttatgtacacaccc

SEQ ID NO: 843221 - DNA, 15 bp, Homo sapiens
ttatgtacacacccc

SEQ ID NO: 843222 - DNA, 15 bp, Homo sapiens
tatgtacacacccct

SEQ ID NO: 843223 - DNA, 15 bp, Homo sapiens
atgtacacacccctt

SEQ ID NO: 843224 - DNA, 15 bp, Homo sapiens
tgtacacaccccttc

SEQ ID NO: 843225 - DNA, 15 bp, Homo sapiens
gtacacaccccttcc

SEQ ID NO: 843226 - DNA, 15 bp, Homo sapiens
tacacaccccttcct

SEQ ID NO: 843227 - DNA, 15 bp, Homo sapiens
acacaccccttcctt

SEQ ID NO: 843228 - DNA, 15 bp, Homo sapiens
cacaccccttccttg

SEQ ID NO: 843229 - DNA, 15 bp, Homo sapiens
acaccccttccttgg

SEQ ID NO: 843230 - DNA, 15 bp, Homo sapiens
caccccttccttggc

SEQ ID NO: 843231 - DNA, 15 bp, Homo sapiens
accccttccttggct

SEQ ID NO: 843232 - DNA, 15 bp, Homo sapiens
ccccttccttggctt

SEQ ID NO: 843233 - DNA, 15 bp, Homo sapiens
cccttccttggcttt

SEQ ID NO: 843234 - DNA, 15 bp, Homo sapiens
ccttccttggctttc

SEQ ID NO: 843235 - DNA, 15 bp, Homo sapiens
cttccttggctttcc

SEQ ID NO: 843236 - DNA, 15 bp, Homo sapiens
ttccttggctttccc

SEQ ID NO: 843237 - DNA, 15 bp, Homo sapiens
tccttggctttccca

SEQ ID NO: 843238 - DNA, 15 bp, Homo sapiens
ccttggctttcccat

SEQ ID NO: 843239 - DNA, 15 bp, Homo sapiens
cttggctttcccatc

SEQ ID NO: 843240 - DNA, 15 bp, Homo sapiens
ttggctttcccatct

SEQ ID NO: 843241 - DNA, 15 bp, Homo sapiens
tggctttcccatctg

SEQ ID NO: 843242 - DNA, 15 bp, Homo sapiens
ggctttcccatctga

SEQ ID NO: 843243 - DNA, 15 bp, Homo sapiens
gctttcccatctgat

SEQ ID NO: 843244 - DNA, 15 bp, Homo sapiens
ctttcccatctgatc

SEQ ID NO: 843245 - DNA, 15 bp, Homo sapiens
tttcccatctgatcc

SEQ ID NO: 843246 - DNA, 15 bp, Homo sapiens
ttcccatctgatcca

SEQ ID NO: 843247 - DNA, 15 bp, Homo sapiens
tcccatctgatccat

SEQ ID NO: 843248 - DNA, 15 bp, Homo sapiens
cccatctgatccatt

SEQ ID NO: 843249 - DNA, 15 bp, Homo sapiens
ccatctgatccattt

SEQ ID NO: 843250 - DNA, 15 bp, Homo sapiens
catctgatccatttc

SEQ ID NO: 843251 - DNA, 15 bp, Homo sapiens
atctgatccatttct

SEQ ID NO: 843252 - DNA, 15 bp, Homo sapiens
tctgatccatttctc

SEQ ID NO: 843253 - DNA, 15 bp, Homo sapiens
ctgatccatttctcc

SEQ ID NO: 843254 - DNA, 15 bp, Homo sapiens
tgatccatttctcct

SEQ ID NO: 843255 - DNA, 15 bp, Homo sapiens
gatccatttctcctt

SEQ ID NO: 843256 - DNA, 15 bp, Homo sapiens
atccatttctccttt

SEQ ID NO: 843257 - DNA, 15 bp, Homo sapiens
tccatttctcctttg

SEQ ID NO: 843258 - DNA, 15 bp, Homo sapiens
ccatttctcctttga

SEQ ID NO: 843259 - DNA, 15 bp, Homo sapiens
catttctcctttgat

SEQ ID NO: 843260 - DNA, 15 bp, Homo sapiens
atttctcctttgatg

SEQ ID NO: 843261 - DNA, 15 bp, Homo sapiens
tttctcctttgatgg

SEQ ID NO: 843262 - DNA, 15 bp, Homo sapiens
ttctcctttgatgga

SEQ ID NO: 843263 - DNA, 15 bp, Homo sapiens
tctcctttgatggag

SEQ ID NO: 843264 - DNA, 15 bp, Homo sapiens
ctcctttgatggaga

SEQ ID NO: 843265 - DNA, 15 bp, Homo sapiens
tcctttgatggagaa

SEQ ID NO: 843266 - DNA, 15 bp, Homo sapiens
cctttgatggagaag

SEQ ID NO: 843267 - DNA, 15 bp, Homo sapiens
ctttgatggagaagg

SEQ ID NO: 843268 - DNA, 15 bp, Homo sapiens
tttgatggagaaggt

SEQ ID NO: 843269 - DNA, 15 bp, Homo sapiens
ttgatggagaaggtg

SEQ ID NO: 843270 - DNA, 15 bp, Homo sapiens
tgatggagaaggtga

SEQ ID NO: 843271 - DNA, 15 bp, Homo sapiens
gatggagaaggtgag

SEQ ID NO: 843272 - DNA, 15 bp, Homo sapiens
atggagaaggtgagt

SEQ ID NO: 843273 - DNA, 15 bp, Homo sapiens
tggagaaggtgagtc

SEQ ID NO: 843274 - DNA, 15 bp, Homo sapiens
ggagaaggtgagtct

SEQ ID NO: 843275 - DNA, 15 bp, Homo sapiens
gagaaggtgagtctg

SEQ ID NO: 843276 - DNA, 15 bp, Homo sapiens
agaaggtgagtctgc

SEQ ID NO: 843277 - DNA, 15 bp, Homo sapiens
gaaggtgagtctgct

SEQ ID NO: 843278 - DNA, 15 bp, Homo sapiens
aaggtgagtctgctc

SEQ ID NO: 843279 - DNA, 15 bp, Homo sapiens
aggtgagtctgctcc

SEQ ID NO: 843280 - DNA, 15 bp, Homo sapiens
ggtgagtctgctcca

SEQ ID NO: 843281 - DNA, 15 bp, Homo sapiens
gtgagtctgctccat

SEQ ID NO: 843282 - DNA, 15 bp, Homo sapiens
tgagtctgctccata

SEQ ID NO: 843283 - DNA, 15 bp, Homo sapiens
gagtctgctccatat

SEQ ID NO: 843284 - DNA, 15 bp, Homo sapiens
agtctgctccatatt

SEQ ID NO: 843285 - DNA, 15 bp, Homo sapiens
gtctgctccatattt

SEQ ID NO: 843286 - DNA, 15 bp, Homo sapiens
tctgctccatattta

SEQ ID NO: 843287 - DNA, 15 bp, Homo sapiens
ctgctccatatttag

SEQ ID NO: 843288 - DNA, 15 bp, Homo sapiens
tgctccatatttagc

SEQ ID NO: 843289 - DNA, 15 bp, Homo sapiens
gctccatatttagct

SEQ ID NO: 843290 - DNA, 15 bp, Homo sapiens
ctccatatttagctt

SEQ ID NO: 843291 - DNA, 15 bp, Homo sapiens
tccatatttagcttc

SEQ ID NO: 843292 - DNA, 15 bp, Homo sapiens
ccatatttagcttct

SEQ ID NO: 843293 - DNA, 15 bp, Homo sapiens
catatttagcttctt

SEQ ID NO: 843294 - DNA, 15 bp, Homo sapiens
atatttagcttctta

SEQ ID NO: 843295 - DNA, 15 bp, Homo sapiens
tatttagcttcttac

SEQ ID NO: 843296 - DNA, 15 bp, Homo sapiens
atttagcttcttact

SEQ ID NO: 843297 - DNA, 15 bp, Homo sapiens
tttagcttcttactc

SEQ ID NO: 843298 - DNA, 15 bp, Homo sapiens
ttagcttcttactct

SEQ ID NO: 843299 - DNA, 15 bp, Homo sapiens
tagcttcttactctg

SEQ ID NO: 843300 - DNA, 15 bp, Homo sapiens
agcttcttactctga

SEQ ID NO: 843301 - DNA, 15 bp, Homo sapiens
gcttcttactctgag

SEQ ID NO: 843302 - DNA, 15 bp, Homo sapiens
cttcttactctgagt

SEQ ID NO: 843303 - DNA, 15 bp, Homo sapiens
ttcttactctgagta

SEQ ID NO: 843304 - DNA, 15 bp, Homo sapiens
tcttactctgagtaa

SEQ ID NO: 843305 - DNA, 15 bp, Homo sapiens
cttactctgagtaac

SEQ ID NO: 843306 - DNA, 15 bp, Homo sapiens
ttactctgagtaacc

SEQ ID NO: 843307 - DNA, 15 bp, Homo sapiens
tactctgagtaacca

SEQ ID NO: 843308 - DNA, 15 bp, Homo sapiens
actctgagtaaccaa

SEQ ID NO: 843309 - DNA, 15 bp, Homo sapiens
ctctgagtaaccaaa

SEQ ID NO: 843310 - DNA, 15 bp, Homo sapiens
tctgagtaaccaaat

SEQ ID NO: 843311 - DNA, 15 bp, Homo sapiens
ctgagtaaccaaatg

SEQ ID NO: 843312 - DNA, 15 bp, Homo sapiens
tgagtaaccaaatgt

SEQ ID NO: 843313 - DNA, 15 bp, Homo sapiens
gagtaaccaaatgtt

SEQ ID NO: 843314 - DNA, 15 bp, Homo sapiens
agtaaccaaatgtta

SEQ ID NO: 843315 - DNA, 15 bp, Homo sapiens
gtaaccaaatgttat

SEQ ID NO: 843316 - DNA, 15 bp, Homo sapiens
taaccaaatgttatg

SEQ ID NO: 843317 - DNA, 15 bp, Homo sapiens
aaccaaatgttatgg

SEQ ID NO: 843318 - DNA, 15 bp, Homo sapiens
accaaatgttatgga

SEQ ID NO: 843319 - DNA, 15 bp, Homo sapiens
ccaaatgttatggat

SEQ ID NO: 843320 - DNA, 15 bp, Homo sapiens
caaatgttatggatg

SEQ ID NO: 843321 - DNA, 15 bp, Homo sapiens
aaatgttatggatgg

SEQ ID NO: 843322 - DNA, 15 bp, Homo sapiens
aatgttatggatggg

SEQ ID NO: 843323 - DNA, 15 bp, Homo sapiens
atgttatggatggga

SEQ ID NO: 843324 - DNA, 15 bp, Homo sapiens
tgttatggatgggag

SEQ ID NO: 843325 - DNA, 15 bp, Homo sapiens
gttatggatgggagg

SEQ ID NO: 843326 - DNA, 15 bp, Homo sapiens
ttatggatgggaggt

SEQ ID NO: 843327 - DNA, 15 bp, Homo sapiens
tatggatgggaggtt

SEQ ID NO: 843328 - DNA, 15 bp, Homo sapiens
atggatgggaggtta

SEQ ID NO: 843329 - DNA, 15 bp, Homo sapiens
tggatgggaggttag

SEQ ID NO: 843330 - DNA, 15 bp, Homo sapiens
ggatgggaggttagc

SEQ ID NO: 843331 - DNA, 15 bp, Homo sapiens
gatgggaggttagct

SEQ ID NO: 843332 - DNA, 15 bp, Homo sapiens
atgggaggttagctc

SEQ ID NO: 843333 - DNA, 15 bp, Homo sapiens
tgggaggttagctct

SEQ ID NO: 843334 - DNA, 15 bp, Homo sapiens
gggaggttagctctg

SEQ ID NO: 843335 - DNA, 15 bp, Homo sapiens
ggaggttagctctgt

SEQ ID NO: 843336 - DNA, 15 bp, Homo sapiens
gaggttagctctgtg

SEQ ID NO: 843337 - DNA, 15 bp, Homo sapiens
aggttagctctgtgt

SEQ ID NO: 843338 - DNA, 15 bp, Homo sapiens
ggttagctctgtgtg

SEQ ID NO: 843339 - DNA, 15 bp, Homo sapiens
gttagctctgtgtgt

SEQ ID NO: 843340 - DNA, 15 bp, Homo sapiens
ttagctctgtgtgtg

SEQ ID NO: 843341 - DNA, 15 bp, Homo sapiens
tagctctgtgtgtga

SEQ ID NO: 843342 - DNA, 15 bp, Homo sapiens
agctctgtgtgtgag

SEQ ID NO: 843343 - DNA, 15 bp, Homo sapiens
gctctgtgtgtgaga

SEQ ID NO: 843344 - DNA, 15 bp, Homo sapiens
ctctgtgtgtgagag

SEQ ID NO: 843345 - DNA, 15 bp, Homo sapiens
tctgtgtgtgagaga

SEQ ID NO: 843346 - DNA, 15 bp, Homo sapiens
ctgtgtgtgagagaa

SEQ ID NO: 843347 - DNA, 15 bp, Homo sapiens
tgtgtgtgagagaaa

SEQ ID NO: 843348 - DNA, 15 bp, Homo sapiens
gtgtgtgagagaaag

SEQ ID NO: 843349 - DNA, 15 bp, Homo sapiens
tgtgtgagagaaagg

SEQ ID NO: 843350 - DNA, 15 bp, Homo sapiens
gtgtgagagaaaggt

SEQ ID NO: 843351 - DNA, 15 bp, Homo sapiens
tgtgagagaaaggtg

SEQ ID NO: 843352 - DNA, 15 bp, Homo sapiens
gtgagagaaaggtgg

SEQ ID NO: 843353 - DNA, 15 bp, Homo sapiens
tgagagaaaggtgga

SEQ ID NO: 843354 - DNA, 15 bp, Homo sapiens
gagagaaaggtggag

SEQ ID NO: 843355 - DNA, 15 bp, Homo sapiens
agagaaaggtggaga

SEQ ID NO: 843356 - DNA, 15 bp, Homo sapiens
gagaaaggtggagaa

SEQ ID NO: 843357 - DNA, 15 bp, Homo sapiens
agaaaggtggagaag

SEQ ID NO: 843358 - DNA, 15 bp, Homo sapiens
gaaaggtggagaagc

SEQ ID NO: 843359 - DNA, 15 bp, Homo sapiens
aaaggtggagaagca

SEQ ID NO: 843360 - DNA, 15 bp, Homo sapiens
aaggtggagaagcat

SEQ ID NO: 843361 - DNA, 15 bp, Homo sapiens
aggtggagaagcatg

SEQ ID NO: 843362 - DNA, 15 bp, Homo sapiens
ggtggagaagcatgt

SEQ ID NO: 843363 - DNA, 15 bp, Homo sapiens
gtggagaagcatgtg

SEQ ID NO: 843364 - DNA, 15 bp, Homo sapiens
tggagaagcatgtgg

SEQ ID NO: 843365 - DNA, 15 bp, Homo sapiens
ggagaagcatgtggg

SEQ ID NO: 843366 - DNA, 15 bp, Homo sapiens
gagaagcatgtgggg

SEQ ID NO: 843367 - DNA, 15 bp, Homo sapiens
agaagcatgtgggga

SEQ ID NO: 843368 - DNA, 15 bp, Homo sapiens
gaagcatgtggggag

SEQ ID NO: 843369 - DNA, 15 bp, Homo sapiens
aagcatgtggggagg

SEQ ID NO: 843370 - DNA, 15 bp, Homo sapiens
agcatgtggggaggg

SEQ ID NO: 843371 - DNA, 15 bp, Homo sapiens
gcatgtggggaggga

SEQ ID NO: 843372 - DNA, 15 bp, Homo sapiens
catgtggggagggaa

SEQ ID NO: 843373 - DNA, 15 bp, Homo sapiens
atgtggggagggaaa

SEQ ID NO: 843374 - DNA, 15 bp, Homo sapiens
tgtggggagggaaat

SEQ ID NO: 843375 - DNA, 15 bp, Homo sapiens
gtggggagggaaata

SEQ ID NO: 843376 - DNA, 15 bp, Homo sapiens
tggggagggaaatag

SEQ ID NO: 843377 - DNA, 15 bp, Homo sapiens
ggggagggaaataga

SEQ ID NO: 843378 - DNA, 15 bp, Homo sapiens
gggagggaaatagat

SEQ ID NO: 843379 - DNA, 15 bp, Homo sapiens
ggagggaaatagatg

SEQ ID NO: 843380 - DNA, 15 bp, Homo sapiens
gagggaaatagatgg

SEQ ID NO: 843381 - DNA, 15 bp, Homo sapiens
agggaaatagatggg

SEQ ID NO: 843382 - DNA, 15 bp, Homo sapiens
gggaaatagatggga

SEQ ID NO: 843383 - DNA, 15 bp, Homo sapiens
ggaaatagatgggaa

SEQ ID NO: 843384 - DNA, 15 bp, Homo sapiens
gaaatagatgggaaa

SEQ ID NO: 843385 - DNA, 15 bp, Homo sapiens
aaatagatgggaaaa

SEQ ID NO: 843386 - DNA, 15 bp, Homo sapiens
aatagatgggaaaag

SEQ ID NO: 843387 - DNA, 15 bp, Homo sapiens
atagatgggaaaagg

SEQ ID NO: 843388 - DNA, 15 bp, Homo sapiens
tagatgggaaaaggt

SEQ ID NO: 843389 - DNA, 15 bp, Homo sapiens
agatgggaaaaggta

SEQ ID NO: 843390 - DNA, 15 bp, Homo sapiens
gatgggaaaaggtaa

SEQ ID NO: 843391 - DNA, 15 bp, Homo sapiens
atgggaaaaggtaat

SEQ ID NO: 843392 - DNA, 15 bp, Homo sapiens
tgggaaaaggtaatt

SEQ ID NO: 843393 - DNA, 15 bp, Homo sapiens
gggaaaaggtaatta

SEQ ID NO: 843394 - DNA, 15 bp, Homo sapiens
ggaaaaggtaattag

SEQ ID NO: 843395 - DNA, 15 bp, Homo sapiens
gaaaaggtaattagg

SEQ ID NO: 843396 - DNA, 15 bp, Homo sapiens
aaaaggtaattaggc

SEQ ID NO: 843397 - DNA, 15 bp, Homo sapiens
aaaggtaattaggct

SEQ ID NO: 843398 - DNA, 15 bp, Homo sapiens
aaggtaattaggctt

SEQ ID NO: 843399 - DNA, 15 bp, Homo sapiens
aggtaattaggcttt

SEQ ID NO: 843400 - DNA, 15 bp, Homo sapiens
ggtaattaggcttta

SEQ ID NO: 843401 - DNA, 15 bp, Homo sapiens
gtaattaggctttat

SEQ ID NO: 843402 - DNA, 15 bp, Homo sapiens
taattaggctttata

SEQ ID NO: 843403 - DNA, 15 bp, Homo sapiens
aattaggctttatag

SEQ ID NO: 843404 - DNA, 15 bp, Homo sapiens
attaggctttataga

SEQ ID NO: 843405 - DNA, 15 bp, Homo sapiens
ttaggctttatagaa

SEQ ID NO: 843406 - DNA, 15 bp, Homo sapiens
taggctttatagaag

SEQ ID NO: 843407 - DNA, 15 bp, Homo sapiens
aggctttatagaagg

SEQ ID NO: 843408 - DNA, 15 bp, Homo sapiens
ggctttatagaaggg

SEQ ID NO: 843409 - DNA, 15 bp, Homo sapiens
gctttatagaagggc

SEQ ID NO: 843410 - DNA, 15 bp, Homo sapiens
ctttatagaagggct

SEQ ID NO: 843411 - DNA, 15 bp, Homo sapiens
tttatagaagggctc

SEQ ID NO: 843412 - DNA, 15 bp, Homo sapiens
ttatagaagggctct

SEQ ID NO: 843413 - DNA, 15 bp, Homo sapiens
tatagaagggctctc

SEQ ID NO: 843414 - DNA, 15 bp, Homo sapiens
atagaagggctctca

SEQ ID NO: 843415 - DNA, 15 bp, Homo sapiens
tagaagggctctcat

SEQ ID NO: 843416 - DNA, 15 bp, Homo sapiens
agaagggctctcatt

SEQ ID NO: 843417 - DNA, 15 bp, Homo sapiens
gaagggctctcatta

SEQ ID NO: 843418 - DNA, 15 bp, Homo sapiens
aagggctctcattag

SEQ ID NO: 843419 - DNA, 15 bp, Homo sapiens
agggctctcattagc

SEQ ID NO: 843420 - DNA, 15 bp, Homo sapiens
gggctctcattagca

SEQ ID NO: 843421 - DNA, 15 bp, Homo sapiens
ggctctcattagcaa

SEQ ID NO: 843422 - DNA, 15 bp, Homo sapiens
gctctcattagcaag

SEQ ID NO: 843423 - DNA, 15 bp, Homo sapiens
ctctcattagcaagc

SEQ ID NO: 843424 - DNA, 15 bp, Homo sapiens
tctcattagcaagct

SEQ ID NO: 843425 - DNA, 15 bp, Homo sapiens
ctcattagcaagctt

SEQ ID NO: 843426 - DNA, 15 bp, Homo sapiens
tcattagcaagcttc

SEQ ID NO: 843427 - DNA, 15 bp, Homo sapiens
cattagcaagcttct

SEQ ID NO: 843428 - DNA, 15 bp, Homo sapiens
attagcaagcttcta

SEQ ID NO: 843429 - DNA, 15 bp, Homo sapiens
ttagcaagcttctag

SEQ ID NO: 843430 - DNA, 15 bp, Homo sapiens
tagcaagcttctagg

SEQ ID NO: 843431 - DNA, 15 bp, Homo sapiens
agcaagcttctaggg

SEQ ID NO: 843432 - DNA, 15 bp, Homo sapiens
gcaagcttctagggg

SEQ ID NO: 843433 - DNA, 15 bp, Homo sapiens
caagcttctagggga

SEQ ID NO: 843434 - DNA, 15 bp, Homo sapiens
aagcttctaggggat

SEQ ID NO: 843435 - DNA, 15 bp, Homo sapiens
agcttctaggggatg

SEQ ID NO: 843436 - DNA, 15 bp, Homo sapiens
gcttctaggggatgc

SEQ ID NO: 843437 - DNA, 15 bp, Homo sapiens
cttctaggggatgcc

SEQ ID NO: 843438 - DNA, 15 bp, Homo sapiens
ttctaggggatgcca

SEQ ID NO: 843439 - DNA, 15 bp, Homo sapiens
tctaggggatgccaa

SEQ ID NO: 843440 - DNA, 15 bp, Homo sapiens
ctaggggatgccaag

SEQ ID NO: 843441 - DNA, 15 bp, Homo sapiens
taggggatgccaaga

SEQ ID NO: 843442 - DNA, 15 bp, Homo sapiens
aggggatgccaagat

SEQ ID NO: 843443 - DNA, 15 bp, Homo sapiens
ggggatgccaagatc

SEQ ID NO: 843444 - DNA, 15 bp, Homo sapiens
gggatgccaagatcc

SEQ ID NO: 843445 - DNA, 15 bp, Homo sapiens
ggatgccaagatcca

SEQ ID NO: 843446 - DNA, 15 bp, Homo sapiens
gatgccaagatccat

SEQ ID NO: 843447 - DNA, 15 bp, Homo sapiens
atgccaagatccatg

SEQ ID NO: 843448 - DNA, 15 bp, Homo sapiens
tgccaagatccatgc

SEQ ID NO: 843449 - DNA, 15 bp, Homo sapiens
gccaagatccatgct

SEQ ID NO: 843450 - DNA, 15 bp, Homo sapiens
ccaagatccatgctt

SEQ ID NO: 843451 - DNA, 15 bp, Homo sapiens
caagatccatgctta

SEQ ID NO: 843452 - DNA, 15 bp, Homo sapiens
aagatccatgcttag

SEQ ID NO: 843453 - DNA, 15 bp, Homo sapiens
agatccatgcttaga

SEQ ID NO: 843454 - DNA, 15 bp, Homo sapiens
gatccatgcttagag

SEQ ID NO: 843455 - DNA, 15 bp, Homo sapiens
atccatgcttagaga

SEQ ID NO: 843456 - DNA, 15 bp, Homo sapiens
tccatgcttagagat

SEQ ID NO: 843457 - DNA, 15 bp, Homo sapiens
ccatgcttagagatt

SEQ ID NO: 843458 - DNA, 15 bp, Homo sapiens
catgcttagagattg

SEQ ID NO: 843459 - DNA, 15 bp, Homo sapiens
atgcttagagattgc

SEQ ID NO: 843460 - DNA, 15 bp, Homo sapiens
tgcttagagattgcc

SEQ ID NO: 843461 - DNA, 15 bp, Homo sapiens
gcttagagattgcca

SEQ ID NO: 843462 - DNA, 15 bp, Homo sapiens
cttagagattgccag

SEQ ID NO: 843463 - DNA, 15 bp, Homo sapiens
ttagagattgccagg

SEQ ID NO: 843464 - DNA, 15 bp, Homo sapiens
tagagattgccaggc

SEQ ID NO: 843465 - DNA, 15 bp, Homo sapiens
agagattgccaggct

SEQ ID NO: 843466 - DNA, 15 bp, Homo sapiens
gagattgccaggctt

SEQ ID NO: 843467 - DNA, 15 bp, Homo sapiens
agattgccaggcttg

SEQ ID NO: 843468 - DNA, 15 bp, Homo sapiens
gattgccaggcttgt

SEQ ID NO: 843469 - DNA, 15 bp, Homo sapiens
attgccaggcttgtc

SEQ ID NO: 843470 - DNA, 15 bp, Homo sapiens
ttgccaggcttgtct

SEQ ID NO: 843471 - DNA, 15 bp, Homo sapiens
tgccaggcttgtctt

SEQ ID NO: 843472 - DNA, 15 bp, Homo sapiens
gccaggcttgtcttc

SEQ ID NO: 843473 - DNA, 15 bp, Homo sapiens
ccaggcttgtcttca

SEQ ID NO: 843474 - DNA, 15 bp, Homo sapiens
caggcttgtcttcaa

SEQ ID NO: 843475 - DNA, 15 bp, Homo sapiens
aggcttgtcttcaaa

SEQ ID NO: 843476 - DNA, 15 bp, Homo sapiens
ggcttgtcttcaaat

SEQ ID NO: 843477 - DNA, 15 bp, Homo sapiens
gcttgtcttcaaatc

SEQ ID NO: 843478 - DNA, 15 bp, Homo sapiens
cttgtcttcaaatct

SEQ ID NO: 843479 - DNA, 15 bp, Homo sapiens
ttgtcttcaaatctc

SEQ ID NO: 843480 - DNA, 15 bp, Homo sapiens
tgtcttcaaatctca

SEQ ID NO: 843481 - DNA, 15 bp, Homo sapiens
gtcttcaaatctcag

SEQ ID NO: 843482 - DNA, 15 bp, Homo sapiens
tcttcaaatctcagc

SEQ ID NO: 843483 - DNA, 15 bp, Homo sapiens
cttcaaatctcagct

SEQ ID NO: 843484 - DNA, 15 bp, Homo sapiens
ttcaaatctcagctg

SEQ ID NO: 843485 - DNA, 15 bp, Homo sapiens
tcaaatctcagctgt

SEQ ID NO: 843486 - DNA, 15 bp, Homo sapiens
caaatctcagctgtg

SEQ ID NO: 843487 - DNA, 15 bp, Homo sapiens
aaatctcagctgtgt

SEQ ID NO: 843488 - DNA, 15 bp, Homo sapiens
aatctcagctgtgta

SEQ ID NO: 843489 - DNA, 15 bp, Homo sapiens
atctcagctgtgtat

SEQ ID NO: 843490 - DNA, 15 bp, Homo sapiens
tctcagctgtgtatt

SEQ ID NO: 843491 - DNA, 15 bp, Homo sapiens
ctcagctgtgtatta

SEQ ID NO: 843492 - DNA, 15 bp, Homo sapiens
tcagctgtgtattac

SEQ ID NO: 843493 - DNA, 15 bp, Homo sapiens
cagctgtgtattact

SEQ ID NO: 843494 - DNA, 15 bp, Homo sapiens
agctgtgtattactc

SEQ ID NO: 843495 - DNA, 15 bp, Homo sapiens
gctgtgtattactcc

SEQ ID NO: 843496 - DNA, 15 bp, Homo sapiens
ctgtgtattactcct

SEQ ID NO: 843497 - DNA, 15 bp, Homo sapiens
tgtgtattactcctt

SEQ ID NO: 843498 - DNA, 15 bp, Homo sapiens
gtgtattactccttt

SEQ ID NO: 843499 - DNA, 15 bp, Homo sapiens
tgtattactccttta

SEQ ID NO: 843500 - DNA, 15 bp, Homo sapiens
gtattactcctttat

SEQ ID NO: 843501 - DNA, 15 bp, Homo sapiens
tattactcctttatg

SEQ ID NO: 843502 - DNA, 15 bp, Homo sapiens
attactcctttatgt

SEQ ID NO: 843503 - DNA, 15 bp, Homo sapiens
ttactcctttatgtt

SEQ ID NO: 843504 - DNA, 15 bp, Homo sapiens
tactcctttatgttt

SEQ ID NO: 843505 - DNA, 15 bp, Homo sapiens
actcctttatgtttt

SEQ ID NO: 843506 - DNA, 15 bp, Homo sapiens
ctcctttatgttttt

SEQ ID NO: 843507 - DNA, 15 bp, Homo sapiens
tcctttatgtttttt

SEQ ID NO: 843508 - DNA, 15 bp, Homo sapiens
cctttatgttttttg

SEQ ID NO: 843509 - DNA, 15 bp, Homo sapiens
ctttatgttttttgt

SEQ ID NO: 843510 - DNA, 15 bp, Homo sapiens
tttatgttttttgtt

SEQ ID NO: 843511 - DNA, 15 bp, Homo sapiens
ttatgttttttgttt

SEQ ID NO: 843512 - DNA, 15 bp, Homo sapiens
tatgttttttgtttg

SEQ ID NO: 843513 - DNA, 15 bp, Homo sapiens
atgttttttgtttgt

SEQ ID NO: 843514 - DNA, 15 bp, Homo sapiens
tgttttttgtttgtt

SEQ ID NO: 843515 - DNA, 15 bp, Homo sapiens
gttttttgtttgttt

SEQ ID NO: 843516 - DNA, 15 bp, Homo sapiens
ttttttgtttgtttg

SEQ ID NO: 843517 - DNA, 15 bp, Homo sapiens
tttttgtttgtttgt

SEQ ID NO: 843518 - DNA, 15 bp, Homo sapiens
ttttgtttgtttgtg

SEQ ID NO: 843519 - DNA, 15 bp, Homo sapiens
tttgtttgtttgtgt

SEQ ID NO: 843520 - DNA, 15 bp, Homo sapiens
ttgtttgtttgtgtt

SEQ ID NO: 843521 - DNA, 15 bp, Homo sapiens
tgtttgtttgtgttg

SEQ ID NO: 843522 - DNA, 15 bp, Homo sapiens
gtttgtttgtgttgt

SEQ ID NO: 843523 - DNA, 15 bp, Homo sapiens
tttgtttgtgttgtt

SEQ ID NO: 843524 - DNA, 15 bp, Homo sapiens
ttgtttgtgttgttt

SEQ ID NO: 843525 - DNA, 15 bp, Homo sapiens
tgtttgtgttgtttg

SEQ ID NO: 843526 - DNA, 15 bp, Homo sapiens
gtttgtgttgtttgt

SEQ ID NO: 843527 - DNA, 15 bp, Homo sapiens
tttgtgttgtttgtt

SEQ ID NO: 843528 - DNA, 15 bp, Homo sapiens
ttgtgttgtttgttt

SEQ ID NO: 843529 - DNA, 15 bp, Homo sapiens
tgtgttgtttgtttt

SEQ ID NO: 843530 - DNA, 15 bp, Homo sapiens
gtgttgtttgttttt

SEQ ID NO: 843531 - DNA, 15 bp, Homo sapiens
tgttgtttgtttttg

SEQ ID NO: 843532 - DNA, 15 bp, Homo sapiens
gttgtttgtttttga

SEQ ID NO: 843533 - DNA, 15 bp, Homo sapiens
ttgtttgtttttgag

SEQ ID NO: 843534 - DNA, 15 bp, Homo sapiens
tgtttgtttttgaga

SEQ ID NO: 843535 - DNA, 15 bp, Homo sapiens
gtttgtttttgagac

SEQ ID NO: 843536 - DNA, 15 bp, Homo sapiens
tttgtttttgagaca

SEQ ID NO: 843537 - DNA, 15 bp, Homo sapiens
ttgagacagagtctc

SEQ ID NO: 843538 - DNA, 15 bp, Homo sapiens
tgagacagagtctcg

SEQ ID NO: 843539 - DNA, 15 bp, Homo sapiens
gagacagagtctcgc

SEQ ID NO: 843540 - DNA, 15 bp, Homo sapiens
agacagagtctcgct

SEQ ID NO: 843541 - DNA, 15 bp, Homo sapiens
gacagagtctcgctg

SEQ ID NO: 843542 - DNA, 15 bp, Homo sapiens
acagagtctcgctgt

SEQ ID NO: 843543 - DNA, 15 bp, Homo sapiens
cagagtctcgctgtg

SEQ ID NO: 843544 - DNA, 15 bp, Homo sapiens
agagtctcgctgtgt

SEQ ID NO: 843545 - DNA, 15 bp, Homo sapiens
gagtctcgctgtgtc

SEQ ID NO: 843546 - DNA, 15 bp, Homo sapiens
agtctcgctgtgtca

SEQ ID NO: 843547 - DNA, 15 bp, Homo sapiens
gtctcgctgtgtcac

SEQ ID NO: 843548 - DNA, 15 bp, Homo sapiens
tctcgctgtgtcacc

SEQ ID NO: 843549 - DNA, 15 bp, Homo sapiens
ctcgctgtgtcaccc

SEQ ID NO: 843550 - DNA, 15 bp, Homo sapiens
tcgctgtgtcaccca

SEQ ID NO: 843551 - DNA, 15 bp, Homo sapiens
cgctgtgtcacccag

SEQ ID NO: 843552 - DNA, 15 bp, Homo sapiens
gctgtgtcacccagg

SEQ ID NO: 843553 - DNA, 15 bp, Homo sapiens
ctgtgtcacccaggc

SEQ ID NO: 843554 - DNA, 15 bp, Homo sapiens
tgtgtcacccaggct

SEQ ID NO: 843555 - DNA, 15 bp, Homo sapiens
gtgtcacccaggctg

SEQ ID NO: 843556 - DNA, 15 bp, Homo sapiens
tgtcacccaggctgg

SEQ ID NO: 843557 - DNA, 15 bp, Homo sapiens
gtcacccaggctgga

SEQ ID NO: 843558 - DNA, 15 bp, Homo sapiens
tcacccaggctggag

SEQ ID NO: 843559 - DNA, 15 bp, Homo sapiens
cacccaggctggagt

SEQ ID NO: 843560 - DNA, 15 bp, Homo sapiens
acccaggctggagtg

SEQ ID NO: 843561 - DNA, 15 bp, Homo sapiens
caggctggagtgtag

SEQ ID NO: 843562 - DNA, 15 bp, Homo sapiens
aggctggagtgtagt

SEQ ID NO: 843563 - DNA, 15 bp, Homo sapiens
ggctggagtgtagtg

SEQ ID NO: 843564 - DNA, 15 bp, Homo sapiens
gctggagtgtagtgg

SEQ ID NO: 843565 - DNA, 15 bp, Homo sapiens
ctggagtgtagtggt

SEQ ID NO: 843566 - DNA, 15 bp, Homo sapiens
tggagtgtagtggtg

SEQ ID NO: 843567 - DNA, 15 bp, Homo sapiens
ggagtgtagtggtgt

SEQ ID NO: 843568 - DNA, 15 bp, Homo sapiens
gagtgtagtggtgtg

SEQ ID NO: 843569 - DNA, 15 bp, Homo sapiens
agtgtagtggtgtga

SEQ ID NO: 843570 - DNA, 15 bp, Homo sapiens
gtgtagtggtgtgat

SEQ ID NO: 843571 - DNA, 15 bp, Homo sapiens
tgtagtggtgtgatc

SEQ ID NO: 843572 - DNA, 15 bp, Homo sapiens
gtagtggtgtgatct

SEQ ID NO: 843573 - DNA, 15 bp, Homo sapiens
tagtggtgtgatctc

SEQ ID NO: 843574 - DNA, 15 bp, Homo sapiens
agtggtgtgatctca

SEQ ID NO: 843575 - DNA, 15 bp, Homo sapiens
gtggtgtgatctcag

SEQ ID NO: 843576 - DNA, 15 bp, Homo sapiens
tggtgtgatctcagc

SEQ ID NO: 843577 - DNA, 15 bp, Homo sapiens
ggtgtgatctcagct

SEQ ID NO: 843578 - DNA, 15 bp, Homo sapiens
gtgtgatctcagctc

SEQ ID NO: 843579 - DNA, 15 bp, Homo sapiens
tgtgatctcagctca

SEQ ID NO: 843580 - DNA, 15 bp, Homo sapiens
gtgatctcagctcac

SEQ ID NO: 843581 - DNA, 15 bp, Homo sapiens
tgatctcagctcact

SEQ ID NO: 843582 - DNA, 15 bp, Homo sapiens
gatctcagctcactg

SEQ ID NO: 843583 - DNA, 15 bp, Homo sapiens
atctcagctcactgc

SEQ ID NO: 843584 - DNA, 15 bp, Homo sapiens
tctcagctcactgca

SEQ ID NO: 843585 - DNA, 15 bp, Homo sapiens
ctcagctcactgcaa

SEQ ID NO: 843586 - DNA, 15 bp, Homo sapiens
tcagctcactgcaaa

SEQ ID NO: 843587 - DNA, 15 bp, Homo sapiens
cagctcactgcaaac

SEQ ID NO: 843588 - DNA, 15 bp, Homo sapiens
agctcactgcaaact

SEQ ID NO: 843589 - DNA, 15 bp, Homo sapiens
gctcactgcaaactc

SEQ ID NO: 843590 - DNA, 15 bp, Homo sapiens
ctcactgcaaactct

SEQ ID NO: 843591 - DNA, 15 bp, Homo sapiens
tcactgcaaactctg

SEQ ID NO: 843592 - DNA, 15 bp, Homo sapiens
cactgcaaactctgc

SEQ ID NO: 843593 - DNA, 15 bp, Homo sapiens
actgcaaactctgcc

SEQ ID NO: 843594 - DNA, 15 bp, Homo sapiens
ctgcaaactctgcct

SEQ ID NO: 843595 - DNA, 15 bp, Homo sapiens
tgcaaactctgcctc

SEQ ID NO: 843596 - DNA, 15 bp, Homo sapiens
gcaaactctgcctcc

SEQ ID NO: 843597 - DNA, 15 bp, Homo sapiens
caaactctgcctcct

SEQ ID NO: 843598 - DNA, 15 bp, Homo sapiens
aaactctgcctcctg

SEQ ID NO: 843599 - DNA, 15 bp, Homo sapiens
aactctgcctcctgg

SEQ ID NO: 843600 - DNA, 15 bp, Homo sapiens
actctgcctcctggg

SEQ ID NO: 843601 - DNA, 15 bp, Homo sapiens
ctctgcctcctgggt

SEQ ID NO: 843602 - DNA, 15 bp, Homo sapiens
tctgcctcctgggtt

SEQ ID NO: 843603 - DNA, 15 bp, Homo sapiens
ctgcctcctgggttc

SEQ ID NO: 843604 - DNA, 15 bp, Homo sapiens
tgcctcctgggttca

SEQ ID NO: 843605 - DNA, 15 bp, Homo sapiens
gcctcctgggttcaa

SEQ ID NO: 843606 - DNA, 15 bp, Homo sapiens
cctcctgggttcaag

SEQ ID NO: 843607 - DNA, 15 bp, Homo sapiens
ctcctgggttcaagc

SEQ ID NO: 843608 - DNA, 15 bp, Homo sapiens
tcctgggttcaagcg

SEQ ID NO: 843609 - DNA, 15 bp, Homo sapiens
cctgggttcaagcga

SEQ ID NO: 843610 - DNA, 15 bp, Homo sapiens
ctgggttcaagcgaa

SEQ ID NO: 843611 - DNA, 15 bp, Homo sapiens
tgggttcaagcgaat

SEQ ID NO: 843612 - DNA, 15 bp, Homo sapiens
gggttcaagcgaatc

SEQ ID NO: 843613 - DNA, 15 bp, Homo sapiens
ggttcaagcgaatct

SEQ ID NO: 843614 - DNA, 15 bp, Homo sapiens
gttcaagcgaatctc

SEQ ID NO: 843615 - DNA, 15 bp, Homo sapiens
ttcaagcgaatctca

SEQ ID NO: 843616 - DNA, 15 bp, Homo sapiens
tcaagcgaatctcag

SEQ ID NO: 843617 - DNA, 15 bp, Homo sapiens
caagcgaatctcagt

SEQ ID NO: 843618 - DNA, 15 bp, Homo sapiens
aagcgaatctcagtc

SEQ ID NO: 843619 - DNA, 15 bp, Homo sapiens
agcgaatctcagtct

SEQ ID NO: 843620 - DNA, 15 bp, Homo sapiens
gcgaatctcagtctc

SEQ ID NO: 843621 - DNA, 15 bp, Homo sapiens
cgaatctcagtctcc

SEQ ID NO: 843622 - DNA, 15 bp, Homo sapiens
gaatctcagtctcct

SEQ ID NO: 843623 - DNA, 15 bp, Homo sapiens
aatctcagtctcctg

SEQ ID NO: 843624 - DNA, 15 bp, Homo sapiens
atctcagtctcctga

SEQ ID NO: 843625 - DNA, 15 bp, Homo sapiens
tctcagtctcctgag

SEQ ID NO: 843626 - DNA, 15 bp, Homo sapiens
ctcagtctcctgagt

SEQ ID NO: 843627 - DNA, 15 bp, Homo sapiens
tcagtctcctgagta

SEQ ID NO: 843628 - DNA, 15 bp, Homo sapiens
cagtctcctgagtag

SEQ ID NO: 843629 - DNA, 15 bp, Homo sapiens
agtctcctgagtagc

SEQ ID NO: 843630 - DNA, 15 bp, Homo sapiens
gtctcctgagtagct

SEQ ID NO: 843631 - DNA, 15 bp, Homo sapiens
tctcctgagtagctg

SEQ ID NO: 843632 - DNA, 15 bp, Homo sapiens
ctgagtagctgggac

SEQ ID NO: 843633 - DNA, 15 bp, Homo sapiens
tgagtagctgggact

SEQ ID NO: 843634 - DNA, 15 bp, Homo sapiens
ctgggactacaggca

SEQ ID NO: 843635 - DNA, 15 bp, Homo sapiens
tgggactacaggcat

SEQ ID NO: 843636 - DNA, 15 bp, Homo sapiens
gggactacaggcatg

SEQ ID NO: 843637 - DNA, 15 bp, Homo sapiens
ggactacaggcatgc

SEQ ID NO: 843638 - DNA, 15 bp, Homo sapiens
gactacaggcatgca

SEQ ID NO: 843639 - DNA, 15 bp, Homo sapiens
actacaggcatgcac

SEQ ID NO: 843640 - DNA, 15 bp, Homo sapiens
ctacaggcatgcacc

SEQ ID NO: 843641 - DNA, 15 bp, Homo sapiens
tacaggcatgcacca

SEQ ID NO: 843642 - DNA, 15 bp, Homo sapiens
acaggcatgcaccac

SEQ ID NO: 843643 - DNA, 15 bp, Homo sapiens
caggcatgcaccacc

SEQ ID NO: 843644 - DNA, 15 bp, Homo sapiens
aggcatgcaccacca

SEQ ID NO: 843645 - DNA, 15 bp, Homo sapiens
ggcatgcaccaccag

SEQ ID NO: 843646 - DNA, 15 bp, Homo sapiens
gcatgcaccaccagg

SEQ ID NO: 843647 - DNA, 15 bp, Homo sapiens
catgcaccaccaggc

SEQ ID NO: 843648 - DNA, 15 bp, Homo sapiens
atgcaccaccaggcc

SEQ ID NO: 843649 - DNA, 15 bp, Homo sapiens
tgcaccaccaggcct

SEQ ID NO: 843650 - DNA, 15 bp, Homo sapiens
gcaccaccaggcctg

SEQ ID NO: 843651 - DNA, 15 bp, Homo sapiens
caccaccaggcctgg

SEQ ID NO: 843652 - DNA, 15 bp, Homo sapiens
accaccaggcctggc

SEQ ID NO: 843653 - DNA, 15 bp, Homo sapiens
ccaccaggcctggct

SEQ ID NO: 843654 - DNA, 15 bp, Homo sapiens
caccaggcctggcta

SEQ ID NO: 843655 - DNA, 15 bp, Homo sapiens
accaggcctggctaa

SEQ ID NO: 843656 - DNA, 15 bp, Homo sapiens
ccaggcctggctaat

SEQ ID NO: 843657 - DNA, 15 bp, Homo sapiens
caggcctggctaatt

SEQ ID NO: 843658 - DNA, 15 bp, Homo sapiens
aggcctggctaattt

SEQ ID NO: 843659 - DNA, 15 bp, Homo sapiens
ggcctggctaatttt

SEQ ID NO: 843660 - DNA, 15 bp, Homo sapiens
ggctaatttttgtag

SEQ ID NO: 843661 - DNA, 15 bp, Homo sapiens
gctaatttttgtaga

SEQ ID NO: 843662 - DNA, 15 bp, Homo sapiens
ctaatttttgtagag

SEQ ID NO: 843663 - DNA, 15 bp, Homo sapiens
taatttttgtagaga

SEQ ID NO: 843664 - DNA, 15 bp, Homo sapiens
aatttttgtagagac

SEQ ID NO: 843665 - DNA, 15 bp, Homo sapiens
atttttgtagagacg

SEQ ID NO: 843666 - DNA, 15 bp, Homo sapiens
tttttgtagagacgg

SEQ ID NO: 843667 - DNA, 15 bp, Homo sapiens
ttttgtagagacggg

SEQ ID NO: 843668 - DNA, 15 bp, Homo sapiens
tttgtagagacgggg

SEQ ID NO: 843669 - DNA, 15 bp, Homo sapiens
ttgtagagacggggt

SEQ ID NO: 843670 - DNA, 15 bp, Homo sapiens
tgtagagacggggtt

SEQ ID NO: 843671 - DNA, 15 bp, Homo sapiens
gtagagacggggttt

SEQ ID NO: 843672 - DNA, 15 bp, Homo sapiens
tagagacggggtttt

SEQ ID NO: 843673 - DNA, 15 bp, Homo sapiens
agagacggggttttg

SEQ ID NO: 843674 - DNA, 15 bp, Homo sapiens
gagacggggttttgc

SEQ ID NO: 843675 - DNA, 15 bp, Homo sapiens
agacggggttttgct

SEQ ID NO: 843676 - DNA, 15 bp, Homo sapiens
gacggggttttgcta

SEQ ID NO: 843677 - DNA, 15 bp, Homo sapiens
acggggttttgctat

SEQ ID NO: 843678 - DNA, 15 bp, Homo sapiens
cggggttttgctatg

SEQ ID NO: 843679 - DNA, 15 bp, Homo sapiens
ggggttttgctatgc

SEQ ID NO: 843680 - DNA, 15 bp, Homo sapiens
gggttttgctatgct

SEQ ID NO: 843681 - DNA, 15 bp, Homo sapiens
ggttttgctatgctg

SEQ ID NO: 843682 - DNA, 15 bp, Homo sapiens
gttttgctatgctgg

SEQ ID NO: 843683 - DNA, 15 bp, Homo sapiens
ttttgctatgctggc

SEQ ID NO: 843684 - DNA, 15 bp, Homo sapiens
tttgctatgctggcc

SEQ ID NO: 843685 - DNA, 15 bp, Homo sapiens
ttgctatgctggcca

SEQ ID NO: 843686 - DNA, 15 bp, Homo sapiens
tgctatgctggccag

SEQ ID NO: 843687 - DNA, 15 bp, Homo sapiens
gctatgctggccagg

SEQ ID NO: 843688 - DNA, 15 bp, Homo sapiens
ctatgctggccaggc

SEQ ID NO: 843689 - DNA, 15 bp, Homo sapiens
tatgctggccaggct

SEQ ID NO: 843690 - DNA, 15 bp, Homo sapiens
atgctggccaggctg

SEQ ID NO: 843691 - DNA, 15 bp, Homo sapiens
tgctggccaggctgg

SEQ ID NO: 843692 - DNA, 15 bp, Homo sapiens
gctggccaggctggt

SEQ ID NO: 843693 - DNA, 15 bp, Homo sapiens
ctggccaggctggtc

SEQ ID NO: 843694 - DNA, 15 bp, Homo sapiens
caagtgatctgcccg

SEQ ID NO: 843695 - DNA, 15 bp, Homo sapiens
aagtgatctgcccgc

SEQ ID NO: 843696 - DNA, 15 bp, Homo sapiens
agtgatctgcccgcc

SEQ ID NO: 843697 - DNA, 15 bp, Homo sapiens
gtgatctgcccgcct

SEQ ID NO: 843698 - DNA, 15 bp, Homo sapiens
tgatctgcccgcctt

SEQ ID NO: 843699 - DNA, 15 bp, Homo sapiens
gatctgcccgccttg

SEQ ID NO: 843700 - DNA, 15 bp, Homo sapiens
atctgcccgccttgg

SEQ ID NO: 843701 - DNA, 15 bp, Homo sapiens
tctgcccgccttggc

SEQ ID NO: 843702 - DNA, 15 bp, Homo sapiens
ctgcccgccttggcc

SEQ ID NO: 843703 - DNA, 15 bp, Homo sapiens
tgcccgccttggcct

SEQ ID NO: 843704 - DNA, 15 bp, Homo sapiens
gcccgccttggcctc

SEQ ID NO: 843705 - DNA, 15 bp, Homo sapiens
cccgccttggcctcc

SEQ ID NO: 843706 - DNA, 15 bp, Homo sapiens
ccgccttggcctccc

SEQ ID NO: 843707 - DNA, 15 bp, Homo sapiens
cgccttggcctccca

SEQ ID NO: 843708 - DNA, 15 bp, Homo sapiens
gccttggcctcccaa

SEQ ID NO: 843709 - DNA, 15 bp, Homo sapiens
ttggcctcccaaagt

SEQ ID NO: 843710 - DNA, 15 bp, Homo sapiens
tggcctcccaaagtg

SEQ ID NO: 843711 - DNA, 15 bp, Homo sapiens
ggcctcccaaagtgt

SEQ ID NO: 843712 - DNA, 15 bp, Homo sapiens
gcctcccaaagtgtt

SEQ ID NO: 843713 - DNA, 15 bp, Homo sapiens
cctcccaaagtgttg

SEQ ID NO: 843714 - DNA, 15 bp, Homo sapiens
ctcccaaagtgttgg

SEQ ID NO: 843715 - DNA, 15 bp, Homo sapiens
tcccaaagtgttggg

SEQ ID NO: 843716 - DNA, 15 bp, Homo sapiens
cccaaagtgttggga

SEQ ID NO: 843717 - DNA, 15 bp, Homo sapiens
ccaaagtgttgggat

SEQ ID NO: 843718 - DNA, 15 bp, Homo sapiens
caaagtgttgggatt

SEQ ID NO: 843719 - DNA, 15 bp, Homo sapiens
aaagtgttgggatta

SEQ ID NO: 843720 - DNA, 15 bp, Homo sapiens
aagtgttgggattag

SEQ ID NO: 843721 - DNA, 15 bp, Homo sapiens
agtgttgggattagt

SEQ ID NO: 843722 - DNA, 15 bp, Homo sapiens
gtgttgggattagtg

SEQ ID NO: 843723 - DNA, 15 bp, Homo sapiens
tgttgggattagtgg

SEQ ID NO: 843724 - DNA, 15 bp, Homo sapiens
gttgggattagtggc

SEQ ID NO: 843725 - DNA, 15 bp, Homo sapiens
ttgggattagtggcg

SEQ ID NO: 843726 - DNA, 15 bp, Homo sapiens
tgggattagtggcgt

SEQ ID NO: 843727 - DNA, 15 bp, Homo sapiens
gggattagtggcgtg

SEQ ID NO: 843728 - DNA, 15 bp, Homo sapiens
ggattagtggcgtga

SEQ ID NO: 843729 - DNA, 15 bp, Homo sapiens
gattagtggcgtgag

SEQ ID NO: 843730 - DNA, 15 bp, Homo sapiens
attagtggcgtgagc

SEQ ID NO: 843731 - DNA, 15 bp, Homo sapiens
ttagtggcgtgagcc

SEQ ID NO: 843732 - DNA, 15 bp, Homo sapiens
tagtggcgtgagcca

SEQ ID NO: 843733 - DNA, 15 bp, Homo sapiens
agtggcgtgagccac

SEQ ID NO: 843734 - DNA, 15 bp, Homo sapiens
gtggcgtgagccact

SEQ ID NO: 843735 - DNA, 15 bp, Homo sapiens
tggcgtgagccactg

SEQ ID NO: 843736 - DNA, 15 bp, Homo sapiens
gcgtgagccactgcc

SEQ ID NO: 843737 - DNA, 15 bp, Homo sapiens
cgtgagccactgccc

SEQ ID NO: 843738 - DNA, 15 bp, Homo sapiens
gtgagccactgcccc

SEQ ID NO: 843739 - DNA, 15 bp, Homo sapiens
tgagccactgccccg

SEQ ID NO: 843740 - DNA, 15 bp, Homo sapiens
gagccactgccccgg

SEQ ID NO: 843741 - DNA, 15 bp, Homo sapiens
agccactgccccggc

SEQ ID NO: 843742 - DNA, 15 bp, Homo sapiens
gccactgccccggcc

SEQ ID NO: 843743 - DNA, 15 bp, Homo sapiens
ccactgccccggcct

SEQ ID NO: 843744 - DNA, 15 bp, Homo sapiens
cactgccccggccta

SEQ ID NO: 843745 - DNA, 15 bp, Homo sapiens
actgccccggcctat

SEQ ID NO: 843746 - DNA, 15 bp, Homo sapiens
ctgccccggcctatt

SEQ ID NO: 843747 - DNA, 15 bp, Homo sapiens
tgccccggcctatta

SEQ ID NO: 843748 - DNA, 15 bp, Homo sapiens
gccccggcctattac

SEQ ID NO: 843749 - DNA, 15 bp, Homo sapiens
ccccggcctattact

SEQ ID NO: 843750 - DNA, 15 bp, Homo sapiens
cccggcctattactc

SEQ ID NO: 843751 - DNA, 15 bp, Homo sapiens
ccggcctattactcc

SEQ ID NO: 843752 - DNA, 15 bp, Homo sapiens
cggcctattactcct

SEQ ID NO: 843753 - DNA, 15 bp, Homo sapiens
ggcctattactcctt

SEQ ID NO: 843754 - DNA, 15 bp, Homo sapiens
gcctattactccttt

SEQ ID NO: 843755 - DNA, 15 bp, Homo sapiens
cctattactccttta

SEQ ID NO: 843756 - DNA, 15 bp, Homo sapiens
ctattactcctttag

SEQ ID NO: 843757 - DNA, 15 bp, Homo sapiens
tattactcctttaga

SEQ ID NO: 843758 - DNA, 15 bp, Homo sapiens
attactcctttagag

SEQ ID NO: 843759 - DNA, 15 bp, Homo sapiens
ttactcctttagagt

SEQ ID NO: 843760 - DNA, 15 bp, Homo sapiens
tactcctttagagtg

SEQ ID NO: 843761 - DNA, 15 bp, Homo sapiens
actcctttagagtga

SEQ ID NO: 843762 - DNA, 15 bp, Homo sapiens
ctcctttagagtgat

SEQ ID NO: 843763 - DNA, 15 bp, Homo sapiens
tcctttagagtgatt

SEQ ID NO: 843764 - DNA, 15 bp, Homo sapiens
cctttagagtgattt

SEQ ID NO: 843765 - DNA, 15 bp, Homo sapiens
ctttagagtgattta

SEQ ID NO: 843766 - DNA, 15 bp, Homo sapiens
tttagagtgatttag

SEQ ID NO: 843767 - DNA, 15 bp, Homo sapiens
ttagagtgatttaga

SEQ ID NO: 843768 - DNA, 15 bp, Homo sapiens
tagagtgatttagag

SEQ ID NO: 843769 - DNA, 15 bp, Homo sapiens
agagtgatttagagc

SEQ ID NO: 843770 - DNA, 15 bp, Homo sapiens
gagtgatttagagcc

SEQ ID NO: 843771 - DNA, 15 bp, Homo sapiens
agtgatttagagcca

SEQ ID NO: 843772 - DNA, 15 bp, Homo sapiens
gtgatttagagccat

SEQ ID NO: 843773 - DNA, 15 bp, Homo sapiens
tgatttagagccatg

SEQ ID NO: 843774 - DNA, 15 bp, Homo sapiens
gatttagagccatgt

SEQ ID NO: 843775 - DNA, 15 bp, Homo sapiens
atttagagccatgtt

SEQ ID NO: 843776 - DNA, 15 bp, Homo sapiens
tttagagccatgttt

SEQ ID NO: 843777 - DNA, 15 bp, Homo sapiens
ttagagccatgttta

SEQ ID NO: 843778 - DNA, 15 bp, Homo sapiens
tagagccatgtttac

SEQ ID NO: 843779 - DNA, 15 bp, Homo sapiens
agagccatgtttact

SEQ ID NO: 843780 - DNA, 15 bp, Homo sapiens
gagccatgtttactt

SEQ ID NO: 843781 - DNA, 15 bp, Homo sapiens
agccatgtttactta

SEQ ID NO: 843782 - DNA, 15 bp, Homo sapiens
gccatgtttacttat

SEQ ID NO: 843783 - DNA, 15 bp, Homo sapiens
ccatgtttacttatg

SEQ ID NO: 843784 - DNA, 15 bp, Homo sapiens
catgtttacttatgg

SEQ ID NO: 843785 - DNA, 15 bp, Homo sapiens
atgtttacttatggt

SEQ ID NO: 843786 - DNA, 15 bp, Homo sapiens
tgtttacttatggta

SEQ ID NO: 843787 - DNA, 15 bp, Homo sapiens
gtttacttatggtaa

SEQ ID NO: 843788 - DNA, 15 bp, Homo sapiens
tttacttatggtaac

SEQ ID NO: 843789 - DNA, 15 bp, Homo sapiens
ttacttatggtaact

SEQ ID NO: 843790 - DNA, 15 bp, Homo sapiens
tacttatggtaactt

SEQ ID NO: 843791 - DNA, 15 bp, Homo sapiens
acttatggtaacttg

SEQ ID NO: 843792 - DNA, 15 bp, Homo sapiens
cttatggtaacttga

SEQ ID NO: 843793 - DNA, 15 bp, Homo sapiens
ttatggtaacttgac

SEQ ID NO: 843794 - DNA, 15 bp, Homo sapiens
tatggtaacttgaca

SEQ ID NO: 843795 - DNA, 15 bp, Homo sapiens
atggtaacttgacag

SEQ ID NO: 843796 - DNA, 15 bp, Homo sapiens
tggtaacttgacagt

SEQ ID NO: 843797 - DNA, 15 bp, Homo sapiens
ggtaacttgacagta

SEQ ID NO: 843798 - DNA, 15 bp, Homo sapiens
gtaacttgacagtaa

SEQ ID NO: 843799 - DNA, 15 bp, Homo sapiens
taacttgacagtaat

SEQ ID NO: 843800 - DNA, 15 bp, Homo sapiens
aacttgacagtaatg

SEQ ID NO: 843801 - DNA, 15 bp, Homo sapiens
acttgacagtaatgg

SEQ ID NO: 843802 - DNA, 15 bp, Homo sapiens
cttgacagtaatggg

SEQ ID NO: 843803 - DNA, 15 bp, Homo sapiens
ttgacagtaatggga

SEQ ID NO: 843804 - DNA, 15 bp, Homo sapiens
tgacagtaatgggaa

SEQ ID NO: 843805 - DNA, 15 bp, Homo sapiens
gacagtaatgggaat

SEQ ID NO: 843806 - DNA, 15 bp, Homo sapiens
acagtaatgggaata

SEQ ID NO: 843807 - DNA, 15 bp, Homo sapiens
cagtaatgggaataa

SEQ ID NO: 843808 - DNA, 15 bp, Homo sapiens
agtaatgggaataac

SEQ ID NO: 843809 - DNA, 15 bp, Homo sapiens
gtaatgggaataacc

SEQ ID NO: 843810 - DNA, 15 bp, Homo sapiens
taatgggaataacca

SEQ ID NO: 843811 - DNA, 15 bp, Homo sapiens
aatgggaataaccac

SEQ ID NO: 843812 - DNA, 15 bp, Homo sapiens
atgggaataaccact

SEQ ID NO: 843813 - DNA, 15 bp, Homo sapiens
tgggaataaccactg

SEQ ID NO: 843814 - DNA, 15 bp, Homo sapiens
gggaataaccactga

SEQ ID NO: 843815 - DNA, 15 bp, Homo sapiens
ggaataaccactgat

SEQ ID NO: 843816 - DNA, 15 bp, Homo sapiens
gaataaccactgatg

SEQ ID NO: 843817 - DNA, 15 bp, Homo sapiens
aataaccactgatga

SEQ ID NO: 843818 - DNA, 15 bp, Homo sapiens
ataaccactgatgaa

SEQ ID NO: 843819 - DNA, 15 bp, Homo sapiens
taaccactgatgaaa

SEQ ID NO: 843820 - DNA, 15 bp, Homo sapiens
aaccactgatgaaac

SEQ ID NO: 843821 - DNA, 15 bp, Homo sapiens
accactgatgaaacg

SEQ ID NO: 843822 - DNA, 15 bp, Homo sapiens
ccactgatgaaacgt

SEQ ID NO: 843823 - DNA, 15 bp, Homo sapiens
cactgatgaaacgta

SEQ ID NO: 843824 - DNA, 15 bp, Homo sapiens
actgatgaaacgtaa

SEQ ID NO: 843825 - DNA, 15 bp, Homo sapiens
ctgatgaaacgtaaa

SEQ ID NO: 843826 - DNA, 15 bp, Homo sapiens
tgatgaaacgtaaag

SEQ ID NO: 843827 - DNA, 15 bp, Homo sapiens
gatgaaacgtaaagc

SEQ ID NO: 843828 - DNA, 15 bp, Homo sapiens
atgaaacgtaaagcc

SEQ ID NO: 843829 - DNA, 15 bp, Homo sapiens
tgaaacgtaaagcct

SEQ ID NO: 843830 - DNA, 15 bp, Homo sapiens
gaaacgtaaagcctt

SEQ ID NO: 843831 - DNA, 15 bp, Homo sapiens
aaacgtaaagccttt

SEQ ID NO: 843832 - DNA, 15 bp, Homo sapiens
aacgtaaagcctttg

SEQ ID NO: 843833 - DNA, 15 bp, Homo sapiens
acgtaaagcctttgt

SEQ ID NO: 843834 - DNA, 15 bp, Homo sapiens
cgtaaagcctttgtc

SEQ ID NO: 843835 - DNA, 15 bp, Homo sapiens
gtaaagcctttgtct

SEQ ID NO: 843836 - DNA, 15 bp, Homo sapiens
taaagcctttgtcta

SEQ ID NO: 843837 - DNA, 15 bp, Homo sapiens
aaagcctttgtctaa

SEQ ID NO: 843838 - DNA, 15 bp, Homo sapiens
aagcctttgtctaat

SEQ ID NO: 843839 - DNA, 15 bp, Homo sapiens
agcctttgtctaatt

SEQ ID NO: 843840 - DNA, 15 bp, Homo sapiens
gcctttgtctaattg

SEQ ID NO: 843841 - DNA, 15 bp, Homo sapiens
cctttgtctaattgt

SEQ ID NO: 843842 - DNA, 15 bp, Homo sapiens
ctttgtctaattgtt

SEQ ID NO: 843843 - DNA, 15 bp, Homo sapiens
tttgtctaattgttt

SEQ ID NO: 843844 - DNA, 15 bp, Homo sapiens
ttgtctaattgttta

SEQ ID NO: 843845 - DNA, 15 bp, Homo sapiens
tgtctaattgtttac

SEQ ID NO: 843846 - DNA, 15 bp, Homo sapiens
gtctaattgtttacc

SEQ ID NO: 843847 - DNA, 15 bp, Homo sapiens
tctaattgtttacct

SEQ ID NO: 843848 - DNA, 15 bp, Homo sapiens
ctaattgtttaccta

SEQ ID NO: 843849 - DNA, 15 bp, Homo sapiens
taattgtttacctag

SEQ ID NO: 843850 - DNA, 15 bp, Homo sapiens
aattgtttacctagt

SEQ ID NO: 843851 - DNA, 15 bp, Homo sapiens
attgtttacctagtt

SEQ ID NO: 843852 - DNA, 15 bp, Homo sapiens
ttgtttacctagttc

SEQ ID NO: 843853 - DNA, 15 bp, Homo sapiens
tgtttacctagttct

SEQ ID NO: 843854 - DNA, 15 bp, Homo sapiens
gtttacctagttctt

SEQ ID NO: 843855 - DNA, 15 bp, Homo sapiens
tttacctagttcttc

SEQ ID NO: 843856 - DNA, 15 bp, Homo sapiens
ttacctagttcttcc

SEQ ID NO: 843857 - DNA, 15 bp, Homo sapiens
tacctagttcttcct

SEQ ID NO: 843858 - DNA, 15 bp, Homo sapiens
acctagttcttcctt

SEQ ID NO: 843859 - DNA, 15 bp, Homo sapiens
cctagttcttccttg

SEQ ID NO: 843860 - DNA, 15 bp, Homo sapiens
ctagttcttccttgt

SEQ ID NO: 843861 - DNA, 15 bp, Homo sapiens
tagttcttccttgtg

SEQ ID NO: 843862 - DNA, 15 bp, Homo sapiens
agttcttccttgtgg

SEQ ID NO: 843863 - DNA, 15 bp, Homo sapiens
gttcttccttgtggt

SEQ ID NO: 843864 - DNA, 15 bp, Homo sapiens
ttcttccttgtggtt

SEQ ID NO: 843865 - DNA, 15 bp, Homo sapiens
tcttccttgtggttc

SEQ ID NO: 843866 - DNA, 15 bp, Homo sapiens
cttccttgtggttca

SEQ ID NO: 843867 - DNA, 15 bp, Homo sapiens
ttccttgtggttcat

SEQ ID NO: 843868 - DNA, 15 bp, Homo sapiens
tccttgtggttcatg

SEQ ID NO: 843869 - DNA, 15 bp, Homo sapiens
ccttgtggttcatga

SEQ ID NO: 843870 - DNA, 15 bp, Homo sapiens
cttgtggttcatgaa

SEQ ID NO: 843871 - DNA, 15 bp, Homo sapiens
ttgtggttcatgaaa

SEQ ID NO: 843872 - DNA, 15 bp, Homo sapiens
tgtggttcatgaaat

SEQ ID NO: 843873 - DNA, 15 bp, Homo sapiens
gtggttcatgaaatt

SEQ ID NO: 843874 - DNA, 15 bp, Homo sapiens
tggttcatgaaattt

SEQ ID NO: 843875 - DNA, 15 bp, Homo sapiens
ggttcatgaaatttt

SEQ ID NO: 843876 - DNA, 15 bp, Homo sapiens
gttcatgaaattttt

SEQ ID NO: 843877 - DNA, 15 bp, Homo sapiens
ttcatgaaatttttc

SEQ ID NO: 843878 - DNA, 15 bp, Homo sapiens
tcatgaaatttttca

SEQ ID NO: 843879 - DNA, 15 bp, Homo sapiens
catgaaatttttcat

SEQ ID NO: 843880 - DNA, 15 bp, Homo sapiens
atgaaatttttcatc

SEQ ID NO: 843881 - DNA, 15 bp, Homo sapiens
tgaaatttttcatct

SEQ ID NO: 843882 - DNA, 15 bp, Homo sapiens
gaaatttttcatctc

SEQ ID NO: 843883 - DNA, 15 bp, Homo sapiens
aaatttttcatctct

SEQ ID NO: 843884 - DNA, 15 bp, Homo sapiens
aatttttcatctctg

SEQ ID NO: 843885 - DNA, 15 bp, Homo sapiens
atttttcatctctgt

SEQ ID NO: 843886 - DNA, 15 bp, Homo sapiens
tttttcatctctgta

SEQ ID NO: 843887 - DNA, 15 bp, Homo sapiens
ttttcatctctgtac

SEQ ID NO: 843888 - DNA, 15 bp, Homo sapiens
tttcatctctgtaca

SEQ ID NO: 843889 - DNA, 15 bp, Homo sapiens
ttcatctctgtacag

SEQ ID NO: 843890 - DNA, 15 bp, Homo sapiens
tcatctctgtacagt

SEQ ID NO: 843891 - DNA, 15 bp, Homo sapiens
catctctgtacagtt

SEQ ID NO: 843892 - DNA, 15 bp, Homo sapiens
atctctgtacagttt

SEQ ID NO: 843893 - DNA, 15 bp, Homo sapiens
tctctgtacagtttg

SEQ ID NO: 843894 - DNA, 15 bp, Homo sapiens
ctctgtacagtttga

SEQ ID NO: 843895 - DNA, 15 bp, Homo sapiens
tctgtacagtttgaa

SEQ ID NO: 843896 - DNA, 15 bp, Homo sapiens
ctgtacagtttgaaa

SEQ ID NO: 843897 - DNA, 15 bp, Homo sapiens
tgtacagtttgaaaa

SEQ ID NO: 843898 - DNA, 15 bp, Homo sapiens
gtacagtttgaaaat

SEQ ID NO: 843899 - DNA, 15 bp, Homo sapiens
tacagtttgaaaatt

SEQ ID NO: 843900 - DNA, 15 bp, Homo sapiens
acagtttgaaaatta

SEQ ID NO: 843901 - DNA, 15 bp, Homo sapiens
cagtttgaaaattaa

SEQ ID NO: 843902 - DNA, 15 bp, Homo sapiens
agtttgaaaattaag

SEQ ID NO: 843903 - DNA, 15 bp, Homo sapiens
gtttgaaaattaaga

SEQ ID NO: 843904 - DNA, 15 bp, Homo sapiens
tttgaaaattaagat

SEQ ID NO: 843905 - DNA, 15 bp, Homo sapiens
ttgaaaattaagatg

SEQ ID NO: 843906 - DNA, 15 bp, Homo sapiens
tgaaaattaagatga

SEQ ID NO: 843907 - DNA, 15 bp, Homo sapiens
gaaaattaagatgat

SEQ ID NO: 843908 - DNA, 15 bp, Homo sapiens
aaaattaagatgata

SEQ ID NO: 843909 - DNA, 15 bp, Homo sapiens
aaattaagatgataa

SEQ ID NO: 843910 - DNA, 15 bp, Homo sapiens
aattaagatgataat

SEQ ID NO: 843911 - DNA, 15 bp, Homo sapiens
attaagatgataata

SEQ ID NO: 843912 - DNA, 15 bp, Homo sapiens
ttaagatgataatat

SEQ ID NO: 843913 - DNA, 15 bp, Homo sapiens
taagatgataatatt

SEQ ID NO: 843914 - DNA, 15 bp, Homo sapiens
aagatgataatattt

SEQ ID NO: 843915 - DNA, 15 bp, Homo sapiens
agatgataatattta

SEQ ID NO: 843916 - DNA, 15 bp, Homo sapiens
gatgataatatttag

SEQ ID NO: 843917 - DNA, 15 bp, Homo sapiens
atgataatatttaga

SEQ ID NO: 843918 - DNA, 15 bp, Homo sapiens
tgataatatttagag

SEQ ID NO: 843919 - DNA, 15 bp, Homo sapiens
gataatatttagaga

SEQ ID NO: 843920 - DNA, 15 bp, Homo sapiens
ataatatttagagat

SEQ ID NO: 843921 - DNA, 15 bp, Homo sapiens
taatatttagagata

SEQ ID NO: 843922 - DNA, 15 bp, Homo sapiens
aatatttagagatat

SEQ ID NO: 843923 - DNA, 15 bp, Homo sapiens
atatttagagatatt

SEQ ID NO: 843924 - DNA, 15 bp, Homo sapiens
tatttagagatattt

SEQ ID NO: 843925 - DNA, 15 bp, Homo sapiens
atttagagatatttt

SEQ ID NO: 843926 - DNA, 15 bp, Homo sapiens
tttagagatatttta

SEQ ID NO: 843927 - DNA, 15 bp, Homo sapiens
ttagagatattttat

SEQ ID NO: 843928 - DNA, 15 bp, Homo sapiens
tagagatattttatt

SEQ ID NO: 843929 - DNA, 15 bp, Homo sapiens
agagatattttattc

SEQ ID NO: 843930 - DNA, 15 bp, Homo sapiens
gagatattttattcc

SEQ ID NO: 843931 - DNA, 15 bp, Homo sapiens
agatattttattcct

SEQ ID NO: 843932 - DNA, 15 bp, Homo sapiens
gatattttattcctt

SEQ ID NO: 843933 - DNA, 15 bp, Homo sapiens
atattttattccttt

SEQ ID NO: 843934 - DNA, 15 bp, Homo sapiens
tattttattcctttg

SEQ ID NO: 843935 - DNA, 15 bp, Homo sapiens
attttattcctttgt

SEQ ID NO: 843936 - DNA, 15 bp, Homo sapiens
ttttattcctttgtg

SEQ ID NO: 843937 - DNA, 15 bp, Homo sapiens
tttattcctttgtga

SEQ ID NO: 843938 - DNA, 15 bp, Homo sapiens
ttattcctttgtgaa

SEQ ID NO: 843939 - DNA, 15 bp, Homo sapiens
tattcctttgtgaag

SEQ ID NO: 843940 - DNA, 15 bp, Homo sapiens
attcctttgtgaaga

SEQ ID NO: 843941 - DNA, 15 bp, Homo sapiens
ttcctttgtgaagag

SEQ ID NO: 843942 - DNA, 15 bp, Homo sapiens
tcctttgtgaagaga

SEQ ID NO: 843943 - DNA, 15 bp, Homo sapiens
cctttgtgaagagaa

SEQ ID NO: 843944 - DNA, 15 bp, Homo sapiens
ctttgtgaagagaaa

SEQ ID NO: 843945 - DNA, 15 bp, Homo sapiens
tttgtgaagagaaaa

SEQ ID NO: 843946 - DNA, 15 bp, Homo sapiens
ttgtgaagagaaaaa

SEQ ID NO: 843947 - DNA, 15 bp, Homo sapiens
tgtgaagagaaaaaa

SEQ ID NO: 843948 - DNA, 15 bp, Homo sapiens
gtgaagagaaaaaag

SEQ ID NO: 843949 - DNA, 15 bp, Homo sapiens
tgaagagaaaaaagg

SEQ ID NO: 843950 - DNA, 15 bp, Homo sapiens
gaagagaaaaaaggc

SEQ ID NO: 843951 - DNA, 15 bp, Homo sapiens
aagagaaaaaaggct

SEQ ID NO: 843952 - DNA, 15 bp, Homo sapiens
agagaaaaaaggctt

SEQ ID NO: 843953 - DNA, 15 bp, Homo sapiens
gagaaaaaaggcttt

SEQ ID NO: 843954 - DNA, 15 bp, Homo sapiens
agaaaaaaggctttc

SEQ ID NO: 843955 - DNA, 15 bp, Homo sapiens
gaaaaaaggctttca

SEQ ID NO: 843956 - DNA, 15 bp, Homo sapiens
aaaaaaggctttcat

SEQ ID NO: 843957 - DNA, 15 bp, Homo sapiens
aaaaaggctttcatt

SEQ ID NO: 843958 - DNA, 15 bp, Homo sapiens
aaaaggctttcatta

SEQ ID NO: 843959 - DNA, 15 bp, Homo sapiens
aaaggctttcattaa

SEQ ID NO: 843960 - DNA, 15 bp, Homo sapiens
aaggctttcattaac

SEQ ID NO: 843961 - DNA, 15 bp, Homo sapiens
aggctttcattaaca

SEQ ID NO: 843962 - DNA, 15 bp, Homo sapiens
ggctttcattaacag

SEQ ID NO: 843963 - DNA, 15 bp, Homo sapiens
gctttcattaacaga

SEQ ID NO: 843964 - DNA, 15 bp, Homo sapiens
ctttcattaacagaa

SEQ ID NO: 843965 - DNA, 15 bp, Homo sapiens
tttcattaacagaaa

SEQ ID NO: 843966 - DNA, 15 bp, Homo sapiens
ttcattaacagaaat

SEQ ID NO: 843967 - DNA, 15 bp, Homo sapiens
tcattaacagaaatc

SEQ ID NO: 843968 - DNA, 15 bp, Homo sapiens
cattaacagaaatca

SEQ ID NO: 843969 - DNA, 15 bp, Homo sapiens
attaacagaaatcag

SEQ ID NO: 843970 - DNA, 15 bp, Homo sapiens
ttaacagaaatcagt

SEQ ID NO: 843971 - DNA, 15 bp, Homo sapiens
taacagaaatcagtg

SEQ ID NO: 843972 - DNA, 15 bp, Homo sapiens
aacagaaatcagtgg

SEQ ID NO: 843973 - DNA, 15 bp, Homo sapiens
acagaaatcagtggc

SEQ ID NO: 843974 - DNA, 15 bp, Homo sapiens
cagaaatcagtggca

SEQ ID NO: 843975 - DNA, 15 bp, Homo sapiens
agaaatcagtggcaa

SEQ ID NO: 843976 - DNA, 15 bp, Homo sapiens
gaaatcagtggcaat

SEQ ID NO: 843977 - DNA, 15 bp, Homo sapiens
aaatcagtggcaata

SEQ ID NO: 843978 - DNA, 15 bp, Homo sapiens
aatcagtggcaataa

SEQ ID NO: 843979 - DNA, 15 bp, Homo sapiens
atcagtggcaataac

SEQ ID NO: 843980 - DNA, 15 bp, Homo sapiens
tcagtggcaataact

SEQ ID NO: 843981 - DNA, 15 bp, Homo sapiens
cagtggcaataactt

SEQ ID NO: 843982 - DNA, 15 bp, Homo sapiens
agtggcaataactta

SEQ ID NO: 843983 - DNA, 15 bp, Homo sapiens
gtggcaataacttaa

SEQ ID NO: 843984 - DNA, 15 bp, Homo sapiens
tggcaataacttaat

SEQ ID NO: 843985 - DNA, 15 bp, Homo sapiens
ggcaataacttaata

SEQ ID NO: 843986 - DNA, 15 bp, Homo sapiens
gcaataacttaataa

SEQ ID NO: 843987 - DNA, 15 bp, Homo sapiens
caataacttaataaa

SEQ ID NO: 843988 - DNA, 15 bp, Homo sapiens
aataacttaataaat

SEQ ID NO: 843989 - DNA, 15 bp, Homo sapiens
ataacttaataaata

SEQ ID NO: 843990 - DNA, 15 bp, Homo sapiens
taacttaataaatac

SEQ ID NO: 843991 - DNA, 15 bp, Homo sapiens
aacttaataaataca

SEQ ID NO: 843992 - DNA, 15 bp, Homo sapiens
acttaataaatacaa

SEQ ID NO: 843993 - DNA, 15 bp, Homo sapiens
cttaataaatacaat

SEQ ID NO: 843994 - DNA, 15 bp, Homo sapiens
ttaataaatacaatc

SEQ ID NO: 843995 - DNA, 15 bp, Homo sapiens
taataaatacaatca

SEQ ID NO: 843996 - DNA, 15 bp, Homo sapiens
aataaatacaatcag

SEQ ID NO: 843997 - DNA, 15 bp, Homo sapiens
ataaatacaatcagc

SEQ ID NO: 843998 - DNA, 15 bp, Homo sapiens
taaatacaatcagct

SEQ ID NO: 843999 - DNA, 15 bp, Homo sapiens
aaatacaatcagctg

SEQ ID NO: 844000 - DNA, 15 bp, Homo sapiens
aatacaatcagctgg

SEQ ID NO: 844001 - DNA, 15 bp, Homo sapiens
atacaatcagctggt

SEQ ID NO: 844002 - DNA, 15 bp, Homo sapiens
tacaatcagctggtg

SEQ ID NO: 844003 - DNA, 15 bp, Homo sapiens
acaatcagctggtgt

SEQ ID NO: 844004 - DNA, 15 bp, Homo sapiens
caatcagctggtgtt

SEQ ID NO: 844005 - DNA, 15 bp, Homo sapiens
aatcagctggtgttc

SEQ ID NO: 844006 - DNA, 15 bp, Homo sapiens
atcagctggtgttcc

SEQ ID NO: 844007 - DNA, 15 bp, Homo sapiens
tcagctggtgttcct

SEQ ID NO: 844008 - DNA, 15 bp, Homo sapiens
cagctggtgttccta

SEQ ID NO: 844009 - DNA, 15 bp, Homo sapiens
agctggtgttcctat

SEQ ID NO: 844010 - DNA, 15 bp, Homo sapiens
gctggtgttcctata

SEQ ID NO: 844011 - DNA, 15 bp, Homo sapiens
ctggtgttcctatag

SEQ ID NO: 844012 - DNA, 15 bp, Homo sapiens
tggtgttcctatagt

SEQ ID NO: 844013 - DNA, 15 bp, Homo sapiens
ggtgttcctatagta

SEQ ID NO: 844014 - DNA, 15 bp, Homo sapiens
gtgttcctatagtat

SEQ ID NO: 844015 - DNA, 15 bp, Homo sapiens
tgttcctatagtatt

SEQ ID NO: 844016 - DNA, 15 bp, Homo sapiens
gttcctatagtattt

SEQ ID NO: 844017 - DNA, 15 bp, Homo sapiens
ttcctatagtattta

SEQ ID NO: 844018 - DNA, 15 bp, Homo sapiens
tcctatagtatttaa

SEQ ID NO: 844019 - DNA, 15 bp, Homo sapiens
cctatagtatttaaa

SEQ ID NO: 844020 - DNA, 15 bp, Homo sapiens
ctatagtatttaaaa

SEQ ID NO: 844021 - DNA, 15 bp, Homo sapiens
tatagtatttaaaag

SEQ ID NO: 844022 - DNA, 15 bp, Homo sapiens
atagtatttaaaaga

SEQ ID NO: 844023 - DNA, 15 bp, Homo sapiens
tagtatttaaaagaa

SEQ ID NO: 844024 - DNA, 15 bp, Homo sapiens
agtatttaaaagaaa

SEQ ID NO: 844025 - DNA, 15 bp, Homo sapiens
gtatttaaaagaaaa

SEQ ID NO: 844026 - DNA, 15 bp, Homo sapiens
tatttaaaagaaaac

SEQ ID NO: 844027 - DNA, 15 bp, Homo sapiens
atttaaaagaaaaca

SEQ ID NO: 844028 - DNA, 15 bp, Homo sapiens
tttaaaagaaaacag

SEQ ID NO: 844029 - DNA, 15 bp, Homo sapiens
ttaaaagaaaacaga

SEQ ID NO: 844030 - DNA, 15 bp, Homo sapiens
taaaagaaaacagaa

SEQ ID NO: 844031 - DNA, 15 bp, Homo sapiens
aaaagaaaacagaaa

SEQ ID NO: 844032 - DNA, 15 bp, Homo sapiens
aaagaaaacagaaag

SEQ ID NO: 844033 - DNA, 15 bp, Homo sapiens
aagaaaacagaaagt

SEQ ID NO: 844034 - DNA, 15 bp, Homo sapiens
agaaaacagaaagtt

SEQ ID NO: 844035 - DNA, 15 bp, Homo sapiens
gaaaacagaaagttt

SEQ ID NO: 844036 - DNA, 15 bp, Homo sapiens
aaaacagaaagttta

SEQ ID NO: 844037 - DNA, 15 bp, Homo sapiens
aaacagaaagtttac

SEQ ID NO: 844038 - DNA, 15 bp, Homo sapiens
aacagaaagtttact

SEQ ID NO: 844039 - DNA, 15 bp, Homo sapiens
acagaaagtttacta

SEQ ID NO: 844040 - DNA, 15 bp, Homo sapiens
cagaaagtttactag

SEQ ID NO: 844041 - DNA, 15 bp, Homo sapiens
agaaagtttactaga

SEQ ID NO: 844042 - DNA, 15 bp, Homo sapiens
gaaagtttactagat

SEQ ID NO: 844043 - DNA, 15 bp, Homo sapiens
aaagtttactagatt

SEQ ID NO: 844044 - DNA, 15 bp, Homo sapiens
aagtttactagattt

SEQ ID NO: 844045 - DNA, 15 bp, Homo sapiens
agtttactagatttc

SEQ ID NO: 844046 - DNA, 15 bp, Homo sapiens
gtttactagatttca

SEQ ID NO: 844047 - DNA, 15 bp, Homo sapiens
tttactagatttcag

SEQ ID NO: 844048 - DNA, 15 bp, Homo sapiens
ttactagatttcagc

SEQ ID NO: 844049 - DNA, 15 bp, Homo sapiens
tactagatttcagcc

SEQ ID NO: 844050 - DNA, 15 bp, Homo sapiens
actagatttcagcca

SEQ ID NO: 844051 - DNA, 15 bp, Homo sapiens
ctagatttcagccag

SEQ ID NO: 844052 - DNA, 15 bp, Homo sapiens
tagatttcagccagt

SEQ ID NO: 844053 - DNA, 15 bp, Homo sapiens
agatttcagccagtt

SEQ ID NO: 844054 - DNA, 15 bp, Homo sapiens
gatttcagccagttt

SEQ ID NO: 844055 - DNA, 15 bp, Homo sapiens
atttcagccagtttt

SEQ ID NO: 844056 - DNA, 15 bp, Homo sapiens
tttcagccagttttc

SEQ ID NO: 844057 - DNA, 15 bp, Homo sapiens
ttcagccagttttca

SEQ ID NO: 844058 - DNA, 15 bp, Homo sapiens
tcagccagttttcag

SEQ ID NO: 844059 - DNA, 15 bp, Homo sapiens
cagccagttttcaga

SEQ ID NO: 844060 - DNA, 15 bp, Homo sapiens
agccagttttcagac

SEQ ID NO: 844061 - DNA, 15 bp, Homo sapiens
gccagttttcagact

SEQ ID NO: 844062 - DNA, 15 bp, Homo sapiens
ccagttttcagacta

SEQ ID NO: 844063 - DNA, 15 bp, Homo sapiens
cagttttcagactat

SEQ ID NO: 844064 - DNA, 15 bp, Homo sapiens
agttttcagactatt

SEQ ID NO: 844065 - DNA, 15 bp, Homo sapiens
gttttcagactattt

SEQ ID NO: 844066 - DNA, 15 bp, Homo sapiens
ttttcagactattta

SEQ ID NO: 844067 - DNA, 15 bp, Homo sapiens
tttcagactatttaa

SEQ ID NO: 844068 - DNA, 15 bp, Homo sapiens
ttcagactatttaat

SEQ ID NO: 844069 - DNA, 15 bp, Homo sapiens
tcagactatttaatg

SEQ ID NO: 844070 - DNA, 15 bp, Homo sapiens
cagactatttaatgt

SEQ ID NO: 844071 - DNA, 15 bp, Homo sapiens
agactatttaatgtc

SEQ ID NO: 844072 - DNA, 15 bp, Homo sapiens
gactatttaatgtct

SEQ ID NO: 844073 - DNA, 15 bp, Homo sapiens
actatttaatgtcta

SEQ ID NO: 844074 - DNA, 15 bp, Homo sapiens
ctatttaatgtctat

SEQ ID NO: 844075 - DNA, 15 bp, Homo sapiens
tatttaatgtctatt

SEQ ID NO: 844076 - DNA, 15 bp, Homo sapiens
atttaatgtctattc

SEQ ID NO: 844077 - DNA, 15 bp, Homo sapiens
tttaatgtctattct

SEQ ID NO: 844078 - DNA, 15 bp, Homo sapiens
ttaatgtctattctt

SEQ ID NO: 844079 - DNA, 15 bp, Homo sapiens
taatgtctattctta

SEQ ID NO: 844080 - DNA, 15 bp, Homo sapiens
aatgtctattcttac

SEQ ID NO: 844081 - DNA, 15 bp, Homo sapiens
atgtctattcttact

SEQ ID NO: 844082 - DNA, 15 bp, Homo sapiens
tgtctattcttacta

SEQ ID NO: 844083 - DNA, 15 bp, Homo sapiens
gtctattcttactat

SEQ ID NO: 844084 - DNA, 15 bp, Homo sapiens
tctattcttactata

SEQ ID NO: 844085 - DNA, 15 bp, Homo sapiens
ctattcttactataa

SEQ ID NO: 844086 - DNA, 15 bp, Homo sapiens
tattcttactataat

SEQ ID NO: 844087 - DNA, 15 bp, Homo sapiens
attcttactataata

SEQ ID NO: 844088 - DNA, 15 bp, Homo sapiens
ttcttactataatag

SEQ ID NO: 844089 - DNA, 15 bp, Homo sapiens
tcttactataataga

SEQ ID NO: 844090 - DNA, 15 bp, Homo sapiens
cttactataatagaa

SEQ ID NO: 844091 - DNA, 15 bp, Homo sapiens
ttactataatagaaa

SEQ ID NO: 844092 - DNA, 15 bp, Homo sapiens
tactataatagaaaa

SEQ ID NO: 844093 - DNA, 15 bp, Homo sapiens
actataatagaaaat

SEQ ID NO: 844094 - DNA, 15 bp, Homo sapiens
ctataatagaaaata

SEQ ID NO: 844095 - DNA, 15 bp, Homo sapiens
tataatagaaaatat

SEQ ID NO: 844096 - DNA, 15 bp, Homo sapiens
ataatagaaaatata

SEQ ID NO: 844097 - DNA, 15 bp, Homo sapiens
taatagaaaatatat

SEQ ID NO: 844098 - DNA, 15 bp, Homo sapiens
aatagaaaatatata

SEQ ID NO: 844099 - DNA, 15 bp, Homo sapiens
atagaaaatatataa

SEQ ID NO: 844100 - DNA, 15 bp, Homo sapiens
tagaaaatatataat

SEQ ID NO: 844101 - DNA, 15 bp, Homo sapiens
agaaaatatataatt

SEQ ID NO: 844102 - DNA, 15 bp, Homo sapiens
gaaaatatataattt

SEQ ID NO: 844103 - DNA, 15 bp, Homo sapiens
aaaatatataatttg

SEQ ID NO: 844104 - DNA, 15 bp, Homo sapiens
aaatatataatttga

SEQ ID NO: 844105 - DNA, 15 bp, Homo sapiens
aatatataatttgat

SEQ ID NO: 844106 - DNA, 15 bp, Homo sapiens
atatataatttgatc

SEQ ID NO: 844107 - DNA, 15 bp, Homo sapiens
tatataatttgatct

SEQ ID NO: 844108 - DNA, 15 bp, Homo sapiens
atataatttgatctt

SEQ ID NO: 844109 - DNA, 15 bp, Homo sapiens
tataatttgatcttg

SEQ ID NO: 844110 - DNA, 15 bp, Homo sapiens
ataatttgatcttgt

SEQ ID NO: 844111 - DNA, 15 bp, Homo sapiens
taatttgatcttgtt

SEQ ID NO: 844112 - DNA, 15 bp, Homo sapiens
aatttgatcttgttc

SEQ ID NO: 844113 - DNA, 15 bp, Homo sapiens
atttgatcttgttct

SEQ ID NO: 844114 - DNA, 15 bp, Homo sapiens
tttgatcttgttctc

SEQ ID NO: 844115 - DNA, 15 bp, Homo sapiens
ttgatcttgttctca

SEQ ID NO: 844116 - DNA, 15 bp, Homo sapiens
tgatcttgttctcat

SEQ ID NO: 844117 - DNA, 15 bp, Homo sapiens
gatcttgttctcatt

SEQ ID NO: 844118 - DNA, 15 bp, Homo sapiens
atcttgttctcattt

SEQ ID NO: 844119 - DNA, 15 bp, Homo sapiens
tcttgttctcatttt

SEQ ID NO: 844120 - DNA, 15 bp, Homo sapiens
cttgttctcattttt

SEQ ID NO: 844121 - DNA, 15 bp, Homo sapiens
ttgttctcatttttc

SEQ ID NO: 844122 - DNA, 15 bp, Homo sapiens
tgttctcatttttca

SEQ ID NO: 844123 - DNA, 15 bp, Homo sapiens
gttctcatttttcaa

SEQ ID NO: 844124 - DNA, 15 bp, Homo sapiens
ttctcatttttcaaa

SEQ ID NO: 844125 - DNA, 15 bp, Homo sapiens
tctcatttttcaaag

SEQ ID NO: 844126 - DNA, 15 bp, Homo sapiens
ctcatttttcaaaga

SEQ ID NO: 844127 - DNA, 15 bp, Homo sapiens
tcatttttcaaagac

SEQ ID NO: 844128 - DNA, 15 bp, Homo sapiens
catttttcaaagacc

SEQ ID NO: 844129 - DNA, 15 bp, Homo sapiens
atttttcaaagacct

SEQ ID NO: 844130 - DNA, 15 bp, Homo sapiens
tttttcaaagacctt

SEQ ID NO: 844131 - DNA, 15 bp, Homo sapiens
ttttcaaagaccttt

SEQ ID NO: 844132 - DNA, 15 bp, Homo sapiens
tttcaaagaccttta

SEQ ID NO: 844133 - DNA, 15 bp, Homo sapiens
ttcaaagacctttaa

SEQ ID NO: 844134 - DNA, 15 bp, Homo sapiens
tcaaagacctttaat

SEQ ID NO: 844135 - DNA, 15 bp, Homo sapiens
caaagacctttaata

SEQ ID NO: 844136 - DNA, 15 bp, Homo sapiens
aaagacctttaatac

SEQ ID NO: 844137 - DNA, 15 bp, Homo sapiens
aagacctttaataca

SEQ ID NO: 844138 - DNA, 15 bp, Homo sapiens
agacctttaatacat

SEQ ID NO: 844139 - DNA, 15 bp, Homo sapiens
gacctttaatacatg

SEQ ID NO: 844140 - DNA, 15 bp, Homo sapiens
acctttaatacatga

SEQ ID NO: 844141 - DNA, 15 bp, Homo sapiens
cctttaatacatgat

SEQ ID NO: 844142 - DNA, 15 bp, Homo sapiens
ctttaatacatgatt

SEQ ID NO: 844143 - DNA, 15 bp, Homo sapiens
tttaatacatgattt

SEQ ID NO: 844144 - DNA, 15 bp, Homo sapiens
ttaatacatgatttt

SEQ ID NO: 844145 - DNA, 15 bp, Homo sapiens
taatacatgatttta

SEQ ID NO: 844146 - DNA, 15 bp, Homo sapiens
aatacatgattttag

SEQ ID NO: 844147 - DNA, 15 bp, Homo sapiens
atacatgattttagt

SEQ ID NO: 844148 - DNA, 15 bp, Homo sapiens
tacatgattttagta

SEQ ID NO: 844149 - DNA, 15 bp, Homo sapiens
acatgattttagtag

SEQ ID NO: 844150 - DNA, 15 bp, Homo sapiens
catgattttagtagt

SEQ ID NO: 844151 - DNA, 15 bp, Homo sapiens
atgattttagtagtt

SEQ ID NO: 844152 - DNA, 15 bp, Homo sapiens
tgattttagtagttg

SEQ ID NO: 844153 - DNA, 15 bp, Homo sapiens
gattttagtagttga

SEQ ID NO: 844154 - DNA, 15 bp, Homo sapiens
attttagtagttgaa

SEQ ID NO: 844155 - DNA, 15 bp, Homo sapiens
ttttagtagttgaaa

SEQ ID NO: 844156 - DNA, 15 bp, Homo sapiens
tttagtagttgaaaa

SEQ ID NO: 844157 - DNA, 15 bp, Homo sapiens
ttagtagttgaaaat

SEQ ID NO: 844158 - DNA, 15 bp, Homo sapiens
tagtagttgaaaatg

SEQ ID NO: 844159 - DNA, 15 bp, Homo sapiens
agtagttgaaaatga

SEQ ID NO: 844160 - DNA, 15 bp, Homo sapiens
gtagttgaaaatgaa

SEQ ID NO: 844161 - DNA, 15 bp, Homo sapiens
tagttgaaaatgaag

SEQ ID NO: 844162 - DNA, 15 bp, Homo sapiens
agttgaaaatgaagt

SEQ ID NO: 844163 - DNA, 15 bp, Homo sapiens
gttgaaaatgaagtt

SEQ ID NO: 844164 - DNA, 15 bp, Homo sapiens
ttgaaaatgaagttt

SEQ ID NO: 844165 - DNA, 15 bp, Homo sapiens
tgaaaatgaagttta

SEQ ID NO: 844166 - DNA, 15 bp, Homo sapiens
gaaaatgaagtttaa

SEQ ID NO: 844167 - DNA, 15 bp, Homo sapiens
aaaatgaagtttaat

SEQ ID NO: 844168 - DNA, 15 bp, Homo sapiens
aaatgaagtttaatg

SEQ ID NO: 844169 - DNA, 15 bp, Homo sapiens
aatgaagtttaatga

SEQ ID NO: 844170 - DNA, 15 bp, Homo sapiens
atgaagtttaatgat

SEQ ID NO: 844171 - DNA, 15 bp, Homo sapiens
tgaagtttaatgata

SEQ ID NO: 844172 - DNA, 15 bp, Homo sapiens
gaagtttaatgatag

SEQ ID NO: 844173 - DNA, 15 bp, Homo sapiens
aagtttaatgatagt

SEQ ID NO: 844174 - DNA, 15 bp, Homo sapiens
agtttaatgatagtt

SEQ ID NO: 844175 - DNA, 15 bp, Homo sapiens
gtttaatgatagttt

SEQ ID NO: 844176 - DNA, 15 bp, Homo sapiens
tttaatgatagttta

SEQ ID NO: 844177 - DNA, 15 bp, Homo sapiens
ttaatgatagtttat

SEQ ID NO: 844178 - DNA, 15 bp, Homo sapiens
taatgatagtttatg

SEQ ID NO: 844179 - DNA, 15 bp, Homo sapiens
aatgatagtttatgc

SEQ ID NO: 844180 - DNA, 15 bp, Homo sapiens
atgatagtttatgcc

SEQ ID NO: 844181 - DNA, 15 bp, Homo sapiens
tgatagtttatgcct

SEQ ID NO: 844182 - DNA, 15 bp, Homo sapiens
gatagtttatgcctc

SEQ ID NO: 844183 - DNA, 15 bp, Homo sapiens
atagtttatgcctct

SEQ ID NO: 844184 - DNA, 15 bp, Homo sapiens
tagtttatgcctcta

SEQ ID NO: 844185 - DNA, 15 bp, Homo sapiens
agtttatgcctctac

SEQ ID NO: 844186 - DNA, 15 bp, Homo sapiens
gtttatgcctctact

SEQ ID NO: 844187 - DNA, 15 bp, Homo sapiens
tttatgcctctactt

SEQ ID NO: 844188 - DNA, 15 bp, Homo sapiens
ttatgcctctacttt

SEQ ID NO: 844189 - DNA, 15 bp, Homo sapiens
tatgcctctactttt

SEQ ID NO: 844190 - DNA, 15 bp, Homo sapiens
atgcctctactttta

SEQ ID NO: 844191 - DNA, 15 bp, Homo sapiens
tgcctctacttttaa

SEQ ID NO: 844192 - DNA, 15 bp, Homo sapiens
gcctctacttttaaa

SEQ ID NO: 844193 - DNA, 15 bp, Homo sapiens
cctctacttttaaaa

SEQ ID NO: 844194 - DNA, 15 bp, Homo sapiens
ctctacttttaaaaa

SEQ ID NO: 844195 - DNA, 15 bp, Homo sapiens
tctacttttaaaaac

SEQ ID NO: 844196 - DNA, 15 bp, Homo sapiens
ctacttttaaaaaca

SEQ ID NO: 844197 - DNA, 15 bp, Homo sapiens
tacttttaaaaacaa

SEQ ID NO: 844198 - DNA, 15 bp, Homo sapiens
acttttaaaaacaaa

SEQ ID NO: 844199 - DNA, 15 bp, Homo sapiens
cttttaaaaacaaag

SEQ ID NO: 844200 - DNA, 15 bp, Homo sapiens
ttttaaaaacaaagt

SEQ ID NO: 844201 - DNA, 15 bp, Homo sapiens
tttaaaaacaaagtc

SEQ ID NO: 844202 - DNA, 15 bp, Homo sapiens
ttaaaaacaaagtct

SEQ ID NO: 844203 - DNA, 15 bp, Homo sapiens
taaaaacaaagtcta

SEQ ID NO: 844204 - DNA, 15 bp, Homo sapiens
aaaaacaaagtctaa

SEQ ID NO: 844205 - DNA, 15 bp, Homo sapiens
aaaacaaagtctaac

SEQ ID NO: 844206 - DNA, 15 bp, Homo sapiens
aaacaaagtctaaca

SEQ ID NO: 844207 - DNA, 15 bp, Homo sapiens
aacaaagtctaacag

SEQ ID NO: 844208 - DNA, 15 bp, Homo sapiens
acaaagtctaacaga

SEQ ID NO: 844209 - DNA, 15 bp, Homo sapiens
caaagtctaacagat

SEQ ID NO: 844210 - DNA, 15 bp, Homo sapiens
aaagtctaacagatt

SEQ ID NO: 844211 - DNA, 15 bp, Homo sapiens
aagtctaacagattt

SEQ ID NO: 844212 - DNA, 15 bp, Homo sapiens
agtctaacagatttt

SEQ ID NO: 844213 - DNA, 15 bp, Homo sapiens
gtctaacagattttt

SEQ ID NO: 844214 - DNA, 15 bp, Homo sapiens
tctaacagatttttc

SEQ ID NO: 844215 - DNA, 15 bp, Homo sapiens
ctaacagatttttct

SEQ ID NO: 844216 - DNA, 15 bp, Homo sapiens
taacagatttttctc

SEQ ID NO: 844217 - DNA, 15 bp, Homo sapiens
aacagatttttctca

SEQ ID NO: 844218 - DNA, 15 bp, Homo sapiens
acagatttttctcat

SEQ ID NO: 844219 - DNA, 15 bp, Homo sapiens
cagatttttctcatg

SEQ ID NO: 844220 - DNA, 15 bp, Homo sapiens
agatttttctcatgt

SEQ ID NO: 844221 - DNA, 15 bp, Homo sapiens
gatttttctcatgtt

SEQ ID NO: 844222 - DNA, 15 bp, Homo sapiens
atttttctcatgtta

SEQ ID NO: 844223 - DNA, 15 bp, Homo sapiens
tttttctcatgttaa

SEQ ID NO: 844224 - DNA, 15 bp, Homo sapiens
ttttctcatgttaaa

SEQ ID NO: 844225 - DNA, 15 bp, Homo sapiens
tttctcatgttaaat

SEQ ID NO: 844226 - DNA, 15 bp, Homo sapiens
ttctcatgttaaatc

SEQ ID NO: 844227 - DNA, 15 bp, Homo sapiens
tctcatgttaaatca

SEQ ID NO: 844228 - DNA, 15 bp, Homo sapiens
ctcatgttaaatcac

SEQ ID NO: 844229 - DNA, 15 bp, Homo sapiens
tcatgttaaatcaca

SEQ ID NO: 844230 - DNA, 15 bp, Homo sapiens
catgttaaatcacag

SEQ ID NO: 844231 - DNA, 15 bp, Homo sapiens
atgttaaatcacaga

SEQ ID NO: 844232 - DNA, 15 bp, Homo sapiens
tgttaaatcacagaa

SEQ ID NO: 844233 - DNA, 15 bp, Homo sapiens
gttaaatcacagaaa

SEQ ID NO: 844234 - DNA, 15 bp, Homo sapiens
ttaaatcacagaaaa

SEQ ID NO: 844235 - DNA, 15 bp, Homo sapiens
taaatcacagaaaaa

SEQ ID NO: 844236 - DNA, 15 bp, Homo sapiens
aaatcacagaaaaag

SEQ ID NO: 844237 - DNA, 15 bp, Homo sapiens
aatcacagaaaaagc

SEQ ID NO: 844238 - DNA, 15 bp, Homo sapiens
atcacagaaaaagcc

SEQ ID NO: 844239 - DNA, 15 bp, Homo sapiens
tcacagaaaaagcca

SEQ ID NO: 844240 - DNA, 15 bp, Homo sapiens
cacagaaaaagccac

SEQ ID NO: 844241 - DNA, 15 bp, Homo sapiens
acagaaaaagccacc

SEQ ID NO: 844242 - DNA, 15 bp, Homo sapiens
cagaaaaagccacct

SEQ ID NO: 844243 - DNA, 15 bp, Homo sapiens
agaaaaagccacctg

SEQ ID NO: 844244 - DNA, 15 bp, Homo sapiens
gaaaaagccacctga

SEQ ID NO: 844245 - DNA, 15 bp, Homo sapiens
aaaaagccacctgac

SEQ ID NO: 844246 - DNA, 15 bp, Homo sapiens
aaaagccacctgaca

SEQ ID NO: 844247 - DNA, 15 bp, Homo sapiens
aaagccacctgacat

SEQ ID NO: 844248 - DNA, 15 bp, Homo sapiens
aagccacctgacatt

SEQ ID NO: 844249 - DNA, 15 bp, Homo sapiens
agccacctgacattt

SEQ ID NO: 844250 - DNA, 15 bp, Homo sapiens
gccacctgacatttt

SEQ ID NO: 844251 - DNA, 15 bp, Homo sapiens
ccacctgacatttta

SEQ ID NO: 844252 - DNA, 15 bp, Homo sapiens
cacctgacattttaa

SEQ ID NO: 844253 - DNA, 15 bp, Homo sapiens
acctgacattttaac

SEQ ID NO: 844254 - DNA, 15 bp, Homo sapiens
cctgacattttaact

SEQ ID NO: 844255 - DNA, 15 bp, Homo sapiens
ctgacattttaactt

SEQ ID NO: 844256 - DNA, 15 bp, Homo sapiens
tgacattttaacttg

SEQ ID NO: 844257 - DNA, 15 bp, Homo sapiens
gacattttaacttgt

SEQ ID NO: 844258 - DNA, 15 bp, Homo sapiens
acattttaacttgtt

SEQ ID NO: 844259 - DNA, 15 bp, Homo sapiens
cattttaacttgttt

SEQ ID NO: 844260 - DNA, 15 bp, Homo sapiens
attttaacttgtttt

SEQ ID NO: 844261 - DNA, 15 bp, Homo sapiens
ttttaacttgttttt

SEQ ID NO: 844262 - DNA, 15 bp, Homo sapiens
tttaacttgtttttg

SEQ ID NO: 844263 - DNA, 15 bp, Homo sapiens
ttaacttgtttttga

SEQ ID NO: 844264 - DNA, 15 bp, Homo sapiens
taacttgtttttgat

SEQ ID NO: 844265 - DNA, 15 bp, Homo sapiens
aacttgtttttgatt

SEQ ID NO: 844266 - DNA, 15 bp, Homo sapiens
acttgtttttgattt

SEQ ID NO: 844267 - DNA, 15 bp, Homo sapiens
cttgtttttgatttg

SEQ ID NO: 844268 - DNA, 15 bp, Homo sapiens
ttgtttttgatttga

SEQ ID NO: 844269 - DNA, 15 bp, Homo sapiens
tgtttttgatttgac

SEQ ID NO: 844270 - DNA, 15 bp, Homo sapiens
gtttttgatttgaca

SEQ ID NO: 844271 - DNA, 15 bp, Homo sapiens
tttttgatttgacag

SEQ ID NO: 844272 - DNA, 15 bp, Homo sapiens
ttttgatttgacagt

SEQ ID NO: 844273 - DNA, 15 bp, Homo sapiens
tttgatttgacagtg

SEQ ID NO: 844274 - DNA, 15 bp, Homo sapiens
ttgatttgacagtga

SEQ ID NO: 844275 - DNA, 15 bp, Homo sapiens
tgatttgacagtgaa

SEQ ID NO: 844276 - DNA, 15 bp, Homo sapiens
gatttgacagtgaaa

SEQ ID NO: 844277 - DNA, 15 bp, Homo sapiens
atttgacagtgaaat

SEQ ID NO: 844278 - DNA, 15 bp, Homo sapiens
tttgacagtgaaatc

SEQ ID NO: 844279 - DNA, 15 bp, Homo sapiens
ttgacagtgaaatct

SEQ ID NO: 844280 - DNA, 15 bp, Homo sapiens
tgacagtgaaatctt

SEQ ID NO: 844281 - DNA, 15 bp, Homo sapiens
gacagtgaaatctta

SEQ ID NO: 844282 - DNA, 15 bp, Homo sapiens
acagtgaaatcttat

SEQ ID NO: 844283 - DNA, 15 bp, Homo sapiens
cagtgaaatcttata

SEQ ID NO: 844284 - DNA, 15 bp, Homo sapiens
agtgaaatcttataa

SEQ ID NO: 844285 - DNA, 15 bp, Homo sapiens
gtgaaatcttataaa

SEQ ID NO: 844286 - DNA, 15 bp, Homo sapiens
tgaaatcttataaat

SEQ ID NO: 844287 - DNA, 15 bp, Homo sapiens
gaaatcttataaatc

SEQ ID NO: 844288 - DNA, 15 bp, Homo sapiens
aaatcttataaatct

SEQ ID NO: 844289 - DNA, 15 bp, Homo sapiens
aatcttataaatctg

SEQ ID NO: 844290 - DNA, 15 bp, Homo sapiens
atcttataaatctgc

SEQ ID NO: 844291 - DNA, 15 bp, Homo sapiens
tcttataaatctgcc

SEQ ID NO: 844292 - DNA, 15 bp, Homo sapiens
cttataaatctgcca

SEQ ID NO: 844293 - DNA, 15 bp, Homo sapiens
ttataaatctgccac

SEQ ID NO: 844294 - DNA, 15 bp, Homo sapiens
tataaatctgccaca

SEQ ID NO: 844295 - DNA, 15 bp, Homo sapiens
ataaatctgccacag

SEQ ID NO: 844296 - DNA, 15 bp, Homo sapiens
taaatctgccacagt

SEQ ID NO: 844297 - DNA, 15 bp, Homo sapiens
aaatctgccacagtt

SEQ ID NO: 844298 - DNA, 15 bp, Homo sapiens
aatctgccacagttc

SEQ ID NO: 844299 - DNA, 15 bp, Homo sapiens
atctgccacagttct

SEQ ID NO: 844300 - DNA, 15 bp, Homo sapiens
tctgccacagttcta

SEQ ID NO: 844301 - DNA, 15 bp, Homo sapiens
ctgccacagttctaa

SEQ ID NO: 844302 - DNA, 15 bp, Homo sapiens
tgccacagttctaaa

SEQ ID NO: 844303 - DNA, 15 bp, Homo sapiens
gccacagttctaaac

SEQ ID NO: 844304 - DNA, 15 bp, Homo sapiens
ccacagttctaaacc

SEQ ID NO: 844305 - DNA, 15 bp, Homo sapiens
cacagttctaaacca

SEQ ID NO: 844306 - DNA, 15 bp, Homo sapiens
acagttctaaaccaa

SEQ ID NO: 844307 - DNA, 15 bp, Homo sapiens
cagttctaaaccaat

SEQ ID NO: 844308 - DNA, 15 bp, Homo sapiens
agttctaaaccaata

SEQ ID NO: 844309 - DNA, 15 bp, Homo sapiens
gttctaaaccaataa

SEQ ID NO: 844310 - DNA, 15 bp, Homo sapiens
ttctaaaccaataaa

SEQ ID NO: 844311 - DNA, 15 bp, Homo sapiens
tctaaaccaataaag

SEQ ID NO: 844312 - DNA, 15 bp, Homo sapiens
ctaaaccaataaaga

SEQ ID NO: 844313 - DNA, 15 bp, Homo sapiens
taaaccaataaagat

SEQ ID NO: 844314 - DNA, 15 bp, Homo sapiens
aaaccaataaagatc

SEQ ID NO: 844315 - DNA, 15 bp, Homo sapiens
aaccaataaagatca

SEQ ID NO: 844316 - DNA, 15 bp, Homo sapiens
accaataaagatcaa

SEQ ID NO: 844317 - DNA, 15 bp, Homo sapiens
ccaataaagatcaag

SEQ ID NO: 844318 - DNA, 15 bp, Homo sapiens
caataaagatcaagg

SEQ ID NO: 844319 - DNA, 15 bp, Homo sapiens
aataaagatcaaggt

SEQ ID NO: 844320 - DNA, 15 bp, Homo sapiens
ataaagatcaaggta

SEQ ID NO: 844321 - DNA, 15 bp, Homo sapiens
taaagatcaaggtat

SEQ ID NO: 844322 - DNA, 15 bp, Homo sapiens
aaagatcaaggtata

SEQ ID NO: 844323 - DNA, 15 bp, Homo sapiens
aagatcaaggtataa

SEQ ID NO: 844324 - DNA, 15 bp, Homo sapiens
agatcaaggtataag

SEQ ID NO: 844325 - DNA, 15 bp, Homo sapiens
gatcaaggtataagg

SEQ ID NO: 844326 - DNA, 15 bp, Homo sapiens
atcaaggtataaggg

SEQ ID NO: 844327 - DNA, 15 bp, Homo sapiens
tcaaggtataaggga

SEQ ID NO: 844328 - DNA, 15 bp, Homo sapiens
caaggtataagggaa

SEQ ID NO: 844329 - DNA, 15 bp, Homo sapiens
aaggtataagggaaa

SEQ ID NO: 844330 - DNA, 15 bp, Homo sapiens
aggtataagggaaaa

SEQ ID NO: 844331 - DNA, 15 bp, Homo sapiens
ggtataagggaaaaa

SEQ ID NO: 844332 - DNA, 15 bp, Homo sapiens
gtataagggaaaaat

SEQ ID NO: 844333 - DNA, 15 bp, Homo sapiens
tataagggaaaaatg

SEQ ID NO: 844334 - DNA, 15 bp, Homo sapiens
ataagggaaaaatgt

SEQ ID NO: 844335 - DNA, 15 bp, Homo sapiens
taagggaaaaatgta

SEQ ID NO: 844336 - DNA, 15 bp, Homo sapiens
aagggaaaaatgtag

SEQ ID NO: 844337 - DNA, 15 bp, Homo sapiens
agggaaaaatgtaga

SEQ ID NO: 844338 - DNA, 15 bp, Homo sapiens
gggaaaaatgtagaa

SEQ ID NO: 844339 - DNA, 15 bp, Homo sapiens
ggaaaaatgtagaat

SEQ ID NO: 844340 - DNA, 15 bp, Homo sapiens
gaaaaatgtagaatg

SEQ ID NO: 844341 - DNA, 15 bp, Homo sapiens
aaaaatgtagaatgt

SEQ ID NO: 844342 - DNA, 15 bp, Homo sapiens
aaaatgtagaatgtt

SEQ ID NO: 844343 - DNA, 15 bp, Homo sapiens
aaatgtagaatgttt

SEQ ID NO: 844344 - DNA, 15 bp, Homo sapiens
aatgtagaatgtttg

SEQ ID NO: 844345 - DNA, 15 bp, Homo sapiens
atgtagaatgtttgt

SEQ ID NO: 844346 - DNA, 15 bp, Homo sapiens
tgtagaatgtttgtg

SEQ ID NO: 844347 - DNA, 15 bp, Homo sapiens
gtagaatgtttgtgt

SEQ ID NO: 844348 - DNA, 15 bp, Homo sapiens
tagaatgtttgtgtg

SEQ ID NO: 844349 - DNA, 15 bp, Homo sapiens
agaatgtttgtgtgt

SEQ ID NO: 844350 - DNA, 15 bp, Homo sapiens
gaatgtttgtgtgtt

SEQ ID NO: 844351 - DNA, 15 bp, Homo sapiens
aatgtttgtgtgttt

SEQ ID NO: 844352 - DNA, 15 bp, Homo sapiens
atgtttgtgtgttta

SEQ ID NO: 844353 - DNA, 15 bp, Homo sapiens
tgtttgtgtgtttat

SEQ ID NO: 844354 - DNA, 15 bp, Homo sapiens
gtttgtgtgtttatt

SEQ ID NO: 844355 - DNA, 15 bp, Homo sapiens
tttgtgtgtttattt

SEQ ID NO: 844356 - DNA, 15 bp, Homo sapiens
ttgtgtgtttatttt

SEQ ID NO: 844357 - DNA, 15 bp, Homo sapiens
tgtgtgtttattttt

SEQ ID NO: 844358 - DNA, 15 bp, Homo sapiens
gtgtgtttatttttt

SEQ ID NO: 844359 - DNA, 15 bp, Homo sapiens
tgtgtttattttttc

SEQ ID NO: 844360 - DNA, 15 bp, Homo sapiens
gtgtttattttttcc

SEQ ID NO: 844361 - DNA, 15 bp, Homo sapiens
tgtttattttttcca

SEQ ID NO: 844362 - DNA, 15 bp, Homo sapiens
gtttattttttccac

SEQ ID NO: 844363 - DNA, 15 bp, Homo sapiens
tttattttttccacc

SEQ ID NO: 844364 - DNA, 15 bp, Homo sapiens
ttattttttccacct

SEQ ID NO: 844365 - DNA, 15 bp, Homo sapiens
tattttttccacctt

SEQ ID NO: 844366 - DNA, 15 bp, Homo sapiens
attttttccaccttg

SEQ ID NO: 844367 - DNA, 15 bp, Homo sapiens
ttttttccaccttgt

SEQ ID NO: 844368 - DNA, 15 bp, Homo sapiens
tttttccaccttgtt

SEQ ID NO: 844369 - DNA, 15 bp, Homo sapiens
ttttccaccttgttc

SEQ ID NO: 844370 - DNA, 15 bp, Homo sapiens
tttccaccttgttct

SEQ ID NO: 844371 - DNA, 15 bp, Homo sapiens
ttccaccttgttcta

SEQ ID NO: 844372 - DNA, 15 bp, Homo sapiens
tccaccttgttctaa

SEQ ID NO: 844373 - DNA, 15 bp, Homo sapiens
ccaccttgttctaag

SEQ ID NO: 844374 - DNA, 15 bp, Homo sapiens
caccttgttctaagc

SEQ ID NO: 844375 - DNA, 15 bp, Homo sapiens
accttgttctaagca

SEQ ID NO: 844376 - DNA, 15 bp, Homo sapiens
ccttgttctaagcac

SEQ ID NO: 844377 - DNA, 15 bp, Homo sapiens
cttgttctaagcaca

SEQ ID NO: 844378 - DNA, 15 bp, Homo sapiens
ttgttctaagcacag

SEQ ID NO: 844379 - DNA, 15 bp, Homo sapiens
tgttctaagcacagc

SEQ ID NO: 844380 - DNA, 15 bp, Homo sapiens
gttctaagcacagca

SEQ ID NO: 844381 - DNA, 15 bp, Homo sapiens
ttctaagcacagcaa

SEQ ID NO: 844382 - DNA, 15 bp, Homo sapiens
tctaagcacagcaat

SEQ ID NO: 844383 - DNA, 15 bp, Homo sapiens
ctaagcacagcaatg

SEQ ID NO: 844384 - DNA, 15 bp, Homo sapiens
taagcacagcaatga

SEQ ID NO: 844385 - DNA, 15 bp, Homo sapiens
aagcacagcaatgag

SEQ ID NO: 844386 - DNA, 15 bp, Homo sapiens
agcacagcaatgagc

SEQ ID NO: 844387 - DNA, 15 bp, Homo sapiens
gcacagcaatgagca

SEQ ID NO: 844388 - DNA, 15 bp, Homo sapiens
cacagcaatgagcat

SEQ ID NO: 844389 - DNA, 15 bp, Homo sapiens
acagcaatgagcatt

SEQ ID NO: 844390 - DNA, 15 bp, Homo sapiens
cagcaatgagcattc

SEQ ID NO: 844391 - DNA, 15 bp, Homo sapiens
agcaatgagcattcg

SEQ ID NO: 844392 - DNA, 15 bp, Homo sapiens
gcaatgagcattcgt

SEQ ID NO: 844393 - DNA, 15 bp, Homo sapiens
caatgagcattcgta

SEQ ID NO: 844394 - DNA, 15 bp, Homo sapiens
aatgagcattcgtaa

SEQ ID NO: 844395 - DNA, 15 bp, Homo sapiens
atgagcattcgtaaa

SEQ ID NO: 844396 - DNA, 15 bp, Homo sapiens
tgagcattcgtaaaa

SEQ ID NO: 844397 - DNA, 15 bp, Homo sapiens
gagcattcgtaaaag

SEQ ID NO: 844398 - DNA, 15 bp, Homo sapiens
agcattcgtaaaagc

SEQ ID NO: 844399 - DNA, 15 bp, Homo sapiens
gcattcgtaaaagcc

SEQ ID NO: 844400 - DNA, 15 bp, Homo sapiens
cattcgtaaaagcct

SEQ ID NO: 844401 - DNA, 15 bp, Homo sapiens
attcgtaaaagcctt

SEQ ID NO: 844402 - DNA, 15 bp, Homo sapiens
ttcgtaaaagcctta

SEQ ID NO: 844403 - DNA, 15 bp, Homo sapiens
tcgtaaaagccttac

SEQ ID NO: 844404 - DNA, 15 bp, Homo sapiens
cgtaaaagccttact

SEQ ID NO: 844405 - DNA, 15 bp, Homo sapiens
gtaaaagccttactt

SEQ ID NO: 844406 - DNA, 15 bp, Homo sapiens
taaaagccttacttt

SEQ ID NO: 844407 - DNA, 15 bp, Homo sapiens
aaaagccttacttta

SEQ ID NO: 844408 - DNA, 15 bp, Homo sapiens
aaagccttactttat

SEQ ID NO: 844409 - DNA, 15 bp, Homo sapiens
aagccttactttatt

SEQ ID NO: 844410 - DNA, 15 bp, Homo sapiens
agccttactttattt

SEQ ID NO: 844411 - DNA, 15 bp, Homo sapiens
gccttactttatttg

SEQ ID NO: 844412 - DNA, 15 bp, Homo sapiens
ccttactttatttgt

SEQ ID NO: 844413 - DNA, 15 bp, Homo sapiens
cttactttatttgtc

SEQ ID NO: 844414 - DNA, 15 bp, Homo sapiens
ttactttatttgtcc

SEQ ID NO: 844415 - DNA, 15 bp, Homo sapiens
tactttatttgtcca

SEQ ID NO: 844416 - DNA, 15 bp, Homo sapiens
actttatttgtccac

SEQ ID NO: 844417 - DNA, 15 bp, Homo sapiens
ctttatttgtccacc

SEQ ID NO: 844418 - DNA, 15 bp, Homo sapiens
tttatttgtccaccc

SEQ ID NO: 844419 - DNA, 15 bp, Homo sapiens
ttatttgtccaccct

SEQ ID NO: 844420 - DNA, 15 bp, Homo sapiens
tatttgtccaccctt

SEQ ID NO: 844421 - DNA, 15 bp, Homo sapiens
atttgtccacccttt

SEQ ID NO: 844422 - DNA, 15 bp, Homo sapiens
tttgtccaccctttt

SEQ ID NO: 844423 - DNA, 15 bp, Homo sapiens
ttgtccacccttttc

SEQ ID NO: 844424 - DNA, 15 bp, Homo sapiens
tgtccacccttttca

SEQ ID NO: 844425 - DNA, 15 bp, Homo sapiens
gtccacccttttcat

SEQ ID NO: 844426 - DNA, 15 bp, Homo sapiens
tccacccttttcatt

SEQ ID NO: 844427 - DNA, 15 bp, Homo sapiens
ccacccttttcattg

SEQ ID NO: 844428 - DNA, 15 bp, Homo sapiens
cacccttttcattgt

SEQ ID NO: 844429 - DNA, 15 bp, Homo sapiens
acccttttcattgtt

SEQ ID NO: 844430 - DNA, 15 bp, Homo sapiens
cccttttcattgttt

SEQ ID NO: 844431 - DNA, 15 bp, Homo sapiens
ccttttcattgtttt

SEQ ID NO: 844432 - DNA, 15 bp, Homo sapiens
cttttcattgttttt

SEQ ID NO: 844433 - DNA, 15 bp, Homo sapiens
ttttcattgtttttt

SEQ ID NO: 844434 - DNA, 15 bp, Homo sapiens
tttcattgtttttta

SEQ ID NO: 844435 - DNA, 15 bp, Homo sapiens
ttcattgttttttag

SEQ ID NO: 844436 - DNA, 15 bp, Homo sapiens
tcattgttttttaga

SEQ ID NO: 844437 - DNA, 15 bp, Homo sapiens
cattgttttttagaa

SEQ ID NO: 844438 - DNA, 15 bp, Homo sapiens
attgttttttagaag

SEQ ID NO: 844439 - DNA, 15 bp, Homo sapiens
ttgttttttagaagc

SEQ ID NO: 844440 - DNA, 15 bp, Homo sapiens
tgttttttagaagcc

SEQ ID NO: 844441 - DNA, 15 bp, Homo sapiens
gttttttagaagccc

SEQ ID NO: 844442 - DNA, 15 bp, Homo sapiens
ttttttagaagccca

SEQ ID NO: 844443 - DNA, 15 bp, Homo sapiens
tttttagaagcccaa

SEQ ID NO: 844444 - DNA, 15 bp, Homo sapiens
ttttagaagcccaac

SEQ ID NO: 844445 - DNA, 15 bp, Homo sapiens
tttagaagcccaaca

SEQ ID NO: 844446 - DNA, 15 bp, Homo sapiens
ttagaagcccaacac

SEQ ID NO: 844447 - DNA, 15 bp, Homo sapiens
tagaagcccaacact

SEQ ID NO: 844448 - DNA, 15 bp, Homo sapiens
agaagcccaacactt

SEQ ID NO: 844449 - DNA, 15 bp, Homo sapiens
gaagcccaacacttt

SEQ ID NO: 844450 - DNA, 15 bp, Homo sapiens
aagcccaacactttt

SEQ ID NO: 844451 - DNA, 15 bp, Homo sapiens
agcccaacacttttc

SEQ ID NO: 844452 - DNA, 15 bp, Homo sapiens
gcccaacacttttct

SEQ ID NO: 844453 - DNA, 15 bp, Homo sapiens
cccaacacttttctt

SEQ ID NO: 844454 - DNA, 15 bp, Homo sapiens
ccaacacttttcttt

SEQ ID NO: 844455 - DNA, 15 bp, Homo sapiens
caacacttttcttta

SEQ ID NO: 844456 - DNA, 15 bp, Homo sapiens
aacacttttctttaa

SEQ ID NO: 844457 - DNA, 15 bp, Homo sapiens
acacttttctttaac

SEQ ID NO: 844458 - DNA, 15 bp, Homo sapiens
cacttttctttaaca

SEQ ID NO: 844459 - DNA, 15 bp, Homo sapiens
acttttctttaacac

SEQ ID NO: 844460 - DNA, 15 bp, Homo sapiens
cttttctttaacaca

SEQ ID NO: 844461 - DNA, 15 bp, Homo sapiens
ttttctttaacacat

SEQ ID NO: 844462 - DNA, 15 bp, Homo sapiens
tttctttaacacata

SEQ ID NO: 844463 - DNA, 15 bp, Homo sapiens
ttctttaacacatac

SEQ ID NO: 844464 - DNA, 15 bp, Homo sapiens
tctttaacacataca

SEQ ID NO: 844465 - DNA, 15 bp, Homo sapiens
ctttaacacatacaa

SEQ ID NO: 844466 - DNA, 15 bp, Homo sapiens
tttaacacatacaat

SEQ ID NO: 844467 - DNA, 15 bp, Homo sapiens
ttaacacatacaatg

SEQ ID NO: 844468 - DNA, 15 bp, Homo sapiens
taacacatacaatgt

SEQ ID NO: 844469 - DNA, 15 bp, Homo sapiens
aacacatacaatgtg

SEQ ID NO: 844470 - DNA, 15 bp, Homo sapiens
acacatacaatgtgg

SEQ ID NO: 844471 - DNA, 15 bp, Homo sapiens
cacatacaatgtggc

SEQ ID NO: 844472 - DNA, 15 bp, Homo sapiens
acatacaatgtggcc

SEQ ID NO: 844473 - DNA, 15 bp, Homo sapiens
catacaatgtggcct

SEQ ID NO: 844474 - DNA, 15 bp, Homo sapiens
atacaatgtggcctt

SEQ ID NO: 844475 - DNA, 15 bp, Homo sapiens
tacaatgtggccttt

SEQ ID NO: 844476 - DNA, 15 bp, Homo sapiens
acaatgtggcctttt

SEQ ID NO: 844477 - DNA, 15 bp, Homo sapiens
caatgtggccttttc

SEQ ID NO: 844478 - DNA, 15 bp, Homo sapiens
aatgtggccttttca

SEQ ID NO: 844479 - DNA, 15 bp, Homo sapiens
atgtggccttttcat

SEQ ID NO: 844480 - DNA, 15 bp, Homo sapiens
tgtggccttttcatg

SEQ ID NO: 844481 - DNA, 15 bp, Homo sapiens
gtggccttttcatga

SEQ ID NO: 844482 - DNA, 15 bp, Homo sapiens
tggccttttcatgaa

SEQ ID NO: 844483 - DNA, 15 bp, Homo sapiens
ggccttttcatgaaa

SEQ ID NO: 844484 - DNA, 15 bp, Homo sapiens
gccttttcatgaaat

SEQ ID NO: 844485 - DNA, 15 bp, Homo sapiens
ccttttcatgaaatc

SEQ ID NO: 844486 - DNA, 15 bp, Homo sapiens
cttttcatgaaatca

SEQ ID NO: 844487 - DNA, 15 bp, Homo sapiens
ttttcatgaaatcaa

SEQ ID NO: 844488 - DNA, 15 bp, Homo sapiens
tttcatgaaatcaat

SEQ ID NO: 844489 - DNA, 15 bp, Homo sapiens
ttcatgaaatcaatt

SEQ ID NO: 844490 - DNA, 15 bp, Homo sapiens
tcatgaaatcaattc

SEQ ID NO: 844491 - DNA, 15 bp, Homo sapiens
catgaaatcaattcc

SEQ ID NO: 844492 - DNA, 15 bp, Homo sapiens
atgaaatcaattccc

SEQ ID NO: 844493 - DNA, 15 bp, Homo sapiens
tgaaatcaattccct

SEQ ID NO: 844494 - DNA, 15 bp, Homo sapiens
gaaatcaattccctg

SEQ ID NO: 844495 - DNA, 15 bp, Homo sapiens
aaatcaattccctgc

SEQ ID NO: 844496 - DNA, 15 bp, Homo sapiens
aatcaattccctgca

SEQ ID NO: 844497 - DNA, 15 bp, Homo sapiens
atcaattccctgcac

SEQ ID NO: 844498 - DNA, 15 bp, Homo sapiens
tcaattccctgcaca

SEQ ID NO: 844499 - DNA, 15 bp, Homo sapiens
caattccctgcacag

SEQ ID NO: 844500 - DNA, 15 bp, Homo sapiens
aattccctgcacagt

SEQ ID NO: 844501 - DNA, 15 bp, Homo sapiens
attccctgcacagtg

SEQ ID NO: 844502 - DNA, 15 bp, Homo sapiens
ttccctgcacagtga

SEQ ID NO: 844503 - DNA, 15 bp, Homo sapiens
tccctgcacagtgat

SEQ ID NO: 844504 - DNA, 15 bp, Homo sapiens
ccctgcacagtgata

SEQ ID NO: 844505 - DNA, 15 bp, Homo sapiens
cctgcacagtgatat

SEQ ID NO: 844506 - DNA, 15 bp, Homo sapiens
ctgcacagtgatata

SEQ ID NO: 844507 - DNA, 15 bp, Homo sapiens
tgcacagtgatatat

SEQ ID NO: 844508 - DNA, 15 bp, Homo sapiens
gcacagtgatatatg

SEQ ID NO: 844509 - DNA, 15 bp, Homo sapiens
cacagtgatatatgg

SEQ ID NO: 844510 - DNA, 15 bp, Homo sapiens
acagtgatatatggc

SEQ ID NO: 844511 - DNA, 15 bp, Homo sapiens
cagtgatatatggca

SEQ ID NO: 844512 - DNA, 15 bp, Homo sapiens
agtgatatatggcag

SEQ ID NO: 844513 - DNA, 15 bp, Homo sapiens
gtgatatatggcaga

SEQ ID NO: 844514 - DNA, 15 bp, Homo sapiens
tgatatatggcagag

SEQ ID NO: 844515 - DNA, 15 bp, Homo sapiens
gatatatggcagagc

SEQ ID NO: 844516 - DNA, 15 bp, Homo sapiens
atatatggcagagca

SEQ ID NO: 844517 - DNA, 15 bp, Homo sapiens
tatatggcagagcat

SEQ ID NO: 844518 - DNA, 15 bp, Homo sapiens
atatggcagagcatt

SEQ ID NO: 844519 - DNA, 15 bp, Homo sapiens
tatggcagagcattg

SEQ ID NO: 844520 - DNA, 15 bp, Homo sapiens
atggcagagcattga

SEQ ID NO: 844521 - DNA, 15 bp, Homo sapiens
tggcagagcattgaa

SEQ ID NO: 844522 - DNA, 15 bp, Homo sapiens
ggcagagcattgaat

SEQ ID NO: 844523 - DNA, 15 bp, Homo sapiens
gcagagcattgaatt

SEQ ID NO: 844524 - DNA, 15 bp, Homo sapiens
cagagcattgaattc

SEQ ID NO: 844525 - DNA, 15 bp, Homo sapiens
agagcattgaattct

SEQ ID NO: 844526 - DNA, 15 bp, Homo sapiens
gagcattgaattctg

SEQ ID NO: 844527 - DNA, 15 bp, Homo sapiens
agcattgaattctgc

SEQ ID NO: 844528 - DNA, 15 bp, Homo sapiens
gcattgaattctgcc

SEQ ID NO: 844529 - DNA, 15 bp, Homo sapiens
cattgaattctgcca

SEQ ID NO: 844530 - DNA, 15 bp, Homo sapiens
attgaattctgccaa

SEQ ID NO: 844531 - DNA, 15 bp, Homo sapiens
ttgaattctgccaaa

SEQ ID NO: 844532 - DNA, 15 bp, Homo sapiens
tgaattctgccaaat

SEQ ID NO: 844533 - DNA, 15 bp, Homo sapiens
gaattctgccaaata

SEQ ID NO: 844534 - DNA, 15 bp, Homo sapiens
aattctgccaaatat

SEQ ID NO: 844535 - DNA, 15 bp, Homo sapiens
attctgccaaatatc

SEQ ID NO: 844536 - DNA, 15 bp, Homo sapiens
ttctgccaaatatct

SEQ ID NO: 844537 - DNA, 15 bp, Homo sapiens
tctgccaaatatctg

SEQ ID NO: 844538 - DNA, 15 bp, Homo sapiens
ctgccaaatatctgg

SEQ ID NO: 844539 - DNA, 15 bp, Homo sapiens
tgccaaatatctggc

SEQ ID NO: 844540 - DNA, 15 bp, Homo sapiens
gccaaatatctggct

SEQ ID NO: 844541 - DNA, 15 bp, Homo sapiens
ccaaatatctggctg

SEQ ID NO: 844542 - DNA, 15 bp, Homo sapiens
caaatatctggctga

SEQ ID NO: 844543 - DNA, 15 bp, Homo sapiens
aaatatctggctgag

SEQ ID NO: 844544 - DNA, 15 bp, Homo sapiens
aatatctggctgagt

SEQ ID NO: 844545 - DNA, 15 bp, Homo sapiens
atatctggctgagtg

SEQ ID NO: 844546 - DNA, 15 bp, Homo sapiens
tatctggctgagtgt

SEQ ID NO: 844547 - DNA, 15 bp, Homo sapiens
atctggctgagtgtt

SEQ ID NO: 844548 - DNA, 15 bp, Homo sapiens
tctggctgagtgttt

SEQ ID NO: 844549 - DNA, 15 bp, Homo sapiens
ctggctgagtgtttg

SEQ ID NO: 844550 - DNA, 15 bp, Homo sapiens
tggctgagtgtttgg

SEQ ID NO: 844551 - DNA, 15 bp, Homo sapiens
ggctgagtgtttggt

SEQ ID NO: 844552 - DNA, 15 bp, Homo sapiens
gctgagtgtttggtg

SEQ ID NO: 844553 - DNA, 15 bp, Homo sapiens
ctgagtgtttggtgt

SEQ ID NO: 844554 - DNA, 15 bp, Homo sapiens
tgagtgtttggtgtt

SEQ ID NO: 844555 - DNA, 15 bp, Homo sapiens
gagtgtttggtgttg

SEQ ID NO: 844556 - DNA, 15 bp, Homo sapiens
agtgtttggtgttgt

SEQ ID NO: 844557 - DNA, 15 bp, Homo sapiens
gtgtttggtgttgta

SEQ ID NO: 844558 - DNA, 15 bp, Homo sapiens
tgtttggtgttgtat

SEQ ID NO: 844559 - DNA, 15 bp, Homo sapiens
gtttggtgttgtatg

SEQ ID NO: 844560 - DNA, 15 bp, Homo sapiens
tttggtgttgtatgg

SEQ ID NO: 844561 - DNA, 15 bp, Homo sapiens
ttggtgttgtatggt

SEQ ID NO: 844562 - DNA, 15 bp, Homo sapiens
tggtgttgtatggtc

SEQ ID NO: 844563 - DNA, 15 bp, Homo sapiens
ggtgttgtatggtct

SEQ ID NO: 844564 - DNA, 15 bp, Homo sapiens
gtgttgtatggtctc

SEQ ID NO: 844565 - DNA, 15 bp, Homo sapiens
tgttgtatggtctcc

SEQ ID NO: 844566 - DNA, 15 bp, Homo sapiens
gttgtatggtctcca

SEQ ID NO: 844567 - DNA, 15 bp, Homo sapiens
ttgtatggtctccat

SEQ ID NO: 844568 - DNA, 15 bp, Homo sapiens
tgtatggtctccatg

SEQ ID NO: 844569 - DNA, 15 bp, Homo sapiens
gtatggtctccatga

SEQ ID NO: 844570 - DNA, 15 bp, Homo sapiens
tatggtctccatgag

SEQ ID NO: 844571 - DNA, 15 bp, Homo sapiens
atggtctccatgaga

SEQ ID NO: 844572 - DNA, 15 bp, Homo sapiens
tggtctccatgagat

SEQ ID NO: 844573 - DNA, 15 bp, Homo sapiens
ggtctccatgagatt

SEQ ID NO: 844574 - DNA, 15 bp, Homo sapiens
gtctccatgagattt

SEQ ID NO: 844575 - DNA, 15 bp, Homo sapiens
tctccatgagatttt

SEQ ID NO: 844576 - DNA, 15 bp, Homo sapiens
ctccatgagattttg

SEQ ID NO: 844577 - DNA, 15 bp, Homo sapiens
tccatgagattttgt

SEQ ID NO: 844578 - DNA, 15 bp, Homo sapiens
ccatgagattttgtc

SEQ ID NO: 844579 - DNA, 15 bp, Homo sapiens
catgagattttgtct

SEQ ID NO: 844580 - DNA, 15 bp, Homo sapiens
atgagattttgtctc

SEQ ID NO: 844581 - DNA, 15 bp, Homo sapiens
tgagattttgtctct

SEQ ID NO: 844582 - DNA, 15 bp, Homo sapiens
gagattttgtctcta

SEQ ID NO: 844583 - DNA, 15 bp, Homo sapiens
agattttgtctctat

SEQ ID NO: 844584 - DNA, 15 bp, Homo sapiens
gattttgtctctata

SEQ ID NO: 844585 - DNA, 15 bp, Homo sapiens
attttgtctctataa

SEQ ID NO: 844586 - DNA, 15 bp, Homo sapiens
ttttgtctctataat

SEQ ID NO: 844587 - DNA, 15 bp, Homo sapiens
tttgtctctataata

SEQ ID NO: 844588 - DNA, 15 bp, Homo sapiens
ttgtctctataatac

SEQ ID NO: 844589 - DNA, 15 bp, Homo sapiens
tgtctctataatact

SEQ ID NO: 844590 - DNA, 15 bp, Homo sapiens
gtctctataatactt

SEQ ID NO: 844591 - DNA, 15 bp, Homo sapiens
tctctataatacttg

SEQ ID NO: 844592 - DNA, 15 bp, Homo sapiens
ctctataatacttgg

SEQ ID NO: 844593 - DNA, 15 bp, Homo sapiens
tctataatacttggg

SEQ ID NO: 844594 - DNA, 15 bp, Homo sapiens
ctataatacttgggt

SEQ ID NO: 844595 - DNA, 15 bp, Homo sapiens
tataatacttgggtt

SEQ ID NO: 844596 - DNA, 15 bp, Homo sapiens
ataatacttgggtta

SEQ ID NO: 844597 - DNA, 15 bp, Homo sapiens
taatacttgggttaa

SEQ ID NO: 844598 - DNA, 15 bp, Homo sapiens
aatacttgggttaat

SEQ ID NO: 844599 - DNA, 15 bp, Homo sapiens
atacttgggttaatc

SEQ ID NO: 844600 - DNA, 15 bp, Homo sapiens
tacttgggttaatct

SEQ ID NO: 844601 - DNA, 15 bp, Homo sapiens
acttgggttaatctc

SEQ ID NO: 844602 - DNA, 15 bp, Homo sapiens
cttgggttaatctcc

SEQ ID NO: 844603 - DNA, 15 bp, Homo sapiens
ttgggttaatctcct

SEQ ID NO: 844604 - DNA, 15 bp, Homo sapiens
tgggttaatctcctt

SEQ ID NO: 844605 - DNA, 15 bp, Homo sapiens
gggttaatctccttg

SEQ ID NO: 844606 - DNA, 15 bp, Homo sapiens
ggttaatctccttgg

SEQ ID NO: 844607 - DNA, 15 bp, Homo sapiens
gttaatctccttgga

SEQ ID NO: 844608 - DNA, 15 bp, Homo sapiens
ttaatctccttggat

SEQ ID NO: 844609 - DNA, 15 bp, Homo sapiens
taatctccttggata

SEQ ID NO: 844610 - DNA, 15 bp, Homo sapiens
aatctccttggatat

SEQ ID NO: 844611 - DNA, 15 bp, Homo sapiens
atctccttggatata

SEQ ID NO: 844612 - DNA, 15 bp, Homo sapiens
tctccttggatatac

SEQ ID NO: 844613 - DNA, 15 bp, Homo sapiens
ctccttggatatact

SEQ ID NO: 844614 - DNA, 15 bp, Homo sapiens
tccttggatatactt

SEQ ID NO: 844615 - DNA, 15 bp, Homo sapiens
ccttggatatacttg

SEQ ID NO: 844616 - DNA, 15 bp, Homo sapiens
cttggatatacttgt

SEQ ID NO: 844617 - DNA, 15 bp, Homo sapiens
ttggatatacttgtg

SEQ ID NO: 844618 - DNA, 15 bp, Homo sapiens
tggatatacttgtgt

SEQ ID NO: 844619 - DNA, 15 bp, Homo sapiens
ggatatacttgtgtg

SEQ ID NO: 844620 - DNA, 15 bp, Homo sapiens
gatatacttgtgtga

SEQ ID NO: 844621 - DNA, 15 bp, Homo sapiens
atatacttgtgtgaa

SEQ ID NO: 844622 - DNA, 15 bp, Homo sapiens
tatacttgtgtgaat

SEQ ID NO: 844623 - DNA, 15 bp, Homo sapiens
atacttgtgtgaatc

SEQ ID NO: 844624 - DNA, 15 bp, Homo sapiens
tacttgtgtgaatca

SEQ ID NO: 844625 - DNA, 15 bp, Homo sapiens
acttgtgtgaatcaa

SEQ ID NO: 844626 - DNA, 15 bp, Homo sapiens
cttgtgtgaatcaaa

SEQ ID NO: 844627 - DNA, 15 bp, Homo sapiens
ttgtgtgaatcaaac

SEQ ID NO: 844628 - DNA, 15 bp, Homo sapiens
tgtgtgaatcaaact

SEQ ID NO: 844629 - DNA, 15 bp, Homo sapiens
gtgtgaatcaaacta

SEQ ID NO: 844630 - DNA, 15 bp, Homo sapiens
tgtgaatcaaactat

SEQ ID NO: 844631 - DNA, 15 bp, Homo sapiens
gtgaatcaaactatg

SEQ ID NO: 844632 - DNA, 15 bp, Homo sapiens
tgaatcaaactatgt

SEQ ID NO: 844633 - DNA, 15 bp, Homo sapiens
gaatcaaactatgtt

SEQ ID NO: 844634 - DNA, 15 bp, Homo sapiens
aatcaaactatgtta

SEQ ID NO: 844635 - DNA, 15 bp, Homo sapiens
atcaaactatgttaa

SEQ ID NO: 844636 - DNA, 15 bp, Homo sapiens
tcaaactatgttaag

SEQ ID NO: 844637 - DNA, 15 bp, Homo sapiens
caaactatgttaagg

SEQ ID NO: 844638 - DNA, 15 bp, Homo sapiens
aaactatgttaaggg

SEQ ID NO: 844639 - DNA, 15 bp, Homo sapiens
aactatgttaaggga

SEQ ID NO: 844640 - DNA, 15 bp, Homo sapiens
actatgttaagggaa

SEQ ID NO: 844641 - DNA, 15 bp, Homo sapiens
ctatgttaagggaaa

SEQ ID NO: 844642 - DNA, 15 bp, Homo sapiens
tatgttaagggaaat

SEQ ID NO: 844643 - DNA, 15 bp, Homo sapiens
atgttaagggaaata

SEQ ID NO: 844644 - DNA, 15 bp, Homo sapiens
tgttaagggaaatag

SEQ ID NO: 844645 - DNA, 15 bp, Homo sapiens
gttaagggaaatagg

SEQ ID NO: 844646 - DNA, 15 bp, Homo sapiens
ttaagggaaatagga

SEQ ID NO: 844647 - DNA, 15 bp, Homo sapiens
taagggaaataggac

SEQ ID NO: 844648 - DNA, 15 bp, Homo sapiens
aagggaaataggaca

SEQ ID NO: 844649 - DNA, 15 bp, Homo sapiens
agggaaataggacaa

SEQ ID NO: 844650 - DNA, 15 bp, Homo sapiens
gggaaataggacaac

SEQ ID NO: 844651 - DNA, 15 bp, Homo sapiens
ggaaataggacaact

SEQ ID NO: 844652 - DNA, 15 bp, Homo sapiens
gaaataggacaacta

SEQ ID NO: 844653 - DNA, 15 bp, Homo sapiens
aaataggacaactaa

SEQ ID NO: 844654 - DNA, 15 bp, Homo sapiens
aataggacaactaaa

SEQ ID NO: 844655 - DNA, 15 bp, Homo sapiens
ataggacaactaaaa

SEQ ID NO: 844656 - DNA, 15 bp, Homo sapiens
taggacaactaaaat

SEQ ID NO: 844657 - DNA, 15 bp, Homo sapiens
aggacaactaaaata

SEQ ID NO: 844658 - DNA, 15 bp, Homo sapiens
ggacaactaaaatat

SEQ ID NO: 844659 - DNA, 15 bp, Homo sapiens
gacaactaaaatatt

SEQ ID NO: 844660 - DNA, 15 bp, Homo sapiens
acaactaaaatattt

SEQ ID NO: 844661 - DNA, 15 bp, Homo sapiens
caactaaaatatttg

SEQ ID NO: 844662 - DNA, 15 bp, Homo sapiens
aactaaaatatttgc

SEQ ID NO: 844663 - DNA, 15 bp, Homo sapiens
actaaaatatttgca

SEQ ID NO: 844664 - DNA, 15 bp, Homo sapiens
ctaaaatatttgcac

SEQ ID NO: 844665 - DNA, 15 bp, Homo sapiens
taaaatatttgcaca

SEQ ID NO: 844666 - DNA, 15 bp, Homo sapiens
aaaatatttgcacat

SEQ ID NO: 844667 - DNA, 15 bp, Homo sapiens
aaatatttgcacatg

SEQ ID NO: 844668 - DNA, 15 bp, Homo sapiens
aatatttgcacatgc

SEQ ID NO: 844669 - DNA, 15 bp, Homo sapiens
atatttgcacatgca

SEQ ID NO: 844670 - DNA, 15 bp, Homo sapiens
tatttgcacatgcaa

SEQ ID NO: 844671 - DNA, 15 bp, Homo sapiens
atttgcacatgcaac

SEQ ID NO: 844672 - DNA, 15 bp, Homo sapiens
tttgcacatgcaact

SEQ ID NO: 844673 - DNA, 15 bp, Homo sapiens
ttgcacatgcaactt

SEQ ID NO: 844674 - DNA, 15 bp, Homo sapiens
tgcacatgcaactta

SEQ ID NO: 844675 - DNA, 15 bp, Homo sapiens
gcacatgcaacttat

SEQ ID NO: 844676 - DNA, 15 bp, Homo sapiens
cacatgcaacttatt

SEQ ID NO: 844677 - DNA, 15 bp, Homo sapiens
acatgcaacttattg

SEQ ID NO: 844678 - DNA, 15 bp, Homo sapiens
catgcaacttattgg

SEQ ID NO: 844679 - DNA, 15 bp, Homo sapiens
atgcaacttattggt

SEQ ID NO: 844680 - DNA, 15 bp, Homo sapiens
tgcaacttattggtc

SEQ ID NO: 844681 - DNA, 15 bp, Homo sapiens
gcaacttattggtcc

SEQ ID NO: 844682 - DNA, 15 bp, Homo sapiens
caacttattggtccc

SEQ ID NO: 844683 - DNA, 15 bp, Homo sapiens
aacttattggtccca

SEQ ID NO: 844684 - DNA, 15 bp, Homo sapiens
acttattggtcccac

SEQ ID NO: 844685 - DNA, 15 bp, Homo sapiens
cttattggtcccact

SEQ ID NO: 844686 - DNA, 15 bp, Homo sapiens
ttattggtcccactt

SEQ ID NO: 844687 - DNA, 15 bp, Homo sapiens
tattggtcccacttt

SEQ ID NO: 844688 - DNA, 15 bp, Homo sapiens
attggtcccactttt

SEQ ID NO: 844689 - DNA, 15 bp, Homo sapiens
ttggtcccacttttt

SEQ ID NO: 844690 - DNA, 15 bp, Homo sapiens
tggtcccacttttta

SEQ ID NO: 844691 - DNA, 15 bp, Homo sapiens
ggtcccactttttat

SEQ ID NO: 844692 - DNA, 15 bp, Homo sapiens
gtcccactttttatt

SEQ ID NO: 844693 - DNA, 15 bp, Homo sapiens
tcccactttttattc

SEQ ID NO: 844694 - DNA, 15 bp, Homo sapiens
cccactttttattct

SEQ ID NO: 844695 - DNA, 15 bp, Homo sapiens
ccactttttattctt

SEQ ID NO: 844696 - DNA, 15 bp, Homo sapiens
cactttttattcttt

SEQ ID NO: 844697 - DNA, 15 bp, Homo sapiens
actttttattctttt

SEQ ID NO: 844698 - DNA, 15 bp, Homo sapiens
ctttttattcttttg

SEQ ID NO: 844699 - DNA, 15 bp, Homo sapiens
tttttattcttttgc

SEQ ID NO: 844700 - DNA, 15 bp, Homo sapiens
ttttattcttttgca

SEQ ID NO: 844701 - DNA, 15 bp, Homo sapiens
tttattcttttgcag

SEQ ID NO: 844702 - DNA, 15 bp, Homo sapiens
ttattcttttgcaga

SEQ ID NO: 844703 - DNA, 15 bp, Homo sapiens
tattcttttgcagag

SEQ ID NO: 844704 - DNA, 15 bp, Homo sapiens
attcttttgcagaga

SEQ ID NO: 844705 - DNA, 15 bp, Homo sapiens
ttcttttgcagagaa

SEQ ID NO: 844706 - DNA, 15 bp, Homo sapiens
tcttttgcagagaat

SEQ ID NO: 844707 - DNA, 15 bp, Homo sapiens
cttttgcagagaatg

SEQ ID NO: 844708 - DNA, 15 bp, Homo sapiens
ttttgcagagaatgg

SEQ ID NO: 844709 - DNA, 15 bp, Homo sapiens
tttgcagagaatggg

SEQ ID NO: 844710 - DNA, 15 bp, Homo sapiens
ttgcagagaatggga

SEQ ID NO: 844711 - DNA, 15 bp, Homo sapiens
tgcagagaatgggat

SEQ ID NO: 844712 - DNA, 15 bp, Homo sapiens
gcagagaatgggata

SEQ ID NO: 844713 - DNA, 15 bp, Homo sapiens
cagagaatgggatag

SEQ ID NO: 844714 - DNA, 15 bp, Homo sapiens
agagaatgggataga

SEQ ID NO: 844715 - DNA, 15 bp, Homo sapiens
gagaatgggatagag

SEQ ID NO: 844716 - DNA, 15 bp, Homo sapiens
agaatgggatagaga

SEQ ID NO: 844717 - DNA, 15 bp, Homo sapiens
gaatgggatagagag

SEQ ID NO: 844718 - DNA, 15 bp, Homo sapiens
aatgggatagagagc

SEQ ID NO: 844719 - DNA, 15 bp, Homo sapiens
atgggatagagagct

SEQ ID NO: 844720 - DNA, 15 bp, Homo sapiens
tgggatagagagctg

SEQ ID NO: 844721 - DNA, 15 bp, Homo sapiens
gggatagagagctgg

SEQ ID NO: 844722 - DNA, 15 bp, Homo sapiens
ggatagagagctggc

SEQ ID NO: 844723 - DNA, 15 bp, Homo sapiens
gatagagagctggct

SEQ ID NO: 844724 - DNA, 15 bp, Homo sapiens
atagagagctggctt

SEQ ID NO: 844725 - DNA, 15 bp, Homo sapiens
tagagagctggcttc

SEQ ID NO: 844726 - DNA, 15 bp, Homo sapiens
agagagctggcttca

SEQ ID NO: 844727 - DNA, 15 bp, Homo sapiens
gagagctggcttcaa

SEQ ID NO: 844728 - DNA, 15 bp, Homo sapiens
agagctggcttcaaa

SEQ ID NO: 844729 - DNA, 15 bp, Homo sapiens
gagctggcttcaaag

SEQ ID NO: 844730 - DNA, 15 bp, Homo sapiens
agctggcttcaaaga

SEQ ID NO: 844731 - DNA, 15 bp, Homo sapiens
gctggcttcaaagaa

SEQ ID NO: 844732 - DNA, 15 bp, Homo sapiens
ctggcttcaaagaaa

SEQ ID NO: 844733 - DNA, 15 bp, Homo sapiens
tggcttcaaagaaaa

SEQ ID NO: 844734 - DNA, 15 bp, Homo sapiens
ggcttcaaagaaaaa

SEQ ID NO: 844735 - DNA, 15 bp, Homo sapiens
gcttcaaagaaaaat

SEQ ID NO: 844736 - DNA, 15 bp, Homo sapiens
cttcaaagaaaaatc

SEQ ID NO: 844737 - DNA, 15 bp, Homo sapiens
ttcaaagaaaaatcc

SEQ ID NO: 844738 - DNA, 15 bp, Homo sapiens
tcaaagaaaaatcct

SEQ ID NO: 844739 - DNA, 15 bp, Homo sapiens
caaagaaaaatccta

SEQ ID NO: 844740 - DNA, 15 bp, Homo sapiens
aaagaaaaatcctaa

SEQ ID NO: 844741 - DNA, 15 bp, Homo sapiens
aagaaaaatcctaaa

SEQ ID NO: 844742 - DNA, 15 bp, Homo sapiens
agaaaaatcctaaac

SEQ ID NO: 844743 - DNA, 15 bp, Homo sapiens
gaaaaatcctaaact

SEQ ID NO: 844744 - DNA, 15 bp, Homo sapiens
aaaaatcctaaactc

SEQ ID NO: 844745 - DNA, 15 bp, Homo sapiens
aaaatcctaaactca

SEQ ID NO: 844746 - DNA, 15 bp, Homo sapiens
aaatcctaaactcat

SEQ ID NO: 844747 - DNA, 15 bp, Homo sapiens
aatcctaaactcatt

SEQ ID NO: 844748 - DNA, 15 bp, Homo sapiens
atcctaaactcatta

SEQ ID NO: 844749 - DNA, 15 bp, Homo sapiens
tcctaaactcattaa

SEQ ID NO: 844750 - DNA, 15 bp, Homo sapiens
cctaaactcattaat

SEQ ID NO: 844751 - DNA, 15 bp, Homo sapiens
ctaaactcattaatg

SEQ ID NO: 844752 - DNA, 15 bp, Homo sapiens
taaactcattaatgc

SEQ ID NO: 844753 - DNA, 15 bp, Homo sapiens
aaactcattaatgcc

SEQ ID NO: 844754 - DNA, 15 bp, Homo sapiens
aactcattaatgccc

SEQ ID NO: 844755 - DNA, 15 bp, Homo sapiens
actcattaatgccct

SEQ ID NO: 844756 - DNA, 15 bp, Homo sapiens
ctcattaatgccctt

SEQ ID NO: 844757 - DNA, 15 bp, Homo sapiens
tcattaatgcccttc

SEQ ID NO: 844758 - DNA, 15 bp, Homo sapiens
cattaatgcccttcg

SEQ ID NO: 844759 - DNA, 15 bp, Homo sapiens
attaatgcccttcgg

SEQ ID NO: 844760 - DNA, 15 bp, Homo sapiens
ttaatgcccttcggc

SEQ ID NO: 844761 - DNA, 15 bp, Homo sapiens
taatgcccttcggcg

SEQ ID NO: 844762 - DNA, 15 bp, Homo sapiens
aatgcccttcggcga

SEQ ID NO: 844763 - DNA, 15 bp, Homo sapiens
atgcccttcggcgat

SEQ ID NO: 844764 - DNA, 15 bp, Homo sapiens
tgcccttcggcgatg

SEQ ID NO: 844765 - DNA, 15 bp, Homo sapiens
gcccttcggcgatgt

SEQ ID NO: 844766 - DNA, 15 bp, Homo sapiens
cccttcggcgatgtt

SEQ ID NO: 844767 - DNA, 15 bp, Homo sapiens
ccttcggcgatgttt

SEQ ID NO: 844768 - DNA, 15 bp, Homo sapiens
cttcggcgatgtttt

SEQ ID NO: 844769 - DNA, 15 bp, Homo sapiens
ttcggcgatgttttt

SEQ ID NO: 844770 - DNA, 15 bp, Homo sapiens
tcggcgatgtttttt

SEQ ID NO: 844771 - DNA, 15 bp, Homo sapiens
cggcgatgttttttc

SEQ ID NO: 844772 - DNA, 15 bp, Homo sapiens
ggcgatgttttttct

SEQ ID NO: 844773 - DNA, 15 bp, Homo sapiens
gcgatgttttttctg

SEQ ID NO: 844774 - DNA, 15 bp, Homo sapiens
cgatgttttttctgg

SEQ ID NO: 844775 - DNA, 15 bp, Homo sapiens
gatgttttttctgga

SEQ ID NO: 844776 - DNA, 15 bp, Homo sapiens
atgttttttctggag

SEQ ID NO: 844777 - DNA, 15 bp, Homo sapiens
tgttttttctggaga

SEQ ID NO: 844778 - DNA, 15 bp, Homo sapiens
gttttttctggagat

SEQ ID NO: 844779 - DNA, 15 bp, Homo sapiens
ttttttctggagatt

SEQ ID NO: 844780 - DNA, 15 bp, Homo sapiens
tttttctggagattt

SEQ ID NO: 844781 - DNA, 15 bp, Homo sapiens
ttttctggagattta

SEQ ID NO: 844782 - DNA, 15 bp, Homo sapiens
tttctggagatttat

SEQ ID NO: 844783 - DNA, 15 bp, Homo sapiens
ttctggagatttatg

SEQ ID NO: 844784 - DNA, 15 bp, Homo sapiens
tctggagatttatgt

SEQ ID NO: 844785 - DNA, 15 bp, Homo sapiens
ctggagatttatgtt

SEQ ID NO: 844786 - DNA, 15 bp, Homo sapiens
tggagatttatgttc

SEQ ID NO: 844787 - DNA, 15 bp, Homo sapiens
ggagatttatgttct

SEQ ID NO: 844788 - DNA, 15 bp, Homo sapiens
gagatttatgttcta

SEQ ID NO: 844789 - DNA, 15 bp, Homo sapiens
agatttatgttctat

SEQ ID NO: 844790 - DNA, 15 bp, Homo sapiens
gatttatgttctatg

SEQ ID NO: 844791 - DNA, 15 bp, Homo sapiens
atttatgttctatgg

SEQ ID NO: 844792 - DNA, 15 bp, Homo sapiens
tttatgttctatgga

SEQ ID NO: 844793 - DNA, 15 bp, Homo sapiens
ttatgttctatggaa

SEQ ID NO: 844794 - DNA, 15 bp, Homo sapiens
tatgttctatggaat

SEQ ID NO: 844795 - DNA, 15 bp, Homo sapiens
atgttctatggaatc

SEQ ID NO: 844796 - DNA, 15 bp, Homo sapiens
tgttctatggaatct

SEQ ID NO: 844797 - DNA, 15 bp, Homo sapiens
gttctatggaatctt

SEQ ID NO: 844798 - DNA, 15 bp, Homo sapiens
ttctatggaatcttt

SEQ ID NO: 844799 - DNA, 15 bp, Homo sapiens
tctatggaatctttt

SEQ ID NO: 844800 - DNA, 15 bp, Homo sapiens
ctatggaatcttttt

SEQ ID NO: 844801 - DNA, 15 bp, Homo sapiens
tatggaatcttttta

SEQ ID NO: 844802 - DNA, 15 bp, Homo sapiens
atggaatctttttat

SEQ ID NO: 844803 - DNA, 15 bp, Homo sapiens
tggaatctttttata

SEQ ID NO: 844804 - DNA, 15 bp, Homo sapiens
ggaatctttttatat

SEQ ID NO: 844805 - DNA, 15 bp, Homo sapiens
gaatctttttatatt

SEQ ID NO: 844806 - DNA, 15 bp, Homo sapiens
aatctttttatattt

SEQ ID NO: 844807 - DNA, 15 bp, Homo sapiens
atctttttatattta

SEQ ID NO: 844808 - DNA, 15 bp, Homo sapiens
tctttttatatttag

SEQ ID NO: 844809 - DNA, 15 bp, Homo sapiens
ctttttatatttagg

SEQ ID NO: 844810 - DNA, 15 bp, Homo sapiens
tttttatatttaggg

SEQ ID NO: 844811 - DNA, 15 bp, Homo sapiens
ttttatatttagggg

SEQ ID NO: 844812 - DNA, 15 bp, Homo sapiens
tttatatttaggggt

SEQ ID NO: 844813 - DNA, 15 bp, Homo sapiens
ttatatttaggggta

SEQ ID NO: 844814 - DNA, 15 bp, Homo sapiens
tatatttaggggtaa

SEQ ID NO: 844815 - DNA, 15 bp, Homo sapiens
atatttaggggtaag

SEQ ID NO: 844816 - DNA, 15 bp, Homo sapiens
tatttaggggtaagg

SEQ ID NO: 844817 - DNA, 15 bp, Homo sapiens
atttaggggtaagga

SEQ ID NO: 844818 - DNA, 15 bp, Homo sapiens
tttaggggtaaggat

SEQ ID NO: 844819 - DNA, 15 bp, Homo sapiens
ttaggggtaaggatc

SEQ ID NO: 844820 - DNA, 15 bp, Homo sapiens
taggggtaaggatct

SEQ ID NO: 844821 - DNA, 15 bp, Homo sapiens
aggggtaaggatctc

SEQ ID NO: 844822 - DNA, 15 bp, Homo sapiens
ggggtaaggatctca

SEQ ID NO: 844823 - DNA, 15 bp, Homo sapiens
gggtaaggatctcat

SEQ ID NO: 844824 - DNA, 15 bp, Homo sapiens
ggtaaggatctcatt

SEQ ID NO: 844825 - DNA, 15 bp, Homo sapiens
gtaaggatctcattt

SEQ ID NO: 844826 - DNA, 15 bp, Homo sapiens
taaggatctcatttg

SEQ ID NO: 844827 - DNA, 15 bp, Homo sapiens
aaggatctcatttgt

SEQ ID NO: 844828 - DNA, 15 bp, Homo sapiens
aggatctcatttgta

SEQ ID NO: 844829 - DNA, 15 bp, Homo sapiens
ggatctcatttgtac

SEQ ID NO: 844830 - DNA, 15 bp, Homo sapiens
gatctcatttgtaca

SEQ ID NO: 844831 - DNA, 15 bp, Homo sapiens
atctcatttgtacat

SEQ ID NO: 844832 - DNA, 15 bp, Homo sapiens
tctcatttgtacatt

SEQ ID NO: 844833 - DNA, 15 bp, Homo sapiens
ctcatttgtacattc

SEQ ID NO: 844834 - DNA, 15 bp, Homo sapiens
tcatttgtacattca

SEQ ID NO: 844835 - DNA, 15 bp, Homo sapiens
catttgtacattcat

SEQ ID NO: 844836 - DNA, 15 bp, Homo sapiens
atttgtacattcatt

SEQ ID NO: 844837 - DNA, 15 bp, Homo sapiens
tttgtacattcatta

SEQ ID NO: 844838 - DNA, 15 bp, Homo sapiens
ttgtacattcattat

SEQ ID NO: 844839 - DNA, 15 bp, Homo sapiens
tgtacattcattatg

SEQ ID NO: 844840 - DNA, 15 bp, Homo sapiens
gtacattcattatgt

SEQ ID NO: 844841 - DNA, 15 bp, Homo sapiens
tacattcattatgta

SEQ ID NO: 844842 - DNA, 15 bp, Homo sapiens
acattcattatgtat

SEQ ID NO: 844843 - DNA, 15 bp, Homo sapiens
cattcattatgtatc

SEQ ID NO: 844844 - DNA, 15 bp, Homo sapiens
attcattatgtatca

SEQ ID NO: 844845 - DNA, 15 bp, Homo sapiens
ttcattatgtatcac

SEQ ID NO: 844846 - DNA, 15 bp, Homo sapiens
tcattatgtatcaca

SEQ ID NO: 844847 - DNA, 15 bp, Homo sapiens
cattatgtatcacat

SEQ ID NO: 844848 - DNA, 15 bp, Homo sapiens
attatgtatcacata

SEQ ID NO: 844849 - DNA, 15 bp, Homo sapiens
ttatgtatcacataa

SEQ ID NO: 844850 - DNA, 15 bp, Homo sapiens
tatgtatcacataac

SEQ ID NO: 844851 - DNA, 15 bp, Homo sapiens
atgtatcacataact

SEQ ID NO: 844852 - DNA, 15 bp, Homo sapiens
tgtatcacataacta

SEQ ID NO: 844853 - DNA, 15 bp, Homo sapiens
gtatcacataactat

SEQ ID NO: 844854 - DNA, 15 bp, Homo sapiens
tatcacataactata

SEQ ID NO: 844855 - DNA, 15 bp, Homo sapiens
atcacataactatat

SEQ ID NO: 844856 - DNA, 15 bp, Homo sapiens
tcacataactatatt

SEQ ID NO: 844857 - DNA, 15 bp, Homo sapiens
cacataactatattc

SEQ ID NO: 844858 - DNA, 15 bp, Homo sapiens
acataactatattca

SEQ ID NO: 844859 - DNA, 15 bp, Homo sapiens
cataactatattcat

SEQ ID NO: 844860 - DNA, 15 bp, Homo sapiens
ataactatattcatt

SEQ ID NO: 844861 - DNA, 15 bp, Homo sapiens
taactatattcattt

SEQ ID NO: 844862 - DNA, 15 bp, Homo sapiens
aactatattcatttt

SEQ ID NO: 844863 - DNA, 15 bp, Homo sapiens
actatattcattttt

SEQ ID NO: 844864 - DNA, 15 bp, Homo sapiens
ctatattcatttttg

SEQ ID NO: 844865 - DNA, 15 bp, Homo sapiens
tatattcatttttgt

SEQ ID NO: 844866 - DNA, 15 bp, Homo sapiens
atattcatttttgtg

SEQ ID NO: 844867 - DNA, 15 bp, Homo sapiens
tattcatttttgtga

SEQ ID NO: 844868 - DNA, 15 bp, Homo sapiens
attcatttttgtgat

SEQ ID NO: 844869 - DNA, 15 bp, Homo sapiens
ttcatttttgtgatt

SEQ ID NO: 844870 - DNA, 15 bp, Homo sapiens
tcatttttgtgatta

SEQ ID NO: 844871 - DNA, 15 bp, Homo sapiens
catttttgtgattat

SEQ ID NO: 844872 - DNA, 15 bp, Homo sapiens
atttttgtgattatg

SEQ ID NO: 844873 - DNA, 15 bp, Homo sapiens
tttttgtgattatga

SEQ ID NO: 844874 - DNA, 15 bp, Homo sapiens
ttttgtgattatgaa

SEQ ID NO: 844875 - DNA, 15 bp, Homo sapiens
tttgtgattatgaaa

SEQ ID NO: 844876 - DNA, 15 bp, Homo sapiens
ttgtgattatgaaaa

SEQ ID NO: 844877 - DNA, 15 bp, Homo sapiens
tgtgattatgaaaag

SEQ ID NO: 844878 - DNA, 15 bp, Homo sapiens
gtgattatgaaaaga

SEQ ID NO: 844879 - DNA, 15 bp, Homo sapiens
tgattatgaaaagac

SEQ ID NO: 844880 - DNA, 15 bp, Homo sapiens
gattatgaaaagact

SEQ ID NO: 844881 - DNA, 15 bp, Homo sapiens
attatgaaaagacta

SEQ ID NO: 844882 - DNA, 15 bp, Homo sapiens
ttatgaaaagactac

SEQ ID NO: 844883 - DNA, 15 bp, Homo sapiens
tatgaaaagactacg

SEQ ID NO: 844884 - DNA, 15 bp, Homo sapiens
atgaaaagactacga

SEQ ID NO: 844885 - DNA, 15 bp, Homo sapiens
tgaaaagactacgaa

SEQ ID NO: 844886 - DNA, 15 bp, Homo sapiens
gaaaagactacgaaa

SEQ ID NO: 844887 - DNA, 15 bp, Homo sapiens
aaaagactacgaaat

SEQ ID NO: 844888 - DNA, 15 bp, Homo sapiens
aaagactacgaaatc

SEQ ID NO: 844889 - DNA, 15 bp, Homo sapiens
aagactacgaaatct

SEQ ID NO: 844890 - DNA, 15 bp, Homo sapiens
agactacgaaatctg

SEQ ID NO: 844891 - DNA, 15 bp, Homo sapiens
gactacgaaatctgg

SEQ ID NO: 844892 - DNA, 15 bp, Homo sapiens
actacgaaatctggt

SEQ ID NO: 844893 - DNA, 15 bp, Homo sapiens
ctacgaaatctggtg

SEQ ID NO: 844894 - DNA, 15 bp, Homo sapiens
tacgaaatctggtga

SEQ ID NO: 844895 - DNA, 15 bp, Homo sapiens
acgaaatctggtgaa

SEQ ID NO: 844896 - DNA, 15 bp, Homo sapiens
cgaaatctggtgaat

SEQ ID NO: 844897 - DNA, 15 bp, Homo sapiens
gaaatctggtgaata

SEQ ID NO: 844898 - DNA, 15 bp, Homo sapiens
aaatctggtgaatag

SEQ ID NO: 844899 - DNA, 15 bp, Homo sapiens
aatctggtgaatagg

SEQ ID NO: 844900 - DNA, 15 bp, Homo sapiens
atctggtgaataggt

SEQ ID NO: 844901 - DNA, 15 bp, Homo sapiens
tctggtgaataggtg

SEQ ID NO: 844902 - DNA, 15 bp, Homo sapiens
ctggtgaataggtgt

SEQ ID NO: 844903 - DNA, 15 bp, Homo sapiens
tggtgaataggtgta

SEQ ID NO: 844904 - DNA, 15 bp, Homo sapiens
ggtgaataggtgtaa

SEQ ID NO: 844905 - DNA, 15 bp, Homo sapiens
gtgaataggtgtaaa

SEQ ID NO: 844906 - DNA, 15 bp, Homo sapiens
tgaataggtgtaaaa

SEQ ID NO: 844907 - DNA, 15 bp, Homo sapiens
gaataggtgtaaaaa

SEQ ID NO: 844908 - DNA, 15 bp, Homo sapiens
aataggtgtaaaaat

SEQ ID NO: 844909 - DNA, 15 bp, Homo sapiens
ataggtgtaaaaata

SEQ ID NO: 844910 - DNA, 15 bp, Homo sapiens
taggtgtaaaaatat

SEQ ID NO: 844911 - DNA, 15 bp, Homo sapiens
aggtgtaaaaatata

SEQ ID NO: 844912 - DNA, 15 bp, Homo sapiens
ggtgtaaaaatataa

SEQ ID NO: 844913 - DNA, 15 bp, Homo sapiens
gtgtaaaaatataaa

SEQ ID NO: 844914 - DNA, 15 bp, Homo sapiens
tgtaaaaatataaag

SEQ ID NO: 844915 - DNA, 15 bp, Homo sapiens
gtaaaaatataaagg

SEQ ID NO: 844916 - DNA, 15 bp, Homo sapiens
taaaaatataaagga

SEQ ID NO: 844917 - DNA, 15 bp, Homo sapiens
aaaaatataaaggat

SEQ ID NO: 844918 - DNA, 15 bp, Homo sapiens
aaaatataaaggatg

SEQ ID NO: 844919 - DNA, 15 bp, Homo sapiens
aaatataaaggatga

SEQ ID NO: 844920 - DNA, 15 bp, Homo sapiens
aatataaaggatgaa

SEQ ID NO: 844921 - DNA, 15 bp, Homo sapiens
atataaaggatgaat

SEQ ID NO: 844922 - DNA, 15 bp, Homo sapiens
tataaaggatgaatc

SEQ ID NO: 844923 - DNA, 15 bp, Homo sapiens
ataaaggatgaatcc

SEQ ID NO: 844924 - DNA, 15 bp, Homo sapiens
taaaggatgaatcca

SEQ ID NO: 844925 - DNA, 15 bp, Homo sapiens
aaaggatgaatccaa

SEQ ID NO: 844926 - DNA, 15 bp, Homo sapiens
aaggatgaatccaac

SEQ ID NO: 844927 - DNA, 15 bp, Homo sapiens
aggatgaatccaact

SEQ ID NO: 844928 - DNA, 15 bp, Homo sapiens
ggatgaatccaactc

SEQ ID NO: 844929 - DNA, 15 bp, Homo sapiens
gatgaatccaactcc

SEQ ID NO: 844930 - DNA, 15 bp, Homo sapiens
atgaatccaactcca

SEQ ID NO: 844931 - DNA, 15 bp, Homo sapiens
tgaatccaactccaa

SEQ ID NO: 844932 - DNA, 15 bp, Homo sapiens
gaatccaactccaaa

SEQ ID NO: 844933 - DNA, 15 bp, Homo sapiens
aatccaactccaaac

SEQ ID NO: 844934 - DNA, 15 bp, Homo sapiens
atccaactccaaaca

SEQ ID NO: 844935 - DNA, 15 bp, Homo sapiens
tccaactccaaacac

SEQ ID NO: 844936 - DNA, 15 bp, Homo sapiens
ccaactccaaacact

SEQ ID NO: 844937 - DNA, 15 bp, Homo sapiens
caactccaaacacta

SEQ ID NO: 844938 - DNA, 15 bp, Homo sapiens
aactccaaacactaa

SEQ ID NO: 844939 - DNA, 15 bp, Homo sapiens
actccaaacactaag

SEQ ID NO: 844940 - DNA, 15 bp, Homo sapiens
ctccaaacactaaga

SEQ ID NO: 844941 - DNA, 15 bp, Homo sapiens
tccaaacactaagaa

SEQ ID NO: 844942 - DNA, 15 bp, Homo sapiens
ccaaacactaagaaa

SEQ ID NO: 844943 - DNA, 15 bp, Homo sapiens
caaacactaagaaac

SEQ ID NO: 844944 - DNA, 15 bp, Homo sapiens
aaacactaagaaacc

SEQ ID NO: 844945 - DNA, 15 bp, Homo sapiens
aacactaagaaacca

SEQ ID NO: 844946 - DNA, 15 bp, Homo sapiens
acactaagaaaccac

SEQ ID NO: 844947 - DNA, 15 bp, Homo sapiens
cactaagaaaccacc

SEQ ID NO: 844948 - DNA, 15 bp, Homo sapiens
actaagaaaccacct

SEQ ID NO: 844949 - DNA, 15 bp, Homo sapiens
ctaagaaaccaccta

SEQ ID NO: 844950 - DNA, 15 bp, Homo sapiens
taagaaaccacctaa

SEQ ID NO: 844951 - DNA, 15 bp, Homo sapiens
aagaaaccacctaaa

SEQ ID NO: 844952 - DNA, 15 bp, Homo sapiens
agaaaccacctaaaa

SEQ ID NO: 844953 - DNA, 15 bp, Homo sapiens
gaaaccacctaaaac

SEQ ID NO: 844954 - DNA, 15 bp, Homo sapiens
aaaccacctaaaact

SEQ ID NO: 844955 - DNA, 15 bp, Homo sapiens
aaccacctaaaactc

SEQ ID NO: 844956 - DNA, 15 bp, Homo sapiens
accacctaaaactct

SEQ ID NO: 844957 - DNA, 15 bp, Homo sapiens
ccacctaaaactcta

SEQ ID NO: 844958 - DNA, 15 bp, Homo sapiens
cacctaaaactctag

SEQ ID NO: 844959 - DNA, 15 bp, Homo sapiens
acctaaaactctagt

SEQ ID NO: 844960 - DNA, 15 bp, Homo sapiens
cctaaaactctagta

SEQ ID NO: 844961 - DNA, 15 bp, Homo sapiens
ctaaaactctagtaa

SEQ ID NO: 844962 - DNA, 15 bp, Homo sapiens
taaaactctagtaag

SEQ ID NO: 844963 - DNA, 15 bp, Homo sapiens
aaaactctagtaagg

SEQ ID NO: 844964 - DNA, 15 bp, Homo sapiens
aaactctagtaagga

SEQ ID NO: 844965 - DNA, 15 bp, Homo sapiens
aactctagtaaggat

SEQ ID NO: 844966 - DNA, 15 bp, Homo sapiens
actctagtaaggata

SEQ ID NO: 844967 - DNA, 15 bp, Homo sapiens
ctctagtaaggataa

SEQ ID NO: 844968 - DNA, 15 bp, Homo sapiens
tctagtaaggataag

SEQ ID NO: 844969 - DNA, 15 bp, Homo sapiens
ctagtaaggataagt

SEQ ID NO: 844970 - DNA, 15 bp, Homo sapiens
tagtaaggataagta

SEQ ID NO: 844971 - DNA, 15 bp, Homo sapiens
agtaaggataagtaa

SEQ ID NO: 844972 - DNA, 15 bp, Homo sapiens
gtaaggataagtaaa

SEQ ID NO: 844973 - DNA, 15 bp, Homo sapiens
taaggataagtaaaa

SEQ ID NO: 844974 - DNA, 15 bp, Homo sapiens
aaggataagtaaaaa

SEQ ID NO: 844975 - DNA, 15 bp, Homo sapiens
aggataagtaaaaat

SEQ ID NO: 844976 - DNA, 15 bp, Homo sapiens
ggataagtaaaaatc

SEQ ID NO: 844977 - DNA, 15 bp, Homo sapiens
gataagtaaaaatcc

SEQ ID NO: 844978 - DNA, 15 bp, Homo sapiens
ataagtaaaaatcct

SEQ ID NO: 844979 - DNA, 15 bp, Homo sapiens
taagtaaaaatcctt

SEQ ID NO: 844980 - DNA, 15 bp, Homo sapiens
aagtaaaaatccttt

SEQ ID NO: 844981 - DNA, 15 bp, Homo sapiens
agtaaaaatcctttg

SEQ ID NO: 844982 - DNA, 15 bp, Homo sapiens
gtaaaaatcctttgg

SEQ ID NO: 844983 - DNA, 15 bp, Homo sapiens
taaaaatcctttgga

SEQ ID NO: 844984 - DNA, 15 bp, Homo sapiens
aaaaatcctttggaa

SEQ ID NO: 844985 - DNA, 15 bp, Homo sapiens
aaaatcctttggaac

SEQ ID NO: 844986 - DNA, 15 bp, Homo sapiens
aaatcctttggaact

SEQ ID NO: 844987 - DNA, 15 bp, Homo sapiens
aatcctttggaacta

SEQ ID NO: 844988 - DNA, 15 bp, Homo sapiens
atcctttggaactaa

SEQ ID NO: 844989 - DNA, 15 bp, Homo sapiens
tcctttggaactaaa

SEQ ID NO: 844990 - DNA, 15 bp, Homo sapiens
cctttggaactaaaa

SEQ ID NO: 844991 - DNA, 15 bp, Homo sapiens
ctttggaactaaaat

SEQ ID NO: 844992 - DNA, 15 bp, Homo sapiens
tttggaactaaaatg

SEQ ID NO: 844993 - DNA, 15 bp, Homo sapiens
ttggaactaaaatgt

SEQ ID NO: 844994 - DNA, 15 bp, Homo sapiens
tggaactaaaatgtc

SEQ ID NO: 844995 - DNA, 15 bp, Homo sapiens
ggaactaaaatgtcc

SEQ ID NO: 844996 - DNA, 15 bp, Homo sapiens
gaactaaaatgtcct

SEQ ID NO: 844997 - DNA, 15 bp, Homo sapiens
aactaaaatgtcctg

SEQ ID NO: 844998 - DNA, 15 bp, Homo sapiens
actaaaatgtcctgg

SEQ ID NO: 844999 - DNA, 15 bp, Homo sapiens
ctaaaatgtcctgga

SEQ ID NO: 845000 - DNA, 15 bp, Homo sapiens
taaaatgtcctggaa

SEQ ID NO: 845001 - DNA, 15 bp, Homo sapiens
aaaatgtcctggaac

SEQ ID NO: 845002 - DNA, 15 bp, Homo sapiens
aaatgtcctggaaca

SEQ ID NO: 845003 - DNA, 15 bp, Homo sapiens
aatgtcctggaacac

SEQ ID NO: 845004 - DNA, 15 bp, Homo sapiens
atgtcctggaacacg

SEQ ID NO: 845005 - DNA, 15 bp, Homo sapiens
tgtcctggaacacgg

SEQ ID NO: 845006 - DNA, 15 bp, Homo sapiens
gtcctggaacacggg

SEQ ID NO: 845007 - DNA, 15 bp, Homo sapiens
tcctggaacacgggt

SEQ ID NO: 845008 - DNA, 15 bp, Homo sapiens
cctggaacacgggtg

SEQ ID NO: 845009 - DNA, 15 bp, Homo sapiens
ctggaacacgggtgg

SEQ ID NO: 845010 - DNA, 15 bp, Homo sapiens
tggaacacgggtggc

SEQ ID NO: 845011 - DNA, 15 bp, Homo sapiens
ggaacacgggtggca

SEQ ID NO: 845012 - DNA, 15 bp, Homo sapiens
gaacacgggtggcaa

SEQ ID NO: 845013 - DNA, 15 bp, Homo sapiens
aacacgggtggcaat

SEQ ID NO: 845014 - DNA, 15 bp, Homo sapiens
acacgggtggcaatt

SEQ ID NO: 845015 - DNA, 15 bp, Homo sapiens
cacgggtggcaattt

SEQ ID NO: 845016 - DNA, 15 bp, Homo sapiens
acgggtggcaattta

SEQ ID NO: 845017 - DNA, 15 bp, Homo sapiens
cgggtggcaatttac

SEQ ID NO: 845018 - DNA, 15 bp, Homo sapiens
gggtggcaatttaca

SEQ ID NO: 845019 - DNA, 15 bp, Homo sapiens
ggtggcaatttacaa

SEQ ID NO: 845020 - DNA, 15 bp, Homo sapiens
gtggcaatttacaat

SEQ ID NO: 845021 - DNA, 15 bp, Homo sapiens
tggcaatttacaatc

SEQ ID NO: 845022 - DNA, 15 bp, Homo sapiens
ggcaatttacaatct

SEQ ID NO: 845023 - DNA, 15 bp, Homo sapiens
gcaatttacaatctc

SEQ ID NO: 845024 - DNA, 15 bp, Homo sapiens
caatttacaatctca

SEQ ID NO: 845025 - DNA, 15 bp, Homo sapiens
aatttacaatctcaa

SEQ ID NO: 845026 - DNA, 15 bp, Homo sapiens
atttacaatctcaat

SEQ ID NO: 845027 - DNA, 15 bp, Homo sapiens
tttacaatctcaatg

SEQ ID NO: 845028 - DNA, 15 bp, Homo sapiens
ttacaatctcaatgg

SEQ ID NO: 845029 - DNA, 15 bp, Homo sapiens
tacaatctcaatggg

SEQ ID NO: 845030 - DNA, 15 bp, Homo sapiens
acaatctcaatgggc

SEQ ID NO: 845031 - DNA, 15 bp, Homo sapiens
caatctcaatgggct

SEQ ID NO: 845032 - DNA, 15 bp, Homo sapiens
aatctcaatgggctc

SEQ ID NO: 845033 - DNA, 15 bp, Homo sapiens
atctcaatgggctca

SEQ ID NO: 845034 - DNA, 15 bp, Homo sapiens
tctcaatgggctcag

SEQ ID NO: 845035 - DNA, 15 bp, Homo sapiens
ctcaatgggctcagc

SEQ ID NO: 845036 - DNA, 15 bp, Homo sapiens
tcaatgggctcagca

SEQ ID NO: 845037 - DNA, 15 bp, Homo sapiens
caatgggctcagcaa

SEQ ID NO: 845038 - DNA, 15 bp, Homo sapiens
aatgggctcagcaaa

SEQ ID NO: 845039 - DNA, 15 bp, Homo sapiens
atgggctcagcaaaa

SEQ ID NO: 845040 - DNA, 15 bp, Homo sapiens
tgggctcagcaaaat

SEQ ID NO: 845041 - DNA, 15 bp, Homo sapiens
gggctcagcaaaata

SEQ ID NO: 845042 - DNA, 15 bp, Homo sapiens
ggctcagcaaaataa

SEQ ID NO: 845043 - DNA, 15 bp, Homo sapiens
gctcagcaaaataaa

SEQ ID NO: 845044 - DNA, 15 bp, Homo sapiens
ctcagcaaaataaat

SEQ ID NO: 845045 - DNA, 15 bp, Homo sapiens
tcagcaaaataaatt

SEQ ID NO: 845046 - DNA, 15 bp, Homo sapiens
cagcaaaataaattg

SEQ ID NO: 845047 - DNA, 15 bp, Homo sapiens
agcaaaataaattgc

SEQ ID NO: 845048 - DNA, 15 bp, Homo sapiens
gcaaaataaattgct

SEQ ID NO: 845049 - DNA, 15 bp, Homo sapiens
caaaataaattgctt

SEQ ID NO: 845050 - DNA, 15 bp, Homo sapiens
aaaataaattgcttg

SEQ ID NO: 845051 - DNA, 15 bp, Homo sapiens
aaataaattgcttgc

SEQ ID NO: 845052 - DNA, 15 bp, Homo sapiens
aataaattgcttgct

SEQ ID NO: 845053 - DNA, 15 bp, Homo sapiens
ataaattgcttgctt

SEQ ID NO: 845054 - DNA, 15 bp, Homo sapiens
taaattgcttgctta

SEQ ID NO: 845055 - DNA, 15 bp, Homo sapiens
aaattgcttgcttaa

SEQ ID NO: 845056 - DNA, 15 bp, Homo sapiens
aattgcttgcttaaa

SEQ ID NO: 845057 - DNA, 15 bp, Homo sapiens
attgcttgcttaaaa

SEQ ID NO: 845058 - DNA, 15 bp, Homo sapiens
ttgcttgcttaaaaa

SEQ ID NO: 845059 - DNA, 15 bp, Homo sapiens
tgcttgcttaaaaaa

SEQ ID NO: 845060 - DNA, 15 bp, Homo sapiens
gcttgcttaaaaaat

SEQ ID NO: 845061 - DNA, 15 bp, Homo sapiens
cttgcttaaaaaatt

SEQ ID NO: 845062 - DNA, 15 bp, Homo sapiens
ttgcttaaaaaatta

SEQ ID NO: 845063 - DNA, 15 bp, Homo sapiens
tgcttaaaaaattat

SEQ ID NO: 845064 - DNA, 15 bp, Homo sapiens
gcttaaaaaattatt

SEQ ID NO: 845065 - DNA, 15 bp, Homo sapiens
cttaaaaaattattt

SEQ ID NO: 845066 - DNA, 15 bp, Homo sapiens
ttaaaaaattatttt

SEQ ID NO: 845067 - DNA, 15 bp, Homo sapiens
taaaaaattattttc

SEQ ID NO: 845068 - DNA, 15 bp, Homo sapiens
aaaaaattattttct

SEQ ID NO: 845069 - DNA, 15 bp, Homo sapiens
aaaaattattttctg

SEQ ID NO: 845070 - DNA, 15 bp, Homo sapiens
aaaattattttctgt

SEQ ID NO: 845071 - DNA, 15 bp, Homo sapiens
aaattattttctgtt

SEQ ID NO: 845072 - DNA, 15 bp, Homo sapiens
aattattttctgtta

SEQ ID NO: 845073 - DNA, 15 bp, Homo sapiens
attattttctgttat

SEQ ID NO: 845074 - DNA, 15 bp, Homo sapiens
ttattttctgttatg

SEQ ID NO: 845075 - DNA, 15 bp, Homo sapiens
tattttctgttatga

SEQ ID NO: 845076 - DNA, 15 bp, Homo sapiens
attttctgttatgat

SEQ ID NO: 845077 - DNA, 15 bp, Homo sapiens
ttttctgttatgatt

SEQ ID NO: 845078 - DNA, 15 bp, Homo sapiens
tttctgttatgattc

SEQ ID NO: 845079 - DNA, 15 bp, Homo sapiens
ttctgttatgattcc

SEQ ID NO: 845080 - DNA, 15 bp, Homo sapiens
tctgttatgattcca

SEQ ID NO: 845081 - DNA, 15 bp, Homo sapiens
ctgttatgattccaa

SEQ ID NO: 845082 - DNA, 15 bp, Homo sapiens
tgttatgattccaaa

SEQ ID NO: 845083 - DNA, 15 bp, Homo sapiens
gttatgattccaaat

SEQ ID NO: 845084 - DNA, 15 bp, Homo sapiens
ttatgattccaaatc

SEQ ID NO: 845085 - DNA, 15 bp, Homo sapiens
tatgattccaaatca

SEQ ID NO: 845086 - DNA, 15 bp, Homo sapiens
atgattccaaatcac

SEQ ID NO: 845087 - DNA, 15 bp, Homo sapiens
tgattccaaatcaca

SEQ ID NO: 845088 - DNA, 15 bp, Homo sapiens
gattccaaatcacat

SEQ ID NO: 845089 - DNA, 15 bp, Homo sapiens
attccaaatcacatt

SEQ ID NO: 845090 - DNA, 15 bp, Homo sapiens
ttccaaatcacatta

SEQ ID NO: 845091 - DNA, 15 bp, Homo sapiens
tccaaatcacattat

SEQ ID NO: 845092 - DNA, 15 bp, Homo sapiens
ccaaatcacattatc

SEQ ID NO: 845093 - DNA, 15 bp, Homo sapiens
caaatcacattatct

SEQ ID NO: 845094 - DNA, 15 bp, Homo sapiens
aaatcacattatctt

SEQ ID NO: 845095 - DNA, 15 bp, Homo sapiens
aatcacattatctta

SEQ ID NO: 845096 - DNA, 15 bp, Homo sapiens
atcacattatcttac

SEQ ID NO: 845097 - DNA, 15 bp, Homo sapiens
tcacattatcttact

SEQ ID NO: 845098 - DNA, 15 bp, Homo sapiens
cacattatcttacta

SEQ ID NO: 845099 - DNA, 15 bp, Homo sapiens
acattatcttactag

SEQ ID NO: 845100 - DNA, 15 bp, Homo sapiens
cattatcttactagt

SEQ ID NO: 845101 - DNA, 15 bp, Homo sapiens
attatcttactagta

SEQ ID NO: 845102 - DNA, 15 bp, Homo sapiens
ttatcttactagtac

SEQ ID NO: 845103 - DNA, 15 bp, Homo sapiens
tatcttactagtaca

SEQ ID NO: 845104 - DNA, 15 bp, Homo sapiens
atcttactagtacat

SEQ ID NO: 845105 - DNA, 15 bp, Homo sapiens
tcttactagtacatg

SEQ ID NO: 845106 - DNA, 15 bp, Homo sapiens
cttactagtacatga

SEQ ID NO: 845107 - DNA, 15 bp, Homo sapiens
ttactagtacatgag

SEQ ID NO: 845108 - DNA, 15 bp, Homo sapiens
tactagtacatgaga

SEQ ID NO: 845109 - DNA, 15 bp, Homo sapiens
actagtacatgagat

SEQ ID NO: 845110 - DNA, 15 bp, Homo sapiens
ctagtacatgagatt

SEQ ID NO: 845111 - DNA, 15 bp, Homo sapiens
tagtacatgagatta

SEQ ID NO: 845112 - DNA, 15 bp, Homo sapiens
agtacatgagattac

SEQ ID NO: 845113 - DNA, 15 bp, Homo sapiens
gtacatgagattact

SEQ ID NO: 845114 - DNA, 15 bp, Homo sapiens
tacatgagattactg

SEQ ID NO: 845115 - DNA, 15 bp, Homo sapiens
acatgagattactgg

SEQ ID NO: 845116 - DNA, 15 bp, Homo sapiens
catgagattactggt

SEQ ID NO: 845117 - DNA, 15 bp, Homo sapiens
atgagattactggtg

SEQ ID NO: 845118 - DNA, 15 bp, Homo sapiens
tgagattactggtgc

SEQ ID NO: 845119 - DNA, 15 bp, Homo sapiens
gagattactggtgcc

SEQ ID NO: 845120 - DNA, 15 bp, Homo sapiens
agattactggtgcct

SEQ ID NO: 845121 - DNA, 15 bp, Homo sapiens
gattactggtgcctt

SEQ ID NO: 845122 - DNA, 15 bp, Homo sapiens
attactggtgccttt

SEQ ID NO: 845123 - DNA, 15 bp, Homo sapiens
ttactggtgccttta

SEQ ID NO: 845124 - DNA, 15 bp, Homo sapiens
tactggtgcctttat

SEQ ID NO: 845125 - DNA, 15 bp, Homo sapiens
actggtgcctttatt

SEQ ID NO: 845126 - DNA, 15 bp, Homo sapiens
ctggtgcctttattt

SEQ ID NO: 845127 - DNA, 15 bp, Homo sapiens
tggtgcctttatttt

SEQ ID NO: 845128 - DNA, 15 bp, Homo sapiens
ggtgcctttattttg

SEQ ID NO: 845129 - DNA, 15 bp, Homo sapiens
gtgcctttattttgc

SEQ ID NO: 845130 - DNA, 15 bp, Homo sapiens
tgcctttattttgct

SEQ ID NO: 845131 - DNA, 15 bp, Homo sapiens
gcctttattttgctg

SEQ ID NO: 845132 - DNA, 15 bp, Homo sapiens
cctttattttgctgt

SEQ ID NO: 845133 - DNA, 15 bp, Homo sapiens
ctttattttgctgta

SEQ ID NO: 845134 - DNA, 15 bp, Homo sapiens
tttattttgctgtat

SEQ ID NO: 845135 - DNA, 15 bp, Homo sapiens
ttattttgctgtatt

SEQ ID NO: 845136 - DNA, 15 bp, Homo sapiens
tattttgctgtattc

SEQ ID NO: 845137 - DNA, 15 bp, Homo sapiens
attttgctgtattca

SEQ ID NO: 845138 - DNA, 15 bp, Homo sapiens
ttttgctgtattcaa

SEQ ID NO: 845139 - DNA, 15 bp, Homo sapiens
tttgctgtattcaac

SEQ ID NO: 845140 - DNA, 15 bp, Homo sapiens
ttgctgtattcaaca

SEQ ID NO: 845141 - DNA, 15 bp, Homo sapiens
tgctgtattcaacag

SEQ ID NO: 845142 - DNA, 15 bp, Homo sapiens
gctgtattcaacagg

SEQ ID NO: 845143 - DNA, 15 bp, Homo sapiens
ctgtattcaacagga

SEQ ID NO: 845144 - DNA, 15 bp, Homo sapiens
tgtattcaacaggag

SEQ ID NO: 845145 - DNA, 15 bp, Homo sapiens
gtattcaacaggaga

SEQ ID NO: 845146 - DNA, 15 bp, Homo sapiens
tattcaacaggagag

SEQ ID NO: 845147 - DNA, 15 bp, Homo sapiens
attcaacaggagagt

SEQ ID NO: 845148 - DNA, 15 bp, Homo sapiens
ttcaacaggagagtg

SEQ ID NO: 845149 - DNA, 15 bp, Homo sapiens
tcaacaggagagtgt

SEQ ID NO: 845150 - DNA, 15 bp, Homo sapiens
caacaggagagtgtc

SEQ ID NO: 845151 - DNA, 15 bp, Homo sapiens
aacaggagagtgtca

SEQ ID NO: 845152 - DNA, 15 bp, Homo sapiens
acaggagagtgtcag

SEQ ID NO: 845153 - DNA, 15 bp, Homo sapiens
caggagagtgtcagg

SEQ ID NO: 845154 - DNA, 15 bp, Homo sapiens
aggagagtgtcagga

SEQ ID NO: 845155 - DNA, 15 bp, Homo sapiens
ggagagtgtcaggag

SEQ ID NO: 845156 - DNA, 15 bp, Homo sapiens
gagagtgtcaggaga

SEQ ID NO: 845157 - DNA, 15 bp, Homo sapiens
agagtgtcaggagac

SEQ ID NO: 845158 - DNA, 15 bp, Homo sapiens
gagtgtcaggagaca

SEQ ID NO: 845159 - DNA, 15 bp, Homo sapiens
agtgtcaggagacaa

SEQ ID NO: 845160 - DNA, 15 bp, Homo sapiens
gtgtcaggagacaat

SEQ ID NO: 845161 - DNA, 15 bp, Homo sapiens
tgtcaggagacaatg

SEQ ID NO: 845162 - DNA, 15 bp, Homo sapiens
gtcaggagacaatgt

SEQ ID NO: 845163 - DNA, 15 bp, Homo sapiens
tcaggagacaatgtc

SEQ ID NO: 845164 - DNA, 15 bp, Homo sapiens
caggagacaatgtca

SEQ ID NO: 845165 - DNA, 15 bp, Homo sapiens
aggagacaatgtcag

SEQ ID NO: 845166 - DNA, 15 bp, Homo sapiens
ggagacaatgtcagc

SEQ ID NO: 845167 - DNA, 15 bp, Homo sapiens
gagacaatgtcagca

SEQ ID NO: 845168 - DNA, 15 bp, Homo sapiens
agacaatgtcagcag

SEQ ID NO: 845169 - DNA, 15 bp, Homo sapiens
gacaatgtcagcaga

SEQ ID NO: 845170 - DNA, 15 bp, Homo sapiens
acaatgtcagcagaa

SEQ ID NO: 845171 - DNA, 15 bp, Homo sapiens
caatgtcagcagaat

SEQ ID NO: 845172 - DNA, 15 bp, Homo sapiens
aatgtcagcagaatt

SEQ ID NO: 845173 - DNA, 15 bp, Homo sapiens
atgtcagcagaatta

SEQ ID NO: 845174 - DNA, 15 bp, Homo sapiens
tgtcagcagaattag

SEQ ID NO: 845175 - DNA, 15 bp, Homo sapiens
gtcagcagaattagg

SEQ ID NO: 845176 - DNA, 15 bp, Homo sapiens
tcagcagaattaggt

SEQ ID NO: 845177 - DNA, 15 bp, Homo sapiens
cagcagaattaggtc

SEQ ID NO: 845178 - DNA, 15 bp, Homo sapiens
agcagaattaggtca

SEQ ID NO: 845179 - DNA, 15 bp, Homo sapiens
gcagaattaggtcaa

SEQ ID NO: 845180 - DNA, 15 bp, Homo sapiens
cagaattaggtcaaa

SEQ ID NO: 845181 - DNA, 15 bp, Homo sapiens
agaattaggtcaaat

SEQ ID NO: 845182 - DNA, 15 bp, Homo sapiens
gaattaggtcaaatg

SEQ ID NO: 845183 - DNA, 15 bp, Homo sapiens
aattaggtcaaatgc

SEQ ID NO: 845184 - DNA, 15 bp, Homo sapiens
attaggtcaaatgca

SEQ ID NO: 845185 - DNA, 15 bp, Homo sapiens
ttaggtcaaatgcag

SEQ ID NO: 845186 - DNA, 15 bp, Homo sapiens
taggtcaaatgcagc

SEQ ID NO: 845187 - DNA, 15 bp, Homo sapiens
aggtcaaatgcagct

SEQ ID NO: 845188 - DNA, 15 bp, Homo sapiens
ggtcaaatgcagcta

SEQ ID NO: 845189 - DNA, 15 bp, Homo sapiens
gtcaaatgcagctaa

SEQ ID NO: 845190 - DNA, 15 bp, Homo sapiens
tcaaatgcagctaat

SEQ ID NO: 845191 - DNA, 15 bp, Homo sapiens
caaatgcagctaatt

SEQ ID NO: 845192 - DNA, 15 bp, Homo sapiens
aaatgcagctaatta

SEQ ID NO: 845193 - DNA, 15 bp, Homo sapiens
aatgcagctaattac

SEQ ID NO: 845194 - DNA, 15 bp, Homo sapiens
atgcagctaattaca

SEQ ID NO: 845195 - DNA, 15 bp, Homo sapiens
tgcagctaattacat

SEQ ID NO: 845196 - DNA, 15 bp, Homo sapiens
gcagctaattacata

SEQ ID NO: 845197 - DNA, 15 bp, Homo sapiens
cagctaattacatat

SEQ ID NO: 845198 - DNA, 15 bp, Homo sapiens
agctaattacatata

SEQ ID NO: 845199 - DNA, 15 bp, Homo sapiens
gctaattacatatat

SEQ ID NO: 845200 - DNA, 15 bp, Homo sapiens
ctaattacatatatg

SEQ ID NO: 845201 - DNA, 15 bp, Homo sapiens
taattacatatatga

SEQ ID NO: 845202 - DNA, 15 bp, Homo sapiens
aattacatatatgaa

SEQ ID NO: 845203 - DNA, 15 bp, Homo sapiens
attacatatatgaat

SEQ ID NO: 845204 - DNA, 15 bp, Homo sapiens
ttacatatatgaatg

SEQ ID NO: 845205 - DNA, 15 bp, Homo sapiens
tacatatatgaatgt

SEQ ID NO: 845206 - DNA, 15 bp, Homo sapiens
acatatatgaatgtt

SEQ ID NO: 845207 - DNA, 15 bp, Homo sapiens
catatatgaatgttt

SEQ ID NO: 845208 - DNA, 15 bp, Homo sapiens
atatatgaatgtttg

SEQ ID NO: 845209 - DNA, 15 bp, Homo sapiens
tatatgaatgtttgt

SEQ ID NO: 845210 - DNA, 15 bp, Homo sapiens
atatgaatgtttgta

SEQ ID NO: 845211 - DNA, 15 bp, Homo sapiens
tatgaatgtttgtaa

SEQ ID NO: 845212 - DNA, 15 bp, Homo sapiens
atgaatgtttgtaat

SEQ ID NO: 845213 - DNA, 15 bp, Homo sapiens
tgaatgtttgtaata

SEQ ID NO: 845214 - DNA, 15 bp, Homo sapiens
gaatgtttgtaatat

SEQ ID NO: 845215 - DNA, 15 bp, Homo sapiens
aatgtttgtaatatt

SEQ ID NO: 845216 - DNA, 15 bp, Homo sapiens
atgtttgtaatattt

SEQ ID NO: 845217 - DNA, 15 bp, Homo sapiens
tgtttgtaatatttt

SEQ ID NO: 845218 - DNA, 15 bp, Homo sapiens
gtttgtaatattttg

SEQ ID NO: 845219 - DNA, 15 bp, Homo sapiens
tttgtaatattttga

SEQ ID NO: 845220 - DNA, 15 bp, Homo sapiens
ttgtaatattttgaa

SEQ ID NO: 845221 - DNA, 15 bp, Homo sapiens
tgtaatattttgaaa

SEQ ID NO: 845222 - DNA, 15 bp, Homo sapiens
gtaatattttgaaat

SEQ ID NO: 845223 - DNA, 15 bp, Homo sapiens
taatattttgaaatc

SEQ ID NO: 845224 - DNA, 15 bp, Homo sapiens
aatattttgaaatca

SEQ ID NO: 845225 - DNA, 15 bp, Homo sapiens
atattttgaaatcat

SEQ ID NO: 845226 - DNA, 15 bp, Homo sapiens
tattttgaaatcata

SEQ ID NO: 845227 - DNA, 15 bp, Homo sapiens
attttgaaatcatat

SEQ ID NO: 845228 - DNA, 15 bp, Homo sapiens
ttttgaaatcatatc

SEQ ID NO: 845229 - DNA, 15 bp, Homo sapiens
tttgaaatcatatct

SEQ ID NO: 845230 - DNA, 15 bp, Homo sapiens
ttgaaatcatatctg

SEQ ID NO: 845231 - DNA, 15 bp, Homo sapiens
tgaaatcatatctgc

SEQ ID NO: 845232 - DNA, 15 bp, Homo sapiens
gaaatcatatctgca

SEQ ID NO: 845233 - DNA, 15 bp, Homo sapiens
aaatcatatctgcat

SEQ ID NO: 845234 - DNA, 15 bp, Homo sapiens
aatcatatctgcatg

SEQ ID NO: 845235 - DNA, 15 bp, Homo sapiens
atcatatctgcatgg

SEQ ID NO: 845236 - DNA, 15 bp, Homo sapiens
tcatatctgcatggt

SEQ ID NO: 845237 - DNA, 15 bp, Homo sapiens
catatctgcatggtg

SEQ ID NO: 845238 - DNA, 15 bp, Homo sapiens
atatctgcatggtga

SEQ ID NO: 845239 - DNA, 15 bp, Homo sapiens
tatctgcatggtgaa

SEQ ID NO: 845240 - DNA, 15 bp, Homo sapiens
atctgcatggtgaat

SEQ ID NO: 845241 - DNA, 15 bp, Homo sapiens
tctgcatggtgaatt

SEQ ID NO: 845242 - DNA, 15 bp, Homo sapiens
ctgcatggtgaattg

SEQ ID NO: 845243 - DNA, 15 bp, Homo sapiens
tgcatggtgaattgt

SEQ ID NO: 845244 - DNA, 15 bp, Homo sapiens
gcatggtgaattgtt

SEQ ID NO: 845245 - DNA, 15 bp, Homo sapiens
catggtgaattgttt

SEQ ID NO: 845246 - DNA, 15 bp, Homo sapiens
atggtgaattgtttc

SEQ ID NO: 845247 - DNA, 15 bp, Homo sapiens
tggtgaattgtttca

SEQ ID NO: 845248 - DNA, 15 bp, Homo sapiens
ggtgaattgtttcaa

SEQ ID NO: 845249 - DNA, 15 bp, Homo sapiens
gtgaattgtttcaaa

SEQ ID NO: 845250 - DNA, 15 bp, Homo sapiens
tgaattgtttcaaag

SEQ ID NO: 845251 - DNA, 15 bp, Homo sapiens
gaattgtttcaaaga

SEQ ID NO: 845252 - DNA, 15 bp, Homo sapiens
aattgtttcaaagaa

SEQ ID NO: 845253 - DNA, 15 bp, Homo sapiens
attgtttcaaagaaa

SEQ ID NO: 845254 - DNA, 15 bp, Homo sapiens
ttgtttcaaagaaaa

SEQ ID NO: 845255 - DNA, 15 bp, Homo sapiens
tgtttcaaagaaaaa

SEQ ID NO: 845256 - DNA, 15 bp, Homo sapiens
gtttcaaagaaaaac

SEQ ID NO: 845257 - DNA, 15 bp, Homo sapiens
tttcaaagaaaaaca

SEQ ID NO: 845258 - DNA, 15 bp, Homo sapiens
ttcaaagaaaaacac

SEQ ID NO: 845259 - DNA, 15 bp, Homo sapiens
tcaaagaaaaacact

SEQ ID NO: 845260 - DNA, 15 bp, Homo sapiens
caaagaaaaacacta

SEQ ID NO: 845261 - DNA, 15 bp, Homo sapiens
aaagaaaaacactaa

SEQ ID NO: 845262 - DNA, 15 bp, Homo sapiens
aagaaaaacactaaa

SEQ ID NO: 845263 - DNA, 15 bp, Homo sapiens
agaaaaacactaaaa

SEQ ID NO: 845264 - DNA, 15 bp, Homo sapiens
gaaaaacactaaaaa

SEQ ID NO: 845265 - DNA, 15 bp, Homo sapiens
aaaaacactaaaaat

SEQ ID NO: 845266 - DNA, 15 bp, Homo sapiens
aaaacactaaaaatt

SEQ ID NO: 845267 - DNA, 15 bp, Homo sapiens
aaacactaaaaattt

SEQ ID NO: 845268 - DNA, 15 bp, Homo sapiens
aacactaaaaattta

SEQ ID NO: 845269 - DNA, 15 bp, Homo sapiens
acactaaaaatttaa

SEQ ID NO: 845270 - DNA, 15 bp, Homo sapiens
cactaaaaatttaaa

SEQ ID NO: 845271 - DNA, 15 bp, Homo sapiens
actaaaaatttaaag

SEQ ID NO: 845272 - DNA, 15 bp, Homo sapiens
ctaaaaatttaaagt

SEQ ID NO: 845273 - DNA, 15 bp, Homo sapiens
taaaaatttaaagta

SEQ ID NO: 845274 - DNA, 15 bp, Homo sapiens
aaaaatttaaagtat

SEQ ID NO: 845275 - DNA, 15 bp, Homo sapiens
aaaatttaaagtata

SEQ ID NO: 845276 - DNA, 15 bp, Homo sapiens
aaatttaaagtatag

SEQ ID NO: 845277 - DNA, 15 bp, Homo sapiens
aatttaaagtatagc

SEQ ID NO: 845278 - DNA, 15 bp, Homo sapiens
atttaaagtatagca

SEQ ID NO: 845279 - DNA, 15 bp, Homo sapiens
tttaaagtatagcag

SEQ ID NO: 845280 - DNA, 15 bp, Homo sapiens
ttaaagtatagcagc

SEQ ID NO: 845281 - DNA, 15 bp, Homo sapiens
taaagtatagcagct

SEQ ID NO: 845282 - DNA, 15 bp, Homo sapiens
aaagtatagcagctt

SEQ ID NO: 845283 - DNA, 15 bp, Homo sapiens
aagtatagcagcttt

SEQ ID NO: 845284 - DNA, 15 bp, Homo sapiens
agtatagcagcttta

SEQ ID NO: 845285 - DNA, 15 bp, Homo sapiens
gtatagcagctttaa

SEQ ID NO: 845286 - DNA, 15 bp, Homo sapiens
tatagcagctttaaa

SEQ ID NO: 845287 - DNA, 15 bp, Homo sapiens
atagcagctttaaat

SEQ ID NO: 845288 - DNA, 15 bp, Homo sapiens
tagcagctttaaata

SEQ ID NO: 845289 - DNA, 15 bp, Homo sapiens
agcagctttaaatac

SEQ ID NO: 845290 - DNA, 15 bp, Homo sapiens
gcagctttaaatact

SEQ ID NO: 845291 - DNA, 15 bp, Homo sapiens
cagctttaaatacta

SEQ ID NO: 845292 - DNA, 15 bp, Homo sapiens
agctttaaatactaa

SEQ ID NO: 845293 - DNA, 15 bp, Homo sapiens
gctttaaatactaaa

SEQ ID NO: 845294 - DNA, 15 bp, Homo sapiens
ctttaaatactaaat

SEQ ID NO: 845295 - DNA, 15 bp, Homo sapiens
tttaaatactaaata

SEQ ID NO: 845296 - DNA, 15 bp, Homo sapiens
ttaaatactaaataa

SEQ ID NO: 845297 - DNA, 15 bp, Homo sapiens
taaatactaaataaa

SEQ ID NO: 845298 - DNA, 15 bp, Homo sapiens
aaatactaaataaat

SEQ ID NO: 845299 - DNA, 15 bp, Homo sapiens
aatactaaataaata

SEQ ID NO: 845300 - DNA, 15 bp, Homo sapiens
atactaaataaataa

SEQ ID NO: 845301 - DNA, 15 bp, Homo sapiens
tactaaataaataat

SEQ ID NO: 845302 - DNA, 15 bp, Homo sapiens
actaaataaataata

SEQ ID NO: 845303 - DNA, 15 bp, Homo sapiens
ctaaataaataatac

SEQ ID NO: 845304 - DNA, 15 bp, Homo sapiens
taaataaataatact

SEQ ID NO: 845305 - DNA, 15 bp, Homo sapiens
aaataaataatacta

SEQ ID NO: 845306 - DNA, 15 bp, Homo sapiens
aataaataatactaa

SEQ ID NO: 845307 - DNA, 15 bp, Homo sapiens
ataaataatactaaa

SEQ ID NO: 845308 - DNA, 15 bp, Homo sapiens
taaataatactaaaa

SEQ ID NO: 845309 - DNA, 15 bp, Homo sapiens
aaataatactaaaaa

SEQ ID NO: 845310 - DNA, 15 bp, Homo sapiens
aataatactaaaaat

SEQ ID NO: 845311 - DNA, 15 bp, Homo sapiens
ataatactaaaaatt

SEQ ID NO: 845312 - DNA, 15 bp, Homo sapiens
taatactaaaaattt

SEQ ID NO: 845313 - DNA, 15 bp, Homo sapiens
aatactaaaaattta

SEQ ID NO: 845314 - DNA, 15 bp, Homo sapiens
atactaaaaatttaa

SEQ ID NO: 845315 - DNA, 15 bp, Homo sapiens
tactaaaaatttaaa

SEQ ID NO: 845316 - DNA, 15 bp, Homo sapiens
taaaaatttaaagtt

SEQ ID NO: 845317 - DNA, 15 bp, Homo sapiens
aaaaatttaaagttc

SEQ ID NO: 845318 - DNA, 15 bp, Homo sapiens
aaaatttaaagttct

SEQ ID NO: 845319 - DNA, 15 bp, Homo sapiens
aaatttaaagttctc

SEQ ID NO: 845320 - DNA, 15 bp, Homo sapiens
aatttaaagttctct

SEQ ID NO: 845321 - DNA, 15 bp, Homo sapiens
atttaaagttctctt

SEQ ID NO: 845322 - DNA, 15 bp, Homo sapiens
tttaaagttctcttg

SEQ ID NO: 845323 - DNA, 15 bp, Homo sapiens
ttaaagttctcttgc

SEQ ID NO: 845324 - DNA, 15 bp, Homo sapiens
taaagttctcttgca

SEQ ID NO: 845325 - DNA, 15 bp, Homo sapiens
aaagttctcttgcaa

SEQ ID NO: 845326 - DNA, 15 bp, Homo sapiens
aagttctcttgcaat

SEQ ID NO: 845327 - DNA, 15 bp, Homo sapiens
agttctcttgcaata

SEQ ID NO: 845328 - DNA, 15 bp, Homo sapiens
gttctcttgcaatat

SEQ ID NO: 845329 - DNA, 15 bp, Homo sapiens
ttctcttgcaatata

SEQ ID NO: 845330 - DNA, 15 bp, Homo sapiens
tctcttgcaatatat

SEQ ID NO: 845331 - DNA, 15 bp, Homo sapiens
ctcttgcaatatatt

SEQ ID NO: 845332 - DNA, 15 bp, Homo sapiens
tcttgcaatatattt

SEQ ID NO: 845333 - DNA, 15 bp, Homo sapiens
cttgcaatatatttt

SEQ ID NO: 845334 - DNA, 15 bp, Homo sapiens
ttgcaatatattttc

SEQ ID NO: 845335 - DNA, 15 bp, Homo sapiens
tgcaatatattttct

SEQ ID NO: 845336 - DNA, 15 bp, Homo sapiens
gcaatatattttctt

SEQ ID NO: 845337 - DNA, 15 bp, Homo sapiens
caatatattttctta

SEQ ID NO: 845338 - DNA, 15 bp, Homo sapiens
aatatattttcttaa

SEQ ID NO: 845339 - DNA, 15 bp, Homo sapiens
atatattttcttaat

SEQ ID NO: 845340 - DNA, 15 bp, Homo sapiens
tatattttcttaata

SEQ ID NO: 845341 - DNA, 15 bp, Homo sapiens
atattttcttaatat

SEQ ID NO: 845342 - DNA, 15 bp, Homo sapiens
tattttcttaatatc

SEQ ID NO: 845343 - DNA, 15 bp, Homo sapiens
attttcttaatatct

SEQ ID NO: 845344 - DNA, 15 bp, Homo sapiens
ttttcttaatatctt

SEQ ID NO: 845345 - DNA, 15 bp, Homo sapiens
tttcttaatatctta

SEQ ID NO: 845346 - DNA, 15 bp, Homo sapiens
ttcttaatatcttac

SEQ ID NO: 845347 - DNA, 15 bp, Homo sapiens
tcttaatatcttaca

SEQ ID NO: 845348 - DNA, 15 bp, Homo sapiens
cttaatatcttacat

SEQ ID NO: 845349 - DNA, 15 bp, Homo sapiens
ttaatatcttacatc

SEQ ID NO: 845350 - DNA, 15 bp, Homo sapiens
taatatcttacatct

SEQ ID NO: 845351 - DNA, 15 bp, Homo sapiens
aatatcttacatctc

SEQ ID NO: 845352 - DNA, 15 bp, Homo sapiens
atatcttacatctca

SEQ ID NO: 845353 - DNA, 15 bp, Homo sapiens
tatcttacatctcat

SEQ ID NO: 845354 - DNA, 15 bp, Homo sapiens
atcttacatctcatc

SEQ ID NO: 845355 - DNA, 15 bp, Homo sapiens
tcttacatctcatca

SEQ ID NO: 845356 - DNA, 15 bp, Homo sapiens
cttacatctcatcag

SEQ ID NO: 845357 - DNA, 15 bp, Homo sapiens
ttacatctcatcagt

SEQ ID NO: 845358 - DNA, 15 bp, Homo sapiens
tacatctcatcagtg

SEQ ID NO: 845359 - DNA, 15 bp, Homo sapiens
acatctcatcagtgt

SEQ ID NO: 845360 - DNA, 15 bp, Homo sapiens
catctcatcagtgtg

SEQ ID NO: 845361 - DNA, 15 bp, Homo sapiens
atctcatcagtgtga

SEQ ID NO: 845362 - DNA, 15 bp, Homo sapiens
tctcatcagtgtgaa

SEQ ID NO: 845363 - DNA, 15 bp, Homo sapiens
ctcatcagtgtgaaa

SEQ ID NO: 845364 - DNA, 15 bp, Homo sapiens
tcatcagtgtgaaaa

SEQ ID NO: 845365 - DNA, 15 bp, Homo sapiens
catcagtgtgaaaag

SEQ ID NO: 845366 - DNA, 15 bp, Homo sapiens
atcagtgtgaaaagt

SEQ ID NO: 845367 - DNA, 15 bp, Homo sapiens
tcagtgtgaaaagtt

SEQ ID NO: 845368 - DNA, 15 bp, Homo sapiens
cagtgtgaaaagttg

SEQ ID NO: 845369 - DNA, 15 bp, Homo sapiens
agtgtgaaaagttgc

SEQ ID NO: 845370 - DNA, 15 bp, Homo sapiens
gtgtgaaaagttgca

SEQ ID NO: 845371 - DNA, 15 bp, Homo sapiens
tgtgaaaagttgcac

SEQ ID NO: 845372 - DNA, 15 bp, Homo sapiens
gtgaaaagttgcaca

SEQ ID NO: 845373 - DNA, 15 bp, Homo sapiens
tgaaaagttgcacat

SEQ ID NO: 845374 - DNA, 15 bp, Homo sapiens
gaaaagttgcacatc

SEQ ID NO: 845375 - DNA, 15 bp, Homo sapiens
aaaagttgcacatct

SEQ ID NO: 845376 - DNA, 15 bp, Homo sapiens
aaagttgcacatctg

SEQ ID NO: 845377 - DNA, 15 bp, Homo sapiens
aagttgcacatctga

SEQ ID NO: 845378 - DNA, 15 bp, Homo sapiens
agttgcacatctgaa

SEQ ID NO: 845379 - DNA, 15 bp, Homo sapiens
gttgcacatctgaaa

SEQ ID NO: 845380 - DNA, 15 bp, Homo sapiens
ttgcacatctgaaaa

SEQ ID NO: 845381 - DNA, 15 bp, Homo sapiens
tgcacatctgaaaat

SEQ ID NO: 845382 - DNA, 15 bp, Homo sapiens
gcacatctgaaaatc

SEQ ID NO: 845383 - DNA, 15 bp, Homo sapiens
cacatctgaaaatcc

SEQ ID NO: 845384 - DNA, 15 bp, Homo sapiens
acatctgaaaatcca

SEQ ID NO: 845385 - DNA, 15 bp, Homo sapiens
catctgaaaatccag

SEQ ID NO: 845386 - DNA, 15 bp, Homo sapiens
atctgaaaatccagg

SEQ ID NO: 845387 - DNA, 15 bp, Homo sapiens
tctgaaaatccaggc

SEQ ID NO: 845388 - DNA, 15 bp, Homo sapiens
ctgaaaatccaggct

SEQ ID NO: 845389 - DNA, 15 bp, Homo sapiens
tgaaaatccaggctt

SEQ ID NO: 845390 - DNA, 15 bp, Homo sapiens
gaaaatccaggcttt

SEQ ID NO: 845391 - DNA, 15 bp, Homo sapiens
aaaatccaggctttg

SEQ ID NO: 845392 - DNA, 15 bp, Homo sapiens
aaatccaggctttgt

SEQ ID NO: 845393 - DNA, 15 bp, Homo sapiens
aatccaggctttgtg

SEQ ID NO: 845394 - DNA, 15 bp, Homo sapiens
atccaggctttgtgg

SEQ ID NO: 845395 - DNA, 15 bp, Homo sapiens
tccaggctttgtggt

SEQ ID NO: 845396 - DNA, 15 bp, Homo sapiens
ccaggctttgtggtg

SEQ ID NO: 845397 - DNA, 15 bp, Homo sapiens
caggctttgtggtgt

SEQ ID NO: 845398 - DNA, 15 bp, Homo sapiens
aggctttgtggtgtt

SEQ ID NO: 845399 - DNA, 15 bp, Homo sapiens
ggctttgtggtgttt

SEQ ID NO: 845400 - DNA, 15 bp, Homo sapiens
gctttgtggtgttta

SEQ ID NO: 845401 - DNA, 15 bp, Homo sapiens
ctttgtggtgtttaa

SEQ ID NO: 845402 - DNA, 15 bp, Homo sapiens
tttgtggtgtttaag

SEQ ID NO: 845403 - DNA, 15 bp, Homo sapiens
ttgtggtgtttaagt

SEQ ID NO: 845404 - DNA, 15 bp, Homo sapiens
tgtggtgtttaagtg

SEQ ID NO: 845405 - DNA, 15 bp, Homo sapiens
gtggtgtttaagtgc

SEQ ID NO: 845406 - DNA, 15 bp, Homo sapiens
tggtgtttaagtgcc

SEQ ID NO: 845407 - DNA, 15 bp, Homo sapiens
ggtgtttaagtgcct

SEQ ID NO: 845408 - DNA, 15 bp, Homo sapiens
gtgtttaagtgcctt

SEQ ID NO: 845409 - DNA, 15 bp, Homo sapiens
tgtttaagtgccttg

SEQ ID NO: 845410 - DNA, 15 bp, Homo sapiens
gtttaagtgccttgt

SEQ ID NO: 845411 - DNA, 15 bp, Homo sapiens
tttaagtgccttgta

SEQ ID NO: 845412 - DNA, 15 bp, Homo sapiens
ttaagtgccttgtat

SEQ ID NO: 845413 - DNA, 15 bp, Homo sapiens
taagtgccttgtatg

SEQ ID NO: 845414 - DNA, 15 bp, Homo sapiens
aagtgccttgtatgt

SEQ ID NO: 845415 - DNA, 15 bp, Homo sapiens
agtgccttgtatgtt

SEQ ID NO: 845416 - DNA, 15 bp, Homo sapiens
gtgccttgtatgttc

SEQ ID NO: 845417 - DNA, 15 bp, Homo sapiens
tgccttgtatgttcc

SEQ ID NO: 845418 - DNA, 15 bp, Homo sapiens
gccttgtatgttccc

SEQ ID NO: 845419 - DNA, 15 bp, Homo sapiens
ccttgtatgttcccc

SEQ ID NO: 845420 - DNA, 15 bp, Homo sapiens
cttgtatgttcccca

SEQ ID NO: 845421 - DNA, 15 bp, Homo sapiens
ttgtatgttccccag

SEQ ID NO: 845422 - DNA, 15 bp, Homo sapiens
tgtatgttccccagt

SEQ ID NO: 845423 - DNA, 15 bp, Homo sapiens
gtatgttccccagtt

SEQ ID NO: 845424 - DNA, 15 bp, Homo sapiens
tatgttccccagttg

SEQ ID NO: 845425 - DNA, 15 bp, Homo sapiens
atgttccccagttgc

SEQ ID NO: 845426 - DNA, 15 bp, Homo sapiens
tgttccccagttgct

SEQ ID NO: 845427 - DNA, 15 bp, Homo sapiens
gttccccagttgctg

SEQ ID NO: 845428 - DNA, 15 bp, Homo sapiens
ttccccagttgctgt

SEQ ID NO: 845429 - DNA, 15 bp, Homo sapiens
tccccagttgctgtc

SEQ ID NO: 845430 - DNA, 15 bp, Homo sapiens
ccccagttgctgtcc

SEQ ID NO: 845431 - DNA, 15 bp, Homo sapiens
cccagttgctgtcca

SEQ ID NO: 845432 - DNA, 15 bp, Homo sapiens
ccagttgctgtccaa

SEQ ID NO: 845433 - DNA, 15 bp, Homo sapiens
cagttgctgtccaat

SEQ ID NO: 845434 - DNA, 15 bp, Homo sapiens
agttgctgtccaatg

SEQ ID NO: 845435 - DNA, 15 bp, Homo sapiens
gttgctgtccaatgt

SEQ ID NO: 845436 - DNA, 15 bp, Homo sapiens
ttgctgtccaatgtg

SEQ ID NO: 845437 - DNA, 15 bp, Homo sapiens
tgctgtccaatgtga

SEQ ID NO: 845438 - DNA, 15 bp, Homo sapiens
gctgtccaatgtgac

SEQ ID NO: 845439 - DNA, 15 bp, Homo sapiens
ctgtccaatgtgact

SEQ ID NO: 845440 - DNA, 15 bp, Homo sapiens
tgtccaatgtgactc

SEQ ID NO: 845441 - DNA, 15 bp, Homo sapiens
gtccaatgtgactct

SEQ ID NO: 845442 - DNA, 15 bp, Homo sapiens
tccaatgtgactctg

SEQ ID NO: 845443 - DNA, 15 bp, Homo sapiens
ccaatgtgactctga

SEQ ID NO: 845444 - DNA, 15 bp, Homo sapiens
caatgtgactctgat

SEQ ID NO: 845445 - DNA, 15 bp, Homo sapiens
aatgtgactctgatt

SEQ ID NO: 845446 - DNA, 15 bp, Homo sapiens
atgtgactctgattt

SEQ ID NO: 845447 - DNA, 15 bp, Homo sapiens
tgtgactctgattta

SEQ ID NO: 845448 - DNA, 15 bp, Homo sapiens
gtgactctgatttat

SEQ ID NO: 845449 - DNA, 15 bp, Homo sapiens
tgactctgatttatt

SEQ ID NO: 845450 - DNA, 15 bp, Homo sapiens
gactctgatttatta

SEQ ID NO: 845451 - DNA, 15 bp, Homo sapiens
actctgatttattat

SEQ ID NO: 845452 - DNA, 15 bp, Homo sapiens
ctctgatttattatt

SEQ ID NO: 845453 - DNA, 15 bp, Homo sapiens
tctgatttattattt

SEQ ID NO: 845454 - DNA, 15 bp, Homo sapiens
ctgatttattatttt

SEQ ID NO: 845455 - DNA, 15 bp, Homo sapiens
tgatttattattttc

SEQ ID NO: 845456 - DNA, 15 bp, Homo sapiens
gatttattattttct

SEQ ID NO: 845457 - DNA, 15 bp, Homo sapiens
atttattattttcta

SEQ ID NO: 845458 - DNA, 15 bp, Homo sapiens
tttattattttctac

SEQ ID NO: 845459 - DNA, 15 bp, Homo sapiens
ttattattttctaca

SEQ ID NO: 845460 - DNA, 15 bp, Homo sapiens
tattattttctacat

SEQ ID NO: 845461 - DNA, 15 bp, Homo sapiens
attattttctacatc

SEQ ID NO: 845462 - DNA, 15 bp, Homo sapiens
ttattttctacatca

SEQ ID NO: 845463 - DNA, 15 bp, Homo sapiens
tattttctacatcat

SEQ ID NO: 845464 - DNA, 15 bp, Homo sapiens
attttctacatcatg

SEQ ID NO: 845465 - DNA, 15 bp, Homo sapiens
ttttctacatcatga

SEQ ID NO: 845466 - DNA, 15 bp, Homo sapiens
tttctacatcatgaa

SEQ ID NO: 845467 - DNA, 15 bp, Homo sapiens
ttctacatcatgaaa

SEQ ID NO: 845468 - DNA, 15 bp, Homo sapiens
tctacatcatgaaag

SEQ ID NO: 845469 - DNA, 15 bp, Homo sapiens
ctacatcatgaaagc

SEQ ID NO: 845470 - DNA, 15 bp, Homo sapiens
tacatcatgaaagca

SEQ ID NO: 845471 - DNA, 15 bp, Homo sapiens
acatcatgaaagcat

SEQ ID NO: 845472 - DNA, 15 bp, Homo sapiens
catcatgaaagcatt

SEQ ID NO: 845473 - DNA, 15 bp, Homo sapiens
atcatgaaagcatta

SEQ ID NO: 845474 - DNA, 15 bp, Homo sapiens
tcatgaaagcattat

SEQ ID NO: 845475 - DNA, 15 bp, Homo sapiens
catgaaagcattatt

SEQ ID NO: 845476 - DNA, 15 bp, Homo sapiens
atgaaagcattattt

SEQ ID NO: 845477 - DNA, 15 bp, Homo sapiens
tgaaagcattatttg

SEQ ID NO: 845478 - DNA, 15 bp, Homo sapiens
gaaagcattatttga

SEQ ID NO: 845479 - DNA, 15 bp, Homo sapiens
aaagcattatttgaa

SEQ ID NO: 845480 - DNA, 15 bp, Homo sapiens
aagcattatttgaat

SEQ ID NO: 845481 - DNA, 15 bp, Homo sapiens
agcattatttgaatc

SEQ ID NO: 845482 - DNA, 15 bp, Homo sapiens
gcattatttgaatcc

SEQ ID NO: 845483 - DNA, 15 bp, Homo sapiens
cattatttgaatcct

SEQ ID NO: 845484 - DNA, 15 bp, Homo sapiens
attatttgaatcctt

SEQ ID NO: 845485 - DNA, 15 bp, Homo sapiens
ttatttgaatccttg

SEQ ID NO: 845486 - DNA, 15 bp, Homo sapiens
tatttgaatccttgg

SEQ ID NO: 845487 - DNA, 15 bp, Homo sapiens
atttgaatccttggt

SEQ ID NO: 845488 - DNA, 15 bp, Homo sapiens
tttgaatccttggtt

SEQ ID NO: 845489 - DNA, 15 bp, Homo sapiens
ttgaatccttggttg

SEQ ID NO: 845490 - DNA, 15 bp, Homo sapiens
tgaatccttggttgt

SEQ ID NO: 845491 - DNA, 15 bp, Homo sapiens
gaatccttggttgta

SEQ ID NO: 845492 - DNA, 15 bp, Homo sapiens
aatccttggttgtaa

SEQ ID NO: 845493 - DNA, 15 bp, Homo sapiens
atccttggttgtaac

SEQ ID NO: 845494 - DNA, 15 bp, Homo sapiens
tccttggttgtaacc

SEQ ID NO: 845495 - DNA, 15 bp, Homo sapiens
ccttggttgtaacct

SEQ ID NO: 845496 - DNA, 15 bp, Homo sapiens
cttggttgtaaccta

SEQ ID NO: 845497 - DNA, 15 bp, Homo sapiens
ttggttgtaacctat

SEQ ID NO: 845498 - DNA, 15 bp, Homo sapiens
tggttgtaacctata

SEQ ID NO: 845499 - DNA, 15 bp, Homo sapiens
ggttgtaacctataa

SEQ ID NO: 845500 - DNA, 15 bp, Homo sapiens
gttgtaacctataaa

SEQ ID NO: 845501 - DNA, 15 bp, Homo sapiens
ttgtaacctataaaa

SEQ ID NO: 845502 - DNA, 15 bp, Homo sapiens
tgtaacctataaaag

SEQ ID NO: 845503 - DNA, 15 bp, Homo sapiens
gtaacctataaaagg

SEQ ID NO: 845504 - DNA, 15 bp, Homo sapiens
taacctataaaagga

SEQ ID NO: 845505 - DNA, 15 bp, Homo sapiens
aacctataaaaggag

SEQ ID NO: 845506 - DNA, 15 bp, Homo sapiens
acctataaaaggaga

SEQ ID NO: 845507 - DNA, 15 bp, Homo sapiens
cctataaaaggagac

SEQ ID NO: 845508 - DNA, 15 bp, Homo sapiens
ctataaaaggagaca

SEQ ID NO: 845509 - DNA, 15 bp, Homo sapiens
tataaaaggagacag

SEQ ID NO: 845510 - DNA, 15 bp, Homo sapiens
ataaaaggagacaga

SEQ ID NO: 845511 - DNA, 15 bp, Homo sapiens
taaaaggagacagat

SEQ ID NO: 845512 - DNA, 15 bp, Homo sapiens
aaaaggagacagatt

SEQ ID NO: 845513 - DNA, 15 bp, Homo sapiens
aaaggagacagattc

SEQ ID NO: 845514 - DNA, 15 bp, Homo sapiens
aaggagacagattca

SEQ ID NO: 845515 - DNA, 15 bp, Homo sapiens
aggagacagattcaa

SEQ ID NO: 845516 - DNA, 15 bp, Homo sapiens
ggagacagattcaag

SEQ ID NO: 845517 - DNA, 15 bp, Homo sapiens
gagacagattcaaga

SEQ ID NO: 845518 - DNA, 15 bp, Homo sapiens
agacagattcaagac

SEQ ID NO: 845519 - DNA, 15 bp, Homo sapiens
gacagattcaagact

SEQ ID NO: 845520 - DNA, 15 bp, Homo sapiens
acagattcaagactt

SEQ ID NO: 845521 - DNA, 15 bp, Homo sapiens
cagattcaagacttg

SEQ ID NO: 845522 - DNA, 15 bp, Homo sapiens
agattcaagacttgt

SEQ ID NO: 845523 - DNA, 15 bp, Homo sapiens
gattcaagacttgtt

SEQ ID NO: 845524 - DNA, 15 bp, Homo sapiens
attcaagacttgttt

SEQ ID NO: 845525 - DNA, 15 bp, Homo sapiens
ttcaagacttgttta

SEQ ID NO: 845526 - DNA, 15 bp, Homo sapiens
tcaagacttgtttaa

SEQ ID NO: 845527 - DNA, 15 bp, Homo sapiens
caagacttgtttaat

SEQ ID NO: 845528 - DNA, 15 bp, Homo sapiens
aagacttgtttaatc

SEQ ID NO: 845529 - DNA, 15 bp, Homo sapiens
agacttgtttaatct

SEQ ID NO: 845530 - DNA, 15 bp, Homo sapiens
gacttgtttaatctt

SEQ ID NO: 845531 - DNA, 15 bp, Homo sapiens
acttgtttaatcttc

SEQ ID NO: 845532 - DNA, 15 bp, Homo sapiens
cttgtttaatcttct

SEQ ID NO: 845533 - DNA, 15 bp, Homo sapiens
ttgtttaatcttctt

SEQ ID NO: 845534 - DNA, 15 bp, Homo sapiens
tgtttaatcttcttg

SEQ ID NO: 845535 - DNA, 15 bp, Homo sapiens
gtttaatcttcttgt

SEQ ID NO: 845536 - DNA, 15 bp, Homo sapiens
tttaatcttcttgtt

SEQ ID NO: 845537 - DNA, 15 bp, Homo sapiens
ttaatcttcttgtta

SEQ ID NO: 845538 - DNA, 15 bp, Homo sapiens
taatcttcttgttaa

SEQ ID NO: 845539 - DNA, 15 bp, Homo sapiens
aatcttcttgttaaa

SEQ ID NO: 845540 - DNA, 15 bp, Homo sapiens
atcttcttgttaaag

SEQ ID NO: 845541 - DNA, 15 bp, Homo sapiens
tcttcttgttaaagc

SEQ ID NO: 845542 - DNA, 15 bp, Homo sapiens
cttcttgttaaagct

SEQ ID NO: 845543 - DNA, 15 bp, Homo sapiens
ttcttgttaaagctg

SEQ ID NO: 845544 - DNA, 15 bp, Homo sapiens
tcttgttaaagctgt

SEQ ID NO: 845545 - DNA, 15 bp, Homo sapiens
cttgttaaagctgtg

SEQ ID NO: 845546 - DNA, 15 bp, Homo sapiens
ttgttaaagctgtgc

SEQ ID NO: 845547 - DNA, 15 bp, Homo sapiens
tgttaaagctgtgca

SEQ ID NO: 845548 - DNA, 15 bp, Homo sapiens
gttaaagctgtgcac

SEQ ID NO: 845549 - DNA, 15 bp, Homo sapiens
ttaaagctgtgcaca

SEQ ID NO: 845550 - DNA, 15 bp, Homo sapiens
taaagctgtgcacaa

SEQ ID NO: 845551 - DNA, 15 bp, Homo sapiens
aaagctgtgcacaat

SEQ ID NO: 845552 - DNA, 15 bp, Homo sapiens
aagctgtgcacaata

SEQ ID NO: 845553 - DNA, 15 bp, Homo sapiens
agctgtgcacaatat

SEQ ID NO: 845554 - DNA, 15 bp, Homo sapiens
gctgtgcacaatatt

SEQ ID NO: 845555 - DNA, 15 bp, Homo sapiens
ctgtgcacaatattt

SEQ ID NO: 845556 - DNA, 15 bp, Homo sapiens
tgtgcacaatatttg

SEQ ID NO: 845557 - DNA, 15 bp, Homo sapiens
gtgcacaatatttgc

SEQ ID NO: 845558 - DNA, 15 bp, Homo sapiens
tgcacaatatttgct

SEQ ID NO: 845559 - DNA, 15 bp, Homo sapiens
gcacaatatttgctt

SEQ ID NO: 845560 - DNA, 15 bp, Homo sapiens
cacaatatttgcttt

SEQ ID NO: 845561 - DNA, 15 bp, Homo sapiens
acaatatttgctttg

SEQ ID NO: 845562 - DNA, 15 bp, Homo sapiens
caatatttgctttgg

SEQ ID NO: 845563 - DNA, 15 bp, Homo sapiens
aatatttgctttggg

SEQ ID NO: 845564 - DNA, 15 bp, Homo sapiens
atatttgctttgggg

SEQ ID NO: 845565 - DNA, 15 bp, Homo sapiens
tatttgctttggggc

SEQ ID NO: 845566 - DNA, 15 bp, Homo sapiens
atttgctttggggcg

SEQ ID NO: 845567 - DNA, 15 bp, Homo sapiens
tttgctttggggcgt

SEQ ID NO: 845568 - DNA, 15 bp, Homo sapiens
ttgctttggggcgtt

SEQ ID NO: 845569 - DNA, 15 bp, Homo sapiens
tgctttggggcgttt

SEQ ID NO: 845570 - DNA, 15 bp, Homo sapiens
gctttggggcgttta

SEQ ID NO: 845571 - DNA, 15 bp, Homo sapiens
ctttggggcgtttac

SEQ ID NO: 845572 - DNA, 15 bp, Homo sapiens
tttggggcgtttact

SEQ ID NO: 845573 - DNA, 15 bp, Homo sapiens
ttggggcgtttactt

SEQ ID NO: 845574 - DNA, 15 bp, Homo sapiens
tggggcgtttactta

SEQ ID NO: 845575 - DNA, 15 bp, Homo sapiens
ggggcgtttacttat

SEQ ID NO: 845576 - DNA, 15 bp, Homo sapiens
gggcgtttacttatc

SEQ ID NO: 845577 - DNA, 15 bp, Homo sapiens
ggcgtttacttatca

SEQ ID NO: 845578 - DNA, 15 bp, Homo sapiens
gcgtttacttatcat

SEQ ID NO: 845579 - DNA, 15 bp, Homo sapiens
cgtttacttatcata

SEQ ID NO: 845580 - DNA, 15 bp, Homo sapiens
gtttacttatcatat

SEQ ID NO: 845581 - DNA, 15 bp, Homo sapiens
tttacttatcatatg

SEQ ID NO: 845582 - DNA, 15 bp, Homo sapiens
ttacttatcatatgg

SEQ ID NO: 845583 - DNA, 15 bp, Homo sapiens
tacttatcatatgga

SEQ ID NO: 845584 - DNA, 15 bp, Homo sapiens
acttatcatatggat

SEQ ID NO: 845585 - DNA, 15 bp, Homo sapiens
cttatcatatggatt

SEQ ID NO: 845586 - DNA, 15 bp, Homo sapiens
ttatcatatggattg

SEQ ID NO: 845587 - DNA, 15 bp, Homo sapiens
tatcatatggattga

SEQ ID NO: 845588 - DNA, 15 bp, Homo sapiens
atcatatggattgac

SEQ ID NO: 845589 - DNA, 15 bp, Homo sapiens
tcatatggattgact

SEQ ID NO: 845590 - DNA, 15 bp, Homo sapiens
catatggattgactt

SEQ ID NO: 845591 - DNA, 15 bp, Homo sapiens
atatggattgacttg

SEQ ID NO: 845592 - DNA, 15 bp, Homo sapiens
tatggattgacttgt

SEQ ID NO: 845593 - DNA, 15 bp, Homo sapiens
atggattgacttgtg

SEQ ID NO: 845594 - DNA, 15 bp, Homo sapiens
tggattgacttgtgt

SEQ ID NO: 845595 - DNA, 15 bp, Homo sapiens
ggattgacttgtgtt

SEQ ID NO: 845596 - DNA, 15 bp, Homo sapiens
gattgacttgtgttt

SEQ ID NO: 845597 - DNA, 15 bp, Homo sapiens
attgacttgtgttta

SEQ ID NO: 845598 - DNA, 15 bp, Homo sapiens
ttgacttgtgtttat

SEQ ID NO: 845599 - DNA, 15 bp, Homo sapiens
tgacttgtgtttata

SEQ ID NO: 845600 - DNA, 15 bp, Homo sapiens
gacttgtgtttatat

SEQ ID NO: 845601 - DNA, 15 bp, Homo sapiens
acttgtgtttatatt

SEQ ID NO: 845602 - DNA, 15 bp, Homo sapiens
cttgtgtttatattg

SEQ ID NO: 845603 - DNA, 15 bp, Homo sapiens
ttgtgtttatattgg

SEQ ID NO: 845604 - DNA, 15 bp, Homo sapiens
tgtgtttatattggt

SEQ ID NO: 845605 - DNA, 15 bp, Homo sapiens
gtgtttatattggtc

SEQ ID NO: 845606 - DNA, 15 bp, Homo sapiens
tgtttatattggtct

SEQ ID NO: 845607 - DNA, 15 bp, Homo sapiens
gtttatattggtctt

SEQ ID NO: 845608 - DNA, 15 bp, Homo sapiens
tttatattggtcttt

SEQ ID NO: 845609 - DNA, 15 bp, Homo sapiens
ttatattggtcttta

SEQ ID NO: 845610 - DNA, 15 bp, Homo sapiens
tatattggtctttat

SEQ ID NO: 845611 - DNA, 15 bp, Homo sapiens
atattggtctttatg

SEQ ID NO: 845612 - DNA, 15 bp, Homo sapiens
tattggtctttatgc

SEQ ID NO: 845613 - DNA, 15 bp, Homo sapiens
attggtctttatgcc

SEQ ID NO: 845614 - DNA, 15 bp, Homo sapiens
ttggtctttatgcct

SEQ ID NO: 845615 - DNA, 15 bp, Homo sapiens
tggtctttatgcctc

SEQ ID NO: 845616 - DNA, 15 bp, Homo sapiens
ggtctttatgcctca

SEQ ID NO: 845617 - DNA, 15 bp, Homo sapiens
gtctttatgcctcag

SEQ ID NO: 845618 - DNA, 15 bp, Homo sapiens
tctttatgcctcagg

SEQ ID NO: 845619 - DNA, 15 bp, Homo sapiens
ctttatgcctcaggg

SEQ ID NO: 845620 - DNA, 15 bp, Homo sapiens
tttatgcctcaggga

SEQ ID NO: 845621 - DNA, 15 bp, Homo sapiens
ttatgcctcagggag

SEQ ID NO: 845622 - DNA, 15 bp, Homo sapiens
tatgcctcagggagt

SEQ ID NO: 845623 - DNA, 15 bp, Homo sapiens
atgcctcagggagtt

SEQ ID NO: 845624 - DNA, 15 bp, Homo sapiens
tgcctcagggagtta

SEQ ID NO: 845625 - DNA, 15 bp, Homo sapiens
gcctcagggagttaa

SEQ ID NO: 845626 - DNA, 15 bp, Homo sapiens
cctcagggagttaaa

SEQ ID NO: 845627 - DNA, 15 bp, Homo sapiens
ctcagggagttaaac

SEQ ID NO: 845628 - DNA, 15 bp, Homo sapiens
tcagggagttaaaca

SEQ ID NO: 845629 - DNA, 15 bp, Homo sapiens
cagggagttaaacag

SEQ ID NO: 845630 - DNA, 15 bp, Homo sapiens
agggagttaaacagt

SEQ ID NO: 845631 - DNA, 15 bp, Homo sapiens
gggagttaaacagtg

SEQ ID NO: 845632 - DNA, 15 bp, Homo sapiens
ggagttaaacagtgt

SEQ ID NO: 845633 - DNA, 15 bp, Homo sapiens
gagttaaacagtgtc

SEQ ID NO: 845634 - DNA, 15 bp, Homo sapiens
agttaaacagtgtct

SEQ ID NO: 845635 - DNA, 15 bp, Homo sapiens
gttaaacagtgtctc

SEQ ID NO: 845636 - DNA, 15 bp, Homo sapiens
ttaaacagtgtctcc

SEQ ID NO: 845637 - DNA, 15 bp, Homo sapiens
taaacagtgtctccc

SEQ ID NO: 845638 - DNA, 15 bp, Homo sapiens
aaacagtgtctccca

SEQ ID NO: 845639 - DNA, 15 bp, Homo sapiens
aacagtgtctcccag

SEQ ID NO: 845640 - DNA, 15 bp, Homo sapiens
acagtgtctcccaga

SEQ ID NO: 845641 - DNA, 15 bp, Homo sapiens
cagtgtctcccagag

SEQ ID NO: 845642 - DNA, 15 bp, Homo sapiens
agtgtctcccagaga

SEQ ID NO: 845643 - DNA, 15 bp, Homo sapiens
gtgtctcccagagaa

SEQ ID NO: 845644 - DNA, 15 bp, Homo sapiens
tgtctcccagagaaa

SEQ ID NO: 845645 - DNA, 15 bp, Homo sapiens
gtctcccagagaaat

SEQ ID NO: 845646 - DNA, 15 bp, Homo sapiens
tctcccagagaaatg

SEQ ID NO: 845647 - DNA, 15 bp, Homo sapiens
ctcccagagaaatgc

SEQ ID NO: 845648 - DNA, 15 bp, Homo sapiens
tcccagagaaatgcc

SEQ ID NO: 845649 - DNA, 15 bp, Homo sapiens
cccagagaaatgcca

SEQ ID NO: 845650 - DNA, 15 bp, Homo sapiens
ccagagaaatgccat

SEQ ID NO: 845651 - DNA, 15 bp, Homo sapiens
cagagaaatgccatt

SEQ ID NO: 845652 - DNA, 15 bp, Homo sapiens
agagaaatgccattt

SEQ ID NO: 845653 - DNA, 15 bp, Homo sapiens
gagaaatgccatttg

SEQ ID NO: 845654 - DNA, 15 bp, Homo sapiens
agaaatgccatttgt

SEQ ID NO: 845655 - DNA, 15 bp, Homo sapiens
gaaatgccatttgtg

SEQ ID NO: 845656 - DNA, 15 bp, Homo sapiens
aaatgccatttgtgt

SEQ ID NO: 845657 - DNA, 15 bp, Homo sapiens
aatgccatttgtgtt

SEQ ID NO: 845658 - DNA, 15 bp, Homo sapiens
atgccatttgtgtta

SEQ ID NO: 845659 - DNA, 15 bp, Homo sapiens
tgccatttgtgttac

SEQ ID NO: 845660 - DNA, 15 bp, Homo sapiens
gccatttgtgttaca

SEQ ID NO: 845661 - DNA, 15 bp, Homo sapiens
ccatttgtgttacat

SEQ ID NO: 845662 - DNA, 15 bp, Homo sapiens
catttgtgttacatt

SEQ ID NO: 845663 - DNA, 15 bp, Homo sapiens
atttgtgttacattg

SEQ ID NO: 845664 - DNA, 15 bp, Homo sapiens
tttgtgttacattgc

SEQ ID NO: 845665 - DNA, 15 bp, Homo sapiens
ttgtgttacattgct

SEQ ID NO: 845666 - DNA, 15 bp, Homo sapiens
tgtgttacattgctt

SEQ ID NO: 845667 - DNA, 15 bp, Homo sapiens
gtgttacattgcttg

SEQ ID NO: 845668 - DNA, 15 bp, Homo sapiens
tgttacattgcttga

SEQ ID NO: 845669 - DNA, 15 bp, Homo sapiens
gttacattgcttgaa

SEQ ID NO: 845670 - DNA, 15 bp, Homo sapiens
ttacattgcttgaaa

SEQ ID NO: 845671 - DNA, 15 bp, Homo sapiens
tacattgcttgaaaa

SEQ ID NO: 845672 - DNA, 15 bp, Homo sapiens
acattgcttgaaaaa

SEQ ID NO: 845673 - DNA, 15 bp, Homo sapiens
cattgcttgaaaaat

SEQ ID NO: 845674 - DNA, 15 bp, Homo sapiens
attgcttgaaaaatt

SEQ ID NO: 845675 - DNA, 15 bp, Homo sapiens
ttgcttgaaaaattt

SEQ ID NO: 845676 - DNA, 15 bp, Homo sapiens
tgcttgaaaaatttc

SEQ ID NO: 845677 - DNA, 15 bp, Homo sapiens
gcttgaaaaatttca

SEQ ID NO: 845678 - DNA, 15 bp, Homo sapiens
cttgaaaaatttcag

SEQ ID NO: 845679 - DNA, 15 bp, Homo sapiens
ttgaaaaatttcagt

SEQ ID NO: 845680 - DNA, 15 bp, Homo sapiens
tgaaaaatttcagtt

SEQ ID NO: 845681 - DNA, 15 bp, Homo sapiens
gaaaaatttcagttc

SEQ ID NO: 845682 - DNA, 15 bp, Homo sapiens
aaaaatttcagttca

SEQ ID NO: 845683 - DNA, 15 bp, Homo sapiens
aaaatttcagttcat

SEQ ID NO: 845684 - DNA, 15 bp, Homo sapiens
aaatttcagttcata

SEQ ID NO: 845685 - DNA, 15 bp, Homo sapiens
aatttcagttcatac

SEQ ID NO: 845686 - DNA, 15 bp, Homo sapiens
atttcagttcataca

SEQ ID NO: 845687 - DNA, 15 bp, Homo sapiens
tttcagttcatacac

SEQ ID NO: 845688 - DNA, 15 bp, Homo sapiens
ttcagttcatacacc

SEQ ID NO: 845689 - DNA, 15 bp, Homo sapiens
tcagttcatacaccc

SEQ ID NO: 845690 - DNA, 15 bp, Homo sapiens
cagttcatacacccc

SEQ ID NO: 845691 - DNA, 15 bp, Homo sapiens
agttcatacaccccc

SEQ ID NO: 845692 - DNA, 15 bp, Homo sapiens
gttcatacaccccca

SEQ ID NO: 845693 - DNA, 15 bp, Homo sapiens
ttcatacacccccat

SEQ ID NO: 845694 - DNA, 15 bp, Homo sapiens
tcatacacccccatg

SEQ ID NO: 845695 - DNA, 15 bp, Homo sapiens
catacacccccatga

SEQ ID NO: 845696 - DNA, 15 bp, Homo sapiens
atacacccccatgaa

SEQ ID NO: 845697 - DNA, 15 bp, Homo sapiens
tacacccccatgaaa

SEQ ID NO: 845698 - DNA, 15 bp, Homo sapiens
acacccccatgaaaa

SEQ ID NO: 845699 - DNA, 15 bp, Homo sapiens
cacccccatgaaaaa

SEQ ID NO: 845700 - DNA, 15 bp, Homo sapiens
acccccatgaaaaat

SEQ ID NO: 845701 - DNA, 15 bp, Homo sapiens
cccccatgaaaaata

SEQ ID NO: 845702 - DNA, 15 bp, Homo sapiens
ccccatgaaaaatac

SEQ ID NO: 845703 - DNA, 15 bp, Homo sapiens
cccatgaaaaataca

SEQ ID NO: 845704 - DNA, 15 bp, Homo sapiens
ccatgaaaaatacat

SEQ ID NO: 845705 - DNA, 15 bp, Homo sapiens
catgaaaaatacatt

SEQ ID NO: 845706 - DNA, 15 bp, Homo sapiens
atgaaaaatacattt

SEQ ID NO: 845707 - DNA, 15 bp, Homo sapiens
tgaaaaatacattta

SEQ ID NO: 845708 - DNA, 15 bp, Homo sapiens
gaaaaatacatttaa

SEQ ID NO: 845709 - DNA, 15 bp, Homo sapiens
aaaaatacatttaaa

SEQ ID NO: 845710 - DNA, 15 bp, Homo sapiens
aaaatacatttaaaa

SEQ ID NO: 845711 - DNA, 15 bp, Homo sapiens
aaatacatttaaaac

SEQ ID NO: 845712 - DNA, 15 bp, Homo sapiens
aatacatttaaaact

SEQ ID NO: 845713 - DNA, 15 bp, Homo sapiens
atacatttaaaactt

SEQ ID NO: 845714 - DNA, 15 bp, Homo sapiens
tacatttaaaactta

SEQ ID NO: 845715 - DNA, 15 bp, Homo sapiens
acatttaaaacttat

SEQ ID NO: 845716 - DNA, 15 bp, Homo sapiens
catttaaaacttatc

SEQ ID NO: 845717 - DNA, 15 bp, Homo sapiens
atttaaaacttatct

SEQ ID NO: 845718 - DNA, 15 bp, Homo sapiens
tttaaaacttatctt

SEQ ID NO: 845719 - DNA, 15 bp, Homo sapiens
ttaaaacttatctta

SEQ ID NO: 845720 - DNA, 15 bp, Homo sapiens
taaaacttatcttaa

SEQ ID NO: 845721 - DNA, 15 bp, Homo sapiens
aaaacttatcttaac

SEQ ID NO: 845722 - DNA, 15 bp, Homo sapiens
aaacttatcttaaca

SEQ ID NO: 845723 - DNA, 15 bp, Homo sapiens
aacttatcttaacaa

SEQ ID NO: 845724 - DNA, 15 bp, Homo sapiens
acttatcttaacaaa

SEQ ID NO: 845725 - DNA, 15 bp, Homo sapiens
cttatcttaacaaag

SEQ ID NO: 845726 - DNA, 15 bp, Homo sapiens
ttatcttaacaaaga

SEQ ID NO: 845727 - DNA, 15 bp, Homo sapiens
tatcttaacaaagat

SEQ ID NO: 845728 - DNA, 15 bp, Homo sapiens
atcttaacaaagatg

SEQ ID NO: 845729 - DNA, 15 bp, Homo sapiens
tcttaacaaagatga

SEQ ID NO: 845730 - DNA, 15 bp, Homo sapiens
cttaacaaagatgag

SEQ ID NO: 845731 - DNA, 15 bp, Homo sapiens
ttaacaaagatgagt

SEQ ID NO: 845732 - DNA, 15 bp, Homo sapiens
taacaaagatgagta

SEQ ID NO: 845733 - DNA, 15 bp, Homo sapiens
aacaaagatgagtac

SEQ ID NO: 845734 - DNA, 15 bp, Homo sapiens
acaaagatgagtaca

SEQ ID NO: 845735 - DNA, 15 bp, Homo sapiens
caaagatgagtacac

SEQ ID NO: 845736 - DNA, 15 bp, Homo sapiens
aaagatgagtacact

SEQ ID NO: 845737 - DNA, 15 bp, Homo sapiens
aagatgagtacactt

SEQ ID NO: 845738 - DNA, 15 bp, Homo sapiens
agatgagtacactta

SEQ ID NO: 845739 - DNA, 15 bp, Homo sapiens
gatgagtacacttag

SEQ ID NO: 845740 - DNA, 15 bp, Homo sapiens
atgagtacacttagg

SEQ ID NO: 845741 - DNA, 15 bp, Homo sapiens
tgagtacacttaggc

SEQ ID NO: 845742 - DNA, 15 bp, Homo sapiens
gagtacacttaggcc

SEQ ID NO: 845743 - DNA, 15 bp, Homo sapiens
agtacacttaggccc

SEQ ID NO: 845744 - DNA, 15 bp, Homo sapiens
gtacacttaggccca

SEQ ID NO: 845745 - DNA, 15 bp, Homo sapiens
tacacttaggcccag

SEQ ID NO: 845746 - DNA, 15 bp, Homo sapiens
acacttaggcccaga

SEQ ID NO: 845747 - DNA, 15 bp, Homo sapiens
cacttaggcccagaa

SEQ ID NO: 845748 - DNA, 15 bp, Homo sapiens
acttaggcccagaat

SEQ ID NO: 845749 - DNA, 15 bp, Homo sapiens
cttaggcccagaatg

SEQ ID NO: 845750 - DNA, 15 bp, Homo sapiens
ttaggcccagaatgt

SEQ ID NO: 845751 - DNA, 15 bp, Homo sapiens
taggcccagaatgtt

SEQ ID NO: 845752 - DNA, 15 bp, Homo sapiens
aggcccagaatgttc

SEQ ID NO: 845753 - DNA, 15 bp, Homo sapiens
ggcccagaatgttct

SEQ ID NO: 845754 - DNA, 15 bp, Homo sapiens
gcccagaatgttctc

SEQ ID NO: 845755 - DNA, 15 bp, Homo sapiens
cccagaatgttctct

SEQ ID NO: 845756 - DNA, 15 bp, Homo sapiens
ccagaatgttctcta

SEQ ID NO: 845757 - DNA, 15 bp, Homo sapiens
cagaatgttctctaa

SEQ ID NO: 845758 - DNA, 15 bp, Homo sapiens
agaatgttctctaat

SEQ ID NO: 845759 - DNA, 15 bp, Homo sapiens
gaatgttctctaatg

SEQ ID NO: 845760 - DNA, 15 bp, Homo sapiens
aatgttctctaatgc

SEQ ID NO: 845761 - DNA, 15 bp, Homo sapiens
atgttctctaatgct

SEQ ID NO: 845762 - DNA, 15 bp, Homo sapiens
tgttctctaatgctc

SEQ ID NO: 845763 - DNA, 15 bp, Homo sapiens
gttctctaatgctct

SEQ ID NO: 845764 - DNA, 15 bp, Homo sapiens
ttctctaatgctctt

SEQ ID NO: 845765 - DNA, 15 bp, Homo sapiens
tctctaatgctcttg

SEQ ID NO: 845766 - DNA, 15 bp, Homo sapiens
ctctaatgctcttga

SEQ ID NO: 845767 - DNA, 15 bp, Homo sapiens
tctaatgctcttgat

SEQ ID NO: 845768 - DNA, 15 bp, Homo sapiens
ctaatgctcttgata

SEQ ID NO: 845769 - DNA, 15 bp, Homo sapiens
taatgctcttgataa

SEQ ID NO: 845770 - DNA, 15 bp, Homo sapiens
aatgctcttgataat

SEQ ID NO: 845771 - DNA, 15 bp, Homo sapiens
atgctcttgataatt

SEQ ID NO: 845772 - DNA, 15 bp, Homo sapiens
tgctcttgataattt

SEQ ID NO: 845773 - DNA, 15 bp, Homo sapiens
gctcttgataatttc

SEQ ID NO: 845774 - DNA, 15 bp, Homo sapiens
ctcttgataatttcc

SEQ ID NO: 845775 - DNA, 15 bp, Homo sapiens
tcttgataatttcct

SEQ ID NO: 845776 - DNA, 15 bp, Homo sapiens
cttgataatttccta

SEQ ID NO: 845777 - DNA, 15 bp, Homo sapiens
ttgataatttcctag

SEQ ID NO: 845778 - DNA, 15 bp, Homo sapiens
tgataatttcctaga

SEQ ID NO: 845779 - DNA, 15 bp, Homo sapiens
gataatttcctagaa

SEQ ID NO: 845780 - DNA, 15 bp, Homo sapiens
ataatttcctagaag

SEQ ID NO: 845781 - DNA, 15 bp, Homo sapiens
taatttcctagaaga

SEQ ID NO: 845782 - DNA, 15 bp, Homo sapiens
aatttcctagaagaa

SEQ ID NO: 845783 - DNA, 15 bp, Homo sapiens
atttcctagaagaaa

SEQ ID NO: 845784 - DNA, 15 bp, Homo sapiens
tttcctagaagaaat

SEQ ID NO: 845785 - DNA, 15 bp, Homo sapiens
ttcctagaagaaatt

SEQ ID NO: 845786 - DNA, 15 bp, Homo sapiens
tcctagaagaaattt

SEQ ID NO: 845787 - DNA, 15 bp, Homo sapiens
cctagaagaaatttt

SEQ ID NO: 845788 - DNA, 15 bp, Homo sapiens
ctagaagaaattttt

SEQ ID NO: 845789 - DNA, 15 bp, Homo sapiens
tagaagaaatttttc

SEQ ID NO: 845790 - DNA, 15 bp, Homo sapiens
agaagaaatttttct

SEQ ID NO: 845791 - DNA, 15 bp, Homo sapiens
gaagaaatttttctg

SEQ ID NO: 845792 - DNA, 15 bp, Homo sapiens
aagaaatttttctga

SEQ ID NO: 845793 - DNA, 15 bp, Homo sapiens
agaaatttttctgac

SEQ ID NO: 845794 - DNA, 15 bp, Homo sapiens
gaaatttttctgact

SEQ ID NO: 845795 - DNA, 15 bp, Homo sapiens
aaatttttctgactt

SEQ ID NO: 845796 - DNA, 15 bp, Homo sapiens
aatttttctgacttt

SEQ ID NO: 845797 - DNA, 15 bp, Homo sapiens
atttttctgactttt

SEQ ID NO: 845798 - DNA, 15 bp, Homo sapiens
tttttctgacttttg

SEQ ID NO: 845799 - DNA, 15 bp, Homo sapiens
ttttctgacttttga

SEQ ID NO: 845800 - DNA, 15 bp, Homo sapiens
tttctgacttttgaa

SEQ ID NO: 845801 - DNA, 15 bp, Homo sapiens
ttctgacttttgaaa

SEQ ID NO: 845802 - DNA, 15 bp, Homo sapiens
tctgacttttgaaat

SEQ ID NO: 845803 - DNA, 15 bp, Homo sapiens
ctgacttttgaaata

SEQ ID NO: 845804 - DNA, 15 bp, Homo sapiens
tgacttttgaaataa

SEQ ID NO: 845805 - DNA, 15 bp, Homo sapiens
gacttttgaaataat

SEQ ID NO: 845806 - DNA, 15 bp, Homo sapiens
acttttgaaataata

SEQ ID NO: 845807 - DNA, 15 bp, Homo sapiens
cttttgaaataatag

SEQ ID NO: 845808 - DNA, 15 bp, Homo sapiens
ttttgaaataataga

SEQ ID NO: 845809 - DNA, 15 bp, Homo sapiens
tttgaaataatagat

SEQ ID NO: 845810 - DNA, 15 bp, Homo sapiens
ttgaaataatagatc

SEQ ID NO: 845811 - DNA, 15 bp, Homo sapiens
tgaaataatagatcc

SEQ ID NO: 845812 - DNA, 15 bp, Homo sapiens
gaaataatagatcca

SEQ ID NO: 845813 - DNA, 15 bp, Homo sapiens
aaataatagatccat

SEQ ID NO: 845814 - DNA, 15 bp, Homo sapiens
aataatagatccata

SEQ ID NO: 845815 - DNA, 15 bp, Homo sapiens
ataatagatccataa

SEQ ID NO: 845816 - DNA, 15 bp, Homo sapiens
taatagatccataat

SEQ ID NO: 845817 - DNA, 15 bp, Homo sapiens
aatagatccataata

SEQ ID NO: 845818 - DNA, 15 bp, Homo sapiens
atagatccataatat

SEQ ID NO: 845819 - DNA, 15 bp, Homo sapiens
tagatccataatata

SEQ ID NO: 845820 - DNA, 15 bp, Homo sapiens
agatccataatatat

SEQ ID NO: 845821 - DNA, 15 bp, Homo sapiens
gatccataatatata

SEQ ID NO: 845822 - DNA, 15 bp, Homo sapiens
atccataatatatat

SEQ ID NO: 845823 - DNA, 15 bp, Homo sapiens
tccataatatatatt

SEQ ID NO: 845824 - DNA, 15 bp, Homo sapiens
ccataatatatattc

SEQ ID NO: 845825 - DNA, 15 bp, Homo sapiens
cataatatatattct

SEQ ID NO: 845826 - DNA, 15 bp, Homo sapiens
ataatatatattctt

SEQ ID NO: 845827 - DNA, 15 bp, Homo sapiens
taatatatattctta

SEQ ID NO: 845828 - DNA, 15 bp, Homo sapiens
aatatatattcttat

SEQ ID NO: 845829 - DNA, 15 bp, Homo sapiens
atatatattcttatg

SEQ ID NO: 845830 - DNA, 15 bp, Homo sapiens
tatatattcttatgg

SEQ ID NO: 845831 - DNA, 15 bp, Homo sapiens
atatattcttatgga

SEQ ID NO: 845832 - DNA, 15 bp, Homo sapiens
tatattcttatggaa

SEQ ID NO: 845833 - DNA, 15 bp, Homo sapiens
atattcttatggaaa

SEQ ID NO: 845834 - DNA, 15 bp, Homo sapiens
tattcttatggaaat

SEQ ID NO: 845835 - DNA, 15 bp, Homo sapiens
attcttatggaaatc

SEQ ID NO: 845836 - DNA, 15 bp, Homo sapiens
ttcttatggaaatct

SEQ ID NO: 845837 - DNA, 15 bp, Homo sapiens
tcttatggaaatctg

SEQ ID NO: 845838 - DNA, 15 bp, Homo sapiens
cttatggaaatctga

SEQ ID NO: 845839 - DNA, 15 bp, Homo sapiens
ttatggaaatctgaa

SEQ ID NO: 845840 - DNA, 15 bp, Homo sapiens
tatggaaatctgaaa

SEQ ID NO: 845841 - DNA, 15 bp, Homo sapiens
atggaaatctgaaac

SEQ ID NO: 845842 - DNA, 15 bp, Homo sapiens
tggaaatctgaaacc

SEQ ID NO: 845843 - DNA, 15 bp, Homo sapiens
ggaaatctgaaacca

SEQ ID NO: 845844 - DNA, 15 bp, Homo sapiens
gaaatctgaaaccat

SEQ ID NO: 845845 - DNA, 15 bp, Homo sapiens
aaatctgaaaccatt

SEQ ID NO: 845846 - DNA, 15 bp, Homo sapiens
aatctgaaaccattt

SEQ ID NO: 845847 - DNA, 15 bp, Homo sapiens
atctgaaaccatttg

SEQ ID NO: 845848 - DNA, 15 bp, Homo sapiens
tctgaaaccatttgg

SEQ ID NO: 845849 - DNA, 15 bp, Homo sapiens
ctgaaaccatttggg

SEQ ID NO: 845850 - DNA, 15 bp, Homo sapiens
tgaaaccatttgggc

SEQ ID NO: 845851 - DNA, 15 bp, Homo sapiens
gaaaccatttgggca

SEQ ID NO: 845852 - DNA, 15 bp, Homo sapiens
aaaccatttgggcat

SEQ ID NO: 845853 - DNA, 15 bp, Homo sapiens
aaccatttgggcatt

SEQ ID NO: 845854 - DNA, 15 bp, Homo sapiens
accatttgggcattt

SEQ ID NO: 845855 - DNA, 15 bp, Homo sapiens
ccatttgggcatttg

SEQ ID NO: 845856 - DNA, 15 bp, Homo sapiens
catttgggcatttgg

SEQ ID NO: 845857 - DNA, 15 bp, Homo sapiens
atttgggcatttggg

SEQ ID NO: 845858 - DNA, 15 bp, Homo sapiens
tttgggcatttgggg

SEQ ID NO: 845859 - DNA, 15 bp, Homo sapiens
ttgggcatttggggg

SEQ ID NO: 845860 - DNA, 15 bp, Homo sapiens
tgggcatttgggggt

SEQ ID NO: 845861 - DNA, 15 bp, Homo sapiens
gggcatttgggggta

SEQ ID NO: 845862 - DNA, 15 bp, Homo sapiens
ggcatttgggggtaa

SEQ ID NO: 845863 - DNA, 15 bp, Homo sapiens
gcatttgggggtaaa

SEQ ID NO: 845864 - DNA, 15 bp, Homo sapiens
catttgggggtaaaa

SEQ ID NO: 845865 - DNA, 15 bp, Homo sapiens
atttgggggtaaaaa

SEQ ID NO: 845866 - DNA, 15 bp, Homo sapiens
tttgggggtaaaaag

SEQ ID NO: 845867 - DNA, 15 bp, Homo sapiens
ttgggggtaaaaagt

SEQ ID NO: 845868 - DNA, 15 bp, Homo sapiens
tgggggtaaaaagta

SEQ ID NO: 845869 - DNA, 15 bp, Homo sapiens
gggggtaaaaagtat

SEQ ID NO: 845870 - DNA, 15 bp, Homo sapiens
ggggtaaaaagtatt

SEQ ID NO: 845871 - DNA, 15 bp, Homo sapiens
gggtaaaaagtattt

SEQ ID NO: 845872 - DNA, 15 bp, Homo sapiens
ggtaaaaagtatttt

SEQ ID NO: 845873 - DNA, 15 bp, Homo sapiens
gtaaaaagtatttta

SEQ ID NO: 845874 - DNA, 15 bp, Homo sapiens
taaaaagtattttat

SEQ ID NO: 845875 - DNA, 15 bp, Homo sapiens
aaaaagtattttatt

SEQ ID NO: 845876 - DNA, 15 bp, Homo sapiens
aaaagtattttatta

SEQ ID NO: 845877 - DNA, 15 bp, Homo sapiens
aaagtattttattag

SEQ ID NO: 845878 - DNA, 15 bp, Homo sapiens
aagtattttattagt

SEQ ID NO: 845879 - DNA, 15 bp, Homo sapiens
agtattttattagta

SEQ ID NO: 845880 - DNA, 15 bp, Homo sapiens
gtattttattagtaa

SEQ ID NO: 845881 - DNA, 15 bp, Homo sapiens
tattttattagtaaa

SEQ ID NO: 845882 - DNA, 15 bp, Homo sapiens
attttattagtaaat

SEQ ID NO: 845883 - DNA, 15 bp, Homo sapiens
ttttattagtaaatt

SEQ ID NO: 845884 - DNA, 15 bp, Homo sapiens
tttattagtaaattt

SEQ ID NO: 845885 - DNA, 15 bp, Homo sapiens
ttattagtaaattta

SEQ ID NO: 845886 - DNA, 15 bp, Homo sapiens
tattagtaaatttaa

SEQ ID NO: 845887 - DNA, 15 bp, Homo sapiens
attagtaaatttaaa

SEQ ID NO: 845888 - DNA, 15 bp, Homo sapiens
ttagtaaatttaaat

SEQ ID NO: 845889 - DNA, 15 bp, Homo sapiens
tagtaaatttaaatg

SEQ ID NO: 845890 - DNA, 15 bp, Homo sapiens
agtaaatttaaatga

SEQ ID NO: 845891 - DNA, 15 bp, Homo sapiens
gtaaatttaaatgag

SEQ ID NO: 845892 - DNA, 15 bp, Homo sapiens
taaatttaaatgagg

SEQ ID NO: 845893 - DNA, 15 bp, Homo sapiens
aaatttaaatgaggt

SEQ ID NO: 845894 - DNA, 15 bp, Homo sapiens
aatttaaatgaggta

SEQ ID NO: 845895 - DNA, 15 bp, Homo sapiens
atttaaatgaggtag

SEQ ID NO: 845896 - DNA, 15 bp, Homo sapiens
tttaaatgaggtagc

SEQ ID NO: 845897 - DNA, 15 bp, Homo sapiens
ttaaatgaggtagct

SEQ ID NO: 845898 - DNA, 15 bp, Homo sapiens
taaatgaggtagctg

SEQ ID NO: 845899 - DNA, 15 bp, Homo sapiens
aaatgaggtagctgg

SEQ ID NO: 845900 - DNA, 15 bp, Homo sapiens
aatgaggtagctgga

SEQ ID NO: 845901 - DNA, 15 bp, Homo sapiens
atgaggtagctggat

SEQ ID NO: 845902 - DNA, 15 bp, Homo sapiens
tgaggtagctggata

SEQ ID NO: 845903 - DNA, 15 bp, Homo sapiens
gaggtagctggataa

SEQ ID NO: 845904 - DNA, 15 bp, Homo sapiens
aggtagctggataat

SEQ ID NO: 845905 - DNA, 15 bp, Homo sapiens
ggtagctggataatt

SEQ ID NO: 845906 - DNA, 15 bp, Homo sapiens
gtagctggataatta

SEQ ID NO: 845907 - DNA, 15 bp, Homo sapiens
tagctggataattaa

SEQ ID NO: 845908 - DNA, 15 bp, Homo sapiens
agctggataattaaa

SEQ ID NO: 845909 - DNA, 15 bp, Homo sapiens
gctggataattaaat

SEQ ID NO: 845910 - DNA, 15 bp, Homo sapiens
ctggataattaaatt

SEQ ID NO: 845911 - DNA, 15 bp, Homo sapiens
tggataattaaatta

SEQ ID NO: 845912 - DNA, 15 bp, Homo sapiens
ggataattaaattac

SEQ ID NO: 845913 - DNA, 15 bp, Homo sapiens
gataattaaattact

SEQ ID NO: 845914 - DNA, 15 bp, Homo sapiens
ataattaaattactt

SEQ ID NO: 845915 - DNA, 15 bp, Homo sapiens
taattaaattacttt

SEQ ID NO: 845916 - DNA, 15 bp, Homo sapiens
aattaaattactttt

SEQ ID NO: 845917 - DNA, 15 bp, Homo sapiens
attaaattactttta

SEQ ID NO: 845918 - DNA, 15 bp, Homo sapiens
ttaaattacttttaa

SEQ ID NO: 845919 - DNA, 15 bp, Homo sapiens
taaattacttttaag

SEQ ID NO: 845920 - DNA, 15 bp, Homo sapiens
aaattacttttaagt

SEQ ID NO: 845921 - DNA, 15 bp, Homo sapiens
aattacttttaagtt

SEQ ID NO: 845922 - DNA, 15 bp, Homo sapiens
attacttttaagtta

SEQ ID NO: 845923 - DNA, 15 bp, Homo sapiens
ttacttttaagttac

SEQ ID NO: 845924 - DNA, 15 bp, Homo sapiens
tacttttaagttacc

SEQ ID NO: 845925 - DNA, 15 bp, Homo sapiens
acttttaagttacct

SEQ ID NO: 845926 - DNA, 15 bp, Homo sapiens
cttttaagttacctt

SEQ ID NO: 845927 - DNA, 15 bp, Homo sapiens
ttttaagttaccttt

SEQ ID NO: 845928 - DNA, 15 bp, Homo sapiens
tttaagttacctttg

SEQ ID NO: 845929 - DNA, 15 bp, Homo sapiens
ttaagttacctttga

SEQ ID NO: 845930 - DNA, 15 bp, Homo sapiens
taagttacctttgag

SEQ ID NO: 845931 - DNA, 15 bp, Homo sapiens
aagttacctttgaga

SEQ ID NO: 845932 - DNA, 15 bp, Homo sapiens
agttacctttgagat

SEQ ID NO: 845933 - DNA, 15 bp, Homo sapiens
gttacctttgagatg

SEQ ID NO: 845934 - DNA, 15 bp, Homo sapiens
ttacctttgagatga

SEQ ID NO: 845935 - DNA, 15 bp, Homo sapiens
tacctttgagatgat

SEQ ID NO: 845936 - DNA, 15 bp, Homo sapiens
acctttgagatgatt

SEQ ID NO: 845937 - DNA, 15 bp, Homo sapiens
cctttgagatgattt

SEQ ID NO: 845938 - DNA, 15 bp, Homo sapiens
ctttgagatgatttt

SEQ ID NO: 845939 - DNA, 15 bp, Homo sapiens
tttgagatgattttt

SEQ ID NO: 845940 - DNA, 15 bp, Homo sapiens
ttgagatgatttttc

SEQ ID NO: 845941 - DNA, 15 bp, Homo sapiens
tgagatgatttttct

SEQ ID NO: 845942 - DNA, 15 bp, Homo sapiens
gagatgatttttctc

SEQ ID NO: 845943 - DNA, 15 bp, Homo sapiens
agatgatttttctca

SEQ ID NO: 845944 - DNA, 15 bp, Homo sapiens
gatgatttttctcaa

SEQ ID NO: 845945 - DNA, 15 bp, Homo sapiens
atgatttttctcaat

SEQ ID NO: 845946 - DNA, 15 bp, Homo sapiens
tgatttttctcaatc

SEQ ID NO: 845947 - DNA, 15 bp, Homo sapiens
gatttttctcaatca

SEQ ID NO: 845948 - DNA, 15 bp, Homo sapiens
atttttctcaatcag

SEQ ID NO: 845949 - DNA, 15 bp, Homo sapiens
tttttctcaatcaga

SEQ ID NO: 845950 - DNA, 15 bp, Homo sapiens
ttttctcaatcagag

SEQ ID NO: 845951 - DNA, 15 bp, Homo sapiens
tttctcaatcagagc

SEQ ID NO: 845952 - DNA, 15 bp, Homo sapiens
ttctcaatcagagca

SEQ ID NO: 845953 - DNA, 15 bp, Homo sapiens
aatattggattattt

SEQ ID NO: 845954 - DNA, 15 bp, Homo sapiens
atattggattatttc

SEQ ID NO: 845955 - DNA, 15 bp, Homo sapiens
tattggattatttct

SEQ ID NO: 845956 - DNA, 15 bp, Homo sapiens
attggattatttctg

SEQ ID NO: 845957 - DNA, 15 bp, Homo sapiens
ttggattatttctgg

SEQ ID NO: 845958 - DNA, 15 bp, Homo sapiens
tggattatttctgga

SEQ ID NO: 845959 - DNA, 15 bp, Homo sapiens
ggattatttctggat

SEQ ID NO: 845960 - DNA, 15 bp, Homo sapiens
gattatttctggatt

SEQ ID NO: 845961 - DNA, 15 bp, Homo sapiens
attatttctggattg

SEQ ID NO: 845962 - DNA, 15 bp, Homo sapiens
ttatttctggattgt

SEQ ID NO: 845963 - DNA, 15 bp, Homo sapiens
tatttctggattgtg

SEQ ID NO: 845964 - DNA, 15 bp, Homo sapiens
atttctggattgtga

SEQ ID NO: 845965 - DNA, 15 bp, Homo sapiens
tttctggattgtgaa

SEQ ID NO: 845966 - DNA, 15 bp, Homo sapiens
ttctggattgtgaaa

SEQ ID NO: 845967 - DNA, 15 bp, Homo sapiens
tctggattgtgaaag

SEQ ID NO: 845968 - DNA, 15 bp, Homo sapiens
ctggattgtgaaaga

SEQ ID NO: 845969 - DNA, 15 bp, Homo sapiens
tggattgtgaaagaa

SEQ ID NO: 845970 - DNA, 15 bp, Homo sapiens
ggattgtgaaagaag

SEQ ID NO: 845971 - DNA, 15 bp, Homo sapiens
gattgtgaaagaaga

SEQ ID NO: 845972 - DNA, 15 bp, Homo sapiens
attgtgaaagaagaa

SEQ ID NO: 845973 - DNA, 15 bp, Homo sapiens
ttgtgaaagaagaag

SEQ ID NO: 845974 - DNA, 15 bp, Homo sapiens
tgtgaaagaagaagg

SEQ ID NO: 845975 - DNA, 15 bp, Homo sapiens
gtgaaagaagaagga

SEQ ID NO: 845976 - DNA, 15 bp, Homo sapiens
tgaaagaagaaggaa

SEQ ID NO: 845977 - DNA, 15 bp, Homo sapiens
gaaagaagaaggaag

SEQ ID NO: 845978 - DNA, 15 bp, Homo sapiens
aaagaagaaggaaga

SEQ ID NO: 845979 - DNA, 15 bp, Homo sapiens
aagaagaaggaagaa

SEQ ID NO: 845980 - DNA, 15 bp, Homo sapiens
agaagaaggaagaag

SEQ ID NO: 845981 - DNA, 15 bp, Homo sapiens
gaagaaggaagaagc

SEQ ID NO: 845982 - DNA, 15 bp, Homo sapiens
aagaaggaagaagca

SEQ ID NO: 845983 - DNA, 15 bp, Homo sapiens
agaaggaagaagcat

SEQ ID NO: 845984 - DNA, 15 bp, Homo sapiens
gaaggaagaagcata

SEQ ID NO: 845985 - DNA, 15 bp, Homo sapiens
aaggaagaagcatat

SEQ ID NO: 845986 - DNA, 15 bp, Homo sapiens
aggaagaagcatatg

SEQ ID NO: 845987 - DNA, 15 bp, Homo sapiens
ggaagaagcatatgg

SEQ ID NO: 845988 - DNA, 15 bp, Homo sapiens
gaagaagcatatgga

SEQ ID NO: 845989 - DNA, 15 bp, Homo sapiens
aagaagcatatggaa

SEQ ID NO: 845990 - DNA, 15 bp, Homo sapiens
agaagcatatggaag

SEQ ID NO: 845991 - DNA, 15 bp, Homo sapiens
gaagcatatggaaga

SEQ ID NO: 845992 - DNA, 15 bp, Homo sapiens
aagcatatggaagag

SEQ ID NO: 845993 - DNA, 15 bp, Homo sapiens
agcatatggaagaga

SEQ ID NO: 845994 - DNA, 15 bp, Homo sapiens
gcatatggaagagaa

SEQ ID NO: 845995 - DNA, 15 bp, Homo sapiens
catatggaagagaag

SEQ ID NO: 845996 - DNA, 15 bp, Homo sapiens
atatggaagagaagt

SEQ ID NO: 845997 - DNA, 15 bp, Homo sapiens
tatggaagagaagtt

SEQ ID NO: 845998 - DNA, 15 bp, Homo sapiens
atggaagagaagttt

SEQ ID NO: 845999 - DNA, 15 bp, Homo sapiens
tggaagagaagtttt

SEQ ID NO: 846000 - DNA, 15 bp, Homo sapiens
ggaagagaagtttta

SEQ ID NO: 846001 - DNA, 15 bp, Homo sapiens
gaagagaagttttag

SEQ ID NO: 846002 - DNA, 15 bp, Homo sapiens
aagagaagttttagt

SEQ ID NO: 846003 - DNA, 15 bp, Homo sapiens
agagaagttttagta

SEQ ID NO: 846004 - DNA, 15 bp, Homo sapiens
gagaagttttagtag

SEQ ID NO: 846005 - DNA, 15 bp, Homo sapiens
agaagttttagtaga

SEQ ID NO: 846006 - DNA, 15 bp, Homo sapiens
gaagttttagtagag

SEQ ID NO: 846007 - DNA, 15 bp, Homo sapiens
aagttttagtagagg

SEQ ID NO: 846008 - DNA, 15 bp, Homo sapiens
agttttagtagaggg

SEQ ID NO: 846009 - DNA, 15 bp, Homo sapiens
gttttagtagagggg

SEQ ID NO: 846010 - DNA, 15 bp, Homo sapiens
ttttagtagagggga

SEQ ID NO: 846011 - DNA, 15 bp, Homo sapiens
tttagtagaggggag

SEQ ID NO: 846012 - DNA, 15 bp, Homo sapiens
ttagtagaggggagg

SEQ ID NO: 846013 - DNA, 15 bp, Homo sapiens
tagtagaggggagga

SEQ ID NO: 846014 - DNA, 15 bp, Homo sapiens
agtagaggggaggaa

SEQ ID NO: 846015 - DNA, 15 bp, Homo sapiens
gtagaggggaggaag

SEQ ID NO: 846016 - DNA, 15 bp, Homo sapiens
tagaggggaggaagg

SEQ ID NO: 846017 - DNA, 15 bp, Homo sapiens
agaggggaggaagga

SEQ ID NO: 846018 - DNA, 15 bp, Homo sapiens
gaggggaggaaggag

SEQ ID NO: 846019 - DNA, 15 bp, Homo sapiens
aggggaggaaggagg

SEQ ID NO: 846020 - DNA, 15 bp, Homo sapiens
ggggaggaaggagga

SEQ ID NO: 846021 - DNA, 15 bp, Homo sapiens
gggaggaaggaggag

SEQ ID NO: 846022 - DNA, 15 bp, Homo sapiens
ggaggaaggaggagg

SEQ ID NO: 846023 - DNA, 15 bp, Homo sapiens
gaggaaggaggaggt

SEQ ID NO: 846024 - DNA, 15 bp, Homo sapiens
aggaaggaggaggtg

SEQ ID NO: 846025 - DNA, 15 bp, Homo sapiens
ggaaggaggaggtgg

SEQ ID NO: 846026 - DNA, 15 bp, Homo sapiens
gaaggaggaggtgga

SEQ ID NO: 846027 - DNA, 15 bp, Homo sapiens
aaggaggaggtggaa

SEQ ID NO: 846028 - DNA, 15 bp, Homo sapiens
aggaggaggtggaaa

SEQ ID NO: 846029 - DNA, 15 bp, Homo sapiens
ggaggaggtggaaac

SEQ ID NO: 846030 - DNA, 15 bp, Homo sapiens
gaggaggtggaaacg

SEQ ID NO: 846031 - DNA, 15 bp, Homo sapiens
aggaggtggaaacga

SEQ ID NO: 846032 - DNA, 15 bp, Homo sapiens
ggaggtggaaacgaa

SEQ ID NO: 846033 - DNA, 15 bp, Homo sapiens
gaggtggaaacgaat

SEQ ID NO: 846034 - DNA, 15 bp, Homo sapiens
aggtggaaacgaatg

SEQ ID NO: 846035 - DNA, 15 bp, Homo sapiens
ggtggaaacgaatgt

SEQ ID NO: 846036 - DNA, 15 bp, Homo sapiens
gtggaaacgaatgta

SEQ ID NO: 846037 - DNA, 15 bp, Homo sapiens
tggaaacgaatgtac

SEQ ID NO: 846038 - DNA, 15 bp, Homo sapiens
ggaaacgaatgtaca

SEQ ID NO: 846039 - DNA, 15 bp, Homo sapiens
gaaacgaatgtacaa

SEQ ID NO: 846040 - DNA, 15 bp, Homo sapiens
aaacgaatgtacaag

SEQ ID NO: 846041 - DNA, 15 bp, Homo sapiens
aacgaatgtacaagg

SEQ ID NO: 846042 - DNA, 15 bp, Homo sapiens
acgaatgtacaagga

SEQ ID NO: 846043 - DNA, 15 bp, Homo sapiens
cgaatgtacaaggat

SEQ ID NO: 846044 - DNA, 15 bp, Homo sapiens
gaatgtacaaggatg

SEQ ID NO: 846045 - DNA, 15 bp, Homo sapiens
aatgtacaaggatgg

SEQ ID NO: 846046 - DNA, 15 bp, Homo sapiens
atgtacaaggatggg

SEQ ID NO: 846047 - DNA, 15 bp, Homo sapiens
tgtacaaggatggga

SEQ ID NO: 846048 - DNA, 15 bp, Homo sapiens
gtacaaggatgggag

SEQ ID NO: 846049 - DNA, 15 bp, Homo sapiens
tacaaggatgggagg

SEQ ID NO: 846050 - DNA, 15 bp, Homo sapiens
acaaggatgggagga

SEQ ID NO: 846051 - DNA, 15 bp, Homo sapiens
caaggatgggaggag

SEQ ID NO: 846052 - DNA, 15 bp, Homo sapiens
aaggatgggaggaga

SEQ ID NO: 846053 - DNA, 15 bp, Homo sapiens
aggatgggaggagaa

SEQ ID NO: 846054 - DNA, 15 bp, Homo sapiens
ggatgggaggagaaa

SEQ ID NO: 846055 - DNA, 15 bp, Homo sapiens
gatgggaggagaaaa

SEQ ID NO: 846056 - DNA, 15 bp, Homo sapiens
atgggaggagaaaag

SEQ ID NO: 846057 - DNA, 15 bp, Homo sapiens
tgggaggagaaaagg

SEQ ID NO: 846058 - DNA, 15 bp, Homo sapiens
gggaggagaaaaggg

SEQ ID NO: 846059 - DNA, 15 bp, Homo sapiens
ggaggagaaaaggga

SEQ ID NO: 846060 - DNA, 15 bp, Homo sapiens
gaggagaaaagggag

SEQ ID NO: 846061 - DNA, 15 bp, Homo sapiens
aggagaaaagggaga

SEQ ID NO: 846062 - DNA, 15 bp, Homo sapiens
ggagaaaagggagag

SEQ ID NO: 846063 - DNA, 15 bp, Homo sapiens
gagaaaagggagaga

SEQ ID NO: 846064 - DNA, 15 bp, Homo sapiens
agaaaagggagagag

SEQ ID NO: 846065 - DNA, 15 bp, Homo sapiens
gaaaagggagagaga

SEQ ID NO: 846066 - DNA, 15 bp, Homo sapiens
aaaagggagagagac

SEQ ID NO: 846067 - DNA, 15 bp, Homo sapiens
aaagggagagagact

SEQ ID NO: 846068 - DNA, 15 bp, Homo sapiens
aagggagagagactt

SEQ ID NO: 846069 - DNA, 15 bp, Homo sapiens
agggagagagacttt

SEQ ID NO: 846070 - DNA, 15 bp, Homo sapiens
gggagagagactttt

SEQ ID NO: 846071 - DNA, 15 bp, Homo sapiens
ggagagagacttttt

SEQ ID NO: 846072 - DNA, 15 bp, Homo sapiens
gagagagactttttt

SEQ ID NO: 846073 - DNA, 15 bp, Homo sapiens
agagagacttttttt

SEQ ID NO: 846074 - DNA, 15 bp, Homo sapiens
gagagactttttttt

SEQ ID NO: 846075 - DNA, 15 bp, Homo sapiens
agagacttttttttt

SEQ ID NO: 846076 - DNA, 15 bp, Homo sapiens
gagactttttttttt

SEQ ID NO: 846077 - DNA, 15 bp, Homo sapiens
agacttttttttttt

SEQ ID NO: 846078 - DNA, 15 bp, Homo sapiens
gactttttttttttt

SEQ ID NO: 846079 - DNA, 15 bp, Homo sapiens
actttttttttttta

SEQ ID NO: 846080 - DNA, 15 bp, Homo sapiens
cttttttttttttaa

SEQ ID NO: 846081 - DNA, 15 bp, Homo sapiens
tttttttttttaagg

SEQ ID NO: 846082 - DNA, 15 bp, Homo sapiens
ttttttttttaaggc

SEQ ID NO: 846083 - DNA, 15 bp, Homo sapiens
tttttttttaaggcg

SEQ ID NO: 846084 - DNA, 15 bp, Homo sapiens
ttttttttaaggcga

SEQ ID NO: 846085 - DNA, 15 bp, Homo sapiens
tttttttaaggcgag

SEQ ID NO: 846086 - DNA, 15 bp, Homo sapiens
ttttttaaggcgaga

SEQ ID NO: 846087 - DNA, 15 bp, Homo sapiens
tttttaaggcgagag

SEQ ID NO: 846088 - DNA, 15 bp, Homo sapiens
ttttaaggcgagagt

SEQ ID NO: 846089 - DNA, 15 bp, Homo sapiens
tttaaggcgagagtt

SEQ ID NO: 846090 - DNA, 15 bp, Homo sapiens
ttaaggcgagagttt

SEQ ID NO: 846091 - DNA, 15 bp, Homo sapiens
taaggcgagagttta

SEQ ID NO: 846092 - DNA, 15 bp, Homo sapiens
aaggcgagagtttac

SEQ ID NO: 846093 - DNA, 15 bp, Homo sapiens
aggcgagagtttact

SEQ ID NO: 846094 - DNA, 15 bp, Homo sapiens
ggcgagagtttacta

SEQ ID NO: 846095 - DNA, 15 bp, Homo sapiens
gcgagagtttactac

SEQ ID NO: 846096 - DNA, 15 bp, Homo sapiens
cgagagtttactacc

SEQ ID NO: 846097 - DNA, 15 bp, Homo sapiens
gagagtttactacct

SEQ ID NO: 846098 - DNA, 15 bp, Homo sapiens
agagtttactaccta

SEQ ID NO: 846099 - DNA, 15 bp, Homo sapiens
gagtttactacctat

SEQ ID NO: 846100 - DNA, 15 bp, Homo sapiens
agtttactacctatc

SEQ ID NO: 846101 - DNA, 15 bp, Homo sapiens
gtttactacctatct

SEQ ID NO: 846102 - DNA, 15 bp, Homo sapiens
tttactacctatcta

SEQ ID NO: 846103 - DNA, 15 bp, Homo sapiens
ttactacctatctaa

SEQ ID NO: 846104 - DNA, 15 bp, Homo sapiens
tactacctatctaac

SEQ ID NO: 846105 - DNA, 15 bp, Homo sapiens
actacctatctaact

SEQ ID NO: 846106 - DNA, 15 bp, Homo sapiens
ctacctatctaactc

SEQ ID NO: 846107 - DNA, 15 bp, Homo sapiens
tacctatctaactct

SEQ ID NO: 846108 - DNA, 15 bp, Homo sapiens
acctatctaactctt

SEQ ID NO: 846109 - DNA, 15 bp, Homo sapiens
cctatctaactcttc

SEQ ID NO: 846110 - DNA, 15 bp, Homo sapiens
ctatctaactcttcg

SEQ ID NO: 846111 - DNA, 15 bp, Homo sapiens
tatctaactcttcgc

SEQ ID NO: 846112 - DNA, 15 bp, Homo sapiens
atctaactcttcgca

SEQ ID NO: 846113 - DNA, 15 bp, Homo sapiens
tctaactcttcgcat

SEQ ID NO: 846114 - DNA, 15 bp, Homo sapiens
ctaactcttcgcatt

SEQ ID NO: 846115 - DNA, 15 bp, Homo sapiens
taactcttcgcattc

SEQ ID NO: 846116 - DNA, 15 bp, Homo sapiens
aactcttcgcattct

SEQ ID NO: 846117 - DNA, 15 bp, Homo sapiens
actcttcgcattctt

SEQ ID NO: 846118 - DNA, 15 bp, Homo sapiens
ctcttcgcattcttg

SEQ ID NO: 846119 - DNA, 15 bp, Homo sapiens
tcttcgcattcttga

SEQ ID NO: 846120 - DNA, 15 bp, Homo sapiens
cttcgcattcttgaa

SEQ ID NO: 846121 - DNA, 15 bp, Homo sapiens
ttcgcattcttgaag

SEQ ID NO: 846122 - DNA, 15 bp, Homo sapiens
tcgcattcttgaagt

SEQ ID NO: 846123 - DNA, 15 bp, Homo sapiens
cgcattcttgaagtc

SEQ ID NO: 846124 - DNA, 15 bp, Homo sapiens
gcattcttgaagtct

SEQ ID NO: 846125 - DNA, 15 bp, Homo sapiens
cattcttgaagtctc

SEQ ID NO: 846126 - DNA, 15 bp, Homo sapiens
attcttgaagtctca

SEQ ID NO: 846127 - DNA, 15 bp, Homo sapiens
ttcttgaagtctcag

SEQ ID NO: 846128 - DNA, 15 bp, Homo sapiens
tcttgaagtctcaga

SEQ ID NO: 846129 - DNA, 15 bp, Homo sapiens
cttgaagtctcagac

SEQ ID NO: 846130 - DNA, 15 bp, Homo sapiens
ttgaagtctcagacc

SEQ ID NO: 846131 - DNA, 15 bp, Homo sapiens
tgaagtctcagacca

SEQ ID NO: 846132 - DNA, 15 bp, Homo sapiens
gaagtctcagaccaa

SEQ ID NO: 846133 - DNA, 15 bp, Homo sapiens
aagtctcagaccaaa

SEQ ID NO: 846134 - DNA, 15 bp, Homo sapiens
agtctcagaccaaat

SEQ ID NO: 846135 - DNA, 15 bp, Homo sapiens
gtctcagaccaaatc

SEQ ID NO: 846136 - DNA, 15 bp, Homo sapiens
tctcagaccaaatcc

SEQ ID NO: 846137 - DNA, 15 bp, Homo sapiens
ctcagaccaaatccc

SEQ ID NO: 846138 - DNA, 15 bp, Homo sapiens
tcagaccaaatccca

SEQ ID NO: 846139 - DNA, 15 bp, Homo sapiens
cagaccaaatcccat

SEQ ID NO: 846140 - DNA, 15 bp, Homo sapiens
agaccaaatcccatc

SEQ ID NO: 846141 - DNA, 15 bp, Homo sapiens
gaccaaatcccatcg

SEQ ID NO: 846142 - DNA, 15 bp, Homo sapiens
accaaatcccatcgg

SEQ ID NO: 846143 - DNA, 15 bp, Homo sapiens
ccaaatcccatcggt

SEQ ID NO: 846144 - DNA, 15 bp, Homo sapiens
caaatcccatcggtt

SEQ ID NO: 846145 - DNA, 15 bp, Homo sapiens
aaatcccatcggttt

SEQ ID NO: 846146 - DNA, 15 bp, Homo sapiens
aatcccatcggtttg

SEQ ID NO: 846147 - DNA, 15 bp, Homo sapiens
atcccatcggtttga

SEQ ID NO: 846148 - DNA, 15 bp, Homo sapiens
tcccatcggtttgaa

SEQ ID NO: 846149 - DNA, 15 bp, Homo sapiens
cccatcggtttgaaa

SEQ ID NO: 846150 - DNA, 15 bp, Homo sapiens
ccatcggtttgaaag

SEQ ID NO: 846151 - DNA, 15 bp, Homo sapiens
catcggtttgaaagc

SEQ ID NO: 846152 - DNA, 15 bp, Homo sapiens
atcggtttgaaagcc

SEQ ID NO: 846153 - DNA, 15 bp, Homo sapiens
tcggtttgaaagcct

SEQ ID NO: 846154 - DNA, 15 bp, Homo sapiens
cggtttgaaagcctc

SEQ ID NO: 846155 - DNA, 15 bp, Homo sapiens
ggtttgaaagcctct

SEQ ID NO: 846156 - DNA, 15 bp, Homo sapiens
gtttgaaagcctcta

SEQ ID NO: 846157 - DNA, 15 bp, Homo sapiens
tttgaaagcctctag

SEQ ID NO: 846158 - DNA, 15 bp, Homo sapiens
ttgaaagcctctagg

SEQ ID NO: 846159 - DNA, 15 bp, Homo sapiens
tgaaagcctctaggg

SEQ ID NO: 846160 - DNA, 15 bp, Homo sapiens
gaaagcctctagggt

SEQ ID NO: 846161 - DNA, 15 bp, Homo sapiens
aaagcctctagggta

SEQ ID NO: 846162 - DNA, 15 bp, Homo sapiens
aagcctctagggtat

SEQ ID NO: 846163 - DNA, 15 bp, Homo sapiens
agcctctagggtatt

SEQ ID NO: 846164 - DNA, 15 bp, Homo sapiens
gcctctagggtattc

SEQ ID NO: 846165 - DNA, 15 bp, Homo sapiens
cctctagggtattct

SEQ ID NO: 846166 - DNA, 15 bp, Homo sapiens
ctctagggtattcta

SEQ ID NO: 846167 - DNA, 15 bp, Homo sapiens
tctagggtattctat

SEQ ID NO: 846168 - DNA, 15 bp, Homo sapiens
ctagggtattctatc

SEQ ID NO: 846169 - DNA, 15 bp, Homo sapiens
tagggtattctatct

SEQ ID NO: 846170 - DNA, 15 bp, Homo sapiens
agggtattctatcta

SEQ ID NO: 846171 - DNA, 15 bp, Homo sapiens
gggtattctatctat

SEQ ID NO: 846172 - DNA, 15 bp, Homo sapiens
ggtattctatctatt

SEQ ID NO: 846173 - DNA, 15 bp, Homo sapiens
gtattctatctattg

SEQ ID NO: 846174 - DNA, 15 bp, Homo sapiens
tattctatctattgt

SEQ ID NO: 846175 - DNA, 15 bp, Homo sapiens
attctatctattgta

SEQ ID NO: 846176 - DNA, 15 bp, Homo sapiens
ttctatctattgtat

SEQ ID NO: 846177 - DNA, 15 bp, Homo sapiens
tctatctattgtata

SEQ ID NO: 846178 - DNA, 15 bp, Homo sapiens
ctatctattgtatac

SEQ ID NO: 846179 - DNA, 15 bp, Homo sapiens
tatctattgtatact

SEQ ID NO: 846180 - DNA, 15 bp, Homo sapiens
atctattgtatactt

SEQ ID NO: 846181 - DNA, 15 bp, Homo sapiens
tctattgtatacttc

SEQ ID NO: 846182 - DNA, 15 bp, Homo sapiens
ctattgtatacttct

SEQ ID NO: 846183 - DNA, 15 bp, Homo sapiens
tattgtatacttctg

SEQ ID NO: 846184 - DNA, 15 bp, Homo sapiens
attgtatacttctgt

SEQ ID NO: 846185 - DNA, 15 bp, Homo sapiens
ttgtatacttctgtt

SEQ ID NO: 846186 - DNA, 15 bp, Homo sapiens
tgtatacttctgtta

SEQ ID NO: 846187 - DNA, 15 bp, Homo sapiens
gtatacttctgttat

SEQ ID NO: 846188 - DNA, 15 bp, Homo sapiens
tatacttctgttatg

SEQ ID NO: 846189 - DNA, 15 bp, Homo sapiens
atacttctgttatgt

SEQ ID NO: 846190 - DNA, 15 bp, Homo sapiens
tacttctgttatgta

SEQ ID NO: 846191 - DNA, 15 bp, Homo sapiens
acttctgttatgtac

SEQ ID NO: 846192 - DNA, 15 bp, Homo sapiens
cttctgttatgtaca

SEQ ID NO: 846193 - DNA, 15 bp, Homo sapiens
ttctgttatgtacaa

SEQ ID NO: 846194 - DNA, 15 bp, Homo sapiens
tctgttatgtacaaa

SEQ ID NO: 846195 - DNA, 15 bp, Homo sapiens
ctgttatgtacaaaa

SEQ ID NO: 846196 - DNA, 15 bp, Homo sapiens
tgttatgtacaaaat

SEQ ID NO: 846197 - DNA, 15 bp, Homo sapiens
gttatgtacaaaatt

SEQ ID NO: 846198 - DNA, 15 bp, Homo sapiens
ttatgtacaaaatta

SEQ ID NO: 846199 - DNA, 15 bp, Homo sapiens
tatgtacaaaattaa

SEQ ID NO: 846200 - DNA, 15 bp, Homo sapiens
atgtacaaaattaat

SEQ ID NO: 846201 - DNA, 15 bp, Homo sapiens
tgtacaaaattaatt

SEQ ID NO: 846202 - DNA, 15 bp, Homo sapiens
gtacaaaattaattt

SEQ ID NO: 846203 - DNA, 15 bp, Homo sapiens
tacaaaattaatttg

SEQ ID NO: 846204 - DNA, 15 bp, Homo sapiens
acaaaattaatttgc

SEQ ID NO: 846205 - DNA, 15 bp, Homo sapiens
caaaattaatttgcc

SEQ ID NO: 846206 - DNA, 15 bp, Homo sapiens
aaaattaatttgcca

SEQ ID NO: 846207 - DNA, 15 bp, Homo sapiens
aaattaatttgccaa

SEQ ID NO: 846208 - DNA, 15 bp, Homo sapiens
aattaatttgccaat

SEQ ID NO: 846209 - DNA, 15 bp, Homo sapiens
attaatttgccaatt

SEQ ID NO: 846210 - DNA, 15 bp, Homo sapiens
ttaatttgccaatta

SEQ ID NO: 846211 - DNA, 15 bp, Homo sapiens
taatttgccaattaa

SEQ ID NO: 846212 - DNA, 15 bp, Homo sapiens
aatttgccaattaat

SEQ ID NO: 846213 - DNA, 15 bp, Homo sapiens
atttgccaattaatt

SEQ ID NO: 846214 - DNA, 15 bp, Homo sapiens
tttgccaattaattg

SEQ ID NO: 846215 - DNA, 15 bp, Homo sapiens
ttgccaattaattgt

SEQ ID NO: 846216 - DNA, 15 bp, Homo sapiens
tgccaattaattgtg

SEQ ID NO: 846217 - DNA, 15 bp, Homo sapiens
gccaattaattgtga

SEQ ID NO: 846218 - DNA, 15 bp, Homo sapiens
ccaattaattgtgaa

SEQ ID NO: 846219 - DNA, 15 bp, Homo sapiens
caattaattgtgaac

SEQ ID NO: 846220 - DNA, 15 bp, Homo sapiens
aattaattgtgaact

SEQ ID NO: 846221 - DNA, 15 bp, Homo sapiens
attaattgtgaactg

SEQ ID NO: 846222 - DNA, 15 bp, Homo sapiens
ttaattgtgaactgt

SEQ ID NO: 846223 - DNA, 15 bp, Homo sapiens
taattgtgaactgtt

SEQ ID NO: 846224 - DNA, 15 bp, Homo sapiens
aattgtgaactgttt

SEQ ID NO: 846225 - DNA, 15 bp, Homo sapiens
attgtgaactgtttt

SEQ ID NO: 846226 - DNA, 15 bp, Homo sapiens
ttgtgaactgtttta

SEQ ID NO: 846227 - DNA, 15 bp, Homo sapiens
tgtgaactgttttat

SEQ ID NO: 846228 - DNA, 15 bp, Homo sapiens
gtgaactgttttata

SEQ ID NO: 846229 - DNA, 15 bp, Homo sapiens
tgaactgttttataa

SEQ ID NO: 846230 - DNA, 15 bp, Homo sapiens
gaactgttttataaa

SEQ ID NO: 846231 - DNA, 15 bp, Homo sapiens
aactgttttataaac

SEQ ID NO: 846232 - DNA, 15 bp, Homo sapiens
actgttttataaact

SEQ ID NO: 846233 - DNA, 15 bp, Homo sapiens
ctgttttataaacta

SEQ ID NO: 846234 - DNA, 15 bp, Homo sapiens
tgttttataaactat

SEQ ID NO: 846235 - DNA, 15 bp, Homo sapiens
gttttataaactatc

SEQ ID NO: 846236 - DNA, 15 bp, Homo sapiens
ttttataaactatct

SEQ ID NO: 846237 - DNA, 15 bp, Homo sapiens
tttataaactatctt

SEQ ID NO: 846238 - DNA, 15 bp, Homo sapiens
ttataaactatctta

SEQ ID NO: 846239 - DNA, 15 bp, Homo sapiens
tataaactatcttaa

SEQ ID NO: 846240 - DNA, 15 bp, Homo sapiens
ataaactatcttaaa

SEQ ID NO: 846241 - DNA, 15 bp, Homo sapiens
taaactatcttaaaa

SEQ ID NO: 846242 - DNA, 15 bp, Homo sapiens
aaactatcttaaaat

SEQ ID NO: 846243 - DNA, 15 bp, Homo sapiens
aactatcttaaaatg

SEQ ID NO: 846244 - DNA, 15 bp, Homo sapiens
actatcttaaaatgg

SEQ ID NO: 846245 - DNA, 15 bp, Homo sapiens
ctatcttaaaatggt

SEQ ID NO: 846246 - DNA, 15 bp, Homo sapiens
tatcttaaaatggtt

SEQ ID NO: 846247 - DNA, 15 bp, Homo sapiens
atcttaaaatggtta

SEQ ID NO: 846248 - DNA, 15 bp, Homo sapiens
tcttaaaatggttag

SEQ ID NO: 846249 - DNA, 15 bp, Homo sapiens
cttaaaatggttagt

SEQ ID NO: 846250 - DNA, 15 bp, Homo sapiens
ttaaaatggttagtt

SEQ ID NO: 846251 - DNA, 15 bp, Homo sapiens
taaaatggttagtta

SEQ ID NO: 846252 - DNA, 15 bp, Homo sapiens
aaaatggttagttaa

SEQ ID NO: 846253 - DNA, 15 bp, Homo sapiens
aaatggttagttaaa

SEQ ID NO: 846254 - DNA, 15 bp, Homo sapiens
aatggttagttaaat

SEQ ID NO: 846255 - DNA, 15 bp, Homo sapiens
atggttagttaaatc

SEQ ID NO: 846256 - DNA, 15 bp, Homo sapiens
tggttagttaaatct

SEQ ID NO: 846257 - DNA, 15 bp, Homo sapiens
ggttagttaaatctt

SEQ ID NO: 846258 - DNA, 15 bp, Homo sapiens
gttagttaaatcttt

SEQ ID NO: 846259 - DNA, 15 bp, Homo sapiens
ttagttaaatctttg

SEQ ID NO: 846260 - DNA, 15 bp, Homo sapiens
tagttaaatctttgg

SEQ ID NO: 846261 - DNA, 15 bp, Homo sapiens
agttaaatctttggg

SEQ ID NO: 846262 - DNA, 15 bp, Homo sapiens
gttaaatctttggga

SEQ ID NO: 846263 - DNA, 15 bp, Homo sapiens
ttaaatctttgggat

SEQ ID NO: 846264 - DNA, 15 bp, Homo sapiens
taaatctttgggata

SEQ ID NO: 846265 - DNA, 15 bp, Homo sapiens
aaatctttgggatag

SEQ ID NO: 846266 - DNA, 15 bp, Homo sapiens
aatctttgggatagt

SEQ ID NO: 846267 - DNA, 15 bp, Homo sapiens
atctttgggatagta

SEQ ID NO: 846268 - DNA, 15 bp, Homo sapiens
tctttgggatagtat

SEQ ID NO: 846269 - DNA, 15 bp, Homo sapiens
ctttgggatagtatt

SEQ ID NO: 846270 - DNA, 15 bp, Homo sapiens
tttgggatagtattt

SEQ ID NO: 846271 - DNA, 15 bp, Homo sapiens
ttgggatagtattta

SEQ ID NO: 846272 - DNA, 15 bp, Homo sapiens
tgggatagtatttag

SEQ ID NO: 846273 - DNA, 15 bp, Homo sapiens
gggatagtatttagc

SEQ ID NO: 846274 - DNA, 15 bp, Homo sapiens
ggatagtatttagct

SEQ ID NO: 846275 - DNA, 15 bp, Homo sapiens
gatagtatttagctt

SEQ ID NO: 846276 - DNA, 15 bp, Homo sapiens
atagtatttagcttt

SEQ ID NO: 846277 - DNA, 15 bp, Homo sapiens
tagtatttagctttc

SEQ ID NO: 846278 - DNA, 15 bp, Homo sapiens
agtatttagctttct

SEQ ID NO: 846279 - DNA, 15 bp, Homo sapiens
gtatttagctttctc

SEQ ID NO: 846280 - DNA, 15 bp, Homo sapiens
tatttagctttctcc

SEQ ID NO: 846281 - DNA, 15 bp, Homo sapiens
atttagctttctcca

SEQ ID NO: 846282 - DNA, 15 bp, Homo sapiens
tttagctttctccag

SEQ ID NO: 846283 - DNA, 15 bp, Homo sapiens
ttagctttctccagg

SEQ ID NO: 846284 - DNA, 15 bp, Homo sapiens
tagctttctccagga

SEQ ID NO: 846285 - DNA, 15 bp, Homo sapiens
agctttctccaggat

SEQ ID NO: 846286 - DNA, 15 bp, Homo sapiens
gctttctccaggatt

SEQ ID NO: 846287 - DNA, 15 bp, Homo sapiens
ctttctccaggatta

SEQ ID NO: 846288 - DNA, 15 bp, Homo sapiens
tttctccaggattat

SEQ ID NO: 846289 - DNA, 15 bp, Homo sapiens
ttctccaggattatg

SEQ ID NO: 846290 - DNA, 15 bp, Homo sapiens
tctccaggattatga

SEQ ID NO: 846291 - DNA, 15 bp, Homo sapiens
ctccaggattatgac

SEQ ID NO: 846292 - DNA, 15 bp, Homo sapiens
tccaggattatgact

SEQ ID NO: 846293 - DNA, 15 bp, Homo sapiens
ccaggattatgactt

SEQ ID NO: 846294 - DNA, 15 bp, Homo sapiens
caggattatgactta

SEQ ID NO: 846295 - DNA, 15 bp, Homo sapiens
aggattatgacttac

SEQ ID NO: 846296 - DNA, 15 bp, Homo sapiens
ggattatgacttacc

SEQ ID NO: 846297 - DNA, 15 bp, Homo sapiens
gattatgacttacct

SEQ ID NO: 846298 - DNA, 15 bp, Homo sapiens
attatgacttacctt

SEQ ID NO: 846299 - DNA, 15 bp, Homo sapiens
ttatgacttaccttc

SEQ ID NO: 846300 - DNA, 15 bp, Homo sapiens
tatgacttaccttct

SEQ ID NO: 846301 - DNA, 15 bp, Homo sapiens
atgacttaccttcta

SEQ ID NO: 846302 - DNA, 15 bp, Homo sapiens
tgacttaccttctaa

SEQ ID NO: 846303 - DNA, 15 bp, Homo sapiens
gacttaccttctaaa

SEQ ID NO: 846304 - DNA, 15 bp, Homo sapiens
acttaccttctaaat

SEQ ID NO: 846305 - DNA, 15 bp, Homo sapiens
cttaccttctaaatt

SEQ ID NO: 846306 - DNA, 15 bp, Homo sapiens
accttctaaattaga

SEQ ID NO: 846307 - DNA, 15 bp, Homo sapiens
ccttctaaattagac

SEQ ID NO: 846308 - DNA, 15 bp, Homo sapiens
cttctaaattagaca

SEQ ID NO: 846309 - DNA, 15 bp, Homo sapiens
ttctaaattagacat

SEQ ID NO: 846310 - DNA, 15 bp, Homo sapiens
tctaaattagacata

SEQ ID NO: 846311 - DNA, 15 bp, Homo sapiens
ctaaattagacatac

SEQ ID NO: 846312 - DNA, 15 bp, Homo sapiens
taaattagacataca

SEQ ID NO: 846313 - DNA, 15 bp, Homo sapiens
aaattagacatacaa

SEQ ID NO: 846314 - DNA, 15 bp, Homo sapiens
aattagacatacaat

SEQ ID NO: 846315 - DNA, 15 bp, Homo sapiens
attagacatacaatg

SEQ ID NO: 846316 - DNA, 15 bp, Homo sapiens
ttagacatacaatgc

SEQ ID NO: 846317 - DNA, 15 bp, Homo sapiens
tagacatacaatgcc

SEQ ID NO: 846318 - DNA, 15 bp, Homo sapiens
agacatacaatgcct

SEQ ID NO: 846319 - DNA, 15 bp, Homo sapiens
gacatacaatgccta

SEQ ID NO: 846320 - DNA, 15 bp, Homo sapiens
acatacaatgcctag

SEQ ID NO: 846321 - DNA, 15 bp, Homo sapiens
catacaatgcctagg

SEQ ID NO: 846322 - DNA, 15 bp, Homo sapiens
atacaatgcctagga

SEQ ID NO: 846323 - DNA, 15 bp, Homo sapiens
tacaatgcctaggag

SEQ ID NO: 846324 - DNA, 15 bp, Homo sapiens
acaatgcctaggagt

SEQ ID NO: 846325 - DNA, 15 bp, Homo sapiens
caatgcctaggagtc

SEQ ID NO: 846326 - DNA, 15 bp, Homo sapiens
aatgcctaggagtca

SEQ ID NO: 846327 - DNA, 15 bp, Homo sapiens
atgcctaggagtcaa

SEQ ID NO: 846328 - DNA, 15 bp, Homo sapiens
tgcctaggagtcaag

SEQ ID NO: 846329 - DNA, 15 bp, Homo sapiens
gcctaggagtcaagg

SEQ ID NO: 846330 - DNA, 15 bp, Homo sapiens
cctaggagtcaagga

SEQ ID NO: 846331 - DNA, 15 bp, Homo sapiens
ctaggagtcaaggac

SEQ ID NO: 846332 - DNA, 15 bp, Homo sapiens
taggagtcaaggact

SEQ ID NO: 846333 - DNA, 15 bp, Homo sapiens
aggagtcaaggacta

SEQ ID NO: 846334 - DNA, 15 bp, Homo sapiens
ggagtcaaggactat

SEQ ID NO: 846335 - DNA, 15 bp, Homo sapiens
gagtcaaggactatt

SEQ ID NO: 846336 - DNA, 15 bp, Homo sapiens
agtcaaggactattt

SEQ ID NO: 846337 - DNA, 15 bp, Homo sapiens
gtcaaggactatttt

SEQ ID NO: 846338 - DNA, 15 bp, Homo sapiens
tcaaggactattttg

SEQ ID NO: 846339 - DNA, 15 bp, Homo sapiens
caaggactattttgc

SEQ ID NO: 846340 - DNA, 15 bp, Homo sapiens
aaggactattttgca

SEQ ID NO: 846341 - DNA, 15 bp, Homo sapiens
aggactattttgcat

SEQ ID NO: 846342 - DNA, 15 bp, Homo sapiens
ggactattttgcata

SEQ ID NO: 846343 - DNA, 15 bp, Homo sapiens
gactattttgcataa

SEQ ID NO: 846344 - DNA, 15 bp, Homo sapiens
actattttgcataaa

SEQ ID NO: 846345 - DNA, 15 bp, Homo sapiens
ctattttgcataaat

SEQ ID NO: 846346 - DNA, 15 bp, Homo sapiens
tattttgcataaatt

SEQ ID NO: 846347 - DNA, 15 bp, Homo sapiens
attttgcataaattc

SEQ ID NO: 846348 - DNA, 15 bp, Homo sapiens
ttttgcataaattcc

SEQ ID NO: 846349 - DNA, 15 bp, Homo sapiens
tttgcataaattcca

SEQ ID NO: 846350 - DNA, 15 bp, Homo sapiens
ttgcataaattccag

SEQ ID NO: 846351 - DNA, 15 bp, Homo sapiens
tgcataaattccagt

SEQ ID NO: 846352 - DNA, 15 bp, Homo sapiens
gcataaattccagtc

SEQ ID NO: 846353 - DNA, 15 bp, Homo sapiens
cataaattccagtct

SEQ ID NO: 846354 - DNA, 15 bp, Homo sapiens
ataaattccagtctt

SEQ ID NO: 846355 - DNA, 15 bp, Homo sapiens
taaattccagtcttc

SEQ ID NO: 846356 - DNA, 15 bp, Homo sapiens
aaattccagtcttct

SEQ ID NO: 846357 - DNA, 15 bp, Homo sapiens
aattccagtcttctt

SEQ ID NO: 846358 - DNA, 15 bp, Homo sapiens
attccagtcttcttt

SEQ ID NO: 846359 - DNA, 15 bp, Homo sapiens
ttccagtcttctttt

SEQ ID NO: 846360 - DNA, 15 bp, Homo sapiens
tccagtcttctttta

SEQ ID NO: 846361 - DNA, 15 bp, Homo sapiens
ccagtcttcttttac

SEQ ID NO: 846362 - DNA, 15 bp, Homo sapiens
cagtcttcttttaca

SEQ ID NO: 846363 - DNA, 15 bp, Homo sapiens
agtcttcttttacaa

SEQ ID NO: 846364 - DNA, 15 bp, Homo sapiens
gtcttcttttacaat

SEQ ID NO: 846365 - DNA, 15 bp, Homo sapiens
tcttcttttacaatg

SEQ ID NO: 846366 - DNA, 15 bp, Homo sapiens
cttcttttacaatgc

SEQ ID NO: 846367 - DNA, 15 bp, Homo sapiens
ttcttttacaatgcc

SEQ ID NO: 846368 - DNA, 15 bp, Homo sapiens
tcttttacaatgcct

SEQ ID NO: 846369 - DNA, 15 bp, Homo sapiens
cttttacaatgccta

SEQ ID NO: 846370 - DNA, 15 bp, Homo sapiens
ttttacaatgcctag

SEQ ID NO: 846371 - DNA, 15 bp, Homo sapiens
tttacaatgcctaga

SEQ ID NO: 846372 - DNA, 15 bp, Homo sapiens
ttacaatgcctagaa

SEQ ID NO: 846373 - DNA, 15 bp, Homo sapiens
tacaatgcctagaat

SEQ ID NO: 846374 - DNA, 15 bp, Homo sapiens
acaatgcctagaatg

SEQ ID NO: 846375 - DNA, 15 bp, Homo sapiens
caatgcctagaatga

SEQ ID NO: 846376 - DNA, 15 bp, Homo sapiens
aatgcctagaatgat

SEQ ID NO: 846377 - DNA, 15 bp, Homo sapiens
atgcctagaatgatt

SEQ ID NO: 846378 - DNA, 15 bp, Homo sapiens
tgcctagaatgattg

SEQ ID NO: 846379 - DNA, 15 bp, Homo sapiens
gcctagaatgattgt

SEQ ID NO: 846380 - DNA, 15 bp, Homo sapiens
cctagaatgattgtt

SEQ ID NO: 846381 - DNA, 15 bp, Homo sapiens
ctagaatgattgtta

SEQ ID NO: 846382 - DNA, 15 bp, Homo sapiens
tagaatgattgttac

SEQ ID NO: 846383 - DNA, 15 bp, Homo sapiens
agaatgattgttacc

SEQ ID NO: 846384 - DNA, 15 bp, Homo sapiens
gaatgattgttacca

SEQ ID NO: 846385 - DNA, 15 bp, Homo sapiens
aatgattgttaccac

SEQ ID NO: 846386 - DNA, 15 bp, Homo sapiens
atgattgttaccaca

SEQ ID NO: 846387 - DNA, 15 bp, Homo sapiens
tgattgttaccacag

SEQ ID NO: 846388 - DNA, 15 bp, Homo sapiens
gattgttaccacaga

SEQ ID NO: 846389 - DNA, 15 bp, Homo sapiens
attgttaccacagaa

SEQ ID NO: 846390 - DNA, 15 bp, Homo sapiens
ttgttaccacagaaa

SEQ ID NO: 846391 - DNA, 15 bp, Homo sapiens
tgttaccacagaaat

SEQ ID NO: 846392 - DNA, 15 bp, Homo sapiens
gttaccacagaaata

SEQ ID NO: 846393 - DNA, 15 bp, Homo sapiens
ttaccacagaaatat

SEQ ID NO: 846394 - DNA, 15 bp, Homo sapiens
taccacagaaatatt

SEQ ID NO: 846395 - DNA, 15 bp, Homo sapiens
accacagaaatattc

SEQ ID NO: 846396 - DNA, 15 bp, Homo sapiens
ccacagaaatattca

SEQ ID NO: 846397 - DNA, 15 bp, Homo sapiens
cacagaaatattcat

SEQ ID NO: 846398 - DNA, 15 bp, Homo sapiens
acagaaatattcatt

SEQ ID NO: 846399 - DNA, 15 bp, Homo sapiens
cagaaatattcatta

SEQ ID NO: 846400 - DNA, 15 bp, Homo sapiens
agaaatattcattac

SEQ ID NO: 846401 - DNA, 15 bp, Homo sapiens
gaaatattcattacc

SEQ ID NO: 846402 - DNA, 15 bp, Homo sapiens
aaatattcattacct

SEQ ID NO: 846403 - DNA, 15 bp, Homo sapiens
aatattcattacctg

SEQ ID NO: 846404 - DNA, 15 bp, Homo sapiens
atattcattacctgg

SEQ ID NO: 846405 - DNA, 15 bp, Homo sapiens
tattcattacctggg

SEQ ID NO: 846406 - DNA, 15 bp, Homo sapiens
attcattacctggga

SEQ ID NO: 846407 - DNA, 15 bp, Homo sapiens
ttcattacctgggag

SEQ ID NO: 846408 - DNA, 15 bp, Homo sapiens
tcattacctgggaga

SEQ ID NO: 846409 - DNA, 15 bp, Homo sapiens
cattacctgggagaa

SEQ ID NO: 846410 - DNA, 15 bp, Homo sapiens
attacctgggagaaa

SEQ ID NO: 846411 - DNA, 15 bp, Homo sapiens
ttacctgggagaaag

SEQ ID NO: 846412 - DNA, 15 bp, Homo sapiens
tacctgggagaaagg

SEQ ID NO: 846413 - DNA, 15 bp, Homo sapiens
acctgggagaaagga

SEQ ID NO: 846414 - DNA, 15 bp, Homo sapiens
cctgggagaaaggat

SEQ ID NO: 846415 - DNA, 15 bp, Homo sapiens
ctgggagaaaggatg

SEQ ID NO: 846416 - DNA, 15 bp, Homo sapiens
tgggagaaaggatga

SEQ ID NO: 846417 - DNA, 15 bp, Homo sapiens
gggagaaaggatgac

SEQ ID NO: 846418 - DNA, 15 bp, Homo sapiens
ggagaaaggatgaca

SEQ ID NO: 846419 - DNA, 15 bp, Homo sapiens
gagaaaggatgacag

SEQ ID NO: 846420 - DNA, 15 bp, Homo sapiens
agaaaggatgacagg

SEQ ID NO: 846421 - DNA, 15 bp, Homo sapiens
gaaaggatgacagga

SEQ ID NO: 846422 - DNA, 15 bp, Homo sapiens
aaaggatgacaggag

SEQ ID NO: 846423 - DNA, 15 bp, Homo sapiens
aaggatgacaggagg

SEQ ID NO: 846424 - DNA, 15 bp, Homo sapiens
aggatgacaggaggg

SEQ ID NO: 846425 - DNA, 15 bp, Homo sapiens
ggatgacaggagggg

SEQ ID NO: 846426 - DNA, 15 bp, Homo sapiens
gatgacaggaggggc

SEQ ID NO: 846427 - DNA, 15 bp, Homo sapiens
atgacaggaggggca

SEQ ID NO: 846428 - DNA, 15 bp, Homo sapiens
tgacaggaggggcag

SEQ ID NO: 846429 - DNA, 15 bp, Homo sapiens
gacaggaggggcaga

SEQ ID NO: 846430 - DNA, 15 bp, Homo sapiens
acaggaggggcagaa

SEQ ID NO: 846431 - DNA, 15 bp, Homo sapiens
caggaggggcagaat

SEQ ID NO: 846432 - DNA, 15 bp, Homo sapiens
aggaggggcagaatg

SEQ ID NO: 846433 - DNA, 15 bp, Homo sapiens
ggaggggcagaatga

SEQ ID NO: 846434 - DNA, 15 bp, Homo sapiens
gaggggcagaatgaa

SEQ ID NO: 846435 - DNA, 15 bp, Homo sapiens
aggggcagaatgaat

SEQ ID NO: 846436 - DNA, 15 bp, Homo sapiens
ggggcagaatgaatg

SEQ ID NO: 846437 - DNA, 15 bp, Homo sapiens
gggcagaatgaatgg

SEQ ID NO: 846438 - DNA, 15 bp, Homo sapiens
ggcagaatgaatgga

SEQ ID NO: 846439 - DNA, 15 bp, Homo sapiens
gcagaatgaatggag

SEQ ID NO: 846440 - DNA, 15 bp, Homo sapiens
cagaatgaatggaga

SEQ ID NO: 846441 - DNA, 15 bp, Homo sapiens
agaatgaatggagag

SEQ ID NO: 846442 - DNA, 15 bp, Homo sapiens
gaatgaatggagaga

SEQ ID NO: 846443 - DNA, 15 bp, Homo sapiens
aatgaatggagagag

SEQ ID NO: 846444 - DNA, 15 bp, Homo sapiens
atgaatggagagagg

SEQ ID NO: 846445 - DNA, 15 bp, Homo sapiens
tgaatggagagaggt

SEQ ID NO: 846446 - DNA, 15 bp, Homo sapiens
gaatggagagaggtc

SEQ ID NO: 846447 - DNA, 15 bp, Homo sapiens
aatggagagaggtcg

SEQ ID NO: 846448 - DNA, 15 bp, Homo sapiens
atggagagaggtcgt

SEQ ID NO: 846449 - DNA, 15 bp, Homo sapiens
tggagagaggtcgtg

SEQ ID NO: 846450 - DNA, 15 bp, Homo sapiens
ggagagaggtcgtga

SEQ ID NO: 846451 - DNA, 15 bp, Homo sapiens
gagagaggtcgtgag

SEQ ID NO: 846452 - DNA, 15 bp, Homo sapiens
agagaggtcgtgaga

SEQ ID NO: 846453 - DNA, 15 bp, Homo sapiens
gagaggtcgtgagaa

SEQ ID NO: 846454 - DNA, 15 bp, Homo sapiens
agaggtcgtgagaat

SEQ ID NO: 846455 - DNA, 15 bp, Homo sapiens
gaggtcgtgagaatg

SEQ ID NO: 846456 - DNA, 15 bp, Homo sapiens
aggtcgtgagaatga

SEQ ID NO: 846457 - DNA, 15 bp, Homo sapiens
ggtcgtgagaatgag

SEQ ID NO: 846458 - DNA, 15 bp, Homo sapiens
gtcgtgagaatgagg

SEQ ID NO: 846459 - DNA, 15 bp, Homo sapiens
tcgtgagaatgaggt

SEQ ID NO: 846460 - DNA, 15 bp, Homo sapiens
cgtgagaatgaggtg

SEQ ID NO: 846461 - DNA, 15 bp, Homo sapiens
gtgagaatgaggtgc

SEQ ID NO: 846462 - DNA, 15 bp, Homo sapiens
tgagaatgaggtgct

SEQ ID NO: 846463 - DNA, 15 bp, Homo sapiens
gagaatgaggtgctg

SEQ ID NO: 846464 - DNA, 15 bp, Homo sapiens
agaatgaggtgctga

SEQ ID NO: 846465 - DNA, 15 bp, Homo sapiens
gaatgaggtgctgag

SEQ ID NO: 846466 - DNA, 15 bp, Homo sapiens
aatgaggtgctgagg

SEQ ID NO: 846467 - DNA, 15 bp, Homo sapiens
atgaggtgctgagga

SEQ ID NO: 846468 - DNA, 15 bp, Homo sapiens
tgaggtgctgaggat

SEQ ID NO: 846469 - DNA, 15 bp, Homo sapiens
gaggtgctgaggatg

SEQ ID NO: 846470 - DNA, 15 bp, Homo sapiens
aggtgctgaggatgg

SEQ ID NO: 846471 - DNA, 15 bp, Homo sapiens
ggtgctgaggatgga

SEQ ID NO: 846472 - DNA, 15 bp, Homo sapiens
gtgctgaggatggac

SEQ ID NO: 846473 - DNA, 15 bp, Homo sapiens
tgctgaggatggacg

SEQ ID NO: 846474 - DNA, 15 bp, Homo sapiens
gctgaggatggacga

SEQ ID NO: 846475 - DNA, 15 bp, Homo sapiens
ctgaggatggacgag

SEQ ID NO: 846476 - DNA, 15 bp, Homo sapiens
tgaggatggacgagg

SEQ ID NO: 846477 - DNA, 15 bp, Homo sapiens
gaggatggacgagga

SEQ ID NO: 846478 - DNA, 15 bp, Homo sapiens
aggatggacgaggaa

SEQ ID NO: 846479 - DNA, 15 bp, Homo sapiens
ggatggacgaggaag

SEQ ID NO: 846480 - DNA, 15 bp, Homo sapiens
gatggacgaggaaga

SEQ ID NO: 846481 - DNA, 15 bp, Homo sapiens
atggacgaggaagaa

SEQ ID NO: 846482 - DNA, 15 bp, Homo sapiens
tggacgaggaagaaa

SEQ ID NO: 846483 - DNA, 15 bp, Homo sapiens
ggacgaggaagaaag

SEQ ID NO: 846484 - DNA, 15 bp, Homo sapiens
gacgaggaagaaagc

SEQ ID NO: 846485 - DNA, 15 bp, Homo sapiens
acgaggaagaaagct

SEQ ID NO: 846486 - DNA, 15 bp, Homo sapiens
cgaggaagaaagctg

SEQ ID NO: 846487 - DNA, 15 bp, Homo sapiens
gaggaagaaagctgt

SEQ ID NO: 846488 - DNA, 15 bp, Homo sapiens
aggaagaaagctgtt

SEQ ID NO: 846489 - DNA, 15 bp, Homo sapiens
ggaagaaagctgttt

SEQ ID NO: 846490 - DNA, 15 bp, Homo sapiens
gaagaaagctgtttt

SEQ ID NO: 846491 - DNA, 15 bp, Homo sapiens
aagaaagctgtttta

SEQ ID NO: 846492 - DNA, 15 bp, Homo sapiens
agaaagctgttttag

SEQ ID NO: 846493 - DNA, 15 bp, Homo sapiens
gaaagctgttttagt

SEQ ID NO: 846494 - DNA, 15 bp, Homo sapiens
aaagctgttttagtt

SEQ ID NO: 846495 - DNA, 15 bp, Homo sapiens
aagctgttttagttg

SEQ ID NO: 846496 - DNA, 15 bp, Homo sapiens
agctgttttagttgg

SEQ ID NO: 846497 - DNA, 15 bp, Homo sapiens
gctgttttagttggg

SEQ ID NO: 846498 - DNA, 15 bp, Homo sapiens
ctgttttagttggga

SEQ ID NO: 846499 - DNA, 15 bp, Homo sapiens
tgttttagttgggag

SEQ ID NO: 846500 - DNA, 15 bp, Homo sapiens
gttttagttgggagg

SEQ ID NO: 846501 - DNA, 15 bp, Homo sapiens
ttttagttgggagga

SEQ ID NO: 846502 - DNA, 15 bp, Homo sapiens
tttagttgggaggat

SEQ ID NO: 846503 - DNA, 15 bp, Homo sapiens
ttagttgggaggata

SEQ ID NO: 846504 - DNA, 15 bp, Homo sapiens
tagttgggaggatag

SEQ ID NO: 846505 - DNA, 15 bp, Homo sapiens
agttgggaggatagg

SEQ ID NO: 846506 - DNA, 15 bp, Homo sapiens
gttgggaggataggt

SEQ ID NO: 846507 - DNA, 15 bp, Homo sapiens
ttgggaggataggtg

SEQ ID NO: 846508 - DNA, 15 bp, Homo sapiens
tgggaggataggtga

SEQ ID NO: 846509 - DNA, 15 bp, Homo sapiens
gggaggataggtgac

SEQ ID NO: 846510 - DNA, 15 bp, Homo sapiens
ggaggataggtgaca

SEQ ID NO: 846511 - DNA, 15 bp, Homo sapiens
gaggataggtgacag

SEQ ID NO: 846512 - DNA, 15 bp, Homo sapiens
aggataggtgacaga

SEQ ID NO: 846513 - DNA, 15 bp, Homo sapiens
ggataggtgacagaa

SEQ ID NO: 846514 - DNA, 15 bp, Homo sapiens
gataggtgacagaag

SEQ ID NO: 846515 - DNA, 15 bp, Homo sapiens
ataggtgacagaagc

SEQ ID NO: 846516 - DNA, 15 bp, Homo sapiens
taggtgacagaagca

SEQ ID NO: 846517 - DNA, 15 bp, Homo sapiens
aggtgacagaagcat

SEQ ID NO: 846518 - DNA, 15 bp, Homo sapiens
ggtgacagaagcatg

SEQ ID NO: 846519 - DNA, 15 bp, Homo sapiens
gtgacagaagcatgg

SEQ ID NO: 846520 - DNA, 15 bp, Homo sapiens
tgacagaagcatgga

SEQ ID NO: 846521 - DNA, 15 bp, Homo sapiens
gacagaagcatggaa

SEQ ID NO: 846522 - DNA, 15 bp, Homo sapiens
acagaagcatggaaa

SEQ ID NO: 846523 - DNA, 15 bp, Homo sapiens
cagaagcatggaaag

SEQ ID NO: 846524 - DNA, 15 bp, Homo sapiens
agaagcatggaaagg

SEQ ID NO: 846525 - DNA, 15 bp, Homo sapiens
gaagcatggaaagga

SEQ ID NO: 846526 - DNA, 15 bp, Homo sapiens
aagcatggaaaggaa

SEQ ID NO: 846527 - DNA, 15 bp, Homo sapiens
agcatggaaaggaat

SEQ ID NO: 846528 - DNA, 15 bp, Homo sapiens
gcatggaaaggaatt

SEQ ID NO: 846529 - DNA, 15 bp, Homo sapiens
catggaaaggaattg

SEQ ID NO: 846530 - DNA, 15 bp, Homo sapiens
atggaaaggaattgc

SEQ ID NO: 846531 - DNA, 15 bp, Homo sapiens
tggaaaggaattgcc

SEQ ID NO: 846532 - DNA, 15 bp, Homo sapiens
ggaaaggaattgcct

SEQ ID NO: 846533 - DNA, 15 bp, Homo sapiens
gaaaggaattgcctt

SEQ ID NO: 846534 - DNA, 15 bp, Homo sapiens
aaaggaattgccttg

SEQ ID NO: 846535 - DNA, 15 bp, Homo sapiens
aaggaattgccttgg

SEQ ID NO: 846536 - DNA, 15 bp, Homo sapiens
aggaattgccttgga

SEQ ID NO: 846537 - DNA, 15 bp, Homo sapiens
ggaattgccttggac

SEQ ID NO: 846538 - DNA, 15 bp, Homo sapiens
gaattgccttggacc

SEQ ID NO: 846539 - DNA, 15 bp, Homo sapiens
aattgccttggaccc

SEQ ID NO: 846540 - DNA, 15 bp, Homo sapiens
attgccttggaccca

SEQ ID NO: 846541 - DNA, 15 bp, Homo sapiens
ttgccttggacccat

SEQ ID NO: 846542 - DNA, 15 bp, Homo sapiens
tgccttggacccatg

SEQ ID NO: 846543 - DNA, 15 bp, Homo sapiens
gccttggacccatgg

SEQ ID NO: 846544 - DNA, 15 bp, Homo sapiens
ccttggacccatgga

SEQ ID NO: 846545 - DNA, 15 bp, Homo sapiens
cttggacccatggaa

SEQ ID NO: 846546 - DNA, 15 bp, Homo sapiens
ttggacccatggaag

SEQ ID NO: 846547 - DNA, 15 bp, Homo sapiens
tggacccatggaagc

SEQ ID NO: 846548 - DNA, 15 bp, Homo sapiens
ggacccatggaagcc

SEQ ID NO: 846549 - DNA, 15 bp, Homo sapiens
gacccatggaagccc

SEQ ID NO: 846550 - DNA, 15 bp, Homo sapiens
acccatggaagccca

SEQ ID NO: 846551 - DNA, 15 bp, Homo sapiens
cccatggaagcccag

SEQ ID NO: 846552 - DNA, 15 bp, Homo sapiens
ccatggaagcccagt

SEQ ID NO: 846553 - DNA, 15 bp, Homo sapiens
catggaagcccagtg

SEQ ID NO: 846554 - DNA, 15 bp, Homo sapiens
atggaagcccagtga

SEQ ID NO: 846555 - DNA, 15 bp, Homo sapiens
tggaagcccagtgaa

SEQ ID NO: 846556 - DNA, 15 bp, Homo sapiens
ggaagcccagtgaag

SEQ ID NO: 846557 - DNA, 15 bp, Homo sapiens
gaagcccagtgaaga

SEQ ID NO: 846558 - DNA, 15 bp, Homo sapiens
aagcccagtgaagat

SEQ ID NO: 846559 - DNA, 15 bp, Homo sapiens
agcccagtgaagata

SEQ ID NO: 846560 - DNA, 15 bp, Homo sapiens
gcccagtgaagatac

SEQ ID NO: 846561 - DNA, 15 bp, Homo sapiens
cccagtgaagatact

SEQ ID NO: 846562 - DNA, 15 bp, Homo sapiens
ccagtgaagatactt

SEQ ID NO: 846563 - DNA, 15 bp, Homo sapiens
cagtgaagatactta

SEQ ID NO: 846564 - DNA, 15 bp, Homo sapiens
agtgaagatacttag

SEQ ID NO: 846565 - DNA, 15 bp, Homo sapiens
gtgaagatacttaga

SEQ ID NO: 846566 - DNA, 15 bp, Homo sapiens
tgaagatacttagat

SEQ ID NO: 846567 - DNA, 15 bp, Homo sapiens
gaagatacttagatc

SEQ ID NO: 846568 - DNA, 15 bp, Homo sapiens
aagatacttagatcc

SEQ ID NO: 846569 - DNA, 15 bp, Homo sapiens
agatacttagatcct

SEQ ID NO: 846570 - DNA, 15 bp, Homo sapiens
gatacttagatcctg

SEQ ID NO: 846571 - DNA, 15 bp, Homo sapiens
atacttagatcctgc

SEQ ID NO: 846572 - DNA, 15 bp, Homo sapiens
tacttagatcctgca

SEQ ID NO: 846573 - DNA, 15 bp, Homo sapiens
acttagatcctgcag

SEQ ID NO: 846574 - DNA, 15 bp, Homo sapiens
cttagatcctgcagg

SEQ ID NO: 846575 - DNA, 15 bp, Homo sapiens
ttagatcctgcaggg

SEQ ID NO: 846576 - DNA, 15 bp, Homo sapiens
tagatcctgcagggg

SEQ ID NO: 846577 - DNA, 15 bp, Homo sapiens
agatcctgcaggggt

SEQ ID NO: 846578 - DNA, 15 bp, Homo sapiens
gatcctgcaggggtg

SEQ ID NO: 846579 - DNA, 15 bp, Homo sapiens
atcctgcaggggtgt

SEQ ID NO: 846580 - DNA, 15 bp, Homo sapiens
tcctgcaggggtgtg

SEQ ID NO: 846581 - DNA, 15 bp, Homo sapiens
cctgcaggggtgtga

SEQ ID NO: 846582 - DNA, 15 bp, Homo sapiens
ctgcaggggtgtgaa

SEQ ID NO: 846583 - DNA, 15 bp, Homo sapiens
tgcaggggtgtgaat

SEQ ID NO: 846584 - DNA, 15 bp, Homo sapiens
gcaggggtgtgaata

SEQ ID NO: 846585 - DNA, 15 bp, Homo sapiens
caggggtgtgaataa

SEQ ID NO: 846586 - DNA, 15 bp, Homo sapiens
aggggtgtgaataat

SEQ ID NO: 846587 - DNA, 15 bp, Homo sapiens
ggggtgtgaataatg

SEQ ID NO: 846588 - DNA, 15 bp, Homo sapiens
gggtgtgaataatgt

SEQ ID NO: 846589 - DNA, 15 bp, Homo sapiens
ggtgtgaataatgtt

SEQ ID NO: 846590 - DNA, 15 bp, Homo sapiens
gtgtgaataatgttc

SEQ ID NO: 846591 - DNA, 15 bp, Homo sapiens
tgtgaataatgttct

SEQ ID NO: 846592 - DNA, 15 bp, Homo sapiens
gtgaataatgttctt

SEQ ID NO: 846593 - DNA, 15 bp, Homo sapiens
tgaataatgttcttt

SEQ ID NO: 846594 - DNA, 15 bp, Homo sapiens
gaataatgttctttt

SEQ ID NO: 846595 - DNA, 15 bp, Homo sapiens
aataatgttctttta

SEQ ID NO: 846596 - DNA, 15 bp, Homo sapiens
ataatgttcttttag

SEQ ID NO: 846597 - DNA, 15 bp, Homo sapiens
taatgttcttttagt

SEQ ID NO: 846598 - DNA, 15 bp, Homo sapiens
aatgttcttttagtt

SEQ ID NO: 846599 - DNA, 15 bp, Homo sapiens
atgttcttttagttt

SEQ ID NO: 846600 - DNA, 15 bp, Homo sapiens
tgttcttttagtttc

SEQ ID NO: 846601 - DNA, 15 bp, Homo sapiens
gttcttttagtttct

SEQ ID NO: 846602 - DNA, 15 bp, Homo sapiens
ttcttttagtttctc

SEQ ID NO: 846603 - DNA, 15 bp, Homo sapiens
tcttttagtttctct

SEQ ID NO: 846604 - DNA, 15 bp, Homo sapiens
cttttagtttctctt

SEQ ID NO: 846605 - DNA, 15 bp, Homo sapiens
ttttagtttctcttc

SEQ ID NO: 846606 - DNA, 15 bp, Homo sapiens
tttagtttctcttct

SEQ ID NO: 846607 - DNA, 15 bp, Homo sapiens
ttagtttctcttctt

SEQ ID NO: 846608 - DNA, 15 bp, Homo sapiens
tagtttctcttctta

SEQ ID NO: 846609 - DNA, 15 bp, Homo sapiens
agtttctcttcttag

SEQ ID NO: 846610 - DNA, 15 bp, Homo sapiens
gtttctcttcttagg

SEQ ID NO: 846611 - DNA, 15 bp, Homo sapiens
tttctcttcttagga

SEQ ID NO: 846612 - DNA, 15 bp, Homo sapiens
ttctcttcttaggag

SEQ ID NO: 846613 - DNA, 15 bp, Homo sapiens
tctcttcttaggagg

SEQ ID NO: 846614 - DNA, 15 bp, Homo sapiens
ctcttcttaggaggt

SEQ ID NO: 846615 - DNA, 15 bp, Homo sapiens
tcttcttaggaggtt

SEQ ID NO: 846616 - DNA, 15 bp, Homo sapiens
cttcttaggaggttt

SEQ ID NO: 846617 - DNA, 15 bp, Homo sapiens
ttcttaggaggtttg

SEQ ID NO: 846618 - DNA, 15 bp, Homo sapiens
tcttaggaggtttgt

SEQ ID NO: 846619 - DNA, 15 bp, Homo sapiens
cttaggaggtttgtt

SEQ ID NO: 846620 - DNA, 15 bp, Homo sapiens
ttaggaggtttgttc

SEQ ID NO: 846621 - DNA, 15 bp, Homo sapiens
taggaggtttgttca

SEQ ID NO: 846622 - DNA, 15 bp, Homo sapiens
aggaggtttgttcat

SEQ ID NO: 846623 - DNA, 15 bp, Homo sapiens
ggaggtttgttcatt

SEQ ID NO: 846624 - DNA, 15 bp, Homo sapiens
gaggtttgttcattt

SEQ ID NO: 846625 - DNA, 15 bp, Homo sapiens
aggtttgttcatttt

SEQ ID NO: 846626 - DNA, 15 bp, Homo sapiens
ggtttgttcattttg

SEQ ID NO: 846627 - DNA, 15 bp, Homo sapiens
gtttgttcattttgg

SEQ ID NO: 846628 - DNA, 15 bp, Homo sapiens
tttgttcattttggg

SEQ ID NO: 846629 - DNA, 15 bp, Homo sapiens
ttgttcattttggga

SEQ ID NO: 846630 - DNA, 15 bp, Homo sapiens
tgttcattttgggag

SEQ ID NO: 846631 - DNA, 15 bp, Homo sapiens
gttcattttgggaga

SEQ ID NO: 846632 - DNA, 15 bp, Homo sapiens
ttcattttgggagat

SEQ ID NO: 846633 - DNA, 15 bp, Homo sapiens
tcattttgggagatt

SEQ ID NO: 846634 - DNA, 15 bp, Homo sapiens
cattttgggagattt

SEQ ID NO: 846635 - DNA, 15 bp, Homo sapiens
attttgggagatttc

SEQ ID NO: 846636 - DNA, 15 bp, Homo sapiens
ttttgggagatttct

SEQ ID NO: 846637 - DNA, 15 bp, Homo sapiens
tttgggagatttctt

SEQ ID NO: 846638 - DNA, 15 bp, Homo sapiens
ttgggagatttcttt

SEQ ID NO: 846639 - DNA, 15 bp, Homo sapiens
tgggagatttctttt

SEQ ID NO: 846640 - DNA, 15 bp, Homo sapiens
gggagatttcttttg

SEQ ID NO: 846641 - DNA, 15 bp, Homo sapiens
ggagatttcttttga

SEQ ID NO: 846642 - DNA, 15 bp, Homo sapiens
gagatttcttttgaa

SEQ ID NO: 846643 - DNA, 15 bp, Homo sapiens
agatttcttttgaaa

SEQ ID NO: 846644 - DNA, 15 bp, Homo sapiens
gatttcttttgaaaa

SEQ ID NO: 846645 - DNA, 15 bp, Homo sapiens
atttcttttgaaaag

SEQ ID NO: 846646 - DNA, 15 bp, Homo sapiens
tttcttttgaaaaga

SEQ ID NO: 846647 - DNA, 15 bp, Homo sapiens
ttcttttgaaaagag

SEQ ID NO: 846648 - DNA, 15 bp, Homo sapiens
tcttttgaaaagagt

SEQ ID NO: 846649 - DNA, 15 bp, Homo sapiens
cttttgaaaagagtg

SEQ ID NO: 846650 - DNA, 15 bp, Homo sapiens
ttttgaaaagagtga

SEQ ID NO: 846651 - DNA, 15 bp, Homo sapiens
tttgaaaagagtgaa

SEQ ID NO: 846652 - DNA, 15 bp, Homo sapiens
ttgaaaagagtgaac

SEQ ID NO: 846653 - DNA, 15 bp, Homo sapiens
tgaaaagagtgaact

SEQ ID NO: 846654 - DNA, 15 bp, Homo sapiens
gaaaagagtgaactt

SEQ ID NO: 846655 - DNA, 15 bp, Homo sapiens
aaaagagtgaactta

SEQ ID NO: 846656 - DNA, 15 bp, Homo sapiens
aaagagtgaacttaa

SEQ ID NO: 846657 - DNA, 15 bp, Homo sapiens
aagagtgaacttaaa

SEQ ID NO: 846658 - DNA, 15 bp, Homo sapiens
agagtgaacttaaat

SEQ ID NO: 846659 - DNA, 15 bp, Homo sapiens
gagtgaacttaaatt

SEQ ID NO: 846660 - DNA, 15 bp, Homo sapiens
agtgaacttaaattg

SEQ ID NO: 846661 - DNA, 15 bp, Homo sapiens
gtgaacttaaattgg

SEQ ID NO: 846662 - DNA, 15 bp, Homo sapiens
tgaacttaaattgga

SEQ ID NO: 846663 - DNA, 15 bp, Homo sapiens
gaacttaaattggag

SEQ ID NO: 846664 - DNA, 15 bp, Homo sapiens
aacttaaattggaga

SEQ ID NO: 846665 - DNA, 15 bp, Homo sapiens
acttaaattggagaa

SEQ ID NO: 846666 - DNA, 15 bp, Homo sapiens
cttaaattggagaaa

SEQ ID NO: 846667 - DNA, 15 bp, Homo sapiens
ttaaattggagaaaa

SEQ ID NO: 846668 - DNA, 15 bp, Homo sapiens
taaattggagaaaag

SEQ ID NO: 846669 - DNA, 15 bp, Homo sapiens
aaattggagaaaagt

SEQ ID NO: 846670 - DNA, 15 bp, Homo sapiens
aattggagaaaagta

SEQ ID NO: 846671 - DNA, 15 bp, Homo sapiens
attggagaaaagtac

SEQ ID NO: 846672 - DNA, 15 bp, Homo sapiens
ttggagaaaagtaca

SEQ ID NO: 846673 - DNA, 15 bp, Homo sapiens
tggagaaaagtacat

SEQ ID NO: 846674 - DNA, 15 bp, Homo sapiens
ggagaaaagtacatt

SEQ ID NO: 846675 - DNA, 15 bp, Homo sapiens
gagaaaagtacattt

SEQ ID NO: 846676 - DNA, 15 bp, Homo sapiens
agaaaagtacatttt

SEQ ID NO: 846677 - DNA, 15 bp, Homo sapiens
gaaaagtacatttta

SEQ ID NO: 846678 - DNA, 15 bp, Homo sapiens
aaaagtacattttag

SEQ ID NO: 846679 - DNA, 15 bp, Homo sapiens
aaagtacattttagt

SEQ ID NO: 846680 - DNA, 15 bp, Homo sapiens
aagtacattttagta

SEQ ID NO: 846681 - DNA, 15 bp, Homo sapiens
agtacattttagtat

SEQ ID NO: 846682 - DNA, 15 bp, Homo sapiens
gtacattttagtatg

SEQ ID NO: 846683 - DNA, 15 bp, Homo sapiens
tacattttagtatgt

SEQ ID NO: 846684 - DNA, 15 bp, Homo sapiens
acattttagtatgtt

SEQ ID NO: 846685 - DNA, 15 bp, Homo sapiens
cattttagtatgttg

SEQ ID NO: 846686 - DNA, 15 bp, Homo sapiens
attttagtatgttga

SEQ ID NO: 846687 - DNA, 15 bp, Homo sapiens
ttttagtatgttgat

SEQ ID NO: 846688 - DNA, 15 bp, Homo sapiens
tttagtatgttgata

SEQ ID NO: 846689 - DNA, 15 bp, Homo sapiens
ttagtatgttgataa

SEQ ID NO: 846690 - DNA, 15 bp, Homo sapiens
tagtatgttgataac

SEQ ID NO: 846691 - DNA, 15 bp, Homo sapiens
agtatgttgataaca

SEQ ID NO: 846692 - DNA, 15 bp, Homo sapiens
gtatgttgataacat

SEQ ID NO: 846693 - DNA, 15 bp, Homo sapiens
tatgttgataacatt

SEQ ID NO: 846694 - DNA, 15 bp, Homo sapiens
atgttgataacattt

SEQ ID NO: 846695 - DNA, 15 bp, Homo sapiens
tgttgataacatttg

SEQ ID NO: 846696 - DNA, 15 bp, Homo sapiens
gttgataacatttga

SEQ ID NO: 846697 - DNA, 15 bp, Homo sapiens
ttgataacatttgaa

SEQ ID NO: 846698 - DNA, 15 bp, Homo sapiens
tgataacatttgaat

SEQ ID NO: 846699 - DNA, 15 bp, Homo sapiens
gataacatttgaatt

SEQ ID NO: 846700 - DNA, 15 bp, Homo sapiens
ataacatttgaattt

SEQ ID NO: 846701 - DNA, 15 bp, Homo sapiens
taacatttgaatttg

SEQ ID NO: 846702 - DNA, 15 bp, Homo sapiens
aacatttgaatttgt

SEQ ID NO: 846703 - DNA, 15 bp, Homo sapiens
acatttgaatttgta

SEQ ID NO: 846704 - DNA, 15 bp, Homo sapiens
catttgaatttgtaa

SEQ ID NO: 846705 - DNA, 15 bp, Homo sapiens
atttgaatttgtaaa

SEQ ID NO: 846706 - DNA, 15 bp, Homo sapiens
tttgaatttgtaaaa

SEQ ID NO: 846707 - DNA, 15 bp, Homo sapiens
ttgaatttgtaaaat

SEQ ID NO: 846708 - DNA, 15 bp, Homo sapiens
tgaatttgtaaaatg

SEQ ID NO: 846709 - DNA, 15 bp, Homo sapiens
gaatttgtaaaatgg

SEQ ID NO: 846710 - DNA, 15 bp, Homo sapiens
aatttgtaaaatgga

SEQ ID NO: 846711 - DNA, 15 bp, Homo sapiens
atttgtaaaatggac

SEQ ID NO: 846712 - DNA, 15 bp, Homo sapiens
tttgtaaaatggacc

SEQ ID NO: 846713 - DNA, 15 bp, Homo sapiens
ttgtaaaatggacct

SEQ ID NO: 846714 - DNA, 15 bp, Homo sapiens
tgtaaaatggaccta

SEQ ID NO: 846715 - DNA, 15 bp, Homo sapiens
gtaaaatggacctat

SEQ ID NO: 846716 - DNA, 15 bp, Homo sapiens
taaaatggacctatg

SEQ ID NO: 846717 - DNA, 15 bp, Homo sapiens
aaaatggacctatgg

SEQ ID NO: 846718 - DNA, 15 bp, Homo sapiens
aaatggacctatgga

SEQ ID NO: 846719 - DNA, 15 bp, Homo sapiens
aatggacctatggat

SEQ ID NO: 846720 - DNA, 15 bp, Homo sapiens
atggacctatggatg

SEQ ID NO: 846721 - DNA, 15 bp, Homo sapiens
tggacctatggatga

SEQ ID NO: 846722 - DNA, 15 bp, Homo sapiens
ggacctatggatgat

SEQ ID NO: 846723 - DNA, 15 bp, Homo sapiens
gacctatggatgatc

SEQ ID NO: 846724 - DNA, 15 bp, Homo sapiens
acctatggatgatct

SEQ ID NO: 846725 - DNA, 15 bp, Homo sapiens
cctatggatgatcta

SEQ ID NO: 846726 - DNA, 15 bp, Homo sapiens
ctatggatgatctac

SEQ ID NO: 846727 - DNA, 15 bp, Homo sapiens
tatggatgatctaca

SEQ ID NO: 846728 - DNA, 15 bp, Homo sapiens
atggatgatctacac

SEQ ID NO: 846729 - DNA, 15 bp, Homo sapiens
tggatgatctacaca

SEQ ID NO: 846730 - DNA, 15 bp, Homo sapiens
ggatgatctacacat

SEQ ID NO: 846731 - DNA, 15 bp, Homo sapiens
gatgatctacacata

SEQ ID NO: 846732 - DNA, 15 bp, Homo sapiens
atgatctacacatat

SEQ ID NO: 846733 - DNA, 15 bp, Homo sapiens
tgatctacacatatt

SEQ ID NO: 846734 - DNA, 15 bp, Homo sapiens
gatctacacatattt

SEQ ID NO: 846735 - DNA, 15 bp, Homo sapiens
atctacacatattta

SEQ ID NO: 846736 - DNA, 15 bp, Homo sapiens
tctacacatatttat

SEQ ID NO: 846737 - DNA, 15 bp, Homo sapiens
ctacacatatttata

SEQ ID NO: 846738 - DNA, 15 bp, Homo sapiens
tacacatatttatat

SEQ ID NO: 846739 - DNA, 15 bp, Homo sapiens
acacatatttatata

SEQ ID NO: 846740 - DNA, 15 bp, Homo sapiens
cacatatttatatac

SEQ ID NO: 846741 - DNA, 15 bp, Homo sapiens
acatatttatatacc

SEQ ID NO: 846742 - DNA, 15 bp, Homo sapiens
catatttatataccc

SEQ ID NO: 846743 - DNA, 15 bp, Homo sapiens
atatttatataccca

SEQ ID NO: 846744 - DNA, 15 bp, Homo sapiens
tatttatatacccat

SEQ ID NO: 846745 - DNA, 15 bp, Homo sapiens
atttatatacccata

SEQ ID NO: 846746 - DNA, 15 bp, Homo sapiens
tttatatacccataa

SEQ ID NO: 846747 - DNA, 15 bp, Homo sapiens
ttatatacccataaa

SEQ ID NO: 846748 - DNA, 15 bp, Homo sapiens
tatatacccataaat

SEQ ID NO: 846749 - DNA, 15 bp, Homo sapiens
atatacccataaata

SEQ ID NO: 846750 - DNA, 15 bp, Homo sapiens
tatacccataaatat

SEQ ID NO: 846751 - DNA, 15 bp, Homo sapiens
atacccataaatata

SEQ ID NO: 846752 - DNA, 15 bp, Homo sapiens
tacccataaatatac

SEQ ID NO: 846753 - DNA, 15 bp, Homo sapiens
acccataaatataca

SEQ ID NO: 846754 - DNA, 15 bp, Homo sapiens
cccataaatatacac

SEQ ID NO: 846755 - DNA, 15 bp, Homo sapiens
ccataaatatacaca

SEQ ID NO: 846756 - DNA, 15 bp, Homo sapiens
cataaatatacacat

SEQ ID NO: 846757 - DNA, 15 bp, Homo sapiens
ataaatatacacata

SEQ ID NO: 846758 - DNA, 15 bp, Homo sapiens
taaatatacacatat

SEQ ID NO: 846759 - DNA, 15 bp, Homo sapiens
aaatatacacatatt

SEQ ID NO: 846760 - DNA, 15 bp, Homo sapiens
aatatacacatattt

SEQ ID NO: 846761 - DNA, 15 bp, Homo sapiens
atatacacatatttt

SEQ ID NO: 846762 - DNA, 15 bp, Homo sapiens
tatacacatatttta

SEQ ID NO: 846763 - DNA, 15 bp, Homo sapiens
atacacatattttaa

SEQ ID NO: 846764 - DNA, 15 bp, Homo sapiens
tacacatattttaat

SEQ ID NO: 846765 - DNA, 15 bp, Homo sapiens
acacatattttaatt

SEQ ID NO: 846766 - DNA, 15 bp, Homo sapiens
cacatattttaattt

SEQ ID NO: 846767 - DNA, 15 bp, Homo sapiens
acatattttaatttt

SEQ ID NO: 846768 - DNA, 15 bp, Homo sapiens
catattttaattttt

SEQ ID NO: 846769 - DNA, 15 bp, Homo sapiens
atattttaatttttg

SEQ ID NO: 846770 - DNA, 15 bp, Homo sapiens
tattttaatttttgg

SEQ ID NO: 846771 - DNA, 15 bp, Homo sapiens
attttaatttttggt

SEQ ID NO: 846772 - DNA, 15 bp, Homo sapiens
ttttaatttttggta

SEQ ID NO: 846773 - DNA, 15 bp, Homo sapiens
tttaatttttggtat

SEQ ID NO: 846774 - DNA, 15 bp, Homo sapiens
ttaatttttggtatt

SEQ ID NO: 846775 - DNA, 15 bp, Homo sapiens
taatttttggtattt

SEQ ID NO: 846776 - DNA, 15 bp, Homo sapiens
aatttttggtatttt

SEQ ID NO: 846777 - DNA, 15 bp, Homo sapiens
atttttggtatttta

SEQ ID NO: 846778 - DNA, 15 bp, Homo sapiens
tttttggtattttat

SEQ ID NO: 846779 - DNA, 15 bp, Homo sapiens
ttttggtattttata

SEQ ID NO: 846780 - DNA, 15 bp, Homo sapiens
tttggtattttataa

SEQ ID NO: 846781 - DNA, 15 bp, Homo sapiens
ttggtattttataat

SEQ ID NO: 846782 - DNA, 15 bp, Homo sapiens
tggtattttataatt

SEQ ID NO: 846783 - DNA, 15 bp, Homo sapiens
ggtattttataatta

SEQ ID NO: 846784 - DNA, 15 bp, Homo sapiens
gtattttataattat

SEQ ID NO: 846785 - DNA, 15 bp, Homo sapiens
tattttataattatt

SEQ ID NO: 846786 - DNA, 15 bp, Homo sapiens
attttataattatta

SEQ ID NO: 846787 - DNA, 15 bp, Homo sapiens
ttttataattattat

SEQ ID NO: 846788 - DNA, 15 bp, Homo sapiens
tttataattattatt

SEQ ID NO: 846789 - DNA, 15 bp, Homo sapiens
ttataattattattt

SEQ ID NO: 846790 - DNA, 15 bp, Homo sapiens
tataattattattta

SEQ ID NO: 846791 - DNA, 15 bp, Homo sapiens
ataattattatttaa

SEQ ID NO: 846792 - DNA, 15 bp, Homo sapiens
taattattatttaat

SEQ ID NO: 846793 - DNA, 15 bp, Homo sapiens
aattattatttaatg

SEQ ID NO: 846794 - DNA, 15 bp, Homo sapiens
attattatttaatga

SEQ ID NO: 846795 - DNA, 15 bp, Homo sapiens
ttattatttaatgat

SEQ ID NO: 846796 - DNA, 15 bp, Homo sapiens
tattatttaatgatc

SEQ ID NO: 846797 - DNA, 15 bp, Homo sapiens
attatttaatgatca

SEQ ID NO: 846798 - DNA, 15 bp, Homo sapiens
ttatttaatgatcat

SEQ ID NO: 846799 - DNA, 15 bp, Homo sapiens
tatttaatgatcatt

SEQ ID NO: 846800 - DNA, 15 bp, Homo sapiens
atttaatgatcattc

SEQ ID NO: 846801 - DNA, 15 bp, Homo sapiens
tttaatgatcattca

SEQ ID NO: 846802 - DNA, 15 bp, Homo sapiens
ttaatgatcattcat

SEQ ID NO: 846803 - DNA, 15 bp, Homo sapiens
taatgatcattcatg

SEQ ID NO: 846804 - DNA, 15 bp, Homo sapiens
aatgatcattcatga

SEQ ID NO: 846805 - DNA, 15 bp, Homo sapiens
atgatcattcatgac

SEQ ID NO: 846806 - DNA, 15 bp, Homo sapiens
tgatcattcatgaca

SEQ ID NO: 846807 - DNA, 15 bp, Homo sapiens
gatcattcatgacat

SEQ ID NO: 846808 - DNA, 15 bp, Homo sapiens
atcattcatgacatt

SEQ ID NO: 846809 - DNA, 15 bp, Homo sapiens
tcattcatgacattt

SEQ ID NO: 846810 - DNA, 15 bp, Homo sapiens
cattcatgacatttt

SEQ ID NO: 846811 - DNA, 15 bp, Homo sapiens
attcatgacatttta

SEQ ID NO: 846812 - DNA, 15 bp, Homo sapiens
ttcatgacattttaa

SEQ ID NO: 846813 - DNA, 15 bp, Homo sapiens
tcatgacattttaaa

SEQ ID NO: 846814 - DNA, 15 bp, Homo sapiens
catgacattttaaaa

SEQ ID NO: 846815 - DNA, 15 bp, Homo sapiens
atgacattttaaaaa

SEQ ID NO: 846816 - DNA, 15 bp, Homo sapiens
tgacattttaaaaat

SEQ ID NO: 846817 - DNA, 15 bp, Homo sapiens
gacattttaaaaatt

SEQ ID NO: 846818 - DNA, 15 bp, Homo sapiens
acattttaaaaatta

SEQ ID NO: 846819 - DNA, 15 bp, Homo sapiens
cattttaaaaattac

SEQ ID NO: 846820 - DNA, 15 bp, Homo sapiens
attttaaaaattaca

SEQ ID NO: 846821 - DNA, 15 bp, Homo sapiens
ttttaaaaattacag

SEQ ID NO: 846822 - DNA, 15 bp, Homo sapiens
tttaaaaattacaga

SEQ ID NO: 846823 - DNA, 15 bp, Homo sapiens
ttaaaaattacagaa

SEQ ID NO: 846824 - DNA, 15 bp, Homo sapiens
taaaaattacagaaa

SEQ ID NO: 846825 - DNA, 15 bp, Homo sapiens
aaaaattacagaaaa

SEQ ID NO: 846826 - DNA, 15 bp, Homo sapiens
aaaattacagaaaaa

SEQ ID NO: 846827 - DNA, 15 bp, Homo sapiens
aaattacagaaaaat

SEQ ID NO: 846828 - DNA, 15 bp, Homo sapiens
aattacagaaaaatt

SEQ ID NO: 846829 - DNA, 15 bp, Homo sapiens
attacagaaaaattt

SEQ ID NO: 846830 - DNA, 15 bp, Homo sapiens
ttacagaaaaattta

SEQ ID NO: 846831 - DNA, 15 bp, Homo sapiens
tacagaaaaatttac

SEQ ID NO: 846832 - DNA, 15 bp, Homo sapiens
acagaaaaatttaca

SEQ ID NO: 846833 - DNA, 15 bp, Homo sapiens
cagaaaaatttacat

SEQ ID NO: 846834 - DNA, 15 bp, Homo sapiens
agaaaaatttacatc

SEQ ID NO: 846835 - DNA, 15 bp, Homo sapiens
gaaaaatttacatct

SEQ ID NO: 846836 - DNA, 15 bp, Homo sapiens
aaaaatttacatcta

SEQ ID NO: 846837 - DNA, 15 bp, Homo sapiens
aaaatttacatctaa

SEQ ID NO: 846838 - DNA, 15 bp, Homo sapiens
aaatttacatctaaa

SEQ ID NO: 846839 - DNA, 15 bp, Homo sapiens
aatttacatctaaaa

SEQ ID NO: 846840 - DNA, 15 bp, Homo sapiens
atttacatctaaaat

SEQ ID NO: 846841 - DNA, 15 bp, Homo sapiens
tttacatctaaaatt

SEQ ID NO: 846842 - DNA, 15 bp, Homo sapiens
ttacatctaaaattt

SEQ ID NO: 846843 - DNA, 15 bp, Homo sapiens
tacatctaaaatttc

SEQ ID NO: 846844 - DNA, 15 bp, Homo sapiens
acatctaaaatttca

SEQ ID NO: 846845 - DNA, 15 bp, Homo sapiens
catctaaaatttcag

SEQ ID NO: 846846 - DNA, 15 bp, Homo sapiens
atctaaaatttcagc

SEQ ID NO: 846847 - DNA, 15 bp, Homo sapiens
tctaaaatttcagca

SEQ ID NO: 846848 - DNA, 15 bp, Homo sapiens
ctaaaatttcagcaa

SEQ ID NO: 846849 - DNA, 15 bp, Homo sapiens
taaaatttcagcaat

SEQ ID NO: 846850 - DNA, 15 bp, Homo sapiens
aaaatttcagcaatg

SEQ ID NO: 846851 - DNA, 15 bp, Homo sapiens
aaatttcagcaatgt

SEQ ID NO: 846852 - DNA, 15 bp, Homo sapiens
aatttcagcaatgtt

SEQ ID NO: 846853 - DNA, 15 bp, Homo sapiens
atttcagcaatgttg

SEQ ID NO: 846854 - DNA, 15 bp, Homo sapiens
tttcagcaatgttgt

SEQ ID NO: 846855 - DNA, 15 bp, Homo sapiens
ttcagcaatgttgtt

SEQ ID NO: 846856 - DNA, 15 bp, Homo sapiens
tcagcaatgttgttt

SEQ ID NO: 846857 - DNA, 15 bp, Homo sapiens
cagcaatgttgtttt

SEQ ID NO: 846858 - DNA, 15 bp, Homo sapiens
agcaatgttgttttt

SEQ ID NO: 846859 - DNA, 15 bp, Homo sapiens
gcaatgttgtttttg

SEQ ID NO: 846860 - DNA, 15 bp, Homo sapiens
caatgttgtttttga

SEQ ID NO: 846861 - DNA, 15 bp, Homo sapiens
aatgttgtttttgac

SEQ ID NO: 846862 - DNA, 15 bp, Homo sapiens
atgttgtttttgacc

SEQ ID NO: 846863 - DNA, 15 bp, Homo sapiens
tgttgtttttgacca

SEQ ID NO: 846864 - DNA, 15 bp, Homo sapiens
gttgtttttgaccaa

SEQ ID NO: 846865 - DNA, 15 bp, Homo sapiens
ttgtttttgaccaac

SEQ ID NO: 846866 - DNA, 15 bp, Homo sapiens
tgtttttgaccaact

SEQ ID NO: 846867 - DNA, 15 bp, Homo sapiens
gtttttgaccaacta

SEQ ID NO: 846868 - DNA, 15 bp, Homo sapiens
tttttgaccaactaa

SEQ ID NO: 846869 - DNA, 15 bp, Homo sapiens
ttttgaccaactaaa

SEQ ID NO: 846870 - DNA, 15 bp, Homo sapiens
tttgaccaactaaat

SEQ ID NO: 846871 - DNA, 15 bp, Homo sapiens
ttgaccaactaaata

SEQ ID NO: 846872 - DNA, 15 bp, Homo sapiens
tgaccaactaaataa

SEQ ID NO: 846873 - DNA, 15 bp, Homo sapiens
gaccaactaaataaa

SEQ ID NO: 846874 - DNA, 15 bp, Homo sapiens
accaactaaataaat

SEQ ID NO: 846875 - DNA, 15 bp, Homo sapiens
ccaactaaataaatt

SEQ ID NO: 846876 - DNA, 15 bp, Homo sapiens
caactaaataaattg

SEQ ID NO: 846877 - DNA, 15 bp, Homo sapiens
aactaaataaattgc

SEQ ID NO: 846878 - DNA, 15 bp, Homo sapiens
actaaataaattgca

SEQ ID NO: 846879 - DNA, 15 bp, Homo sapiens
ctaaataaattgcat

SEQ ID NO: 846880 - DNA, 15 bp, Homo sapiens
taaataaattgcatt

SEQ ID NO: 846881 - DNA, 15 bp, Homo sapiens
aaataaattgcattt

SEQ ID NO: 846882 - DNA, 15 bp, Homo sapiens
aataaattgcatttg

SEQ ID NO: 846883 - DNA, 15 bp, Homo sapiens
ataaattgcatttga

SEQ ID NO: 846884 - DNA, 15 bp, Homo sapiens
taaattgcatttgaa

SEQ ID NO: 846885 - DNA, 15 bp, Homo sapiens
aaattgcatttgaaa

SEQ ID NO: 846886 - DNA, 15 bp, Homo sapiens
aattgcatttgaaat

SEQ ID NO: 846887 - DNA, 15 bp, Homo sapiens
attgcatttgaaata

SEQ ID NO: 846888 - DNA, 15 bp, Homo sapiens
ttgcatttgaaataa

SEQ ID NO: 846889 - DNA, 15 bp, Homo sapiens
tgcatttgaaataat

SEQ ID NO: 846890 - DNA, 15 bp, Homo sapiens
gcatttgaaataatg

SEQ ID NO: 846891 - DNA, 15 bp, Homo sapiens
catttgaaataatgg

SEQ ID NO: 846892 - DNA, 15 bp, Homo sapiens
atttgaaataatgga

SEQ ID NO: 846893 - DNA, 15 bp, Homo sapiens
tttgaaataatggag

SEQ ID NO: 846894 - DNA, 15 bp, Homo sapiens
ttgaaataatggaga

SEQ ID NO: 846895 - DNA, 15 bp, Homo sapiens
tgaaataatggagat

SEQ ID NO: 846896 - DNA, 15 bp, Homo sapiens
gaaataatggagatg

SEQ ID NO: 846897 - DNA, 15 bp, Homo sapiens
aaataatggagatgc

SEQ ID NO: 846898 - DNA, 15 bp, Homo sapiens
aataatggagatgca

SEQ ID NO: 846899 - DNA, 15 bp, Homo sapiens
ataatggagatgcaa

SEQ ID NO: 846900 - DNA, 15 bp, Homo sapiens
taatggagatgcaat

SEQ ID NO: 846901 - DNA, 15 bp, Homo sapiens
aatggagatgcaatg

SEQ ID NO: 846902 - DNA, 15 bp, Homo sapiens
atggagatgcaatgt

SEQ ID NO: 846903 - DNA, 15 bp, Homo sapiens
tggagatgcaatgtt

SEQ ID NO: 846904 - DNA, 15 bp, Homo sapiens
ggagatgcaatgttc

SEQ ID NO: 846905 - DNA, 15 bp, Homo sapiens
gagatgcaatgttca

SEQ ID NO: 846906 - DNA, 15 bp, Homo sapiens
agatgcaatgttcaa

SEQ ID NO: 846907 - DNA, 15 bp, Homo sapiens
gatgcaatgttcaaa

SEQ ID NO: 846908 - DNA, 15 bp, Homo sapiens
atgcaatgttcaaaa

SEQ ID NO: 846909 - DNA, 15 bp, Homo sapiens
tgcaatgttcaaaat

SEQ ID NO: 846910 - DNA, 15 bp, Homo sapiens
gcaatgttcaaaatt

SEQ ID NO: 846911 - DNA, 15 bp, Homo sapiens
caatgttcaaaattt

SEQ ID NO: 846912 - DNA, 15 bp, Homo sapiens
aatgttcaaaatttc

SEQ ID NO: 846913 - DNA, 15 bp, Homo sapiens
atgttcaaaatttca

SEQ ID NO: 846914 - DNA, 15 bp, Homo sapiens
tgttcaaaatttcaa

SEQ ID NO: 846915 - DNA, 15 bp, Homo sapiens
gttcaaaatttcaac

SEQ ID NO: 846916 - DNA, 15 bp, Homo sapiens
ttcaaaatttcaact

SEQ ID NO: 846917 - DNA, 15 bp, Homo sapiens
tcaaaatttcaactg

SEQ ID NO: 846918 - DNA, 15 bp, Homo sapiens
caaaatttcaactgt

SEQ ID NO: 846919 - DNA, 15 bp, Homo sapiens
aaaatttcaactgtg

SEQ ID NO: 846920 - DNA, 15 bp, Homo sapiens
aaatttcaactgtgg

SEQ ID NO: 846921 - DNA, 15 bp, Homo sapiens
aatttcaactgtggt

SEQ ID NO: 846922 - DNA, 15 bp, Homo sapiens
atttcaactgtggtt

SEQ ID NO: 846923 - DNA, 15 bp, Homo sapiens
tttcaactgtggtta

SEQ ID NO: 846924 - DNA, 15 bp, Homo sapiens
ttcaactgtggttaa

SEQ ID NO: 846925 - DNA, 15 bp, Homo sapiens
tcaactgtggttaaa

SEQ ID NO: 846926 - DNA, 15 bp, Homo sapiens
caactgtggttaaag

SEQ ID NO: 846927 - DNA, 15 bp, Homo sapiens
aactgtggttaaagc

SEQ ID NO: 846928 - DNA, 15 bp, Homo sapiens
actgtggttaaagca

SEQ ID NO: 846929 - DNA, 15 bp, Homo sapiens
ctgtggttaaagcaa

SEQ ID NO: 846930 - DNA, 15 bp, Homo sapiens
tgtggttaaagcaat

SEQ ID NO: 846931 - DNA, 15 bp, Homo sapiens
gtggttaaagcaata

SEQ ID NO: 846932 - DNA, 15 bp, Homo sapiens
tggttaaagcaatag

SEQ ID NO: 846933 - DNA, 15 bp, Homo sapiens
ggttaaagcaatagt

SEQ ID NO: 846934 - DNA, 15 bp, Homo sapiens
gttaaagcaatagtg

SEQ ID NO: 846935 - DNA, 15 bp, Homo sapiens
ttaaagcaatagtgt

SEQ ID NO: 846936 - DNA, 15 bp, Homo sapiens
taaagcaatagtgtg

SEQ ID NO: 846937 - DNA, 15 bp, Homo sapiens
aaagcaatagtgtga

SEQ ID NO: 846938 - DNA, 15 bp, Homo sapiens
aagcaatagtgtgat

SEQ ID NO: 846939 - DNA, 15 bp, Homo sapiens
agcaatagtgtgata

SEQ ID NO: 846940 - DNA, 15 bp, Homo sapiens
gcaatagtgtgatat

SEQ ID NO: 846941 - DNA, 15 bp, Homo sapiens
caatagtgtgatata

SEQ ID NO: 846942 - DNA, 15 bp, Homo sapiens
aatagtgtgatatat

SEQ ID NO: 846943 - DNA, 15 bp, Homo sapiens
atagtgtgatatatg

SEQ ID NO: 846944 - DNA, 15 bp, Homo sapiens
tagtgtgatatatga

SEQ ID NO: 846945 - DNA, 15 bp, Homo sapiens
agtgtgatatatgat

SEQ ID NO: 846946 - DNA, 15 bp, Homo sapiens
gtgtgatatatgatt

SEQ ID NO: 846947 - DNA, 15 bp, Homo sapiens
tgtgatatatgatta

SEQ ID NO: 846948 - DNA, 15 bp, Homo sapiens
gtgatatatgattac

SEQ ID NO: 846949 - DNA, 15 bp, Homo sapiens
tgatatatgattaca

SEQ ID NO: 846950 - DNA, 15 bp, Homo sapiens
gatatatgattacat

SEQ ID NO: 846951 - DNA, 15 bp, Homo sapiens
atatatgattacatt

SEQ ID NO: 846952 - DNA, 15 bp, Homo sapiens
tatatgattacatta

SEQ ID NO: 846953 - DNA, 15 bp, Homo sapiens
atatgattacattag

SEQ ID NO: 846954 - DNA, 15 bp, Homo sapiens
tatgattacattaga

SEQ ID NO: 846955 - DNA, 15 bp, Homo sapiens
atgattacattagaa

SEQ ID NO: 846956 - DNA, 15 bp, Homo sapiens
tgattacattagaag

SEQ ID NO: 846957 - DNA, 15 bp, Homo sapiens
gattacattagaagg

SEQ ID NO: 846958 - DNA, 15 bp, Homo sapiens
attacattagaagga

SEQ ID NO: 846959 - DNA, 15 bp, Homo sapiens
ttacattagaaggaa

SEQ ID NO: 846960 - DNA, 15 bp, Homo sapiens
tacattagaaggaag

SEQ ID NO: 846961 - DNA, 15 bp, Homo sapiens
acattagaaggaaga

SEQ ID NO: 846962 - DNA, 15 bp, Homo sapiens
cattagaaggaagat

SEQ ID NO: 846963 - DNA, 15 bp, Homo sapiens
attagaaggaagatg

SEQ ID NO: 846964 - DNA, 15 bp, Homo sapiens
ttagaaggaagatgt

SEQ ID NO: 846965 - DNA, 15 bp, Homo sapiens
tagaaggaagatgtg

SEQ ID NO: 846966 - DNA, 15 bp, Homo sapiens
agaaggaagatgtgc

SEQ ID NO: 846967 - DNA, 15 bp, Homo sapiens
gaaggaagatgtgcc

SEQ ID NO: 846968 - DNA, 15 bp, Homo sapiens
aaggaagatgtgcct

SEQ ID NO: 846969 - DNA, 15 bp, Homo sapiens
aggaagatgtgcctt

SEQ ID NO: 846970 - DNA, 15 bp, Homo sapiens
ggaagatgtgccttt

SEQ ID NO: 846971 - DNA, 15 bp, Homo sapiens
gaagatgtgcctttc

SEQ ID NO: 846972 - DNA, 15 bp, Homo sapiens
aagatgtgcctttca

SEQ ID NO: 846973 - DNA, 15 bp, Homo sapiens
agatgtgcctttcaa

SEQ ID NO: 846974 - DNA, 15 bp, Homo sapiens
gatgtgcctttcaaa

SEQ ID NO: 846975 - DNA, 15 bp, Homo sapiens
atgtgcctttcaaat

SEQ ID NO: 846976 - DNA, 15 bp, Homo sapiens
tgtgcctttcaaatt

SEQ ID NO: 846977 - DNA, 15 bp, Homo sapiens
gtgcctttcaaattc

SEQ ID NO: 846978 - DNA, 15 bp, Homo sapiens
tgcctttcaaattca

SEQ ID NO: 846979 - DNA, 15 bp, Homo sapiens
gcctttcaaattcag

SEQ ID NO: 846980 - DNA, 15 bp, Homo sapiens
cctttcaaattcaga

SEQ ID NO: 846981 - DNA, 15 bp, Homo sapiens
ctttcaaattcagat

SEQ ID NO: 846982 - DNA, 15 bp, Homo sapiens
tttcaaattcagatt

SEQ ID NO: 846983 - DNA, 15 bp, Homo sapiens
ttcaaattcagattg

SEQ ID NO: 846984 - DNA, 15 bp, Homo sapiens
tcaaattcagattga

SEQ ID NO: 846985 - DNA, 15 bp, Homo sapiens
caaattcagattgag

SEQ ID NO: 846986 - DNA, 15 bp, Homo sapiens
aaattcagattgagc

SEQ ID NO: 846987 - DNA, 15 bp, Homo sapiens
aattcagattgagca

SEQ ID NO: 846988 - DNA, 15 bp, Homo sapiens
attcagattgagcat

SEQ ID NO: 846989 - DNA, 15 bp, Homo sapiens
ttcagattgagcata

SEQ ID NO: 846990 - DNA, 15 bp, Homo sapiens
tcagattgagcatac

SEQ ID NO: 846991 - DNA, 15 bp, Homo sapiens
cagattgagcatact

SEQ ID NO: 846992 - DNA, 15 bp, Homo sapiens
agattgagcatacta

SEQ ID NO: 846993 - DNA, 15 bp, Homo sapiens
gattgagcatactaa

SEQ ID NO: 846994 - DNA, 15 bp, Homo sapiens
attgagcatactaaa

SEQ ID NO: 846995 - DNA, 15 bp, Homo sapiens
ttgagcatactaaaa

SEQ ID NO: 846996 - DNA, 15 bp, Homo sapiens
tgagcatactaaaag

SEQ ID NO: 846997 - DNA, 15 bp, Homo sapiens
gagcatactaaaagt

SEQ ID NO: 846998 - DNA, 15 bp, Homo sapiens
agcatactaaaagtg

SEQ ID NO: 846999 - DNA, 15 bp, Homo sapiens
gcatactaaaagtga

SEQ ID NO: 847000 - DNA, 15 bp, Homo sapiens
catactaaaagtgac

SEQ ID NO: 847001 - DNA, 15 bp, Homo sapiens
atactaaaagtgact

SEQ ID NO: 847002 - DNA, 15 bp, Homo sapiens
tactaaaagtgactc

SEQ ID NO: 847003 - DNA, 15 bp, Homo sapiens
actaaaagtgactct

SEQ ID NO: 847004 - DNA, 15 bp, Homo sapiens
ctaaaagtgactctc

SEQ ID NO: 847005 - DNA, 15 bp, Homo sapiens
taaaagtgactctct

SEQ ID NO: 847006 - DNA, 15 bp, Homo sapiens
aaaagtgactctcta

SEQ ID NO: 847007 - DNA, 15 bp, Homo sapiens
aaagtgactctctaa

SEQ ID NO: 847008 - DNA, 15 bp, Homo sapiens
aagtgactctctaat

SEQ ID NO: 847009 - DNA, 15 bp, Homo sapiens
agtgactctctaatt

SEQ ID NO: 847010 - DNA, 15 bp, Homo sapiens
gtgactctctaattt

SEQ ID NO: 847011 - DNA, 15 bp, Homo sapiens
tgactctctaatttt

SEQ ID NO: 847012 - DNA, 15 bp, Homo sapiens
gactctctaattttc

SEQ ID NO: 847013 - DNA, 15 bp, Homo sapiens
actctctaattttct

SEQ ID NO: 847014 - DNA, 15 bp, Homo sapiens
ctctctaattttcta

SEQ ID NO: 847015 - DNA, 15 bp, Homo sapiens
tctctaattttctat

SEQ ID NO: 847016 - DNA, 15 bp, Homo sapiens
ctctaattttctatt

SEQ ID NO: 847017 - DNA, 15 bp, Homo sapiens
tctaattttctattt

SEQ ID NO: 847018 - DNA, 15 bp, Homo sapiens
ctaattttctatttt

SEQ ID NO: 847019 - DNA, 15 bp, Homo sapiens
taattttctattttt

SEQ ID NO: 847020 - DNA, 15 bp, Homo sapiens
aattttctatttttg

SEQ ID NO: 847021 - DNA, 15 bp, Homo sapiens
attttctatttttgg

SEQ ID NO: 847022 - DNA, 15 bp, Homo sapiens
ttttctatttttggt

SEQ ID NO: 847023 - DNA, 15 bp, Homo sapiens
tttctatttttggta

SEQ ID NO: 847024 - DNA, 15 bp, Homo sapiens
ttctatttttggtaa

SEQ ID NO: 847025 - DNA, 15 bp, Homo sapiens
tctatttttggtaat

SEQ ID NO: 847026 - DNA, 15 bp, Homo sapiens
ctatttttggtaata

SEQ ID NO: 847027 - DNA, 15 bp, Homo sapiens
tatttttggtaatag

SEQ ID NO: 847028 - DNA, 15 bp, Homo sapiens
atttttggtaatagg

SEQ ID NO: 847029 - DNA, 15 bp, Homo sapiens
tttttggtaatagga

SEQ ID NO: 847030 - DNA, 15 bp, Homo sapiens
ttttggtaataggac

SEQ ID NO: 847031 - DNA, 15 bp, Homo sapiens
tttggtaataggaca

SEQ ID NO: 847032 - DNA, 15 bp, Homo sapiens
ttggtaataggacat

SEQ ID NO: 847033 - DNA, 15 bp, Homo sapiens
tggtaataggacatc

SEQ ID NO: 847034 - DNA, 15 bp, Homo sapiens
ggtaataggacatct

SEQ ID NO: 847035 - DNA, 15 bp, Homo sapiens
gtaataggacatctc

SEQ ID NO: 847036 - DNA, 15 bp, Homo sapiens
taataggacatctcc

SEQ ID NO: 847037 - DNA, 15 bp, Homo sapiens
aataggacatctcca

SEQ ID NO: 847038 - DNA, 15 bp, Homo sapiens
ataggacatctccaa

SEQ ID NO: 847039 - DNA, 15 bp, Homo sapiens
taggacatctccaag

SEQ ID NO: 847040 - DNA, 15 bp, Homo sapiens
aggacatctccaagt

SEQ ID NO: 847041 - DNA, 15 bp, Homo sapiens
ggacatctccaagtt

SEQ ID NO: 847042 - DNA, 15 bp, Homo sapiens
gacatctccaagttt

SEQ ID NO: 847043 - DNA, 15 bp, Homo sapiens
acatctccaagtttg

SEQ ID NO: 847044 - DNA, 15 bp, Homo sapiens
catctccaagtttgc

SEQ ID NO: 847045 - DNA, 15 bp, Homo sapiens
atctccaagtttgca

SEQ ID NO: 847046 - DNA, 15 bp, Homo sapiens
tctccaagtttgcag

SEQ ID NO: 847047 - DNA, 15 bp, Homo sapiens
ctccaagtttgcaga

SEQ ID NO: 847048 - DNA, 15 bp, Homo sapiens
tccaagtttgcagag

SEQ ID NO: 847049 - DNA, 15 bp, Homo sapiens
ccaagtttgcagaga

SEQ ID NO: 847050 - DNA, 15 bp, Homo sapiens
caagtttgcagagaa

SEQ ID NO: 847051 - DNA, 15 bp, Homo sapiens
aagtttgcagagaaa

SEQ ID NO: 847052 - DNA, 15 bp, Homo sapiens
agtttgcagagaaag

SEQ ID NO: 847053 - DNA, 15 bp, Homo sapiens
gtttgcagagaaaga

SEQ ID NO: 847054 - DNA, 15 bp, Homo sapiens
tttgcagagaaagac

SEQ ID NO: 847055 - DNA, 15 bp, Homo sapiens
ttgcagagaaagaca

SEQ ID NO: 847056 - DNA, 15 bp, Homo sapiens
tgcagagaaagacaa

SEQ ID NO: 847057 - DNA, 15 bp, Homo sapiens
gcagagaaagacaat

SEQ ID NO: 847058 - DNA, 15 bp, Homo sapiens
cagagaaagacaata

SEQ ID NO: 847059 - DNA, 15 bp, Homo sapiens
agagaaagacaatat

SEQ ID NO: 847060 - DNA, 15 bp, Homo sapiens
gagaaagacaatata

SEQ ID NO: 847061 - DNA, 15 bp, Homo sapiens
agaaagacaatatag

SEQ ID NO: 847062 - DNA, 15 bp, Homo sapiens
gaaagacaatatagt

SEQ ID NO: 847063 - DNA, 15 bp, Homo sapiens
aaagacaatatagtt

SEQ ID NO: 847064 - DNA, 15 bp, Homo sapiens
aagacaatatagttc

SEQ ID NO: 847065 - DNA, 15 bp, Homo sapiens
agacaatatagttct

SEQ ID NO: 847066 - DNA, 15 bp, Homo sapiens
gacaatatagttctt

SEQ ID NO: 847067 - DNA, 15 bp, Homo sapiens
acaatatagttcttg

SEQ ID NO: 847068 - DNA, 15 bp, Homo sapiens
caatatagttcttgg

SEQ ID NO: 847069 - DNA, 15 bp, Homo sapiens
aatatagttcttgga

SEQ ID NO: 847070 - DNA, 15 bp, Homo sapiens
atatagttcttggag

SEQ ID NO: 847071 - DNA, 15 bp, Homo sapiens
tatagttcttggaga

SEQ ID NO: 847072 - DNA, 15 bp, Homo sapiens
atagttcttggagaa

SEQ ID NO: 847073 - DNA, 15 bp, Homo sapiens
tagttcttggagaag

SEQ ID NO: 847074 - DNA, 15 bp, Homo sapiens
agttcttggagaagg

SEQ ID NO: 847075 - DNA, 15 bp, Homo sapiens
gttcttggagaaggt

SEQ ID NO: 847076 - DNA, 15 bp, Homo sapiens
ttcttggagaaggtg

SEQ ID NO: 847077 - DNA, 15 bp, Homo sapiens
tcttggagaaggtgg

SEQ ID NO: 847078 - DNA, 15 bp, Homo sapiens
cttggagaaggtgga

SEQ ID NO: 847079 - DNA, 15 bp, Homo sapiens
ttggagaaggtggaa

SEQ ID NO: 847080 - DNA, 15 bp, Homo sapiens
tggagaaggtggaat

SEQ ID NO: 847081 - DNA, 15 bp, Homo sapiens
ggagaaggtggaatc

SEQ ID NO: 847082 - DNA, 15 bp, Homo sapiens
gagaaggtggaatca

SEQ ID NO: 847083 - DNA, 15 bp, Homo sapiens
agaaggtggaatcac

SEQ ID NO: 847084 - DNA, 15 bp, Homo sapiens
gaaggtggaatcaca

SEQ ID NO: 847085 - DNA, 15 bp, Homo sapiens
aaggtggaatcacac

SEQ ID NO: 847086 - DNA, 15 bp, Homo sapiens
aggtggaatcacact

SEQ ID NO: 847087 - DNA, 15 bp, Homo sapiens
ggtggaatcacactg

SEQ ID NO: 847088 - DNA, 15 bp, Homo sapiens
gtggaatcacactga

SEQ ID NO: 847089 - DNA, 15 bp, Homo sapiens
tggaatcacactgag

SEQ ID NO: 847090 - DNA, 15 bp, Homo sapiens
ggaatcacactgagt

SEQ ID NO: 847091 - DNA, 15 bp, Homo sapiens
gaatcacactgagtg

SEQ ID NO: 847092 - DNA, 15 bp, Homo sapiens
aatcacactgagtgg

SEQ ID NO: 847093 - DNA, 15 bp, Homo sapiens
atcacactgagtgga

SEQ ID NO: 847094 - DNA, 15 bp, Homo sapiens
tcacactgagtggag

SEQ ID NO: 847095 - DNA, 15 bp, Homo sapiens
cacactgagtggagg

SEQ ID NO: 847096 - DNA, 15 bp, Homo sapiens
acactgagtggaggt

SEQ ID NO: 847097 - DNA, 15 bp, Homo sapiens
cactgagtggaggtc

SEQ ID NO: 847098 - DNA, 15 bp, Homo sapiens
actgagtggaggtca

SEQ ID NO: 847099 - DNA, 15 bp, Homo sapiens
ctgagtggaggtcaa

SEQ ID NO: 847100 - DNA, 15 bp, Homo sapiens
tgagtggaggtcaac

SEQ ID NO: 847101 - DNA, 15 bp, Homo sapiens
gagtggaggtcaacg

SEQ ID NO: 847102 - DNA, 15 bp, Homo sapiens
agtggaggtcaacga

SEQ ID NO: 847103 - DNA, 15 bp, Homo sapiens
gtggaggtcaacgag

SEQ ID NO: 847104 - DNA, 15 bp, Homo sapiens
tggaggtcaacgagc

SEQ ID NO: 847105 - DNA, 15 bp, Homo sapiens
ggaggtcaacgagca

SEQ ID NO: 847106 - DNA, 15 bp, Homo sapiens
gaggtcaacgagcaa

SEQ ID NO: 847107 - DNA, 15 bp, Homo sapiens
aggtcaacgagcaag

SEQ ID NO: 847108 - DNA, 15 bp, Homo sapiens
ggtcaacgagcaaga

SEQ ID NO: 847109 - DNA, 15 bp, Homo sapiens
gtcaacgagcaagaa

SEQ ID NO: 847110 - DNA, 15 bp, Homo sapiens
tcaacgagcaagaat

SEQ ID NO: 847111 - DNA, 15 bp, Homo sapiens
caacgagcaagaatt

SEQ ID NO: 847112 - DNA, 15 bp, Homo sapiens
aacgagcaagaattt

SEQ ID NO: 847113 - DNA, 15 bp, Homo sapiens
acgagcaagaatttc

SEQ ID NO: 847114 - DNA, 15 bp, Homo sapiens
cgagcaagaatttct

SEQ ID NO: 847115 - DNA, 15 bp, Homo sapiens
gagcaagaatttctt

SEQ ID NO: 847116 - DNA, 15 bp, Homo sapiens
agcaagaatttcttt

SEQ ID NO: 847117 - DNA, 15 bp, Homo sapiens
gcaagaatttcttta

SEQ ID NO: 847118 - DNA, 15 bp, Homo sapiens
caagaatttctttag

SEQ ID NO: 847119 - DNA, 15 bp, Homo sapiens
aagaatttctttagc

SEQ ID NO: 847120 - DNA, 15 bp, Homo sapiens
agaatttctttagca

SEQ ID NO: 847121 - DNA, 15 bp, Homo sapiens
gaatttctttagcaa

SEQ ID NO: 847122 - DNA, 15 bp, Homo sapiens
aatttctttagcaag

SEQ ID NO: 847123 - DNA, 15 bp, Homo sapiens
atttctttagcaagg

SEQ ID NO: 847124 - DNA, 15 bp, Homo sapiens
tttctttagcaaggt

SEQ ID NO: 847125 - DNA, 15 bp, Homo sapiens
ttctttagcaaggtg

SEQ ID NO: 847126 - DNA, 15 bp, Homo sapiens
tctttagcaaggtga

SEQ ID NO: 847127 - DNA, 15 bp, Homo sapiens
ctttagcaaggtgaa

SEQ ID NO: 847128 - DNA, 15 bp, Homo sapiens
tttagcaaggtgaat

SEQ ID NO: 847129 - DNA, 15 bp, Homo sapiens
ttagcaaggtgaata

SEQ ID NO: 847130 - DNA, 15 bp, Homo sapiens
tagcaaggtgaataa

SEQ ID NO: 847131 - DNA, 15 bp, Homo sapiens
agcaaggtgaataac

SEQ ID NO: 847132 - DNA, 15 bp, Homo sapiens
gcaaggtgaataact

SEQ ID NO: 847133 - DNA, 15 bp, Homo sapiens
caaggtgaataacta

SEQ ID NO: 847134 - DNA, 15 bp, Homo sapiens
aaggtgaataactaa

SEQ ID NO: 847135 - DNA, 15 bp, Homo sapiens
aggtgaataactaat

SEQ ID NO: 847136 - DNA, 15 bp, Homo sapiens
ggtgaataactaatt

SEQ ID NO: 847137 - DNA, 15 bp, Homo sapiens
gtgaataactaatta

SEQ ID NO: 847138 - DNA, 15 bp, Homo sapiens
tgaataactaattat

SEQ ID NO: 847139 - DNA, 15 bp, Homo sapiens
gaataactaattatt

SEQ ID NO: 847140 - DNA, 15 bp, Homo sapiens
aataactaattattg

SEQ ID NO: 847141 - DNA, 15 bp, Homo sapiens
ataactaattattgg

SEQ ID NO: 847142 - DNA, 15 bp, Homo sapiens
taactaattattggt

SEQ ID NO: 847143 - DNA, 15 bp, Homo sapiens
aactaattattggtc

SEQ ID NO: 847144 - DNA, 15 bp, Homo sapiens
actaattattggtct

SEQ ID NO: 847145 - DNA, 15 bp, Homo sapiens
ctaattattggtcta

SEQ ID NO: 847146 - DNA, 15 bp, Homo sapiens
taattattggtctag

SEQ ID NO: 847147 - DNA, 15 bp, Homo sapiens
aattattggtctagc

SEQ ID NO: 847148 - DNA, 15 bp, Homo sapiens
attattggtctagca

SEQ ID NO: 847149 - DNA, 15 bp, Homo sapiens
ttattggtctagcaa

SEQ ID NO: 847150 - DNA, 15 bp, Homo sapiens
tattggtctagcaag

SEQ ID NO: 847151 - DNA, 15 bp, Homo sapiens
attggtctagcaagc

SEQ ID NO: 847152 - DNA, 15 bp, Homo sapiens
ttggtctagcaagca

SEQ ID NO: 847153 - DNA, 15 bp, Homo sapiens
tggtctagcaagcat

SEQ ID NO: 847154 - DNA, 15 bp, Homo sapiens
ggtctagcaagcatt

SEQ ID NO: 847155 - DNA, 15 bp, Homo sapiens
gtctagcaagcattt

SEQ ID NO: 847156 - DNA, 15 bp, Homo sapiens
tctagcaagcatttg

SEQ ID NO: 847157 - DNA, 15 bp, Homo sapiens
ctagcaagcatttgc

SEQ ID NO: 847158 - DNA, 15 bp, Homo sapiens
tagcaagcatttgct

SEQ ID NO: 847159 - DNA, 15 bp, Homo sapiens
agcaagcatttgctg

SEQ ID NO: 847160 - DNA, 15 bp, Homo sapiens
gcaagcatttgctgt

SEQ ID NO: 847161 - DNA, 15 bp, Homo sapiens
caagcatttgctgta

SEQ ID NO: 847162 - DNA, 15 bp, Homo sapiens
aagcatttgctgtaa

SEQ ID NO: 847163 - DNA, 15 bp, Homo sapiens
agcatttgctgtaaa

SEQ ID NO: 847164 - DNA, 15 bp, Homo sapiens
gcatttgctgtaaat

SEQ ID NO: 847165 - DNA, 15 bp, Homo sapiens
catttgctgtaaatg

SEQ ID NO: 847166 - DNA, 15 bp, Homo sapiens
atttgctgtaaatgt

SEQ ID NO: 847167 - DNA, 15 bp, Homo sapiens
tttgctgtaaatgtc

SEQ ID NO: 847168 - DNA, 15 bp, Homo sapiens
ttgctgtaaatgtca

SEQ ID NO: 847169 - DNA, 15 bp, Homo sapiens
tgctgtaaatgtcat

SEQ ID NO: 847170 - DNA, 15 bp, Homo sapiens
gctgtaaatgtcatt

SEQ ID NO: 847171 - DNA, 15 bp, Homo sapiens
ctgtaaatgtcattc

SEQ ID NO: 847172 - DNA, 15 bp, Homo sapiens
tgtaaatgtcattca

SEQ ID NO: 847173 - DNA, 15 bp, Homo sapiens
gtaaatgtcattcat

SEQ ID NO: 847174 - DNA, 15 bp, Homo sapiens
taaatgtcattcatg

SEQ ID NO: 847175 - DNA, 15 bp, Homo sapiens
aaatgtcattcatgt

SEQ ID NO: 847176 - DNA, 15 bp, Homo sapiens
aatgtcattcatgta

SEQ ID NO: 847177 - DNA, 15 bp, Homo sapiens
atgtcattcatgtaa

SEQ ID NO: 847178 - DNA, 15 bp, Homo sapiens
tgtcattcatgtaaa

SEQ ID NO: 847179 - DNA, 15 bp, Homo sapiens
gtcattcatgtaaaa

SEQ ID NO: 847180 - DNA, 15 bp, Homo sapiens
tcattcatgtaaaaa

SEQ ID NO: 847181 - DNA, 15 bp, Homo sapiens
cattcatgtaaaaaa

SEQ ID NO: 847182 - DNA, 15 bp, Homo sapiens
attcatgtaaaaaaa

SEQ ID NO: 847183 - DNA, 15 bp, Homo sapiens
ttcatgtaaaaaaat

SEQ ID NO: 847184 - DNA, 15 bp, Homo sapiens
tcatgtaaaaaaatt

SEQ ID NO: 847185 - DNA, 15 bp, Homo sapiens
catgtaaaaaaatta

SEQ ID NO: 847186 - DNA, 15 bp, Homo sapiens
atgtaaaaaaattac

SEQ ID NO: 847187 - DNA, 15 bp, Homo sapiens
tgtaaaaaaattaca

SEQ ID NO: 847188 - DNA, 15 bp, Homo sapiens
gtaaaaaaattacag

SEQ ID NO: 847189 - DNA, 15 bp, Homo sapiens
taaaaaaattacaga

SEQ ID NO: 847190 - DNA, 15 bp, Homo sapiens
aaaaaaattacagac

SEQ ID NO: 847191 - DNA, 15 bp, Homo sapiens
aaaaaattacagaca

SEQ ID NO: 847192 - DNA, 15 bp, Homo sapiens
aaaaattacagacat

SEQ ID NO: 847193 - DNA, 15 bp, Homo sapiens
aaaattacagacatt

SEQ ID NO: 847194 - DNA, 15 bp, Homo sapiens
aaattacagacattt

SEQ ID NO: 847195 - DNA, 15 bp, Homo sapiens
aattacagacatttc

SEQ ID NO: 847196 - DNA, 15 bp, Homo sapiens
attacagacatttct

SEQ ID NO: 847197 - DNA, 15 bp, Homo sapiens
ttacagacatttctc

SEQ ID NO: 847198 - DNA, 15 bp, Homo sapiens
tacagacatttctct

SEQ ID NO: 847199 - DNA, 15 bp, Homo sapiens
acagacatttctcta

SEQ ID NO: 847200 - DNA, 15 bp, Homo sapiens
cagacatttctctat

SEQ ID NO: 847201 - DNA, 15 bp, Homo sapiens
agacatttctctatt

SEQ ID NO: 847202 - DNA, 15 bp, Homo sapiens
gacatttctctattg

SEQ ID NO: 847203 - DNA, 15 bp, Homo sapiens
acatttctctattgc

SEQ ID NO: 847204 - DNA, 15 bp, Homo sapiens
catttctctattgct

SEQ ID NO: 847205 - DNA, 15 bp, Homo sapiens
atttctctattgctt

SEQ ID NO: 847206 - DNA, 15 bp, Homo sapiens
tttctctattgcttt

SEQ ID NO: 847207 - DNA, 15 bp, Homo sapiens
ttctctattgcttta

SEQ ID NO: 847208 - DNA, 15 bp, Homo sapiens
tctctattgctttat

SEQ ID NO: 847209 - DNA, 15 bp, Homo sapiens
ctctattgctttata

SEQ ID NO: 847210 - DNA, 15 bp, Homo sapiens
tctattgctttatat

SEQ ID NO: 847211 - DNA, 15 bp, Homo sapiens
ctattgctttatatt

SEQ ID NO: 847212 - DNA, 15 bp, Homo sapiens
tattgctttatattc

SEQ ID NO: 847213 - DNA, 15 bp, Homo sapiens
attgctttatattct

SEQ ID NO: 847214 - DNA, 15 bp, Homo sapiens
ttgctttatattctg

SEQ ID NO: 847215 - DNA, 15 bp, Homo sapiens
tgctttatattctgt

SEQ ID NO: 847216 - DNA, 15 bp, Homo sapiens
gctttatattctgtt

SEQ ID NO: 847217 - DNA, 15 bp, Homo sapiens
ctttatattctgttt

SEQ ID NO: 847218 - DNA, 15 bp, Homo sapiens
tttatattctgtttc

SEQ ID NO: 847219 - DNA, 15 bp, Homo sapiens
ttatattctgtttct

SEQ ID NO: 847220 - DNA, 15 bp, Homo sapiens
tatattctgtttctg

SEQ ID NO: 847221 - DNA, 15 bp, Homo sapiens
atattctgtttctgg

SEQ ID NO: 847222 - DNA, 15 bp, Homo sapiens
tattctgtttctgga

SEQ ID NO: 847223 - DNA, 15 bp, Homo sapiens
attctgtttctggaa

SEQ ID NO: 847224 - DNA, 15 bp, Homo sapiens
ttctgtttctggaat

SEQ ID NO: 847225 - DNA, 15 bp, Homo sapiens
tctgtttctggaatt

SEQ ID NO: 847226 - DNA, 15 bp, Homo sapiens
ctgtttctggaattg

SEQ ID NO: 847227 - DNA, 15 bp, Homo sapiens
tgtttctggaattga

SEQ ID NO: 847228 - DNA, 15 bp, Homo sapiens
gtttctggaattgaa

SEQ ID NO: 847229 - DNA, 15 bp, Homo sapiens
tttctggaattgaaa

SEQ ID NO: 847230 - DNA, 15 bp, Homo sapiens
ttctggaattgaaaa

SEQ ID NO: 847231 - DNA, 15 bp, Homo sapiens
tctggaattgaaaaa

SEQ ID NO: 847232 - DNA, 15 bp, Homo sapiens
ctggaattgaaaaaa

SEQ ID NO: 847233 - DNA, 15 bp, Homo sapiens
tggaattgaaaaaat

SEQ ID NO: 847234 - DNA, 15 bp, Homo sapiens
ggaattgaaaaaatc

SEQ ID NO: 847235 - DNA, 15 bp, Homo sapiens
gaattgaaaaaatcc

SEQ ID NO: 847236 - DNA, 15 bp, Homo sapiens
aattgaaaaaatcct

SEQ ID NO: 847237 - DNA, 15 bp, Homo sapiens
attgaaaaaatcctg

SEQ ID NO: 847238 - DNA, 15 bp, Homo sapiens
ttgaaaaaatcctgg

SEQ ID NO: 847239 - DNA, 15 bp, Homo sapiens
tgaaaaaatcctggg

SEQ ID NO: 847240 - DNA, 15 bp, Homo sapiens
gaaaaaatcctgggg

SEQ ID NO: 847241 - DNA, 15 bp, Homo sapiens
aaaaaatcctggggt

SEQ ID NO: 847242 - DNA, 15 bp, Homo sapiens
aaaaatcctggggtt

SEQ ID NO: 847243 - DNA, 15 bp, Homo sapiens
aaaatcctggggttt

SEQ ID NO: 847244 - DNA, 15 bp, Homo sapiens
aaatcctggggtttt

SEQ ID NO: 847245 - DNA, 15 bp, Homo sapiens
aatcctggggtttta

SEQ ID NO: 847246 - DNA, 15 bp, Homo sapiens
atcctggggttttat

SEQ ID NO: 847247 - DNA, 15 bp, Homo sapiens
tcctggggttttatg

SEQ ID NO: 847248 - DNA, 15 bp, Homo sapiens
cctggggttttatgg

SEQ ID NO: 847249 - DNA, 15 bp, Homo sapiens
ctggggttttatggc

SEQ ID NO: 847250 - DNA, 15 bp, Homo sapiens
tggggttttatggct

SEQ ID NO: 847251 - DNA, 15 bp, Homo sapiens
ggggttttatggcta

SEQ ID NO: 847252 - DNA, 15 bp, Homo sapiens
gggttttatggctag

SEQ ID NO: 847253 - DNA, 15 bp, Homo sapiens
ggttttatggctagt

SEQ ID NO: 847254 - DNA, 15 bp, Homo sapiens
gttttatggctagtg

SEQ ID NO: 847255 - DNA, 15 bp, Homo sapiens
ttttatggctagtgg

SEQ ID NO: 847256 - DNA, 15 bp, Homo sapiens
tttatggctagtggg

SEQ ID NO: 847257 - DNA, 15 bp, Homo sapiens
ttatggctagtgggt

SEQ ID NO: 847258 - DNA, 15 bp, Homo sapiens
tatggctagtgggtt

SEQ ID NO: 847259 - DNA, 15 bp, Homo sapiens
atggctagtgggtta

SEQ ID NO: 847260 - DNA, 15 bp, Homo sapiens
tggctagtgggttaa

SEQ ID NO: 847261 - DNA, 15 bp, Homo sapiens
ggctagtgggttaag

SEQ ID NO: 847262 - DNA, 15 bp, Homo sapiens
gctagtgggttaaga

SEQ ID NO: 847263 - DNA, 15 bp, Homo sapiens
ctagtgggttaagaa

SEQ ID NO: 847264 - DNA, 15 bp, Homo sapiens
tagtgggttaagaat

SEQ ID NO: 847265 - DNA, 15 bp, Homo sapiens
agtgggttaagaatc

SEQ ID NO: 847266 - DNA, 15 bp, Homo sapiens
gtgggttaagaatca

SEQ ID NO: 847267 - DNA, 15 bp, Homo sapiens
tgggttaagaatcac

SEQ ID NO: 847268 - DNA, 15 bp, Homo sapiens
gggttaagaatcaca

SEQ ID NO: 847269 - DNA, 15 bp, Homo sapiens
ggttaagaatcacat

SEQ ID NO: 847270 - DNA, 15 bp, Homo sapiens
gttaagaatcacatt

SEQ ID NO: 847271 - DNA, 15 bp, Homo sapiens
ttaagaatcacattt

SEQ ID NO: 847272 - DNA, 15 bp, Homo sapiens
taagaatcacattta

SEQ ID NO: 847273 - DNA, 15 bp, Homo sapiens
aagaatcacatttaa

SEQ ID NO: 847274 - DNA, 15 bp, Homo sapiens
agaatcacatttaag

SEQ ID NO: 847275 - DNA, 15 bp, Homo sapiens
gaatcacatttaaga

SEQ ID NO: 847276 - DNA, 15 bp, Homo sapiens
aatcacatttaagaa

SEQ ID NO: 847277 - DNA, 15 bp, Homo sapiens
atcacatttaagaac

SEQ ID NO: 847278 - DNA, 15 bp, Homo sapiens
tcacatttaagaact

SEQ ID NO: 847279 - DNA, 15 bp, Homo sapiens
cacatttaagaacta

SEQ ID NO: 847280 - DNA, 15 bp, Homo sapiens
acatttaagaactat

SEQ ID NO: 847281 - DNA, 15 bp, Homo sapiens
catttaagaactata

SEQ ID NO: 847282 - DNA, 15 bp, Homo sapiens
atttaagaactataa

SEQ ID NO: 847283 - DNA, 15 bp, Homo sapiens
tttaagaactataaa

SEQ ID NO: 847284 - DNA, 15 bp, Homo sapiens
ttaagaactataaat

SEQ ID NO: 847285 - DNA, 15 bp, Homo sapiens
taagaactataaata

SEQ ID NO: 847286 - DNA, 15 bp, Homo sapiens
aagaactataaataa

SEQ ID NO: 847287 - DNA, 15 bp, Homo sapiens
agaactataaataat

SEQ ID NO: 847288 - DNA, 15 bp, Homo sapiens
gaactataaataatg

SEQ ID NO: 847289 - DNA, 15 bp, Homo sapiens
aactataaataatgg

SEQ ID NO: 847290 - DNA, 15 bp, Homo sapiens
actataaataatggt

SEQ ID NO: 847291 - DNA, 15 bp, Homo sapiens
ctataaataatggta

SEQ ID NO: 847292 - DNA, 15 bp, Homo sapiens
tataaataatggtat

SEQ ID NO: 847293 - DNA, 15 bp, Homo sapiens
ataaataatggtata

SEQ ID NO: 847294 - DNA, 15 bp, Homo sapiens
taaataatggtatag

SEQ ID NO: 847295 - DNA, 15 bp, Homo sapiens
aaataatggtatagt

SEQ ID NO: 847296 - DNA, 15 bp, Homo sapiens
aataatggtatagta

SEQ ID NO: 847297 - DNA, 15 bp, Homo sapiens
ataatggtatagtat

SEQ ID NO: 847298 - DNA, 15 bp, Homo sapiens
taatggtatagtatc

SEQ ID NO: 847299 - DNA, 15 bp, Homo sapiens
aatggtatagtatcc

SEQ ID NO: 847300 - DNA, 15 bp, Homo sapiens
atggtatagtatcca

SEQ ID NO: 847301 - DNA, 15 bp, Homo sapiens
tggtatagtatccag

SEQ ID NO: 847302 - DNA, 15 bp, Homo sapiens
ggtatagtatccaga

SEQ ID NO: 847303 - DNA, 15 bp, Homo sapiens
gtatagtatccagat

SEQ ID NO: 847304 - DNA, 15 bp, Homo sapiens
tatagtatccagatt

SEQ ID NO: 847305 - DNA, 15 bp, Homo sapiens
atagtatccagattt

SEQ ID NO: 847306 - DNA, 15 bp, Homo sapiens
tagtatccagatttg

SEQ ID NO: 847307 - DNA, 15 bp, Homo sapiens
agtatccagatttgg

SEQ ID NO: 847308 - DNA, 15 bp, Homo sapiens
gtatccagatttggt

SEQ ID NO: 847309 - DNA, 15 bp, Homo sapiens
tatccagatttggta

SEQ ID NO: 847310 - DNA, 15 bp, Homo sapiens
atccagatttggtag

SEQ ID NO: 847311 - DNA, 15 bp, Homo sapiens
tccagatttggtaga

SEQ ID NO: 847312 - DNA, 15 bp, Homo sapiens
ccagatttggtagag

SEQ ID NO: 847313 - DNA, 15 bp, Homo sapiens
cagatttggtagaga

SEQ ID NO: 847314 - DNA, 15 bp, Homo sapiens
agatttggtagagat

SEQ ID NO: 847315 - DNA, 15 bp, Homo sapiens
gatttggtagagatt

SEQ ID NO: 847316 - DNA, 15 bp, Homo sapiens
atttggtagagatta

SEQ ID NO: 847317 - DNA, 15 bp, Homo sapiens
tttggtagagattat

SEQ ID NO: 847318 - DNA, 15 bp, Homo sapiens
ttggtagagattatg

SEQ ID NO: 847319 - DNA, 15 bp, Homo sapiens
tggtagagattatgg

SEQ ID NO: 847320 - DNA, 15 bp, Homo sapiens
ggtagagattatggt

SEQ ID NO: 847321 - DNA, 15 bp, Homo sapiens
gtagagattatggtt

SEQ ID NO: 847322 - DNA, 15 bp, Homo sapiens
tagagattatggtta

SEQ ID NO: 847323 - DNA, 15 bp, Homo sapiens
agagattatggttac

SEQ ID NO: 847324 - DNA, 15 bp, Homo sapiens
gagattatggttact

SEQ ID NO: 847325 - DNA, 15 bp, Homo sapiens
agattatggttactc

SEQ ID NO: 847326 - DNA, 15 bp, Homo sapiens
gattatggttactca

SEQ ID NO: 847327 - DNA, 15 bp, Homo sapiens
attatggttactcag

SEQ ID NO: 847328 - DNA, 15 bp, Homo sapiens
ttatggttactcaga

SEQ ID NO: 847329 - DNA, 15 bp, Homo sapiens
tatggttactcagaa

SEQ ID NO: 847330 - DNA, 15 bp, Homo sapiens
atggttactcagaat

SEQ ID NO: 847331 - DNA, 15 bp, Homo sapiens
tggttactcagaatc

SEQ ID NO: 847332 - DNA, 15 bp, Homo sapiens
ggttactcagaatct

SEQ ID NO: 847333 - DNA, 15 bp, Homo sapiens
gttactcagaatctg

SEQ ID NO: 847334 - DNA, 15 bp, Homo sapiens
ttactcagaatctgt

SEQ ID NO: 847335 - DNA, 15 bp, Homo sapiens
tactcagaatctgtg

SEQ ID NO: 847336 - DNA, 15 bp, Homo sapiens
actcagaatctgtgc

SEQ ID NO: 847337 - DNA, 15 bp, Homo sapiens
ctcagaatctgtgcc

SEQ ID NO: 847338 - DNA, 15 bp, Homo sapiens
tcagaatctgtgccc

SEQ ID NO: 847339 - DNA, 15 bp, Homo sapiens
cagaatctgtgcccg

SEQ ID NO: 847340 - DNA, 15 bp, Homo sapiens
agaatctgtgcccgt

SEQ ID NO: 847341 - DNA, 15 bp, Homo sapiens
gaatctgtgcccgta

SEQ ID NO: 847342 - DNA, 15 bp, Homo sapiens
aatctgtgcccgtat

SEQ ID NO: 847343 - DNA, 15 bp, Homo sapiens
atctgtgcccgtatc

SEQ ID NO: 847344 - DNA, 15 bp, Homo sapiens
tctgtgcccgtatct

SEQ ID NO: 847345 - DNA, 15 bp, Homo sapiens
ctgtgcccgtatctt

SEQ ID NO: 847346 - DNA, 15 bp, Homo sapiens
tgtgcccgtatcttg

SEQ ID NO: 847347 - DNA, 15 bp, Homo sapiens
gtgcccgtatcttgg

SEQ ID NO: 847348 - DNA, 15 bp, Homo sapiens
tgcccgtatcttggt

SEQ ID NO: 847349 - DNA, 15 bp, Homo sapiens
gcccgtatcttggtg

SEQ ID NO: 847350 - DNA, 15 bp, Homo sapiens
cccgtatcttggtgt

SEQ ID NO: 847351 - DNA, 15 bp, Homo sapiens
ccgtatcttggtgtc

SEQ ID NO: 847352 - DNA, 15 bp, Homo sapiens
cgtatcttggtgtca

SEQ ID NO: 847353 - DNA, 15 bp, Homo sapiens
gtatcttggtgtcag

SEQ ID NO: 847354 - DNA, 15 bp, Homo sapiens
tatcttggtgtcagt

SEQ ID NO: 847355 - DNA, 15 bp, Homo sapiens
atcttggtgtcagtg

SEQ ID NO: 847356 - DNA, 15 bp, Homo sapiens
tcttggtgtcagtgt

SEQ ID NO: 847357 - DNA, 15 bp, Homo sapiens
cttggtgtcagtgta

SEQ ID NO: 847358 - DNA, 15 bp, Homo sapiens
ttggtgtcagtgtat

SEQ ID NO: 847359 - DNA, 15 bp, Homo sapiens
tggtgtcagtgtatt

SEQ ID NO: 847360 - DNA, 15 bp, Homo sapiens
ggtgtcagtgtattt

SEQ ID NO: 847361 - DNA, 15 bp, Homo sapiens
gtgtcagtgtatttg

SEQ ID NO: 847362 - DNA, 15 bp, Homo sapiens
tgtcagtgtatttgt

SEQ ID NO: 847363 - DNA, 15 bp, Homo sapiens
gtcagtgtatttgtt

SEQ ID NO: 847364 - DNA, 15 bp, Homo sapiens
tcagtgtatttgttt

SEQ ID NO: 847365 - DNA, 15 bp, Homo sapiens
cagtgtatttgtttg

SEQ ID NO: 847366 - DNA, 15 bp, Homo sapiens
agtgtatttgtttgc

SEQ ID NO: 847367 - DNA, 15 bp, Homo sapiens
gtgtatttgtttgcc

SEQ ID NO: 847368 - DNA, 15 bp, Homo sapiens
tgtatttgtttgcct

SEQ ID NO: 847369 - DNA, 15 bp, Homo sapiens
gtatttgtttgcctc

SEQ ID NO: 847370 - DNA, 15 bp, Homo sapiens
tatttgtttgcctca

SEQ ID NO: 847371 - DNA, 15 bp, Homo sapiens
atttgtttgcctcat

SEQ ID NO: 847372 - DNA, 15 bp, Homo sapiens
tttgtttgcctcata

SEQ ID NO: 847373 - DNA, 15 bp, Homo sapiens
ttgtttgcctcatag

SEQ ID NO: 847374 - DNA, 15 bp, Homo sapiens
tgtttgcctcatagt

SEQ ID NO: 847375 - DNA, 15 bp, Homo sapiens
gtttgcctcatagta

SEQ ID NO: 847376 - DNA, 15 bp, Homo sapiens
tttgcctcatagtat

SEQ ID NO: 847377 - DNA, 15 bp, Homo sapiens
ttgcctcatagtata

SEQ ID NO: 847378 - DNA, 15 bp, Homo sapiens
tgcctcatagtatag

SEQ ID NO: 847379 - DNA, 15 bp, Homo sapiens
gcctcatagtatagt

SEQ ID NO: 847380 - DNA, 15 bp, Homo sapiens
cctcatagtatagtt

SEQ ID NO: 847381 - DNA, 15 bp, Homo sapiens
ctcatagtatagttt

SEQ ID NO: 847382 - DNA, 15 bp, Homo sapiens
tcatagtatagttta

SEQ ID NO: 847383 - DNA, 15 bp, Homo sapiens
catagtatagtttac

SEQ ID NO: 847384 - DNA, 15 bp, Homo sapiens
atagtatagtttact

SEQ ID NO: 847385 - DNA, 15 bp, Homo sapiens
tagtatagtttacta

SEQ ID NO: 847386 - DNA, 15 bp, Homo sapiens
agtatagtttactac

SEQ ID NO: 847387 - DNA, 15 bp, Homo sapiens
gtatagtttactaca

SEQ ID NO: 847388 - DNA, 15 bp, Homo sapiens
tatagtttactacaa

SEQ ID NO: 847389 - DNA, 15 bp, Homo sapiens
atagtttactacaaa

SEQ ID NO: 847390 - DNA, 15 bp, Homo sapiens
tagtttactacaaat

SEQ ID NO: 847391 - DNA, 15 bp, Homo sapiens
agtttactacaaatg

SEQ ID NO: 847392 - DNA, 15 bp, Homo sapiens
gtttactacaaatgg

SEQ ID NO: 847393 - DNA, 15 bp, Homo sapiens
tttactacaaatgga

SEQ ID NO: 847394 - DNA, 15 bp, Homo sapiens
ttactacaaatggaa

SEQ ID NO: 847395 - DNA, 15 bp, Homo sapiens
tactacaaatggaaa

SEQ ID NO: 847396 - DNA, 15 bp, Homo sapiens
actacaaatggaaaa

SEQ ID NO: 847397 - DNA, 15 bp, Homo sapiens
ctacaaatggaaaac

SEQ ID NO: 847398 - DNA, 15 bp, Homo sapiens
tacaaatggaaaact

SEQ ID NO: 847399 - DNA, 15 bp, Homo sapiens
acaaatggaaaactc

SEQ ID NO: 847400 - DNA, 15 bp, Homo sapiens
caaatggaaaactct

SEQ ID NO: 847401 - DNA, 15 bp, Homo sapiens
aaatggaaaactcta

SEQ ID NO: 847402 - DNA, 15 bp, Homo sapiens
aatggaaaactctag

SEQ ID NO: 847403 - DNA, 15 bp, Homo sapiens
atggaaaactctagg

SEQ ID NO: 847404 - DNA, 15 bp, Homo sapiens
tggaaaactctagga

SEQ ID NO: 847405 - DNA, 15 bp, Homo sapiens
ggaaaactctaggat

SEQ ID NO: 847406 - DNA, 15 bp, Homo sapiens
gaaaactctaggatt

SEQ ID NO: 847407 - DNA, 15 bp, Homo sapiens
aaaactctaggattc

SEQ ID NO: 847408 - DNA, 15 bp, Homo sapiens
aaactctaggattct

SEQ ID NO: 847409 - DNA, 15 bp, Homo sapiens
aactctaggattctg

SEQ ID NO: 847410 - DNA, 15 bp, Homo sapiens
actctaggattctgc

SEQ ID NO: 847411 - DNA, 15 bp, Homo sapiens
ctctaggattctgca

SEQ ID NO: 847412 - DNA, 15 bp, Homo sapiens
tctaggattctgcat

SEQ ID NO: 847413 - DNA, 15 bp, Homo sapiens
ctaggattctgcata

SEQ ID NO: 847414 - DNA, 15 bp, Homo sapiens
taggattctgcataa

SEQ ID NO: 847415 - DNA, 15 bp, Homo sapiens
aggattctgcataat

SEQ ID NO: 847416 - DNA, 15 bp, Homo sapiens
ggattctgcataata

SEQ ID NO: 847417 - DNA, 15 bp, Homo sapiens
gattctgcataatac

SEQ ID NO: 847418 - DNA, 15 bp, Homo sapiens
attctgcataatact

SEQ ID NO: 847419 - DNA, 15 bp, Homo sapiens
ttctgcataatactg

SEQ ID NO: 847420 - DNA, 15 bp, Homo sapiens
tctgcataatactgg

SEQ ID NO: 847421 - DNA, 15 bp, Homo sapiens
ctgcataatactgga

SEQ ID NO: 847422 - DNA, 15 bp, Homo sapiens
tgcataatactggac

SEQ ID NO: 847423 - DNA, 15 bp, Homo sapiens
gcataatactggaca

SEQ ID NO: 847424 - DNA, 15 bp, Homo sapiens
cataatactggacag

SEQ ID NO: 847425 - DNA, 15 bp, Homo sapiens
ataatactggacaga

SEQ ID NO: 847426 - DNA, 15 bp, Homo sapiens
taatactggacagag

SEQ ID NO: 847427 - DNA, 15 bp, Homo sapiens
aatactggacagaga

SEQ ID NO: 847428 - DNA, 15 bp, Homo sapiens
atactggacagagaa

SEQ ID NO: 847429 - DNA, 15 bp, Homo sapiens
tactggacagagaag

SEQ ID NO: 847430 - DNA, 15 bp, Homo sapiens
actggacagagaaga

SEQ ID NO: 847431 - DNA, 15 bp, Homo sapiens
ctggacagagaagat

SEQ ID NO: 847432 - DNA, 15 bp, Homo sapiens
tggacagagaagatg

SEQ ID NO: 847433 - DNA, 15 bp, Homo sapiens
ggacagagaagatgt

SEQ ID NO: 847434 - DNA, 15 bp, Homo sapiens
gacagagaagatgta

SEQ ID NO: 847435 - DNA, 15 bp, Homo sapiens
acagagaagatgtaa

SEQ ID NO: 847436 - DNA, 15 bp, Homo sapiens
cagagaagatgtaaa

SEQ ID NO: 847437 - DNA, 15 bp, Homo sapiens
agagaagatgtaaat

SEQ ID NO: 847438 - DNA, 15 bp, Homo sapiens
gagaagatgtaaata

SEQ ID NO: 847439 - DNA, 15 bp, Homo sapiens
agaagatgtaaatat

SEQ ID NO: 847440 - DNA, 15 bp, Homo sapiens
gaagatgtaaatatc

SEQ ID NO: 847441 - DNA, 15 bp, Homo sapiens
aagatgtaaatatct

SEQ ID NO: 847442 - DNA, 15 bp, Homo sapiens
agatgtaaatatctg

SEQ ID NO: 847443 - DNA, 15 bp, Homo sapiens
gatgtaaatatctgt

SEQ ID NO: 847444 - DNA, 15 bp, Homo sapiens
atgtaaatatctgtt

SEQ ID NO: 847445 - DNA, 15 bp, Homo sapiens
tgtaaatatctgtta

SEQ ID NO: 847446 - DNA, 15 bp, Homo sapiens
gtaaatatctgttag

SEQ ID NO: 847447 - DNA, 15 bp, Homo sapiens
taaatatctgttagt

SEQ ID NO: 847448 - DNA, 15 bp, Homo sapiens
aaatatctgttagtt

SEQ ID NO: 847449 - DNA, 15 bp, Homo sapiens
aatatctgttagttc

SEQ ID NO: 847450 - DNA, 15 bp, Homo sapiens
atatctgttagttcc

SEQ ID NO: 847451 - DNA, 15 bp, Homo sapiens
tatctgttagttcca

SEQ ID NO: 847452 - DNA, 15 bp, Homo sapiens
atctgttagttccat

SEQ ID NO: 847453 - DNA, 15 bp, Homo sapiens
tctgttagttccatc

SEQ ID NO: 847454 - DNA, 15 bp, Homo sapiens
ctgttagttccatca

SEQ ID NO: 847455 - DNA, 15 bp, Homo sapiens
tgttagttccatcat

SEQ ID NO: 847456 - DNA, 15 bp, Homo sapiens
gttagttccatcata

SEQ ID NO: 847457 - DNA, 15 bp, Homo sapiens
ttagttccatcatag

SEQ ID NO: 847458 - DNA, 15 bp, Homo sapiens
tagttccatcataga

SEQ ID NO: 847459 - DNA, 15 bp, Homo sapiens
agttccatcatagac

SEQ ID NO: 847460 - DNA, 15 bp, Homo sapiens
gttccatcatagacc

SEQ ID NO: 847461 - DNA, 15 bp, Homo sapiens
ttccatcatagaccc

SEQ ID NO: 847462 - DNA, 15 bp, Homo sapiens
tccatcatagaccct

SEQ ID NO: 847463 - DNA, 15 bp, Homo sapiens
ccatcatagaccctg

SEQ ID NO: 847464 - DNA, 15 bp, Homo sapiens
catcatagaccctgc

SEQ ID NO: 847465 - DNA, 15 bp, Homo sapiens
atcatagaccctgcc

SEQ ID NO: 847466 - DNA, 15 bp, Homo sapiens
tcatagaccctgcca

SEQ ID NO: 847467 - DNA, 15 bp, Homo sapiens
catagaccctgccac

SEQ ID NO: 847468 - DNA, 15 bp, Homo sapiens
atagaccctgccact

SEQ ID NO: 847469 - DNA, 15 bp, Homo sapiens
tagaccctgccactc

SEQ ID NO: 847470 - DNA, 15 bp, Homo sapiens
agaccctgccactcc

SEQ ID NO: 847471 - DNA, 15 bp, Homo sapiens
gaccctgccactcca

SEQ ID NO: 847472 - DNA, 15 bp, Homo sapiens
accctgccactccaa

SEQ ID NO: 847473 - DNA, 15 bp, Homo sapiens
ccctgccactccaat

SEQ ID NO: 847474 - DNA, 15 bp, Homo sapiens
cctgccactccaatg

SEQ ID NO: 847475 - DNA, 15 bp, Homo sapiens
ctgccactccaatgt

SEQ ID NO: 847476 - DNA, 15 bp, Homo sapiens
tgccactccaatgta

SEQ ID NO: 847477 - DNA, 15 bp, Homo sapiens
gccactccaatgtac

SEQ ID NO: 847478 - DNA, 15 bp, Homo sapiens
ccactccaatgtaca

SEQ ID NO: 847479 - DNA, 15 bp, Homo sapiens
cactccaatgtacac

SEQ ID NO: 847480 - DNA, 15 bp, Homo sapiens
actccaatgtacaca

SEQ ID NO: 847481 - DNA, 15 bp, Homo sapiens
ctccaatgtacacac

SEQ ID NO: 847482 - DNA, 15 bp, Homo sapiens
tccaatgtacacacc

SEQ ID NO: 847483 - DNA, 15 bp, Homo sapiens
ccaatgtacacacca

SEQ ID NO: 847484 - DNA, 15 bp, Homo sapiens
caatgtacacaccag

SEQ ID NO: 847485 - DNA, 15 bp, Homo sapiens
aatgtacacaccagc

SEQ ID NO: 847486 - DNA, 15 bp, Homo sapiens
atgtacacaccagct

SEQ ID NO: 847487 - DNA, 15 bp, Homo sapiens
tgtacacaccagctt

SEQ ID NO: 847488 - DNA, 15 bp, Homo sapiens
gtacacaccagcttt

SEQ ID NO: 847489 - DNA, 15 bp, Homo sapiens
tacacaccagcttta

SEQ ID NO: 847490 - DNA, 15 bp, Homo sapiens
acacaccagctttag

SEQ ID NO: 847491 - DNA, 15 bp, Homo sapiens
cacaccagctttagg

SEQ ID NO: 847492 - DNA, 15 bp, Homo sapiens
acaccagctttaggc

SEQ ID NO: 847493 - DNA, 15 bp, Homo sapiens
caccagctttaggct

SEQ ID NO: 847494 - DNA, 15 bp, Homo sapiens
accagctttaggctt

SEQ ID NO: 847495 - DNA, 15 bp, Homo sapiens
ccagctttaggcttc

SEQ ID NO: 847496 - DNA, 15 bp, Homo sapiens
cagctttaggcttct

SEQ ID NO: 847497 - DNA, 15 bp, Homo sapiens
agctttaggcttctt

SEQ ID NO: 847498 - DNA, 15 bp, Homo sapiens
gctttaggcttcttg

SEQ ID NO: 847499 - DNA, 15 bp, Homo sapiens
ctttaggcttcttgg

SEQ ID NO: 847500 - DNA, 15 bp, Homo sapiens
tttaggcttcttggt

SEQ ID NO: 847501 - DNA, 15 bp, Homo sapiens
ttaggcttcttggta

SEQ ID NO: 847502 - DNA, 15 bp, Homo sapiens
taggcttcttggtat

SEQ ID NO: 847503 - DNA, 15 bp, Homo sapiens
aggcttcttggtata

SEQ ID NO: 847504 - DNA, 15 bp, Homo sapiens
ggcttcttggtatag

SEQ ID NO: 847505 - DNA, 15 bp, Homo sapiens
gcttcttggtataga

SEQ ID NO: 847506 - DNA, 15 bp, Homo sapiens
cttcttggtatagat

SEQ ID NO: 847507 - DNA, 15 bp, Homo sapiens
ttcttggtatagata

SEQ ID NO: 847508 - DNA, 15 bp, Homo sapiens
tcttggtatagataa

SEQ ID NO: 847509 - DNA, 15 bp, Homo sapiens
cttggtatagataaa

SEQ ID NO: 847510 - DNA, 15 bp, Homo sapiens
ttggtatagataaac

SEQ ID NO: 847511 - DNA, 15 bp, Homo sapiens
tggtatagataaaca

SEQ ID NO: 847512 - DNA, 15 bp, Homo sapiens
ggtatagataaacat

SEQ ID NO: 847513 - DNA, 15 bp, Homo sapiens
gtatagataaacata

SEQ ID NO: 847514 - DNA, 15 bp, Homo sapiens
tatagataaacatac

SEQ ID NO: 847515 - DNA, 15 bp, Homo sapiens
atagataaacataca

SEQ ID NO: 847516 - DNA, 15 bp, Homo sapiens
tagataaacatacat

SEQ ID NO: 847517 - DNA, 15 bp, Homo sapiens
agataaacatacatt

SEQ ID NO: 847518 - DNA, 15 bp, Homo sapiens
gataaacatacattt

SEQ ID NO: 847519 - DNA, 15 bp, Homo sapiens
ataaacatacatttt

SEQ ID NO: 847520 - DNA, 15 bp, Homo sapiens
taaacatacattttc

SEQ ID NO: 847521 - DNA, 15 bp, Homo sapiens
aaacatacattttca

SEQ ID NO: 847522 - DNA, 15 bp, Homo sapiens
aacatacattttcaa

SEQ ID NO: 847523 - DNA, 15 bp, Homo sapiens
acatacattttcaaa

SEQ ID NO: 847524 - DNA, 15 bp, Homo sapiens
catacattttcaaaa

SEQ ID NO: 847525 - DNA, 15 bp, Homo sapiens
atacattttcaaaat

SEQ ID NO: 847526 - DNA, 15 bp, Homo sapiens
tacattttcaaaatt

SEQ ID NO: 847527 - DNA, 15 bp, Homo sapiens
acattttcaaaattt

SEQ ID NO: 847528 - DNA, 15 bp, Homo sapiens
cattttcaaaatttt

SEQ ID NO: 847529 - DNA, 15 bp, Homo sapiens
attttcaaaattttt

SEQ ID NO: 847530 - DNA, 15 bp, Homo sapiens
ttttcaaaatttttc

SEQ ID NO: 847531 - DNA, 15 bp, Homo sapiens
tttcaaaatttttca

SEQ ID NO: 847532 - DNA, 15 bp, Homo sapiens
ttcaaaatttttcat

SEQ ID NO: 847533 - DNA, 15 bp, Homo sapiens
tcaaaatttttcatc

SEQ ID NO: 847534 - DNA, 15 bp, Homo sapiens
caaaatttttcatca

SEQ ID NO: 847535 - DNA, 15 bp, Homo sapiens
aaaatttttcatcat

SEQ ID NO: 847536 - DNA, 15 bp, Homo sapiens
aaatttttcatcata

SEQ ID NO: 847537 - DNA, 15 bp, Homo sapiens
aatttttcatcataa

SEQ ID NO: 847538 - DNA, 15 bp, Homo sapiens
tttcatcataatttt

SEQ ID NO: 847539 - DNA, 15 bp, Homo sapiens
ttcatcataattttc

SEQ ID NO: 847540 - DNA, 15 bp, Homo sapiens
tcatcataattttca

SEQ ID NO: 847541 - DNA, 15 bp, Homo sapiens
catcataattttcat

SEQ ID NO: 847542 - DNA, 15 bp, Homo sapiens
atcataattttcata

SEQ ID NO: 847543 - DNA, 15 bp, Homo sapiens
tcataattttcataa

SEQ ID NO: 847544 - DNA, 15 bp, Homo sapiens
cataattttcataac

SEQ ID NO: 847545 - DNA, 15 bp, Homo sapiens
ataattttcataaca

SEQ ID NO: 847546 - DNA, 15 bp, Homo sapiens
taattttcataacaa

SEQ ID NO: 847547 - DNA, 15 bp, Homo sapiens
aattttcataacaaa

SEQ ID NO: 847548 - DNA, 15 bp, Homo sapiens
attttcataacaaaa

SEQ ID NO: 847549 - DNA, 15 bp, Homo sapiens
ttttcataacaaaat

SEQ ID NO: 847550 - DNA, 15 bp, Homo sapiens
tttcataacaaaata

SEQ ID NO: 847551 - DNA, 15 bp, Homo sapiens
ttcataacaaaatag

SEQ ID NO: 847552 - DNA, 15 bp, Homo sapiens
tcataacaaaatagg

SEQ ID NO: 847553 - DNA, 15 bp, Homo sapiens
cataacaaaatagga

SEQ ID NO: 847554 - DNA, 15 bp, Homo sapiens
ataacaaaataggaa

SEQ ID NO: 847555 - DNA, 15 bp, Homo sapiens
taacaaaataggaag

SEQ ID NO: 847556 - DNA, 15 bp, Homo sapiens
aacaaaataggaagg

SEQ ID NO: 847557 - DNA, 15 bp, Homo sapiens
acaaaataggaaggc

SEQ ID NO: 847558 - DNA, 15 bp, Homo sapiens
caaaataggaaggca

SEQ ID NO: 847559 - DNA, 15 bp, Homo sapiens
aaaataggaaggcaa

SEQ ID NO: 847560 - DNA, 15 bp, Homo sapiens
aaataggaaggcaaa

SEQ ID NO: 847561 - DNA, 15 bp, Homo sapiens
aataggaaggcaaat

SEQ ID NO: 847562 - DNA, 15 bp, Homo sapiens
ataggaaggcaaatg

SEQ ID NO: 847563 - DNA, 15 bp, Homo sapiens
taggaaggcaaatga

SEQ ID NO: 847564 - DNA, 15 bp, Homo sapiens
aggaaggcaaatgat

SEQ ID NO: 847565 - DNA, 15 bp, Homo sapiens
ggaaggcaaatgatg

SEQ ID NO: 847566 - DNA, 15 bp, Homo sapiens
gaaggcaaatgatgt

SEQ ID NO: 847567 - DNA, 15 bp, Homo sapiens
aaggcaaatgatgtc

SEQ ID NO: 847568 - DNA, 15 bp, Homo sapiens
aggcaaatgatgtca

SEQ ID NO: 847569 - DNA, 15 bp, Homo sapiens
ggcaaatgatgtcac

SEQ ID NO: 847570 - DNA, 15 bp, Homo sapiens
gcaaatgatgtcact

SEQ ID NO: 847571 - DNA, 15 bp, Homo sapiens
caaatgatgtcactt

SEQ ID NO: 847572 - DNA, 15 bp, Homo sapiens
aaatgatgtcacttg

SEQ ID NO: 847573 - DNA, 15 bp, Homo sapiens
aatgatgtcacttgg

SEQ ID NO: 847574 - DNA, 15 bp, Homo sapiens
atgatgtcacttggc

SEQ ID NO: 847575 - DNA, 15 bp, Homo sapiens
tgatgtcacttggct

SEQ ID NO: 847576 - DNA, 15 bp, Homo sapiens
gatgtcacttggctt

SEQ ID NO: 847577 - DNA, 15 bp, Homo sapiens
atgtcacttggctta

SEQ ID NO: 847578 - DNA, 15 bp, Homo sapiens
tgtcacttggcttaa

SEQ ID NO: 847579 - DNA, 15 bp, Homo sapiens
gtcacttggcttaaa

SEQ ID NO: 847580 - DNA, 15 bp, Homo sapiens
tcacttggcttaaaa

SEQ ID NO: 847581 - DNA, 15 bp, Homo sapiens
cacttggcttaaaat

SEQ ID NO: 847582 - DNA, 15 bp, Homo sapiens
acttggcttaaaatc

SEQ ID NO: 847583 - DNA, 15 bp, Homo sapiens
cttggcttaaaatct

SEQ ID NO: 847584 - DNA, 15 bp, Homo sapiens
ttggcttaaaatcta

SEQ ID NO: 847585 - DNA, 15 bp, Homo sapiens
tggcttaaaatctat

SEQ ID NO: 847586 - DNA, 15 bp, Homo sapiens
ggcttaaaatctata

SEQ ID NO: 847587 - DNA, 15 bp, Homo sapiens
gcttaaaatctataa

SEQ ID NO: 847588 - DNA, 15 bp, Homo sapiens
cttaaaatctataat

SEQ ID NO: 847589 - DNA, 15 bp, Homo sapiens
ttaaaatctataata

SEQ ID NO: 847590 - DNA, 15 bp, Homo sapiens
taaaatctataatat

SEQ ID NO: 847591 - DNA, 15 bp, Homo sapiens
aaaatctataatatt

SEQ ID NO: 847592 - DNA, 15 bp, Homo sapiens
aaatctataatattt

SEQ ID NO: 847593 - DNA, 15 bp, Homo sapiens
aatctataatattta

SEQ ID NO: 847594 - DNA, 15 bp, Homo sapiens
atctataatatttaa

SEQ ID NO: 847595 - DNA, 15 bp, Homo sapiens
tctataatatttaaa

SEQ ID NO: 847596 - DNA, 15 bp, Homo sapiens
ctataatatttaaaa

SEQ ID NO: 847597 - DNA, 15 bp, Homo sapiens
tataatatttaaaat

SEQ ID NO: 847598 - DNA, 15 bp, Homo sapiens
ataatatttaaaata

SEQ ID NO: 847599 - DNA, 15 bp, Homo sapiens
taatatttaaaataa

SEQ ID NO: 847600 - DNA, 15 bp, Homo sapiens
aatatttaaaataaa

SEQ ID NO: 847601 - DNA, 15 bp, Homo sapiens
atatttaaaataaac

SEQ ID NO: 847602 - DNA, 15 bp, Homo sapiens
tatttaaaataaaca

SEQ ID NO: 847603 - DNA, 15 bp, Homo sapiens
atttaaaataaacag

SEQ ID NO: 847604 - DNA, 15 bp, Homo sapiens
tttaaaataaacagg

SEQ ID NO: 847605 - DNA, 15 bp, Homo sapiens
ttaaaataaacagga

SEQ ID NO: 847606 - DNA, 15 bp, Homo sapiens
taaaataaacaggac

SEQ ID NO: 847607 - DNA, 15 bp, Homo sapiens
aaaataaacaggaca

SEQ ID NO: 847608 - DNA, 15 bp, Homo sapiens
aaataaacaggacaa

SEQ ID NO: 847609 - DNA, 15 bp, Homo sapiens
aataaacaggacaaa

SEQ ID NO: 847610 - DNA, 15 bp, Homo sapiens
ataaacaggacaaat

SEQ ID NO: 847611 - DNA, 15 bp, Homo sapiens
taaacaggacaaatg

SEQ ID NO: 847612 - DNA, 15 bp, Homo sapiens
aaacaggacaaatgc

SEQ ID NO: 847613 - DNA, 15 bp, Homo sapiens
aacaggacaaatgca

SEQ ID NO: 847614 - DNA, 15 bp, Homo sapiens
acaggacaaatgcat

SEQ ID NO: 847615 - DNA, 15 bp, Homo sapiens
caggacaaatgcatt

SEQ ID NO: 847616 - DNA, 15 bp, Homo sapiens
aggacaaatgcatta

SEQ ID NO: 847617 - DNA, 15 bp, Homo sapiens
ggacaaatgcattaa

SEQ ID NO: 847618 - DNA, 15 bp, Homo sapiens
gacaaatgcattaac

SEQ ID NO: 847619 - DNA, 15 bp, Homo sapiens
acaaatgcattaaca

SEQ ID NO: 847620 - DNA, 15 bp, Homo sapiens
caaatgcattaacat

SEQ ID NO: 847621 - DNA, 15 bp, Homo sapiens
aaatgcattaacatt

SEQ ID NO: 847622 - DNA, 15 bp, Homo sapiens
aatgcattaacattg

SEQ ID NO: 847623 - DNA, 15 bp, Homo sapiens
atgcattaacattgt

SEQ ID NO: 847624 - DNA, 15 bp, Homo sapiens
tgcattaacattgtt

SEQ ID NO: 847625 - DNA, 15 bp, Homo sapiens
gcattaacattgttg

SEQ ID NO: 847626 - DNA, 15 bp, Homo sapiens
cattaacattgttgg

SEQ ID NO: 847627 - DNA, 15 bp, Homo sapiens
attaacattgttggg

SEQ ID NO: 847628 - DNA, 15 bp, Homo sapiens
ttaacattgttgggg

SEQ ID NO: 847629 - DNA, 15 bp, Homo sapiens
taacattgttggggg

SEQ ID NO: 847630 - DNA, 15 bp, Homo sapiens
aacattgttggggga

SEQ ID NO: 847631 - DNA, 15 bp, Homo sapiens
acattgttgggggag

SEQ ID NO: 847632 - DNA, 15 bp, Homo sapiens
cattgttgggggagg

SEQ ID NO: 847633 - DNA, 15 bp, Homo sapiens
attgttgggggagga

SEQ ID NO: 847634 - DNA, 15 bp, Homo sapiens
ttgttgggggaggag

SEQ ID NO: 847635 - DNA, 15 bp, Homo sapiens
tgttgggggaggagg

SEQ ID NO: 847636 - DNA, 15 bp, Homo sapiens
gttgggggaggaggt

SEQ ID NO: 847637 - DNA, 15 bp, Homo sapiens
ttgggggaggaggtc

SEQ ID NO: 847638 - DNA, 15 bp, Homo sapiens
tgggggaggaggtcc

SEQ ID NO: 847639 - DNA, 15 bp, Homo sapiens
gggggaggaggtccc

SEQ ID NO: 847640 - DNA, 15 bp, Homo sapiens
ggggaggaggtccct

SEQ ID NO: 847641 - DNA, 15 bp, Homo sapiens
gggaggaggtccctt

SEQ ID NO: 847642 - DNA, 15 bp, Homo sapiens
ggaggaggtccctta

SEQ ID NO: 847643 - DNA, 15 bp, Homo sapiens
gaggaggtcccttag

SEQ ID NO: 847644 - DNA, 15 bp, Homo sapiens
aggaggtcccttagt

SEQ ID NO: 847645 - DNA, 15 bp, Homo sapiens
ggaggtcccttagta

SEQ ID NO: 847646 - DNA, 15 bp, Homo sapiens
gaggtcccttagtag

SEQ ID NO: 847647 - DNA, 15 bp, Homo sapiens
aggtcccttagtaga

SEQ ID NO: 847648 - DNA, 15 bp, Homo sapiens
ggtcccttagtagaa

SEQ ID NO: 847649 - DNA, 15 bp, Homo sapiens
gtcccttagtagaaa

SEQ ID NO: 847650 - DNA, 15 bp, Homo sapiens
tcccttagtagaaac

SEQ ID NO: 847651 - DNA, 15 bp, Homo sapiens
cccttagtagaaaca

SEQ ID NO: 847652 - DNA, 15 bp, Homo sapiens
ccttagtagaaacac

SEQ ID NO: 847653 - DNA, 15 bp, Homo sapiens
cttagtagaaacact

SEQ ID NO: 847654 - DNA, 15 bp, Homo sapiens
ttagtagaaacactc

SEQ ID NO: 847655 - DNA, 15 bp, Homo sapiens
tagtagaaacactct

SEQ ID NO: 847656 - DNA, 15 bp, Homo sapiens
agtagaaacactctt

SEQ ID NO: 847657 - DNA, 15 bp, Homo sapiens
gtagaaacactcttg

SEQ ID NO: 847658 - DNA, 15 bp, Homo sapiens
tagaaacactcttgg

SEQ ID NO: 847659 - DNA, 15 bp, Homo sapiens
agaaacactcttggt

SEQ ID NO: 847660 - DNA, 15 bp, Homo sapiens
gaaacactcttggtc

SEQ ID NO: 847661 - DNA, 15 bp, Homo sapiens
aaacactcttggtcc

SEQ ID NO: 847662 - DNA, 15 bp, Homo sapiens
aacactcttggtcca

SEQ ID NO: 847663 - DNA, 15 bp, Homo sapiens
acactcttggtccaa

SEQ ID NO: 847664 - DNA, 15 bp, Homo sapiens
cactcttggtccaag

SEQ ID NO: 847665 - DNA, 15 bp, Homo sapiens
actcttggtccaagc

SEQ ID NO: 847666 - DNA, 15 bp, Homo sapiens
ctcttggtccaagca

SEQ ID NO: 847667 - DNA, 15 bp, Homo sapiens
tcttggtccaagcat

SEQ ID NO: 847668 - DNA, 15 bp, Homo sapiens
cttggtccaagcatt

SEQ ID NO: 847669 - DNA, 15 bp, Homo sapiens
ttggtccaagcattt

SEQ ID NO: 847670 - DNA, 15 bp, Homo sapiens
tggtccaagcatttt

SEQ ID NO: 847671 - DNA, 15 bp, Homo sapiens
ggtccaagcatttta

SEQ ID NO: 847672 - DNA, 15 bp, Homo sapiens
gtccaagcattttaa

SEQ ID NO: 847673 - DNA, 15 bp, Homo sapiens
tccaagcattttaaa

SEQ ID NO: 847674 - DNA, 15 bp, Homo sapiens
ccaagcattttaaag

SEQ ID NO: 847675 - DNA, 15 bp, Homo sapiens
caagcattttaaagc

SEQ ID NO: 847676 - DNA, 15 bp, Homo sapiens
aagcattttaaagct

SEQ ID NO: 847677 - DNA, 15 bp, Homo sapiens
agcattttaaagctg

SEQ ID NO: 847678 - DNA, 15 bp, Homo sapiens
gcattttaaagctgt

SEQ ID NO: 847679 - DNA, 15 bp, Homo sapiens
cattttaaagctgtc

SEQ ID NO: 847680 - DNA, 15 bp, Homo sapiens
attttaaagctgtca

SEQ ID NO: 847681 - DNA, 15 bp, Homo sapiens
ttttaaagctgtcaa

SEQ ID NO: 847682 - DNA, 15 bp, Homo sapiens
tttaaagctgtcaaa

SEQ ID NO: 847683 - DNA, 15 bp, Homo sapiens
ttaaagctgtcaaag

SEQ ID NO: 847684 - DNA, 15 bp, Homo sapiens
taaagctgtcaaaga

SEQ ID NO: 847685 - DNA, 15 bp, Homo sapiens
aaagctgtcaaagag

SEQ ID NO: 847686 - DNA, 15 bp, Homo sapiens
aagctgtcaaagaga

SEQ ID NO: 847687 - DNA, 15 bp, Homo sapiens
agctgtcaaagagat

SEQ ID NO: 847688 - DNA, 15 bp, Homo sapiens
gctgtcaaagagatg

SEQ ID NO: 847689 - DNA, 15 bp, Homo sapiens
ctgtcaaagagatgt

SEQ ID NO: 847690 - DNA, 15 bp, Homo sapiens
tgtcaaagagatgta

SEQ ID NO: 847691 - DNA, 15 bp, Homo sapiens
gtcaaagagatgtaa

SEQ ID NO: 847692 - DNA, 15 bp, Homo sapiens
tcaaagagatgtaaa

SEQ ID NO: 847693 - DNA, 15 bp, Homo sapiens
caaagagatgtaaat

SEQ ID NO: 847694 - DNA, 15 bp, Homo sapiens
aaagagatgtaaata

SEQ ID NO: 847695 - DNA, 15 bp, Homo sapiens
aagagatgtaaatat

SEQ ID NO: 847696 - DNA, 15 bp, Homo sapiens
agagatgtaaatata

SEQ ID NO: 847697 - DNA, 15 bp, Homo sapiens
gagatgtaaatatag

SEQ ID NO: 847698 - DNA, 15 bp, Homo sapiens
agatgtaaatataga

SEQ ID NO: 847699 - DNA, 15 bp, Homo sapiens
gatgtaaatatagat

SEQ ID NO: 847700 - DNA, 15 bp, Homo sapiens
atgtaaatatagata

SEQ ID NO: 847701 - DNA, 15 bp, Homo sapiens
tgtaaatatagataa

SEQ ID NO: 847702 - DNA, 15 bp, Homo sapiens
gtaaatatagataat

SEQ ID NO: 847703 - DNA, 15 bp, Homo sapiens
taaatatagataatg

SEQ ID NO: 847704 - DNA, 15 bp, Homo sapiens
aaatatagataatgt

SEQ ID NO: 847705 - DNA, 15 bp, Homo sapiens
aatatagataatgta

SEQ ID NO: 847706 - DNA, 15 bp, Homo sapiens
atatagataatgtat

SEQ ID NO: 847707 - DNA, 15 bp, Homo sapiens
tatagataatgtatg

SEQ ID NO: 847708 - DNA, 15 bp, Homo sapiens
atagataatgtatgt

SEQ ID NO: 847709 - DNA, 15 bp, Homo sapiens
tagataatgtatgtc

SEQ ID NO: 847710 - DNA, 15 bp, Homo sapiens
agataatgtatgtca

SEQ ID NO: 847711 - DNA, 15 bp, Homo sapiens
gataatgtatgtcaa

SEQ ID NO: 847712 - DNA, 15 bp, Homo sapiens
ataatgtatgtcaag

SEQ ID NO: 847713 - DNA, 15 bp, Homo sapiens
taatgtatgtcaagg

SEQ ID NO: 847714 - DNA, 15 bp, Homo sapiens
aatgtatgtcaagga

SEQ ID NO: 847715 - DNA, 15 bp, Homo sapiens
atgtatgtcaaggag

SEQ ID NO: 847716 - DNA, 15 bp, Homo sapiens
tgtatgtcaaggaga

SEQ ID NO: 847717 - DNA, 15 bp, Homo sapiens
gtatgtcaaggagag

SEQ ID NO: 847718 - DNA, 15 bp, Homo sapiens
tatgtcaaggagaga

SEQ ID NO: 847719 - DNA, 15 bp, Homo sapiens
atgtcaaggagagag

SEQ ID NO: 847720 - DNA, 15 bp, Homo sapiens
tgtcaaggagagagc

SEQ ID NO: 847721 - DNA, 15 bp, Homo sapiens
gtcaaggagagagct

SEQ ID NO: 847722 - DNA, 15 bp, Homo sapiens
tcaaggagagagctt

SEQ ID NO: 847723 - DNA, 15 bp, Homo sapiens
caaggagagagcttt

SEQ ID NO: 847724 - DNA, 15 bp, Homo sapiens
aaggagagagctttg

SEQ ID NO: 847725 - DNA, 15 bp, Homo sapiens
aggagagagctttgt

SEQ ID NO: 847726 - DNA, 15 bp, Homo sapiens
ggagagagctttgtg

SEQ ID NO: 847727 - DNA, 15 bp, Homo sapiens
gagagagctttgtgg

SEQ ID NO: 847728 - DNA, 15 bp, Homo sapiens
agagagctttgtggt

SEQ ID NO: 847729 - DNA, 15 bp, Homo sapiens
gagagctttgtggtt

SEQ ID NO: 847730 - DNA, 15 bp, Homo sapiens
agagctttgtggtta

SEQ ID NO: 847731 - DNA, 15 bp, Homo sapiens
gagctttgtggttaa

SEQ ID NO: 847732 - DNA, 15 bp, Homo sapiens
agctttgtggttaaa

SEQ ID NO: 847733 - DNA, 15 bp, Homo sapiens
gctttgtggttaaac

SEQ ID NO: 847734 - DNA, 15 bp, Homo sapiens
ctttgtggttaaact

SEQ ID NO: 847735 - DNA, 15 bp, Homo sapiens
tttgtggttaaactg

SEQ ID NO: 847736 - DNA, 15 bp, Homo sapiens
ttgtggttaaactgt

SEQ ID NO: 847737 - DNA, 15 bp, Homo sapiens
tgtggttaaactgta

SEQ ID NO: 847738 - DNA, 15 bp, Homo sapiens
gtggttaaactgtaa

SEQ ID NO: 847739 - DNA, 15 bp, Homo sapiens
tggttaaactgtaac

SEQ ID NO: 847740 - DNA, 15 bp, Homo sapiens
ggttaaactgtaact

SEQ ID NO: 847741 - DNA, 15 bp, Homo sapiens
gttaaactgtaactt

SEQ ID NO: 847742 - DNA, 15 bp, Homo sapiens
ttaaactgtaacttt

SEQ ID NO: 847743 - DNA, 15 bp, Homo sapiens
taaactgtaactttc

SEQ ID NO: 847744 - DNA, 15 bp, Homo sapiens
aaactgtaactttca

SEQ ID NO: 847745 - DNA, 15 bp, Homo sapiens
aactgtaactttcag

SEQ ID NO: 847746 - DNA, 15 bp, Homo sapiens
actgtaactttcagt

SEQ ID NO: 847747 - DNA, 15 bp, Homo sapiens
ctgtaactttcagtt

SEQ ID NO: 847748 - DNA, 15 bp, Homo sapiens
tgtaactttcagttt

SEQ ID NO: 847749 - DNA, 15 bp, Homo sapiens
gtaactttcagttta

SEQ ID NO: 847750 - DNA, 15 bp, Homo sapiens
taactttcagtttaa

SEQ ID NO: 847751 - DNA, 15 bp, Homo sapiens
aactttcagtttaaa

SEQ ID NO: 847752 - DNA, 15 bp, Homo sapiens
actttcagtttaaac

SEQ ID NO: 847753 - DNA, 15 bp, Homo sapiens
ctttcagtttaaaca

SEQ ID NO: 847754 - DNA, 15 bp, Homo sapiens
tttcagtttaaacaa

SEQ ID NO: 847755 - DNA, 15 bp, Homo sapiens
ttcagtttaaacaat

SEQ ID NO: 847756 - DNA, 15 bp, Homo sapiens
tcagtttaaacaatt

SEQ ID NO: 847757 - DNA, 15 bp, Homo sapiens
cagtttaaacaatta

SEQ ID NO: 847758 - DNA, 15 bp, Homo sapiens
agtttaaacaattat

SEQ ID NO: 847759 - DNA, 15 bp, Homo sapiens
gtttaaacaattatt

SEQ ID NO: 847760 - DNA, 15 bp, Homo sapiens
tttaaacaattattg

SEQ ID NO: 847761 - DNA, 15 bp, Homo sapiens
ttaaacaattattgg

SEQ ID NO: 847762 - DNA, 15 bp, Homo sapiens
taaacaattattggt

SEQ ID NO: 847763 - DNA, 15 bp, Homo sapiens
aaacaattattggtg

SEQ ID NO: 847764 - DNA, 15 bp, Homo sapiens
aacaattattggtga

SEQ ID NO: 847765 - DNA, 15 bp, Homo sapiens
acaattattggtgac

SEQ ID NO: 847766 - DNA, 15 bp, Homo sapiens
caattattggtgact

SEQ ID NO: 847767 - DNA, 15 bp, Homo sapiens
aattattggtgactc

SEQ ID NO: 847768 - DNA, 15 bp, Homo sapiens
attattggtgactct

SEQ ID NO: 847769 - DNA, 15 bp, Homo sapiens
ttattggtgactctg

SEQ ID NO: 847770 - DNA, 15 bp, Homo sapiens
tattggtgactctga

SEQ ID NO: 847771 - DNA, 15 bp, Homo sapiens
attggtgactctgat

SEQ ID NO: 847772 - DNA, 15 bp, Homo sapiens
ttggtgactctgatg

SEQ ID NO: 847773 - DNA, 15 bp, Homo sapiens
tggtgactctgatgt

SEQ ID NO: 847774 - DNA, 15 bp, Homo sapiens
ggtgactctgatgtc

SEQ ID NO: 847775 - DNA, 15 bp, Homo sapiens
gtgactctgatgtca

SEQ ID NO: 847776 - DNA, 15 bp, Homo sapiens
tgactctgatgtcaa

SEQ ID NO: 847777 - DNA, 15 bp, Homo sapiens
gactctgatgtcaaa

SEQ ID NO: 847778 - DNA, 15 bp, Homo sapiens
actctgatgtcaaat

SEQ ID NO: 847779 - DNA, 15 bp, Homo sapiens
ctctgatgtcaaatg

SEQ ID NO: 847780 - DNA, 15 bp, Homo sapiens
tctgatgtcaaatgt

SEQ ID NO: 847781 - DNA, 15 bp, Homo sapiens
ctgatgtcaaatgtt

SEQ ID NO: 847782 - DNA, 15 bp, Homo sapiens
tgatgtcaaatgttt

SEQ ID NO: 847783 - DNA, 15 bp, Homo sapiens
gatgtcaaatgtttc

SEQ ID NO: 847784 - DNA, 15 bp, Homo sapiens
atgtcaaatgtttct

SEQ ID NO: 847785 - DNA, 15 bp, Homo sapiens
tgtcaaatgtttctc

SEQ ID NO: 847786 - DNA, 15 bp, Homo sapiens
gtcaaatgtttctca

SEQ ID NO: 847787 - DNA, 15 bp, Homo sapiens
tcaaatgtttctcaa

SEQ ID NO: 847788 - DNA, 15 bp, Homo sapiens
caaatgtttctcaag

SEQ ID NO: 847789 - DNA, 15 bp, Homo sapiens
aaatgtttctcaagc

SEQ ID NO: 847790 - DNA, 15 bp, Homo sapiens
aatgtttctcaagct

SEQ ID NO: 847791 - DNA, 15 bp, Homo sapiens
atgtttctcaagctt

SEQ ID NO: 847792 - DNA, 15 bp, Homo sapiens
tgtttctcaagcttt

SEQ ID NO: 847793 - DNA, 15 bp, Homo sapiens
gtttctcaagcttta

SEQ ID NO: 847794 - DNA, 15 bp, Homo sapiens
tttctcaagctttat

SEQ ID NO: 847795 - DNA, 15 bp, Homo sapiens
ttctcaagctttatc

SEQ ID NO: 847796 - DNA, 15 bp, Homo sapiens
tctcaagctttatct

SEQ ID NO: 847797 - DNA, 15 bp, Homo sapiens
ctcaagctttatctg

SEQ ID NO: 847798 - DNA, 15 bp, Homo sapiens
tcaagctttatctga

SEQ ID NO: 847799 - DNA, 15 bp, Homo sapiens
caagctttatctgaa

SEQ ID NO: 847800 - DNA, 15 bp, Homo sapiens
aagctttatctgaac

SEQ ID NO: 847801 - DNA, 15 bp, Homo sapiens
agctttatctgaaca

SEQ ID NO: 847802 - DNA, 15 bp, Homo sapiens
gctttatctgaacaa

SEQ ID NO: 847803 - DNA, 15 bp, Homo sapiens
ctttatctgaacaaa

SEQ ID NO: 847804 - DNA, 15 bp, Homo sapiens
tttatctgaacaaaa

SEQ ID NO: 847805 - DNA, 15 bp, Homo sapiens
ttatctgaacaaaat

SEQ ID NO: 847806 - DNA, 15 bp, Homo sapiens
tatctgaacaaaatt

SEQ ID NO: 847807 - DNA, 15 bp, Homo sapiens
atctgaacaaaattc

SEQ ID NO: 847808 - DNA, 15 bp, Homo sapiens
tctgaacaaaattct

SEQ ID NO: 847809 - DNA, 15 bp, Homo sapiens
ctgaacaaaattctt

SEQ ID NO: 847810 - DNA, 15 bp, Homo sapiens
tgaacaaaattcttc

SEQ ID NO: 847811 - DNA, 15 bp, Homo sapiens
gaacaaaattcttct

SEQ ID NO: 847812 - DNA, 15 bp, Homo sapiens
aacaaaattcttctc

SEQ ID NO: 847813 - DNA, 15 bp, Homo sapiens
acaaaattcttctca

SEQ ID NO: 847814 - DNA, 15 bp, Homo sapiens
caaaattcttctcac

SEQ ID NO: 847815 - DNA, 15 bp, Homo sapiens
aaaattcttctcact

SEQ ID NO: 847816 - DNA, 15 bp, Homo sapiens
aaattcttctcactt

SEQ ID NO: 847817 - DNA, 15 bp, Homo sapiens
aattcttctcacttt

SEQ ID NO: 847818 - DNA, 15 bp, Homo sapiens
attcttctcactttg

SEQ ID NO: 847819 - DNA, 15 bp, Homo sapiens
ttcttctcactttgt

SEQ ID NO: 847820 - DNA, 15 bp, Homo sapiens
tcttctcactttgtt

SEQ ID NO: 847821 - DNA, 15 bp, Homo sapiens
cttctcactttgttg

SEQ ID NO: 847822 - DNA, 15 bp, Homo sapiens
ttctcactttgttgc

SEQ ID NO: 847823 - DNA, 15 bp, Homo sapiens
tctcactttgttgcc

SEQ ID NO: 847824 - DNA, 15 bp, Homo sapiens
ctcactttgttgcca

SEQ ID NO: 847825 - DNA, 15 bp, Homo sapiens
tcactttgttgccaa

SEQ ID NO: 847826 - DNA, 15 bp, Homo sapiens
cactttgttgccaaa

SEQ ID NO: 847827 - DNA, 15 bp, Homo sapiens
actttgttgccaaag

SEQ ID NO: 847828 - DNA, 15 bp, Homo sapiens
ctttgttgccaaagt

SEQ ID NO: 847829 - DNA, 15 bp, Homo sapiens
tttgttgccaaagtc

SEQ ID NO: 847830 - DNA, 15 bp, Homo sapiens
ttgttgccaaagtcg

SEQ ID NO: 847831 - DNA, 15 bp, Homo sapiens
tgttgccaaagtcgt

SEQ ID NO: 847832 - DNA, 15 bp, Homo sapiens
gttgccaaagtcgtt

SEQ ID NO: 847833 - DNA, 15 bp, Homo sapiens
ttgccaaagtcgtta

SEQ ID NO: 847834 - DNA, 15 bp, Homo sapiens
tgccaaagtcgttaa

SEQ ID NO: 847835 - DNA, 15 bp, Homo sapiens
gccaaagtcgttaac

SEQ ID NO: 847836 - DNA, 15 bp, Homo sapiens
ccaaagtcgttaaca

SEQ ID NO: 847837 - DNA, 15 bp, Homo sapiens
caaagtcgttaacaa

SEQ ID NO: 847838 - DNA, 15 bp, Homo sapiens
aaagtcgttaacaag

SEQ ID NO: 847839 - DNA, 15 bp, Homo sapiens
aagtcgttaacaaga

SEQ ID NO: 847840 - DNA, 15 bp, Homo sapiens
agtcgttaacaagaa

SEQ ID NO: 847841 - DNA, 15 bp, Homo sapiens
gtcgttaacaagaaa

SEQ ID NO: 847842 - DNA, 15 bp, Homo sapiens
tcgttaacaagaaat

SEQ ID NO: 847843 - DNA, 15 bp, Homo sapiens
cgttaacaagaaatc

SEQ ID NO: 847844 - DNA, 15 bp, Homo sapiens
gttaacaagaaatca

SEQ ID NO: 847845 - DNA, 15 bp, Homo sapiens
ttaacaagaaatcac

SEQ ID NO: 847846 - DNA, 15 bp, Homo sapiens
taacaagaaatcaca

SEQ ID NO: 847847 - DNA, 15 bp, Homo sapiens
aacaagaaatcacat

SEQ ID NO: 847848 - DNA, 15 bp, Homo sapiens
acaagaaatcacatt

SEQ ID NO: 847849 - DNA, 15 bp, Homo sapiens
caagaaatcacattg

SEQ ID NO: 847850 - DNA, 15 bp, Homo sapiens
aagaaatcacattga

SEQ ID NO: 847851 - DNA, 15 bp, Homo sapiens
agaaatcacattgac

SEQ ID NO: 847852 - DNA, 15 bp, Homo sapiens
gaaatcacattgact

SEQ ID NO: 847853 - DNA, 15 bp, Homo sapiens
aaatcacattgactc

SEQ ID NO: 847854 - DNA, 15 bp, Homo sapiens
aatcacattgactca

SEQ ID NO: 847855 - DNA, 15 bp, Homo sapiens
atcacattgactcat

SEQ ID NO: 847856 - DNA, 15 bp, Homo sapiens
tcacattgactcatt

SEQ ID NO: 847857 - DNA, 15 bp, Homo sapiens
cacattgactcattg

SEQ ID NO: 847858 - DNA, 15 bp, Homo sapiens
acattgactcattga

SEQ ID NO: 847859 - DNA, 15 bp, Homo sapiens
cattgactcattgat

SEQ ID NO: 847860 - DNA, 15 bp, Homo sapiens
attgactcattgatg

SEQ ID NO: 847861 - DNA, 15 bp, Homo sapiens
ttgactcattgatgt

SEQ ID NO: 847862 - DNA, 15 bp, Homo sapiens
tgactcattgatgtt

SEQ ID NO: 847863 - DNA, 15 bp, Homo sapiens
gactcattgatgttt

SEQ ID NO: 847864 - DNA, 15 bp, Homo sapiens
actcattgatgtttt

SEQ ID NO: 847865 - DNA, 15 bp, Homo sapiens
ctcattgatgttttg

SEQ ID NO: 847866 - DNA, 15 bp, Homo sapiens
tcattgatgttttgg

SEQ ID NO: 847867 - DNA, 15 bp, Homo sapiens
cattgatgttttggc

SEQ ID NO: 847868 - DNA, 15 bp, Homo sapiens
attgatgttttggct

SEQ ID NO: 847869 - DNA, 15 bp, Homo sapiens
ttgatgttttggctc

SEQ ID NO: 847870 - DNA, 15 bp, Homo sapiens
tgatgttttggctcc

SEQ ID NO: 847871 - DNA, 15 bp, Homo sapiens
gatgttttggctcct

SEQ ID NO: 847872 - DNA, 15 bp, Homo sapiens
atgttttggctcctt

SEQ ID NO: 847873 - DNA, 15 bp, Homo sapiens
tgttttggctccttt

SEQ ID NO: 847874 - DNA, 15 bp, Homo sapiens
gttttggctcctttc

SEQ ID NO: 847875 - DNA, 15 bp, Homo sapiens
ttttggctcctttcc

SEQ ID NO: 847876 - DNA, 15 bp, Homo sapiens
tttggctcctttccc

SEQ ID NO: 847877 - DNA, 15 bp, Homo sapiens
ttggctcctttccct

SEQ ID NO: 847878 - DNA, 15 bp, Homo sapiens
tggctcctttccctt

SEQ ID NO: 847879 - DNA, 15 bp, Homo sapiens
ggctcctttccctta

SEQ ID NO: 847880 - DNA, 15 bp, Homo sapiens
gctcctttcccttac

SEQ ID NO: 847881 - DNA, 15 bp, Homo sapiens
ctcctttcccttact

SEQ ID NO: 847882 - DNA, 15 bp, Homo sapiens
tcctttcccttactt

SEQ ID NO: 847883 - DNA, 15 bp, Homo sapiens
cctttcccttacttt

SEQ ID NO: 847884 - DNA, 15 bp, Homo sapiens
ctttcccttactttc

SEQ ID NO: 847885 - DNA, 15 bp, Homo sapiens
tttcccttactttct

SEQ ID NO: 847886 - DNA, 15 bp, Homo sapiens
ttcccttactttctg

SEQ ID NO: 847887 - DNA, 15 bp, Homo sapiens
tcccttactttctgt

SEQ ID NO: 847888 - DNA, 15 bp, Homo sapiens
cccttactttctgtt

SEQ ID NO: 847889 - DNA, 15 bp, Homo sapiens
ccttactttctgttg

SEQ ID NO: 847890 - DNA, 15 bp, Homo sapiens
cttactttctgttgc

SEQ ID NO: 847891 - DNA, 15 bp, Homo sapiens
ttactttctgttgct

SEQ ID NO: 847892 - DNA, 15 bp, Homo sapiens
tactttctgttgctt

SEQ ID NO: 847893 - DNA, 15 bp, Homo sapiens
actttctgttgcttt

SEQ ID NO: 847894 - DNA, 15 bp, Homo sapiens
ctttctgttgctttc

SEQ ID NO: 847895 - DNA, 15 bp, Homo sapiens
tttctgttgctttcc

SEQ ID NO: 847896 - DNA, 15 bp, Homo sapiens
ttctgttgctttcca

SEQ ID NO: 847897 - DNA, 15 bp, Homo sapiens
tctgttgctttccaa

SEQ ID NO: 847898 - DNA, 15 bp, Homo sapiens
ctgttgctttccaaa

SEQ ID NO: 847899 - DNA, 15 bp, Homo sapiens
tgttgctttccaaaa

SEQ ID NO: 847900 - DNA, 15 bp, Homo sapiens
gttgctttccaaaag

SEQ ID NO: 847901 - DNA, 15 bp, Homo sapiens
ttgctttccaaaagc

SEQ ID NO: 847902 - DNA, 15 bp, Homo sapiens
tgctttccaaaagct

SEQ ID NO: 847903 - DNA, 15 bp, Homo sapiens
gctttccaaaagctg

SEQ ID NO: 847904 - DNA, 15 bp, Homo sapiens
ctttccaaaagctga

SEQ ID NO: 847905 - DNA, 15 bp, Homo sapiens
tttccaaaagctgag

SEQ ID NO: 847906 - DNA, 15 bp, Homo sapiens
ttccaaaagctgaga

SEQ ID NO: 847907 - DNA, 15 bp, Homo sapiens
tccaaaagctgagac

SEQ ID NO: 847908 - DNA, 15 bp, Homo sapiens
ccaaaagctgagaca

SEQ ID NO: 847909 - DNA, 15 bp, Homo sapiens
caaaagctgagacag

SEQ ID NO: 847910 - DNA, 15 bp, Homo sapiens
aaaagctgagacagg

SEQ ID NO: 847911 - DNA, 15 bp, Homo sapiens
aaagctgagacagga

SEQ ID NO: 847912 - DNA, 15 bp, Homo sapiens
aagctgagacaggaa

SEQ ID NO: 847913 - DNA, 15 bp, Homo sapiens
agctgagacaggaaa

SEQ ID NO: 847914 - DNA, 15 bp, Homo sapiens
gctgagacaggaaac

SEQ ID NO: 847915 - DNA, 15 bp, Homo sapiens
ctgagacaggaaact

SEQ ID NO: 847916 - DNA, 15 bp, Homo sapiens
tgagacaggaaacta

SEQ ID NO: 847917 - DNA, 15 bp, Homo sapiens
gagacaggaaactaa

SEQ ID NO: 847918 - DNA, 15 bp, Homo sapiens
agacaggaaactaac

SEQ ID NO: 847919 - DNA, 15 bp, Homo sapiens
gacaggaaactaacc

SEQ ID NO: 847920 - DNA, 15 bp, Homo sapiens
acaggaaactaaccc

SEQ ID NO: 847921 - DNA, 15 bp, Homo sapiens
caggaaactaaccct

SEQ ID NO: 847922 - DNA, 15 bp, Homo sapiens
aggaaactaacccta

SEQ ID NO: 847923 - DNA, 15 bp, Homo sapiens
ggaaactaaccctaa

SEQ ID NO: 847924 - DNA, 15 bp, Homo sapiens
gaaactaaccctaac

SEQ ID NO: 847925 - DNA, 15 bp, Homo sapiens
aaactaaccctaact

SEQ ID NO: 847926 - DNA, 15 bp, Homo sapiens
aactaaccctaactg

SEQ ID NO: 847927 - DNA, 15 bp, Homo sapiens
actaaccctaactga

SEQ ID NO: 847928 - DNA, 15 bp, Homo sapiens
ctaaccctaactgag

SEQ ID NO: 847929 - DNA, 15 bp, Homo sapiens
taaccctaactgagc

SEQ ID NO: 847930 - DNA, 15 bp, Homo sapiens
aaccctaactgagca

SEQ ID NO: 847931 - DNA, 15 bp, Homo sapiens
accctaactgagcac

SEQ ID NO: 847932 - DNA, 15 bp, Homo sapiens
ccctaactgagcacc

SEQ ID NO: 847933 - DNA, 15 bp, Homo sapiens
cctaactgagcacct

SEQ ID NO: 847934 - DNA, 15 bp, Homo sapiens
ctaactgagcacctg

SEQ ID NO: 847935 - DNA, 15 bp, Homo sapiens
taactgagcacctgc

SEQ ID NO: 847936 - DNA, 15 bp, Homo sapiens
aactgagcacctgca

SEQ ID NO: 847937 - DNA, 15 bp, Homo sapiens
actgagcacctgcaa

SEQ ID NO: 847938 - DNA, 15 bp, Homo sapiens
ctgagcacctgcaat

SEQ ID NO: 847939 - DNA, 15 bp, Homo sapiens
tgagcacctgcaatt

SEQ ID NO: 847940 - DNA, 15 bp, Homo sapiens
gagcacctgcaattg

SEQ ID NO: 847941 - DNA, 15 bp, Homo sapiens
agcacctgcaattgc

SEQ ID NO: 847942 - DNA, 15 bp, Homo sapiens
gcacctgcaattgcc

SEQ ID NO: 847943 - DNA, 15 bp, Homo sapiens
cacctgcaattgcct

SEQ ID NO: 847944 - DNA, 15 bp, Homo sapiens
acctgcaattgcctg

SEQ ID NO: 847945 - DNA, 15 bp, Homo sapiens
cctgcaattgcctgg

SEQ ID NO: 847946 - DNA, 15 bp, Homo sapiens
ctgcaattgcctggt

SEQ ID NO: 847947 - DNA, 15 bp, Homo sapiens
tgcaattgcctggta

SEQ ID NO: 847948 - DNA, 15 bp, Homo sapiens
gcaattgcctggtag

SEQ ID NO: 847949 - DNA, 15 bp, Homo sapiens
caattgcctggtagt

SEQ ID NO: 847950 - DNA, 15 bp, Homo sapiens
aattgcctggtagta

SEQ ID NO: 847951 - DNA, 15 bp, Homo sapiens
attgcctggtagtat

SEQ ID NO: 847952 - DNA, 15 bp, Homo sapiens
ttgcctggtagtatt

SEQ ID NO: 847953 - DNA, 15 bp, Homo sapiens
tgcctggtagtattc

SEQ ID NO: 847954 - DNA, 15 bp, Homo sapiens
gcctggtagtattct

SEQ ID NO: 847955 - DNA, 15 bp, Homo sapiens
cctggtagtattcta

SEQ ID NO: 847956 - DNA, 15 bp, Homo sapiens
ctggtagtattctag

SEQ ID NO: 847957 - DNA, 15 bp, Homo sapiens
tggtagtattctagt

SEQ ID NO: 847958 - DNA, 15 bp, Homo sapiens
ggtagtattctagtc

SEQ ID NO: 847959 - DNA, 15 bp, Homo sapiens
gtagtattctagtca

SEQ ID NO: 847960 - DNA, 15 bp, Homo sapiens
tagtattctagtcat

SEQ ID NO: 847961 - DNA, 15 bp, Homo sapiens
agtattctagtcatg

SEQ ID NO: 847962 - DNA, 15 bp, Homo sapiens
gtattctagtcatgt

SEQ ID NO: 847963 - DNA, 15 bp, Homo sapiens
tattctagtcatgtg

SEQ ID NO: 847964 - DNA, 15 bp, Homo sapiens
attctagtcatgtgt

SEQ ID NO: 847965 - DNA, 15 bp, Homo sapiens
ttctagtcatgtgtg

SEQ ID NO: 847966 - DNA, 15 bp, Homo sapiens
tctagtcatgtgtgt

SEQ ID NO: 847967 - DNA, 15 bp, Homo sapiens
ctagtcatgtgtgta

SEQ ID NO: 847968 - DNA, 15 bp, Homo sapiens
tagtcatgtgtgtac

SEQ ID NO: 847969 - DNA, 15 bp, Homo sapiens
agtcatgtgtgtact

SEQ ID NO: 847970 - DNA, 15 bp, Homo sapiens
gtcatgtgtgtactt

SEQ ID NO: 847971 - DNA, 15 bp, Homo sapiens
tcatgtgtgtacttt

SEQ ID NO: 847972 - DNA, 15 bp, Homo sapiens
catgtgtgtactttt

SEQ ID NO: 847973 - DNA, 15 bp, Homo sapiens
atgtgtgtacttttg

SEQ ID NO: 847974 - DNA, 15 bp, Homo sapiens
tgtgtgtacttttgt

SEQ ID NO: 847975 - DNA, 15 bp, Homo sapiens
gtgtgtacttttgtg

SEQ ID NO: 847976 - DNA, 15 bp, Homo sapiens
tgtgtacttttgtgt

SEQ ID NO: 847977 - DNA, 15 bp, Homo sapiens
gtgtacttttgtgtg

SEQ ID NO: 847978 - DNA, 15 bp, Homo sapiens
tgtacttttgtgtgt

SEQ ID NO: 847979 - DNA, 15 bp, Homo sapiens
gtacttttgtgtgta

SEQ ID NO: 847980 - DNA, 15 bp, Homo sapiens
tacttttgtgtgtat

SEQ ID NO: 847981 - DNA, 15 bp, Homo sapiens
acttttgtgtgtatg

SEQ ID NO: 847982 - DNA, 15 bp, Homo sapiens
cttttgtgtgtatgt

SEQ ID NO: 847983 - DNA, 15 bp, Homo sapiens
ttttgtgtgtatgta

SEQ ID NO: 847984 - DNA, 15 bp, Homo sapiens
tttgtgtgtatgtaa

SEQ ID NO: 847985 - DNA, 15 bp, Homo sapiens
ttgtgtgtatgtaat

SEQ ID NO: 847986 - DNA, 15 bp, Homo sapiens
tgtgtgtatgtaatc

SEQ ID NO: 847987 - DNA, 15 bp, Homo sapiens
gtgtgtatgtaatcc

SEQ ID NO: 847988 - DNA, 15 bp, Homo sapiens
tgtgtatgtaatccc

SEQ ID NO: 847989 - DNA, 15 bp, Homo sapiens
gtgtatgtaatcccc

SEQ ID NO: 847990 - DNA, 15 bp, Homo sapiens
tgtatgtaatcccct

SEQ ID NO: 847991 - DNA, 15 bp, Homo sapiens
gtatgtaatcccctt

SEQ ID NO: 847992 - DNA, 15 bp, Homo sapiens
tatgtaatcccctta

SEQ ID NO: 847993 - DNA, 15 bp, Homo sapiens
atgtaatccccttac

SEQ ID NO: 847994 - DNA, 15 bp, Homo sapiens
tgtaatccccttaca

SEQ ID NO: 847995 - DNA, 15 bp, Homo sapiens
gtaatccccttacag

SEQ ID NO: 847996 - DNA, 15 bp, Homo sapiens
taatccccttacagc

SEQ ID NO: 847997 - DNA, 15 bp, Homo sapiens
aatccccttacagct

SEQ ID NO: 847998 - DNA, 15 bp, Homo sapiens
atccccttacagctc

SEQ ID NO: 847999 - DNA, 15 bp, Homo sapiens
tccccttacagctct

SEQ ID NO: 848000 - DNA, 15 bp, Homo sapiens
ccccttacagctctg

SEQ ID NO: 848001 - DNA, 15 bp, Homo sapiens
cccttacagctctgc

SEQ ID NO: 848002 - DNA, 15 bp, Homo sapiens
ccttacagctctgca

SEQ ID NO: 848003 - DNA, 15 bp, Homo sapiens
cttacagctctgcaa

SEQ ID NO: 848004 - DNA, 15 bp, Homo sapiens
ttacagctctgcaaa

SEQ ID NO: 848005 - DNA, 15 bp, Homo sapiens
tacagctctgcaaag

SEQ ID NO: 848006 - DNA, 15 bp, Homo sapiens
acagctctgcaaagt

SEQ ID NO: 848007 - DNA, 15 bp, Homo sapiens
cagctctgcaaagta

SEQ ID NO: 848008 - DNA, 15 bp, Homo sapiens
agctctgcaaagtaa

SEQ ID NO: 848009 - DNA, 15 bp, Homo sapiens
gctctgcaaagtaag

SEQ ID NO: 848010 - DNA, 15 bp, Homo sapiens
ctctgcaaagtaaga

SEQ ID NO: 848011 - DNA, 15 bp, Homo sapiens
tctgcaaagtaagaa

SEQ ID NO: 848012 - DNA, 15 bp, Homo sapiens
ctgcaaagtaagaat

SEQ ID NO: 848013 - DNA, 15 bp, Homo sapiens
tgcaaagtaagaatt

SEQ ID NO: 848014 - DNA, 15 bp, Homo sapiens
gcaaagtaagaattg

SEQ ID NO: 848015 - DNA, 15 bp, Homo sapiens
caaagtaagaattgt

SEQ ID NO: 848016 - DNA, 15 bp, Homo sapiens
aaagtaagaattgtt

SEQ ID NO: 848017 - DNA, 15 bp, Homo sapiens
aagtaagaattgttc

SEQ ID NO: 848018 - DNA, 15 bp, Homo sapiens
agtaagaattgttct

SEQ ID NO: 848019 - DNA, 15 bp, Homo sapiens
gtaagaattgttctc

SEQ ID NO: 848020 - DNA, 15 bp, Homo sapiens
taagaattgttctcc

SEQ ID NO: 848021 - DNA, 15 bp, Homo sapiens
aagaattgttctccc

SEQ ID NO: 848022 - DNA, 15 bp, Homo sapiens
agaattgttctccct

SEQ ID NO: 848023 - DNA, 15 bp, Homo sapiens
gaattgttctccctg

SEQ ID NO: 848024 - DNA, 15 bp, Homo sapiens
aattgttctccctgc

SEQ ID NO: 848025 - DNA, 15 bp, Homo sapiens
attgttctccctgct

SEQ ID NO: 848026 - DNA, 15 bp, Homo sapiens
ttgttctccctgctt

SEQ ID NO: 848027 - DNA, 15 bp, Homo sapiens
tgttctccctgcttt

SEQ ID NO: 848028 - DNA, 15 bp, Homo sapiens
gttctccctgcttta

SEQ ID NO: 848029 - DNA, 15 bp, Homo sapiens
ttctccctgctttac

SEQ ID NO: 848030 - DNA, 15 bp, Homo sapiens
tctccctgctttaca

SEQ ID NO: 848031 - DNA, 15 bp, Homo sapiens
ctccctgctttacag

SEQ ID NO: 848032 - DNA, 15 bp, Homo sapiens
tccctgctttacaga

SEQ ID NO: 848033 - DNA, 15 bp, Homo sapiens
ccctgctttacagaa

SEQ ID NO: 848034 - DNA, 15 bp, Homo sapiens
cctgctttacagaag

SEQ ID NO: 848035 - DNA, 15 bp, Homo sapiens
ctgctttacagaaga

SEQ ID NO: 848036 - DNA, 15 bp, Homo sapiens
tgctttacagaagag

SEQ ID NO: 848037 - DNA, 15 bp, Homo sapiens
gctttacagaagaga

SEQ ID NO: 848038 - DNA, 15 bp, Homo sapiens
ctttacagaagagat

SEQ ID NO: 848039 - DNA, 15 bp, Homo sapiens
tttacagaagagatc

SEQ ID NO: 848040 - DNA, 15 bp, Homo sapiens
ttacagaagagatca

SEQ ID NO: 848041 - DNA, 15 bp, Homo sapiens
tacagaagagatcat

SEQ ID NO: 848042 - DNA, 15 bp, Homo sapiens
acagaagagatcata

SEQ ID NO: 848043 - DNA, 15 bp, Homo sapiens
cagaagagatcataa

SEQ ID NO: 848044 - DNA, 15 bp, Homo sapiens
agaagagatcataag

SEQ ID NO: 848045 - DNA, 15 bp, Homo sapiens
gaagagatcataaga

SEQ ID NO: 848046 - DNA, 15 bp, Homo sapiens
aagagatcataagat

SEQ ID NO: 848047 - DNA, 15 bp, Homo sapiens
agagatcataagata

SEQ ID NO: 848048 - DNA, 15 bp, Homo sapiens
gagatcataagataa

SEQ ID NO: 848049 - DNA, 15 bp, Homo sapiens
agatcataagataat

SEQ ID NO: 848050 - DNA, 15 bp, Homo sapiens
gatcataagataatt

SEQ ID NO: 848051 - DNA, 15 bp, Homo sapiens
atcataagataattg

SEQ ID NO: 848052 - DNA, 15 bp, Homo sapiens
tcataagataattga

SEQ ID NO: 848053 - DNA, 15 bp, Homo sapiens
cataagataattgag

SEQ ID NO: 848054 - DNA, 15 bp, Homo sapiens
ataagataattgagg

SEQ ID NO: 848055 - DNA, 15 bp, Homo sapiens
taagataattgaggc

SEQ ID NO: 848056 - DNA, 15 bp, Homo sapiens
aagataattgaggct

SEQ ID NO: 848057 - DNA, 15 bp, Homo sapiens
agataattgaggctg

SEQ ID NO: 848058 - DNA, 15 bp, Homo sapiens
gataattgaggctgt

SEQ ID NO: 848059 - DNA, 15 bp, Homo sapiens
ataattgaggctgtt

SEQ ID NO: 848060 - DNA, 15 bp, Homo sapiens
taattgaggctgtta

SEQ ID NO: 848061 - DNA, 15 bp, Homo sapiens
aattgaggctgttag

SEQ ID NO: 848062 - DNA, 15 bp, Homo sapiens
attgaggctgttaga

SEQ ID NO: 848063 - DNA, 15 bp, Homo sapiens
ttgaggctgttagat

SEQ ID NO: 848064 - DNA, 15 bp, Homo sapiens
tgaggctgttagatg

SEQ ID NO: 848065 - DNA, 15 bp, Homo sapiens
gaggctgttagatgt

SEQ ID NO: 848066 - DNA, 15 bp, Homo sapiens
aggctgttagatgtt

SEQ ID NO: 848067 - DNA, 15 bp, Homo sapiens
ggctgttagatgtta

SEQ ID NO: 848068 - DNA, 15 bp, Homo sapiens
gctgttagatgttaa

SEQ ID NO: 848069 - DNA, 15 bp, Homo sapiens
ctgttagatgttaac

SEQ ID NO: 848070 - DNA, 15 bp, Homo sapiens
tgttagatgttaact

SEQ ID NO: 848071 - DNA, 15 bp, Homo sapiens
gttagatgttaactt

SEQ ID NO: 848072 - DNA, 15 bp, Homo sapiens
ttagatgttaacttg

SEQ ID NO: 848073 - DNA, 15 bp, Homo sapiens
tagatgttaacttgc

SEQ ID NO: 848074 - DNA, 15 bp, Homo sapiens
agatgttaacttgcc

SEQ ID NO: 848075 - DNA, 15 bp, Homo sapiens
gatgttaacttgcca

SEQ ID NO: 848076 - DNA, 15 bp, Homo sapiens
atgttaacttgccaa

SEQ ID NO: 848077 - DNA, 15 bp, Homo sapiens
tgttaacttgccaaa

SEQ ID NO: 848078 - DNA, 15 bp, Homo sapiens
gttaacttgccaaaa

SEQ ID NO: 848079 - DNA, 15 bp, Homo sapiens
ttaacttgccaaaag

SEQ ID NO: 848080 - DNA, 15 bp, Homo sapiens
taacttgccaaaagc

SEQ ID NO: 848081 - DNA, 15 bp, Homo sapiens
aacttgccaaaagcc

SEQ ID NO: 848082 - DNA, 15 bp, Homo sapiens
acttgccaaaagcca

SEQ ID NO: 848083 - DNA, 15 bp, Homo sapiens
cttgccaaaagccat

SEQ ID NO: 848084 - DNA, 15 bp, Homo sapiens
ttgccaaaagccata

SEQ ID NO: 848085 - DNA, 15 bp, Homo sapiens
tgccaaaagccatac

SEQ ID NO: 848086 - DNA, 15 bp, Homo sapiens
gccaaaagccataca

SEQ ID NO: 848087 - DNA, 15 bp, Homo sapiens
ccaaaagccatacag

SEQ ID NO: 848088 - DNA, 15 bp, Homo sapiens
caaaagccatacagg

SEQ ID NO: 848089 - DNA, 15 bp, Homo sapiens
aaaagccatacagga

SEQ ID NO: 848090 - DNA, 15 bp, Homo sapiens
aaagccatacaggaa

SEQ ID NO: 848091 - DNA, 15 bp, Homo sapiens
aagccatacaggaaa

SEQ ID NO: 848092 - DNA, 15 bp, Homo sapiens
agccatacaggaaaa

SEQ ID NO: 848093 - DNA, 15 bp, Homo sapiens
gccatacaggaaaat

SEQ ID NO: 848094 - DNA, 15 bp, Homo sapiens
ccatacaggaaaatg

SEQ ID NO: 848095 - DNA, 15 bp, Homo sapiens
catacaggaaaatgg

SEQ ID NO: 848096 - DNA, 15 bp, Homo sapiens
atacaggaaaatggt

SEQ ID NO: 848097 - DNA, 15 bp, Homo sapiens
tacaggaaaatggta

SEQ ID NO: 848098 - DNA, 15 bp, Homo sapiens
acaggaaaatggtag

SEQ ID NO: 848099 - DNA, 15 bp, Homo sapiens
caggaaaatggtaga

SEQ ID NO: 848100 - DNA, 15 bp, Homo sapiens
aggaaaatggtagag

SEQ ID NO: 848101 - DNA, 15 bp, Homo sapiens
ggaaaatggtagagt

SEQ ID NO: 848102 - DNA, 15 bp, Homo sapiens
gaaaatggtagagtc

SEQ ID NO: 848103 - DNA, 15 bp, Homo sapiens
aaaatggtagagtca

SEQ ID NO: 848104 - DNA, 15 bp, Homo sapiens
aaatggtagagtcac

SEQ ID NO: 848105 - DNA, 15 bp, Homo sapiens
aatggtagagtcaca

SEQ ID NO: 848106 - DNA, 15 bp, Homo sapiens
atggtagagtcacag

SEQ ID NO: 848107 - DNA, 15 bp, Homo sapiens
tggtagagtcacagt

SEQ ID NO: 848108 - DNA, 15 bp, Homo sapiens
ggtagagtcacagtt

SEQ ID NO: 848109 - DNA, 15 bp, Homo sapiens
gtagagtcacagttt

SEQ ID NO: 848110 - DNA, 15 bp, Homo sapiens
tagagtcacagtttg

SEQ ID NO: 848111 - DNA, 15 bp, Homo sapiens
agagtcacagtttga

SEQ ID NO: 848112 - DNA, 15 bp, Homo sapiens
gagtcacagtttgaa

SEQ ID NO: 848113 - DNA, 15 bp, Homo sapiens
agtcacagtttgaac

SEQ ID NO: 848114 - DNA, 15 bp, Homo sapiens
gtcacagtttgaacc

SEQ ID NO: 848115 - DNA, 15 bp, Homo sapiens
tcacagtttgaacca

SEQ ID NO: 848116 - DNA, 15 bp, Homo sapiens
cacagtttgaaccag

SEQ ID NO: 848117 - DNA, 15 bp, Homo sapiens
acagtttgaaccagg

SEQ ID NO: 848118 - DNA, 15 bp, Homo sapiens
cagtttgaaccaggt

SEQ ID NO: 848119 - DNA, 15 bp, Homo sapiens
agtttgaaccaggtc

SEQ ID NO: 848120 - DNA, 15 bp, Homo sapiens
gtttgaaccaggtcc

SEQ ID NO: 848121 - DNA, 15 bp, Homo sapiens
tttgaaccaggtcct

SEQ ID NO: 848122 - DNA, 15 bp, Homo sapiens
ttgaaccaggtcctt

SEQ ID NO: 848123 - DNA, 15 bp, Homo sapiens
tgaaccaggtccttt

SEQ ID NO: 848124 - DNA, 15 bp, Homo sapiens
gaaccaggtcctttt

SEQ ID NO: 848125 - DNA, 15 bp, Homo sapiens
aaccaggtccttttg

SEQ ID NO: 848126 - DNA, 15 bp, Homo sapiens
accaggtccttttga

SEQ ID NO: 848127 - DNA, 15 bp, Homo sapiens
ccaggtccttttgat

SEQ ID NO: 848128 - DNA, 15 bp, Homo sapiens
caggtccttttgatt

SEQ ID NO: 848129 - DNA, 15 bp, Homo sapiens
aggtccttttgattc

SEQ ID NO: 848130 - DNA, 15 bp, Homo sapiens
ggtccttttgattct

SEQ ID NO: 848131 - DNA, 15 bp, Homo sapiens
gtccttttgattctt

SEQ ID NO: 848132 - DNA, 15 bp, Homo sapiens
tccttttgattcttt

SEQ ID NO: 848133 - DNA, 15 bp, Homo sapiens
ccttttgattcttta

SEQ ID NO: 848134 - DNA, 15 bp, Homo sapiens
cttttgattctttac

SEQ ID NO: 848135 - DNA, 15 bp, Homo sapiens
ttttgattctttaca

SEQ ID NO: 848136 - DNA, 15 bp, Homo sapiens
tttgattctttacat

SEQ ID NO: 848137 - DNA, 15 bp, Homo sapiens
ttgattctttacatt

SEQ ID NO: 848138 - DNA, 15 bp, Homo sapiens
tgattctttacatta

SEQ ID NO: 848139 - DNA, 15 bp, Homo sapiens
gattctttacattaa

SEQ ID NO: 848140 - DNA, 15 bp, Homo sapiens
attctttacattaaa

SEQ ID NO: 848141 - DNA, 15 bp, Homo sapiens
ttctttacattaaac

SEQ ID NO: 848142 - DNA, 15 bp, Homo sapiens
tctttacattaaacc

SEQ ID NO: 848143 - DNA, 15 bp, Homo sapiens
ctttacattaaacca

SEQ ID NO: 848144 - DNA, 15 bp, Homo sapiens
tttacattaaaccat

SEQ ID NO: 848145 - DNA, 15 bp, Homo sapiens
ttacattaaaccatg

SEQ ID NO: 848146 - DNA, 15 bp, Homo sapiens
tacattaaaccatgc

SEQ ID NO: 848147 - DNA, 15 bp, Homo sapiens
acattaaaccatgct

SEQ ID NO: 848148 - DNA, 15 bp, Homo sapiens
cattaaaccatgctt

SEQ ID NO: 848149 - DNA, 15 bp, Homo sapiens
attaaaccatgcttt

SEQ ID NO: 848150 - DNA, 15 bp, Homo sapiens
ttaaaccatgctttg

SEQ ID NO: 848151 - DNA, 15 bp, Homo sapiens
taaaccatgctttga

SEQ ID NO: 848152 - DNA, 15 bp, Homo sapiens
aaaccatgctttgat

SEQ ID NO: 848153 - DNA, 15 bp, Homo sapiens
aaccatgctttgatc

SEQ ID NO: 848154 - DNA, 15 bp, Homo sapiens
accatgctttgatct

SEQ ID NO: 848155 - DNA, 15 bp, Homo sapiens
ccatgctttgatctt

SEQ ID NO: 848156 - DNA, 15 bp, Homo sapiens
catgctttgatcttg

SEQ ID NO: 848157 - DNA, 15 bp, Homo sapiens
atgctttgatcttgg

SEQ ID NO: 848158 - DNA, 15 bp, Homo sapiens
tgctttgatcttgga

SEQ ID NO: 848159 - DNA, 15 bp, Homo sapiens
gctttgatcttggaa

SEQ ID NO: 848160 - DNA, 15 bp, Homo sapiens
ctttgatcttggaaa

SEQ ID NO: 848161 - DNA, 15 bp, Homo sapiens
tttgatcttggaaat

SEQ ID NO: 848162 - DNA, 15 bp, Homo sapiens
ttgatcttggaaata

SEQ ID NO: 848163 - DNA, 15 bp, Homo sapiens
tgatcttggaaatac

SEQ ID NO: 848164 - DNA, 15 bp, Homo sapiens
gatcttggaaataca

SEQ ID NO: 848165 - DNA, 15 bp, Homo sapiens
atcttggaaatacac

SEQ ID NO: 848166 - DNA, 15 bp, Homo sapiens
tcttggaaatacact

SEQ ID NO: 848167 - DNA, 15 bp, Homo sapiens
cttggaaatacactg

SEQ ID NO: 848168 - DNA, 15 bp, Homo sapiens
ttggaaatacactgt

SEQ ID NO: 848169 - DNA, 15 bp, Homo sapiens
tggaaatacactgta

SEQ ID NO: 848170 - DNA, 15 bp, Homo sapiens
ggaaatacactgtaa

SEQ ID NO: 848171 - DNA, 15 bp, Homo sapiens
gaaatacactgtaag

SEQ ID NO: 848172 - DNA, 15 bp, Homo sapiens
aaatacactgtaagg

SEQ ID NO: 848173 - DNA, 15 bp, Homo sapiens
aatacactgtaaggc

SEQ ID NO: 848174 - DNA, 15 bp, Homo sapiens
atacactgtaaggca

SEQ ID NO: 848175 - DNA, 15 bp, Homo sapiens
tacactgtaaggcaa

SEQ ID NO: 848176 - DNA, 15 bp, Homo sapiens
acactgtaaggcaat

SEQ ID NO: 848177 - DNA, 15 bp, Homo sapiens
cactgtaaggcaata

SEQ ID NO: 848178 - DNA, 15 bp, Homo sapiens
actgtaaggcaataa

SEQ ID NO: 848179 - DNA, 15 bp, Homo sapiens
ctgtaaggcaataaa

SEQ ID NO: 848180 - DNA, 15 bp, Homo sapiens
tgtaaggcaataaat

SEQ ID NO: 848181 - DNA, 15 bp, Homo sapiens
gtaaggcaataaatc

SEQ ID NO: 848182 - DNA, 15 bp, Homo sapiens
taaggcaataaatca

SEQ ID NO: 848183 - DNA, 15 bp, Homo sapiens
aaggcaataaatcaa

SEQ ID NO: 848184 - DNA, 15 bp, Homo sapiens
aggcaataaatcaat

SEQ ID NO: 848185 - DNA, 15 bp, Homo sapiens
ggcaataaatcaata

SEQ ID NO: 848186 - DNA, 15 bp, Homo sapiens
gcaataaatcaatag

SEQ ID NO: 848187 - DNA, 15 bp, Homo sapiens
caataaatcaataga

SEQ ID NO: 848188 - DNA, 15 bp, Homo sapiens
aataaatcaatagat

SEQ ID NO: 848189 - DNA, 15 bp, Homo sapiens
ataaatcaatagata

SEQ ID NO: 848190 - DNA, 15 bp, Homo sapiens
taaatcaatagatac

SEQ ID NO: 848191 - DNA, 15 bp, Homo sapiens
aaatcaatagatacg

SEQ ID NO: 848192 - DNA, 15 bp, Homo sapiens
aatcaatagatacgg

SEQ ID NO: 848193 - DNA, 15 bp, Homo sapiens
atcaatagatacgga

SEQ ID NO: 848194 - DNA, 15 bp, Homo sapiens
tcaatagatacggat

SEQ ID NO: 848195 - DNA, 15 bp, Homo sapiens
caatagatacggata

SEQ ID NO: 848196 - DNA, 15 bp, Homo sapiens
aatagatacggataa

SEQ ID NO: 848197 - DNA, 15 bp, Homo sapiens
atagatacggataat

SEQ ID NO: 848198 - DNA, 15 bp, Homo sapiens
tagatacggataatt

SEQ ID NO: 848199 - DNA, 15 bp, Homo sapiens
agatacggataattc

SEQ ID NO: 848200 - DNA, 15 bp, Homo sapiens
gatacggataattca

SEQ ID NO: 848201 - DNA, 15 bp, Homo sapiens
atacggataattcac

SEQ ID NO: 848202 - DNA, 15 bp, Homo sapiens
tacggataattcaca

SEQ ID NO: 848203 - DNA, 15 bp, Homo sapiens
acggataattcacag

SEQ ID NO: 848204 - DNA, 15 bp, Homo sapiens
cggataattcacagg

SEQ ID NO: 848205 - DNA, 15 bp, Homo sapiens
ggataattcacaggc

SEQ ID NO: 848206 - DNA, 15 bp, Homo sapiens
gataattcacaggct

SEQ ID NO: 848207 - DNA, 15 bp, Homo sapiens
ataattcacaggctt

SEQ ID NO: 848208 - DNA, 15 bp, Homo sapiens
taattcacaggcttc

SEQ ID NO: 848209 - DNA, 15 bp, Homo sapiens
aattcacaggcttct

SEQ ID NO: 848210 - DNA, 15 bp, Homo sapiens
attcacaggcttcta

SEQ ID NO: 848211 - DNA, 15 bp, Homo sapiens
ttcacaggcttctaa

SEQ ID NO: 848212 - DNA, 15 bp, Homo sapiens
tcacaggcttctaaa

SEQ ID NO: 848213 - DNA, 15 bp, Homo sapiens
cacaggcttctaaat

SEQ ID NO: 848214 - DNA, 15 bp, Homo sapiens
acaggcttctaaata

SEQ ID NO: 848215 - DNA, 15 bp, Homo sapiens
caggcttctaaataa

SEQ ID NO: 848216 - DNA, 15 bp, Homo sapiens
aggcttctaaataaa

SEQ ID NO: 848217 - DNA, 15 bp, Homo sapiens
ggcttctaaataaat

SEQ ID NO: 848218 - DNA, 15 bp, Homo sapiens
gcttctaaataaatg

SEQ ID NO: 848219 - DNA, 15 bp, Homo sapiens
cttctaaataaatgg

SEQ ID NO: 848220 - DNA, 15 bp, Homo sapiens
ttctaaataaatgga

SEQ ID NO: 848221 - DNA, 15 bp, Homo sapiens
tctaaataaatggaa

SEQ ID NO: 848222 - DNA, 15 bp, Homo sapiens
ctaaataaatggaag

SEQ ID NO: 848223 - DNA, 15 bp, Homo sapiens
taaataaatggaagt

SEQ ID NO: 848224 - DNA, 15 bp, Homo sapiens
aaataaatggaagtt

SEQ ID NO: 848225 - DNA, 15 bp, Homo sapiens
aataaatggaagttg

SEQ ID NO: 848226 - DNA, 15 bp, Homo sapiens
ataaatggaagttga

SEQ ID NO: 848227 - DNA, 15 bp, Homo sapiens
taaatggaagttgat

SEQ ID NO: 848228 - DNA, 15 bp, Homo sapiens
aaatggaagttgatt

SEQ ID NO: 848229 - DNA, 15 bp, Homo sapiens
aatggaagttgattg

SEQ ID NO: 848230 - DNA, 15 bp, Homo sapiens
atggaagttgattgt

SEQ ID NO: 848231 - DNA, 15 bp, Homo sapiens
tggaagttgattgtt

SEQ ID NO: 848232 - DNA, 15 bp, Homo sapiens
ggaagttgattgttt

SEQ ID NO: 848233 - DNA, 15 bp, Homo sapiens
gaagttgattgtttt

SEQ ID NO: 848234 - DNA, 15 bp, Homo sapiens
aagttgattgttttt

SEQ ID NO: 848235 - DNA, 15 bp, Homo sapiens
agttgattgttttta

SEQ ID NO: 848236 - DNA, 15 bp, Homo sapiens
gttgattgtttttat

SEQ ID NO: 848237 - DNA, 15 bp, Homo sapiens
ttgattgtttttatc

SEQ ID NO: 848238 - DNA, 15 bp, Homo sapiens
tgattgtttttatct

SEQ ID NO: 848239 - DNA, 15 bp, Homo sapiens
gattgtttttatctg

SEQ ID NO: 848240 - DNA, 15 bp, Homo sapiens
attgtttttatctgt

SEQ ID NO: 848241 - DNA, 15 bp, Homo sapiens
ttgtttttatctgtg

SEQ ID NO: 848242 - DNA, 15 bp, Homo sapiens
tgtttttatctgtga

SEQ ID NO: 848243 - DNA, 15 bp, Homo sapiens
gtttttatctgtgag

SEQ ID NO: 848244 - DNA, 15 bp, Homo sapiens
tttttatctgtgagc

SEQ ID NO: 848245 - DNA, 15 bp, Homo sapiens
ttttatctgtgagcc

SEQ ID NO: 848246 - DNA, 15 bp, Homo sapiens
tttatctgtgagcca

SEQ ID NO: 848247 - DNA, 15 bp, Homo sapiens
ttatctgtgagccaa

SEQ ID NO: 848248 - DNA, 15 bp, Homo sapiens
tatctgtgagccaaa

SEQ ID NO: 848249 - DNA, 15 bp, Homo sapiens
atctgtgagccaaag

SEQ ID NO: 848250 - DNA, 15 bp, Homo sapiens
tctgtgagccaaagt

SEQ ID NO: 848251 - DNA, 15 bp, Homo sapiens
ctgtgagccaaagta

SEQ ID NO: 848252 - DNA, 15 bp, Homo sapiens
tgtgagccaaagtaa

SEQ ID NO: 848253 - DNA, 15 bp, Homo sapiens
gtgagccaaagtaag

SEQ ID NO: 848254 - DNA, 15 bp, Homo sapiens
tgagccaaagtaaga

SEQ ID NO: 848255 - DNA, 15 bp, Homo sapiens
gagccaaagtaagac

SEQ ID NO: 848256 - DNA, 15 bp, Homo sapiens
agccaaagtaagact

SEQ ID NO: 848257 - DNA, 15 bp, Homo sapiens
gccaaagtaagactt

SEQ ID NO: 848258 - DNA, 15 bp, Homo sapiens
ccaaagtaagactta

SEQ ID NO: 848259 - DNA, 15 bp, Homo sapiens
caaagtaagacttat

SEQ ID NO: 848260 - DNA, 15 bp, Homo sapiens
aaagtaagacttatt

SEQ ID NO: 848261 - DNA, 15 bp, Homo sapiens
aagtaagacttattc

SEQ ID NO: 848262 - DNA, 15 bp, Homo sapiens
agtaagacttattct

SEQ ID NO: 848263 - DNA, 15 bp, Homo sapiens
gtaagacttattcta

SEQ ID NO: 848264 - DNA, 15 bp, Homo sapiens
taagacttattctaa

SEQ ID NO: 848265 - DNA, 15 bp, Homo sapiens
aagacttattctaag

SEQ ID NO: 848266 - DNA, 15 bp, Homo sapiens
agacttattctaaga

SEQ ID NO: 848267 - DNA, 15 bp, Homo sapiens
gacttattctaagaa

SEQ ID NO: 848268 - DNA, 15 bp, Homo sapiens
acttattctaagaat

SEQ ID NO: 848269 - DNA, 15 bp, Homo sapiens
cttattctaagaatt

SEQ ID NO: 848270 - DNA, 15 bp, Homo sapiens
ttattctaagaattc

SEQ ID NO: 848271 - DNA, 15 bp, Homo sapiens
tattctaagaattcc

SEQ ID NO: 848272 - DNA, 15 bp, Homo sapiens
attctaagaattcca

SEQ ID NO: 848273 - DNA, 15 bp, Homo sapiens
ttctaagaattccac

SEQ ID NO: 848274 - DNA, 15 bp, Homo sapiens
tctaagaattccaca

SEQ ID NO: 848275 - DNA, 15 bp, Homo sapiens
ctaagaattccacaa

SEQ ID NO: 848276 - DNA, 15 bp, Homo sapiens
taagaattccacaaa

SEQ ID NO: 848277 - DNA, 15 bp, Homo sapiens
aagaattccacaaat

SEQ ID NO: 848278 - DNA, 15 bp, Homo sapiens
agaattccacaaatt

SEQ ID NO: 848279 - DNA, 15 bp, Homo sapiens
gaattccacaaattt

SEQ ID NO: 848280 - DNA, 15 bp, Homo sapiens
aattccacaaattta

SEQ ID NO: 848281 - DNA, 15 bp, Homo sapiens
attccacaaatttag

SEQ ID NO: 848282 - DNA, 15 bp, Homo sapiens
ttccacaaatttaga

SEQ ID NO: 848283 - DNA, 15 bp, Homo sapiens
tccacaaatttagat

SEQ ID NO: 848284 - DNA, 15 bp, Homo sapiens
ccacaaatttagata

SEQ ID NO: 848285 - DNA, 15 bp, Homo sapiens
cacaaatttagataa

SEQ ID NO: 848286 - DNA, 15 bp, Homo sapiens
acaaatttagataag

SEQ ID NO: 848287 - DNA, 15 bp, Homo sapiens
caaatttagataaga

SEQ ID NO: 848288 - DNA, 15 bp, Homo sapiens
aaatttagataagat

SEQ ID NO: 848289 - DNA, 15 bp, Homo sapiens
aatttagataagata

SEQ ID NO: 848290 - DNA, 15 bp, Homo sapiens
atttagataagatag

SEQ ID NO: 848291 - DNA, 15 bp, Homo sapiens
tttagataagataga

SEQ ID NO: 848292 - DNA, 15 bp, Homo sapiens
ttagataagatagag

SEQ ID NO: 848293 - DNA, 15 bp, Homo sapiens
tagataagatagagt

SEQ ID NO: 848294 - DNA, 15 bp, Homo sapiens
agataagatagagta

SEQ ID NO: 848295 - DNA, 15 bp, Homo sapiens
gataagatagagtat

SEQ ID NO: 848296 - DNA, 15 bp, Homo sapiens
ataagatagagtata

SEQ ID NO: 848297 - DNA, 15 bp, Homo sapiens
taagatagagtatat

SEQ ID NO: 848298 - DNA, 15 bp, Homo sapiens
aagatagagtatatg

SEQ ID NO: 848299 - DNA, 15 bp, Homo sapiens
agatagagtatatgg

SEQ ID NO: 848300 - DNA, 15 bp, Homo sapiens
gatagagtatatggc

SEQ ID NO: 848301 - DNA, 15 bp, Homo sapiens
atagagtatatggct

SEQ ID NO: 848302 - DNA, 15 bp, Homo sapiens
tagagtatatggctt

SEQ ID NO: 848303 - DNA, 15 bp, Homo sapiens
agagtatatggcttc

SEQ ID NO: 848304 - DNA, 15 bp, Homo sapiens
gagtatatggcttct

SEQ ID NO: 848305 - DNA, 15 bp, Homo sapiens
agtatatggcttcta

SEQ ID NO: 848306 - DNA, 15 bp, Homo sapiens
gtatatggcttctag

SEQ ID NO: 848307 - DNA, 15 bp, Homo sapiens
tatatggcttctaga

SEQ ID NO: 848308 - DNA, 15 bp, Homo sapiens
atatggcttctagac

SEQ ID NO: 848309 - DNA, 15 bp, Homo sapiens
tatggcttctagaca

SEQ ID NO: 848310 - DNA, 15 bp, Homo sapiens
atggcttctagacat

SEQ ID NO: 848311 - DNA, 15 bp, Homo sapiens
tggcttctagacatc

SEQ ID NO: 848312 - DNA, 15 bp, Homo sapiens
ggcttctagacatcc

SEQ ID NO: 848313 - DNA, 15 bp, Homo sapiens
gcttctagacatcca

SEQ ID NO: 848314 - DNA, 15 bp, Homo sapiens
cttctagacatccaa

SEQ ID NO: 848315 - DNA, 15 bp, Homo sapiens
ttctagacatccaac

SEQ ID NO: 848316 - DNA, 15 bp, Homo sapiens
tctagacatccaaca

SEQ ID NO: 848317 - DNA, 15 bp, Homo sapiens
ctagacatccaacat

SEQ ID NO: 848318 - DNA, 15 bp, Homo sapiens
tagacatccaacata

SEQ ID NO: 848319 - DNA, 15 bp, Homo sapiens
agacatccaacatag

SEQ ID NO: 848320 - DNA, 15 bp, Homo sapiens
gacatccaacataga

SEQ ID NO: 848321 - DNA, 15 bp, Homo sapiens
acatccaacatagaa

SEQ ID NO: 848322 - DNA, 15 bp, Homo sapiens
catccaacatagaac

SEQ ID NO: 848323 - DNA, 15 bp, Homo sapiens
atccaacatagaact

SEQ ID NO: 848324 - DNA, 15 bp, Homo sapiens
tccaacatagaactg

SEQ ID NO: 848325 - DNA, 15 bp, Homo sapiens
ccaacatagaactga

SEQ ID NO: 848326 - DNA, 15 bp, Homo sapiens
caacatagaactgag

SEQ ID NO: 848327 - DNA, 15 bp, Homo sapiens
aacatagaactgagt

SEQ ID NO: 848328 - DNA, 15 bp, Homo sapiens
acatagaactgagtt

SEQ ID NO: 848329 - DNA, 15 bp, Homo sapiens
catagaactgagttt

SEQ ID NO: 848330 - DNA, 15 bp, Homo sapiens
atagaactgagtttg

SEQ ID NO: 848331 - DNA, 15 bp, Homo sapiens
tagaactgagtttgt

SEQ ID NO: 848332 - DNA, 15 bp, Homo sapiens
agaactgagtttgtg

SEQ ID NO: 848333 - DNA, 15 bp, Homo sapiens
gaactgagtttgtgt

SEQ ID NO: 848334 - DNA, 15 bp, Homo sapiens
aactgagtttgtgtt

SEQ ID NO: 848335 - DNA, 15 bp, Homo sapiens
actgagtttgtgtta

SEQ ID NO: 848336 - DNA, 15 bp, Homo sapiens
ctgagtttgtgttat

SEQ ID NO: 848337 - DNA, 15 bp, Homo sapiens
tgagtttgtgttatc

SEQ ID NO: 848338 - DNA, 15 bp, Homo sapiens
gagtttgtgttatca

SEQ ID NO: 848339 - DNA, 15 bp, Homo sapiens
agtttgtgttatcag

SEQ ID NO: 848340 - DNA, 15 bp, Homo sapiens
gtttgtgttatcagt

SEQ ID NO: 848341 - DNA, 15 bp, Homo sapiens
tttgtgttatcagtt

SEQ ID NO: 848342 - DNA, 15 bp, Homo sapiens
ttgtgttatcagttt

SEQ ID NO: 848343 - DNA, 15 bp, Homo sapiens
tgtgttatcagttta

SEQ ID NO: 848344 - DNA, 15 bp, Homo sapiens
gtgttatcagtttaa

SEQ ID NO: 848345 - DNA, 15 bp, Homo sapiens
tgttatcagtttaag

SEQ ID NO: 848346 - DNA, 15 bp, Homo sapiens
gttatcagtttaaga

SEQ ID NO: 848347 - DNA, 15 bp, Homo sapiens
ttatcagtttaagat

SEQ ID NO: 848348 - DNA, 15 bp, Homo sapiens
tatcagtttaagatt

SEQ ID NO: 848349 - DNA, 15 bp, Homo sapiens
atcagtttaagattt

SEQ ID NO: 848350 - DNA, 15 bp, Homo sapiens
tcagtttaagatttg

SEQ ID NO: 848351 - DNA, 15 bp, Homo sapiens
cagtttaagatttgg

SEQ ID NO: 848352 - DNA, 15 bp, Homo sapiens
agtttaagatttggt

SEQ ID NO: 848353 - DNA, 15 bp, Homo sapiens
gtttaagatttggtt

SEQ ID NO: 848354 - DNA, 15 bp, Homo sapiens
tttaagatttggttt

SEQ ID NO: 848355 - DNA, 15 bp, Homo sapiens
ttaagatttggtttt

SEQ ID NO: 848356 - DNA, 15 bp, Homo sapiens
taagatttggttttg

SEQ ID NO: 848357 - DNA, 15 bp, Homo sapiens
aagatttggttttgc

SEQ ID NO: 848358 - DNA, 15 bp, Homo sapiens
agatttggttttgct

SEQ ID NO: 848359 - DNA, 15 bp, Homo sapiens
gatttggttttgctg

SEQ ID NO: 848360 - DNA, 15 bp, Homo sapiens
atttggttttgctgt

SEQ ID NO: 848361 - DNA, 15 bp, Homo sapiens
tttggttttgctgta

SEQ ID NO: 848362 - DNA, 15 bp, Homo sapiens
ttggttttgctgtaa

SEQ ID NO: 848363 - DNA, 15 bp, Homo sapiens
tggttttgctgtaag

SEQ ID NO: 848364 - DNA, 15 bp, Homo sapiens
ggttttgctgtaagg

SEQ ID NO: 848365 - DNA, 15 bp, Homo sapiens
gttttgctgtaaggt

SEQ ID NO: 848366 - DNA, 15 bp, Homo sapiens
ttttgctgtaaggtg

SEQ ID NO: 848367 - DNA, 15 bp, Homo sapiens
tttgctgtaaggtgc

SEQ ID NO: 848368 - DNA, 15 bp, Homo sapiens
ttgctgtaaggtgca

SEQ ID NO: 848369 - DNA, 15 bp, Homo sapiens
tgctgtaaggtgcac

SEQ ID NO: 848370 - DNA, 15 bp, Homo sapiens
gctgtaaggtgcaca

SEQ ID NO: 848371 - DNA, 15 bp, Homo sapiens
ctgtaaggtgcacac

SEQ ID NO: 848372 - DNA, 15 bp, Homo sapiens
tgtaaggtgcacaca

SEQ ID NO: 848373 - DNA, 15 bp, Homo sapiens
gtaaggtgcacacac

SEQ ID NO: 848374 - DNA, 15 bp, Homo sapiens
taaggtgcacacact

SEQ ID NO: 848375 - DNA, 15 bp, Homo sapiens
aaggtgcacacactt

SEQ ID NO: 848376 - DNA, 15 bp, Homo sapiens
aggtgcacacacttt

SEQ ID NO: 848377 - DNA, 15 bp, Homo sapiens
ggtgcacacactttg

SEQ ID NO: 848378 - DNA, 15 bp, Homo sapiens
gtgcacacactttga

SEQ ID NO: 848379 - DNA, 15 bp, Homo sapiens
tgcacacactttgag

SEQ ID NO: 848380 - DNA, 15 bp, Homo sapiens
gcacacactttgagg

SEQ ID NO: 848381 - DNA, 15 bp, Homo sapiens
cacacactttgagga

SEQ ID NO: 848382 - DNA, 15 bp, Homo sapiens
acacactttgaggaa

SEQ ID NO: 848383 - DNA, 15 bp, Homo sapiens
cacactttgaggaac

SEQ ID NO: 848384 - DNA, 15 bp, Homo sapiens
acactttgaggaact

SEQ ID NO: 848385 - DNA, 15 bp, Homo sapiens
cactttgaggaacta

SEQ ID NO: 848386 - DNA, 15 bp, Homo sapiens
actttgaggaactaa

SEQ ID NO: 848387 - DNA, 15 bp, Homo sapiens
ctttgaggaactaaa

SEQ ID NO: 848388 - DNA, 15 bp, Homo sapiens
tttgaggaactaaaa

SEQ ID NO: 848389 - DNA, 15 bp, Homo sapiens
ttgaggaactaaaaa

SEQ ID NO: 848390 - DNA, 15 bp, Homo sapiens
tgaggaactaaaaat

SEQ ID NO: 848391 - DNA, 15 bp, Homo sapiens
gaggaactaaaaata

SEQ ID NO: 848392 - DNA, 15 bp, Homo sapiens
aggaactaaaaataa

SEQ ID NO: 848393 - DNA, 15 bp, Homo sapiens
ggaactaaaaataat

SEQ ID NO: 848394 - DNA, 15 bp, Homo sapiens
gaactaaaaataatt

SEQ ID NO: 848395 - DNA, 15 bp, Homo sapiens
aactaaaaataattg

SEQ ID NO: 848396 - DNA, 15 bp, Homo sapiens
actaaaaataattgt

SEQ ID NO: 848397 - DNA, 15 bp, Homo sapiens
ctaaaaataattgtc

SEQ ID NO: 848398 - DNA, 15 bp, Homo sapiens
taaaaataattgtct

SEQ ID NO: 848399 - DNA, 15 bp, Homo sapiens
aaaaataattgtctg

SEQ ID NO: 848400 - DNA, 15 bp, Homo sapiens
aaaataattgtctgt

SEQ ID NO: 848401 - DNA, 15 bp, Homo sapiens
aaataattgtctgtt

SEQ ID NO: 848402 - DNA, 15 bp, Homo sapiens
aataattgtctgttc

SEQ ID NO: 848403 - DNA, 15 bp, Homo sapiens
ataattgtctgttct

SEQ ID NO: 848404 - DNA, 15 bp, Homo sapiens
taattgtctgttctt

SEQ ID NO: 848405 - DNA, 15 bp, Homo sapiens
aattgtctgttctta

SEQ ID NO: 848406 - DNA, 15 bp, Homo sapiens
attgtctgttcttat

SEQ ID NO: 848407 - DNA, 15 bp, Homo sapiens
ttgtctgttcttatt

SEQ ID NO: 848408 - DNA, 15 bp, Homo sapiens
tgtctgttcttattc

SEQ ID NO: 848409 - DNA, 15 bp, Homo sapiens
gtctgttcttattct

SEQ ID NO: 848410 - DNA, 15 bp, Homo sapiens
tctgttcttattctg

SEQ ID NO: 848411 - DNA, 15 bp, Homo sapiens
ctgttcttattctga

SEQ ID NO: 848412 - DNA, 15 bp, Homo sapiens
tgttcttattctgat

SEQ ID NO: 848413 - DNA, 15 bp, Homo sapiens
gttcttattctgatc

SEQ ID NO: 848414 - DNA, 15 bp, Homo sapiens
ttcttattctgatca

SEQ ID NO: 848415 - DNA, 15 bp, Homo sapiens
tcttattctgatcag

SEQ ID NO: 848416 - DNA, 15 bp, Homo sapiens
cttattctgatcaga

SEQ ID NO: 848417 - DNA, 15 bp, Homo sapiens
ttattctgatcagaa

SEQ ID NO: 848418 - DNA, 15 bp, Homo sapiens
tattctgatcagaat

SEQ ID NO: 848419 - DNA, 15 bp, Homo sapiens
attctgatcagaatg

SEQ ID NO: 848420 - DNA, 15 bp, Homo sapiens
ttctgatcagaatgt

SEQ ID NO: 848421 - DNA, 15 bp, Homo sapiens
tctgatcagaatgtg

SEQ ID NO: 848422 - DNA, 15 bp, Homo sapiens
ctgatcagaatgtgt

SEQ ID NO: 848423 - DNA, 15 bp, Homo sapiens
tgatcagaatgtgta

SEQ ID NO: 848424 - DNA, 15 bp, Homo sapiens
gatcagaatgtgtaa

SEQ ID NO: 848425 - DNA, 15 bp, Homo sapiens
atcagaatgtgtaat

SEQ ID NO: 848426 - DNA, 15 bp, Homo sapiens
tcagaatgtgtaatg

SEQ ID NO: 848427 - DNA, 15 bp, Homo sapiens
cagaatgtgtaatgt

SEQ ID NO: 848428 - DNA, 15 bp, Homo sapiens
agaatgtgtaatgtg

SEQ ID NO: 848429 - DNA, 15 bp, Homo sapiens
gaatgtgtaatgtgt

SEQ ID NO: 848430 - DNA, 15 bp, Homo sapiens
aatgtgtaatgtgtt

SEQ ID NO: 848431 - DNA, 15 bp, Homo sapiens
atgtgtaatgtgttg

SEQ ID NO: 848432 - DNA, 15 bp, Homo sapiens
tgtgtaatgtgttgt

SEQ ID NO: 848433 - DNA, 15 bp, Homo sapiens
gtgtaatgtgttgtc

SEQ ID NO: 848434 - DNA, 15 bp, Homo sapiens
tgtaatgtgttgtcc

SEQ ID NO: 848435 - DNA, 15 bp, Homo sapiens
gtaatgtgttgtcca

SEQ ID NO: 848436 - DNA, 15 bp, Homo sapiens
taatgtgttgtccag

SEQ ID NO: 848437 - DNA, 15 bp, Homo sapiens
aatgtgttgtccagt

SEQ ID NO: 848438 - DNA, 15 bp, Homo sapiens
atgtgttgtccagtt

SEQ ID NO: 848439 - DNA, 15 bp, Homo sapiens
tgtgttgtccagttt

SEQ ID NO: 848440 - DNA, 15 bp, Homo sapiens
gtgttgtccagtttt

SEQ ID NO: 848441 - DNA, 15 bp, Homo sapiens
tgttgtccagttttg

SEQ ID NO: 848442 - DNA, 15 bp, Homo sapiens
gttgtccagttttgg

SEQ ID NO: 848443 - DNA, 15 bp, Homo sapiens
ttgtccagttttgga

SEQ ID NO: 848444 - DNA, 15 bp, Homo sapiens
tgtccagttttggat

SEQ ID NO: 848445 - DNA, 15 bp, Homo sapiens
gtccagttttggatg

SEQ ID NO: 848446 - DNA, 15 bp, Homo sapiens
tccagttttggatga

SEQ ID NO: 848447 - DNA, 15 bp, Homo sapiens
ccagttttggatgat

SEQ ID NO: 848448 - DNA, 15 bp, Homo sapiens
cagttttggatgatg

SEQ ID NO: 848449 - DNA, 15 bp, Homo sapiens
agttttggatgatga

SEQ ID NO: 848450 - DNA, 15 bp, Homo sapiens
gttttggatgatgaa

SEQ ID NO: 848451 - DNA, 15 bp, Homo sapiens
ttttggatgatgaat

SEQ ID NO: 848452 - DNA, 15 bp, Homo sapiens
tttggatgatgaatt

SEQ ID NO: 848453 - DNA, 15 bp, Homo sapiens
ttggatgatgaattt

SEQ ID NO: 848454 - DNA, 15 bp, Homo sapiens
tggatgatgaatttc

SEQ ID NO: 848455 - DNA, 15 bp, Homo sapiens
ggatgatgaatttct

SEQ ID NO: 848456 - DNA, 15 bp, Homo sapiens
gatgatgaatttctt

SEQ ID NO: 848457 - DNA, 15 bp, Homo sapiens
atgatgaatttctta

SEQ ID NO: 848458 - DNA, 15 bp, Homo sapiens
tgatgaatttcttat

SEQ ID NO: 848459 - DNA, 15 bp, Homo sapiens
gatgaatttcttatt

SEQ ID NO: 848460 - DNA, 15 bp, Homo sapiens
atgaatttcttattt

SEQ ID NO: 848461 - DNA, 15 bp, Homo sapiens
tgaatttcttatttc

SEQ ID NO: 848462 - DNA, 15 bp, Homo sapiens
gaatttcttatttct

SEQ ID NO: 848463 - DNA, 15 bp, Homo sapiens
aatttcttatttcta

SEQ ID NO: 848464 - DNA, 15 bp, Homo sapiens
atttcttatttctaa

SEQ ID NO: 848465 - DNA, 15 bp, Homo sapiens
tttcttatttctaat

SEQ ID NO: 848466 - DNA, 15 bp, Homo sapiens
ttcttatttctaatc

SEQ ID NO: 848467 - DNA, 15 bp, Homo sapiens
tcttatttctaatct

SEQ ID NO: 848468 - DNA, 15 bp, Homo sapiens
cttatttctaatctc

SEQ ID NO: 848469 - DNA, 15 bp, Homo sapiens
ttatttctaatctca

SEQ ID NO: 848470 - DNA, 15 bp, Homo sapiens
tatttctaatctcat

SEQ ID NO: 848471 - DNA, 15 bp, Homo sapiens
atttctaatctcata

SEQ ID NO: 848472 - DNA, 15 bp, Homo sapiens
tttctaatctcataa

SEQ ID NO: 848473 - DNA, 15 bp, Homo sapiens
ttctaatctcataag

SEQ ID NO: 848474 - DNA, 15 bp, Homo sapiens
tctaatctcataaga

SEQ ID NO: 848475 - DNA, 15 bp, Homo sapiens
ctaatctcataagaa

SEQ ID NO: 848476 - DNA, 15 bp, Homo sapiens
taatctcataagaaa

SEQ ID NO: 848477 - DNA, 15 bp, Homo sapiens
aatctcataagaaac

SEQ ID NO: 848478 - DNA, 15 bp, Homo sapiens
atctcataagaaact

SEQ ID NO: 848479 - DNA, 15 bp, Homo sapiens
tctcataagaaactt

SEQ ID NO: 848480 - DNA, 15 bp, Homo sapiens
ctcataagaaacttg

SEQ ID NO: 848481 - DNA, 15 bp, Homo sapiens
tcataagaaacttgt

SEQ ID NO: 848482 - DNA, 15 bp, Homo sapiens
cataagaaacttgtc

SEQ ID NO: 848483 - DNA, 15 bp, Homo sapiens
ataagaaacttgtca

SEQ ID NO: 848484 - DNA, 15 bp, Homo sapiens
taagaaacttgtcat

SEQ ID NO: 848485 - DNA, 15 bp, Homo sapiens
aagaaacttgtcata

SEQ ID NO: 848486 - DNA, 15 bp, Homo sapiens
agaaacttgtcatag

SEQ ID NO: 848487 - DNA, 15 bp, Homo sapiens
gaaacttgtcataga

SEQ ID NO: 848488 - DNA, 15 bp, Homo sapiens
aaacttgtcatagat

SEQ ID NO: 848489 - DNA, 15 bp, Homo sapiens
aacttgtcatagatg

SEQ ID NO: 848490 - DNA, 15 bp, Homo sapiens
acttgtcatagatgt

SEQ ID NO: 848491 - DNA, 15 bp, Homo sapiens
cttgtcatagatgtg

SEQ ID NO: 848492 - DNA, 15 bp, Homo sapiens
ttgtcatagatgtga

SEQ ID NO: 848493 - DNA, 15 bp, Homo sapiens
tgtcatagatgtgag

SEQ ID NO: 848494 - DNA, 15 bp, Homo sapiens
gtcatagatgtgagg

SEQ ID NO: 848495 - DNA, 15 bp, Homo sapiens
tcatagatgtgaggg

SEQ ID NO: 848496 - DNA, 15 bp, Homo sapiens
catagatgtgaggga

SEQ ID NO: 848497 - DNA, 15 bp, Homo sapiens
atagatgtgagggag

SEQ ID NO: 848498 - DNA, 15 bp, Homo sapiens
tagatgtgagggaga

SEQ ID NO: 848499 - DNA, 15 bp, Homo sapiens
agatgtgagggagag

SEQ ID NO: 848500 - DNA, 15 bp, Homo sapiens
gatgtgagggagaga

SEQ ID NO: 848501 - DNA, 15 bp, Homo sapiens
atgtgagggagagaa

SEQ ID NO: 848502 - DNA, 15 bp, Homo sapiens
tgtgagggagagaat

SEQ ID NO: 848503 - DNA, 15 bp, Homo sapiens
gtgagggagagaatt

SEQ ID NO: 848504 - DNA, 15 bp, Homo sapiens
tgagggagagaatta

SEQ ID NO: 848505 - DNA, 15 bp, Homo sapiens
gagggagagaattaa

SEQ ID NO: 848506 - DNA, 15 bp, Homo sapiens
agggagagaattaag

SEQ ID NO: 848507 - DNA, 15 bp, Homo sapiens
gggagagaattaaga

SEQ ID NO: 848508 - DNA, 15 bp, Homo sapiens
ggagagaattaagaa

SEQ ID NO: 848509 - DNA, 15 bp, Homo sapiens
gagagaattaagaac

SEQ ID NO: 848510 - DNA, 15 bp, Homo sapiens
agagaattaagaaca

SEQ ID NO: 848511 - DNA, 15 bp, Homo sapiens
gagaattaagaacag

SEQ ID NO: 848512 - DNA, 15 bp, Homo sapiens
agaattaagaacaga

SEQ ID NO: 848513 - DNA, 15 bp, Homo sapiens
gaattaagaacagag

SEQ ID NO: 848514 - DNA, 15 bp, Homo sapiens
aattaagaacagagt

SEQ ID NO: 848515 - DNA, 15 bp, Homo sapiens
attaagaacagagtg

SEQ ID NO: 848516 - DNA, 15 bp, Homo sapiens
ttaagaacagagtgt

SEQ ID NO: 848517 - DNA, 15 bp, Homo sapiens
taagaacagagtgtg

SEQ ID NO: 848518 - DNA, 15 bp, Homo sapiens
aagaacagagtgtgg

SEQ ID NO: 848519 - DNA, 15 bp, Homo sapiens
agaacagagtgtggg

SEQ ID NO: 848520 - DNA, 15 bp, Homo sapiens
gaacagagtgtgggg

SEQ ID NO: 848521 - DNA, 15 bp, Homo sapiens
aacagagtgtgggga

SEQ ID NO: 848522 - DNA, 15 bp, Homo sapiens
acagagtgtggggaa

SEQ ID NO: 848523 - DNA, 15 bp, Homo sapiens
cagagtgtggggaag

SEQ ID NO: 848524 - DNA, 15 bp, Homo sapiens
agagtgtggggaaga

SEQ ID NO: 848525 - DNA, 15 bp, Homo sapiens
gagtgtggggaagaa

SEQ ID NO: 848526 - DNA, 15 bp, Homo sapiens
agtgtggggaagaaa

SEQ ID NO: 848527 - DNA, 15 bp, Homo sapiens
gtgtggggaagaaac

SEQ ID NO: 848528 - DNA, 15 bp, Homo sapiens
tgtggggaagaaact

SEQ ID NO: 848529 - DNA, 15 bp, Homo sapiens
gtggggaagaaactg

SEQ ID NO: 848530 - DNA, 15 bp, Homo sapiens
tggggaagaaactgt

SEQ ID NO: 848531 - DNA, 15 bp, Homo sapiens
ggggaagaaactgtg

SEQ ID NO: 848532 - DNA, 15 bp, Homo sapiens
gggaagaaactgtgt

SEQ ID NO: 848533 - DNA, 15 bp, Homo sapiens
ggaagaaactgtgta

SEQ ID NO: 848534 - DNA, 15 bp, Homo sapiens
gaagaaactgtgtac

SEQ ID NO: 848535 - DNA, 15 bp, Homo sapiens
aagaaactgtgtaca

SEQ ID NO: 848536 - DNA, 15 bp, Homo sapiens
agaaactgtgtacat

SEQ ID NO: 848537 - DNA, 15 bp, Homo sapiens
gaaactgtgtacatt

SEQ ID NO: 848538 - DNA, 15 bp, Homo sapiens
aaactgtgtacattt

SEQ ID NO: 848539 - DNA, 15 bp, Homo sapiens
aactgtgtacatttt

SEQ ID NO: 848540 - DNA, 15 bp, Homo sapiens
actgtgtacattttg

SEQ ID NO: 848541 - DNA, 15 bp, Homo sapiens
ctgtgtacattttga

SEQ ID NO: 848542 - DNA, 15 bp, Homo sapiens
tgtgtacattttgat

SEQ ID NO: 848543 - DNA, 15 bp, Homo sapiens
gtgtacattttgatg

SEQ ID NO: 848544 - DNA, 15 bp, Homo sapiens
tgtacattttgatgg

SEQ ID NO: 848545 - DNA, 15 bp, Homo sapiens
gtacattttgatggg

SEQ ID NO: 848546 - DNA, 15 bp, Homo sapiens
tacattttgatggga

SEQ ID NO: 848547 - DNA, 15 bp, Homo sapiens
acattttgatgggat

SEQ ID NO: 848548 - DNA, 15 bp, Homo sapiens
cattttgatgggatc

SEQ ID NO: 848549 - DNA, 15 bp, Homo sapiens
attttgatgggatcc

SEQ ID NO: 848550 - DNA, 15 bp, Homo sapiens
ttttgatgggatcca

SEQ ID NO: 848551 - DNA, 15 bp, Homo sapiens
tttgatgggatccat

SEQ ID NO: 848552 - DNA, 15 bp, Homo sapiens
ttgatgggatccatt

SEQ ID NO: 848553 - DNA, 15 bp, Homo sapiens
tgatgggatccatta

SEQ ID NO: 848554 - DNA, 15 bp, Homo sapiens
gatgggatccattat

SEQ ID NO: 848555 - DNA, 15 bp, Homo sapiens
atgggatccattatg

SEQ ID NO: 848556 - DNA, 15 bp, Homo sapiens
tgggatccattatgt

SEQ ID NO: 848557 - DNA, 15 bp, Homo sapiens
gggatccattatgta

SEQ ID NO: 848558 - DNA, 15 bp, Homo sapiens
ggatccattatgtag

SEQ ID NO: 848559 - DNA, 15 bp, Homo sapiens
gatccattatgtagc

SEQ ID NO: 848560 - DNA, 15 bp, Homo sapiens
atccattatgtagct

SEQ ID NO: 848561 - DNA, 15 bp, Homo sapiens
tccattatgtagctc

SEQ ID NO: 848562 - DNA, 15 bp, Homo sapiens
ccattatgtagctct

SEQ ID NO: 848563 - DNA, 15 bp, Homo sapiens
cattatgtagctctt

SEQ ID NO: 848564 - DNA, 15 bp, Homo sapiens
attatgtagctcttg

SEQ ID NO: 848565 - DNA, 15 bp, Homo sapiens
ttatgtagctcttgc

SEQ ID NO: 848566 - DNA, 15 bp, Homo sapiens
tatgtagctcttgca

SEQ ID NO: 848567 - DNA, 15 bp, Homo sapiens
atgtagctcttgcat

SEQ ID NO: 848568 - DNA, 15 bp, Homo sapiens
tgtagctcttgcata

SEQ ID NO: 848569 - DNA, 15 bp, Homo sapiens
gtagctcttgcatac

SEQ ID NO: 848570 - DNA, 15 bp, Homo sapiens
tagctcttgcatact

SEQ ID NO: 848571 - DNA, 15 bp, Homo sapiens
agctcttgcatactg

SEQ ID NO: 848572 - DNA, 15 bp, Homo sapiens
gctcttgcatactgt

SEQ ID NO: 848573 - DNA, 15 bp, Homo sapiens
ctcttgcatactgtc

SEQ ID NO: 848574 - DNA, 15 bp, Homo sapiens
tcttgcatactgtct

SEQ ID NO: 848575 - DNA, 15 bp, Homo sapiens
cttgcatactgtctt

SEQ ID NO: 848576 - DNA, 15 bp, Homo sapiens
ttgcatactgtcttc

SEQ ID NO: 848577 - DNA, 15 bp, Homo sapiens
tgcatactgtcttca

SEQ ID NO: 848578 - DNA, 15 bp, Homo sapiens
gcatactgtcttcaa

SEQ ID NO: 848579 - DNA, 15 bp, Homo sapiens
catactgtcttcaaa

SEQ ID NO: 848580 - DNA, 15 bp, Homo sapiens
atactgtcttcaaaa

SEQ ID NO: 848581 - DNA, 15 bp, Homo sapiens
tactgtcttcaaaaa

SEQ ID NO: 848582 - DNA, 15 bp, Homo sapiens
actgtcttcaaaaat

SEQ ID NO: 848583 - DNA, 15 bp, Homo sapiens
ctgtcttcaaaaata

SEQ ID NO: 848584 - DNA, 15 bp, Homo sapiens
tgtcttcaaaaataa

SEQ ID NO: 848585 - DNA, 15 bp, Homo sapiens
gtcttcaaaaataag

SEQ ID NO: 848586 - DNA, 15 bp, Homo sapiens
tcttcaaaaataagt

SEQ ID NO: 848587 - DNA, 15 bp, Homo sapiens
cttcaaaaataagtt

SEQ ID NO: 848588 - DNA, 15 bp, Homo sapiens
ttcaaaaataagtta

SEQ ID NO: 848589 - DNA, 15 bp, Homo sapiens
tcaaaaataagttac

SEQ ID NO: 848590 - DNA, 15 bp, Homo sapiens
caaaaataagttaca

SEQ ID NO: 848591 - DNA, 15 bp, Homo sapiens
aaaaataagttacac

SEQ ID NO: 848592 - DNA, 15 bp, Homo sapiens
aaaataagttacact

SEQ ID NO: 848593 - DNA, 15 bp, Homo sapiens
aaataagttacacta

SEQ ID NO: 848594 - DNA, 15 bp, Homo sapiens
aataagttacactat

SEQ ID NO: 848595 - DNA, 15 bp, Homo sapiens
ataagttacactata

SEQ ID NO: 848596 - DNA, 15 bp, Homo sapiens
taagttacactataa

SEQ ID NO: 848597 - DNA, 15 bp, Homo sapiens
aagttacactataaa

SEQ ID NO: 848598 - DNA, 15 bp, Homo sapiens
agttacactataaag

SEQ ID NO: 848599 - DNA, 15 bp, Homo sapiens
gttacactataaagg

SEQ ID NO: 848600 - DNA, 15 bp, Homo sapiens
ttacactataaaggt

SEQ ID NO: 848601 - DNA, 15 bp, Homo sapiens
tacactataaaggtt

SEQ ID NO: 848602 - DNA, 15 bp, Homo sapiens
acactataaaggttg

SEQ ID NO: 848603 - DNA, 15 bp, Homo sapiens
cactataaaggttgt

SEQ ID NO: 848604 - DNA, 15 bp, Homo sapiens
actataaaggttgtt

SEQ ID NO: 848605 - DNA, 15 bp, Homo sapiens
ctataaaggttgttt

SEQ ID NO: 848606 - DNA, 15 bp, Homo sapiens
tataaaggttgtttt

SEQ ID NO: 848607 - DNA, 15 bp, Homo sapiens
ataaaggttgtttta

SEQ ID NO: 848608 - DNA, 15 bp, Homo sapiens
taaaggttgttttag

SEQ ID NO: 848609 - DNA, 15 bp, Homo sapiens
aaaggttgttttaga

SEQ ID NO: 848610 - DNA, 15 bp, Homo sapiens
aaggttgttttagac

SEQ ID NO: 848611 - DNA, 15 bp, Homo sapiens
aggttgttttagact

SEQ ID NO: 848612 - DNA, 15 bp, Homo sapiens
ggttgttttagactt

SEQ ID NO: 848613 - DNA, 15 bp, Homo sapiens
gttgttttagacttt

SEQ ID NO: 848614 - DNA, 15 bp, Homo sapiens
ttgttttagactttt

SEQ ID NO: 848615 - DNA, 15 bp, Homo sapiens
tgttttagactttta

SEQ ID NO: 848616 - DNA, 15 bp, Homo sapiens
gttttagacttttaa

SEQ ID NO: 848617 - DNA, 15 bp, Homo sapiens
ttttagacttttaaa

SEQ ID NO: 848618 - DNA, 15 bp, Homo sapiens
tttagacttttaaag

SEQ ID NO: 848619 - DNA, 15 bp, Homo sapiens
ttagacttttaaagt

SEQ ID NO: 848620 - DNA, 15 bp, Homo sapiens
tagacttttaaagtt

SEQ ID NO: 848621 - DNA, 15 bp, Homo sapiens
agacttttaaagttt

SEQ ID NO: 848622 - DNA, 15 bp, Homo sapiens
gacttttaaagtttt

SEQ ID NO: 848623 - DNA, 15 bp, Homo sapiens
acttttaaagttttg

SEQ ID NO: 848624 - DNA, 15 bp, Homo sapiens
cttttaaagttttgc

SEQ ID NO: 848625 - DNA, 15 bp, Homo sapiens
ttttaaagttttgcc

SEQ ID NO: 848626 - DNA, 15 bp, Homo sapiens
tttaaagttttgcca

SEQ ID NO: 848627 - DNA, 15 bp, Homo sapiens
ttaaagttttgccat

SEQ ID NO: 848628 - DNA, 15 bp, Homo sapiens
taaagttttgccatt

SEQ ID NO: 848629 - DNA, 15 bp, Homo sapiens
aaagttttgccattg

SEQ ID NO: 848630 - DNA, 15 bp, Homo sapiens
aagttttgccattgg

SEQ ID NO: 848631 - DNA, 15 bp, Homo sapiens
agttttgccattggt

SEQ ID NO: 848632 - DNA, 15 bp, Homo sapiens
gttttgccattggtt

SEQ ID NO: 848633 - DNA, 15 bp, Homo sapiens
ttttgccattggttt

SEQ ID NO: 848634 - DNA, 15 bp, Homo sapiens
tttgccattggtttt

SEQ ID NO: 848635 - DNA, 15 bp, Homo sapiens
ttgccattggttttt

SEQ ID NO: 848636 - DNA, 15 bp, Homo sapiens
tgccattggttttta

SEQ ID NO: 848637 - DNA, 15 bp, Homo sapiens
gccattggtttttaa

SEQ ID NO: 848638 - DNA, 15 bp, Homo sapiens
ccattggtttttaaa

SEQ ID NO: 848639 - DNA, 15 bp, Homo sapiens
cattggtttttaaaa

SEQ ID NO: 848640 - DNA, 15 bp, Homo sapiens
attggtttttaaaaa

SEQ ID NO: 848641 - DNA, 15 bp, Homo sapiens
ttggtttttaaaaaa

SEQ ID NO: 848642 - DNA, 15 bp, Homo sapiens
tggtttttaaaaaaa

SEQ ID NO: 848643 - DNA, 15 bp, Homo sapiens
ggtttttaaaaaaat

SEQ ID NO: 848644 - DNA, 15 bp, Homo sapiens
gtttttaaaaaaatt

SEQ ID NO: 848645 - DNA, 15 bp, Homo sapiens
tttttaaaaaaattt

SEQ ID NO: 848646 - DNA, 15 bp, Homo sapiens
ttttaaaaaaatttt

SEQ ID NO: 848647 - DNA, 15 bp, Homo sapiens
tttaaaaaaattttt

SEQ ID NO: 848648 - DNA, 15 bp, Homo sapiens
ttaaaaaaattttta

SEQ ID NO: 848649 - DNA, 15 bp, Homo sapiens
taaaaaaatttttaa

SEQ ID NO: 848650 - DNA, 15 bp, Homo sapiens
aaaaaaatttttaaa

SEQ ID NO: 848651 - DNA, 15 bp, Homo sapiens
aaaaaatttttaaat

SEQ ID NO: 848652 - DNA, 15 bp, Homo sapiens
aaaaatttttaaatt

SEQ ID NO: 848653 - DNA, 15 bp, Homo sapiens
aaaatttttaaattg

SEQ ID NO: 848654 - DNA, 15 bp, Homo sapiens
aaatttttaaattgg

SEQ ID NO: 848655 - DNA, 15 bp, Homo sapiens
aatttttaaattggc

SEQ ID NO: 848656 - DNA, 15 bp, Homo sapiens
atttttaaattggct

SEQ ID NO: 848657 - DNA, 15 bp, Homo sapiens
tttttaaattggctt

SEQ ID NO: 848658 - DNA, 15 bp, Homo sapiens
ttttaaattggcttt

SEQ ID NO: 848659 - DNA, 15 bp, Homo sapiens
tttaaattggcttta

SEQ ID NO: 848660 - DNA, 15 bp, Homo sapiens
ttaaattggctttaa

SEQ ID NO: 848661 - DNA, 15 bp, Homo sapiens
taaattggctttaaa

SEQ ID NO: 848662 - DNA, 15 bp, Homo sapiens
aaattggctttaaaa

SEQ ID NO: 848663 - DNA, 15 bp, Homo sapiens
aattggctttaaaaa

SEQ ID NO: 848664 - DNA, 15 bp, Homo sapiens
attggctttaaaaat

SEQ ID NO: 848665 - DNA, 15 bp, Homo sapiens
ttggctttaaaaatt

SEQ ID NO: 848666 - DNA, 15 bp, Homo sapiens
tggctttaaaaattt

SEQ ID NO: 848667 - DNA, 15 bp, Homo sapiens
ggctttaaaaatttc

SEQ ID NO: 848668 - DNA, 15 bp, Homo sapiens
gctttaaaaatttct

SEQ ID NO: 848669 - DNA, 15 bp, Homo sapiens
ctttaaaaatttctt

SEQ ID NO: 848670 - DNA, 15 bp, Homo sapiens
tttaaaaatttctta

SEQ ID NO: 848671 - DNA, 15 bp, Homo sapiens
ttaaaaatttcttaa

SEQ ID NO: 848672 - DNA, 15 bp, Homo sapiens
taaaaatttcttaat

SEQ ID NO: 848673 - DNA, 15 bp, Homo sapiens
aaaaatttcttaatt

SEQ ID NO: 848674 - DNA, 15 bp, Homo sapiens
aaaatttcttaattg

SEQ ID NO: 848675 - DNA, 15 bp, Homo sapiens
aaatttcttaattgt

SEQ ID NO: 848676 - DNA, 15 bp, Homo sapiens
aatttcttaattgtg

SEQ ID NO: 848677 - DNA, 15 bp, Homo sapiens
atttcttaattgtgt

SEQ ID NO: 848678 - DNA, 15 bp, Homo sapiens
tttcttaattgtgtg

SEQ ID NO: 848679 - DNA, 15 bp, Homo sapiens
ttcttaattgtgtgc

SEQ ID NO: 848680 - DNA, 15 bp, Homo sapiens
tcttaattgtgtgct

SEQ ID NO: 848681 - DNA, 15 bp, Homo sapiens
cttaattgtgtgctg

SEQ ID NO: 848682 - DNA, 15 bp, Homo sapiens
ttaattgtgtgctga

SEQ ID NO: 848683 - DNA, 15 bp, Homo sapiens
taattgtgtgctgaa

SEQ ID NO: 848684 - DNA, 15 bp, Homo sapiens
aattgtgtgctgaat

SEQ ID NO: 848685 - DNA, 15 bp, Homo sapiens
attgtgtgctgaata

SEQ ID NO: 848686 - DNA, 15 bp, Homo sapiens
ttgtgtgctgaatac

SEQ ID NO: 848687 - DNA, 15 bp, Homo sapiens
tgtgtgctgaataca

SEQ ID NO: 848688 - DNA, 15 bp, Homo sapiens
gtgtgctgaatacaa

SEQ ID NO: 848689 - DNA, 15 bp, Homo sapiens
tgtgctgaatacaat

SEQ ID NO: 848690 - DNA, 15 bp, Homo sapiens
gtgctgaatacaatt

SEQ ID NO: 848691 - DNA, 15 bp, Homo sapiens
tgctgaatacaattt

SEQ ID NO: 848692 - DNA, 15 bp, Homo sapiens
gctgaatacaatttt

SEQ ID NO: 848693 - DNA, 15 bp, Homo sapiens
ctgaatacaattttc

SEQ ID NO: 848694 - DNA, 15 bp, Homo sapiens
tgaatacaattttct

SEQ ID NO: 848695 - DNA, 15 bp, Homo sapiens
gaatacaattttctt

SEQ ID NO: 848696 - DNA, 15 bp, Homo sapiens
aatacaattttcttt

SEQ ID NO: 848697 - DNA, 15 bp, Homo sapiens
atacaattttcttta

SEQ ID NO: 848698 - DNA, 15 bp, Homo sapiens
tacaattttctttat

SEQ ID NO: 848699 - DNA, 15 bp, Homo sapiens
acaattttctttatt

SEQ ID NO: 848700 - DNA, 15 bp, Homo sapiens
caattttctttatta

SEQ ID NO: 848701 - DNA, 15 bp, Homo sapiens
aattttctttattac

SEQ ID NO: 848702 - DNA, 15 bp, Homo sapiens
attttctttattaca

SEQ ID NO: 848703 - DNA, 15 bp, Homo sapiens
ttttctttattacag

SEQ ID NO: 848704 - DNA, 15 bp, Homo sapiens
tttctttattacaga

SEQ ID NO: 848705 - DNA, 15 bp, Homo sapiens
ttctttattacagaa

SEQ ID NO: 848706 - DNA, 15 bp, Homo sapiens
tctttattacagaag

SEQ ID NO: 848707 - DNA, 15 bp, Homo sapiens
ctttattacagaagt

SEQ ID NO: 848708 - DNA, 15 bp, Homo sapiens
tttattacagaagta

SEQ ID NO: 848709 - DNA, 15 bp, Homo sapiens
ttattacagaagtac

SEQ ID NO: 848710 - DNA, 15 bp, Homo sapiens
tattacagaagtacc

SEQ ID NO: 848711 - DNA, 15 bp, Homo sapiens
attacagaagtacca

SEQ ID NO: 848712 - DNA, 15 bp, Homo sapiens
ttacagaagtaccaa

SEQ ID NO: 848713 - DNA, 15 bp, Homo sapiens
tacagaagtaccaac

SEQ ID NO: 848714 - DNA, 15 bp, Homo sapiens
acagaagtaccaaca

SEQ ID NO: 848715 - DNA, 15 bp, Homo sapiens
cagaagtaccaacaa

SEQ ID NO: 848716 - DNA, 15 bp, Homo sapiens
agaagtaccaacaat

SEQ ID NO: 848717 - DNA, 15 bp, Homo sapiens
gaagtaccaacaatt

SEQ ID NO: 848718 - DNA, 15 bp, Homo sapiens
aagtaccaacaatta

SEQ ID NO: 848719 - DNA, 15 bp, Homo sapiens
agtaccaacaattac

SEQ ID NO: 848720 - DNA, 15 bp, Homo sapiens
gtaccaacaattaca

SEQ ID NO: 848721 - DNA, 15 bp, Homo sapiens
taccaacaattacat

SEQ ID NO: 848722 - DNA, 15 bp, Homo sapiens
accaacaattacatg

SEQ ID NO: 848723 - DNA, 15 bp, Homo sapiens
ccaacaattacatgt

SEQ ID NO: 848724 - DNA, 15 bp, Homo sapiens
caacaattacatgta

SEQ ID NO: 848725 - DNA, 15 bp, Homo sapiens
aacaattacatgtat

SEQ ID NO: 848726 - DNA, 15 bp, Homo sapiens
acaattacatgtata

SEQ ID NO: 848727 - DNA, 15 bp, Homo sapiens
caattacatgtataa

SEQ ID NO: 848728 - DNA, 15 bp, Homo sapiens
aattacatgtataaa

SEQ ID NO: 848729 - DNA, 15 bp, Homo sapiens
attacatgtataaac

SEQ ID NO: 848730 - DNA, 15 bp, Homo sapiens
ttacatgtataaaca

SEQ ID NO: 848731 - DNA, 15 bp, Homo sapiens
tacatgtataaacag

SEQ ID NO: 848732 - DNA, 15 bp, Homo sapiens
acatgtataaacaga

SEQ ID NO: 848733 - DNA, 15 bp, Homo sapiens
catgtataaacagag

SEQ ID NO: 848734 - DNA, 15 bp, Homo sapiens
atgtataaacagaga

SEQ ID NO: 848735 - DNA, 15 bp, Homo sapiens
tgtataaacagagaa

SEQ ID NO: 848736 - DNA, 15 bp, Homo sapiens
gtataaacagagaat

SEQ ID NO: 848737 - DNA, 15 bp, Homo sapiens
tataaacagagaatc

SEQ ID NO: 848738 - DNA, 15 bp, Homo sapiens
ataaacagagaatcc

SEQ ID NO: 848739 - DNA, 15 bp, Homo sapiens
taaacagagaatcct

SEQ ID NO: 848740 - DNA, 15 bp, Homo sapiens
aaacagagaatccta

SEQ ID NO: 848741 - DNA, 15 bp, Homo sapiens
aacagagaatcctat

SEQ ID NO: 848742 - DNA, 15 bp, Homo sapiens
acagagaatcctatg

SEQ ID NO: 848743 - DNA, 15 bp, Homo sapiens
cagagaatcctatgt

SEQ ID NO: 848744 - DNA, 15 bp, Homo sapiens
agagaatcctatgta

SEQ ID NO: 848745 - DNA, 15 bp, Homo sapiens
gagaatcctatgtac

SEQ ID NO: 848746 - DNA, 15 bp, Homo sapiens
agaatcctatgtact

SEQ ID NO: 848747 - DNA, 15 bp, Homo sapiens
gaatcctatgtactt

SEQ ID NO: 848748 - DNA, 15 bp, Homo sapiens
aatcctatgtacttg

SEQ ID NO: 848749 - DNA, 15 bp, Homo sapiens
atcctatgtacttga

SEQ ID NO: 848750 - DNA, 15 bp, Homo sapiens
tcctatgtacttgag

SEQ ID NO: 848751 - DNA, 15 bp, Homo sapiens
cctatgtacttgaga

SEQ ID NO: 848752 - DNA, 15 bp, Homo sapiens
ctatgtacttgagat

SEQ ID NO: 848753 - DNA, 15 bp, Homo sapiens
tatgtacttgagata

SEQ ID NO: 848754 - DNA, 15 bp, Homo sapiens
atgtacttgagatat

SEQ ID NO: 848755 - DNA, 15 bp, Homo sapiens
tgtacttgagatata

SEQ ID NO: 848756 - DNA, 15 bp, Homo sapiens
gtacttgagatataa

SEQ ID NO: 848757 - DNA, 15 bp, Homo sapiens
tacttgagatataag

SEQ ID NO: 848758 - DNA, 15 bp, Homo sapiens
acttgagatataagt

SEQ ID NO: 848759 - DNA, 15 bp, Homo sapiens
cttgagatataagta

SEQ ID NO: 848760 - DNA, 15 bp, Homo sapiens
ttgagatataagtaa

SEQ ID NO: 848761 - DNA, 15 bp, Homo sapiens
tgagatataagtaag

SEQ ID NO: 848762 - DNA, 15 bp, Homo sapiens
gagatataagtaagg

SEQ ID NO: 848763 - DNA, 15 bp, Homo sapiens
agatataagtaaggt

SEQ ID NO: 848764 - DNA, 15 bp, Homo sapiens
gatataagtaaggtt

SEQ ID NO: 848765 - DNA, 15 bp, Homo sapiens
atataagtaaggtta

SEQ ID NO: 848766 - DNA, 15 bp, Homo sapiens
tataagtaaggttac

SEQ ID NO: 848767 - DNA, 15 bp, Homo sapiens
ataagtaaggttact

SEQ ID NO: 848768 - DNA, 15 bp, Homo sapiens
taagtaaggttacta

SEQ ID NO: 848769 - DNA, 15 bp, Homo sapiens
aagtaaggttactat

SEQ ID NO: 848770 - DNA, 15 bp, Homo sapiens
agtaaggttactatc

SEQ ID NO: 848771 - DNA, 15 bp, Homo sapiens
gtaaggttactatca

SEQ ID NO: 848772 - DNA, 15 bp, Homo sapiens
taaggttactatcaa

SEQ ID NO: 848773 - DNA, 15 bp, Homo sapiens
aaggttactatcaat

SEQ ID NO: 848774 - DNA, 15 bp, Homo sapiens
aggttactatcaatc

SEQ ID NO: 848775 - DNA, 15 bp, Homo sapiens
ggttactatcaatca

SEQ ID NO: 848776 - DNA, 15 bp, Homo sapiens
gttactatcaatcac

SEQ ID NO: 848777 - DNA, 15 bp, Homo sapiens
ttactatcaatcaca

SEQ ID NO: 848778 - DNA, 15 bp, Homo sapiens
tactatcaatcacac

SEQ ID NO: 848779 - DNA, 15 bp, Homo sapiens
actatcaatcacacc

SEQ ID NO: 848780 - DNA, 15 bp, Homo sapiens
ctatcaatcacacct

SEQ ID NO: 848781 - DNA, 15 bp, Homo sapiens
tatcaatcacacctg

SEQ ID NO: 848782 - DNA, 15 bp, Homo sapiens
atcaatcacacctga

SEQ ID NO: 848783 - DNA, 15 bp, Homo sapiens
tcaatcacacctgaa

SEQ ID NO: 848784 - DNA, 15 bp, Homo sapiens
caatcacacctgaaa

SEQ ID NO: 848785 - DNA, 15 bp, Homo sapiens
aatcacacctgaaaa

SEQ ID NO: 848786 - DNA, 15 bp, Homo sapiens
atcacacctgaaaaa

SEQ ID NO: 848787 - DNA, 15 bp, Homo sapiens
tcacacctgaaaaat

SEQ ID NO: 848788 - DNA, 15 bp, Homo sapiens
cacacctgaaaaatt

SEQ ID NO: 848789 - DNA, 15 bp, Homo sapiens
acacctgaaaaattt

SEQ ID NO: 848790 - DNA, 15 bp, Homo sapiens
cacctgaaaaattta

SEQ ID NO: 848791 - DNA, 15 bp, Homo sapiens
acctgaaaaatttaa

SEQ ID NO: 848792 - DNA, 15 bp, Homo sapiens
cctgaaaaatttaaa

SEQ ID NO: 848793 - DNA, 15 bp, Homo sapiens
ctgaaaaatttaaat

SEQ ID NO: 848794 - DNA, 15 bp, Homo sapiens
tgaaaaatttaaatg

SEQ ID NO: 848795 - DNA, 15 bp, Homo sapiens
gaaaaatttaaatgt

SEQ ID NO: 848796 - DNA, 15 bp, Homo sapiens
aaaaatttaaatgtt

SEQ ID NO: 848797 - DNA, 15 bp, Homo sapiens
aaaatttaaatgtta

SEQ ID NO: 848798 - DNA, 15 bp, Homo sapiens
aaatttaaatgttat

SEQ ID NO: 848799 - DNA, 15 bp, Homo sapiens
aatttaaatgttatg

SEQ ID NO: 848800 - DNA, 15 bp, Homo sapiens
atttaaatgttatga

SEQ ID NO: 848801 - DNA, 15 bp, Homo sapiens
tttaaatgttatgaa

SEQ ID NO: 848802 - DNA, 15 bp, Homo sapiens
ttaaatgttatgaag

SEQ ID NO: 848803 - DNA, 15 bp, Homo sapiens
taaatgttatgaaga

SEQ ID NO: 848804 - DNA, 15 bp, Homo sapiens
aaatgttatgaagaa

SEQ ID NO: 848805 - DNA, 15 bp, Homo sapiens
aatgttatgaagaaa

SEQ ID NO: 848806 - DNA, 15 bp, Homo sapiens
atgttatgaagaaat

SEQ ID NO: 848807 - DNA, 15 bp, Homo sapiens
tgttatgaagaaatt

SEQ ID NO: 848808 - DNA, 15 bp, Homo sapiens
gttatgaagaaatta

SEQ ID NO: 848809 - DNA, 15 bp, Homo sapiens
ttatgaagaaattat

SEQ ID NO: 848810 - DNA, 15 bp, Homo sapiens
tatgaagaaattatc

SEQ ID NO: 848811 - DNA, 15 bp, Homo sapiens
atgaagaaattatct

SEQ ID NO: 848812 - DNA, 15 bp, Homo sapiens
tgaagaaattatctc

SEQ ID NO: 848813 - DNA, 15 bp, Homo sapiens
gaagaaattatctca

SEQ ID NO: 848814 - DNA, 15 bp, Homo sapiens
aagaaattatctcat

SEQ ID NO: 848815 - DNA, 15 bp, Homo sapiens
agaaattatctcatt

SEQ ID NO: 848816 - DNA, 15 bp, Homo sapiens
gaaattatctcattt

SEQ ID NO: 848817 - DNA, 15 bp, Homo sapiens
aaattatctcatttc

SEQ ID NO: 848818 - DNA, 15 bp, Homo sapiens
aattatctcatttct

SEQ ID NO: 848819 - DNA, 15 bp, Homo sapiens
attatctcatttcta

SEQ ID NO: 848820 - DNA, 15 bp, Homo sapiens
ttatctcatttctat

SEQ ID NO: 848821 - DNA, 15 bp, Homo sapiens
tatctcatttctatt

SEQ ID NO: 848822 - DNA, 15 bp, Homo sapiens
atctcatttctatta

SEQ ID NO: 848823 - DNA, 15 bp, Homo sapiens
tctcatttctattaa

SEQ ID NO: 848824 - DNA, 15 bp, Homo sapiens
ctcatttctattaat

SEQ ID NO: 848825 - DNA, 15 bp, Homo sapiens
tcatttctattaata

SEQ ID NO: 848826 - DNA, 15 bp, Homo sapiens
catttctattaatat

SEQ ID NO: 848827 - DNA, 15 bp, Homo sapiens
atttctattaatatg

SEQ ID NO: 848828 - DNA, 15 bp, Homo sapiens
tttctattaatatgg

SEQ ID NO: 848829 - DNA, 15 bp, Homo sapiens
ttctattaatatggg

SEQ ID NO: 848830 - DNA, 15 bp, Homo sapiens
tctattaatatggga

SEQ ID NO: 848831 - DNA, 15 bp, Homo sapiens
ctattaatatgggaa

SEQ ID NO: 848832 - DNA, 15 bp, Homo sapiens
tattaatatgggaac

SEQ ID NO: 848833 - DNA, 15 bp, Homo sapiens
attaatatgggaact

SEQ ID NO: 848834 - DNA, 15 bp, Homo sapiens
ttaatatgggaactg

SEQ ID NO: 848835 - DNA, 15 bp, Homo sapiens
taatatgggaactgt

SEQ ID NO: 848836 - DNA, 15 bp, Homo sapiens
aatatgggaactgtg

SEQ ID NO: 848837 - DNA, 15 bp, Homo sapiens
atatgggaactgtgt

SEQ ID NO: 848838 - DNA, 15 bp, Homo sapiens
tatgggaactgtgtc

SEQ ID NO: 848839 - DNA, 15 bp, Homo sapiens
atgggaactgtgtct

SEQ ID NO: 848840 - DNA, 15 bp, Homo sapiens
tgggaactgtgtctt

SEQ ID NO: 848841 - DNA, 15 bp, Homo sapiens
gggaactgtgtcttc

SEQ ID NO: 848842 - DNA, 15 bp, Homo sapiens
ggaactgtgtcttca

SEQ ID NO: 848843 - DNA, 15 bp, Homo sapiens
gaactgtgtcttcat

SEQ ID NO: 848844 - DNA, 15 bp, Homo sapiens
aactgtgtcttcatc

SEQ ID NO: 848845 - DNA, 15 bp, Homo sapiens
actgtgtcttcatct

SEQ ID NO: 848846 - DNA, 15 bp, Homo sapiens
ctgtgtcttcatctt

SEQ ID NO: 848847 - DNA, 15 bp, Homo sapiens
tgtgtcttcatcttt

SEQ ID NO: 848848 - DNA, 15 bp, Homo sapiens
gtgtcttcatcttta

SEQ ID NO: 848849 - DNA, 15 bp, Homo sapiens
tgtcttcatctttat

SEQ ID NO: 848850 - DNA, 15 bp, Homo sapiens
gtcttcatctttatt

SEQ ID NO: 848851 - DNA, 15 bp, Homo sapiens
tcttcatctttatta

SEQ ID NO: 848852 - DNA, 15 bp, Homo sapiens
cttcatctttattac

SEQ ID NO: 848853 - DNA, 15 bp, Homo sapiens
ttcatctttattact

SEQ ID NO: 848854 - DNA, 15 bp, Homo sapiens
tcatctttattactg

SEQ ID NO: 848855 - DNA, 15 bp, Homo sapiens
catctttattactgt

SEQ ID NO: 848856 - DNA, 15 bp, Homo sapiens
atctttattactgtt

SEQ ID NO: 848857 - DNA, 15 bp, Homo sapiens
tctttattactgttc

SEQ ID NO: 848858 - DNA, 15 bp, Homo sapiens
ctttattactgttct

SEQ ID NO: 848859 - DNA, 15 bp, Homo sapiens
tttattactgttcta

SEQ ID NO: 848860 - DNA, 15 bp, Homo sapiens
ttattactgttctaa

SEQ ID NO: 848861 - DNA, 15 bp, Homo sapiens
tattactgttctaag

SEQ ID NO: 848862 - DNA, 15 bp, Homo sapiens
attactgttctaagg

SEQ ID NO: 848863 - DNA, 15 bp, Homo sapiens
ttactgttctaaggt

SEQ ID NO: 848864 - DNA, 15 bp, Homo sapiens
tactgttctaaggtc

SEQ ID NO: 848865 - DNA, 15 bp, Homo sapiens
actgttctaaggtca

SEQ ID NO: 848866 - DNA, 15 bp, Homo sapiens
ctgttctaaggtcaa

SEQ ID NO: 848867 - DNA, 15 bp, Homo sapiens
tgttctaaggtcaac

SEQ ID NO: 848868 - DNA, 15 bp, Homo sapiens
gttctaaggtcaact

SEQ ID NO: 848869 - DNA, 15 bp, Homo sapiens
ttctaaggtcaactc

SEQ ID NO: 848870 - DNA, 15 bp, Homo sapiens
tctaaggtcaactca

SEQ ID NO: 848871 - DNA, 15 bp, Homo sapiens
ctaaggtcaactcaa

SEQ ID NO: 848872 - DNA, 15 bp, Homo sapiens
taaggtcaactcaat

SEQ ID NO: 848873 - DNA, 15 bp, Homo sapiens
aaggtcaactcaatg

SEQ ID NO: 848874 - DNA, 15 bp, Homo sapiens
aggtcaactcaatgt

SEQ ID NO: 848875 - DNA, 15 bp, Homo sapiens
ggtcaactcaatgta

SEQ ID NO: 848876 - DNA, 15 bp, Homo sapiens
gtcaactcaatgtag

SEQ ID NO: 848877 - DNA, 15 bp, Homo sapiens
tcaactcaatgtaga

SEQ ID NO: 848878 - DNA, 15 bp, Homo sapiens
caactcaatgtagat

SEQ ID NO: 848879 - DNA, 15 bp, Homo sapiens
aactcaatgtagatt

SEQ ID NO: 848880 - DNA, 15 bp, Homo sapiens
actcaatgtagattt

SEQ ID NO: 848881 - DNA, 15 bp, Homo sapiens
ctcaatgtagatttt

SEQ ID NO: 848882 - DNA, 15 bp, Homo sapiens
tcaatgtagatttta

SEQ ID NO: 848883 - DNA, 15 bp, Homo sapiens
caatgtagattttac

SEQ ID NO: 848884 - DNA, 15 bp, Homo sapiens
aatgtagattttact

SEQ ID NO: 848885 - DNA, 15 bp, Homo sapiens
atgtagattttactt

SEQ ID NO: 848886 - DNA, 15 bp, Homo sapiens
tgtagattttacttg

SEQ ID NO: 848887 - DNA, 15 bp, Homo sapiens
gtagattttacttgc

SEQ ID NO: 848888 - DNA, 15 bp, Homo sapiens
tagattttacttgct

SEQ ID NO: 848889 - DNA, 15 bp, Homo sapiens
agattttacttgctt

SEQ ID NO: 848890 - DNA, 15 bp, Homo sapiens
gattttacttgctta

SEQ ID NO: 848891 - DNA, 15 bp, Homo sapiens
attttacttgcttat

SEQ ID NO: 848892 - DNA, 15 bp, Homo sapiens
ttttacttgcttatg

SEQ ID NO: 848893 - DNA, 15 bp, Homo sapiens
tttacttgcttatgg

SEQ ID NO: 848894 - DNA, 15 bp, Homo sapiens
ttacttgcttatggt

SEQ ID NO: 848895 - DNA, 15 bp, Homo sapiens
tacttgcttatggtt

SEQ ID NO: 848896 - DNA, 15 bp, Homo sapiens
acttgcttatggttt

SEQ ID NO: 848897 - DNA, 15 bp, Homo sapiens
cttgcttatggtttc

SEQ ID NO: 848898 - DNA, 15 bp, Homo sapiens
ttgcttatggtttca

SEQ ID NO: 848899 - DNA, 15 bp, Homo sapiens
tgcttatggtttcat

SEQ ID NO: 848900 - DNA, 15 bp, Homo sapiens
gcttatggtttcata

SEQ ID NO: 848901 - DNA, 15 bp, Homo sapiens
cttatggtttcatat

SEQ ID NO: 848902 - DNA, 15 bp, Homo sapiens
ttatggtttcatatt

SEQ ID NO: 848903 - DNA, 15 bp, Homo sapiens
tatggtttcatattt

SEQ ID NO: 848904 - DNA, 15 bp, Homo sapiens
atggtttcatatttt

SEQ ID NO: 848905 - DNA, 15 bp, Homo sapiens
tggtttcatatttta

SEQ ID NO: 848906 - DNA, 15 bp, Homo sapiens
ggtttcatattttag

SEQ ID NO: 848907 - DNA, 15 bp, Homo sapiens
gtttcatattttagc

SEQ ID NO: 848908 - DNA, 15 bp, Homo sapiens
tttcatattttagct

SEQ ID NO: 848909 - DNA, 15 bp, Homo sapiens
ttcatattttagcta

SEQ ID NO: 848910 - DNA, 15 bp, Homo sapiens
tcatattttagctaa

SEQ ID NO: 848911 - DNA, 15 bp, Homo sapiens
catattttagctaaa

SEQ ID NO: 848912 - DNA, 15 bp, Homo sapiens
atattttagctaaat

SEQ ID NO: 848913 - DNA, 15 bp, Homo sapiens
tattttagctaaata

SEQ ID NO: 848914 - DNA, 15 bp, Homo sapiens
attttagctaaatag

SEQ ID NO: 848915 - DNA, 15 bp, Homo sapiens
ttttagctaaatagt

SEQ ID NO: 848916 - DNA, 15 bp, Homo sapiens
tttagctaaatagta

SEQ ID NO: 848917 - DNA, 15 bp, Homo sapiens
ttagctaaatagtaa

SEQ ID NO: 848918 - DNA, 15 bp, Homo sapiens
tagctaaatagtaaa

SEQ ID NO: 848919 - DNA, 15 bp, Homo sapiens
agctaaatagtaaaa

SEQ ID NO: 848920 - DNA, 15 bp, Homo sapiens
gctaaatagtaaaat

SEQ ID NO: 848921 - DNA, 15 bp, Homo sapiens
ctaaatagtaaaata

SEQ ID NO: 848922 - DNA, 15 bp, Homo sapiens
taaatagtaaaataa

SEQ ID NO: 848923 - DNA, 15 bp, Homo sapiens
aaatagtaaaataat

SEQ ID NO: 848924 - DNA, 15 bp, Homo sapiens
aatagtaaaataata

SEQ ID NO: 848925 - DNA, 15 bp, Homo sapiens
atagtaaaataatat

SEQ ID NO: 848926 - DNA, 15 bp, Homo sapiens
tagtaaaataatatg

SEQ ID NO: 848927 - DNA, 15 bp, Homo sapiens
agtaaaataatatgg

SEQ ID NO: 848928 - DNA, 15 bp, Homo sapiens
gtaaaataatatgga

SEQ ID NO: 848929 - DNA, 15 bp, Homo sapiens
taaaataatatggat

SEQ ID NO: 848930 - DNA, 15 bp, Homo sapiens
aaaataatatggata

SEQ ID NO: 848931 - DNA, 15 bp, Homo sapiens
aaataatatggatat

SEQ ID NO: 848932 - DNA, 15 bp, Homo sapiens
aataatatggatata

SEQ ID NO: 848933 - DNA, 15 bp, Homo sapiens
ataatatggatatac

SEQ ID NO: 848934 - DNA, 15 bp, Homo sapiens
taatatggatataca

SEQ ID NO: 848935 - DNA, 15 bp, Homo sapiens
aatatggatatacat

SEQ ID NO: 848936 - DNA, 15 bp, Homo sapiens
atatggatatacatt

SEQ ID NO: 848937 - DNA, 15 bp, Homo sapiens
tatggatatacattt

SEQ ID NO: 848938 - DNA, 15 bp, Homo sapiens
atggatatacatttt

SEQ ID NO: 848939 - DNA, 15 bp, Homo sapiens
tggatatacattttg

SEQ ID NO: 848940 - DNA, 15 bp, Homo sapiens
ggatatacattttgt

SEQ ID NO: 848941 - DNA, 15 bp, Homo sapiens
gatatacattttgtt

SEQ ID NO: 848942 - DNA, 15 bp, Homo sapiens
atatacattttgttg

SEQ ID NO: 848943 - DNA, 15 bp, Homo sapiens
tatacattttgttgt

SEQ ID NO: 848944 - DNA, 15 bp, Homo sapiens
atacattttgttgtg

SEQ ID NO: 848945 - DNA, 15 bp, Homo sapiens
tacattttgttgtga

SEQ ID NO: 848946 - DNA, 15 bp, Homo sapiens
acattttgttgtgac

SEQ ID NO: 848947 - DNA, 15 bp, Homo sapiens
cattttgttgtgact

SEQ ID NO: 848948 - DNA, 15 bp, Homo sapiens
attttgttgtgactt

SEQ ID NO: 848949 - DNA, 15 bp, Homo sapiens
ttttgttgtgactta

SEQ ID NO: 848950 - DNA, 15 bp, Homo sapiens
tttgttgtgacttac

SEQ ID NO: 848951 - DNA, 15 bp, Homo sapiens
ttgttgtgacttact

SEQ ID NO: 848952 - DNA, 15 bp, Homo sapiens
tgttgtgacttactc

SEQ ID NO: 848953 - DNA, 15 bp, Homo sapiens
gttgtgacttactca

SEQ ID NO: 848954 - DNA, 15 bp, Homo sapiens
ttgtgacttactcat

SEQ ID NO: 848955 - DNA, 15 bp, Homo sapiens
tgtgacttactcata

SEQ ID NO: 848956 - DNA, 15 bp, Homo sapiens
gtgacttactcatac

SEQ ID NO: 848957 - DNA, 15 bp, Homo sapiens
tgacttactcatact

SEQ ID NO: 848958 - DNA, 15 bp, Homo sapiens
gacttactcatactt

SEQ ID NO: 848959 - DNA, 15 bp, Homo sapiens
acttactcatacttt

SEQ ID NO: 848960 - DNA, 15 bp, Homo sapiens
cttactcatactttc

SEQ ID NO: 848961 - DNA, 15 bp, Homo sapiens
ttactcatactttcc

SEQ ID NO: 848962 - DNA, 15 bp, Homo sapiens
tactcatactttcct

SEQ ID NO: 848963 - DNA, 15 bp, Homo sapiens
actcatactttcctt

SEQ ID NO: 848964 - DNA, 15 bp, Homo sapiens
ctcatactttcctta

SEQ ID NO: 848965 - DNA, 15 bp, Homo sapiens
tcatactttccttat

SEQ ID NO: 848966 - DNA, 15 bp, Homo sapiens
catactttccttatt

SEQ ID NO: 848967 - DNA, 15 bp, Homo sapiens
atactttccttattt

SEQ ID NO: 848968 - DNA, 15 bp, Homo sapiens
tactttccttatttg

SEQ ID NO: 848969 - DNA, 15 bp, Homo sapiens
actttccttatttgg

SEQ ID NO: 848970 - DNA, 15 bp, Homo sapiens
ctttccttatttgga

SEQ ID NO: 848971 - DNA, 15 bp, Homo sapiens
tttccttatttggaa

SEQ ID NO: 848972 - DNA, 15 bp, Homo sapiens
ttccttatttggaac

SEQ ID NO: 848973 - DNA, 15 bp, Homo sapiens
tccttatttggaact

SEQ ID NO: 848974 - DNA, 15 bp, Homo sapiens
ccttatttggaactt

SEQ ID NO: 848975 - DNA, 15 bp, Homo sapiens
cttatttggaacttt

SEQ ID NO: 848976 - DNA, 15 bp, Homo sapiens
ttatttggaactttt

SEQ ID NO: 848977 - DNA, 15 bp, Homo sapiens
tatttggaactttta

SEQ ID NO: 848978 - DNA, 15 bp, Homo sapiens
atttggaacttttat

SEQ ID NO: 848979 - DNA, 15 bp, Homo sapiens
tttggaacttttatg

SEQ ID NO: 848980 - DNA, 15 bp, Homo sapiens
ttggaacttttatga

SEQ ID NO: 848981 - DNA, 15 bp, Homo sapiens
tggaacttttatgaa

SEQ ID NO: 848982 - DNA, 15 bp, Homo sapiens
ggaacttttatgaat

SEQ ID NO: 848983 - DNA, 15 bp, Homo sapiens
gaacttttatgaata

SEQ ID NO: 848984 - DNA, 15 bp, Homo sapiens
aacttttatgaatat

SEQ ID NO: 848985 - DNA, 15 bp, Homo sapiens
acttttatgaatatg

SEQ ID NO: 848986 - DNA, 15 bp, Homo sapiens
cttttatgaatatga

SEQ ID NO: 848987 - DNA, 15 bp, Homo sapiens
ttttatgaatatgat

SEQ ID NO: 848988 - DNA, 15 bp, Homo sapiens
tttatgaatatgata

SEQ ID NO: 848989 - DNA, 15 bp, Homo sapiens
ttatgaatatgatat

SEQ ID NO: 848990 - DNA, 15 bp, Homo sapiens
tatgaatatgatata

SEQ ID NO: 848991 - DNA, 15 bp, Homo sapiens
atgaatatgatatag

SEQ ID NO: 848992 - DNA, 15 bp, Homo sapiens
tgaatatgatataga

SEQ ID NO: 848993 - DNA, 15 bp, Homo sapiens
gaatatgatatagag

SEQ ID NO: 848994 - DNA, 15 bp, Homo sapiens
aatatgatatagaga

SEQ ID NO: 848995 - DNA, 15 bp, Homo sapiens
atatgatatagagac

SEQ ID NO: 848996 - DNA, 15 bp, Homo sapiens
tatgatatagagact

SEQ ID NO: 848997 - DNA, 15 bp, Homo sapiens
atgatatagagactg

SEQ ID NO: 848998 - DNA, 15 bp, Homo sapiens
tgatatagagactga

SEQ ID NO: 848999 - DNA, 15 bp, Homo sapiens
gatatagagactgaa

SEQ ID NO: 849000 - DNA, 15 bp, Homo sapiens
atatagagactgaaa

SEQ ID NO: 849001 - DNA, 15 bp, Homo sapiens
tatagagactgaaac

SEQ ID NO: 849002 - DNA, 15 bp, Homo sapiens
atagagactgaaact

SEQ ID NO: 849003 - DNA, 15 bp, Homo sapiens
tagagactgaaacta

SEQ ID NO: 849004 - DNA, 15 bp, Homo sapiens
agagactgaaactac

SEQ ID NO: 849005 - DNA, 15 bp, Homo sapiens
gagactgaaactaca

SEQ ID NO: 849006 - DNA, 15 bp, Homo sapiens
agactgaaactacaa

SEQ ID NO: 849007 - DNA, 15 bp, Homo sapiens
gactgaaactacaag

SEQ ID NO: 849008 - DNA, 15 bp, Homo sapiens
actgaaactacaagg

SEQ ID NO: 849009 - DNA, 15 bp, Homo sapiens
ctgaaactacaagga

SEQ ID NO: 849010 - DNA, 15 bp, Homo sapiens
tgaaactacaaggaa

SEQ ID NO: 849011 - DNA, 15 bp, Homo sapiens
gaaactacaaggaac

SEQ ID NO: 849012 - DNA, 15 bp, Homo sapiens
aaactacaaggaaca

SEQ ID NO: 849013 - DNA, 15 bp, Homo sapiens
aactacaaggaacaa

SEQ ID NO: 849014 - DNA, 15 bp, Homo sapiens
actacaaggaacaaa

SEQ ID NO: 849015 - DNA, 15 bp, Homo sapiens
ctacaaggaacaaaa

SEQ ID NO: 849016 - DNA, 15 bp, Homo sapiens
tacaaggaacaaaat

SEQ ID NO: 849017 - DNA, 15 bp, Homo sapiens
acaaggaacaaaatg

SEQ ID NO: 849018 - DNA, 15 bp, Homo sapiens
caaggaacaaaatgc

SEQ ID NO: 849019 - DNA, 15 bp, Homo sapiens
aaggaacaaaatgca

SEQ ID NO: 849020 - DNA, 15 bp, Homo sapiens
aggaacaaaatgcaa

SEQ ID NO: 849021 - DNA, 15 bp, Homo sapiens
ggaacaaaatgcaat

SEQ ID NO: 849022 - DNA, 15 bp, Homo sapiens
gaacaaaatgcaata

SEQ ID NO: 849023 - DNA, 15 bp, Homo sapiens
aacaaaatgcaatat

SEQ ID NO: 849024 - DNA, 15 bp, Homo sapiens
acaaaatgcaatatc

SEQ ID NO: 849025 - DNA, 15 bp, Homo sapiens
caaaatgcaatatca

SEQ ID NO: 849026 - DNA, 15 bp, Homo sapiens
aaaatgcaatatcaa

SEQ ID NO: 849027 - DNA, 15 bp, Homo sapiens
aaatgcaatatcaat

SEQ ID NO: 849028 - DNA, 15 bp, Homo sapiens
aatgcaatatcaatt

SEQ ID NO: 849029 - DNA, 15 bp, Homo sapiens
atgcaatatcaatta

SEQ ID NO: 849030 - DNA, 15 bp, Homo sapiens
tgcaatatcaattat

SEQ ID NO: 849031 - DNA, 15 bp, Homo sapiens
gcaatatcaattata

SEQ ID NO: 849032 - DNA, 15 bp, Homo sapiens
caatatcaattatac

SEQ ID NO: 849033 - DNA, 15 bp, Homo sapiens
aatatcaattataca

SEQ ID NO: 849034 - DNA, 15 bp, Homo sapiens
atatcaattatacag

SEQ ID NO: 849035 - DNA, 15 bp, Homo sapiens
tatcaattatacagt

SEQ ID NO: 849036 - DNA, 15 bp, Homo sapiens
atcaattatacagtt

SEQ ID NO: 849037 - DNA, 15 bp, Homo sapiens
tcaattatacagttg

SEQ ID NO: 849038 - DNA, 15 bp, Homo sapiens
caattatacagttgt

SEQ ID NO: 849039 - DNA, 15 bp, Homo sapiens
aattatacagttgtg

SEQ ID NO: 849040 - DNA, 15 bp, Homo sapiens
attatacagttgtgg

SEQ ID NO: 849041 - DNA, 15 bp, Homo sapiens
ttatacagttgtggc

SEQ ID NO: 849042 - DNA, 15 bp, Homo sapiens
tatacagttgtggca

SEQ ID NO: 849043 - DNA, 15 bp, Homo sapiens
atacagttgtggcag

SEQ ID NO: 849044 - DNA, 15 bp, Homo sapiens
tacagttgtggcagc

SEQ ID NO: 849045 - DNA, 15 bp, Homo sapiens
acagttgtggcagca

SEQ ID NO: 849046 - DNA, 15 bp, Homo sapiens
cagttgtggcagcac

SEQ ID NO: 849047 - DNA, 15 bp, Homo sapiens
agttgtggcagcact

SEQ ID NO: 849048 - DNA, 15 bp, Homo sapiens
gttgtggcagcactg

SEQ ID NO: 849049 - DNA, 15 bp, Homo sapiens
ttgtggcagcactgc

SEQ ID NO: 849050 - DNA, 15 bp, Homo sapiens
tgtggcagcactgct

SEQ ID NO: 849051 - DNA, 15 bp, Homo sapiens
gtggcagcactgcta

SEQ ID NO: 849052 - DNA, 15 bp, Homo sapiens
tggcagcactgctat

SEQ ID NO: 849053 - DNA, 15 bp, Homo sapiens
ggcagcactgctatc

SEQ ID NO: 849054 - DNA, 15 bp, Homo sapiens
gcagcactgctatca

SEQ ID NO: 849055 - DNA, 15 bp, Homo sapiens
cagcactgctatcaa

SEQ ID NO: 849056 - DNA, 15 bp, Homo sapiens
agcactgctatcaat

SEQ ID NO: 849057 - DNA, 15 bp, Homo sapiens
gcactgctatcaatt

SEQ ID NO: 849058 - DNA, 15 bp, Homo sapiens
cactgctatcaattt

SEQ ID NO: 849059 - DNA, 15 bp, Homo sapiens
actgctatcaatttg

SEQ ID NO: 849060 - DNA, 15 bp, Homo sapiens
ctgctatcaatttgt

SEQ ID NO: 849061 - DNA, 15 bp, Homo sapiens
tgctatcaatttgtt

SEQ ID NO: 849062 - DNA, 15 bp, Homo sapiens
gctatcaatttgttg

SEQ ID NO: 849063 - DNA, 15 bp, Homo sapiens
ctatcaatttgttga

SEQ ID NO: 849064 - DNA, 15 bp, Homo sapiens
tatcaatttgttgat

SEQ ID NO: 849065 - DNA, 15 bp, Homo sapiens
atcaatttgttgata

SEQ ID NO: 849066 - DNA, 15 bp, Homo sapiens
tcaatttgttgatag

SEQ ID NO: 849067 - DNA, 15 bp, Homo sapiens
caatttgttgatagt

SEQ ID NO: 849068 - DNA, 15 bp, Homo sapiens
aatttgttgatagtg

SEQ ID NO: 849069 - DNA, 15 bp, Homo sapiens
atttgttgatagtgg

SEQ ID NO: 849070 - DNA, 15 bp, Homo sapiens
tttgttgatagtggt

SEQ ID NO: 849071 - DNA, 15 bp, Homo sapiens
ttgttgatagtggtt

SEQ ID NO: 849072 - DNA, 15 bp, Homo sapiens
tgttgatagtggtta

SEQ ID NO: 849073 - DNA, 15 bp, Homo sapiens
gttgatagtggttaa

SEQ ID NO: 849074 - DNA, 15 bp, Homo sapiens
ttgatagtggttaac

SEQ ID NO: 849075 - DNA, 15 bp, Homo sapiens
tgatagtggttaaca

SEQ ID NO: 849076 - DNA, 15 bp, Homo sapiens
gatagtggttaacac

SEQ ID NO: 849077 - DNA, 15 bp, Homo sapiens
atagtggttaacact

SEQ ID NO: 849078 - DNA, 15 bp, Homo sapiens
tagtggttaacactt

SEQ ID NO: 849079 - DNA, 15 bp, Homo sapiens
agtggttaacactta

SEQ ID NO: 849080 - DNA, 15 bp, Homo sapiens
gtggttaacacttag

SEQ ID NO: 849081 - DNA, 15 bp, Homo sapiens
tggttaacacttaga

SEQ ID NO: 849082 - DNA, 15 bp, Homo sapiens
ggttaacacttagaa

SEQ ID NO: 849083 - DNA, 15 bp, Homo sapiens
gttaacacttagaaa

SEQ ID NO: 849084 - DNA, 15 bp, Homo sapiens
ttaacacttagaaaa

SEQ ID NO: 849085 - DNA, 15 bp, Homo sapiens
taacacttagaaaaa

SEQ ID NO: 849086 - DNA, 15 bp, Homo sapiens
aacacttagaaaaac

SEQ ID NO: 849087 - DNA, 15 bp, Homo sapiens
acacttagaaaaaca

SEQ ID NO: 849088 - DNA, 15 bp, Homo sapiens
cacttagaaaaacat

SEQ ID NO: 849089 - DNA, 15 bp, Homo sapiens
acttagaaaaacatt

SEQ ID NO: 849090 - DNA, 15 bp, Homo sapiens
cttagaaaaacattt

SEQ ID NO: 849091 - DNA, 15 bp, Homo sapiens
ttagaaaaacatttt

SEQ ID NO: 849092 - DNA, 15 bp, Homo sapiens
tagaaaaacatttta

SEQ ID NO: 849093 - DNA, 15 bp, Homo sapiens
agaaaaacattttaa

SEQ ID NO: 849094 - DNA, 15 bp, Homo sapiens
gaaaaacattttaaa

SEQ ID NO: 849095 - DNA, 15 bp, Homo sapiens
aaaaacattttaaaa

SEQ ID NO: 849096 - DNA, 15 bp, Homo sapiens
aaaacattttaaaaa

SEQ ID NO: 849097 - DNA, 15 bp, Homo sapiens
aaacattttaaaaat

SEQ ID NO: 849098 - DNA, 15 bp, Homo sapiens
aacattttaaaaata

SEQ ID NO: 849099 - DNA, 15 bp, Homo sapiens
acattttaaaaataa

SEQ ID NO: 849100 - DNA, 15 bp, Homo sapiens
cattttaaaaataat

SEQ ID NO: 849101 - DNA, 15 bp, Homo sapiens
attttaaaaataatt

SEQ ID NO: 849102 - DNA, 15 bp, Homo sapiens
tttaaaaataatttc

SEQ ID NO: 849103 - DNA, 15 bp, Homo sapiens
ttaaaaataatttca

SEQ ID NO: 849104 - DNA, 15 bp, Homo sapiens
taaaaataatttcac

SEQ ID NO: 849105 - DNA, 15 bp, Homo sapiens
aaaaataatttcaca

SEQ ID NO: 849106 - DNA, 15 bp, Homo sapiens
aaaataatttcacat

SEQ ID NO: 849107 - DNA, 15 bp, Homo sapiens
aaataatttcacata

SEQ ID NO: 849108 - DNA, 15 bp, Homo sapiens
aataatttcacataa

SEQ ID NO: 849109 - DNA, 15 bp, Homo sapiens
ataatttcacataag

SEQ ID NO: 849110 - DNA, 15 bp, Homo sapiens
taatttcacataagt

SEQ ID NO: 849111 - DNA, 15 bp, Homo sapiens
aatttcacataagta

SEQ ID NO: 849112 - DNA, 15 bp, Homo sapiens
atttcacataagtaa

SEQ ID NO: 849113 - DNA, 15 bp, Homo sapiens
tttcacataagtaat

SEQ ID NO: 849114 - DNA, 15 bp, Homo sapiens
ttcacataagtaatg

SEQ ID NO: 849115 - DNA, 15 bp, Homo sapiens
tcacataagtaatgt

SEQ ID NO: 849116 - DNA, 15 bp, Homo sapiens
cacataagtaatgta

SEQ ID NO: 849117 - DNA, 15 bp, Homo sapiens
acataagtaatgtaa

SEQ ID NO: 849118 - DNA, 15 bp, Homo sapiens
cataagtaatgtaat

SEQ ID NO: 849119 - DNA, 15 bp, Homo sapiens
ataagtaatgtaatt

SEQ ID NO: 849120 - DNA, 15 bp, Homo sapiens
taagtaatgtaattt

SEQ ID NO: 849121 - DNA, 15 bp, Homo sapiens
aagtaatgtaattta

SEQ ID NO: 849122 - DNA, 15 bp, Homo sapiens
agtaatgtaatttat

SEQ ID NO: 849123 - DNA, 15 bp, Homo sapiens
gtaatgtaatttatt

SEQ ID NO: 849124 - DNA, 15 bp, Homo sapiens
taatgtaatttatta

SEQ ID NO: 849125 - DNA, 15 bp, Homo sapiens
aatgtaatttattag

SEQ ID NO: 849126 - DNA, 15 bp, Homo sapiens
atgtaatttattagc

SEQ ID NO: 849127 - DNA, 15 bp, Homo sapiens
tgtaatttattagct

SEQ ID NO: 849128 - DNA, 15 bp, Homo sapiens
gtaatttattagctg

SEQ ID NO: 849129 - DNA, 15 bp, Homo sapiens
taatttattagctgt

SEQ ID NO: 849130 - DNA, 15 bp, Homo sapiens
aatttattagctgtc

SEQ ID NO: 849131 - DNA, 15 bp, Homo sapiens
atttattagctgtct

SEQ ID NO: 849132 - DNA, 15 bp, Homo sapiens
tttattagctgtctc

SEQ ID NO: 849133 - DNA, 15 bp, Homo sapiens
ttattagctgtctct

SEQ ID NO: 849134 - DNA, 15 bp, Homo sapiens
tattagctgtctctg

SEQ ID NO: 849135 - DNA, 15 bp, Homo sapiens
attagctgtctctga

SEQ ID NO: 849136 - DNA, 15 bp, Homo sapiens
ttagctgtctctgac

SEQ ID NO: 849137 - DNA, 15 bp, Homo sapiens
tagctgtctctgaca

SEQ ID NO: 849138 - DNA, 15 bp, Homo sapiens
agctgtctctgacat

SEQ ID NO: 849139 - DNA, 15 bp, Homo sapiens
gctgtctctgacatt

SEQ ID NO: 849140 - DNA, 15 bp, Homo sapiens
ctgtctctgacattt

SEQ ID NO: 849141 - DNA, 15 bp, Homo sapiens
tgtctctgacatttt

SEQ ID NO: 849142 - DNA, 15 bp, Homo sapiens
gtctctgacatttta

SEQ ID NO: 849143 - DNA, 15 bp, Homo sapiens
tctctgacattttac

SEQ ID NO: 849144 - DNA, 15 bp, Homo sapiens
ctctgacattttaca

SEQ ID NO: 849145 - DNA, 15 bp, Homo sapiens
tctgacattttacag

SEQ ID NO: 849146 - DNA, 15 bp, Homo sapiens
ctgacattttacagt

SEQ ID NO: 849147 - DNA, 15 bp, Homo sapiens
tgacattttacagtt

SEQ ID NO: 849148 - DNA, 15 bp, Homo sapiens
gacattttacagttt

SEQ ID NO: 849149 - DNA, 15 bp, Homo sapiens
acattttacagtttg

SEQ ID NO: 849150 - DNA, 15 bp, Homo sapiens
cattttacagtttgg

SEQ ID NO: 849151 - DNA, 15 bp, Homo sapiens
attttacagtttgga

SEQ ID NO: 849152 - DNA, 15 bp, Homo sapiens
ttttacagtttggaa

SEQ ID NO: 849153 - DNA, 15 bp, Homo sapiens
tttacagtttggaat

SEQ ID NO: 849154 - DNA, 15 bp, Homo sapiens
ttacagtttggaata

SEQ ID NO: 849155 - DNA, 15 bp, Homo sapiens
tacagtttggaatag

SEQ ID NO: 849156 - DNA, 15 bp, Homo sapiens
acagtttggaatagt

SEQ ID NO: 849157 - DNA, 15 bp, Homo sapiens
cagtttggaatagtt

SEQ ID NO: 849158 - DNA, 15 bp, Homo sapiens
agtttggaatagttt

SEQ ID NO: 849159 - DNA, 15 bp, Homo sapiens
gtttggaatagttta

SEQ ID NO: 849160 - DNA, 15 bp, Homo sapiens
tttggaatagtttat

SEQ ID NO: 849161 - DNA, 15 bp, Homo sapiens
ttggaatagtttatt

SEQ ID NO: 849162 - DNA, 15 bp, Homo sapiens
tggaatagtttattt

SEQ ID NO: 849163 - DNA, 15 bp, Homo sapiens
ggaatagtttatttt

SEQ ID NO: 849164 - DNA, 15 bp, Homo sapiens
gaatagtttattttc

SEQ ID NO: 849165 - DNA, 15 bp, Homo sapiens
aatagtttattttct

SEQ ID NO: 849166 - DNA, 15 bp, Homo sapiens
atagtttattttctt

SEQ ID NO: 849167 - DNA, 15 bp, Homo sapiens
tagtttattttcttt

SEQ ID NO: 849168 - DNA, 15 bp, Homo sapiens
agtttattttctttt

SEQ ID NO: 849169 - DNA, 15 bp, Homo sapiens
gtttattttcttttt

SEQ ID NO: 849170 - DNA, 15 bp, Homo sapiens
tttattttctttttg

SEQ ID NO: 849171 - DNA, 15 bp, Homo sapiens
ttattttctttttgg

SEQ ID NO: 849172 - DNA, 15 bp, Homo sapiens
tattttctttttggt

SEQ ID NO: 849173 - DNA, 15 bp, Homo sapiens
attttctttttggtg

SEQ ID NO: 849174 - DNA, 15 bp, Homo sapiens
ttttctttttggtgt

SEQ ID NO: 849175 - DNA, 15 bp, Homo sapiens
tttctttttggtgtc

SEQ ID NO: 849176 - DNA, 15 bp, Homo sapiens
ttctttttggtgtcc

SEQ ID NO: 849177 - DNA, 15 bp, Homo sapiens
tctttttggtgtcct

SEQ ID NO: 849178 - DNA, 15 bp, Homo sapiens
ctttttggtgtcctc

SEQ ID NO: 849179 - DNA, 15 bp, Homo sapiens
tttttggtgtcctca

SEQ ID NO: 849180 - DNA, 15 bp, Homo sapiens
ttttggtgtcctcac

SEQ ID NO: 849181 - DNA, 15 bp, Homo sapiens
tttggtgtcctcacc

SEQ ID NO: 849182 - DNA, 15 bp, Homo sapiens
ttggtgtcctcacca

SEQ ID NO: 849183 - DNA, 15 bp, Homo sapiens
tggtgtcctcaccaa

SEQ ID NO: 849184 - DNA, 15 bp, Homo sapiens
ggtgtcctcaccaaa

SEQ ID NO: 849185 - DNA, 15 bp, Homo sapiens
gtgtcctcaccaaaa

SEQ ID NO: 849186 - DNA, 15 bp, Homo sapiens
tgtcctcaccaaaac

SEQ ID NO: 849187 - DNA, 15 bp, Homo sapiens
gtcctcaccaaaacc

SEQ ID NO: 849188 - DNA, 15 bp, Homo sapiens
tcctcaccaaaaccc

SEQ ID NO: 849189 - DNA, 15 bp, Homo sapiens
cctcaccaaaaccca

SEQ ID NO: 849190 - DNA, 15 bp, Homo sapiens
ctcaccaaaacccaa

SEQ ID NO: 849191 - DNA, 15 bp, Homo sapiens
tcaccaaaacccaac

SEQ ID NO: 849192 - DNA, 15 bp, Homo sapiens
caccaaaacccaaca

SEQ ID NO: 849193 - DNA, 15 bp, Homo sapiens
accaaaacccaacat

SEQ ID NO: 849194 - DNA, 15 bp, Homo sapiens
ccaaaacccaacatc

SEQ ID NO: 849195 - DNA, 15 bp, Homo sapiens
caaaacccaacatct

SEQ ID NO: 849196 - DNA, 15 bp, Homo sapiens
aaaacccaacatctt

SEQ ID NO: 849197 - DNA, 15 bp, Homo sapiens
aaacccaacatcttc

SEQ ID NO: 849198 - DNA, 15 bp, Homo sapiens
aacccaacatcttca

SEQ ID NO: 849199 - DNA, 15 bp, Homo sapiens
acccaacatcttcaa

SEQ ID NO: 849200 - DNA, 15 bp, Homo sapiens
cccaacatcttcaag

SEQ ID NO: 849201 - DNA, 15 bp, Homo sapiens
ccaacatcttcaagg

SEQ ID NO: 849202 - DNA, 15 bp, Homo sapiens
caacatcttcaaggg

SEQ ID NO: 849203 - DNA, 15 bp, Homo sapiens
aacatcttcaagggc

SEQ ID NO: 849204 - DNA, 15 bp, Homo sapiens
acatcttcaagggca

SEQ ID NO: 849205 - DNA, 15 bp, Homo sapiens
catcttcaagggcag

SEQ ID NO: 849206 - DNA, 15 bp, Homo sapiens
atcttcaagggcagg

SEQ ID NO: 849207 - DNA, 15 bp, Homo sapiens
tcttcaagggcagga

SEQ ID NO: 849208 - DNA, 15 bp, Homo sapiens
cttcaagggcaggaa

SEQ ID NO: 849209 - DNA, 15 bp, Homo sapiens
ttcaagggcaggaac

SEQ ID NO: 849210 - DNA, 15 bp, Homo sapiens
tcaagggcaggaact

SEQ ID NO: 849211 - DNA, 15 bp, Homo sapiens
caagggcaggaactg

SEQ ID NO: 849212 - DNA, 15 bp, Homo sapiens
aagggcaggaactgt

SEQ ID NO: 849213 - DNA, 15 bp, Homo sapiens
agggcaggaactgta

SEQ ID NO: 849214 - DNA, 15 bp, Homo sapiens
gggcaggaactgtat

SEQ ID NO: 849215 - DNA, 15 bp, Homo sapiens
ggcaggaactgtata

SEQ ID NO: 849216 - DNA, 15 bp, Homo sapiens
gcaggaactgtataa

SEQ ID NO: 849217 - DNA, 15 bp, Homo sapiens
caggaactgtataat

SEQ ID NO: 849218 - DNA, 15 bp, Homo sapiens
aggaactgtataatt

SEQ ID NO: 849219 - DNA, 15 bp, Homo sapiens
ggaactgtataattt

SEQ ID NO: 849220 - DNA, 15 bp, Homo sapiens
gaactgtataatttt

SEQ ID NO: 849221 - DNA, 15 bp, Homo sapiens
aactgtataattttt

SEQ ID NO: 849222 - DNA, 15 bp, Homo sapiens
actgtataatttttg

SEQ ID NO: 849223 - DNA, 15 bp, Homo sapiens
ctgtataatttttgc

SEQ ID NO: 849224 - DNA, 15 bp, Homo sapiens
tgtataatttttgcc

SEQ ID NO: 849225 - DNA, 15 bp, Homo sapiens
gtataatttttgcca

SEQ ID NO: 849226 - DNA, 15 bp, Homo sapiens
tataatttttgccat

SEQ ID NO: 849227 - DNA, 15 bp, Homo sapiens
ataatttttgccatt

SEQ ID NO: 849228 - DNA, 15 bp, Homo sapiens
taatttttgccattg

SEQ ID NO: 849229 - DNA, 15 bp, Homo sapiens
aatttttgccattgt

SEQ ID NO: 849230 - DNA, 15 bp, Homo sapiens
atttttgccattgta

SEQ ID NO: 849231 - DNA, 15 bp, Homo sapiens
tttttgccattgtat

SEQ ID NO: 849232 - DNA, 15 bp, Homo sapiens
ttttgccattgtatt

SEQ ID NO: 849233 - DNA, 15 bp, Homo sapiens
tttgccattgtattt

SEQ ID NO: 849234 - DNA, 15 bp, Homo sapiens
ttgccattgtatttt

SEQ ID NO: 849235 - DNA, 15 bp, Homo sapiens
tgccattgtattttg

SEQ ID NO: 849236 - DNA, 15 bp, Homo sapiens
gccattgtattttga

SEQ ID NO: 849237 - DNA, 15 bp, Homo sapiens
ccattgtattttgag

SEQ ID NO: 849238 - DNA, 15 bp, Homo sapiens
cattgtattttgagc

SEQ ID NO: 849239 - DNA, 15 bp, Homo sapiens
attgtattttgagca

SEQ ID NO: 849240 - DNA, 15 bp, Homo sapiens
ttgtattttgagcac

SEQ ID NO: 849241 - DNA, 15 bp, Homo sapiens
tgtattttgagcaca

SEQ ID NO: 849242 - DNA, 15 bp, Homo sapiens
gtattttgagcacat

SEQ ID NO: 849243 - DNA, 15 bp, Homo sapiens
tattttgagcacata

SEQ ID NO: 849244 - DNA, 15 bp, Homo sapiens
attttgagcacatag

SEQ ID NO: 849245 - DNA, 15 bp, Homo sapiens
ttttgagcacatagc

SEQ ID NO: 849246 - DNA, 15 bp, Homo sapiens
tttgagcacatagca

SEQ ID NO: 849247 - DNA, 15 bp, Homo sapiens
ttgagcacatagcat

SEQ ID NO: 849248 - DNA, 15 bp, Homo sapiens
tgagcacatagcatg

SEQ ID NO: 849249 - DNA, 15 bp, Homo sapiens
gagcacatagcatgg

SEQ ID NO: 849250 - DNA, 15 bp, Homo sapiens
agcacatagcatggt

SEQ ID NO: 849251 - DNA, 15 bp, Homo sapiens
gcacatagcatggta

SEQ ID NO: 849252 - DNA, 15 bp, Homo sapiens
cacatagcatggtac

SEQ ID NO: 849253 - DNA, 15 bp, Homo sapiens
acatagcatggtact

SEQ ID NO: 849254 - DNA, 15 bp, Homo sapiens
catagcatggtactt

SEQ ID NO: 849255 - DNA, 15 bp, Homo sapiens
atagcatggtacttg

SEQ ID NO: 849256 - DNA, 15 bp, Homo sapiens
tagcatggtacttgc

SEQ ID NO: 849257 - DNA, 15 bp, Homo sapiens
agcatggtacttgcc

SEQ ID NO: 849258 - DNA, 15 bp, Homo sapiens
gcatggtacttgcct

SEQ ID NO: 849259 - DNA, 15 bp, Homo sapiens
catggtacttgcctc

SEQ ID NO: 849260 - DNA, 15 bp, Homo sapiens
atggtacttgcctct

SEQ ID NO: 849261 - DNA, 15 bp, Homo sapiens
tggtacttgcctcta

SEQ ID NO: 849262 - DNA, 15 bp, Homo sapiens
ggtacttgcctctaa

SEQ ID NO: 849263 - DNA, 15 bp, Homo sapiens
gtacttgcctctaaa

SEQ ID NO: 849264 - DNA, 15 bp, Homo sapiens
tacttgcctctaaat

SEQ ID NO: 849265 - DNA, 15 bp, Homo sapiens
acttgcctctaaata

SEQ ID NO: 849266 - DNA, 15 bp, Homo sapiens
cttgcctctaaatag

SEQ ID NO: 849267 - DNA, 15 bp, Homo sapiens
ttgcctctaaataga

SEQ ID NO: 849268 - DNA, 15 bp, Homo sapiens
tgcctctaaatagat

SEQ ID NO: 849269 - DNA, 15 bp, Homo sapiens
gcctctaaatagata

SEQ ID NO: 849270 - DNA, 15 bp, Homo sapiens
cctctaaatagatac

SEQ ID NO: 849271 - DNA, 15 bp, Homo sapiens
ctctaaatagatact

SEQ ID NO: 849272 - DNA, 15 bp, Homo sapiens
tctaaatagatacta

SEQ ID NO: 849273 - DNA, 15 bp, Homo sapiens
ctaaatagatactat

SEQ ID NO: 849274 - DNA, 15 bp, Homo sapiens
taaatagatactatt

SEQ ID NO: 849275 - DNA, 15 bp, Homo sapiens
aaatagatactattg

SEQ ID NO: 849276 - DNA, 15 bp, Homo sapiens
aatagatactattgt

SEQ ID NO: 849277 - DNA, 15 bp, Homo sapiens
atagatactattgtt

SEQ ID NO: 849278 - DNA, 15 bp, Homo sapiens
tagatactattgtta

SEQ ID NO: 849279 - DNA, 15 bp, Homo sapiens
agatactattgttaa

SEQ ID NO: 849280 - DNA, 15 bp, Homo sapiens
gatactattgttaaa

SEQ ID NO: 849281 - DNA, 15 bp, Homo sapiens
atactattgttaaaa

SEQ ID NO: 849282 - DNA, 15 bp, Homo sapiens
tactattgttaaaat

SEQ ID NO: 849283 - DNA, 15 bp, Homo sapiens
actattgttaaaata

SEQ ID NO: 849284 - DNA, 15 bp, Homo sapiens
ctattgttaaaatat

SEQ ID NO: 849285 - DNA, 15 bp, Homo sapiens
tattgttaaaatatt

SEQ ID NO: 849286 - DNA, 15 bp, Homo sapiens
attgttaaaatattt

SEQ ID NO: 849287 - DNA, 15 bp, Homo sapiens
ttgttaaaatatttt

SEQ ID NO: 849288 - DNA, 15 bp, Homo sapiens
tgttaaaatattttt

SEQ ID NO: 849289 - DNA, 15 bp, Homo sapiens
gttaaaatatttttt

SEQ ID NO: 849290 - DNA, 15 bp, Homo sapiens
ttaaaatatttttta

SEQ ID NO: 849291 - DNA, 15 bp, Homo sapiens
taaaatattttttaa

SEQ ID NO: 849292 - DNA, 15 bp, Homo sapiens
aaaatattttttaag

SEQ ID NO: 849293 - DNA, 15 bp, Homo sapiens
aaatattttttaagg

SEQ ID NO: 849294 - DNA, 15 bp, Homo sapiens
aatattttttaaggt

SEQ ID NO: 849295 - DNA, 15 bp, Homo sapiens
atattttttaaggta

SEQ ID NO: 849296 - DNA, 15 bp, Homo sapiens
tattttttaaggtaa

SEQ ID NO: 849297 - DNA, 15 bp, Homo sapiens
attttttaaggtaat

SEQ ID NO: 849298 - DNA, 15 bp, Homo sapiens
ttttttaaggtaata

SEQ ID NO: 849299 - DNA, 15 bp, Homo sapiens
tttttaaggtaatat

SEQ ID NO: 849300 - DNA, 15 bp, Homo sapiens
ttttaaggtaatatt

SEQ ID NO: 849301 - DNA, 15 bp, Homo sapiens
tttaaggtaatattt

SEQ ID NO: 849302 - DNA, 15 bp, Homo sapiens
ttaaggtaatatttt

SEQ ID NO: 849303 - DNA, 15 bp, Homo sapiens
taaggtaatatttta

SEQ ID NO: 849304 - DNA, 15 bp, Homo sapiens
aaggtaatattttaa

SEQ ID NO: 849305 - DNA, 15 bp, Homo sapiens
aggtaatattttaaa

SEQ ID NO: 849306 - DNA, 15 bp, Homo sapiens
ggtaatattttaaag

SEQ ID NO: 849307 - DNA, 15 bp, Homo sapiens
gtaatattttaaagt

SEQ ID NO: 849308 - DNA, 15 bp, Homo sapiens
taatattttaaagtg

SEQ ID NO: 849309 - DNA, 15 bp, Homo sapiens
aatattttaaagtgt

SEQ ID NO: 849310 - DNA, 15 bp, Homo sapiens
atattttaaagtgta

SEQ ID NO: 849311 - DNA, 15 bp, Homo sapiens
tattttaaagtgtat

SEQ ID NO: 849312 - DNA, 15 bp, Homo sapiens
attttaaagtgtatg

SEQ ID NO: 849313 - DNA, 15 bp, Homo sapiens
ttttaaagtgtatgc

SEQ ID NO: 849314 - DNA, 15 bp, Homo sapiens
tttaaagtgtatgct

SEQ ID NO: 849315 - DNA, 15 bp, Homo sapiens
ttaaagtgtatgcta

SEQ ID NO: 849316 - DNA, 15 bp, Homo sapiens
taaagtgtatgctat

SEQ ID NO: 849317 - DNA, 15 bp, Homo sapiens
aaagtgtatgctatg

SEQ ID NO: 849318 - DNA, 15 bp, Homo sapiens
aagtgtatgctatgg

SEQ ID NO: 849319 - DNA, 15 bp, Homo sapiens
agtgtatgctatggt

SEQ ID NO: 849320 - DNA, 15 bp, Homo sapiens
gtgtatgctatggta

SEQ ID NO: 849321 - DNA, 15 bp, Homo sapiens
tgtatgctatggtac

SEQ ID NO: 849322 - DNA, 15 bp, Homo sapiens
gtatgctatggtaca

SEQ ID NO: 849323 - DNA, 15 bp, Homo sapiens
tatgctatggtacag

SEQ ID NO: 849324 - DNA, 15 bp, Homo sapiens
atgctatggtacagt

SEQ ID NO: 849325 - DNA, 15 bp, Homo sapiens
tgctatggtacagtt

SEQ ID NO: 849326 - DNA, 15 bp, Homo sapiens
gctatggtacagttc

SEQ ID NO: 849327 - DNA, 15 bp, Homo sapiens
ctatggtacagttca

SEQ ID NO: 849328 - DNA, 15 bp, Homo sapiens
tatggtacagttcag

SEQ ID NO: 849329 - DNA, 15 bp, Homo sapiens
atggtacagttcagt

SEQ ID NO: 849330 - DNA, 15 bp, Homo sapiens
tggtacagttcagtt

SEQ ID NO: 849331 - DNA, 15 bp, Homo sapiens
ggtacagttcagttt

SEQ ID NO: 849332 - DNA, 15 bp, Homo sapiens
gtacagttcagtttg

SEQ ID NO: 849333 - DNA, 15 bp, Homo sapiens
tacagttcagtttgt

SEQ ID NO: 849334 - DNA, 15 bp, Homo sapiens
acagttcagtttgtg

SEQ ID NO: 849335 - DNA, 15 bp, Homo sapiens
cagttcagtttgtga

SEQ ID NO: 849336 - DNA, 15 bp, Homo sapiens
agttcagtttgtgac

SEQ ID NO: 849337 - DNA, 15 bp, Homo sapiens
gttcagtttgtgact

SEQ ID NO: 849338 - DNA, 15 bp, Homo sapiens
ttcagtttgtgactt

SEQ ID NO: 849339 - DNA, 15 bp, Homo sapiens
tcagtttgtgacttt

SEQ ID NO: 849340 - DNA, 15 bp, Homo sapiens
cagtttgtgactttt

SEQ ID NO: 849341 - DNA, 15 bp, Homo sapiens
agtttgtgacttttg

SEQ ID NO: 849342 - DNA, 15 bp, Homo sapiens
gtttgtgacttttgc

SEQ ID NO: 849343 - DNA, 15 bp, Homo sapiens
tttgtgacttttgct

SEQ ID NO: 849344 - DNA, 15 bp, Homo sapiens
ttgtgacttttgcta

SEQ ID NO: 849345 - DNA, 15 bp, Homo sapiens
tgtgacttttgctag

SEQ ID NO: 849346 - DNA, 15 bp, Homo sapiens
gtgacttttgctagt

SEQ ID NO: 849347 - DNA, 15 bp, Homo sapiens
tgacttttgctagtt

SEQ ID NO: 849348 - DNA, 15 bp, Homo sapiens
gacttttgctagttt

SEQ ID NO: 849349 - DNA, 15 bp, Homo sapiens
acttttgctagttta

SEQ ID NO: 849350 - DNA, 15 bp, Homo sapiens
cttttgctagtttat

SEQ ID NO: 849351 - DNA, 15 bp, Homo sapiens
ttttgctagtttatg

SEQ ID NO: 849352 - DNA, 15 bp, Homo sapiens
tttgctagtttatgc

SEQ ID NO: 849353 - DNA, 15 bp, Homo sapiens
ttgctagtttatgcc

SEQ ID NO: 849354 - DNA, 15 bp, Homo sapiens
tgctagtttatgcca

SEQ ID NO: 849355 - DNA, 15 bp, Homo sapiens
gctagtttatgccac

SEQ ID NO: 849356 - DNA, 15 bp, Homo sapiens
ctagtttatgccact

SEQ ID NO: 849357 - DNA, 15 bp, Homo sapiens
tagtttatgccactt

SEQ ID NO: 849358 - DNA, 15 bp, Homo sapiens
agtttatgccactta

SEQ ID NO: 849359 - DNA, 15 bp, Homo sapiens
gtttatgccacttac

SEQ ID NO: 849360 - DNA, 15 bp, Homo sapiens
tttatgccacttaca

SEQ ID NO: 849361 - DNA, 15 bp, Homo sapiens
ttatgccacttacag

SEQ ID NO: 849362 - DNA, 15 bp, Homo sapiens
tatgccacttacagt

SEQ ID NO: 849363 - DNA, 15 bp, Homo sapiens
atgccacttacagtt

SEQ ID NO: 849364 - DNA, 15 bp, Homo sapiens
tgccacttacagtta

SEQ ID NO: 849365 - DNA, 15 bp, Homo sapiens
gccacttacagttag

SEQ ID NO: 849366 - DNA, 15 bp, Homo sapiens
ccacttacagttagc

SEQ ID NO: 849367 - DNA, 15 bp, Homo sapiens
cacttacagttagca

SEQ ID NO: 849368 - DNA, 15 bp, Homo sapiens
acttacagttagcaa

SEQ ID NO: 849369 - DNA, 15 bp, Homo sapiens
cttacagttagcaaa

SEQ ID NO: 849370 - DNA, 15 bp, Homo sapiens
ttacagttagcaaaa

SEQ ID NO: 849371 - DNA, 15 bp, Homo sapiens
tacagttagcaaaat

SEQ ID NO: 849372 - DNA, 15 bp, Homo sapiens
acagttagcaaaatc

SEQ ID NO: 849373 - DNA, 15 bp, Homo sapiens
cagttagcaaaatca

SEQ ID NO: 849374 - DNA, 15 bp, Homo sapiens
agttagcaaaatcac

SEQ ID NO: 849375 - DNA, 15 bp, Homo sapiens
gttagcaaaatcact

SEQ ID NO: 849376 - DNA, 15 bp, Homo sapiens
ttagcaaaatcactt

SEQ ID NO: 849377 - DNA, 15 bp, Homo sapiens
tagcaaaatcacttc

SEQ ID NO: 849378 - DNA, 15 bp, Homo sapiens
agcaaaatcacttca

SEQ ID NO: 849379 - DNA, 15 bp, Homo sapiens
gcaaaatcacttcag

SEQ ID NO: 849380 - DNA, 15 bp, Homo sapiens
caaaatcacttcagc

SEQ ID NO: 849381 - DNA, 15 bp, Homo sapiens
aaaatcacttcagca

SEQ ID NO: 849382 - DNA, 15 bp, Homo sapiens
aaatcacttcagcag

SEQ ID NO: 849383 - DNA, 15 bp, Homo sapiens
aatcacttcagcagt

SEQ ID NO: 849384 - DNA, 15 bp, Homo sapiens
atcacttcagcagtt

SEQ ID NO: 849385 - DNA, 15 bp, Homo sapiens
tcacttcagcagttc

SEQ ID NO: 849386 - DNA, 15 bp, Homo sapiens
cacttcagcagttct

SEQ ID NO: 849387 - DNA, 15 bp, Homo sapiens
acttcagcagttctt

SEQ ID NO: 849388 - DNA, 15 bp, Homo sapiens
cttcagcagttcttg

SEQ ID NO: 849389 - DNA, 15 bp, Homo sapiens
ttcagcagttcttgg

SEQ ID NO: 849390 - DNA, 15 bp, Homo sapiens
tcagcagttcttgga

SEQ ID NO: 849391 - DNA, 15 bp, Homo sapiens
cagcagttcttggaa

SEQ ID NO: 849392 - DNA, 15 bp, Homo sapiens
agcagttcttggaat

SEQ ID NO: 849393 - DNA, 15 bp, Homo sapiens
gcagttcttggaatg

SEQ ID NO: 849394 - DNA, 15 bp, Homo sapiens
cagttcttggaatgt

SEQ ID NO: 849395 - DNA, 15 bp, Homo sapiens
agttcttggaatgtt

SEQ ID NO: 849396 - DNA, 15 bp, Homo sapiens
gttcttggaatgttg

SEQ ID NO: 849397 - DNA, 15 bp, Homo sapiens
ttcttggaatgttgt

SEQ ID NO: 849398 - DNA, 15 bp, Homo sapiens
tcttggaatgttgtg

SEQ ID NO: 849399 - DNA, 15 bp, Homo sapiens
cttggaatgttgtga

SEQ ID NO: 849400 - DNA, 15 bp, Homo sapiens
ttggaatgttgtgaa

SEQ ID NO: 849401 - DNA, 15 bp, Homo sapiens
tggaatgttgtgaaa

SEQ ID NO: 849402 - DNA, 15 bp, Homo sapiens
ggaatgttgtgaaaa

SEQ ID NO: 849403 - DNA, 15 bp, Homo sapiens
gaatgttgtgaaaag

SEQ ID NO: 849404 - DNA, 15 bp, Homo sapiens
aatgttgtgaaaagt

SEQ ID NO: 849405 - DNA, 15 bp, Homo sapiens
atgttgtgaaaagtg

SEQ ID NO: 849406 - DNA, 15 bp, Homo sapiens
tgttgtgaaaagtga

SEQ ID NO: 849407 - DNA, 15 bp, Homo sapiens
gttgtgaaaagtgat

SEQ ID NO: 849408 - DNA, 15 bp, Homo sapiens
ttgtgaaaagtgata

SEQ ID NO: 849409 - DNA, 15 bp, Homo sapiens
tgtgaaaagtgataa

SEQ ID NO: 849410 - DNA, 15 bp, Homo sapiens
gtgaaaagtgataaa

SEQ ID NO: 849411 - DNA, 15 bp, Homo sapiens
tgaaaagtgataaaa

SEQ ID NO: 849412 - DNA, 15 bp, Homo sapiens
gaaaagtgataaaaa

SEQ ID NO: 849413 - DNA, 15 bp, Homo sapiens
aaaagtgataaaaat

SEQ ID NO: 849414 - DNA, 15 bp, Homo sapiens
aaagtgataaaaatc

SEQ ID NO: 849415 - DNA, 15 bp, Homo sapiens
aagtgataaaaatct

SEQ ID NO: 849416 - DNA, 15 bp, Homo sapiens
agtgataaaaatctt

SEQ ID NO: 849417 - DNA, 15 bp, Homo sapiens
gtgataaaaatcttc

SEQ ID NO: 849418 - DNA, 15 bp, Homo sapiens
tgataaaaatcttct

SEQ ID NO: 849419 - DNA, 15 bp, Homo sapiens
gataaaaatcttctg

SEQ ID NO: 849420 - DNA, 15 bp, Homo sapiens
ataaaaatcttctgc

SEQ ID NO: 849421 - DNA, 15 bp, Homo sapiens
taaaaatcttctgca

SEQ ID NO: 849422 - DNA, 15 bp, Homo sapiens
aaaaatcttctgcaa

SEQ ID NO: 849423 - DNA, 15 bp, Homo sapiens
aaaatcttctgcaac

SEQ ID NO: 849424 - DNA, 15 bp, Homo sapiens
aaatcttctgcaact

SEQ ID NO: 849425 - DNA, 15 bp, Homo sapiens
aatcttctgcaactt

SEQ ID NO: 849426 - DNA, 15 bp, Homo sapiens
atcttctgcaactta

SEQ ID NO: 849427 - DNA, 15 bp, Homo sapiens
tcttctgcaacttat

SEQ ID NO: 849428 - DNA, 15 bp, Homo sapiens
cttctgcaacttatt

SEQ ID NO: 849429 - DNA, 15 bp, Homo sapiens
ttctgcaacttattc

SEQ ID NO: 849430 - DNA, 15 bp, Homo sapiens
tctgcaacttattcc

SEQ ID NO: 849431 - DNA, 15 bp, Homo sapiens
ctgcaacttattcct

SEQ ID NO: 849432 - DNA, 15 bp, Homo sapiens
tgcaacttattcctt

SEQ ID NO: 849433 - DNA, 15 bp, Homo sapiens
gcaacttattccttt

SEQ ID NO: 849434 - DNA, 15 bp, Homo sapiens
caacttattccttta

SEQ ID NO: 849435 - DNA, 15 bp, Homo sapiens
aacttattcctttat

SEQ ID NO: 849436 - DNA, 15 bp, Homo sapiens
acttattcctttatt

SEQ ID NO: 849437 - DNA, 15 bp, Homo sapiens
cttattcctttattc

SEQ ID NO: 849438 - DNA, 15 bp, Homo sapiens
ttattcctttattcc

SEQ ID NO: 849439 - DNA, 15 bp, Homo sapiens
tattcctttattcct

SEQ ID NO: 849440 - DNA, 15 bp, Homo sapiens
attcctttattcctc

SEQ ID NO: 849441 - DNA, 15 bp, Homo sapiens
ttcctttattcctca

SEQ ID NO: 849442 - DNA, 15 bp, Homo sapiens
tcctttattcctcat

SEQ ID NO: 849443 - DNA, 15 bp, Homo sapiens
cctttattcctcatt

SEQ ID NO: 849444 - DNA, 15 bp, Homo sapiens
ctttattcctcattt

SEQ ID NO: 849445 - DNA, 15 bp, Homo sapiens
tttattcctcattta

SEQ ID NO: 849446 - DNA, 15 bp, Homo sapiens
ttattcctcatttaa

SEQ ID NO: 849447 - DNA, 15 bp, Homo sapiens
tattcctcatttaaa

SEQ ID NO: 849448 - DNA, 15 bp, Homo sapiens
attcctcatttaaaa

SEQ ID NO: 849449 - DNA, 15 bp, Homo sapiens
ttcctcatttaaaat

SEQ ID NO: 849450 - DNA, 15 bp, Homo sapiens
tcctcatttaaaata

SEQ ID NO: 849451 - DNA, 15 bp, Homo sapiens
cctcatttaaaataa

SEQ ID NO: 849452 - DNA, 15 bp, Homo sapiens
ctcatttaaaataat

SEQ ID NO: 849453 - DNA, 15 bp, Homo sapiens
tcatttaaaataatc

SEQ ID NO: 849454 - DNA, 15 bp, Homo sapiens
catttaaaataatct

SEQ ID NO: 849455 - DNA, 15 bp, Homo sapiens
atttaaaataatcta

SEQ ID NO: 849456 - DNA, 15 bp, Homo sapiens
tttaaaataatctac

SEQ ID NO: 849457 - DNA, 15 bp, Homo sapiens
ttaaaataatctacc

SEQ ID NO: 849458 - DNA, 15 bp, Homo sapiens
taaaataatctacca

SEQ ID NO: 849459 - DNA, 15 bp, Homo sapiens
aaaataatctaccat

SEQ ID NO: 849460 - DNA, 15 bp, Homo sapiens
aaataatctaccata

SEQ ID NO: 849461 - DNA, 15 bp, Homo sapiens
aataatctaccatag

SEQ ID NO: 849462 - DNA, 15 bp, Homo sapiens
ataatctaccatagt

SEQ ID NO: 849463 - DNA, 15 bp, Homo sapiens
taatctaccatagta

SEQ ID NO: 849464 - DNA, 15 bp, Homo sapiens
aatctaccatagtaa

SEQ ID NO: 849465 - DNA, 15 bp, Homo sapiens
atctaccatagtaaa

SEQ ID NO: 849466 - DNA, 15 bp, Homo sapiens
tctaccatagtaaaa

SEQ ID NO: 849467 - DNA, 15 bp, Homo sapiens
ctaccatagtaaaaa

SEQ ID NO: 849468 - DNA, 15 bp, Homo sapiens
taccatagtaaaaac

SEQ ID NO: 849469 - DNA, 15 bp, Homo sapiens
accatagtaaaaaca

SEQ ID NO: 849470 - DNA, 15 bp, Homo sapiens
ccatagtaaaaacat

SEQ ID NO: 849471 - DNA, 15 bp, Homo sapiens
catagtaaaaacatg

SEQ ID NO: 849472 - DNA, 15 bp, Homo sapiens
atagtaaaaacatgt

SEQ ID NO: 849473 - DNA, 15 bp, Homo sapiens
tagtaaaaacatgta

SEQ ID NO: 849474 - DNA, 15 bp, Homo sapiens
agtaaaaacatgtat

SEQ ID NO: 849475 - DNA, 15 bp, Homo sapiens
gtaaaaacatgtata

SEQ ID NO: 849476 - DNA, 15 bp, Homo sapiens
taaaaacatgtataa

SEQ ID NO: 849477 - DNA, 15 bp, Homo sapiens
aaaaacatgtataaa

SEQ ID NO: 849478 - DNA, 15 bp, Homo sapiens
aaaacatgtataaaa

SEQ ID NO: 849479 - DNA, 15 bp, Homo sapiens
aaacatgtataaaag

SEQ ID NO: 849480 - DNA, 15 bp, Homo sapiens
aacatgtataaaagt

SEQ ID NO: 849481 - DNA, 15 bp, Homo sapiens
acatgtataaaagtg

SEQ ID NO: 849482 - DNA, 15 bp, Homo sapiens
catgtataaaagtgc

SEQ ID NO: 849483 - DNA, 15 bp, Homo sapiens
atgtataaaagtgct

SEQ ID NO: 849484 - DNA, 15 bp, Homo sapiens
tgtataaaagtgcta

SEQ ID NO: 849485 - DNA, 15 bp, Homo sapiens
gtataaaagtgctac

SEQ ID NO: 849486 - DNA, 15 bp, Homo sapiens
tataaaagtgctact

SEQ ID NO: 849487 - DNA, 15 bp, Homo sapiens
ataaaagtgctactt

SEQ ID NO: 849488 - DNA, 15 bp, Homo sapiens
taaaagtgctacttc

SEQ ID NO: 849489 - DNA, 15 bp, Homo sapiens
aaaagtgctacttct

SEQ ID NO: 849490 - DNA, 15 bp, Homo sapiens
aaagtgctacttctg

SEQ ID NO: 849491 - DNA, 15 bp, Homo sapiens
aagtgctacttctgc

SEQ ID NO: 849492 - DNA, 15 bp, Homo sapiens
agtgctacttctgca

SEQ ID NO: 849493 - DNA, 15 bp, Homo sapiens
gtgctacttctgcac

SEQ ID NO: 849494 - DNA, 15 bp, Homo sapiens
tgctacttctgcacc

SEQ ID NO: 849495 - DNA, 15 bp, Homo sapiens
gctacttctgcacca

SEQ ID NO: 849496 - DNA, 15 bp, Homo sapiens
ctacttctgcaccac

SEQ ID NO: 849497 - DNA, 15 bp, Homo sapiens
tacttctgcaccact

SEQ ID NO: 849498 - DNA, 15 bp, Homo sapiens
acttctgcaccactt

SEQ ID NO: 849499 - DNA, 15 bp, Homo sapiens
cttctgcaccacttt

SEQ ID NO: 849500 - DNA, 15 bp, Homo sapiens
ttctgcaccactttt

SEQ ID NO: 849501 - DNA, 15 bp, Homo sapiens
tctgcaccacttttg

SEQ ID NO: 849502 - DNA, 15 bp, Homo sapiens
ctgcaccacttttga

SEQ ID NO: 849503 - DNA, 15 bp, Homo sapiens
tgcaccacttttgag

SEQ ID NO: 849504 - DNA, 15 bp, Homo sapiens
gcaccacttttgaga

SEQ ID NO: 849505 - DNA, 15 bp, Homo sapiens
caccacttttgagaa

SEQ ID NO: 849506 - DNA, 15 bp, Homo sapiens
accacttttgagaat

SEQ ID NO: 849507 - DNA, 15 bp, Homo sapiens
ccacttttgagaata

SEQ ID NO: 849508 - DNA, 15 bp, Homo sapiens
cacttttgagaatag

SEQ ID NO: 849509 - DNA, 15 bp, Homo sapiens
acttttgagaatagt

SEQ ID NO: 849510 - DNA, 15 bp, Homo sapiens
cttttgagaatagtg

SEQ ID NO: 849511 - DNA, 15 bp, Homo sapiens
ttttgagaatagtgt

SEQ ID NO: 849512 - DNA, 15 bp, Homo sapiens
tttgagaatagtgtt

SEQ ID NO: 849513 - DNA, 15 bp, Homo sapiens
ttgagaatagtgtta

SEQ ID NO: 849514 - DNA, 15 bp, Homo sapiens
tgagaatagtgttat

SEQ ID NO: 849515 - DNA, 15 bp, Homo sapiens
gagaatagtgttatt

SEQ ID NO: 849516 - DNA, 15 bp, Homo sapiens
agaatagtgttattt

SEQ ID NO: 849517 - DNA, 15 bp, Homo sapiens
gaatagtgttatttc

SEQ ID NO: 849518 - DNA, 15 bp, Homo sapiens
aatagtgttatttca

SEQ ID NO: 849519 - DNA, 15 bp, Homo sapiens
atagtgttatttcag

SEQ ID NO: 849520 - DNA, 15 bp, Homo sapiens
tagtgttatttcagt

SEQ ID NO: 849521 - DNA, 15 bp, Homo sapiens
agtgttatttcagtg

SEQ ID NO: 849522 - DNA, 15 bp, Homo sapiens
gtgttatttcagtga

SEQ ID NO: 849523 - DNA, 15 bp, Homo sapiens
tgttatttcagtgaa

SEQ ID NO: 849524 - DNA, 15 bp, Homo sapiens
gttatttcagtgaat

SEQ ID NO: 849525 - DNA, 15 bp, Homo sapiens
ttatttcagtgaatc

SEQ ID NO: 849526 - DNA, 15 bp, Homo sapiens
tatttcagtgaatcg

SEQ ID NO: 849527 - DNA, 15 bp, Homo sapiens
atttcagtgaatcga

SEQ ID NO: 849528 - DNA, 15 bp, Homo sapiens
tttcagtgaatcgat

SEQ ID NO: 849529 - DNA, 15 bp, Homo sapiens
ttcagtgaatcgatg

SEQ ID NO: 849530 - DNA, 15 bp, Homo sapiens
tcagtgaatcgatgt

SEQ ID NO: 849531 - DNA, 15 bp, Homo sapiens
cagtgaatcgatgtg

SEQ ID NO: 849532 - DNA, 15 bp, Homo sapiens
agtgaatcgatgtgg

SEQ ID NO: 849533 - DNA, 15 bp, Homo sapiens
gtgaatcgatgtggt

SEQ ID NO: 849534 - DNA, 15 bp, Homo sapiens
tgaatcgatgtggtg

SEQ ID NO: 849535 - DNA, 15 bp, Homo sapiens
gaatcgatgtggtga

SEQ ID NO: 849536 - DNA, 15 bp, Homo sapiens
aatcgatgtggtgac

SEQ ID NO: 849537 - DNA, 15 bp, Homo sapiens
atcgatgtggtgacc

SEQ ID NO: 849538 - DNA, 15 bp, Homo sapiens
tcgatgtggtgacca

SEQ ID NO: 849539 - DNA, 15 bp, Homo sapiens
cgatgtggtgaccat

SEQ ID NO: 849540 - DNA, 15 bp, Homo sapiens
gatgtggtgaccata

SEQ ID NO: 849541 - DNA, 15 bp, Homo sapiens
atgtggtgaccatat

SEQ ID NO: 849542 - DNA, 15 bp, Homo sapiens
tgtggtgaccatatt

SEQ ID NO: 849543 - DNA, 15 bp, Homo sapiens
gtggtgaccatattg

SEQ ID NO: 849544 - DNA, 15 bp, Homo sapiens
tggtgaccatattgt

SEQ ID NO: 849545 - DNA, 15 bp, Homo sapiens
ggtgaccatattgta

SEQ ID NO: 849546 - DNA, 15 bp, Homo sapiens
gtgaccatattgtaa

SEQ ID NO: 849547 - DNA, 15 bp, Homo sapiens
tgaccatattgtaat

SEQ ID NO: 849548 - DNA, 15 bp, Homo sapiens
gaccatattgtaatg

SEQ ID NO: 849549 - DNA, 15 bp, Homo sapiens
accatattgtaatgc

SEQ ID NO: 849550 - DNA, 15 bp, Homo sapiens
ccatattgtaatgca

SEQ ID NO: 849551 - DNA, 15 bp, Homo sapiens
catattgtaatgcat

SEQ ID NO: 849552 - DNA, 15 bp, Homo sapiens
atattgtaatgcatg

SEQ ID NO: 849553 - DNA, 15 bp, Homo sapiens
tattgtaatgcatgt

SEQ ID NO: 849554 - DNA, 15 bp, Homo sapiens
attgtaatgcatgta

SEQ ID NO: 849555 - DNA, 15 bp, Homo sapiens
ttgtaatgcatgtag

SEQ ID NO: 849556 - DNA, 15 bp, Homo sapiens
tgtaatgcatgtagt

SEQ ID NO: 849557 - DNA, 15 bp, Homo sapiens
gtaatgcatgtagtg

SEQ ID NO: 849558 - DNA, 15 bp, Homo sapiens
taatgcatgtagtga

SEQ ID NO: 849559 - DNA, 15 bp, Homo sapiens
aatgcatgtagtgaa

SEQ ID NO: 849560 - DNA, 15 bp, Homo sapiens
atgcatgtagtgaac

SEQ ID NO: 849561 - DNA, 15 bp, Homo sapiens
tgcatgtagtgaact

SEQ ID NO: 849562 - DNA, 15 bp, Homo sapiens
gcatgtagtgaactg

SEQ ID NO: 849563 - DNA, 15 bp, Homo sapiens
catgtagtgaactgt

SEQ ID NO: 849564 - DNA, 15 bp, Homo sapiens
atgtagtgaactgtt

SEQ ID NO: 849565 - DNA, 15 bp, Homo sapiens
tgtagtgaactgttt

SEQ ID NO: 849566 - DNA, 15 bp, Homo sapiens
gtagtgaactgttta

SEQ ID NO: 849567 - DNA, 15 bp, Homo sapiens
tagtgaactgtttaa

SEQ ID NO: 849568 - DNA, 15 bp, Homo sapiens
agtgaactgtttaag

SEQ ID NO: 849569 - DNA, 15 bp, Homo sapiens
gtgaactgtttaagg

SEQ ID NO: 849570 - DNA, 15 bp, Homo sapiens
tgaactgtttaaggc

SEQ ID NO: 849571 - DNA, 15 bp, Homo sapiens
gaactgtttaaggca

SEQ ID NO: 849572 - DNA, 15 bp, Homo sapiens
aactgtttaaggcaa

SEQ ID NO: 849573 - DNA, 15 bp, Homo sapiens
actgtttaaggcaaa

SEQ ID NO: 849574 - DNA, 15 bp, Homo sapiens
ctgtttaaggcaaat

SEQ ID NO: 849575 - DNA, 15 bp, Homo sapiens
tgtttaaggcaaatc

SEQ ID NO: 849576 - DNA, 15 bp, Homo sapiens
gtttaaggcaaatca

SEQ ID NO: 849577 - DNA, 15 bp, Homo sapiens
tttaaggcaaatcat

SEQ ID NO: 849578 - DNA, 15 bp, Homo sapiens
ttaaggcaaatcatc

SEQ ID NO: 849579 - DNA, 15 bp, Homo sapiens
taaggcaaatcatct

SEQ ID NO: 849580 - DNA, 15 bp, Homo sapiens
aaggcaaatcatcta

SEQ ID NO: 849581 - DNA, 15 bp, Homo sapiens
aggcaaatcatctac

SEQ ID NO: 849582 - DNA, 15 bp, Homo sapiens
ggcaaatcatctaca

SEQ ID NO: 849583 - DNA, 15 bp, Homo sapiens
gcaaatcatctacac

SEQ ID NO: 849584 - DNA, 15 bp, Homo sapiens
caaatcatctacact

SEQ ID NO: 849585 - DNA, 15 bp, Homo sapiens
aaatcatctacacta

SEQ ID NO: 849586 - DNA, 15 bp, Homo sapiens
aatcatctacactag

SEQ ID NO: 849587 - DNA, 15 bp, Homo sapiens
atcatctacactaga

SEQ ID NO: 849588 - DNA, 15 bp, Homo sapiens
tcatctacactagat

SEQ ID NO: 849589 - DNA, 15 bp, Homo sapiens
catctacactagatg

SEQ ID NO: 849590 - DNA, 15 bp, Homo sapiens
atctacactagatga

SEQ ID NO: 849591 - DNA, 15 bp, Homo sapiens
tctacactagatgac

SEQ ID NO: 849592 - DNA, 15 bp, Homo sapiens
ctacactagatgacc

SEQ ID NO: 849593 - DNA, 15 bp, Homo sapiens
tacactagatgacca

SEQ ID NO: 849594 - DNA, 15 bp, Homo sapiens
acactagatgaccag

SEQ ID NO: 849595 - DNA, 15 bp, Homo sapiens
cactagatgaccagg

SEQ ID NO: 849596 - DNA, 15 bp, Homo sapiens
actagatgaccagga

SEQ ID NO: 849597 - DNA, 15 bp, Homo sapiens
ctagatgaccaggaa

SEQ ID NO: 849598 - DNA, 15 bp, Homo sapiens
tagatgaccaggaaa

SEQ ID NO: 849599 - DNA, 15 bp, Homo sapiens
agatgaccaggaaat

SEQ ID NO: 849600 - DNA, 15 bp, Homo sapiens
gatgaccaggaaata

SEQ ID NO: 849601 - DNA, 15 bp, Homo sapiens
atgaccaggaaatag

SEQ ID NO: 849602 - DNA, 15 bp, Homo sapiens
tgaccaggaaataga

SEQ ID NO: 849603 - DNA, 15 bp, Homo sapiens
gaccaggaaatagag

SEQ ID NO: 849604 - DNA, 15 bp, Homo sapiens
accaggaaatagaga

SEQ ID NO: 849605 - DNA, 15 bp, Homo sapiens
ccaggaaatagagag

SEQ ID NO: 849606 - DNA, 15 bp, Homo sapiens
caggaaatagagagg

SEQ ID NO: 849607 - DNA, 15 bp, Homo sapiens
aggaaatagagagga

SEQ ID NO: 849608 - DNA, 15 bp, Homo sapiens
ggaaatagagaggaa

SEQ ID NO: 849609 - DNA, 15 bp, Homo sapiens
gaaatagagaggaaa

SEQ ID NO: 849610 - DNA, 15 bp, Homo sapiens
aaatagagaggaaat

SEQ ID NO: 849611 - DNA, 15 bp, Homo sapiens
aatagagaggaaatg

SEQ ID NO: 849612 - DNA, 15 bp, Homo sapiens
atagagaggaaatgt

SEQ ID NO: 849613 - DNA, 15 bp, Homo sapiens
tagagaggaaatgta

SEQ ID NO: 849614 - DNA, 15 bp, Homo sapiens
agagaggaaatgtaa

SEQ ID NO: 849615 - DNA, 15 bp, Homo sapiens
gagaggaaatgtaat

SEQ ID NO: 849616 - DNA, 15 bp, Homo sapiens
agaggaaatgtaatt

SEQ ID NO: 849617 - DNA, 15 bp, Homo sapiens
gaggaaatgtaattt

SEQ ID NO: 849618 - DNA, 15 bp, Homo sapiens
aggaaatgtaattta

SEQ ID NO: 849619 - DNA, 15 bp, Homo sapiens
ggaaatgtaatttaa

SEQ ID NO: 849620 - DNA, 15 bp, Homo sapiens
gaaatgtaatttaat

SEQ ID NO: 849621 - DNA, 15 bp, Homo sapiens
aatgtaatttaattt

SEQ ID NO: 849622 - DNA, 15 bp, Homo sapiens
atgtaatttaatttc

SEQ ID NO: 849623 - DNA, 15 bp, Homo sapiens
tgtaatttaatttcc

SEQ ID NO: 849624 - DNA, 15 bp, Homo sapiens
gtaatttaatttcca

SEQ ID NO: 849625 - DNA, 15 bp, Homo sapiens
taatttaatttccat

SEQ ID NO: 849626 - DNA, 15 bp, Homo sapiens
aatttaatttccatt

SEQ ID NO: 849627 - DNA, 15 bp, Homo sapiens
atttaatttccattt

SEQ ID NO: 849628 - DNA, 15 bp, Homo sapiens
tttaatttccatttt

SEQ ID NO: 849629 - DNA, 15 bp, Homo sapiens
ttaatttccattttc

SEQ ID NO: 849630 - DNA, 15 bp, Homo sapiens
taatttccattttct

SEQ ID NO: 849631 - DNA, 15 bp, Homo sapiens
aatttccattttctt

SEQ ID NO: 849632 - DNA, 15 bp, Homo sapiens
atttccattttcttt

SEQ ID NO: 849633 - DNA, 15 bp, Homo sapiens
tttccattttctttt

SEQ ID NO: 849634 - DNA, 15 bp, Homo sapiens
ttccattttcttttt

SEQ ID NO: 849635 - DNA, 15 bp, Homo sapiens
tccattttcttttta

SEQ ID NO: 849636 - DNA, 15 bp, Homo sapiens
ccattttctttttag

SEQ ID NO: 849637 - DNA, 15 bp, Homo sapiens
cattttctttttaga

SEQ ID NO: 849638 - DNA, 15 bp, Homo sapiens
attttctttttagag

SEQ ID NO: 849639 - DNA, 15 bp, Homo sapiens
ttttctttttagagc

SEQ ID NO: 849640 - DNA, 15 bp, Homo sapiens
tttctttttagagca

SEQ ID NO: 849641 - DNA, 15 bp, Homo sapiens
ttctttttagagcag

SEQ ID NO: 849642 - DNA, 15 bp, Homo sapiens
tctttttagagcagt

SEQ ID NO: 849643 - DNA, 15 bp, Homo sapiens
ctttttagagcagta

SEQ ID NO: 849644 - DNA, 15 bp, Homo sapiens
tttttagagcagtat

SEQ ID NO: 849645 - DNA, 15 bp, Homo sapiens
ttttagagcagtata

SEQ ID NO: 849646 - DNA, 15 bp, Homo sapiens
tttagagcagtatac

SEQ ID NO: 849647 - DNA, 15 bp, Homo sapiens
ttagagcagtataca

SEQ ID NO: 849648 - DNA, 15 bp, Homo sapiens
tagagcagtatacaa

SEQ ID NO: 849649 - DNA, 15 bp, Homo sapiens
agagcagtatacaaa

SEQ ID NO: 849650 - DNA, 15 bp, Homo sapiens
gagcagtatacaaag

SEQ ID NO: 849651 - DNA, 15 bp, Homo sapiens
agcagtatacaaaga

SEQ ID NO: 849652 - DNA, 15 bp, Homo sapiens
gcagtatacaaagat

SEQ ID NO: 849653 - DNA, 15 bp, Homo sapiens
cagtatacaaagatg

SEQ ID NO: 849654 - DNA, 15 bp, Homo sapiens
agtatacaaagatgc

SEQ ID NO: 849655 - DNA, 15 bp, Homo sapiens
gtatacaaagatgct

SEQ ID NO: 849656 - DNA, 15 bp, Homo sapiens
tatacaaagatgctg

SEQ ID NO: 849657 - DNA, 15 bp, Homo sapiens
atacaaagatgctga

SEQ ID NO: 849658 - DNA, 15 bp, Homo sapiens
tacaaagatgctgat

SEQ ID NO: 849659 - DNA, 15 bp, Homo sapiens
acaaagatgctgatt

SEQ ID NO: 849660 - DNA, 15 bp, Homo sapiens
caaagatgctgattt

SEQ ID NO: 849661 - DNA, 15 bp, Homo sapiens
aaagatgctgatttg

SEQ ID NO: 849662 - DNA, 15 bp, Homo sapiens
aagatgctgatttgt

SEQ ID NO: 849663 - DNA, 15 bp, Homo sapiens
agatgctgatttgta

SEQ ID NO: 849664 - DNA, 15 bp, Homo sapiens
gatgctgatttgtat

SEQ ID NO: 849665 - DNA, 15 bp, Homo sapiens
atgctgatttgtatt

SEQ ID NO: 849666 - DNA, 15 bp, Homo sapiens
tgctgatttgtattt

SEQ ID NO: 849667 - DNA, 15 bp, Homo sapiens
gctgatttgtattta

SEQ ID NO: 849668 - DNA, 15 bp, Homo sapiens
ctgatttgtatttat

SEQ ID NO: 849669 - DNA, 15 bp, Homo sapiens
tgatttgtatttatt

SEQ ID NO: 849670 - DNA, 15 bp, Homo sapiens
gatttgtatttatta

SEQ ID NO: 849671 - DNA, 15 bp, Homo sapiens
atttgtatttattag

SEQ ID NO: 849672 - DNA, 15 bp, Homo sapiens
tttgtatttattaga

SEQ ID NO: 849673 - DNA, 15 bp, Homo sapiens
ttgtatttattagac

SEQ ID NO: 849674 - DNA, 15 bp, Homo sapiens
tgtatttattagact

SEQ ID NO: 849675 - DNA, 15 bp, Homo sapiens
gtatttattagactc

SEQ ID NO: 849676 - DNA, 15 bp, Homo sapiens
tatttattagactct

SEQ ID NO: 849677 - DNA, 15 bp, Homo sapiens
atttattagactctc

SEQ ID NO: 849678 - DNA, 15 bp, Homo sapiens
tttattagactctcc

SEQ ID NO: 849679 - DNA, 15 bp, Homo sapiens
ttattagactctcct

SEQ ID NO: 849680 - DNA, 15 bp, Homo sapiens
tattagactctcctt

SEQ ID NO: 849681 - DNA, 15 bp, Homo sapiens
attagactctccttt

SEQ ID NO: 849682 - DNA, 15 bp, Homo sapiens
ttagactctcctttt

SEQ ID NO: 849683 - DNA, 15 bp, Homo sapiens
tagactctccttttg

SEQ ID NO: 849684 - DNA, 15 bp, Homo sapiens
agactctccttttgg

SEQ ID NO: 849685 - DNA, 15 bp, Homo sapiens
gactctccttttgga

SEQ ID NO: 849686 - DNA, 15 bp, Homo sapiens
actctccttttggat

SEQ ID NO: 849687 - DNA, 15 bp, Homo sapiens
ctctccttttggata

SEQ ID NO: 849688 - DNA, 15 bp, Homo sapiens
tctccttttggatac

SEQ ID NO: 849689 - DNA, 15 bp, Homo sapiens
ctccttttggatacc

SEQ ID NO: 849690 - DNA, 15 bp, Homo sapiens
tccttttggatacct

SEQ ID NO: 849691 - DNA, 15 bp, Homo sapiens
ccttttggataccta

SEQ ID NO: 849692 - DNA, 15 bp, Homo sapiens
cttttggatacctag

SEQ ID NO: 849693 - DNA, 15 bp, Homo sapiens
ttttggatacctaga

SEQ ID NO: 849694 - DNA, 15 bp, Homo sapiens
tttggatacctagat

SEQ ID NO: 849695 - DNA, 15 bp, Homo sapiens
ttggatacctagatg

SEQ ID NO: 849696 - DNA, 15 bp, Homo sapiens
tggatacctagatgt

SEQ ID NO: 849697 - DNA, 15 bp, Homo sapiens
ggatacctagatgtt

SEQ ID NO: 849698 - DNA, 15 bp, Homo sapiens
gatacctagatgttt

SEQ ID NO: 849699 - DNA, 15 bp, Homo sapiens
atacctagatgtttt

SEQ ID NO: 849700 - DNA, 15 bp, Homo sapiens
tacctagatgtttta

SEQ ID NO: 849701 - DNA, 15 bp, Homo sapiens
acctagatgttttaa

SEQ ID NO: 849702 - DNA, 15 bp, Homo sapiens
cctagatgttttaac

SEQ ID NO: 849703 - DNA, 15 bp, Homo sapiens
ctagatgttttaaca

SEQ ID NO: 849704 - DNA, 15 bp, Homo sapiens
tagatgttttaacag

SEQ ID NO: 849705 - DNA, 15 bp, Homo sapiens
agatgttttaacaga

SEQ ID NO: 849706 - DNA, 15 bp, Homo sapiens
gatgttttaacagaa

SEQ ID NO: 849707 - DNA, 15 bp, Homo sapiens
atgttttaacagaaa

SEQ ID NO: 849708 - DNA, 15 bp, Homo sapiens
tgttttaacagaaaa

SEQ ID NO: 849709 - DNA, 15 bp, Homo sapiens
gttttaacagaaaaa

SEQ ID NO: 849710 - DNA, 15 bp, Homo sapiens
ttttaacagaaaaag

SEQ ID NO: 849711 - DNA, 15 bp, Homo sapiens
tttaacagaaaaaga

SEQ ID NO: 849712 - DNA, 15 bp, Homo sapiens
ttaacagaaaaagaa

SEQ ID NO: 849713 - DNA, 15 bp, Homo sapiens
taacagaaaaagaaa

SEQ ID NO: 849714 - DNA, 15 bp, Homo sapiens
aacagaaaaagaaat

SEQ ID NO: 849715 - DNA, 15 bp, Homo sapiens
acagaaaaagaaata

SEQ ID NO: 849716 - DNA, 15 bp, Homo sapiens
cagaaaaagaaatat

SEQ ID NO: 849717 - DNA, 15 bp, Homo sapiens
agaaaaagaaatatt

SEQ ID NO: 849718 - DNA, 15 bp, Homo sapiens
gaaaaagaaatattt

SEQ ID NO: 849719 - DNA, 15 bp, Homo sapiens
aaaaagaaatatttg

SEQ ID NO: 849720 - DNA, 15 bp, Homo sapiens
aaaagaaatatttga

SEQ ID NO: 849721 - DNA, 15 bp, Homo sapiens
aaagaaatatttgaa

SEQ ID NO: 849722 - DNA, 15 bp, Homo sapiens
aagaaatatttgaaa

SEQ ID NO: 849723 - DNA, 15 bp, Homo sapiens
agaaatatttgaaag

SEQ ID NO: 849724 - DNA, 15 bp, Homo sapiens
gaaatatttgaaagg

SEQ ID NO: 849725 - DNA, 15 bp, Homo sapiens
aaatatttgaaaggt

SEQ ID NO: 849726 - DNA, 15 bp, Homo sapiens
aatatttgaaaggta

SEQ ID NO: 849727 - DNA, 15 bp, Homo sapiens
atatttgaaaggtat

SEQ ID NO: 849728 - DNA, 15 bp, Homo sapiens
tatttgaaaggtatg

SEQ ID NO: 849729 - DNA, 15 bp, Homo sapiens
atttgaaaggtatgt

SEQ ID NO: 849730 - DNA, 15 bp, Homo sapiens
tttgaaaggtatgtt

SEQ ID NO: 849731 - DNA, 15 bp, Homo sapiens
ttgaaaggtatgttc

SEQ ID NO: 849732 - DNA, 15 bp, Homo sapiens
tgaaaggtatgttct

SEQ ID NO: 849733 - DNA, 15 bp, Homo sapiens
gaaaggtatgttctt

SEQ ID NO: 849734 - DNA, 15 bp, Homo sapiens
aaaggtatgttcttt

SEQ ID NO: 849735 - DNA, 15 bp, Homo sapiens
aaggtatgttctttg

SEQ ID NO: 849736 - DNA, 15 bp, Homo sapiens
aggtatgttctttga

SEQ ID NO: 849737 - DNA, 15 bp, Homo sapiens
ggtatgttctttgaa

SEQ ID NO: 849738 - DNA, 15 bp, Homo sapiens
gtatgttctttgaat

SEQ ID NO: 849739 - DNA, 15 bp, Homo sapiens
tatgttctttgaata

SEQ ID NO: 849740 - DNA, 15 bp, Homo sapiens
atgttctttgaatac

SEQ ID NO: 849741 - DNA, 15 bp, Homo sapiens
tgttctttgaatacc

SEQ ID NO: 849742 - DNA, 15 bp, Homo sapiens
gttctttgaatacct

SEQ ID NO: 849743 - DNA, 15 bp, Homo sapiens
ttctttgaatacctt

SEQ ID NO: 849744 - DNA, 15 bp, Homo sapiens
tctttgaatacctta

SEQ ID NO: 849745 - DNA, 15 bp, Homo sapiens
ctttgaataccttac

SEQ ID NO: 849746 - DNA, 15 bp, Homo sapiens
tttgaataccttact

SEQ ID NO: 849747 - DNA, 15 bp, Homo sapiens
ttgaataccttactt

SEQ ID NO: 849748 - DNA, 15 bp, Homo sapiens
tgaataccttactta

SEQ ID NO: 849749 - DNA, 15 bp, Homo sapiens
gaataccttacttat

SEQ ID NO: 849750 - DNA, 15 bp, Homo sapiens
aataccttacttata

SEQ ID NO: 849751 - DNA, 15 bp, Homo sapiens
ataccttacttataa

SEQ ID NO: 849752 - DNA, 15 bp, Homo sapiens
taccttacttataat

SEQ ID NO: 849753 - DNA, 15 bp, Homo sapiens
accttacttataatg

SEQ ID NO: 849754 - DNA, 15 bp, Homo sapiens
ccttacttataatgc

SEQ ID NO: 849755 - DNA, 15 bp, Homo sapiens
cttacttataatgct

SEQ ID NO: 849756 - DNA, 15 bp, Homo sapiens
ttacttataatgctc

SEQ ID NO: 849757 - DNA, 15 bp, Homo sapiens
tacttataatgctca

SEQ ID NO: 849758 - DNA, 15 bp, Homo sapiens
acttataatgctcat

SEQ ID NO: 849759 - DNA, 15 bp, Homo sapiens
cttataatgctcatg

SEQ ID NO: 849760 - DNA, 15 bp, Homo sapiens
ttataatgctcatgc

SEQ ID NO: 849761 - DNA, 15 bp, Homo sapiens
tataatgctcatgct

SEQ ID NO: 849762 - DNA, 15 bp, Homo sapiens
ataatgctcatgcta

SEQ ID NO: 849763 - DNA, 15 bp, Homo sapiens
taatgctcatgctaa

SEQ ID NO: 849764 - DNA, 15 bp, Homo sapiens
aatgctcatgctaaa

SEQ ID NO: 849765 - DNA, 15 bp, Homo sapiens
atgctcatgctaaaa

SEQ ID NO: 849766 - DNA, 15 bp, Homo sapiens
tgctcatgctaaaat

SEQ ID NO: 849767 - DNA, 15 bp, Homo sapiens
gctcatgctaaaata

SEQ ID NO: 849768 - DNA, 15 bp, Homo sapiens
ctcatgctaaaataa

SEQ ID NO: 849769 - DNA, 15 bp, Homo sapiens
tcatgctaaaataaa

SEQ ID NO: 849770 - DNA, 15 bp, Homo sapiens
catgctaaaataaaa

SEQ ID NO: 849771 - DNA, 15 bp, Homo sapiens
atgctaaaataaaag

SEQ ID NO: 849772 - DNA, 15 bp, Homo sapiens
tgctaaaataaaaga

SEQ ID NO: 849773 - DNA, 15 bp, Homo sapiens
gctaaaataaaagaa

SEQ ID NO: 849774 - DNA, 15 bp, Homo sapiens
ctaaaataaaagaaa

SEQ ID NO: 849775 - DNA, 15 bp, Homo sapiens
taaaataaaagaaag

SEQ ID NO: 849776 - DNA, 15 bp, Homo sapiens
aaaataaaagaaaga

SEQ ID NO: 849777 - DNA, 15 bp, Homo sapiens
aaataaaagaaagac

SEQ ID NO: 849778 - DNA, 15 bp, Homo sapiens
aataaaagaaagaca

SEQ ID NO: 849779 - DNA, 15 bp, Homo sapiens
ataaaagaaagacag

SEQ ID NO: 849780 - DNA, 15 bp, Homo sapiens
taaaagaaagacaga

SEQ ID NO: 849781 - DNA, 15 bp, Homo sapiens
aaaagaaagacagac

SEQ ID NO: 849782 - DNA, 15 bp, Homo sapiens
aaagaaagacagact

SEQ ID NO: 849783 - DNA, 15 bp, Homo sapiens
aagaaagacagactg

SEQ ID NO: 849784 - DNA, 15 bp, Homo sapiens
agaaagacagactgt

SEQ ID NO: 849785 - DNA, 15 bp, Homo sapiens
gaaagacagactgtc

SEQ ID NO: 849786 - DNA, 15 bp, Homo sapiens
aaagacagactgtcc

SEQ ID NO: 849787 - DNA, 15 bp, Homo sapiens
aagacagactgtccc

SEQ ID NO: 849788 - DNA, 15 bp, Homo sapiens
agacagactgtccca

SEQ ID NO: 849789 - DNA, 15 bp, Homo sapiens
gacagactgtcccat

SEQ ID NO: 849790 - DNA, 15 bp, Homo sapiens
acagactgtcccatc

SEQ ID NO: 849791 - DNA, 15 bp, Homo sapiens
cagactgtcccatca

SEQ ID NO: 849792 - DNA, 15 bp, Homo sapiens
agactgtcccatcat

SEQ ID NO: 849793 - DNA, 15 bp, Homo sapiens
gactgtcccatcata

SEQ ID NO: 849794 - DNA, 15 bp, Homo sapiens
actgtcccatcatag

SEQ ID NO: 849795 - DNA, 15 bp, Homo sapiens
ctgtcccatcataga

SEQ ID NO: 849796 - DNA, 15 bp, Homo sapiens
tgtcccatcatagat

SEQ ID NO: 849797 - DNA, 15 bp, Homo sapiens
gtcccatcatagatt

SEQ ID NO: 849798 - DNA, 15 bp, Homo sapiens
tcccatcatagattg

SEQ ID NO: 849799 - DNA, 15 bp, Homo sapiens
cccatcatagattgc

SEQ ID NO: 849800 - DNA, 15 bp, Homo sapiens
ccatcatagattgca

SEQ ID NO: 849801 - DNA, 15 bp, Homo sapiens
catcatagattgcat

SEQ ID NO: 849802 - DNA, 15 bp, Homo sapiens
atcatagattgcatt

SEQ ID NO: 849803 - DNA, 15 bp, Homo sapiens
tcatagattgcattt

SEQ ID NO: 849804 - DNA, 15 bp, Homo sapiens
catagattgcatttt

SEQ ID NO: 849805 - DNA, 15 bp, Homo sapiens
atagattgcatttta

SEQ ID NO: 849806 - DNA, 15 bp, Homo sapiens
tagattgcattttac

SEQ ID NO: 849807 - DNA, 15 bp, Homo sapiens
agattgcattttacc

SEQ ID NO: 849808 - DNA, 15 bp, Homo sapiens
gattgcattttacct

SEQ ID NO: 849809 - DNA, 15 bp, Homo sapiens
attgcattttacctc

SEQ ID NO: 849810 - DNA, 15 bp, Homo sapiens
ttgcattttacctct

SEQ ID NO: 849811 - DNA, 15 bp, Homo sapiens
tgcattttacctctt

SEQ ID NO: 849812 - DNA, 15 bp, Homo sapiens
gcattttacctcttg

SEQ ID NO: 849813 - DNA, 15 bp, Homo sapiens
cattttacctcttga

SEQ ID NO: 849814 - DNA, 15 bp, Homo sapiens
attttacctcttgag

SEQ ID NO: 849815 - DNA, 15 bp, Homo sapiens
ttttacctcttgaga

SEQ ID NO: 849816 - DNA, 15 bp, Homo sapiens
tttacctcttgagaa

SEQ ID NO: 849817 - DNA, 15 bp, Homo sapiens
ttacctcttgagaaa

SEQ ID NO: 849818 - DNA, 15 bp, Homo sapiens
tacctcttgagaaat

SEQ ID NO: 849819 - DNA, 15 bp, Homo sapiens
acctcttgagaaata

SEQ ID NO: 849820 - DNA, 15 bp, Homo sapiens
cctcttgagaaatat

SEQ ID NO: 849821 - DNA, 15 bp, Homo sapiens
ctcttgagaaatatg

SEQ ID NO: 849822 - DNA, 15 bp, Homo sapiens
tcttgagaaatatgt

SEQ ID NO: 849823 - DNA, 15 bp, Homo sapiens
cttgagaaatatgtt

SEQ ID NO: 849824 - DNA, 15 bp, Homo sapiens
ttgagaaatatgttc

SEQ ID NO: 849825 - DNA, 15 bp, Homo sapiens
tgagaaatatgttca

SEQ ID NO: 849826 - DNA, 15 bp, Homo sapiens
gagaaatatgttcac

SEQ ID NO: 849827 - DNA, 15 bp, Homo sapiens
agaaatatgttcacc

SEQ ID NO: 849828 - DNA, 15 bp, Homo sapiens
gaaatatgttcacca

SEQ ID NO: 849829 - DNA, 15 bp, Homo sapiens
aaatatgttcaccat

SEQ ID NO: 849830 - DNA, 15 bp, Homo sapiens
aatatgttcaccatt

SEQ ID NO: 849831 - DNA, 15 bp, Homo sapiens
atatgttcaccattg

SEQ ID NO: 849832 - DNA, 15 bp, Homo sapiens
tatgttcaccattgt

SEQ ID NO: 849833 - DNA, 15 bp, Homo sapiens
atgttcaccattgtt

SEQ ID NO: 849834 - DNA, 15 bp, Homo sapiens
tgttcaccattgttg

SEQ ID NO: 849835 - DNA, 15 bp, Homo sapiens
gttcaccattgttgg

SEQ ID NO: 849836 - DNA, 15 bp, Homo sapiens
ttcaccattgttggt

SEQ ID NO: 849837 - DNA, 15 bp, Homo sapiens
tcaccattgttggta

SEQ ID NO: 849838 - DNA, 15 bp, Homo sapiens
caccattgttggtat

SEQ ID NO: 849839 - DNA, 15 bp, Homo sapiens
accattgttggtatg

SEQ ID NO: 849840 - DNA, 15 bp, Homo sapiens
ccattgttggtatgg

SEQ ID NO: 849841 - DNA, 15 bp, Homo sapiens
cattgttggtatggc

SEQ ID NO: 849842 - DNA, 15 bp, Homo sapiens
attgttggtatggca

SEQ ID NO: 849843 - DNA, 15 bp, Homo sapiens
ttgttggtatggcag

SEQ ID NO: 849844 - DNA, 15 bp, Homo sapiens
tgttggtatggcaga

SEQ ID NO: 849845 - DNA, 15 bp, Homo sapiens
gttggtatggcagaa

SEQ ID NO: 849846 - DNA, 15 bp, Homo sapiens
ttggtatggcagaat

SEQ ID NO: 849847 - DNA, 15 bp, Homo sapiens
tggtatggcagaatg

SEQ ID NO: 849848 - DNA, 15 bp, Homo sapiens
ggtatggcagaatgt

SEQ ID NO: 849849 - DNA, 15 bp, Homo sapiens
gtatggcagaatgta

SEQ ID NO: 849850 - DNA, 15 bp, Homo sapiens
tatggcagaatgtag

SEQ ID NO: 849851 - DNA, 15 bp, Homo sapiens
atggcagaatgtagc

SEQ ID NO: 849852 - DNA, 15 bp, Homo sapiens
tggcagaatgtagca

SEQ ID NO: 849853 - DNA, 15 bp, Homo sapiens
ggcagaatgtagcat

SEQ ID NO: 849854 - DNA, 15 bp, Homo sapiens
gcagaatgtagcatg

SEQ ID NO: 849855 - DNA, 15 bp, Homo sapiens
cagaatgtagcatgg

SEQ ID NO: 849856 - DNA, 15 bp, Homo sapiens
agaatgtagcatggt

SEQ ID NO: 849857 - DNA, 15 bp, Homo sapiens
gaatgtagcatggta

SEQ ID NO: 849858 - DNA, 15 bp, Homo sapiens
aatgtagcatggtat

SEQ ID NO: 849859 - DNA, 15 bp, Homo sapiens
atgtagcatggtatt

SEQ ID NO: 849860 - DNA, 15 bp, Homo sapiens
tgtagcatggtatta

SEQ ID NO: 849861 - DNA, 15 bp, Homo sapiens
gtagcatggtattaa

SEQ ID NO: 849862 - DNA, 15 bp, Homo sapiens
tagcatggtattaac

SEQ ID NO: 849863 - DNA, 15 bp, Homo sapiens
agcatggtattaact

SEQ ID NO: 849864 - DNA, 15 bp, Homo sapiens
gcatggtattaactc

SEQ ID NO: 849865 - DNA, 15 bp, Homo sapiens
catggtattaactca

SEQ ID NO: 849866 - DNA, 15 bp, Homo sapiens
atggtattaactcaa

SEQ ID NO: 849867 - DNA, 15 bp, Homo sapiens
tggtattaactcaaa

SEQ ID NO: 849868 - DNA, 15 bp, Homo sapiens
ggtattaactcaaat

SEQ ID NO: 849869 - DNA, 15 bp, Homo sapiens
gtattaactcaaatc

SEQ ID NO: 849870 - DNA, 15 bp, Homo sapiens
tattaactcaaatct

SEQ ID NO: 849871 - DNA, 15 bp, Homo sapiens
attaactcaaatctg

SEQ ID NO: 849872 - DNA, 15 bp, Homo sapiens
ttaactcaaatctga

SEQ ID NO: 849873 - DNA, 15 bp, Homo sapiens
taactcaaatctgat

SEQ ID NO: 849874 - DNA, 15 bp, Homo sapiens
aactcaaatctgatc

SEQ ID NO: 849875 - DNA, 15 bp, Homo sapiens
actcaaatctgatct

SEQ ID NO: 849876 - DNA, 15 bp, Homo sapiens
ctcaaatctgatctg

SEQ ID NO: 849877 - DNA, 15 bp, Homo sapiens
tcaaatctgatctgc

SEQ ID NO: 849878 - DNA, 15 bp, Homo sapiens
caaatctgatctgcc

SEQ ID NO: 849879 - DNA, 15 bp, Homo sapiens
aaatctgatctgccc

SEQ ID NO: 849880 - DNA, 15 bp, Homo sapiens
aatctgatctgccct

SEQ ID NO: 849881 - DNA, 15 bp, Homo sapiens
atctgatctgcccta

SEQ ID NO: 849882 - DNA, 15 bp, Homo sapiens
tctgatctgccctac

SEQ ID NO: 849883 - DNA, 15 bp, Homo sapiens
ctgatctgccctact

SEQ ID NO: 849884 - DNA, 15 bp, Homo sapiens
tgatctgccctactg

SEQ ID NO: 849885 - DNA, 15 bp, Homo sapiens
gatctgccctactgg

SEQ ID NO: 849886 - DNA, 15 bp, Homo sapiens
atctgccctactggg

SEQ ID NO: 849887 - DNA, 15 bp, Homo sapiens
tctgccctactgggc

SEQ ID NO: 849888 - DNA, 15 bp, Homo sapiens
ctgccctactgggcc

SEQ ID NO: 849889 - DNA, 15 bp, Homo sapiens
tgccctactgggcca

SEQ ID NO: 849890 - DNA, 15 bp, Homo sapiens
gccctactgggccag

SEQ ID NO: 849891 - DNA, 15 bp, Homo sapiens
ccctactgggccagg

SEQ ID NO: 849892 - DNA, 15 bp, Homo sapiens
cctactgggccagga

SEQ ID NO: 849893 - DNA, 15 bp, Homo sapiens
ctactgggccaggat

SEQ ID NO: 849894 - DNA, 15 bp, Homo sapiens
tactgggccaggatt

SEQ ID NO: 849895 - DNA, 15 bp, Homo sapiens
actgggccaggattc

SEQ ID NO: 849896 - DNA, 15 bp, Homo sapiens
ctgggccaggattca

SEQ ID NO: 849897 - DNA, 15 bp, Homo sapiens
tgggccaggattcaa

SEQ ID NO: 849898 - DNA, 15 bp, Homo sapiens
gggccaggattcaag

SEQ ID NO: 849899 - DNA, 15 bp, Homo sapiens
ggccaggattcaaga

SEQ ID NO: 849900 - DNA, 15 bp, Homo sapiens
gccaggattcaagat

SEQ ID NO: 849901 - DNA, 15 bp, Homo sapiens
ccaggattcaagatt

SEQ ID NO: 849902 - DNA, 15 bp, Homo sapiens
caggattcaagatta

SEQ ID NO: 849903 - DNA, 15 bp, Homo sapiens
aggattcaagattac

SEQ ID NO: 849904 - DNA, 15 bp, Homo sapiens
ggattcaagattact

SEQ ID NO: 849905 - DNA, 15 bp, Homo sapiens
gattcaagattactt

SEQ ID NO: 849906 - DNA, 15 bp, Homo sapiens
attcaagattacttc

SEQ ID NO: 849907 - DNA, 15 bp, Homo sapiens
ttcaagattacttcc

SEQ ID NO: 849908 - DNA, 15 bp, Homo sapiens
tcaagattacttcca

SEQ ID NO: 849909 - DNA, 15 bp, Homo sapiens
caagattacttccat

SEQ ID NO: 849910 - DNA, 15 bp, Homo sapiens
aagattacttccatt

SEQ ID NO: 849911 - DNA, 15 bp, Homo sapiens
agattacttccatta

SEQ ID NO: 849912 - DNA, 15 bp, Homo sapiens
gattacttccattaa

SEQ ID NO: 849913 - DNA, 15 bp, Homo sapiens
attacttccattaaa

SEQ ID NO: 849914 - DNA, 15 bp, Homo sapiens
ttacttccattaaaa

SEQ ID NO: 849915 - DNA, 15 bp, Homo sapiens
tacttccattaaaac

SEQ ID NO: 849916 - DNA, 15 bp, Homo sapiens
acttccattaaaacc

SEQ ID NO: 849917 - DNA, 15 bp, Homo sapiens
cttccattaaaacct

SEQ ID NO: 849918 - DNA, 15 bp, Homo sapiens
ttccattaaaacctt

SEQ ID NO: 849919 - DNA, 15 bp, Homo sapiens
tccattaaaaccttt

SEQ ID NO: 849920 - DNA, 15 bp, Homo sapiens
ccattaaaacctttt

SEQ ID NO: 849921 - DNA, 15 bp, Homo sapiens
cattaaaaccttttc

SEQ ID NO: 849922 - DNA, 15 bp, Homo sapiens
attaaaaccttttct

SEQ ID NO: 849923 - DNA, 15 bp, Homo sapiens
ttaaaaccttttctc

SEQ ID NO: 849924 - DNA, 15 bp, Homo sapiens
taaaaccttttctca

SEQ ID NO: 849925 - DNA, 15 bp, Homo sapiens
aaaaccttttctcac

SEQ ID NO: 849926 - DNA, 15 bp, Homo sapiens
aaaccttttctcacc

SEQ ID NO: 849927 - DNA, 15 bp, Homo sapiens
aaccttttctcaccg

SEQ ID NO: 849928 - DNA, 15 bp, Homo sapiens
accttttctcaccgc

SEQ ID NO: 849929 - DNA, 15 bp, Homo sapiens
ccttttctcaccgcc

SEQ ID NO: 849930 - DNA, 15 bp, Homo sapiens
cttttctcaccgcct

SEQ ID NO: 849931 - DNA, 15 bp, Homo sapiens
ttttctcaccgcctc

SEQ ID NO: 849932 - DNA, 15 bp, Homo sapiens
tttctcaccgcctca

SEQ ID NO: 849933 - DNA, 15 bp, Homo sapiens
ttctcaccgcctcat

SEQ ID NO: 849934 - DNA, 15 bp, Homo sapiens
tctcaccgcctcatg

SEQ ID NO: 849935 - DNA, 15 bp, Homo sapiens
ctcaccgcctcatgc

SEQ ID NO: 849936 - DNA, 15 bp, Homo sapiens
tcaccgcctcatgct

SEQ ID NO: 849937 - DNA, 15 bp, Homo sapiens
caccgcctcatgcta

SEQ ID NO: 849938 - DNA, 15 bp, Homo sapiens
accgcctcatgctaa

SEQ ID NO: 849939 - DNA, 15 bp, Homo sapiens
ccgcctcatgctaaa

SEQ ID NO: 849940 - DNA, 15 bp, Homo sapiens
cgcctcatgctaaac

SEQ ID NO: 849941 - DNA, 15 bp, Homo sapiens
gcctcatgctaaacc

SEQ ID NO: 849942 - DNA, 15 bp, Homo sapiens
cctcatgctaaacca

SEQ ID NO: 849943 - DNA, 15 bp, Homo sapiens
ctcatgctaaaccag

SEQ ID NO: 849944 - DNA, 15 bp, Homo sapiens
tcatgctaaaccagt

SEQ ID NO: 849945 - DNA, 15 bp, Homo sapiens
catgctaaaccagtt

SEQ ID NO: 849946 - DNA, 15 bp, Homo sapiens
atgctaaaccagttt

SEQ ID NO: 849947 - DNA, 15 bp, Homo sapiens
tgctaaaccagtttc

SEQ ID NO: 849948 - DNA, 15 bp, Homo sapiens
gctaaaccagtttct

SEQ ID NO: 849949 - DNA, 15 bp, Homo sapiens
ctaaaccagtttctc

SEQ ID NO: 849950 - DNA, 15 bp, Homo sapiens
taaaccagtttctct

SEQ ID NO: 849951 - DNA, 15 bp, Homo sapiens
aaaccagtttctctc

SEQ ID NO: 849952 - DNA, 15 bp, Homo sapiens
aaccagtttctctca

SEQ ID NO: 849953 - DNA, 15 bp, Homo sapiens
accagtttctctcat

SEQ ID NO: 849954 - DNA, 15 bp, Homo sapiens
ccagtttctctcatt

SEQ ID NO: 849955 - DNA, 15 bp, Homo sapiens
cagtttctctcattg

SEQ ID NO: 849956 - DNA, 15 bp, Homo sapiens
agtttctctcattgc

SEQ ID NO: 849957 - DNA, 15 bp, Homo sapiens
gtttctctcattgct

SEQ ID NO: 849958 - DNA, 15 bp, Homo sapiens
tttctctcattgcta

SEQ ID NO: 849959 - DNA, 15 bp, Homo sapiens
ttctctcattgctat

SEQ ID NO: 849960 - DNA, 15 bp, Homo sapiens
tctctcattgctata

SEQ ID NO: 849961 - DNA, 15 bp, Homo sapiens
ctctcattgctatac

SEQ ID NO: 849962 - DNA, 15 bp, Homo sapiens
tctcattgctatact

SEQ ID NO: 849963 - DNA, 15 bp, Homo sapiens
ctcattgctatactg

SEQ ID NO: 849964 - DNA, 15 bp, Homo sapiens
tcattgctatactgt

SEQ ID NO: 849965 - DNA, 15 bp, Homo sapiens
cattgctatactgtt

SEQ ID NO: 849966 - DNA, 15 bp, Homo sapiens
attgctatactgtta

SEQ ID NO: 849967 - DNA, 15 bp, Homo sapiens
ttgctatactgttat

SEQ ID NO: 849968 - DNA, 15 bp, Homo sapiens
tgctatactgttata

SEQ ID NO: 849969 - DNA, 15 bp, Homo sapiens
gctatactgttatag

SEQ ID NO: 849970 - DNA, 15 bp, Homo sapiens
ctatactgttatagc

SEQ ID NO: 849971 - DNA, 15 bp, Homo sapiens
tatactgttatagca

SEQ ID NO: 849972 - DNA, 15 bp, Homo sapiens
atactgttatagcaa

SEQ ID NO: 849973 - DNA, 15 bp, Homo sapiens
tactgttatagcaat

SEQ ID NO: 849974 - DNA, 15 bp, Homo sapiens
actgttatagcaatt

SEQ ID NO: 849975 - DNA, 15 bp, Homo sapiens
ctgttatagcaattg

SEQ ID NO: 849976 - DNA, 15 bp, Homo sapiens
tgttatagcaattgc

SEQ ID NO: 849977 - DNA, 15 bp, Homo sapiens
gttatagcaattgct

SEQ ID NO: 849978 - DNA, 15 bp, Homo sapiens
ttatagcaattgcta

SEQ ID NO: 849979 - DNA, 15 bp, Homo sapiens
tatagcaattgctat

SEQ ID NO: 849980 - DNA, 15 bp, Homo sapiens
atagcaattgctatc

SEQ ID NO: 849981 - DNA, 15 bp, Homo sapiens
tagcaattgctatct

SEQ ID NO: 849982 - DNA, 15 bp, Homo sapiens
agcaattgctatcta

SEQ ID NO: 849983 - DNA, 15 bp, Homo sapiens
gcaattgctatctat

SEQ ID NO: 849984 - DNA, 15 bp, Homo sapiens
caattgctatctatg

SEQ ID NO: 849985 - DNA, 15 bp, Homo sapiens
aattgctatctatgt

SEQ ID NO: 849986 - DNA, 15 bp, Homo sapiens
attgctatctatgta

SEQ ID NO: 849987 - DNA, 15 bp, Homo sapiens
ttgctatctatgtag

SEQ ID NO: 849988 - DNA, 15 bp, Homo sapiens
tgctatctatgtagt

SEQ ID NO: 849989 - DNA, 15 bp, Homo sapiens
gctatctatgtagtt

SEQ ID NO: 849990 - DNA, 15 bp, Homo sapiens
ctatctatgtagttt

SEQ ID NO: 849991 - DNA, 15 bp, Homo sapiens
tatctatgtagtttt

SEQ ID NO: 849992 - DNA, 15 bp, Homo sapiens
atctatgtagttttt

SEQ ID NO: 849993 - DNA, 15 bp, Homo sapiens
tctatgtagtttttg

SEQ ID NO: 849994 - DNA, 15 bp, Homo sapiens
ctatgtagtttttgc

SEQ ID NO: 849995 - DNA, 15 bp, Homo sapiens
tatgtagtttttgca

SEQ ID NO: 849996 - DNA, 15 bp, Homo sapiens
atgtagtttttgcag

SEQ ID NO: 849997 - DNA, 15 bp, Homo sapiens
tgtagtttttgcagt

SEQ ID NO: 849998 - DNA, 15 bp, Homo sapiens
gtagtttttgcagta

SEQ ID NO: 849999 - DNA, 15 bp, Homo sapiens
tagtttttgcagtat

SEQ ID NO: 850000 - DNA, 15 bp, Homo sapiens
agtttttgcagtatc

SEQ ID NO: 850001 - DNA, 15 bp, Homo sapiens
gtttttgcagtatca

SEQ ID NO: 850002 - DNA, 15 bp, Homo sapiens
tttttgcagtatcat

SEQ ID NO: 850003 - DNA, 15 bp, Homo sapiens
ttttgcagtatcatt

SEQ ID NO: 850004 - DNA, 15 bp, Homo sapiens
tttgcagtatcattg

SEQ ID NO: 850005 - DNA, 15 bp, Homo sapiens
ttgcagtatcattgc

SEQ ID NO: 850006 - DNA, 15 bp, Homo sapiens
tgcagtatcattgcc

SEQ ID NO: 850007 - DNA, 15 bp, Homo sapiens
gcagtatcattgcct

SEQ ID NO: 850008 - DNA, 15 bp, Homo sapiens
cagtatcattgcctt

SEQ ID NO: 850009 - DNA, 15 bp, Homo sapiens
agtatcattgccttg

SEQ ID NO: 850010 - DNA, 15 bp, Homo sapiens
gtatcattgccttgt

SEQ ID NO: 850011 - DNA, 15 bp, Homo sapiens
tatcattgccttgtg

SEQ ID NO: 850012 - DNA, 15 bp, Homo sapiens
atcattgccttgtga

SEQ ID NO: 850013 - DNA, 15 bp, Homo sapiens
tcattgccttgtgat

SEQ ID NO: 850014 - DNA, 15 bp, Homo sapiens
cattgccttgtgata

SEQ ID NO: 850015 - DNA, 15 bp, Homo sapiens
attgccttgtgatat

SEQ ID NO: 850016 - DNA, 15 bp, Homo sapiens
ttgccttgtgatata

SEQ ID NO: 850017 - DNA, 15 bp, Homo sapiens
tgccttgtgatatat

SEQ ID NO: 850018 - DNA, 15 bp, Homo sapiens
gccttgtgatatata

SEQ ID NO: 850019 - DNA, 15 bp, Homo sapiens
ccttgtgatatatat

SEQ ID NO: 850020 - DNA, 15 bp, Homo sapiens
cttgtgatatatatt

SEQ ID NO: 850021 - DNA, 15 bp, Homo sapiens
ttgtgatatatatta

SEQ ID NO: 850022 - DNA, 15 bp, Homo sapiens
tgtgatatatattac

SEQ ID NO: 850023 - DNA, 15 bp, Homo sapiens
gtgatatatattact

SEQ ID NO: 850024 - DNA, 15 bp, Homo sapiens
tgatatatattactt

SEQ ID NO: 850025 - DNA, 15 bp, Homo sapiens
gatatatattacttt

SEQ ID NO: 850026 - DNA, 15 bp, Homo sapiens
atatatattacttta

SEQ ID NO: 850027 - DNA, 15 bp, Homo sapiens
tatatattactttaa

SEQ ID NO: 850028 - DNA, 15 bp, Homo sapiens
atatattactttaat

SEQ ID NO: 850029 - DNA, 15 bp, Homo sapiens
tatattactttaatt

SEQ ID NO: 850030 - DNA, 15 bp, Homo sapiens
atattactttaatta

SEQ ID NO: 850031 - DNA, 15 bp, Homo sapiens
tattactttaattat

SEQ ID NO: 850032 - DNA, 15 bp, Homo sapiens
attactttaattatt

SEQ ID NO: 850033 - DNA, 15 bp, Homo sapiens
ttactttaattatta

SEQ ID NO: 850034 - DNA, 15 bp, Homo sapiens
tactttaattattat

SEQ ID NO: 850035 - DNA, 15 bp, Homo sapiens
actttaattattatt

SEQ ID NO: 850036 - DNA, 15 bp, Homo sapiens
ctttaattattatta

SEQ ID NO: 850037 - DNA, 15 bp, Homo sapiens
tttaattattattat

SEQ ID NO: 850038 - DNA, 15 bp, Homo sapiens
ttaattattattata

SEQ ID NO: 850039 - DNA, 15 bp, Homo sapiens
taattattattatac

SEQ ID NO: 850040 - DNA, 15 bp, Homo sapiens
aattattattatact

SEQ ID NO: 850041 - DNA, 15 bp, Homo sapiens
attattattatactt

SEQ ID NO: 850042 - DNA, 15 bp, Homo sapiens
ttattattatactta

SEQ ID NO: 850043 - DNA, 15 bp, Homo sapiens
tattattatacttaa

SEQ ID NO: 850044 - DNA, 15 bp, Homo sapiens
attattatacttaac

SEQ ID NO: 850045 - DNA, 15 bp, Homo sapiens
ttattatacttaaca

SEQ ID NO: 850046 - DNA, 15 bp, Homo sapiens
tattatacttaacat

SEQ ID NO: 850047 - DNA, 15 bp, Homo sapiens
attatacttaacatt

SEQ ID NO: 850048 - DNA, 15 bp, Homo sapiens
ttatacttaacattt

SEQ ID NO: 850049 - DNA, 15 bp, Homo sapiens
tatacttaacatttt

SEQ ID NO: 850050 - DNA, 15 bp, Homo sapiens
atacttaacattttt

SEQ ID NO: 850051 - DNA, 15 bp, Homo sapiens
tacttaacattttta

SEQ ID NO: 850052 - DNA, 15 bp, Homo sapiens
acttaacatttttat

SEQ ID NO: 850053 - DNA, 15 bp, Homo sapiens
cttaacatttttatt

SEQ ID NO: 850054 - DNA, 15 bp, Homo sapiens
ttaacatttttattt

SEQ ID NO: 850055 - DNA, 15 bp, Homo sapiens
taacatttttattta

SEQ ID NO: 850056 - DNA, 15 bp, Homo sapiens
aacatttttatttac

SEQ ID NO: 850057 - DNA, 15 bp, Homo sapiens
acatttttatttact

SEQ ID NO: 850058 - DNA, 15 bp, Homo sapiens
catttttatttactt

SEQ ID NO: 850059 - DNA, 15 bp, Homo sapiens
atttttatttacttt

SEQ ID NO: 850060 - DNA, 15 bp, Homo sapiens
tttttatttactttt

SEQ ID NO: 850061 - DNA, 15 bp, Homo sapiens
ttttatttacttttt

SEQ ID NO: 850062 - DNA, 15 bp, Homo sapiens
tttatttactttttg

SEQ ID NO: 850063 - DNA, 15 bp, Homo sapiens
ttatttactttttgt

SEQ ID NO: 850064 - DNA, 15 bp, Homo sapiens
tatttactttttgtg

SEQ ID NO: 850065 - DNA, 15 bp, Homo sapiens
atttactttttgtgt

SEQ ID NO: 850066 - DNA, 15 bp, Homo sapiens
tttactttttgtgtt

SEQ ID NO: 850067 - DNA, 15 bp, Homo sapiens
ttactttttgtgtta

SEQ ID NO: 850068 - DNA, 15 bp, Homo sapiens
tactttttgtgttag

SEQ ID NO: 850069 - DNA, 15 bp, Homo sapiens
actttttgtgttagt

SEQ ID NO: 850070 - DNA, 15 bp, Homo sapiens
ctttttgtgttagta

SEQ ID NO: 850071 - DNA, 15 bp, Homo sapiens
tttttgtgttagtat

SEQ ID NO: 850072 - DNA, 15 bp, Homo sapiens
ttttgtgttagtatt

SEQ ID NO: 850073 - DNA, 15 bp, Homo sapiens
tttgtgttagtattt

SEQ ID NO: 850074 - DNA, 15 bp, Homo sapiens
ttgtgttagtatttt

SEQ ID NO: 850075 - DNA, 15 bp, Homo sapiens
tgtgttagtatttta

SEQ ID NO: 850076 - DNA, 15 bp, Homo sapiens
gtgttagtattttat

SEQ ID NO: 850077 - DNA, 15 bp, Homo sapiens
tgttagtattttatt

SEQ ID NO: 850078 - DNA, 15 bp, Homo sapiens
gttagtattttattc

SEQ ID NO: 850079 - DNA, 15 bp, Homo sapiens
ttagtattttattct

SEQ ID NO: 850080 - DNA, 15 bp, Homo sapiens
tagtattttattctg

SEQ ID NO: 850081 - DNA, 15 bp, Homo sapiens
agtattttattctgt

SEQ ID NO: 850082 - DNA, 15 bp, Homo sapiens
gtattttattctgtc

SEQ ID NO: 850083 - DNA, 15 bp, Homo sapiens
tattttattctgtct

SEQ ID NO: 850084 - DNA, 15 bp, Homo sapiens
attttattctgtctt

SEQ ID NO: 850085 - DNA, 15 bp, Homo sapiens
ttttattctgtcttc

SEQ ID NO: 850086 - DNA, 15 bp, Homo sapiens
tttattctgtcttct

SEQ ID NO: 850087 - DNA, 15 bp, Homo sapiens
ttattctgtcttctc

SEQ ID NO: 850088 - DNA, 15 bp, Homo sapiens
tattctgtcttctcc

SEQ ID NO: 850089 - DNA, 15 bp, Homo sapiens
attctgtcttctcct

SEQ ID NO: 850090 - DNA, 15 bp, Homo sapiens
ttctgtcttctcctt

SEQ ID NO: 850091 - DNA, 15 bp, Homo sapiens
tctgtcttctcctta

SEQ ID NO: 850092 - DNA, 15 bp, Homo sapiens
ctgtcttctccttag

SEQ ID NO: 850093 - DNA, 15 bp, Homo sapiens
tgtcttctccttaga

SEQ ID NO: 850094 - DNA, 15 bp, Homo sapiens
gtcttctccttagat

SEQ ID NO: 850095 - DNA, 15 bp, Homo sapiens
tcttctccttagata

SEQ ID NO: 850096 - DNA, 15 bp, Homo sapiens
cttctccttagatag

SEQ ID NO: 850097 - DNA, 15 bp, Homo sapiens
ttctccttagatagt

SEQ ID NO: 850098 - DNA, 15 bp, Homo sapiens
tctccttagatagta

SEQ ID NO: 850099 - DNA, 15 bp, Homo sapiens
ctccttagatagtaa

SEQ ID NO: 850100 - DNA, 15 bp, Homo sapiens
tccttagatagtaac

SEQ ID NO: 850101 - DNA, 15 bp, Homo sapiens
ccttagatagtaacc

SEQ ID NO: 850102 - DNA, 15 bp, Homo sapiens
cttagatagtaacct

SEQ ID NO: 850103 - DNA, 15 bp, Homo sapiens
ttagatagtaacctt

SEQ ID NO: 850104 - DNA, 15 bp, Homo sapiens
tagatagtaaccttc

SEQ ID NO: 850105 - DNA, 15 bp, Homo sapiens
agatagtaaccttct

SEQ ID NO: 850106 - DNA, 15 bp, Homo sapiens
gatagtaaccttctt

SEQ ID NO: 850107 - DNA, 15 bp, Homo sapiens
atagtaaccttctta

SEQ ID NO: 850108 - DNA, 15 bp, Homo sapiens
tagtaaccttcttaa

SEQ ID NO: 850109 - DNA, 15 bp, Homo sapiens
agtaaccttcttaag

SEQ ID NO: 850110 - DNA, 15 bp, Homo sapiens
gtaaccttcttaaga

SEQ ID NO: 850111 - DNA, 15 bp, Homo sapiens
taaccttcttaagaa

SEQ ID NO: 850112 - DNA, 15 bp, Homo sapiens
aaccttcttaagaaa

SEQ ID NO: 850113 - DNA, 15 bp, Homo sapiens
accttcttaagaaaa

SEQ ID NO: 850114 - DNA, 15 bp, Homo sapiens
ccttcttaagaaaat

SEQ ID NO: 850115 - DNA, 15 bp, Homo sapiens
cttcttaagaaaata

SEQ ID NO: 850116 - DNA, 15 bp, Homo sapiens
ttcttaagaaaatat

SEQ ID NO: 850117 - DNA, 15 bp, Homo sapiens
tcttaagaaaatata

SEQ ID NO: 850118 - DNA, 15 bp, Homo sapiens
cttaagaaaatatat

SEQ ID NO: 850119 - DNA, 15 bp, Homo sapiens
ttaagaaaatatata

SEQ ID NO: 850120 - DNA, 15 bp, Homo sapiens
taagaaaatatatat

SEQ ID NO: 850121 - DNA, 15 bp, Homo sapiens
aagaaaatatatatg

SEQ ID NO: 850122 - DNA, 15 bp, Homo sapiens
agaaaatatatatgc

SEQ ID NO: 850123 - DNA, 15 bp, Homo sapiens
gaaaatatatatgct

SEQ ID NO: 850124 - DNA, 15 bp, Homo sapiens
aaaatatatatgcta

SEQ ID NO: 850125 - DNA, 15 bp, Homo sapiens
aaatatatatgctaa

SEQ ID NO: 850126 - DNA, 15 bp, Homo sapiens
aatatatatgctaag

SEQ ID NO: 850127 - DNA, 15 bp, Homo sapiens
atatatatgctaagt

SEQ ID NO: 850128 - DNA, 15 bp, Homo sapiens
tatatatgctaagtg

SEQ ID NO: 850129 - DNA, 15 bp, Homo sapiens
atatatgctaagtgt

SEQ ID NO: 850130 - DNA, 15 bp, Homo sapiens
tatatgctaagtgtt

SEQ ID NO: 850131 - DNA, 15 bp, Homo sapiens
atatgctaagtgttt

SEQ ID NO: 850132 - DNA, 15 bp, Homo sapiens
tatgctaagtgtttt

SEQ ID NO: 850133 - DNA, 15 bp, Homo sapiens
atgctaagtgtttta

SEQ ID NO: 850134 - DNA, 15 bp, Homo sapiens
tgctaagtgttttac

SEQ ID NO: 850135 - DNA, 15 bp, Homo sapiens
gctaagtgttttact

SEQ ID NO: 850136 - DNA, 15 bp, Homo sapiens
ctaagtgttttactg

SEQ ID NO: 850137 - DNA, 15 bp, Homo sapiens
taagtgttttactgg

SEQ ID NO: 850138 - DNA, 15 bp, Homo sapiens
aagtgttttactggt

SEQ ID NO: 850139 - DNA, 15 bp, Homo sapiens
agtgttttactggtt

SEQ ID NO: 850140 - DNA, 15 bp, Homo sapiens
gtgttttactggttt

SEQ ID NO: 850141 - DNA, 15 bp, Homo sapiens
tgttttactggttta

SEQ ID NO: 850142 - DNA, 15 bp, Homo sapiens
gttttactggtttaa

SEQ ID NO: 850143 - DNA, 15 bp, Homo sapiens
ttttactggtttaat

SEQ ID NO: 850144 - DNA, 15 bp, Homo sapiens
tttactggtttaata

SEQ ID NO: 850145 - DNA, 15 bp, Homo sapiens
ttactggtttaatat

SEQ ID NO: 850146 - DNA, 15 bp, Homo sapiens
tactggtttaatatg

SEQ ID NO: 850147 - DNA, 15 bp, Homo sapiens
actggtttaatatgc

SEQ ID NO: 850148 - DNA, 15 bp, Homo sapiens
ctggtttaatatgct

SEQ ID NO: 850149 - DNA, 15 bp, Homo sapiens
tggtttaatatgctt

SEQ ID NO: 850150 - DNA, 15 bp, Homo sapiens
ggtttaatatgctta

SEQ ID NO: 850151 - DNA, 15 bp, Homo sapiens
gtttaatatgcttag

SEQ ID NO: 850152 - DNA, 15 bp, Homo sapiens
tttaatatgcttaga

SEQ ID NO: 850153 - DNA, 15 bp, Homo sapiens
ttaatatgcttagac

SEQ ID NO: 850154 - DNA, 15 bp, Homo sapiens
taatatgcttagact

SEQ ID NO: 850155 - DNA, 15 bp, Homo sapiens
aatatgcttagacta

SEQ ID NO: 850156 - DNA, 15 bp, Homo sapiens
atatgcttagactac

SEQ ID NO: 850157 - DNA, 15 bp, Homo sapiens
tatgcttagactact

SEQ ID NO: 850158 - DNA, 15 bp, Homo sapiens
atgcttagactactc

SEQ ID NO: 850159 - DNA, 15 bp, Homo sapiens
tgcttagactactca

SEQ ID NO: 850160 - DNA, 15 bp, Homo sapiens
gcttagactactcat

SEQ ID NO: 850161 - DNA, 15 bp, Homo sapiens
cttagactactcatc

SEQ ID NO: 850162 - DNA, 15 bp, Homo sapiens
ttagactactcatct

SEQ ID NO: 850163 - DNA, 15 bp, Homo sapiens
tagactactcatcta

SEQ ID NO: 850164 - DNA, 15 bp, Homo sapiens
agactactcatctac

SEQ ID NO: 850165 - DNA, 15 bp, Homo sapiens
gactactcatctacc

SEQ ID NO: 850166 - DNA, 15 bp, Homo sapiens
actactcatctacct

SEQ ID NO: 850167 - DNA, 15 bp, Homo sapiens
ctactcatctacctc

SEQ ID NO: 850168 - DNA, 15 bp, Homo sapiens
tactcatctacctca

SEQ ID NO: 850169 - DNA, 15 bp, Homo sapiens
actcatctacctcaa

SEQ ID NO: 850170 - DNA, 15 bp, Homo sapiens
ctcatctacctcaat

SEQ ID NO: 850171 - DNA, 15 bp, Homo sapiens
tcatctacctcaata

SEQ ID NO: 850172 - DNA, 15 bp, Homo sapiens
catctacctcaatac

SEQ ID NO: 850173 - DNA, 15 bp, Homo sapiens
atctacctcaatact

SEQ ID NO: 850174 - DNA, 15 bp, Homo sapiens
tctacctcaatactt

SEQ ID NO: 850175 - DNA, 15 bp, Homo sapiens
ctacctcaatacttc

SEQ ID NO: 850176 - DNA, 15 bp, Homo sapiens
tacctcaatacttcc

SEQ ID NO: 850177 - DNA, 15 bp, Homo sapiens
acctcaatacttcct

SEQ ID NO: 850178 - DNA, 15 bp, Homo sapiens
cctcaatacttcctt

SEQ ID NO: 850179 - DNA, 15 bp, Homo sapiens
ctcaatacttccttg

SEQ ID NO: 850180 - DNA, 15 bp, Homo sapiens
tcaatacttccttgg

SEQ ID NO: 850181 - DNA, 15 bp, Homo sapiens
caatacttccttgga

SEQ ID NO: 850182 - DNA, 15 bp, Homo sapiens
aatacttccttggag

SEQ ID NO: 850183 - DNA, 15 bp, Homo sapiens
atacttccttggaga

SEQ ID NO: 850184 - DNA, 15 bp, Homo sapiens
tacttccttggagat

SEQ ID NO: 850185 - DNA, 15 bp, Homo sapiens
acttccttggagatc

SEQ ID NO: 850186 - DNA, 15 bp, Homo sapiens
cttccttggagatct

SEQ ID NO: 850187 - DNA, 15 bp, Homo sapiens
ttccttggagatctc

SEQ ID NO: 850188 - DNA, 15 bp, Homo sapiens
tccttggagatctcc

SEQ ID NO: 850189 - DNA, 15 bp, Homo sapiens
ccttggagatctcct

SEQ ID NO: 850190 - DNA, 15 bp, Homo sapiens
cttggagatctcctc

SEQ ID NO: 850191 - DNA, 15 bp, Homo sapiens
ttggagatctcctcc

SEQ ID NO: 850192 - DNA, 15 bp, Homo sapiens
tggagatctcctcct

SEQ ID NO: 850193 - DNA, 15 bp, Homo sapiens
ggagatctcctcctc

SEQ ID NO: 850194 - DNA, 15 bp, Homo sapiens
gagatctcctcctca

SEQ ID NO: 850195 - DNA, 15 bp, Homo sapiens
agatctcctcctcag

SEQ ID NO: 850196 - DNA, 15 bp, Homo sapiens
gatctcctcctcagt

SEQ ID NO: 850197 - DNA, 15 bp, Homo sapiens
atctcctcctcagtc

SEQ ID NO: 850198 - DNA, 15 bp, Homo sapiens
tctcctcctcagtca

SEQ ID NO: 850199 - DNA, 15 bp, Homo sapiens
ctcctcctcagtcac

SEQ ID NO: 850200 - DNA, 15 bp, Homo sapiens
tcctcctcagtcaca

SEQ ID NO: 850201 - DNA, 15 bp, Homo sapiens
cctcctcagtcacac

SEQ ID NO: 850202 - DNA, 15 bp, Homo sapiens
ctcctcagtcacaca

SEQ ID NO: 850203 - DNA, 15 bp, Homo sapiens
tcctcagtcacacag

SEQ ID NO: 850204 - DNA, 15 bp, Homo sapiens
cctcagtcacacaga

SEQ ID NO: 850205 - DNA, 15 bp, Homo sapiens
ctcagtcacacagag

SEQ ID NO: 850206 - DNA, 15 bp, Homo sapiens
tcagtcacacagagc

SEQ ID NO: 850207 - DNA, 15 bp, Homo sapiens
cagtcacacagagct

SEQ ID NO: 850208 - DNA, 15 bp, Homo sapiens
agtcacacagagctc

SEQ ID NO: 850209 - DNA, 15 bp, Homo sapiens
gtcacacagagctca

SEQ ID NO: 850210 - DNA, 15 bp, Homo sapiens
tcacacagagctcag

SEQ ID NO: 850211 - DNA, 15 bp, Homo sapiens
cacacagagctcagg

SEQ ID NO: 850212 - DNA, 15 bp, Homo sapiens
acacagagctcagga

SEQ ID NO: 850213 - DNA, 15 bp, Homo sapiens
cacagagctcaggac

SEQ ID NO: 850214 - DNA, 15 bp, Homo sapiens
acagagctcaggact

SEQ ID NO: 850215 - DNA, 15 bp, Homo sapiens
cagagctcaggactt

SEQ ID NO: 850216 - DNA, 15 bp, Homo sapiens
agagctcaggactta

SEQ ID NO: 850217 - DNA, 15 bp, Homo sapiens
gagctcaggacttat

SEQ ID NO: 850218 - DNA, 15 bp, Homo sapiens
agctcaggacttata

SEQ ID NO: 850219 - DNA, 15 bp, Homo sapiens
gctcaggacttatat

SEQ ID NO: 850220 - DNA, 15 bp, Homo sapiens
ctcaggacttatatt

SEQ ID NO: 850221 - DNA, 15 bp, Homo sapiens
tcaggacttatattt

SEQ ID NO: 850222 - DNA, 15 bp, Homo sapiens
caggacttatatttc

SEQ ID NO: 850223 - DNA, 15 bp, Homo sapiens
aggacttatatttcc

SEQ ID NO: 850224 - DNA, 15 bp, Homo sapiens
ggacttatatttcct

SEQ ID NO: 850225 - DNA, 15 bp, Homo sapiens
gacttatatttcctt

SEQ ID NO: 850226 - DNA, 15 bp, Homo sapiens
acttatatttccttg

SEQ ID NO: 850227 - DNA, 15 bp, Homo sapiens
cttatatttccttgg

SEQ ID NO: 850228 - DNA, 15 bp, Homo sapiens
ttatatttccttgga

SEQ ID NO: 850229 - DNA, 15 bp, Homo sapiens
tatatttccttggaa

SEQ ID NO: 850230 - DNA, 15 bp, Homo sapiens
atatttccttggaac

SEQ ID NO: 850231 - DNA, 15 bp, Homo sapiens
tatttccttggaact

SEQ ID NO: 850232 - DNA, 15 bp, Homo sapiens
atttccttggaactc

SEQ ID NO: 850233 - DNA, 15 bp, Homo sapiens
tttccttggaactcc

SEQ ID NO: 850234 - DNA, 15 bp, Homo sapiens
ttccttggaactcct

SEQ ID NO: 850235 - DNA, 15 bp, Homo sapiens
tccttggaactcctg

SEQ ID NO: 850236 - DNA, 15 bp, Homo sapiens
ccttggaactcctgt

SEQ ID NO: 850237 - DNA, 15 bp, Homo sapiens
cttggaactcctgtt

SEQ ID NO: 850238 - DNA, 15 bp, Homo sapiens
ttggaactcctgtta

SEQ ID NO: 850239 - DNA, 15 bp, Homo sapiens
tggaactcctgttag

SEQ ID NO: 850240 - DNA, 15 bp, Homo sapiens
ggaactcctgttagg

SEQ ID NO: 850241 - DNA, 15 bp, Homo sapiens
gaactcctgttaggg

SEQ ID NO: 850242 - DNA, 15 bp, Homo sapiens
aactcctgttagggt

SEQ ID NO: 850243 - DNA, 15 bp, Homo sapiens
actcctgttagggtc

SEQ ID NO: 850244 - DNA, 15 bp, Homo sapiens
ctcctgttagggtcc

SEQ ID NO: 850245 - DNA, 15 bp, Homo sapiens
tcctgttagggtcca

SEQ ID NO: 850246 - DNA, 15 bp, Homo sapiens
cctgttagggtccaa

SEQ ID NO: 850247 - DNA, 15 bp, Homo sapiens
ctgttagggtccaat

SEQ ID NO: 850248 - DNA, 15 bp, Homo sapiens
tgttagggtccaatg

SEQ ID NO: 850249 - DNA, 15 bp, Homo sapiens
gttagggtccaatgt

SEQ ID NO: 850250 - DNA, 15 bp, Homo sapiens
ttagggtccaatgta

SEQ ID NO: 850251 - DNA, 15 bp, Homo sapiens
tagggtccaatgtac

SEQ ID NO: 850252 - DNA, 15 bp, Homo sapiens
agggtccaatgtaca

SEQ ID NO: 850253 - DNA, 15 bp, Homo sapiens
gggtccaatgtacat

SEQ ID NO: 850254 - DNA, 15 bp, Homo sapiens
ggtccaatgtacatg

SEQ ID NO: 850255 - DNA, 15 bp, Homo sapiens
gtccaatgtacatga

SEQ ID NO: 850256 - DNA, 15 bp, Homo sapiens
tccaatgtacatgaa

SEQ ID NO: 850257 - DNA, 15 bp, Homo sapiens
ccaatgtacatgaaa

SEQ ID NO: 850258 - DNA, 15 bp, Homo sapiens
caatgtacatgaaat

SEQ ID NO: 850259 - DNA, 15 bp, Homo sapiens
aatgtacatgaaatt

SEQ ID NO: 850260 - DNA, 15 bp, Homo sapiens
atgtacatgaaattc

SEQ ID NO: 850261 - DNA, 15 bp, Homo sapiens
tgtacatgaaattcc

SEQ ID NO: 850262 - DNA, 15 bp, Homo sapiens
gtacatgaaattccc

SEQ ID NO: 850263 - DNA, 15 bp, Homo sapiens
tacatgaaattccct

SEQ ID NO: 850264 - DNA, 15 bp, Homo sapiens
acatgaaattcccta

SEQ ID NO: 850265 - DNA, 15 bp, Homo sapiens
catgaaattccctag

SEQ ID NO: 850266 - DNA, 15 bp, Homo sapiens
atgaaattccctaga

SEQ ID NO: 850267 - DNA, 15 bp, Homo sapiens
tgaaattccctagac

SEQ ID NO: 850268 - DNA, 15 bp, Homo sapiens
gaaattccctagaca

SEQ ID NO: 850269 - DNA, 15 bp, Homo sapiens
aaattccctagacag

SEQ ID NO: 850270 - DNA, 15 bp, Homo sapiens
aattccctagacaga

SEQ ID NO: 850271 - DNA, 15 bp, Homo sapiens
attccctagacagac

SEQ ID NO: 850272 - DNA, 15 bp, Homo sapiens
ttccctagacagaca

SEQ ID NO: 850273 - DNA, 15 bp, Homo sapiens
tccctagacagacag

SEQ ID NO: 850274 - DNA, 15 bp, Homo sapiens
ccctagacagacaga

SEQ ID NO: 850275 - DNA, 15 bp, Homo sapiens
cctagacagacagac

SEQ ID NO: 850276 - DNA, 15 bp, Homo sapiens
ctagacagacagaca

SEQ ID NO: 850277 - DNA, 15 bp, Homo sapiens
tagacagacagacag

SEQ ID NO: 850278 - DNA, 15 bp, Homo sapiens
agacagacagacagt

SEQ ID NO: 850279 - DNA, 15 bp, Homo sapiens
gacagacagacagtc

SEQ ID NO: 850280 - DNA, 15 bp, Homo sapiens
acagacagacagtca

SEQ ID NO: 850281 - DNA, 15 bp, Homo sapiens
cagacagacagtcag

SEQ ID NO: 850282 - DNA, 15 bp, Homo sapiens
agacagacagtcagt

SEQ ID NO: 850283 - DNA, 15 bp, Homo sapiens
gacagacagtcagtt

SEQ ID NO: 850284 - DNA, 15 bp, Homo sapiens
acagacagtcagtta

SEQ ID NO: 850285 - DNA, 15 bp, Homo sapiens
cagacagtcagttat

SEQ ID NO: 850286 - DNA, 15 bp, Homo sapiens
agacagtcagttata

SEQ ID NO: 850287 - DNA, 15 bp, Homo sapiens
gacagtcagttatat

SEQ ID NO: 850288 - DNA, 15 bp, Homo sapiens
acagtcagttatatg

SEQ ID NO: 850289 - DNA, 15 bp, Homo sapiens
cagtcagttatatgg

SEQ ID NO: 850290 - DNA, 15 bp, Homo sapiens
agtcagttatatggc

SEQ ID NO: 850291 - DNA, 15 bp, Homo sapiens
gtcagttatatggct

SEQ ID NO: 850292 - DNA, 15 bp, Homo sapiens
tcagttatatggctt

SEQ ID NO: 850293 - DNA, 15 bp, Homo sapiens
cagttatatggcttg

SEQ ID NO: 850294 - DNA, 15 bp, Homo sapiens
agttatatggcttga

SEQ ID NO: 850295 - DNA, 15 bp, Homo sapiens
gttatatggcttgat

SEQ ID NO: 850296 - DNA, 15 bp, Homo sapiens
ttatatggcttgatt

SEQ ID NO: 850297 - DNA, 15 bp, Homo sapiens
tatatggcttgattt

SEQ ID NO: 850298 - DNA, 15 bp, Homo sapiens
atatggcttgatttc

SEQ ID NO: 850299 - DNA, 15 bp, Homo sapiens
tatggcttgatttca

SEQ ID NO: 850300 - DNA, 15 bp, Homo sapiens
atggcttgatttcaa

SEQ ID NO: 850301 - DNA, 15 bp, Homo sapiens
tggcttgatttcaaa

SEQ ID NO: 850302 - DNA, 15 bp, Homo sapiens
ggcttgatttcaaag

SEQ ID NO: 850303 - DNA, 15 bp, Homo sapiens
gcttgatttcaaagt

SEQ ID NO: 850304 - DNA, 15 bp, Homo sapiens
cttgatttcaaagtt

SEQ ID NO: 850305 - DNA, 15 bp, Homo sapiens
ttgatttcaaagttt

SEQ ID NO: 850306 - DNA, 15 bp, Homo sapiens
tgatttcaaagtttc

SEQ ID NO: 850307 - DNA, 15 bp, Homo sapiens
gatttcaaagtttca

SEQ ID NO: 850308 - DNA, 15 bp, Homo sapiens
atttcaaagtttcaa

SEQ ID NO: 850309 - DNA, 15 bp, Homo sapiens
tttcaaagtttcaaa

SEQ ID NO: 850310 - DNA, 15 bp, Homo sapiens
ttcaaagtttcaaaa

SEQ ID NO: 850311 - DNA, 15 bp, Homo sapiens
tcaaagtttcaaaat

SEQ ID NO: 850312 - DNA, 15 bp, Homo sapiens
caaagtttcaaaatg

SEQ ID NO: 850313 - DNA, 15 bp, Homo sapiens
aaagtttcaaaatga

SEQ ID NO: 850314 - DNA, 15 bp, Homo sapiens
aagtttcaaaatgat

SEQ ID NO: 850315 - DNA, 15 bp, Homo sapiens
agtttcaaaatgatt

SEQ ID NO: 850316 - DNA, 15 bp, Homo sapiens
gtttcaaaatgattt

SEQ ID NO: 850317 - DNA, 15 bp, Homo sapiens
tttcaaaatgattta

SEQ ID NO: 850318 - DNA, 15 bp, Homo sapiens
ttcaaaatgatttaa

SEQ ID NO: 850319 - DNA, 15 bp, Homo sapiens
tcaaaatgatttaat

SEQ ID NO: 850320 - DNA, 15 bp, Homo sapiens
caaaatgatttaatg

SEQ ID NO: 850321 - DNA, 15 bp, Homo sapiens
aaaatgatttaatgg

SEQ ID NO: 850322 - DNA, 15 bp, Homo sapiens
aaatgatttaatgga

SEQ ID NO: 850323 - DNA, 15 bp, Homo sapiens
aatgatttaatggac

SEQ ID NO: 850324 - DNA, 15 bp, Homo sapiens
atgatttaatggact

SEQ ID NO: 850325 - DNA, 15 bp, Homo sapiens
tgatttaatggacta

SEQ ID NO: 850326 - DNA, 15 bp, Homo sapiens
gatttaatggactat

SEQ ID NO: 850327 - DNA, 15 bp, Homo sapiens
atttaatggactatc

SEQ ID NO: 850328 - DNA, 15 bp, Homo sapiens
tttaatggactatca

SEQ ID NO: 850329 - DNA, 15 bp, Homo sapiens
ttaatggactatcaa

SEQ ID NO: 850330 - DNA, 15 bp, Homo sapiens
taatggactatcaag

SEQ ID NO: 850331 - DNA, 15 bp, Homo sapiens
aatggactatcaagt

SEQ ID NO: 850332 - DNA, 15 bp, Homo sapiens
atggactatcaagta

SEQ ID NO: 850333 - DNA, 15 bp, Homo sapiens
tggactatcaagtag

SEQ ID NO: 850334 - DNA, 15 bp, Homo sapiens
ggactatcaagtagt

SEQ ID NO: 850335 - DNA, 15 bp, Homo sapiens
gactatcaagtagtt

SEQ ID NO: 850336 - DNA, 15 bp, Homo sapiens
actatcaagtagttt

SEQ ID NO: 850337 - DNA, 15 bp, Homo sapiens
ctatcaagtagttta

SEQ ID NO: 850338 - DNA, 15 bp, Homo sapiens
tatcaagtagtttat

SEQ ID NO: 850339 - DNA, 15 bp, Homo sapiens
atcaagtagtttatt

SEQ ID NO: 850340 - DNA, 15 bp, Homo sapiens
tcaagtagtttatta

SEQ ID NO: 850341 - DNA, 15 bp, Homo sapiens
caagtagtttattag

SEQ ID NO: 850342 - DNA, 15 bp, Homo sapiens
aagtagtttattagg

SEQ ID NO: 850343 - DNA, 15 bp, Homo sapiens
agtagtttattagga

SEQ ID NO: 850344 - DNA, 15 bp, Homo sapiens
gtagtttattaggag

SEQ ID NO: 850345 - DNA, 15 bp, Homo sapiens
tagtttattaggaga

SEQ ID NO: 850346 - DNA, 15 bp, Homo sapiens
agtttattaggagaa

SEQ ID NO: 850347 - DNA, 15 bp, Homo sapiens
gtttattaggagaac

SEQ ID NO: 850348 - DNA, 15 bp, Homo sapiens
tttattaggagaaca

SEQ ID NO: 850349 - DNA, 15 bp, Homo sapiens
ttattaggagaacag

SEQ ID NO: 850350 - DNA, 15 bp, Homo sapiens
tattaggagaacagt

SEQ ID NO: 850351 - DNA, 15 bp, Homo sapiens
attaggagaacagtt

SEQ ID NO: 850352 - DNA, 15 bp, Homo sapiens
ttaggagaacagtta

SEQ ID NO: 850353 - DNA, 15 bp, Homo sapiens
taggagaacagttat

SEQ ID NO: 850354 - DNA, 15 bp, Homo sapiens
aggagaacagttatt

SEQ ID NO: 850355 - DNA, 15 bp, Homo sapiens
ggagaacagttatta

SEQ ID NO: 850356 - DNA, 15 bp, Homo sapiens
gagaacagttattat

SEQ ID NO: 850357 - DNA, 15 bp, Homo sapiens
agaacagttattata

SEQ ID NO: 850358 - DNA, 15 bp, Homo sapiens
gaacagttattatac

SEQ ID NO: 850359 - DNA, 15 bp, Homo sapiens
aacagttattatact

SEQ ID NO: 850360 - DNA, 15 bp, Homo sapiens
acagttattatactc

SEQ ID NO: 850361 - DNA, 15 bp, Homo sapiens
cagttattatactct

SEQ ID NO: 850362 - DNA, 15 bp, Homo sapiens
agttattatactctt

SEQ ID NO: 850363 - DNA, 15 bp, Homo sapiens
gttattatactcttc

SEQ ID NO: 850364 - DNA, 15 bp, Homo sapiens
ttattatactcttct

SEQ ID NO: 850365 - DNA, 15 bp, Homo sapiens
tattatactcttcta

SEQ ID NO: 850366 - DNA, 15 bp, Homo sapiens
attatactcttctaa

SEQ ID NO: 850367 - DNA, 15 bp, Homo sapiens
ttatactcttctaaa

SEQ ID NO: 850368 - DNA, 15 bp, Homo sapiens
tatactcttctaaaa

SEQ ID NO: 850369 - DNA, 15 bp, Homo sapiens
atactcttctaaaaa

SEQ ID NO: 850370 - DNA, 15 bp, Homo sapiens
tactcttctaaaaat

SEQ ID NO: 850371 - DNA, 15 bp, Homo sapiens
actcttctaaaaata

SEQ ID NO: 850372 - DNA, 15 bp, Homo sapiens
ctcttctaaaaataa

SEQ ID NO: 850373 - DNA, 15 bp, Homo sapiens
tcttctaaaaataaa

SEQ ID NO: 850374 - DNA, 15 bp, Homo sapiens
cttctaaaaataaag

SEQ ID NO: 850375 - DNA, 15 bp, Homo sapiens
ttctaaaaataaaga

SEQ ID NO: 850376 - DNA, 15 bp, Homo sapiens
tctaaaaataaagac

SEQ ID NO: 850377 - DNA, 15 bp, Homo sapiens
ctaaaaataaagact

SEQ ID NO: 850378 - DNA, 15 bp, Homo sapiens
taaaaataaagactt

SEQ ID NO: 850379 - DNA, 15 bp, Homo sapiens
aaaaataaagacttt

SEQ ID NO: 850380 - DNA, 15 bp, Homo sapiens
aaaataaagacttta

SEQ ID NO: 850381 - DNA, 15 bp, Homo sapiens
aaataaagactttaa

SEQ ID NO: 850382 - DNA, 15 bp, Homo sapiens
aataaagactttaag

SEQ ID NO: 850383 - DNA, 15 bp, Homo sapiens
ataaagactttaagc

SEQ ID NO: 850384 - DNA, 15 bp, Homo sapiens
taaagactttaagca

SEQ ID NO: 850385 - DNA, 15 bp, Homo sapiens
aaagactttaagcaa

SEQ ID NO: 850386 - DNA, 15 bp, Homo sapiens
aagactttaagcaat

SEQ ID NO: 850387 - DNA, 15 bp, Homo sapiens
agactttaagcaata

SEQ ID NO: 850388 - DNA, 15 bp, Homo sapiens
gactttaagcaataa

SEQ ID NO: 850389 - DNA, 15 bp, Homo sapiens
actttaagcaataaa

SEQ ID NO: 850390 - DNA, 15 bp, Homo sapiens
ctttaagcaataaag

SEQ ID NO: 850391 - DNA, 15 bp, Homo sapiens
tttaagcaataaaga

SEQ ID NO: 850392 - DNA, 15 bp, Homo sapiens
ttaagcaataaagat

SEQ ID NO: 850393 - DNA, 15 bp, Homo sapiens
taagcaataaagatg

SEQ ID NO: 850394 - DNA, 15 bp, Homo sapiens
aagcaataaagatgt

SEQ ID NO: 850395 - DNA, 15 bp, Homo sapiens
agcaataaagatgta

SEQ ID NO: 850396 - DNA, 15 bp, Homo sapiens
gcaataaagatgtat

SEQ ID NO: 850397 - DNA, 15 bp, Homo sapiens
caataaagatgtata

SEQ ID NO: 850398 - DNA, 15 bp, Homo sapiens
aataaagatgtatat

SEQ ID NO: 850399 - DNA, 15 bp, Homo sapiens
ataaagatgtatatg

SEQ ID NO: 850400 - DNA, 15 bp, Homo sapiens
taaagatgtatatgt

SEQ ID NO: 850401 - DNA, 15 bp, Homo sapiens
aaagatgtatatgta

SEQ ID NO: 850402 - DNA, 15 bp, Homo sapiens
aagatgtatatgtat

SEQ ID NO: 850403 - DNA, 15 bp, Homo sapiens
agatgtatatgtata

SEQ ID NO: 850404 - DNA, 15 bp, Homo sapiens
gatgtatatgtatat

SEQ ID NO: 850405 - DNA, 15 bp, Homo sapiens
atgtatatgtatata

SEQ ID NO: 850406 - DNA, 15 bp, Homo sapiens
tgtatatgtatataa

SEQ ID NO: 850407 - DNA, 15 bp, Homo sapiens
gtatatgtatataaa

SEQ ID NO: 850408 - DNA, 15 bp, Homo sapiens
tatatgtatataaaa

SEQ ID NO: 850409 - DNA, 15 bp, Homo sapiens
atatgtatataaaat

SEQ ID NO: 850410 - DNA, 15 bp, Homo sapiens
tatgtatataaaatg

SEQ ID NO: 850411 - DNA, 15 bp, Homo sapiens
atgtatataaaatgg

SEQ ID NO: 850412 - DNA, 15 bp, Homo sapiens
tgtatataaaatggc

SEQ ID NO: 850413 - DNA, 15 bp, Homo sapiens
gtatataaaatggct

SEQ ID NO: 850414 - DNA, 15 bp, Homo sapiens
tatataaaatggctg

SEQ ID NO: 850415 - DNA, 15 bp, Homo sapiens
atataaaatggctgg

SEQ ID NO: 850416 - DNA, 15 bp, Homo sapiens
tataaaatggctggg

SEQ ID NO: 850417 - DNA, 15 bp, Homo sapiens
ataaaatggctgggt

SEQ ID NO: 850418 - DNA, 15 bp, Homo sapiens
taaaatggctgggtt

SEQ ID NO: 850419 - DNA, 15 bp, Homo sapiens
aaaatggctgggtta

SEQ ID NO: 850420 - DNA, 15 bp, Homo sapiens
aaatggctgggttat

SEQ ID NO: 850421 - DNA, 15 bp, Homo sapiens
aatggctgggttatt

SEQ ID NO: 850422 - DNA, 15 bp, Homo sapiens
atggctgggttattc

SEQ ID NO: 850423 - DNA, 15 bp, Homo sapiens
tggctgggttattcc

SEQ ID NO: 850424 - DNA, 15 bp, Homo sapiens
ggctgggttattcct

SEQ ID NO: 850425 - DNA, 15 bp, Homo sapiens
gctgggttattccta

SEQ ID NO: 850426 - DNA, 15 bp, Homo sapiens
ctgggttattcctag

SEQ ID NO: 850427 - DNA, 15 bp, Homo sapiens
tgggttattcctaga

SEQ ID NO: 850428 - DNA, 15 bp, Homo sapiens
gggttattcctagaa

SEQ ID NO: 850429 - DNA, 15 bp, Homo sapiens
ggttattcctagaag

SEQ ID NO: 850430 - DNA, 15 bp, Homo sapiens
gttattcctagaagt

SEQ ID NO: 850431 - DNA, 15 bp, Homo sapiens
ttattcctagaagta

SEQ ID NO: 850432 - DNA, 15 bp, Homo sapiens
tattcctagaagtac

SEQ ID NO: 850433 - DNA, 15 bp, Homo sapiens
attcctagaagtacc

SEQ ID NO: 850434 - DNA, 15 bp, Homo sapiens
ttcctagaagtacct

SEQ ID NO: 850435 - DNA, 15 bp, Homo sapiens
tcctagaagtacctt

SEQ ID NO: 850436 - DNA, 15 bp, Homo sapiens
cctagaagtaccttt

SEQ ID NO: 850437 - DNA, 15 bp, Homo sapiens
ctagaagtacctttc

SEQ ID NO: 850438 - DNA, 15 bp, Homo sapiens
tagaagtacctttct

SEQ ID NO: 850439 - DNA, 15 bp, Homo sapiens
agaagtacctttctt

SEQ ID NO: 850440 - DNA, 15 bp, Homo sapiens
gaagtacctttctta

SEQ ID NO: 850441 - DNA, 15 bp, Homo sapiens
aagtacctttcttag

SEQ ID NO: 850442 - DNA, 15 bp, Homo sapiens
agtacctttcttaga

SEQ ID NO: 850443 - DNA, 15 bp, Homo sapiens
gtacctttcttagaa

SEQ ID NO: 850444 - DNA, 15 bp, Homo sapiens
tacctttcttagaat

SEQ ID NO: 850445 - DNA, 15 bp, Homo sapiens
acctttcttagaatt

SEQ ID NO: 850446 - DNA, 15 bp, Homo sapiens
cctttcttagaattt

SEQ ID NO: 850447 - DNA, 15 bp, Homo sapiens
ctttcttagaattta

SEQ ID NO: 850448 - DNA, 15 bp, Homo sapiens
tttcttagaatttag

SEQ ID NO: 850449 - DNA, 15 bp, Homo sapiens
ttcttagaatttagt

SEQ ID NO: 850450 - DNA, 15 bp, Homo sapiens
tcttagaatttagtt

SEQ ID NO: 850451 - DNA, 15 bp, Homo sapiens
cttagaatttagtta

SEQ ID NO: 850452 - DNA, 15 bp, Homo sapiens
ttagaatttagttaa

SEQ ID NO: 850453 - DNA, 15 bp, Homo sapiens
tagaatttagttaaa

SEQ ID NO: 850454 - DNA, 15 bp, Homo sapiens
agaatttagttaaat

SEQ ID NO: 850455 - DNA, 15 bp, Homo sapiens
gaatttagttaaatt

SEQ ID NO: 850456 - DNA, 15 bp, Homo sapiens
aatttagttaaattt

SEQ ID NO: 850457 - DNA, 15 bp, Homo sapiens
atttagttaaattta

SEQ ID NO: 850458 - DNA, 15 bp, Homo sapiens
tttagttaaatttaa

SEQ ID NO: 850459 - DNA, 15 bp, Homo sapiens
ttagttaaatttaat

SEQ ID NO: 850460 - DNA, 15 bp, Homo sapiens
tagttaaatttaata

SEQ ID NO: 850461 - DNA, 15 bp, Homo sapiens
agttaaatttaatat

SEQ ID NO: 850462 - DNA, 15 bp, Homo sapiens
gttaaatttaatatc

SEQ ID NO: 850463 - DNA, 15 bp, Homo sapiens
ttaaatttaatatcc

SEQ ID NO: 850464 - DNA, 15 bp, Homo sapiens
taaatttaatatcca

SEQ ID NO: 850465 - DNA, 15 bp, Homo sapiens
aaatttaatatccaa

SEQ ID NO: 850466 - DNA, 15 bp, Homo sapiens
aatttaatatccaag

SEQ ID NO: 850467 - DNA, 15 bp, Homo sapiens
atttaatatccaaga

SEQ ID NO: 850468 - DNA, 15 bp, Homo sapiens
tttaatatccaagat

SEQ ID NO: 850469 - DNA, 15 bp, Homo sapiens
ttaatatccaagata

SEQ ID NO: 850470 - DNA, 15 bp, Homo sapiens
taatatccaagatac

SEQ ID NO: 850471 - DNA, 15 bp, Homo sapiens
aatatccaagatact

SEQ ID NO: 850472 - DNA, 15 bp, Homo sapiens
atatccaagatacta

SEQ ID NO: 850473 - DNA, 15 bp, Homo sapiens
tatccaagatactat

SEQ ID NO: 850474 - DNA, 15 bp, Homo sapiens
atccaagatactatc

SEQ ID NO: 850475 - DNA, 15 bp, Homo sapiens
tccaagatactatct

SEQ ID NO: 850476 - DNA, 15 bp, Homo sapiens
ccaagatactatctt

SEQ ID NO: 850477 - DNA, 15 bp, Homo sapiens
caagatactatcttt

SEQ ID NO: 850478 - DNA, 15 bp, Homo sapiens
aagatactatctttt

SEQ ID NO: 850479 - DNA, 15 bp, Homo sapiens
agatactatcttttc

SEQ ID NO: 850480 - DNA, 15 bp, Homo sapiens
gatactatcttttca

SEQ ID NO: 850481 - DNA, 15 bp, Homo sapiens
atactatcttttcaa

SEQ ID NO: 850482 - DNA, 15 bp, Homo sapiens
tactatcttttcaac

SEQ ID NO: 850483 - DNA, 15 bp, Homo sapiens
actatcttttcaacc

SEQ ID NO: 850484 - DNA, 15 bp, Homo sapiens
ctatcttttcaaccc

SEQ ID NO: 850485 - DNA, 15 bp, Homo sapiens
tatcttttcaaccct

SEQ ID NO: 850486 - DNA, 15 bp, Homo sapiens
atcttttcaaccctg

SEQ ID NO: 850487 - DNA, 15 bp, Homo sapiens
tcttttcaaccctga

SEQ ID NO: 850488 - DNA, 15 bp, Homo sapiens
cttttcaaccctgag

SEQ ID NO: 850489 - DNA, 15 bp, Homo sapiens
ttttcaaccctgaga

SEQ ID NO: 850490 - DNA, 15 bp, Homo sapiens
tttcaaccctgagat

SEQ ID NO: 850491 - DNA, 15 bp, Homo sapiens
ttcaaccctgagatt

SEQ ID NO: 850492 - DNA, 15 bp, Homo sapiens
tcaaccctgagattg

SEQ ID NO: 850493 - DNA, 15 bp, Homo sapiens
caaccctgagattgt

SEQ ID NO: 850494 - DNA, 15 bp, Homo sapiens
aaccctgagattgtg

SEQ ID NO: 850495 - DNA, 15 bp, Homo sapiens
accctgagattgtga

SEQ ID NO: 850496 - DNA, 15 bp, Homo sapiens
ccctgagattgtgaa

SEQ ID NO: 850497 - DNA, 15 bp, Homo sapiens
cctgagattgtgaaa

SEQ ID NO: 850498 - DNA, 15 bp, Homo sapiens
ctgagattgtgaaaa

SEQ ID NO: 850499 - DNA, 15 bp, Homo sapiens
tgagattgtgaaaag

SEQ ID NO: 850500 - DNA, 15 bp, Homo sapiens
gagattgtgaaaagt

SEQ ID NO: 850501 - DNA, 15 bp, Homo sapiens
agattgtgaaaagta

SEQ ID NO: 850502 - DNA, 15 bp, Homo sapiens
gattgtgaaaagtaa

SEQ ID NO: 850503 - DNA, 15 bp, Homo sapiens
attgtgaaaagtaac

SEQ ID NO: 850504 - DNA, 15 bp, Homo sapiens
ttgtgaaaagtaact

SEQ ID NO: 850505 - DNA, 15 bp, Homo sapiens
tgtgaaaagtaactt

SEQ ID NO: 850506 - DNA, 15 bp, Homo sapiens
gtgaaaagtaacttc

SEQ ID NO: 850507 - DNA, 15 bp, Homo sapiens
tgaaaagtaacttct

SEQ ID NO: 850508 - DNA, 15 bp, Homo sapiens
gaaaagtaacttcta

SEQ ID NO: 850509 - DNA, 15 bp, Homo sapiens
aaaagtaacttctat

SEQ ID NO: 850510 - DNA, 15 bp, Homo sapiens
aaagtaacttctatc

SEQ ID NO: 850511 - DNA, 15 bp, Homo sapiens
aagtaacttctatca

SEQ ID NO: 850512 - DNA, 15 bp, Homo sapiens
agtaacttctatcaa

SEQ ID NO: 850513 - DNA, 15 bp, Homo sapiens
gtaacttctatcaat

SEQ ID NO: 850514 - DNA, 15 bp, Homo sapiens
taacttctatcaata

SEQ ID NO: 850515 - DNA, 15 bp, Homo sapiens
aacttctatcaatat

SEQ ID NO: 850516 - DNA, 15 bp, Homo sapiens
acttctatcaatata

SEQ ID NO: 850517 - DNA, 15 bp, Homo sapiens
cttctatcaatataa

SEQ ID NO: 850518 - DNA, 15 bp, Homo sapiens
ttctatcaatataaa

SEQ ID NO: 850519 - DNA, 15 bp, Homo sapiens
tctatcaatataaac

SEQ ID NO: 850520 - DNA, 15 bp, Homo sapiens
ctatcaatataaact

SEQ ID NO: 850521 - DNA, 15 bp, Homo sapiens
tatcaatataaactt

SEQ ID NO: 850522 - DNA, 15 bp, Homo sapiens
atcaatataaacttt

SEQ ID NO: 850523 - DNA, 15 bp, Homo sapiens
tcaatataaacttta

SEQ ID NO: 850524 - DNA, 15 bp, Homo sapiens
caatataaactttac

SEQ ID NO: 850525 - DNA, 15 bp, Homo sapiens
aatataaactttact

SEQ ID NO: 850526 - DNA, 15 bp, Homo sapiens
atataaactttacta

SEQ ID NO: 850527 - DNA, 15 bp, Homo sapiens
tataaactttactac

SEQ ID NO: 850528 - DNA, 15 bp, Homo sapiens
ataaactttactaca

SEQ ID NO: 850529 - DNA, 15 bp, Homo sapiens
taaactttactacat

SEQ ID NO: 850530 - DNA, 15 bp, Homo sapiens
aaactttactacatt

SEQ ID NO: 850531 - DNA, 15 bp, Homo sapiens
aactttactacattt

SEQ ID NO: 850532 - DNA, 15 bp, Homo sapiens
actttactacatttg

SEQ ID NO: 850533 - DNA, 15 bp, Homo sapiens
ctttactacatttgt

SEQ ID NO: 850534 - DNA, 15 bp, Homo sapiens
tttactacatttgta

SEQ ID NO: 850535 - DNA, 15 bp, Homo sapiens
ttactacatttgtat

SEQ ID NO: 850536 - DNA, 15 bp, Homo sapiens
tactacatttgtatt

SEQ ID NO: 850537 - DNA, 15 bp, Homo sapiens
actacatttgtattg

SEQ ID NO: 850538 - DNA, 15 bp, Homo sapiens
ctacatttgtattgt

SEQ ID NO: 850539 - DNA, 15 bp, Homo sapiens
tacatttgtattgtg

SEQ ID NO: 850540 - DNA, 15 bp, Homo sapiens
acatttgtattgtgt

SEQ ID NO: 850541 - DNA, 15 bp, Homo sapiens
catttgtattgtgtt

SEQ ID NO: 850542 - DNA, 15 bp, Homo sapiens
atttgtattgtgtta

SEQ ID NO: 850543 - DNA, 15 bp, Homo sapiens
tttgtattgtgttag

SEQ ID NO: 850544 - DNA, 15 bp, Homo sapiens
ttgtattgtgttagt

SEQ ID NO: 850545 - DNA, 15 bp, Homo sapiens
tgtattgtgttagtg

SEQ ID NO: 850546 - DNA, 15 bp, Homo sapiens
gtattgtgttagtgt

SEQ ID NO: 850547 - DNA, 15 bp, Homo sapiens
tattgtgttagtgtg

SEQ ID NO: 850548 - DNA, 15 bp, Homo sapiens
attgtgttagtgtgt

SEQ ID NO: 850549 - DNA, 15 bp, Homo sapiens
ttgtgttagtgtgtt

SEQ ID NO: 850550 - DNA, 15 bp, Homo sapiens
tgtgttagtgtgtta

SEQ ID NO: 850551 - DNA, 15 bp, Homo sapiens
gtgttagtgtgttac

SEQ ID NO: 850552 - DNA, 15 bp, Homo sapiens
tgttagtgtgttaca

SEQ ID NO: 850553 - DNA, 15 bp, Homo sapiens
gttagtgtgttacag

SEQ ID NO: 850554 - DNA, 15 bp, Homo sapiens
ttagtgtgttacagt

SEQ ID NO: 850555 - DNA, 15 bp, Homo sapiens
tagtgtgttacagta

SEQ ID NO: 850556 - DNA, 15 bp, Homo sapiens
agtgtgttacagtat

SEQ ID NO: 850557 - DNA, 15 bp, Homo sapiens
gtgtgttacagtata

SEQ ID NO: 850558 - DNA, 15 bp, Homo sapiens
tgtgttacagtataa

SEQ ID NO: 850559 - DNA, 15 bp, Homo sapiens
gtgttacagtataat

SEQ ID NO: 850560 - DNA, 15 bp, Homo sapiens
tgttacagtataatc

SEQ ID NO: 850561 - DNA, 15 bp, Homo sapiens
gttacagtataatct

SEQ ID NO: 850562 - DNA, 15 bp, Homo sapiens
ttacagtataatcta

SEQ ID NO: 850563 - DNA, 15 bp, Homo sapiens
tacagtataatctag

SEQ ID NO: 850564 - DNA, 15 bp, Homo sapiens
acagtataatctaga

SEQ ID NO: 850565 - DNA, 15 bp, Homo sapiens
cagtataatctagaa

SEQ ID NO: 850566 - DNA, 15 bp, Homo sapiens
agtataatctagaac

SEQ ID NO: 850567 - DNA, 15 bp, Homo sapiens
gtataatctagaaca

SEQ ID NO: 850568 - DNA, 15 bp, Homo sapiens
tataatctagaacaa

SEQ ID NO: 850569 - DNA, 15 bp, Homo sapiens
ataatctagaacaat

SEQ ID NO: 850570 - DNA, 15 bp, Homo sapiens
taatctagaacaatg

SEQ ID NO: 850571 - DNA, 15 bp, Homo sapiens
aatctagaacaatgt

SEQ ID NO: 850572 - DNA, 15 bp, Homo sapiens
atctagaacaatgtg

SEQ ID NO: 850573 - DNA, 15 bp, Homo sapiens
tctagaacaatgtgt

SEQ ID NO: 850574 - DNA, 15 bp, Homo sapiens
ctagaacaatgtgtc

SEQ ID NO: 850575 - DNA, 15 bp, Homo sapiens
tagaacaatgtgtct

SEQ ID NO: 850576 - DNA, 15 bp, Homo sapiens
agaacaatgtgtctt

SEQ ID NO: 850577 - DNA, 15 bp, Homo sapiens
gaacaatgtgtcttt

SEQ ID NO: 850578 - DNA, 15 bp, Homo sapiens
aacaatgtgtctttc

SEQ ID NO: 850579 - DNA, 15 bp, Homo sapiens
acaatgtgtctttct

SEQ ID NO: 850580 - DNA, 15 bp, Homo sapiens
caatgtgtctttcta

SEQ ID NO: 850581 - DNA, 15 bp, Homo sapiens
aatgtgtctttctat

SEQ ID NO: 850582 - DNA, 15 bp, Homo sapiens
atgtgtctttctata

SEQ ID NO: 850583 - DNA, 15 bp, Homo sapiens
tgtgtctttctatat

SEQ ID NO: 850584 - DNA, 15 bp, Homo sapiens
gtgtctttctatatg

SEQ ID NO: 850585 - DNA, 15 bp, Homo sapiens
tgtctttctatatga

SEQ ID NO: 850586 - DNA, 15 bp, Homo sapiens
gtctttctatatgat

SEQ ID NO: 850587 - DNA, 15 bp, Homo sapiens
tctttctatatgata

SEQ ID NO: 850588 - DNA, 15 bp, Homo sapiens
ctttctatatgatat

SEQ ID NO: 850589 - DNA, 15 bp, Homo sapiens
tttctatatgatata

SEQ ID NO: 850590 - DNA, 15 bp, Homo sapiens
ttctatatgatatat

SEQ ID NO: 850591 - DNA, 15 bp, Homo sapiens
tctatatgatatatg

SEQ ID NO: 850592 - DNA, 15 bp, Homo sapiens
ctatatgatatatga

SEQ ID NO: 850593 - DNA, 15 bp, Homo sapiens
tatatgatatatgac

SEQ ID NO: 850594 - DNA, 15 bp, Homo sapiens
atatgatatatgaca

SEQ ID NO: 850595 - DNA, 15 bp, Homo sapiens
tatgatatatgacat

SEQ ID NO: 850596 - DNA, 15 bp, Homo sapiens
atgatatatgacatt

SEQ ID NO: 850597 - DNA, 15 bp, Homo sapiens
tgatatatgacattt

SEQ ID NO: 850598 - DNA, 15 bp, Homo sapiens
gatatatgacatttt

SEQ ID NO: 850599 - DNA, 15 bp, Homo sapiens
atatatgacatttta

SEQ ID NO: 850600 - DNA, 15 bp, Homo sapiens
tatatgacattttaa

SEQ ID NO: 850601 - DNA, 15 bp, Homo sapiens
atatgacattttaat

SEQ ID NO: 850602 - DNA, 15 bp, Homo sapiens
tatgacattttaatg

SEQ ID NO: 850603 - DNA, 15 bp, Homo sapiens
atgacattttaatgc

SEQ ID NO: 850604 - DNA, 15 bp, Homo sapiens
tgacattttaatgcc

SEQ ID NO: 850605 - DNA, 15 bp, Homo sapiens
gacattttaatgcct

SEQ ID NO: 850606 - DNA, 15 bp, Homo sapiens
acattttaatgccta

SEQ ID NO: 850607 - DNA, 15 bp, Homo sapiens
cattttaatgcctaa

SEQ ID NO: 850608 - DNA, 15 bp, Homo sapiens
attttaatgcctaaa

SEQ ID NO: 850609 - DNA, 15 bp, Homo sapiens
ttttaatgcctaaaa

SEQ ID NO: 850610 - DNA, 15 bp, Homo sapiens
tttaatgcctaaaaa

SEQ ID NO: 850611 - DNA, 15 bp, Homo sapiens
ttaatgcctaaaaaa

SEQ ID NO: 850612 - DNA, 15 bp, Homo sapiens
taatgcctaaaaaaa

SEQ ID NO: 850613 - DNA, 15 bp, Homo sapiens
aatgcctaaaaaaac

SEQ ID NO: 850614 - DNA, 15 bp, Homo sapiens
atgcctaaaaaaact

SEQ ID NO: 850615 - DNA, 15 bp, Homo sapiens
tgcctaaaaaaactg

SEQ ID NO: 850616 - DNA, 15 bp, Homo sapiens
gcctaaaaaaactga

SEQ ID NO: 850617 - DNA, 15 bp, Homo sapiens
cctaaaaaaactgat

SEQ ID NO: 850618 - DNA, 15 bp, Homo sapiens
ctaaaaaaactgata

SEQ ID NO: 850619 - DNA, 15 bp, Homo sapiens
taaaaaaactgatat

SEQ ID NO: 850620 - DNA, 15 bp, Homo sapiens
aaaaaaactgatatg

SEQ ID NO: 850621 - DNA, 15 bp, Homo sapiens
aaaaaactgatatgt

SEQ ID NO: 850622 - DNA, 15 bp, Homo sapiens
aaaaactgatatgtc

SEQ ID NO: 850623 - DNA, 15 bp, Homo sapiens
aaaactgatatgtct

SEQ ID NO: 850624 - DNA, 15 bp, Homo sapiens
aaactgatatgtctt

SEQ ID NO: 850625 - DNA, 15 bp, Homo sapiens
aactgatatgtctta

SEQ ID NO: 850626 - DNA, 15 bp, Homo sapiens
actgatatgtcttag

SEQ ID NO: 850627 - DNA, 15 bp, Homo sapiens
ctgatatgtcttaga

SEQ ID NO: 850628 - DNA, 15 bp, Homo sapiens
tgatatgtcttagat

SEQ ID NO: 850629 - DNA, 15 bp, Homo sapiens
gatatgtcttagatg

SEQ ID NO: 850630 - DNA, 15 bp, Homo sapiens
atatgtcttagatga

SEQ ID NO: 850631 - DNA, 15 bp, Homo sapiens
tatgtcttagatgat

SEQ ID NO: 850632 - DNA, 15 bp, Homo sapiens
atgtcttagatgatt

SEQ ID NO: 850633 - DNA, 15 bp, Homo sapiens
tgtcttagatgattc

SEQ ID NO: 850634 - DNA, 15 bp, Homo sapiens
gtcttagatgattct

SEQ ID NO: 850635 - DNA, 15 bp, Homo sapiens
tcttagatgattcta

SEQ ID NO: 850636 - DNA, 15 bp, Homo sapiens
cttagatgattctag

SEQ ID NO: 850637 - DNA, 15 bp, Homo sapiens
ttagatgattctagt

SEQ ID NO: 850638 - DNA, 15 bp, Homo sapiens
tagatgattctagtc

SEQ ID NO: 850639 - DNA, 15 bp, Homo sapiens
agatgattctagtca

SEQ ID NO: 850640 - DNA, 15 bp, Homo sapiens
gatgattctagtcag

SEQ ID NO: 850641 - DNA, 15 bp, Homo sapiens
atgattctagtcagg

SEQ ID NO: 850642 - DNA, 15 bp, Homo sapiens
tgattctagtcagga

SEQ ID NO: 850643 - DNA, 15 bp, Homo sapiens
gattctagtcaggat

SEQ ID NO: 850644 - DNA, 15 bp, Homo sapiens
attctagtcaggatt

SEQ ID NO: 850645 - DNA, 15 bp, Homo sapiens
ttctagtcaggattt

SEQ ID NO: 850646 - DNA, 15 bp, Homo sapiens
tctagtcaggattta

SEQ ID NO: 850647 - DNA, 15 bp, Homo sapiens
ctagtcaggatttac

SEQ ID NO: 850648 - DNA, 15 bp, Homo sapiens
tagtcaggatttact

SEQ ID NO: 850649 - DNA, 15 bp, Homo sapiens
agtcaggatttactt

SEQ ID NO: 850650 - DNA, 15 bp, Homo sapiens
gtcaggatttacttc

SEQ ID NO: 850651 - DNA, 15 bp, Homo sapiens
tcaggatttacttct

SEQ ID NO: 850652 - DNA, 15 bp, Homo sapiens
caggatttacttcta

SEQ ID NO: 850653 - DNA, 15 bp, Homo sapiens
aggatttacttctag

SEQ ID NO: 850654 - DNA, 15 bp, Homo sapiens
ggatttacttctaga

SEQ ID NO: 850655 - DNA, 15 bp, Homo sapiens
gatttacttctagaa

SEQ ID NO: 850656 - DNA, 15 bp, Homo sapiens
atttacttctagaat

SEQ ID NO: 850657 - DNA, 15 bp, Homo sapiens
tttacttctagaata

SEQ ID NO: 850658 - DNA, 15 bp, Homo sapiens
ttacttctagaatag

SEQ ID NO: 850659 - DNA, 15 bp, Homo sapiens
tacttctagaataga

SEQ ID NO: 850660 - DNA, 15 bp, Homo sapiens
acttctagaatagat

SEQ ID NO: 850661 - DNA, 15 bp, Homo sapiens
cttctagaatagatt

SEQ ID NO: 850662 - DNA, 15 bp, Homo sapiens
ttctagaatagatta

SEQ ID NO: 850663 - DNA, 15 bp, Homo sapiens
tctagaatagattaa

SEQ ID NO: 850664 - DNA, 15 bp, Homo sapiens
ctagaatagattaaa

SEQ ID NO: 850665 - DNA, 15 bp, Homo sapiens
tagaatagattaaaa

SEQ ID NO: 850666 - DNA, 15 bp, Homo sapiens
agaatagattaaaat

SEQ ID NO: 850667 - DNA, 15 bp, Homo sapiens
gaatagattaaaatt

SEQ ID NO: 850668 - DNA, 15 bp, Homo sapiens
aatagattaaaattc

SEQ ID NO: 850669 - DNA, 15 bp, Homo sapiens
atagattaaaattct

SEQ ID NO: 850670 - DNA, 15 bp, Homo sapiens
tagattaaaattcta

SEQ ID NO: 850671 - DNA, 15 bp, Homo sapiens
agattaaaattctat

SEQ ID NO: 850672 - DNA, 15 bp, Homo sapiens
gattaaaattctatt

SEQ ID NO: 850673 - DNA, 15 bp, Homo sapiens
attaaaattctattt

SEQ ID NO: 850674 - DNA, 15 bp, Homo sapiens
ttaaaattctatttg

SEQ ID NO: 850675 - DNA, 15 bp, Homo sapiens
taaaattctatttga

SEQ ID NO: 850676 - DNA, 15 bp, Homo sapiens
aaaattctatttgag

SEQ ID NO: 850677 - DNA, 15 bp, Homo sapiens
aaattctatttgagg

SEQ ID NO: 850678 - DNA, 15 bp, Homo sapiens
aattctatttgagga

SEQ ID NO: 850679 - DNA, 15 bp, Homo sapiens
attctatttgaggag

SEQ ID NO: 850680 - DNA, 15 bp, Homo sapiens
ttctatttgaggaga

SEQ ID NO: 850681 - DNA, 15 bp, Homo sapiens
tctatttgaggagag

SEQ ID NO: 850682 - DNA, 15 bp, Homo sapiens
ctatttgaggagagt

SEQ ID NO: 850683 - DNA, 15 bp, Homo sapiens
tatttgaggagagtc

SEQ ID NO: 850684 - DNA, 15 bp, Homo sapiens
atttgaggagagtca

SEQ ID NO: 850685 - DNA, 15 bp, Homo sapiens
tttgaggagagtcaa

SEQ ID NO: 850686 - DNA, 15 bp, Homo sapiens
ttgaggagagtcaaa

SEQ ID NO: 850687 - DNA, 15 bp, Homo sapiens
tgaggagagtcaaat

SEQ ID NO: 850688 - DNA, 15 bp, Homo sapiens
gaggagagtcaaatt

SEQ ID NO: 850689 - DNA, 15 bp, Homo sapiens
aggagagtcaaatta

SEQ ID NO: 850690 - DNA, 15 bp, Homo sapiens
ggagagtcaaattaa

SEQ ID NO: 850691 - DNA, 15 bp, Homo sapiens
gagagtcaaattaat

SEQ ID NO: 850692 - DNA, 15 bp, Homo sapiens
agagtcaaattaatt

SEQ ID NO: 850693 - DNA, 15 bp, Homo sapiens
gagtcaaattaatta

SEQ ID NO: 850694 - DNA, 15 bp, Homo sapiens
agtcaaattaattat

SEQ ID NO: 850695 - DNA, 15 bp, Homo sapiens
gtcaaattaattatc

SEQ ID NO: 850696 - DNA, 15 bp, Homo sapiens
tcaaattaattatcg

SEQ ID NO: 850697 - DNA, 15 bp, Homo sapiens
caaattaattatcga

SEQ ID NO: 850698 - DNA, 15 bp, Homo sapiens
aaattaattatcgaa

SEQ ID NO: 850699 - DNA, 15 bp, Homo sapiens
aattaattatcgaat

SEQ ID NO: 850700 - DNA, 15 bp, Homo sapiens
attaattatcgaatt

SEQ ID NO: 850701 - DNA, 15 bp, Homo sapiens
ttaattatcgaattc

SEQ ID NO: 850702 - DNA, 15 bp, Homo sapiens
taattatcgaattct

SEQ ID NO: 850703 - DNA, 15 bp, Homo sapiens
aattatcgaattctc

SEQ ID NO: 850704 - DNA, 15 bp, Homo sapiens
attatcgaattctca

SEQ ID NO: 850705 - DNA, 15 bp, Homo sapiens
ttatcgaattctcag

SEQ ID NO: 850706 - DNA, 15 bp, Homo sapiens
tatcgaattctcagt

SEQ ID NO: 850707 - DNA, 15 bp, Homo sapiens
atcgaattctcagtt

SEQ ID NO: 850708 - DNA, 15 bp, Homo sapiens
tcgaattctcagttg

SEQ ID NO: 850709 - DNA, 15 bp, Homo sapiens
cgaattctcagttgt

SEQ ID NO: 850710 - DNA, 15 bp, Homo sapiens
gaattctcagttgtt

SEQ ID NO: 850711 - DNA, 15 bp, Homo sapiens
aattctcagttgtta

SEQ ID NO: 850712 - DNA, 15 bp, Homo sapiens
attctcagttgttat

SEQ ID NO: 850713 - DNA, 15 bp, Homo sapiens
ttctcagttgttatt

SEQ ID NO: 850714 - DNA, 15 bp, Homo sapiens
tctcagttgttatta

SEQ ID NO: 850715 - DNA, 15 bp, Homo sapiens
ctcagttgttattat

SEQ ID NO: 850716 - DNA, 15 bp, Homo sapiens
tcagttgttattatt

SEQ ID NO: 850717 - DNA, 15 bp, Homo sapiens
cagttgttattattg

SEQ ID NO: 850718 - DNA, 15 bp, Homo sapiens
agttgttattattgc

SEQ ID NO: 850719 - DNA, 15 bp, Homo sapiens
gttgttattattgct

SEQ ID NO: 850720 - DNA, 15 bp, Homo sapiens
ttgttattattgctg

SEQ ID NO: 850721 - DNA, 15 bp, Homo sapiens
tgttattattgctgt

SEQ ID NO: 850722 - DNA, 15 bp, Homo sapiens
gttattattgctgtt

SEQ ID NO: 850723 - DNA, 15 bp, Homo sapiens
ttattattgctgttt

SEQ ID NO: 850724 - DNA, 15 bp, Homo sapiens
tattattgctgtttt

SEQ ID NO: 850725 - DNA, 15 bp, Homo sapiens
attattgctgtttta

SEQ ID NO: 850726 - DNA, 15 bp, Homo sapiens
ttattgctgttttat

SEQ ID NO: 850727 - DNA, 15 bp, Homo sapiens
tattgctgttttatt

SEQ ID NO: 850728 - DNA, 15 bp, Homo sapiens
attgctgttttattt

SEQ ID NO: 850729 - DNA, 15 bp, Homo sapiens
ttgctgttttatttt

SEQ ID NO: 850730 - DNA, 15 bp, Homo sapiens
tgctgttttattttt

SEQ ID NO: 850731 - DNA, 15 bp, Homo sapiens
gctgttttattttta

SEQ ID NO: 850732 - DNA, 15 bp, Homo sapiens
ctgttttatttttag

SEQ ID NO: 850733 - DNA, 15 bp, Homo sapiens
tgttttatttttagt

SEQ ID NO: 850734 - DNA, 15 bp, Homo sapiens
gttttatttttagtg

SEQ ID NO: 850735 - DNA, 15 bp, Homo sapiens
ttttatttttagtga

SEQ ID NO: 850736 - DNA, 15 bp, Homo sapiens
tttatttttagtgaa

SEQ ID NO: 850737 - DNA, 15 bp, Homo sapiens
ttatttttagtgaaa

SEQ ID NO: 850738 - DNA, 15 bp, Homo sapiens
tatttttagtgaaac

SEQ ID NO: 850739 - DNA, 15 bp, Homo sapiens
atttttagtgaaaca

SEQ ID NO: 850740 - DNA, 15 bp, Homo sapiens
tttttagtgaaacag

SEQ ID NO: 850741 - DNA, 15 bp, Homo sapiens
ttttagtgaaacaga

SEQ ID NO: 850742 - DNA, 15 bp, Homo sapiens
tttagtgaaacagat

SEQ ID NO: 850743 - DNA, 15 bp, Homo sapiens
ttagtgaaacagatt

SEQ ID NO: 850744 - DNA, 15 bp, Homo sapiens
tagtgaaacagatta

SEQ ID NO: 850745 - DNA, 15 bp, Homo sapiens
agtgaaacagattag

SEQ ID NO: 850746 - DNA, 15 bp, Homo sapiens
gtgaaacagattagt

SEQ ID NO: 850747 - DNA, 15 bp, Homo sapiens
tgaaacagattagtc

SEQ ID NO: 850748 - DNA, 15 bp, Homo sapiens
gaaacagattagtct

SEQ ID NO: 850749 - DNA, 15 bp, Homo sapiens
aaacagattagtctt

SEQ ID NO: 850750 - DNA, 15 bp, Homo sapiens
aacagattagtctta

SEQ ID NO: 850751 - DNA, 15 bp, Homo sapiens
acagattagtcttaa

SEQ ID NO: 850752 - DNA, 15 bp, Homo sapiens
cagattagtcttaat

SEQ ID NO: 850753 - DNA, 15 bp, Homo sapiens
agattagtcttaatg

SEQ ID NO: 850754 - DNA, 15 bp, Homo sapiens
gattagtcttaatgt

SEQ ID NO: 850755 - DNA, 15 bp, Homo sapiens
attagtcttaatgta

SEQ ID NO: 850756 - DNA, 15 bp, Homo sapiens
ttagtcttaatgtaa

SEQ ID NO: 850757 - DNA, 15 bp, Homo sapiens
tagtcttaatgtaaa

SEQ ID NO: 850758 - DNA, 15 bp, Homo sapiens
agtcttaatgtaaac

SEQ ID NO: 850759 - DNA, 15 bp, Homo sapiens
gtcttaatgtaaaca

SEQ ID NO: 850760 - DNA, 15 bp, Homo sapiens
tcttaatgtaaacac

SEQ ID NO: 850761 - DNA, 15 bp, Homo sapiens
cttaatgtaaacact

SEQ ID NO: 850762 - DNA, 15 bp, Homo sapiens
ttaatgtaaacactt

SEQ ID NO: 850763 - DNA, 15 bp, Homo sapiens
taatgtaaacacttg

SEQ ID NO: 850764 - DNA, 15 bp, Homo sapiens
aatgtaaacacttga

SEQ ID NO: 850765 - DNA, 15 bp, Homo sapiens
atgtaaacacttgag

SEQ ID NO: 850766 - DNA, 15 bp, Homo sapiens
tgtaaacacttgaga

SEQ ID NO: 850767 - DNA, 15 bp, Homo sapiens
gtaaacacttgagaa

SEQ ID NO: 850768 - DNA, 15 bp, Homo sapiens
taaacacttgagaaa

SEQ ID NO: 850769 - DNA, 15 bp, Homo sapiens
aaacacttgagaaat

SEQ ID NO: 850770 - DNA, 15 bp, Homo sapiens
aacacttgagaaata

SEQ ID NO: 850771 - DNA, 15 bp, Homo sapiens
acacttgagaaataa

SEQ ID NO: 850772 - DNA, 15 bp, Homo sapiens
cacttgagaaataaa

SEQ ID NO: 850773 - DNA, 15 bp, Homo sapiens
acttgagaaataaat

SEQ ID NO: 850774 - DNA, 15 bp, Homo sapiens
cttgagaaataaatt

SEQ ID NO: 850775 - DNA, 15 bp, Homo sapiens
ttgagaaataaattg

SEQ ID NO: 850776 - DNA, 15 bp, Homo sapiens
tgagaaataaattga

SEQ ID NO: 850777 - DNA, 15 bp, Homo sapiens
gagaaataaattgat

SEQ ID NO: 850778 - DNA, 15 bp, Homo sapiens
agaaataaattgatg

SEQ ID NO: 850779 - DNA, 15 bp, Homo sapiens
gaaataaattgatgg

SEQ ID NO: 850780 - DNA, 15 bp, Homo sapiens
aaataaattgatggt

SEQ ID NO: 850781 - DNA, 15 bp, Homo sapiens
aataaattgatggtc

SEQ ID NO: 850782 - DNA, 15 bp, Homo sapiens
ataaattgatggtca

SEQ ID NO: 850783 - DNA, 15 bp, Homo sapiens
taaattgatggtcaa

SEQ ID NO: 850784 - DNA, 15 bp, Homo sapiens
aaattgatggtcaac

SEQ ID NO: 850785 - DNA, 15 bp, Homo sapiens
aattgatggtcaacc

SEQ ID NO: 850786 - DNA, 15 bp, Homo sapiens
attgatggtcaacct

SEQ ID NO: 850787 - DNA, 15 bp, Homo sapiens
ttgatggtcaaccta

SEQ ID NO: 850788 - DNA, 15 bp, Homo sapiens
tgatggtcaacctaa

SEQ ID NO: 850789 - DNA, 15 bp, Homo sapiens
gatggtcaacctaaa

SEQ ID NO: 850790 - DNA, 15 bp, Homo sapiens
atggtcaacctaaaa

SEQ ID NO: 850791 - DNA, 15 bp, Homo sapiens
tggtcaacctaaaat

SEQ ID NO: 850792 - DNA, 15 bp, Homo sapiens
ggtcaacctaaaatg

SEQ ID NO: 850793 - DNA, 15 bp, Homo sapiens
gtcaacctaaaatgt

SEQ ID NO: 850794 - DNA, 15 bp, Homo sapiens
tcaacctaaaatgta

SEQ ID NO: 850795 - DNA, 15 bp, Homo sapiens
caacctaaaatgtaa

SEQ ID NO: 850796 - DNA, 15 bp, Homo sapiens
aacctaaaatgtaaa

SEQ ID NO: 850797 - DNA, 15 bp, Homo sapiens
acctaaaatgtaaaa

SEQ ID NO: 850798 - DNA, 15 bp, Homo sapiens
cctaaaatgtaaaaa

SEQ ID NO: 850799 - DNA, 15 bp, Homo sapiens
ctaaaatgtaaaaaa

SEQ ID NO: 850800 - DNA, 15 bp, Homo sapiens
taaaatgtaaaaaag

SEQ ID NO: 850801 - DNA, 15 bp, Homo sapiens
aaaatgtaaaaaaga

SEQ ID NO: 850802 - DNA, 15 bp, Homo sapiens
aaatgtaaaaaagaa

SEQ ID NO: 850803 - DNA, 15 bp, Homo sapiens
aatgtaaaaaagaaa

SEQ ID NO: 850804 - DNA, 15 bp, Homo sapiens
atgtaaaaaagaaat

SEQ ID NO: 850805 - DNA, 15 bp, Homo sapiens
tgtaaaaaagaaatt

SEQ ID NO: 850806 - DNA, 15 bp, Homo sapiens
gtaaaaaagaaatta

SEQ ID NO: 850807 - DNA, 15 bp, Homo sapiens
taaaaaagaaattaa

SEQ ID NO: 850808 - DNA, 15 bp, Homo sapiens
aaaaaagaaattaat

SEQ ID NO: 850809 - DNA, 15 bp, Homo sapiens
aaaaagaaattaata

SEQ ID NO: 850810 - DNA, 15 bp, Homo sapiens
aaaagaaattaatag

SEQ ID NO: 850811 - DNA, 15 bp, Homo sapiens
aaagaaattaataga

SEQ ID NO: 850812 - DNA, 15 bp, Homo sapiens
aagaaattaatagaa

SEQ ID NO: 850813 - DNA, 15 bp, Homo sapiens
agaaattaatagaaa

SEQ ID NO: 850814 - DNA, 15 bp, Homo sapiens
gaaattaatagaaaa

SEQ ID NO: 850815 - DNA, 15 bp, Homo sapiens
aaattaatagaaaat

SEQ ID NO: 850816 - DNA, 15 bp, Homo sapiens
aattaatagaaaatt

SEQ ID NO: 850817 - DNA, 15 bp, Homo sapiens
attaatagaaaattt

SEQ ID NO: 850818 - DNA, 15 bp, Homo sapiens
ttaatagaaaattta

SEQ ID NO: 850819 - DNA, 15 bp, Homo sapiens
taatagaaaatttaa

SEQ ID NO: 850820 - DNA, 15 bp, Homo sapiens
aatagaaaatttaaa

SEQ ID NO: 850821 - DNA, 15 bp, Homo sapiens
atagaaaatttaaag

SEQ ID NO: 850822 - DNA, 15 bp, Homo sapiens
tagaaaatttaaaga

SEQ ID NO: 850823 - DNA, 15 bp, Homo sapiens
agaaaatttaaagag

SEQ ID NO: 850824 - DNA, 15 bp, Homo sapiens
gaaaatttaaagagc

SEQ ID NO: 850825 - DNA, 15 bp, Homo sapiens
aaaatttaaagagca

SEQ ID NO: 850826 - DNA, 15 bp, Homo sapiens
aaatttaaagagcaa

SEQ ID NO: 850827 - DNA, 15 bp, Homo sapiens
aatttaaagagcaac

SEQ ID NO: 850828 - DNA, 15 bp, Homo sapiens
atttaaagagcaaca

SEQ ID NO: 850829 - DNA, 15 bp, Homo sapiens
tttaaagagcaacaa

SEQ ID NO: 850830 - DNA, 15 bp, Homo sapiens
ttaaagagcaacaaa

SEQ ID NO: 850831 - DNA, 15 bp, Homo sapiens
taaagagcaacaaag

SEQ ID NO: 850832 - DNA, 15 bp, Homo sapiens
aaagagcaacaaagc

SEQ ID NO: 850833 - DNA, 15 bp, Homo sapiens
aagagcaacaaagct

SEQ ID NO: 850834 - DNA, 15 bp, Homo sapiens
agagcaacaaagctc

SEQ ID NO: 850835 - DNA, 15 bp, Homo sapiens
gagcaacaaagctct

SEQ ID NO: 850836 - DNA, 15 bp, Homo sapiens
agcaacaaagctctg

SEQ ID NO: 850837 - DNA, 15 bp, Homo sapiens
gcaacaaagctctga

SEQ ID NO: 850838 - DNA, 15 bp, Homo sapiens
caacaaagctctgac

SEQ ID NO: 850839 - DNA, 15 bp, Homo sapiens
aacaaagctctgaca

SEQ ID NO: 850840 - DNA, 15 bp, Homo sapiens
acaaagctctgacat

SEQ ID NO: 850841 - DNA, 15 bp, Homo sapiens
caaagctctgacatt

SEQ ID NO: 850842 - DNA, 15 bp, Homo sapiens
aaagctctgacattt

SEQ ID NO: 850843 - DNA, 15 bp, Homo sapiens
aagctctgacattta

SEQ ID NO: 850844 - DNA, 15 bp, Homo sapiens
agctctgacatttaa

SEQ ID NO: 850845 - DNA, 15 bp, Homo sapiens
gctctgacatttaaa

SEQ ID NO: 850846 - DNA, 15 bp, Homo sapiens
ctctgacatttaaaa

SEQ ID NO: 850847 - DNA, 15 bp, Homo sapiens
tctgacatttaaaag

SEQ ID NO: 850848 - DNA, 15 bp, Homo sapiens
ctgacatttaaaaga

SEQ ID NO: 850849 - DNA, 15 bp, Homo sapiens
tgacatttaaaagaa

SEQ ID NO: 850850 - DNA, 15 bp, Homo sapiens
gacatttaaaagaaa

SEQ ID NO: 850851 - DNA, 15 bp, Homo sapiens
acatttaaaagaaat

SEQ ID NO: 850852 - DNA, 15 bp, Homo sapiens
catttaaaagaaatg

SEQ ID NO: 850853 - DNA, 15 bp, Homo sapiens
atttaaaagaaatga

SEQ ID NO: 850854 - DNA, 15 bp, Homo sapiens
tttaaaagaaatgaa

SEQ ID NO: 850855 - DNA, 15 bp, Homo sapiens
ttaaaagaaatgaag

SEQ ID NO: 850856 - DNA, 15 bp, Homo sapiens
taaaagaaatgaagt

SEQ ID NO: 850857 - DNA, 15 bp, Homo sapiens
aaaagaaatgaagta

SEQ ID NO: 850858 - DNA, 15 bp, Homo sapiens
aaagaaatgaagtac

SEQ ID NO: 850859 - DNA, 15 bp, Homo sapiens
aagaaatgaagtaca

SEQ ID NO: 850860 - DNA, 15 bp, Homo sapiens
agaaatgaagtacaa

SEQ ID NO: 850861 - DNA, 15 bp, Homo sapiens
gaaatgaagtacaaa

SEQ ID NO: 850862 - DNA, 15 bp, Homo sapiens
aaatgaagtacaaat

SEQ ID NO: 850863 - DNA, 15 bp, Homo sapiens
aatgaagtacaaatc

SEQ ID NO: 850864 - DNA, 15 bp, Homo sapiens
atgaagtacaaatct

SEQ ID NO: 850865 - DNA, 15 bp, Homo sapiens
tgaagtacaaatctc

SEQ ID NO: 850866 - DNA, 15 bp, Homo sapiens
gaagtacaaatctct

SEQ ID NO: 850867 - DNA, 15 bp, Homo sapiens
aagtacaaatctcta

SEQ ID NO: 850868 - DNA, 15 bp, Homo sapiens
agtacaaatctctag

SEQ ID NO: 850869 - DNA, 15 bp, Homo sapiens
gtacaaatctctagg

SEQ ID NO: 850870 - DNA, 15 bp, Homo sapiens
tacaaatctctaggg

SEQ ID NO: 850871 - DNA, 15 bp, Homo sapiens
acaaatctctaggga

SEQ ID NO: 850872 - DNA, 15 bp, Homo sapiens
caaatctctagggac

SEQ ID NO: 850873 - DNA, 15 bp, Homo sapiens
aaatctctagggacc

SEQ ID NO: 850874 - DNA, 15 bp, Homo sapiens
aatctctagggacct

SEQ ID NO: 850875 - DNA, 15 bp, Homo sapiens
atctctagggacctt

SEQ ID NO: 850876 - DNA, 15 bp, Homo sapiens
tctctagggacctta

SEQ ID NO: 850877 - DNA, 15 bp, Homo sapiens
ctctagggaccttaa

SEQ ID NO: 850878 - DNA, 15 bp, Homo sapiens
tctagggaccttaaa

SEQ ID NO: 850879 - DNA, 15 bp, Homo sapiens
ctagggaccttaaag

SEQ ID NO: 850880 - DNA, 15 bp, Homo sapiens
tagggaccttaaaga

SEQ ID NO: 850881 - DNA, 15 bp, Homo sapiens
agggaccttaaagat

SEQ ID NO: 850882 - DNA, 15 bp, Homo sapiens
gggaccttaaagatc

SEQ ID NO: 850883 - DNA, 15 bp, Homo sapiens
ggaccttaaagatca

SEQ ID NO: 850884 - DNA, 15 bp, Homo sapiens
gaccttaaagatcat

SEQ ID NO: 850885 - DNA, 15 bp, Homo sapiens
accttaaagatcatc

SEQ ID NO: 850886 - DNA, 15 bp, Homo sapiens
ccttaaagatcatct

SEQ ID NO: 850887 - DNA, 15 bp, Homo sapiens
cttaaagatcatcta

SEQ ID NO: 850888 - DNA, 15 bp, Homo sapiens
ttaaagatcatctaa

SEQ ID NO: 850889 - DNA, 15 bp, Homo sapiens
taaagatcatctaat

SEQ ID NO: 850890 - DNA, 15 bp, Homo sapiens
aaagatcatctaata

SEQ ID NO: 850891 - DNA, 15 bp, Homo sapiens
aagatcatctaataa

SEQ ID NO: 850892 - DNA, 15 bp, Homo sapiens
agatcatctaataat

SEQ ID NO: 850893 - DNA, 15 bp, Homo sapiens
gatcatctaataatt

SEQ ID NO: 850894 - DNA, 15 bp, Homo sapiens
atcatctaataattt

SEQ ID NO: 850895 - DNA, 15 bp, Homo sapiens
tcatctaataatttc

SEQ ID NO: 850896 - DNA, 15 bp, Homo sapiens
catctaataatttcc

SEQ ID NO: 850897 - DNA, 15 bp, Homo sapiens
atctaataatttcct

SEQ ID NO: 850898 - DNA, 15 bp, Homo sapiens
tctaataatttcctc

SEQ ID NO: 850899 - DNA, 15 bp, Homo sapiens
ctaataatttcctca

SEQ ID NO: 850900 - DNA, 15 bp, Homo sapiens
taataatttcctcat

SEQ ID NO: 850901 - DNA, 15 bp, Homo sapiens
aataatttcctcatt

SEQ ID NO: 850902 - DNA, 15 bp, Homo sapiens
ataatttcctcattt

SEQ ID NO: 850903 - DNA, 15 bp, Homo sapiens
taatttcctcatttt

SEQ ID NO: 850904 - DNA, 15 bp, Homo sapiens
aatttcctcattttc

SEQ ID NO: 850905 - DNA, 15 bp, Homo sapiens
atttcctcattttct

SEQ ID NO: 850906 - DNA, 15 bp, Homo sapiens
tttcctcattttcta

SEQ ID NO: 850907 - DNA, 15 bp, Homo sapiens
ttcctcattttctag

SEQ ID NO: 850908 - DNA, 15 bp, Homo sapiens
tcctcattttctaga

SEQ ID NO: 850909 - DNA, 15 bp, Homo sapiens
cctcattttctagat

SEQ ID NO: 850910 - DNA, 15 bp, Homo sapiens
ctcattttctagata

SEQ ID NO: 850911 - DNA, 15 bp, Homo sapiens
tcattttctagataa

SEQ ID NO: 850912 - DNA, 15 bp, Homo sapiens
cattttctagataaa

SEQ ID NO: 850913 - DNA, 15 bp, Homo sapiens
attttctagataaat

SEQ ID NO: 850914 - DNA, 15 bp, Homo sapiens
ttttctagataaata

SEQ ID NO: 850915 - DNA, 15 bp, Homo sapiens
tttctagataaataa

SEQ ID NO: 850916 - DNA, 15 bp, Homo sapiens
ttctagataaataaa

SEQ ID NO: 850917 - DNA, 15 bp, Homo sapiens
tctagataaataaac

SEQ ID NO: 850918 - DNA, 15 bp, Homo sapiens
ctagataaataaact

SEQ ID NO: 850919 - DNA, 15 bp, Homo sapiens
tagataaataaactg

SEQ ID NO: 850920 - DNA, 15 bp, Homo sapiens
agataaataaactga

SEQ ID NO: 850921 - DNA, 15 bp, Homo sapiens
gataaataaactgag

SEQ ID NO: 850922 - DNA, 15 bp, Homo sapiens
ataaataaactgaga

SEQ ID NO: 850923 - DNA, 15 bp, Homo sapiens
taaataaactgagag

SEQ ID NO: 850924 - DNA, 15 bp, Homo sapiens
aaataaactgagaga

SEQ ID NO: 850925 - DNA, 15 bp, Homo sapiens
aataaactgagagac

SEQ ID NO: 850926 - DNA, 15 bp, Homo sapiens
ataaactgagagacc

SEQ ID NO: 850927 - DNA, 15 bp, Homo sapiens
taaactgagagaccc

SEQ ID NO: 850928 - DNA, 15 bp, Homo sapiens
aaactgagagacccc

SEQ ID NO: 850929 - DNA, 15 bp, Homo sapiens
aactgagagaccccg

SEQ ID NO: 850930 - DNA, 15 bp, Homo sapiens
actgagagaccccga

SEQ ID NO: 850931 - DNA, 15 bp, Homo sapiens
ctgagagaccccgag

SEQ ID NO: 850932 - DNA, 15 bp, Homo sapiens
tgagagaccccgagg

SEQ ID NO: 850933 - DNA, 15 bp, Homo sapiens
gagagaccccgagga

SEQ ID NO: 850934 - DNA, 15 bp, Homo sapiens
agagaccccgaggat

SEQ ID NO: 850935 - DNA, 15 bp, Homo sapiens
gagaccccgaggata

SEQ ID NO: 850936 - DNA, 15 bp, Homo sapiens
agaccccgaggataa

SEQ ID NO: 850937 - DNA, 15 bp, Homo sapiens
gaccccgaggataaa

SEQ ID NO: 850938 - DNA, 15 bp, Homo sapiens
accccgaggataaat

SEQ ID NO: 850939 - DNA, 15 bp, Homo sapiens
ccccgaggataaatg

SEQ ID NO: 850940 - DNA, 15 bp, Homo sapiens
cccgaggataaatga

SEQ ID NO: 850941 - DNA, 15 bp, Homo sapiens
ccgaggataaatgat

SEQ ID NO: 850942 - DNA, 15 bp, Homo sapiens
cgaggataaatgatt

SEQ ID NO: 850943 - DNA, 15 bp, Homo sapiens
gaggataaatgattt

SEQ ID NO: 850944 - DNA, 15 bp, Homo sapiens
aggataaatgatttg

SEQ ID NO: 850945 - DNA, 15 bp, Homo sapiens
ggataaatgatttgc

SEQ ID NO: 850946 - DNA, 15 bp, Homo sapiens
gataaatgatttgct

SEQ ID NO: 850947 - DNA, 15 bp, Homo sapiens
ataaatgatttgctc

SEQ ID NO: 850948 - DNA, 15 bp, Homo sapiens
taaatgatttgctca

SEQ ID NO: 850949 - DNA, 15 bp, Homo sapiens
aaatgatttgctcaa

SEQ ID NO: 850950 - DNA, 15 bp, Homo sapiens
aatgatttgctcaaa

SEQ ID NO: 850951 - DNA, 15 bp, Homo sapiens
atgatttgctcaaag

SEQ ID NO: 850952 - DNA, 15 bp, Homo sapiens
tgatttgctcaaagt

SEQ ID NO: 850953 - DNA, 15 bp, Homo sapiens
gatttgctcaaagtc

SEQ ID NO: 850954 - DNA, 15 bp, Homo sapiens
atttgctcaaagtca

SEQ ID NO: 850955 - DNA, 15 bp, Homo sapiens
tttgctcaaagtcaa

SEQ ID NO: 850956 - DNA, 15 bp, Homo sapiens
ttgctcaaagtcaaa

SEQ ID NO: 850957 - DNA, 15 bp, Homo sapiens
tgctcaaagtcaaat

SEQ ID NO: 850958 - DNA, 15 bp, Homo sapiens
gctcaaagtcaaata

SEQ ID NO: 850959 - DNA, 15 bp, Homo sapiens
ctcaaagtcaaatat

SEQ ID NO: 850960 - DNA, 15 bp, Homo sapiens
tcaaagtcaaatatc

SEQ ID NO: 850961 - DNA, 15 bp, Homo sapiens
caaagtcaaatatct

SEQ ID NO: 850962 - DNA, 15 bp, Homo sapiens
aaagtcaaatatcta

SEQ ID NO: 850963 - DNA, 15 bp, Homo sapiens
aagtcaaatatctac

SEQ ID NO: 850964 - DNA, 15 bp, Homo sapiens
agtcaaatatctact

SEQ ID NO: 850965 - DNA, 15 bp, Homo sapiens
gtcaaatatctactt

SEQ ID NO: 850966 - DNA, 15 bp, Homo sapiens
tcaaatatctactta

SEQ ID NO: 850967 - DNA, 15 bp, Homo sapiens
caaatatctacttaa

SEQ ID NO: 850968 - DNA, 15 bp, Homo sapiens
aaatatctacttaat

SEQ ID NO: 850969 - DNA, 15 bp, Homo sapiens
aatatctacttaata

SEQ ID NO: 850970 - DNA, 15 bp, Homo sapiens
atatctacttaatat

SEQ ID NO: 850971 - DNA, 15 bp, Homo sapiens
tatctacttaatata

SEQ ID NO: 850972 - DNA, 15 bp, Homo sapiens
atctacttaatatag

SEQ ID NO: 850973 - DNA, 15 bp, Homo sapiens
tctacttaatatagg

SEQ ID NO: 850974 - DNA, 15 bp, Homo sapiens
ctacttaatatagga

SEQ ID NO: 850975 - DNA, 15 bp, Homo sapiens
tacttaatataggaa

SEQ ID NO: 850976 - DNA, 15 bp, Homo sapiens
acttaatataggaaa

SEQ ID NO: 850977 - DNA, 15 bp, Homo sapiens
cttaatataggaaat

SEQ ID NO: 850978 - DNA, 15 bp, Homo sapiens
ttaatataggaaatt

SEQ ID NO: 850979 - DNA, 15 bp, Homo sapiens
taatataggaaattt

SEQ ID NO: 850980 - DNA, 15 bp, Homo sapiens
aatataggaaattta

SEQ ID NO: 850981 - DNA, 15 bp, Homo sapiens
atataggaaatttaa

SEQ ID NO: 850982 - DNA, 15 bp, Homo sapiens
tataggaaatttaat

SEQ ID NO: 850983 - DNA, 15 bp, Homo sapiens
ataggaaatttaatt

SEQ ID NO: 850984 - DNA, 15 bp, Homo sapiens
taggaaatttaattt

SEQ ID NO: 850985 - DNA, 15 bp, Homo sapiens
aggaaatttaatttc

SEQ ID NO: 850986 - DNA, 15 bp, Homo sapiens
ggaaatttaatttca

SEQ ID NO: 850987 - DNA, 15 bp, Homo sapiens
gaaatttaatttcat

SEQ ID NO: 850988 - DNA, 15 bp, Homo sapiens
aaatttaatttcatt

SEQ ID NO: 850989 - DNA, 15 bp, Homo sapiens
aatttaatttcattc

SEQ ID NO: 850990 - DNA, 15 bp, Homo sapiens
atttaatttcattct

SEQ ID NO: 850991 - DNA, 15 bp, Homo sapiens
tttaatttcattctc

SEQ ID NO: 850992 - DNA, 15 bp, Homo sapiens
ttaatttcattctca

SEQ ID NO: 850993 - DNA, 15 bp, Homo sapiens
taatttcattctcag

SEQ ID NO: 850994 - DNA, 15 bp, Homo sapiens
aatttcattctcagt

SEQ ID NO: 850995 - DNA, 15 bp, Homo sapiens
atttcattctcagtc

SEQ ID NO: 850996 - DNA, 15 bp, Homo sapiens
tttcattctcagtct

SEQ ID NO: 850997 - DNA, 15 bp, Homo sapiens
ttcattctcagtctg

SEQ ID NO: 850998 - DNA, 15 bp, Homo sapiens
tcattctcagtctgt

SEQ ID NO: 850999 - DNA, 15 bp, Homo sapiens
cattctcagtctgtt

SEQ ID NO: 851000 - DNA, 15 bp, Homo sapiens
attctcagtctgtta

SEQ ID NO: 851001 - DNA, 15 bp, Homo sapiens
ttctcagtctgttaa

SEQ ID NO: 851002 - DNA, 15 bp, Homo sapiens
tctcagtctgttaac

SEQ ID NO: 851003 - DNA, 15 bp, Homo sapiens
ctcagtctgttaaca

SEQ ID NO: 851004 - DNA, 15 bp, Homo sapiens
tcagtctgttaacat

SEQ ID NO: 851005 - DNA, 15 bp, Homo sapiens
cagtctgttaacatg

SEQ ID NO: 851006 - DNA, 15 bp, Homo sapiens
agtctgttaacatgc

SEQ ID NO: 851007 - DNA, 15 bp, Homo sapiens
gtctgttaacatgca

SEQ ID NO: 851008 - DNA, 15 bp, Homo sapiens
tctgttaacatgcaa

SEQ ID NO: 851009 - DNA, 15 bp, Homo sapiens
ctgttaacatgcaac

SEQ ID NO: 851010 - DNA, 15 bp, Homo sapiens
tgttaacatgcaact

SEQ ID NO: 851011 - DNA, 15 bp, Homo sapiens
gttaacatgcaactt

SEQ ID NO: 851012 - DNA, 15 bp, Homo sapiens
ttaacatgcaacttt

SEQ ID NO: 851013 - DNA, 15 bp, Homo sapiens
taacatgcaactttt

SEQ ID NO: 851014 - DNA, 15 bp, Homo sapiens
aacatgcaacttttc

SEQ ID NO: 851015 - DNA, 15 bp, Homo sapiens
acatgcaacttttca

SEQ ID NO: 851016 - DNA, 15 bp, Homo sapiens
catgcaacttttcaa

SEQ ID NO: 851017 - DNA, 15 bp, Homo sapiens
atgcaacttttcaat

SEQ ID NO: 851018 - DNA, 15 bp, Homo sapiens
tgcaacttttcaata

SEQ ID NO: 851019 - DNA, 15 bp, Homo sapiens
gcaacttttcaatat

SEQ ID NO: 851020 - DNA, 15 bp, Homo sapiens
caacttttcaatata

SEQ ID NO: 851021 - DNA, 15 bp, Homo sapiens
aacttttcaatatag

SEQ ID NO: 851022 - DNA, 15 bp, Homo sapiens
acttttcaatatagc

SEQ ID NO: 851023 - DNA, 15 bp, Homo sapiens
cttttcaatatagca

SEQ ID NO: 851024 - DNA, 15 bp, Homo sapiens
ttttcaatatagcat

SEQ ID NO: 851025 - DNA, 15 bp, Homo sapiens
tttcaatatagcatg

SEQ ID NO: 851026 - DNA, 15 bp, Homo sapiens
ttcaatatagcatgt

SEQ ID NO: 851027 - DNA, 15 bp, Homo sapiens
tcaatatagcatgtt

SEQ ID NO: 851028 - DNA, 15 bp, Homo sapiens
caatatagcatgtta

SEQ ID NO: 851029 - DNA, 15 bp, Homo sapiens
aatatagcatgttat

SEQ ID NO: 851030 - DNA, 15 bp, Homo sapiens
atatagcatgttatt

SEQ ID NO: 851031 - DNA, 15 bp, Homo sapiens
tatagcatgttattt

SEQ ID NO: 851032 - DNA, 15 bp, Homo sapiens
atagcatgttatttc

SEQ ID NO: 851033 - DNA, 15 bp, Homo sapiens
tagcatgttatttca

SEQ ID NO: 851034 - DNA, 15 bp, Homo sapiens
agcatgttatttcat

SEQ ID NO: 851035 - DNA, 15 bp, Homo sapiens
gcatgttatttcatg

SEQ ID NO: 851036 - DNA, 15 bp, Homo sapiens
catgttatttcatgc

SEQ ID NO: 851037 - DNA, 15 bp, Homo sapiens
atgttatttcatgct

SEQ ID NO: 851038 - DNA, 15 bp, Homo sapiens
tgttatttcatgcta

SEQ ID NO: 851039 - DNA, 15 bp, Homo sapiens
gttatttcatgctat

SEQ ID NO: 851040 - DNA, 15 bp, Homo sapiens
ttatttcatgctatc

SEQ ID NO: 851041 - DNA, 15 bp, Homo sapiens
tatttcatgctatca

SEQ ID NO: 851042 - DNA, 15 bp, Homo sapiens
atttcatgctatcag

SEQ ID NO: 851043 - DNA, 15 bp, Homo sapiens
tttcatgctatcaga

SEQ ID NO: 851044 - DNA, 15 bp, Homo sapiens
ttcatgctatcagaa

SEQ ID NO: 851045 - DNA, 15 bp, Homo sapiens
tcatgctatcagaat

SEQ ID NO: 851046 - DNA, 15 bp, Homo sapiens
catgctatcagaatt

SEQ ID NO: 851047 - DNA, 15 bp, Homo sapiens
atgctatcagaattc

SEQ ID NO: 851048 - DNA, 15 bp, Homo sapiens
tgctatcagaattca

SEQ ID NO: 851049 - DNA, 15 bp, Homo sapiens
gctatcagaattcac

SEQ ID NO: 851050 - DNA, 15 bp, Homo sapiens
ctatcagaattcaca

SEQ ID NO: 851051 - DNA, 15 bp, Homo sapiens
tatcagaattcacaa

SEQ ID NO: 851052 - DNA, 15 bp, Homo sapiens
atcagaattcacaag

SEQ ID NO: 851053 - DNA, 15 bp, Homo sapiens
tcagaattcacaagg

SEQ ID NO: 851054 - DNA, 15 bp, Homo sapiens
cagaattcacaaggt

SEQ ID NO: 851055 - DNA, 15 bp, Homo sapiens
agaattcacaaggta

SEQ ID NO: 851056 - DNA, 15 bp, Homo sapiens
gaattcacaaggtac

SEQ ID NO: 851057 - DNA, 15 bp, Homo sapiens
aattcacaaggtacc

SEQ ID NO: 851058 - DNA, 15 bp, Homo sapiens
attcacaaggtacca

SEQ ID NO: 851059 - DNA, 15 bp, Homo sapiens
ttcacaaggtaccaa

SEQ ID NO: 851060 - DNA, 15 bp, Homo sapiens
tcacaaggtaccaat

SEQ ID NO: 851061 - DNA, 15 bp, Homo sapiens
cacaaggtaccaatt

SEQ ID NO: 851062 - DNA, 15 bp, Homo sapiens
acaaggtaccaattt

SEQ ID NO: 851063 - DNA, 15 bp, Homo sapiens
caaggtaccaattta

SEQ ID NO: 851064 - DNA, 15 bp, Homo sapiens
aaggtaccaatttaa

SEQ ID NO: 851065 - DNA, 15 bp, Homo sapiens
aggtaccaatttaat

SEQ ID NO: 851066 - DNA, 15 bp, Homo sapiens
ggtaccaatttaatt

SEQ ID NO: 851067 - DNA, 15 bp, Homo sapiens
gtaccaatttaatta

SEQ ID NO: 851068 - DNA, 15 bp, Homo sapiens
taccaatttaattac

SEQ ID NO: 851069 - DNA, 15 bp, Homo sapiens
accaatttaattact

SEQ ID NO: 851070 - DNA, 15 bp, Homo sapiens
ccaatttaattacta

SEQ ID NO: 851071 - DNA, 15 bp, Homo sapiens
caatttaattactac

SEQ ID NO: 851072 - DNA, 15 bp, Homo sapiens
aatttaattactaca

SEQ ID NO: 851073 - DNA, 15 bp, Homo sapiens
atttaattactacag

SEQ ID NO: 851074 - DNA, 15 bp, Homo sapiens
tttaattactacaga

SEQ ID NO: 851075 - DNA, 15 bp, Homo sapiens
ttaattactacagag

SEQ ID NO: 851076 - DNA, 15 bp, Homo sapiens
taattactacagagt

SEQ ID NO: 851077 - DNA, 15 bp, Homo sapiens
aattactacagagta

SEQ ID NO: 851078 - DNA, 15 bp, Homo sapiens
attactacagagtac

SEQ ID NO: 851079 - DNA, 15 bp, Homo sapiens
ttactacagagtact

SEQ ID NO: 851080 - DNA, 15 bp, Homo sapiens
tactacagagtactt

SEQ ID NO: 851081 - DNA, 15 bp, Homo sapiens
actacagagtactta

SEQ ID NO: 851082 - DNA, 15 bp, Homo sapiens
ctacagagtacttat

SEQ ID NO: 851083 - DNA, 15 bp, Homo sapiens
tacagagtacttata

SEQ ID NO: 851084 - DNA, 15 bp, Homo sapiens
acagagtacttatag

SEQ ID NO: 851085 - DNA, 15 bp, Homo sapiens
cagagtacttataga

SEQ ID NO: 851086 - DNA, 15 bp, Homo sapiens
agagtacttatagaa

SEQ ID NO: 851087 - DNA, 15 bp, Homo sapiens
gagtacttatagaat

SEQ ID NO: 851088 - DNA, 15 bp, Homo sapiens
agtacttatagaatc

SEQ ID NO: 851089 - DNA, 15 bp, Homo sapiens
gtacttatagaatca

SEQ ID NO: 851090 - DNA, 15 bp, Homo sapiens
tacttatagaatcat

SEQ ID NO: 851091 - DNA, 15 bp, Homo sapiens
acttatagaatcatt

SEQ ID NO: 851092 - DNA, 15 bp, Homo sapiens
cttatagaatcattt

SEQ ID NO: 851093 - DNA, 15 bp, Homo sapiens
ttatagaatcattta

SEQ ID NO: 851094 - DNA, 15 bp, Homo sapiens
tatagaatcatttaa

SEQ ID NO: 851095 - DNA, 15 bp, Homo sapiens
atagaatcatttaaa

SEQ ID NO: 851096 - DNA, 15 bp, Homo sapiens
tagaatcatttaaaa

SEQ ID NO: 851097 - DNA, 15 bp, Homo sapiens
agaatcatttaaaat

SEQ ID NO: 851098 - DNA, 15 bp, Homo sapiens
gaatcatttaaaata

SEQ ID NO: 851099 - DNA, 15 bp, Homo sapiens
aatcatttaaaatat

SEQ ID NO: 851100 - DNA, 15 bp, Homo sapiens
atcatttaaaatata

SEQ ID NO: 851101 - DNA, 15 bp, Homo sapiens
tcatttaaaatataa

SEQ ID NO: 851102 - DNA, 15 bp, Homo sapiens
catttaaaatataat

SEQ ID NO: 851103 - DNA, 15 bp, Homo sapiens
atttaaaatataata

SEQ ID NO: 851104 - DNA, 15 bp, Homo sapiens
tttaaaatataataa

SEQ ID NO: 851105 - DNA, 15 bp, Homo sapiens
ttaaaatataataaa

SEQ ID NO: 851106 - DNA, 15 bp, Homo sapiens
taaaatataataaaa

SEQ ID NO: 851107 - DNA, 15 bp, Homo sapiens
aaaatataataaaat

SEQ ID NO: 851108 - DNA, 15 bp, Homo sapiens
aaatataataaaatt

SEQ ID NO: 851109 - DNA, 15 bp, Homo sapiens
aatataataaaattg

SEQ ID NO: 851110 - DNA, 15 bp, Homo sapiens
atataataaaattgt

SEQ ID NO: 851111 - DNA, 15 bp, Homo sapiens
tataataaaattgta

SEQ ID NO: 851112 - DNA, 15 bp, Homo sapiens
ataataaaattgtat

SEQ ID NO: 851113 - DNA, 15 bp, Homo sapiens
taataaaattgtatg

SEQ ID NO: 851114 - DNA, 15 bp, Homo sapiens
aataaaattgtatga

SEQ ID NO: 851115 - DNA, 15 bp, Homo sapiens
ataaaattgtatgat

SEQ ID NO: 851116 - DNA, 15 bp, Homo sapiens
taaaattgtatgata

SEQ ID NO: 851117 - DNA, 15 bp, Homo sapiens
aaaattgtatgatag

SEQ ID NO: 851118 - DNA, 15 bp, Homo sapiens
aaattgtatgataga

SEQ ID NO: 851119 - DNA, 15 bp, Homo sapiens
aattgtatgatagag

SEQ ID NO: 851120 - DNA, 15 bp, Homo sapiens
attgtatgatagaga

SEQ ID NO: 851121 - DNA, 15 bp, Homo sapiens
ttgtatgatagagat

SEQ ID NO: 851122 - DNA, 15 bp, Homo sapiens
tgtatgatagagatt

SEQ ID NO: 851123 - DNA, 15 bp, Homo sapiens
gtatgatagagatta

SEQ ID NO: 851124 - DNA, 15 bp, Homo sapiens
tatgatagagattat

SEQ ID NO: 851125 - DNA, 15 bp, Homo sapiens
atgatagagattata

SEQ ID NO: 851126 - DNA, 15 bp, Homo sapiens
tgatagagattatat

SEQ ID NO: 851127 - DNA, 15 bp, Homo sapiens
gatagagattatatg

SEQ ID NO: 851128 - DNA, 15 bp, Homo sapiens
atagagattatatgc

SEQ ID NO: 851129 - DNA, 15 bp, Homo sapiens
tagagattatatgca

SEQ ID NO: 851130 - DNA, 15 bp, Homo sapiens
agagattatatgcaa

SEQ ID NO: 851131 - DNA, 15 bp, Homo sapiens
gagattatatgcaat

SEQ ID NO: 851132 - DNA, 15 bp, Homo sapiens
agattatatgcaata

SEQ ID NO: 851133 - DNA, 15 bp, Homo sapiens
gattatatgcaataa

SEQ ID NO: 851134 - DNA, 15 bp, Homo sapiens
attatatgcaataaa

SEQ ID NO: 851135 - DNA, 15 bp, Homo sapiens
ttatatgcaataaaa

SEQ ID NO: 851136 - DNA, 15 bp, Homo sapiens
tatatgcaataaaac

SEQ ID NO: 851137 - DNA, 15 bp, Homo sapiens
atatgcaataaaaca

SEQ ID NO: 851138 - DNA, 15 bp, Homo sapiens
tatgcaataaaacat

SEQ ID NO: 851139 - DNA, 15 bp, Homo sapiens
atgcaataaaacatt

SEQ ID NO: 851140 - DNA, 15 bp, Homo sapiens
tgcaataaaacatta

SEQ ID NO: 851141 - DNA, 15 bp, Homo sapiens
gcaataaaacattaa

SEQ ID NO: 851142 - DNA, 15 bp, Homo sapiens
caataaaacattaac

SEQ ID NO: 851143 - DNA, 15 bp, Homo sapiens
aataaaacattaaca

SEQ ID NO: 851144 - DNA, 15 bp, Homo sapiens
ataaaacattaacaa

SEQ ID NO: 851145 - DNA, 15 bp, Homo sapiens
taaaacattaacaaa

SEQ ID NO: 851146 - DNA, 15 bp, Homo sapiens
aaaacattaacaaaa

SEQ ID NO: 851147 - DNA, 15 bp, Homo sapiens
aaacattaacaaaat

SEQ ID NO: 851148 - DNA, 15 bp, Homo sapiens
aacattaacaaaatg

SEQ ID NO: 851149 - DNA, 15 bp, Homo sapiens
acattaacaaaatgc

SEQ ID NO: 851150 - DNA, 15 bp, Homo sapiens
cattaacaaaatgct

SEQ ID NO: 851151 - DNA, 15 bp, Homo sapiens
attaacaaaatgcta

SEQ ID NO: 851152 - DNA, 15 bp, Homo sapiens
ttaacaaaatgctaa

SEQ ID NO: 851153 - DNA, 15 bp, Homo sapiens
taacaaaatgctaaa

SEQ ID NO: 851154 - DNA, 15 bp, Homo sapiens
aacaaaatgctaaaa

SEQ ID NO: 851155 - DNA, 15 bp, Homo sapiens
acaaaatgctaaaat

SEQ ID NO: 851156 - DNA, 15 bp, Homo sapiens
caaaatgctaaaata

SEQ ID NO: 851157 - DNA, 15 bp, Homo sapiens
aaaatgctaaaatac

SEQ ID NO: 851158 - DNA, 15 bp, Homo sapiens
aaatgctaaaatacg

SEQ ID NO: 851159 - DNA, 15 bp, Homo sapiens
aatgctaaaatacga

SEQ ID NO: 851160 - DNA, 15 bp, Homo sapiens
atgctaaaatacgag

SEQ ID NO: 851161 - DNA, 15 bp, Homo sapiens
tgctaaaatacgaga

SEQ ID NO: 851162 - DNA, 15 bp, Homo sapiens
gctaaaatacgagac

SEQ ID NO: 851163 - DNA, 15 bp, Homo sapiens
ctaaaatacgagaca

SEQ ID NO: 851164 - DNA, 15 bp, Homo sapiens
taaaatacgagacat

SEQ ID NO: 851165 - DNA, 15 bp, Homo sapiens
aaaatacgagacata

SEQ ID NO: 851166 - DNA, 15 bp, Homo sapiens
aaatacgagacatat

SEQ ID NO: 851167 - DNA, 15 bp, Homo sapiens
aatacgagacatatt

SEQ ID NO: 851168 - DNA, 15 bp, Homo sapiens
atacgagacatattg

SEQ ID NO: 851169 - DNA, 15 bp, Homo sapiens
tacgagacatattgc

SEQ ID NO: 851170 - DNA, 15 bp, Homo sapiens
acgagacatattgca

SEQ ID NO: 851171 - DNA, 15 bp, Homo sapiens
cgagacatattgcaa

SEQ ID NO: 851172 - DNA, 15 bp, Homo sapiens
gagacatattgcaat

SEQ ID NO: 851173 - DNA, 15 bp, Homo sapiens
agacatattgcaata

SEQ ID NO: 851174 - DNA, 15 bp, Homo sapiens
gacatattgcaataa

SEQ ID NO: 851175 - DNA, 15 bp, Homo sapiens
acatattgcaataaa

SEQ ID NO: 851176 - DNA, 15 bp, Homo sapiens
catattgcaataaag

SEQ ID NO: 851177 - DNA, 15 bp, Homo sapiens
atattgcaataaagt

SEQ ID NO: 851178 - DNA, 15 bp, Homo sapiens
tattgcaataaagta

SEQ ID NO: 851179 - DNA, 15 bp, Homo sapiens
attgcaataaagtat

SEQ ID NO: 851180 - DNA, 15 bp, Homo sapiens
ttgcaataaagtatt

SEQ ID NO: 851181 - DNA, 15 bp, Homo sapiens
tgcaataaagtattt

SEQ ID NO: 851182 - DNA, 15 bp, Homo sapiens
gcaataaagtattta

SEQ ID NO: 851183 - DNA, 15 bp, Homo sapiens
caataaagtatttat

SEQ ID NO: 851184 - DNA, 15 bp, Homo sapiens
aataaagtatttata

SEQ ID NO: 851185 - DNA, 15 bp, Homo sapiens
ataaagtatttataa

SEQ ID NO: 851186 - DNA, 15 bp, Homo sapiens
taaagtatttataaa

SEQ ID NO: 851187 - DNA, 15 bp, Homo sapiens
aaagtatttataaaa

SEQ ID NO: 851188 - DNA, 15 bp, Homo sapiens
aagtatttataaaat

SEQ ID NO: 851189 - DNA, 15 bp, Homo sapiens
agtatttataaaatt

SEQ ID NO: 851190 - DNA, 15 bp, Homo sapiens
gtatttataaaattg

SEQ ID NO: 851191 - DNA, 15 bp, Homo sapiens
tatttataaaattga

SEQ ID NO: 851192 - DNA, 15 bp, Homo sapiens
atttataaaattgat

SEQ ID NO: 851193 - DNA, 15 bp, Homo sapiens
tttataaaattgata

SEQ ID NO: 851194 - DNA, 15 bp, Homo sapiens
ttataaaattgatat

SEQ ID NO: 851195 - DNA, 15 bp, Homo sapiens
tataaaattgatatt

SEQ ID NO: 851196 - DNA, 15 bp, Homo sapiens
ataaaattgatattt

SEQ ID NO: 851197 - DNA, 15 bp, Homo sapiens
taaaattgatattta

SEQ ID NO: 851198 - DNA, 15 bp, Homo sapiens
aaaattgatatttat

SEQ ID NO: 851199 - DNA, 15 bp, Homo sapiens
aaattgatatttata

SEQ ID NO: 851200 - DNA, 15 bp, Homo sapiens
aattgatatttatat

SEQ ID NO: 851201 - DNA, 15 bp, Homo sapiens
attgatatttatatg

SEQ ID NO: 851202 - DNA, 15 bp, Homo sapiens
ttgatatttatatgt

SEQ ID NO: 851203 - DNA, 15 bp, Homo sapiens
tgatatttatatgtt

SEQ ID NO: 851204 - DNA, 15 bp, Homo sapiens
gatatttatatgttt

SEQ ID NO: 851205 - DNA, 15 bp, Homo sapiens
atatttatatgtttt

SEQ ID NO: 851206 - DNA, 15 bp, Homo sapiens
tatttatatgttttt

SEQ ID NO: 851207 - DNA, 15 bp, Homo sapiens
atttatatgttttta

SEQ ID NO: 851208 - DNA, 15 bp, Homo sapiens
tttatatgtttttat

SEQ ID NO: 851209 - DNA, 15 bp, Homo sapiens
ttatatgtttttata

SEQ ID NO: 851210 - DNA, 15 bp, Homo sapiens
tatatgtttttatat

SEQ ID NO: 851211 - DNA, 15 bp, Homo sapiens
atatgtttttatatc

SEQ ID NO: 851212 - DNA, 15 bp, Homo sapiens
tatgtttttatatct

SEQ ID NO: 851213 - DNA, 15 bp, Homo sapiens
atgtttttatatctt

SEQ ID NO: 851214 - DNA, 15 bp, Homo sapiens
tgtttttatatctta

SEQ ID NO: 851215 - DNA, 15 bp, Homo sapiens
gtttttatatcttaa

SEQ ID NO: 851216 - DNA, 15 bp, Homo sapiens
tttttatatcttaaa

SEQ ID NO: 851217 - DNA, 15 bp, Homo sapiens
ttttatatcttaaag

SEQ ID NO: 851218 - DNA, 15 bp, Homo sapiens
tttatatcttaaagc

SEQ ID NO: 851219 - DNA, 15 bp, Homo sapiens
ttatatcttaaagct

SEQ ID NO: 851220 - DNA, 15 bp, Homo sapiens
tatatcttaaagctg

SEQ ID NO: 851221 - DNA, 15 bp, Homo sapiens
atatcttaaagctgt

SEQ ID NO: 851222 - DNA, 15 bp, Homo sapiens
tatcttaaagctgtg

SEQ ID NO: 851223 - DNA, 15 bp, Homo sapiens
atcttaaagctgtgt

SEQ ID NO: 851224 - DNA, 15 bp, Homo sapiens
tcttaaagctgtgtc

SEQ ID NO: 851225 - DNA, 15 bp, Homo sapiens
cttaaagctgtgtct

SEQ ID NO: 851226 - DNA, 15 bp, Homo sapiens
ttaaagctgtgtctg

SEQ ID NO: 851227 - DNA, 15 bp, Homo sapiens
taaagctgtgtctgt

SEQ ID NO: 851228 - DNA, 15 bp, Homo sapiens
aaagctgtgtctgta

SEQ ID NO: 851229 - DNA, 15 bp, Homo sapiens
aagctgtgtctgtaa

SEQ ID NO: 851230 - DNA, 15 bp, Homo sapiens
agctgtgtctgtaaa

SEQ ID NO: 851231 - DNA, 15 bp, Homo sapiens
gctgtgtctgtaaac

SEQ ID NO: 851232 - DNA, 15 bp, Homo sapiens
ctgtgtctgtaaact

SEQ ID NO: 851233 - DNA, 15 bp, Homo sapiens
tgtgtctgtaaactg

SEQ ID NO: 851234 - DNA, 15 bp, Homo sapiens
gtgtctgtaaactga

SEQ ID NO: 851235 - DNA, 15 bp, Homo sapiens
tgtctgtaaactgat

SEQ ID NO: 851236 - DNA, 15 bp, Homo sapiens
gtctgtaaactgatg

SEQ ID NO: 851237 - DNA, 15 bp, Homo sapiens
tctgtaaactgatgg

SEQ ID NO: 851238 - DNA, 15 bp, Homo sapiens
ctgtaaactgatggc

SEQ ID NO: 851239 - DNA, 15 bp, Homo sapiens
tgtaaactgatggct

SEQ ID NO: 851240 - DNA, 15 bp, Homo sapiens
gtaaactgatggcta

SEQ ID NO: 851241 - DNA, 15 bp, Homo sapiens
taaactgatggctaa

SEQ ID NO: 851242 - DNA, 15 bp, Homo sapiens
aaactgatggctaac

SEQ ID NO: 851243 - DNA, 15 bp, Homo sapiens
aactgatggctaaca

SEQ ID NO: 851244 - DNA, 15 bp, Homo sapiens
actgatggctaacaa

SEQ ID NO: 851245 - DNA, 15 bp, Homo sapiens
ctgatggctaacaaa

SEQ ID NO: 851246 - DNA, 15 bp, Homo sapiens
tgatggctaacaaaa

SEQ ID NO: 851247 - DNA, 15 bp, Homo sapiens
gatggctaacaaaac

SEQ ID NO: 851248 - DNA, 15 bp, Homo sapiens
atggctaacaaaact

SEQ ID NO: 851249 - DNA, 15 bp, Homo sapiens
tggctaacaaaacta

SEQ ID NO: 851250 - DNA, 15 bp, Homo sapiens
ggctaacaaaactag

SEQ ID NO: 851251 - DNA, 15 bp, Homo sapiens
gctaacaaaactagg

SEQ ID NO: 851252 - DNA, 15 bp, Homo sapiens
ctaacaaaactagga

SEQ ID NO: 851253 - DNA, 15 bp, Homo sapiens
taacaaaactaggat

SEQ ID NO: 851254 - DNA, 15 bp, Homo sapiens
aacaaaactaggatt

SEQ ID NO: 851255 - DNA, 15 bp, Homo sapiens
acaaaactaggattt

SEQ ID NO: 851256 - DNA, 15 bp, Homo sapiens
caaaactaggatttt

SEQ ID NO: 851257 - DNA, 15 bp, Homo sapiens
aaaactaggattttg

SEQ ID NO: 851258 - DNA, 15 bp, Homo sapiens
aaactaggattttgg

SEQ ID NO: 851259 - DNA, 15 bp, Homo sapiens
aactaggattttggt

SEQ ID NO: 851260 - DNA, 15 bp, Homo sapiens
actaggattttggtc

SEQ ID NO: 851261 - DNA, 15 bp, Homo sapiens
ctaggattttggtca

SEQ ID NO: 851262 - DNA, 15 bp, Homo sapiens
taggattttggtcac

SEQ ID NO: 851263 - DNA, 15 bp, Homo sapiens
aggattttggtcact

SEQ ID NO: 851264 - DNA, 15 bp, Homo sapiens
ggattttggtcactt

SEQ ID NO: 851265 - DNA, 15 bp, Homo sapiens
gattttggtcacttc

SEQ ID NO: 851266 - DNA, 15 bp, Homo sapiens
attttggtcacttct

SEQ ID NO: 851267 - DNA, 15 bp, Homo sapiens
ttttggtcacttcta

SEQ ID NO: 851268 - DNA, 15 bp, Homo sapiens
tttggtcacttctaa

SEQ ID NO: 851269 - DNA, 15 bp, Homo sapiens
ttggtcacttctaaa

SEQ ID NO: 851270 - DNA, 15 bp, Homo sapiens
tggtcacttctaaaa

SEQ ID NO: 851271 - DNA, 15 bp, Homo sapiens
ggtcacttctaaaat

SEQ ID NO: 851272 - DNA, 15 bp, Homo sapiens
gtcacttctaaaatg

SEQ ID NO: 851273 - DNA, 15 bp, Homo sapiens
tcacttctaaaatgg

SEQ ID NO: 851274 - DNA, 15 bp, Homo sapiens
cacttctaaaatgga

SEQ ID NO: 851275 - DNA, 15 bp, Homo sapiens
acttctaaaatggaa

SEQ ID NO: 851276 - DNA, 15 bp, Homo sapiens
cttctaaaatggaac

SEQ ID NO: 851277 - DNA, 15 bp, Homo sapiens
ttctaaaatggaaca

SEQ ID NO: 851278 - DNA, 15 bp, Homo sapiens
tctaaaatggaacat

SEQ ID NO: 851279 - DNA, 15 bp, Homo sapiens
ctaaaatggaacatt

SEQ ID NO: 851280 - DNA, 15 bp, Homo sapiens
taaaatggaacattt

SEQ ID NO: 851281 - DNA, 15 bp, Homo sapiens
aaaatggaacattta

SEQ ID NO: 851282 - DNA, 15 bp, Homo sapiens
aaatggaacatttaa

SEQ ID NO: 851283 - DNA, 15 bp, Homo sapiens
aatggaacatttaaa

SEQ ID NO: 851284 - DNA, 15 bp, Homo sapiens
atggaacatttaaag

SEQ ID NO: 851285 - DNA, 15 bp, Homo sapiens
tggaacatttaaaga

SEQ ID NO: 851286 - DNA, 15 bp, Homo sapiens
ggaacatttaaagaa

SEQ ID NO: 851287 - DNA, 15 bp, Homo sapiens
gaacatttaaagaaa

SEQ ID NO: 851288 - DNA, 15 bp, Homo sapiens
aacatttaaagaaag

SEQ ID NO: 851289 - DNA, 15 bp, Homo sapiens
acatttaaagaaagc

SEQ ID NO: 851290 - DNA, 15 bp, Homo sapiens
catttaaagaaagct

SEQ ID NO: 851291 - DNA, 15 bp, Homo sapiens
atttaaagaaagctg

SEQ ID NO: 851292 - DNA, 15 bp, Homo sapiens
tttaaagaaagctga

SEQ ID NO: 851293 - DNA, 15 bp, Homo sapiens
ttaaagaaagctgac

SEQ ID NO: 851294 - DNA, 15 bp, Homo sapiens
taaagaaagctgaca

SEQ ID NO: 851295 - DNA, 15 bp, Homo sapiens
aaagaaagctgacaa

SEQ ID NO: 851296 - DNA, 15 bp, Homo sapiens
aagaaagctgacaaa

SEQ ID NO: 851297 - DNA, 15 bp, Homo sapiens
agaaagctgacaaaa

SEQ ID NO: 851298 - DNA, 15 bp, Homo sapiens
gaaagctgacaaaat

SEQ ID NO: 851299 - DNA, 15 bp, Homo sapiens
aaagctgacaaaata

SEQ ID NO: 851300 - DNA, 15 bp, Homo sapiens
aagctgacaaaatat

SEQ ID NO: 851301 - DNA, 15 bp, Homo sapiens
agctgacaaaatatt

SEQ ID NO: 851302 - DNA, 15 bp, Homo sapiens
gctgacaaaatatta

SEQ ID NO: 851303 - DNA, 15 bp, Homo sapiens
ctgacaaaatattaa

SEQ ID NO: 851304 - DNA, 15 bp, Homo sapiens
tgacaaaatattaat

SEQ ID NO: 851305 - DNA, 15 bp, Homo sapiens
gacaaaatattaatt

SEQ ID NO: 851306 - DNA, 15 bp, Homo sapiens
acaaaatattaattt

SEQ ID NO: 851307 - DNA, 15 bp, Homo sapiens
caaaatattaatttt

SEQ ID NO: 851308 - DNA, 15 bp, Homo sapiens
aaaatattaattttg

SEQ ID NO: 851309 - DNA, 15 bp, Homo sapiens
aaatattaattttgc

SEQ ID NO: 851310 - DNA, 15 bp, Homo sapiens
aatattaattttgca

SEQ ID NO: 851311 - DNA, 15 bp, Homo sapiens
atattaattttgcat

SEQ ID NO: 851312 - DNA, 15 bp, Homo sapiens
tattaattttgcatg

SEQ ID NO: 851313 - DNA, 15 bp, Homo sapiens
attaattttgcatga

SEQ ID NO: 851314 - DNA, 15 bp, Homo sapiens
ttaattttgcatgaa

SEQ ID NO: 851315 - DNA, 15 bp, Homo sapiens
taattttgcatgaag

SEQ ID NO: 851316 - DNA, 15 bp, Homo sapiens
aattttgcatgaagg

SEQ ID NO: 851317 - DNA, 15 bp, Homo sapiens
attttgcatgaaggt

SEQ ID NO: 851318 - DNA, 15 bp, Homo sapiens
ttttgcatgaaggta

SEQ ID NO: 851319 - DNA, 15 bp, Homo sapiens
tttgcatgaaggtag

SEQ ID NO: 851320 - DNA, 15 bp, Homo sapiens
ttgcatgaaggtagc

SEQ ID NO: 851321 - DNA, 15 bp, Homo sapiens
tgcatgaaggtagca

SEQ ID NO: 851322 - DNA, 15 bp, Homo sapiens
gcatgaaggtagcag

SEQ ID NO: 851323 - DNA, 15 bp, Homo sapiens
catgaaggtagcagc

SEQ ID NO: 851324 - DNA, 15 bp, Homo sapiens
atgaaggtagcagct

SEQ ID NO: 851325 - DNA, 15 bp, Homo sapiens
tgaaggtagcagcta

SEQ ID NO: 851326 - DNA, 15 bp, Homo sapiens
gaaggtagcagctat

SEQ ID NO: 851327 - DNA, 15 bp, Homo sapiens
aaggtagcagctatt

SEQ ID NO: 851328 - DNA, 15 bp, Homo sapiens
aggtagcagctattt

SEQ ID NO: 851329 - DNA, 15 bp, Homo sapiens
ggtagcagctatttt

SEQ ID NO: 851330 - DNA, 15 bp, Homo sapiens
gtagcagctattttt

SEQ ID NO: 851331 - DNA, 15 bp, Homo sapiens
tagcagctattttta

SEQ ID NO: 851332 - DNA, 15 bp, Homo sapiens
agcagctatttttat

SEQ ID NO: 851333 - DNA, 15 bp, Homo sapiens
gcagctatttttatg

SEQ ID NO: 851334 - DNA, 15 bp, Homo sapiens
cagctatttttatgg

SEQ ID NO: 851335 - DNA, 15 bp, Homo sapiens
agctatttttatggg

SEQ ID NO: 851336 - DNA, 15 bp, Homo sapiens
gctatttttatggga

SEQ ID NO: 851337 - DNA, 15 bp, Homo sapiens
ctatttttatgggac

SEQ ID NO: 851338 - DNA, 15 bp, Homo sapiens
tatttttatgggaca

SEQ ID NO: 851339 - DNA, 15 bp, Homo sapiens
atttttatgggacat

SEQ ID NO: 851340 - DNA, 15 bp, Homo sapiens
tttttatgggacatt

SEQ ID NO: 851341 - DNA, 15 bp, Homo sapiens
ttttatgggacattt

SEQ ID NO: 851342 - DNA, 15 bp, Homo sapiens
tttatgggacatttt

SEQ ID NO: 851343 - DNA, 15 bp, Homo sapiens
ttatgggacattttc

SEQ ID NO: 851344 - DNA, 15 bp, Homo sapiens
tatgggacattttca

SEQ ID NO: 851345 - DNA, 15 bp, Homo sapiens
atgggacattttcag

SEQ ID NO: 851346 - DNA, 15 bp, Homo sapiens
tgggacattttcaga

SEQ ID NO: 851347 - DNA, 15 bp, Homo sapiens
gggacattttcagaa

SEQ ID NO: 851348 - DNA, 15 bp, Homo sapiens
ggacattttcagaac

SEQ ID NO: 851349 - DNA, 15 bp, Homo sapiens
gacattttcagaact

SEQ ID NO: 851350 - DNA, 15 bp, Homo sapiens
acattttcagaactc

SEQ ID NO: 851351 - DNA, 15 bp, Homo sapiens
cattttcagaactcc

SEQ ID NO: 851352 - DNA, 15 bp, Homo sapiens
attttcagaactcca

SEQ ID NO: 851353 - DNA, 15 bp, Homo sapiens
ttttcagaactccaa

SEQ ID NO: 851354 - DNA, 15 bp, Homo sapiens
tttcagaactccaaa

SEQ ID NO: 851355 - DNA, 15 bp, Homo sapiens
ttcagaactccaaaa

SEQ ID NO: 851356 - DNA, 15 bp, Homo sapiens
tcagaactccaaaat

SEQ ID NO: 851357 - DNA, 15 bp, Homo sapiens
cagaactccaaaatc

SEQ ID NO: 851358 - DNA, 15 bp, Homo sapiens
agaactccaaaatct

SEQ ID NO: 851359 - DNA, 15 bp, Homo sapiens
gaactccaaaatcta

SEQ ID NO: 851360 - DNA, 15 bp, Homo sapiens
aactccaaaatctac

SEQ ID NO: 851361 - DNA, 15 bp, Homo sapiens
actccaaaatctaca

SEQ ID NO: 851362 - DNA, 15 bp, Homo sapiens
ctccaaaatctacag

SEQ ID NO: 851363 - DNA, 15 bp, Homo sapiens
tccaaaatctacagc

SEQ ID NO: 851364 - DNA, 15 bp, Homo sapiens
ccaaaatctacagcc

SEQ ID NO: 851365 - DNA, 15 bp, Homo sapiens
caaaatctacagcca

SEQ ID NO: 851366 - DNA, 15 bp, Homo sapiens
aaaatctacagccag

SEQ ID NO: 851367 - DNA, 15 bp, Homo sapiens
aaatctacagccaga

SEQ ID NO: 851368 - DNA, 15 bp, Homo sapiens
aatctacagccagac

SEQ ID NO: 851369 - DNA, 15 bp, Homo sapiens
atctacagccagact

SEQ ID NO: 851370 - DNA, 15 bp, Homo sapiens
tctacagccagactt

SEQ ID NO: 851371 - DNA, 15 bp, Homo sapiens
ctacagccagacttt

SEQ ID NO: 851372 - DNA, 15 bp, Homo sapiens
tacagccagacttta

SEQ ID NO: 851373 - DNA, 15 bp, Homo sapiens
acagccagactttag

SEQ ID NO: 851374 - DNA, 15 bp, Homo sapiens
cagccagactttagc

SEQ ID NO: 851375 - DNA, 15 bp, Homo sapiens
agccagactttagct

SEQ ID NO: 851376 - DNA, 15 bp, Homo sapiens
gccagactttagctc

SEQ ID NO: 851377 - DNA, 15 bp, Homo sapiens
ccagactttagctca

SEQ ID NO: 851378 - DNA, 15 bp, Homo sapiens
cagactttagctcaa

SEQ ID NO: 851379 - DNA, 15 bp, Homo sapiens
agactttagctcaaa

SEQ ID NO: 851380 - DNA, 15 bp, Homo sapiens
gactttagctcaaaa

SEQ ID NO: 851381 - DNA, 15 bp, Homo sapiens
actttagctcaaaac

SEQ ID NO: 851382 - DNA, 15 bp, Homo sapiens
ctttagctcaaaact

SEQ ID NO: 851383 - DNA, 15 bp, Homo sapiens
tttagctcaaaactc

SEQ ID NO: 851384 - DNA, 15 bp, Homo sapiens
ttagctcaaaactca

SEQ ID NO: 851385 - DNA, 15 bp, Homo sapiens
tagctcaaaactcat

SEQ ID NO: 851386 - DNA, 15 bp, Homo sapiens
agctcaaaactcatg

SEQ ID NO: 851387 - DNA, 15 bp, Homo sapiens
gctcaaaactcatgg

SEQ ID NO: 851388 - DNA, 15 bp, Homo sapiens
ctcaaaactcatggg

SEQ ID NO: 851389 - DNA, 15 bp, Homo sapiens
tcaaaactcatggga

SEQ ID NO: 851390 - DNA, 15 bp, Homo sapiens
caaaactcatgggat

SEQ ID NO: 851391 - DNA, 15 bp, Homo sapiens
aaaactcatgggatg

SEQ ID NO: 851392 - DNA, 15 bp, Homo sapiens
aaactcatgggatgt

SEQ ID NO: 851393 - DNA, 15 bp, Homo sapiens
aactcatgggatgtg

SEQ ID NO: 851394 - DNA, 15 bp, Homo sapiens
actcatgggatgtga

SEQ ID NO: 851395 - DNA, 15 bp, Homo sapiens
ctcatgggatgtgat

SEQ ID NO: 851396 - DNA, 15 bp, Homo sapiens
tcatgggatgtgatt

SEQ ID NO: 851397 - DNA, 15 bp, Homo sapiens
catgggatgtgattc

SEQ ID NO: 851398 - DNA, 15 bp, Homo sapiens
atgggatgtgattct

SEQ ID NO: 851399 - DNA, 15 bp, Homo sapiens
tgggatgtgattctt

SEQ ID NO: 851400 - DNA, 15 bp, Homo sapiens
gggatgtgattcttt

SEQ ID NO: 851401 - DNA, 15 bp, Homo sapiens
ggatgtgattctttc

SEQ ID NO: 851402 - DNA, 15 bp, Homo sapiens
gatgtgattctttcg

SEQ ID NO: 851403 - DNA, 15 bp, Homo sapiens
atgtgattctttcga

SEQ ID NO: 851404 - DNA, 15 bp, Homo sapiens
tgtgattctttcgac

SEQ ID NO: 851405 - DNA, 15 bp, Homo sapiens
gtgattctttcgacc

SEQ ID NO: 851406 - DNA, 15 bp, Homo sapiens
tgattctttcgacca

SEQ ID NO: 851407 - DNA, 15 bp, Homo sapiens
gattctttcgaccaa

SEQ ID NO: 851408 - DNA, 15 bp, Homo sapiens
attctttcgaccaat

SEQ ID NO: 851409 - DNA, 15 bp, Homo sapiens
ttctttcgaccaatt

SEQ ID NO: 851410 - DNA, 15 bp, Homo sapiens
tctttcgaccaattt

SEQ ID NO: 851411 - DNA, 15 bp, Homo sapiens
ctttcgaccaattta

SEQ ID NO: 851412 - DNA, 15 bp, Homo sapiens
tttcgaccaatttag

SEQ ID NO: 851413 - DNA, 15 bp, Homo sapiens
ttcgaccaatttagt

SEQ ID NO: 851414 - DNA, 15 bp, Homo sapiens
tcgaccaatttagtg

SEQ ID NO: 851415 - DNA, 15 bp, Homo sapiens
cgaccaatttagtgc

SEQ ID NO: 851416 - DNA, 15 bp, Homo sapiens
gaccaatttagtgca

SEQ ID NO: 851417 - DNA, 15 bp, Homo sapiens
accaatttagtgcag

SEQ ID NO: 851418 - DNA, 15 bp, Homo sapiens
ccaatttagtgcaga

SEQ ID NO: 851419 - DNA, 15 bp, Homo sapiens
caatttagtgcagaa

SEQ ID NO: 851420 - DNA, 15 bp, Homo sapiens
aatttagtgcagaaa

SEQ ID NO: 851421 - DNA, 15 bp, Homo sapiens
atttagtgcagaaag

SEQ ID NO: 851422 - DNA, 15 bp, Homo sapiens
tttagtgcagaaaga

SEQ ID NO: 851423 - DNA, 15 bp, Homo sapiens
ttagtgcagaaagaa

SEQ ID NO: 851424 - DNA, 15 bp, Homo sapiens
tagtgcagaaagaag

SEQ ID NO: 851425 - DNA, 15 bp, Homo sapiens
agtgcagaaagaaga

SEQ ID NO: 851426 - DNA, 15 bp, Homo sapiens
gtgcagaaagaagaa

SEQ ID NO: 851427 - DNA, 15 bp, Homo sapiens
tgcagaaagaagaaa

SEQ ID NO: 851428 - DNA, 15 bp, Homo sapiens
gcagaaagaagaaat

SEQ ID NO: 851429 - DNA, 15 bp, Homo sapiens
cagaaagaagaaatt

SEQ ID NO: 851430 - DNA, 15 bp, Homo sapiens
agaaagaagaaattc

SEQ ID NO: 851431 - DNA, 15 bp, Homo sapiens
gaaagaagaaattca

SEQ ID NO: 851432 - DNA, 15 bp, Homo sapiens
aaagaagaaattcaa

SEQ ID NO: 851433 - DNA, 15 bp, Homo sapiens
aagaagaaattcaat

SEQ ID NO: 851434 - DNA, 15 bp, Homo sapiens
agaagaaattcaatc

SEQ ID NO: 851435 - DNA, 15 bp, Homo sapiens
gaagaaattcaatcc

SEQ ID NO: 851436 - DNA, 15 bp, Homo sapiens
aagaaattcaatcct

SEQ ID NO: 851437 - DNA, 15 bp, Homo sapiens
agaaattcaatccta

SEQ ID NO: 851438 - DNA, 15 bp, Homo sapiens
gaaattcaatcctaa

SEQ ID NO: 851439 - DNA, 15 bp, Homo sapiens
aaattcaatcctaac

SEQ ID NO: 851440 - DNA, 15 bp, Homo sapiens
aattcaatcctaact

SEQ ID NO: 851441 - DNA, 15 bp, Homo sapiens
attcaatcctaactg

SEQ ID NO: 851442 - DNA, 15 bp, Homo sapiens
ttcaatcctaactga

SEQ ID NO: 851443 - DNA, 15 bp, Homo sapiens
tcaatcctaactgag

SEQ ID NO: 851444 - DNA, 15 bp, Homo sapiens
caatcctaactgaga

SEQ ID NO: 851445 - DNA, 15 bp, Homo sapiens
aatcctaactgagac

SEQ ID NO: 851446 - DNA, 15 bp, Homo sapiens
atcctaactgagacc

SEQ ID NO: 851447 - DNA, 15 bp, Homo sapiens
tcctaactgagacct

SEQ ID NO: 851448 - DNA, 15 bp, Homo sapiens
cctaactgagacctt

SEQ ID NO: 851449 - DNA, 15 bp, Homo sapiens
ctaactgagacctta

SEQ ID NO: 851450 - DNA, 15 bp, Homo sapiens
taactgagaccttac

SEQ ID NO: 851451 - DNA, 15 bp, Homo sapiens
aactgagaccttaca

SEQ ID NO: 851452 - DNA, 15 bp, Homo sapiens
actgagaccttacac

SEQ ID NO: 851453 - DNA, 15 bp, Homo sapiens
ctgagaccttacacc

SEQ ID NO: 851454 - DNA, 15 bp, Homo sapiens
tgagaccttacaccg

SEQ ID NO: 851455 - DNA, 15 bp, Homo sapiens
gagaccttacaccgt

SEQ ID NO: 851456 - DNA, 15 bp, Homo sapiens
agaccttacaccgtt

SEQ ID NO: 851457 - DNA, 15 bp, Homo sapiens
gaccttacaccgttt

SEQ ID NO: 851458 - DNA, 15 bp, Homo sapiens
accttacaccgtttc

SEQ ID NO: 851459 - DNA, 15 bp, Homo sapiens
ccttacaccgtttct

SEQ ID NO: 851460 - DNA, 15 bp, Homo sapiens
cttacaccgtttctc

SEQ ID NO: 851461 - DNA, 15 bp, Homo sapiens
ttacaccgtttctca

SEQ ID NO: 851462 - DNA, 15 bp, Homo sapiens
tacaccgtttctcat

SEQ ID NO: 851463 - DNA, 15 bp, Homo sapiens
acaccgtttctcatt

SEQ ID NO: 851464 - DNA, 15 bp, Homo sapiens
caccgtttctcatta

SEQ ID NO: 851465 - DNA, 15 bp, Homo sapiens
accgtttctcattag

SEQ ID NO: 851466 - DNA, 15 bp, Homo sapiens
ccgtttctcattaga

SEQ ID NO: 851467 - DNA, 15 bp, Homo sapiens
cgtttctcattagaa

SEQ ID NO: 851468 - DNA, 15 bp, Homo sapiens
gtttctcattagaag

SEQ ID NO: 851469 - DNA, 15 bp, Homo sapiens
tttctcattagaagg

SEQ ID NO: 851470 - DNA, 15 bp, Homo sapiens
ttctcattagaagga

SEQ ID NO: 851471 - DNA, 15 bp, Homo sapiens
tctcattagaaggag

SEQ ID NO: 851472 - DNA, 15 bp, Homo sapiens
ctcattagaaggaga

SEQ ID NO: 851473 - DNA, 15 bp, Homo sapiens
tcattagaaggagat

SEQ ID NO: 851474 - DNA, 15 bp, Homo sapiens
cattagaaggagatg

SEQ ID NO: 851475 - DNA, 15 bp, Homo sapiens
attagaaggagatgc

SEQ ID NO: 851476 - DNA, 15 bp, Homo sapiens
ttagaaggagatgct

SEQ ID NO: 851477 - DNA, 15 bp, Homo sapiens
tagaaggagatgctc

SEQ ID NO: 851478 - DNA, 15 bp, Homo sapiens
agaaggagatgctcc

SEQ ID NO: 851479 - DNA, 15 bp, Homo sapiens
gaaggagatgctcct

SEQ ID NO: 851480 - DNA, 15 bp, Homo sapiens
aaggagatgctcctg

SEQ ID NO: 851481 - DNA, 15 bp, Homo sapiens
aggagatgctcctgt

SEQ ID NO: 851482 - DNA, 15 bp, Homo sapiens
ggagatgctcctgtc

SEQ ID NO: 851483 - DNA, 15 bp, Homo sapiens
gagatgctcctgtct

SEQ ID NO: 851484 - DNA, 15 bp, Homo sapiens
agatgctcctgtctc

SEQ ID NO: 851485 - DNA, 15 bp, Homo sapiens
gatgctcctgtctcc

SEQ ID NO: 851486 - DNA, 15 bp, Homo sapiens
atgctcctgtctcct

SEQ ID NO: 851487 - DNA, 15 bp, Homo sapiens
tgctcctgtctcctg

SEQ ID NO: 851488 - DNA, 15 bp, Homo sapiens
gctcctgtctcctgg

SEQ ID NO: 851489 - DNA, 15 bp, Homo sapiens
ctcctgtctcctgga

SEQ ID NO: 851490 - DNA, 15 bp, Homo sapiens
tcctgtctcctggac

SEQ ID NO: 851491 - DNA, 15 bp, Homo sapiens
cctgtctcctggaca

SEQ ID NO: 851492 - DNA, 15 bp, Homo sapiens
ctgtctcctggacag

SEQ ID NO: 851493 - DNA, 15 bp, Homo sapiens
tgtctcctggacaga

SEQ ID NO: 851494 - DNA, 15 bp, Homo sapiens
gtctcctggacagaa

SEQ ID NO: 851495 - DNA, 15 bp, Homo sapiens
tctcctggacagaaa

SEQ ID NO: 851496 - DNA, 15 bp, Homo sapiens
ctcctggacagaaac

SEQ ID NO: 851497 - DNA, 15 bp, Homo sapiens
tcctggacagaaaca

SEQ ID NO: 851498 - DNA, 15 bp, Homo sapiens
cctggacagaaacaa

SEQ ID NO: 851499 - DNA, 15 bp, Homo sapiens
ctggacagaaacaaa

SEQ ID NO: 851500 - DNA, 15 bp, Homo sapiens
tggacagaaacaaaa

SEQ ID NO: 851501 - DNA, 15 bp, Homo sapiens
ggacagaaacaaaaa

SEQ ID NO: 851502 - DNA, 15 bp, Homo sapiens
gacagaaacaaaaaa

SEQ ID NO: 851503 - DNA, 15 bp, Homo sapiens
acagaaacaaaaaaa

SEQ ID NO: 851504 - DNA, 15 bp, Homo sapiens
cagaaacaaaaaaac

SEQ ID NO: 851505 - DNA, 15 bp, Homo sapiens
agaaacaaaaaaaca

SEQ ID NO: 851506 - DNA, 15 bp, Homo sapiens
gaaacaaaaaaacaa

SEQ ID NO: 851507 - DNA, 15 bp, Homo sapiens
aaacaaaaaaacaat

SEQ ID NO: 851508 - DNA, 15 bp, Homo sapiens
aacaaaaaaacaatc

SEQ ID NO: 851509 - DNA, 15 bp, Homo sapiens
acaaaaaaacaatct

SEQ ID NO: 851510 - DNA, 15 bp, Homo sapiens
caaaaaaacaatctt

SEQ ID NO: 851511 - DNA, 15 bp, Homo sapiens
aaaaaaacaatcttt

SEQ ID NO: 851512 - DNA, 15 bp, Homo sapiens
aaaaaacaatctttt

SEQ ID NO: 851513 - DNA, 15 bp, Homo sapiens
aaaaacaatctttta

SEQ ID NO: 851514 - DNA, 15 bp, Homo sapiens
aaaacaatcttttaa

SEQ ID NO: 851515 - DNA, 15 bp, Homo sapiens
aaacaatcttttaaa

SEQ ID NO: 851516 - DNA, 15 bp, Homo sapiens
aacaatcttttaaac

SEQ ID NO: 851517 - DNA, 15 bp, Homo sapiens
acaatcttttaaaca

SEQ ID NO: 851518 - DNA, 15 bp, Homo sapiens
caatcttttaaacag

SEQ ID NO: 851519 - DNA, 15 bp, Homo sapiens
aatcttttaaacaga

SEQ ID NO: 851520 - DNA, 15 bp, Homo sapiens
atcttttaaacagac

SEQ ID NO: 851521 - DNA, 15 bp, Homo sapiens
tcttttaaacagact

SEQ ID NO: 851522 - DNA, 15 bp, Homo sapiens
cttttaaacagactg

SEQ ID NO: 851523 - DNA, 15 bp, Homo sapiens
ttttaaacagactgg

SEQ ID NO: 851524 - DNA, 15 bp, Homo sapiens
tttaaacagactgga

SEQ ID NO: 851525 - DNA, 15 bp, Homo sapiens
ttaaacagactggag

SEQ ID NO: 851526 - DNA, 15 bp, Homo sapiens
taaacagactggaga

SEQ ID NO: 851527 - DNA, 15 bp, Homo sapiens
aaacagactggagag

SEQ ID NO: 851528 - DNA, 15 bp, Homo sapiens
aacagactggagagt

SEQ ID NO: 851529 - DNA, 15 bp, Homo sapiens
acagactggagagtt

SEQ ID NO: 851530 - DNA, 15 bp, Homo sapiens
cagactggagagttt

SEQ ID NO: 851531 - DNA, 15 bp, Homo sapiens
agactggagagtttg

SEQ ID NO: 851532 - DNA, 15 bp, Homo sapiens
gactggagagtttgg

SEQ ID NO: 851533 - DNA, 15 bp, Homo sapiens
actggagagtttggg

SEQ ID NO: 851534 - DNA, 15 bp, Homo sapiens
ctggagagtttgggg

SEQ ID NO: 851535 - DNA, 15 bp, Homo sapiens
tggagagtttgggga

SEQ ID NO: 851536 - DNA, 15 bp, Homo sapiens
ggagagtttggggaa

SEQ ID NO: 851537 - DNA, 15 bp, Homo sapiens
gagagtttggggaaa

SEQ ID NO: 851538 - DNA, 15 bp, Homo sapiens
agagtttggggaaaa

SEQ ID NO: 851539 - DNA, 15 bp, Homo sapiens
gagtttggggaaaaa

SEQ ID NO: 851540 - DNA, 15 bp, Homo sapiens
agtttggggaaaaaa

SEQ ID NO: 851541 - DNA, 15 bp, Homo sapiens
gtttggggaaaaaag

SEQ ID NO: 851542 - DNA, 15 bp, Homo sapiens
tttggggaaaaaagg

SEQ ID NO: 851543 - DNA, 15 bp, Homo sapiens
ttggggaaaaaagga

SEQ ID NO: 851544 - DNA, 15 bp, Homo sapiens
tggggaaaaaaggaa

SEQ ID NO: 851545 - DNA, 15 bp, Homo sapiens
ggggaaaaaaggaag

SEQ ID NO: 851546 - DNA, 15 bp, Homo sapiens
gggaaaaaaggaaga

SEQ ID NO: 851547 - DNA, 15 bp, Homo sapiens
ggaaaaaaggaagaa

SEQ ID NO: 851548 - DNA, 15 bp, Homo sapiens
gaaaaaaggaagaat

SEQ ID NO: 851549 - DNA, 15 bp, Homo sapiens
aaaaaaggaagaatt

SEQ ID NO: 851550 - DNA, 15 bp, Homo sapiens
aaaaaggaagaattc

SEQ ID NO: 851551 - DNA, 15 bp, Homo sapiens
aaaaggaagaattct

SEQ ID NO: 851552 - DNA, 15 bp, Homo sapiens
aaaggaagaattcta

SEQ ID NO: 851553 - DNA, 15 bp, Homo sapiens
aaggaagaattctat

SEQ ID NO: 851554 - DNA, 15 bp, Homo sapiens
aggaagaattctatt

SEQ ID NO: 851555 - DNA, 15 bp, Homo sapiens
ggaagaattctattc

SEQ ID NO: 851556 - DNA, 15 bp, Homo sapiens
gaagaattctattct

SEQ ID NO: 851557 - DNA, 15 bp, Homo sapiens
aagaattctattctc

SEQ ID NO: 851558 - DNA, 15 bp, Homo sapiens
agaattctattctca

SEQ ID NO: 851559 - DNA, 15 bp, Homo sapiens
gaattctattctcaa

SEQ ID NO: 851560 - DNA, 15 bp, Homo sapiens
aattctattctcaat

SEQ ID NO: 851561 - DNA, 15 bp, Homo sapiens
attctattctcaatc

SEQ ID NO: 851562 - DNA, 15 bp, Homo sapiens
ttctattctcaatcc

SEQ ID NO: 851563 - DNA, 15 bp, Homo sapiens
tctattctcaatcca

SEQ ID NO: 851564 - DNA, 15 bp, Homo sapiens
ctattctcaatccaa

SEQ ID NO: 851565 - DNA, 15 bp, Homo sapiens
tattctcaatccaat

SEQ ID NO: 851566 - DNA, 15 bp, Homo sapiens
attctcaatccaatc

SEQ ID NO: 851567 - DNA, 15 bp, Homo sapiens
ttctcaatccaatca

SEQ ID NO: 851568 - DNA, 15 bp, Homo sapiens
tctcaatccaatcaa

SEQ ID NO: 851569 - DNA, 15 bp, Homo sapiens
ctcaatccaatcaac

SEQ ID NO: 851570 - DNA, 15 bp, Homo sapiens
tcaatccaatcaact

SEQ ID NO: 851571 - DNA, 15 bp, Homo sapiens
caatccaatcaactc

SEQ ID NO: 851572 - DNA, 15 bp, Homo sapiens
aatccaatcaactct

SEQ ID NO: 851573 - DNA, 15 bp, Homo sapiens
atccaatcaactcta

SEQ ID NO: 851574 - DNA, 15 bp, Homo sapiens
tccaatcaactctat

SEQ ID NO: 851575 - DNA, 15 bp, Homo sapiens
ccaatcaactctata

SEQ ID NO: 851576 - DNA, 15 bp, Homo sapiens
caatcaactctatac

SEQ ID NO: 851577 - DNA, 15 bp, Homo sapiens
aatcaactctatacg

SEQ ID NO: 851578 - DNA, 15 bp, Homo sapiens
atcaactctatacga

SEQ ID NO: 851579 - DNA, 15 bp, Homo sapiens
tcaactctatacgaa

SEQ ID NO: 851580 - DNA, 15 bp, Homo sapiens
caactctatacgaaa

SEQ ID NO: 851581 - DNA, 15 bp, Homo sapiens
aactctatacgaaaa

SEQ ID NO: 851582 - DNA, 15 bp, Homo sapiens
actctatacgaaaat

SEQ ID NO: 851583 - DNA, 15 bp, Homo sapiens
ctctatacgaaaatt

SEQ ID NO: 851584 - DNA, 15 bp, Homo sapiens
tctatacgaaaattt

SEQ ID NO: 851585 - DNA, 15 bp, Homo sapiens
ctatacgaaaatttt

SEQ ID NO: 851586 - DNA, 15 bp, Homo sapiens
tatacgaaaattttc

SEQ ID NO: 851587 - DNA, 15 bp, Homo sapiens
atacgaaaattttcc

SEQ ID NO: 851588 - DNA, 15 bp, Homo sapiens
tacgaaaattttcca

SEQ ID NO: 851589 - DNA, 15 bp, Homo sapiens
acgaaaattttccat

SEQ ID NO: 851590 - DNA, 15 bp, Homo sapiens
cgaaaattttccatt

SEQ ID NO: 851591 - DNA, 15 bp, Homo sapiens
gaaaattttccattg

SEQ ID NO: 851592 - DNA, 15 bp, Homo sapiens
aaaattttccattgt

SEQ ID NO: 851593 - DNA, 15 bp, Homo sapiens
aaattttccattgtg

SEQ ID NO: 851594 - DNA, 15 bp, Homo sapiens
aattttccattgtgc

SEQ ID NO: 851595 - DNA, 15 bp, Homo sapiens
attttccattgtgca

SEQ ID NO: 851596 - DNA, 15 bp, Homo sapiens
ttttccattgtgcaa

SEQ ID NO: 851597 - DNA, 15 bp, Homo sapiens
tttccattgtgcaaa

SEQ ID NO: 851598 - DNA, 15 bp, Homo sapiens
ttccattgtgcaaaa

SEQ ID NO: 851599 - DNA, 15 bp, Homo sapiens
tccattgtgcaaaag

SEQ ID NO: 851600 - DNA, 15 bp, Homo sapiens
ccattgtgcaaaaga

SEQ ID NO: 851601 - DNA, 15 bp, Homo sapiens
cattgtgcaaaagac

SEQ ID NO: 851602 - DNA, 15 bp, Homo sapiens
attgtgcaaaagact

SEQ ID NO: 851603 - DNA, 15 bp, Homo sapiens
ttgtgcaaaagactc

SEQ ID NO: 851604 - DNA, 15 bp, Homo sapiens
tgtgcaaaagactcc

SEQ ID NO: 851605 - DNA, 15 bp, Homo sapiens
gtgcaaaagactccc

SEQ ID NO: 851606 - DNA, 15 bp, Homo sapiens
tgcaaaagactccct

SEQ ID NO: 851607 - DNA, 15 bp, Homo sapiens
gcaaaagactccctt

SEQ ID NO: 851608 - DNA, 15 bp, Homo sapiens
caaaagactccctta

SEQ ID NO: 851609 - DNA, 15 bp, Homo sapiens
aaaagactcccttac

SEQ ID NO: 851610 - DNA, 15 bp, Homo sapiens
aaagactcccttaca

SEQ ID NO: 851611 - DNA, 15 bp, Homo sapiens
aagactcccttacaa

SEQ ID NO: 851612 - DNA, 15 bp, Homo sapiens
agactcccttacaaa

SEQ ID NO: 851613 - DNA, 15 bp, Homo sapiens
gactcccttacaaat

SEQ ID NO: 851614 - DNA, 15 bp, Homo sapiens
actcccttacaaatg

SEQ ID NO: 851615 - DNA, 15 bp, Homo sapiens
ctcccttacaaatga

SEQ ID NO: 851616 - DNA, 15 bp, Homo sapiens
tcccttacaaatgaa

SEQ ID NO: 851617 - DNA, 15 bp, Homo sapiens
cccttacaaatgaat

SEQ ID NO: 851618 - DNA, 15 bp, Homo sapiens
ccttacaaatgaatg

SEQ ID NO: 851619 - DNA, 15 bp, Homo sapiens
cttacaaatgaatgg

SEQ ID NO: 851620 - DNA, 15 bp, Homo sapiens
ttacaaatgaatggc

SEQ ID NO: 851621 - DNA, 15 bp, Homo sapiens
tacaaatgaatggca

SEQ ID NO: 851622 - DNA, 15 bp, Homo sapiens
acaaatgaatggcat

SEQ ID NO: 851623 - DNA, 15 bp, Homo sapiens
caaatgaatggcatc

SEQ ID NO: 851624 - DNA, 15 bp, Homo sapiens
aaatgaatggcatcg

SEQ ID NO: 851625 - DNA, 15 bp, Homo sapiens
aatgaatggcatcga

SEQ ID NO: 851626 - DNA, 15 bp, Homo sapiens
atgaatggcatcgaa

SEQ ID NO: 851627 - DNA, 15 bp, Homo sapiens
tgaatggcatcgaag

SEQ ID NO: 851628 - DNA, 15 bp, Homo sapiens
gaatggcatcgaaga

SEQ ID NO: 851629 - DNA, 15 bp, Homo sapiens
aatggcatcgaagag

SEQ ID NO: 851630 - DNA, 15 bp, Homo sapiens
atggcatcgaagagg

SEQ ID NO: 851631 - DNA, 15 bp, Homo sapiens
tggcatcgaagagga

SEQ ID NO: 851632 - DNA, 15 bp, Homo sapiens
ggcatcgaagaggat

SEQ ID NO: 851633 - DNA, 15 bp, Homo sapiens
gcatcgaagaggatt

SEQ ID NO: 851634 - DNA, 15 bp, Homo sapiens
catcgaagaggattc

SEQ ID NO: 851635 - DNA, 15 bp, Homo sapiens
atcgaagaggattct

SEQ ID NO: 851636 - DNA, 15 bp, Homo sapiens
tcgaagaggattctg

SEQ ID NO: 851637 - DNA, 15 bp, Homo sapiens
cgaagaggattctga

SEQ ID NO: 851638 - DNA, 15 bp, Homo sapiens
gaagaggattctgat

SEQ ID NO: 851639 - DNA, 15 bp, Homo sapiens
aagaggattctgatg

SEQ ID NO: 851640 - DNA, 15 bp, Homo sapiens
agaggattctgatga

SEQ ID NO: 851641 - DNA, 15 bp, Homo sapiens
gaggattctgatgag

SEQ ID NO: 851642 - DNA, 15 bp, Homo sapiens
aggattctgatgagc

SEQ ID NO: 851643 - DNA, 15 bp, Homo sapiens
ggattctgatgagcc

SEQ ID NO: 851644 - DNA, 15 bp, Homo sapiens
gattctgatgagcct

SEQ ID NO: 851645 - DNA, 15 bp, Homo sapiens
attctgatgagcctt

SEQ ID NO: 851646 - DNA, 15 bp, Homo sapiens
ttctgatgagccttt

SEQ ID NO: 851647 - DNA, 15 bp, Homo sapiens
tctgatgagccttta

SEQ ID NO: 851648 - DNA, 15 bp, Homo sapiens
ctgatgagcctttag

SEQ ID NO: 851649 - DNA, 15 bp, Homo sapiens
tgatgagcctttaga

SEQ ID NO: 851650 - DNA, 15 bp, Homo sapiens
gatgagcctttagag

SEQ ID NO: 851651 - DNA, 15 bp, Homo sapiens
atgagcctttagaga

SEQ ID NO: 851652 - DNA, 15 bp, Homo sapiens
tgagcctttagagag

SEQ ID NO: 851653 - DNA, 15 bp, Homo sapiens
gagcctttagagaga

SEQ ID NO: 851654 - DNA, 15 bp, Homo sapiens
agcctttagagagaa

SEQ ID NO: 851655 - DNA, 15 bp, Homo sapiens
gcctttagagagaag

SEQ ID NO: 851656 - DNA, 15 bp, Homo sapiens
cctttagagagaagg

SEQ ID NO: 851657 - DNA, 15 bp, Homo sapiens
ctttagagagaaggc

SEQ ID NO: 851658 - DNA, 15 bp, Homo sapiens
tttagagagaaggct

SEQ ID NO: 851659 - DNA, 15 bp, Homo sapiens
ttagagagaaggctg

SEQ ID NO: 851660 - DNA, 15 bp, Homo sapiens
tagagagaaggctgt

SEQ ID NO: 851661 - DNA, 15 bp, Homo sapiens
agagagaaggctgtc

SEQ ID NO: 851662 - DNA, 15 bp, Homo sapiens
gagagaaggctgtcc

SEQ ID NO: 851663 - DNA, 15 bp, Homo sapiens
agagaaggctgtcct

SEQ ID NO: 851664 - DNA, 15 bp, Homo sapiens
gagaaggctgtcctt

SEQ ID NO: 851665 - DNA, 15 bp, Homo sapiens
agaaggctgtcctta

SEQ ID NO: 851666 - DNA, 15 bp, Homo sapiens
gaaggctgtccttag

SEQ ID NO: 851667 - DNA, 15 bp, Homo sapiens
aaggctgtccttagt

SEQ ID NO: 851668 - DNA, 15 bp, Homo sapiens
aggctgtccttagta

SEQ ID NO: 851669 - DNA, 15 bp, Homo sapiens
ggctgtccttagtac

SEQ ID NO: 851670 - DNA, 15 bp, Homo sapiens
gctgtccttagtacc

SEQ ID NO: 851671 - DNA, 15 bp, Homo sapiens
ctgtccttagtacca

SEQ ID NO: 851672 - DNA, 15 bp, Homo sapiens
tgtccttagtaccag

SEQ ID NO: 851673 - DNA, 15 bp, Homo sapiens
gtccttagtaccaga

SEQ ID NO: 851674 - DNA, 15 bp, Homo sapiens
tccttagtaccagat

SEQ ID NO: 851675 - DNA, 15 bp, Homo sapiens
ccttagtaccagatt

SEQ ID NO: 851676 - DNA, 15 bp, Homo sapiens
cttagtaccagattc

SEQ ID NO: 851677 - DNA, 15 bp, Homo sapiens
ttagtaccagattct

SEQ ID NO: 851678 - DNA, 15 bp, Homo sapiens
tagtaccagattctg

SEQ ID NO: 851679 - DNA, 15 bp, Homo sapiens
agtaccagattctga

SEQ ID NO: 851680 - DNA, 15 bp, Homo sapiens
gtaccagattctgag

SEQ ID NO: 851681 - DNA, 15 bp, Homo sapiens
taccagattctgagc

SEQ ID NO: 851682 - DNA, 15 bp, Homo sapiens
accagattctgagca

SEQ ID NO: 851683 - DNA, 15 bp, Homo sapiens
ccagattctgagcag

SEQ ID NO: 851684 - DNA, 15 bp, Homo sapiens
cagattctgagcagg

SEQ ID NO: 851685 - DNA, 15 bp, Homo sapiens
agattctgagcaggg

SEQ ID NO: 851686 - DNA, 15 bp, Homo sapiens
gattctgagcaggga

SEQ ID NO: 851687 - DNA, 15 bp, Homo sapiens
attctgagcagggag

SEQ ID NO: 851688 - DNA, 15 bp, Homo sapiens
ttctgagcagggaga

SEQ ID NO: 851689 - DNA, 15 bp, Homo sapiens
tctgagcagggagag

SEQ ID NO: 851690 - DNA, 15 bp, Homo sapiens
ctgagcagggagagg

SEQ ID NO: 851691 - DNA, 15 bp, Homo sapiens
tgagcagggagaggc

SEQ ID NO: 851692 - DNA, 15 bp, Homo sapiens
gagcagggagaggcg

SEQ ID NO: 851693 - DNA, 15 bp, Homo sapiens
agcagggagaggcga

SEQ ID NO: 851694 - DNA, 15 bp, Homo sapiens
gcagggagaggcgat

SEQ ID NO: 851695 - DNA, 15 bp, Homo sapiens
cagggagaggcgata

SEQ ID NO: 851696 - DNA, 15 bp, Homo sapiens
agggagaggcgatac

SEQ ID NO: 851697 - DNA, 15 bp, Homo sapiens
gggagaggcgatact

SEQ ID NO: 851698 - DNA, 15 bp, Homo sapiens
ggagaggcgatactg

SEQ ID NO: 851699 - DNA, 15 bp, Homo sapiens
gagaggcgatactgc

SEQ ID NO: 851700 - DNA, 15 bp, Homo sapiens
agaggcgatactgcc

SEQ ID NO: 851701 - DNA, 15 bp, Homo sapiens
gaggcgatactgcct

SEQ ID NO: 851702 - DNA, 15 bp, Homo sapiens
aggcgatactgcctc

SEQ ID NO: 851703 - DNA, 15 bp, Homo sapiens
ggcgatactgcctcg

SEQ ID NO: 851704 - DNA, 15 bp, Homo sapiens
gcgatactgcctcgc

SEQ ID NO: 851705 - DNA, 15 bp, Homo sapiens
cgatactgcctcgca

SEQ ID NO: 851706 - DNA, 15 bp, Homo sapiens
gatactgcctcgcat

SEQ ID NO: 851707 - DNA, 15 bp, Homo sapiens
atactgcctcgcatc

SEQ ID NO: 851708 - DNA, 15 bp, Homo sapiens
tactgcctcgcatca

SEQ ID NO: 851709 - DNA, 15 bp, Homo sapiens
actgcctcgcatcag

SEQ ID NO: 851710 - DNA, 15 bp, Homo sapiens
ctgcctcgcatcagc

SEQ ID NO: 851711 - DNA, 15 bp, Homo sapiens
tgcctcgcatcagcg

SEQ ID NO: 851712 - DNA, 15 bp, Homo sapiens
gcctcgcatcagcgt

SEQ ID NO: 851713 - DNA, 15 bp, Homo sapiens
cctcgcatcagcgtg

SEQ ID NO: 851714 - DNA, 15 bp, Homo sapiens
ctcgcatcagcgtga

SEQ ID NO: 851715 - DNA, 15 bp, Homo sapiens
tcgcatcagcgtgat

SEQ ID NO: 851716 - DNA, 15 bp, Homo sapiens
cgcatcagcgtgatc

SEQ ID NO: 851717 - DNA, 15 bp, Homo sapiens
gcatcagcgtgatca

SEQ ID NO: 851718 - DNA, 15 bp, Homo sapiens
catcagcgtgatcag

SEQ ID NO: 851719 - DNA, 15 bp, Homo sapiens
atcagcgtgatcagc

SEQ ID NO: 851720 - DNA, 15 bp, Homo sapiens
tcagcgtgatcagca

SEQ ID NO: 851721 - DNA, 15 bp, Homo sapiens
cagcgtgatcagcac

SEQ ID NO: 851722 - DNA, 15 bp, Homo sapiens
agcgtgatcagcact

SEQ ID NO: 851723 - DNA, 15 bp, Homo sapiens
gcgtgatcagcactg

SEQ ID NO: 851724 - DNA, 15 bp, Homo sapiens
cgtgatcagcactgg

SEQ ID NO: 851725 - DNA, 15 bp, Homo sapiens
gtgatcagcactggc

SEQ ID NO: 851726 - DNA, 15 bp, Homo sapiens
tgatcagcactggcc

SEQ ID NO: 851727 - DNA, 15 bp, Homo sapiens
gatcagcactggccc

SEQ ID NO: 851728 - DNA, 15 bp, Homo sapiens
atcagcactggcccc

SEQ ID NO: 851729 - DNA, 15 bp, Homo sapiens
tcagcactggcccca

SEQ ID NO: 851730 - DNA, 15 bp, Homo sapiens
cagcactggccccac

SEQ ID NO: 851731 - DNA, 15 bp, Homo sapiens
agcactggccccacg

SEQ ID NO: 851732 - DNA, 15 bp, Homo sapiens
gcactggccccacgc

SEQ ID NO: 851733 - DNA, 15 bp, Homo sapiens
cactggccccacgct

SEQ ID NO: 851734 - DNA, 15 bp, Homo sapiens
actggccccacgctt

SEQ ID NO: 851735 - DNA, 15 bp, Homo sapiens
ctggccccacgcttc

SEQ ID NO: 851736 - DNA, 15 bp, Homo sapiens
tggccccacgcttca

SEQ ID NO: 851737 - DNA, 15 bp, Homo sapiens
ggccccacgcttcag

SEQ ID NO: 851738 - DNA, 15 bp, Homo sapiens
gccccacgcttcagg

SEQ ID NO: 851739 - DNA, 15 bp, Homo sapiens
ccccacgcttcaggc

SEQ ID NO: 851740 - DNA, 15 bp, Homo sapiens
cccacgcttcaggca

SEQ ID NO: 851741 - DNA, 15 bp, Homo sapiens
ccacgcttcaggcac

SEQ ID NO: 851742 - DNA, 15 bp, Homo sapiens
cacgcttcaggcacg

SEQ ID NO: 851743 - DNA, 15 bp, Homo sapiens
acgcttcaggcacga

SEQ ID NO: 851744 - DNA, 15 bp, Homo sapiens
cgcttcaggcacgaa

SEQ ID NO: 851745 - DNA, 15 bp, Homo sapiens
gcttcaggcacgaag

SEQ ID NO: 851746 - DNA, 15 bp, Homo sapiens
cttcaggcacgaagg

SEQ ID NO: 851747 - DNA, 15 bp, Homo sapiens
ttcaggcacgaagga

SEQ ID NO: 851748 - DNA, 15 bp, Homo sapiens
tcaggcacgaaggag

SEQ ID NO: 851749 - DNA, 15 bp, Homo sapiens
caggcacgaaggagg

SEQ ID NO: 851750 - DNA, 15 bp, Homo sapiens
aggcacgaaggaggc

SEQ ID NO: 851751 - DNA, 15 bp, Homo sapiens
ggcacgaaggaggca

SEQ ID NO: 851752 - DNA, 15 bp, Homo sapiens
gcacgaaggaggcag

SEQ ID NO: 851753 - DNA, 15 bp, Homo sapiens
cacgaaggaggcagt

SEQ ID NO: 851754 - DNA, 15 bp, Homo sapiens
acgaaggaggcagtc

SEQ ID NO: 851755 - DNA, 15 bp, Homo sapiens
cgaaggaggcagtct

SEQ ID NO: 851756 - DNA, 15 bp, Homo sapiens
gaaggaggcagtctg

SEQ ID NO: 851757 - DNA, 15 bp, Homo sapiens
aaggaggcagtctgt

SEQ ID NO: 851758 - DNA, 15 bp, Homo sapiens
aggaggcagtctgtc

SEQ ID NO: 851759 - DNA, 15 bp, Homo sapiens
ggaggcagtctgtcc

SEQ ID NO: 851760 - DNA, 15 bp, Homo sapiens
gaggcagtctgtcct

SEQ ID NO: 851761 - DNA, 15 bp, Homo sapiens
aggcagtctgtcctg

SEQ ID NO: 851762 - DNA, 15 bp, Homo sapiens
ggcagtctgtcctga

SEQ ID NO: 851763 - DNA, 15 bp, Homo sapiens
gcagtctgtcctgaa

SEQ ID NO: 851764 - DNA, 15 bp, Homo sapiens
cagtctgtcctgaac

SEQ ID NO: 851765 - DNA, 15 bp, Homo sapiens
agtctgtcctgaacc

SEQ ID NO: 851766 - DNA, 15 bp, Homo sapiens
gtctgtcctgaacct

SEQ ID NO: 851767 - DNA, 15 bp, Homo sapiens
tctgtcctgaacctg

SEQ ID NO: 851768 - DNA, 15 bp, Homo sapiens
ctgtcctgaacctga

SEQ ID NO: 851769 - DNA, 15 bp, Homo sapiens
tgtcctgaacctgat

SEQ ID NO: 851770 - DNA, 15 bp, Homo sapiens
gtcctgaacctgatg

SEQ ID NO: 851771 - DNA, 15 bp, Homo sapiens
tcctgaacctgatga

SEQ ID NO: 851772 - DNA, 15 bp, Homo sapiens
cctgaacctgatgac

SEQ ID NO: 851773 - DNA, 15 bp, Homo sapiens
ctgaacctgatgaca

SEQ ID NO: 851774 - DNA, 15 bp, Homo sapiens
tgaacctgatgacac

SEQ ID NO: 851775 - DNA, 15 bp, Homo sapiens
gaacctgatgacaca

SEQ ID NO: 851776 - DNA, 15 bp, Homo sapiens
aacctgatgacacac

SEQ ID NO: 851777 - DNA, 15 bp, Homo sapiens
acctgatgacacact

SEQ ID NO: 851778 - DNA, 15 bp, Homo sapiens
cctgatgacacactc

SEQ ID NO: 851779 - DNA, 15 bp, Homo sapiens
ctgatgacacactca

SEQ ID NO: 851780 - DNA, 15 bp, Homo sapiens
tgatgacacactcag

SEQ ID NO: 851781 - DNA, 15 bp, Homo sapiens
gatgacacactcagt

SEQ ID NO: 851782 - DNA, 15 bp, Homo sapiens
atgacacactcagtt

SEQ ID NO: 851783 - DNA, 15 bp, Homo sapiens
tgacacactcagtta

SEQ ID NO: 851784 - DNA, 15 bp, Homo sapiens
gacacactcagttaa

SEQ ID NO: 851785 - DNA, 15 bp, Homo sapiens
acacactcagttaac

SEQ ID NO: 851786 - DNA, 15 bp, Homo sapiens
cacactcagttaacc

SEQ ID NO: 851787 - DNA, 15 bp, Homo sapiens
acactcagttaacca

SEQ ID NO: 851788 - DNA, 15 bp, Homo sapiens
cactcagttaaccaa

SEQ ID NO: 851789 - DNA, 15 bp, Homo sapiens
actcagttaaccaag

SEQ ID NO: 851790 - DNA, 15 bp, Homo sapiens
ctcagttaaccaagg

SEQ ID NO: 851791 - DNA, 15 bp, Homo sapiens
tcagttaaccaaggt

SEQ ID NO: 851792 - DNA, 15 bp, Homo sapiens
cagttaaccaaggtc

SEQ ID NO: 851793 - DNA, 15 bp, Homo sapiens
agttaaccaaggtca

SEQ ID NO: 851794 - DNA, 15 bp, Homo sapiens
gttaaccaaggtcag

SEQ ID NO: 851795 - DNA, 15 bp, Homo sapiens
ttaaccaaggtcaga

SEQ ID NO: 851796 - DNA, 15 bp, Homo sapiens
taaccaaggtcagaa

SEQ ID NO: 851797 - DNA, 15 bp, Homo sapiens
aaccaaggtcagaac

SEQ ID NO: 851798 - DNA, 15 bp, Homo sapiens
accaaggtcagaaca

SEQ ID NO: 851799 - DNA, 15 bp, Homo sapiens
ccaaggtcagaacat

SEQ ID NO: 851800 - DNA, 15 bp, Homo sapiens
caaggtcagaacatt

SEQ ID NO: 851801 - DNA, 15 bp, Homo sapiens
aaggtcagaacattc

SEQ ID NO: 851802 - DNA, 15 bp, Homo sapiens
aggtcagaacattca

SEQ ID NO: 851803 - DNA, 15 bp, Homo sapiens
ggtcagaacattcac

SEQ ID NO: 851804 - DNA, 15 bp, Homo sapiens
gtcagaacattcacc

SEQ ID NO: 851805 - DNA, 15 bp, Homo sapiens
tcagaacattcaccg

SEQ ID NO: 851806 - DNA, 15 bp, Homo sapiens
cagaacattcaccga

SEQ ID NO: 851807 - DNA, 15 bp, Homo sapiens
agaacattcaccgaa

SEQ ID NO: 851808 - DNA, 15 bp, Homo sapiens
gaacattcaccgaaa

SEQ ID NO: 851809 - DNA, 15 bp, Homo sapiens
aacattcaccgaaag

SEQ ID NO: 851810 - DNA, 15 bp, Homo sapiens
acattcaccgaaaga

SEQ ID NO: 851811 - DNA, 15 bp, Homo sapiens
cattcaccgaaagac

SEQ ID NO: 851812 - DNA, 15 bp, Homo sapiens
attcaccgaaagaca

SEQ ID NO: 851813 - DNA, 15 bp, Homo sapiens
ttcaccgaaagacaa

SEQ ID NO: 851814 - DNA, 15 bp, Homo sapiens
tcaccgaaagacaac

SEQ ID NO: 851815 - DNA, 15 bp, Homo sapiens
caccgaaagacaaca

SEQ ID NO: 851816 - DNA, 15 bp, Homo sapiens
accgaaagacaacag

SEQ ID NO: 851817 - DNA, 15 bp, Homo sapiens
ccgaaagacaacagc

SEQ ID NO: 851818 - DNA, 15 bp, Homo sapiens
cgaaagacaacagca

SEQ ID NO: 851819 - DNA, 15 bp, Homo sapiens
gaaagacaacagcat

SEQ ID NO: 851820 - DNA, 15 bp, Homo sapiens
aaagacaacagcatc

SEQ ID NO: 851821 - DNA, 15 bp, Homo sapiens
aagacaacagcatcc

SEQ ID NO: 851822 - DNA, 15 bp, Homo sapiens
agacaacagcatcca

SEQ ID NO: 851823 - DNA, 15 bp, Homo sapiens
gacaacagcatccac

SEQ ID NO: 851824 - DNA, 15 bp, Homo sapiens
acaacagcatccaca

SEQ ID NO: 851825 - DNA, 15 bp, Homo sapiens
caacagcatccacac

SEQ ID NO: 851826 - DNA, 15 bp, Homo sapiens
aacagcatccacacg

SEQ ID NO: 851827 - DNA, 15 bp, Homo sapiens
acagcatccacacga

SEQ ID NO: 851828 - DNA, 15 bp, Homo sapiens
cagcatccacacgaa

SEQ ID NO: 851829 - DNA, 15 bp, Homo sapiens
agcatccacacgaaa

SEQ ID NO: 851830 - DNA, 15 bp, Homo sapiens
gcatccacacgaaaa

SEQ ID NO: 851831 - DNA, 15 bp, Homo sapiens
catccacacgaaaag

SEQ ID NO: 851832 - DNA, 15 bp, Homo sapiens
atccacacgaaaagt

SEQ ID NO: 851833 - DNA, 15 bp, Homo sapiens
tccacacgaaaagtg

SEQ ID NO: 851834 - DNA, 15 bp, Homo sapiens
ccacacgaaaagtgt

SEQ ID NO: 851835 - DNA, 15 bp, Homo sapiens
cacacgaaaagtgtc

SEQ ID NO: 851836 - DNA, 15 bp, Homo sapiens
acacgaaaagtgtca

SEQ ID NO: 851837 - DNA, 15 bp, Homo sapiens
cacgaaaagtgtcac

SEQ ID NO: 851838 - DNA, 15 bp, Homo sapiens
acgaaaagtgtcact

SEQ ID NO: 851839 - DNA, 15 bp, Homo sapiens
cgaaaagtgtcactg

SEQ ID NO: 851840 - DNA, 15 bp, Homo sapiens
gaaaagtgtcactgg

SEQ ID NO: 851841 - DNA, 15 bp, Homo sapiens
aaaagtgtcactggc

SEQ ID NO: 851842 - DNA, 15 bp, Homo sapiens
aaagtgtcactggcc

SEQ ID NO: 851843 - DNA, 15 bp, Homo sapiens
aagtgtcactggccc

SEQ ID NO: 851844 - DNA, 15 bp, Homo sapiens
agtgtcactggcccc

SEQ ID NO: 851845 - DNA, 15 bp, Homo sapiens
gtgtcactggcccct

SEQ ID NO: 851846 - DNA, 15 bp, Homo sapiens
tgtcactggcccctc

SEQ ID NO: 851847 - DNA, 15 bp, Homo sapiens
gtcactggcccctca

SEQ ID NO: 851848 - DNA, 15 bp, Homo sapiens
tcactggcccctcag

SEQ ID NO: 851849 - DNA, 15 bp, Homo sapiens
cactggcccctcagg

SEQ ID NO: 851850 - DNA, 15 bp, Homo sapiens
actggcccctcaggc

SEQ ID NO: 851851 - DNA, 15 bp, Homo sapiens
ctggcccctcaggca

SEQ ID NO: 851852 - DNA, 15 bp, Homo sapiens
tggcccctcaggcaa

SEQ ID NO: 851853 - DNA, 15 bp, Homo sapiens
ggcccctcaggcaaa

SEQ ID NO: 851854 - DNA, 15 bp, Homo sapiens
gcccctcaggcaaac

SEQ ID NO: 851855 - DNA, 15 bp, Homo sapiens
cccctcaggcaaact

SEQ ID NO: 851856 - DNA, 15 bp, Homo sapiens
ccctcaggcaaactt

SEQ ID NO: 851857 - DNA, 15 bp, Homo sapiens
cctcaggcaaacttg

SEQ ID NO: 851858 - DNA, 15 bp, Homo sapiens
ctcaggcaaacttga

SEQ ID NO: 851859 - DNA, 15 bp, Homo sapiens
tcaggcaaacttgac

SEQ ID NO: 851860 - DNA, 15 bp, Homo sapiens
caggcaaacttgact

SEQ ID NO: 851861 - DNA, 15 bp, Homo sapiens
aggcaaacttgactg

SEQ ID NO: 851862 - DNA, 15 bp, Homo sapiens
ggcaaacttgactga

SEQ ID NO: 851863 - DNA, 15 bp, Homo sapiens
gcaaacttgactgaa

SEQ ID NO: 851864 - DNA, 15 bp, Homo sapiens
caaacttgactgaac

SEQ ID NO: 851865 - DNA, 15 bp, Homo sapiens
aaacttgactgaact

SEQ ID NO: 851866 - DNA, 15 bp, Homo sapiens
aacttgactgaactg

SEQ ID NO: 851867 - DNA, 15 bp, Homo sapiens
acttgactgaactgg

SEQ ID NO: 851868 - DNA, 15 bp, Homo sapiens
cttgactgaactgga

SEQ ID NO: 851869 - DNA, 15 bp, Homo sapiens
ttgactgaactggat

SEQ ID NO: 851870 - DNA, 15 bp, Homo sapiens
tgactgaactggata

SEQ ID NO: 851871 - DNA, 15 bp, Homo sapiens
gactgaactggatat

SEQ ID NO: 851872 - DNA, 15 bp, Homo sapiens
actgaactggatata

SEQ ID NO: 851873 - DNA, 15 bp, Homo sapiens
ctgaactggatatat

SEQ ID NO: 851874 - DNA, 15 bp, Homo sapiens
tgaactggatatata

SEQ ID NO: 851875 - DNA, 15 bp, Homo sapiens
gaactggatatatat

SEQ ID NO: 851876 - DNA, 15 bp, Homo sapiens
aactggatatatatt

SEQ ID NO: 851877 - DNA, 15 bp, Homo sapiens
actggatatatattc

SEQ ID NO: 851878 - DNA, 15 bp, Homo sapiens
ctggatatatattca

SEQ ID NO: 851879 - DNA, 15 bp, Homo sapiens
tggatatatattcaa

SEQ ID NO: 851880 - DNA, 15 bp, Homo sapiens
ggatatatattcaag

SEQ ID NO: 851881 - DNA, 15 bp, Homo sapiens
gatatatattcaaga

SEQ ID NO: 851882 - DNA, 15 bp, Homo sapiens
atatatattcaagaa

SEQ ID NO: 851883 - DNA, 15 bp, Homo sapiens
tatatattcaagaag

SEQ ID NO: 851884 - DNA, 15 bp, Homo sapiens
atatattcaagaagg

SEQ ID NO: 851885 - DNA, 15 bp, Homo sapiens
tatattcaagaaggt

SEQ ID NO: 851886 - DNA, 15 bp, Homo sapiens
atattcaagaaggtt

SEQ ID NO: 851887 - DNA, 15 bp, Homo sapiens
tattcaagaaggtta

SEQ ID NO: 851888 - DNA, 15 bp, Homo sapiens
attcaagaaggttat

SEQ ID NO: 851889 - DNA, 15 bp, Homo sapiens
ttcaagaaggttatc

SEQ ID NO: 851890 - DNA, 15 bp, Homo sapiens
tcaagaaggttatct

SEQ ID NO: 851891 - DNA, 15 bp, Homo sapiens
caagaaggttatctc

SEQ ID NO: 851892 - DNA, 15 bp, Homo sapiens
aagaaggttatctca

SEQ ID NO: 851893 - DNA, 15 bp, Homo sapiens
agaaggttatctcaa

SEQ ID NO: 851894 - DNA, 15 bp, Homo sapiens
gaaggttatctcaag

SEQ ID NO: 851895 - DNA, 15 bp, Homo sapiens
aaggttatctcaaga

SEQ ID NO: 851896 - DNA, 15 bp, Homo sapiens
aggttatctcaagaa

SEQ ID NO: 851897 - DNA, 15 bp, Homo sapiens
ggttatctcaagaaa

SEQ ID NO: 851898 - DNA, 15 bp, Homo sapiens
gttatctcaagaaac

SEQ ID NO: 851899 - DNA, 15 bp, Homo sapiens
ttatctcaagaaact

SEQ ID NO: 851900 - DNA, 15 bp, Homo sapiens
tatctcaagaaactg

SEQ ID NO: 851901 - DNA, 15 bp, Homo sapiens
atctcaagaaactgg

SEQ ID NO: 851902 - DNA, 15 bp, Homo sapiens
tctcaagaaactggc

SEQ ID NO: 851903 - DNA, 15 bp, Homo sapiens
ctcaagaaactggct

SEQ ID NO: 851904 - DNA, 15 bp, Homo sapiens
tcaagaaactggctt

SEQ ID NO: 851905 - DNA, 15 bp, Homo sapiens
caagaaactggcttg

SEQ ID NO: 851906 - DNA, 15 bp, Homo sapiens
aagaaactggcttgg

SEQ ID NO: 851907 - DNA, 15 bp, Homo sapiens
agaaactggcttgga

SEQ ID NO: 851908 - DNA, 15 bp, Homo sapiens
gaaactggcttggaa

SEQ ID NO: 851909 - DNA, 15 bp, Homo sapiens
aaactggcttggaaa

SEQ ID NO: 851910 - DNA, 15 bp, Homo sapiens
aactggcttggaaat

SEQ ID NO: 851911 - DNA, 15 bp, Homo sapiens
actggcttggaaata

SEQ ID NO: 851912 - DNA, 15 bp, Homo sapiens
ctggcttggaaataa

SEQ ID NO: 851913 - DNA, 15 bp, Homo sapiens
tggcttggaaataag

SEQ ID NO: 851914 - DNA, 15 bp, Homo sapiens
ggcttggaaataagt

SEQ ID NO: 851915 - DNA, 15 bp, Homo sapiens
gcttggaaataagtg

SEQ ID NO: 851916 - DNA, 15 bp, Homo sapiens
cttggaaataagtga

SEQ ID NO: 851917 - DNA, 15 bp, Homo sapiens
ttggaaataagtgaa

SEQ ID NO: 851918 - DNA, 15 bp, Homo sapiens
tggaaataagtgaag

SEQ ID NO: 851919 - DNA, 15 bp, Homo sapiens
ggaaataagtgaaga

SEQ ID NO: 851920 - DNA, 15 bp, Homo sapiens
gaaataagtgaagaa

SEQ ID NO: 851921 - DNA, 15 bp, Homo sapiens
aaataagtgaagaaa

SEQ ID NO: 851922 - DNA, 15 bp, Homo sapiens
aataagtgaagaaat

SEQ ID NO: 851923 - DNA, 15 bp, Homo sapiens
ataagtgaagaaatt

SEQ ID NO: 851924 - DNA, 15 bp, Homo sapiens
taagtgaagaaatta

SEQ ID NO: 851925 - DNA, 15 bp, Homo sapiens
aagtgaagaaattaa

SEQ ID NO: 851926 - DNA, 15 bp, Homo sapiens
agtgaagaaattaac

SEQ ID NO: 851927 - DNA, 15 bp, Homo sapiens
gtgaagaaattaacg

SEQ ID NO: 851928 - DNA, 15 bp, Homo sapiens
tgaagaaattaacga

SEQ ID NO: 851929 - DNA, 15 bp, Homo sapiens
gaagaaattaacgaa

SEQ ID NO: 851930 - DNA, 15 bp, Homo sapiens
aagaaattaacgaag

SEQ ID NO: 851931 - DNA, 15 bp, Homo sapiens
agaaattaacgaaga

SEQ ID NO: 851932 - DNA, 15 bp, Homo sapiens
gaaattaacgaagaa

SEQ ID NO: 851933 - DNA, 15 bp, Homo sapiens
aaattaacgaagaag

SEQ ID NO: 851934 - DNA, 15 bp, Homo sapiens
aattaacgaagaaga

SEQ ID NO: 851935 - DNA, 15 bp, Homo sapiens
attaacgaagaagac

SEQ ID NO: 851936 - DNA, 15 bp, Homo sapiens
ttaacgaagaagact

SEQ ID NO: 851937 - DNA, 15 bp, Homo sapiens
taacgaagaagactt

SEQ ID NO: 851938 - DNA, 15 bp, Homo sapiens
aacgaagaagactta

SEQ ID NO: 851939 - DNA, 15 bp, Homo sapiens
acgaagaagacttaa

SEQ ID NO: 851940 - DNA, 15 bp, Homo sapiens
cgaagaagacttaaa

SEQ ID NO: 851941 - DNA, 15 bp, Homo sapiens
gaagaagacttaaag

SEQ ID NO: 851942 - DNA, 15 bp, Homo sapiens
aagaagacttaaagg

SEQ ID NO: 851943 - DNA, 15 bp, Homo sapiens
agaagacttaaaggt

SEQ ID NO: 851944 - DNA, 15 bp, Homo sapiens
gaagacttaaaggta

SEQ ID NO: 851945 - DNA, 15 bp, Homo sapiens
aagacttaaaggtag

SEQ ID NO: 851946 - DNA, 15 bp, Homo sapiens
agacttaaaggtagg

SEQ ID NO: 851947 - DNA, 15 bp, Homo sapiens
gacttaaaggtaggt

SEQ ID NO: 851948 - DNA, 15 bp, Homo sapiens
acttaaaggtaggta

SEQ ID NO: 851949 - DNA, 15 bp, Homo sapiens
cttaaaggtaggtat

SEQ ID NO: 851950 - DNA, 15 bp, Homo sapiens
ttaaaggtaggtata

SEQ ID NO: 851951 - DNA, 15 bp, Homo sapiens
taaaggtaggtatac

SEQ ID NO: 851952 - DNA, 15 bp, Homo sapiens
aaaggtaggtataca

SEQ ID NO: 851953 - DNA, 15 bp, Homo sapiens
aaggtaggtatacat

SEQ ID NO: 851954 - DNA, 15 bp, Homo sapiens
aggtaggtatacatc

SEQ ID NO: 851955 - DNA, 15 bp, Homo sapiens
ggtaggtatacatcg

SEQ ID NO: 851956 - DNA, 15 bp, Homo sapiens
gtaggtatacatcgc

SEQ ID NO: 851957 - DNA, 15 bp, Homo sapiens
taggtatacatcgct

SEQ ID NO: 851958 - DNA, 15 bp, Homo sapiens
aggtatacatcgctt

SEQ ID NO: 851959 - DNA, 15 bp, Homo sapiens
ggtatacatcgcttg

SEQ ID NO: 851960 - DNA, 15 bp, Homo sapiens
gtatacatcgcttgg

SEQ ID NO: 851961 - DNA, 15 bp, Homo sapiens
tatacatcgcttggg

SEQ ID NO: 851962 - DNA, 15 bp, Homo sapiens
atacatcgcttgggg

SEQ ID NO: 851963 - DNA, 15 bp, Homo sapiens
tacatcgcttggggg

SEQ ID NO: 851964 - DNA, 15 bp, Homo sapiens
acatcgcttgggggt

SEQ ID NO: 851965 - DNA, 15 bp, Homo sapiens
catcgcttgggggta

SEQ ID NO: 851966 - DNA, 15 bp, Homo sapiens
atcgcttgggggtat

SEQ ID NO: 851967 - DNA, 15 bp, Homo sapiens
tcgcttgggggtatt

SEQ ID NO: 851968 - DNA, 15 bp, Homo sapiens
cgcttgggggtattt

SEQ ID NO: 851969 - DNA, 15 bp, Homo sapiens
gcttgggggtatttc

SEQ ID NO: 851970 - DNA, 15 bp, Homo sapiens
cttgggggtatttca

SEQ ID NO: 851971 - DNA, 15 bp, Homo sapiens
ttgggggtatttcac

SEQ ID NO: 851972 - DNA, 15 bp, Homo sapiens
tgggggtatttcacc

SEQ ID NO: 851973 - DNA, 15 bp, Homo sapiens
gggggtatttcaccc

SEQ ID NO: 851974 - DNA, 15 bp, Homo sapiens
ggggtatttcacccc

SEQ ID NO: 851975 - DNA, 15 bp, Homo sapiens
gggtatttcacccca

SEQ ID NO: 851976 - DNA, 15 bp, Homo sapiens
ggtatttcaccccac

SEQ ID NO: 851977 - DNA, 15 bp, Homo sapiens
gtatttcaccccaca

SEQ ID NO: 851978 - DNA, 15 bp, Homo sapiens
tatttcaccccacag

SEQ ID NO: 851979 - DNA, 15 bp, Homo sapiens
atttcaccccacaga

SEQ ID NO: 851980 - DNA, 15 bp, Homo sapiens
tttcaccccacagaa

SEQ ID NO: 851981 - DNA, 15 bp, Homo sapiens
ttcaccccacagaat

SEQ ID NO: 851982 - DNA, 15 bp, Homo sapiens
tcaccccacagaatg

SEQ ID NO: 851983 - DNA, 15 bp, Homo sapiens
caccccacagaatgc

SEQ ID NO: 851984 - DNA, 15 bp, Homo sapiens
accccacagaatgca

SEQ ID NO: 851985 - DNA, 15 bp, Homo sapiens
ccccacagaatgcaa

SEQ ID NO: 851986 - DNA, 15 bp, Homo sapiens
cccacagaatgcaat

SEQ ID NO: 851987 - DNA, 15 bp, Homo sapiens
ccacagaatgcaatt

SEQ ID NO: 851988 - DNA, 15 bp, Homo sapiens
cacagaatgcaattg

SEQ ID NO: 851989 - DNA, 15 bp, Homo sapiens
acagaatgcaattga

SEQ ID NO: 851990 - DNA, 15 bp, Homo sapiens
cagaatgcaattgag

SEQ ID NO: 851991 - DNA, 15 bp, Homo sapiens
agaatgcaattgagt

SEQ ID NO: 851992 - DNA, 15 bp, Homo sapiens
gaatgcaattgagta

SEQ ID NO: 851993 - DNA, 15 bp, Homo sapiens
aatgcaattgagtag

SEQ ID NO: 851994 - DNA, 15 bp, Homo sapiens
atgcaattgagtaga

SEQ ID NO: 851995 - DNA, 15 bp, Homo sapiens
tgcaattgagtagaa

SEQ ID NO: 851996 - DNA, 15 bp, Homo sapiens
gcaattgagtagaat

SEQ ID NO: 851997 - DNA, 15 bp, Homo sapiens
caattgagtagaatg

SEQ ID NO: 851998 - DNA, 15 bp, Homo sapiens
aattgagtagaatgc

SEQ ID NO: 851999 - DNA, 15 bp, Homo sapiens
attgagtagaatgca

SEQ ID NO: 852000 - DNA, 15 bp, Homo sapiens
ttgagtagaatgcaa

SEQ ID NO: 852001 - DNA, 15 bp, Homo sapiens
tgagtagaatgcaat

SEQ ID NO: 852002 - DNA, 15 bp, Homo sapiens
gagtagaatgcaata

SEQ ID NO: 852003 - DNA, 15 bp, Homo sapiens
agtagaatgcaatat

SEQ ID NO: 852004 - DNA, 15 bp, Homo sapiens
gtagaatgcaatatg

SEQ ID NO: 852005 - DNA, 15 bp, Homo sapiens
tagaatgcaatatgt

SEQ ID NO: 852006 - DNA, 15 bp, Homo sapiens
agaatgcaatatgta

SEQ ID NO: 852007 - DNA, 15 bp, Homo sapiens
gaatgcaatatgtag

SEQ ID NO: 852008 - DNA, 15 bp, Homo sapiens
aatgcaatatgtagc

SEQ ID NO: 852009 - DNA, 15 bp, Homo sapiens
atgcaatatgtagca

SEQ ID NO: 852010 - DNA, 15 bp, Homo sapiens
tgcaatatgtagcat

SEQ ID NO: 852011 - DNA, 15 bp, Homo sapiens
gcaatatgtagcatg

SEQ ID NO: 852012 - DNA, 15 bp, Homo sapiens
caatatgtagcatgt

SEQ ID NO: 852013 - DNA, 15 bp, Homo sapiens
aatatgtagcatgta

SEQ ID NO: 852014 - DNA, 15 bp, Homo sapiens
atatgtagcatgtaa

SEQ ID NO: 852015 - DNA, 15 bp, Homo sapiens
tatgtagcatgtaac

SEQ ID NO: 852016 - DNA, 15 bp, Homo sapiens
atgtagcatgtaaca

SEQ ID NO: 852017 - DNA, 15 bp, Homo sapiens
tgtagcatgtaacaa

SEQ ID NO: 852018 - DNA, 15 bp, Homo sapiens
gtagcatgtaacaaa

SEQ ID NO: 852019 - DNA, 15 bp, Homo sapiens
tagcatgtaacaaaa

SEQ ID NO: 852020 - DNA, 15 bp, Homo sapiens
agcatgtaacaaaat

SEQ ID NO: 852021 - DNA, 15 bp, Homo sapiens
gcatgtaacaaaatt

SEQ ID NO: 852022 - DNA, 15 bp, Homo sapiens
catgtaacaaaattt

SEQ ID NO: 852023 - DNA, 15 bp, Homo sapiens
atgtaacaaaattta

SEQ ID NO: 852024 - DNA, 15 bp, Homo sapiens
tgtaacaaaatttac

SEQ ID NO: 852025 - DNA, 15 bp, Homo sapiens
gtaacaaaatttact

SEQ ID NO: 852026 - DNA, 15 bp, Homo sapiens
taacaaaatttacta

SEQ ID NO: 852027 - DNA, 15 bp, Homo sapiens
aacaaaatttactaa

SEQ ID NO: 852028 - DNA, 15 bp, Homo sapiens
acaaaatttactaaa

SEQ ID NO: 852029 - DNA, 15 bp, Homo sapiens
caaaatttactaaaa

SEQ ID NO: 852030 - DNA, 15 bp, Homo sapiens
aaaatttactaaaat

SEQ ID NO: 852031 - DNA, 15 bp, Homo sapiens
aaatttactaaaatc

SEQ ID NO: 852032 - DNA, 15 bp, Homo sapiens
aatttactaaaatca

SEQ ID NO: 852033 - DNA, 15 bp, Homo sapiens
atttactaaaatcat

SEQ ID NO: 852034 - DNA, 15 bp, Homo sapiens
tttactaaaatcata

SEQ ID NO: 852035 - DNA, 15 bp, Homo sapiens
ttactaaaatcatag

SEQ ID NO: 852036 - DNA, 15 bp, Homo sapiens
tactaaaatcatagg

SEQ ID NO: 852037 - DNA, 15 bp, Homo sapiens
actaaaatcatagga

SEQ ID NO: 852038 - DNA, 15 bp, Homo sapiens
ctaaaatcataggat

SEQ ID NO: 852039 - DNA, 15 bp, Homo sapiens
taaaatcataggatt

SEQ ID NO: 852040 - DNA, 15 bp, Homo sapiens
aaaatcataggatta

SEQ ID NO: 852041 - DNA, 15 bp, Homo sapiens
aaatcataggattag

SEQ ID NO: 852042 - DNA, 15 bp, Homo sapiens
aatcataggattagg

SEQ ID NO: 852043 - DNA, 15 bp, Homo sapiens
atcataggattagga

SEQ ID NO: 852044 - DNA, 15 bp, Homo sapiens
tcataggattaggat

SEQ ID NO: 852045 - DNA, 15 bp, Homo sapiens
cataggattaggata

SEQ ID NO: 852046 - DNA, 15 bp, Homo sapiens
ataggattaggataa

SEQ ID NO: 852047 - DNA, 15 bp, Homo sapiens
taggattaggataag

SEQ ID NO: 852048 - DNA, 15 bp, Homo sapiens
aggattaggataagg

SEQ ID NO: 852049 - DNA, 15 bp, Homo sapiens
ggattaggataaggt

SEQ ID NO: 852050 - DNA, 15 bp, Homo sapiens
gattaggataaggtg

SEQ ID NO: 852051 - DNA, 15 bp, Homo sapiens
attaggataaggtgt

SEQ ID NO: 852052 - DNA, 15 bp, Homo sapiens
ttaggataaggtgta

SEQ ID NO: 852053 - DNA, 15 bp, Homo sapiens
taggataaggtgtat

SEQ ID NO: 852054 - DNA, 15 bp, Homo sapiens
aggataaggtgtatc

SEQ ID NO: 852055 - DNA, 15 bp, Homo sapiens
ggataaggtgtatct

SEQ ID NO: 852056 - DNA, 15 bp, Homo sapiens
gataaggtgtatctt

SEQ ID NO: 852057 - DNA, 15 bp, Homo sapiens
ataaggtgtatctta

SEQ ID NO: 852058 - DNA, 15 bp, Homo sapiens
taaggtgtatcttaa

SEQ ID NO: 852059 - DNA, 15 bp, Homo sapiens
aaggtgtatcttaaa

SEQ ID NO: 852060 - DNA, 15 bp, Homo sapiens
aggtgtatcttaaaa

SEQ ID NO: 852061 - DNA, 15 bp, Homo sapiens
ggtgtatcttaaaac

SEQ ID NO: 852062 - DNA, 15 bp, Homo sapiens
gtgtatcttaaaact

SEQ ID NO: 852063 - DNA, 15 bp, Homo sapiens
tgtatcttaaaactc

SEQ ID NO: 852064 - DNA, 15 bp, Homo sapiens
gtatcttaaaactca

SEQ ID NO: 852065 - DNA, 15 bp, Homo sapiens
tatcttaaaactcag

SEQ ID NO: 852066 - DNA, 15 bp, Homo sapiens
atcttaaaactcaga

SEQ ID NO: 852067 - DNA, 15 bp, Homo sapiens
tcttaaaactcagaa

SEQ ID NO: 852068 - DNA, 15 bp, Homo sapiens
cttaaaactcagaaa

SEQ ID NO: 852069 - DNA, 15 bp, Homo sapiens
ttaaaactcagaaag

SEQ ID NO: 852070 - DNA, 15 bp, Homo sapiens
taaaactcagaaagt

SEQ ID NO: 852071 - DNA, 15 bp, Homo sapiens
aaaactcagaaagta

SEQ ID NO: 852072 - DNA, 15 bp, Homo sapiens
aaactcagaaagtat

SEQ ID NO: 852073 - DNA, 15 bp, Homo sapiens
aactcagaaagtatg

SEQ ID NO: 852074 - DNA, 15 bp, Homo sapiens
actcagaaagtatga

SEQ ID NO: 852075 - DNA, 15 bp, Homo sapiens
ctcagaaagtatgaa

SEQ ID NO: 852076 - DNA, 15 bp, Homo sapiens
tcagaaagtatgaag

SEQ ID NO: 852077 - DNA, 15 bp, Homo sapiens
cagaaagtatgaagt

SEQ ID NO: 852078 - DNA, 15 bp, Homo sapiens
agaaagtatgaagtt

SEQ ID NO: 852079 - DNA, 15 bp, Homo sapiens
gaaagtatgaagttc

SEQ ID NO: 852080 - DNA, 15 bp, Homo sapiens
aaagtatgaagttca

SEQ ID NO: 852081 - DNA, 15 bp, Homo sapiens
aagtatgaagttcat

SEQ ID NO: 852082 - DNA, 15 bp, Homo sapiens
agtatgaagttcatt

SEQ ID NO: 852083 - DNA, 15 bp, Homo sapiens
gtatgaagttcatta

SEQ ID NO: 852084 - DNA, 15 bp, Homo sapiens
tatgaagttcattaa

SEQ ID NO: 852085 - DNA, 15 bp, Homo sapiens
atgaagttcattaat

SEQ ID NO: 852086 - DNA, 15 bp, Homo sapiens
tgaagttcattaatt

SEQ ID NO: 852087 - DNA, 15 bp, Homo sapiens
gaagttcattaatta

SEQ ID NO: 852088 - DNA, 15 bp, Homo sapiens
aagttcattaattat

SEQ ID NO: 852089 - DNA, 15 bp, Homo sapiens
agttcattaattata

SEQ ID NO: 852090 - DNA, 15 bp, Homo sapiens
gttcattaattatac

SEQ ID NO: 852091 - DNA, 15 bp, Homo sapiens
ttcattaattataca

SEQ ID NO: 852092 - DNA, 15 bp, Homo sapiens
tcattaattatacaa

SEQ ID NO: 852093 - DNA, 15 bp, Homo sapiens
cattaattatacaag

SEQ ID NO: 852094 - DNA, 15 bp, Homo sapiens
attaattatacaagc

SEQ ID NO: 852095 - DNA, 15 bp, Homo sapiens
ttaattatacaagca

SEQ ID NO: 852096 - DNA, 15 bp, Homo sapiens
taattatacaagcaa

SEQ ID NO: 852097 - DNA, 15 bp, Homo sapiens
aattatacaagcaac

SEQ ID NO: 852098 - DNA, 15 bp, Homo sapiens
attatacaagcaacg

SEQ ID NO: 852099 - DNA, 15 bp, Homo sapiens
ttatacaagcaacgt

SEQ ID NO: 852100 - DNA, 15 bp, Homo sapiens
tatacaagcaacgtt

SEQ ID NO: 852101 - DNA, 15 bp, Homo sapiens
atacaagcaacgtta

SEQ ID NO: 852102 - DNA, 15 bp, Homo sapiens
tacaagcaacgttaa

SEQ ID NO: 852103 - DNA, 15 bp, Homo sapiens
acaagcaacgttaaa

SEQ ID NO: 852104 - DNA, 15 bp, Homo sapiens
caagcaacgttaaaa

SEQ ID NO: 852105 - DNA, 15 bp, Homo sapiens
aagcaacgttaaaat

SEQ ID NO: 852106 - DNA, 15 bp, Homo sapiens
agcaacgttaaaatg

SEQ ID NO: 852107 - DNA, 15 bp, Homo sapiens
gcaacgttaaaatgt

SEQ ID NO: 852108 - DNA, 15 bp, Homo sapiens
caacgttaaaatgta

SEQ ID NO: 852109 - DNA, 15 bp, Homo sapiens
aacgttaaaatgtaa

SEQ ID NO: 852110 - DNA, 15 bp, Homo sapiens
acgttaaaatgtaaa

SEQ ID NO: 852111 - DNA, 15 bp, Homo sapiens
cgttaaaatgtaaaa

SEQ ID NO: 852112 - DNA, 15 bp, Homo sapiens
gttaaaatgtaaaat

SEQ ID NO: 852113 - DNA, 15 bp, Homo sapiens
ttaaaatgtaaaata

SEQ ID NO: 852114 - DNA, 15 bp, Homo sapiens
taaaatgtaaaataa

SEQ ID NO: 852115 - DNA, 15 bp, Homo sapiens
aaaatgtaaaataac

SEQ ID NO: 852116 - DNA, 15 bp, Homo sapiens
aaatgtaaaataaca

SEQ ID NO: 852117 - DNA, 15 bp, Homo sapiens
aatgtaaaataacaa

SEQ ID NO: 852118 - DNA, 15 bp, Homo sapiens
atgtaaaataacaaa

SEQ ID NO: 852119 - DNA, 15 bp, Homo sapiens
tgtaaaataacaaat

SEQ ID NO: 852120 - DNA, 15 bp, Homo sapiens
gtaaaataacaaatg

SEQ ID NO: 852121 - DNA, 15 bp, Homo sapiens
taaaataacaaatga

SEQ ID NO: 852122 - DNA, 15 bp, Homo sapiens
aaaataacaaatgat

SEQ ID NO: 852123 - DNA, 15 bp, Homo sapiens
aaataacaaatgatt

SEQ ID NO: 852124 - DNA, 15 bp, Homo sapiens
aataacaaatgattt

SEQ ID NO: 852125 - DNA, 15 bp, Homo sapiens
ataacaaatgatttc

SEQ ID NO: 852126 - DNA, 15 bp, Homo sapiens
taacaaatgatttct

SEQ ID NO: 852127 - DNA, 15 bp, Homo sapiens
aacaaatgatttctt

SEQ ID NO: 852128 - DNA, 15 bp, Homo sapiens
acaaatgatttcttt

SEQ ID NO: 852129 - DNA, 15 bp, Homo sapiens
caaatgatttctttt

SEQ ID NO: 852130 - DNA, 15 bp, Homo sapiens
aaatgatttcttttt

SEQ ID NO: 852131 - DNA, 15 bp, Homo sapiens
aatgatttctttttg

SEQ ID NO: 852132 - DNA, 15 bp, Homo sapiens
atgatttctttttgc

SEQ ID NO: 852133 - DNA, 15 bp, Homo sapiens
tgatttctttttgca

SEQ ID NO: 852134 - DNA, 15 bp, Homo sapiens
gatttctttttgcaa

SEQ ID NO: 852135 - DNA, 15 bp, Homo sapiens
atttctttttgcaat

SEQ ID NO: 852136 - DNA, 15 bp, Homo sapiens
tttctttttgcaatg

SEQ ID NO: 852137 - DNA, 15 bp, Homo sapiens
ttctttttgcaatgg

SEQ ID NO: 852138 - DNA, 15 bp, Homo sapiens
tctttttgcaatgga

SEQ ID NO: 852139 - DNA, 15 bp, Homo sapiens
ctttttgcaatggac

SEQ ID NO: 852140 - DNA, 15 bp, Homo sapiens
tttttgcaatggaca

SEQ ID NO: 852141 - DNA, 15 bp, Homo sapiens
ttttgcaatggacat

SEQ ID NO: 852142 - DNA, 15 bp, Homo sapiens
tttgcaatggacata

SEQ ID NO: 852143 - DNA, 15 bp, Homo sapiens
ttgcaatggacatat

SEQ ID NO: 852144 - DNA, 15 bp, Homo sapiens
tgcaatggacatatc

SEQ ID NO: 852145 - DNA, 15 bp, Homo sapiens
gcaatggacatatct

SEQ ID NO: 852146 - DNA, 15 bp, Homo sapiens
caatggacatatctc

SEQ ID NO: 852147 - DNA, 15 bp, Homo sapiens
aatggacatatctct

SEQ ID NO: 852148 - DNA, 15 bp, Homo sapiens
atggacatatctctt

SEQ ID NO: 852149 - DNA, 15 bp, Homo sapiens
tggacatatctcttc

SEQ ID NO: 852150 - DNA, 15 bp, Homo sapiens
ggacatatctcttcc

SEQ ID NO: 852151 - DNA, 15 bp, Homo sapiens
gacatatctcttccc

SEQ ID NO: 852152 - DNA, 15 bp, Homo sapiens
acatatctcttccca

SEQ ID NO: 852153 - DNA, 15 bp, Homo sapiens
catatctcttcccat

SEQ ID NO: 852154 - DNA, 15 bp, Homo sapiens
atatctcttcccata

SEQ ID NO: 852155 - DNA, 15 bp, Homo sapiens
tatctcttcccataa

SEQ ID NO: 852156 - DNA, 15 bp, Homo sapiens
atctcttcccataaa

SEQ ID NO: 852157 - DNA, 15 bp, Homo sapiens
tctcttcccataaaa

SEQ ID NO: 852158 - DNA, 15 bp, Homo sapiens
ctcttcccataaaat

SEQ ID NO: 852159 - DNA, 15 bp, Homo sapiens
tcttcccataaaatg

SEQ ID NO: 852160 - DNA, 15 bp, Homo sapiens
cttcccataaaatgg

SEQ ID NO: 852161 - DNA, 15 bp, Homo sapiens
ttcccataaaatggg

SEQ ID NO: 852162 - DNA, 15 bp, Homo sapiens
tcccataaaatggga

SEQ ID NO: 852163 - DNA, 15 bp, Homo sapiens
cccataaaatgggaa

SEQ ID NO: 852164 - DNA, 15 bp, Homo sapiens
ccataaaatgggaaa

SEQ ID NO: 852165 - DNA, 15 bp, Homo sapiens
cataaaatgggaaag

SEQ ID NO: 852166 - DNA, 15 bp, Homo sapiens
ataaaatgggaaagg

SEQ ID NO: 852167 - DNA, 15 bp, Homo sapiens
taaaatgggaaagga

SEQ ID NO: 852168 - DNA, 15 bp, Homo sapiens
aaaatgggaaaggat

SEQ ID NO: 852169 - DNA, 15 bp, Homo sapiens
aaatgggaaaggatt

SEQ ID NO: 852170 - DNA, 15 bp, Homo sapiens
aatgggaaaggattt

SEQ ID NO: 852171 - DNA, 15 bp, Homo sapiens
atgggaaaggattta

SEQ ID NO: 852172 - DNA, 15 bp, Homo sapiens
tgggaaaggatttag

SEQ ID NO: 852173 - DNA, 15 bp, Homo sapiens
gggaaaggatttagt

SEQ ID NO: 852174 - DNA, 15 bp, Homo sapiens
ggaaaggatttagtt

SEQ ID NO: 852175 - DNA, 15 bp, Homo sapiens
gaaaggatttagttt

SEQ ID NO: 852176 - DNA, 15 bp, Homo sapiens
aaaggatttagtttt

SEQ ID NO: 852177 - DNA, 15 bp, Homo sapiens
aaggatttagttttt

SEQ ID NO: 852178 - DNA, 15 bp, Homo sapiens
aggatttagtttttg

SEQ ID NO: 852179 - DNA, 15 bp, Homo sapiens
ggatttagtttttgg

SEQ ID NO: 852180 - DNA, 15 bp, Homo sapiens
gatttagtttttggt

SEQ ID NO: 852181 - DNA, 15 bp, Homo sapiens
atttagtttttggtc

SEQ ID NO: 852182 - DNA, 15 bp, Homo sapiens
tttagtttttggtcc

SEQ ID NO: 852183 - DNA, 15 bp, Homo sapiens
ttagtttttggtcct

SEQ ID NO: 852184 - DNA, 15 bp, Homo sapiens
tagtttttggtcctc

SEQ ID NO: 852185 - DNA, 15 bp, Homo sapiens
agtttttggtcctct

SEQ ID NO: 852186 - DNA, 15 bp, Homo sapiens
gtttttggtcctcta

SEQ ID NO: 852187 - DNA, 15 bp, Homo sapiens
tttttggtcctctac

SEQ ID NO: 852188 - DNA, 15 bp, Homo sapiens
ttttggtcctctact

SEQ ID NO: 852189 - DNA, 15 bp, Homo sapiens
tttggtcctctacta

SEQ ID NO: 852190 - DNA, 15 bp, Homo sapiens
ttggtcctctactaa

SEQ ID NO: 852191 - DNA, 15 bp, Homo sapiens
tggtcctctactaag

SEQ ID NO: 852192 - DNA, 15 bp, Homo sapiens
ggtcctctactaagc

SEQ ID NO: 852193 - DNA, 15 bp, Homo sapiens
gtcctctactaagcc

SEQ ID NO: 852194 - DNA, 15 bp, Homo sapiens
tcctctactaagcca

SEQ ID NO: 852195 - DNA, 15 bp, Homo sapiens
cctctactaagccag

SEQ ID NO: 852196 - DNA, 15 bp, Homo sapiens
ctctactaagccagt

SEQ ID NO: 852197 - DNA, 15 bp, Homo sapiens
tctactaagccagtg

SEQ ID NO: 852198 - DNA, 15 bp, Homo sapiens
ctactaagccagtga

SEQ ID NO: 852199 - DNA, 15 bp, Homo sapiens
tactaagccagtgat

SEQ ID NO: 852200 - DNA, 15 bp, Homo sapiens
actaagccagtgata

SEQ ID NO: 852201 - DNA, 15 bp, Homo sapiens
ctaagccagtgataa

SEQ ID NO: 852202 - DNA, 15 bp, Homo sapiens
taagccagtgataac

SEQ ID NO: 852203 - DNA, 15 bp, Homo sapiens
aagccagtgataact

SEQ ID NO: 852204 - DNA, 15 bp, Homo sapiens
agccagtgataactg

SEQ ID NO: 852205 - DNA, 15 bp, Homo sapiens
gccagtgataactgt

SEQ ID NO: 852206 - DNA, 15 bp, Homo sapiens
ccagtgataactgtg

SEQ ID NO: 852207 - DNA, 15 bp, Homo sapiens
cagtgataactgtga

SEQ ID NO: 852208 - DNA, 15 bp, Homo sapiens
agtgataactgtgac

SEQ ID NO: 852209 - DNA, 15 bp, Homo sapiens
gtgataactgtgact

SEQ ID NO: 852210 - DNA, 15 bp, Homo sapiens
tgataactgtgacta

SEQ ID NO: 852211 - DNA, 15 bp, Homo sapiens
gataactgtgactat

SEQ ID NO: 852212 - DNA, 15 bp, Homo sapiens
ataactgtgactata

SEQ ID NO: 852213 - DNA, 15 bp, Homo sapiens
taactgtgactataa

SEQ ID NO: 852214 - DNA, 15 bp, Homo sapiens
aactgtgactataag

SEQ ID NO: 852215 - DNA, 15 bp, Homo sapiens
actgtgactataagt

SEQ ID NO: 852216 - DNA, 15 bp, Homo sapiens
ctgtgactataagtt

SEQ ID NO: 852217 - DNA, 15 bp, Homo sapiens
tgtgactataagtta

SEQ ID NO: 852218 - DNA, 15 bp, Homo sapiens
gtgactataagttag

SEQ ID NO: 852219 - DNA, 15 bp, Homo sapiens
tgactataagttaga

SEQ ID NO: 852220 - DNA, 15 bp, Homo sapiens
gactataagttagaa

SEQ ID NO: 852221 - DNA, 15 bp, Homo sapiens
actataagttagaaa

SEQ ID NO: 852222 - DNA, 15 bp, Homo sapiens
ctataagttagaaag

SEQ ID NO: 852223 - DNA, 15 bp, Homo sapiens
tataagttagaaagc

SEQ ID NO: 852224 - DNA, 15 bp, Homo sapiens
ataagttagaaagca

SEQ ID NO: 852225 - DNA, 15 bp, Homo sapiens
taagttagaaagcat

SEQ ID NO: 852226 - DNA, 15 bp, Homo sapiens
aagttagaaagcatt

SEQ ID NO: 852227 - DNA, 15 bp, Homo sapiens
agttagaaagcattt

SEQ ID NO: 852228 - DNA, 15 bp, Homo sapiens
gttagaaagcatttg

SEQ ID NO: 852229 - DNA, 15 bp, Homo sapiens
ttagaaagcatttgc

SEQ ID NO: 852230 - DNA, 15 bp, Homo sapiens
tagaaagcatttgct

SEQ ID NO: 852231 - DNA, 15 bp, Homo sapiens
agaaagcatttgctt

SEQ ID NO: 852232 - DNA, 15 bp, Homo sapiens
gaaagcatttgcttt

SEQ ID NO: 852233 - DNA, 15 bp, Homo sapiens
aaagcatttgcttta

SEQ ID NO: 852234 - DNA, 15 bp, Homo sapiens
aagcatttgctttat

SEQ ID NO: 852235 - DNA, 15 bp, Homo sapiens
agcatttgctttatt

SEQ ID NO: 852236 - DNA, 15 bp, Homo sapiens
gcatttgctttatta

SEQ ID NO: 852237 - DNA, 15 bp, Homo sapiens
catttgctttattac

SEQ ID NO: 852238 - DNA, 15 bp, Homo sapiens
atttgctttattacc

SEQ ID NO: 852239 - DNA, 15 bp, Homo sapiens
tttgctttattacca

SEQ ID NO: 852240 - DNA, 15 bp, Homo sapiens
ttgctttattaccat

SEQ ID NO: 852241 - DNA, 15 bp, Homo sapiens
tgctttattaccatc

SEQ ID NO: 852242 - DNA, 15 bp, Homo sapiens
gctttattaccatct

SEQ ID NO: 852243 - DNA, 15 bp, Homo sapiens
ctttattaccatctt

SEQ ID NO: 852244 - DNA, 15 bp, Homo sapiens
tttattaccatcttg

SEQ ID NO: 852245 - DNA, 15 bp, Homo sapiens
ttattaccatcttga

SEQ ID NO: 852246 - DNA, 15 bp, Homo sapiens
tattaccatcttgaa

SEQ ID NO: 852247 - DNA, 15 bp, Homo sapiens
attaccatcttgaac

SEQ ID NO: 852248 - DNA, 15 bp, Homo sapiens
ttaccatcttgaacc

SEQ ID NO: 852249 - DNA, 15 bp, Homo sapiens
taccatcttgaaccc

SEQ ID NO: 852250 - DNA, 15 bp, Homo sapiens
accatcttgaaccct

SEQ ID NO: 852251 - DNA, 15 bp, Homo sapiens
ccatcttgaaccctc

SEQ ID NO: 852252 - DNA, 15 bp, Homo sapiens
catcttgaaccctct

SEQ ID NO: 852253 - DNA, 15 bp, Homo sapiens
atcttgaaccctctg

SEQ ID NO: 852254 - DNA, 15 bp, Homo sapiens
tcttgaaccctctgt

SEQ ID NO: 852255 - DNA, 15 bp, Homo sapiens
cttgaaccctctgtg

SEQ ID NO: 852256 - DNA, 15 bp, Homo sapiens
ttgaaccctctgtgg

SEQ ID NO: 852257 - DNA, 15 bp, Homo sapiens
tgaaccctctgtggg

SEQ ID NO: 852258 - DNA, 15 bp, Homo sapiens
gaaccctctgtggga

SEQ ID NO: 852259 - DNA, 15 bp, Homo sapiens
aaccctctgtgggaa

SEQ ID NO: 852260 - DNA, 15 bp, Homo sapiens
accctctgtgggaag

SEQ ID NO: 852261 - DNA, 15 bp, Homo sapiens
ccctctgtgggaaga

SEQ ID NO: 852262 - DNA, 15 bp, Homo sapiens
cctctgtgggaagag

SEQ ID NO: 852263 - DNA, 15 bp, Homo sapiens
ctctgtgggaagagg

SEQ ID NO: 852264 - DNA, 15 bp, Homo sapiens
tctgtgggaagaggt

SEQ ID NO: 852265 - DNA, 15 bp, Homo sapiens
ctgtgggaagaggtg

SEQ ID NO: 852266 - DNA, 15 bp, Homo sapiens
tgtgggaagaggtgc

SEQ ID NO: 852267 - DNA, 15 bp, Homo sapiens
gtgggaagaggtgca

SEQ ID NO: 852268 - DNA, 15 bp, Homo sapiens
tgggaagaggtgcag

SEQ ID NO: 852269 - DNA, 15 bp, Homo sapiens
gggaagaggtgcagt

SEQ ID NO: 852270 - DNA, 15 bp, Homo sapiens
ggaagaggtgcagta

SEQ ID NO: 852271 - DNA, 15 bp, Homo sapiens
gaagaggtgcagtat

SEQ ID NO: 852272 - DNA, 15 bp, Homo sapiens
aagaggtgcagtata

SEQ ID NO: 852273 - DNA, 15 bp, Homo sapiens
agaggtgcagtataa

SEQ ID NO: 852274 - DNA, 15 bp, Homo sapiens
gaggtgcagtataaa

SEQ ID NO: 852275 - DNA, 15 bp, Homo sapiens
aggtgcagtataaat

SEQ ID NO: 852276 - DNA, 15 bp, Homo sapiens
ggtgcagtataaata

SEQ ID NO: 852277 - DNA, 15 bp, Homo sapiens
gtgcagtataaataa

SEQ ID NO: 852278 - DNA, 15 bp, Homo sapiens
tgcagtataaataac

SEQ ID NO: 852279 - DNA, 15 bp, Homo sapiens
gcagtataaataact

SEQ ID NO: 852280 - DNA, 15 bp, Homo sapiens
cagtataaataactg

SEQ ID NO: 852281 - DNA, 15 bp, Homo sapiens
agtataaataactgt

SEQ ID NO: 852282 - DNA, 15 bp, Homo sapiens
gtataaataactgta

SEQ ID NO: 852283 - DNA, 15 bp, Homo sapiens
tataaataactgtat

SEQ ID NO: 852284 - DNA, 15 bp, Homo sapiens
ataaataactgtata

SEQ ID NO: 852285 - DNA, 15 bp, Homo sapiens
taaataactgtataa

SEQ ID NO: 852286 - DNA, 15 bp, Homo sapiens
aaataactgtataaa

SEQ ID NO: 852287 - DNA, 15 bp, Homo sapiens
aataactgtataaat

SEQ ID NO: 852288 - DNA, 15 bp, Homo sapiens
ataactgtataaata

SEQ ID NO: 852289 - DNA, 15 bp, Homo sapiens
taactgtataaataa

SEQ ID NO: 852290 - DNA, 15 bp, Homo sapiens
aactgtataaataaa

SEQ ID NO: 852291 - DNA, 15 bp, Homo sapiens
actgtataaataaat

SEQ ID NO: 852292 - DNA, 15 bp, Homo sapiens
ctgtataaataaata

SEQ ID NO: 852293 - DNA, 15 bp, Homo sapiens
tgtataaataaatag

SEQ ID NO: 852294 - DNA, 15 bp, Homo sapiens
gtataaataaatagt

SEQ ID NO: 852295 - DNA, 15 bp, Homo sapiens
tataaataaatagta

SEQ ID NO: 852296 - DNA, 15 bp, Homo sapiens
ataaataaatagtag

SEQ ID NO: 852297 - DNA, 15 bp, Homo sapiens
taaataaatagtagc

SEQ ID NO: 852298 - DNA, 15 bp, Homo sapiens
aaataaatagtagct

SEQ ID NO: 852299 - DNA, 15 bp, Homo sapiens
aataaatagtagctt

SEQ ID NO: 852300 - DNA, 15 bp, Homo sapiens
ataaatagtagcttt

SEQ ID NO: 852301 - DNA, 15 bp, Homo sapiens
taaatagtagctttc

SEQ ID NO: 852302 - DNA, 15 bp, Homo sapiens
aaatagtagctttca

SEQ ID NO: 852303 - DNA, 15 bp, Homo sapiens
aatagtagctttcat

SEQ ID NO: 852304 - DNA, 15 bp, Homo sapiens
atagtagctttcatt

SEQ ID NO: 852305 - DNA, 15 bp, Homo sapiens
tagtagctttcatta

SEQ ID NO: 852306 - DNA, 15 bp, Homo sapiens
agtagctttcattat

SEQ ID NO: 852307 - DNA, 15 bp, Homo sapiens
gtagctttcattatt

SEQ ID NO: 852308 - DNA, 15 bp, Homo sapiens
tagctttcattattt

SEQ ID NO: 852309 - DNA, 15 bp, Homo sapiens
agctttcattattta

SEQ ID NO: 852310 - DNA, 15 bp, Homo sapiens
gctttcattatttat

SEQ ID NO: 852311 - DNA, 15 bp, Homo sapiens
ctttcattatttata

SEQ ID NO: 852312 - DNA, 15 bp, Homo sapiens
tttcattatttatag

SEQ ID NO: 852313 - DNA, 15 bp, Homo sapiens
ttcattatttatagc

SEQ ID NO: 852314 - DNA, 15 bp, Homo sapiens
tcattatttatagct

SEQ ID NO: 852315 - DNA, 15 bp, Homo sapiens
cattatttatagctc

SEQ ID NO: 852316 - DNA, 15 bp, Homo sapiens
attatttatagctcg

SEQ ID NO: 852317 - DNA, 15 bp, Homo sapiens
ttatttatagctcgc

SEQ ID NO: 852318 - DNA, 15 bp, Homo sapiens
tatttatagctcgca

SEQ ID NO: 852319 - DNA, 15 bp, Homo sapiens
atttatagctcgcaa

SEQ ID NO: 852320 - DNA, 15 bp, Homo sapiens
tttatagctcgcaaa

SEQ ID NO: 852321 - DNA, 15 bp, Homo sapiens
ttatagctcgcaaaa

SEQ ID NO: 852322 - DNA, 15 bp, Homo sapiens
tatagctcgcaaaat

SEQ ID NO: 852323 - DNA, 15 bp, Homo sapiens
atagctcgcaaaata

SEQ ID NO: 852324 - DNA, 15 bp, Homo sapiens
tagctcgcaaaataa

SEQ ID NO: 852325 - DNA, 15 bp, Homo sapiens
agctcgcaaaataat

SEQ ID NO: 852326 - DNA, 15 bp, Homo sapiens
gctcgcaaaataatc

SEQ ID NO: 852327 - DNA, 15 bp, Homo sapiens
ctcgcaaaataatct

SEQ ID NO: 852328 - DNA, 15 bp, Homo sapiens
tcgcaaaataatctg

SEQ ID NO: 852329 - DNA, 15 bp, Homo sapiens
cgcaaaataatctgt

SEQ ID NO: 852330 - DNA, 15 bp, Homo sapiens
gcaaaataatctgta

SEQ ID NO: 852331 - DNA, 15 bp, Homo sapiens
caaaataatctgtat

SEQ ID NO: 852332 - DNA, 15 bp, Homo sapiens
aaaataatctgtatg

SEQ ID NO: 852333 - DNA, 15 bp, Homo sapiens
aaataatctgtatgg

SEQ ID NO: 852334 - DNA, 15 bp, Homo sapiens
aataatctgtatgga

SEQ ID NO: 852335 - DNA, 15 bp, Homo sapiens
ataatctgtatggaa

SEQ ID NO: 852336 - DNA, 15 bp, Homo sapiens
taatctgtatggaag

SEQ ID NO: 852337 - DNA, 15 bp, Homo sapiens
aatctgtatggaagt

SEQ ID NO: 852338 - DNA, 15 bp, Homo sapiens
atctgtatggaagta

SEQ ID NO: 852339 - DNA, 15 bp, Homo sapiens
tctgtatggaagtag

SEQ ID NO: 852340 - DNA, 15 bp, Homo sapiens
ctgtatggaagtagc

SEQ ID NO: 852341 - DNA, 15 bp, Homo sapiens
tgtatggaagtagca

SEQ ID NO: 852342 - DNA, 15 bp, Homo sapiens
gtatggaagtagcat

SEQ ID NO: 852343 - DNA, 15 bp, Homo sapiens
tatggaagtagcata

SEQ ID NO: 852344 - DNA, 15 bp, Homo sapiens
atggaagtagcatat

SEQ ID NO: 852345 - DNA, 15 bp, Homo sapiens
tggaagtagcatata

SEQ ID NO: 852346 - DNA, 15 bp, Homo sapiens
ggaagtagcatatat

SEQ ID NO: 852347 - DNA, 15 bp, Homo sapiens
gaagtagcatatata

SEQ ID NO: 852348 - DNA, 15 bp, Homo sapiens
aagtagcatatataa

SEQ ID NO: 852349 - DNA, 15 bp, Homo sapiens
agtagcatatataag

SEQ ID NO: 852350 - DNA, 15 bp, Homo sapiens
gtagcatatataagg

SEQ ID NO: 852351 - DNA, 15 bp, Homo sapiens
tagcatatataaggt

SEQ ID NO: 852352 - DNA, 15 bp, Homo sapiens
agcatatataaggta

SEQ ID NO: 852353 - DNA, 15 bp, Homo sapiens
gcatatataaggtat

SEQ ID NO: 852354 - DNA, 15 bp, Homo sapiens
catatataaggtata

SEQ ID NO: 852355 - DNA, 15 bp, Homo sapiens
atatataaggtatat

SEQ ID NO: 852356 - DNA, 15 bp, Homo sapiens
tatataaggtatata

SEQ ID NO: 852357 - DNA, 15 bp, Homo sapiens
atataaggtatataa

SEQ ID NO: 852358 - DNA, 15 bp, Homo sapiens
tataaggtatataaa

SEQ ID NO: 852359 - DNA, 15 bp, Homo sapiens
ataaggtatataaac

SEQ ID NO: 852360 - DNA, 15 bp, Homo sapiens
taaggtatataaaca

SEQ ID NO: 852361 - DNA, 15 bp, Homo sapiens
aaggtatataaacat

SEQ ID NO: 852362 - DNA, 15 bp, Homo sapiens
aggtatataaacatt

SEQ ID NO: 852363 - DNA, 15 bp, Homo sapiens
ggtatataaacattt

SEQ ID NO: 852364 - DNA, 15 bp, Homo sapiens
gtatataaacattta

SEQ ID NO: 852365 - DNA, 15 bp, Homo sapiens
tatataaacatttag

SEQ ID NO: 852366 - DNA, 15 bp, Homo sapiens
atataaacatttagc

SEQ ID NO: 852367 - DNA, 15 bp, Homo sapiens
tataaacatttagcc

SEQ ID NO: 852368 - DNA, 15 bp, Homo sapiens
ataaacatttagcct

SEQ ID NO: 852369 - DNA, 15 bp, Homo sapiens
taaacatttagcctc

SEQ ID NO: 852370 - DNA, 15 bp, Homo sapiens
aaacatttagcctct

SEQ ID NO: 852371 - DNA, 15 bp, Homo sapiens
aacatttagcctctt

SEQ ID NO: 852372 - DNA, 15 bp, Homo sapiens
acatttagcctcttg

SEQ ID NO: 852373 - DNA, 15 bp, Homo sapiens
catttagcctcttga

SEQ ID NO: 852374 - DNA, 15 bp, Homo sapiens
atttagcctcttgat

SEQ ID NO: 852375 - DNA, 15 bp, Homo sapiens
tttagcctcttgata

SEQ ID NO: 852376 - DNA, 15 bp, Homo sapiens
ttagcctcttgatag

SEQ ID NO: 852377 - DNA, 15 bp, Homo sapiens
tagcctcttgatagg

SEQ ID NO: 852378 - DNA, 15 bp, Homo sapiens
agcctcttgatagga

SEQ ID NO: 852379 - DNA, 15 bp, Homo sapiens
gcctcttgataggac

SEQ ID NO: 852380 - DNA, 15 bp, Homo sapiens
cctcttgataggact

SEQ ID NO: 852381 - DNA, 15 bp, Homo sapiens
ctcttgataggacta

SEQ ID NO: 852382 - DNA, 15 bp, Homo sapiens
tcttgataggactaa

SEQ ID NO: 852383 - DNA, 15 bp, Homo sapiens
cttgataggactaac

SEQ ID NO: 852384 - DNA, 15 bp, Homo sapiens
ttgataggactaact

SEQ ID NO: 852385 - DNA, 15 bp, Homo sapiens
tgataggactaactc

SEQ ID NO: 852386 - DNA, 15 bp, Homo sapiens
gataggactaactca

SEQ ID NO: 852387 - DNA, 15 bp, Homo sapiens
ataggactaactcac

SEQ ID NO: 852388 - DNA, 15 bp, Homo sapiens
taggactaactcaca

SEQ ID NO: 852389 - DNA, 15 bp, Homo sapiens
aggactaactcacat

SEQ ID NO: 852390 - DNA, 15 bp, Homo sapiens
ggactaactcacatt

SEQ ID NO: 852391 - DNA, 15 bp, Homo sapiens
gactaactcacattc

SEQ ID NO: 852392 - DNA, 15 bp, Homo sapiens
actaactcacattct

SEQ ID NO: 852393 - DNA, 15 bp, Homo sapiens
ctaactcacattctg

SEQ ID NO: 852394 - DNA, 15 bp, Homo sapiens
taactcacattctgg

SEQ ID NO: 852395 - DNA, 15 bp, Homo sapiens
aactcacattctggt

SEQ ID NO: 852396 - DNA, 15 bp, Homo sapiens
actcacattctggtt

SEQ ID NO: 852397 - DNA, 15 bp, Homo sapiens
ctcacattctggttt

SEQ ID NO: 852398 - DNA, 15 bp, Homo sapiens
tcacattctggtttg

SEQ ID NO: 852399 - DNA, 15 bp, Homo sapiens
cacattctggtttgt

SEQ ID NO: 852400 - DNA, 15 bp, Homo sapiens
acattctggtttgta

SEQ ID NO: 852401 - DNA, 15 bp, Homo sapiens
cattctggtttgtat

SEQ ID NO: 852402 - DNA, 15 bp, Homo sapiens
attctggtttgtata

SEQ ID NO: 852403 - DNA, 15 bp, Homo sapiens
ttctggtttgtatat

SEQ ID NO: 852404 - DNA, 15 bp, Homo sapiens
tctggtttgtatatc

SEQ ID NO: 852405 - DNA, 15 bp, Homo sapiens
ctggtttgtatatca

SEQ ID NO: 852406 - DNA, 15 bp, Homo sapiens
tggtttgtatatcag

SEQ ID NO: 852407 - DNA, 15 bp, Homo sapiens
ggtttgtatatcagt

SEQ ID NO: 852408 - DNA, 15 bp, Homo sapiens
gtttgtatatcagtc

SEQ ID NO: 852409 - DNA, 15 bp, Homo sapiens
tttgtatatcagtct

SEQ ID NO: 852410 - DNA, 15 bp, Homo sapiens
ttgtatatcagtctt

SEQ ID NO: 852411 - DNA, 15 bp, Homo sapiens
tgtatatcagtcttg

SEQ ID NO: 852412 - DNA, 15 bp, Homo sapiens
gtatatcagtcttgc

SEQ ID NO: 852413 - DNA, 15 bp, Homo sapiens
tatatcagtcttgcc

SEQ ID NO: 852414 - DNA, 15 bp, Homo sapiens
atatcagtcttgcct

SEQ ID NO: 852415 - DNA, 15 bp, Homo sapiens
tatcagtcttgcctg

SEQ ID NO: 852416 - DNA, 15 bp, Homo sapiens
atcagtcttgcctga

SEQ ID NO: 852417 - DNA, 15 bp, Homo sapiens
tcagtcttgcctgaa

SEQ ID NO: 852418 - DNA, 15 bp, Homo sapiens
cagtcttgcctgaat

SEQ ID NO: 852419 - DNA, 15 bp, Homo sapiens
agtcttgcctgaatt

SEQ ID NO: 852420 - DNA, 15 bp, Homo sapiens
gtcttgcctgaattt

SEQ ID NO: 852421 - DNA, 15 bp, Homo sapiens
tcttgcctgaattta

SEQ ID NO: 852422 - DNA, 15 bp, Homo sapiens
cttgcctgaatttag

SEQ ID NO: 852423 - DNA, 15 bp, Homo sapiens
ttgcctgaatttagc

SEQ ID NO: 852424 - DNA, 15 bp, Homo sapiens
tgcctgaatttagct

SEQ ID NO: 852425 - DNA, 15 bp, Homo sapiens
gcctgaatttagcta

SEQ ID NO: 852426 - DNA, 15 bp, Homo sapiens
cctgaatttagctag

SEQ ID NO: 852427 - DNA, 15 bp, Homo sapiens
ctgaatttagctagt

SEQ ID NO: 852428 - DNA, 15 bp, Homo sapiens
tgaatttagctagtg

SEQ ID NO: 852429 - DNA, 15 bp, Homo sapiens
gaatttagctagtgt

SEQ ID NO: 852430 - DNA, 15 bp, Homo sapiens
aatttagctagtgtg

SEQ ID NO: 852431 - DNA, 15 bp, Homo sapiens
atttagctagtgtgg

SEQ ID NO: 852432 - DNA, 15 bp, Homo sapiens
tttagctagtgtggg

SEQ ID NO: 852433 - DNA, 15 bp, Homo sapiens
ttagctagtgtgggc

SEQ ID NO: 852434 - DNA, 15 bp, Homo sapiens
tagctagtgtgggct

SEQ ID NO: 852435 - DNA, 15 bp, Homo sapiens
agctagtgtgggctt

SEQ ID NO: 852436 - DNA, 15 bp, Homo sapiens
gctagtgtgggcttt

SEQ ID NO: 852437 - DNA, 15 bp, Homo sapiens
ctagtgtgggctttt

SEQ ID NO: 852438 - DNA, 15 bp, Homo sapiens
tagtgtgggcttttt

SEQ ID NO: 852439 - DNA, 15 bp, Homo sapiens
agtgtgggctttttt

SEQ ID NO: 852440 - DNA, 15 bp, Homo sapiens
gtgtgggcttttttt

SEQ ID NO: 852441 - DNA, 15 bp, Homo sapiens
tgtgggctttttttt

SEQ ID NO: 852442 - DNA, 15 bp, Homo sapiens
gtgggctttttttta

SEQ ID NO: 852443 - DNA, 15 bp, Homo sapiens
tgggcttttttttat

SEQ ID NO: 852444 - DNA, 15 bp, Homo sapiens
gggcttttttttatc

SEQ ID NO: 852445 - DNA, 15 bp, Homo sapiens
ggcttttttttatct

SEQ ID NO: 852446 - DNA, 15 bp, Homo sapiens
gcttttttttatctt

SEQ ID NO: 852447 - DNA, 15 bp, Homo sapiens
cttttttttatcttg

SEQ ID NO: 852448 - DNA, 15 bp, Homo sapiens
ttttttttatcttgt

SEQ ID NO: 852449 - DNA, 15 bp, Homo sapiens
tttttttatcttgtg

SEQ ID NO: 852450 - DNA, 15 bp, Homo sapiens
ttttttatcttgtga

SEQ ID NO: 852451 - DNA, 15 bp, Homo sapiens
tttttatcttgtgag

SEQ ID NO: 852452 - DNA, 15 bp, Homo sapiens
ttttatcttgtgagt

SEQ ID NO: 852453 - DNA, 15 bp, Homo sapiens
tttatcttgtgagtt

SEQ ID NO: 852454 - DNA, 15 bp, Homo sapiens
ttatcttgtgagttt

SEQ ID NO: 852455 - DNA, 15 bp, Homo sapiens
tatcttgtgagtttg

SEQ ID NO: 852456 - DNA, 15 bp, Homo sapiens
atcttgtgagtttgc

SEQ ID NO: 852457 - DNA, 15 bp, Homo sapiens
tcttgtgagtttgct

SEQ ID NO: 852458 - DNA, 15 bp, Homo sapiens
cttgtgagtttgctt

SEQ ID NO: 852459 - DNA, 15 bp, Homo sapiens
ttgtgagtttgcttt

SEQ ID NO: 852460 - DNA, 15 bp, Homo sapiens
tgtgagtttgcttta

SEQ ID NO: 852461 - DNA, 15 bp, Homo sapiens
gtgagtttgctttat

SEQ ID NO: 852462 - DNA, 15 bp, Homo sapiens
tgagtttgctttata

SEQ ID NO: 852463 - DNA, 15 bp, Homo sapiens
gagtttgctttatac

SEQ ID NO: 852464 - DNA, 15 bp, Homo sapiens
agtttgctttataca

SEQ ID NO: 852465 - DNA, 15 bp, Homo sapiens
gtttgctttatacat

SEQ ID NO: 852466 - DNA, 15 bp, Homo sapiens
tttgctttatacatt

SEQ ID NO: 852467 - DNA, 15 bp, Homo sapiens
ttgctttatacattg

SEQ ID NO: 852468 - DNA, 15 bp, Homo sapiens
tgctttatacattgg

SEQ ID NO: 852469 - DNA, 15 bp, Homo sapiens
gctttatacattggg

SEQ ID NO: 852470 - DNA, 15 bp, Homo sapiens
ctttatacattgggt

SEQ ID NO: 852471 - DNA, 15 bp, Homo sapiens
tttatacattgggtt

SEQ ID NO: 852472 - DNA, 15 bp, Homo sapiens
ttatacattgggttt

SEQ ID NO: 852473 - DNA, 15 bp, Homo sapiens
tatacattgggtttc

SEQ ID NO: 852474 - DNA, 15 bp, Homo sapiens
atacattgggtttct

SEQ ID NO: 852475 - DNA, 15 bp, Homo sapiens
tacattgggtttctg

SEQ ID NO: 852476 - DNA, 15 bp, Homo sapiens
acattgggtttctga

SEQ ID NO: 852477 - DNA, 15 bp, Homo sapiens
cattgggtttctgaa

SEQ ID NO: 852478 - DNA, 15 bp, Homo sapiens
attgggtttctgaaa

SEQ ID NO: 852479 - DNA, 15 bp, Homo sapiens
ttgggtttctgaaaa

SEQ ID NO: 852480 - DNA, 15 bp, Homo sapiens
tgggtttctgaaaag

SEQ ID NO: 852481 - DNA, 15 bp, Homo sapiens
gggtttctgaaaaga

SEQ ID NO: 852482 - DNA, 15 bp, Homo sapiens
ggtttctgaaaagat

SEQ ID NO: 852483 - DNA, 15 bp, Homo sapiens
gtttctgaaaagatt

SEQ ID NO: 852484 - DNA, 15 bp, Homo sapiens
tttctgaaaagattt

SEQ ID NO: 852485 - DNA, 15 bp, Homo sapiens
ttctgaaaagatttc

SEQ ID NO: 852486 - DNA, 15 bp, Homo sapiens
tctgaaaagatttct

SEQ ID NO: 852487 - DNA, 15 bp, Homo sapiens
ctgaaaagatttctt

SEQ ID NO: 852488 - DNA, 15 bp, Homo sapiens
tgaaaagatttcttt

SEQ ID NO: 852489 - DNA, 15 bp, Homo sapiens
gaaaagatttctttt

SEQ ID NO: 852490 - DNA, 15 bp, Homo sapiens
aaaagatttctttta

SEQ ID NO: 852491 - DNA, 15 bp, Homo sapiens
aaagatttcttttag

SEQ ID NO: 852492 - DNA, 15 bp, Homo sapiens
aagatttcttttaga

SEQ ID NO: 852493 - DNA, 15 bp, Homo sapiens
agatttcttttagag

SEQ ID NO: 852494 - DNA, 15 bp, Homo sapiens
gatttcttttagaga

SEQ ID NO: 852495 - DNA, 15 bp, Homo sapiens
atttcttttagagaa

SEQ ID NO: 852496 - DNA, 15 bp, Homo sapiens
tttcttttagagaat

SEQ ID NO: 852497 - DNA, 15 bp, Homo sapiens
ttcttttagagaatg

SEQ ID NO: 852498 - DNA, 15 bp, Homo sapiens
tcttttagagaatgt

SEQ ID NO: 852499 - DNA, 15 bp, Homo sapiens
cttttagagaatgta

SEQ ID NO: 852500 - DNA, 15 bp, Homo sapiens
ttttagagaatgtat

SEQ ID NO: 852501 - DNA, 15 bp, Homo sapiens
tttagagaatgtata

SEQ ID NO: 852502 - DNA, 15 bp, Homo sapiens
ttagagaatgtatat

SEQ ID NO: 852503 - DNA, 15 bp, Homo sapiens
tagagaatgtatata

SEQ ID NO: 852504 - DNA, 15 bp, Homo sapiens
agagaatgtatataa

SEQ ID NO: 852505 - DNA, 15 bp, Homo sapiens
gagaatgtatataag

SEQ ID NO: 852506 - DNA, 15 bp, Homo sapiens
agaatgtatataagc

SEQ ID NO: 852507 - DNA, 15 bp, Homo sapiens
gaatgtatataagct

SEQ ID NO: 852508 - DNA, 15 bp, Homo sapiens
aatgtatataagctt

SEQ ID NO: 852509 - DNA, 15 bp, Homo sapiens
atgtatataagctta

SEQ ID NO: 852510 - DNA, 15 bp, Homo sapiens
tgtatataagcttaa

SEQ ID NO: 852511 - DNA, 15 bp, Homo sapiens
gtatataagcttaac

SEQ ID NO: 852512 - DNA, 15 bp, Homo sapiens
tatataagcttaaca

SEQ ID NO: 852513 - DNA, 15 bp, Homo sapiens
atataagcttaacat

SEQ ID NO: 852514 - DNA, 15 bp, Homo sapiens
tataagcttaacatg

SEQ ID NO: 852515 - DNA, 15 bp, Homo sapiens
ataagcttaacatgt

SEQ ID NO: 852516 - DNA, 15 bp, Homo sapiens
taagcttaacatgta

SEQ ID NO: 852517 - DNA, 15 bp, Homo sapiens
aagcttaacatgtac

SEQ ID NO: 852518 - DNA, 15 bp, Homo sapiens
agcttaacatgtact

SEQ ID NO: 852519 - DNA, 15 bp, Homo sapiens
gcttaacatgtacta

SEQ ID NO: 852520 - DNA, 15 bp, Homo sapiens
cttaacatgtactag

SEQ ID NO: 852521 - DNA, 15 bp, Homo sapiens
ttaacatgtactagt

SEQ ID NO: 852522 - DNA, 15 bp, Homo sapiens
taacatgtactagtg

SEQ ID NO: 852523 - DNA, 15 bp, Homo sapiens
aacatgtactagtgc

SEQ ID NO: 852524 - DNA, 15 bp, Homo sapiens
acatgtactagtgcc

SEQ ID NO: 852525 - DNA, 15 bp, Homo sapiens
catgtactagtgcca

SEQ ID NO: 852526 - DNA, 15 bp, Homo sapiens
atgtactagtgccaa

SEQ ID NO: 852527 - DNA, 15 bp, Homo sapiens
tgtactagtgccaat

SEQ ID NO: 852528 - DNA, 15 bp, Homo sapiens
gtactagtgccaatc

SEQ ID NO: 852529 - DNA, 15 bp, Homo sapiens
tactagtgccaatct

SEQ ID NO: 852530 - DNA, 15 bp, Homo sapiens
actagtgccaatctt

SEQ ID NO: 852531 - DNA, 15 bp, Homo sapiens
ctagtgccaatcttc

SEQ ID NO: 852532 - DNA, 15 bp, Homo sapiens
tagtgccaatcttca

SEQ ID NO: 852533 - DNA, 15 bp, Homo sapiens
agtgccaatcttcag

SEQ ID NO: 852534 - DNA, 15 bp, Homo sapiens
gtgccaatcttcaga

SEQ ID NO: 852535 - DNA, 15 bp, Homo sapiens
tgccaatcttcagac

SEQ ID NO: 852536 - DNA, 15 bp, Homo sapiens
gccaatcttcagaca

SEQ ID NO: 852537 - DNA, 15 bp, Homo sapiens
ccaatcttcagacag

SEQ ID NO: 852538 - DNA, 15 bp, Homo sapiens
caatcttcagacaga

SEQ ID NO: 852539 - DNA, 15 bp, Homo sapiens
aatcttcagacagaa

SEQ ID NO: 852540 - DNA, 15 bp, Homo sapiens
atcttcagacagaaa

SEQ ID NO: 852541 - DNA, 15 bp, Homo sapiens
tcttcagacagaaat

SEQ ID NO: 852542 - DNA, 15 bp, Homo sapiens
cttcagacagaaatt

SEQ ID NO: 852543 - DNA, 15 bp, Homo sapiens
ttcagacagaaattt

SEQ ID NO: 852544 - DNA, 15 bp, Homo sapiens
tcagacagaaatttt

SEQ ID NO: 852545 - DNA, 15 bp, Homo sapiens
cagacagaaattttg

SEQ ID NO: 852546 - DNA, 15 bp, Homo sapiens
agacagaaattttgt

SEQ ID NO: 852547 - DNA, 15 bp, Homo sapiens
gacagaaattttgtt

SEQ ID NO: 852548 - DNA, 15 bp, Homo sapiens
acagaaattttgttc

SEQ ID NO: 852549 - DNA, 15 bp, Homo sapiens
cagaaattttgttct

SEQ ID NO: 852550 - DNA, 15 bp, Homo sapiens
agaaattttgttcta

SEQ ID NO: 852551 - DNA, 15 bp, Homo sapiens
gaaattttgttctat

SEQ ID NO: 852552 - DNA, 15 bp, Homo sapiens
aaattttgttctatt

SEQ ID NO: 852553 - DNA, 15 bp, Homo sapiens
aattttgttctatta

SEQ ID NO: 852554 - DNA, 15 bp, Homo sapiens
attttgttctattag

SEQ ID NO: 852555 - DNA, 15 bp, Homo sapiens
ttttgttctattagg

SEQ ID NO: 852556 - DNA, 15 bp, Homo sapiens
tttgttctattaggt

SEQ ID NO: 852557 - DNA, 15 bp, Homo sapiens
ttgttctattaggtt

SEQ ID NO: 852558 - DNA, 15 bp, Homo sapiens
tgttctattaggttt

SEQ ID NO: 852559 - DNA, 15 bp, Homo sapiens
gttctattaggtttt

SEQ ID NO: 852560 - DNA, 15 bp, Homo sapiens
ttctattaggtttta

SEQ ID NO: 852561 - DNA, 15 bp, Homo sapiens
tctattaggttttaa

SEQ ID NO: 852562 - DNA, 15 bp, Homo sapiens
ctattaggttttaag

SEQ ID NO: 852563 - DNA, 15 bp, Homo sapiens
tattaggttttaaga

SEQ ID NO: 852564 - DNA, 15 bp, Homo sapiens
attaggttttaagaa

SEQ ID NO: 852565 - DNA, 15 bp, Homo sapiens
ttaggttttaagaat

SEQ ID NO: 852566 - DNA, 15 bp, Homo sapiens
taggttttaagaata

SEQ ID NO: 852567 - DNA, 15 bp, Homo sapiens
aggttttaagaataa

SEQ ID NO: 852568 - DNA, 15 bp, Homo sapiens
ggttttaagaataaa

SEQ ID NO: 852569 - DNA, 15 bp, Homo sapiens
gttttaagaataaaa

SEQ ID NO: 852570 - DNA, 15 bp, Homo sapiens
ttttaagaataaaag

SEQ ID NO: 852571 - DNA, 15 bp, Homo sapiens
tttaagaataaaagc

SEQ ID NO: 852572 - DNA, 15 bp, Homo sapiens
ttaagaataaaagca

SEQ ID NO: 852573 - DNA, 15 bp, Homo sapiens
taagaataaaagcat

SEQ ID NO: 852574 - DNA, 15 bp, Homo sapiens
aagaataaaagcatt

SEQ ID NO: 852575 - DNA, 15 bp, Homo sapiens
agaataaaagcattt

SEQ ID NO: 852576 - DNA, 15 bp, Homo sapiens
gaataaaagcatttt

SEQ ID NO: 852577 - DNA, 15 bp, Homo sapiens
aataaaagcatttta

SEQ ID NO: 852578 - DNA, 15 bp, Homo sapiens
ataaaagcattttat

SEQ ID NO: 852579 - DNA, 15 bp, Homo sapiens
taaaagcattttatt

SEQ ID NO: 852580 - DNA, 15 bp, Homo sapiens
aaaagcattttattt

SEQ ID NO: 852581 - DNA, 15 bp, Homo sapiens
aaagcattttatttt

SEQ ID NO: 852582 - DNA, 15 bp, Homo sapiens
aagcattttattttt

SEQ ID NO: 852583 - DNA, 15 bp, Homo sapiens
agcattttattttta

SEQ ID NO: 852584 - DNA, 15 bp, Homo sapiens
gcattttatttttaa

SEQ ID NO: 852585 - DNA, 15 bp, Homo sapiens
cattttatttttaaa

SEQ ID NO: 852586 - DNA, 15 bp, Homo sapiens
attttatttttaaaa

SEQ ID NO: 852587 - DNA, 15 bp, Homo sapiens
ttttatttttaaaac

SEQ ID NO: 852588 - DNA, 15 bp, Homo sapiens
tttatttttaaaaca

SEQ ID NO: 852589 - DNA, 15 bp, Homo sapiens
ttatttttaaaacag

SEQ ID NO: 852590 - DNA, 15 bp, Homo sapiens
tatttttaaaacagg

SEQ ID NO: 852591 - DNA, 15 bp, Homo sapiens
atttttaaaacagga

SEQ ID NO: 852592 - DNA, 15 bp, Homo sapiens
tttttaaaacaggaa

SEQ ID NO: 852593 - DNA, 15 bp, Homo sapiens
ttttaaaacaggaaa

SEQ ID NO: 852594 - DNA, 15 bp, Homo sapiens
tttaaaacaggaaat

SEQ ID NO: 852595 - DNA, 15 bp, Homo sapiens
ttaaaacaggaaata

SEQ ID NO: 852596 - DNA, 15 bp, Homo sapiens
taaaacaggaaataa

SEQ ID NO: 852597 - DNA, 15 bp, Homo sapiens
aaaacaggaaataat

SEQ ID NO: 852598 - DNA, 15 bp, Homo sapiens
aaacaggaaataata

SEQ ID NO: 852599 - DNA, 15 bp, Homo sapiens
aacaggaaataatat

SEQ ID NO: 852600 - DNA, 15 bp, Homo sapiens
acaggaaataatata

SEQ ID NO: 852601 - DNA, 15 bp, Homo sapiens
caggaaataatataa

SEQ ID NO: 852602 - DNA, 15 bp, Homo sapiens
aggaaataatataaa

SEQ ID NO: 852603 - DNA, 15 bp, Homo sapiens
ggaaataatataaaa

SEQ ID NO: 852604 - DNA, 15 bp, Homo sapiens
gaaataatataaaaa

SEQ ID NO: 852605 - DNA, 15 bp, Homo sapiens
aaataatataaaaag

SEQ ID NO: 852606 - DNA, 15 bp, Homo sapiens
aataatataaaaagg

SEQ ID NO: 852607 - DNA, 15 bp, Homo sapiens
ataatataaaaagga

SEQ ID NO: 852608 - DNA, 15 bp, Homo sapiens
taatataaaaaggag

SEQ ID NO: 852609 - DNA, 15 bp, Homo sapiens
aatataaaaaggaga

SEQ ID NO: 852610 - DNA, 15 bp, Homo sapiens
atataaaaaggagag

SEQ ID NO: 852611 - DNA, 15 bp, Homo sapiens
tataaaaaggagagt

SEQ ID NO: 852612 - DNA, 15 bp, Homo sapiens
ataaaaaggagagtt

SEQ ID NO: 852613 - DNA, 15 bp, Homo sapiens
taaaaaggagagttt

SEQ ID NO: 852614 - DNA, 15 bp, Homo sapiens
aaaaaggagagtttt

SEQ ID NO: 852615 - DNA, 15 bp, Homo sapiens
aaaaggagagttttt

SEQ ID NO: 852616 - DNA, 15 bp, Homo sapiens
aaaggagagtttttg

SEQ ID NO: 852617 - DNA, 15 bp, Homo sapiens
aaggagagtttttgt

SEQ ID NO: 852618 - DNA, 15 bp, Homo sapiens
aggagagtttttgtt

SEQ ID NO: 852619 - DNA, 15 bp, Homo sapiens
ggagagtttttgttg

SEQ ID NO: 852620 - DNA, 15 bp, Homo sapiens
gagagtttttgttgt

SEQ ID NO: 852621 - DNA, 15 bp, Homo sapiens
agagtttttgttgtt

SEQ ID NO: 852622 - DNA, 15 bp, Homo sapiens
gagtttttgttgttt

SEQ ID NO: 852623 - DNA, 15 bp, Homo sapiens
agtttttgttgtttt

SEQ ID NO: 852624 - DNA, 15 bp, Homo sapiens
gtttttgttgtttta

SEQ ID NO: 852625 - DNA, 15 bp, Homo sapiens
tttttgttgttttag

SEQ ID NO: 852626 - DNA, 15 bp, Homo sapiens
ttttgttgttttagt

SEQ ID NO: 852627 - DNA, 15 bp, Homo sapiens
tttgttgttttagta

SEQ ID NO: 852628 - DNA, 15 bp, Homo sapiens
ttgttgttttagtag

SEQ ID NO: 852629 - DNA, 15 bp, Homo sapiens
tgttgttttagtaga

SEQ ID NO: 852630 - DNA, 15 bp, Homo sapiens
gttgttttagtagaa

SEQ ID NO: 852631 - DNA, 15 bp, Homo sapiens
ttgttttagtagaaa

SEQ ID NO: 852632 - DNA, 15 bp, Homo sapiens
tgttttagtagaaaa

SEQ ID NO: 852633 - DNA, 15 bp, Homo sapiens
gttttagtagaaaac

SEQ ID NO: 852634 - DNA, 15 bp, Homo sapiens
ttttagtagaaaact

SEQ ID NO: 852635 - DNA, 15 bp, Homo sapiens
tttagtagaaaactt

SEQ ID NO: 852636 - DNA, 15 bp, Homo sapiens
ttagtagaaaactta

SEQ ID NO: 852637 - DNA, 15 bp, Homo sapiens
tagtagaaaacttaa

SEQ ID NO: 852638 - DNA, 15 bp, Homo sapiens
agtagaaaacttaat

SEQ ID NO: 852639 - DNA, 15 bp, Homo sapiens
gtagaaaacttaatg

SEQ ID NO: 852640 - DNA, 15 bp, Homo sapiens
tagaaaacttaatgc

SEQ ID NO: 852641 - DNA, 15 bp, Homo sapiens
agaaaacttaatgcc

SEQ ID NO: 852642 - DNA, 15 bp, Homo sapiens
gaaaacttaatgcct

SEQ ID NO: 852643 - DNA, 15 bp, Homo sapiens
aaaacttaatgcctt

SEQ ID NO: 852644 - DNA, 15 bp, Homo sapiens
aaacttaatgccttg

SEQ ID NO: 852645 - DNA, 15 bp, Homo sapiens
aacttaatgccttgg

SEQ ID NO: 852646 - DNA, 15 bp, Homo sapiens
acttaatgccttgga

SEQ ID NO: 852647 - DNA, 15 bp, Homo sapiens
cttaatgccttggat

SEQ ID NO: 852648 - DNA, 15 bp, Homo sapiens
ttaatgccttggatg

SEQ ID NO: 852649 - DNA, 15 bp, Homo sapiens
taatgccttggatga

SEQ ID NO: 852650 - DNA, 15 bp, Homo sapiens
aatgccttggatgaa

SEQ ID NO: 852651 - DNA, 15 bp, Homo sapiens
atgccttggatgaaa

SEQ ID NO: 852652 - DNA, 15 bp, Homo sapiens
tgccttggatgaaat

SEQ ID NO: 852653 - DNA, 15 bp, Homo sapiens
gccttggatgaaatg

SEQ ID NO: 852654 - DNA, 15 bp, Homo sapiens
ccttggatgaaatga

SEQ ID NO: 852655 - DNA, 15 bp, Homo sapiens
cttggatgaaatgag

SEQ ID NO: 852656 - DNA, 15 bp, Homo sapiens
ttggatgaaatgagc

SEQ ID NO: 852657 - DNA, 15 bp, Homo sapiens
tggatgaaatgagcc

SEQ ID NO: 852658 - DNA, 15 bp, Homo sapiens
ggatgaaatgagcca

SEQ ID NO: 852659 - DNA, 15 bp, Homo sapiens
gatgaaatgagccat

SEQ ID NO: 852660 - DNA, 15 bp, Homo sapiens
atgaaatgagccatg

SEQ ID NO: 852661 - DNA, 15 bp, Homo sapiens
tgaaatgagccatgg

SEQ ID NO: 852662 - DNA, 15 bp, Homo sapiens
gaaatgagccatggg

SEQ ID NO: 852663 - DNA, 15 bp, Homo sapiens
aaatgagccatgggc

SEQ ID NO: 852664 - DNA, 15 bp, Homo sapiens
aatgagccatgggca

SEQ ID NO: 852665 - DNA, 15 bp, Homo sapiens
atgagccatgggcag

SEQ ID NO: 852666 - DNA, 15 bp, Homo sapiens
tgagccatgggcagg

SEQ ID NO: 852667 - DNA, 15 bp, Homo sapiens
gagccatgggcaggg

SEQ ID NO: 852668 - DNA, 15 bp, Homo sapiens
agccatgggcagggt

SEQ ID NO: 852669 - DNA, 15 bp, Homo sapiens
gccatgggcagggtt

SEQ ID NO: 852670 - DNA, 15 bp, Homo sapiens
ccatgggcagggttg

SEQ ID NO: 852671 - DNA, 15 bp, Homo sapiens
catgggcagggttgt

SEQ ID NO: 852672 - DNA, 15 bp, Homo sapiens
atgggcagggttgta

SEQ ID NO: 852673 - DNA, 15 bp, Homo sapiens
tgggcagggttgtaa

SEQ ID NO: 852674 - DNA, 15 bp, Homo sapiens
gggcagggttgtaat

SEQ ID NO: 852675 - DNA, 15 bp, Homo sapiens
ggcagggttgtaatg

SEQ ID NO: 852676 - DNA, 15 bp, Homo sapiens
gcagggttgtaatga

SEQ ID NO: 852677 - DNA, 15 bp, Homo sapiens
cagggttgtaatgaa

SEQ ID NO: 852678 - DNA, 15 bp, Homo sapiens
agggttgtaatgaat

SEQ ID NO: 852679 - DNA, 15 bp, Homo sapiens
gggttgtaatgaatt

SEQ ID NO: 852680 - DNA, 15 bp, Homo sapiens
ggttgtaatgaattg

SEQ ID NO: 852681 - DNA, 15 bp, Homo sapiens
gttgtaatgaattga

SEQ ID NO: 852682 - DNA, 15 bp, Homo sapiens
ttgtaatgaattgat

SEQ ID NO: 852683 - DNA, 15 bp, Homo sapiens
tgtaatgaattgata

SEQ ID NO: 852684 - DNA, 15 bp, Homo sapiens
gtaatgaattgatat

SEQ ID NO: 852685 - DNA, 15 bp, Homo sapiens
taatgaattgatatg

SEQ ID NO: 852686 - DNA, 15 bp, Homo sapiens
aatgaattgatatgt

SEQ ID NO: 852687 - DNA, 15 bp, Homo sapiens
atgaattgatatgtt

SEQ ID NO: 852688 - DNA, 15 bp, Homo sapiens
tgaattgatatgttt

SEQ ID NO: 852689 - DNA, 15 bp, Homo sapiens
gaattgatatgttta

SEQ ID NO: 852690 - DNA, 15 bp, Homo sapiens
aattgatatgtttaa

SEQ ID NO: 852691 - DNA, 15 bp, Homo sapiens
attgatatgtttaat

SEQ ID NO: 852692 - DNA, 15 bp, Homo sapiens
ttgatatgtttaata

SEQ ID NO: 852693 - DNA, 15 bp, Homo sapiens
tgatatgtttaatag

SEQ ID NO: 852694 - DNA, 15 bp, Homo sapiens
gatatgtttaatagt

SEQ ID NO: 852695 - DNA, 15 bp, Homo sapiens
atatgtttaatagta

SEQ ID NO: 852696 - DNA, 15 bp, Homo sapiens
tatgtttaatagtat

SEQ ID NO: 852697 - DNA, 15 bp, Homo sapiens
atgtttaatagtata

SEQ ID NO: 852698 - DNA, 15 bp, Homo sapiens
tgtttaatagtatag

SEQ ID NO: 852699 - DNA, 15 bp, Homo sapiens
gtttaatagtataga

SEQ ID NO: 852700 - DNA, 15 bp, Homo sapiens
tttaatagtatagat

SEQ ID NO: 852701 - DNA, 15 bp, Homo sapiens
ttaatagtatagatc

SEQ ID NO: 852702 - DNA, 15 bp, Homo sapiens
taatagtatagatca

SEQ ID NO: 852703 - DNA, 15 bp, Homo sapiens
aatagtatagatcat

SEQ ID NO: 852704 - DNA, 15 bp, Homo sapiens
atagtatagatcatt

SEQ ID NO: 852705 - DNA, 15 bp, Homo sapiens
tagtatagatcattt

SEQ ID NO: 852706 - DNA, 15 bp, Homo sapiens
agtatagatcatttg

SEQ ID NO: 852707 - DNA, 15 bp, Homo sapiens
gtatagatcatttgt

SEQ ID NO: 852708 - DNA, 15 bp, Homo sapiens
tatagatcatttgtg

SEQ ID NO: 852709 - DNA, 15 bp, Homo sapiens
atagatcatttgtga

SEQ ID NO: 852710 - DNA, 15 bp, Homo sapiens
tagatcatttgtgaa

SEQ ID NO: 852711 - DNA, 15 bp, Homo sapiens
agatcatttgtgaat

SEQ ID NO: 852712 - DNA, 15 bp, Homo sapiens
gatcatttgtgaata

SEQ ID NO: 852713 - DNA, 15 bp, Homo sapiens
atcatttgtgaataa

SEQ ID NO: 852714 - DNA, 15 bp, Homo sapiens
tcatttgtgaataat

SEQ ID NO: 852715 - DNA, 15 bp, Homo sapiens
catttgtgaataata

SEQ ID NO: 852716 - DNA, 15 bp, Homo sapiens
atttgtgaataatat

SEQ ID NO: 852717 - DNA, 15 bp, Homo sapiens
tttgtgaataatatg

SEQ ID NO: 852718 - DNA, 15 bp, Homo sapiens
ttgtgaataatatga

SEQ ID NO: 852719 - DNA, 15 bp, Homo sapiens
tgtgaataatatgac

SEQ ID NO: 852720 - DNA, 15 bp, Homo sapiens
gtgaataatatgacc

SEQ ID NO: 852721 - DNA, 15 bp, Homo sapiens
tgaataatatgacct

SEQ ID NO: 852722 - DNA, 15 bp, Homo sapiens
gaataatatgacctt

SEQ ID NO: 852723 - DNA, 15 bp, Homo sapiens
aataatatgaccttt

SEQ ID NO: 852724 - DNA, 15 bp, Homo sapiens
ataatatgacctttg

SEQ ID NO: 852725 - DNA, 15 bp, Homo sapiens
taatatgacctttga

SEQ ID NO: 852726 - DNA, 15 bp, Homo sapiens
aatatgacctttgac

SEQ ID NO: 852727 - DNA, 15 bp, Homo sapiens
atatgacctttgaca

SEQ ID NO: 852728 - DNA, 15 bp, Homo sapiens
tatgacctttgacaa

SEQ ID NO: 852729 - DNA, 15 bp, Homo sapiens
atgacctttgacaag

SEQ ID NO: 852730 - DNA, 15 bp, Homo sapiens
tgacctttgacaaga

SEQ ID NO: 852731 - DNA, 15 bp, Homo sapiens
gacctttgacaagac

SEQ ID NO: 852732 - DNA, 15 bp, Homo sapiens
acctttgacaagaca

SEQ ID NO: 852733 - DNA, 15 bp, Homo sapiens
cctttgacaagacac

SEQ ID NO: 852734 - DNA, 15 bp, Homo sapiens
ctttgacaagacaca

SEQ ID NO: 852735 - DNA, 15 bp, Homo sapiens
tttgacaagacacaa

SEQ ID NO: 852736 - DNA, 15 bp, Homo sapiens
ttgacaagacacaag

SEQ ID NO: 852737 - DNA, 15 bp, Homo sapiens
tgacaagacacaagc

SEQ ID NO: 852738 - DNA, 15 bp, Homo sapiens
gacaagacacaagcc

SEQ ID NO: 852739 - DNA, 15 bp, Homo sapiens
acaagacacaagcca

SEQ ID NO: 852740 - DNA, 15 bp, Homo sapiens
caagacacaagccat

SEQ ID NO: 852741 - DNA, 15 bp, Homo sapiens
aagacacaagccatt

SEQ ID NO: 852742 - DNA, 15 bp, Homo sapiens
agacacaagccatta

SEQ ID NO: 852743 - DNA, 15 bp, Homo sapiens
gacacaagccattaa

SEQ ID NO: 852744 - DNA, 15 bp, Homo sapiens
acacaagccattaac

SEQ ID NO: 852745 - DNA, 15 bp, Homo sapiens
cacaagccattaaca

SEQ ID NO: 852746 - DNA, 15 bp, Homo sapiens
acaagccattaacat

SEQ ID NO: 852747 - DNA, 15 bp, Homo sapiens
caagccattaacatc

SEQ ID NO: 852748 - DNA, 15 bp, Homo sapiens
aagccattaacatct

SEQ ID NO: 852749 - DNA, 15 bp, Homo sapiens
agccattaacatctg

SEQ ID NO: 852750 - DNA, 15 bp, Homo sapiens
gccattaacatctgt

SEQ ID NO: 852751 - DNA, 15 bp, Homo sapiens
ccattaacatctgta

SEQ ID NO: 852752 - DNA, 15 bp, Homo sapiens
cattaacatctgtag

SEQ ID NO: 852753 - DNA, 15 bp, Homo sapiens
attaacatctgtagg

SEQ ID NO: 852754 - DNA, 15 bp, Homo sapiens
ttaacatctgtaggc

SEQ ID NO: 852755 - DNA, 15 bp, Homo sapiens
taacatctgtaggca

SEQ ID NO: 852756 - DNA, 15 bp, Homo sapiens
aacatctgtaggcag

SEQ ID NO: 852757 - DNA, 15 bp, Homo sapiens
acatctgtaggcaga

SEQ ID NO: 852758 - DNA, 15 bp, Homo sapiens
catctgtaggcagaa

SEQ ID NO: 852759 - DNA, 15 bp, Homo sapiens
atctgtaggcagaag

SEQ ID NO: 852760 - DNA, 15 bp, Homo sapiens
tctgtaggcagaagt

SEQ ID NO: 852761 - DNA, 15 bp, Homo sapiens
ctgtaggcagaagtt

SEQ ID NO: 852762 - DNA, 15 bp, Homo sapiens
tgtaggcagaagttt

SEQ ID NO: 852763 - DNA, 15 bp, Homo sapiens
gtaggcagaagtttc

SEQ ID NO: 852764 - DNA, 15 bp, Homo sapiens
taggcagaagtttcc

SEQ ID NO: 852765 - DNA, 15 bp, Homo sapiens
aggcagaagtttcct

SEQ ID NO: 852766 - DNA, 15 bp, Homo sapiens
ggcagaagtttcctt

SEQ ID NO: 852767 - DNA, 15 bp, Homo sapiens
gcagaagtttccttc

SEQ ID NO: 852768 - DNA, 15 bp, Homo sapiens
cagaagtttccttct

SEQ ID NO: 852769 - DNA, 15 bp, Homo sapiens
agaagtttccttctt

SEQ ID NO: 852770 - DNA, 15 bp, Homo sapiens
gaagtttccttcttt

SEQ ID NO: 852771 - DNA, 15 bp, Homo sapiens
aagtttccttctttg

SEQ ID NO: 852772 - DNA, 15 bp, Homo sapiens
agtttccttctttgt

SEQ ID NO: 852773 - DNA, 15 bp, Homo sapiens
gtttccttctttgta

SEQ ID NO: 852774 - DNA, 15 bp, Homo sapiens
tttccttctttgtaa

SEQ ID NO: 852775 - DNA, 15 bp, Homo sapiens
ttccttctttgtaaa

SEQ ID NO: 852776 - DNA, 15 bp, Homo sapiens
tccttctttgtaaaa

SEQ ID NO: 852777 - DNA, 15 bp, Homo sapiens
ccttctttgtaaaat

SEQ ID NO: 852778 - DNA, 15 bp, Homo sapiens
cttctttgtaaaatg

SEQ ID NO: 852779 - DNA, 15 bp, Homo sapiens
ttctttgtaaaatga

SEQ ID NO: 852780 - DNA, 15 bp, Homo sapiens
tctttgtaaaatgag

SEQ ID NO: 852781 - DNA, 15 bp, Homo sapiens
ctttgtaaaatgagg

SEQ ID NO: 852782 - DNA, 15 bp, Homo sapiens
tttgtaaaatgaggg

SEQ ID NO: 852783 - DNA, 15 bp, Homo sapiens
ttgtaaaatgaggga

SEQ ID NO: 852784 - DNA, 15 bp, Homo sapiens
tgtaaaatgagggaa

SEQ ID NO: 852785 - DNA, 15 bp, Homo sapiens
gtaaaatgagggaat

SEQ ID NO: 852786 - DNA, 15 bp, Homo sapiens
taaaatgagggaata

SEQ ID NO: 852787 - DNA, 15 bp, Homo sapiens
aaaatgagggaataa

SEQ ID NO: 852788 - DNA, 15 bp, Homo sapiens
aaatgagggaataaa

SEQ ID NO: 852789 - DNA, 15 bp, Homo sapiens
aatgagggaataaaa

SEQ ID NO: 852790 - DNA, 15 bp, Homo sapiens
atgagggaataaaat

SEQ ID NO: 852791 - DNA, 15 bp, Homo sapiens
tgagggaataaaata

SEQ ID NO: 852792 - DNA, 15 bp, Homo sapiens
gagggaataaaatag

SEQ ID NO: 852793 - DNA, 15 bp, Homo sapiens
agggaataaaataga

SEQ ID NO: 852794 - DNA, 15 bp, Homo sapiens
gggaataaaatagat

SEQ ID NO: 852795 - DNA, 15 bp, Homo sapiens
ggaataaaatagatc

SEQ ID NO: 852796 - DNA, 15 bp, Homo sapiens
gaataaaatagatcc

SEQ ID NO: 852797 - DNA, 15 bp, Homo sapiens
aataaaatagatccc

SEQ ID NO: 852798 - DNA, 15 bp, Homo sapiens
ataaaatagatccct

SEQ ID NO: 852799 - DNA, 15 bp, Homo sapiens
taaaatagatcccta

SEQ ID NO: 852800 - DNA, 15 bp, Homo sapiens
aaaatagatccctaa

SEQ ID NO: 852801 - DNA, 15 bp, Homo sapiens
aaatagatccctaaa

SEQ ID NO: 852802 - DNA, 15 bp, Homo sapiens
aatagatccctaaag

SEQ ID NO: 852803 - DNA, 15 bp, Homo sapiens
atagatccctaaagt

SEQ ID NO: 852804 - DNA, 15 bp, Homo sapiens
tagatccctaaagtg

SEQ ID NO: 852805 - DNA, 15 bp, Homo sapiens
agatccctaaagtgt

SEQ ID NO: 852806 - DNA, 15 bp, Homo sapiens
gatccctaaagtgtg

SEQ ID NO: 852807 - DNA, 15 bp, Homo sapiens
atccctaaagtgtgt

SEQ ID NO: 852808 - DNA, 15 bp, Homo sapiens
tccctaaagtgtgta

SEQ ID NO: 852809 - DNA, 15 bp, Homo sapiens
ccctaaagtgtgtaa

SEQ ID NO: 852810 - DNA, 15 bp, Homo sapiens
cctaaagtgtgtaat

SEQ ID NO: 852811 - DNA, 15 bp, Homo sapiens
ctaaagtgtgtaatt

SEQ ID NO: 852812 - DNA, 15 bp, Homo sapiens
taaagtgtgtaattt

SEQ ID NO: 852813 - DNA, 15 bp, Homo sapiens
aaagtgtgtaatttt

SEQ ID NO: 852814 - DNA, 15 bp, Homo sapiens
aagtgtgtaatttta

SEQ ID NO: 852815 - DNA, 15 bp, Homo sapiens
agtgtgtaattttag

SEQ ID NO: 852816 - DNA, 15 bp, Homo sapiens
gtgtgtaattttagt

SEQ ID NO: 852817 - DNA, 15 bp, Homo sapiens
tgtgtaattttagta

SEQ ID NO: 852818 - DNA, 15 bp, Homo sapiens
gtgtaattttagtat

SEQ ID NO: 852819 - DNA, 15 bp, Homo sapiens
tgtaattttagtatt

SEQ ID NO: 852820 - DNA, 15 bp, Homo sapiens
gtaattttagtattt

SEQ ID NO: 852821 - DNA, 15 bp, Homo sapiens
taattttagtatttc

SEQ ID NO: 852822 - DNA, 15 bp, Homo sapiens
aattttagtatttct

SEQ ID NO: 852823 - DNA, 15 bp, Homo sapiens
attttagtatttcta

SEQ ID NO: 852824 - DNA, 15 bp, Homo sapiens
ttttagtatttctaa

SEQ ID NO: 852825 - DNA, 15 bp, Homo sapiens
tttagtatttctaaa

SEQ ID NO: 852826 - DNA, 15 bp, Homo sapiens
ttagtatttctaaac

SEQ ID NO: 852827 - DNA, 15 bp, Homo sapiens
tagtatttctaaact

SEQ ID NO: 852828 - DNA, 15 bp, Homo sapiens
agtatttctaaactt

SEQ ID NO: 852829 - DNA, 15 bp, Homo sapiens
gtatttctaaacttt

SEQ ID NO: 852830 - DNA, 15 bp, Homo sapiens
tatttctaaacttta

SEQ ID NO: 852831 - DNA, 15 bp, Homo sapiens
atttctaaactttat

SEQ ID NO: 852832 - DNA, 15 bp, Homo sapiens
tttctaaactttatg

SEQ ID NO: 852833 - DNA, 15 bp, Homo sapiens
ttctaaactttatga

SEQ ID NO: 852834 - DNA, 15 bp, Homo sapiens
tctaaactttatgaa

SEQ ID NO: 852835 - DNA, 15 bp, Homo sapiens
ctaaactttatgaag

SEQ ID NO: 852836 - DNA, 15 bp, Homo sapiens
taaactttatgaagg

SEQ ID NO: 852837 - DNA, 15 bp, Homo sapiens
aaactttatgaaggt

SEQ ID NO: 852838 - DNA, 15 bp, Homo sapiens
aactttatgaaggtt

SEQ ID NO: 852839 - DNA, 15 bp, Homo sapiens
actttatgaaggttt

SEQ ID NO: 852840 - DNA, 15 bp, Homo sapiens
ctttatgaaggtttc

SEQ ID NO: 852841 - DNA, 15 bp, Homo sapiens
tttatgaaggtttcc

SEQ ID NO: 852842 - DNA, 15 bp, Homo sapiens
ttatgaaggtttcct

SEQ ID NO: 852843 - DNA, 15 bp, Homo sapiens
tatgaaggtttccta

SEQ ID NO: 852844 - DNA, 15 bp, Homo sapiens
atgaaggtttcctaa

SEQ ID NO: 852845 - DNA, 15 bp, Homo sapiens
tgaaggtttcctaaa

SEQ ID NO: 852846 - DNA, 15 bp, Homo sapiens
gaaggtttcctaaat

SEQ ID NO: 852847 - DNA, 15 bp, Homo sapiens
aaggtttcctaaatg

SEQ ID NO: 852848 - DNA, 15 bp, Homo sapiens
aggtttcctaaatga

SEQ ID NO: 852849 - DNA, 15 bp, Homo sapiens
ggtttcctaaatgat

SEQ ID NO: 852850 - DNA, 15 bp, Homo sapiens
gtttcctaaatgata

SEQ ID NO: 852851 - DNA, 15 bp, Homo sapiens
tttcctaaatgataa

SEQ ID NO: 852852 - DNA, 15 bp, Homo sapiens
ttcctaaatgataat

SEQ ID NO: 852853 - DNA, 15 bp, Homo sapiens
tcctaaatgataatt

SEQ ID NO: 852854 - DNA, 15 bp, Homo sapiens
cctaaatgataattc

SEQ ID NO: 852855 - DNA, 15 bp, Homo sapiens
ctaaatgataattca

SEQ ID NO: 852856 - DNA, 15 bp, Homo sapiens
taaatgataattcat

SEQ ID NO: 852857 - DNA, 15 bp, Homo sapiens
aaatgataattcatc

SEQ ID NO: 852858 - DNA, 15 bp, Homo sapiens
aatgataattcatct

SEQ ID NO: 852859 - DNA, 15 bp, Homo sapiens
atgataattcatcta

SEQ ID NO: 852860 - DNA, 15 bp, Homo sapiens
tgataattcatctat

SEQ ID NO: 852861 - DNA, 15 bp, Homo sapiens
gataattcatctata

SEQ ID NO: 852862 - DNA, 15 bp, Homo sapiens
ataattcatctatat

SEQ ID NO: 852863 - DNA, 15 bp, Homo sapiens
taattcatctatata

SEQ ID NO: 852864 - DNA, 15 bp, Homo sapiens
aattcatctatatag

SEQ ID NO: 852865 - DNA, 15 bp, Homo sapiens
attcatctatatagt

SEQ ID NO: 852866 - DNA, 15 bp, Homo sapiens
ttcatctatatagtg

SEQ ID NO: 852867 - DNA, 15 bp, Homo sapiens
tcatctatatagtgt

SEQ ID NO: 852868 - DNA, 15 bp, Homo sapiens
catctatatagtgtt

SEQ ID NO: 852869 - DNA, 15 bp, Homo sapiens
atctatatagtgttt

SEQ ID NO: 852870 - DNA, 15 bp, Homo sapiens
tctatatagtgtttt

SEQ ID NO: 852871 - DNA, 15 bp, Homo sapiens
ctatatagtgttttt

SEQ ID NO: 852872 - DNA, 15 bp, Homo sapiens
tatatagtgtttttt

SEQ ID NO: 852873 - DNA, 15 bp, Homo sapiens
atatagtgttttttt

SEQ ID NO: 852874 - DNA, 15 bp, Homo sapiens
tatagtgtttttttg

SEQ ID NO: 852875 - DNA, 15 bp, Homo sapiens
atagtgtttttttgt

SEQ ID NO: 852876 - DNA, 15 bp, Homo sapiens
tagtgtttttttgtg

SEQ ID NO: 852877 - DNA, 15 bp, Homo sapiens
agtgtttttttgtgt

SEQ ID NO: 852878 - DNA, 15 bp, Homo sapiens
gtgtttttttgtgtg

SEQ ID NO: 852879 - DNA, 15 bp, Homo sapiens
tgtttttttgtgtgt

SEQ ID NO: 852880 - DNA, 15 bp, Homo sapiens
gtttttttgtgtgtt

SEQ ID NO: 852881 - DNA, 15 bp, Homo sapiens
tttttttgtgtgttt

SEQ ID NO: 852882 - DNA, 15 bp, Homo sapiens
ttttttgtgtgtttg

SEQ ID NO: 852883 - DNA, 15 bp, Homo sapiens
tttttgtgtgtttgt

SEQ ID NO: 852884 - DNA, 15 bp, Homo sapiens
ttttgtgtgtttgtt

SEQ ID NO: 852885 - DNA, 15 bp, Homo sapiens
tttgtgtgtttgttt

SEQ ID NO: 852886 - DNA, 15 bp, Homo sapiens
ttgtgtgtttgtttg

SEQ ID NO: 852887 - DNA, 15 bp, Homo sapiens
tgtgtgtttgtttgt

SEQ ID NO: 852888 - DNA, 15 bp, Homo sapiens
gtgtgtttgtttgtt

SEQ ID NO: 852889 - DNA, 15 bp, Homo sapiens
tgtgtttgtttgttt

SEQ ID NO: 852890 - DNA, 15 bp, Homo sapiens
gtgtttgtttgtttg

SEQ ID NO: 852891 - DNA, 15 bp, Homo sapiens
tgtttgtttgtttgt

SEQ ID NO: 852892 - DNA, 15 bp, Homo sapiens
gtttgtttgtttgtt

SEQ ID NO: 852893 - DNA, 15 bp, Homo sapiens
ttgtttgtttgtttg

SEQ ID NO: 852894 - DNA, 15 bp, Homo sapiens
tgtttgtttgtttga

SEQ ID NO: 852895 - DNA, 15 bp, Homo sapiens
gtttgtttgtttgag

SEQ ID NO: 852896 - DNA, 15 bp, Homo sapiens
tttgtttgtttgaga

SEQ ID NO: 852897 - DNA, 15 bp, Homo sapiens
ttgtttgtttgagat

SEQ ID NO: 852898 - DNA, 15 bp, Homo sapiens
tgtttgtttgagatg

SEQ ID NO: 852899 - DNA, 15 bp, Homo sapiens
gtttgtttgagatgg

SEQ ID NO: 852900 - DNA, 15 bp, Homo sapiens
tttgtttgagatgga

SEQ ID NO: 852901 - DNA, 15 bp, Homo sapiens
ttgtttgagatggag

SEQ ID NO: 852902 - DNA, 15 bp, Homo sapiens
tgtttgagatggagt

SEQ ID NO: 852903 - DNA, 15 bp, Homo sapiens
gtttgagatggagtc

SEQ ID NO: 852904 - DNA, 15 bp, Homo sapiens
tttgagatggagtct

SEQ ID NO: 852905 - DNA, 15 bp, Homo sapiens
ttgagatggagtctc

SEQ ID NO: 852906 - DNA, 15 bp, Homo sapiens
tgagatggagtctcg

SEQ ID NO: 852907 - DNA, 15 bp, Homo sapiens
gagatggagtctcgc

SEQ ID NO: 852908 - DNA, 15 bp, Homo sapiens
agatggagtctcgct

SEQ ID NO: 852909 - DNA, 15 bp, Homo sapiens
gatggagtctcgctc

SEQ ID NO: 852910 - DNA, 15 bp, Homo sapiens
atggagtctcgctct

SEQ ID NO: 852911 - DNA, 15 bp, Homo sapiens
tggagtctcgctctg

SEQ ID NO: 852912 - DNA, 15 bp, Homo sapiens
agtctcgctctgtca

SEQ ID NO: 852913 - DNA, 15 bp, Homo sapiens
gtctcgctctgtcac

SEQ ID NO: 852914 - DNA, 15 bp, Homo sapiens
tctcgctctgtcacc

SEQ ID NO: 852915 - DNA, 15 bp, Homo sapiens
ctcgctctgtcacct

SEQ ID NO: 852916 - DNA, 15 bp, Homo sapiens
tcgctctgtcaccta

SEQ ID NO: 852917 - DNA, 15 bp, Homo sapiens
cgctctgtcacctag

SEQ ID NO: 852918 - DNA, 15 bp, Homo sapiens
gctctgtcacctagg

SEQ ID NO: 852919 - DNA, 15 bp, Homo sapiens
ctctgtcacctaggc

SEQ ID NO: 852920 - DNA, 15 bp, Homo sapiens
tctgtcacctaggct

SEQ ID NO: 852921 - DNA, 15 bp, Homo sapiens
ctgtcacctaggctg

SEQ ID NO: 852922 - DNA, 15 bp, Homo sapiens
tgtcacctaggctgg

SEQ ID NO: 852923 - DNA, 15 bp, Homo sapiens
gtcacctaggctgga

SEQ ID NO: 852924 - DNA, 15 bp, Homo sapiens
tcacctaggctggag

SEQ ID NO: 852925 - DNA, 15 bp, Homo sapiens
cacctaggctggagt

SEQ ID NO: 852926 - DNA, 15 bp, Homo sapiens
acctaggctggagtg

SEQ ID NO: 852927 - DNA, 15 bp, Homo sapiens
cctaggctggagtgc

SEQ ID NO: 852928 - DNA, 15 bp, Homo sapiens
ctaggctggagtgca

SEQ ID NO: 852929 - DNA, 15 bp, Homo sapiens
taggctggagtgcaa

SEQ ID NO: 852930 - DNA, 15 bp, Homo sapiens
ctggagtgcaatggt

SEQ ID NO: 852931 - DNA, 15 bp, Homo sapiens
tggagtgcaatggtg

SEQ ID NO: 852932 - DNA, 15 bp, Homo sapiens
ggagtgcaatggtgc

SEQ ID NO: 852933 - DNA, 15 bp, Homo sapiens
gagtgcaatggtgca

SEQ ID NO: 852934 - DNA, 15 bp, Homo sapiens
agtgcaatggtgcaa

SEQ ID NO: 852935 - DNA, 15 bp, Homo sapiens
gtgcaatggtgcaac

SEQ ID NO: 852936 - DNA, 15 bp, Homo sapiens
tgcaatggtgcaacc

SEQ ID NO: 852937 - DNA, 15 bp, Homo sapiens
gcaatggtgcaacct

SEQ ID NO: 852938 - DNA, 15 bp, Homo sapiens
caatggtgcaacctc

SEQ ID NO: 852939 - DNA, 15 bp, Homo sapiens
aatggtgcaacctcg

SEQ ID NO: 852940 - DNA, 15 bp, Homo sapiens
atggtgcaacctcgg

SEQ ID NO: 852941 - DNA, 15 bp, Homo sapiens
tggtgcaacctcggc

SEQ ID NO: 852942 - DNA, 15 bp, Homo sapiens
ggtgcaacctcggct

SEQ ID NO: 852943 - DNA, 15 bp, Homo sapiens
gtgcaacctcggctc

SEQ ID NO: 852944 - DNA, 15 bp, Homo sapiens
tgcaacctcggctca

SEQ ID NO: 852945 - DNA, 15 bp, Homo sapiens
gcaacctcggctcac

SEQ ID NO: 852946 - DNA, 15 bp, Homo sapiens
caacctcggctcact

SEQ ID NO: 852947 - DNA, 15 bp, Homo sapiens
aacctcggctcactg

SEQ ID NO: 852948 - DNA, 15 bp, Homo sapiens
acctcggctcactgc

SEQ ID NO: 852949 - DNA, 15 bp, Homo sapiens
cctcggctcactgca

SEQ ID NO: 852950 - DNA, 15 bp, Homo sapiens
caacctctgcctcct

SEQ ID NO: 852951 - DNA, 15 bp, Homo sapiens
aacctctgcctcctg

SEQ ID NO: 852952 - DNA, 15 bp, Homo sapiens
acctctgcctcctgg

SEQ ID NO: 852953 - DNA, 15 bp, Homo sapiens
cctctgcctcctggg

SEQ ID NO: 852954 - DNA, 15 bp, Homo sapiens
tcctgggttcaagct

SEQ ID NO: 852955 - DNA, 15 bp, Homo sapiens
cctgggttcaagcta

SEQ ID NO: 852956 - DNA, 15 bp, Homo sapiens
ctgggttcaagctaa

SEQ ID NO: 852957 - DNA, 15 bp, Homo sapiens
tgggttcaagctaat

SEQ ID NO: 852958 - DNA, 15 bp, Homo sapiens
gggttcaagctaatc

SEQ ID NO: 852959 - DNA, 15 bp, Homo sapiens
ggttcaagctaatct

SEQ ID NO: 852960 - DNA, 15 bp, Homo sapiens
gttcaagctaatctc

SEQ ID NO: 852961 - DNA, 15 bp, Homo sapiens
ttcaagctaatctcc

SEQ ID NO: 852962 - DNA, 15 bp, Homo sapiens
tcaagctaatctcct

SEQ ID NO: 852963 - DNA, 15 bp, Homo sapiens
caagctaatctcctg

SEQ ID NO: 852964 - DNA, 15 bp, Homo sapiens
aagctaatctcctgc

SEQ ID NO: 852965 - DNA, 15 bp, Homo sapiens
agctaatctcctgcc

SEQ ID NO: 852966 - DNA, 15 bp, Homo sapiens
gctaatctcctgcct

SEQ ID NO: 852967 - DNA, 15 bp, Homo sapiens
ctaatctcctgcctc

SEQ ID NO: 852968 - DNA, 15 bp, Homo sapiens
taatctcctgcctca

SEQ ID NO: 852969 - DNA, 15 bp, Homo sapiens
aatctcctgcctcag

SEQ ID NO: 852970 - DNA, 15 bp, Homo sapiens
atctcctgcctcagc

SEQ ID NO: 852971 - DNA, 15 bp, Homo sapiens
ctcctgagtagctga

SEQ ID NO: 852972 - DNA, 15 bp, Homo sapiens
tcctgagtagctgag

SEQ ID NO: 852973 - DNA, 15 bp, Homo sapiens
cctgagtagctgaga

SEQ ID NO: 852974 - DNA, 15 bp, Homo sapiens
ctgagtagctgagat

SEQ ID NO: 852975 - DNA, 15 bp, Homo sapiens
tgagtagctgagatt

SEQ ID NO: 852976 - DNA, 15 bp, Homo sapiens
gagtagctgagatta

SEQ ID NO: 852977 - DNA, 15 bp, Homo sapiens
agtagctgagattac

SEQ ID NO: 852978 - DNA, 15 bp, Homo sapiens
gtagctgagattaca

SEQ ID NO: 852979 - DNA, 15 bp, Homo sapiens
tagctgagattacag

SEQ ID NO: 852980 - DNA, 15 bp, Homo sapiens
agctgagattacagg

SEQ ID NO: 852981 - DNA, 15 bp, Homo sapiens
gctgagattacaggc

SEQ ID NO: 852982 - DNA, 15 bp, Homo sapiens
ctgagattacaggca

SEQ ID NO: 852983 - DNA, 15 bp, Homo sapiens
tgagattacaggcat

SEQ ID NO: 852984 - DNA, 15 bp, Homo sapiens
gagattacaggcatg

SEQ ID NO: 852985 - DNA, 15 bp, Homo sapiens
agattacaggcatgc

SEQ ID NO: 852986 - DNA, 15 bp, Homo sapiens
gattacaggcatgca

SEQ ID NO: 852987 - DNA, 15 bp, Homo sapiens
attacaggcatgcac

SEQ ID NO: 852988 - DNA, 15 bp, Homo sapiens
ttacaggcatgcacc

SEQ ID NO: 852989 - DNA, 15 bp, Homo sapiens
ggcatgcaccaccat

SEQ ID NO: 852990 - DNA, 15 bp, Homo sapiens
gcatgcaccaccatg

SEQ ID NO: 852991 - DNA, 15 bp, Homo sapiens
catgcaccaccatgc

SEQ ID NO: 852992 - DNA, 15 bp, Homo sapiens
atgcaccaccatgcc

SEQ ID NO: 852993 - DNA, 15 bp, Homo sapiens
tgcaccaccatgccg

SEQ ID NO: 852994 - DNA, 15 bp, Homo sapiens
gcaccaccatgccga

SEQ ID NO: 852995 - DNA, 15 bp, Homo sapiens
caccaccatgccgag

SEQ ID NO: 852996 - DNA, 15 bp, Homo sapiens
accaccatgccgagc

SEQ ID NO: 852997 - DNA, 15 bp, Homo sapiens
ccaccatgccgagct

SEQ ID NO: 852998 - DNA, 15 bp, Homo sapiens
caccatgccgagcta

SEQ ID NO: 852999 - DNA, 15 bp, Homo sapiens
accatgccgagctaa

SEQ ID NO: 853000 - DNA, 15 bp, Homo sapiens
ccatgccgagctaat

SEQ ID NO: 853001 - DNA, 15 bp, Homo sapiens
catgccgagctaatt

SEQ ID NO: 853002 - DNA, 15 bp, Homo sapiens
atgccgagctaattt

SEQ ID NO: 853003 - DNA, 15 bp, Homo sapiens
tgccgagctaatttt

SEQ ID NO: 853004 - DNA, 15 bp, Homo sapiens
gccgagctaattttt

SEQ ID NO: 853005 - DNA, 15 bp, Homo sapiens
ccgagctaatttttg

SEQ ID NO: 853006 - DNA, 15 bp, Homo sapiens
cgagctaatttttgt

SEQ ID NO: 853007 - DNA, 15 bp, Homo sapiens
gagctaatttttgta

SEQ ID NO: 853008 - DNA, 15 bp, Homo sapiens
atttttagtagagaa

SEQ ID NO: 853009 - DNA, 15 bp, Homo sapiens
tttttagtagagaag

SEQ ID NO: 853010 - DNA, 15 bp, Homo sapiens
ttttagtagagaagg

SEQ ID NO: 853011 - DNA, 15 bp, Homo sapiens
tttagtagagaaggg

SEQ ID NO: 853012 - DNA, 15 bp, Homo sapiens
ttagtagagaagggg

SEQ ID NO: 853013 - DNA, 15 bp, Homo sapiens
tagtagagaaggggt

SEQ ID NO: 853014 - DNA, 15 bp, Homo sapiens
agtagagaaggggtt

SEQ ID NO: 853015 - DNA, 15 bp, Homo sapiens
gtagagaaggggttt

SEQ ID NO: 853016 - DNA, 15 bp, Homo sapiens
tagagaaggggtttc

SEQ ID NO: 853017 - DNA, 15 bp, Homo sapiens
agagaaggggtttca

SEQ ID NO: 853018 - DNA, 15 bp, Homo sapiens
gagaaggggtttcat

SEQ ID NO: 853019 - DNA, 15 bp, Homo sapiens
agaaggggtttcatc

SEQ ID NO: 853020 - DNA, 15 bp, Homo sapiens
gaaggggtttcatca

SEQ ID NO: 853021 - DNA, 15 bp, Homo sapiens
aaggggtttcatcat

SEQ ID NO: 853022 - DNA, 15 bp, Homo sapiens
aggggtttcatcatg

SEQ ID NO: 853023 - DNA, 15 bp, Homo sapiens
ggggtttcatcatgt

SEQ ID NO: 853024 - DNA, 15 bp, Homo sapiens
gggtttcatcatgtt

SEQ ID NO: 853025 - DNA, 15 bp, Homo sapiens
ggtttcatcatgttg

SEQ ID NO: 853026 - DNA, 15 bp, Homo sapiens
gtttcatcatgttga

SEQ ID NO: 853027 - DNA, 15 bp, Homo sapiens
tttcatcatgttgac

SEQ ID NO: 853028 - DNA, 15 bp, Homo sapiens
ttcatcatgttgacc

SEQ ID NO: 853029 - DNA, 15 bp, Homo sapiens
tcatcatgttgacca

SEQ ID NO: 853030 - DNA, 15 bp, Homo sapiens
catcatgttgaccag

SEQ ID NO: 853031 - DNA, 15 bp, Homo sapiens
atcatgttgaccagg

SEQ ID NO: 853032 - DNA, 15 bp, Homo sapiens
tcatgttgaccaggc

SEQ ID NO: 853033 - DNA, 15 bp, Homo sapiens
catgttgaccaggct

SEQ ID NO: 853034 - DNA, 15 bp, Homo sapiens
atgttgaccaggctg

SEQ ID NO: 853035 - DNA, 15 bp, Homo sapiens
tgttgaccaggctgg

SEQ ID NO: 853036 - DNA, 15 bp, Homo sapiens
gttgaccaggctggt

SEQ ID NO: 853037 - DNA, 15 bp, Homo sapiens
ttgaccaggctggtc

SEQ ID NO: 853038 - DNA, 15 bp, Homo sapiens
tgaccaggctggtct

SEQ ID NO: 853039 - DNA, 15 bp, Homo sapiens
gaccaggctggtctt

SEQ ID NO: 853040 - DNA, 15 bp, Homo sapiens
accaggctggtcttg

SEQ ID NO: 853041 - DNA, 15 bp, Homo sapiens
tgaactcctgacctt

SEQ ID NO: 853042 - DNA, 15 bp, Homo sapiens
gaactcctgaccttg

SEQ ID NO: 853043 - DNA, 15 bp, Homo sapiens
aactcctgaccttgt

SEQ ID NO: 853044 - DNA, 15 bp, Homo sapiens
actcctgaccttgtg

SEQ ID NO: 853045 - DNA, 15 bp, Homo sapiens
tgaccttgtgatcca

SEQ ID NO: 853046 - DNA, 15 bp, Homo sapiens
gaccttgtgatccac

SEQ ID NO: 853047 - DNA, 15 bp, Homo sapiens
accttgtgatccacc

SEQ ID NO: 853048 - DNA, 15 bp, Homo sapiens
ccttgtgatccaccc

SEQ ID NO: 853049 - DNA, 15 bp, Homo sapiens
cttgtgatccaccca

SEQ ID NO: 853050 - DNA, 15 bp, Homo sapiens
ttgtgatccacccac

SEQ ID NO: 853051 - DNA, 15 bp, Homo sapiens
tgtgatccacccacc

SEQ ID NO: 853052 - DNA, 15 bp, Homo sapiens
gatccacccacctca

SEQ ID NO: 853053 - DNA, 15 bp, Homo sapiens
atccacccacctcag

SEQ ID NO: 853054 - DNA, 15 bp, Homo sapiens
tccacccacctcagc

SEQ ID NO: 853055 - DNA, 15 bp, Homo sapiens
ccacccacctcagcc

SEQ ID NO: 853056 - DNA, 15 bp, Homo sapiens
cacccacctcagcct

SEQ ID NO: 853057 - DNA, 15 bp, Homo sapiens
acccacctcagcctc

SEQ ID NO: 853058 - DNA, 15 bp, Homo sapiens
cacctcagcctccca

SEQ ID NO: 853059 - DNA, 15 bp, Homo sapiens
acctcagcctcccaa

SEQ ID NO: 853060 - DNA, 15 bp, Homo sapiens
cctcagcctcccaaa

SEQ ID NO: 853061 - DNA, 15 bp, Homo sapiens
ctcagcctcccaaag

SEQ ID NO: 853062 - DNA, 15 bp, Homo sapiens
tcccaaagtgctggt

SEQ ID NO: 853063 - DNA, 15 bp, Homo sapiens
cccaaagtgctggta

SEQ ID NO: 853064 - DNA, 15 bp, Homo sapiens
ccaaagtgctggtat

SEQ ID NO: 853065 - DNA, 15 bp, Homo sapiens
caaagtgctggtatt

SEQ ID NO: 853066 - DNA, 15 bp, Homo sapiens
aaagtgctggtatta

SEQ ID NO: 853067 - DNA, 15 bp, Homo sapiens
aagtgctggtattac

SEQ ID NO: 853068 - DNA, 15 bp, Homo sapiens
agtgctggtattaca

SEQ ID NO: 853069 - DNA, 15 bp, Homo sapiens
gtgctggtattacag

SEQ ID NO: 853070 - DNA, 15 bp, Homo sapiens
tgctggtattacagg

SEQ ID NO: 853071 - DNA, 15 bp, Homo sapiens
gctggtattacaggc

SEQ ID NO: 853072 - DNA, 15 bp, Homo sapiens
ctggtattacaggcg

SEQ ID NO: 853073 - DNA, 15 bp, Homo sapiens
tggtattacaggcgt

SEQ ID NO: 853074 - DNA, 15 bp, Homo sapiens
ggtattacaggcgtg

SEQ ID NO: 853075 - DNA, 15 bp, Homo sapiens
gtattacaggcgtgt

SEQ ID NO: 853076 - DNA, 15 bp, Homo sapiens
tattacaggcgtgtg

SEQ ID NO: 853077 - DNA, 15 bp, Homo sapiens
attacaggcgtgtgc

SEQ ID NO: 853078 - DNA, 15 bp, Homo sapiens
ttacaggcgtgtgcc

SEQ ID NO: 853079 - DNA, 15 bp, Homo sapiens
tacaggcgtgtgcca

SEQ ID NO: 853080 - DNA, 15 bp, Homo sapiens
acaggcgtgtgccac

SEQ ID NO: 853081 - DNA, 15 bp, Homo sapiens
caggcgtgtgccacc

SEQ ID NO: 853082 - DNA, 15 bp, Homo sapiens
aggcgtgtgccacca

SEQ ID NO: 853083 - DNA, 15 bp, Homo sapiens
ggcgtgtgccaccac

SEQ ID NO: 853084 - DNA, 15 bp, Homo sapiens
gcgtgtgccaccacg

SEQ ID NO: 853085 - DNA, 15 bp, Homo sapiens
cgtgtgccaccacgt

SEQ ID NO: 853086 - DNA, 15 bp, Homo sapiens
gtgtgccaccacgtc

SEQ ID NO: 853087 - DNA, 15 bp, Homo sapiens
tgtgccaccacgtcc

SEQ ID NO: 853088 - DNA, 15 bp, Homo sapiens
gtgccaccacgtcca

SEQ ID NO: 853089 - DNA, 15 bp, Homo sapiens
tgccaccacgtccag

SEQ ID NO: 853090 - DNA, 15 bp, Homo sapiens
gccaccacgtccagc

SEQ ID NO: 853091 - DNA, 15 bp, Homo sapiens
ccaccacgtccagcc

SEQ ID NO: 853092 - DNA, 15 bp, Homo sapiens
caccacgtccagcct

SEQ ID NO: 853093 - DNA, 15 bp, Homo sapiens
accacgtccagcctg

SEQ ID NO: 853094 - DNA, 15 bp, Homo sapiens
ccacgtccagcctga

SEQ ID NO: 853095 - DNA, 15 bp, Homo sapiens
cacgtccagcctgag

SEQ ID NO: 853096 - DNA, 15 bp, Homo sapiens
acgtccagcctgagc

SEQ ID NO: 853097 - DNA, 15 bp, Homo sapiens
cgtccagcctgagcc

SEQ ID NO: 853098 - DNA, 15 bp, Homo sapiens
gtccagcctgagcca

SEQ ID NO: 853099 - DNA, 15 bp, Homo sapiens
tccagcctgagccac

SEQ ID NO: 853100 - DNA, 15 bp, Homo sapiens
ccagcctgagccact

SEQ ID NO: 853101 - DNA, 15 bp, Homo sapiens
cagcctgagccactg

SEQ ID NO: 853102 - DNA, 15 bp, Homo sapiens
agcctgagccactgc

SEQ ID NO: 853103 - DNA, 15 bp, Homo sapiens
gcctgagccactgcg

SEQ ID NO: 853104 - DNA, 15 bp, Homo sapiens
cctgagccactgcgc

SEQ ID NO: 853105 - DNA, 15 bp, Homo sapiens
ctgagccactgcgcc

SEQ ID NO: 853106 - DNA, 15 bp, Homo sapiens
cactgcgcccagccc

SEQ ID NO: 853107 - DNA, 15 bp, Homo sapiens
actgcgcccagccca

SEQ ID NO: 853108 - DNA, 15 bp, Homo sapiens
ctgcgcccagcccat

SEQ ID NO: 853109 - DNA, 15 bp, Homo sapiens
tgcgcccagcccatc

SEQ ID NO: 853110 - DNA, 15 bp, Homo sapiens
gcgcccagcccatct

SEQ ID NO: 853111 - DNA, 15 bp, Homo sapiens
cgcccagcccatcta

SEQ ID NO: 853112 - DNA, 15 bp, Homo sapiens
gcccagcccatctat

SEQ ID NO: 853113 - DNA, 15 bp, Homo sapiens
cccagcccatctata

SEQ ID NO: 853114 - DNA, 15 bp, Homo sapiens
ccagcccatctatat

SEQ ID NO: 853115 - DNA, 15 bp, Homo sapiens
cagcccatctatata

SEQ ID NO: 853116 - DNA, 15 bp, Homo sapiens
agcccatctatatag

SEQ ID NO: 853117 - DNA, 15 bp, Homo sapiens
gcccatctatatagt

SEQ ID NO: 853118 - DNA, 15 bp, Homo sapiens
cccatctatatagtt

SEQ ID NO: 853119 - DNA, 15 bp, Homo sapiens
ccatctatatagttt

SEQ ID NO: 853120 - DNA, 15 bp, Homo sapiens
catctatatagttta

SEQ ID NO: 853121 - DNA, 15 bp, Homo sapiens
atctatatagtttaa

SEQ ID NO: 853122 - DNA, 15 bp, Homo sapiens
tctatatagtttaat

SEQ ID NO: 853123 - DNA, 15 bp, Homo sapiens
ctatatagtttaata

SEQ ID NO: 853124 - DNA, 15 bp, Homo sapiens
tatatagtttaatat

SEQ ID NO: 853125 - DNA, 15 bp, Homo sapiens
atatagtttaatatc

SEQ ID NO: 853126 - DNA, 15 bp, Homo sapiens
tatagtttaatatca

SEQ ID NO: 853127 - DNA, 15 bp, Homo sapiens
atagtttaatatcaa

SEQ ID NO: 853128 - DNA, 15 bp, Homo sapiens
tagtttaatatcaat

SEQ ID NO: 853129 - DNA, 15 bp, Homo sapiens
agtttaatatcaatc

SEQ ID NO: 853130 - DNA, 15 bp, Homo sapiens
gtttaatatcaatct

SEQ ID NO: 853131 - DNA, 15 bp, Homo sapiens
tttaatatcaatcta

SEQ ID NO: 853132 - DNA, 15 bp, Homo sapiens
ttaatatcaatctaa

SEQ ID NO: 853133 - DNA, 15 bp, Homo sapiens
taatatcaatctaaa

SEQ ID NO: 853134 - DNA, 15 bp, Homo sapiens
aatatcaatctaaat

SEQ ID NO: 853135 - DNA, 15 bp, Homo sapiens
atatcaatctaaatg

SEQ ID NO: 853136 - DNA, 15 bp, Homo sapiens
tatcaatctaaatga

SEQ ID NO: 853137 - DNA, 15 bp, Homo sapiens
atcaatctaaatgaa

SEQ ID NO: 853138 - DNA, 15 bp, Homo sapiens
tcaatctaaatgaat

SEQ ID NO: 853139 - DNA, 15 bp, Homo sapiens
caatctaaatgaatt

SEQ ID NO: 853140 - DNA, 15 bp, Homo sapiens
aatctaaatgaattt

SEQ ID NO: 853141 - DNA, 15 bp, Homo sapiens
atctaaatgaatttc

SEQ ID NO: 853142 - DNA, 15 bp, Homo sapiens
tctaaatgaatttct

SEQ ID NO: 853143 - DNA, 15 bp, Homo sapiens
ctaaatgaatttctc

SEQ ID NO: 853144 - DNA, 15 bp, Homo sapiens
taaatgaatttctca

SEQ ID NO: 853145 - DNA, 15 bp, Homo sapiens
aaatgaatttctcag

SEQ ID NO: 853146 - DNA, 15 bp, Homo sapiens
aatgaatttctcagt

SEQ ID NO: 853147 - DNA, 15 bp, Homo sapiens
atgaatttctcagtc

SEQ ID NO: 853148 - DNA, 15 bp, Homo sapiens
tgaatttctcagtcc

SEQ ID NO: 853149 - DNA, 15 bp, Homo sapiens
gaatttctcagtcct

SEQ ID NO: 853150 - DNA, 15 bp, Homo sapiens
aatttctcagtcctg

SEQ ID NO: 853151 - DNA, 15 bp, Homo sapiens
atttctcagtcctga

SEQ ID NO: 853152 - DNA, 15 bp, Homo sapiens
tttctcagtcctgag

SEQ ID NO: 853153 - DNA, 15 bp, Homo sapiens
ttctcagtcctgagc

SEQ ID NO: 853154 - DNA, 15 bp, Homo sapiens
tctcagtcctgagcc

SEQ ID NO: 853155 - DNA, 15 bp, Homo sapiens
ctcagtcctgagcct

SEQ ID NO: 853156 - DNA, 15 bp, Homo sapiens
tcagtcctgagccta

SEQ ID NO: 853157 - DNA, 15 bp, Homo sapiens
cagtcctgagcctaa

SEQ ID NO: 853158 - DNA, 15 bp, Homo sapiens
agtcctgagcctaaa

SEQ ID NO: 853159 - DNA, 15 bp, Homo sapiens
gtcctgagcctaaaa

SEQ ID NO: 853160 - DNA, 15 bp, Homo sapiens
tcctgagcctaaaaa

SEQ ID NO: 853161 - DNA, 15 bp, Homo sapiens
cctgagcctaaaaat

SEQ ID NO: 853162 - DNA, 15 bp, Homo sapiens
ctgagcctaaaaatt

SEQ ID NO: 853163 - DNA, 15 bp, Homo sapiens
tgagcctaaaaattt

SEQ ID NO: 853164 - DNA, 15 bp, Homo sapiens
gagcctaaaaattta

SEQ ID NO: 853165 - DNA, 15 bp, Homo sapiens
agcctaaaaatttag

SEQ ID NO: 853166 - DNA, 15 bp, Homo sapiens
gcctaaaaatttagt

SEQ ID NO: 853167 - DNA, 15 bp, Homo sapiens
cctaaaaatttagtt

SEQ ID NO: 853168 - DNA, 15 bp, Homo sapiens
ctaaaaatttagttg

SEQ ID NO: 853169 - DNA, 15 bp, Homo sapiens
taaaaatttagttgt

SEQ ID NO: 853170 - DNA, 15 bp, Homo sapiens
aaaaatttagttgta

SEQ ID NO: 853171 - DNA, 15 bp, Homo sapiens
aaaatttagttgtaa

SEQ ID NO: 853172 - DNA, 15 bp, Homo sapiens
aaatttagttgtaaa

SEQ ID NO: 853173 - DNA, 15 bp, Homo sapiens
aatttagttgtaaag

SEQ ID NO: 853174 - DNA, 15 bp, Homo sapiens
atttagttgtaaaga

SEQ ID NO: 853175 - DNA, 15 bp, Homo sapiens
tttagttgtaaagaa

SEQ ID NO: 853176 - DNA, 15 bp, Homo sapiens
ttagttgtaaagaat

SEQ ID NO: 853177 - DNA, 15 bp, Homo sapiens
tagttgtaaagaatg

SEQ ID NO: 853178 - DNA, 15 bp, Homo sapiens
agttgtaaagaatga

SEQ ID NO: 853179 - DNA, 15 bp, Homo sapiens
gttgtaaagaatgat

SEQ ID NO: 853180 - DNA, 15 bp, Homo sapiens
ttgtaaagaatgata

SEQ ID NO: 853181 - DNA, 15 bp, Homo sapiens
tgtaaagaatgatat

SEQ ID NO: 853182 - DNA, 15 bp, Homo sapiens
gtaaagaatgatatc

SEQ ID NO: 853183 - DNA, 15 bp, Homo sapiens
taaagaatgatatcc

SEQ ID NO: 853184 - DNA, 15 bp, Homo sapiens
aaagaatgatatcct

SEQ ID NO: 853185 - DNA, 15 bp, Homo sapiens
aagaatgatatcctt

SEQ ID NO: 853186 - DNA, 15 bp, Homo sapiens
agaatgatatccttg

SEQ ID NO: 853187 - DNA, 15 bp, Homo sapiens
gaatgatatccttga

SEQ ID NO: 853188 - DNA, 15 bp, Homo sapiens
aatgatatccttgac

SEQ ID NO: 853189 - DNA, 15 bp, Homo sapiens
atgatatccttgact

SEQ ID NO: 853190 - DNA, 15 bp, Homo sapiens
tgatatccttgacta

SEQ ID NO: 853191 - DNA, 15 bp, Homo sapiens
gatatccttgactaa

SEQ ID NO: 853192 - DNA, 15 bp, Homo sapiens
atatccttgactaat

SEQ ID NO: 853193 - DNA, 15 bp, Homo sapiens
tatccttgactaata

SEQ ID NO: 853194 - DNA, 15 bp, Homo sapiens
atccttgactaataa

SEQ ID NO: 853195 - DNA, 15 bp, Homo sapiens
tccttgactaataat

SEQ ID NO: 853196 - DNA, 15 bp, Homo sapiens
ccttgactaataata

SEQ ID NO: 853197 - DNA, 15 bp, Homo sapiens
cttgactaataatag

SEQ ID NO: 853198 - DNA, 15 bp, Homo sapiens
ttgactaataatagt

SEQ ID NO: 853199 - DNA, 15 bp, Homo sapiens
tgactaataatagtt

SEQ ID NO: 853200 - DNA, 15 bp, Homo sapiens
gactaataatagttt

SEQ ID NO: 853201 - DNA, 15 bp, Homo sapiens
actaataatagtttc

SEQ ID NO: 853202 - DNA, 15 bp, Homo sapiens
ctaataatagtttct

SEQ ID NO: 853203 - DNA, 15 bp, Homo sapiens
taataatagtttcta

SEQ ID NO: 853204 - DNA, 15 bp, Homo sapiens
aataatagtttctat

SEQ ID NO: 853205 - DNA, 15 bp, Homo sapiens
ataatagtttctatt

SEQ ID NO: 853206 - DNA, 15 bp, Homo sapiens
taatagtttctatta

SEQ ID NO: 853207 - DNA, 15 bp, Homo sapiens
aatagtttctattaa

SEQ ID NO: 853208 - DNA, 15 bp, Homo sapiens
atagtttctattaat

SEQ ID NO: 853209 - DNA, 15 bp, Homo sapiens
tagtttctattaatg

SEQ ID NO: 853210 - DNA, 15 bp, Homo sapiens
agtttctattaatgg

SEQ ID NO: 853211 - DNA, 15 bp, Homo sapiens
gtttctattaatgga

SEQ ID NO: 853212 - DNA, 15 bp, Homo sapiens
tttctattaatggat

SEQ ID NO: 853213 - DNA, 15 bp, Homo sapiens
ttctattaatggatt

SEQ ID NO: 853214 - DNA, 15 bp, Homo sapiens
tctattaatggattg

SEQ ID NO: 853215 - DNA, 15 bp, Homo sapiens
ctattaatggattgc

SEQ ID NO: 853216 - DNA, 15 bp, Homo sapiens
tattaatggattgca

SEQ ID NO: 853217 - DNA, 15 bp, Homo sapiens
attaatggattgcat

SEQ ID NO: 853218 - DNA, 15 bp, Homo sapiens
ttaatggattgcatc

SEQ ID NO: 853219 - DNA, 15 bp, Homo sapiens
taatggattgcatct

SEQ ID NO: 853220 - DNA, 15 bp, Homo sapiens
aatggattgcatcta

SEQ ID NO: 853221 - DNA, 15 bp, Homo sapiens
atggattgcatctag

SEQ ID NO: 853222 - DNA, 15 bp, Homo sapiens
tggattgcatctagt

SEQ ID NO: 853223 - DNA, 15 bp, Homo sapiens
ggattgcatctagtg

SEQ ID NO: 853224 - DNA, 15 bp, Homo sapiens
gattgcatctagtgc

SEQ ID NO: 853225 - DNA, 15 bp, Homo sapiens
attgcatctagtgct

SEQ ID NO: 853226 - DNA, 15 bp, Homo sapiens
ttgcatctagtgcta

SEQ ID NO: 853227 - DNA, 15 bp, Homo sapiens
tgcatctagtgctag

SEQ ID NO: 853228 - DNA, 15 bp, Homo sapiens
gcatctagtgctagg

SEQ ID NO: 853229 - DNA, 15 bp, Homo sapiens
catctagtgctaggt

SEQ ID NO: 853230 - DNA, 15 bp, Homo sapiens
atctagtgctaggtg

SEQ ID NO: 853231 - DNA, 15 bp, Homo sapiens
tctagtgctaggtgg

SEQ ID NO: 853232 - DNA, 15 bp, Homo sapiens
ctagtgctaggtggc

SEQ ID NO: 853233 - DNA, 15 bp, Homo sapiens
tagtgctaggtggca

SEQ ID NO: 853234 - DNA, 15 bp, Homo sapiens
agtgctaggtggcat

SEQ ID NO: 853235 - DNA, 15 bp, Homo sapiens
gtgctaggtggcata

SEQ ID NO: 853236 - DNA, 15 bp, Homo sapiens
tgctaggtggcatat

SEQ ID NO: 853237 - DNA, 15 bp, Homo sapiens
gctaggtggcatata

SEQ ID NO: 853238 - DNA, 15 bp, Homo sapiens
ctaggtggcatatat

SEQ ID NO: 853239 - DNA, 15 bp, Homo sapiens
taggtggcatatatt

SEQ ID NO: 853240 - DNA, 15 bp, Homo sapiens
aggtggcatatattt

SEQ ID NO: 853241 - DNA, 15 bp, Homo sapiens
ggtggcatatattta

SEQ ID NO: 853242 - DNA, 15 bp, Homo sapiens
gtggcatatatttag

SEQ ID NO: 853243 - DNA, 15 bp, Homo sapiens
tggcatatatttagt

SEQ ID NO: 853244 - DNA, 15 bp, Homo sapiens
ggcatatatttagtc

SEQ ID NO: 853245 - DNA, 15 bp, Homo sapiens
gcatatatttagtcc

SEQ ID NO: 853246 - DNA, 15 bp, Homo sapiens
catatatttagtccc

SEQ ID NO: 853247 - DNA, 15 bp, Homo sapiens
atatatttagtcccc

SEQ ID NO: 853248 - DNA, 15 bp, Homo sapiens
tatatttagtcccca

SEQ ID NO: 853249 - DNA, 15 bp, Homo sapiens
atatttagtccccac

SEQ ID NO: 853250 - DNA, 15 bp, Homo sapiens
tatttagtccccaca

SEQ ID NO: 853251 - DNA, 15 bp, Homo sapiens
atttagtccccacaa

SEQ ID NO: 853252 - DNA, 15 bp, Homo sapiens
tttagtccccacaac

SEQ ID NO: 853253 - DNA, 15 bp, Homo sapiens
ttagtccccacaact

SEQ ID NO: 853254 - DNA, 15 bp, Homo sapiens
tagtccccacaacta

SEQ ID NO: 853255 - DNA, 15 bp, Homo sapiens
agtccccacaactac

SEQ ID NO: 853256 - DNA, 15 bp, Homo sapiens
gtccccacaactacc

SEQ ID NO: 853257 - DNA, 15 bp, Homo sapiens
tccccacaactaccc

SEQ ID NO: 853258 - DNA, 15 bp, Homo sapiens
ccccacaactaccct

SEQ ID NO: 853259 - DNA, 15 bp, Homo sapiens
cccacaactaccctg

SEQ ID NO: 853260 - DNA, 15 bp, Homo sapiens
ccacaactaccctgg

SEQ ID NO: 853261 - DNA, 15 bp, Homo sapiens
cacaactaccctgga

SEQ ID NO: 853262 - DNA, 15 bp, Homo sapiens
acaactaccctggaa

SEQ ID NO: 853263 - DNA, 15 bp, Homo sapiens
caactaccctggaag

SEQ ID NO: 853264 - DNA, 15 bp, Homo sapiens
aactaccctggaagg

SEQ ID NO: 853265 - DNA, 15 bp, Homo sapiens
actaccctggaaggt

SEQ ID NO: 853266 - DNA, 15 bp, Homo sapiens
ctaccctggaaggta

SEQ ID NO: 853267 - DNA, 15 bp, Homo sapiens
taccctggaaggtat

SEQ ID NO: 853268 - DNA, 15 bp, Homo sapiens
accctggaaggtatt

SEQ ID NO: 853269 - DNA, 15 bp, Homo sapiens
ccctggaaggtattt

SEQ ID NO: 853270 - DNA, 15 bp, Homo sapiens
cctggaaggtattta

SEQ ID NO: 853271 - DNA, 15 bp, Homo sapiens
ctggaaggtatttaa

SEQ ID NO: 853272 - DNA, 15 bp, Homo sapiens
tggaaggtatttaaa

SEQ ID NO: 853273 - DNA, 15 bp, Homo sapiens
ggaaggtatttaaaa

SEQ ID NO: 853274 - DNA, 15 bp, Homo sapiens
gaaggtatttaaaat

SEQ ID NO: 853275 - DNA, 15 bp, Homo sapiens
aaggtatttaaaatt

SEQ ID NO: 853276 - DNA, 15 bp, Homo sapiens
aggtatttaaaattt

SEQ ID NO: 853277 - DNA, 15 bp, Homo sapiens
ggtatttaaaatttt

SEQ ID NO: 853278 - DNA, 15 bp, Homo sapiens
gtatttaaaattttt

SEQ ID NO: 853279 - DNA, 15 bp, Homo sapiens
tatttaaaatttttc

SEQ ID NO: 853280 - DNA, 15 bp, Homo sapiens
atttaaaatttttca

SEQ ID NO: 853281 - DNA, 15 bp, Homo sapiens
tttaaaatttttcac

SEQ ID NO: 853282 - DNA, 15 bp, Homo sapiens
ttaaaatttttcaca

SEQ ID NO: 853283 - DNA, 15 bp, Homo sapiens
taaaatttttcacat

SEQ ID NO: 853284 - DNA, 15 bp, Homo sapiens
aaaatttttcacatt

SEQ ID NO: 853285 - DNA, 15 bp, Homo sapiens
aaatttttcacattt

SEQ ID NO: 853286 - DNA, 15 bp, Homo sapiens
aatttttcacatttg

SEQ ID NO: 853287 - DNA, 15 bp, Homo sapiens
atttttcacatttgc

SEQ ID NO: 853288 - DNA, 15 bp, Homo sapiens
tttttcacatttgca

SEQ ID NO: 853289 - DNA, 15 bp, Homo sapiens
ttttcacatttgcag

SEQ ID NO: 853290 - DNA, 15 bp, Homo sapiens
tttcacatttgcaga

SEQ ID NO: 853291 - DNA, 15 bp, Homo sapiens
ttcacatttgcagat

SEQ ID NO: 853292 - DNA, 15 bp, Homo sapiens
tcacatttgcagata

SEQ ID NO: 853293 - DNA, 15 bp, Homo sapiens
cacatttgcagataa

SEQ ID NO: 853294 - DNA, 15 bp, Homo sapiens
acatttgcagataag

SEQ ID NO: 853295 - DNA, 15 bp, Homo sapiens
catttgcagataagg

SEQ ID NO: 853296 - DNA, 15 bp, Homo sapiens
atttgcagataagga

SEQ ID NO: 853297 - DNA, 15 bp, Homo sapiens
tttgcagataaggaa

SEQ ID NO: 853298 - DNA, 15 bp, Homo sapiens
ttgcagataaggaaa

SEQ ID NO: 853299 - DNA, 15 bp, Homo sapiens
tgcagataaggaaac

SEQ ID NO: 853300 - DNA, 15 bp, Homo sapiens
gcagataaggaaact

SEQ ID NO: 853301 - DNA, 15 bp, Homo sapiens
cagataaggaaacta

SEQ ID NO: 853302 - DNA, 15 bp, Homo sapiens
agataaggaaactaa

SEQ ID NO: 853303 - DNA, 15 bp, Homo sapiens
gataaggaaactaaa

SEQ ID NO: 853304 - DNA, 15 bp, Homo sapiens
ataaggaaactaaag

SEQ ID NO: 853305 - DNA, 15 bp, Homo sapiens
taaggaaactaaagt

SEQ ID NO: 853306 - DNA, 15 bp, Homo sapiens
aaggaaactaaagtt

SEQ ID NO: 853307 - DNA, 15 bp, Homo sapiens
aggaaactaaagttc

SEQ ID NO: 853308 - DNA, 15 bp, Homo sapiens
ggaaactaaagttca

SEQ ID NO: 853309 - DNA, 15 bp, Homo sapiens
gaaactaaagttcag

SEQ ID NO: 853310 - DNA, 15 bp, Homo sapiens
aaactaaagttcaga

SEQ ID NO: 853311 - DNA, 15 bp, Homo sapiens
aactaaagttcagag

SEQ ID NO: 853312 - DNA, 15 bp, Homo sapiens
actaaagttcagagt

SEQ ID NO: 853313 - DNA, 15 bp, Homo sapiens
ctaaagttcagagtt

SEQ ID NO: 853314 - DNA, 15 bp, Homo sapiens
taaagttcagagttc

SEQ ID NO: 853315 - DNA, 15 bp, Homo sapiens
aaagttcagagttcg

SEQ ID NO: 853316 - DNA, 15 bp, Homo sapiens
aagttcagagttcgg

SEQ ID NO: 853317 - DNA, 15 bp, Homo sapiens
agttcagagttcggc

SEQ ID NO: 853318 - DNA, 15 bp, Homo sapiens
gttcagagttcggca

SEQ ID NO: 853319 - DNA, 15 bp, Homo sapiens
ttcagagttcggcaa

SEQ ID NO: 853320 - DNA, 15 bp, Homo sapiens
tcagagttcggcaac

SEQ ID NO: 853321 - DNA, 15 bp, Homo sapiens
cagagttcggcaaca

SEQ ID NO: 853322 - DNA, 15 bp, Homo sapiens
agagttcggcaacat

SEQ ID NO: 853323 - DNA, 15 bp, Homo sapiens
gagttcggcaacatg

SEQ ID NO: 853324 - DNA, 15 bp, Homo sapiens
agttcggcaacatgc

SEQ ID NO: 853325 - DNA, 15 bp, Homo sapiens
gttcggcaacatgct

SEQ ID NO: 853326 - DNA, 15 bp, Homo sapiens
ttcggcaacatgctt

SEQ ID NO: 853327 - DNA, 15 bp, Homo sapiens
tcggcaacatgcttg

SEQ ID NO: 853328 - DNA, 15 bp, Homo sapiens
cggcaacatgcttga

SEQ ID NO: 853329 - DNA, 15 bp, Homo sapiens
ggcaacatgcttgaa

SEQ ID NO: 853330 - DNA, 15 bp, Homo sapiens
gcaacatgcttgaat

SEQ ID NO: 853331 - DNA, 15 bp, Homo sapiens
caacatgcttgaatt

SEQ ID NO: 853332 - DNA, 15 bp, Homo sapiens
aacatgcttgaattc

SEQ ID NO: 853333 - DNA, 15 bp, Homo sapiens
acatgcttgaattca

SEQ ID NO: 853334 - DNA, 15 bp, Homo sapiens
catgcttgaattcaa

SEQ ID NO: 853335 - DNA, 15 bp, Homo sapiens
atgcttgaattcaag

SEQ ID NO: 853336 - DNA, 15 bp, Homo sapiens
tgcttgaattcaagc

SEQ ID NO: 853337 - DNA, 15 bp, Homo sapiens
gcttgaattcaagca

SEQ ID NO: 853338 - DNA, 15 bp, Homo sapiens
cttgaattcaagcag

SEQ ID NO: 853339 - DNA, 15 bp, Homo sapiens
ttgaattcaagcagc

SEQ ID NO: 853340 - DNA, 15 bp, Homo sapiens
tgaattcaagcagct

SEQ ID NO: 853341 - DNA, 15 bp, Homo sapiens
gaattcaagcagctc

SEQ ID NO: 853342 - DNA, 15 bp, Homo sapiens
aattcaagcagctcc

SEQ ID NO: 853343 - DNA, 15 bp, Homo sapiens
attcaagcagctcct

SEQ ID NO: 853344 - DNA, 15 bp, Homo sapiens
ttcaagcagctccta

SEQ ID NO: 853345 - DNA, 15 bp, Homo sapiens
tcaagcagctcctag

SEQ ID NO: 853346 - DNA, 15 bp, Homo sapiens
caagcagctcctagg

SEQ ID NO: 853347 - DNA, 15 bp, Homo sapiens
aagcagctcctagga

SEQ ID NO: 853348 - DNA, 15 bp, Homo sapiens
agcagctcctaggat

SEQ ID NO: 853349 - DNA, 15 bp, Homo sapiens
gcagctcctaggatg

SEQ ID NO: 853350 - DNA, 15 bp, Homo sapiens
cagctcctaggatgt

SEQ ID NO: 853351 - DNA, 15 bp, Homo sapiens
agctcctaggatgtt

SEQ ID NO: 853352 - DNA, 15 bp, Homo sapiens
gctcctaggatgtta

SEQ ID NO: 853353 - DNA, 15 bp, Homo sapiens
ctcctaggatgttaa

SEQ ID NO: 853354 - DNA, 15 bp, Homo sapiens
tcctaggatgttaat

SEQ ID NO: 853355 - DNA, 15 bp, Homo sapiens
cctaggatgttaatg

SEQ ID NO: 853356 - DNA, 15 bp, Homo sapiens
ctaggatgttaatgg

SEQ ID NO: 853357 - DNA, 15 bp, Homo sapiens
taggatgttaatggt

SEQ ID NO: 853358 - DNA, 15 bp, Homo sapiens
aggatgttaatggtg

SEQ ID NO: 853359 - DNA, 15 bp, Homo sapiens
ggatgttaatggtgg

SEQ ID NO: 853360 - DNA, 15 bp, Homo sapiens
gatgttaatggtgga

SEQ ID NO: 853361 - DNA, 15 bp, Homo sapiens
atgttaatggtggag

SEQ ID NO: 853362 - DNA, 15 bp, Homo sapiens
tgttaatggtggagg

SEQ ID NO: 853363 - DNA, 15 bp, Homo sapiens
gttaatggtggaggt

SEQ ID NO: 853364 - DNA, 15 bp, Homo sapiens
ttaatggtggaggtt

SEQ ID NO: 853365 - DNA, 15 bp, Homo sapiens
taatggtggaggttg

SEQ ID NO: 853366 - DNA, 15 bp, Homo sapiens
aatggtggaggttgg

SEQ ID NO: 853367 - DNA, 15 bp, Homo sapiens
atggtggaggttggg

SEQ ID NO: 853368 - DNA, 15 bp, Homo sapiens
tggtggaggttgggt

SEQ ID NO: 853369 - DNA, 15 bp, Homo sapiens
ggtggaggttgggtt

SEQ ID NO: 853370 - DNA, 15 bp, Homo sapiens
gtggaggttgggttc

SEQ ID NO: 853371 - DNA, 15 bp, Homo sapiens
tggaggttgggttca

SEQ ID NO: 853372 - DNA, 15 bp, Homo sapiens
ggaggttgggttcaa

SEQ ID NO: 853373 - DNA, 15 bp, Homo sapiens
gaggttgggttcaaa

SEQ ID NO: 853374 - DNA, 15 bp, Homo sapiens
aggttgggttcaaat

SEQ ID NO: 853375 - DNA, 15 bp, Homo sapiens
ggttgggttcaaatc

SEQ ID NO: 853376 - DNA, 15 bp, Homo sapiens
gttgggttcaaatcc

SEQ ID NO: 853377 - DNA, 15 bp, Homo sapiens
ttgggttcaaatcca

SEQ ID NO: 853378 - DNA, 15 bp, Homo sapiens
tgggttcaaatccag

SEQ ID NO: 853379 - DNA, 15 bp, Homo sapiens
gggttcaaatccaga

SEQ ID NO: 853380 - DNA, 15 bp, Homo sapiens
ggttcaaatccagat

SEQ ID NO: 853381 - DNA, 15 bp, Homo sapiens
gttcaaatccagatc

SEQ ID NO: 853382 - DNA, 15 bp, Homo sapiens
ttcaaatccagatct

SEQ ID NO: 853383 - DNA, 15 bp, Homo sapiens
tcaaatccagatctg

SEQ ID NO: 853384 - DNA, 15 bp, Homo sapiens
caaatccagatctgt

SEQ ID NO: 853385 - DNA, 15 bp, Homo sapiens
aaatccagatctgtc

SEQ ID NO: 853386 - DNA, 15 bp, Homo sapiens
aatccagatctgtct

SEQ ID NO: 853387 - DNA, 15 bp, Homo sapiens
atccagatctgtctg

SEQ ID NO: 853388 - DNA, 15 bp, Homo sapiens
tccagatctgtctga

SEQ ID NO: 853389 - DNA, 15 bp, Homo sapiens
ccagatctgtctgac

SEQ ID NO: 853390 - DNA, 15 bp, Homo sapiens
cagatctgtctgact

SEQ ID NO: 853391 - DNA, 15 bp, Homo sapiens
agatctgtctgactc

SEQ ID NO: 853392 - DNA, 15 bp, Homo sapiens
gatctgtctgactca

SEQ ID NO: 853393 - DNA, 15 bp, Homo sapiens
atctgtctgactcaa

SEQ ID NO: 853394 - DNA, 15 bp, Homo sapiens
tctgtctgactcaaa

SEQ ID NO: 853395 - DNA, 15 bp, Homo sapiens
ctgtctgactcaaaa

SEQ ID NO: 853396 - DNA, 15 bp, Homo sapiens
tgtctgactcaaaaa

SEQ ID NO: 853397 - DNA, 15 bp, Homo sapiens
gtctgactcaaaaaa

SEQ ID NO: 853398 - DNA, 15 bp, Homo sapiens
tctgactcaaaaaat

SEQ ID NO: 853399 - DNA, 15 bp, Homo sapiens
ctgactcaaaaaatg

SEQ ID NO: 853400 - DNA, 15 bp, Homo sapiens
tgactcaaaaaatgc

SEQ ID NO: 853401 - DNA, 15 bp, Homo sapiens
gactcaaaaaatgca

SEQ ID NO: 853402 - DNA, 15 bp, Homo sapiens
actcaaaaaatgcat

SEQ ID NO: 853403 - DNA, 15 bp, Homo sapiens
ctcaaaaaatgcata

SEQ ID NO: 853404 - DNA, 15 bp, Homo sapiens
tcaaaaaatgcatac

SEQ ID NO: 853405 - DNA, 15 bp, Homo sapiens
caaaaaatgcatact

SEQ ID NO: 853406 - DNA, 15 bp, Homo sapiens
aaaaaatgcatactc

SEQ ID NO: 853407 - DNA, 15 bp, Homo sapiens
aaaaatgcatactcc

SEQ ID NO: 853408 - DNA, 15 bp, Homo sapiens
aaaatgcatactcct

SEQ ID NO: 853409 - DNA, 15 bp, Homo sapiens
aaatgcatactccta

SEQ ID NO: 853410 - DNA, 15 bp, Homo sapiens
aatgcatactcctaa

SEQ ID NO: 853411 - DNA, 15 bp, Homo sapiens
atgcatactcctaac

SEQ ID NO: 853412 - DNA, 15 bp, Homo sapiens
tgcatactcctaacc

SEQ ID NO: 853413 - DNA, 15 bp, Homo sapiens
gcatactcctaacca

SEQ ID NO: 853414 - DNA, 15 bp, Homo sapiens
catactcctaaccag

SEQ ID NO: 853415 - DNA, 15 bp, Homo sapiens
atactcctaaccagt

SEQ ID NO: 853416 - DNA, 15 bp, Homo sapiens
tactcctaaccagtg

SEQ ID NO: 853417 - DNA, 15 bp, Homo sapiens
actcctaaccagtgc

SEQ ID NO: 853418 - DNA, 15 bp, Homo sapiens
ctcctaaccagtgca

SEQ ID NO: 853419 - DNA, 15 bp, Homo sapiens
tcctaaccagtgcac

SEQ ID NO: 853420 - DNA, 15 bp, Homo sapiens
cctaaccagtgcact

SEQ ID NO: 853421 - DNA, 15 bp, Homo sapiens
ctaaccagtgcacta

SEQ ID NO: 853422 - DNA, 15 bp, Homo sapiens
taaccagtgcactat

SEQ ID NO: 853423 - DNA, 15 bp, Homo sapiens
aaccagtgcactata

SEQ ID NO: 853424 - DNA, 15 bp, Homo sapiens
accagtgcactatat

SEQ ID NO: 853425 - DNA, 15 bp, Homo sapiens
ccagtgcactatatc

SEQ ID NO: 853426 - DNA, 15 bp, Homo sapiens
cagtgcactatatcc

SEQ ID NO: 853427 - DNA, 15 bp, Homo sapiens
agtgcactatatccc

SEQ ID NO: 853428 - DNA, 15 bp, Homo sapiens
gtgcactatatccca

SEQ ID NO: 853429 - DNA, 15 bp, Homo sapiens
tgcactatatcccaa

SEQ ID NO: 853430 - DNA, 15 bp, Homo sapiens
gcactatatcccaat

SEQ ID NO: 853431 - DNA, 15 bp, Homo sapiens
cactatatcccaatt

SEQ ID NO: 853432 - DNA, 15 bp, Homo sapiens
actatatcccaattc

SEQ ID NO: 853433 - DNA, 15 bp, Homo sapiens
ctatatcccaattcc

SEQ ID NO: 853434 - DNA, 15 bp, Homo sapiens
tatatcccaattcca

SEQ ID NO: 853435 - DNA, 15 bp, Homo sapiens
atatcccaattccat

SEQ ID NO: 853436 - DNA, 15 bp, Homo sapiens
tatcccaattccata

SEQ ID NO: 853437 - DNA, 15 bp, Homo sapiens
atcccaattccatag

SEQ ID NO: 853438 - DNA, 15 bp, Homo sapiens
tcccaattccatagg

SEQ ID NO: 853439 - DNA, 15 bp, Homo sapiens
cccaattccatagga

SEQ ID NO: 853440 - DNA, 15 bp, Homo sapiens
ccaattccataggag

SEQ ID NO: 853441 - DNA, 15 bp, Homo sapiens
caattccataggagc

SEQ ID NO: 853442 - DNA, 15 bp, Homo sapiens
aattccataggagcc

SEQ ID NO: 853443 - DNA, 15 bp, Homo sapiens
attccataggagccc

SEQ ID NO: 853444 - DNA, 15 bp, Homo sapiens
ttccataggagccct

SEQ ID NO: 853445 - DNA, 15 bp, Homo sapiens
tccataggagccctt

SEQ ID NO: 853446 - DNA, 15 bp, Homo sapiens
ccataggagcccttc

SEQ ID NO: 853447 - DNA, 15 bp, Homo sapiens
cataggagcccttct

SEQ ID NO: 853448 - DNA, 15 bp, Homo sapiens
ataggagcccttctt

SEQ ID NO: 853449 - DNA, 15 bp, Homo sapiens
taggagcccttcttt

SEQ ID NO: 853450 - DNA, 15 bp, Homo sapiens
aggagcccttctttg

SEQ ID NO: 853451 - DNA, 15 bp, Homo sapiens
ggagcccttctttgt

SEQ ID NO: 853452 - DNA, 15 bp, Homo sapiens
gagcccttctttgtg

SEQ ID NO: 853453 - DNA, 15 bp, Homo sapiens
agcccttctttgtga

SEQ ID NO: 853454 - DNA, 15 bp, Homo sapiens
gcccttctttgtgat

SEQ ID NO: 853455 - DNA, 15 bp, Homo sapiens
cccttctttgtgatt

SEQ ID NO: 853456 - DNA, 15 bp, Homo sapiens
ccttctttgtgattc

SEQ ID NO: 853457 - DNA, 15 bp, Homo sapiens
cttctttgtgattca

SEQ ID NO: 853458 - DNA, 15 bp, Homo sapiens
ttctttgtgattcat

SEQ ID NO: 853459 - DNA, 15 bp, Homo sapiens
tctttgtgattcata

SEQ ID NO: 853460 - DNA, 15 bp, Homo sapiens
ctttgtgattcatag

SEQ ID NO: 853461 - DNA, 15 bp, Homo sapiens
tttgtgattcatagc

SEQ ID NO: 853462 - DNA, 15 bp, Homo sapiens
ttgtgattcatagca

SEQ ID NO: 853463 - DNA, 15 bp, Homo sapiens
tgtgattcatagcac

SEQ ID NO: 853464 - DNA, 15 bp, Homo sapiens
gtgattcatagcact

SEQ ID NO: 853465 - DNA, 15 bp, Homo sapiens
tgattcatagcactt

SEQ ID NO: 853466 - DNA, 15 bp, Homo sapiens
gattcatagcacttt

SEQ ID NO: 853467 - DNA, 15 bp, Homo sapiens
attcatagcactttc

SEQ ID NO: 853468 - DNA, 15 bp, Homo sapiens
ttcatagcactttcc

SEQ ID NO: 853469 - DNA, 15 bp, Homo sapiens
tcatagcactttccc

SEQ ID NO: 853470 - DNA, 15 bp, Homo sapiens
catagcactttccca

SEQ ID NO: 853471 - DNA, 15 bp, Homo sapiens
atagcactttcccat

SEQ ID NO: 853472 - DNA, 15 bp, Homo sapiens
tagcactttcccatg

SEQ ID NO: 853473 - DNA, 15 bp, Homo sapiens
agcactttcccatga

SEQ ID NO: 853474 - DNA, 15 bp, Homo sapiens
gcactttcccatgag

SEQ ID NO: 853475 - DNA, 15 bp, Homo sapiens
cactttcccatgagt

SEQ ID NO: 853476 - DNA, 15 bp, Homo sapiens
actttcccatgagtt

SEQ ID NO: 853477 - DNA, 15 bp, Homo sapiens
ctttcccatgagttt

SEQ ID NO: 853478 - DNA, 15 bp, Homo sapiens
tttcccatgagtttt

SEQ ID NO: 853479 - DNA, 15 bp, Homo sapiens
ttcccatgagttttg

SEQ ID NO: 853480 - DNA, 15 bp, Homo sapiens
tcccatgagttttgt

SEQ ID NO: 853481 - DNA, 15 bp, Homo sapiens
cccatgagttttgtt

SEQ ID NO: 853482 - DNA, 15 bp, Homo sapiens
ccatgagttttgttg

SEQ ID NO: 853483 - DNA, 15 bp, Homo sapiens
catgagttttgttga

SEQ ID NO: 853484 - DNA, 15 bp, Homo sapiens
atgagttttgttgat

SEQ ID NO: 853485 - DNA, 15 bp, Homo sapiens
tgagttttgttgatt

SEQ ID NO: 853486 - DNA, 15 bp, Homo sapiens
gagttttgttgattt

SEQ ID NO: 853487 - DNA, 15 bp, Homo sapiens
agttttgttgatttt

SEQ ID NO: 853488 - DNA, 15 bp, Homo sapiens
gttttgttgattttg

SEQ ID NO: 853489 - DNA, 15 bp, Homo sapiens
ttttgttgattttgt

SEQ ID NO: 853490 - DNA, 15 bp, Homo sapiens
tttgttgattttgtg

SEQ ID NO: 853491 - DNA, 15 bp, Homo sapiens
ttgttgattttgtga

SEQ ID NO: 853492 - DNA, 15 bp, Homo sapiens
tgttgattttgtgag

SEQ ID NO: 853493 - DNA, 15 bp, Homo sapiens
gttgattttgtgaga

SEQ ID NO: 853494 - DNA, 15 bp, Homo sapiens
ttgattttgtgagaa

SEQ ID NO: 853495 - DNA, 15 bp, Homo sapiens
tgattttgtgagaaa

SEQ ID NO: 853496 - DNA, 15 bp, Homo sapiens
gattttgtgagaaac

SEQ ID NO: 853497 - DNA, 15 bp, Homo sapiens
attttgtgagaaaca

SEQ ID NO: 853498 - DNA, 15 bp, Homo sapiens
ttttgtgagaaacaa

SEQ ID NO: 853499 - DNA, 15 bp, Homo sapiens
tttgtgagaaacaaa

SEQ ID NO: 853500 - DNA, 15 bp, Homo sapiens
ttgtgagaaacaaaa

SEQ ID NO: 853501 - DNA, 15 bp, Homo sapiens
tgtgagaaacaaaac

SEQ ID NO: 853502 - DNA, 15 bp, Homo sapiens
gtgagaaacaaaact

SEQ ID NO: 853503 - DNA, 15 bp, Homo sapiens
tgagaaacaaaactc

SEQ ID NO: 853504 - DNA, 15 bp, Homo sapiens
gagaaacaaaactct

SEQ ID NO: 853505 - DNA, 15 bp, Homo sapiens
agaaacaaaactctt

SEQ ID NO: 853506 - DNA, 15 bp, Homo sapiens
gaaacaaaactcttt

SEQ ID NO: 853507 - DNA, 15 bp, Homo sapiens
aaacaaaactctttt

SEQ ID NO: 853508 - DNA, 15 bp, Homo sapiens
aacaaaactcttttt

SEQ ID NO: 853509 - DNA, 15 bp, Homo sapiens
acaaaactctttttc

SEQ ID NO: 853510 - DNA, 15 bp, Homo sapiens
caaaactctttttcc

SEQ ID NO: 853511 - DNA, 15 bp, Homo sapiens
aaaactctttttcct

SEQ ID NO: 853512 - DNA, 15 bp, Homo sapiens
aaactctttttcctt

SEQ ID NO: 853513 - DNA, 15 bp, Homo sapiens
aactctttttccttt

SEQ ID NO: 853514 - DNA, 15 bp, Homo sapiens
actctttttcctttg

SEQ ID NO: 853515 - DNA, 15 bp, Homo sapiens
ctctttttcctttgg

SEQ ID NO: 853516 - DNA, 15 bp, Homo sapiens
tctttttcctttgga

SEQ ID NO: 853517 - DNA, 15 bp, Homo sapiens
ctttttcctttggac

SEQ ID NO: 853518 - DNA, 15 bp, Homo sapiens
tttttcctttggact

SEQ ID NO: 853519 - DNA, 15 bp, Homo sapiens
ttttcctttggactg

SEQ ID NO: 853520 - DNA, 15 bp, Homo sapiens
tttcctttggactgt

SEQ ID NO: 853521 - DNA, 15 bp, Homo sapiens
ttcctttggactgtc

SEQ ID NO: 853522 - DNA, 15 bp, Homo sapiens
tcctttggactgtct

SEQ ID NO: 853523 - DNA, 15 bp, Homo sapiens
cctttggactgtctg

SEQ ID NO: 853524 - DNA, 15 bp, Homo sapiens
ctttggactgtctgg

SEQ ID NO: 853525 - DNA, 15 bp, Homo sapiens
tttggactgtctgga

SEQ ID NO: 853526 - DNA, 15 bp, Homo sapiens
ttggactgtctggaa

SEQ ID NO: 853527 - DNA, 15 bp, Homo sapiens
tggactgtctggaat

SEQ ID NO: 853528 - DNA, 15 bp, Homo sapiens
ggactgtctggaatc

SEQ ID NO: 853529 - DNA, 15 bp, Homo sapiens
gactgtctggaatct

SEQ ID NO: 853530 - DNA, 15 bp, Homo sapiens
actgtctggaatctc

SEQ ID NO: 853531 - DNA, 15 bp, Homo sapiens
ctgtctggaatctct

SEQ ID NO: 853532 - DNA, 15 bp, Homo sapiens
tgtctggaatctctc

SEQ ID NO: 853533 - DNA, 15 bp, Homo sapiens
gtctggaatctctct

SEQ ID NO: 853534 - DNA, 15 bp, Homo sapiens
tctggaatctctctt

SEQ ID NO: 853535 - DNA, 15 bp, Homo sapiens
ctggaatctctcttt

SEQ ID NO: 853536 - DNA, 15 bp, Homo sapiens
tggaatctctctttt

SEQ ID NO: 853537 - DNA, 15 bp, Homo sapiens
ggaatctctcttttt

SEQ ID NO: 853538 - DNA, 15 bp, Homo sapiens
gaatctctctttttc

SEQ ID NO: 853539 - DNA, 15 bp, Homo sapiens
aatctctctttttca

SEQ ID NO: 853540 - DNA, 15 bp, Homo sapiens
atctctctttttcaa

SEQ ID NO: 853541 - DNA, 15 bp, Homo sapiens
tctctctttttcaaa

SEQ ID NO: 853542 - DNA, 15 bp, Homo sapiens
ctctctttttcaaat

SEQ ID NO: 853543 - DNA, 15 bp, Homo sapiens
tctctttttcaaatt

SEQ ID NO: 853544 - DNA, 15 bp, Homo sapiens
ctctttttcaaattt

SEQ ID NO: 853545 - DNA, 15 bp, Homo sapiens
tctttttcaaatttt

SEQ ID NO: 853546 - DNA, 15 bp, Homo sapiens
ctttttcaaattttt

SEQ ID NO: 853547 - DNA, 15 bp, Homo sapiens
tttttcaaatttttg

SEQ ID NO: 853548 - DNA, 15 bp, Homo sapiens
ttttcaaatttttga

SEQ ID NO: 853549 - DNA, 15 bp, Homo sapiens
tttcaaatttttgaa

SEQ ID NO: 853550 - DNA, 15 bp, Homo sapiens
ttcaaatttttgaaa

SEQ ID NO: 853551 - DNA, 15 bp, Homo sapiens
tcaaatttttgaaat

SEQ ID NO: 853552 - DNA, 15 bp, Homo sapiens
caaatttttgaaatg

SEQ ID NO: 853553 - DNA, 15 bp, Homo sapiens
aaatttttgaaatgt

SEQ ID NO: 853554 - DNA, 15 bp, Homo sapiens
aatttttgaaatgta

SEQ ID NO: 853555 - DNA, 15 bp, Homo sapiens
atttttgaaatgtat

SEQ ID NO: 853556 - DNA, 15 bp, Homo sapiens
tttttgaaatgtatt

SEQ ID NO: 853557 - DNA, 15 bp, Homo sapiens
ttttgaaatgtattt

SEQ ID NO: 853558 - DNA, 15 bp, Homo sapiens
tttgaaatgtatttc

SEQ ID NO: 853559 - DNA, 15 bp, Homo sapiens
ttgaaatgtatttct

SEQ ID NO: 853560 - DNA, 15 bp, Homo sapiens
tgaaatgtatttcta

SEQ ID NO: 853561 - DNA, 15 bp, Homo sapiens
gaaatgtatttctat

SEQ ID NO: 853562 - DNA, 15 bp, Homo sapiens
aaatgtatttctatg

SEQ ID NO: 853563 - DNA, 15 bp, Homo sapiens
aatgtatttctatgc

SEQ ID NO: 853564 - DNA, 15 bp, Homo sapiens
atgtatttctatgcc

SEQ ID NO: 853565 - DNA, 15 bp, Homo sapiens
tgtatttctatgcca

SEQ ID NO: 853566 - DNA, 15 bp, Homo sapiens
gtatttctatgccaa

SEQ ID NO: 853567 - DNA, 15 bp, Homo sapiens
tatttctatgccaaa

SEQ ID NO: 853568 - DNA, 15 bp, Homo sapiens
atttctatgccaaaa

SEQ ID NO: 853569 - DNA, 15 bp, Homo sapiens
tttctatgccaaaag

SEQ ID NO: 853570 - DNA, 15 bp, Homo sapiens
ttctatgccaaaaga

SEQ ID NO: 853571 - DNA, 15 bp, Homo sapiens
tctatgccaaaagac

SEQ ID NO: 853572 - DNA, 15 bp, Homo sapiens
ctatgccaaaagaca

SEQ ID NO: 853573 - DNA, 15 bp, Homo sapiens
tatgccaaaagacaa

SEQ ID NO: 853574 - DNA, 15 bp, Homo sapiens
atgccaaaagacaaa

SEQ ID NO: 853575 - DNA, 15 bp, Homo sapiens
tgccaaaagacaaag

SEQ ID NO: 853576 - DNA, 15 bp, Homo sapiens
gccaaaagacaaaga

SEQ ID NO: 853577 - DNA, 15 bp, Homo sapiens
ccaaaagacaaagat

SEQ ID NO: 853578 - DNA, 15 bp, Homo sapiens
caaaagacaaagatt

SEQ ID NO: 853579 - DNA, 15 bp, Homo sapiens
aaaagacaaagattt

SEQ ID NO: 853580 - DNA, 15 bp, Homo sapiens
aaagacaaagatttc

SEQ ID NO: 853581 - DNA, 15 bp, Homo sapiens
aagacaaagatttct

SEQ ID NO: 853582 - DNA, 15 bp, Homo sapiens
agacaaagatttcta

SEQ ID NO: 853583 - DNA, 15 bp, Homo sapiens
gacaaagatttctag

SEQ ID NO: 853584 - DNA, 15 bp, Homo sapiens
acaaagatttctaga

SEQ ID NO: 853585 - DNA, 15 bp, Homo sapiens
caaagatttctagag

SEQ ID NO: 853586 - DNA, 15 bp, Homo sapiens
aaagatttctagagg

SEQ ID NO: 853587 - DNA, 15 bp, Homo sapiens
aagatttctagagga

SEQ ID NO: 853588 - DNA, 15 bp, Homo sapiens
agatttctagaggaa

SEQ ID NO: 853589 - DNA, 15 bp, Homo sapiens
gatttctagaggaat

SEQ ID NO: 853590 - DNA, 15 bp, Homo sapiens
atttctagaggaata

SEQ ID NO: 853591 - DNA, 15 bp, Homo sapiens
tttctagaggaatat

SEQ ID NO: 853592 - DNA, 15 bp, Homo sapiens
ttctagaggaatatg

SEQ ID NO: 853593 - DNA, 15 bp, Homo sapiens
tctagaggaatatgc

SEQ ID NO: 853594 - DNA, 15 bp, Homo sapiens
ctagaggaatatgcc

SEQ ID NO: 853595 - DNA, 15 bp, Homo sapiens
tagaggaatatgcct

SEQ ID NO: 853596 - DNA, 15 bp, Homo sapiens
agaggaatatgccta

SEQ ID NO: 853597 - DNA, 15 bp, Homo sapiens
gaggaatatgcctag

SEQ ID NO: 853598 - DNA, 15 bp, Homo sapiens
aggaatatgcctagg

SEQ ID NO: 853599 - DNA, 15 bp, Homo sapiens
ggaatatgcctagga

SEQ ID NO: 853600 - DNA, 15 bp, Homo sapiens
gaatatgcctaggat

SEQ ID NO: 853601 - DNA, 15 bp, Homo sapiens
aatatgcctaggatg

SEQ ID NO: 853602 - DNA, 15 bp, Homo sapiens
atatgcctaggatga

SEQ ID NO: 853603 - DNA, 15 bp, Homo sapiens
tatgcctaggatgag

SEQ ID NO: 853604 - DNA, 15 bp, Homo sapiens
atgcctaggatgaga

SEQ ID NO: 853605 - DNA, 15 bp, Homo sapiens
tgcctaggatgagaa

SEQ ID NO: 853606 - DNA, 15 bp, Homo sapiens
gcctaggatgagaat

SEQ ID NO: 853607 - DNA, 15 bp, Homo sapiens
cctaggatgagaatt

SEQ ID NO: 853608 - DNA, 15 bp, Homo sapiens
ctaggatgagaatta

SEQ ID NO: 853609 - DNA, 15 bp, Homo sapiens
taggatgagaattat

SEQ ID NO: 853610 - DNA, 15 bp, Homo sapiens
aggatgagaattatg

SEQ ID NO: 853611 - DNA, 15 bp, Homo sapiens
ggatgagaattatgt

SEQ ID NO: 853612 - DNA, 15 bp, Homo sapiens
gatgagaattatgta

SEQ ID NO: 853613 - DNA, 15 bp, Homo sapiens
atgagaattatgtaa

SEQ ID NO: 853614 - DNA, 15 bp, Homo sapiens
tgagaattatgtaat

SEQ ID NO: 853615 - DNA, 15 bp, Homo sapiens
gagaattatgtaatt

SEQ ID NO: 853616 - DNA, 15 bp, Homo sapiens
agaattatgtaattt

SEQ ID NO: 853617 - DNA, 15 bp, Homo sapiens
gaattatgtaattta

SEQ ID NO: 853618 - DNA, 15 bp, Homo sapiens
aattatgtaatttaa

SEQ ID NO: 853619 - DNA, 15 bp, Homo sapiens
attatgtaatttaaa

SEQ ID NO: 853620 - DNA, 15 bp, Homo sapiens
ttatgtaatttaaat

SEQ ID NO: 853621 - DNA, 15 bp, Homo sapiens
tatgtaatttaaatc

SEQ ID NO: 853622 - DNA, 15 bp, Homo sapiens
atgtaatttaaatca

SEQ ID NO: 853623 - DNA, 15 bp, Homo sapiens
tgtaatttaaatcac

SEQ ID NO: 853624 - DNA, 15 bp, Homo sapiens
gtaatttaaatcaca

SEQ ID NO: 853625 - DNA, 15 bp, Homo sapiens
taatttaaatcacag

SEQ ID NO: 853626 - DNA, 15 bp, Homo sapiens
aatttaaatcacagc

SEQ ID NO: 853627 - DNA, 15 bp, Homo sapiens
atttaaatcacagct

SEQ ID NO: 853628 - DNA, 15 bp, Homo sapiens
tttaaatcacagctg

SEQ ID NO: 853629 - DNA, 15 bp, Homo sapiens
ttaaatcacagctgg

SEQ ID NO: 853630 - DNA, 15 bp, Homo sapiens
taaatcacagctgga

SEQ ID NO: 853631 - DNA, 15 bp, Homo sapiens
aaatcacagctggaa

SEQ ID NO: 853632 - DNA, 15 bp, Homo sapiens
aatcacagctggaaa

SEQ ID NO: 853633 - DNA, 15 bp, Homo sapiens
atcacagctggaaag

SEQ ID NO: 853634 - DNA, 15 bp, Homo sapiens
tcacagctggaaaga

SEQ ID NO: 853635 - DNA, 15 bp, Homo sapiens
cacagctggaaagag

SEQ ID NO: 853636 - DNA, 15 bp, Homo sapiens
acagctggaaagaga

SEQ ID NO: 853637 - DNA, 15 bp, Homo sapiens
cagctggaaagagag

SEQ ID NO: 853638 - DNA, 15 bp, Homo sapiens
agctggaaagagaga

SEQ ID NO: 853639 - DNA, 15 bp, Homo sapiens
gctggaaagagagaa

SEQ ID NO: 853640 - DNA, 15 bp, Homo sapiens
ctggaaagagagaaa

SEQ ID NO: 853641 - DNA, 15 bp, Homo sapiens
tggaaagagagaaag

SEQ ID NO: 853642 - DNA, 15 bp, Homo sapiens
ggaaagagagaaagt

SEQ ID NO: 853643 - DNA, 15 bp, Homo sapiens
gaaagagagaaagtc

SEQ ID NO: 853644 - DNA, 15 bp, Homo sapiens
aaagagagaaagtcc

SEQ ID NO: 853645 - DNA, 15 bp, Homo sapiens
aagagagaaagtcct

SEQ ID NO: 853646 - DNA, 15 bp, Homo sapiens
agagagaaagtccta

SEQ ID NO: 853647 - DNA, 15 bp, Homo sapiens
gagagaaagtcctaa

SEQ ID NO: 853648 - DNA, 15 bp, Homo sapiens
agagaaagtcctaag

SEQ ID NO: 853649 - DNA, 15 bp, Homo sapiens
gagaaagtcctaagt

SEQ ID NO: 853650 - DNA, 15 bp, Homo sapiens
agaaagtcctaagtt

SEQ ID NO: 853651 - DNA, 15 bp, Homo sapiens
gaaagtcctaagtta

SEQ ID NO: 853652 - DNA, 15 bp, Homo sapiens
aaagtcctaagttac

SEQ ID NO: 853653 - DNA, 15 bp, Homo sapiens
aagtcctaagttact

SEQ ID NO: 853654 - DNA, 15 bp, Homo sapiens
agtcctaagttacta

SEQ ID NO: 853655 - DNA, 15 bp, Homo sapiens
gtcctaagttactaa

SEQ ID NO: 853656 - DNA, 15 bp, Homo sapiens
tcctaagttactaag

SEQ ID NO: 853657 - DNA, 15 bp, Homo sapiens
cctaagttactaaga

SEQ ID NO: 853658 - DNA, 15 bp, Homo sapiens
ctaagttactaagaa

SEQ ID NO: 853659 - DNA, 15 bp, Homo sapiens
taagttactaagaaa

SEQ ID NO: 853660 - DNA, 15 bp, Homo sapiens
aagttactaagaaat

SEQ ID NO: 853661 - DNA, 15 bp, Homo sapiens
agttactaagaaatg

SEQ ID NO: 853662 - DNA, 15 bp, Homo sapiens
gttactaagaaatgt

SEQ ID NO: 853663 - DNA, 15 bp, Homo sapiens
ttactaagaaatgtt

SEQ ID NO: 853664 - DNA, 15 bp, Homo sapiens
tactaagaaatgttc

SEQ ID NO: 853665 - DNA, 15 bp, Homo sapiens
actaagaaatgttca

SEQ ID NO: 853666 - DNA, 15 bp, Homo sapiens
ctaagaaatgttcaa

SEQ ID NO: 853667 - DNA, 15 bp, Homo sapiens
taagaaatgttcaaa

SEQ ID NO: 853668 - DNA, 15 bp, Homo sapiens
aagaaatgttcaaac

SEQ ID NO: 853669 - DNA, 15 bp, Homo sapiens
agaaatgttcaaaca

SEQ ID NO: 853670 - DNA, 15 bp, Homo sapiens
gaaatgttcaaacac

SEQ ID NO: 853671 - DNA, 15 bp, Homo sapiens
aaatgttcaaacaca

SEQ ID NO: 853672 - DNA, 15 bp, Homo sapiens
aatgttcaaacacaa

SEQ ID NO: 853673 - DNA, 15 bp, Homo sapiens
atgttcaaacacaaa

SEQ ID NO: 853674 - DNA, 15 bp, Homo sapiens
tgttcaaacacaaat

SEQ ID NO: 853675 - DNA, 15 bp, Homo sapiens
gttcaaacacaaatg

SEQ ID NO: 853676 - DNA, 15 bp, Homo sapiens
ttcaaacacaaatga

SEQ ID NO: 853677 - DNA, 15 bp, Homo sapiens
tcaaacacaaatgag

SEQ ID NO: 853678 - DNA, 15 bp, Homo sapiens
caaacacaaatgagc

SEQ ID NO: 853679 - DNA, 15 bp, Homo sapiens
aaacacaaatgagct

SEQ ID NO: 853680 - DNA, 15 bp, Homo sapiens
aacacaaatgagctt

SEQ ID NO: 853681 - DNA, 15 bp, Homo sapiens
acacaaatgagcttt

SEQ ID NO: 853682 - DNA, 15 bp, Homo sapiens
cacaaatgagctttc

SEQ ID NO: 853683 - DNA, 15 bp, Homo sapiens
acaaatgagctttca

SEQ ID NO: 853684 - DNA, 15 bp, Homo sapiens
caaatgagctttcag

SEQ ID NO: 853685 - DNA, 15 bp, Homo sapiens
aaatgagctttcagt

SEQ ID NO: 853686 - DNA, 15 bp, Homo sapiens
aatgagctttcagtc

SEQ ID NO: 853687 - DNA, 15 bp, Homo sapiens
atgagctttcagtct

SEQ ID NO: 853688 - DNA, 15 bp, Homo sapiens
tgagctttcagtcta

SEQ ID NO: 853689 - DNA, 15 bp, Homo sapiens
gagctttcagtctat

SEQ ID NO: 853690 - DNA, 15 bp, Homo sapiens
agctttcagtctatt

SEQ ID NO: 853691 - DNA, 15 bp, Homo sapiens
gctttcagtctattg

SEQ ID NO: 853692 - DNA, 15 bp, Homo sapiens
ctttcagtctattgg

SEQ ID NO: 853693 - DNA, 15 bp, Homo sapiens
tttcagtctattgga

SEQ ID NO: 853694 - DNA, 15 bp, Homo sapiens
ttcagtctattggaa

SEQ ID NO: 853695 - DNA, 15 bp, Homo sapiens
tcagtctattggaag

SEQ ID NO: 853696 - DNA, 15 bp, Homo sapiens
cagtctattggaaga

SEQ ID NO: 853697 - DNA, 15 bp, Homo sapiens
agtctattggaagac

SEQ ID NO: 853698 - DNA, 15 bp, Homo sapiens
gtctattggaagacc

SEQ ID NO: 853699 - DNA, 15 bp, Homo sapiens
tctattggaagacct

SEQ ID NO: 853700 - DNA, 15 bp, Homo sapiens
ctattggaagacctt

SEQ ID NO: 853701 - DNA, 15 bp, Homo sapiens
tattggaagaccttt

SEQ ID NO: 853702 - DNA, 15 bp, Homo sapiens
attggaagaccttta

SEQ ID NO: 853703 - DNA, 15 bp, Homo sapiens
ttggaagacctttat

SEQ ID NO: 853704 - DNA, 15 bp, Homo sapiens
tggaagacctttata

SEQ ID NO: 853705 - DNA, 15 bp, Homo sapiens
ggaagacctttatag

SEQ ID NO: 853706 - DNA, 15 bp, Homo sapiens
gaagacctttatagc

SEQ ID NO: 853707 - DNA, 15 bp, Homo sapiens
aagacctttatagct

SEQ ID NO: 853708 - DNA, 15 bp, Homo sapiens
agacctttatagcta

SEQ ID NO: 853709 - DNA, 15 bp, Homo sapiens
gacctttatagctag

SEQ ID NO: 853710 - DNA, 15 bp, Homo sapiens
acctttatagctaga

SEQ ID NO: 853711 - DNA, 15 bp, Homo sapiens
cctttatagctagaa

SEQ ID NO: 853712 - DNA, 15 bp, Homo sapiens
ctttatagctagaag

SEQ ID NO: 853713 - DNA, 15 bp, Homo sapiens
tttatagctagaagt

SEQ ID NO: 853714 - DNA, 15 bp, Homo sapiens
ttatagctagaagta

SEQ ID NO: 853715 - DNA, 15 bp, Homo sapiens
tatagctagaagtat

SEQ ID NO: 853716 - DNA, 15 bp, Homo sapiens
atagctagaagtata

SEQ ID NO: 853717 - DNA, 15 bp, Homo sapiens
tagctagaagtatac

SEQ ID NO: 853718 - DNA, 15 bp, Homo sapiens
agctagaagtatact

SEQ ID NO: 853719 - DNA, 15 bp, Homo sapiens
gctagaagtatactg

SEQ ID NO: 853720 - DNA, 15 bp, Homo sapiens
ctagaagtatactga

SEQ ID NO: 853721 - DNA, 15 bp, Homo sapiens
tagaagtatactgaa

SEQ ID NO: 853722 - DNA, 15 bp, Homo sapiens
agaagtatactgaac

SEQ ID NO: 853723 - DNA, 15 bp, Homo sapiens
gaagtatactgaact

SEQ ID NO: 853724 - DNA, 15 bp, Homo sapiens
aagtatactgaactg

SEQ ID NO: 853725 - DNA, 15 bp, Homo sapiens
agtatactgaactgt

SEQ ID NO: 853726 - DNA, 15 bp, Homo sapiens
gtatactgaactgta

SEQ ID NO: 853727 - DNA, 15 bp, Homo sapiens
tatactgaactgtac

SEQ ID NO: 853728 - DNA, 15 bp, Homo sapiens
atactgaactgtact

SEQ ID NO: 853729 - DNA, 15 bp, Homo sapiens
tactgaactgtactt

SEQ ID NO: 853730 - DNA, 15 bp, Homo sapiens
actgaactgtacttg

SEQ ID NO: 853731 - DNA, 15 bp, Homo sapiens
ctgaactgtacttgt

SEQ ID NO: 853732 - DNA, 15 bp, Homo sapiens
tgaactgtacttgtc

SEQ ID NO: 853733 - DNA, 15 bp, Homo sapiens
gaactgtacttgtcc

SEQ ID NO: 853734 - DNA, 15 bp, Homo sapiens
aactgtacttgtcca

SEQ ID NO: 853735 - DNA, 15 bp, Homo sapiens
actgtacttgtccat

SEQ ID NO: 853736 - DNA, 15 bp, Homo sapiens
ctgtacttgtccatg

SEQ ID NO: 853737 - DNA, 15 bp, Homo sapiens
tgtacttgtccatgg

SEQ ID NO: 853738 - DNA, 15 bp, Homo sapiens
gtacttgtccatgga

SEQ ID NO: 853739 - DNA, 15 bp, Homo sapiens
tacttgtccatggac

SEQ ID NO: 853740 - DNA, 15 bp, Homo sapiens
acttgtccatggacc

SEQ ID NO: 853741 - DNA, 15 bp, Homo sapiens
cttgtccatggaccc

SEQ ID NO: 853742 - DNA, 15 bp, Homo sapiens
ttgtccatggacccc

SEQ ID NO: 853743 - DNA, 15 bp, Homo sapiens
tgtccatggacccct

SEQ ID NO: 853744 - DNA, 15 bp, Homo sapiens
gtccatggacccctg

SEQ ID NO: 853745 - DNA, 15 bp, Homo sapiens
tccatggacccctga

SEQ ID NO: 853746 - DNA, 15 bp, Homo sapiens
ccatggacccctgaa

SEQ ID NO: 853747 - DNA, 15 bp, Homo sapiens
catggacccctgaag

SEQ ID NO: 853748 - DNA, 15 bp, Homo sapiens
atggacccctgaaga

SEQ ID NO: 853749 - DNA, 15 bp, Homo sapiens
tggacccctgaagaa

SEQ ID NO: 853750 - DNA, 15 bp, Homo sapiens
ggacccctgaagaaa

SEQ ID NO: 853751 - DNA, 15 bp, Homo sapiens
gacccctgaagaaac

SEQ ID NO: 853752 - DNA, 15 bp, Homo sapiens
acccctgaagaaaca

SEQ ID NO: 853753 - DNA, 15 bp, Homo sapiens
cccctgaagaaacag

SEQ ID NO: 853754 - DNA, 15 bp, Homo sapiens
ccctgaagaaacagg

SEQ ID NO: 853755 - DNA, 15 bp, Homo sapiens
cctgaagaaacaggt

SEQ ID NO: 853756 - DNA, 15 bp, Homo sapiens
ctgaagaaacaggtt

SEQ ID NO: 853757 - DNA, 15 bp, Homo sapiens
tgaagaaacaggtta

SEQ ID NO: 853758 - DNA, 15 bp, Homo sapiens
gaagaaacaggttaa

SEQ ID NO: 853759 - DNA, 15 bp, Homo sapiens
aagaaacaggttaaa

SEQ ID NO: 853760 - DNA, 15 bp, Homo sapiens
agaaacaggttaaat

SEQ ID NO: 853761 - DNA, 15 bp, Homo sapiens
gaaacaggttaaatc

SEQ ID NO: 853762 - DNA, 15 bp, Homo sapiens
aaacaggttaaatca

SEQ ID NO: 853763 - DNA, 15 bp, Homo sapiens
aacaggttaaatcaa

SEQ ID NO: 853764 - DNA, 15 bp, Homo sapiens
acaggttaaatcaaa

SEQ ID NO: 853765 - DNA, 15 bp, Homo sapiens
caggttaaatcaaag

SEQ ID NO: 853766 - DNA, 15 bp, Homo sapiens
aggttaaatcaaaga

SEQ ID NO: 853767 - DNA, 15 bp, Homo sapiens
ggttaaatcaaagag

SEQ ID NO: 853768 - DNA, 15 bp, Homo sapiens
gaggagactccgtct

SEQ ID NO: 853769 - DNA, 15 bp, Homo sapiens
aggagactccgtctc

SEQ ID NO: 853770 - DNA, 15 bp, Homo sapiens
ggagactccgtctca

SEQ ID NO: 853771 - DNA, 15 bp, Homo sapiens
gagactccgtctcac

SEQ ID NO: 853772 - DNA, 15 bp, Homo sapiens
agactccgtctcaca

SEQ ID NO: 853773 - DNA, 15 bp, Homo sapiens
gactccgtctcacac

SEQ ID NO: 853774 - DNA, 15 bp, Homo sapiens
actccgtctcacaca

SEQ ID NO: 853775 - DNA, 15 bp, Homo sapiens
ctccgtctcacacac

SEQ ID NO: 853776 - DNA, 15 bp, Homo sapiens
tccgtctcacacaca

SEQ ID NO: 853777 - DNA, 15 bp, Homo sapiens
ccgtctcacacacac

SEQ ID NO: 853778 - DNA, 15 bp, Homo sapiens
cgtctcacacacaca

SEQ ID NO: 853779 - DNA, 15 bp, Homo sapiens
acacacacacacaaa

SEQ ID NO: 853780 - DNA, 15 bp, Homo sapiens
cacacacacacaaag

SEQ ID NO: 853781 - DNA, 15 bp, Homo sapiens
acacacacacaaaga

SEQ ID NO: 853782 - DNA, 15 bp, Homo sapiens
cacacacacaaagaa

SEQ ID NO: 853783 - DNA, 15 bp, Homo sapiens
acacacacaaagaaa

SEQ ID NO: 853784 - DNA, 15 bp, Homo sapiens
cacacacaaagaaaa

SEQ ID NO: 853785 - DNA, 15 bp, Homo sapiens
acacacaaagaaaat

SEQ ID NO: 853786 - DNA, 15 bp, Homo sapiens
cacacaaagaaaata

SEQ ID NO: 853787 - DNA, 15 bp, Homo sapiens
acacaaagaaaataa

SEQ ID NO: 853788 - DNA, 15 bp, Homo sapiens
cacaaagaaaataaa

SEQ ID NO: 853789 - DNA, 15 bp, Homo sapiens
acaaagaaaataaac

SEQ ID NO: 853790 - DNA, 15 bp, Homo sapiens
caaagaaaataaacc

SEQ ID NO: 853791 - DNA, 15 bp, Homo sapiens
aaagaaaataaacca

SEQ ID NO: 853792 - DNA, 15 bp, Homo sapiens
aagaaaataaaccat

SEQ ID NO: 853793 - DNA, 15 bp, Homo sapiens
agaaaataaaccatc

SEQ ID NO: 853794 - DNA, 15 bp, Homo sapiens
gaaaataaaccatct

SEQ ID NO: 853795 - DNA, 15 bp, Homo sapiens
aaaataaaccatctc

SEQ ID NO: 853796 - DNA, 15 bp, Homo sapiens
aaataaaccatctct

SEQ ID NO: 853797 - DNA, 15 bp, Homo sapiens
aataaaccatctctt

SEQ ID NO: 853798 - DNA, 15 bp, Homo sapiens
ataaaccatctcttg

SEQ ID NO: 853799 - DNA, 15 bp, Homo sapiens
taaaccatctcttga

SEQ ID NO: 853800 - DNA, 15 bp, Homo sapiens
aaaccatctcttgat

SEQ ID NO: 853801 - DNA, 15 bp, Homo sapiens
aaccatctcttgatg

SEQ ID NO: 853802 - DNA, 15 bp, Homo sapiens
accatctcttgatga

SEQ ID NO: 853803 - DNA, 15 bp, Homo sapiens
ccatctcttgatgaa

SEQ ID NO: 853804 - DNA, 15 bp, Homo sapiens
catctcttgatgaat

SEQ ID NO: 853805 - DNA, 15 bp, Homo sapiens
atctcttgatgaatc

SEQ ID NO: 853806 - DNA, 15 bp, Homo sapiens
tctcttgatgaatca

SEQ ID NO: 853807 - DNA, 15 bp, Homo sapiens
ctcttgatgaatcat

SEQ ID NO: 853808 - DNA, 15 bp, Homo sapiens
tcttgatgaatcata

SEQ ID NO: 853809 - DNA, 15 bp, Homo sapiens
cttgatgaatcataa

SEQ ID NO: 853810 - DNA, 15 bp, Homo sapiens
ttgatgaatcataaa

SEQ ID NO: 853811 - DNA, 15 bp, Homo sapiens
tgatgaatcataaat

SEQ ID NO: 853812 - DNA, 15 bp, Homo sapiens
gatgaatcataaatt

SEQ ID NO: 853813 - DNA, 15 bp, Homo sapiens
atgaatcataaattt

SEQ ID NO: 853814 - DNA, 15 bp, Homo sapiens
tgaatcataaatttg

SEQ ID NO: 853815 - DNA, 15 bp, Homo sapiens
gaatcataaatttgt

SEQ ID NO: 853816 - DNA, 15 bp, Homo sapiens
aatcataaatttgtg

SEQ ID NO: 853817 - DNA, 15 bp, Homo sapiens
atcataaatttgtgt

SEQ ID NO: 853818 - DNA, 15 bp, Homo sapiens
tcataaatttgtgtc

SEQ ID NO: 853819 - DNA, 15 bp, Homo sapiens
cataaatttgtgtct

SEQ ID NO: 853820 - DNA, 15 bp, Homo sapiens
ataaatttgtgtctc

SEQ ID NO: 853821 - DNA, 15 bp, Homo sapiens
taaatttgtgtctct

SEQ ID NO: 853822 - DNA, 15 bp, Homo sapiens
aaatttgtgtctcta

SEQ ID NO: 853823 - DNA, 15 bp, Homo sapiens
aatttgtgtctctag

SEQ ID NO: 853824 - DNA, 15 bp, Homo sapiens
atttgtgtctctagt

SEQ ID NO: 853825 - DNA, 15 bp, Homo sapiens
tttgtgtctctagtt

SEQ ID NO: 853826 - DNA, 15 bp, Homo sapiens
ttgtgtctctagttt

SEQ ID NO: 853827 - DNA, 15 bp, Homo sapiens
tgtgtctctagttta

SEQ ID NO: 853828 - DNA, 15 bp, Homo sapiens
gtgtctctagtttag

SEQ ID NO: 853829 - DNA, 15 bp, Homo sapiens
tgtctctagtttaga

SEQ ID NO: 853830 - DNA, 15 bp, Homo sapiens
gtctctagtttagac

SEQ ID NO: 853831 - DNA, 15 bp, Homo sapiens
tctctagtttagacc

SEQ ID NO: 853832 - DNA, 15 bp, Homo sapiens
ctctagtttagacct

SEQ ID NO: 853833 - DNA, 15 bp, Homo sapiens
tctagtttagacctc

SEQ ID NO: 853834 - DNA, 15 bp, Homo sapiens
ctagtttagacctct

SEQ ID NO: 853835 - DNA, 15 bp, Homo sapiens
tagtttagacctcta

SEQ ID NO: 853836 - DNA, 15 bp, Homo sapiens
agtttagacctctat

SEQ ID NO: 853837 - DNA, 15 bp, Homo sapiens
gtttagacctctatc

SEQ ID NO: 853838 - DNA, 15 bp, Homo sapiens
tttagacctctatcc

SEQ ID NO: 853839 - DNA, 15 bp, Homo sapiens
ttagacctctatcct

SEQ ID NO: 853840 - DNA, 15 bp, Homo sapiens
tagacctctatcctg

SEQ ID NO: 853841 - DNA, 15 bp, Homo sapiens
agacctctatcctgc

SEQ ID NO: 853842 - DNA, 15 bp, Homo sapiens
gacctctatcctgct

SEQ ID NO: 853843 - DNA, 15 bp, Homo sapiens
acctctatcctgctc

SEQ ID NO: 853844 - DNA, 15 bp, Homo sapiens
cctctatcctgctct

SEQ ID NO: 853845 - DNA, 15 bp, Homo sapiens
ctctatcctgctctc

SEQ ID NO: 853846 - DNA, 15 bp, Homo sapiens
tctatcctgctctct

SEQ ID NO: 853847 - DNA, 15 bp, Homo sapiens
ctatcctgctctcta

SEQ ID NO: 853848 - DNA, 15 bp, Homo sapiens
tatcctgctctctaa

SEQ ID NO: 853849 - DNA, 15 bp, Homo sapiens
atcctgctctctaaa

SEQ ID NO: 853850 - DNA, 15 bp, Homo sapiens
tcctgctctctaaat

SEQ ID NO: 853851 - DNA, 15 bp, Homo sapiens
cctgctctctaaatg

SEQ ID NO: 853852 - DNA, 15 bp, Homo sapiens
ctgctctctaaatga

SEQ ID NO: 853853 - DNA, 15 bp, Homo sapiens
tgctctctaaatgat

SEQ ID NO: 853854 - DNA, 15 bp, Homo sapiens
gctctctaaatgatg

SEQ ID NO: 853855 - DNA, 15 bp, Homo sapiens
ctctctaaatgatgt

SEQ ID NO: 853856 - DNA, 15 bp, Homo sapiens
tctctaaatgatgta

SEQ ID NO: 853857 - DNA, 15 bp, Homo sapiens
ctctaaatgatgtat

SEQ ID NO: 853858 - DNA, 15 bp, Homo sapiens
tctaaatgatgtatc

SEQ ID NO: 853859 - DNA, 15 bp, Homo sapiens
ctaaatgatgtatcc

SEQ ID NO: 853860 - DNA, 15 bp, Homo sapiens
taaatgatgtatcca

SEQ ID NO: 853861 - DNA, 15 bp, Homo sapiens
aaatgatgtatccaa

SEQ ID NO: 853862 - DNA, 15 bp, Homo sapiens
aatgatgtatccaac

SEQ ID NO: 853863 - DNA, 15 bp, Homo sapiens
atgatgtatccaact

SEQ ID NO: 853864 - DNA, 15 bp, Homo sapiens
tgatgtatccaacta

SEQ ID NO: 853865 - DNA, 15 bp, Homo sapiens
gatgtatccaactat

SEQ ID NO: 853866 - DNA, 15 bp, Homo sapiens
atgtatccaactatc

SEQ ID NO: 853867 - DNA, 15 bp, Homo sapiens
tgtatccaactatca

SEQ ID NO: 853868 - DNA, 15 bp, Homo sapiens
gtatccaactatcat

SEQ ID NO: 853869 - DNA, 15 bp, Homo sapiens
tatccaactatcatc

SEQ ID NO: 853870 - DNA, 15 bp, Homo sapiens
atccaactatcatct

SEQ ID NO: 853871 - DNA, 15 bp, Homo sapiens
tccaactatcatctt

SEQ ID NO: 853872 - DNA, 15 bp, Homo sapiens
ccaactatcatcttg

SEQ ID NO: 853873 - DNA, 15 bp, Homo sapiens
caactatcatcttga

SEQ ID NO: 853874 - DNA, 15 bp, Homo sapiens
aactatcatcttgac

SEQ ID NO: 853875 - DNA, 15 bp, Homo sapiens
actatcatcttgaca

SEQ ID NO: 853876 - DNA, 15 bp, Homo sapiens
ctatcatcttgacac

SEQ ID NO: 853877 - DNA, 15 bp, Homo sapiens
tatcatcttgacacc

SEQ ID NO: 853878 - DNA, 15 bp, Homo sapiens
atcatcttgacacca

SEQ ID NO: 853879 - DNA, 15 bp, Homo sapiens
tcatcttgacaccat

SEQ ID NO: 853880 - DNA, 15 bp, Homo sapiens
catcttgacaccatc

SEQ ID NO: 853881 - DNA, 15 bp, Homo sapiens
atcttgacaccatca

SEQ ID NO: 853882 - DNA, 15 bp, Homo sapiens
tcttgacaccatcat

SEQ ID NO: 853883 - DNA, 15 bp, Homo sapiens
cttgacaccatcata

SEQ ID NO: 853884 - DNA, 15 bp, Homo sapiens
ttgacaccatcatat

SEQ ID NO: 853885 - DNA, 15 bp, Homo sapiens
tgacaccatcatatg

SEQ ID NO: 853886 - DNA, 15 bp, Homo sapiens
gacaccatcatatgt

SEQ ID NO: 853887 - DNA, 15 bp, Homo sapiens
acaccatcatatgtt

SEQ ID NO: 853888 - DNA, 15 bp, Homo sapiens
caccatcatatgttc

SEQ ID NO: 853889 - DNA, 15 bp, Homo sapiens
accatcatatgttca

SEQ ID NO: 853890 - DNA, 15 bp, Homo sapiens
ccatcatatgttcat

SEQ ID NO: 853891 - DNA, 15 bp, Homo sapiens
catcatatgttcata

SEQ ID NO: 853892 - DNA, 15 bp, Homo sapiens
atcatatgttcataa

SEQ ID NO: 853893 - DNA, 15 bp, Homo sapiens
tcatatgttcataaa

SEQ ID NO: 853894 - DNA, 15 bp, Homo sapiens
catatgttcataaaa

SEQ ID NO: 853895 - DNA, 15 bp, Homo sapiens
atatgttcataaaac

SEQ ID NO: 853896 - DNA, 15 bp, Homo sapiens
tatgttcataaaaca

SEQ ID NO: 853897 - DNA, 15 bp, Homo sapiens
atgttcataaaacat

SEQ ID NO: 853898 - DNA, 15 bp, Homo sapiens
tgttcataaaacata

SEQ ID NO: 853899 - DNA, 15 bp, Homo sapiens
gttcataaaacataa

SEQ ID NO: 853900 - DNA, 15 bp, Homo sapiens
ttcataaaacataat

SEQ ID NO: 853901 - DNA, 15 bp, Homo sapiens
tcataaaacataatt

SEQ ID NO: 853902 - DNA, 15 bp, Homo sapiens
cataaaacataatta

SEQ ID NO: 853903 - DNA, 15 bp, Homo sapiens
ataaaacataattat

SEQ ID NO: 853904 - DNA, 15 bp, Homo sapiens
taaaacataattata

SEQ ID NO: 853905 - DNA, 15 bp, Homo sapiens
aaaacataattatag

SEQ ID NO: 853906 - DNA, 15 bp, Homo sapiens
aaacataattataga

SEQ ID NO: 853907 - DNA, 15 bp, Homo sapiens
aacataattatagaa

SEQ ID NO: 853908 - DNA, 15 bp, Homo sapiens
acataattatagaat

SEQ ID NO: 853909 - DNA, 15 bp, Homo sapiens
cataattatagaata

SEQ ID NO: 853910 - DNA, 15 bp, Homo sapiens
ataattatagaatat

SEQ ID NO: 853911 - DNA, 15 bp, Homo sapiens
taattatagaatatc

SEQ ID NO: 853912 - DNA, 15 bp, Homo sapiens
aattatagaatatct

SEQ ID NO: 853913 - DNA, 15 bp, Homo sapiens
attatagaatatctt

SEQ ID NO: 853914 - DNA, 15 bp, Homo sapiens
ttatagaatatcttt

SEQ ID NO: 853915 - DNA, 15 bp, Homo sapiens
tatagaatatctttc

SEQ ID NO: 853916 - DNA, 15 bp, Homo sapiens
atagaatatctttca

SEQ ID NO: 853917 - DNA, 15 bp, Homo sapiens
tagaatatctttcag

SEQ ID NO: 853918 - DNA, 15 bp, Homo sapiens
agaatatctttcagt

SEQ ID NO: 853919 - DNA, 15 bp, Homo sapiens
gaatatctttcagta

SEQ ID NO: 853920 - DNA, 15 bp, Homo sapiens
aatatctttcagtag

SEQ ID NO: 853921 - DNA, 15 bp, Homo sapiens
atatctttcagtagg

SEQ ID NO: 853922 - DNA, 15 bp, Homo sapiens
tatctttcagtaggc

SEQ ID NO: 853923 - DNA, 15 bp, Homo sapiens
atctttcagtaggct

SEQ ID NO: 853924 - DNA, 15 bp, Homo sapiens
tctttcagtaggctt

SEQ ID NO: 853925 - DNA, 15 bp, Homo sapiens
ctttcagtaggcttg

SEQ ID NO: 853926 - DNA, 15 bp, Homo sapiens
tttcagtaggcttga

SEQ ID NO: 853927 - DNA, 15 bp, Homo sapiens
ttcagtaggcttgac

SEQ ID NO: 853928 - DNA, 15 bp, Homo sapiens
tcagtaggcttgaca

SEQ ID NO: 853929 - DNA, 15 bp, Homo sapiens
cagtaggcttgacat

SEQ ID NO: 853930 - DNA, 15 bp, Homo sapiens
agtaggcttgacatt

SEQ ID NO: 853931 - DNA, 15 bp, Homo sapiens
gtaggcttgacattt

SEQ ID NO: 853932 - DNA, 15 bp, Homo sapiens
taggcttgacatttt

SEQ ID NO: 853933 - DNA, 15 bp, Homo sapiens
aggcttgacatttta

SEQ ID NO: 853934 - DNA, 15 bp, Homo sapiens
ggcttgacattttaa

SEQ ID NO: 853935 - DNA, 15 bp, Homo sapiens
gcttgacattttaag

SEQ ID NO: 853936 - DNA, 15 bp, Homo sapiens
cttgacattttaagg

SEQ ID NO: 853937 - DNA, 15 bp, Homo sapiens
ttgacattttaaggc

SEQ ID NO: 853938 - DNA, 15 bp, Homo sapiens
tgacattttaaggca

SEQ ID NO: 853939 - DNA, 15 bp, Homo sapiens
gacattttaaggcat

SEQ ID NO: 853940 - DNA, 15 bp, Homo sapiens
acattttaaggcatg

SEQ ID NO: 853941 - DNA, 15 bp, Homo sapiens
cattttaaggcatga

SEQ ID NO: 853942 - DNA, 15 bp, Homo sapiens
attttaaggcatgag

SEQ ID NO: 853943 - DNA, 15 bp, Homo sapiens
ttttaaggcatgagt

SEQ ID NO: 853944 - DNA, 15 bp, Homo sapiens
tttaaggcatgagtt

SEQ ID NO: 853945 - DNA, 15 bp, Homo sapiens
ttaaggcatgagttt

SEQ ID NO: 853946 - DNA, 15 bp, Homo sapiens
taaggcatgagtttc

SEQ ID NO: 853947 - DNA, 15 bp, Homo sapiens
aaggcatgagtttcc

SEQ ID NO: 853948 - DNA, 15 bp, Homo sapiens
aggcatgagtttccg

SEQ ID NO: 853949 - DNA, 15 bp, Homo sapiens
ggcatgagtttccgt

SEQ ID NO: 853950 - DNA, 15 bp, Homo sapiens
gcatgagtttccgtt

SEQ ID NO: 853951 - DNA, 15 bp, Homo sapiens
catgagtttccgttc

SEQ ID NO: 853952 - DNA, 15 bp, Homo sapiens
atgagtttccgttca

SEQ ID NO: 853953 - DNA, 15 bp, Homo sapiens
tgagtttccgttcag

SEQ ID NO: 853954 - DNA, 15 bp, Homo sapiens
gagtttccgttcagt

SEQ ID NO: 853955 - DNA, 15 bp, Homo sapiens
agtttccgttcagta

SEQ ID NO: 853956 - DNA, 15 bp, Homo sapiens
gtttccgttcagtat

SEQ ID NO: 853957 - DNA, 15 bp, Homo sapiens
tttccgttcagtatc

SEQ ID NO: 853958 - DNA, 15 bp, Homo sapiens
ttccgttcagtatct

SEQ ID NO: 853959 - DNA, 15 bp, Homo sapiens
tccgttcagtatctc

SEQ ID NO: 853960 - DNA, 15 bp, Homo sapiens
ccgttcagtatctcc

SEQ ID NO: 853961 - DNA, 15 bp, Homo sapiens
cgttcagtatctcct

SEQ ID NO: 853962 - DNA, 15 bp, Homo sapiens
gttcagtatctcctt

SEQ ID NO: 853963 - DNA, 15 bp, Homo sapiens
ttcagtatctcctta

SEQ ID NO: 853964 - DNA, 15 bp, Homo sapiens
tcagtatctccttaa

SEQ ID NO: 853965 - DNA, 15 bp, Homo sapiens
cagtatctccttaaa

SEQ ID NO: 853966 - DNA, 15 bp, Homo sapiens
agtatctccttaaaa

SEQ ID NO: 853967 - DNA, 15 bp, Homo sapiens
gtatctccttaaaat

SEQ ID NO: 853968 - DNA, 15 bp, Homo sapiens
tatctccttaaaata

SEQ ID NO: 853969 - DNA, 15 bp, Homo sapiens
atctccttaaaatat

SEQ ID NO: 853970 - DNA, 15 bp, Homo sapiens
tctccttaaaatata

SEQ ID NO: 853971 - DNA, 15 bp, Homo sapiens
ctccttaaaatatac

SEQ ID NO: 853972 - DNA, 15 bp, Homo sapiens
tccttaaaatatacc

SEQ ID NO: 853973 - DNA, 15 bp, Homo sapiens
ccttaaaatataccc

SEQ ID NO: 853974 - DNA, 15 bp, Homo sapiens
cttaaaatataccca

SEQ ID NO: 853975 - DNA, 15 bp, Homo sapiens
ttaaaatatacccag

SEQ ID NO: 853976 - DNA, 15 bp, Homo sapiens
taaaatatacccagg

SEQ ID NO: 853977 - DNA, 15 bp, Homo sapiens
aaaatatacccaggg

SEQ ID NO: 853978 - DNA, 15 bp, Homo sapiens
aaatatacccagggt

SEQ ID NO: 853979 - DNA, 15 bp, Homo sapiens
aatatacccagggtc

SEQ ID NO: 853980 - DNA, 15 bp, Homo sapiens
atatacccagggtct

SEQ ID NO: 853981 - DNA, 15 bp, Homo sapiens
tatacccagggtctc

SEQ ID NO: 853982 - DNA, 15 bp, Homo sapiens
atacccagggtctca

SEQ ID NO: 853983 - DNA, 15 bp, Homo sapiens
tacccagggtctcag

SEQ ID NO: 853984 - DNA, 15 bp, Homo sapiens
acccagggtctcagg

SEQ ID NO: 853985 - DNA, 15 bp, Homo sapiens
cccagggtctcagga

SEQ ID NO: 853986 - DNA, 15 bp, Homo sapiens
ccagggtctcaggag

SEQ ID NO: 853987 - DNA, 15 bp, Homo sapiens
cagggtctcaggaga

SEQ ID NO: 853988 - DNA, 15 bp, Homo sapiens
agggtctcaggagac

SEQ ID NO: 853989 - DNA, 15 bp, Homo sapiens
gggtctcaggagact

SEQ ID NO: 853990 - DNA, 15 bp, Homo sapiens
ggtctcaggagacta

SEQ ID NO: 853991 - DNA, 15 bp, Homo sapiens
gtctcaggagactat

SEQ ID NO: 853992 - DNA, 15 bp, Homo sapiens
tctcaggagactatt

SEQ ID NO: 853993 - DNA, 15 bp, Homo sapiens
ctcaggagactattc

SEQ ID NO: 853994 - DNA, 15 bp, Homo sapiens
tcaggagactattca

SEQ ID NO: 853995 - DNA, 15 bp, Homo sapiens
caggagactattcaa

SEQ ID NO: 853996 - DNA, 15 bp, Homo sapiens
aggagactattcaaa

SEQ ID NO: 853997 - DNA, 15 bp, Homo sapiens
ggagactattcaaac

SEQ ID NO: 853998 - DNA, 15 bp, Homo sapiens
gagactattcaaaca

SEQ ID NO: 853999 - DNA, 15 bp, Homo sapiens
agactattcaaacag

SEQ ID NO: 854000 - DNA, 15 bp, Homo sapiens
gactattcaaacagg

SEQ ID NO: 854001 - DNA, 15 bp, Homo sapiens
actattcaaacagga

SEQ ID NO: 854002 - DNA, 15 bp, Homo sapiens
ctattcaaacaggac

SEQ ID NO: 854003 - DNA, 15 bp, Homo sapiens
tattcaaacaggaca

SEQ ID NO: 854004 - DNA, 15 bp, Homo sapiens
attcaaacaggacaa

SEQ ID NO: 854005 - DNA, 15 bp, Homo sapiens
ttcaaacaggacaaa

SEQ ID NO: 854006 - DNA, 15 bp, Homo sapiens
tcaaacaggacaaag

SEQ ID NO: 854007 - DNA, 15 bp, Homo sapiens
caaacaggacaaagc

SEQ ID NO: 854008 - DNA, 15 bp, Homo sapiens
aaacaggacaaagct

SEQ ID NO: 854009 - DNA, 15 bp, Homo sapiens
aacaggacaaagctt

SEQ ID NO: 854010 - DNA, 15 bp, Homo sapiens
acaggacaaagcttc

SEQ ID NO: 854011 - DNA, 15 bp, Homo sapiens
caggacaaagcttct

SEQ ID NO: 854012 - DNA, 15 bp, Homo sapiens
aggacaaagcttcta

SEQ ID NO: 854013 - DNA, 15 bp, Homo sapiens
ggacaaagcttctat

SEQ ID NO: 854014 - DNA, 15 bp, Homo sapiens
gacaaagcttctatt

SEQ ID NO: 854015 - DNA, 15 bp, Homo sapiens
acaaagcttctattc

SEQ ID NO: 854016 - DNA, 15 bp, Homo sapiens
caaagcttctattct

SEQ ID NO: 854017 - DNA, 15 bp, Homo sapiens
aaagcttctattcta

SEQ ID NO: 854018 - DNA, 15 bp, Homo sapiens
aagcttctattctac

SEQ ID NO: 854019 - DNA, 15 bp, Homo sapiens
agcttctattctact

SEQ ID NO: 854020 - DNA, 15 bp, Homo sapiens
gcttctattctactt

SEQ ID NO: 854021 - DNA, 15 bp, Homo sapiens
cttctattctactta

SEQ ID NO: 854022 - DNA, 15 bp, Homo sapiens
ttctattctacttac

SEQ ID NO: 854023 - DNA, 15 bp, Homo sapiens
tctattctacttact

SEQ ID NO: 854024 - DNA, 15 bp, Homo sapiens
ctattctacttacta

SEQ ID NO: 854025 - DNA, 15 bp, Homo sapiens
tattctacttactaa

SEQ ID NO: 854026 - DNA, 15 bp, Homo sapiens
attctacttactaat

SEQ ID NO: 854027 - DNA, 15 bp, Homo sapiens
ttctacttactaatg

SEQ ID NO: 854028 - DNA, 15 bp, Homo sapiens
tctacttactaatgt

SEQ ID NO: 854029 - DNA, 15 bp, Homo sapiens
ctacttactaatgtg

SEQ ID NO: 854030 - DNA, 15 bp, Homo sapiens
tacttactaatgtgt

SEQ ID NO: 854031 - DNA, 15 bp, Homo sapiens
acttactaatgtgtc

SEQ ID NO: 854032 - DNA, 15 bp, Homo sapiens
cttactaatgtgtct

SEQ ID NO: 854033 - DNA, 15 bp, Homo sapiens
ttactaatgtgtctg

SEQ ID NO: 854034 - DNA, 15 bp, Homo sapiens
tactaatgtgtctgg

SEQ ID NO: 854035 - DNA, 15 bp, Homo sapiens
actaatgtgtctggc

SEQ ID NO: 854036 - DNA, 15 bp, Homo sapiens
ctaatgtgtctggcc

SEQ ID NO: 854037 - DNA, 15 bp, Homo sapiens
taatgtgtctggccc

SEQ ID NO: 854038 - DNA, 15 bp, Homo sapiens
aatgtgtctggccct

SEQ ID NO: 854039 - DNA, 15 bp, Homo sapiens
atgtgtctggcccta

SEQ ID NO: 854040 - DNA, 15 bp, Homo sapiens
tgtgtctggccctat

SEQ ID NO: 854041 - DNA, 15 bp, Homo sapiens
gtgtctggccctatt

SEQ ID NO: 854042 - DNA, 15 bp, Homo sapiens
tgtctggccctattt

SEQ ID NO: 854043 - DNA, 15 bp, Homo sapiens
gtctggccctatttg

SEQ ID NO: 854044 - DNA, 15 bp, Homo sapiens
tctggccctatttgg

SEQ ID NO: 854045 - DNA, 15 bp, Homo sapiens
ctggccctatttggc

SEQ ID NO: 854046 - DNA, 15 bp, Homo sapiens
tggccctatttggca

SEQ ID NO: 854047 - DNA, 15 bp, Homo sapiens
ggccctatttggcag

SEQ ID NO: 854048 - DNA, 15 bp, Homo sapiens
gccctatttggcagg

SEQ ID NO: 854049 - DNA, 15 bp, Homo sapiens
ccctatttggcaggt

SEQ ID NO: 854050 - DNA, 15 bp, Homo sapiens
cctatttggcaggtt

SEQ ID NO: 854051 - DNA, 15 bp, Homo sapiens
ctatttggcaggttg

SEQ ID NO: 854052 - DNA, 15 bp, Homo sapiens
tatttggcaggttgg

SEQ ID NO: 854053 - DNA, 15 bp, Homo sapiens
atttggcaggttgga

SEQ ID NO: 854054 - DNA, 15 bp, Homo sapiens
tttggcaggttggat

SEQ ID NO: 854055 - DNA, 15 bp, Homo sapiens
ttggcaggttggata

SEQ ID NO: 854056 - DNA, 15 bp, Homo sapiens
tggcaggttggataa

SEQ ID NO: 854057 - DNA, 15 bp, Homo sapiens
ggcaggttggataaa

SEQ ID NO: 854058 - DNA, 15 bp, Homo sapiens
gcaggttggataaaa

SEQ ID NO: 854059 - DNA, 15 bp, Homo sapiens
caggttggataaaaa

SEQ ID NO: 854060 - DNA, 15 bp, Homo sapiens
aggttggataaaaag

SEQ ID NO: 854061 - DNA, 15 bp, Homo sapiens
ggttggataaaaagt

SEQ ID NO: 854062 - DNA, 15 bp, Homo sapiens
gttggataaaaagtc

SEQ ID NO: 854063 - DNA, 15 bp, Homo sapiens
ttggataaaaagtca

SEQ ID NO: 854064 - DNA, 15 bp, Homo sapiens
tggataaaaagtcat

SEQ ID NO: 854065 - DNA, 15 bp, Homo sapiens
ggataaaaagtcatc

SEQ ID NO: 854066 - DNA, 15 bp, Homo sapiens
gataaaaagtcatct

SEQ ID NO: 854067 - DNA, 15 bp, Homo sapiens
ataaaaagtcatctg

SEQ ID NO: 854068 - DNA, 15 bp, Homo sapiens
taaaaagtcatctga

SEQ ID NO: 854069 - DNA, 15 bp, Homo sapiens
aaaaagtcatctgaa

SEQ ID NO: 854070 - DNA, 15 bp, Homo sapiens
aaaagtcatctgaac

SEQ ID NO: 854071 - DNA, 15 bp, Homo sapiens
aaagtcatctgaaca

SEQ ID NO: 854072 - DNA, 15 bp, Homo sapiens
aagtcatctgaacat

SEQ ID NO: 854073 - DNA, 15 bp, Homo sapiens
agtcatctgaacatt

SEQ ID NO: 854074 - DNA, 15 bp, Homo sapiens
gtcatctgaacattg

SEQ ID NO: 854075 - DNA, 15 bp, Homo sapiens
tcatctgaacattgt

SEQ ID NO: 854076 - DNA, 15 bp, Homo sapiens
catctgaacattgtc

SEQ ID NO: 854077 - DNA, 15 bp, Homo sapiens
atctgaacattgtca

SEQ ID NO: 854078 - DNA, 15 bp, Homo sapiens
tctgaacattgtcac

SEQ ID NO: 854079 - DNA, 15 bp, Homo sapiens
ctgaacattgtcact

SEQ ID NO: 854080 - DNA, 15 bp, Homo sapiens
tgaacattgtcactt

SEQ ID NO: 854081 - DNA, 15 bp, Homo sapiens
gaacattgtcacttt

SEQ ID NO: 854082 - DNA, 15 bp, Homo sapiens
aacattgtcacttta

SEQ ID NO: 854083 - DNA, 15 bp, Homo sapiens
acattgtcactttat

SEQ ID NO: 854084 - DNA, 15 bp, Homo sapiens
cattgtcactttatg

SEQ ID NO: 854085 - DNA, 15 bp, Homo sapiens
attgtcactttatga

SEQ ID NO: 854086 - DNA, 15 bp, Homo sapiens
ttgtcactttatgaa

SEQ ID NO: 854087 - DNA, 15 bp, Homo sapiens
tgtcactttatgaat

SEQ ID NO: 854088 - DNA, 15 bp, Homo sapiens
gtcactttatgaata

SEQ ID NO: 854089 - DNA, 15 bp, Homo sapiens
tcactttatgaataa

SEQ ID NO: 854090 - DNA, 15 bp, Homo sapiens
cactttatgaataat

SEQ ID NO: 854091 - DNA, 15 bp, Homo sapiens
actttatgaataata

SEQ ID NO: 854092 - DNA, 15 bp, Homo sapiens
ctttatgaataatat

SEQ ID NO: 854093 - DNA, 15 bp, Homo sapiens
tttatgaataatata

SEQ ID NO: 854094 - DNA, 15 bp, Homo sapiens
ttatgaataatatag

SEQ ID NO: 854095 - DNA, 15 bp, Homo sapiens
tatgaataatatagt

SEQ ID NO: 854096 - DNA, 15 bp, Homo sapiens
atgaataatatagtt

SEQ ID NO: 854097 - DNA, 15 bp, Homo sapiens
tgaataatatagttt

SEQ ID NO: 854098 - DNA, 15 bp, Homo sapiens
gaataatatagttta

SEQ ID NO: 854099 - DNA, 15 bp, Homo sapiens
aataatatagtttaa

SEQ ID NO: 854100 - DNA, 15 bp, Homo sapiens
ataatatagtttaat

SEQ ID NO: 854101 - DNA, 15 bp, Homo sapiens
taatatagtttaata

SEQ ID NO: 854102 - DNA, 15 bp, Homo sapiens
aatatagtttaatag

SEQ ID NO: 854103 - DNA, 15 bp, Homo sapiens
atatagtttaatagt

SEQ ID NO: 854104 - DNA, 15 bp, Homo sapiens
tatagtttaatagtt

SEQ ID NO: 854105 - DNA, 15 bp, Homo sapiens
atagtttaatagttt

SEQ ID NO: 854106 - DNA, 15 bp, Homo sapiens
tagtttaatagtttg

SEQ ID NO: 854107 - DNA, 15 bp, Homo sapiens
agtttaatagtttgt

SEQ ID NO: 854108 - DNA, 15 bp, Homo sapiens
gtttaatagtttgtg

SEQ ID NO: 854109 - DNA, 15 bp, Homo sapiens
tttaatagtttgtga

SEQ ID NO: 854110 - DNA, 15 bp, Homo sapiens
ttaatagtttgtgaa

SEQ ID NO: 854111 - DNA, 15 bp, Homo sapiens
taatagtttgtgaat

SEQ ID NO: 854112 - DNA, 15 bp, Homo sapiens
aatagtttgtgaatc

SEQ ID NO: 854113 - DNA, 15 bp, Homo sapiens
atagtttgtgaatca

SEQ ID NO: 854114 - DNA, 15 bp, Homo sapiens
tagtttgtgaatcac

SEQ ID NO: 854115 - DNA, 15 bp, Homo sapiens
agtttgtgaatcacc

SEQ ID NO: 854116 - DNA, 15 bp, Homo sapiens
gtttgtgaatcaccc

SEQ ID NO: 854117 - DNA, 15 bp, Homo sapiens
tttgtgaatcacccc

SEQ ID NO: 854118 - DNA, 15 bp, Homo sapiens
ttgtgaatcacccct

SEQ ID NO: 854119 - DNA, 15 bp, Homo sapiens
tgtgaatcacccctg

SEQ ID NO: 854120 - DNA, 15 bp, Homo sapiens
gtgaatcacccctgc

SEQ ID NO: 854121 - DNA, 15 bp, Homo sapiens
tgaatcacccctgca

SEQ ID NO: 854122 - DNA, 15 bp, Homo sapiens
gaatcacccctgcaa

SEQ ID NO: 854123 - DNA, 15 bp, Homo sapiens
aatcacccctgcaat

SEQ ID NO: 854124 - DNA, 15 bp, Homo sapiens
atcacccctgcaatt

SEQ ID NO: 854125 - DNA, 15 bp, Homo sapiens
tcacccctgcaattt

SEQ ID NO: 854126 - DNA, 15 bp, Homo sapiens
cacccctgcaattta

SEQ ID NO: 854127 - DNA, 15 bp, Homo sapiens
acccctgcaatttaa

SEQ ID NO: 854128 - DNA, 15 bp, Homo sapiens
cccctgcaatttaaa

SEQ ID NO: 854129 - DNA, 15 bp, Homo sapiens
ccctgcaatttaaaa

SEQ ID NO: 854130 - DNA, 15 bp, Homo sapiens
cctgcaatttaaaaa

SEQ ID NO: 854131 - DNA, 15 bp, Homo sapiens
ctgcaatttaaaaaa

SEQ ID NO: 854132 - DNA, 15 bp, Homo sapiens
tgcaatttaaaaaat

SEQ ID NO: 854133 - DNA, 15 bp, Homo sapiens
gcaatttaaaaaata

SEQ ID NO: 854134 - DNA, 15 bp, Homo sapiens
caatttaaaaaatag

SEQ ID NO: 854135 - DNA, 15 bp, Homo sapiens
aatttaaaaaatagt

SEQ ID NO: 854136 - DNA, 15 bp, Homo sapiens
atttaaaaaatagta

SEQ ID NO: 854137 - DNA, 15 bp, Homo sapiens
tttaaaaaatagtaa

SEQ ID NO: 854138 - DNA, 15 bp, Homo sapiens
ttaaaaaatagtaaa

SEQ ID NO: 854139 - DNA, 15 bp, Homo sapiens
taaaaaatagtaaaa

SEQ ID NO: 854140 - DNA, 15 bp, Homo sapiens
aaaaaatagtaaaat

SEQ ID NO: 854141 - DNA, 15 bp, Homo sapiens
aaaaatagtaaaatt

SEQ ID NO: 854142 - DNA, 15 bp, Homo sapiens
aaaatagtaaaatta

SEQ ID NO: 854143 - DNA, 15 bp, Homo sapiens
aaatagtaaaattat

SEQ ID NO: 854144 - DNA, 15 bp, Homo sapiens
aatagtaaaattatc

SEQ ID NO: 854145 - DNA, 15 bp, Homo sapiens
atagtaaaattatca

SEQ ID NO: 854146 - DNA, 15 bp, Homo sapiens
tagtaaaattatcag

SEQ ID NO: 854147 - DNA, 15 bp, Homo sapiens
agtaaaattatcaga

SEQ ID NO: 854148 - DNA, 15 bp, Homo sapiens
gtaaaattatcagaa

SEQ ID NO: 854149 - DNA, 15 bp, Homo sapiens
taaaattatcagaat

SEQ ID NO: 854150 - DNA, 15 bp, Homo sapiens
aaaattatcagaatc

SEQ ID NO: 854151 - DNA, 15 bp, Homo sapiens
aaattatcagaatct

SEQ ID NO: 854152 - DNA, 15 bp, Homo sapiens
aattatcagaatcta

SEQ ID NO: 854153 - DNA, 15 bp, Homo sapiens
attatcagaatctaa

SEQ ID NO: 854154 - DNA, 15 bp, Homo sapiens
ttatcagaatctaat

SEQ ID NO: 854155 - DNA, 15 bp, Homo sapiens
tatcagaatctaatt

SEQ ID NO: 854156 - DNA, 15 bp, Homo sapiens
atcagaatctaattt

SEQ ID NO: 854157 - DNA, 15 bp, Homo sapiens
tcagaatctaattta

SEQ ID NO: 854158 - DNA, 15 bp, Homo sapiens
cagaatctaatttaa

SEQ ID NO: 854159 - DNA, 15 bp, Homo sapiens
agaatctaatttaat

SEQ ID NO: 854160 - DNA, 15 bp, Homo sapiens
gaatctaatttaata

SEQ ID NO: 854161 - DNA, 15 bp, Homo sapiens
aatctaatttaataa

SEQ ID NO: 854162 - DNA, 15 bp, Homo sapiens
atctaatttaataat

SEQ ID NO: 854163 - DNA, 15 bp, Homo sapiens
tctaatttaataatt

SEQ ID NO: 854164 - DNA, 15 bp, Homo sapiens
ctaatttaataattc

SEQ ID NO: 854165 - DNA, 15 bp, Homo sapiens
taatttaataattcc

SEQ ID NO: 854166 - DNA, 15 bp, Homo sapiens
aatttaataattcct

SEQ ID NO: 854167 - DNA, 15 bp, Homo sapiens
atttaataattccta

SEQ ID NO: 854168 - DNA, 15 bp, Homo sapiens
tttaataattcctat

SEQ ID NO: 854169 - DNA, 15 bp, Homo sapiens
ttaataattcctatt

SEQ ID NO: 854170 - DNA, 15 bp, Homo sapiens
taataattcctattg

SEQ ID NO: 854171 - DNA, 15 bp, Homo sapiens
aataattcctattgg

SEQ ID NO: 854172 - DNA, 15 bp, Homo sapiens
ataattcctattgga

SEQ ID NO: 854173 - DNA, 15 bp, Homo sapiens
taattcctattggaa

SEQ ID NO: 854174 - DNA, 15 bp, Homo sapiens
aattcctattggaac

SEQ ID NO: 854175 - DNA, 15 bp, Homo sapiens
attcctattggaaca

SEQ ID NO: 854176 - DNA, 15 bp, Homo sapiens
ttcctattggaacac

SEQ ID NO: 854177 - DNA, 15 bp, Homo sapiens
tcctattggaacacc

SEQ ID NO: 854178 - DNA, 15 bp, Homo sapiens
cctattggaacaccc

SEQ ID NO: 854179 - DNA, 15 bp, Homo sapiens
ctattggaacacccc

SEQ ID NO: 854180 - DNA, 15 bp, Homo sapiens
tattggaacacccca

SEQ ID NO: 854181 - DNA, 15 bp, Homo sapiens
attggaacaccccat

SEQ ID NO: 854182 - DNA, 15 bp, Homo sapiens
ttggaacaccccatg

SEQ ID NO: 854183 - DNA, 15 bp, Homo sapiens
tggaacaccccatgt

SEQ ID NO: 854184 - DNA, 15 bp, Homo sapiens
ggaacaccccatgtt

SEQ ID NO: 854185 - DNA, 15 bp, Homo sapiens
gaacaccccatgtta

SEQ ID NO: 854186 - DNA, 15 bp, Homo sapiens
aacaccccatgttag

SEQ ID NO: 854187 - DNA, 15 bp, Homo sapiens
acaccccatgttagg

SEQ ID NO: 854188 - DNA, 15 bp, Homo sapiens
caccccatgttaggg

SEQ ID NO: 854189 - DNA, 15 bp, Homo sapiens
accccatgttagggg

SEQ ID NO: 854190 - DNA, 15 bp, Homo sapiens
ccccatgttagggga

SEQ ID NO: 854191 - DNA, 15 bp, Homo sapiens
cccatgttaggggat

SEQ ID NO: 854192 - DNA, 15 bp, Homo sapiens
ccatgttaggggatt

SEQ ID NO: 854193 - DNA, 15 bp, Homo sapiens
catgttaggggattt

SEQ ID NO: 854194 - DNA, 15 bp, Homo sapiens
atgttaggggatttc

SEQ ID NO: 854195 - DNA, 15 bp, Homo sapiens
tgttaggggatttcc

SEQ ID NO: 854196 - DNA, 15 bp, Homo sapiens
gttaggggatttcca

SEQ ID NO: 854197 - DNA, 15 bp, Homo sapiens
ttaggggatttccag

SEQ ID NO: 854198 - DNA, 15 bp, Homo sapiens
taggggatttccagt

SEQ ID NO: 854199 - DNA, 15 bp, Homo sapiens
aggggatttccagtt

SEQ ID NO: 854200 - DNA, 15 bp, Homo sapiens
ggggatttccagtta

SEQ ID NO: 854201 - DNA, 15 bp, Homo sapiens
gggatttccagttat

SEQ ID NO: 854202 - DNA, 15 bp, Homo sapiens
ggatttccagttatt

SEQ ID NO: 854203 - DNA, 15 bp, Homo sapiens
gatttccagttattt

SEQ ID NO: 854204 - DNA, 15 bp, Homo sapiens
atttccagttatttc

SEQ ID NO: 854205 - DNA, 15 bp, Homo sapiens
tttccagttatttca

SEQ ID NO: 854206 - DNA, 15 bp, Homo sapiens
ttccagttatttcaa

SEQ ID NO: 854207 - DNA, 15 bp, Homo sapiens
tccagttatttcaat

SEQ ID NO: 854208 - DNA, 15 bp, Homo sapiens
ccagttatttcaatt

SEQ ID NO: 854209 - DNA, 15 bp, Homo sapiens
cagttatttcaattg

SEQ ID NO: 854210 - DNA, 15 bp, Homo sapiens
agttatttcaattga

SEQ ID NO: 854211 - DNA, 15 bp, Homo sapiens
gttatttcaattgat

SEQ ID NO: 854212 - DNA, 15 bp, Homo sapiens
ttatttcaattgata

SEQ ID NO: 854213 - DNA, 15 bp, Homo sapiens
tatttcaattgatat

SEQ ID NO: 854214 - DNA, 15 bp, Homo sapiens
atttcaattgatatc

SEQ ID NO: 854215 - DNA, 15 bp, Homo sapiens
tttcaattgatatct

SEQ ID NO: 854216 - DNA, 15 bp, Homo sapiens
ttcaattgatatctc

SEQ ID NO: 854217 - DNA, 15 bp, Homo sapiens
tcaattgatatctca

SEQ ID NO: 854218 - DNA, 15 bp, Homo sapiens
caattgatatctcaa

SEQ ID NO: 854219 - DNA, 15 bp, Homo sapiens
aattgatatctcaat

SEQ ID NO: 854220 - DNA, 15 bp, Homo sapiens
attgatatctcaatg

SEQ ID NO: 854221 - DNA, 15 bp, Homo sapiens
ttgatatctcaatgt

SEQ ID NO: 854222 - DNA, 15 bp, Homo sapiens
tgatatctcaatgtt

SEQ ID NO: 854223 - DNA, 15 bp, Homo sapiens
gatatctcaatgttt

SEQ ID NO: 854224 - DNA, 15 bp, Homo sapiens
atatctcaatgtttt

SEQ ID NO: 854225 - DNA, 15 bp, Homo sapiens
tatctcaatgtttta

SEQ ID NO: 854226 - DNA, 15 bp, Homo sapiens
atctcaatgttttaa

SEQ ID NO: 854227 - DNA, 15 bp, Homo sapiens
tctcaatgttttaaa

SEQ ID NO: 854228 - DNA, 15 bp, Homo sapiens
ctcaatgttttaaag

SEQ ID NO: 854229 - DNA, 15 bp, Homo sapiens
tcaatgttttaaaga

SEQ ID NO: 854230 - DNA, 15 bp, Homo sapiens
caatgttttaaagat

SEQ ID NO: 854231 - DNA, 15 bp, Homo sapiens
aatgttttaaagatt

SEQ ID NO: 854232 - DNA, 15 bp, Homo sapiens
atgttttaaagattg

SEQ ID NO: 854233 - DNA, 15 bp, Homo sapiens
tgttttaaagattgt

SEQ ID NO: 854234 - DNA, 15 bp, Homo sapiens
gttttaaagattgtt

SEQ ID NO: 854235 - DNA, 15 bp, Homo sapiens
ttttaaagattgttt

SEQ ID NO: 854236 - DNA, 15 bp, Homo sapiens
tttaaagattgttta

SEQ ID NO: 854237 - DNA, 15 bp, Homo sapiens
ttaaagattgtttat

SEQ ID NO: 854238 - DNA, 15 bp, Homo sapiens
taaagattgtttatt

SEQ ID NO: 854239 - DNA, 15 bp, Homo sapiens
aaagattgtttattt

SEQ ID NO: 854240 - DNA, 15 bp, Homo sapiens
aagattgtttatttc

SEQ ID NO: 854241 - DNA, 15 bp, Homo sapiens
agattgtttatttct

SEQ ID NO: 854242 - DNA, 15 bp, Homo sapiens
gattgtttatttcta

SEQ ID NO: 854243 - DNA, 15 bp, Homo sapiens
attgtttatttctat

SEQ ID NO: 854244 - DNA, 15 bp, Homo sapiens
ttgtttatttctatt

SEQ ID NO: 854245 - DNA, 15 bp, Homo sapiens
tgtttatttctatta

SEQ ID NO: 854246 - DNA, 15 bp, Homo sapiens
gtttatttctattac

SEQ ID NO: 854247 - DNA, 15 bp, Homo sapiens
tttatttctattact

SEQ ID NO: 854248 - DNA, 15 bp, Homo sapiens
ttatttctattacta

SEQ ID NO: 854249 - DNA, 15 bp, Homo sapiens
tatttctattactaa

SEQ ID NO: 854250 - DNA, 15 bp, Homo sapiens
atttctattactaat

SEQ ID NO: 854251 - DNA, 15 bp, Homo sapiens
tttctattactaatt

SEQ ID NO: 854252 - DNA, 15 bp, Homo sapiens
ttctattactaattc

SEQ ID NO: 854253 - DNA, 15 bp, Homo sapiens
tctattactaattca

SEQ ID NO: 854254 - DNA, 15 bp, Homo sapiens
ctattactaattcac

SEQ ID NO: 854255 - DNA, 15 bp, Homo sapiens
tattactaattcact

SEQ ID NO: 854256 - DNA, 15 bp, Homo sapiens
attactaattcactc

SEQ ID NO: 854257 - DNA, 15 bp, Homo sapiens
ttactaattcactct

SEQ ID NO: 854258 - DNA, 15 bp, Homo sapiens
tactaattcactctt

SEQ ID NO: 854259 - DNA, 15 bp, Homo sapiens
actaattcactcttt

SEQ ID NO: 854260 - DNA, 15 bp, Homo sapiens
ctaattcactcttta

SEQ ID NO: 854261 - DNA, 15 bp, Homo sapiens
taattcactctttat

SEQ ID NO: 854262 - DNA, 15 bp, Homo sapiens
aattcactctttatt

SEQ ID NO: 854263 - DNA, 15 bp, Homo sapiens
attcactctttattt

SEQ ID NO: 854264 - DNA, 15 bp, Homo sapiens
ttcactctttatttt

SEQ ID NO: 854265 - DNA, 15 bp, Homo sapiens
tcactctttatttta

SEQ ID NO: 854266 - DNA, 15 bp, Homo sapiens
cactctttattttaa

SEQ ID NO: 854267 - DNA, 15 bp, Homo sapiens
actctttattttaac

SEQ ID NO: 854268 - DNA, 15 bp, Homo sapiens
ctctttattttaaca

SEQ ID NO: 854269 - DNA, 15 bp, Homo sapiens
tctttattttaacat

SEQ ID NO: 854270 - DNA, 15 bp, Homo sapiens
ctttattttaacata

SEQ ID NO: 854271 - DNA, 15 bp, Homo sapiens
tttattttaacataa

SEQ ID NO: 854272 - DNA, 15 bp, Homo sapiens
ttattttaacataaa

SEQ ID NO: 854273 - DNA, 15 bp, Homo sapiens
tattttaacataaat

SEQ ID NO: 854274 - DNA, 15 bp, Homo sapiens
attttaacataaatt

SEQ ID NO: 854275 - DNA, 15 bp, Homo sapiens
ttttaacataaattg

SEQ ID NO: 854276 - DNA, 15 bp, Homo sapiens
tttaacataaattgt

SEQ ID NO: 854277 - DNA, 15 bp, Homo sapiens
ttaacataaattgtg

SEQ ID NO: 854278 - DNA, 15 bp, Homo sapiens
taacataaattgtgg

SEQ ID NO: 854279 - DNA, 15 bp, Homo sapiens
aacataaattgtggc

SEQ ID NO: 854280 - DNA, 15 bp, Homo sapiens
acataaattgtggct

SEQ ID NO: 854281 - DNA, 15 bp, Homo sapiens
cataaattgtggcta

SEQ ID NO: 854282 - DNA, 15 bp, Homo sapiens
ataaattgtggctat

SEQ ID NO: 854283 - DNA, 15 bp, Homo sapiens
taaattgtggctatc

SEQ ID NO: 854284 - DNA, 15 bp, Homo sapiens
aaattgtggctatct

SEQ ID NO: 854285 - DNA, 15 bp, Homo sapiens
aattgtggctatcta

SEQ ID NO: 854286 - DNA, 15 bp, Homo sapiens
attgtggctatctat

SEQ ID NO: 854287 - DNA, 15 bp, Homo sapiens
ttgtggctatctatc

SEQ ID NO: 854288 - DNA, 15 bp, Homo sapiens
tgtggctatctatct

SEQ ID NO: 854289 - DNA, 15 bp, Homo sapiens
gtggctatctatctc

SEQ ID NO: 854290 - DNA, 15 bp, Homo sapiens
tggctatctatctct

SEQ ID NO: 854291 - DNA, 15 bp, Homo sapiens
ggctatctatctcta

SEQ ID NO: 854292 - DNA, 15 bp, Homo sapiens
gctatctatctctat

SEQ ID NO: 854293 - DNA, 15 bp, Homo sapiens
ctatctatctctatt

SEQ ID NO: 854294 - DNA, 15 bp, Homo sapiens
tatctatctctattc

SEQ ID NO: 854295 - DNA, 15 bp, Homo sapiens
atctatctctattca

SEQ ID NO: 854296 - DNA, 15 bp, Homo sapiens
tctatctctattcat

SEQ ID NO: 854297 - DNA, 15 bp, Homo sapiens
ctatctctattcatt

SEQ ID NO: 854298 - DNA, 15 bp, Homo sapiens
tatctctattcattt

SEQ ID NO: 854299 - DNA, 15 bp, Homo sapiens
atctctattcatttc

SEQ ID NO: 854300 - DNA, 15 bp, Homo sapiens
tctctattcatttca

SEQ ID NO: 854301 - DNA, 15 bp, Homo sapiens
ctctattcatttcaa

SEQ ID NO: 854302 - DNA, 15 bp, Homo sapiens
tctattcatttcaat

SEQ ID NO: 854303 - DNA, 15 bp, Homo sapiens
ctattcatttcaatt

SEQ ID NO: 854304 - DNA, 15 bp, Homo sapiens
tattcatttcaatta

SEQ ID NO: 854305 - DNA, 15 bp, Homo sapiens
attcatttcaattat

SEQ ID NO: 854306 - DNA, 15 bp, Homo sapiens
ttcatttcaattata

SEQ ID NO: 854307 - DNA, 15 bp, Homo sapiens
tcatttcaattatat

SEQ ID NO: 854308 - DNA, 15 bp, Homo sapiens
catttcaattatatt

SEQ ID NO: 854309 - DNA, 15 bp, Homo sapiens
atttcaattatattt

SEQ ID NO: 854310 - DNA, 15 bp, Homo sapiens
tttcaattatatttc

SEQ ID NO: 854311 - DNA, 15 bp, Homo sapiens
ttcaattatatttct

SEQ ID NO: 854312 - DNA, 15 bp, Homo sapiens
tcaattatatttctc

SEQ ID NO: 854313 - DNA, 15 bp, Homo sapiens
caattatatttctca

SEQ ID NO: 854314 - DNA, 15 bp, Homo sapiens
aattatatttctcat

SEQ ID NO: 854315 - DNA, 15 bp, Homo sapiens
attatatttctcata

SEQ ID NO: 854316 - DNA, 15 bp, Homo sapiens
ttatatttctcatac

SEQ ID NO: 854317 - DNA, 15 bp, Homo sapiens
tatatttctcatacc

SEQ ID NO: 854318 - DNA, 15 bp, Homo sapiens
atatttctcatacca

SEQ ID NO: 854319 - DNA, 15 bp, Homo sapiens
tatttctcataccat

SEQ ID NO: 854320 - DNA, 15 bp, Homo sapiens
atttctcataccatt

SEQ ID NO: 854321 - DNA, 15 bp, Homo sapiens
tttctcataccattc

SEQ ID NO: 854322 - DNA, 15 bp, Homo sapiens
ttctcataccattct

SEQ ID NO: 854323 - DNA, 15 bp, Homo sapiens
tctcataccattcta

SEQ ID NO: 854324 - DNA, 15 bp, Homo sapiens
ctcataccattctat

SEQ ID NO: 854325 - DNA, 15 bp, Homo sapiens
tcataccattctata

SEQ ID NO: 854326 - DNA, 15 bp, Homo sapiens
cataccattctatag

SEQ ID NO: 854327 - DNA, 15 bp, Homo sapiens
ataccattctataga

SEQ ID NO: 854328 - DNA, 15 bp, Homo sapiens
taccattctatagat

SEQ ID NO: 854329 - DNA, 15 bp, Homo sapiens
accattctatagatg

SEQ ID NO: 854330 - DNA, 15 bp, Homo sapiens
ccattctatagatgg

SEQ ID NO: 854331 - DNA, 15 bp, Homo sapiens
cattctatagatggg

SEQ ID NO: 854332 - DNA, 15 bp, Homo sapiens
attctatagatgggg

SEQ ID NO: 854333 - DNA, 15 bp, Homo sapiens
ttctatagatggggt

SEQ ID NO: 854334 - DNA, 15 bp, Homo sapiens
tctatagatggggtg

SEQ ID NO: 854335 - DNA, 15 bp, Homo sapiens
ctatagatggggtga

SEQ ID NO: 854336 - DNA, 15 bp, Homo sapiens
tatagatggggtgaa

SEQ ID NO: 854337 - DNA, 15 bp, Homo sapiens
atagatggggtgaaa

SEQ ID NO: 854338 - DNA, 15 bp, Homo sapiens
tagatggggtgaaaa

SEQ ID NO: 854339 - DNA, 15 bp, Homo sapiens
agatggggtgaaaag

SEQ ID NO: 854340 - DNA, 15 bp, Homo sapiens
gatggggtgaaaaga

SEQ ID NO: 854341 - DNA, 15 bp, Homo sapiens
atggggtgaaaagaa

SEQ ID NO: 854342 - DNA, 15 bp, Homo sapiens
tggggtgaaaagaaa

SEQ ID NO: 854343 - DNA, 15 bp, Homo sapiens
ggggtgaaaagaaaa

SEQ ID NO: 854344 - DNA, 15 bp, Homo sapiens
gggtgaaaagaaaag

SEQ ID NO: 854345 - DNA, 15 bp, Homo sapiens
ggtgaaaagaaaagt

SEQ ID NO: 854346 - DNA, 15 bp, Homo sapiens
gtgaaaagaaaagtg

SEQ ID NO: 854347 - DNA, 15 bp, Homo sapiens
tgaaaagaaaagtgt

SEQ ID NO: 854348 - DNA, 15 bp, Homo sapiens
gaaaagaaaagtgtt

SEQ ID NO: 854349 - DNA, 15 bp, Homo sapiens
aaaagaaaagtgtta

SEQ ID NO: 854350 - DNA, 15 bp, Homo sapiens
aaagaaaagtgttaa

SEQ ID NO: 854351 - DNA, 15 bp, Homo sapiens
aagaaaagtgttaat

SEQ ID NO: 854352 - DNA, 15 bp, Homo sapiens
agaaaagtgttaatt

SEQ ID NO: 854353 - DNA, 15 bp, Homo sapiens
gaaaagtgttaattt

SEQ ID NO: 854354 - DNA, 15 bp, Homo sapiens
aaaagtgttaatttt

SEQ ID NO: 854355 - DNA, 15 bp, Homo sapiens
aaagtgttaattttt

SEQ ID NO: 854356 - DNA, 15 bp, Homo sapiens
aagtgttaatttttt

SEQ ID NO: 854357 - DNA, 15 bp, Homo sapiens
agtgttaatttttta

SEQ ID NO: 854358 - DNA, 15 bp, Homo sapiens
gtgttaattttttaa

SEQ ID NO: 854359 - DNA, 15 bp, Homo sapiens
tgttaattttttaaa

SEQ ID NO: 854360 - DNA, 15 bp, Homo sapiens
gttaattttttaaaa

SEQ ID NO: 854361 - DNA, 15 bp, Homo sapiens
ttaattttttaaaac

SEQ ID NO: 854362 - DNA, 15 bp, Homo sapiens
taattttttaaaact

SEQ ID NO: 854363 - DNA, 15 bp, Homo sapiens
aattttttaaaactc

SEQ ID NO: 854364 - DNA, 15 bp, Homo sapiens
attttttaaaactcc

SEQ ID NO: 854365 - DNA, 15 bp, Homo sapiens
ttttttaaaactcca

SEQ ID NO: 854366 - DNA, 15 bp, Homo sapiens
tttttaaaactccat

SEQ ID NO: 854367 - DNA, 15 bp, Homo sapiens
ttttaaaactccata

SEQ ID NO: 854368 - DNA, 15 bp, Homo sapiens
tttaaaactccatac

SEQ ID NO: 854369 - DNA, 15 bp, Homo sapiens
ttaaaactccatacc

SEQ ID NO: 854370 - DNA, 15 bp, Homo sapiens
taaaactccatacct

SEQ ID NO: 854371 - DNA, 15 bp, Homo sapiens
aaaactccatacctc

SEQ ID NO: 854372 - DNA, 15 bp, Homo sapiens
aaactccatacctca

SEQ ID NO: 854373 - DNA, 15 bp, Homo sapiens
aactccatacctcaa

SEQ ID NO: 854374 - DNA, 15 bp, Homo sapiens
actccatacctcaaa

SEQ ID NO: 854375 - DNA, 15 bp, Homo sapiens
ctccatacctcaaat

SEQ ID NO: 854376 - DNA, 15 bp, Homo sapiens
tccatacctcaaata

SEQ ID NO: 854377 - DNA, 15 bp, Homo sapiens
ccatacctcaaatac

SEQ ID NO: 854378 - DNA, 15 bp, Homo sapiens
catacctcaaatact

SEQ ID NO: 854379 - DNA, 15 bp, Homo sapiens
atacctcaaatacta

SEQ ID NO: 854380 - DNA, 15 bp, Homo sapiens
tacctcaaatactat

SEQ ID NO: 854381 - DNA, 15 bp, Homo sapiens
acctcaaatactata

SEQ ID NO: 854382 - DNA, 15 bp, Homo sapiens
cctcaaatactatat

SEQ ID NO: 854383 - DNA, 15 bp, Homo sapiens
ctcaaatactatatg

SEQ ID NO: 854384 - DNA, 15 bp, Homo sapiens
tcaaatactatatga

SEQ ID NO: 854385 - DNA, 15 bp, Homo sapiens
caaatactatatgaa

SEQ ID NO: 854386 - DNA, 15 bp, Homo sapiens
aaatactatatgaat

SEQ ID NO: 854387 - DNA, 15 bp, Homo sapiens
aatactatatgaatt

SEQ ID NO: 854388 - DNA, 15 bp, Homo sapiens
atactatatgaattt

SEQ ID NO: 854389 - DNA, 15 bp, Homo sapiens
tactatatgaattta

SEQ ID NO: 854390 - DNA, 15 bp, Homo sapiens
actatatgaatttat

SEQ ID NO: 854391 - DNA, 15 bp, Homo sapiens
ctatatgaatttata

SEQ ID NO: 854392 - DNA, 15 bp, Homo sapiens
tatatgaatttatag

SEQ ID NO: 854393 - DNA, 15 bp, Homo sapiens
atatgaatttatagt

SEQ ID NO: 854394 - DNA, 15 bp, Homo sapiens
tatgaatttatagtt

SEQ ID NO: 854395 - DNA, 15 bp, Homo sapiens
atgaatttatagttg

SEQ ID NO: 854396 - DNA, 15 bp, Homo sapiens
tgaatttatagttgt

SEQ ID NO: 854397 - DNA, 15 bp, Homo sapiens
gaatttatagttgtt

SEQ ID NO: 854398 - DNA, 15 bp, Homo sapiens
aatttatagttgtta

SEQ ID NO: 854399 - DNA, 15 bp, Homo sapiens
atttatagttgttat

SEQ ID NO: 854400 - DNA, 15 bp, Homo sapiens
tttatagttgttatt

SEQ ID NO: 854401 - DNA, 15 bp, Homo sapiens
ttatagttgttattg

SEQ ID NO: 854402 - DNA, 15 bp, Homo sapiens
tatagttgttattgc

SEQ ID NO: 854403 - DNA, 15 bp, Homo sapiens
atagttgttattgct

SEQ ID NO: 854404 - DNA, 15 bp, Homo sapiens
tagttgttattgcta

SEQ ID NO: 854405 - DNA, 15 bp, Homo sapiens
agttgttattgctaa

SEQ ID NO: 854406 - DNA, 15 bp, Homo sapiens
gttgttattgctaaa

SEQ ID NO: 854407 - DNA, 15 bp, Homo sapiens
ttgttattgctaaag

SEQ ID NO: 854408 - DNA, 15 bp, Homo sapiens
tgttattgctaaagc

SEQ ID NO: 854409 - DNA, 15 bp, Homo sapiens
gttattgctaaagca

SEQ ID NO: 854410 - DNA, 15 bp, Homo sapiens
ttattgctaaagcaa

SEQ ID NO: 854411 - DNA, 15 bp, Homo sapiens
tattgctaaagcaat

SEQ ID NO: 854412 - DNA, 15 bp, Homo sapiens
attgctaaagcaatt

SEQ ID NO: 854413 - DNA, 15 bp, Homo sapiens
ttgctaaagcaatta

SEQ ID NO: 854414 - DNA, 15 bp, Homo sapiens
tgctaaagcaattat

SEQ ID NO: 854415 - DNA, 15 bp, Homo sapiens
gctaaagcaattatc

SEQ ID NO: 854416 - DNA, 15 bp, Homo sapiens
ctaaagcaattatct

SEQ ID NO: 854417 - DNA, 15 bp, Homo sapiens
taaagcaattatctt

SEQ ID NO: 854418 - DNA, 15 bp, Homo sapiens
aaagcaattatctta

SEQ ID NO: 854419 - DNA, 15 bp, Homo sapiens
aagcaattatcttac

SEQ ID NO: 854420 - DNA, 15 bp, Homo sapiens
agcaattatcttaca

SEQ ID NO: 854421 - DNA, 15 bp, Homo sapiens
gcaattatcttacat

SEQ ID NO: 854422 - DNA, 15 bp, Homo sapiens
caattatcttacatc

SEQ ID NO: 854423 - DNA, 15 bp, Homo sapiens
aattatcttacatct

SEQ ID NO: 854424 - DNA, 15 bp, Homo sapiens
attatcttacatctt

SEQ ID NO: 854425 - DNA, 15 bp, Homo sapiens
ttatcttacatcttt

SEQ ID NO: 854426 - DNA, 15 bp, Homo sapiens
tatcttacatctttt

SEQ ID NO: 854427 - DNA, 15 bp, Homo sapiens
atcttacatcttttc

SEQ ID NO: 854428 - DNA, 15 bp, Homo sapiens
tcttacatcttttcc

SEQ ID NO: 854429 - DNA, 15 bp, Homo sapiens
cttacatcttttcct

SEQ ID NO: 854430 - DNA, 15 bp, Homo sapiens
ttacatcttttcctc

SEQ ID NO: 854431 - DNA, 15 bp, Homo sapiens
tacatcttttcctcc

SEQ ID NO: 854432 - DNA, 15 bp, Homo sapiens
acatcttttcctcca

SEQ ID NO: 854433 - DNA, 15 bp, Homo sapiens
catcttttcctccaa

SEQ ID NO: 854434 - DNA, 15 bp, Homo sapiens
atcttttcctccaaa

SEQ ID NO: 854435 - DNA, 15 bp, Homo sapiens
tcttttcctccaaaa

SEQ ID NO: 854436 - DNA, 15 bp, Homo sapiens
cttttcctccaaaac

SEQ ID NO: 854437 - DNA, 15 bp, Homo sapiens
ttttcctccaaaaca

SEQ ID NO: 854438 - DNA, 15 bp, Homo sapiens
tttcctccaaaacaa

SEQ ID NO: 854439 - DNA, 15 bp, Homo sapiens
ttcctccaaaacaaa

SEQ ID NO: 854440 - DNA, 15 bp, Homo sapiens
tcctccaaaacaaag

SEQ ID NO: 854441 - DNA, 15 bp, Homo sapiens
cctccaaaacaaagt

SEQ ID NO: 854442 - DNA, 15 bp, Homo sapiens
ctccaaaacaaagtt

SEQ ID NO: 854443 - DNA, 15 bp, Homo sapiens
tccaaaacaaagtta

SEQ ID NO: 854444 - DNA, 15 bp, Homo sapiens
ccaaaacaaagttat

SEQ ID NO: 854445 - DNA, 15 bp, Homo sapiens
caaaacaaagttatg

SEQ ID NO: 854446 - DNA, 15 bp, Homo sapiens
aaaacaaagttatgt

SEQ ID NO: 854447 - DNA, 15 bp, Homo sapiens
aaacaaagttatgtg

SEQ ID NO: 854448 - DNA, 15 bp, Homo sapiens
aacaaagttatgtgc

SEQ ID NO: 854449 - DNA, 15 bp, Homo sapiens
acaaagttatgtgct

SEQ ID NO: 854450 - DNA, 15 bp, Homo sapiens
caaagttatgtgctg

SEQ ID NO: 854451 - DNA, 15 bp, Homo sapiens
aaagttatgtgctgg

SEQ ID NO: 854452 - DNA, 15 bp, Homo sapiens
aagttatgtgctggt

SEQ ID NO: 854453 - DNA, 15 bp, Homo sapiens
agttatgtgctggtt

SEQ ID NO: 854454 - DNA, 15 bp, Homo sapiens
gttatgtgctggttt

SEQ ID NO: 854455 - DNA, 15 bp, Homo sapiens
ttatgtgctggttta

SEQ ID NO: 854456 - DNA, 15 bp, Homo sapiens
tatgtgctggtttat

SEQ ID NO: 854457 - DNA, 15 bp, Homo sapiens
atgtgctggtttatt

SEQ ID NO: 854458 - DNA, 15 bp, Homo sapiens
tgtgctggtttattt

SEQ ID NO: 854459 - DNA, 15 bp, Homo sapiens
gtgctggtttatttt

SEQ ID NO: 854460 - DNA, 15 bp, Homo sapiens
tgctggtttattttc

SEQ ID NO: 854461 - DNA, 15 bp, Homo sapiens
gctggtttattttct

SEQ ID NO: 854462 - DNA, 15 bp, Homo sapiens
ctggtttattttctt

SEQ ID NO: 854463 - DNA, 15 bp, Homo sapiens
tggtttattttcttt

SEQ ID NO: 854464 - DNA, 15 bp, Homo sapiens
ggtttattttctttg

SEQ ID NO: 854465 - DNA, 15 bp, Homo sapiens
gtttattttctttgt

SEQ ID NO: 854466 - DNA, 15 bp, Homo sapiens
tttattttctttgta

SEQ ID NO: 854467 - DNA, 15 bp, Homo sapiens
ttattttctttgtac

SEQ ID NO: 854468 - DNA, 15 bp, Homo sapiens
tattttctttgtact

SEQ ID NO: 854469 - DNA, 15 bp, Homo sapiens
attttctttgtactc

SEQ ID NO: 854470 - DNA, 15 bp, Homo sapiens
ttttctttgtactca

SEQ ID NO: 854471 - DNA, 15 bp, Homo sapiens
tttctttgtactcat

SEQ ID NO: 854472 - DNA, 15 bp, Homo sapiens
ttctttgtactcata

SEQ ID NO: 854473 - DNA, 15 bp, Homo sapiens
tctttgtactcataa

SEQ ID NO: 854474 - DNA, 15 bp, Homo sapiens
ctttgtactcataag

SEQ ID NO: 854475 - DNA, 15 bp, Homo sapiens
tttgtactcataaga

SEQ ID NO: 854476 - DNA, 15 bp, Homo sapiens
ttgtactcataagat

SEQ ID NO: 854477 - DNA, 15 bp, Homo sapiens
tgtactcataagatg

SEQ ID NO: 854478 - DNA, 15 bp, Homo sapiens
gtactcataagatgc

SEQ ID NO: 854479 - DNA, 15 bp, Homo sapiens
tactcataagatgcc

SEQ ID NO: 854480 - DNA, 15 bp, Homo sapiens
actcataagatgcct

SEQ ID NO: 854481 - DNA, 15 bp, Homo sapiens
ctcataagatgcctt

SEQ ID NO: 854482 - DNA, 15 bp, Homo sapiens
tcataagatgccttc

SEQ ID NO: 854483 - DNA, 15 bp, Homo sapiens
cataagatgccttcc

SEQ ID NO: 854484 - DNA, 15 bp, Homo sapiens
ataagatgccttcca

SEQ ID NO: 854485 - DNA, 15 bp, Homo sapiens
taagatgccttccat

SEQ ID NO: 854486 - DNA, 15 bp, Homo sapiens
aagatgccttccatt

SEQ ID NO: 854487 - DNA, 15 bp, Homo sapiens
agatgccttccattt

SEQ ID NO: 854488 - DNA, 15 bp, Homo sapiens
gatgccttccatttt

SEQ ID NO: 854489 - DNA, 15 bp, Homo sapiens
atgccttccattttt

SEQ ID NO: 854490 - DNA, 15 bp, Homo sapiens
tgccttccattttta

SEQ ID NO: 854491 - DNA, 15 bp, Homo sapiens
gccttccatttttag

SEQ ID NO: 854492 - DNA, 15 bp, Homo sapiens
ccttccatttttagt

SEQ ID NO: 854493 - DNA, 15 bp, Homo sapiens
cttccatttttagta

SEQ ID NO: 854494 - DNA, 15 bp, Homo sapiens
ttccatttttagtaa

SEQ ID NO: 854495 - DNA, 15 bp, Homo sapiens
tccatttttagtaac

SEQ ID NO: 854496 - DNA, 15 bp, Homo sapiens
ccatttttagtaaca

SEQ ID NO: 854497 - DNA, 15 bp, Homo sapiens
catttttagtaacat

SEQ ID NO: 854498 - DNA, 15 bp, Homo sapiens
atttttagtaacata

SEQ ID NO: 854499 - DNA, 15 bp, Homo sapiens
tttttagtaacataa

SEQ ID NO: 854500 - DNA, 15 bp, Homo sapiens
ttttagtaacataag

SEQ ID NO: 854501 - DNA, 15 bp, Homo sapiens
tttagtaacataagt

SEQ ID NO: 854502 - DNA, 15 bp, Homo sapiens
ttagtaacataagtc

SEQ ID NO: 854503 - DNA, 15 bp, Homo sapiens
tagtaacataagtct

SEQ ID NO: 854504 - DNA, 15 bp, Homo sapiens
agtaacataagtctt

SEQ ID NO: 854505 - DNA, 15 bp, Homo sapiens
gtaacataagtcttg

SEQ ID NO: 854506 - DNA, 15 bp, Homo sapiens
taacataagtcttgt

SEQ ID NO: 854507 - DNA, 15 bp, Homo sapiens
aacataagtcttgtc

SEQ ID NO: 854508 - DNA, 15 bp, Homo sapiens
acataagtcttgtct

SEQ ID NO: 854509 - DNA, 15 bp, Homo sapiens
cataagtcttgtctt

SEQ ID NO: 854510 - DNA, 15 bp, Homo sapiens
ataagtcttgtcttt

SEQ ID NO: 854511 - DNA, 15 bp, Homo sapiens
taagtcttgtctttc

SEQ ID NO: 854512 - DNA, 15 bp, Homo sapiens
aagtcttgtctttct

SEQ ID NO: 854513 - DNA, 15 bp, Homo sapiens
agtcttgtctttctc

SEQ ID NO: 854514 - DNA, 15 bp, Homo sapiens
gtcttgtctttctcc

SEQ ID NO: 854515 - DNA, 15 bp, Homo sapiens
tcttgtctttctcct

SEQ ID NO: 854516 - DNA, 15 bp, Homo sapiens
cttgtctttctccta

SEQ ID NO: 854517 - DNA, 15 bp, Homo sapiens
ttgtctttctcctat

SEQ ID NO: 854518 - DNA, 15 bp, Homo sapiens
tgtctttctcctatt

SEQ ID NO: 854519 - DNA, 15 bp, Homo sapiens
gtctttctcctattc

SEQ ID NO: 854520 - DNA, 15 bp, Homo sapiens
tctttctcctattct

SEQ ID NO: 854521 - DNA, 15 bp, Homo sapiens
ctttctcctattctt

SEQ ID NO: 854522 - DNA, 15 bp, Homo sapiens
tttctcctattctta

SEQ ID NO: 854523 - DNA, 15 bp, Homo sapiens
ttctcctattcttag

SEQ ID NO: 854524 - DNA, 15 bp, Homo sapiens
tctcctattcttagc

SEQ ID NO: 854525 - DNA, 15 bp, Homo sapiens
ctcctattcttagct

SEQ ID NO: 854526 - DNA, 15 bp, Homo sapiens
tcctattcttagcta

SEQ ID NO: 854527 - DNA, 15 bp, Homo sapiens
cctattcttagctac

SEQ ID NO: 854528 - DNA, 15 bp, Homo sapiens
ctattcttagctact

SEQ ID NO: 854529 - DNA, 15 bp, Homo sapiens
tattcttagctactt

SEQ ID NO: 854530 - DNA, 15 bp, Homo sapiens
attcttagctactta

SEQ ID NO: 854531 - DNA, 15 bp, Homo sapiens
ttcttagctacttaa

SEQ ID NO: 854532 - DNA, 15 bp, Homo sapiens
tcttagctacttaag

SEQ ID NO: 854533 - DNA, 15 bp, Homo sapiens
cttagctacttaagc

SEQ ID NO: 854534 - DNA, 15 bp, Homo sapiens
ttagctacttaagca

SEQ ID NO: 854535 - DNA, 15 bp, Homo sapiens
tagctacttaagcat

SEQ ID NO: 854536 - DNA, 15 bp, Homo sapiens
agctacttaagcatt

SEQ ID NO: 854537 - DNA, 15 bp, Homo sapiens
gctacttaagcatta

SEQ ID NO: 854538 - DNA, 15 bp, Homo sapiens
ctacttaagcattat

SEQ ID NO: 854539 - DNA, 15 bp, Homo sapiens
tacttaagcattatg

SEQ ID NO: 854540 - DNA, 15 bp, Homo sapiens
acttaagcattatgt

SEQ ID NO: 854541 - DNA, 15 bp, Homo sapiens
cttaagcattatgta

SEQ ID NO: 854542 - DNA, 15 bp, Homo sapiens
ttaagcattatgtag

SEQ ID NO: 854543 - DNA, 15 bp, Homo sapiens
taagcattatgtagc

SEQ ID NO: 854544 - DNA, 15 bp, Homo sapiens
aagcattatgtagct

SEQ ID NO: 854545 - DNA, 15 bp, Homo sapiens
agcattatgtagctt

SEQ ID NO: 854546 - DNA, 15 bp, Homo sapiens
gcattatgtagctta

SEQ ID NO: 854547 - DNA, 15 bp, Homo sapiens
cattatgtagcttaa

SEQ ID NO: 854548 - DNA, 15 bp, Homo sapiens
attatgtagcttaaa

SEQ ID NO: 854549 - DNA, 15 bp, Homo sapiens
ttatgtagcttaaat

SEQ ID NO: 854550 - DNA, 15 bp, Homo sapiens
tatgtagcttaaata

SEQ ID NO: 854551 - DNA, 15 bp, Homo sapiens
atgtagcttaaataa

SEQ ID NO: 854552 - DNA, 15 bp, Homo sapiens
tgtagcttaaataag

SEQ ID NO: 854553 - DNA, 15 bp, Homo sapiens
gtagcttaaataagc

SEQ ID NO: 854554 - DNA, 15 bp, Homo sapiens
tagcttaaataagca

SEQ ID NO: 854555 - DNA, 15 bp, Homo sapiens
agcttaaataagcac

SEQ ID NO: 854556 - DNA, 15 bp, Homo sapiens
gcttaaataagcact

SEQ ID NO: 854557 - DNA, 15 bp, Homo sapiens
cttaaataagcacta

SEQ ID NO: 854558 - DNA, 15 bp, Homo sapiens
ttaaataagcactaa

SEQ ID NO: 854559 - DNA, 15 bp, Homo sapiens
taaataagcactaaa

SEQ ID NO: 854560 - DNA, 15 bp, Homo sapiens
aaataagcactaaag

SEQ ID NO: 854561 - DNA, 15 bp, Homo sapiens
aataagcactaaaga

SEQ ID NO: 854562 - DNA, 15 bp, Homo sapiens
ataagcactaaagat

SEQ ID NO: 854563 - DNA, 15 bp, Homo sapiens
taagcactaaagatt

SEQ ID NO: 854564 - DNA, 15 bp, Homo sapiens
aagcactaaagattc

SEQ ID NO: 854565 - DNA, 15 bp, Homo sapiens
agcactaaagattcc

SEQ ID NO: 854566 - DNA, 15 bp, Homo sapiens
gcactaaagattcct

SEQ ID NO: 854567 - DNA, 15 bp, Homo sapiens
cactaaagattccta

SEQ ID NO: 854568 - DNA, 15 bp, Homo sapiens
actaaagattcctat

SEQ ID NO: 854569 - DNA, 15 bp, Homo sapiens
ctaaagattcctatc

SEQ ID NO: 854570 - DNA, 15 bp, Homo sapiens
taaagattcctatct

SEQ ID NO: 854571 - DNA, 15 bp, Homo sapiens
aaagattcctatctg

SEQ ID NO: 854572 - DNA, 15 bp, Homo sapiens
aagattcctatctgt

SEQ ID NO: 854573 - DNA, 15 bp, Homo sapiens
agattcctatctgta

SEQ ID NO: 854574 - DNA, 15 bp, Homo sapiens
gattcctatctgtat

SEQ ID NO: 854575 - DNA, 15 bp, Homo sapiens
attcctatctgtatg

SEQ ID NO: 854576 - DNA, 15 bp, Homo sapiens
ttcctatctgtatga

SEQ ID NO: 854577 - DNA, 15 bp, Homo sapiens
tcctatctgtatgaa

SEQ ID NO: 854578 - DNA, 15 bp, Homo sapiens
cctatctgtatgaaa

SEQ ID NO: 854579 - DNA, 15 bp, Homo sapiens
ctatctgtatgaaaa

SEQ ID NO: 854580 - DNA, 15 bp, Homo sapiens
tatctgtatgaaaaa

SEQ ID NO: 854581 - DNA, 15 bp, Homo sapiens
atctgtatgaaaaaa

SEQ ID NO: 854582 - DNA, 15 bp, Homo sapiens
tctgtatgaaaaaat

SEQ ID NO: 854583 - DNA, 15 bp, Homo sapiens
ctgtatgaaaaaata

SEQ ID NO: 854584 - DNA, 15 bp, Homo sapiens
tgtatgaaaaaataa

SEQ ID NO: 854585 - DNA, 15 bp, Homo sapiens
gtatgaaaaaataaa

SEQ ID NO: 854586 - DNA, 15 bp, Homo sapiens
tatgaaaaaataaag

SEQ ID NO: 854587 - DNA, 15 bp, Homo sapiens
atgaaaaaataaaga

SEQ ID NO: 854588 - DNA, 15 bp, Homo sapiens
tgaaaaaataaagat

SEQ ID NO: 854589 - DNA, 15 bp, Homo sapiens
gaaaaaataaagatt

SEQ ID NO: 854590 - DNA, 15 bp, Homo sapiens
aaaaaataaagatta

SEQ ID NO: 854591 - DNA, 15 bp, Homo sapiens
aaaaataaagattaa

SEQ ID NO: 854592 - DNA, 15 bp, Homo sapiens
aaaataaagattaaa

SEQ ID NO: 854593 - DNA, 15 bp, Homo sapiens
aaataaagattaaat

SEQ ID NO: 854594 - DNA, 15 bp, Homo sapiens
aataaagattaaata

SEQ ID NO: 854595 - DNA, 15 bp, Homo sapiens
ataaagattaaataa

SEQ ID NO: 854596 - DNA, 15 bp, Homo sapiens
taaagattaaataaa

SEQ ID NO: 854597 - DNA, 15 bp, Homo sapiens
aaagattaaataaat

SEQ ID NO: 854598 - DNA, 15 bp, Homo sapiens
aagattaaataaata

SEQ ID NO: 854599 - DNA, 15 bp, Homo sapiens
agattaaataaataa

SEQ ID NO: 854600 - DNA, 15 bp, Homo sapiens
gattaaataaataag

SEQ ID NO: 854601 - DNA, 15 bp, Homo sapiens
attaaataaataaga

SEQ ID NO: 854602 - DNA, 15 bp, Homo sapiens
ttaaataaataagat

SEQ ID NO: 854603 - DNA, 15 bp, Homo sapiens
taaataaataagatc

SEQ ID NO: 854604 - DNA, 15 bp, Homo sapiens
aaataaataagatct

SEQ ID NO: 854605 - DNA, 15 bp, Homo sapiens
aataaataagatcta

SEQ ID NO: 854606 - DNA, 15 bp, Homo sapiens
ataaataagatctag

SEQ ID NO: 854607 - DNA, 15 bp, Homo sapiens
taaataagatctaga

SEQ ID NO: 854608 - DNA, 15 bp, Homo sapiens
aaataagatctagaa

SEQ ID NO: 854609 - DNA, 15 bp, Homo sapiens
aataagatctagaaa

SEQ ID NO: 854610 - DNA, 15 bp, Homo sapiens
ataagatctagaaag

SEQ ID NO: 854611 - DNA, 15 bp, Homo sapiens
taagatctagaaagg

SEQ ID NO: 854612 - DNA, 15 bp, Homo sapiens
aagatctagaaaggg

SEQ ID NO: 854613 - DNA, 15 bp, Homo sapiens
agatctagaaagggt

SEQ ID NO: 854614 - DNA, 15 bp, Homo sapiens
gatctagaaagggtg

SEQ ID NO: 854615 - DNA, 15 bp, Homo sapiens
atctagaaagggtga

SEQ ID NO: 854616 - DNA, 15 bp, Homo sapiens
tctagaaagggtgac

SEQ ID NO: 854617 - DNA, 15 bp, Homo sapiens
ctagaaagggtgaca

SEQ ID NO: 854618 - DNA, 15 bp, Homo sapiens
tagaaagggtgacaa

SEQ ID NO: 854619 - DNA, 15 bp, Homo sapiens
agaaagggtgacaag

SEQ ID NO: 854620 - DNA, 15 bp, Homo sapiens
gaaagggtgacaagg

SEQ ID NO: 854621 - DNA, 15 bp, Homo sapiens
aaagggtgacaaggt

SEQ ID NO: 854622 - DNA, 15 bp, Homo sapiens
aagggtgacaaggtg

SEQ ID NO: 854623 - DNA, 15 bp, Homo sapiens
agggtgacaaggtga

SEQ ID NO: 854624 - DNA, 15 bp, Homo sapiens
gggtgacaaggtgat

SEQ ID NO: 854625 - DNA, 15 bp, Homo sapiens
ggtgacaaggtgatg

SEQ ID NO: 854626 - DNA, 15 bp, Homo sapiens
gtgacaaggtgatgc

SEQ ID NO: 854627 - DNA, 15 bp, Homo sapiens
tgacaaggtgatgct

SEQ ID NO: 854628 - DNA, 15 bp, Homo sapiens
gacaaggtgatgctt

SEQ ID NO: 854629 - DNA, 15 bp, Homo sapiens
acaaggtgatgcttc

SEQ ID NO: 854630 - DNA, 15 bp, Homo sapiens
caaggtgatgcttca

SEQ ID NO: 854631 - DNA, 15 bp, Homo sapiens
aaggtgatgcttcaa

SEQ ID NO: 854632 - DNA, 15 bp, Homo sapiens
aggtgatgcttcaaa

SEQ ID NO: 854633 - DNA, 15 bp, Homo sapiens
ggtgatgcttcaaaa

SEQ ID NO: 854634 - DNA, 15 bp, Homo sapiens
gtgatgcttcaaaat

SEQ ID NO: 854635 - DNA, 15 bp, Homo sapiens
tgatgcttcaaaatg

SEQ ID NO: 854636 - DNA, 15 bp, Homo sapiens
gatgcttcaaaatga

SEQ ID NO: 854637 - DNA, 15 bp, Homo sapiens
atgcttcaaaatgaa

SEQ ID NO: 854638 - DNA, 15 bp, Homo sapiens
tgcttcaaaatgaac

SEQ ID NO: 854639 - DNA, 15 bp, Homo sapiens
gcttcaaaatgaacc

SEQ ID NO: 854640 - DNA, 15 bp, Homo sapiens
cttcaaaatgaacca

SEQ ID NO: 854641 - DNA, 15 bp, Homo sapiens
ttcaaaatgaaccat

SEQ ID NO: 854642 - DNA, 15 bp, Homo sapiens
tcaaaatgaaccata

SEQ ID NO: 854643 - DNA, 15 bp, Homo sapiens
caaaatgaaccatac

SEQ ID NO: 854644 - DNA, 15 bp, Homo sapiens
aaaatgaaccatacc

SEQ ID NO: 854645 - DNA, 15 bp, Homo sapiens
aaatgaaccatacca

SEQ ID NO: 854646 - DNA, 15 bp, Homo sapiens
aatgaaccataccaa

SEQ ID NO: 854647 - DNA, 15 bp, Homo sapiens
atgaaccataccaag

SEQ ID NO: 854648 - DNA, 15 bp, Homo sapiens
tgaaccataccaagc

SEQ ID NO: 854649 - DNA, 15 bp, Homo sapiens
gaaccataccaagcc

SEQ ID NO: 854650 - DNA, 15 bp, Homo sapiens
aaccataccaagcca

SEQ ID NO: 854651 - DNA, 15 bp, Homo sapiens
accataccaagccat

SEQ ID NO: 854652 - DNA, 15 bp, Homo sapiens
ccataccaagccatc

SEQ ID NO: 854653 - DNA, 15 bp, Homo sapiens
cataccaagccatct

SEQ ID NO: 854654 - DNA, 15 bp, Homo sapiens
ataccaagccatcta

SEQ ID NO: 854655 - DNA, 15 bp, Homo sapiens
taccaagccatctag

SEQ ID NO: 854656 - DNA, 15 bp, Homo sapiens
accaagccatctagc

SEQ ID NO: 854657 - DNA, 15 bp, Homo sapiens
ccaagccatctagcg

SEQ ID NO: 854658 - DNA, 15 bp, Homo sapiens
caagccatctagcga

SEQ ID NO: 854659 - DNA, 15 bp, Homo sapiens
aagccatctagcgat

SEQ ID NO: 854660 - DNA, 15 bp, Homo sapiens
agccatctagcgatt

SEQ ID NO: 854661 - DNA, 15 bp, Homo sapiens
gccatctagcgattg

SEQ ID NO: 854662 - DNA, 15 bp, Homo sapiens
ccatctagcgattga

SEQ ID NO: 854663 - DNA, 15 bp, Homo sapiens
catctagcgattgat

SEQ ID NO: 854664 - DNA, 15 bp, Homo sapiens
atctagcgattgata

SEQ ID NO: 854665 - DNA, 15 bp, Homo sapiens
tctagcgattgataa

SEQ ID NO: 854666 - DNA, 15 bp, Homo sapiens
ctagcgattgataaa

SEQ ID NO: 854667 - DNA, 15 bp, Homo sapiens
tagcgattgataaat

SEQ ID NO: 854668 - DNA, 15 bp, Homo sapiens
agcgattgataaatt

SEQ ID NO: 854669 - DNA, 15 bp, Homo sapiens
gcgattgataaatta

SEQ ID NO: 854670 - DNA, 15 bp, Homo sapiens
cgattgataaattac

SEQ ID NO: 854671 - DNA, 15 bp, Homo sapiens
gattgataaattact

SEQ ID NO: 854672 - DNA, 15 bp, Homo sapiens
attgataaattactc

SEQ ID NO: 854673 - DNA, 15 bp, Homo sapiens
ttgataaattactca

SEQ ID NO: 854674 - DNA, 15 bp, Homo sapiens
tgataaattactcac

SEQ ID NO: 854675 - DNA, 15 bp, Homo sapiens
gataaattactcaca

SEQ ID NO: 854676 - DNA, 15 bp, Homo sapiens
ataaattactcacac

SEQ ID NO: 854677 - DNA, 15 bp, Homo sapiens
taaattactcacact

SEQ ID NO: 854678 - DNA, 15 bp, Homo sapiens
aaattactcacactc

SEQ ID NO: 854679 - DNA, 15 bp, Homo sapiens
aattactcacactca

SEQ ID NO: 854680 - DNA, 15 bp, Homo sapiens
attactcacactcat

SEQ ID NO: 854681 - DNA, 15 bp, Homo sapiens
ttactcacactcata

SEQ ID NO: 854682 - DNA, 15 bp, Homo sapiens
tactcacactcataa

SEQ ID NO: 854683 - DNA, 15 bp, Homo sapiens
actcacactcataat

SEQ ID NO: 854684 - DNA, 15 bp, Homo sapiens
ctcacactcataatc

SEQ ID NO: 854685 - DNA, 15 bp, Homo sapiens
tcacactcataatca

SEQ ID NO: 854686 - DNA, 15 bp, Homo sapiens
cacactcataatcac

SEQ ID NO: 854687 - DNA, 15 bp, Homo sapiens
acactcataatcaca

SEQ ID NO: 854688 - DNA, 15 bp, Homo sapiens
cactcataatcacat

SEQ ID NO: 854689 - DNA, 15 bp, Homo sapiens
actcataatcacatt

SEQ ID NO: 854690 - DNA, 15 bp, Homo sapiens
ctcataatcacattg

SEQ ID NO: 854691 - DNA, 15 bp, Homo sapiens
tcataatcacattgt

SEQ ID NO: 854692 - DNA, 15 bp, Homo sapiens
cataatcacattgtt

SEQ ID NO: 854693 - DNA, 15 bp, Homo sapiens
ataatcacattgttg

SEQ ID NO: 854694 - DNA, 15 bp, Homo sapiens
taatcacattgttgg

SEQ ID NO: 854695 - DNA, 15 bp, Homo sapiens
aatcacattgttgga

SEQ ID NO: 854696 - DNA, 15 bp, Homo sapiens
atcacattgttggaa

SEQ ID NO: 854697 - DNA, 15 bp, Homo sapiens
tcacattgttggaaa

SEQ ID NO: 854698 - DNA, 15 bp, Homo sapiens
cacattgttggaaag

SEQ ID NO: 854699 - DNA, 15 bp, Homo sapiens
acattgttggaaaga

SEQ ID NO: 854700 - DNA, 15 bp, Homo sapiens
cattgttggaaagaa

SEQ ID NO: 854701 - DNA, 15 bp, Homo sapiens
attgttggaaagaag

SEQ ID NO: 854702 - DNA, 15 bp, Homo sapiens
ttgttggaaagaagc

SEQ ID NO: 854703 - DNA, 15 bp, Homo sapiens
tgttggaaagaagcc

SEQ ID NO: 854704 - DNA, 15 bp, Homo sapiens
gttggaaagaagcca

SEQ ID NO: 854705 - DNA, 15 bp, Homo sapiens
ttggaaagaagccat

SEQ ID NO: 854706 - DNA, 15 bp, Homo sapiens
tggaaagaagccatt

SEQ ID NO: 854707 - DNA, 15 bp, Homo sapiens
ggaaagaagccattg

SEQ ID NO: 854708 - DNA, 15 bp, Homo sapiens
gaaagaagccattga

SEQ ID NO: 854709 - DNA, 15 bp, Homo sapiens
aaagaagccattgac

SEQ ID NO: 854710 - DNA, 15 bp, Homo sapiens
aagaagccattgaca

SEQ ID NO: 854711 - DNA, 15 bp, Homo sapiens
agaagccattgacaa

SEQ ID NO: 854712 - DNA, 15 bp, Homo sapiens
gaagccattgacaat

SEQ ID NO: 854713 - DNA, 15 bp, Homo sapiens
aagccattgacaatt

SEQ ID NO: 854714 - DNA, 15 bp, Homo sapiens
agccattgacaattc

SEQ ID NO: 854715 - DNA, 15 bp, Homo sapiens
gccattgacaattca

SEQ ID NO: 854716 - DNA, 15 bp, Homo sapiens
ccattgacaattcag

SEQ ID NO: 854717 - DNA, 15 bp, Homo sapiens
cattgacaattcagt

SEQ ID NO: 854718 - DNA, 15 bp, Homo sapiens
attgacaattcagtt

SEQ ID NO: 854719 - DNA, 15 bp, Homo sapiens
ttgacaattcagttt

SEQ ID NO: 854720 - DNA, 15 bp, Homo sapiens
tgacaattcagtttg

SEQ ID NO: 854721 - DNA, 15 bp, Homo sapiens
gacaattcagtttgt

SEQ ID NO: 854722 - DNA, 15 bp, Homo sapiens
acaattcagtttgtt

SEQ ID NO: 854723 - DNA, 15 bp, Homo sapiens
caattcagtttgttt

SEQ ID NO: 854724 - DNA, 15 bp, Homo sapiens
aattcagtttgtttc

SEQ ID NO: 854725 - DNA, 15 bp, Homo sapiens
attcagtttgtttca

SEQ ID NO: 854726 - DNA, 15 bp, Homo sapiens
ttcagtttgtttcac

SEQ ID NO: 854727 - DNA, 15 bp, Homo sapiens
tcagtttgtttcaca

SEQ ID NO: 854728 - DNA, 15 bp, Homo sapiens
cagtttgtttcacaa

SEQ ID NO: 854729 - DNA, 15 bp, Homo sapiens
agtttgtttcacaac

SEQ ID NO: 854730 - DNA, 15 bp, Homo sapiens
gtttgtttcacaact

SEQ ID NO: 854731 - DNA, 15 bp, Homo sapiens
tttgtttcacaactg

SEQ ID NO: 854732 - DNA, 15 bp, Homo sapiens
ttgtttcacaactgt

SEQ ID NO: 854733 - DNA, 15 bp, Homo sapiens
tgtttcacaactgtc

SEQ ID NO: 854734 - DNA, 15 bp, Homo sapiens
gtttcacaactgtct

SEQ ID NO: 854735 - DNA, 15 bp, Homo sapiens
tttcacaactgtcta

SEQ ID NO: 854736 - DNA, 15 bp, Homo sapiens
ttcacaactgtctat

SEQ ID NO: 854737 - DNA, 15 bp, Homo sapiens
tcacaactgtctatc

SEQ ID NO: 854738 - DNA, 15 bp, Homo sapiens
cacaactgtctatca

SEQ ID NO: 854739 - DNA, 15 bp, Homo sapiens
acaactgtctatcac

SEQ ID NO: 854740 - DNA, 15 bp, Homo sapiens
caactgtctatcaca

SEQ ID NO: 854741 - DNA, 15 bp, Homo sapiens
aactgtctatcacat

SEQ ID NO: 854742 - DNA, 15 bp, Homo sapiens
actgtctatcacata

SEQ ID NO: 854743 - DNA, 15 bp, Homo sapiens
ctgtctatcacatag

SEQ ID NO: 854744 - DNA, 15 bp, Homo sapiens
tgtctatcacatagt

SEQ ID NO: 854745 - DNA, 15 bp, Homo sapiens
gtctatcacatagtg

SEQ ID NO: 854746 - DNA, 15 bp, Homo sapiens
tctatcacatagtga

SEQ ID NO: 854747 - DNA, 15 bp, Homo sapiens
ctatcacatagtgag

SEQ ID NO: 854748 - DNA, 15 bp, Homo sapiens
tatcacatagtgagc

SEQ ID NO: 854749 - DNA, 15 bp, Homo sapiens
atcacatagtgagca

SEQ ID NO: 854750 - DNA, 15 bp, Homo sapiens
tcacatagtgagcac

SEQ ID NO: 854751 - DNA, 15 bp, Homo sapiens
cacatagtgagcaca

SEQ ID NO: 854752 - DNA, 15 bp, Homo sapiens
acatagtgagcacaa

SEQ ID NO: 854753 - DNA, 15 bp, Homo sapiens
catagtgagcacaac

SEQ ID NO: 854754 - DNA, 15 bp, Homo sapiens
atagtgagcacaact

SEQ ID NO: 854755 - DNA, 15 bp, Homo sapiens
tagtgagcacaacta

SEQ ID NO: 854756 - DNA, 15 bp, Homo sapiens
agtgagcacaactaa

SEQ ID NO: 854757 - DNA, 15 bp, Homo sapiens
gtgagcacaactaaa

SEQ ID NO: 854758 - DNA, 15 bp, Homo sapiens
tgagcacaactaaaa

SEQ ID NO: 854759 - DNA, 15 bp, Homo sapiens
gagcacaactaaaag

SEQ ID NO: 854760 - DNA, 15 bp, Homo sapiens
agcacaactaaaaga

SEQ ID NO: 854761 - DNA, 15 bp, Homo sapiens
gcacaactaaaagac

SEQ ID NO: 854762 - DNA, 15 bp, Homo sapiens
cacaactaaaagact

SEQ ID NO: 854763 - DNA, 15 bp, Homo sapiens
acaactaaaagacta

SEQ ID NO: 854764 - DNA, 15 bp, Homo sapiens
caactaaaagactac

SEQ ID NO: 854765 - DNA, 15 bp, Homo sapiens
aactaaaagactact

SEQ ID NO: 854766 - DNA, 15 bp, Homo sapiens
actaaaagactactt

SEQ ID NO: 854767 - DNA, 15 bp, Homo sapiens
ctaaaagactacttt

SEQ ID NO: 854768 - DNA, 15 bp, Homo sapiens
taaaagactactttt

SEQ ID NO: 854769 - DNA, 15 bp, Homo sapiens
aaaagactacttttt

SEQ ID NO: 854770 - DNA, 15 bp, Homo sapiens
aaagactactttttg

SEQ ID NO: 854771 - DNA, 15 bp, Homo sapiens
aagactactttttgt

SEQ ID NO: 854772 - DNA, 15 bp, Homo sapiens
agactactttttgtc

SEQ ID NO: 854773 - DNA, 15 bp, Homo sapiens
gactactttttgtct

SEQ ID NO: 854774 - DNA, 15 bp, Homo sapiens
actactttttgtctt

SEQ ID NO: 854775 - DNA, 15 bp, Homo sapiens
ctactttttgtcttt

SEQ ID NO: 854776 - DNA, 15 bp, Homo sapiens
tactttttgtctttt

SEQ ID NO: 854777 - DNA, 15 bp, Homo sapiens
actttttgtctttta

SEQ ID NO: 854778 - DNA, 15 bp, Homo sapiens
ctttttgtcttttac

SEQ ID NO: 854779 - DNA, 15 bp, Homo sapiens
tttttgtcttttact

SEQ ID NO: 854780 - DNA, 15 bp, Homo sapiens
ttttgtcttttactg

SEQ ID NO: 854781 - DNA, 15 bp, Homo sapiens
tttgtcttttactgc

SEQ ID NO: 854782 - DNA, 15 bp, Homo sapiens
ttgtcttttactgct

SEQ ID NO: 854783 - DNA, 15 bp, Homo sapiens
tgtcttttactgctt

SEQ ID NO: 854784 - DNA, 15 bp, Homo sapiens
gtcttttactgcttg

SEQ ID NO: 854785 - DNA, 15 bp, Homo sapiens
tcttttactgcttgt

SEQ ID NO: 854786 - DNA, 15 bp, Homo sapiens
cttttactgcttgtt

SEQ ID NO: 854787 - DNA, 15 bp, Homo sapiens
ttttactgcttgttt

SEQ ID NO: 854788 - DNA, 15 bp, Homo sapiens
tttactgcttgtttt

SEQ ID NO: 854789 - DNA, 15 bp, Homo sapiens
ttactgcttgttttg

SEQ ID NO: 854790 - DNA, 15 bp, Homo sapiens
tactgcttgttttgt

SEQ ID NO: 854791 - DNA, 15 bp, Homo sapiens
actgcttgttttgtt

SEQ ID NO: 854792 - DNA, 15 bp, Homo sapiens
ctgcttgttttgttg

SEQ ID NO: 854793 - DNA, 15 bp, Homo sapiens
tgcttgttttgttga

SEQ ID NO: 854794 - DNA, 15 bp, Homo sapiens
gcttgttttgttgat

SEQ ID NO: 854795 - DNA, 15 bp, Homo sapiens
cttgttttgttgatc

SEQ ID NO: 854796 - DNA, 15 bp, Homo sapiens
ttgttttgttgatca

SEQ ID NO: 854797 - DNA, 15 bp, Homo sapiens
tgttttgttgatcaa

SEQ ID NO: 854798 - DNA, 15 bp, Homo sapiens
gttttgttgatcaag

SEQ ID NO: 854799 - DNA, 15 bp, Homo sapiens
ttttgttgatcaagt

SEQ ID NO: 854800 - DNA, 15 bp, Homo sapiens
tttgttgatcaagtg

SEQ ID NO: 854801 - DNA, 15 bp, Homo sapiens
ttgttgatcaagtga

SEQ ID NO: 854802 - DNA, 15 bp, Homo sapiens
tgttgatcaagtgac

SEQ ID NO: 854803 - DNA, 15 bp, Homo sapiens
gttgatcaagtgact

SEQ ID NO: 854804 - DNA, 15 bp, Homo sapiens
ttgatcaagtgactg

SEQ ID NO: 854805 - DNA, 15 bp, Homo sapiens
tgatcaagtgactga

SEQ ID NO: 854806 - DNA, 15 bp, Homo sapiens
gatcaagtgactgat

SEQ ID NO: 854807 - DNA, 15 bp, Homo sapiens
atcaagtgactgatt

SEQ ID NO: 854808 - DNA, 15 bp, Homo sapiens
tcaagtgactgattg

SEQ ID NO: 854809 - DNA, 15 bp, Homo sapiens
caagtgactgattgt

SEQ ID NO: 854810 - DNA, 15 bp, Homo sapiens
aagtgactgattgta

SEQ ID NO: 854811 - DNA, 15 bp, Homo sapiens
agtgactgattgtac

SEQ ID NO: 854812 - DNA, 15 bp, Homo sapiens
gtgactgattgtaca

SEQ ID NO: 854813 - DNA, 15 bp, Homo sapiens
tgactgattgtacaa

SEQ ID NO: 854814 - DNA, 15 bp, Homo sapiens
gactgattgtacaat

SEQ ID NO: 854815 - DNA, 15 bp, Homo sapiens
actgattgtacaatg

SEQ ID NO: 854816 - DNA, 15 bp, Homo sapiens
ctgattgtacaatga

SEQ ID NO: 854817 - DNA, 15 bp, Homo sapiens
tgattgtacaatgac

SEQ ID NO: 854818 - DNA, 15 bp, Homo sapiens
gattgtacaatgacc

SEQ ID NO: 854819 - DNA, 15 bp, Homo sapiens
attgtacaatgacca

SEQ ID NO: 854820 - DNA, 15 bp, Homo sapiens
ttgtacaatgaccaa

SEQ ID NO: 854821 - DNA, 15 bp, Homo sapiens
tgtacaatgaccaac

SEQ ID NO: 854822 - DNA, 15 bp, Homo sapiens
gtacaatgaccaaca

SEQ ID NO: 854823 - DNA, 15 bp, Homo sapiens
tacaatgaccaacaa

SEQ ID NO: 854824 - DNA, 15 bp, Homo sapiens
acaatgaccaacaag

SEQ ID NO: 854825 - DNA, 15 bp, Homo sapiens
caatgaccaacaaga

SEQ ID NO: 854826 - DNA, 15 bp, Homo sapiens
aatgaccaacaagaa

SEQ ID NO: 854827 - DNA, 15 bp, Homo sapiens
atgaccaacaagaag

SEQ ID NO: 854828 - DNA, 15 bp, Homo sapiens
tgaccaacaagaagt

SEQ ID NO: 854829 - DNA, 15 bp, Homo sapiens
gaccaacaagaagtc

SEQ ID NO: 854830 - DNA, 15 bp, Homo sapiens
accaacaagaagtct

SEQ ID NO: 854831 - DNA, 15 bp, Homo sapiens
ccaacaagaagtctg

SEQ ID NO: 854832 - DNA, 15 bp, Homo sapiens
caacaagaagtctga

SEQ ID NO: 854833 - DNA, 15 bp, Homo sapiens
aacaagaagtctgat

SEQ ID NO: 854834 - DNA, 15 bp, Homo sapiens
acaagaagtctgatg

SEQ ID NO: 854835 - DNA, 15 bp, Homo sapiens
caagaagtctgatgt

SEQ ID NO: 854836 - DNA, 15 bp, Homo sapiens
aagaagtctgatgtg

SEQ ID NO: 854837 - DNA, 15 bp, Homo sapiens
agaagtctgatgtgt

SEQ ID NO: 854838 - DNA, 15 bp, Homo sapiens
gaagtctgatgtgta

SEQ ID NO: 854839 - DNA, 15 bp, Homo sapiens
aagtctgatgtgtag

SEQ ID NO: 854840 - DNA, 15 bp, Homo sapiens
agtctgatgtgtaga

SEQ ID NO: 854841 - DNA, 15 bp, Homo sapiens
gtctgatgtgtagag

SEQ ID NO: 854842 - DNA, 15 bp, Homo sapiens
tctgatgtgtagaga

SEQ ID NO: 854843 - DNA, 15 bp, Homo sapiens
ctgatgtgtagagaa

SEQ ID NO: 854844 - DNA, 15 bp, Homo sapiens
tgatgtgtagagaaa

SEQ ID NO: 854845 - DNA, 15 bp, Homo sapiens
gatgtgtagagaaaa

SEQ ID NO: 854846 - DNA, 15 bp, Homo sapiens
atgtgtagagaaaag

SEQ ID NO: 854847 - DNA, 15 bp, Homo sapiens
tgtgtagagaaaagg

SEQ ID NO: 854848 - DNA, 15 bp, Homo sapiens
gtgtagagaaaaggg

SEQ ID NO: 854849 - DNA, 15 bp, Homo sapiens
tgtagagaaaagggg

SEQ ID NO: 854850 - DNA, 15 bp, Homo sapiens
gtagagaaaagggga

SEQ ID NO: 854851 - DNA, 15 bp, Homo sapiens
tagagaaaaggggaa

SEQ ID NO: 854852 - DNA, 15 bp, Homo sapiens
agagaaaaggggaac

SEQ ID NO: 854853 - DNA, 15 bp, Homo sapiens
gagaaaaggggaacc

SEQ ID NO: 854854 - DNA, 15 bp, Homo sapiens
agaaaaggggaacct

SEQ ID NO: 854855 - DNA, 15 bp, Homo sapiens
gaaaaggggaacctg

SEQ ID NO: 854856 - DNA, 15 bp, Homo sapiens
aaaaggggaacctgg

SEQ ID NO: 854857 - DNA, 15 bp, Homo sapiens
aaaggggaacctggc

SEQ ID NO: 854858 - DNA, 15 bp, Homo sapiens
aaggggaacctggct

SEQ ID NO: 854859 - DNA, 15 bp, Homo sapiens
aggggaacctggctt

SEQ ID NO: 854860 - DNA, 15 bp, Homo sapiens
ggggaacctggcttt

SEQ ID NO: 854861 - DNA, 15 bp, Homo sapiens
gggaacctggctttt

SEQ ID NO: 854862 - DNA, 15 bp, Homo sapiens
ggaacctggcttttc

SEQ ID NO: 854863 - DNA, 15 bp, Homo sapiens
gaacctggcttttct

SEQ ID NO: 854864 - DNA, 15 bp, Homo sapiens
aacctggcttttctg

SEQ ID NO: 854865 - DNA, 15 bp, Homo sapiens
acctggcttttctgc

SEQ ID NO: 854866 - DNA, 15 bp, Homo sapiens
cctggcttttctgcc

SEQ ID NO: 854867 - DNA, 15 bp, Homo sapiens
ctggcttttctgcct

SEQ ID NO: 854868 - DNA, 15 bp, Homo sapiens
tggcttttctgcctt

SEQ ID NO: 854869 - DNA, 15 bp, Homo sapiens
ggcttttctgcctta

SEQ ID NO: 854870 - DNA, 15 bp, Homo sapiens
gcttttctgccttac

SEQ ID NO: 854871 - DNA, 15 bp, Homo sapiens
cttttctgccttact

SEQ ID NO: 854872 - DNA, 15 bp, Homo sapiens
ttttctgccttactc

SEQ ID NO: 854873 - DNA, 15 bp, Homo sapiens
tttctgccttactcc

SEQ ID NO: 854874 - DNA, 15 bp, Homo sapiens
ttctgccttactcct

SEQ ID NO: 854875 - DNA, 15 bp, Homo sapiens
tctgccttactcctg

SEQ ID NO: 854876 - DNA, 15 bp, Homo sapiens
ctgccttactcctga

SEQ ID NO: 854877 - DNA, 15 bp, Homo sapiens
tgccttactcctgat

SEQ ID NO: 854878 - DNA, 15 bp, Homo sapiens
gccttactcctgatg

SEQ ID NO: 854879 - DNA, 15 bp, Homo sapiens
ccttactcctgatgc

SEQ ID NO: 854880 - DNA, 15 bp, Homo sapiens
cttactcctgatgcc

SEQ ID NO: 854881 - DNA, 15 bp, Homo sapiens
ttactcctgatgcct

SEQ ID NO: 854882 - DNA, 15 bp, Homo sapiens
tactcctgatgccta

SEQ ID NO: 854883 - DNA, 15 bp, Homo sapiens
actcctgatgcctaa

SEQ ID NO: 854884 - DNA, 15 bp, Homo sapiens
ctcctgatgcctaat

SEQ ID NO: 854885 - DNA, 15 bp, Homo sapiens
tcctgatgcctaatt

SEQ ID NO: 854886 - DNA, 15 bp, Homo sapiens
cctgatgcctaattc

SEQ ID NO: 854887 - DNA, 15 bp, Homo sapiens
ctgatgcctaattct

SEQ ID NO: 854888 - DNA, 15 bp, Homo sapiens
tgatgcctaattctg

SEQ ID NO: 854889 - DNA, 15 bp, Homo sapiens
gatgcctaattctga

SEQ ID NO: 854890 - DNA, 15 bp, Homo sapiens
atgcctaattctgag

SEQ ID NO: 854891 - DNA, 15 bp, Homo sapiens
tgcctaattctgagc

SEQ ID NO: 854892 - DNA, 15 bp, Homo sapiens
gcctaattctgagca

SEQ ID NO: 854893 - DNA, 15 bp, Homo sapiens
cctaattctgagcat

SEQ ID NO: 854894 - DNA, 15 bp, Homo sapiens
ctaattctgagcatg

SEQ ID NO: 854895 - DNA, 15 bp, Homo sapiens
taattctgagcatgt

SEQ ID NO: 854896 - DNA, 15 bp, Homo sapiens
aattctgagcatgtg

SEQ ID NO: 854897 - DNA, 15 bp, Homo sapiens
attctgagcatgtga

SEQ ID NO: 854898 - DNA, 15 bp, Homo sapiens
ttctgagcatgtgaa

SEQ ID NO: 854899 - DNA, 15 bp, Homo sapiens
tctgagcatgtgaat

SEQ ID NO: 854900 - DNA, 15 bp, Homo sapiens
ctgagcatgtgaata

SEQ ID NO: 854901 - DNA, 15 bp, Homo sapiens
tgagcatgtgaatat

SEQ ID NO: 854902 - DNA, 15 bp, Homo sapiens
gagcatgtgaatatt

SEQ ID NO: 854903 - DNA, 15 bp, Homo sapiens
agcatgtgaatatta

SEQ ID NO: 854904 - DNA, 15 bp, Homo sapiens
gcatgtgaatattat

SEQ ID NO: 854905 - DNA, 15 bp, Homo sapiens
catgtgaatattatt

SEQ ID NO: 854906 - DNA, 15 bp, Homo sapiens
atgtgaatattattc

SEQ ID NO: 854907 - DNA, 15 bp, Homo sapiens
tgtgaatattattct

SEQ ID NO: 854908 - DNA, 15 bp, Homo sapiens
gtgaatattattctg

SEQ ID NO: 854909 - DNA, 15 bp, Homo sapiens
tgaatattattctgt

SEQ ID NO: 854910 - DNA, 15 bp, Homo sapiens
gaatattattctgtt

SEQ ID NO: 854911 - DNA, 15 bp, Homo sapiens
aatattattctgttt

SEQ ID NO: 854912 - DNA, 15 bp, Homo sapiens
atattattctgtttc

SEQ ID NO: 854913 - DNA, 15 bp, Homo sapiens
tattattctgtttct

SEQ ID NO: 854914 - DNA, 15 bp, Homo sapiens
attattctgtttctt

SEQ ID NO: 854915 - DNA, 15 bp, Homo sapiens
ttattctgtttcttt

SEQ ID NO: 854916 - DNA, 15 bp, Homo sapiens
tattctgtttcttta

SEQ ID NO: 854917 - DNA, 15 bp, Homo sapiens
attctgtttctttaa

SEQ ID NO: 854918 - DNA, 15 bp, Homo sapiens
ttctgtttctttaat

SEQ ID NO: 854919 - DNA, 15 bp, Homo sapiens
tctgtttctttaatt

SEQ ID NO: 854920 - DNA, 15 bp, Homo sapiens
ctgtttctttaattc

SEQ ID NO: 854921 - DNA, 15 bp, Homo sapiens
tgtttctttaattct

SEQ ID NO: 854922 - DNA, 15 bp, Homo sapiens
gtttctttaattctc

SEQ ID NO: 854923 - DNA, 15 bp, Homo sapiens
tttctttaattctcc

SEQ ID NO: 854924 - DNA, 15 bp, Homo sapiens
ttctttaattctcca

SEQ ID NO: 854925 - DNA, 15 bp, Homo sapiens
tctttaattctccaa

SEQ ID NO: 854926 - DNA, 15 bp, Homo sapiens
ctttaattctccaag

SEQ ID NO: 854927 - DNA, 15 bp, Homo sapiens
tttaattctccaagt

SEQ ID NO: 854928 - DNA, 15 bp, Homo sapiens
ttaattctccaagtg

SEQ ID NO: 854929 - DNA, 15 bp, Homo sapiens
taattctccaagtga

SEQ ID NO: 854930 - DNA, 15 bp, Homo sapiens
aattctccaagtgaa

SEQ ID NO: 854931 - DNA, 15 bp, Homo sapiens
attctccaagtgaag

SEQ ID NO: 854932 - DNA, 15 bp, Homo sapiens
ttctccaagtgaagc

SEQ ID NO: 854933 - DNA, 15 bp, Homo sapiens
tctccaagtgaagca

SEQ ID NO: 854934 - DNA, 15 bp, Homo sapiens
ctccaagtgaagcag

SEQ ID NO: 854935 - DNA, 15 bp, Homo sapiens
tccaagtgaagcagc

SEQ ID NO: 854936 - DNA, 15 bp, Homo sapiens
ccaagtgaagcagca

SEQ ID NO: 854937 - DNA, 15 bp, Homo sapiens
caagtgaagcagcag

SEQ ID NO: 854938 - DNA, 15 bp, Homo sapiens
aagtgaagcagcaga

SEQ ID NO: 854939 - DNA, 15 bp, Homo sapiens
agtgaagcagcagat

SEQ ID NO: 854940 - DNA, 15 bp, Homo sapiens
gtgaagcagcagata

SEQ ID NO: 854941 - DNA, 15 bp, Homo sapiens
tgaagcagcagataa

SEQ ID NO: 854942 - DNA, 15 bp, Homo sapiens
gaagcagcagataaa

SEQ ID NO: 854943 - DNA, 15 bp, Homo sapiens
aagcagcagataaac

SEQ ID NO: 854944 - DNA, 15 bp, Homo sapiens
agcagcagataaacc

SEQ ID NO: 854945 - DNA, 15 bp, Homo sapiens
gcagcagataaacca

SEQ ID NO: 854946 - DNA, 15 bp, Homo sapiens
cagcagataaaccat

SEQ ID NO: 854947 - DNA, 15 bp, Homo sapiens
agcagataaaccatc

SEQ ID NO: 854948 - DNA, 15 bp, Homo sapiens
gcagataaaccatcc

SEQ ID NO: 854949 - DNA, 15 bp, Homo sapiens
cagataaaccatcct

SEQ ID NO: 854950 - DNA, 15 bp, Homo sapiens
agataaaccatcctt

SEQ ID NO: 854951 - DNA, 15 bp, Homo sapiens
gataaaccatccttg

SEQ ID NO: 854952 - DNA, 15 bp, Homo sapiens
ataaaccatccttgt

SEQ ID NO: 854953 - DNA, 15 bp, Homo sapiens
taaaccatccttgtt

SEQ ID NO: 854954 - DNA, 15 bp, Homo sapiens
aaaccatccttgttt

SEQ ID NO: 854955 - DNA, 15 bp, Homo sapiens
aaccatccttgtttc

SEQ ID NO: 854956 - DNA, 15 bp, Homo sapiens
accatccttgtttcc

SEQ ID NO: 854957 - DNA, 15 bp, Homo sapiens
ccatccttgtttcca

SEQ ID NO: 854958 - DNA, 15 bp, Homo sapiens
catccttgtttccat

SEQ ID NO: 854959 - DNA, 15 bp, Homo sapiens
atccttgtttccatt

SEQ ID NO: 854960 - DNA, 15 bp, Homo sapiens
tccttgtttccatta

SEQ ID NO: 854961 - DNA, 15 bp, Homo sapiens
ccttgtttccattag

SEQ ID NO: 854962 - DNA, 15 bp, Homo sapiens
cttgtttccattagc

SEQ ID NO: 854963 - DNA, 15 bp, Homo sapiens
ttgtttccattagct

SEQ ID NO: 854964 - DNA, 15 bp, Homo sapiens
tgtttccattagctg

SEQ ID NO: 854965 - DNA, 15 bp, Homo sapiens
gtttccattagctgt

SEQ ID NO: 854966 - DNA, 15 bp, Homo sapiens
tttccattagctgtc

SEQ ID NO: 854967 - DNA, 15 bp, Homo sapiens
ttccattagctgtct

SEQ ID NO: 854968 - DNA, 15 bp, Homo sapiens
tccattagctgtcta

SEQ ID NO: 854969 - DNA, 15 bp, Homo sapiens
ccattagctgtctac

SEQ ID NO: 854970 - DNA, 15 bp, Homo sapiens
cattagctgtctacc

SEQ ID NO: 854971 - DNA, 15 bp, Homo sapiens
attagctgtctaccc

SEQ ID NO: 854972 - DNA, 15 bp, Homo sapiens
ttagctgtctaccct

SEQ ID NO: 854973 - DNA, 15 bp, Homo sapiens
tagctgtctaccctg

SEQ ID NO: 854974 - DNA, 15 bp, Homo sapiens
agctgtctaccctgt

SEQ ID NO: 854975 - DNA, 15 bp, Homo sapiens
gctgtctaccctgtt

SEQ ID NO: 854976 - DNA, 15 bp, Homo sapiens
ctgtctaccctgttc

SEQ ID NO: 854977 - DNA, 15 bp, Homo sapiens
tgtctaccctgttca

SEQ ID NO: 854978 - DNA, 15 bp, Homo sapiens
gtctaccctgttcaa

SEQ ID NO: 854979 - DNA, 15 bp, Homo sapiens
tctaccctgttcaac

SEQ ID NO: 854980 - DNA, 15 bp, Homo sapiens
ctaccctgttcaact

SEQ ID NO: 854981 - DNA, 15 bp, Homo sapiens
taccctgttcaactg

SEQ ID NO: 854982 - DNA, 15 bp, Homo sapiens
accctgttcaactgt

SEQ ID NO: 854983 - DNA, 15 bp, Homo sapiens
ccctgttcaactgtg

SEQ ID NO: 854984 - DNA, 15 bp, Homo sapiens
cctgttcaactgtgt

SEQ ID NO: 854985 - DNA, 15 bp, Homo sapiens
ctgttcaactgtgtg

SEQ ID NO: 854986 - DNA, 15 bp, Homo sapiens
tgttcaactgtgtgt

SEQ ID NO: 854987 - DNA, 15 bp, Homo sapiens
gttcaactgtgtgtt

SEQ ID NO: 854988 - DNA, 15 bp, Homo sapiens
ttcaactgtgtgttt

SEQ ID NO: 854989 - DNA, 15 bp, Homo sapiens
tcaactgtgtgtttc

SEQ ID NO: 854990 - DNA, 15 bp, Homo sapiens
caactgtgtgtttct

SEQ ID NO: 854991 - DNA, 15 bp, Homo sapiens
aactgtgtgtttcta

SEQ ID NO: 854992 - DNA, 15 bp, Homo sapiens
actgtgtgtttctaa

SEQ ID NO: 854993 - DNA, 15 bp, Homo sapiens
ctgtgtgtttctaat

SEQ ID NO: 854994 - DNA, 15 bp, Homo sapiens
tgtgtgtttctaata

SEQ ID NO: 854995 - DNA, 15 bp, Homo sapiens
gtgtgtttctaataa

SEQ ID NO: 854996 - DNA, 15 bp, Homo sapiens
tgtgtttctaataac

SEQ ID NO: 854997 - DNA, 15 bp, Homo sapiens
gtgtttctaataaca

SEQ ID NO: 854998 - DNA, 15 bp, Homo sapiens
tgtttctaataacat

SEQ ID NO: 854999 - DNA, 15 bp, Homo sapiens
gtttctaataacata

SEQ ID NO: 855000 - DNA, 15 bp, Homo sapiens
tttctaataacataa

SEQ ID NO: 855001 - DNA, 15 bp, Homo sapiens
ttctaataacataag

SEQ ID NO: 855002 - DNA, 15 bp, Homo sapiens
tctaataacataaga

SEQ ID NO: 855003 - DNA, 15 bp, Homo sapiens
ctaataacataagaa

SEQ ID NO: 855004 - DNA, 15 bp, Homo sapiens
taataacataagaat

SEQ ID NO: 855005 - DNA, 15 bp, Homo sapiens
aataacataagaata

SEQ ID NO: 855006 - DNA, 15 bp, Homo sapiens
ataacataagaataa

SEQ ID NO: 855007 - DNA, 15 bp, Homo sapiens
taacataagaataag

SEQ ID NO: 855008 - DNA, 15 bp, Homo sapiens
aacataagaataaga

SEQ ID NO: 855009 - DNA, 15 bp, Homo sapiens
acataagaataagaa

SEQ ID NO: 855010 - DNA, 15 bp, Homo sapiens
cataagaataagaaa

SEQ ID NO: 855011 - DNA, 15 bp, Homo sapiens
ataagaataagaaag

SEQ ID NO: 855012 - DNA, 15 bp, Homo sapiens
taagaataagaaagc

SEQ ID NO: 855013 - DNA, 15 bp, Homo sapiens
aagaataagaaagcc

SEQ ID NO: 855014 - DNA, 15 bp, Homo sapiens
agaataagaaagcca

SEQ ID NO: 855015 - DNA, 15 bp, Homo sapiens
gaataagaaagccac

SEQ ID NO: 855016 - DNA, 15 bp, Homo sapiens
aataagaaagccacc

SEQ ID NO: 855017 - DNA, 15 bp, Homo sapiens
ataagaaagccacca

SEQ ID NO: 855018 - DNA, 15 bp, Homo sapiens
taagaaagccaccag

SEQ ID NO: 855019 - DNA, 15 bp, Homo sapiens
aagaaagccaccagg

SEQ ID NO: 855020 - DNA, 15 bp, Homo sapiens
agaaagccaccaggg

SEQ ID NO: 855021 - DNA, 15 bp, Homo sapiens
gaaagccaccagggt

SEQ ID NO: 855022 - DNA, 15 bp, Homo sapiens
aaagccaccagggtg

SEQ ID NO: 855023 - DNA, 15 bp, Homo sapiens
aagccaccagggtga

SEQ ID NO: 855024 - DNA, 15 bp, Homo sapiens
agccaccagggtgag

SEQ ID NO: 855025 - DNA, 15 bp, Homo sapiens
gccaccagggtgagc

SEQ ID NO: 855026 - DNA, 15 bp, Homo sapiens
ccaccagggtgagca

SEQ ID NO: 855027 - DNA, 15 bp, Homo sapiens
caccagggtgagcag

SEQ ID NO: 855028 - DNA, 15 bp, Homo sapiens
accagggtgagcagg

SEQ ID NO: 855029 - DNA, 15 bp, Homo sapiens
ccagggtgagcaggg

SEQ ID NO: 855030 - DNA, 15 bp, Homo sapiens
cagggtgagcaggga

SEQ ID NO: 855031 - DNA, 15 bp, Homo sapiens
agggtgagcagggaa

SEQ ID NO: 855032 - DNA, 15 bp, Homo sapiens
gggtgagcagggaag

SEQ ID NO: 855033 - DNA, 15 bp, Homo sapiens
ggtgagcagggaagg

SEQ ID NO: 855034 - DNA, 15 bp, Homo sapiens
gtgagcagggaaggc

SEQ ID NO: 855035 - DNA, 15 bp, Homo sapiens
tgagcagggaaggca

SEQ ID NO: 855036 - DNA, 15 bp, Homo sapiens
gagcagggaaggcaa

SEQ ID NO: 855037 - DNA, 15 bp, Homo sapiens
agcagggaaggcaat

SEQ ID NO: 855038 - DNA, 15 bp, Homo sapiens
gcagggaaggcaatg

SEQ ID NO: 855039 - DNA, 15 bp, Homo sapiens
cagggaaggcaatga

SEQ ID NO: 855040 - DNA, 15 bp, Homo sapiens
agggaaggcaatgag

SEQ ID NO: 855041 - DNA, 15 bp, Homo sapiens
gggaaggcaatgagt

SEQ ID NO: 855042 - DNA, 15 bp, Homo sapiens
ggaaggcaatgagtc

SEQ ID NO: 855043 - DNA, 15 bp, Homo sapiens
gaaggcaatgagtct

SEQ ID NO: 855044 - DNA, 15 bp, Homo sapiens
aaggcaatgagtctg

SEQ ID NO: 855045 - DNA, 15 bp, Homo sapiens
aggcaatgagtctgc

SEQ ID NO: 855046 - DNA, 15 bp, Homo sapiens
ggcaatgagtctgca

SEQ ID NO: 855047 - DNA, 15 bp, Homo sapiens
gcaatgagtctgcaa

SEQ ID NO: 855048 - DNA, 15 bp, Homo sapiens
caatgagtctgcaag

SEQ ID NO: 855049 - DNA, 15 bp, Homo sapiens
aatgagtctgcaagg

SEQ ID NO: 855050 - DNA, 15 bp, Homo sapiens
atgagtctgcaaggc

SEQ ID NO: 855051 - DNA, 15 bp, Homo sapiens
tgagtctgcaaggct

SEQ ID NO: 855052 - DNA, 15 bp, Homo sapiens
gagtctgcaaggctt

SEQ ID NO: 855053 - DNA, 15 bp, Homo sapiens
agtctgcaaggcttg

SEQ ID NO: 855054 - DNA, 15 bp, Homo sapiens
gtctgcaaggcttgt

SEQ ID NO: 855055 - DNA, 15 bp, Homo sapiens
tctgcaaggcttgtg

SEQ ID NO: 855056 - DNA, 15 bp, Homo sapiens
ctgcaaggcttgtgg

SEQ ID NO: 855057 - DNA, 15 bp, Homo sapiens
tgcaaggcttgtgga

SEQ ID NO: 855058 - DNA, 15 bp, Homo sapiens
gcaaggcttgtggat

SEQ ID NO: 855059 - DNA, 15 bp, Homo sapiens
caaggcttgtggata

SEQ ID NO: 855060 - DNA, 15 bp, Homo sapiens
aaggcttgtggatag

SEQ ID NO: 855061 - DNA, 15 bp, Homo sapiens
aggcttgtggataga

SEQ ID NO: 855062 - DNA, 15 bp, Homo sapiens
ggcttgtggatagat

SEQ ID NO: 855063 - DNA, 15 bp, Homo sapiens
gcttgtggatagatt

SEQ ID NO: 855064 - DNA, 15 bp, Homo sapiens
cttgtggatagattt

SEQ ID NO: 855065 - DNA, 15 bp, Homo sapiens
ttgtggatagatttc

SEQ ID NO: 855066 - DNA, 15 bp, Homo sapiens
tgtggatagatttct

SEQ ID NO: 855067 - DNA, 15 bp, Homo sapiens
gtggatagatttctg

SEQ ID NO: 855068 - DNA, 15 bp, Homo sapiens
tggatagatttctgt

SEQ ID NO: 855069 - DNA, 15 bp, Homo sapiens
ggatagatttctgtt

SEQ ID NO: 855070 - DNA, 15 bp, Homo sapiens
gatagatttctgtta

SEQ ID NO: 855071 - DNA, 15 bp, Homo sapiens
atagatttctgttag

SEQ ID NO: 855072 - DNA, 15 bp, Homo sapiens
tagatttctgttagt

SEQ ID NO: 855073 - DNA, 15 bp, Homo sapiens
agatttctgttagtg

SEQ ID NO: 855074 - DNA, 15 bp, Homo sapiens
gatttctgttagtga

SEQ ID NO: 855075 - DNA, 15 bp, Homo sapiens
atttctgttagtgag

SEQ ID NO: 855076 - DNA, 15 bp, Homo sapiens
tttctgttagtgagg

SEQ ID NO: 855077 - DNA, 15 bp, Homo sapiens
ttctgttagtgaggc

SEQ ID NO: 855078 - DNA, 15 bp, Homo sapiens
tctgttagtgaggct

SEQ ID NO: 855079 - DNA, 15 bp, Homo sapiens
ctgttagtgaggctc

SEQ ID NO: 855080 - DNA, 15 bp, Homo sapiens
tgttagtgaggctct

SEQ ID NO: 855081 - DNA, 15 bp, Homo sapiens
gttagtgaggctcta

SEQ ID NO: 855082 - DNA, 15 bp, Homo sapiens
ttagtgaggctctag

SEQ ID NO: 855083 - DNA, 15 bp, Homo sapiens
tagtgaggctctaga

SEQ ID NO: 855084 - DNA, 15 bp, Homo sapiens
agtgaggctctagaa

SEQ ID NO: 855085 - DNA, 15 bp, Homo sapiens
gtgaggctctagaaa

SEQ ID NO: 855086 - DNA, 15 bp, Homo sapiens
tgaggctctagaaag

SEQ ID NO: 855087 - DNA, 15 bp, Homo sapiens
gaggctctagaaagt

SEQ ID NO: 855088 - DNA, 15 bp, Homo sapiens
aggctctagaaagtt

SEQ ID NO: 855089 - DNA, 15 bp, Homo sapiens
ggctctagaaagttc

SEQ ID NO: 855090 - DNA, 15 bp, Homo sapiens
gctctagaaagttct

SEQ ID NO: 855091 - DNA, 15 bp, Homo sapiens
ctctagaaagttctt

SEQ ID NO: 855092 - DNA, 15 bp, Homo sapiens
tctagaaagttcttc

SEQ ID NO: 855093 - DNA, 15 bp, Homo sapiens
ctagaaagttcttcc

SEQ ID NO: 855094 - DNA, 15 bp, Homo sapiens
tagaaagttcttcca

SEQ ID NO: 855095 - DNA, 15 bp, Homo sapiens
agaaagttcttccaa

SEQ ID NO: 855096 - DNA, 15 bp, Homo sapiens
gaaagttcttccaag

SEQ ID NO: 855097 - DNA, 15 bp, Homo sapiens
aaagttcttccaaga

SEQ ID NO: 855098 - DNA, 15 bp, Homo sapiens
aagttcttccaagat

SEQ ID NO: 855099 - DNA, 15 bp, Homo sapiens
agttcttccaagatt

SEQ ID NO: 855100 - DNA, 15 bp, Homo sapiens
gttcttccaagattg

SEQ ID NO: 855101 - DNA, 15 bp, Homo sapiens
ttcttccaagattga

SEQ ID NO: 855102 - DNA, 15 bp, Homo sapiens
tcttccaagattgat

SEQ ID NO: 855103 - DNA, 15 bp, Homo sapiens
cttccaagattgatg

SEQ ID NO: 855104 - DNA, 15 bp, Homo sapiens
ttccaagattgatgc

SEQ ID NO: 855105 - DNA, 15 bp, Homo sapiens
tccaagattgatgca

SEQ ID NO: 855106 - DNA, 15 bp, Homo sapiens
ccaagattgatgcaa

SEQ ID NO: 855107 - DNA, 15 bp, Homo sapiens
caagattgatgcaat

SEQ ID NO: 855108 - DNA, 15 bp, Homo sapiens
aagattgatgcaatc

SEQ ID NO: 855109 - DNA, 15 bp, Homo sapiens
agattgatgcaatct

SEQ ID NO: 855110 - DNA, 15 bp, Homo sapiens
gattgatgcaatctg

SEQ ID NO: 855111 - DNA, 15 bp, Homo sapiens
attgatgcaatctga

SEQ ID NO: 855112 - DNA, 15 bp, Homo sapiens
ttgatgcaatctgag

SEQ ID NO: 855113 - DNA, 15 bp, Homo sapiens
tgatgcaatctgaga

SEQ ID NO: 855114 - DNA, 15 bp, Homo sapiens
gatgcaatctgagaa

SEQ ID NO: 855115 - DNA, 15 bp, Homo sapiens
atgcaatctgagaag

SEQ ID NO: 855116 - DNA, 15 bp, Homo sapiens
tgcaatctgagaaga

SEQ ID NO: 855117 - DNA, 15 bp, Homo sapiens
gcaatctgagaagag

SEQ ID NO: 855118 - DNA, 15 bp, Homo sapiens
caatctgagaagagt

SEQ ID NO: 855119 - DNA, 15 bp, Homo sapiens
aatctgagaagagtt

SEQ ID NO: 855120 - DNA, 15 bp, Homo sapiens
atctgagaagagttt

SEQ ID NO: 855121 - DNA, 15 bp, Homo sapiens
tctgagaagagtttt

SEQ ID NO: 855122 - DNA, 15 bp, Homo sapiens
ctgagaagagttttc

SEQ ID NO: 855123 - DNA, 15 bp, Homo sapiens
tgagaagagttttct

SEQ ID NO: 855124 - DNA, 15 bp, Homo sapiens
gagaagagttttctg

SEQ ID NO: 855125 - DNA, 15 bp, Homo sapiens
agaagagttttctgt

SEQ ID NO: 855126 - DNA, 15 bp, Homo sapiens
gaagagttttctgtc

SEQ ID NO: 855127 - DNA, 15 bp, Homo sapiens
aagagttttctgtca

SEQ ID NO: 855128 - DNA, 15 bp, Homo sapiens
agagttttctgtcaa

SEQ ID NO: 855129 - DNA, 15 bp, Homo sapiens
gagttttctgtcaat

SEQ ID NO: 855130 - DNA, 15 bp, Homo sapiens
agttttctgtcaata

SEQ ID NO: 855131 - DNA, 15 bp, Homo sapiens
gttttctgtcaatac

SEQ ID NO: 855132 - DNA, 15 bp, Homo sapiens
ttttctgtcaataca

SEQ ID NO: 855133 - DNA, 15 bp, Homo sapiens
tttctgtcaatacaa

SEQ ID NO: 855134 - DNA, 15 bp, Homo sapiens
ttctgtcaatacaaa

SEQ ID NO: 855135 - DNA, 15 bp, Homo sapiens
tctgtcaatacaaac

SEQ ID NO: 855136 - DNA, 15 bp, Homo sapiens
ctgtcaatacaaact

SEQ ID NO: 855137 - DNA, 15 bp, Homo sapiens
tgtcaatacaaactc

SEQ ID NO: 855138 - DNA, 15 bp, Homo sapiens
gtcaatacaaactcc

SEQ ID NO: 855139 - DNA, 15 bp, Homo sapiens
tcaatacaaactccc

SEQ ID NO: 855140 - DNA, 15 bp, Homo sapiens
caatacaaactccct

SEQ ID NO: 855141 - DNA, 15 bp, Homo sapiens
aatacaaactccctg

SEQ ID NO: 855142 - DNA, 15 bp, Homo sapiens
atacaaactccctgg

SEQ ID NO: 855143 - DNA, 15 bp, Homo sapiens
tacaaactccctggg

SEQ ID NO: 855144 - DNA, 15 bp, Homo sapiens
acaaactccctgggt

SEQ ID NO: 855145 - DNA, 15 bp, Homo sapiens
caaactccctgggtt

SEQ ID NO: 855146 - DNA, 15 bp, Homo sapiens
aaactccctgggttt

SEQ ID NO: 855147 - DNA, 15 bp, Homo sapiens
aactccctgggtttc

SEQ ID NO: 855148 - DNA, 15 bp, Homo sapiens
actccctgggtttct

SEQ ID NO: 855149 - DNA, 15 bp, Homo sapiens
ctccctgggtttctc

SEQ ID NO: 855150 - DNA, 15 bp, Homo sapiens
tccctgggtttctcc

SEQ ID NO: 855151 - DNA, 15 bp, Homo sapiens
ccctgggtttctcct

SEQ ID NO: 855152 - DNA, 15 bp, Homo sapiens
cctgggtttctcctt

SEQ ID NO: 855153 - DNA, 15 bp, Homo sapiens
ctgggtttctccttt

SEQ ID NO: 855154 - DNA, 15 bp, Homo sapiens
tgggtttctcctttg

SEQ ID NO: 855155 - DNA, 15 bp, Homo sapiens
gggtttctcctttgt

SEQ ID NO: 855156 - DNA, 15 bp, Homo sapiens
ggtttctcctttgtc

SEQ ID NO: 855157 - DNA, 15 bp, Homo sapiens
gtttctcctttgtcc

SEQ ID NO: 855158 - DNA, 15 bp, Homo sapiens
tttctcctttgtcct

SEQ ID NO: 855159 - DNA, 15 bp, Homo sapiens
ttctcctttgtcctt

SEQ ID NO: 855160 - DNA, 15 bp, Homo sapiens
tctcctttgtccttt

SEQ ID NO: 855161 - DNA, 15 bp, Homo sapiens
ctcctttgtcctttt

SEQ ID NO: 855162 - DNA, 15 bp, Homo sapiens
tcctttgtcctttta

SEQ ID NO: 855163 - DNA, 15 bp, Homo sapiens
cctttgtccttttac

SEQ ID NO: 855164 - DNA, 15 bp, Homo sapiens
ctttgtccttttact

SEQ ID NO: 855165 - DNA, 15 bp, Homo sapiens
tttgtccttttactg

SEQ ID NO: 855166 - DNA, 15 bp, Homo sapiens
ttgtccttttactgc

SEQ ID NO: 855167 - DNA, 15 bp, Homo sapiens
tgtccttttactgcc

SEQ ID NO: 855168 - DNA, 15 bp, Homo sapiens
gtccttttactgcct

SEQ ID NO: 855169 - DNA, 15 bp, Homo sapiens
tccttttactgcctg

SEQ ID NO: 855170 - DNA, 15 bp, Homo sapiens
ccttttactgcctgt

SEQ ID NO: 855171 - DNA, 15 bp, Homo sapiens
cttttactgcctgtg

SEQ ID NO: 855172 - DNA, 15 bp, Homo sapiens
ttttactgcctgtgt

SEQ ID NO: 855173 - DNA, 15 bp, Homo sapiens
tttactgcctgtgtt

SEQ ID NO: 855174 - DNA, 15 bp, Homo sapiens
ttactgcctgtgttt

SEQ ID NO: 855175 - DNA, 15 bp, Homo sapiens
tactgcctgtgtttg

SEQ ID NO: 855176 - DNA, 15 bp, Homo sapiens
actgcctgtgtttgt

SEQ ID NO: 855177 - DNA, 15 bp, Homo sapiens
ctgcctgtgtttgtt

SEQ ID NO: 855178 - DNA, 15 bp, Homo sapiens
tgcctgtgtttgttt

SEQ ID NO: 855179 - DNA, 15 bp, Homo sapiens
gcctgtgtttgtttt

SEQ ID NO: 855180 - DNA, 15 bp, Homo sapiens
cctgtgtttgttttg

SEQ ID NO: 855181 - DNA, 15 bp, Homo sapiens
ctgtgtttgttttgg

SEQ ID NO: 855182 - DNA, 15 bp, Homo sapiens
tgtgtttgttttggg

SEQ ID NO: 855183 - DNA, 15 bp, Homo sapiens
gtgtttgttttgggt

SEQ ID NO: 855184 - DNA, 15 bp, Homo sapiens
tgtttgttttgggtt

SEQ ID NO: 855185 - DNA, 15 bp, Homo sapiens
gtttgttttgggttc

SEQ ID NO: 855186 - DNA, 15 bp, Homo sapiens
tttgttttgggttcc

SEQ ID NO: 855187 - DNA, 15 bp, Homo sapiens
ttgttttgggttcca

SEQ ID NO: 855188 - DNA, 15 bp, Homo sapiens
tgttttgggttccag

SEQ ID NO: 855189 - DNA, 15 bp, Homo sapiens
gttttgggttccagt

SEQ ID NO: 855190 - DNA, 15 bp, Homo sapiens
ttttgggttccagta

SEQ ID NO: 855191 - DNA, 15 bp, Homo sapiens
tttgggttccagtaa

SEQ ID NO: 855192 - DNA, 15 bp, Homo sapiens
ttgggttccagtaaa

SEQ ID NO: 855193 - DNA, 15 bp, Homo sapiens
tgggttccagtaaag

SEQ ID NO: 855194 - DNA, 15 bp, Homo sapiens
gggttccagtaaaga

SEQ ID NO: 855195 - DNA, 15 bp, Homo sapiens
ggttccagtaaagat

SEQ ID NO: 855196 - DNA, 15 bp, Homo sapiens
gttccagtaaagatc

SEQ ID NO: 855197 - DNA, 15 bp, Homo sapiens
ttccagtaaagatca

SEQ ID NO: 855198 - DNA, 15 bp, Homo sapiens
tccagtaaagatcaa

SEQ ID NO: 855199 - DNA, 15 bp, Homo sapiens
ccagtaaagatcaag

SEQ ID NO: 855200 - DNA, 15 bp, Homo sapiens
cagtaaagatcaagt

SEQ ID NO: 855201 - DNA, 15 bp, Homo sapiens
agtaaagatcaagtg

SEQ ID NO: 855202 - DNA, 15 bp, Homo sapiens
gtaaagatcaagtga

SEQ ID NO: 855203 - DNA, 15 bp, Homo sapiens
taaagatcaagtgac

SEQ ID NO: 855204 - DNA, 15 bp, Homo sapiens
aaagatcaagtgact

SEQ ID NO: 855205 - DNA, 15 bp, Homo sapiens
aagatcaagtgactg

SEQ ID NO: 855206 - DNA, 15 bp, Homo sapiens
agatcaagtgactga

SEQ ID NO: 855207 - DNA, 15 bp, Homo sapiens
gtgactgattgtacc

SEQ ID NO: 855208 - DNA, 15 bp, Homo sapiens
tgactgattgtacca

SEQ ID NO: 855209 - DNA, 15 bp, Homo sapiens
gactgattgtaccat

SEQ ID NO: 855210 - DNA, 15 bp, Homo sapiens
actgattgtaccatg

SEQ ID NO: 855211 - DNA, 15 bp, Homo sapiens
ctgattgtaccatga

SEQ ID NO: 855212 - DNA, 15 bp, Homo sapiens
tgattgtaccatgac

SEQ ID NO: 855213 - DNA, 15 bp, Homo sapiens
gattgtaccatgacc

SEQ ID NO: 855214 - DNA, 15 bp, Homo sapiens
attgtaccatgacca

SEQ ID NO: 855215 - DNA, 15 bp, Homo sapiens
ttgtaccatgaccaa

SEQ ID NO: 855216 - DNA, 15 bp, Homo sapiens
tgtaccatgaccaac

SEQ ID NO: 855217 - DNA, 15 bp, Homo sapiens
gtaccatgaccaaca

SEQ ID NO: 855218 - DNA, 15 bp, Homo sapiens
taccatgaccaacaa

SEQ ID NO: 855219 - DNA, 15 bp, Homo sapiens
accatgaccaacaag

SEQ ID NO: 855220 - DNA, 15 bp, Homo sapiens
ccatgaccaacaaga

SEQ ID NO: 855221 - DNA, 15 bp, Homo sapiens
catgaccaacaagaa

SEQ ID NO: 855222 - DNA, 15 bp, Homo sapiens
tgaccaacaagaagc

SEQ ID NO: 855223 - DNA, 15 bp, Homo sapiens
gaccaacaagaagcc

SEQ ID NO: 855224 - DNA, 15 bp, Homo sapiens
accaacaagaagcct

SEQ ID NO: 855225 - DNA, 15 bp, Homo sapiens
ccaacaagaagcctg

SEQ ID NO: 855226 - DNA, 15 bp, Homo sapiens
caacaagaagcctga

SEQ ID NO: 855227 - DNA, 15 bp, Homo sapiens
aacaagaagcctgat

SEQ ID NO: 855228 - DNA, 15 bp, Homo sapiens
acaagaagcctgatg

SEQ ID NO: 855229 - DNA, 15 bp, Homo sapiens
caagaagcctgatgt

SEQ ID NO: 855230 - DNA, 15 bp, Homo sapiens
aagaagcctgatgtg

SEQ ID NO: 855231 - DNA, 15 bp, Homo sapiens
agaagcctgatgtgt

SEQ ID NO: 855232 - DNA, 15 bp, Homo sapiens
gaagcctgatgtgtg

SEQ ID NO: 855233 - DNA, 15 bp, Homo sapiens
aagcctgatgtgtgg

SEQ ID NO: 855234 - DNA, 15 bp, Homo sapiens
agcctgatgtgtgga

SEQ ID NO: 855235 - DNA, 15 bp, Homo sapiens
gcctgatgtgtggag

SEQ ID NO: 855236 - DNA, 15 bp, Homo sapiens
cctgatgtgtggaga

SEQ ID NO: 855237 - DNA, 15 bp, Homo sapiens
ctgatgtgtggagaa

SEQ ID NO: 855238 - DNA, 15 bp, Homo sapiens
tgatgtgtggagaaa

SEQ ID NO: 855239 - DNA, 15 bp, Homo sapiens
gatgtgtggagaaaa

SEQ ID NO: 855240 - DNA, 15 bp, Homo sapiens
atgtgtggagaaaag

SEQ ID NO: 855241 - DNA, 15 bp, Homo sapiens
tgtgtggagaaaagg

SEQ ID NO: 855242 - DNA, 15 bp, Homo sapiens
gtgtggagaaaaggg

SEQ ID NO: 855243 - DNA, 15 bp, Homo sapiens
tgtggagaaaagggg

SEQ ID NO: 855244 - DNA, 15 bp, Homo sapiens
gtggagaaaagggga

SEQ ID NO: 855245 - DNA, 15 bp, Homo sapiens
tggagaaaaggggaa

SEQ ID NO: 855246 - DNA, 15 bp, Homo sapiens
ggagaaaaggggaac

SEQ ID NO: 855247 - DNA, 15 bp, Homo sapiens
cctggcttttctgca

SEQ ID NO: 855248 - DNA, 15 bp, Homo sapiens
ctggcttttctgcat

SEQ ID NO: 855249 - DNA, 15 bp, Homo sapiens
tggcttttctgcatt

SEQ ID NO: 855250 - DNA, 15 bp, Homo sapiens
ggcttttctgcatta

SEQ ID NO: 855251 - DNA, 15 bp, Homo sapiens
gcttttctgcattac

SEQ ID NO: 855252 - DNA, 15 bp, Homo sapiens
cttttctgcattact

SEQ ID NO: 855253 - DNA, 15 bp, Homo sapiens
ttttctgcattactc

SEQ ID NO: 855254 - DNA, 15 bp, Homo sapiens
tttctgcattactcc

SEQ ID NO: 855255 - DNA, 15 bp, Homo sapiens
ttctgcattactcct

SEQ ID NO: 855256 - DNA, 15 bp, Homo sapiens
tctgcattactccta

SEQ ID NO: 855257 - DNA, 15 bp, Homo sapiens
ctgcattactcctaa

SEQ ID NO: 855258 - DNA, 15 bp, Homo sapiens
tgcattactcctaat

SEQ ID NO: 855259 - DNA, 15 bp, Homo sapiens
gcattactcctaatg

SEQ ID NO: 855260 - DNA, 15 bp, Homo sapiens
cattactcctaatgc

SEQ ID NO: 855261 - DNA, 15 bp, Homo sapiens
attactcctaatgcc

SEQ ID NO: 855262 - DNA, 15 bp, Homo sapiens
ttactcctaatgcct

SEQ ID NO: 855263 - DNA, 15 bp, Homo sapiens
tactcctaatgccta

SEQ ID NO: 855264 - DNA, 15 bp, Homo sapiens
actcctaatgcctaa

SEQ ID NO: 855265 - DNA, 15 bp, Homo sapiens
ctcctaatgcctaat

SEQ ID NO: 855266 - DNA, 15 bp, Homo sapiens
tcctaatgcctaatt

SEQ ID NO: 855267 - DNA, 15 bp, Homo sapiens
cctaatgcctaattt

SEQ ID NO: 855268 - DNA, 15 bp, Homo sapiens
ctaatgcctaatttt

SEQ ID NO: 855269 - DNA, 15 bp, Homo sapiens
taatgcctaattttc

SEQ ID NO: 855270 - DNA, 15 bp, Homo sapiens
aatgcctaattttct

SEQ ID NO: 855271 - DNA, 15 bp, Homo sapiens
atgcctaattttctt

SEQ ID NO: 855272 - DNA, 15 bp, Homo sapiens
tgcctaattttcttg

SEQ ID NO: 855273 - DNA, 15 bp, Homo sapiens
gcctaattttcttgt

SEQ ID NO: 855274 - DNA, 15 bp, Homo sapiens
cctaattttcttgta

SEQ ID NO: 855275 - DNA, 15 bp, Homo sapiens
ctaattttcttgtac

SEQ ID NO: 855276 - DNA, 15 bp, Homo sapiens
taattttcttgtact

SEQ ID NO: 855277 - DNA, 15 bp, Homo sapiens
aattttcttgtactg

SEQ ID NO: 855278 - DNA, 15 bp, Homo sapiens
attttcttgtactga

SEQ ID NO: 855279 - DNA, 15 bp, Homo sapiens
ttttcttgtactgaa

SEQ ID NO: 855280 - DNA, 15 bp, Homo sapiens
tttcttgtactgaaa

SEQ ID NO: 855281 - DNA, 15 bp, Homo sapiens
ttcttgtactgaaag

SEQ ID NO: 855282 - DNA, 15 bp, Homo sapiens
tcttgtactgaaagt

SEQ ID NO: 855283 - DNA, 15 bp, Homo sapiens
cttgtactgaaagta

SEQ ID NO: 855284 - DNA, 15 bp, Homo sapiens
ttgtactgaaagtag

SEQ ID NO: 855285 - DNA, 15 bp, Homo sapiens
tgtactgaaagtagt

SEQ ID NO: 855286 - DNA, 15 bp, Homo sapiens
gtactgaaagtagtt

SEQ ID NO: 855287 - DNA, 15 bp, Homo sapiens
tactgaaagtagttt

SEQ ID NO: 855288 - DNA, 15 bp, Homo sapiens
actgaaagtagtttt

SEQ ID NO: 855289 - DNA, 15 bp, Homo sapiens
ctgaaagtagttttt

SEQ ID NO: 855290 - DNA, 15 bp, Homo sapiens
tgaaagtagtttttg

SEQ ID NO: 855291 - DNA, 15 bp, Homo sapiens
gaaagtagtttttgc

SEQ ID NO: 855292 - DNA, 15 bp, Homo sapiens
aaagtagtttttgct

SEQ ID NO: 855293 - DNA, 15 bp, Homo sapiens
aagtagtttttgctg

SEQ ID NO: 855294 - DNA, 15 bp, Homo sapiens
agtagtttttgctgt

SEQ ID NO: 855295 - DNA, 15 bp, Homo sapiens
gtagtttttgctgta

SEQ ID NO: 855296 - DNA, 15 bp, Homo sapiens
tagtttttgctgtaa

SEQ ID NO: 855297 - DNA, 15 bp, Homo sapiens
agtttttgctgtaag

SEQ ID NO: 855298 - DNA, 15 bp, Homo sapiens
gtttttgctgtaaga

SEQ ID NO: 855299 - DNA, 15 bp, Homo sapiens
tttttgctgtaagaa

SEQ ID NO: 855300 - DNA, 15 bp, Homo sapiens
ttttgctgtaagaat

SEQ ID NO: 855301 - DNA, 15 bp, Homo sapiens
tttgctgtaagaatc

SEQ ID NO: 855302 - DNA, 15 bp, Homo sapiens
ttgctgtaagaatct

SEQ ID NO: 855303 - DNA, 15 bp, Homo sapiens
tgctgtaagaatctg

SEQ ID NO: 855304 - DNA, 15 bp, Homo sapiens
gctgtaagaatctga

SEQ ID NO: 855305 - DNA, 15 bp, Homo sapiens
ctgtaagaatctgag

SEQ ID NO: 855306 - DNA, 15 bp, Homo sapiens
tgtaagaatctgagg

SEQ ID NO: 855307 - DNA, 15 bp, Homo sapiens
gtaagaatctgaggg

SEQ ID NO: 855308 - DNA, 15 bp, Homo sapiens
taagaatctgagggg

SEQ ID NO: 855309 - DNA, 15 bp, Homo sapiens
aagaatctgagggga

SEQ ID NO: 855310 - DNA, 15 bp, Homo sapiens
agaatctgaggggag

SEQ ID NO: 855311 - DNA, 15 bp, Homo sapiens
gaatctgaggggagg

SEQ ID NO: 855312 - DNA, 15 bp, Homo sapiens
aatctgaggggagga

SEQ ID NO: 855313 - DNA, 15 bp, Homo sapiens
atctgaggggaggag

SEQ ID NO: 855314 - DNA, 15 bp, Homo sapiens
tctgaggggaggagt

SEQ ID NO: 855315 - DNA, 15 bp, Homo sapiens
ctgaggggaggagtc

SEQ ID NO: 855316 - DNA, 15 bp, Homo sapiens
tgaggggaggagtca

SEQ ID NO: 855317 - DNA, 15 bp, Homo sapiens
gaggggaggagtcat

SEQ ID NO: 855318 - DNA, 15 bp, Homo sapiens
aggggaggagtcatt

SEQ ID NO: 855319 - DNA, 15 bp, Homo sapiens
ggggaggagtcattt

SEQ ID NO: 855320 - DNA, 15 bp, Homo sapiens
gggaggagtcatttc

SEQ ID NO: 855321 - DNA, 15 bp, Homo sapiens
ggaggagtcatttct

SEQ ID NO: 855322 - DNA, 15 bp, Homo sapiens
gaggagtcatttctt

SEQ ID NO: 855323 - DNA, 15 bp, Homo sapiens
aggagtcatttcttc

SEQ ID NO: 855324 - DNA, 15 bp, Homo sapiens
ggagtcatttcttca

SEQ ID NO: 855325 - DNA, 15 bp, Homo sapiens
gagtcatttcttcaa

SEQ ID NO: 855326 - DNA, 15 bp, Homo sapiens
agtcatttcttcaat

SEQ ID NO: 855327 - DNA, 15 bp, Homo sapiens
gtcatttcttcaatt

SEQ ID NO: 855328 - DNA, 15 bp, Homo sapiens
tcatttcttcaattt

SEQ ID NO: 855329 - DNA, 15 bp, Homo sapiens
catttcttcaatttt

SEQ ID NO: 855330 - DNA, 15 bp, Homo sapiens
atttcttcaattttt

SEQ ID NO: 855331 - DNA, 15 bp, Homo sapiens
tttcttcaatttttt

SEQ ID NO: 855332 - DNA, 15 bp, Homo sapiens
ttcttcaattttttt

SEQ ID NO: 855333 - DNA, 15 bp, Homo sapiens
tcttcaatttttttt

SEQ ID NO: 855334 - DNA, 15 bp, Homo sapiens
cttcaattttttttt

SEQ ID NO: 855335 - DNA, 15 bp, Homo sapiens
ttcaatttttttttt

SEQ ID NO: 855336 - DNA, 15 bp, Homo sapiens
caatttttttttttg

SEQ ID NO: 855337 - DNA, 15 bp, Homo sapiens
aatttttttttttgg

SEQ ID NO: 855338 - DNA, 15 bp, Homo sapiens
atttttttttttggt

SEQ ID NO: 855339 - DNA, 15 bp, Homo sapiens
tttttttttttggtc

SEQ ID NO: 855340 - DNA, 15 bp, Homo sapiens
ttttttttttggtct

SEQ ID NO: 855341 - DNA, 15 bp, Homo sapiens
tttttttttggtctc

SEQ ID NO: 855342 - DNA, 15 bp, Homo sapiens
ttttttttggtctcc

SEQ ID NO: 855343 - DNA, 15 bp, Homo sapiens
tttttttggtctcct

SEQ ID NO: 855344 - DNA, 15 bp, Homo sapiens
ttttttggtctcctt

SEQ ID NO: 855345 - DNA, 15 bp, Homo sapiens
tttttggtctccttt

SEQ ID NO: 855346 - DNA, 15 bp, Homo sapiens
ttttggtctcctttt

SEQ ID NO: 855347 - DNA, 15 bp, Homo sapiens
tttggtctcctttta

SEQ ID NO: 855348 - DNA, 15 bp, Homo sapiens
ttggtctccttttaa

SEQ ID NO: 855349 - DNA, 15 bp, Homo sapiens
tggtctccttttaat

SEQ ID NO: 855350 - DNA, 15 bp, Homo sapiens
ggtctccttttaatg

SEQ ID NO: 855351 - DNA, 15 bp, Homo sapiens
gtctccttttaatgg

SEQ ID NO: 855352 - DNA, 15 bp, Homo sapiens
tctccttttaatggt

SEQ ID NO: 855353 - DNA, 15 bp, Homo sapiens
ctccttttaatggtt

SEQ ID NO: 855354 - DNA, 15 bp, Homo sapiens
tccttttaatggttt

SEQ ID NO: 855355 - DNA, 15 bp, Homo sapiens
ccttttaatggtttc

SEQ ID NO: 855356 - DNA, 15 bp, Homo sapiens
cttttaatggtttct

SEQ ID NO: 855357 - DNA, 15 bp, Homo sapiens
ttttaatggtttctt

SEQ ID NO: 855358 - DNA, 15 bp, Homo sapiens
tttaatggtttcttg

SEQ ID NO: 855359 - DNA, 15 bp, Homo sapiens
ttaatggtttcttga

SEQ ID NO: 855360 - DNA, 15 bp, Homo sapiens
taatggtttcttgat

SEQ ID NO: 855361 - DNA, 15 bp, Homo sapiens
aatggtttcttgatc

SEQ ID NO: 855362 - DNA, 15 bp, Homo sapiens
atggtttcttgatca

SEQ ID NO: 855363 - DNA, 15 bp, Homo sapiens
tggtttcttgatcat

SEQ ID NO: 855364 - DNA, 15 bp, Homo sapiens
ggtttcttgatcatg

SEQ ID NO: 855365 - DNA, 15 bp, Homo sapiens
gtttcttgatcatgt

SEQ ID NO: 855366 - DNA, 15 bp, Homo sapiens
tttcttgatcatgtc

SEQ ID NO: 855367 - DNA, 15 bp, Homo sapiens
ttcttgatcatgtct

SEQ ID NO: 855368 - DNA, 15 bp, Homo sapiens
tcttgatcatgtcta

SEQ ID NO: 855369 - DNA, 15 bp, Homo sapiens
cttgatcatgtctat

SEQ ID NO: 855370 - DNA, 15 bp, Homo sapiens
ttgatcatgtctatc

SEQ ID NO: 855371 - DNA, 15 bp, Homo sapiens
tgatcatgtctatcc

SEQ ID NO: 855372 - DNA, 15 bp, Homo sapiens
gatcatgtctatcct

SEQ ID NO: 855373 - DNA, 15 bp, Homo sapiens
atcatgtctatcctt

SEQ ID NO: 855374 - DNA, 15 bp, Homo sapiens
tcatgtctatcctta

SEQ ID NO: 855375 - DNA, 15 bp, Homo sapiens
catgtctatccttat

SEQ ID NO: 855376 - DNA, 15 bp, Homo sapiens
atgtctatccttatt

SEQ ID NO: 855377 - DNA, 15 bp, Homo sapiens
tgtctatccttattt

SEQ ID NO: 855378 - DNA, 15 bp, Homo sapiens
gtctatccttatttt

SEQ ID NO: 855379 - DNA, 15 bp, Homo sapiens
tctatccttattttt

SEQ ID NO: 855380 - DNA, 15 bp, Homo sapiens
ctatccttatttttc

SEQ ID NO: 855381 - DNA, 15 bp, Homo sapiens
tatccttatttttct

SEQ ID NO: 855382 - DNA, 15 bp, Homo sapiens
atccttatttttctg

SEQ ID NO: 855383 - DNA, 15 bp, Homo sapiens
tccttatttttctgt

SEQ ID NO: 855384 - DNA, 15 bp, Homo sapiens
ccttatttttctgtt

SEQ ID NO: 855385 - DNA, 15 bp, Homo sapiens
cttatttttctgttt

SEQ ID NO: 855386 - DNA, 15 bp, Homo sapiens
ttatttttctgtttt

SEQ ID NO: 855387 - DNA, 15 bp, Homo sapiens
tatttttctgttttc

SEQ ID NO: 855388 - DNA, 15 bp, Homo sapiens
atttttctgttttca

SEQ ID NO: 855389 - DNA, 15 bp, Homo sapiens
tttttctgttttcac

SEQ ID NO: 855390 - DNA, 15 bp, Homo sapiens
ttttctgttttcaca

SEQ ID NO: 855391 - DNA, 15 bp, Homo sapiens
tttctgttttcacaa

SEQ ID NO: 855392 - DNA, 15 bp, Homo sapiens
ttctgttttcacaaa

SEQ ID NO: 855393 - DNA, 15 bp, Homo sapiens
tctgttttcacaaat

SEQ ID NO: 855394 - DNA, 15 bp, Homo sapiens
ctgttttcacaaatt

SEQ ID NO: 855395 - DNA, 15 bp, Homo sapiens
tgttttcacaaattt

SEQ ID NO: 855396 - DNA, 15 bp, Homo sapiens
gttttcacaaatttt

SEQ ID NO: 855397 - DNA, 15 bp, Homo sapiens
ttttcacaaattttt

SEQ ID NO: 855398 - DNA, 15 bp, Homo sapiens
tttcacaaatttttg

SEQ ID NO: 855399 - DNA, 15 bp, Homo sapiens
ttcacaaatttttgt

SEQ ID NO: 855400 - DNA, 15 bp, Homo sapiens
tcacaaatttttgtg

SEQ ID NO: 855401 - DNA, 15 bp, Homo sapiens
cacaaatttttgtgg

SEQ ID NO: 855402 - DNA, 15 bp, Homo sapiens
acaaatttttgtggt

SEQ ID NO: 855403 - DNA, 15 bp, Homo sapiens
caaatttttgtggta

SEQ ID NO: 855404 - DNA, 15 bp, Homo sapiens
aaatttttgtggtat

SEQ ID NO: 855405 - DNA, 15 bp, Homo sapiens
aatttttgtggtata

SEQ ID NO: 855406 - DNA, 15 bp, Homo sapiens
atttttgtggtatat

SEQ ID NO: 855407 - DNA, 15 bp, Homo sapiens
tttttgtggtatatt

SEQ ID NO: 855408 - DNA, 15 bp, Homo sapiens
ttttgtggtatattt

SEQ ID NO: 855409 - DNA, 15 bp, Homo sapiens
tttgtggtatatttt

SEQ ID NO: 855410 - DNA, 15 bp, Homo sapiens
ttgtggtatattttc

SEQ ID NO: 855411 - DNA, 15 bp, Homo sapiens
tgtggtatattttcc

SEQ ID NO: 855412 - DNA, 15 bp, Homo sapiens
gtggtatattttcct

SEQ ID NO: 855413 - DNA, 15 bp, Homo sapiens
tggtatattttcctc

SEQ ID NO: 855414 - DNA, 15 bp, Homo sapiens
ggtatattttcctct

SEQ ID NO: 855415 - DNA, 15 bp, Homo sapiens
gtatattttcctctc

SEQ ID NO: 855416 - DNA, 15 bp, Homo sapiens
tatattttcctctca

SEQ ID NO: 855417 - DNA, 15 bp, Homo sapiens
atattttcctctcat

SEQ ID NO: 855418 - DNA, 15 bp, Homo sapiens
tattttcctctcatg

SEQ ID NO: 855419 - DNA, 15 bp, Homo sapiens
attttcctctcatga

SEQ ID NO: 855420 - DNA, 15 bp, Homo sapiens
ttttcctctcatgac

SEQ ID NO: 855421 - DNA, 15 bp, Homo sapiens
tttcctctcatgacc

SEQ ID NO: 855422 - DNA, 15 bp, Homo sapiens
ttcctctcatgacct

SEQ ID NO: 855423 - DNA, 15 bp, Homo sapiens
tcctctcatgacctc

SEQ ID NO: 855424 - DNA, 15 bp, Homo sapiens
cctctcatgacctct

SEQ ID NO: 855425 - DNA, 15 bp, Homo sapiens
ctctcatgacctctg

SEQ ID NO: 855426 - DNA, 15 bp, Homo sapiens
tctcatgacctctgt

SEQ ID NO: 855427 - DNA, 15 bp, Homo sapiens
ctcatgacctctgtc

SEQ ID NO: 855428 - DNA, 15 bp, Homo sapiens
tcatgacctctgtct

SEQ ID NO: 855429 - DNA, 15 bp, Homo sapiens
catgacctctgtctc

SEQ ID NO: 855430 - DNA, 15 bp, Homo sapiens
atgacctctgtctca

SEQ ID NO: 855431 - DNA, 15 bp, Homo sapiens
tgacctctgtctcaa

SEQ ID NO: 855432 - DNA, 15 bp, Homo sapiens
gacctctgtctcaag

SEQ ID NO: 855433 - DNA, 15 bp, Homo sapiens
acctctgtctcaaga

SEQ ID NO: 855434 - DNA, 15 bp, Homo sapiens
cctctgtctcaagac

SEQ ID NO: 855435 - DNA, 15 bp, Homo sapiens
ctctgtctcaagact

SEQ ID NO: 855436 - DNA, 15 bp, Homo sapiens
tctgtctcaagactt

SEQ ID NO: 855437 - DNA, 15 bp, Homo sapiens
ctgtctcaagacttc

SEQ ID NO: 855438 - DNA, 15 bp, Homo sapiens
tgtctcaagacttct

SEQ ID NO: 855439 - DNA, 15 bp, Homo sapiens
gtctcaagacttctt

SEQ ID NO: 855440 - DNA, 15 bp, Homo sapiens
tctcaagacttcttt

SEQ ID NO: 855441 - DNA, 15 bp, Homo sapiens
ctcaagacttctttc

SEQ ID NO: 855442 - DNA, 15 bp, Homo sapiens
tcaagacttctttcc

SEQ ID NO: 855443 - DNA, 15 bp, Homo sapiens
caagacttctttcca

SEQ ID NO: 855444 - DNA, 15 bp, Homo sapiens
aagacttctttccat

SEQ ID NO: 855445 - DNA, 15 bp, Homo sapiens
agacttctttccatc

SEQ ID NO: 855446 - DNA, 15 bp, Homo sapiens
gacttctttccatcc

SEQ ID NO: 855447 - DNA, 15 bp, Homo sapiens
acttctttccatcca

SEQ ID NO: 855448 - DNA, 15 bp, Homo sapiens
cttctttccatccat

SEQ ID NO: 855449 - DNA, 15 bp, Homo sapiens
ttctttccatccatc

SEQ ID NO: 855450 - DNA, 15 bp, Homo sapiens
tctttccatccatct

SEQ ID NO: 855451 - DNA, 15 bp, Homo sapiens
ctttccatccatctc

SEQ ID NO: 855452 - DNA, 15 bp, Homo sapiens
tttccatccatctct

SEQ ID NO: 855453 - DNA, 15 bp, Homo sapiens
ttccatccatctctt

SEQ ID NO: 855454 - DNA, 15 bp, Homo sapiens
tccatccatctcttc

SEQ ID NO: 855455 - DNA, 15 bp, Homo sapiens
ccatccatctcttct

SEQ ID NO: 855456 - DNA, 15 bp, Homo sapiens
catccatctcttctc

SEQ ID NO: 855457 - DNA, 15 bp, Homo sapiens
atccatctcttctca

SEQ ID NO: 855458 - DNA, 15 bp, Homo sapiens
tccatctcttctcat

SEQ ID NO: 855459 - DNA, 15 bp, Homo sapiens
ccatctcttctcatt

SEQ ID NO: 855460 - DNA, 15 bp, Homo sapiens
catctcttctcattt

SEQ ID NO: 855461 - DNA, 15 bp, Homo sapiens
atctcttctcatttc

SEQ ID NO: 855462 - DNA, 15 bp, Homo sapiens
tctcttctcatttca

SEQ ID NO: 855463 - DNA, 15 bp, Homo sapiens
ctcttctcatttcat

SEQ ID NO: 855464 - DNA, 15 bp, Homo sapiens
tcttctcatttcatc

SEQ ID NO: 855465 - DNA, 15 bp, Homo sapiens
cttctcatttcatcc

SEQ ID NO: 855466 - DNA, 15 bp, Homo sapiens
ttctcatttcatcct

SEQ ID NO: 855467 - DNA, 15 bp, Homo sapiens
tctcatttcatcctg

SEQ ID NO: 855468 - DNA, 15 bp, Homo sapiens
ctcatttcatcctgt

SEQ ID NO: 855469 - DNA, 15 bp, Homo sapiens
tcatttcatcctgta

SEQ ID NO: 855470 - DNA, 15 bp, Homo sapiens
catttcatcctgtag

SEQ ID NO: 855471 - DNA, 15 bp, Homo sapiens
atttcatcctgtaga

SEQ ID NO: 855472 - DNA, 15 bp, Homo sapiens
tttcatcctgtagag

SEQ ID NO: 855473 - DNA, 15 bp, Homo sapiens
ttcatcctgtagagt

SEQ ID NO: 855474 - DNA, 15 bp, Homo sapiens
tcatcctgtagagtg

SEQ ID NO: 855475 - DNA, 15 bp, Homo sapiens
catcctgtagagtgt

SEQ ID NO: 855476 - DNA, 15 bp, Homo sapiens
atcctgtagagtgtc

SEQ ID NO: 855477 - DNA, 15 bp, Homo sapiens
tcctgtagagtgtct

SEQ ID NO: 855478 - DNA, 15 bp, Homo sapiens
cctgtagagtgtctg

SEQ ID NO: 855479 - DNA, 15 bp, Homo sapiens
ctgtagagtgtctgt

SEQ ID NO: 855480 - DNA, 15 bp, Homo sapiens
tgtagagtgtctgtg

SEQ ID NO: 855481 - DNA, 15 bp, Homo sapiens
gtagagtgtctgtgg

SEQ ID NO: 855482 - DNA, 15 bp, Homo sapiens
tagagtgtctgtggt

SEQ ID NO: 855483 - DNA, 15 bp, Homo sapiens
agagtgtctgtggta

SEQ ID NO: 855484 - DNA, 15 bp, Homo sapiens
gagtgtctgtggtaa

SEQ ID NO: 855485 - DNA, 15 bp, Homo sapiens
agtgtctgtggtaag

SEQ ID NO: 855486 - DNA, 15 bp, Homo sapiens
gtgtctgtggtaaga

SEQ ID NO: 855487 - DNA, 15 bp, Homo sapiens
tgtctgtggtaagag

SEQ ID NO: 855488 - DNA, 15 bp, Homo sapiens
gtctgtggtaagagc

SEQ ID NO: 855489 - DNA, 15 bp, Homo sapiens
tctgtggtaagagcc

SEQ ID NO: 855490 - DNA, 15 bp, Homo sapiens
ctgtggtaagagccc

SEQ ID NO: 855491 - DNA, 15 bp, Homo sapiens
tgtggtaagagccct

SEQ ID NO: 855492 - DNA, 15 bp, Homo sapiens
gtggtaagagccctg

SEQ ID NO: 855493 - DNA, 15 bp, Homo sapiens
tggtaagagccctgc

SEQ ID NO: 855494 - DNA, 15 bp, Homo sapiens
ggtaagagccctgca

SEQ ID NO: 855495 - DNA, 15 bp, Homo sapiens
gtaagagccctgcat

SEQ ID NO: 855496 - DNA, 15 bp, Homo sapiens
taagagccctgcatt

SEQ ID NO: 855497 - DNA, 15 bp, Homo sapiens
aagagccctgcattc

SEQ ID NO: 855498 - DNA, 15 bp, Homo sapiens
agagccctgcattct

SEQ ID NO: 855499 - DNA, 15 bp, Homo sapiens
gagccctgcattcta

SEQ ID NO: 855500 - DNA, 15 bp, Homo sapiens
agccctgcattctac

SEQ ID NO: 855501 - DNA, 15 bp, Homo sapiens
gccctgcattctact

SEQ ID NO: 855502 - DNA, 15 bp, Homo sapiens
ccctgcattctactc

SEQ ID NO: 855503 - DNA, 15 bp, Homo sapiens
cctgcattctactct

SEQ ID NO: 855504 - DNA, 15 bp, Homo sapiens
ctgcattctactctg

SEQ ID NO: 855505 - DNA, 15 bp, Homo sapiens
tgcattctactctgg

SEQ ID NO: 855506 - DNA, 15 bp, Homo sapiens
gcattctactctggc

SEQ ID NO: 855507 - DNA, 15 bp, Homo sapiens
cattctactctggcc

SEQ ID NO: 855508 - DNA, 15 bp, Homo sapiens
attctactctggcct

SEQ ID NO: 855509 - DNA, 15 bp, Homo sapiens
ttctactctggcctt

SEQ ID NO: 855510 - DNA, 15 bp, Homo sapiens
tctactctggccttg

SEQ ID NO: 855511 - DNA, 15 bp, Homo sapiens
ctactctggccttgc

SEQ ID NO: 855512 - DNA, 15 bp, Homo sapiens
tactctggccttgcc

SEQ ID NO: 855513 - DNA, 15 bp, Homo sapiens
actctggccttgcca

SEQ ID NO: 855514 - DNA, 15 bp, Homo sapiens
ctctggccttgccat

SEQ ID NO: 855515 - DNA, 15 bp, Homo sapiens
tctggccttgccatg

SEQ ID NO: 855516 - DNA, 15 bp, Homo sapiens
ctggccttgccatgt

SEQ ID NO: 855517 - DNA, 15 bp, Homo sapiens
tggccttgccatgtg

SEQ ID NO: 855518 - DNA, 15 bp, Homo sapiens
ggccttgccatgtgt

SEQ ID NO: 855519 - DNA, 15 bp, Homo sapiens
gccttgccatgtgtg

SEQ ID NO: 855520 - DNA, 15 bp, Homo sapiens
ccttgccatgtgtgg

SEQ ID NO: 855521 - DNA, 15 bp, Homo sapiens
cttgccatgtgtggc

SEQ ID NO: 855522 - DNA, 15 bp, Homo sapiens
ttgccatgtgtggcc

SEQ ID NO: 855523 - DNA, 15 bp, Homo sapiens
tgccatgtgtggcct

SEQ ID NO: 855524 - DNA, 15 bp, Homo sapiens
gccatgtgtggcctt

SEQ ID NO: 855525 - DNA, 15 bp, Homo sapiens
ccatgtgtggccttg

SEQ ID NO: 855526 - DNA, 15 bp, Homo sapiens
catgtgtggccttgg

SEQ ID NO: 855527 - DNA, 15 bp, Homo sapiens
atgtgtggccttggg

SEQ ID NO: 855528 - DNA, 15 bp, Homo sapiens
tgtgtggccttgggc

SEQ ID NO: 855529 - DNA, 15 bp, Homo sapiens
gtgtggccttgggca

SEQ ID NO: 855530 - DNA, 15 bp, Homo sapiens
tgtggccttgggcaa

SEQ ID NO: 855531 - DNA, 15 bp, Homo sapiens
gtggccttgggcaag

SEQ ID NO: 855532 - DNA, 15 bp, Homo sapiens
tggccttgggcaagt

SEQ ID NO: 855533 - DNA, 15 bp, Homo sapiens
ggccttgggcaagtc

SEQ ID NO: 855534 - DNA, 15 bp, Homo sapiens
gccttgggcaagtcc

SEQ ID NO: 855535 - DNA, 15 bp, Homo sapiens
ccttgggcaagtcct

SEQ ID NO: 855536 - DNA, 15 bp, Homo sapiens
cttgggcaagtccta

SEQ ID NO: 855537 - DNA, 15 bp, Homo sapiens
ttgggcaagtcctag

SEQ ID NO: 855538 - DNA, 15 bp, Homo sapiens
tgggcaagtcctagc

SEQ ID NO: 855539 - DNA, 15 bp, Homo sapiens
gggcaagtcctagcc

SEQ ID NO: 855540 - DNA, 15 bp, Homo sapiens
ggcaagtcctagcct

SEQ ID NO: 855541 - DNA, 15 bp, Homo sapiens
gcaagtcctagcctc

SEQ ID NO: 855542 - DNA, 15 bp, Homo sapiens
caagtcctagcctcc

SEQ ID NO: 855543 - DNA, 15 bp, Homo sapiens
aagtcctagcctcct

SEQ ID NO: 855544 - DNA, 15 bp, Homo sapiens
agtcctagcctcctt

SEQ ID NO: 855545 - DNA, 15 bp, Homo sapiens
gtcctagcctccttg

SEQ ID NO: 855546 - DNA, 15 bp, Homo sapiens
tcctagcctccttga

SEQ ID NO: 855547 - DNA, 15 bp, Homo sapiens
cctagcctccttgag

SEQ ID NO: 855548 - DNA, 15 bp, Homo sapiens
ctagcctccttgagg

SEQ ID NO: 855549 - DNA, 15 bp, Homo sapiens
tagcctccttgaggg

SEQ ID NO: 855550 - DNA, 15 bp, Homo sapiens
agcctccttgagggt

SEQ ID NO: 855551 - DNA, 15 bp, Homo sapiens
gcctccttgagggtc

SEQ ID NO: 855552 - DNA, 15 bp, Homo sapiens
cctccttgagggtct

SEQ ID NO: 855553 - DNA, 15 bp, Homo sapiens
ctccttgagggtctt

SEQ ID NO: 855554 - DNA, 15 bp, Homo sapiens
tccttgagggtctta

SEQ ID NO: 855555 - DNA, 15 bp, Homo sapiens
ccttgagggtcttat

SEQ ID NO: 855556 - DNA, 15 bp, Homo sapiens
cttgagggtcttatt

SEQ ID NO: 855557 - DNA, 15 bp, Homo sapiens
ttgagggtcttattt

SEQ ID NO: 855558 - DNA, 15 bp, Homo sapiens
tgagggtcttatttt

SEQ ID NO: 855559 - DNA, 15 bp, Homo sapiens
gagggtcttattttt

SEQ ID NO: 855560 - DNA, 15 bp, Homo sapiens
agggtcttatttttc

SEQ ID NO: 855561 - DNA, 15 bp, Homo sapiens
gggtcttatttttct

SEQ ID NO: 855562 - DNA, 15 bp, Homo sapiens
ggtcttatttttctc

SEQ ID NO: 855563 - DNA, 15 bp, Homo sapiens
gtcttatttttctca

SEQ ID NO: 855564 - DNA, 15 bp, Homo sapiens
tcttatttttctcat

SEQ ID NO: 855565 - DNA, 15 bp, Homo sapiens
cttatttttctcatt

SEQ ID NO: 855566 - DNA, 15 bp, Homo sapiens
ttatttttctcattt

SEQ ID NO: 855567 - DNA, 15 bp, Homo sapiens
tatttttctcatttg

SEQ ID NO: 855568 - DNA, 15 bp, Homo sapiens
atttttctcatttgt

SEQ ID NO: 855569 - DNA, 15 bp, Homo sapiens
tttttctcatttgta

SEQ ID NO: 855570 - DNA, 15 bp, Homo sapiens
ttttctcatttgtaa

SEQ ID NO: 855571 - DNA, 15 bp, Homo sapiens
tttctcatttgtaaa

SEQ ID NO: 855572 - DNA, 15 bp, Homo sapiens
ttctcatttgtaaaa

SEQ ID NO: 855573 - DNA, 15 bp, Homo sapiens
tctcatttgtaaaat

SEQ ID NO: 855574 - DNA, 15 bp, Homo sapiens
ctcatttgtaaaatg

SEQ ID NO: 855575 - DNA, 15 bp, Homo sapiens
tcatttgtaaaatga

SEQ ID NO: 855576 - DNA, 15 bp, Homo sapiens
catttgtaaaatgaa

SEQ ID NO: 855577 - DNA, 15 bp, Homo sapiens
atttgtaaaatgaaa

SEQ ID NO: 855578 - DNA, 15 bp, Homo sapiens
tttgtaaaatgaaac

SEQ ID NO: 855579 - DNA, 15 bp, Homo sapiens
ttgtaaaatgaaaca

SEQ ID NO: 855580 - DNA, 15 bp, Homo sapiens
tgtaaaatgaaacag

SEQ ID NO: 855581 - DNA, 15 bp, Homo sapiens
gtaaaatgaaacagt

SEQ ID NO: 855582 - DNA, 15 bp, Homo sapiens
taaaatgaaacagtt

SEQ ID NO: 855583 - DNA, 15 bp, Homo sapiens
aaaatgaaacagttt

SEQ ID NO: 855584 - DNA, 15 bp, Homo sapiens
aaatgaaacagtttg

SEQ ID NO: 855585 - DNA, 15 bp, Homo sapiens
aatgaaacagtttga

SEQ ID NO: 855586 - DNA, 15 bp, Homo sapiens
atgaaacagtttgat

SEQ ID NO: 855587 - DNA, 15 bp, Homo sapiens
tgaaacagtttgatg

SEQ ID NO: 855588 - DNA, 15 bp, Homo sapiens
gaaacagtttgatga

SEQ ID NO: 855589 - DNA, 15 bp, Homo sapiens
aaacagtttgatgag

SEQ ID NO: 855590 - DNA, 15 bp, Homo sapiens
aacagtttgatgaga

SEQ ID NO: 855591 - DNA, 15 bp, Homo sapiens
acagtttgatgagaa

SEQ ID NO: 855592 - DNA, 15 bp, Homo sapiens
cagtttgatgagaag

SEQ ID NO: 855593 - DNA, 15 bp, Homo sapiens
agtttgatgagaagt

SEQ ID NO: 855594 - DNA, 15 bp, Homo sapiens
gtttgatgagaagtt

SEQ ID NO: 855595 - DNA, 15 bp, Homo sapiens
tttgatgagaagttt

SEQ ID NO: 855596 - DNA, 15 bp, Homo sapiens
ttgatgagaagtttt

SEQ ID NO: 855597 - DNA, 15 bp, Homo sapiens
tgatgagaagttttc

SEQ ID NO: 855598 - DNA, 15 bp, Homo sapiens
gatgagaagttttct

SEQ ID NO: 855599 - DNA, 15 bp, Homo sapiens
atgagaagttttcta

SEQ ID NO: 855600 - DNA, 15 bp, Homo sapiens
tgagaagttttctaa

SEQ ID NO: 855601 - DNA, 15 bp, Homo sapiens
gagaagttttctaag

SEQ ID NO: 855602 - DNA, 15 bp, Homo sapiens
agaagttttctaagg

SEQ ID NO: 855603 - DNA, 15 bp, Homo sapiens
gaagttttctaaggt

SEQ ID NO: 855604 - DNA, 15 bp, Homo sapiens
aagttttctaaggtt

SEQ ID NO: 855605 - DNA, 15 bp, Homo sapiens
agttttctaaggttc

SEQ ID NO: 855606 - DNA, 15 bp, Homo sapiens
gttttctaaggttcc

SEQ ID NO: 855607 - DNA, 15 bp, Homo sapiens
ttttctaaggttcct

SEQ ID NO: 855608 - DNA, 15 bp, Homo sapiens
tttctaaggttcctt

SEQ ID NO: 855609 - DNA, 15 bp, Homo sapiens
ttctaaggttccttc

SEQ ID NO: 855610 - DNA, 15 bp, Homo sapiens
tctaaggttccttca

SEQ ID NO: 855611 - DNA, 15 bp, Homo sapiens
ctaaggttccttcaa

SEQ ID NO: 855612 - DNA, 15 bp, Homo sapiens
taaggttccttcaag

SEQ ID NO: 855613 - DNA, 15 bp, Homo sapiens
aaggttccttcaagc

SEQ ID NO: 855614 - DNA, 15 bp, Homo sapiens
aggttccttcaagct

SEQ ID NO: 855615 - DNA, 15 bp, Homo sapiens
ggttccttcaagctt

SEQ ID NO: 855616 - DNA, 15 bp, Homo sapiens
gttccttcaagcttt

SEQ ID NO: 855617 - DNA, 15 bp, Homo sapiens
ttccttcaagctttg

SEQ ID NO: 855618 - DNA, 15 bp, Homo sapiens
tccttcaagctttga

SEQ ID NO: 855619 - DNA, 15 bp, Homo sapiens
ccttcaagctttgac

SEQ ID NO: 855620 - DNA, 15 bp, Homo sapiens
cttcaagctttgaca

SEQ ID NO: 855621 - DNA, 15 bp, Homo sapiens
ttcaagctttgacaa

SEQ ID NO: 855622 - DNA, 15 bp, Homo sapiens
tcaagctttgacaat

SEQ ID NO: 855623 - DNA, 15 bp, Homo sapiens
caagctttgacaatc

SEQ ID NO: 855624 - DNA, 15 bp, Homo sapiens
aagctttgacaatct

SEQ ID NO: 855625 - DNA, 15 bp, Homo sapiens
agctttgacaatctc

SEQ ID NO: 855626 - DNA, 15 bp, Homo sapiens
gctttgacaatctct

SEQ ID NO: 855627 - DNA, 15 bp, Homo sapiens
ctttgacaatctctc

SEQ ID NO: 855628 - DNA, 15 bp, Homo sapiens
tttgacaatctctct

SEQ ID NO: 855629 - DNA, 15 bp, Homo sapiens
ttgacaatctctctc

SEQ ID NO: 855630 - DNA, 15 bp, Homo sapiens
tgacaatctctctct

SEQ ID NO: 855631 - DNA, 15 bp, Homo sapiens
gacaatctctctctt

SEQ ID NO: 855632 - DNA, 15 bp, Homo sapiens
acaatctctctcttc

SEQ ID NO: 855633 - DNA, 15 bp, Homo sapiens
caatctctctcttct

SEQ ID NO: 855634 - DNA, 15 bp, Homo sapiens
aatctctctcttctg

SEQ ID NO: 855635 - DNA, 15 bp, Homo sapiens
atctctctcttctgg

SEQ ID NO: 855636 - DNA, 15 bp, Homo sapiens
tctctctcttctgga

SEQ ID NO: 855637 - DNA, 15 bp, Homo sapiens
ctctctcttctggat

SEQ ID NO: 855638 - DNA, 15 bp, Homo sapiens
tctctcttctggatc

SEQ ID NO: 855639 - DNA, 15 bp, Homo sapiens
ctctcttctggatct

SEQ ID NO: 855640 - DNA, 15 bp, Homo sapiens
tctcttctggatctt

SEQ ID NO: 855641 - DNA, 15 bp, Homo sapiens
ctcttctggatcttt

SEQ ID NO: 855642 - DNA, 15 bp, Homo sapiens
tcttctggatctttt

SEQ ID NO: 855643 - DNA, 15 bp, Homo sapiens
cttctggatcttttt

SEQ ID NO: 855644 - DNA, 15 bp, Homo sapiens
ttctggatctttttc

SEQ ID NO: 855645 - DNA, 15 bp, Homo sapiens
tctggatctttttcc

SEQ ID NO: 855646 - DNA, 15 bp, Homo sapiens
ctggatctttttccc

SEQ ID NO: 855647 - DNA, 15 bp, Homo sapiens
tggatctttttccca

SEQ ID NO: 855648 - DNA, 15 bp, Homo sapiens
ggatctttttcccat

SEQ ID NO: 855649 - DNA, 15 bp, Homo sapiens
gatctttttcccatg

SEQ ID NO: 855650 - DNA, 15 bp, Homo sapiens
atctttttcccatga

SEQ ID NO: 855651 - DNA, 15 bp, Homo sapiens
tctttttcccatgaa

SEQ ID NO: 855652 - DNA, 15 bp, Homo sapiens
ctttttcccatgaaa

SEQ ID NO: 855653 - DNA, 15 bp, Homo sapiens
tttttcccatgaaaa

SEQ ID NO: 855654 - DNA, 15 bp, Homo sapiens
ttttcccatgaaaaa

SEQ ID NO: 855655 - DNA, 15 bp, Homo sapiens
tttcccatgaaaaat

SEQ ID NO: 855656 - DNA, 15 bp, Homo sapiens
ttcccatgaaaaatt

SEQ ID NO: 855657 - DNA, 15 bp, Homo sapiens
tcccatgaaaaattt

SEQ ID NO: 855658 - DNA, 15 bp, Homo sapiens
cccatgaaaaatttc

SEQ ID NO: 855659 - DNA, 15 bp, Homo sapiens
ccatgaaaaatttca

SEQ ID NO: 855660 - DNA, 15 bp, Homo sapiens
catgaaaaatttcaa

SEQ ID NO: 855661 - DNA, 15 bp, Homo sapiens
atgaaaaatttcaac

SEQ ID NO: 855662 - DNA, 15 bp, Homo sapiens
tgaaaaatttcaact

SEQ ID NO: 855663 - DNA, 15 bp, Homo sapiens
gaaaaatttcaactc

SEQ ID NO: 855664 - DNA, 15 bp, Homo sapiens
aaaaatttcaactct

SEQ ID NO: 855665 - DNA, 15 bp, Homo sapiens
aaaatttcaactctt

SEQ ID NO: 855666 - DNA, 15 bp, Homo sapiens
aaatttcaactcttg

SEQ ID NO: 855667 - DNA, 15 bp, Homo sapiens
aatttcaactcttga

SEQ ID NO: 855668 - DNA, 15 bp, Homo sapiens
atttcaactcttgat

SEQ ID NO: 855669 - DNA, 15 bp, Homo sapiens
tttcaactcttgatt

SEQ ID NO: 855670 - DNA, 15 bp, Homo sapiens
ttcaactcttgatta

SEQ ID NO: 855671 - DNA, 15 bp, Homo sapiens
tcaactcttgattag

SEQ ID NO: 855672 - DNA, 15 bp, Homo sapiens
caactcttgattagc

SEQ ID NO: 855673 - DNA, 15 bp, Homo sapiens
aactcttgattagca

SEQ ID NO: 855674 - DNA, 15 bp, Homo sapiens
actcttgattagcat

SEQ ID NO: 855675 - DNA, 15 bp, Homo sapiens
ctcttgattagcatg

SEQ ID NO: 855676 - DNA, 15 bp, Homo sapiens
tcttgattagcatgt

SEQ ID NO: 855677 - DNA, 15 bp, Homo sapiens
cttgattagcatgta

SEQ ID NO: 855678 - DNA, 15 bp, Homo sapiens
ttgattagcatgtag

SEQ ID NO: 855679 - DNA, 15 bp, Homo sapiens
tgattagcatgtagg

SEQ ID NO: 855680 - DNA, 15 bp, Homo sapiens
gattagcatgtaggc

SEQ ID NO: 855681 - DNA, 15 bp, Homo sapiens
attagcatgtaggca

SEQ ID NO: 855682 - DNA, 15 bp, Homo sapiens
ttagcatgtaggcag

SEQ ID NO: 855683 - DNA, 15 bp, Homo sapiens
tagcatgtaggcagg

SEQ ID NO: 855684 - DNA, 15 bp, Homo sapiens
agcatgtaggcaggg

SEQ ID NO: 855685 - DNA, 15 bp, Homo sapiens
gcatgtaggcaggga

SEQ ID NO: 855686 - DNA, 15 bp, Homo sapiens
catgtaggcagggat

SEQ ID NO: 855687 - DNA, 15 bp, Homo sapiens
atgtaggcagggatt

SEQ ID NO: 855688 - DNA, 15 bp, Homo sapiens
tgtaggcagggatta

SEQ ID NO: 855689 - DNA, 15 bp, Homo sapiens
gtaggcagggattat

SEQ ID NO: 855690 - DNA, 15 bp, Homo sapiens
taggcagggattatt

SEQ ID NO: 855691 - DNA, 15 bp, Homo sapiens
aggcagggattattc

SEQ ID NO: 855692 - DNA, 15 bp, Homo sapiens
ggcagggattattcc

SEQ ID NO: 855693 - DNA, 15 bp, Homo sapiens
gcagggattattcca

SEQ ID NO: 855694 - DNA, 15 bp, Homo sapiens
cagggattattccac

SEQ ID NO: 855695 - DNA, 15 bp, Homo sapiens
agggattattccaca

SEQ ID NO: 855696 - DNA, 15 bp, Homo sapiens
gggattattccacat

SEQ ID NO: 855697 - DNA, 15 bp, Homo sapiens
ggattattccacatc

SEQ ID NO: 855698 - DNA, 15 bp, Homo sapiens
gattattccacatcc

SEQ ID NO: 855699 - DNA, 15 bp, Homo sapiens
attattccacatcct

SEQ ID NO: 855700 - DNA, 15 bp, Homo sapiens
ttattccacatcctt

SEQ ID NO: 855701 - DNA, 15 bp, Homo sapiens
tattccacatcctta

SEQ ID NO: 855702 - DNA, 15 bp, Homo sapiens
attccacatccttat

SEQ ID NO: 855703 - DNA, 15 bp, Homo sapiens
ttccacatccttata

SEQ ID NO: 855704 - DNA, 15 bp, Homo sapiens
tccacatccttatag

SEQ ID NO: 855705 - DNA, 15 bp, Homo sapiens
ccacatccttatagg

SEQ ID NO: 855706 - DNA, 15 bp, Homo sapiens
cacatccttatagga

SEQ ID NO: 855707 - DNA, 15 bp, Homo sapiens
acatccttataggaa

SEQ ID NO: 855708 - DNA, 15 bp, Homo sapiens
catccttataggaat

SEQ ID NO: 855709 - DNA, 15 bp, Homo sapiens
atccttataggaatc

SEQ ID NO: 855710 - DNA, 15 bp, Homo sapiens
tccttataggaatca

SEQ ID NO: 855711 - DNA, 15 bp, Homo sapiens
ccttataggaatcac

SEQ ID NO: 855712 - DNA, 15 bp, Homo sapiens
cttataggaatcaca

SEQ ID NO: 855713 - DNA, 15 bp, Homo sapiens
ttataggaatcacat

SEQ ID NO: 855714 - DNA, 15 bp, Homo sapiens
tataggaatcacatt

SEQ ID NO: 855715 - DNA, 15 bp, Homo sapiens
ataggaatcacattt

SEQ ID NO: 855716 - DNA, 15 bp, Homo sapiens
taggaatcacatttc

SEQ ID NO: 855717 - DNA, 15 bp, Homo sapiens
aggaatcacatttct

SEQ ID NO: 855718 - DNA, 15 bp, Homo sapiens
ggaatcacatttctg

SEQ ID NO: 855719 - DNA, 15 bp, Homo sapiens
gaatcacatttctgc

SEQ ID NO: 855720 - DNA, 15 bp, Homo sapiens
aatcacatttctgct

SEQ ID NO: 855721 - DNA, 15 bp, Homo sapiens
atcacatttctgcta

SEQ ID NO: 855722 - DNA, 15 bp, Homo sapiens
tcacatttctgctac

SEQ ID NO: 855723 - DNA, 15 bp, Homo sapiens
cacatttctgctact

SEQ ID NO: 855724 - DNA, 15 bp, Homo sapiens
acatttctgctactg

SEQ ID NO: 855725 - DNA, 15 bp, Homo sapiens
catttctgctactgt

SEQ ID NO: 855726 - DNA, 15 bp, Homo sapiens
atttctgctactgtc

SEQ ID NO: 855727 - DNA, 15 bp, Homo sapiens
tttctgctactgtcc

SEQ ID NO: 855728 - DNA, 15 bp, Homo sapiens
ttctgctactgtccc

SEQ ID NO: 855729 - DNA, 15 bp, Homo sapiens
tctgctactgtccct

SEQ ID NO: 855730 - DNA, 15 bp, Homo sapiens
ctgctactgtccctg

SEQ ID NO: 855731 - DNA, 15 bp, Homo sapiens
tgctactgtccctga

SEQ ID NO: 855732 - DNA, 15 bp, Homo sapiens
gctactgtccctgaa

SEQ ID NO: 855733 - DNA, 15 bp, Homo sapiens
ctactgtccctgaat

SEQ ID NO: 855734 - DNA, 15 bp, Homo sapiens
tactgtccctgaatg

SEQ ID NO: 855735 - DNA, 15 bp, Homo sapiens
actgtccctgaatgc

SEQ ID NO: 855736 - DNA, 15 bp, Homo sapiens
ctgtccctgaatgct

SEQ ID NO: 855737 - DNA, 15 bp, Homo sapiens
tgtccctgaatgcta

SEQ ID NO: 855738 - DNA, 15 bp, Homo sapiens
gtccctgaatgctag

SEQ ID NO: 855739 - DNA, 15 bp, Homo sapiens
tccctgaatgctaga

SEQ ID NO: 855740 - DNA, 15 bp, Homo sapiens
ccctgaatgctagag

SEQ ID NO: 855741 - DNA, 15 bp, Homo sapiens
cctgaatgctagagt

SEQ ID NO: 855742 - DNA, 15 bp, Homo sapiens
ctgaatgctagagtc

SEQ ID NO: 855743 - DNA, 15 bp, Homo sapiens
tgaatgctagagtcc

SEQ ID NO: 855744 - DNA, 15 bp, Homo sapiens
gaatgctagagtcca

SEQ ID NO: 855745 - DNA, 15 bp, Homo sapiens
aatgctagagtccat

SEQ ID NO: 855746 - DNA, 15 bp, Homo sapiens
atgctagagtccatt

SEQ ID NO: 855747 - DNA, 15 bp, Homo sapiens
tgctagagtccattg

SEQ ID NO: 855748 - DNA, 15 bp, Homo sapiens
gctagagtccattga

SEQ ID NO: 855749 - DNA, 15 bp, Homo sapiens
ctagagtccattgat

SEQ ID NO: 855750 - DNA, 15 bp, Homo sapiens
tagagtccattgatt

SEQ ID NO: 855751 - DNA, 15 bp, Homo sapiens
agagtccattgatta

SEQ ID NO: 855752 - DNA, 15 bp, Homo sapiens
gagtccattgattaa

SEQ ID NO: 855753 - DNA, 15 bp, Homo sapiens
agtccattgattaag

SEQ ID NO: 855754 - DNA, 15 bp, Homo sapiens
gtccattgattaagt

SEQ ID NO: 855755 - DNA, 15 bp, Homo sapiens
tccattgattaagtt

SEQ ID NO: 855756 - DNA, 15 bp, Homo sapiens
ccattgattaagtta

SEQ ID NO: 855757 - DNA, 15 bp, Homo sapiens
cattgattaagttat

SEQ ID NO: 855758 - DNA, 15 bp, Homo sapiens
attgattaagttatt

SEQ ID NO: 855759 - DNA, 15 bp, Homo sapiens
ttgattaagttattc

SEQ ID NO: 855760 - DNA, 15 bp, Homo sapiens
tgattaagttattca

SEQ ID NO: 855761 - DNA, 15 bp, Homo sapiens
gattaagttattcac

SEQ ID NO: 855762 - DNA, 15 bp, Homo sapiens
attaagttattcact

SEQ ID NO: 855763 - DNA, 15 bp, Homo sapiens
ttaagttattcactg

SEQ ID NO: 855764 - DNA, 15 bp, Homo sapiens
taagttattcactgc

SEQ ID NO: 855765 - DNA, 15 bp, Homo sapiens
aagttattcactgct

SEQ ID NO: 855766 - DNA, 15 bp, Homo sapiens
agttattcactgctg

SEQ ID NO: 855767 - DNA, 15 bp, Homo sapiens
gttattcactgctgc

SEQ ID NO: 855768 - DNA, 15 bp, Homo sapiens
ttattcactgctgca

SEQ ID NO: 855769 - DNA, 15 bp, Homo sapiens
tattcactgctgcaa

SEQ ID NO: 855770 - DNA, 15 bp, Homo sapiens
attcactgctgcaat

SEQ ID NO: 855771 - DNA, 15 bp, Homo sapiens
ttcactgctgcaatt

SEQ ID NO: 855772 - DNA, 15 bp, Homo sapiens
tcactgctgcaattg

SEQ ID NO: 855773 - DNA, 15 bp, Homo sapiens
cactgctgcaattgt

SEQ ID NO: 855774 - DNA, 15 bp, Homo sapiens
actgctgcaattgtc

SEQ ID NO: 855775 - DNA, 15 bp, Homo sapiens
ctgctgcaattgtca

SEQ ID NO: 855776 - DNA, 15 bp, Homo sapiens
tgctgcaattgtcag

SEQ ID NO: 855777 - DNA, 15 bp, Homo sapiens
gctgcaattgtcaga

SEQ ID NO: 855778 - DNA, 15 bp, Homo sapiens
ctgcaattgtcagag

SEQ ID NO: 855779 - DNA, 15 bp, Homo sapiens
tgcaattgtcagagc

SEQ ID NO: 855780 - DNA, 15 bp, Homo sapiens
gcaattgtcagagct

SEQ ID NO: 855781 - DNA, 15 bp, Homo sapiens
caattgtcagagctg

SEQ ID NO: 855782 - DNA, 15 bp, Homo sapiens
aattgtcagagctga

SEQ ID NO: 855783 - DNA, 15 bp, Homo sapiens
attgtcagagctgat

SEQ ID NO: 855784 - DNA, 15 bp, Homo sapiens
ttgtcagagctgatc

SEQ ID NO: 855785 - DNA, 15 bp, Homo sapiens
tgtcagagctgatca

SEQ ID NO: 855786 - DNA, 15 bp, Homo sapiens
gtcagagctgatcaa

SEQ ID NO: 855787 - DNA, 15 bp, Homo sapiens
tcagagctgatcaaa

SEQ ID NO: 855788 - DNA, 15 bp, Homo sapiens
cagagctgatcaaag

SEQ ID NO: 855789 - DNA, 15 bp, Homo sapiens
agagctgatcaaaga

SEQ ID NO: 855790 - DNA, 15 bp, Homo sapiens
gagctgatcaaagaa

SEQ ID NO: 855791 - DNA, 15 bp, Homo sapiens
agctgatcaaagaac

SEQ ID NO: 855792 - DNA, 15 bp, Homo sapiens
gctgatcaaagaact

SEQ ID NO: 855793 - DNA, 15 bp, Homo sapiens
ctgatcaaagaactc

SEQ ID NO: 855794 - DNA, 15 bp, Homo sapiens
tgatcaaagaactct

SEQ ID NO: 855795 - DNA, 15 bp, Homo sapiens
gatcaaagaactctg

SEQ ID NO: 855796 - DNA, 15 bp, Homo sapiens
atcaaagaactctga

SEQ ID NO: 855797 - DNA, 15 bp, Homo sapiens
tcaaagaactctgaa

SEQ ID NO: 855798 - DNA, 15 bp, Homo sapiens
caaagaactctgaac

SEQ ID NO: 855799 - DNA, 15 bp, Homo sapiens
aaagaactctgaacc

SEQ ID NO: 855800 - DNA, 15 bp, Homo sapiens
aagaactctgaacca

SEQ ID NO: 855801 - DNA, 15 bp, Homo sapiens
agaactctgaaccag

SEQ ID NO: 855802 - DNA, 15 bp, Homo sapiens
gaactctgaaccagt

SEQ ID NO: 855803 - DNA, 15 bp, Homo sapiens
aactctgaaccagtg

SEQ ID NO: 855804 - DNA, 15 bp, Homo sapiens
actctgaaccagtgt

SEQ ID NO: 855805 - DNA, 15 bp, Homo sapiens
ctctgaaccagtgtg

SEQ ID NO: 855806 - DNA, 15 bp, Homo sapiens
tctgaaccagtgtgt

SEQ ID NO: 855807 - DNA, 15 bp, Homo sapiens
ctgaaccagtgtgtt

SEQ ID NO: 855808 - DNA, 15 bp, Homo sapiens
tgaaccagtgtgtta

SEQ ID NO: 855809 - DNA, 15 bp, Homo sapiens
gaaccagtgtgttac

SEQ ID NO: 855810 - DNA, 15 bp, Homo sapiens
aaccagtgtgttact

SEQ ID NO: 855811 - DNA, 15 bp, Homo sapiens
accagtgtgttacta

SEQ ID NO: 855812 - DNA, 15 bp, Homo sapiens
ccagtgtgttactag

SEQ ID NO: 855813 - DNA, 15 bp, Homo sapiens
cagtgtgttactaga

SEQ ID NO: 855814 - DNA, 15 bp, Homo sapiens
agtgtgttactagaa

SEQ ID NO: 855815 - DNA, 15 bp, Homo sapiens
gtgtgttactagaac

SEQ ID NO: 855816 - DNA, 15 bp, Homo sapiens
tgtgttactagaact

SEQ ID NO: 855817 - DNA, 15 bp, Homo sapiens
gtgttactagaacta

SEQ ID NO: 855818 - DNA, 15 bp, Homo sapiens
tgttactagaactaa

SEQ ID NO: 855819 - DNA, 15 bp, Homo sapiens
gttactagaactaac

SEQ ID NO: 855820 - DNA, 15 bp, Homo sapiens
ttactagaactaaca

SEQ ID NO: 855821 - DNA, 15 bp, Homo sapiens
tactagaactaacaa

SEQ ID NO: 855822 - DNA, 15 bp, Homo sapiens
actagaactaacaaa

SEQ ID NO: 855823 - DNA, 15 bp, Homo sapiens
ctagaactaacaaag

SEQ ID NO: 855824 - DNA, 15 bp, Homo sapiens
tagaactaacaaaga

SEQ ID NO: 855825 - DNA, 15 bp, Homo sapiens
agaactaacaaagaa

SEQ ID NO: 855826 - DNA, 15 bp, Homo sapiens
gaactaacaaagaaa

SEQ ID NO: 855827 - DNA, 15 bp, Homo sapiens
aactaacaaagaaaa

SEQ ID NO: 855828 - DNA, 15 bp, Homo sapiens
actaacaaagaaaat

SEQ ID NO: 855829 - DNA, 15 bp, Homo sapiens
ctaacaaagaaaatg

SEQ ID NO: 855830 - DNA, 15 bp, Homo sapiens
taacaaagaaaatgc

SEQ ID NO: 855831 - DNA, 15 bp, Homo sapiens
aacaaagaaaatgcc

SEQ ID NO: 855832 - DNA, 15 bp, Homo sapiens
acaaagaaaatgcca

SEQ ID NO: 855833 - DNA, 15 bp, Homo sapiens
caaagaaaatgccat

SEQ ID NO: 855834 - DNA, 15 bp, Homo sapiens
aaagaaaatgccatt

SEQ ID NO: 855835 - DNA, 15 bp, Homo sapiens
aagaaaatgccatta

SEQ ID NO: 855836 - DNA, 15 bp, Homo sapiens
agaaaatgccattat

SEQ ID NO: 855837 - DNA, 15 bp, Homo sapiens
gaaaatgccattatg

SEQ ID NO: 855838 - DNA, 15 bp, Homo sapiens
aaaatgccattatga

SEQ ID NO: 855839 - DNA, 15 bp, Homo sapiens
aaatgccattatgat

SEQ ID NO: 855840 - DNA, 15 bp, Homo sapiens
aatgccattatgatg

SEQ ID NO: 855841 - DNA, 15 bp, Homo sapiens
atgccattatgatgt

SEQ ID NO: 855842 - DNA, 15 bp, Homo sapiens
tgccattatgatgtt

SEQ ID NO: 855843 - DNA, 15 bp, Homo sapiens
gccattatgatgttc

SEQ ID NO: 855844 - DNA, 15 bp, Homo sapiens
ccattatgatgttct

SEQ ID NO: 855845 - DNA, 15 bp, Homo sapiens
cattatgatgttcta

SEQ ID NO: 855846 - DNA, 15 bp, Homo sapiens
attatgatgttctag

SEQ ID NO: 855847 - DNA, 15 bp, Homo sapiens
ttatgatgttctaga

SEQ ID NO: 855848 - DNA, 15 bp, Homo sapiens
tatgatgttctagag

SEQ ID NO: 855849 - DNA, 15 bp, Homo sapiens
atgatgttctagagt

SEQ ID NO: 855850 - DNA, 15 bp, Homo sapiens
tgatgttctagagtc

SEQ ID NO: 855851 - DNA, 15 bp, Homo sapiens
gatgttctagagtct

SEQ ID NO: 855852 - DNA, 15 bp, Homo sapiens
atgttctagagtctt

SEQ ID NO: 855853 - DNA, 15 bp, Homo sapiens
tgttctagagtcttg

SEQ ID NO: 855854 - DNA, 15 bp, Homo sapiens
gttctagagtcttga

SEQ ID NO: 855855 - DNA, 15 bp, Homo sapiens
ttctagagtcttgaa

SEQ ID NO: 855856 - DNA, 15 bp, Homo sapiens
tctagagtcttgaat

SEQ ID NO: 855857 - DNA, 15 bp, Homo sapiens
ctagagtcttgaatt

SEQ ID NO: 855858 - DNA, 15 bp, Homo sapiens
tagagtcttgaatta

SEQ ID NO: 855859 - DNA, 15 bp, Homo sapiens
agagtcttgaattag

SEQ ID NO: 855860 - DNA, 15 bp, Homo sapiens
gagtcttgaattagt

SEQ ID NO: 855861 - DNA, 15 bp, Homo sapiens
agtcttgaattagta

SEQ ID NO: 855862 - DNA, 15 bp, Homo sapiens
gtcttgaattagtag

SEQ ID NO: 855863 - DNA, 15 bp, Homo sapiens
tcttgaattagtaga

SEQ ID NO: 855864 - DNA, 15 bp, Homo sapiens
cttgaattagtagaa

SEQ ID NO: 855865 - DNA, 15 bp, Homo sapiens
ttgaattagtagaag

SEQ ID NO: 855866 - DNA, 15 bp, Homo sapiens
tgaattagtagaaga

SEQ ID NO: 855867 - DNA, 15 bp, Homo sapiens
gaattagtagaagag

SEQ ID NO: 855868 - DNA, 15 bp, Homo sapiens
aattagtagaagagg

SEQ ID NO: 855869 - DNA, 15 bp, Homo sapiens
attagtagaagaggt

SEQ ID NO: 855870 - DNA, 15 bp, Homo sapiens
ttagtagaagaggtt

SEQ ID NO: 855871 - DNA, 15 bp, Homo sapiens
tagtagaagaggttt

SEQ ID NO: 855872 - DNA, 15 bp, Homo sapiens
agtagaagaggttta

SEQ ID NO: 855873 - DNA, 15 bp, Homo sapiens
gtagaagaggtttaa

SEQ ID NO: 855874 - DNA, 15 bp, Homo sapiens
tagaagaggtttaat

SEQ ID NO: 855875 - DNA, 15 bp, Homo sapiens
agaagaggtttaata

SEQ ID NO: 855876 - DNA, 15 bp, Homo sapiens
gaagaggtttaataa

SEQ ID NO: 855877 - DNA, 15 bp, Homo sapiens
aagaggtttaataag

SEQ ID NO: 855878 - DNA, 15 bp, Homo sapiens
agaggtttaataaga

SEQ ID NO: 855879 - DNA, 15 bp, Homo sapiens
gaggtttaataagaa

SEQ ID NO: 855880 - DNA, 15 bp, Homo sapiens
aggtttaataagaac

SEQ ID NO: 855881 - DNA, 15 bp, Homo sapiens
ggtttaataagaacc

SEQ ID NO: 855882 - DNA, 15 bp, Homo sapiens
gtttaataagaaccc

SEQ ID NO: 855883 - DNA, 15 bp, Homo sapiens
tttaataagaaccct

SEQ ID NO: 855884 - DNA, 15 bp, Homo sapiens
ttaataagaacccta

SEQ ID NO: 855885 - DNA, 15 bp, Homo sapiens
taataagaaccctaa

SEQ ID NO: 855886 - DNA, 15 bp, Homo sapiens
aataagaaccctaag

SEQ ID NO: 855887 - DNA, 15 bp, Homo sapiens
ataagaaccctaagg

SEQ ID NO: 855888 - DNA, 15 bp, Homo sapiens
taagaaccctaaggg

SEQ ID NO: 855889 - DNA, 15 bp, Homo sapiens
aagaaccctaaggga

SEQ ID NO: 855890 - DNA, 15 bp, Homo sapiens
agaaccctaagggat

SEQ ID NO: 855891 - DNA, 15 bp, Homo sapiens
gaaccctaagggatt

SEQ ID NO: 855892 - DNA, 15 bp, Homo sapiens
aaccctaagggattg

SEQ ID NO: 855893 - DNA, 15 bp, Homo sapiens
accctaagggattgc

SEQ ID NO: 855894 - DNA, 15 bp, Homo sapiens
ccctaagggattgct

SEQ ID NO: 855895 - DNA, 15 bp, Homo sapiens
cctaagggattgcta

SEQ ID NO: 855896 - DNA, 15 bp, Homo sapiens
ctaagggattgctag

SEQ ID NO: 855897 - DNA, 15 bp, Homo sapiens
taagggattgctaga

SEQ ID NO: 855898 - DNA, 15 bp, Homo sapiens
aagggattgctagaa

SEQ ID NO: 855899 - DNA, 15 bp, Homo sapiens
agggattgctagaat

SEQ ID NO: 855900 - DNA, 15 bp, Homo sapiens
gggattgctagaatg

SEQ ID NO: 855901 - DNA, 15 bp, Homo sapiens
ggattgctagaatgt

SEQ ID NO: 855902 - DNA, 15 bp, Homo sapiens
gattgctagaatgtt

SEQ ID NO: 855903 - DNA, 15 bp, Homo sapiens
attgctagaatgtta

SEQ ID NO: 855904 - DNA, 15 bp, Homo sapiens
ttgctagaatgttaa

SEQ ID NO: 855905 - DNA, 15 bp, Homo sapiens
tgctagaatgttaaa

SEQ ID NO: 855906 - DNA, 15 bp, Homo sapiens
gctagaatgttaaaa

SEQ ID NO: 855907 - DNA, 15 bp, Homo sapiens
ctagaatgttaaaaa

SEQ ID NO: 855908 - DNA, 15 bp, Homo sapiens
tagaatgttaaaaac

SEQ ID NO: 855909 - DNA, 15 bp, Homo sapiens
agaatgttaaaaaca

SEQ ID NO: 855910 - DNA, 15 bp, Homo sapiens
gaatgttaaaaacaa

SEQ ID NO: 855911 - DNA, 15 bp, Homo sapiens
aatgttaaaaacaaa

SEQ ID NO: 855912 - DNA, 15 bp, Homo sapiens
atgttaaaaacaaac

SEQ ID NO: 855913 - DNA, 15 bp, Homo sapiens
tgttaaaaacaaaca

SEQ ID NO: 855914 - DNA, 15 bp, Homo sapiens
gttaaaaacaaacaa

SEQ ID NO: 855915 - DNA, 15 bp, Homo sapiens
ttaaaaacaaacaaa

SEQ ID NO: 855916 - DNA, 15 bp, Homo sapiens
taaaaacaaacaaac

SEQ ID NO: 855917 - DNA, 15 bp, Homo sapiens
aacaaacaaacaaaa

SEQ ID NO: 855918 - DNA, 15 bp, Homo sapiens
acaaacaaacaaaaa

SEQ ID NO: 855919 - DNA, 15 bp, Homo sapiens
aacaaacaaaaaaaa

SEQ ID NO: 855920 - DNA, 15 bp, Homo sapiens
acaaacaaaaaaaaa

SEQ ID NO: 855921 - DNA, 15 bp, Homo sapiens
caaacaaaaaaaaag

SEQ ID NO: 855922 - DNA, 15 bp, Homo sapiens
aaacaaaaaaaaagg

SEQ ID NO: 855923 - DNA, 15 bp, Homo sapiens
aacaaaaaaaaaggt

SEQ ID NO: 855924 - DNA, 15 bp, Homo sapiens
acaaaaaaaaaggtt

SEQ ID NO: 855925 - DNA, 15 bp, Homo sapiens
caaaaaaaaaggttg

SEQ ID NO: 855926 - DNA, 15 bp, Homo sapiens
aaaaaaaaaggttga

SEQ ID NO: 855927 - DNA, 15 bp, Homo sapiens
aaaaaaaaggttgaa

SEQ ID NO: 855928 - DNA, 15 bp, Homo sapiens
aaaaaaaggttgaaa

SEQ ID NO: 855929 - DNA, 15 bp, Homo sapiens
aaaaaaggttgaaaa

SEQ ID NO: 855930 - DNA, 15 bp, Homo sapiens
aaaaaggttgaaaag

SEQ ID NO: 855931 - DNA, 15 bp, Homo sapiens
aaaaggttgaaaagt

SEQ ID NO: 855932 - DNA, 15 bp, Homo sapiens
aaaggttgaaaagtt

SEQ ID NO: 855933 - DNA, 15 bp, Homo sapiens
aaggttgaaaagttt

SEQ ID NO: 855934 - DNA, 15 bp, Homo sapiens
aggttgaaaagttta

SEQ ID NO: 855935 - DNA, 15 bp, Homo sapiens
ggttgaaaagtttag

SEQ ID NO: 855936 - DNA, 15 bp, Homo sapiens
gttgaaaagtttaga

SEQ ID NO: 855937 - DNA, 15 bp, Homo sapiens
ttgaaaagtttagaa

SEQ ID NO: 855938 - DNA, 15 bp, Homo sapiens
tgaaaagtttagaaa

SEQ ID NO: 855939 - DNA, 15 bp, Homo sapiens
gaaaagtttagaaaa

SEQ ID NO: 855940 - DNA, 15 bp, Homo sapiens
aaaagtttagaaaat

SEQ ID NO: 855941 - DNA, 15 bp, Homo sapiens
aaagtttagaaaatt

SEQ ID NO: 855942 - DNA, 15 bp, Homo sapiens
aagtttagaaaattc

SEQ ID NO: 855943 - DNA, 15 bp, Homo sapiens
agtttagaaaattca

SEQ ID NO: 855944 - DNA, 15 bp, Homo sapiens
gtttagaaaattcac

SEQ ID NO: 855945 - DNA, 15 bp, Homo sapiens
tttagaaaattcact

SEQ ID NO: 855946 - DNA, 15 bp, Homo sapiens
ttagaaaattcactg

SEQ ID NO: 855947 - DNA, 15 bp, Homo sapiens
tagaaaattcactgg

SEQ ID NO: 855948 - DNA, 15 bp, Homo sapiens
agaaaattcactggt

SEQ ID NO: 855949 - DNA, 15 bp, Homo sapiens
gaaaattcactggtc

SEQ ID NO: 855950 - DNA, 15 bp, Homo sapiens
aaaattcactggtct

SEQ ID NO: 855951 - DNA, 15 bp, Homo sapiens
aaattcactggtctt

SEQ ID NO: 855952 - DNA, 15 bp, Homo sapiens
aattcactggtcttt

SEQ ID NO: 855953 - DNA, 15 bp, Homo sapiens
attcactggtctttg

SEQ ID NO: 855954 - DNA, 15 bp, Homo sapiens
ttcactggtctttgt

SEQ ID NO: 855955 - DNA, 15 bp, Homo sapiens
tcactggtctttgtg

SEQ ID NO: 855956 - DNA, 15 bp, Homo sapiens
cactggtctttgtgc

SEQ ID NO: 855957 - DNA, 15 bp, Homo sapiens
actggtctttgtgcc

SEQ ID NO: 855958 - DNA, 15 bp, Homo sapiens
ctggtctttgtgccc

SEQ ID NO: 855959 - DNA, 15 bp, Homo sapiens
tggtctttgtgccca

SEQ ID NO: 855960 - DNA, 15 bp, Homo sapiens
ggtctttgtgcccat

SEQ ID NO: 855961 - DNA, 15 bp, Homo sapiens
gtctttgtgcccatc

SEQ ID NO: 855962 - DNA, 15 bp, Homo sapiens
tctttgtgcccatca

SEQ ID NO: 855963 - DNA, 15 bp, Homo sapiens
ctttgtgcccatcat

SEQ ID NO: 855964 - DNA, 15 bp, Homo sapiens
tttgtgcccatcatt

SEQ ID NO: 855965 - DNA, 15 bp, Homo sapiens
ttgtgcccatcattt

SEQ ID NO: 855966 - DNA, 15 bp, Homo sapiens
tgtgcccatcatttt

SEQ ID NO: 855967 - DNA, 15 bp, Homo sapiens
gtgcccatcatttta

SEQ ID NO: 855968 - DNA, 15 bp, Homo sapiens
tgcccatcattttac

SEQ ID NO: 855969 - DNA, 15 bp, Homo sapiens
gcccatcattttact

SEQ ID NO: 855970 - DNA, 15 bp, Homo sapiens
cccatcattttactt

SEQ ID NO: 855971 - DNA, 15 bp, Homo sapiens
ccatcattttacttc

SEQ ID NO: 855972 - DNA, 15 bp, Homo sapiens
catcattttacttcc

SEQ ID NO: 855973 - DNA, 15 bp, Homo sapiens
atcattttacttcca

SEQ ID NO: 855974 - DNA, 15 bp, Homo sapiens
tcattttacttccag

SEQ ID NO: 855975 - DNA, 15 bp, Homo sapiens
cattttacttccagg

SEQ ID NO: 855976 - DNA, 15 bp, Homo sapiens
attttacttccaggg

SEQ ID NO: 855977 - DNA, 15 bp, Homo sapiens
ttttacttccagggt

SEQ ID NO: 855978 - DNA, 15 bp, Homo sapiens
tttacttccagggtt

SEQ ID NO: 855979 - DNA, 15 bp, Homo sapiens
ttacttccagggttt

SEQ ID NO: 855980 - DNA, 15 bp, Homo sapiens
tacttccagggttta

SEQ ID NO: 855981 - DNA, 15 bp, Homo sapiens
acttccagggtttag

SEQ ID NO: 855982 - DNA, 15 bp, Homo sapiens
cttccagggtttaga

SEQ ID NO: 855983 - DNA, 15 bp, Homo sapiens
ttccagggtttagat

SEQ ID NO: 855984 - DNA, 15 bp, Homo sapiens
tccagggtttagata

SEQ ID NO: 855985 - DNA, 15 bp, Homo sapiens
ccagggtttagataa

SEQ ID NO: 855986 - DNA, 15 bp, Homo sapiens
cagggtttagataat

SEQ ID NO: 855987 - DNA, 15 bp, Homo sapiens
agggtttagataatc

SEQ ID NO: 855988 - DNA, 15 bp, Homo sapiens
gggtttagataatct

SEQ ID NO: 855989 - DNA, 15 bp, Homo sapiens
ggtttagataatctc

SEQ ID NO: 855990 - DNA, 15 bp, Homo sapiens
gtttagataatctca

SEQ ID NO: 855991 - DNA, 15 bp, Homo sapiens
tttagataatctcat

SEQ ID NO: 855992 - DNA, 15 bp, Homo sapiens
ttagataatctcatt

SEQ ID NO: 855993 - DNA, 15 bp, Homo sapiens
tagataatctcattt

SEQ ID NO: 855994 - DNA, 15 bp, Homo sapiens
agataatctcatttt

SEQ ID NO: 855995 - DNA, 15 bp, Homo sapiens
gataatctcattttt

SEQ ID NO: 855996 - DNA, 15 bp, Homo sapiens
ataatctcatttttg

SEQ ID NO: 855997 - DNA, 15 bp, Homo sapiens
taatctcatttttgc

SEQ ID NO: 855998 - DNA, 15 bp, Homo sapiens
aatctcatttttgca

SEQ ID NO: 855999 - DNA, 15 bp, Homo sapiens
atctcatttttgcaa

SEQ ID NO: 856000 - DNA, 15 bp, Homo sapiens
tctcatttttgcaat

SEQ ID NO: 856001 - DNA, 15 bp, Homo sapiens
ctcatttttgcaatg

SEQ ID NO: 856002 - DNA, 15 bp, Homo sapiens
tcatttttgcaatga

SEQ ID NO: 856003 - DNA, 15 bp, Homo sapiens
catttttgcaatgaa

SEQ ID NO: 856004 - DNA, 15 bp, Homo sapiens
atttttgcaatgaag

SEQ ID NO: 856005 - DNA, 15 bp, Homo sapiens
tttttgcaatgaagg

SEQ ID NO: 856006 - DNA, 15 bp, Homo sapiens
ttttgcaatgaagga

SEQ ID NO: 856007 - DNA, 15 bp, Homo sapiens
tttgcaatgaaggaa

SEQ ID NO: 856008 - DNA, 15 bp, Homo sapiens
ttgcaatgaaggaat

SEQ ID NO: 856009 - DNA, 15 bp, Homo sapiens
tgcaatgaaggaatg

SEQ ID NO: 856010 - DNA, 15 bp, Homo sapiens
gcaatgaaggaatgg

SEQ ID NO: 856011 - DNA, 15 bp, Homo sapiens
caatgaaggaatgga

SEQ ID NO: 856012 - DNA, 15 bp, Homo sapiens
aatgaaggaatggat

SEQ ID NO: 856013 - DNA, 15 bp, Homo sapiens
atgaaggaatggatt

SEQ ID NO: 856014 - DNA, 15 bp, Homo sapiens
tgaaggaatggatta

SEQ ID NO: 856015 - DNA, 15 bp, Homo sapiens
gaaggaatggattag

SEQ ID NO: 856016 - DNA, 15 bp, Homo sapiens
aaggaatggattaga

SEQ ID NO: 856017 - DNA, 15 bp, Homo sapiens
aggaatggattagat

SEQ ID NO: 856018 - DNA, 15 bp, Homo sapiens
ggaatggattagatc

SEQ ID NO: 856019 - DNA, 15 bp, Homo sapiens
gaatggattagatca

SEQ ID NO: 856020 - DNA, 15 bp, Homo sapiens
aatggattagatcac

SEQ ID NO: 856021 - DNA, 15 bp, Homo sapiens
atggattagatcaca

SEQ ID NO: 856022 - DNA, 15 bp, Homo sapiens
tggattagatcacaa

SEQ ID NO: 856023 - DNA, 15 bp, Homo sapiens
ggattagatcacaag

SEQ ID NO: 856024 - DNA, 15 bp, Homo sapiens
gattagatcacaagt

SEQ ID NO: 856025 - DNA, 15 bp, Homo sapiens
attagatcacaagtt

SEQ ID NO: 856026 - DNA, 15 bp, Homo sapiens
ttagatcacaagttc

SEQ ID NO: 856027 - DNA, 15 bp, Homo sapiens
tagatcacaagttct

SEQ ID NO: 856028 - DNA, 15 bp, Homo sapiens
agatcacaagttctc

SEQ ID NO: 856029 - DNA, 15 bp, Homo sapiens
gatcacaagttctca

SEQ ID NO: 856030 - DNA, 15 bp, Homo sapiens
atcacaagttctcat

SEQ ID NO: 856031 - DNA, 15 bp, Homo sapiens
tcacaagttctcatc

SEQ ID NO: 856032 - DNA, 15 bp, Homo sapiens
cacaagttctcatcc

SEQ ID NO: 856033 - DNA, 15 bp, Homo sapiens
acaagttctcatcct

SEQ ID NO: 856034 - DNA, 15 bp, Homo sapiens
caagttctcatccta

SEQ ID NO: 856035 - DNA, 15 bp, Homo sapiens
aagttctcatcctag

SEQ ID NO: 856036 - DNA, 15 bp, Homo sapiens
agttctcatcctagt

SEQ ID NO: 856037 - DNA, 15 bp, Homo sapiens
gttctcatcctagta

SEQ ID NO: 856038 - DNA, 15 bp, Homo sapiens
ttctcatcctagtag

SEQ ID NO: 856039 - DNA, 15 bp, Homo sapiens
tctcatcctagtagc

SEQ ID NO: 856040 - DNA, 15 bp, Homo sapiens
ctcatcctagtagca

SEQ ID NO: 856041 - DNA, 15 bp, Homo sapiens
tcatcctagtagcac

SEQ ID NO: 856042 - DNA, 15 bp, Homo sapiens
catcctagtagcaca

SEQ ID NO: 856043 - DNA, 15 bp, Homo sapiens
atcctagtagcacat

SEQ ID NO: 856044 - DNA, 15 bp, Homo sapiens
tcctagtagcacatg

SEQ ID NO: 856045 - DNA, 15 bp, Homo sapiens
cctagtagcacatgc

SEQ ID NO: 856046 - DNA, 15 bp, Homo sapiens
ctagtagcacatgca

SEQ ID NO: 856047 - DNA, 15 bp, Homo sapiens
tagtagcacatgcag

SEQ ID NO: 856048 - DNA, 15 bp, Homo sapiens
agtagcacatgcaga

SEQ ID NO: 856049 - DNA, 15 bp, Homo sapiens
gtagcacatgcagaa

SEQ ID NO: 856050 - DNA, 15 bp, Homo sapiens
tagcacatgcagaat

SEQ ID NO: 856051 - DNA, 15 bp, Homo sapiens
agcacatgcagaatc

SEQ ID NO: 856052 - DNA, 15 bp, Homo sapiens
gcacatgcagaatct

SEQ ID NO: 856053 - DNA, 15 bp, Homo sapiens
cacatgcagaatctt

SEQ ID NO: 856054 - DNA, 15 bp, Homo sapiens
acatgcagaatcttt

SEQ ID NO: 856055 - DNA, 15 bp, Homo sapiens
catgcagaatcttta

SEQ ID NO: 856056 - DNA, 15 bp, Homo sapiens
atgcagaatctttat

SEQ ID NO: 856057 - DNA, 15 bp, Homo sapiens
tgcagaatctttata

SEQ ID NO: 856058 - DNA, 15 bp, Homo sapiens
gcagaatctttataa

SEQ ID NO: 856059 - DNA, 15 bp, Homo sapiens
cagaatctttataaa

SEQ ID NO: 856060 - DNA, 15 bp, Homo sapiens
agaatctttataaaa

SEQ ID NO: 856061 - DNA, 15 bp, Homo sapiens
gaatctttataaaaa

SEQ ID NO: 856062 - DNA, 15 bp, Homo sapiens
aatctttataaaaac

SEQ ID NO: 856063 - DNA, 15 bp, Homo sapiens
atctttataaaaaca

SEQ ID NO: 856064 - DNA, 15 bp, Homo sapiens
tctttataaaaacac

SEQ ID NO: 856065 - DNA, 15 bp, Homo sapiens
ctttataaaaacaca

SEQ ID NO: 856066 - DNA, 15 bp, Homo sapiens
tttataaaaacacag

SEQ ID NO: 856067 - DNA, 15 bp, Homo sapiens
ttataaaaacacaga

SEQ ID NO: 856068 - DNA, 15 bp, Homo sapiens
tataaaaacacagag

SEQ ID NO: 856069 - DNA, 15 bp, Homo sapiens
ataaaaacacagagt

SEQ ID NO: 856070 - DNA, 15 bp, Homo sapiens
taaaaacacagagta

SEQ ID NO: 856071 - DNA, 15 bp, Homo sapiens
aaaaacacagagtag

SEQ ID NO: 856072 - DNA, 15 bp, Homo sapiens
aaaacacagagtagc

SEQ ID NO: 856073 - DNA, 15 bp, Homo sapiens
aaacacagagtagcc

SEQ ID NO: 856074 - DNA, 15 bp, Homo sapiens
aacacagagtagcca

SEQ ID NO: 856075 - DNA, 15 bp, Homo sapiens
acacagagtagccag

SEQ ID NO: 856076 - DNA, 15 bp, Homo sapiens
cacagagtagccagg

SEQ ID NO: 856077 - DNA, 15 bp, Homo sapiens
acagagtagccaggt

SEQ ID NO: 856078 - DNA, 15 bp, Homo sapiens
cagagtagccaggtg

SEQ ID NO: 856079 - DNA, 15 bp, Homo sapiens
agagtagccaggtgc

SEQ ID NO: 856080 - DNA, 15 bp, Homo sapiens
gagtagccaggtgcg

SEQ ID NO: 856081 - DNA, 15 bp, Homo sapiens
agtagccaggtgcgg

SEQ ID NO: 856082 - DNA, 15 bp, Homo sapiens
gtagccaggtgcggt

SEQ ID NO: 856083 - DNA, 15 bp, Homo sapiens
tagccaggtgcggtg

SEQ ID NO: 856084 - DNA, 15 bp, Homo sapiens
agccaggtgcggtgg

SEQ ID NO: 856085 - DNA, 15 bp, Homo sapiens
gccaggtgcggtggc

SEQ ID NO: 856086 - DNA, 15 bp, Homo sapiens
ccaggtgcggtggct

SEQ ID NO: 856087 - DNA, 15 bp, Homo sapiens
caggtgcggtggctc

SEQ ID NO: 856088 - DNA, 15 bp, Homo sapiens
aggtgcggtggctca

SEQ ID NO: 856089 - DNA, 15 bp, Homo sapiens
ggtgcggtggctcat

SEQ ID NO: 856090 - DNA, 15 bp, Homo sapiens
gtgcggtggctcatg

SEQ ID NO: 856091 - DNA, 15 bp, Homo sapiens
tgcggtggctcatgc

SEQ ID NO: 856092 - DNA, 15 bp, Homo sapiens
gcggtggctcatgcc

SEQ ID NO: 856093 - DNA, 15 bp, Homo sapiens
cggtggctcatgcct

SEQ ID NO: 856094 - DNA, 15 bp, Homo sapiens
ctcatgcctgtaatc

SEQ ID NO: 856095 - DNA, 15 bp, Homo sapiens
atcccagcactttga

SEQ ID NO: 856096 - DNA, 15 bp, Homo sapiens
tcccagcactttgag

SEQ ID NO: 856097 - DNA, 15 bp, Homo sapiens
cccagcactttgaga

SEQ ID NO: 856098 - DNA, 15 bp, Homo sapiens
ccagcactttgagag

SEQ ID NO: 856099 - DNA, 15 bp, Homo sapiens
cagcactttgagagc

SEQ ID NO: 856100 - DNA, 15 bp, Homo sapiens
agcactttgagagcc

SEQ ID NO: 856101 - DNA, 15 bp, Homo sapiens
gcactttgagagcct

SEQ ID NO: 856102 - DNA, 15 bp, Homo sapiens
cactttgagagcctg

SEQ ID NO: 856103 - DNA, 15 bp, Homo sapiens
actttgagagcctgg

SEQ ID NO: 856104 - DNA, 15 bp, Homo sapiens
ctttgagagcctggg

SEQ ID NO: 856105 - DNA, 15 bp, Homo sapiens
tttgagagcctgggg

SEQ ID NO: 856106 - DNA, 15 bp, Homo sapiens
ttgagagcctggggc

SEQ ID NO: 856107 - DNA, 15 bp, Homo sapiens
tgagagcctggggca

SEQ ID NO: 856108 - DNA, 15 bp, Homo sapiens
gagagcctggggcag

SEQ ID NO: 856109 - DNA, 15 bp, Homo sapiens
agagcctggggcagg

SEQ ID NO: 856110 - DNA, 15 bp, Homo sapiens
gagcctggggcaggt

SEQ ID NO: 856111 - DNA, 15 bp, Homo sapiens
agcctggggcaggtg

SEQ ID NO: 856112 - DNA, 15 bp, Homo sapiens
gcctggggcaggtgg

SEQ ID NO: 856113 - DNA, 15 bp, Homo sapiens
cctggggcaggtgga

SEQ ID NO: 856114 - DNA, 15 bp, Homo sapiens
ctggggcaggtggat

SEQ ID NO: 856115 - DNA, 15 bp, Homo sapiens
tggggcaggtggatc

SEQ ID NO: 856116 - DNA, 15 bp, Homo sapiens
ggggcaggtggatca

SEQ ID NO: 856117 - DNA, 15 bp, Homo sapiens
gggcaggtggatcac

SEQ ID NO: 856118 - DNA, 15 bp, Homo sapiens
ggcaggtggatcact

SEQ ID NO: 856119 - DNA, 15 bp, Homo sapiens
gcaggtggatcactt

SEQ ID NO: 856120 - DNA, 15 bp, Homo sapiens
caggtggatcacttg

SEQ ID NO: 856121 - DNA, 15 bp, Homo sapiens
aggtggatcacttga

SEQ ID NO: 856122 - DNA, 15 bp, Homo sapiens
ggtggatcacttgag

SEQ ID NO: 856123 - DNA, 15 bp, Homo sapiens
gtggatcacttgaga

SEQ ID NO: 856124 - DNA, 15 bp, Homo sapiens
tggatcacttgagaa

SEQ ID NO: 856125 - DNA, 15 bp, Homo sapiens
ggatcacttgagaat

SEQ ID NO: 856126 - DNA, 15 bp, Homo sapiens
gatcacttgagaata

SEQ ID NO: 856127 - DNA, 15 bp, Homo sapiens
atcacttgagaatag

SEQ ID NO: 856128 - DNA, 15 bp, Homo sapiens
tcacttgagaatagg

SEQ ID NO: 856129 - DNA, 15 bp, Homo sapiens
cacttgagaatagga

SEQ ID NO: 856130 - DNA, 15 bp, Homo sapiens
acttgagaataggag

SEQ ID NO: 856131 - DNA, 15 bp, Homo sapiens
cttgagaataggagt

SEQ ID NO: 856132 - DNA, 15 bp, Homo sapiens
ttgagaataggagtt

SEQ ID NO: 856133 - DNA, 15 bp, Homo sapiens
tgagaataggagttg

SEQ ID NO: 856134 - DNA, 15 bp, Homo sapiens
gagaataggagttga

SEQ ID NO: 856135 - DNA, 15 bp, Homo sapiens
agaataggagttgaa

SEQ ID NO: 856136 - DNA, 15 bp, Homo sapiens
gaataggagttgaag

SEQ ID NO: 856137 - DNA, 15 bp, Homo sapiens
aataggagttgaaga

SEQ ID NO: 856138 - DNA, 15 bp, Homo sapiens
ataggagttgaagac

SEQ ID NO: 856139 - DNA, 15 bp, Homo sapiens
taggagttgaagacc

SEQ ID NO: 856140 - DNA, 15 bp, Homo sapiens
aggagttgaagacca

SEQ ID NO: 856141 - DNA, 15 bp, Homo sapiens
ggagttgaagaccaa

SEQ ID NO: 856142 - DNA, 15 bp, Homo sapiens
gagttgaagaccaag

SEQ ID NO: 856143 - DNA, 15 bp, Homo sapiens
agttgaagaccaagc

SEQ ID NO: 856144 - DNA, 15 bp, Homo sapiens
gttgaagaccaagct

SEQ ID NO: 856145 - DNA, 15 bp, Homo sapiens
ttgaagaccaagctg

SEQ ID NO: 856146 - DNA, 15 bp, Homo sapiens
tgaagaccaagctgg

SEQ ID NO: 856147 - DNA, 15 bp, Homo sapiens
gaagaccaagctggt

SEQ ID NO: 856148 - DNA, 15 bp, Homo sapiens
aagaccaagctggtc

SEQ ID NO: 856149 - DNA, 15 bp, Homo sapiens
agaccaagctggtca

SEQ ID NO: 856150 - DNA, 15 bp, Homo sapiens
gaccaagctggtcaa

SEQ ID NO: 856151 - DNA, 15 bp, Homo sapiens
accaagctggtcaac

SEQ ID NO: 856152 - DNA, 15 bp, Homo sapiens
ccaagctggtcaaca

SEQ ID NO: 856153 - DNA, 15 bp, Homo sapiens
caagctggtcaacat

SEQ ID NO: 856154 - DNA, 15 bp, Homo sapiens
aagctggtcaacatg

SEQ ID NO: 856155 - DNA, 15 bp, Homo sapiens
agctggtcaacatgg

SEQ ID NO: 856156 - DNA, 15 bp, Homo sapiens
gctggtcaacatggc

SEQ ID NO: 856157 - DNA, 15 bp, Homo sapiens
ctggtcaacatggca

SEQ ID NO: 856158 - DNA, 15 bp, Homo sapiens
tggtcaacatggcaa

SEQ ID NO: 856159 - DNA, 15 bp, Homo sapiens
ggtcaacatggcaaa

SEQ ID NO: 856160 - DNA, 15 bp, Homo sapiens
gtcaacatggcaaaa

SEQ ID NO: 856161 - DNA, 15 bp, Homo sapiens
tcaacatggcaaaac

SEQ ID NO: 856162 - DNA, 15 bp, Homo sapiens
caacatggcaaaacc

SEQ ID NO: 856163 - DNA, 15 bp, Homo sapiens
aacatggcaaaaccc

SEQ ID NO: 856164 - DNA, 15 bp, Homo sapiens
acatggcaaaaccct

SEQ ID NO: 856165 - DNA, 15 bp, Homo sapiens
catggcaaaaccctg

SEQ ID NO: 856166 - DNA, 15 bp, Homo sapiens
atggcaaaaccctgt

SEQ ID NO: 856167 - DNA, 15 bp, Homo sapiens
tggcaaaaccctgta

SEQ ID NO: 856168 - DNA, 15 bp, Homo sapiens
ggcaaaaccctgtat

SEQ ID NO: 856169 - DNA, 15 bp, Homo sapiens
gcaaaaccctgtatc

SEQ ID NO: 856170 - DNA, 15 bp, Homo sapiens
caaaaccctgtatct

SEQ ID NO: 856171 - DNA, 15 bp, Homo sapiens
aaaaccctgtatcta

SEQ ID NO: 856172 - DNA, 15 bp, Homo sapiens
aaaccctgtatctac

SEQ ID NO: 856173 - DNA, 15 bp, Homo sapiens
aaccctgtatctact

SEQ ID NO: 856174 - DNA, 15 bp, Homo sapiens
accctgtatctacta

SEQ ID NO: 856175 - DNA, 15 bp, Homo sapiens
ccctgtatctactaa

SEQ ID NO: 856176 - DNA, 15 bp, Homo sapiens
cctgtatctactaaa

SEQ ID NO: 856177 - DNA, 15 bp, Homo sapiens
ctgtatctactaaaa

SEQ ID NO: 856178 - DNA, 15 bp, Homo sapiens
tgtatctactaaaaa

SEQ ID NO: 856179 - DNA, 15 bp, Homo sapiens
gtatctactaaaaat

SEQ ID NO: 856180 - DNA, 15 bp, Homo sapiens
tatctactaaaaatt

SEQ ID NO: 856181 - DNA, 15 bp, Homo sapiens
atctactaaaaattc

SEQ ID NO: 856182 - DNA, 15 bp, Homo sapiens
tctactaaaaattca

SEQ ID NO: 856183 - DNA, 15 bp, Homo sapiens
ctactaaaaattcaa

SEQ ID NO: 856184 - DNA, 15 bp, Homo sapiens
tactaaaaattcaaa

SEQ ID NO: 856185 - DNA, 15 bp, Homo sapiens
actaaaaattcaaaa

SEQ ID NO: 856186 - DNA, 15 bp, Homo sapiens
ctaaaaattcaaaaa

SEQ ID NO: 856187 - DNA, 15 bp, Homo sapiens
taaaaattcaaaaat

SEQ ID NO: 856188 - DNA, 15 bp, Homo sapiens
aaaaattcaaaaatt

SEQ ID NO: 856189 - DNA, 15 bp, Homo sapiens
aaaattcaaaaatta

SEQ ID NO: 856190 - DNA, 15 bp, Homo sapiens
aaattcaaaaattag

SEQ ID NO: 856191 - DNA, 15 bp, Homo sapiens
aattcaaaaattagc

SEQ ID NO: 856192 - DNA, 15 bp, Homo sapiens
attcaaaaattagcc

SEQ ID NO: 856193 - DNA, 15 bp, Homo sapiens
ttcaaaaattagcca

SEQ ID NO: 856194 - DNA, 15 bp, Homo sapiens
tcaaaaattagccag

SEQ ID NO: 856195 - DNA, 15 bp, Homo sapiens
caaaaattagccagg

SEQ ID NO: 856196 - DNA, 15 bp, Homo sapiens
aaaaattagccaggc

SEQ ID NO: 856197 - DNA, 15 bp, Homo sapiens
aaaattagccaggca

SEQ ID NO: 856198 - DNA, 15 bp, Homo sapiens
aaattagccaggcat

SEQ ID NO: 856199 - DNA, 15 bp, Homo sapiens
aattagccaggcatg

SEQ ID NO: 856200 - DNA, 15 bp, Homo sapiens
attagccaggcatga

SEQ ID NO: 856201 - DNA, 15 bp, Homo sapiens
ttagccaggcatgat

SEQ ID NO: 856202 - DNA, 15 bp, Homo sapiens
tagccaggcatgatg

SEQ ID NO: 856203 - DNA, 15 bp, Homo sapiens
agccaggcatgatgg

SEQ ID NO: 856204 - DNA, 15 bp, Homo sapiens
gccaggcatgatggc

SEQ ID NO: 856205 - DNA, 15 bp, Homo sapiens
ccaggcatgatggca

SEQ ID NO: 856206 - DNA, 15 bp, Homo sapiens
caggcatgatggcac

SEQ ID NO: 856207 - DNA, 15 bp, Homo sapiens
aggcatgatggcaca

SEQ ID NO: 856208 - DNA, 15 bp, Homo sapiens
ggcatgatggcacat

SEQ ID NO: 856209 - DNA, 15 bp, Homo sapiens
gcatgatggcacatg

SEQ ID NO: 856210 - DNA, 15 bp, Homo sapiens
catgatggcacatgc

SEQ ID NO: 856211 - DNA, 15 bp, Homo sapiens
atgatggcacatgcc

SEQ ID NO: 856212 - DNA, 15 bp, Homo sapiens
tgatggcacatgcct

SEQ ID NO: 856213 - DNA, 15 bp, Homo sapiens
gatggcacatgcctc

SEQ ID NO: 856214 - DNA, 15 bp, Homo sapiens
atggcacatgcctcc

SEQ ID NO: 856215 - DNA, 15 bp, Homo sapiens
tggcacatgcctccc

SEQ ID NO: 856216 - DNA, 15 bp, Homo sapiens
ggcacatgcctccca

SEQ ID NO: 856217 - DNA, 15 bp, Homo sapiens
gcacatgcctcccag

SEQ ID NO: 856218 - DNA, 15 bp, Homo sapiens
cacatgcctcccagc

SEQ ID NO: 856219 - DNA, 15 bp, Homo sapiens
acatgcctcccagct

SEQ ID NO: 856220 - DNA, 15 bp, Homo sapiens
catgcctcccagcta

SEQ ID NO: 856221 - DNA, 15 bp, Homo sapiens
atgcctcccagctac

SEQ ID NO: 856222 - DNA, 15 bp, Homo sapiens
tgcctcccagctact

SEQ ID NO: 856223 - DNA, 15 bp, Homo sapiens
gcctcccagctactg

SEQ ID NO: 856224 - DNA, 15 bp, Homo sapiens
cctcccagctactgg

SEQ ID NO: 856225 - DNA, 15 bp, Homo sapiens
ctcccagctactggg

SEQ ID NO: 856226 - DNA, 15 bp, Homo sapiens
tcccagctactgggg

SEQ ID NO: 856227 - DNA, 15 bp, Homo sapiens
cccagctactgggga

SEQ ID NO: 856228 - DNA, 15 bp, Homo sapiens
ccagctactggggag

SEQ ID NO: 856229 - DNA, 15 bp, Homo sapiens
cagctactggggagg

SEQ ID NO: 856230 - DNA, 15 bp, Homo sapiens
agctactggggaggc

SEQ ID NO: 856231 - DNA, 15 bp, Homo sapiens
gctactggggaggct

SEQ ID NO: 856232 - DNA, 15 bp, Homo sapiens
ctactggggaggctg

SEQ ID NO: 856233 - DNA, 15 bp, Homo sapiens
tactggggaggctga

SEQ ID NO: 856234 - DNA, 15 bp, Homo sapiens
actggggaggctgag

SEQ ID NO: 856235 - DNA, 15 bp, Homo sapiens
ctggggaggctgagg

SEQ ID NO: 856236 - DNA, 15 bp, Homo sapiens
tggggaggctgaggc

SEQ ID NO: 856237 - DNA, 15 bp, Homo sapiens
ggggaggctgaggca

SEQ ID NO: 856238 - DNA, 15 bp, Homo sapiens
gaggcaggagaatcg

SEQ ID NO: 856239 - DNA, 15 bp, Homo sapiens
aggcaggagaatcga

SEQ ID NO: 856240 - DNA, 15 bp, Homo sapiens
ggcaggagaatcgat

SEQ ID NO: 856241 - DNA, 15 bp, Homo sapiens
gcaggagaatcgatt

SEQ ID NO: 856242 - DNA, 15 bp, Homo sapiens
caggagaatcgattg

SEQ ID NO: 856243 - DNA, 15 bp, Homo sapiens
aggagaatcgattga

SEQ ID NO: 856244 - DNA, 15 bp, Homo sapiens
ggagaatcgattgaa

SEQ ID NO: 856245 - DNA, 15 bp, Homo sapiens
gagaatcgattgaac

SEQ ID NO: 856246 - DNA, 15 bp, Homo sapiens
agaatcgattgaacc

SEQ ID NO: 856247 - DNA, 15 bp, Homo sapiens
gaatcgattgaaccc

SEQ ID NO: 856248 - DNA, 15 bp, Homo sapiens
aatcgattgaacccg

SEQ ID NO: 856249 - DNA, 15 bp, Homo sapiens
atcgattgaacccgg

SEQ ID NO: 856250 - DNA, 15 bp, Homo sapiens
tcgattgaacccggg

SEQ ID NO: 856251 - DNA, 15 bp, Homo sapiens
cgattgaacccggga

SEQ ID NO: 856252 - DNA, 15 bp, Homo sapiens
gattgaacccgggag

SEQ ID NO: 856253 - DNA, 15 bp, Homo sapiens
attgaacccgggaga

SEQ ID NO: 856254 - DNA, 15 bp, Homo sapiens
ttgaacccgggagat

SEQ ID NO: 856255 - DNA, 15 bp, Homo sapiens
tgaacccgggagatg

SEQ ID NO: 856256 - DNA, 15 bp, Homo sapiens
gaacccgggagatgg

SEQ ID NO: 856257 - DNA, 15 bp, Homo sapiens
aacccgggagatgga

SEQ ID NO: 856258 - DNA, 15 bp, Homo sapiens
acccgggagatggag

SEQ ID NO: 856259 - DNA, 15 bp, Homo sapiens
cccgggagatggagg

SEQ ID NO: 856260 - DNA, 15 bp, Homo sapiens
ccgggagatggaggt

SEQ ID NO: 856261 - DNA, 15 bp, Homo sapiens
cgggagatggaggtt

SEQ ID NO: 856262 - DNA, 15 bp, Homo sapiens
gggagatggaggttg

SEQ ID NO: 856263 - DNA, 15 bp, Homo sapiens
ggagatggaggttgc

SEQ ID NO: 856264 - DNA, 15 bp, Homo sapiens
gagatggaggttgca

SEQ ID NO: 856265 - DNA, 15 bp, Homo sapiens
agatggaggttgcag

SEQ ID NO: 856266 - DNA, 15 bp, Homo sapiens
gatggaggttgcagg

SEQ ID NO: 856267 - DNA, 15 bp, Homo sapiens
atggaggttgcaggg

SEQ ID NO: 856268 - DNA, 15 bp, Homo sapiens
tggaggttgcaggga

SEQ ID NO: 856269 - DNA, 15 bp, Homo sapiens
ggaggttgcagggag

SEQ ID NO: 856270 - DNA, 15 bp, Homo sapiens
gaggttgcagggagc

SEQ ID NO: 856271 - DNA, 15 bp, Homo sapiens
aggttgcagggagct

SEQ ID NO: 856272 - DNA, 15 bp, Homo sapiens
ggttgcagggagctg

SEQ ID NO: 856273 - DNA, 15 bp, Homo sapiens
gttgcagggagctga

SEQ ID NO: 856274 - DNA, 15 bp, Homo sapiens
ttgcagggagctgag

SEQ ID NO: 856275 - DNA, 15 bp, Homo sapiens
tgcagggagctgaga

SEQ ID NO: 856276 - DNA, 15 bp, Homo sapiens
gcagggagctgagat

SEQ ID NO: 856277 - DNA, 15 bp, Homo sapiens
cagggagctgagata

SEQ ID NO: 856278 - DNA, 15 bp, Homo sapiens
agggagctgagatag

SEQ ID NO: 856279 - DNA, 15 bp, Homo sapiens
gggagctgagatagc

SEQ ID NO: 856280 - DNA, 15 bp, Homo sapiens
ggagctgagatagct

SEQ ID NO: 856281 - DNA, 15 bp, Homo sapiens
gagctgagatagctc

SEQ ID NO: 856282 - DNA, 15 bp, Homo sapiens
agctgagatagctcc

SEQ ID NO: 856283 - DNA, 15 bp, Homo sapiens
gctgagatagctcca

SEQ ID NO: 856284 - DNA, 15 bp, Homo sapiens
ctgagatagctccac

SEQ ID NO: 856285 - DNA, 15 bp, Homo sapiens
tgagatagctccact

SEQ ID NO: 856286 - DNA, 15 bp, Homo sapiens
gagatagctccactg

SEQ ID NO: 856287 - DNA, 15 bp, Homo sapiens
agatagctccactgc

SEQ ID NO: 856288 - DNA, 15 bp, Homo sapiens
gatagctccactgca

SEQ ID NO: 856289 - DNA, 15 bp, Homo sapiens
atagctccactgcac

SEQ ID NO: 856290 - DNA, 15 bp, Homo sapiens
tagctccactgcact

SEQ ID NO: 856291 - DNA, 15 bp, Homo sapiens
agctccactgcactc

SEQ ID NO: 856292 - DNA, 15 bp, Homo sapiens
gctccactgcactcc

SEQ ID NO: 856293 - DNA, 15 bp, Homo sapiens
ctccactgcactcca

SEQ ID NO: 856294 - DNA, 15 bp, Homo sapiens
tccactgcactccag

SEQ ID NO: 856295 - DNA, 15 bp, Homo sapiens
gcactccagcctggt

SEQ ID NO: 856296 - DNA, 15 bp, Homo sapiens
cactccagcctggtg

SEQ ID NO: 856297 - DNA, 15 bp, Homo sapiens
actccagcctggtga

SEQ ID NO: 856298 - DNA, 15 bp, Homo sapiens
ctccagcctggtgac

SEQ ID NO: 856299 - DNA, 15 bp, Homo sapiens
tccagcctggtgaca

SEQ ID NO: 856300 - DNA, 15 bp, Homo sapiens
ccagcctggtgacag

SEQ ID NO: 856301 - DNA, 15 bp, Homo sapiens
cagcctggtgacagg

SEQ ID NO: 856302 - DNA, 15 bp, Homo sapiens
agcctggtgacaggg

SEQ ID NO: 856303 - DNA, 15 bp, Homo sapiens
gcctggtgacagggt

SEQ ID NO: 856304 - DNA, 15 bp, Homo sapiens
cctggtgacagggtg

SEQ ID NO: 856305 - DNA, 15 bp, Homo sapiens
ctggtgacagggtga

SEQ ID NO: 856306 - DNA, 15 bp, Homo sapiens
tggtgacagggtgag

SEQ ID NO: 856307 - DNA, 15 bp, Homo sapiens
ggtgacagggtgaga

SEQ ID NO: 856308 - DNA, 15 bp, Homo sapiens
gtgacagggtgagac

SEQ ID NO: 856309 - DNA, 15 bp, Homo sapiens
tgacagggtgagact

SEQ ID NO: 856310 - DNA, 15 bp, Homo sapiens
gacagggtgagactc

SEQ ID NO: 856311 - DNA, 15 bp, Homo sapiens
acagggtgagactcc

SEQ ID NO: 856312 - DNA, 15 bp, Homo sapiens
cagggtgagactcca

SEQ ID NO: 856313 - DNA, 15 bp, Homo sapiens
agggtgagactccat

SEQ ID NO: 856314 - DNA, 15 bp, Homo sapiens
gggtgagactccatc

SEQ ID NO: 856315 - DNA, 15 bp, Homo sapiens
ggtgagactccatca

SEQ ID NO: 856316 - DNA, 15 bp, Homo sapiens
gtgagactccatcac

SEQ ID NO: 856317 - DNA, 15 bp, Homo sapiens
tgagactccatcaca

SEQ ID NO: 856318 - DNA, 15 bp, Homo sapiens
gagactccatcacaa

SEQ ID NO: 856319 - DNA, 15 bp, Homo sapiens
agactccatcacaaa

SEQ ID NO: 856320 - DNA, 15 bp, Homo sapiens
gactccatcacaaac

SEQ ID NO: 856321 - DNA, 15 bp, Homo sapiens
actccatcacaaaca

SEQ ID NO: 856322 - DNA, 15 bp, Homo sapiens
ctccatcacaaacaa

SEQ ID NO: 856323 - DNA, 15 bp, Homo sapiens
tccatcacaaacaaa

SEQ ID NO: 856324 - DNA, 15 bp, Homo sapiens
ccatcacaaacaaaa

SEQ ID NO: 856325 - DNA, 15 bp, Homo sapiens
catcacaaacaaaac

SEQ ID NO: 856326 - DNA, 15 bp, Homo sapiens
atcacaaacaaaaca

SEQ ID NO: 856327 - DNA, 15 bp, Homo sapiens
tcacaaacaaaacaa

SEQ ID NO: 856328 - DNA, 15 bp, Homo sapiens
cacaaacaaaacaaa

SEQ ID NO: 856329 - DNA, 15 bp, Homo sapiens
acaaacaaaacaaaa

SEQ ID NO: 856330 - DNA, 15 bp, Homo sapiens
caaacaaaacaaaac

SEQ ID NO: 856331 - DNA, 15 bp, Homo sapiens
aaacaaaacaaaaca

SEQ ID NO: 856332 - DNA, 15 bp, Homo sapiens
aacaaaacaaaacaa

SEQ ID NO: 856333 - DNA, 15 bp, Homo sapiens
acaaaacaaaacaaa

SEQ ID NO: 856334 - DNA, 15 bp, Homo sapiens
caaaacaaaacaaaa

SEQ ID NO: 856335 - DNA, 15 bp, Homo sapiens
aaaacaaaacaaaag

SEQ ID NO: 856336 - DNA, 15 bp, Homo sapiens
aaacaaaacaaaaga

SEQ ID NO: 856337 - DNA, 15 bp, Homo sapiens
aacaaaacaaaagaa

SEQ ID NO: 856338 - DNA, 15 bp, Homo sapiens
acaaaacaaaagaaa

SEQ ID NO: 856339 - DNA, 15 bp, Homo sapiens
caaaacaaaagaaag

SEQ ID NO: 856340 - DNA, 15 bp, Homo sapiens
aaaacaaaagaaagc

SEQ ID NO: 856341 - DNA, 15 bp, Homo sapiens
aaacaaaagaaagca

SEQ ID NO: 856342 - DNA, 15 bp, Homo sapiens
aacaaaagaaagcaa

SEQ ID NO: 856343 - DNA, 15 bp, Homo sapiens
acaaaagaaagcaaa

SEQ ID NO: 856344 - DNA, 15 bp, Homo sapiens
caaaagaaagcaaaa

SEQ ID NO: 856345 - DNA, 15 bp, Homo sapiens
aaaagaaagcaaaaa

SEQ ID NO: 856346 - DNA, 15 bp, Homo sapiens
aaagaaagcaaaaac

SEQ ID NO: 856347 - DNA, 15 bp, Homo sapiens
aagaaagcaaaaaca

SEQ ID NO: 856348 - DNA, 15 bp, Homo sapiens
agaaagcaaaaacac

SEQ ID NO: 856349 - DNA, 15 bp, Homo sapiens
gaaagcaaaaacaca

SEQ ID NO: 856350 - DNA, 15 bp, Homo sapiens
aaagcaaaaacacag

SEQ ID NO: 856351 - DNA, 15 bp, Homo sapiens
aagcaaaaacacaga

SEQ ID NO: 856352 - DNA, 15 bp, Homo sapiens
agcaaaaacacagat

SEQ ID NO: 856353 - DNA, 15 bp, Homo sapiens
gcaaaaacacagatt

SEQ ID NO: 856354 - DNA, 15 bp, Homo sapiens
caaaaacacagatta

SEQ ID NO: 856355 - DNA, 15 bp, Homo sapiens
aaaaacacagattac

SEQ ID NO: 856356 - DNA, 15 bp, Homo sapiens
aaaacacagattact

SEQ ID NO: 856357 - DNA, 15 bp, Homo sapiens
aaacacagattactc

SEQ ID NO: 856358 - DNA, 15 bp, Homo sapiens
aacacagattactca

SEQ ID NO: 856359 - DNA, 15 bp, Homo sapiens
acacagattactcag

SEQ ID NO: 856360 - DNA, 15 bp, Homo sapiens
cacagattactcagg

SEQ ID NO: 856361 - DNA, 15 bp, Homo sapiens
acagattactcaggg

SEQ ID NO: 856362 - DNA, 15 bp, Homo sapiens
cagattactcagggt

SEQ ID NO: 856363 - DNA, 15 bp, Homo sapiens
agattactcagggtc

SEQ ID NO: 856364 - DNA, 15 bp, Homo sapiens
gattactcagggtcc

SEQ ID NO: 856365 - DNA, 15 bp, Homo sapiens
attactcagggtcca

SEQ ID NO: 856366 - DNA, 15 bp, Homo sapiens
ttactcagggtccac

SEQ ID NO: 856367 - DNA, 15 bp, Homo sapiens
tactcagggtccact

SEQ ID NO: 856368 - DNA, 15 bp, Homo sapiens
actcagggtccacta

SEQ ID NO: 856369 - DNA, 15 bp, Homo sapiens
ctcagggtccactaa

SEQ ID NO: 856370 - DNA, 15 bp, Homo sapiens
tcagggtccactaag

SEQ ID NO: 856371 - DNA, 15 bp, Homo sapiens
cagggtccactaaga

SEQ ID NO: 856372 - DNA, 15 bp, Homo sapiens
agggtccactaagac

SEQ ID NO: 856373 - DNA, 15 bp, Homo sapiens
gggtccactaagacc

SEQ ID NO: 856374 - DNA, 15 bp, Homo sapiens
ggtccactaagacca

SEQ ID NO: 856375 - DNA, 15 bp, Homo sapiens
gtccactaagaccag

SEQ ID NO: 856376 - DNA, 15 bp, Homo sapiens
tccactaagaccagt

SEQ ID NO: 856377 - DNA, 15 bp, Homo sapiens
ccactaagaccagtg

SEQ ID NO: 856378 - DNA, 15 bp, Homo sapiens
cactaagaccagtga

SEQ ID NO: 856379 - DNA, 15 bp, Homo sapiens
actaagaccagtgaa

SEQ ID NO: 856380 - DNA, 15 bp, Homo sapiens
ctaagaccagtgaag

SEQ ID NO: 856381 - DNA, 15 bp, Homo sapiens
taagaccagtgaagt

SEQ ID NO: 856382 - DNA, 15 bp, Homo sapiens
aagaccagtgaagtc

SEQ ID NO: 856383 - DNA, 15 bp, Homo sapiens
agaccagtgaagtca

SEQ ID NO: 856384 - DNA, 15 bp, Homo sapiens
gaccagtgaagtcag

SEQ ID NO: 856385 - DNA, 15 bp, Homo sapiens
accagtgaagtcagt

SEQ ID NO: 856386 - DNA, 15 bp, Homo sapiens
ccagtgaagtcagtt

SEQ ID NO: 856387 - DNA, 15 bp, Homo sapiens
cagtgaagtcagttc

SEQ ID NO: 856388 - DNA, 15 bp, Homo sapiens
agtgaagtcagttct

SEQ ID NO: 856389 - DNA, 15 bp, Homo sapiens
gtgaagtcagttctc

SEQ ID NO: 856390 - DNA, 15 bp, Homo sapiens
tgaagtcagttctct

SEQ ID NO: 856391 - DNA, 15 bp, Homo sapiens
gaagtcagttctctt

SEQ ID NO: 856392 - DNA, 15 bp, Homo sapiens
aagtcagttctcttg

SEQ ID NO: 856393 - DNA, 15 bp, Homo sapiens
agtcagttctcttgg

SEQ ID NO: 856394 - DNA, 15 bp, Homo sapiens
gtcagttctcttggt

SEQ ID NO: 856395 - DNA, 15 bp, Homo sapiens
tcagttctcttggta

SEQ ID NO: 856396 - DNA, 15 bp, Homo sapiens
cagttctcttggtag

SEQ ID NO: 856397 - DNA, 15 bp, Homo sapiens
agttctcttggtagg

SEQ ID NO: 856398 - DNA, 15 bp, Homo sapiens
gttctcttggtaggg

SEQ ID NO: 856399 - DNA, 15 bp, Homo sapiens
ttctcttggtagggg

SEQ ID NO: 856400 - DNA, 15 bp, Homo sapiens
tctcttggtaggggg

SEQ ID NO: 856401 - DNA, 15 bp, Homo sapiens
ctcttggtagggggc

SEQ ID NO: 856402 - DNA, 15 bp, Homo sapiens
tcttggtagggggca

SEQ ID NO: 856403 - DNA, 15 bp, Homo sapiens
cttggtagggggcag

SEQ ID NO: 856404 - DNA, 15 bp, Homo sapiens
ttggtagggggcagg

SEQ ID NO: 856405 - DNA, 15 bp, Homo sapiens
tggtagggggcaggg

SEQ ID NO: 856406 - DNA, 15 bp, Homo sapiens
ggtagggggcagggt

SEQ ID NO: 856407 - DNA, 15 bp, Homo sapiens
gtagggggcagggtg

SEQ ID NO: 856408 - DNA, 15 bp, Homo sapiens
tagggggcagggtga

SEQ ID NO: 856409 - DNA, 15 bp, Homo sapiens
agggggcagggtgac

SEQ ID NO: 856410 - DNA, 15 bp, Homo sapiens
gggggcagggtgact

SEQ ID NO: 856411 - DNA, 15 bp, Homo sapiens
ggggcagggtgactg

SEQ ID NO: 856412 - DNA, 15 bp, Homo sapiens
gggcagggtgactga

SEQ ID NO: 856413 - DNA, 15 bp, Homo sapiens
ggcagggtgactgag

SEQ ID NO: 856414 - DNA, 15 bp, Homo sapiens
gcagggtgactgagc

SEQ ID NO: 856415 - DNA, 15 bp, Homo sapiens
cagggtgactgagca

SEQ ID NO: 856416 - DNA, 15 bp, Homo sapiens
agggtgactgagcat

SEQ ID NO: 856417 - DNA, 15 bp, Homo sapiens
gggtgactgagcatg

SEQ ID NO: 856418 - DNA, 15 bp, Homo sapiens
ggtgactgagcatga

SEQ ID NO: 856419 - DNA, 15 bp, Homo sapiens
gtgactgagcatgat

SEQ ID NO: 856420 - DNA, 15 bp, Homo sapiens
tgactgagcatgatg

SEQ ID NO: 856421 - DNA, 15 bp, Homo sapiens
gactgagcatgatgt

SEQ ID NO: 856422 - DNA, 15 bp, Homo sapiens
actgagcatgatgtt

SEQ ID NO: 856423 - DNA, 15 bp, Homo sapiens
ctgagcatgatgttt

SEQ ID NO: 856424 - DNA, 15 bp, Homo sapiens
tgagcatgatgtttg

SEQ ID NO: 856425 - DNA, 15 bp, Homo sapiens
gagcatgatgtttgt

SEQ ID NO: 856426 - DNA, 15 bp, Homo sapiens
agcatgatgtttgta

SEQ ID NO: 856427 - DNA, 15 bp, Homo sapiens
gcatgatgtttgtaa

SEQ ID NO: 856428 - DNA, 15 bp, Homo sapiens
catgatgtttgtaat

SEQ ID NO: 856429 - DNA, 15 bp, Homo sapiens
atgatgtttgtaatt

SEQ ID NO: 856430 - DNA, 15 bp, Homo sapiens
tgatgtttgtaattt

SEQ ID NO: 856431 - DNA, 15 bp, Homo sapiens
gatgtttgtaatttt

SEQ ID NO: 856432 - DNA, 15 bp, Homo sapiens
atgtttgtaatttta

SEQ ID NO: 856433 - DNA, 15 bp, Homo sapiens
tgtttgtaattttaa

SEQ ID NO: 856434 - DNA, 15 bp, Homo sapiens
gtttgtaattttaaa

SEQ ID NO: 856435 - DNA, 15 bp, Homo sapiens
tttgtaattttaaaa

SEQ ID NO: 856436 - DNA, 15 bp, Homo sapiens
ttgtaattttaaaag

SEQ ID NO: 856437 - DNA, 15 bp, Homo sapiens
tgtaattttaaaagt

SEQ ID NO: 856438 - DNA, 15 bp, Homo sapiens
gtaattttaaaagtg

SEQ ID NO: 856439 - DNA, 15 bp, Homo sapiens
taattttaaaagtgc

SEQ ID NO: 856440 - DNA, 15 bp, Homo sapiens
aattttaaaagtgct

SEQ ID NO: 856441 - DNA, 15 bp, Homo sapiens
attttaaaagtgctc

SEQ ID NO: 856442 - DNA, 15 bp, Homo sapiens
ttttaaaagtgctcc

SEQ ID NO: 856443 - DNA, 15 bp, Homo sapiens
tttaaaagtgctcca

SEQ ID NO: 856444 - DNA, 15 bp, Homo sapiens
ttaaaagtgctccag

SEQ ID NO: 856445 - DNA, 15 bp, Homo sapiens
taaaagtgctccagg

SEQ ID NO: 856446 - DNA, 15 bp, Homo sapiens
aaaagtgctccaggt

SEQ ID NO: 856447 - DNA, 15 bp, Homo sapiens
aaagtgctccaggtg

SEQ ID NO: 856448 - DNA, 15 bp, Homo sapiens
aagtgctccaggtga

SEQ ID NO: 856449 - DNA, 15 bp, Homo sapiens
agtgctccaggtgat

SEQ ID NO: 856450 - DNA, 15 bp, Homo sapiens
gtgctccaggtgatt

SEQ ID NO: 856451 - DNA, 15 bp, Homo sapiens
tgctccaggtgattc

SEQ ID NO: 856452 - DNA, 15 bp, Homo sapiens
gctccaggtgattct

SEQ ID NO: 856453 - DNA, 15 bp, Homo sapiens
ctccaggtgattcta

SEQ ID NO: 856454 - DNA, 15 bp, Homo sapiens
tccaggtgattctag

SEQ ID NO: 856455 - DNA, 15 bp, Homo sapiens
ccaggtgattctagc

SEQ ID NO: 856456 - DNA, 15 bp, Homo sapiens
caggtgattctagcg

SEQ ID NO: 856457 - DNA, 15 bp, Homo sapiens
aggtgattctagcgt

SEQ ID NO: 856458 - DNA, 15 bp, Homo sapiens
ggtgattctagcgtg

SEQ ID NO: 856459 - DNA, 15 bp, Homo sapiens
gtgattctagcgtgt

SEQ ID NO: 856460 - DNA, 15 bp, Homo sapiens
tgattctagcgtgta

SEQ ID NO: 856461 - DNA, 15 bp, Homo sapiens
gattctagcgtgtat

SEQ ID NO: 856462 - DNA, 15 bp, Homo sapiens
attctagcgtgtatc

SEQ ID NO: 856463 - DNA, 15 bp, Homo sapiens
ttctagcgtgtatca

SEQ ID NO: 856464 - DNA, 15 bp, Homo sapiens
tctagcgtgtatcaa

SEQ ID NO: 856465 - DNA, 15 bp, Homo sapiens
ctagcgtgtatcaag

SEQ ID NO: 856466 - DNA, 15 bp, Homo sapiens
tagcgtgtatcaagc

SEQ ID NO: 856467 - DNA, 15 bp, Homo sapiens
agcgtgtatcaagca

SEQ ID NO: 856468 - DNA, 15 bp, Homo sapiens
gcgtgtatcaagcaa

SEQ ID NO: 856469 - DNA, 15 bp, Homo sapiens
cgtgtatcaagcaag

SEQ ID NO: 856470 - DNA, 15 bp, Homo sapiens
gtgtatcaagcaaga

SEQ ID NO: 856471 - DNA, 15 bp, Homo sapiens
tgtatcaagcaagac

SEQ ID NO: 856472 - DNA, 15 bp, Homo sapiens
gtatcaagcaagact

SEQ ID NO: 856473 - DNA, 15 bp, Homo sapiens
tatcaagcaagactt

SEQ ID NO: 856474 - DNA, 15 bp, Homo sapiens
atcaagcaagacttg

SEQ ID NO: 856475 - DNA, 15 bp, Homo sapiens
tcaagcaagacttgt

SEQ ID NO: 856476 - DNA, 15 bp, Homo sapiens
caagcaagacttgtg

SEQ ID NO: 856477 - DNA, 15 bp, Homo sapiens
aagcaagacttgtga

SEQ ID NO: 856478 - DNA, 15 bp, Homo sapiens
agcaagacttgtgaa

SEQ ID NO: 856479 - DNA, 15 bp, Homo sapiens
gcaagacttgtgaac

SEQ ID NO: 856480 - DNA, 15 bp, Homo sapiens
caagacttgtgaacc

SEQ ID NO: 856481 - DNA, 15 bp, Homo sapiens
aagacttgtgaacca

SEQ ID NO: 856482 - DNA, 15 bp, Homo sapiens
agacttgtgaaccac

SEQ ID NO: 856483 - DNA, 15 bp, Homo sapiens
gacttgtgaaccact

SEQ ID NO: 856484 - DNA, 15 bp, Homo sapiens
acttgtgaaccactg

SEQ ID NO: 856485 - DNA, 15 bp, Homo sapiens
cttgtgaaccactga

SEQ ID NO: 856486 - DNA, 15 bp, Homo sapiens
ttgtgaaccactgaa

SEQ ID NO: 856487 - DNA, 15 bp, Homo sapiens
tgtgaaccactgaac

SEQ ID NO: 856488 - DNA, 15 bp, Homo sapiens
gtgaaccactgaact

SEQ ID NO: 856489 - DNA, 15 bp, Homo sapiens
tgaaccactgaacta

SEQ ID NO: 856490 - DNA, 15 bp, Homo sapiens
gaaccactgaactac

SEQ ID NO: 856491 - DNA, 15 bp, Homo sapiens
aaccactgaactaca

SEQ ID NO: 856492 - DNA, 15 bp, Homo sapiens
accactgaactacat

SEQ ID NO: 856493 - DNA, 15 bp, Homo sapiens
ccactgaactacatg

SEQ ID NO: 856494 - DNA, 15 bp, Homo sapiens
cactgaactacatgc

SEQ ID NO: 856495 - DNA, 15 bp, Homo sapiens
actgaactacatgct

SEQ ID NO: 856496 - DNA, 15 bp, Homo sapiens
ctgaactacatgcta

SEQ ID NO: 856497 - DNA, 15 bp, Homo sapiens
tgaactacatgctaa

SEQ ID NO: 856498 - DNA, 15 bp, Homo sapiens
gaactacatgctaag

SEQ ID NO: 856499 - DNA, 15 bp, Homo sapiens
aactacatgctaaga

SEQ ID NO: 856500 - DNA, 15 bp, Homo sapiens
actacatgctaagac

SEQ ID NO: 856501 - DNA, 15 bp, Homo sapiens
ctacatgctaagact

SEQ ID NO: 856502 - DNA, 15 bp, Homo sapiens
tacatgctaagactc

SEQ ID NO: 856503 - DNA, 15 bp, Homo sapiens
acatgctaagactca

SEQ ID NO: 856504 - DNA, 15 bp, Homo sapiens
catgctaagactcat

SEQ ID NO: 856505 - DNA, 15 bp, Homo sapiens
atgctaagactcatt

SEQ ID NO: 856506 - DNA, 15 bp, Homo sapiens
tgctaagactcattt

SEQ ID NO: 856507 - DNA, 15 bp, Homo sapiens
gctaagactcatttt

SEQ ID NO: 856508 - DNA, 15 bp, Homo sapiens
ctaagactcatttta

SEQ ID NO: 856509 - DNA, 15 bp, Homo sapiens
taagactcattttag

SEQ ID NO: 856510 - DNA, 15 bp, Homo sapiens
aagactcattttagc

SEQ ID NO: 856511 - DNA, 15 bp, Homo sapiens
agactcattttagct

SEQ ID NO: 856512 - DNA, 15 bp, Homo sapiens
gactcattttagctc

SEQ ID NO: 856513 - DNA, 15 bp, Homo sapiens
actcattttagctct

SEQ ID NO: 856514 - DNA, 15 bp, Homo sapiens
ctcattttagctctg

SEQ ID NO: 856515 - DNA, 15 bp, Homo sapiens
tcattttagctctga

SEQ ID NO: 856516 - DNA, 15 bp, Homo sapiens
cattttagctctgat

SEQ ID NO: 856517 - DNA, 15 bp, Homo sapiens
attttagctctgatt

SEQ ID NO: 856518 - DNA, 15 bp, Homo sapiens
ttttagctctgattt

SEQ ID NO: 856519 - DNA, 15 bp, Homo sapiens
tttagctctgatttt

SEQ ID NO: 856520 - DNA, 15 bp, Homo sapiens
ttagctctgattttc

SEQ ID NO: 856521 - DNA, 15 bp, Homo sapiens
tagctctgattttct

SEQ ID NO: 856522 - DNA, 15 bp, Homo sapiens
agctctgattttctg

SEQ ID NO: 856523 - DNA, 15 bp, Homo sapiens
gctctgattttctgt

SEQ ID NO: 856524 - DNA, 15 bp, Homo sapiens
ctctgattttctgtg

SEQ ID NO: 856525 - DNA, 15 bp, Homo sapiens
tctgattttctgtga

SEQ ID NO: 856526 - DNA, 15 bp, Homo sapiens
ctgattttctgtgag

SEQ ID NO: 856527 - DNA, 15 bp, Homo sapiens
tgattttctgtgagt

SEQ ID NO: 856528 - DNA, 15 bp, Homo sapiens
gattttctgtgagtc

SEQ ID NO: 856529 - DNA, 15 bp, Homo sapiens
attttctgtgagtca

SEQ ID NO: 856530 - DNA, 15 bp, Homo sapiens
ttttctgtgagtcat

SEQ ID NO: 856531 - DNA, 15 bp, Homo sapiens
tttctgtgagtcata

SEQ ID NO: 856532 - DNA, 15 bp, Homo sapiens
ttctgtgagtcatag

SEQ ID NO: 856533 - DNA, 15 bp, Homo sapiens
tctgtgagtcatagc

SEQ ID NO: 856534 - DNA, 15 bp, Homo sapiens
ctgtgagtcatagca

SEQ ID NO: 856535 - DNA, 15 bp, Homo sapiens
tgtgagtcatagcag

SEQ ID NO: 856536 - DNA, 15 bp, Homo sapiens
gtgagtcatagcaga

SEQ ID NO: 856537 - DNA, 15 bp, Homo sapiens
tgagtcatagcagag

SEQ ID NO: 856538 - DNA, 15 bp, Homo sapiens
gagtcatagcagagg

SEQ ID NO: 856539 - DNA, 15 bp, Homo sapiens
agtcatagcagaggg

SEQ ID NO: 856540 - DNA, 15 bp, Homo sapiens
gtcatagcagagggc

SEQ ID NO: 856541 - DNA, 15 bp, Homo sapiens
tcatagcagagggct

SEQ ID NO: 856542 - DNA, 15 bp, Homo sapiens
catagcagagggctc

SEQ ID NO: 856543 - DNA, 15 bp, Homo sapiens
atagcagagggctca

SEQ ID NO: 856544 - DNA, 15 bp, Homo sapiens
tagcagagggctcag

SEQ ID NO: 856545 - DNA, 15 bp, Homo sapiens
agcagagggctcagc

SEQ ID NO: 856546 - DNA, 15 bp, Homo sapiens
gcagagggctcagca

SEQ ID NO: 856547 - DNA, 15 bp, Homo sapiens
cagagggctcagcaa

SEQ ID NO: 856548 - DNA, 15 bp, Homo sapiens
agagggctcagcaaa

SEQ ID NO: 856549 - DNA, 15 bp, Homo sapiens
gagggctcagcaaac

SEQ ID NO: 856550 - DNA, 15 bp, Homo sapiens
agggctcagcaaact

SEQ ID NO: 856551 - DNA, 15 bp, Homo sapiens
gggctcagcaaactt

SEQ ID NO: 856552 - DNA, 15 bp, Homo sapiens
ggctcagcaaacttt

SEQ ID NO: 856553 - DNA, 15 bp, Homo sapiens
gctcagcaaactttt

SEQ ID NO: 856554 - DNA, 15 bp, Homo sapiens
ctcagcaaacttttt

SEQ ID NO: 856555 - DNA, 15 bp, Homo sapiens
tcagcaaactttttc

SEQ ID NO: 856556 - DNA, 15 bp, Homo sapiens
cagcaaactttttct

SEQ ID NO: 856557 - DNA, 15 bp, Homo sapiens
agcaaactttttcta

SEQ ID NO: 856558 - DNA, 15 bp, Homo sapiens
gcaaactttttctat

SEQ ID NO: 856559 - DNA, 15 bp, Homo sapiens
caaactttttctata

SEQ ID NO: 856560 - DNA, 15 bp, Homo sapiens
aaactttttctataa

SEQ ID NO: 856561 - DNA, 15 bp, Homo sapiens
aactttttctataaa

SEQ ID NO: 856562 - DNA, 15 bp, Homo sapiens
actttttctataaat

SEQ ID NO: 856563 - DNA, 15 bp, Homo sapiens
ctttttctataaatg

SEQ ID NO: 856564 - DNA, 15 bp, Homo sapiens
tttttctataaatgc

SEQ ID NO: 856565 - DNA, 15 bp, Homo sapiens
ttttctataaatgct

SEQ ID NO: 856566 - DNA, 15 bp, Homo sapiens
tttctataaatgcta

SEQ ID NO: 856567 - DNA, 15 bp, Homo sapiens
ttctataaatgctaa

SEQ ID NO: 856568 - DNA, 15 bp, Homo sapiens
tctataaatgctaag

SEQ ID NO: 856569 - DNA, 15 bp, Homo sapiens
ctataaatgctaaga

SEQ ID NO: 856570 - DNA, 15 bp, Homo sapiens
tataaatgctaagat

SEQ ID NO: 856571 - DNA, 15 bp, Homo sapiens
ataaatgctaagata

SEQ ID NO: 856572 - DNA, 15 bp, Homo sapiens
taaatgctaagatag

SEQ ID NO: 856573 - DNA, 15 bp, Homo sapiens
aaatgctaagatagt

SEQ ID NO: 856574 - DNA, 15 bp, Homo sapiens
aatgctaagatagta

SEQ ID NO: 856575 - DNA, 15 bp, Homo sapiens
atgctaagatagtaa

SEQ ID NO: 856576 - DNA, 15 bp, Homo sapiens
tgctaagatagtaaa

SEQ ID NO: 856577 - DNA, 15 bp, Homo sapiens
gctaagatagtaaat

SEQ ID NO: 856578 - DNA, 15 bp, Homo sapiens
ctaagatagtaaata

SEQ ID NO: 856579 - DNA, 15 bp, Homo sapiens
taagatagtaaatat

SEQ ID NO: 856580 - DNA, 15 bp, Homo sapiens
aagatagtaaatatt

SEQ ID NO: 856581 - DNA, 15 bp, Homo sapiens
tcagctttgtgggct

SEQ ID NO: 856582 - DNA, 15 bp, Homo sapiens
cagctttgtgggctg

SEQ ID NO: 856583 - DNA, 15 bp, Homo sapiens
agctttgtgggctgt

SEQ ID NO: 856584 - DNA, 15 bp, Homo sapiens
gctttgtgggctgta

SEQ ID NO: 856585 - DNA, 15 bp, Homo sapiens
ctttgtgggctgtat

SEQ ID NO: 856586 - DNA, 15 bp, Homo sapiens
tttgtgggctgtatc

SEQ ID NO: 856587 - DNA, 15 bp, Homo sapiens
ttgtgggctgtatcg

SEQ ID NO: 856588 - DNA, 15 bp, Homo sapiens
tgtgggctgtatcgt

SEQ ID NO: 856589 - DNA, 15 bp, Homo sapiens
gtgggctgtatcgtc

SEQ ID NO: 856590 - DNA, 15 bp, Homo sapiens
tgggctgtatcgtct

SEQ ID NO: 856591 - DNA, 15 bp, Homo sapiens
gggctgtatcgtctt

SEQ ID NO: 856592 - DNA, 15 bp, Homo sapiens
ggctgtatcgtcttt

SEQ ID NO: 856593 - DNA, 15 bp, Homo sapiens
gctgtatcgtcttta

SEQ ID NO: 856594 - DNA, 15 bp, Homo sapiens
ctgtatcgtctttat

SEQ ID NO: 856595 - DNA, 15 bp, Homo sapiens
tgtatcgtctttatg

SEQ ID NO: 856596 - DNA, 15 bp, Homo sapiens
gtatcgtctttatga

SEQ ID NO: 856597 - DNA, 15 bp, Homo sapiens
tatcgtctttatgac

SEQ ID NO: 856598 - DNA, 15 bp, Homo sapiens
atcgtctttatgaca

SEQ ID NO: 856599 - DNA, 15 bp, Homo sapiens
tcgtctttatgacaa

SEQ ID NO: 856600 - DNA, 15 bp, Homo sapiens
cgtctttatgacaac

SEQ ID NO: 856601 - DNA, 15 bp, Homo sapiens
gtctttatgacaact

SEQ ID NO: 856602 - DNA, 15 bp, Homo sapiens
tctttatgacaactc

SEQ ID NO: 856603 - DNA, 15 bp, Homo sapiens
ctttatgacaactca

SEQ ID NO: 856604 - DNA, 15 bp, Homo sapiens
tttatgacaactcaa

SEQ ID NO: 856605 - DNA, 15 bp, Homo sapiens
ttatgacaactcaac

SEQ ID NO: 856606 - DNA, 15 bp, Homo sapiens
tatgacaactcaact

SEQ ID NO: 856607 - DNA, 15 bp, Homo sapiens
atgacaactcaactc

SEQ ID NO: 856608 - DNA, 15 bp, Homo sapiens
tgacaactcaactca

SEQ ID NO: 856609 - DNA, 15 bp, Homo sapiens
gacaactcaactcag

SEQ ID NO: 856610 - DNA, 15 bp, Homo sapiens
acaactcaactcagt

SEQ ID NO: 856611 - DNA, 15 bp, Homo sapiens
caactcaactcagtc

SEQ ID NO: 856612 - DNA, 15 bp, Homo sapiens
aactcaactcagtct

SEQ ID NO: 856613 - DNA, 15 bp, Homo sapiens
actcaactcagtctt

SEQ ID NO: 856614 - DNA, 15 bp, Homo sapiens
ctcaactcagtcttt

SEQ ID NO: 856615 - DNA, 15 bp, Homo sapiens
tcaactcagtctttg

SEQ ID NO: 856616 - DNA, 15 bp, Homo sapiens
caactcagtctttgt

SEQ ID NO: 856617 - DNA, 15 bp, Homo sapiens
aactcagtctttgta

SEQ ID NO: 856618 - DNA, 15 bp, Homo sapiens
actcagtctttgtag

SEQ ID NO: 856619 - DNA, 15 bp, Homo sapiens
ctcagtctttgtaga

SEQ ID NO: 856620 - DNA, 15 bp, Homo sapiens
tcagtctttgtagag

SEQ ID NO: 856621 - DNA, 15 bp, Homo sapiens
cagtctttgtagaga

SEQ ID NO: 856622 - DNA, 15 bp, Homo sapiens
agtctttgtagagaa

SEQ ID NO: 856623 - DNA, 15 bp, Homo sapiens
gtctttgtagagaaa

SEQ ID NO: 856624 - DNA, 15 bp, Homo sapiens
tctttgtagagaaaa

SEQ ID NO: 856625 - DNA, 15 bp, Homo sapiens
ctttgtagagaaaag

SEQ ID NO: 856626 - DNA, 15 bp, Homo sapiens
tttgtagagaaaagc

SEQ ID NO: 856627 - DNA, 15 bp, Homo sapiens
ttgtagagaaaagca

SEQ ID NO: 856628 - DNA, 15 bp, Homo sapiens
tgtagagaaaagcag

SEQ ID NO: 856629 - DNA, 15 bp, Homo sapiens
gtagagaaaagcagc

SEQ ID NO: 856630 - DNA, 15 bp, Homo sapiens
tagagaaaagcagct

SEQ ID NO: 856631 - DNA, 15 bp, Homo sapiens
agagaaaagcagctg

SEQ ID NO: 856632 - DNA, 15 bp, Homo sapiens
gagaaaagcagctgt

SEQ ID NO: 856633 - DNA, 15 bp, Homo sapiens
agaaaagcagctgta

SEQ ID NO: 856634 - DNA, 15 bp, Homo sapiens
gaaaagcagctgtac

SEQ ID NO: 856635 - DNA, 15 bp, Homo sapiens
aaaagcagctgtaca

SEQ ID NO: 856636 - DNA, 15 bp, Homo sapiens
aaagcagctgtacat

SEQ ID NO: 856637 - DNA, 15 bp, Homo sapiens
aagcagctgtacata

SEQ ID NO: 856638 - DNA, 15 bp, Homo sapiens
agcagctgtacataa

SEQ ID NO: 856639 - DNA, 15 bp, Homo sapiens
gcagctgtacataat

SEQ ID NO: 856640 - DNA, 15 bp, Homo sapiens
cagctgtacataata

SEQ ID NO: 856641 - DNA, 15 bp, Homo sapiens
agctgtacataatat

SEQ ID NO: 856642 - DNA, 15 bp, Homo sapiens
gctgtacataatatg

SEQ ID NO: 856643 - DNA, 15 bp, Homo sapiens
ctgtacataatatgt

SEQ ID NO: 856644 - DNA, 15 bp, Homo sapiens
tgtacataatatgta

SEQ ID NO: 856645 - DNA, 15 bp, Homo sapiens
gtacataatatgtaa

SEQ ID NO: 856646 - DNA, 15 bp, Homo sapiens
tacataatatgtaaa

SEQ ID NO: 856647 - DNA, 15 bp, Homo sapiens
acataatatgtaaac

SEQ ID NO: 856648 - DNA, 15 bp, Homo sapiens
cataatatgtaaact

SEQ ID NO: 856649 - DNA, 15 bp, Homo sapiens
ataatatgtaaacta

SEQ ID NO: 856650 - DNA, 15 bp, Homo sapiens
taatatgtaaactaa

SEQ ID NO: 856651 - DNA, 15 bp, Homo sapiens
aatatgtaaactaat

SEQ ID NO: 856652 - DNA, 15 bp, Homo sapiens
atatgtaaactaatg

SEQ ID NO: 856653 - DNA, 15 bp, Homo sapiens
tatgtaaactaatgg

SEQ ID NO: 856654 - DNA, 15 bp, Homo sapiens
atgtaaactaatggg

SEQ ID NO: 856655 - DNA, 15 bp, Homo sapiens
tgtaaactaatggga

SEQ ID NO: 856656 - DNA, 15 bp, Homo sapiens
gtaaactaatgggag

SEQ ID NO: 856657 - DNA, 15 bp, Homo sapiens
taaactaatgggagt

SEQ ID NO: 856658 - DNA, 15 bp, Homo sapiens
aaactaatgggagta

SEQ ID NO: 856659 - DNA, 15 bp, Homo sapiens
aactaatgggagtag

SEQ ID NO: 856660 - DNA, 15 bp, Homo sapiens
actaatgggagtagc

SEQ ID NO: 856661 - DNA, 15 bp, Homo sapiens
ctaatgggagtagct

SEQ ID NO: 856662 - DNA, 15 bp, Homo sapiens
taatgggagtagcta

SEQ ID NO: 856663 - DNA, 15 bp, Homo sapiens
aatgggagtagctag

SEQ ID NO: 856664 - DNA, 15 bp, Homo sapiens
atgggagtagctaga

SEQ ID NO: 856665 - DNA, 15 bp, Homo sapiens
tgggagtagctagat

SEQ ID NO: 856666 - DNA, 15 bp, Homo sapiens
gggagtagctagatg

SEQ ID NO: 856667 - DNA, 15 bp, Homo sapiens
ggagtagctagatgt

SEQ ID NO: 856668 - DNA, 15 bp, Homo sapiens
gagtagctagatgtg

SEQ ID NO: 856669 - DNA, 15 bp, Homo sapiens
agtagctagatgtgt

SEQ ID NO: 856670 - DNA, 15 bp, Homo sapiens
gtagctagatgtgtc

SEQ ID NO: 856671 - DNA, 15 bp, Homo sapiens
tagctagatgtgtcc

SEQ ID NO: 856672 - DNA, 15 bp, Homo sapiens
agctagatgtgtcct

SEQ ID NO: 856673 - DNA, 15 bp, Homo sapiens
gctagatgtgtcctg

SEQ ID NO: 856674 - DNA, 15 bp, Homo sapiens
ctagatgtgtcctgt

SEQ ID NO: 856675 - DNA, 15 bp, Homo sapiens
tagatgtgtcctgtg

SEQ ID NO: 856676 - DNA, 15 bp, Homo sapiens
agatgtgtcctgtgg

SEQ ID NO: 856677 - DNA, 15 bp, Homo sapiens
gatgtgtcctgtggg

SEQ ID NO: 856678 - DNA, 15 bp, Homo sapiens
atgtgtcctgtgggc

SEQ ID NO: 856679 - DNA, 15 bp, Homo sapiens
tgtgtcctgtgggcc

SEQ ID NO: 856680 - DNA, 15 bp, Homo sapiens
gtgtcctgtgggcca

SEQ ID NO: 856681 - DNA, 15 bp, Homo sapiens
tgtcctgtgggccat

SEQ ID NO: 856682 - DNA, 15 bp, Homo sapiens
gtcctgtgggccata

SEQ ID NO: 856683 - DNA, 15 bp, Homo sapiens
tcctgtgggccatag

SEQ ID NO: 856684 - DNA, 15 bp, Homo sapiens
cctgtgggccatagt

SEQ ID NO: 856685 - DNA, 15 bp, Homo sapiens
ctgtgggccatagtt

SEQ ID NO: 856686 - DNA, 15 bp, Homo sapiens
tgtgggccatagttt

SEQ ID NO: 856687 - DNA, 15 bp, Homo sapiens
gtgggccatagtttt

SEQ ID NO: 856688 - DNA, 15 bp, Homo sapiens
tgggccatagttttg

SEQ ID NO: 856689 - DNA, 15 bp, Homo sapiens
gggccatagttttgc

SEQ ID NO: 856690 - DNA, 15 bp, Homo sapiens
ggccatagttttgct

SEQ ID NO: 856691 - DNA, 15 bp, Homo sapiens
gccatagttttgctg

SEQ ID NO: 856692 - DNA, 15 bp, Homo sapiens
ccatagttttgctga

SEQ ID NO: 856693 - DNA, 15 bp, Homo sapiens
catagttttgctgac

SEQ ID NO: 856694 - DNA, 15 bp, Homo sapiens
atagttttgctgact

SEQ ID NO: 856695 - DNA, 15 bp, Homo sapiens
tagttttgctgactc

SEQ ID NO: 856696 - DNA, 15 bp, Homo sapiens
agttttgctgactcc

SEQ ID NO: 856697 - DNA, 15 bp, Homo sapiens
gttttgctgactcct

SEQ ID NO: 856698 - DNA, 15 bp, Homo sapiens
ttttgctgactcctg

SEQ ID NO: 856699 - DNA, 15 bp, Homo sapiens
tttgctgactcctgg

SEQ ID NO: 856700 - DNA, 15 bp, Homo sapiens
ttgctgactcctggt

SEQ ID NO: 856701 - DNA, 15 bp, Homo sapiens
tgctgactcctggtc

SEQ ID NO: 856702 - DNA, 15 bp, Homo sapiens
gctgactcctggtct

SEQ ID NO: 856703 - DNA, 15 bp, Homo sapiens
ctgactcctggtcta

SEQ ID NO: 856704 - DNA, 15 bp, Homo sapiens
tgactcctggtctat

SEQ ID NO: 856705 - DNA, 15 bp, Homo sapiens
gactcctggtctatg

SEQ ID NO: 856706 - DNA, 15 bp, Homo sapiens
actcctggtctatgt

SEQ ID NO: 856707 - DNA, 15 bp, Homo sapiens
ctcctggtctatgtc

SEQ ID NO: 856708 - DNA, 15 bp, Homo sapiens
tcctggtctatgtca

SEQ ID NO: 856709 - DNA, 15 bp, Homo sapiens
cctggtctatgtcat

SEQ ID NO: 856710 - DNA, 15 bp, Homo sapiens
ctggtctatgtcata

SEQ ID NO: 856711 - DNA, 15 bp, Homo sapiens
tggtctatgtcatag

SEQ ID NO: 856712 - DNA, 15 bp, Homo sapiens
ggtctatgtcataga

SEQ ID NO: 856713 - DNA, 15 bp, Homo sapiens
gtctatgtcatagaa

SEQ ID NO: 856714 - DNA, 15 bp, Homo sapiens
tctatgtcatagaat

SEQ ID NO: 856715 - DNA, 15 bp, Homo sapiens
ctatgtcatagaatt

SEQ ID NO: 856716 - DNA, 15 bp, Homo sapiens
tatgtcatagaattt

SEQ ID NO: 856717 - DNA, 15 bp, Homo sapiens
atgtcatagaatttc

SEQ ID NO: 856718 - DNA, 15 bp, Homo sapiens
tgtcatagaatttcc

SEQ ID NO: 856719 - DNA, 15 bp, Homo sapiens
gtcatagaatttcct

SEQ ID NO: 856720 - DNA, 15 bp, Homo sapiens
tcatagaatttcctt

SEQ ID NO: 856721 - DNA, 15 bp, Homo sapiens
catagaatttccttt

SEQ ID NO: 856722 - DNA, 15 bp, Homo sapiens
atagaatttcctttt

SEQ ID NO: 856723 - DNA, 15 bp, Homo sapiens
tagaatttccttttg

SEQ ID NO: 856724 - DNA, 15 bp, Homo sapiens
agaatttccttttga

SEQ ID NO: 856725 - DNA, 15 bp, Homo sapiens
gaatttccttttgaa

SEQ ID NO: 856726 - DNA, 15 bp, Homo sapiens
aatttccttttgaat

SEQ ID NO: 856727 - DNA, 15 bp, Homo sapiens
atttccttttgaatt

SEQ ID NO: 856728 - DNA, 15 bp, Homo sapiens
tttccttttgaattg

SEQ ID NO: 856729 - DNA, 15 bp, Homo sapiens
ttccttttgaattga

SEQ ID NO: 856730 - DNA, 15 bp, Homo sapiens
tccttttgaattgat

SEQ ID NO: 856731 - DNA, 15 bp, Homo sapiens
ccttttgaattgatg

SEQ ID NO: 856732 - DNA, 15 bp, Homo sapiens
cttttgaattgatgg

SEQ ID NO: 856733 - DNA, 15 bp, Homo sapiens
ttttgaattgatgga

SEQ ID NO: 856734 - DNA, 15 bp, Homo sapiens
tttgaattgatggac

SEQ ID NO: 856735 - DNA, 15 bp, Homo sapiens
ttgaattgatggacc

SEQ ID NO: 856736 - DNA, 15 bp, Homo sapiens
tgaattgatggacca

SEQ ID NO: 856737 - DNA, 15 bp, Homo sapiens
gaattgatggaccac

SEQ ID NO: 856738 - DNA, 15 bp, Homo sapiens
aattgatggaccacc

SEQ ID NO: 856739 - DNA, 15 bp, Homo sapiens
attgatggaccacca

SEQ ID NO: 856740 - DNA, 15 bp, Homo sapiens
ttgatggaccaccag

SEQ ID NO: 856741 - DNA, 15 bp, Homo sapiens
tgatggaccaccagc

SEQ ID NO: 856742 - DNA, 15 bp, Homo sapiens
gatggaccaccagca

SEQ ID NO: 856743 - DNA, 15 bp, Homo sapiens
atggaccaccagcaa

SEQ ID NO: 856744 - DNA, 15 bp, Homo sapiens
tggaccaccagcaaa

SEQ ID NO: 856745 - DNA, 15 bp, Homo sapiens
ggaccaccagcaaat

SEQ ID NO: 856746 - DNA, 15 bp, Homo sapiens
gaccaccagcaaatg

SEQ ID NO: 856747 - DNA, 15 bp, Homo sapiens
accaccagcaaatga

SEQ ID NO: 856748 - DNA, 15 bp, Homo sapiens
ccaccagcaaatgat

SEQ ID NO: 856749 - DNA, 15 bp, Homo sapiens
caccagcaaatgatt

SEQ ID NO: 856750 - DNA, 15 bp, Homo sapiens
accagcaaatgattt

SEQ ID NO: 856751 - DNA, 15 bp, Homo sapiens
ccagcaaatgatttt

SEQ ID NO: 856752 - DNA, 15 bp, Homo sapiens
cagcaaatgattttt

SEQ ID NO: 856753 - DNA, 15 bp, Homo sapiens
agcaaatgatttttg

SEQ ID NO: 856754 - DNA, 15 bp, Homo sapiens
gcaaatgatttttgt

SEQ ID NO: 856755 - DNA, 15 bp, Homo sapiens
caaatgatttttgtc

SEQ ID NO: 856756 - DNA, 15 bp, Homo sapiens
aaatgatttttgtcc

SEQ ID NO: 856757 - DNA, 15 bp, Homo sapiens
aatgatttttgtcct

SEQ ID NO: 856758 - DNA, 15 bp, Homo sapiens
atgatttttgtcctg

SEQ ID NO: 856759 - DNA, 15 bp, Homo sapiens
tgatttttgtcctgt

SEQ ID NO: 856760 - DNA, 15 bp, Homo sapiens
gatttttgtcctgta

SEQ ID NO: 856761 - DNA, 15 bp, Homo sapiens
atttttgtcctgtat

SEQ ID NO: 856762 - DNA, 15 bp, Homo sapiens
tttttgtcctgtatc

SEQ ID NO: 856763 - DNA, 15 bp, Homo sapiens
ttttgtcctgtatca

SEQ ID NO: 856764 - DNA, 15 bp, Homo sapiens
tttgtcctgtatcaa

SEQ ID NO: 856765 - DNA, 15 bp, Homo sapiens
ttgtcctgtatcaat

SEQ ID NO: 856766 - DNA, 15 bp, Homo sapiens
tgtcctgtatcaatc

SEQ ID NO: 856767 - DNA, 15 bp, Homo sapiens
gtcctgtatcaatca

SEQ ID NO: 856768 - DNA, 15 bp, Homo sapiens
tcctgtatcaatcaa

SEQ ID NO: 856769 - DNA, 15 bp, Homo sapiens
cctgtatcaatcaat

SEQ ID NO: 856770 - DNA, 15 bp, Homo sapiens
ctgtatcaatcaatg

SEQ ID NO: 856771 - DNA, 15 bp, Homo sapiens
tgtatcaatcaatga

SEQ ID NO: 856772 - DNA, 15 bp, Homo sapiens
gtatcaatcaatgat

SEQ ID NO: 856773 - DNA, 15 bp, Homo sapiens
tatcaatcaatgata

SEQ ID NO: 856774 - DNA, 15 bp, Homo sapiens
atcaatcaatgatac

SEQ ID NO: 856775 - DNA, 15 bp, Homo sapiens
tcaatcaatgataca

SEQ ID NO: 856776 - DNA, 15 bp, Homo sapiens
caatcaatgatacat

SEQ ID NO: 856777 - DNA, 15 bp, Homo sapiens
aatcaatgatacata

SEQ ID NO: 856778 - DNA, 15 bp, Homo sapiens
atcaatgatacatac

SEQ ID NO: 856779 - DNA, 15 bp, Homo sapiens
tcaatgatacataca

SEQ ID NO: 856780 - DNA, 15 bp, Homo sapiens
caatgatacatacat

SEQ ID NO: 856781 - DNA, 15 bp, Homo sapiens
aatgatacatacata

SEQ ID NO: 856782 - DNA, 15 bp, Homo sapiens
atgatacatacataa

SEQ ID NO: 856783 - DNA, 15 bp, Homo sapiens
tgatacatacataaa

SEQ ID NO: 856784 - DNA, 15 bp, Homo sapiens
gatacatacataaat

SEQ ID NO: 856785 - DNA, 15 bp, Homo sapiens
atacatacataaatc

SEQ ID NO: 856786 - DNA, 15 bp, Homo sapiens
tacatacataaatct

SEQ ID NO: 856787 - DNA, 15 bp, Homo sapiens
acatacataaatctc

SEQ ID NO: 856788 - DNA, 15 bp, Homo sapiens
catacataaatctct

SEQ ID NO: 856789 - DNA, 15 bp, Homo sapiens
atacataaatctcta

SEQ ID NO: 856790 - DNA, 15 bp, Homo sapiens
tacataaatctctac

SEQ ID NO: 856791 - DNA, 15 bp, Homo sapiens
acataaatctctaca

SEQ ID NO: 856792 - DNA, 15 bp, Homo sapiens
cataaatctctacaa

SEQ ID NO: 856793 - DNA, 15 bp, Homo sapiens
ataaatctctacaag

SEQ ID NO: 856794 - DNA, 15 bp, Homo sapiens
taaatctctacaaga

SEQ ID NO: 856795 - DNA, 15 bp, Homo sapiens
aaatctctacaagac

SEQ ID NO: 856796 - DNA, 15 bp, Homo sapiens
aatctctacaagaca

SEQ ID NO: 856797 - DNA, 15 bp, Homo sapiens
atctctacaagacat

SEQ ID NO: 856798 - DNA, 15 bp, Homo sapiens
tctctacaagacatg

SEQ ID NO: 856799 - DNA, 15 bp, Homo sapiens
ctctacaagacatgt

SEQ ID NO: 856800 - DNA, 15 bp, Homo sapiens
tctacaagacatgta

SEQ ID NO: 856801 - DNA, 15 bp, Homo sapiens
ctacaagacatgtaa

SEQ ID NO: 856802 - DNA, 15 bp, Homo sapiens
tacaagacatgtaaa

SEQ ID NO: 856803 - DNA, 15 bp, Homo sapiens
acaagacatgtaaag

SEQ ID NO: 856804 - DNA, 15 bp, Homo sapiens
caagacatgtaaagg

SEQ ID NO: 856805 - DNA, 15 bp, Homo sapiens
aagacatgtaaagga

SEQ ID NO: 856806 - DNA, 15 bp, Homo sapiens
agacatgtaaaggat

SEQ ID NO: 856807 - DNA, 15 bp, Homo sapiens
gacatgtaaaggatg

SEQ ID NO: 856808 - DNA, 15 bp, Homo sapiens
acatgtaaaggatga

SEQ ID NO: 856809 - DNA, 15 bp, Homo sapiens
catgtaaaggatgag

SEQ ID NO: 856810 - DNA, 15 bp, Homo sapiens
atgtaaaggatgagg

SEQ ID NO: 856811 - DNA, 15 bp, Homo sapiens
tgtaaaggatgaggc

SEQ ID NO: 856812 - DNA, 15 bp, Homo sapiens
gtaaaggatgaggct

SEQ ID NO: 856813 - DNA, 15 bp, Homo sapiens
taaaggatgaggctt

SEQ ID NO: 856814 - DNA, 15 bp, Homo sapiens
aaaggatgaggctta

SEQ ID NO: 856815 - DNA, 15 bp, Homo sapiens
aaggatgaggcttaa

SEQ ID NO: 856816 - DNA, 15 bp, Homo sapiens
aggatgaggcttaat

SEQ ID NO: 856817 - DNA, 15 bp, Homo sapiens
ggatgaggcttaatg

SEQ ID NO: 856818 - DNA, 15 bp, Homo sapiens
gatgaggcttaatga

SEQ ID NO: 856819 - DNA, 15 bp, Homo sapiens
atgaggcttaatgac

SEQ ID NO: 856820 - DNA, 15 bp, Homo sapiens
tgaggcttaatgaca

SEQ ID NO: 856821 - DNA, 15 bp, Homo sapiens
gaggcttaatgacag

SEQ ID NO: 856822 - DNA, 15 bp, Homo sapiens
aggcttaatgacaga

SEQ ID NO: 856823 - DNA, 15 bp, Homo sapiens
ggcttaatgacagag

SEQ ID NO: 856824 - DNA, 15 bp, Homo sapiens
gcttaatgacagagt

SEQ ID NO: 856825 - DNA, 15 bp, Homo sapiens
cttaatgacagagta

SEQ ID NO: 856826 - DNA, 15 bp, Homo sapiens
ttaatgacagagtac

SEQ ID NO: 856827 - DNA, 15 bp, Homo sapiens
taatgacagagtact

SEQ ID NO: 856828 - DNA, 15 bp, Homo sapiens
aatgacagagtactt

SEQ ID NO: 856829 - DNA, 15 bp, Homo sapiens
atgacagagtacttt

SEQ ID NO: 856830 - DNA, 15 bp, Homo sapiens
tgacagagtactttg

SEQ ID NO: 856831 - DNA, 15 bp, Homo sapiens
gacagagtactttgg

SEQ ID NO: 856832 - DNA, 15 bp, Homo sapiens
acagagtactttggg

SEQ ID NO: 856833 - DNA, 15 bp, Homo sapiens
cagagtactttgggg

SEQ ID NO: 856834 - DNA, 15 bp, Homo sapiens
agagtactttgggga

SEQ ID NO: 856835 - DNA, 15 bp, Homo sapiens
gagtactttggggaa

SEQ ID NO: 856836 - DNA, 15 bp, Homo sapiens
agtactttggggaag

SEQ ID NO: 856837 - DNA, 15 bp, Homo sapiens
gtactttggggaaga

SEQ ID NO: 856838 - DNA, 15 bp, Homo sapiens
tactttggggaagac

SEQ ID NO: 856839 - DNA, 15 bp, Homo sapiens
actttggggaagaca

SEQ ID NO: 856840 - DNA, 15 bp, Homo sapiens
ctttggggaagacat

SEQ ID NO: 856841 - DNA, 15 bp, Homo sapiens
tttggggaagacata

SEQ ID NO: 856842 - DNA, 15 bp, Homo sapiens
ttggggaagacataa

SEQ ID NO: 856843 - DNA, 15 bp, Homo sapiens
tggggaagacataat

SEQ ID NO: 856844 - DNA, 15 bp, Homo sapiens
ggggaagacataata

SEQ ID NO: 856845 - DNA, 15 bp, Homo sapiens
gggaagacataatat

SEQ ID NO: 856846 - DNA, 15 bp, Homo sapiens
ggaagacataatatt

SEQ ID NO: 856847 - DNA, 15 bp, Homo sapiens
gaagacataatattg

SEQ ID NO: 856848 - DNA, 15 bp, Homo sapiens
aagacataatattgc

SEQ ID NO: 856849 - DNA, 15 bp, Homo sapiens
agacataatattgca

SEQ ID NO: 856850 - DNA, 15 bp, Homo sapiens
gacataatattgcaa

SEQ ID NO: 856851 - DNA, 15 bp, Homo sapiens
acataatattgcaaa

SEQ ID NO: 856852 - DNA, 15 bp, Homo sapiens
cataatattgcaaaa

SEQ ID NO: 856853 - DNA, 15 bp, Homo sapiens
ataatattgcaaaat

SEQ ID NO: 856854 - DNA, 15 bp, Homo sapiens
taatattgcaaaatt

SEQ ID NO: 856855 - DNA, 15 bp, Homo sapiens
atattgcaaaattaa

SEQ ID NO: 856856 - DNA, 15 bp, Homo sapiens
tattgcaaaattaag

SEQ ID NO: 856857 - DNA, 15 bp, Homo sapiens
attgcaaaattaaga

SEQ ID NO: 856858 - DNA, 15 bp, Homo sapiens
ttgcaaaattaagat

SEQ ID NO: 856859 - DNA, 15 bp, Homo sapiens
tgcaaaattaagatg

SEQ ID NO: 856860 - DNA, 15 bp, Homo sapiens
gcaaaattaagatgc

SEQ ID NO: 856861 - DNA, 15 bp, Homo sapiens
caaaattaagatgct

SEQ ID NO: 856862 - DNA, 15 bp, Homo sapiens
aaaattaagatgctt

SEQ ID NO: 856863 - DNA, 15 bp, Homo sapiens
aaattaagatgctta

SEQ ID NO: 856864 - DNA, 15 bp, Homo sapiens
aattaagatgcttag

SEQ ID NO: 856865 - DNA, 15 bp, Homo sapiens
attaagatgcttaga

SEQ ID NO: 856866 - DNA, 15 bp, Homo sapiens
ttaagatgcttagag

SEQ ID NO: 856867 - DNA, 15 bp, Homo sapiens
taagatgcttagaga

SEQ ID NO: 856868 - DNA, 15 bp, Homo sapiens
aagatgcttagagaa

SEQ ID NO: 856869 - DNA, 15 bp, Homo sapiens
agatgcttagagaaa

SEQ ID NO: 856870 - DNA, 15 bp, Homo sapiens
gatgcttagagaaaa

SEQ ID NO: 856871 - DNA, 15 bp, Homo sapiens
atgcttagagaaaaa

SEQ ID NO: 856872 - DNA, 15 bp, Homo sapiens
tgcttagagaaaaat

SEQ ID NO: 856873 - DNA, 15 bp, Homo sapiens
gcttagagaaaaatc

SEQ ID NO: 856874 - DNA, 15 bp, Homo sapiens
cttagagaaaaatca

SEQ ID NO: 856875 - DNA, 15 bp, Homo sapiens
ttagagaaaaatcat

SEQ ID NO: 856876 - DNA, 15 bp, Homo sapiens
tagagaaaaatcata

SEQ ID NO: 856877 - DNA, 15 bp, Homo sapiens
agagaaaaatcatat

SEQ ID NO: 856878 - DNA, 15 bp, Homo sapiens
gagaaaaatcatatt

SEQ ID NO: 856879 - DNA, 15 bp, Homo sapiens
agaaaaatcatatta

SEQ ID NO: 856880 - DNA, 15 bp, Homo sapiens
gaaaaatcatattaa

SEQ ID NO: 856881 - DNA, 15 bp, Homo sapiens
aaaaatcatattaaa

SEQ ID NO: 856882 - DNA, 15 bp, Homo sapiens
aaaatcatattaaaa

SEQ ID NO: 856883 - DNA, 15 bp, Homo sapiens
aaatcatattaaaat

SEQ ID NO: 856884 - DNA, 15 bp, Homo sapiens
aatcatattaaaata

SEQ ID NO: 856885 - DNA, 15 bp, Homo sapiens
atcatattaaaatag

SEQ ID NO: 856886 - DNA, 15 bp, Homo sapiens
tcatattaaaatagt

SEQ ID NO: 856887 - DNA, 15 bp, Homo sapiens
catattaaaatagtg

SEQ ID NO: 856888 - DNA, 15 bp, Homo sapiens
atattaaaatagtga

SEQ ID NO: 856889 - DNA, 15 bp, Homo sapiens
tattaaaatagtgaa

SEQ ID NO: 856890 - DNA, 15 bp, Homo sapiens
attaaaatagtgaaa

SEQ ID NO: 856891 - DNA, 15 bp, Homo sapiens
ttaaaatagtgaaaa

SEQ ID NO: 856892 - DNA, 15 bp, Homo sapiens
taaaatagtgaaaac

SEQ ID NO: 856893 - DNA, 15 bp, Homo sapiens
aaaatagtgaaaact

SEQ ID NO: 856894 - DNA, 15 bp, Homo sapiens
aaatagtgaaaactg

SEQ ID NO: 856895 - DNA, 15 bp, Homo sapiens
aatagtgaaaactgt

SEQ ID NO: 856896 - DNA, 15 bp, Homo sapiens
atagtgaaaactgtg

SEQ ID NO: 856897 - DNA, 15 bp, Homo sapiens
tagtgaaaactgtga

SEQ ID NO: 856898 - DNA, 15 bp, Homo sapiens
agtgaaaactgtgag

SEQ ID NO: 856899 - DNA, 15 bp, Homo sapiens
gtgaaaactgtgaga

SEQ ID NO: 856900 - DNA, 15 bp, Homo sapiens
tgaaaactgtgagaa

SEQ ID NO: 856901 - DNA, 15 bp, Homo sapiens
gaaaactgtgagaag

SEQ ID NO: 856902 - DNA, 15 bp, Homo sapiens
aaaactgtgagaagg

SEQ ID NO: 856903 - DNA, 15 bp, Homo sapiens
aaactgtgagaaggt

SEQ ID NO: 856904 - DNA, 15 bp, Homo sapiens
aactgtgagaaggta

SEQ ID NO: 856905 - DNA, 15 bp, Homo sapiens
actgtgagaaggtat

SEQ ID NO: 856906 - DNA, 15 bp, Homo sapiens
ctgtgagaaggtatt

SEQ ID NO: 856907 - DNA, 15 bp, Homo sapiens
tgtgagaaggtattt

SEQ ID NO: 856908 - DNA, 15 bp, Homo sapiens
gtgagaaggtatttt

SEQ ID NO: 856909 - DNA, 15 bp, Homo sapiens
tgagaaggtattttg

SEQ ID NO: 856910 - DNA, 15 bp, Homo sapiens
gagaaggtattttga

SEQ ID NO: 856911 - DNA, 15 bp, Homo sapiens
agaaggtattttgat

SEQ ID NO: 856912 - DNA, 15 bp, Homo sapiens
gaaggtattttgatt

SEQ ID NO: 856913 - DNA, 15 bp, Homo sapiens
aaggtattttgattt

SEQ ID NO: 856914 - DNA, 15 bp, Homo sapiens
aggtattttgatttg

SEQ ID NO: 856915 - DNA, 15 bp, Homo sapiens
ggtattttgatttgt

SEQ ID NO: 856916 - DNA, 15 bp, Homo sapiens
gtattttgatttgtt

SEQ ID NO: 856917 - DNA, 15 bp, Homo sapiens
tattttgatttgttg

SEQ ID NO: 856918 - DNA, 15 bp, Homo sapiens
attttgatttgttgt

SEQ ID NO: 856919 - DNA, 15 bp, Homo sapiens
ttttgatttgttgtt

SEQ ID NO: 856920 - DNA, 15 bp, Homo sapiens
tttgatttgttgttt

SEQ ID NO: 856921 - DNA, 15 bp, Homo sapiens
ttgatttgttgtttt

SEQ ID NO: 856922 - DNA, 15 bp, Homo sapiens
tgatttgttgttttg

SEQ ID NO: 856923 - DNA, 15 bp, Homo sapiens
gatttgttgttttgg

SEQ ID NO: 856924 - DNA, 15 bp, Homo sapiens
atttgttgttttgga

SEQ ID NO: 856925 - DNA, 15 bp, Homo sapiens
tttgttgttttggat

SEQ ID NO: 856926 - DNA, 15 bp, Homo sapiens
ttgttgttttggatt

SEQ ID NO: 856927 - DNA, 15 bp, Homo sapiens
tgttgttttggattc

SEQ ID NO: 856928 - DNA, 15 bp, Homo sapiens
gttgttttggattcc

SEQ ID NO: 856929 - DNA, 15 bp, Homo sapiens
ttgttttggattcct

SEQ ID NO: 856930 - DNA, 15 bp, Homo sapiens
tgttttggattcctc

SEQ ID NO: 856931 - DNA, 15 bp, Homo sapiens
gttttggattcctct

SEQ ID NO: 856932 - DNA, 15 bp, Homo sapiens
ttttggattcctctt

SEQ ID NO: 856933 - DNA, 15 bp, Homo sapiens
tttggattcctcttt

SEQ ID NO: 856934 - DNA, 15 bp, Homo sapiens
ttggattcctctttt

SEQ ID NO: 856935 - DNA, 15 bp, Homo sapiens
tggattcctcttttt

SEQ ID NO: 856936 - DNA, 15 bp, Homo sapiens
ggattcctctttttg

SEQ ID NO: 856937 - DNA, 15 bp, Homo sapiens
gattcctctttttgc

SEQ ID NO: 856938 - DNA, 15 bp, Homo sapiens
attcctctttttgca

SEQ ID NO: 856939 - DNA, 15 bp, Homo sapiens
ttcctctttttgcaa

SEQ ID NO: 856940 - DNA, 15 bp, Homo sapiens
tcctctttttgcaaa

SEQ ID NO: 856941 - DNA, 15 bp, Homo sapiens
cctctttttgcaaat

SEQ ID NO: 856942 - DNA, 15 bp, Homo sapiens
ctctttttgcaaatt

SEQ ID NO: 856943 - DNA, 15 bp, Homo sapiens
tctttttgcaaattc

SEQ ID NO: 856944 - DNA, 15 bp, Homo sapiens
ctttttgcaaattct

SEQ ID NO: 856945 - DNA, 15 bp, Homo sapiens
tttttgcaaattctt

SEQ ID NO: 856946 - DNA, 15 bp, Homo sapiens
ttttgcaaattcttt

SEQ ID NO: 856947 - DNA, 15 bp, Homo sapiens
tttgcaaattctttt

SEQ ID NO: 856948 - DNA, 15 bp, Homo sapiens
ttgcaaattcttttg

SEQ ID NO: 856949 - DNA, 15 bp, Homo sapiens
tgcaaattcttttga

SEQ ID NO: 856950 - DNA, 15 bp, Homo sapiens
gcaaattcttttgaa

SEQ ID NO: 856951 - DNA, 15 bp, Homo sapiens
caaattcttttgaaa

SEQ ID NO: 856952 - DNA, 15 bp, Homo sapiens
aaattcttttgaaat

SEQ ID NO: 856953 - DNA, 15 bp, Homo sapiens
aattcttttgaaata

SEQ ID NO: 856954 - DNA, 15 bp, Homo sapiens
attcttttgaaatat

SEQ ID NO: 856955 - DNA, 15 bp, Homo sapiens
ttcttttgaaatatt

SEQ ID NO: 856956 - DNA, 15 bp, Homo sapiens
tcttttgaaatattt

SEQ ID NO: 856957 - DNA, 15 bp, Homo sapiens
cttttgaaatatttt

SEQ ID NO: 856958 - DNA, 15 bp, Homo sapiens
ttttgaaatattttc

SEQ ID NO: 856959 - DNA, 15 bp, Homo sapiens
tttgaaatattttca

SEQ ID NO: 856960 - DNA, 15 bp, Homo sapiens
ttgaaatattttcag

SEQ ID NO: 856961 - DNA, 15 bp, Homo sapiens
tgaaatattttcagt

SEQ ID NO: 856962 - DNA, 15 bp, Homo sapiens
gaaatattttcagtg

SEQ ID NO: 856963 - DNA, 15 bp, Homo sapiens
aaatattttcagtgg

SEQ ID NO: 856964 - DNA, 15 bp, Homo sapiens
aatattttcagtgga

SEQ ID NO: 856965 - DNA, 15 bp, Homo sapiens
atattttcagtggaa

SEQ ID NO: 856966 - DNA, 15 bp, Homo sapiens
tattttcagtggaag

SEQ ID NO: 856967 - DNA, 15 bp, Homo sapiens
attttcagtggaagc

SEQ ID NO: 856968 - DNA, 15 bp, Homo sapiens
ttttcagtggaagct

SEQ ID NO: 856969 - DNA, 15 bp, Homo sapiens
tttcagtggaagcta

SEQ ID NO: 856970 - DNA, 15 bp, Homo sapiens
ttcagtggaagctac

SEQ ID NO: 856971 - DNA, 15 bp, Homo sapiens
tcagtggaagctaca

SEQ ID NO: 856972 - DNA, 15 bp, Homo sapiens
cagtggaagctacat

SEQ ID NO: 856973 - DNA, 15 bp, Homo sapiens
agtggaagctacata

SEQ ID NO: 856974 - DNA, 15 bp, Homo sapiens
gtggaagctacatag

SEQ ID NO: 856975 - DNA, 15 bp, Homo sapiens
tggaagctacataga

SEQ ID NO: 856976 - DNA, 15 bp, Homo sapiens
ggaagctacatagat

SEQ ID NO: 856977 - DNA, 15 bp, Homo sapiens
gaagctacatagatc

SEQ ID NO: 856978 - DNA, 15 bp, Homo sapiens
aagctacatagatcc

SEQ ID NO: 856979 - DNA, 15 bp, Homo sapiens
agctacatagatcca

SEQ ID NO: 856980 - DNA, 15 bp, Homo sapiens
gctacatagatccaa

SEQ ID NO: 856981 - DNA, 15 bp, Homo sapiens
ctacatagatccaat

SEQ ID NO: 856982 - DNA, 15 bp, Homo sapiens
tacatagatccaatt

SEQ ID NO: 856983 - DNA, 15 bp, Homo sapiens
acatagatccaattg

SEQ ID NO: 856984 - DNA, 15 bp, Homo sapiens
catagatccaattgt

SEQ ID NO: 856985 - DNA, 15 bp, Homo sapiens
atagatccaattgta

SEQ ID NO: 856986 - DNA, 15 bp, Homo sapiens
tagatccaattgtat

SEQ ID NO: 856987 - DNA, 15 bp, Homo sapiens
agatccaattgtatt

SEQ ID NO: 856988 - DNA, 15 bp, Homo sapiens
gatccaattgtattc

SEQ ID NO: 856989 - DNA, 15 bp, Homo sapiens
atccaattgtattca

SEQ ID NO: 856990 - DNA, 15 bp, Homo sapiens
tccaattgtattcac

SEQ ID NO: 856991 - DNA, 15 bp, Homo sapiens
ccaattgtattcacc

SEQ ID NO: 856992 - DNA, 15 bp, Homo sapiens
caattgtattcacca

SEQ ID NO: 856993 - DNA, 15 bp, Homo sapiens
aattgtattcaccaa

SEQ ID NO: 856994 - DNA, 15 bp, Homo sapiens
attgtattcaccaag

SEQ ID NO: 856995 - DNA, 15 bp, Homo sapiens
ttgtattcaccaagc

SEQ ID NO: 856996 - DNA, 15 bp, Homo sapiens
tgtattcaccaagct

SEQ ID NO: 856997 - DNA, 15 bp, Homo sapiens
gtattcaccaagcta

SEQ ID NO: 856998 - DNA, 15 bp, Homo sapiens
tattcaccaagctag

SEQ ID NO: 856999 - DNA, 15 bp, Homo sapiens
attcaccaagctaga

SEQ ID NO: 857000 - DNA, 15 bp, Homo sapiens
ttcaccaagctagat

SEQ ID NO: 857001 - DNA, 15 bp, Homo sapiens
tcaccaagctagatt

SEQ ID NO: 857002 - DNA, 15 bp, Homo sapiens
caccaagctagattg

SEQ ID NO: 857003 - DNA, 15 bp, Homo sapiens
accaagctagattgt

SEQ ID NO: 857004 - DNA, 15 bp, Homo sapiens
ccaagctagattgta

SEQ ID NO: 857005 - DNA, 15 bp, Homo sapiens
caagctagattgtaa

SEQ ID NO: 857006 - DNA, 15 bp, Homo sapiens
aagctagattgtaat

SEQ ID NO: 857007 - DNA, 15 bp, Homo sapiens
agctagattgtaatt

SEQ ID NO: 857008 - DNA, 15 bp, Homo sapiens
gctagattgtaatta

SEQ ID NO: 857009 - DNA, 15 bp, Homo sapiens
ctagattgtaattaa

SEQ ID NO: 857010 - DNA, 15 bp, Homo sapiens
tagattgtaattaag

SEQ ID NO: 857011 - DNA, 15 bp, Homo sapiens
agattgtaattaagc

SEQ ID NO: 857012 - DNA, 15 bp, Homo sapiens
gattgtaattaagct

SEQ ID NO: 857013 - DNA, 15 bp, Homo sapiens
attgtaattaagctc

SEQ ID NO: 857014 - DNA, 15 bp, Homo sapiens
ttgtaattaagctcc

SEQ ID NO: 857015 - DNA, 15 bp, Homo sapiens
tgtaattaagctcca

SEQ ID NO: 857016 - DNA, 15 bp, Homo sapiens
gtaattaagctccag

SEQ ID NO: 857017 - DNA, 15 bp, Homo sapiens
taattaagctccaga

SEQ ID NO: 857018 - DNA, 15 bp, Homo sapiens
aattaagctccagag

SEQ ID NO: 857019 - DNA, 15 bp, Homo sapiens
attaagctccagagt

SEQ ID NO: 857020 - DNA, 15 bp, Homo sapiens
ttaagctccagagta

SEQ ID NO: 857021 - DNA, 15 bp, Homo sapiens
taagctccagagtaa

SEQ ID NO: 857022 - DNA, 15 bp, Homo sapiens
aagctccagagtaag

SEQ ID NO: 857023 - DNA, 15 bp, Homo sapiens
agctccagagtaagt

SEQ ID NO: 857024 - DNA, 15 bp, Homo sapiens
gctccagagtaagta

SEQ ID NO: 857025 - DNA, 15 bp, Homo sapiens
ctccagagtaagtaa

SEQ ID NO: 857026 - DNA, 15 bp, Homo sapiens
tccagagtaagtaat

SEQ ID NO: 857027 - DNA, 15 bp, Homo sapiens
ccagagtaagtaata

SEQ ID NO: 857028 - DNA, 15 bp, Homo sapiens
cagagtaagtaatag

SEQ ID NO: 857029 - DNA, 15 bp, Homo sapiens
agagtaagtaataga

SEQ ID NO: 857030 - DNA, 15 bp, Homo sapiens
gagtaagtaatagat

SEQ ID NO: 857031 - DNA, 15 bp, Homo sapiens
agtaagtaatagatt

SEQ ID NO: 857032 - DNA, 15 bp, Homo sapiens
gtaagtaatagattt

SEQ ID NO: 857033 - DNA, 15 bp, Homo sapiens
taagtaatagatttg

SEQ ID NO: 857034 - DNA, 15 bp, Homo sapiens
aagtaatagatttga

SEQ ID NO: 857035 - DNA, 15 bp, Homo sapiens
agtaatagatttgat

SEQ ID NO: 857036 - DNA, 15 bp, Homo sapiens
gtaatagatttgatg

SEQ ID NO: 857037 - DNA, 15 bp, Homo sapiens
taatagatttgatga

SEQ ID NO: 857038 - DNA, 15 bp, Homo sapiens
aatagatttgatgag

SEQ ID NO: 857039 - DNA, 15 bp, Homo sapiens
atagatttgatgagt

SEQ ID NO: 857040 - DNA, 15 bp, Homo sapiens
tagatttgatgagtg

SEQ ID NO: 857041 - DNA, 15 bp, Homo sapiens
agatttgatgagtga

SEQ ID NO: 857042 - DNA, 15 bp, Homo sapiens
gatttgatgagtgat

SEQ ID NO: 857043 - DNA, 15 bp, Homo sapiens
atttgatgagtgatg

SEQ ID NO: 857044 - DNA, 15 bp, Homo sapiens
tttgatgagtgatgt

SEQ ID NO: 857045 - DNA, 15 bp, Homo sapiens
ttgatgagtgatgtc

SEQ ID NO: 857046 - DNA, 15 bp, Homo sapiens
tgatgagtgatgtcc

SEQ ID NO: 857047 - DNA, 15 bp, Homo sapiens
gatgagtgatgtcca

SEQ ID NO: 857048 - DNA, 15 bp, Homo sapiens
atgagtgatgtccaa

SEQ ID NO: 857049 - DNA, 15 bp, Homo sapiens
tgagtgatgtccaac

SEQ ID NO: 857050 - DNA, 15 bp, Homo sapiens
gagtgatgtccaacc

SEQ ID NO: 857051 - DNA, 15 bp, Homo sapiens
agtgatgtccaacct

SEQ ID NO: 857052 - DNA, 15 bp, Homo sapiens
gtgatgtccaacctt

SEQ ID NO: 857053 - DNA, 15 bp, Homo sapiens
tgatgtccaaccttt

SEQ ID NO: 857054 - DNA, 15 bp, Homo sapiens
gatgtccaacctttt

SEQ ID NO: 857055 - DNA, 15 bp, Homo sapiens
atgtccaacctttta

SEQ ID NO: 857056 - DNA, 15 bp, Homo sapiens
tgtccaaccttttac

SEQ ID NO: 857057 - DNA, 15 bp, Homo sapiens
gtccaaccttttaca

SEQ ID NO: 857058 - DNA, 15 bp, Homo sapiens
tccaaccttttacat

SEQ ID NO: 857059 - DNA, 15 bp, Homo sapiens
ccaaccttttacatg

SEQ ID NO: 857060 - DNA, 15 bp, Homo sapiens
caaccttttacatgg

SEQ ID NO: 857061 - DNA, 15 bp, Homo sapiens
aaccttttacatgga

SEQ ID NO: 857062 - DNA, 15 bp, Homo sapiens
accttttacatggaa

SEQ ID NO: 857063 - DNA, 15 bp, Homo sapiens
ccttttacatggaag

SEQ ID NO: 857064 - DNA, 15 bp, Homo sapiens
cttttacatggaaga

SEQ ID NO: 857065 - DNA, 15 bp, Homo sapiens
ttttacatggaagag

SEQ ID NO: 857066 - DNA, 15 bp, Homo sapiens
tttacatggaagagt

SEQ ID NO: 857067 - DNA, 15 bp, Homo sapiens
ttacatggaagagta

SEQ ID NO: 857068 - DNA, 15 bp, Homo sapiens
tacatggaagagtaa

SEQ ID NO: 857069 - DNA, 15 bp, Homo sapiens
acatggaagagtaag

SEQ ID NO: 857070 - DNA, 15 bp, Homo sapiens
catggaagagtaagt

SEQ ID NO: 857071 - DNA, 15 bp, Homo sapiens
atggaagagtaagtt

SEQ ID NO: 857072 - DNA, 15 bp, Homo sapiens
tggaagagtaagttt

SEQ ID NO: 857073 - DNA, 15 bp, Homo sapiens
ggaagagtaagtttg

SEQ ID NO: 857074 - DNA, 15 bp, Homo sapiens
gaagagtaagtttga

SEQ ID NO: 857075 - DNA, 15 bp, Homo sapiens
aagagtaagtttgag

SEQ ID NO: 857076 - DNA, 15 bp, Homo sapiens
agagtaagtttgagt

SEQ ID NO: 857077 - DNA, 15 bp, Homo sapiens
gagtaagtttgagtc

SEQ ID NO: 857078 - DNA, 15 bp, Homo sapiens
agtaagtttgagtct

SEQ ID NO: 857079 - DNA, 15 bp, Homo sapiens
gtaagtttgagtctt

SEQ ID NO: 857080 - DNA, 15 bp, Homo sapiens
taagtttgagtcttc

SEQ ID NO: 857081 - DNA, 15 bp, Homo sapiens
aagtttgagtcttcc

SEQ ID NO: 857082 - DNA, 15 bp, Homo sapiens
agtttgagtcttcct

SEQ ID NO: 857083 - DNA, 15 bp, Homo sapiens
gtttgagtcttcctt

SEQ ID NO: 857084 - DNA, 15 bp, Homo sapiens
tttgagtcttccttt

SEQ ID NO: 857085 - DNA, 15 bp, Homo sapiens
ttgagtcttcctttg

SEQ ID NO: 857086 - DNA, 15 bp, Homo sapiens
tgagtcttcctttgc

SEQ ID NO: 857087 - DNA, 15 bp, Homo sapiens
gagtcttcctttgcc

SEQ ID NO: 857088 - DNA, 15 bp, Homo sapiens
agtcttcctttgccc

SEQ ID NO: 857089 - DNA, 15 bp, Homo sapiens
gtcttcctttgccca

SEQ ID NO: 857090 - DNA, 15 bp, Homo sapiens
tcttcctttgcccat

SEQ ID NO: 857091 - DNA, 15 bp, Homo sapiens
cttcctttgcccatt

SEQ ID NO: 857092 - DNA, 15 bp, Homo sapiens
ttcctttgcccattg

SEQ ID NO: 857093 - DNA, 15 bp, Homo sapiens
tcctttgcccattga

SEQ ID NO: 857094 - DNA, 15 bp, Homo sapiens
cctttgcccattgac

SEQ ID NO: 857095 - DNA, 15 bp, Homo sapiens
ctttgcccattgaca

SEQ ID NO: 857096 - DNA, 15 bp, Homo sapiens
tttgcccattgacac

SEQ ID NO: 857097 - DNA, 15 bp, Homo sapiens
ttgcccattgacaca

SEQ ID NO: 857098 - DNA, 15 bp, Homo sapiens
tgcccattgacacac

SEQ ID NO: 857099 - DNA, 15 bp, Homo sapiens
gcccattgacacact

SEQ ID NO: 857100 - DNA, 15 bp, Homo sapiens
cccattgacacactt

SEQ ID NO: 857101 - DNA, 15 bp, Homo sapiens
ccattgacacactta

SEQ ID NO: 857102 - DNA, 15 bp, Homo sapiens
cattgacacacttag

SEQ ID NO: 857103 - DNA, 15 bp, Homo sapiens
attgacacacttagt

SEQ ID NO: 857104 - DNA, 15 bp, Homo sapiens
ttgacacacttagta

SEQ ID NO: 857105 - DNA, 15 bp, Homo sapiens
tgacacacttagtac

SEQ ID NO: 857106 - DNA, 15 bp, Homo sapiens
gacacacttagtacc

SEQ ID NO: 857107 - DNA, 15 bp, Homo sapiens
acacacttagtacca

SEQ ID NO: 857108 - DNA, 15 bp, Homo sapiens
cacacttagtaccat

SEQ ID NO: 857109 - DNA, 15 bp, Homo sapiens
acacttagtaccatg

SEQ ID NO: 857110 - DNA, 15 bp, Homo sapiens
cacttagtaccatgt

SEQ ID NO: 857111 - DNA, 15 bp, Homo sapiens
acttagtaccatgtt

SEQ ID NO: 857112 - DNA, 15 bp, Homo sapiens
cttagtaccatgttt

SEQ ID NO: 857113 - DNA, 15 bp, Homo sapiens
ttagtaccatgttta

SEQ ID NO: 857114 - DNA, 15 bp, Homo sapiens
tagtaccatgtttac

SEQ ID NO: 857115 - DNA, 15 bp, Homo sapiens
agtaccatgtttacc

SEQ ID NO: 857116 - DNA, 15 bp, Homo sapiens
gtaccatgtttacca

SEQ ID NO: 857117 - DNA, 15 bp, Homo sapiens
taccatgtttaccaa

SEQ ID NO: 857118 - DNA, 15 bp, Homo sapiens
accatgtttaccaaa

SEQ ID NO: 857119 - DNA, 15 bp, Homo sapiens
ccatgtttaccaaag

SEQ ID NO: 857120 - DNA, 15 bp, Homo sapiens
catgtttaccaaagt

SEQ ID NO: 857121 - DNA, 15 bp, Homo sapiens
atgtttaccaaagtt

SEQ ID NO: 857122 - DNA, 15 bp, Homo sapiens
tgtttaccaaagttc

SEQ ID NO: 857123 - DNA, 15 bp, Homo sapiens
gtttaccaaagttct

SEQ ID NO: 857124 - DNA, 15 bp, Homo sapiens
tttaccaaagttctt

SEQ ID NO: 857125 - DNA, 15 bp, Homo sapiens
ttaccaaagttctta

SEQ ID NO: 857126 - DNA, 15 bp, Homo sapiens
taccaaagttcttag

SEQ ID NO: 857127 - DNA, 15 bp, Homo sapiens
accaaagttcttagt

SEQ ID NO: 857128 - DNA, 15 bp, Homo sapiens
ccaaagttcttagtt

SEQ ID NO: 857129 - DNA, 15 bp, Homo sapiens
caaagttcttagtta

SEQ ID NO: 857130 - DNA, 15 bp, Homo sapiens
aaagttcttagttat

SEQ ID NO: 857131 - DNA, 15 bp, Homo sapiens
aagttcttagttatt

SEQ ID NO: 857132 - DNA, 15 bp, Homo sapiens
agttcttagttattg

SEQ ID NO: 857133 - DNA, 15 bp, Homo sapiens
gttcttagttattga

SEQ ID NO: 857134 - DNA, 15 bp, Homo sapiens
ttcttagttattgaa

SEQ ID NO: 857135 - DNA, 15 bp, Homo sapiens
tcttagttattgaaa

SEQ ID NO: 857136 - DNA, 15 bp, Homo sapiens
cttagttattgaaat

SEQ ID NO: 857137 - DNA, 15 bp, Homo sapiens
ttagttattgaaatg

SEQ ID NO: 857138 - DNA, 15 bp, Homo sapiens
tagttattgaaatgg

SEQ ID NO: 857139 - DNA, 15 bp, Homo sapiens
agttattgaaatggg

SEQ ID NO: 857140 - DNA, 15 bp, Homo sapiens
gttattgaaatgggc

SEQ ID NO: 857141 - DNA, 15 bp, Homo sapiens
ttattgaaatgggca

SEQ ID NO: 857142 - DNA, 15 bp, Homo sapiens
tattgaaatgggcac

SEQ ID NO: 857143 - DNA, 15 bp, Homo sapiens
attgaaatgggcacc

SEQ ID NO: 857144 - DNA, 15 bp, Homo sapiens
ttgaaatgggcacca

SEQ ID NO: 857145 - DNA, 15 bp, Homo sapiens
tgaaatgggcaccag

SEQ ID NO: 857146 - DNA, 15 bp, Homo sapiens
gaaatgggcaccagc

SEQ ID NO: 857147 - DNA, 15 bp, Homo sapiens
aaatgggcaccagca

SEQ ID NO: 857148 - DNA, 15 bp, Homo sapiens
aatgggcaccagcat

SEQ ID NO: 857149 - DNA, 15 bp, Homo sapiens
atgggcaccagcata

SEQ ID NO: 857150 - DNA, 15 bp, Homo sapiens
tgggcaccagcatat

SEQ ID NO: 857151 - DNA, 15 bp, Homo sapiens
gggcaccagcatatt

SEQ ID NO: 857152 - DNA, 15 bp, Homo sapiens
ggcaccagcatattt

SEQ ID NO: 857153 - DNA, 15 bp, Homo sapiens
gcaccagcatatttt

SEQ ID NO: 857154 - DNA, 15 bp, Homo sapiens
caccagcatattttg

SEQ ID NO: 857155 - DNA, 15 bp, Homo sapiens
accagcatattttga

SEQ ID NO: 857156 - DNA, 15 bp, Homo sapiens
ccagcatattttgaa

SEQ ID NO: 857157 - DNA, 15 bp, Homo sapiens
cagcatattttgaaa

SEQ ID NO: 857158 - DNA, 15 bp, Homo sapiens
agcatattttgaaac

SEQ ID NO: 857159 - DNA, 15 bp, Homo sapiens
gcatattttgaaacg

SEQ ID NO: 857160 - DNA, 15 bp, Homo sapiens
catattttgaaacgt

SEQ ID NO: 857161 - DNA, 15 bp, Homo sapiens
atattttgaaacgtt

SEQ ID NO: 857162 - DNA, 15 bp, Homo sapiens
tattttgaaacgttg

SEQ ID NO: 857163 - DNA, 15 bp, Homo sapiens
attttgaaacgttgg

SEQ ID NO: 857164 - DNA, 15 bp, Homo sapiens
ttttgaaacgttggt

SEQ ID NO: 857165 - DNA, 15 bp, Homo sapiens
tttgaaacgttggtg

SEQ ID NO: 857166 - DNA, 15 bp, Homo sapiens
ttgaaacgttggtgt

SEQ ID NO: 857167 - DNA, 15 bp, Homo sapiens
tgaaacgttggtgtt

SEQ ID NO: 857168 - DNA, 15 bp, Homo sapiens
gaaacgttggtgtta

SEQ ID NO: 857169 - DNA, 15 bp, Homo sapiens
aaacgttggtgttaa

SEQ ID NO: 857170 - DNA, 15 bp, Homo sapiens
aacgttggtgttaac

SEQ ID NO: 857171 - DNA, 15 bp, Homo sapiens
acgttggtgttaact

SEQ ID NO: 857172 - DNA, 15 bp, Homo sapiens
cgttggtgttaactt

SEQ ID NO: 857173 - DNA, 15 bp, Homo sapiens
gttggtgttaacttg

SEQ ID NO: 857174 - DNA, 15 bp, Homo sapiens
ttggtgttaacttgg

SEQ ID NO: 857175 - DNA, 15 bp, Homo sapiens
tggtgttaacttggg

SEQ ID NO: 857176 - DNA, 15 bp, Homo sapiens
ggtgttaacttggga

SEQ ID NO: 857177 - DNA, 15 bp, Homo sapiens
gtgttaacttgggat

SEQ ID NO: 857178 - DNA, 15 bp, Homo sapiens
tgttaacttgggata

SEQ ID NO: 857179 - DNA, 15 bp, Homo sapiens
gttaacttgggatat

SEQ ID NO: 857180 - DNA, 15 bp, Homo sapiens
ttaacttgggatatg

SEQ ID NO: 857181 - DNA, 15 bp, Homo sapiens
taacttgggatatgc

SEQ ID NO: 857182 - DNA, 15 bp, Homo sapiens
aacttgggatatgcc

SEQ ID NO: 857183 - DNA, 15 bp, Homo sapiens
acttgggatatgcct

SEQ ID NO: 857184 - DNA, 15 bp, Homo sapiens
cttgggatatgcctt

SEQ ID NO: 857185 - DNA, 15 bp, Homo sapiens
ttgggatatgccttt

SEQ ID NO: 857186 - DNA, 15 bp, Homo sapiens
tgggatatgcctttt

SEQ ID NO: 857187 - DNA, 15 bp, Homo sapiens
gggatatgccttttg

SEQ ID NO: 857188 - DNA, 15 bp, Homo sapiens
ggatatgccttttgt

SEQ ID NO: 857189 - DNA, 15 bp, Homo sapiens
gatatgccttttgtc

SEQ ID NO: 857190 - DNA, 15 bp, Homo sapiens
atatgccttttgtca

SEQ ID NO: 857191 - DNA, 15 bp, Homo sapiens
tatgccttttgtcat

SEQ ID NO: 857192 - DNA, 15 bp, Homo sapiens
atgccttttgtcatg

SEQ ID NO: 857193 - DNA, 15 bp, Homo sapiens
tgccttttgtcatgt

SEQ ID NO: 857194 - DNA, 15 bp, Homo sapiens
gccttttgtcatgtt

SEQ ID NO: 857195 - DNA, 15 bp, Homo sapiens
ccttttgtcatgttg

SEQ ID NO: 857196 - DNA, 15 bp, Homo sapiens
cttttgtcatgttgc

SEQ ID NO: 857197 - DNA, 15 bp, Homo sapiens
ttttgtcatgttgca

SEQ ID NO: 857198 - DNA, 15 bp, Homo sapiens
tttgtcatgttgcaa

SEQ ID NO: 857199 - DNA, 15 bp, Homo sapiens
ttgtcatgttgcaaa

SEQ ID NO: 857200 - DNA, 15 bp, Homo sapiens
tgtcatgttgcaaat

SEQ ID NO: 857201 - DNA, 15 bp, Homo sapiens
gtcatgttgcaaata

SEQ ID NO: 857202 - DNA, 15 bp, Homo sapiens
tcatgttgcaaatag

SEQ ID NO: 857203 - DNA, 15 bp, Homo sapiens
catgttgcaaataga

SEQ ID NO: 857204 - DNA, 15 bp, Homo sapiens
atgttgcaaatagat

SEQ ID NO: 857205 - DNA, 15 bp, Homo sapiens
tgttgcaaatagatt

SEQ ID NO: 857206 - DNA, 15 bp, Homo sapiens
gttgcaaatagattt

SEQ ID NO: 857207 - DNA, 15 bp, Homo sapiens
ttgcaaatagatttt

SEQ ID NO: 857208 - DNA, 15 bp, Homo sapiens
tgcaaatagattttg

SEQ ID NO: 857209 - DNA, 15 bp, Homo sapiens
gcaaatagattttgt

SEQ ID NO: 857210 - DNA, 15 bp, Homo sapiens
caaatagattttgtt

SEQ ID NO: 857211 - DNA, 15 bp, Homo sapiens
aaatagattttgttt

SEQ ID NO: 857212 - DNA, 15 bp, Homo sapiens
aatagattttgtttc

SEQ ID NO: 857213 - DNA, 15 bp, Homo sapiens
atagattttgtttct

SEQ ID NO: 857214 - DNA, 15 bp, Homo sapiens
tagattttgtttctg

SEQ ID NO: 857215 - DNA, 15 bp, Homo sapiens
agattttgtttctgt

SEQ ID NO: 857216 - DNA, 15 bp, Homo sapiens
gattttgtttctgtt

SEQ ID NO: 857217 - DNA, 15 bp, Homo sapiens
attttgtttctgttt

SEQ ID NO: 857218 - DNA, 15 bp, Homo sapiens
tttgtttctgttttg

SEQ ID NO: 857219 - DNA, 15 bp, Homo sapiens
ttgtttctgttttgt

SEQ ID NO: 857220 - DNA, 15 bp, Homo sapiens
tgtttctgttttgtg

SEQ ID NO: 857221 - DNA, 15 bp, Homo sapiens
gtttctgttttgtga

SEQ ID NO: 857222 - DNA, 15 bp, Homo sapiens
tttctgttttgtgaa

SEQ ID NO: 857223 - DNA, 15 bp, Homo sapiens
ttctgttttgtgaag

SEQ ID NO: 857224 - DNA, 15 bp, Homo sapiens
tctgttttgtgaaga

SEQ ID NO: 857225 - DNA, 15 bp, Homo sapiens
ctgttttgtgaagat

SEQ ID NO: 857226 - DNA, 15 bp, Homo sapiens
tgttttgtgaagatc

SEQ ID NO: 857227 - DNA, 15 bp, Homo sapiens
gttttgtgaagatca

SEQ ID NO: 857228 - DNA, 15 bp, Homo sapiens
ttttgtgaagatcac

SEQ ID NO: 857229 - DNA, 15 bp, Homo sapiens
tttgtgaagatcacc

SEQ ID NO: 857230 - DNA, 15 bp, Homo sapiens
ttgtgaagatcacca

SEQ ID NO: 857231 - DNA, 15 bp, Homo sapiens
tgtgaagatcaccat

SEQ ID NO: 857232 - DNA, 15 bp, Homo sapiens
gtgaagatcaccatc

SEQ ID NO: 857233 - DNA, 15 bp, Homo sapiens
tgaagatcaccatct

SEQ ID NO: 857234 - DNA, 15 bp, Homo sapiens
gaagatcaccatctc

SEQ ID NO: 857235 - DNA, 15 bp, Homo sapiens
aagatcaccatctct

SEQ ID NO: 857236 - DNA, 15 bp, Homo sapiens
agatcaccatctctg

SEQ ID NO: 857237 - DNA, 15 bp, Homo sapiens
gatcaccatctctgt

SEQ ID NO: 857238 - DNA, 15 bp, Homo sapiens
atcaccatctctgtc

SEQ ID NO: 857239 - DNA, 15 bp, Homo sapiens
tcaccatctctgtca

SEQ ID NO: 857240 - DNA, 15 bp, Homo sapiens
caccatctctgtcac

SEQ ID NO: 857241 - DNA, 15 bp, Homo sapiens
accatctctgtcact

SEQ ID NO: 857242 - DNA, 15 bp, Homo sapiens
ccatctctgtcactt

SEQ ID NO: 857243 - DNA, 15 bp, Homo sapiens
catctctgtcacttc

SEQ ID NO: 857244 - DNA, 15 bp, Homo sapiens
atctctgtcacttct

SEQ ID NO: 857245 - DNA, 15 bp, Homo sapiens
tctctgtcacttctg

SEQ ID NO: 857246 - DNA, 15 bp, Homo sapiens
ctctgtcacttctga

SEQ ID NO: 857247 - DNA, 15 bp, Homo sapiens
tctgtcacttctgat

SEQ ID NO: 857248 - DNA, 15 bp, Homo sapiens
ctgtcacttctgata

SEQ ID NO: 857249 - DNA, 15 bp, Homo sapiens
tgtcacttctgatag

SEQ ID NO: 857250 - DNA, 15 bp, Homo sapiens
gtcacttctgataga

SEQ ID NO: 857251 - DNA, 15 bp, Homo sapiens
tcacttctgatagaa

SEQ ID NO: 857252 - DNA, 15 bp, Homo sapiens
cacttctgatagaaa

SEQ ID NO: 857253 - DNA, 15 bp, Homo sapiens
acttctgatagaaaa

SEQ ID NO: 857254 - DNA, 15 bp, Homo sapiens
cttctgatagaaaaa

SEQ ID NO: 857255 - DNA, 15 bp, Homo sapiens
ttctgatagaaaaag

SEQ ID NO: 857256 - DNA, 15 bp, Homo sapiens
tctgatagaaaaagt

SEQ ID NO: 857257 - DNA, 15 bp, Homo sapiens
ctgatagaaaaagtg

SEQ ID NO: 857258 - DNA, 15 bp, Homo sapiens
tgatagaaaaagtga

SEQ ID NO: 857259 - DNA, 15 bp, Homo sapiens
gatagaaaaagtgac

SEQ ID NO: 857260 - DNA, 15 bp, Homo sapiens
atagaaaaagtgaca

SEQ ID NO: 857261 - DNA, 15 bp, Homo sapiens
tagaaaaagtgacac

SEQ ID NO: 857262 - DNA, 15 bp, Homo sapiens
agaaaaagtgacact

SEQ ID NO: 857263 - DNA, 15 bp, Homo sapiens
gaaaaagtgacactg

SEQ ID NO: 857264 - DNA, 15 bp, Homo sapiens
aaaaagtgacactga

SEQ ID NO: 857265 - DNA, 15 bp, Homo sapiens
aaaagtgacactgac

SEQ ID NO: 857266 - DNA, 15 bp, Homo sapiens
aaagtgacactgact

SEQ ID NO: 857267 - DNA, 15 bp, Homo sapiens
aagtgacactgactt

SEQ ID NO: 857268 - DNA, 15 bp, Homo sapiens
agtgacactgacttc

SEQ ID NO: 857269 - DNA, 15 bp, Homo sapiens
gtgacactgacttct

SEQ ID NO: 857270 - DNA, 15 bp, Homo sapiens
tgacactgacttctc

SEQ ID NO: 857271 - DNA, 15 bp, Homo sapiens
gacactgacttctca

SEQ ID NO: 857272 - DNA, 15 bp, Homo sapiens
acactgacttctcaa

SEQ ID NO: 857273 - DNA, 15 bp, Homo sapiens
cactgacttctcaag

SEQ ID NO: 857274 - DNA, 15 bp, Homo sapiens
actgacttctcaagt

SEQ ID NO: 857275 - DNA, 15 bp, Homo sapiens
ctgacttctcaagtg

SEQ ID NO: 857276 - DNA, 15 bp, Homo sapiens
tgacttctcaagtga

SEQ ID NO: 857277 - DNA, 15 bp, Homo sapiens
gacttctcaagtgat

SEQ ID NO: 857278 - DNA, 15 bp, Homo sapiens
acttctcaagtgatt

SEQ ID NO: 857279 - DNA, 15 bp, Homo sapiens
cttctcaagtgattt

SEQ ID NO: 857280 - DNA, 15 bp, Homo sapiens
ttctcaagtgatttg

SEQ ID NO: 857281 - DNA, 15 bp, Homo sapiens
tctcaagtgatttga

SEQ ID NO: 857282 - DNA, 15 bp, Homo sapiens
ctcaagtgatttgac

SEQ ID NO: 857283 - DNA, 15 bp, Homo sapiens
tcaagtgatttgaca

SEQ ID NO: 857284 - DNA, 15 bp, Homo sapiens
caagtgatttgacac

SEQ ID NO: 857285 - DNA, 15 bp, Homo sapiens
aagtgatttgacaca

SEQ ID NO: 857286 - DNA, 15 bp, Homo sapiens
agtgatttgacacag

SEQ ID NO: 857287 - DNA, 15 bp, Homo sapiens
gtgatttgacacagg

SEQ ID NO: 857288 - DNA, 15 bp, Homo sapiens
tgatttgacacaggt

SEQ ID NO: 857289 - DNA, 15 bp, Homo sapiens
gatttgacacaggtt

SEQ ID NO: 857290 - DNA, 15 bp, Homo sapiens
atttgacacaggtta

SEQ ID NO: 857291 - DNA, 15 bp, Homo sapiens
tttgacacaggttaa

SEQ ID NO: 857292 - DNA, 15 bp, Homo sapiens
ttgacacaggttaaa

SEQ ID NO: 857293 - DNA, 15 bp, Homo sapiens
tgacacaggttaaaa

SEQ ID NO: 857294 - DNA, 15 bp, Homo sapiens
gacacaggttaaaat

SEQ ID NO: 857295 - DNA, 15 bp, Homo sapiens
acacaggttaaaata

SEQ ID NO: 857296 - DNA, 15 bp, Homo sapiens
cacaggttaaaatat

SEQ ID NO: 857297 - DNA, 15 bp, Homo sapiens
acaggttaaaatatg

SEQ ID NO: 857298 - DNA, 15 bp, Homo sapiens
caggttaaaatatgt

SEQ ID NO: 857299 - DNA, 15 bp, Homo sapiens
aggttaaaatatgta

SEQ ID NO: 857300 - DNA, 15 bp, Homo sapiens
ggttaaaatatgtaa

SEQ ID NO: 857301 - DNA, 15 bp, Homo sapiens
gttaaaatatgtaaa

SEQ ID NO: 857302 - DNA, 15 bp, Homo sapiens
ttaaaatatgtaaac

SEQ ID NO: 857303 - DNA, 15 bp, Homo sapiens
taaaatatgtaaacc

SEQ ID NO: 857304 - DNA, 15 bp, Homo sapiens
aaaatatgtaaacca

SEQ ID NO: 857305 - DNA, 15 bp, Homo sapiens
aaatatgtaaaccat

SEQ ID NO: 857306 - DNA, 15 bp, Homo sapiens
aatatgtaaaccatt

SEQ ID NO: 857307 - DNA, 15 bp, Homo sapiens
atatgtaaaccattt

SEQ ID NO: 857308 - DNA, 15 bp, Homo sapiens
tatgtaaaccatttc

SEQ ID NO: 857309 - DNA, 15 bp, Homo sapiens
atgtaaaccatttct

SEQ ID NO: 857310 - DNA, 15 bp, Homo sapiens
tgtaaaccatttctg

SEQ ID NO: 857311 - DNA, 15 bp, Homo sapiens
gtaaaccatttctgt

SEQ ID NO: 857312 - DNA, 15 bp, Homo sapiens
taaaccatttctgta

SEQ ID NO: 857313 - DNA, 15 bp, Homo sapiens
aaaccatttctgtag

SEQ ID NO: 857314 - DNA, 15 bp, Homo sapiens
aaccatttctgtaga

SEQ ID NO: 857315 - DNA, 15 bp, Homo sapiens
accatttctgtagag

SEQ ID NO: 857316 - DNA, 15 bp, Homo sapiens
ccatttctgtagaga

SEQ ID NO: 857317 - DNA, 15 bp, Homo sapiens
catttctgtagagag

SEQ ID NO: 857318 - DNA, 15 bp, Homo sapiens
atttctgtagagagc

SEQ ID NO: 857319 - DNA, 15 bp, Homo sapiens
tttctgtagagagca

SEQ ID NO: 857320 - DNA, 15 bp, Homo sapiens
ttctgtagagagcaa

SEQ ID NO: 857321 - DNA, 15 bp, Homo sapiens
tctgtagagagcaag

SEQ ID NO: 857322 - DNA, 15 bp, Homo sapiens
ctgtagagagcaagc

SEQ ID NO: 857323 - DNA, 15 bp, Homo sapiens
tgtagagagcaagct

SEQ ID NO: 857324 - DNA, 15 bp, Homo sapiens
gtagagagcaagctg

SEQ ID NO: 857325 - DNA, 15 bp, Homo sapiens
tagagagcaagctgt

SEQ ID NO: 857326 - DNA, 15 bp, Homo sapiens
agagagcaagctgta

SEQ ID NO: 857327 - DNA, 15 bp, Homo sapiens
gagagcaagctgtaa

SEQ ID NO: 857328 - DNA, 15 bp, Homo sapiens
agagcaagctgtaat

SEQ ID NO: 857329 - DNA, 15 bp, Homo sapiens
gagcaagctgtaata

SEQ ID NO: 857330 - DNA, 15 bp, Homo sapiens
agcaagctgtaataa

SEQ ID NO: 857331 - DNA, 15 bp, Homo sapiens
gcaagctgtaataat

SEQ ID NO: 857332 - DNA, 15 bp, Homo sapiens
caagctgtaataata

SEQ ID NO: 857333 - DNA, 15 bp, Homo sapiens
aagctgtaataatat

SEQ ID NO: 857334 - DNA, 15 bp, Homo sapiens
agctgtaataatata

SEQ ID NO: 857335 - DNA, 15 bp, Homo sapiens
gctgtaataatatac

SEQ ID NO: 857336 - DNA, 15 bp, Homo sapiens
ctgtaataatatact

SEQ ID NO: 857337 - DNA, 15 bp, Homo sapiens
tgtaataatatacta

SEQ ID NO: 857338 - DNA, 15 bp, Homo sapiens
gtaataatatactaa

SEQ ID NO: 857339 - DNA, 15 bp, Homo sapiens
taataatatactaaa

SEQ ID NO: 857340 - DNA, 15 bp, Homo sapiens
aataatatactaaag

SEQ ID NO: 857341 - DNA, 15 bp, Homo sapiens
ataatatactaaagg

SEQ ID NO: 857342 - DNA, 15 bp, Homo sapiens
taatatactaaaggg

SEQ ID NO: 857343 - DNA, 15 bp, Homo sapiens
aatatactaaagggc

SEQ ID NO: 857344 - DNA, 15 bp, Homo sapiens
atatactaaagggct

SEQ ID NO: 857345 - DNA, 15 bp, Homo sapiens
tatactaaagggcta

SEQ ID NO: 857346 - DNA, 15 bp, Homo sapiens
atactaaagggctag

SEQ ID NO: 857347 - DNA, 15 bp, Homo sapiens
tactaaagggctagg

SEQ ID NO: 857348 - DNA, 15 bp, Homo sapiens
actaaagggctaggt

SEQ ID NO: 857349 - DNA, 15 bp, Homo sapiens
ctaaagggctaggtt

SEQ ID NO: 857350 - DNA, 15 bp, Homo sapiens
taaagggctaggttt

SEQ ID NO: 857351 - DNA, 15 bp, Homo sapiens
aaagggctaggttta

SEQ ID NO: 857352 - DNA, 15 bp, Homo sapiens
aagggctaggtttat

SEQ ID NO: 857353 - DNA, 15 bp, Homo sapiens
agggctaggtttata

SEQ ID NO: 857354 - DNA, 15 bp, Homo sapiens
gggctaggtttatag

SEQ ID NO: 857355 - DNA, 15 bp, Homo sapiens
ggctaggtttatagt

SEQ ID NO: 857356 - DNA, 15 bp, Homo sapiens
gctaggtttatagta

SEQ ID NO: 857357 - DNA, 15 bp, Homo sapiens
ctaggtttatagtat

SEQ ID NO: 857358 - DNA, 15 bp, Homo sapiens
taggtttatagtata

SEQ ID NO: 857359 - DNA, 15 bp, Homo sapiens
aggtttatagtataa

SEQ ID NO: 857360 - DNA, 15 bp, Homo sapiens
ggtttatagtataat

SEQ ID NO: 857361 - DNA, 15 bp, Homo sapiens
gtttatagtataata

SEQ ID NO: 857362 - DNA, 15 bp, Homo sapiens
tttatagtataatat

SEQ ID NO: 857363 - DNA, 15 bp, Homo sapiens
ttatagtataatata

SEQ ID NO: 857364 - DNA, 15 bp, Homo sapiens
tatagtataatataa

SEQ ID NO: 857365 - DNA, 15 bp, Homo sapiens
atagtataatataaa

SEQ ID NO: 857366 - DNA, 15 bp, Homo sapiens
tagtataatataaat

SEQ ID NO: 857367 - DNA, 15 bp, Homo sapiens
agtataatataaata

SEQ ID NO: 857368 - DNA, 15 bp, Homo sapiens
gtataatataaataa

SEQ ID NO: 857369 - DNA, 15 bp, Homo sapiens
tataatataaataac

SEQ ID NO: 857370 - DNA, 15 bp, Homo sapiens
ataatataaataact

SEQ ID NO: 857371 - DNA, 15 bp, Homo sapiens
taatataaataactc

SEQ ID NO: 857372 - DNA, 15 bp, Homo sapiens
aatataaataactca

SEQ ID NO: 857373 - DNA, 15 bp, Homo sapiens
atataaataactcat

SEQ ID NO: 857374 - DNA, 15 bp, Homo sapiens
tataaataactcatt

SEQ ID NO: 857375 - DNA, 15 bp, Homo sapiens
ataaataactcattt

SEQ ID NO: 857376 - DNA, 15 bp, Homo sapiens
taaataactcattta

SEQ ID NO: 857377 - DNA, 15 bp, Homo sapiens
aaataactcatttat

SEQ ID NO: 857378 - DNA, 15 bp, Homo sapiens
aataactcatttatg

SEQ ID NO: 857379 - DNA, 15 bp, Homo sapiens
ataactcatttatgc

SEQ ID NO: 857380 - DNA, 15 bp, Homo sapiens
taactcatttatgct

SEQ ID NO: 857381 - DNA, 15 bp, Homo sapiens
aactcatttatgctg

SEQ ID NO: 857382 - DNA, 15 bp, Homo sapiens
actcatttatgctgt

SEQ ID NO: 857383 - DNA, 15 bp, Homo sapiens
ctcatttatgctgtt

SEQ ID NO: 857384 - DNA, 15 bp, Homo sapiens
tcatttatgctgtta

SEQ ID NO: 857385 - DNA, 15 bp, Homo sapiens
catttatgctgttaa

SEQ ID NO: 857386 - DNA, 15 bp, Homo sapiens
atttatgctgttaat

SEQ ID NO: 857387 - DNA, 15 bp, Homo sapiens
tttatgctgttaata

SEQ ID NO: 857388 - DNA, 15 bp, Homo sapiens
ttatgctgttaataa

SEQ ID NO: 857389 - DNA, 15 bp, Homo sapiens
tatgctgttaataat

SEQ ID NO: 857390 - DNA, 15 bp, Homo sapiens
atgctgttaataatt

SEQ ID NO: 857391 - DNA, 15 bp, Homo sapiens
tgctgttaataattt

SEQ ID NO: 857392 - DNA, 15 bp, Homo sapiens
gctgttaataattta

SEQ ID NO: 857393 - DNA, 15 bp, Homo sapiens
ctgttaataatttat

SEQ ID NO: 857394 - DNA, 15 bp, Homo sapiens
tgttaataatttata

SEQ ID NO: 857395 - DNA, 15 bp, Homo sapiens
gttaataatttatag

SEQ ID NO: 857396 - DNA, 15 bp, Homo sapiens
ttaataatttatagc

SEQ ID NO: 857397 - DNA, 15 bp, Homo sapiens
taataatttatagca

SEQ ID NO: 857398 - DNA, 15 bp, Homo sapiens
aataatttatagcaa

SEQ ID NO: 857399 - DNA, 15 bp, Homo sapiens
ataatttatagcaac

SEQ ID NO: 857400 - DNA, 15 bp, Homo sapiens
taatttatagcaaca

SEQ ID NO: 857401 - DNA, 15 bp, Homo sapiens
aatttatagcaacat

SEQ ID NO: 857402 - DNA, 15 bp, Homo sapiens
atttatagcaacatg

SEQ ID NO: 857403 - DNA, 15 bp, Homo sapiens
tttatagcaacatgg

SEQ ID NO: 857404 - DNA, 15 bp, Homo sapiens
ttatagcaacatggc

SEQ ID NO: 857405 - DNA, 15 bp, Homo sapiens
tatagcaacatggca

SEQ ID NO: 857406 - DNA, 15 bp, Homo sapiens
atagcaacatggcat

SEQ ID NO: 857407 - DNA, 15 bp, Homo sapiens
tagcaacatggcatt

SEQ ID NO: 857408 - DNA, 15 bp, Homo sapiens
agcaacatggcattt

SEQ ID NO: 857409 - DNA, 15 bp, Homo sapiens
gcaacatggcatttg

SEQ ID NO: 857410 - DNA, 15 bp, Homo sapiens
caacatggcatttga

SEQ ID NO: 857411 - DNA, 15 bp, Homo sapiens
aacatggcatttgac

SEQ ID NO: 857412 - DNA, 15 bp, Homo sapiens
acatggcatttgact

SEQ ID NO: 857413 - DNA, 15 bp, Homo sapiens
catggcatttgactg

SEQ ID NO: 857414 - DNA, 15 bp, Homo sapiens
atggcatttgactga

SEQ ID NO: 857415 - DNA, 15 bp, Homo sapiens
tggcatttgactgac

SEQ ID NO: 857416 - DNA, 15 bp, Homo sapiens
ggcatttgactgact

SEQ ID NO: 857417 - DNA, 15 bp, Homo sapiens
gcatttgactgactt

SEQ ID NO: 857418 - DNA, 15 bp, Homo sapiens
catttgactgacttt

SEQ ID NO: 857419 - DNA, 15 bp, Homo sapiens
atttgactgactttt

SEQ ID NO: 857420 - DNA, 15 bp, Homo sapiens
tttgactgacttttt

SEQ ID NO: 857421 - DNA, 15 bp, Homo sapiens
ttgactgacttttta

SEQ ID NO: 857422 - DNA, 15 bp, Homo sapiens
tgactgactttttat

SEQ ID NO: 857423 - DNA, 15 bp, Homo sapiens
gactgactttttatg

SEQ ID NO: 857424 - DNA, 15 bp, Homo sapiens
actgactttttatgt

SEQ ID NO: 857425 - DNA, 15 bp, Homo sapiens
ctgactttttatgtg

SEQ ID NO: 857426 - DNA, 15 bp, Homo sapiens
tgactttttatgtgc

SEQ ID NO: 857427 - DNA, 15 bp, Homo sapiens
gactttttatgtgct

SEQ ID NO: 857428 - DNA, 15 bp, Homo sapiens
actttttatgtgctc

SEQ ID NO: 857429 - DNA, 15 bp, Homo sapiens
ctttttatgtgctct

SEQ ID NO: 857430 - DNA, 15 bp, Homo sapiens
tttttatgtgctcta

SEQ ID NO: 857431 - DNA, 15 bp, Homo sapiens
ttttatgtgctctag

SEQ ID NO: 857432 - DNA, 15 bp, Homo sapiens
tttatgtgctctagt

SEQ ID NO: 857433 - DNA, 15 bp, Homo sapiens
ttatgtgctctagtc

SEQ ID NO: 857434 - DNA, 15 bp, Homo sapiens
tatgtgctctagtca

SEQ ID NO: 857435 - DNA, 15 bp, Homo sapiens
atgtgctctagtcat

SEQ ID NO: 857436 - DNA, 15 bp, Homo sapiens
tgtgctctagtcatg

SEQ ID NO: 857437 - DNA, 15 bp, Homo sapiens
gtgctctagtcatgt

SEQ ID NO: 857438 - DNA, 15 bp, Homo sapiens
tgctctagtcatgta

SEQ ID NO: 857439 - DNA, 15 bp, Homo sapiens
gctctagtcatgtaa

SEQ ID NO: 857440 - DNA, 15 bp, Homo sapiens
ctctagtcatgtaag

SEQ ID NO: 857441 - DNA, 15 bp, Homo sapiens
tctagtcatgtaagt

SEQ ID NO: 857442 - DNA, 15 bp, Homo sapiens
ctagtcatgtaagta

SEQ ID NO: 857443 - DNA, 15 bp, Homo sapiens
tagtcatgtaagtaa

SEQ ID NO: 857444 - DNA, 15 bp, Homo sapiens
agtcatgtaagtaat

SEQ ID NO: 857445 - DNA, 15 bp, Homo sapiens
gtcatgtaagtaata

SEQ ID NO: 857446 - DNA, 15 bp, Homo sapiens
tcatgtaagtaatag

SEQ ID NO: 857447 - DNA, 15 bp, Homo sapiens
catgtaagtaataga

SEQ ID NO: 857448 - DNA, 15 bp, Homo sapiens
atgtaagtaatagat

SEQ ID NO: 857449 - DNA, 15 bp, Homo sapiens
tgtaagtaatagatg

SEQ ID NO: 857450 - DNA, 15 bp, Homo sapiens
gtaagtaatagatgt

SEQ ID NO: 857451 - DNA, 15 bp, Homo sapiens
taagtaatagatgtg

SEQ ID NO: 857452 - DNA, 15 bp, Homo sapiens
aagtaatagatgtgg

SEQ ID NO: 857453 - DNA, 15 bp, Homo sapiens
agtaatagatgtgga

SEQ ID NO: 857454 - DNA, 15 bp, Homo sapiens
gtaatagatgtggaa

SEQ ID NO: 857455 - DNA, 15 bp, Homo sapiens
taatagatgtggaaa

SEQ ID NO: 857456 - DNA, 15 bp, Homo sapiens
aatagatgtggaaac

SEQ ID NO: 857457 - DNA, 15 bp, Homo sapiens
atagatgtggaaaca

SEQ ID NO: 857458 - DNA, 15 bp, Homo sapiens
tagatgtggaaacat

SEQ ID NO: 857459 - DNA, 15 bp, Homo sapiens
agatgtggaaacata

SEQ ID NO: 857460 - DNA, 15 bp, Homo sapiens
gatgtggaaacatag

SEQ ID NO: 857461 - DNA, 15 bp, Homo sapiens
atgtggaaacataga

SEQ ID NO: 857462 - DNA, 15 bp, Homo sapiens
tgtggaaacatagac

SEQ ID NO: 857463 - DNA, 15 bp, Homo sapiens
gtggaaacatagacc

SEQ ID NO: 857464 - DNA, 15 bp, Homo sapiens
tggaaacatagacca

SEQ ID NO: 857465 - DNA, 15 bp, Homo sapiens
ggaaacatagaccag

SEQ ID NO: 857466 - DNA, 15 bp, Homo sapiens
gaaacatagaccaga

SEQ ID NO: 857467 - DNA, 15 bp, Homo sapiens
aaacatagaccagag

SEQ ID NO: 857468 - DNA, 15 bp, Homo sapiens
aacatagaccagagt

SEQ ID NO: 857469 - DNA, 15 bp, Homo sapiens
acatagaccagagtt

SEQ ID NO: 857470 - DNA, 15 bp, Homo sapiens
catagaccagagttt

SEQ ID NO: 857471 - DNA, 15 bp, Homo sapiens
atagaccagagtttc

SEQ ID NO: 857472 - DNA, 15 bp, Homo sapiens
tagaccagagtttca

SEQ ID NO: 857473 - DNA, 15 bp, Homo sapiens
agaccagagtttcaa

SEQ ID NO: 857474 - DNA, 15 bp, Homo sapiens
gaccagagtttcaag

SEQ ID NO: 857475 - DNA, 15 bp, Homo sapiens
accagagtttcaaga

SEQ ID NO: 857476 - DNA, 15 bp, Homo sapiens
ccagagtttcaagaa

SEQ ID NO: 857477 - DNA, 15 bp, Homo sapiens
cagagtttcaagaac

SEQ ID NO: 857478 - DNA, 15 bp, Homo sapiens
agagtttcaagaaca

SEQ ID NO: 857479 - DNA, 15 bp, Homo sapiens
gagtttcaagaacat

SEQ ID NO: 857480 - DNA, 15 bp, Homo sapiens
agtttcaagaacatg

SEQ ID NO: 857481 - DNA, 15 bp, Homo sapiens
gtttcaagaacatgt

SEQ ID NO: 857482 - DNA, 15 bp, Homo sapiens
tttcaagaacatgtt

SEQ ID NO: 857483 - DNA, 15 bp, Homo sapiens
ttcaagaacatgttt

SEQ ID NO: 857484 - DNA, 15 bp, Homo sapiens
tcaagaacatgtttt

SEQ ID NO: 857485 - DNA, 15 bp, Homo sapiens
caagaacatgttttg

SEQ ID NO: 857486 - DNA, 15 bp, Homo sapiens
aagaacatgttttgg

SEQ ID NO: 857487 - DNA, 15 bp, Homo sapiens
agaacatgttttggg

SEQ ID NO: 857488 - DNA, 15 bp, Homo sapiens
gaacatgttttgggc

SEQ ID NO: 857489 - DNA, 15 bp, Homo sapiens
aacatgttttgggca

SEQ ID NO: 857490 - DNA, 15 bp, Homo sapiens
acatgttttgggcag

SEQ ID NO: 857491 - DNA, 15 bp, Homo sapiens
catgttttgggcaga

SEQ ID NO: 857492 - DNA, 15 bp, Homo sapiens
atgttttgggcagag

SEQ ID NO: 857493 - DNA, 15 bp, Homo sapiens
tgttttgggcagagt

SEQ ID NO: 857494 - DNA, 15 bp, Homo sapiens
gttttgggcagagtc

SEQ ID NO: 857495 - DNA, 15 bp, Homo sapiens
ttttgggcagagtct

SEQ ID NO: 857496 - DNA, 15 bp, Homo sapiens
tttgggcagagtctg

SEQ ID NO: 857497 - DNA, 15 bp, Homo sapiens
ttgggcagagtctgt

SEQ ID NO: 857498 - DNA, 15 bp, Homo sapiens
tgggcagagtctgtt

SEQ ID NO: 857499 - DNA, 15 bp, Homo sapiens
gggcagagtctgttt

SEQ ID NO: 857500 - DNA, 15 bp, Homo sapiens
ggcagagtctgtttt

SEQ ID NO: 857501 - DNA, 15 bp, Homo sapiens
gcagagtctgttttc

SEQ ID NO: 857502 - DNA, 15 bp, Homo sapiens
cagagtctgttttct

SEQ ID NO: 857503 - DNA, 15 bp, Homo sapiens
agagtctgttttctt

SEQ ID NO: 857504 - DNA, 15 bp, Homo sapiens
gagtctgttttcttg

SEQ ID NO: 857505 - DNA, 15 bp, Homo sapiens
agtctgttttcttgc

SEQ ID NO: 857506 - DNA, 15 bp, Homo sapiens
gtctgttttcttgct

SEQ ID NO: 857507 - DNA, 15 bp, Homo sapiens
tctgttttcttgcta

SEQ ID NO: 857508 - DNA, 15 bp, Homo sapiens
ctgttttcttgctat

SEQ ID NO: 857509 - DNA, 15 bp, Homo sapiens
tgttttcttgctatt

SEQ ID NO: 857510 - DNA, 15 bp, Homo sapiens
gttttcttgctatta

SEQ ID NO: 857511 - DNA, 15 bp, Homo sapiens
ttttcttgctattat

SEQ ID NO: 857512 - DNA, 15 bp, Homo sapiens
tttcttgctattatc

SEQ ID NO: 857513 - DNA, 15 bp, Homo sapiens
ttcttgctattatct

SEQ ID NO: 857514 - DNA, 15 bp, Homo sapiens
tcttgctattatctc

SEQ ID NO: 857515 - DNA, 15 bp, Homo sapiens
cttgctattatctct

SEQ ID NO: 857516 - DNA, 15 bp, Homo sapiens
ttgctattatctctt

SEQ ID NO: 857517 - DNA, 15 bp, Homo sapiens
tgctattatctctta

SEQ ID NO: 857518 - DNA, 15 bp, Homo sapiens
gctattatctcttaa

SEQ ID NO: 857519 - DNA, 15 bp, Homo sapiens
ctattatctcttaag

SEQ ID NO: 857520 - DNA, 15 bp, Homo sapiens
tattatctcttaagt

SEQ ID NO: 857521 - DNA, 15 bp, Homo sapiens
attatctcttaagtt

SEQ ID NO: 857522 - DNA, 15 bp, Homo sapiens
ttatctcttaagttt

SEQ ID NO: 857523 - DNA, 15 bp, Homo sapiens
tatctcttaagttta

SEQ ID NO: 857524 - DNA, 15 bp, Homo sapiens
atctcttaagtttat

SEQ ID NO: 857525 - DNA, 15 bp, Homo sapiens
tctcttaagtttatg

SEQ ID NO: 857526 - DNA, 15 bp, Homo sapiens
ctcttaagtttatgt

SEQ ID NO: 857527 - DNA, 15 bp, Homo sapiens
tcttaagtttatgtt

SEQ ID NO: 857528 - DNA, 15 bp, Homo sapiens
cttaagtttatgttc

SEQ ID NO: 857529 - DNA, 15 bp, Homo sapiens
ttaagtttatgttca

SEQ ID NO: 857530 - DNA, 15 bp, Homo sapiens
taagtttatgttcat

SEQ ID NO: 857531 - DNA, 15 bp, Homo sapiens
aagtttatgttcatg

SEQ ID NO: 857532 - DNA, 15 bp, Homo sapiens
agtttatgttcatgg

SEQ ID NO: 857533 - DNA, 15 bp, Homo sapiens
gtttatgttcatggc

SEQ ID NO: 857534 - DNA, 15 bp, Homo sapiens
tttatgttcatggcc

SEQ ID NO: 857535 - DNA, 15 bp, Homo sapiens
ttatgttcatggcct

SEQ ID NO: 857536 - DNA, 15 bp, Homo sapiens
tatgttcatggccta

SEQ ID NO: 857537 - DNA, 15 bp, Homo sapiens
atgttcatggcctaa

SEQ ID NO: 857538 - DNA, 15 bp, Homo sapiens
tgttcatggcctaaa

SEQ ID NO: 857539 - DNA, 15 bp, Homo sapiens
gttcatggcctaaag

SEQ ID NO: 857540 - DNA, 15 bp, Homo sapiens
ttcatggcctaaaga

SEQ ID NO: 857541 - DNA, 15 bp, Homo sapiens
tcatggcctaaagat

SEQ ID NO: 857542 - DNA, 15 bp, Homo sapiens
catggcctaaagatt

SEQ ID NO: 857543 - DNA, 15 bp, Homo sapiens
atggcctaaagatta

SEQ ID NO: 857544 - DNA, 15 bp, Homo sapiens
tggcctaaagattat

SEQ ID NO: 857545 - DNA, 15 bp, Homo sapiens
ggcctaaagattatg

SEQ ID NO: 857546 - DNA, 15 bp, Homo sapiens
gcctaaagattatgc

SEQ ID NO: 857547 - DNA, 15 bp, Homo sapiens
cctaaagattatgct

SEQ ID NO: 857548 - DNA, 15 bp, Homo sapiens
ctaaagattatgcta

SEQ ID NO: 857549 - DNA, 15 bp, Homo sapiens
taaagattatgctaa

SEQ ID NO: 857550 - DNA, 15 bp, Homo sapiens
aaagattatgctaat

SEQ ID NO: 857551 - DNA, 15 bp, Homo sapiens
aagattatgctaatg

SEQ ID NO: 857552 - DNA, 15 bp, Homo sapiens
agattatgctaatgg

SEQ ID NO: 857553 - DNA, 15 bp, Homo sapiens
gattatgctaatgga

SEQ ID NO: 857554 - DNA, 15 bp, Homo sapiens
attatgctaatggat

SEQ ID NO: 857555 - DNA, 15 bp, Homo sapiens
ttatgctaatggatc

SEQ ID NO: 857556 - DNA, 15 bp, Homo sapiens
tatgctaatggatct

SEQ ID NO: 857557 - DNA, 15 bp, Homo sapiens
atgctaatggatctg

SEQ ID NO: 857558 - DNA, 15 bp, Homo sapiens
tgctaatggatctgc

SEQ ID NO: 857559 - DNA, 15 bp, Homo sapiens
gctaatggatctgcc

SEQ ID NO: 857560 - DNA, 15 bp, Homo sapiens
ctaatggatctgcct

SEQ ID NO: 857561 - DNA, 15 bp, Homo sapiens
taatggatctgcctt

SEQ ID NO: 857562 - DNA, 15 bp, Homo sapiens
aatggatctgccttg

SEQ ID NO: 857563 - DNA, 15 bp, Homo sapiens
atggatctgccttgg

SEQ ID NO: 857564 - DNA, 15 bp, Homo sapiens
tggatctgccttggt

SEQ ID NO: 857565 - DNA, 15 bp, Homo sapiens
ggatctgccttggtc

SEQ ID NO: 857566 - DNA, 15 bp, Homo sapiens
gatctgccttggtct

SEQ ID NO: 857567 - DNA, 15 bp, Homo sapiens
atctgccttggtctt

SEQ ID NO: 857568 - DNA, 15 bp, Homo sapiens
tctgccttggtcttg

SEQ ID NO: 857569 - DNA, 15 bp, Homo sapiens
ctgccttggtcttgg

SEQ ID NO: 857570 - DNA, 15 bp, Homo sapiens
tgccttggtcttggg

SEQ ID NO: 857571 - DNA, 15 bp, Homo sapiens
gccttggtcttgggt

SEQ ID NO: 857572 - DNA, 15 bp, Homo sapiens
ccttggtcttgggtg

SEQ ID NO: 857573 - DNA, 15 bp, Homo sapiens
cttggtcttgggtgt

SEQ ID NO: 857574 - DNA, 15 bp, Homo sapiens
ttggtcttgggtgtc

SEQ ID NO: 857575 - DNA, 15 bp, Homo sapiens
tggtcttgggtgtca

SEQ ID NO: 857576 - DNA, 15 bp, Homo sapiens
ggtcttgggtgtcag

SEQ ID NO: 857577 - DNA, 15 bp, Homo sapiens
gtcttgggtgtcagg

SEQ ID NO: 857578 - DNA, 15 bp, Homo sapiens
tcttgggtgtcaggt

SEQ ID NO: 857579 - DNA, 15 bp, Homo sapiens
cttgggtgtcaggtc

SEQ ID NO: 857580 - DNA, 15 bp, Homo sapiens
ttgggtgtcaggtct

SEQ ID NO: 857581 - DNA, 15 bp, Homo sapiens
tgggtgtcaggtctg

SEQ ID NO: 857582 - DNA, 15 bp, Homo sapiens
gggtgtcaggtctgt

SEQ ID NO: 857583 - DNA, 15 bp, Homo sapiens
ggtgtcaggtctgtg

SEQ ID NO: 857584 - DNA, 15 bp, Homo sapiens
gtgtcaggtctgtgt

SEQ ID NO: 857585 - DNA, 15 bp, Homo sapiens
tgtcaggtctgtgtt

SEQ ID NO: 857586 - DNA, 15 bp, Homo sapiens
gtcaggtctgtgtta

SEQ ID NO: 857587 - DNA, 15 bp, Homo sapiens
tcaggtctgtgttag

SEQ ID NO: 857588 - DNA, 15 bp, Homo sapiens
caggtctgtgttagc

SEQ ID NO: 857589 - DNA, 15 bp, Homo sapiens
aggtctgtgttagcg

SEQ ID NO: 857590 - DNA, 15 bp, Homo sapiens
ggtctgtgttagcga

SEQ ID NO: 857591 - DNA, 15 bp, Homo sapiens
gtctgtgttagcgag

SEQ ID NO: 857592 - DNA, 15 bp, Homo sapiens
tctgtgttagcgagt

SEQ ID NO: 857593 - DNA, 15 bp, Homo sapiens
ctgtgttagcgagta

SEQ ID NO: 857594 - DNA, 15 bp, Homo sapiens
tgtgttagcgagtat

SEQ ID NO: 857595 - DNA, 15 bp, Homo sapiens
gtgttagcgagtatt

SEQ ID NO: 857596 - DNA, 15 bp, Homo sapiens
tgttagcgagtattg

SEQ ID NO: 857597 - DNA, 15 bp, Homo sapiens
gttagcgagtattga

SEQ ID NO: 857598 - DNA, 15 bp, Homo sapiens
ttagcgagtattgaa

SEQ ID NO: 857599 - DNA, 15 bp, Homo sapiens
tagcgagtattgaaa

SEQ ID NO: 857600 - DNA, 15 bp, Homo sapiens
agcgagtattgaaaa

SEQ ID NO: 857601 - DNA, 15 bp, Homo sapiens
gcgagtattgaaaag

SEQ ID NO: 857602 - DNA, 15 bp, Homo sapiens
cgagtattgaaaagc

SEQ ID NO: 857603 - DNA, 15 bp, Homo sapiens
gagtattgaaaagca

SEQ ID NO: 857604 - DNA, 15 bp, Homo sapiens
agtattgaaaagcat

SEQ ID NO: 857605 - DNA, 15 bp, Homo sapiens
gtattgaaaagcata

SEQ ID NO: 857606 - DNA, 15 bp, Homo sapiens
tattgaaaagcatag

SEQ ID NO: 857607 - DNA, 15 bp, Homo sapiens
attgaaaagcatagt

SEQ ID NO: 857608 - DNA, 15 bp, Homo sapiens
ttgaaaagcatagtt

SEQ ID NO: 857609 - DNA, 15 bp, Homo sapiens
tgaaaagcatagttt

SEQ ID NO: 857610 - DNA, 15 bp, Homo sapiens
gaaaagcatagtttt

SEQ ID NO: 857611 - DNA, 15 bp, Homo sapiens
aaaagcatagttttt

SEQ ID NO: 857612 - DNA, 15 bp, Homo sapiens
aaagcatagtttttg

SEQ ID NO: 857613 - DNA, 15 bp, Homo sapiens
aagcatagtttttgc

SEQ ID NO: 857614 - DNA, 15 bp, Homo sapiens
agcatagtttttgcc

SEQ ID NO: 857615 - DNA, 15 bp, Homo sapiens
gcatagtttttgcct

SEQ ID NO: 857616 - DNA, 15 bp, Homo sapiens
catagtttttgccta

SEQ ID NO: 857617 - DNA, 15 bp, Homo sapiens
atagtttttgcctac

SEQ ID NO: 857618 - DNA, 15 bp, Homo sapiens
tagtttttgcctact

SEQ ID NO: 857619 - DNA, 15 bp, Homo sapiens
agtttttgcctactg

SEQ ID NO: 857620 - DNA, 15 bp, Homo sapiens
gtttttgcctactgg

SEQ ID NO: 857621 - DNA, 15 bp, Homo sapiens
tttttgcctactggg

SEQ ID NO: 857622 - DNA, 15 bp, Homo sapiens
ttttgcctactggga

SEQ ID NO: 857623 - DNA, 15 bp, Homo sapiens
tttgcctactgggaa

SEQ ID NO: 857624 - DNA, 15 bp, Homo sapiens
ttgcctactgggaag

SEQ ID NO: 857625 - DNA, 15 bp, Homo sapiens
tgcctactgggaagg

SEQ ID NO: 857626 - DNA, 15 bp, Homo sapiens
gcctactgggaagga

SEQ ID NO: 857627 - DNA, 15 bp, Homo sapiens
cctactgggaaggat

SEQ ID NO: 857628 - DNA, 15 bp, Homo sapiens
ctactgggaaggatt

SEQ ID NO: 857629 - DNA, 15 bp, Homo sapiens
tactgggaaggattt

SEQ ID NO: 857630 - DNA, 15 bp, Homo sapiens
actgggaaggattta

SEQ ID NO: 857631 - DNA, 15 bp, Homo sapiens
ctgggaaggatttat

SEQ ID NO: 857632 - DNA, 15 bp, Homo sapiens
tgggaaggatttatg

SEQ ID NO: 857633 - DNA, 15 bp, Homo sapiens
gggaaggatttatga

SEQ ID NO: 857634 - DNA, 15 bp, Homo sapiens
ggaaggatttatgat

SEQ ID NO: 857635 - DNA, 15 bp, Homo sapiens
gaaggatttatgatt

SEQ ID NO: 857636 - DNA, 15 bp, Homo sapiens
aaggatttatgattt

SEQ ID NO: 857637 - DNA, 15 bp, Homo sapiens
aggatttatgattta

SEQ ID NO: 857638 - DNA, 15 bp, Homo sapiens
ggatttatgatttaa

SEQ ID NO: 857639 - DNA, 15 bp, Homo sapiens
gatttatgatttaaa

SEQ ID NO: 857640 - DNA, 15 bp, Homo sapiens
atttatgatttaaaa

SEQ ID NO: 857641 - DNA, 15 bp, Homo sapiens
tttatgatttaaaag

SEQ ID NO: 857642 - DNA, 15 bp, Homo sapiens
ttatgatttaaaagc

SEQ ID NO: 857643 - DNA, 15 bp, Homo sapiens
tatgatttaaaagcc

SEQ ID NO: 857644 - DNA, 15 bp, Homo sapiens
atgatttaaaagccc

SEQ ID NO: 857645 - DNA, 15 bp, Homo sapiens
tgatttaaaagccct

SEQ ID NO: 857646 - DNA, 15 bp, Homo sapiens
gatttaaaagcccta

SEQ ID NO: 857647 - DNA, 15 bp, Homo sapiens
atttaaaagccctaa

SEQ ID NO: 857648 - DNA, 15 bp, Homo sapiens
tttaaaagccctaaa

SEQ ID NO: 857649 - DNA, 15 bp, Homo sapiens
ttaaaagccctaaat

SEQ ID NO: 857650 - DNA, 15 bp, Homo sapiens
taaaagccctaaatc

SEQ ID NO: 857651 - DNA, 15 bp, Homo sapiens
aaaagccctaaatct

SEQ ID NO: 857652 - DNA, 15 bp, Homo sapiens
aaagccctaaatctc

SEQ ID NO: 857653 - DNA, 15 bp, Homo sapiens
aagccctaaatctcc

SEQ ID NO: 857654 - DNA, 15 bp, Homo sapiens
agccctaaatctccc

SEQ ID NO: 857655 - DNA, 15 bp, Homo sapiens
gccctaaatctcccc

SEQ ID NO: 857656 - DNA, 15 bp, Homo sapiens
ccctaaatctcccct

SEQ ID NO: 857657 - DNA, 15 bp, Homo sapiens
cctaaatctcccctt

SEQ ID NO: 857658 - DNA, 15 bp, Homo sapiens
ctaaatctccccttt

SEQ ID NO: 857659 - DNA, 15 bp, Homo sapiens
taaatctcccctttt

SEQ ID NO: 857660 - DNA, 15 bp, Homo sapiens
aaatctcccctttta

SEQ ID NO: 857661 - DNA, 15 bp, Homo sapiens
aatctccccttttat

SEQ ID NO: 857662 - DNA, 15 bp, Homo sapiens
atctccccttttatg

SEQ ID NO: 857663 - DNA, 15 bp, Homo sapiens
tctccccttttatgt

SEQ ID NO: 857664 - DNA, 15 bp, Homo sapiens
ctccccttttatgta

SEQ ID NO: 857665 - DNA, 15 bp, Homo sapiens
tccccttttatgtac

SEQ ID NO: 857666 - DNA, 15 bp, Homo sapiens
ccccttttatgtact

SEQ ID NO: 857667 - DNA, 15 bp, Homo sapiens
cccttttatgtactt

SEQ ID NO: 857668 - DNA, 15 bp, Homo sapiens
ccttttatgtacttc

SEQ ID NO: 857669 - DNA, 15 bp, Homo sapiens
cttttatgtacttca

SEQ ID NO: 857670 - DNA, 15 bp, Homo sapiens
ttttatgtacttcat

SEQ ID NO: 857671 - DNA, 15 bp, Homo sapiens
tttatgtacttcata

SEQ ID NO: 857672 - DNA, 15 bp, Homo sapiens
ttatgtacttcatac

SEQ ID NO: 857673 - DNA, 15 bp, Homo sapiens
tatgtacttcatact

SEQ ID NO: 857674 - DNA, 15 bp, Homo sapiens
atgtacttcatactt

SEQ ID NO: 857675 - DNA, 15 bp, Homo sapiens
tgtacttcatactta

SEQ ID NO: 857676 - DNA, 15 bp, Homo sapiens
gtacttcatacttag

SEQ ID NO: 857677 - DNA, 15 bp, Homo sapiens
tacttcatacttaga

SEQ ID NO: 857678 - DNA, 15 bp, Homo sapiens
acttcatacttagaa

SEQ ID NO: 857679 - DNA, 15 bp, Homo sapiens
cttcatacttagaaa

SEQ ID NO: 857680 - DNA, 15 bp, Homo sapiens
ttcatacttagaaaa

SEQ ID NO: 857681 - DNA, 15 bp, Homo sapiens
tcatacttagaaaat

SEQ ID NO: 857682 - DNA, 15 bp, Homo sapiens
catacttagaaaatt

SEQ ID NO: 857683 - DNA, 15 bp, Homo sapiens
atacttagaaaattt

SEQ ID NO: 857684 - DNA, 15 bp, Homo sapiens
tacttagaaaatttt

SEQ ID NO: 857685 - DNA, 15 bp, Homo sapiens
acttagaaaattttt

SEQ ID NO: 857686 - DNA, 15 bp, Homo sapiens
cttagaaaatttttc

SEQ ID NO: 857687 - DNA, 15 bp, Homo sapiens
ttagaaaatttttcc

SEQ ID NO: 857688 - DNA, 15 bp, Homo sapiens
tagaaaatttttcct

SEQ ID NO: 857689 - DNA, 15 bp, Homo sapiens
agaaaatttttcctg

SEQ ID NO: 857690 - DNA, 15 bp, Homo sapiens
gaaaatttttcctgt

SEQ ID NO: 857691 - DNA, 15 bp, Homo sapiens
aaaatttttcctgta

SEQ ID NO: 857692 - DNA, 15 bp, Homo sapiens
aaatttttcctgtaa

SEQ ID NO: 857693 - DNA, 15 bp, Homo sapiens
aatttttcctgtaaa

SEQ ID NO: 857694 - DNA, 15 bp, Homo sapiens
atttttcctgtaaac

SEQ ID NO: 857695 - DNA, 15 bp, Homo sapiens
tttttcctgtaaact

SEQ ID NO: 857696 - DNA, 15 bp, Homo sapiens
ttttcctgtaaactg

SEQ ID NO: 857697 - DNA, 15 bp, Homo sapiens
tttcctgtaaactgt

SEQ ID NO: 857698 - DNA, 15 bp, Homo sapiens
ttcctgtaaactgtg

SEQ ID NO: 857699 - DNA, 15 bp, Homo sapiens
tcctgtaaactgtgt

SEQ ID NO: 857700 - DNA, 15 bp, Homo sapiens
cctgtaaactgtgtg

SEQ ID NO: 857701 - DNA, 15 bp, Homo sapiens
ctgtaaactgtgtga

SEQ ID NO: 857702 - DNA, 15 bp, Homo sapiens
tgtaaactgtgtgac

SEQ ID NO: 857703 - DNA, 15 bp, Homo sapiens
gtaaactgtgtgact

SEQ ID NO: 857704 - DNA, 15 bp, Homo sapiens
taaactgtgtgactt

SEQ ID NO: 857705 - DNA, 15 bp, Homo sapiens
aaactgtgtgacttt

SEQ ID NO: 857706 - DNA, 15 bp, Homo sapiens
aactgtgtgactttt

SEQ ID NO: 857707 - DNA, 15 bp, Homo sapiens
actgtgtgacttttt

SEQ ID NO: 857708 - DNA, 15 bp, Homo sapiens
ctgtgtgactttttt

SEQ ID NO: 857709 - DNA, 15 bp, Homo sapiens
tgtgtgactttttta

SEQ ID NO: 857710 - DNA, 15 bp, Homo sapiens
gtgtgacttttttac

SEQ ID NO: 857711 - DNA, 15 bp, Homo sapiens
tgtgacttttttaca

SEQ ID NO: 857712 - DNA, 15 bp, Homo sapiens
gtgacttttttacat

SEQ ID NO: 857713 - DNA, 15 bp, Homo sapiens
tgacttttttacatt

SEQ ID NO: 857714 - DNA, 15 bp, Homo sapiens
gacttttttacattg

SEQ ID NO: 857715 - DNA, 15 bp, Homo sapiens
acttttttacattgt

SEQ ID NO: 857716 - DNA, 15 bp, Homo sapiens
cttttttacattgtg

SEQ ID NO: 857717 - DNA, 15 bp, Homo sapiens
ttttttacattgtgc

SEQ ID NO: 857718 - DNA, 15 bp, Homo sapiens
tttttacattgtgcc

SEQ ID NO: 857719 - DNA, 15 bp, Homo sapiens
ttttacattgtgcca

SEQ ID NO: 857720 - DNA, 15 bp, Homo sapiens
tttacattgtgccag

SEQ ID NO: 857721 - DNA, 15 bp, Homo sapiens
ttacattgtgccagt

SEQ ID NO: 857722 - DNA, 15 bp, Homo sapiens
tacattgtgccagtt

SEQ ID NO: 857723 - DNA, 15 bp, Homo sapiens
acattgtgccagttt

SEQ ID NO: 857724 - DNA, 15 bp, Homo sapiens
cattgtgccagtttt

SEQ ID NO: 857725 - DNA, 15 bp, Homo sapiens
attgtgccagttttc

SEQ ID NO: 857726 - DNA, 15 bp, Homo sapiens
ttgtgccagttttct

SEQ ID NO: 857727 - DNA, 15 bp, Homo sapiens
tgtgccagttttcta

SEQ ID NO: 857728 - DNA, 15 bp, Homo sapiens
gtgccagttttctag

SEQ ID NO: 857729 - DNA, 15 bp, Homo sapiens
tgccagttttctaga

SEQ ID NO: 857730 - DNA, 15 bp, Homo sapiens
gccagttttctagat

SEQ ID NO: 857731 - DNA, 15 bp, Homo sapiens
ccagttttctagatg

SEQ ID NO: 857732 - DNA, 15 bp, Homo sapiens
cagttttctagatga

SEQ ID NO: 857733 - DNA, 15 bp, Homo sapiens
agttttctagatgac

SEQ ID NO: 857734 - DNA, 15 bp, Homo sapiens
gttttctagatgact

SEQ ID NO: 857735 - DNA, 15 bp, Homo sapiens
ttttctagatgactc

SEQ ID NO: 857736 - DNA, 15 bp, Homo sapiens
tttctagatgactct

SEQ ID NO: 857737 - DNA, 15 bp, Homo sapiens
ttctagatgactctc

SEQ ID NO: 857738 - DNA, 15 bp, Homo sapiens
tctagatgactctcg

SEQ ID NO: 857739 - DNA, 15 bp, Homo sapiens
ctagatgactctcgt

SEQ ID NO: 857740 - DNA, 15 bp, Homo sapiens
tagatgactctcgtc

SEQ ID NO: 857741 - DNA, 15 bp, Homo sapiens
agatgactctcgtca

SEQ ID NO: 857742 - DNA, 15 bp, Homo sapiens
gatgactctcgtcat

SEQ ID NO: 857743 - DNA, 15 bp, Homo sapiens
atgactctcgtcata

SEQ ID NO: 857744 - DNA, 15 bp, Homo sapiens
catctcgcaaactat

SEQ ID NO: 857745 - DNA, 15 bp, Homo sapiens
atctcgcaaactatc

SEQ ID NO: 857746 - DNA, 15 bp, Homo sapiens
tctcgcaaactatca

SEQ ID NO: 857747 - DNA, 15 bp, Homo sapiens
ctcgcaaactatcac

SEQ ID NO: 857748 - DNA, 15 bp, Homo sapiens
tcgcaaactatcaca

SEQ ID NO: 857749 - DNA, 15 bp, Homo sapiens
cgcaaactatcacaa

SEQ ID NO: 857750 - DNA, 15 bp, Homo sapiens
gcaaactatcacaag

SEQ ID NO: 857751 - DNA, 15 bp, Homo sapiens
caaactatcacaaga

SEQ ID NO: 857752 - DNA, 15 bp, Homo sapiens
aaactatcacaagat

SEQ ID NO: 857753 - DNA, 15 bp, Homo sapiens
aactatcacaagatg

SEQ ID NO: 857754 - DNA, 15 bp, Homo sapiens
actatcacaagatgc

SEQ ID NO: 857755 - DNA, 15 bp, Homo sapiens
ctatcacaagatgct

SEQ ID NO: 857756 - DNA, 15 bp, Homo sapiens
tatcacaagatgctc

SEQ ID NO: 857757 - DNA, 15 bp, Homo sapiens
atcacaagatgctcc

SEQ ID NO: 857758 - DNA, 15 bp, Homo sapiens
tcacaagatgctcca

SEQ ID NO: 857759 - DNA, 15 bp, Homo sapiens
cacaagatgctccaa

SEQ ID NO: 857760 - DNA, 15 bp, Homo sapiens
acaagatgctccaaa

SEQ ID NO: 857761 - DNA, 15 bp, Homo sapiens
caagatgctccaaac

SEQ ID NO: 857762 - DNA, 15 bp, Homo sapiens
aagatgctccaaaca

SEQ ID NO: 857763 - DNA, 15 bp, Homo sapiens
agatgctccaaacat

SEQ ID NO: 857764 - DNA, 15 bp, Homo sapiens
gatgctccaaacata

SEQ ID NO: 857765 - DNA, 15 bp, Homo sapiens
atgctccaaacatac

SEQ ID NO: 857766 - DNA, 15 bp, Homo sapiens
tgctccaaacatact

SEQ ID NO: 857767 - DNA, 15 bp, Homo sapiens
gctccaaacatactt

SEQ ID NO: 857768 - DNA, 15 bp, Homo sapiens
ctccaaacatacttc

SEQ ID NO: 857769 - DNA, 15 bp, Homo sapiens
tccaaacatacttct

SEQ ID NO: 857770 - DNA, 15 bp, Homo sapiens
ccaaacatacttctt

SEQ ID NO: 857771 - DNA, 15 bp, Homo sapiens
caaacatacttctta

SEQ ID NO: 857772 - DNA, 15 bp, Homo sapiens
aaacatacttcttat

SEQ ID NO: 857773 - DNA, 15 bp, Homo sapiens
aacatacttcttatg

SEQ ID NO: 857774 - DNA, 15 bp, Homo sapiens
acatacttcttatgt

SEQ ID NO: 857775 - DNA, 15 bp, Homo sapiens
catacttcttatgtg

SEQ ID NO: 857776 - DNA, 15 bp, Homo sapiens
atacttcttatgtgc

SEQ ID NO: 857777 - DNA, 15 bp, Homo sapiens
tacttcttatgtgct

SEQ ID NO: 857778 - DNA, 15 bp, Homo sapiens
acttcttatgtgctg

SEQ ID NO: 857779 - DNA, 15 bp, Homo sapiens
cttcttatgtgctga

SEQ ID NO: 857780 - DNA, 15 bp, Homo sapiens
ttcttatgtgctgaa

SEQ ID NO: 857781 - DNA, 15 bp, Homo sapiens
tcttatgtgctgaat

SEQ ID NO: 857782 - DNA, 15 bp, Homo sapiens
cttatgtgctgaatt

SEQ ID NO: 857783 - DNA, 15 bp, Homo sapiens
ttatgtgctgaatta

SEQ ID NO: 857784 - DNA, 15 bp, Homo sapiens
tatgtgctgaattaa

SEQ ID NO: 857785 - DNA, 15 bp, Homo sapiens
atgtgctgaattaag

SEQ ID NO: 857786 - DNA, 15 bp, Homo sapiens
tgtgctgaattaaga

SEQ ID NO: 857787 - DNA, 15 bp, Homo sapiens
gtgctgaattaagaa

SEQ ID NO: 857788 - DNA, 15 bp, Homo sapiens
tgctgaattaagaag

SEQ ID NO: 857789 - DNA, 15 bp, Homo sapiens
gctgaattaagaagt

SEQ ID NO: 857790 - DNA, 15 bp, Homo sapiens
ctgaattaagaagtc

SEQ ID NO: 857791 - DNA, 15 bp, Homo sapiens
tgaattaagaagtca

SEQ ID NO: 857792 - DNA, 15 bp, Homo sapiens
gaattaagaagtcaa

SEQ ID NO: 857793 - DNA, 15 bp, Homo sapiens
aattaagaagtcaac

SEQ ID NO: 857794 - DNA, 15 bp, Homo sapiens
attaagaagtcaact

SEQ ID NO: 857795 - DNA, 15 bp, Homo sapiens
ttaagaagtcaactc

SEQ ID NO: 857796 - DNA, 15 bp, Homo sapiens
taagaagtcaactca

SEQ ID NO: 857797 - DNA, 15 bp, Homo sapiens
aagaagtcaactcaa

SEQ ID NO: 857798 - DNA, 15 bp, Homo sapiens
agaagtcaactcaaa

SEQ ID NO: 857799 - DNA, 15 bp, Homo sapiens
gaagtcaactcaaat

SEQ ID NO: 857800 - DNA, 15 bp, Homo sapiens
aagtcaactcaaatt

SEQ ID NO: 857801 - DNA, 15 bp, Homo sapiens
agtcaactcaaattt

SEQ ID NO: 857802 - DNA, 15 bp, Homo sapiens
gtcaactcaaattta

SEQ ID NO: 857803 - DNA, 15 bp, Homo sapiens
tcaactcaaatttag

SEQ ID NO: 857804 - DNA, 15 bp, Homo sapiens
caactcaaatttagt

SEQ ID NO: 857805 - DNA, 15 bp, Homo sapiens
aactcaaatttagta

SEQ ID NO: 857806 - DNA, 15 bp, Homo sapiens
actcaaatttagtat

SEQ ID NO: 857807 - DNA, 15 bp, Homo sapiens
ctcaaatttagtata

SEQ ID NO: 857808 - DNA, 15 bp, Homo sapiens
tcaaatttagtatac

SEQ ID NO: 857809 - DNA, 15 bp, Homo sapiens
caaatttagtatact

SEQ ID NO: 857810 - DNA, 15 bp, Homo sapiens
aaatttagtatacta

SEQ ID NO: 857811 - DNA, 15 bp, Homo sapiens
aatttagtatactag

SEQ ID NO: 857812 - DNA, 15 bp, Homo sapiens
atttagtatactagt

SEQ ID NO: 857813 - DNA, 15 bp, Homo sapiens
tttagtatactagta

SEQ ID NO: 857814 - DNA, 15 bp, Homo sapiens
ttagtatactagtaa

SEQ ID NO: 857815 - DNA, 15 bp, Homo sapiens
tagtatactagtaat

SEQ ID NO: 857816 - DNA, 15 bp, Homo sapiens
agtatactagtaata

SEQ ID NO: 857817 - DNA, 15 bp, Homo sapiens
gtatactagtaatat

SEQ ID NO: 857818 - DNA, 15 bp, Homo sapiens
tatactagtaatatt

SEQ ID NO: 857819 - DNA, 15 bp, Homo sapiens
atactagtaatattt

SEQ ID NO: 857820 - DNA, 15 bp, Homo sapiens
tactagtaatatttt

SEQ ID NO: 857821 - DNA, 15 bp, Homo sapiens
actagtaatattttt

SEQ ID NO: 857822 - DNA, 15 bp, Homo sapiens
ctagtaatatttttg

SEQ ID NO: 857823 - DNA, 15 bp, Homo sapiens
tagtaatatttttgg

SEQ ID NO: 857824 - DNA, 15 bp, Homo sapiens
agtaatatttttgga

SEQ ID NO: 857825 - DNA, 15 bp, Homo sapiens
gtaatatttttggat

SEQ ID NO: 857826 - DNA, 15 bp, Homo sapiens
taatatttttggata

SEQ ID NO: 857827 - DNA, 15 bp, Homo sapiens
aatatttttggatat

SEQ ID NO: 857828 - DNA, 15 bp, Homo sapiens
atatttttggatatc

SEQ ID NO: 857829 - DNA, 15 bp, Homo sapiens
tatttttggatatcc

SEQ ID NO: 857830 - DNA, 15 bp, Homo sapiens
atttttggatatccc

SEQ ID NO: 857831 - DNA, 15 bp, Homo sapiens
tttttggatatccca

SEQ ID NO: 857832 - DNA, 15 bp, Homo sapiens
ttttggatatcccaa

SEQ ID NO: 857833 - DNA, 15 bp, Homo sapiens
tttggatatcccaaa

SEQ ID NO: 857834 - DNA, 15 bp, Homo sapiens
ttggatatcccaaaa

SEQ ID NO: 857835 - DNA, 15 bp, Homo sapiens
tggatatcccaaaac

SEQ ID NO: 857836 - DNA, 15 bp, Homo sapiens
ggatatcccaaaaca

SEQ ID NO: 857837 - DNA, 15 bp, Homo sapiens
gatatcccaaaacac

SEQ ID NO: 857838 - DNA, 15 bp, Homo sapiens
atatcccaaaacact

SEQ ID NO: 857839 - DNA, 15 bp, Homo sapiens
tatcccaaaacactg

SEQ ID NO: 857840 - DNA, 15 bp, Homo sapiens
atcccaaaacactgc

SEQ ID NO: 857841 - DNA, 15 bp, Homo sapiens
tcccaaaacactgcc

SEQ ID NO: 857842 - DNA, 15 bp, Homo sapiens
cccaaaacactgcca

SEQ ID NO: 857843 - DNA, 15 bp, Homo sapiens
ccaaaacactgccag

SEQ ID NO: 857844 - DNA, 15 bp, Homo sapiens
caaaacactgccagc

SEQ ID NO: 857845 - DNA, 15 bp, Homo sapiens
aaaacactgccagct

SEQ ID NO: 857846 - DNA, 15 bp, Homo sapiens
aaacactgccagctc

SEQ ID NO: 857847 - DNA, 15 bp, Homo sapiens
aacactgccagctca

SEQ ID NO: 857848 - DNA, 15 bp, Homo sapiens
acactgccagctcag

SEQ ID NO: 857849 - DNA, 15 bp, Homo sapiens
cactgccagctcagc

SEQ ID NO: 857850 - DNA, 15 bp, Homo sapiens
actgccagctcagct

SEQ ID NO: 857851 - DNA, 15 bp, Homo sapiens
ctgccagctcagctt

SEQ ID NO: 857852 - DNA, 15 bp, Homo sapiens
tgccagctcagcttt

SEQ ID NO: 857853 - DNA, 15 bp, Homo sapiens
gccagctcagcttta

SEQ ID NO: 857854 - DNA, 15 bp, Homo sapiens
ccagctcagctttag

SEQ ID NO: 857855 - DNA, 15 bp, Homo sapiens
cagctcagctttagg

SEQ ID NO: 857856 - DNA, 15 bp, Homo sapiens
agctcagctttaggc

SEQ ID NO: 857857 - DNA, 15 bp, Homo sapiens
gctcagctttaggct

SEQ ID NO: 857858 - DNA, 15 bp, Homo sapiens
ctcagctttaggctg

SEQ ID NO: 857859 - DNA, 15 bp, Homo sapiens
tcagctttaggctgc

SEQ ID NO: 857860 - DNA, 15 bp, Homo sapiens
cagctttaggctgcc

SEQ ID NO: 857861 - DNA, 15 bp, Homo sapiens
agctttaggctgccc

SEQ ID NO: 857862 - DNA, 15 bp, Homo sapiens
gctttaggctgccct

SEQ ID NO: 857863 - DNA, 15 bp, Homo sapiens
ctttaggctgccctt

SEQ ID NO: 857864 - DNA, 15 bp, Homo sapiens
tttaggctgcccttc

SEQ ID NO: 857865 - DNA, 15 bp, Homo sapiens
ttaggctgcccttct

SEQ ID NO: 857866 - DNA, 15 bp, Homo sapiens
taggctgcccttctt

SEQ ID NO: 857867 - DNA, 15 bp, Homo sapiens
aggctgcccttcttg

SEQ ID NO: 857868 - DNA, 15 bp, Homo sapiens
ggctgcccttcttgg

SEQ ID NO: 857869 - DNA, 15 bp, Homo sapiens
gctgcccttcttggg

SEQ ID NO: 857870 - DNA, 15 bp, Homo sapiens
ctgcccttcttgggg

SEQ ID NO: 857871 - DNA, 15 bp, Homo sapiens
tgcccttcttggggg

SEQ ID NO: 857872 - DNA, 15 bp, Homo sapiens
gcccttcttgggggg

SEQ ID NO: 857873 - DNA, 15 bp, Homo sapiens
cccttcttggggggg

SEQ ID NO: 857874 - DNA, 15 bp, Homo sapiens
ccttcttggggggga

SEQ ID NO: 857875 - DNA, 15 bp, Homo sapiens
cttcttgggggggaa

SEQ ID NO: 857876 - DNA, 15 bp, Homo sapiens
ttcttgggggggaaa

SEQ ID NO: 857877 - DNA, 15 bp, Homo sapiens
tcttgggggggaaaa

SEQ ID NO: 857878 - DNA, 15 bp, Homo sapiens
cttgggggggaaaaa

SEQ ID NO: 857879 - DNA, 15 bp, Homo sapiens
ttgggggggaaaaaa

SEQ ID NO: 857880 - DNA, 15 bp, Homo sapiens
tgggggggaaaaaag

SEQ ID NO: 857881 - DNA, 15 bp, Homo sapiens
gggggggaaaaaagc

SEQ ID NO: 857882 - DNA, 15 bp, Homo sapiens
ggggggaaaaaagca

SEQ ID NO: 857883 - DNA, 15 bp, Homo sapiens
gggggaaaaaagcag

SEQ ID NO: 857884 - DNA, 15 bp, Homo sapiens
ggggaaaaaagcagt

SEQ ID NO: 857885 - DNA, 15 bp, Homo sapiens
gggaaaaaagcagtt

SEQ ID NO: 857886 - DNA, 15 bp, Homo sapiens
ggaaaaaagcagttg

SEQ ID NO: 857887 - DNA, 15 bp, Homo sapiens
gaaaaaagcagttga

SEQ ID NO: 857888 - DNA, 15 bp, Homo sapiens
aaaaaagcagttgaa

SEQ ID NO: 857889 - DNA, 15 bp, Homo sapiens
aaaaagcagttgaaa

SEQ ID NO: 857890 - DNA, 15 bp, Homo sapiens
aaaagcagttgaaat

SEQ ID NO: 857891 - DNA, 15 bp, Homo sapiens
aaagcagttgaaatt

SEQ ID NO: 857892 - DNA, 15 bp, Homo sapiens
aagcagttgaaattt

SEQ ID NO: 857893 - DNA, 15 bp, Homo sapiens
agcagttgaaattta

SEQ ID NO: 857894 - DNA, 15 bp, Homo sapiens
gcagttgaaatttag

SEQ ID NO: 857895 - DNA, 15 bp, Homo sapiens
cagttgaaatttagg

SEQ ID NO: 857896 - DNA, 15 bp, Homo sapiens
agttgaaatttagga

SEQ ID NO: 857897 - DNA, 15 bp, Homo sapiens
gttgaaatttaggac

SEQ ID NO: 857898 - DNA, 15 bp, Homo sapiens
ttgaaatttaggact

SEQ ID NO: 857899 - DNA, 15 bp, Homo sapiens
tgaaatttaggactt

SEQ ID NO: 857900 - DNA, 15 bp, Homo sapiens
gaaatttaggactta

SEQ ID NO: 857901 - DNA, 15 bp, Homo sapiens
aaatttaggacttaa

SEQ ID NO: 857902 - DNA, 15 bp, Homo sapiens
aatttaggacttaag

SEQ ID NO: 857903 - DNA, 15 bp, Homo sapiens
atttaggacttaagt

SEQ ID NO: 857904 - DNA, 15 bp, Homo sapiens
tttaggacttaagtg

SEQ ID NO: 857905 - DNA, 15 bp, Homo sapiens
ttaggacttaagtgg

SEQ ID NO: 857906 - DNA, 15 bp, Homo sapiens
taggacttaagtggg

SEQ ID NO: 857907 - DNA, 15 bp, Homo sapiens
aggacttaagtgggc

SEQ ID NO: 857908 - DNA, 15 bp, Homo sapiens
ggacttaagtgggca

SEQ ID NO: 857909 - DNA, 15 bp, Homo sapiens
gacttaagtgggcat

SEQ ID NO: 857910 - DNA, 15 bp, Homo sapiens
acttaagtgggcatc

SEQ ID NO: 857911 - DNA, 15 bp, Homo sapiens
cttaagtgggcatct

SEQ ID NO: 857912 - DNA, 15 bp, Homo sapiens
ttaagtgggcatctc

SEQ ID NO: 857913 - DNA, 15 bp, Homo sapiens
taagtgggcatctcg

SEQ ID NO: 857914 - DNA, 15 bp, Homo sapiens
aagtgggcatctcgt

SEQ ID NO: 857915 - DNA, 15 bp, Homo sapiens
agtgggcatctcgtt

SEQ ID NO: 857916 - DNA, 15 bp, Homo sapiens
gtgggcatctcgttt

SEQ ID NO: 857917 - DNA, 15 bp, Homo sapiens
tgggcatctcgttta

SEQ ID NO: 857918 - DNA, 15 bp, Homo sapiens
gggcatctcgtttaa

SEQ ID NO: 857919 - DNA, 15 bp, Homo sapiens
ggcatctcgtttaat

SEQ ID NO: 857920 - DNA, 15 bp, Homo sapiens
gcatctcgtttaatt

SEQ ID NO: 857921 - DNA, 15 bp, Homo sapiens
catctcgtttaattt

SEQ ID NO: 857922 - DNA, 15 bp, Homo sapiens
atctcgtttaatttt

SEQ ID NO: 857923 - DNA, 15 bp, Homo sapiens
tctcgtttaattttt

SEQ ID NO: 857924 - DNA, 15 bp, Homo sapiens
ctcgtttaattttta

SEQ ID NO: 857925 - DNA, 15 bp, Homo sapiens
tcgtttaatttttaa

SEQ ID NO: 857926 - DNA, 15 bp, Homo sapiens
cgtttaatttttaat

SEQ ID NO: 857927 - DNA, 15 bp, Homo sapiens
gtttaatttttaatg

SEQ ID NO: 857928 - DNA, 15 bp, Homo sapiens
tttaatttttaatgg

SEQ ID NO: 857929 - DNA, 15 bp, Homo sapiens
ttaatttttaatgga

SEQ ID NO: 857930 - DNA, 15 bp, Homo sapiens
taatttttaatggat

SEQ ID NO: 857931 - DNA, 15 bp, Homo sapiens
aatttttaatggatt

SEQ ID NO: 857932 - DNA, 15 bp, Homo sapiens
atttttaatggattt

SEQ ID NO: 857933 - DNA, 15 bp, Homo sapiens
tttttaatggatttc

SEQ ID NO: 857934 - DNA, 15 bp, Homo sapiens
ttttaatggatttct

SEQ ID NO: 857935 - DNA, 15 bp, Homo sapiens
tttaatggatttcta

SEQ ID NO: 857936 - DNA, 15 bp, Homo sapiens
ttaatggatttctat

SEQ ID NO: 857937 - DNA, 15 bp, Homo sapiens
taatggatttctatg

SEQ ID NO: 857938 - DNA, 15 bp, Homo sapiens
aatggatttctatgt

SEQ ID NO: 857939 - DNA, 15 bp, Homo sapiens
atggatttctatgtt

SEQ ID NO: 857940 - DNA, 15 bp, Homo sapiens
tggatttctatgttg

SEQ ID NO: 857941 - DNA, 15 bp, Homo sapiens
ggatttctatgttgt

SEQ ID NO: 857942 - DNA, 15 bp, Homo sapiens
gatttctatgttgtt

SEQ ID NO: 857943 - DNA, 15 bp, Homo sapiens
atttctatgttgttg

SEQ ID NO: 857944 - DNA, 15 bp, Homo sapiens
tttctatgttgttgg

SEQ ID NO: 857945 - DNA, 15 bp, Homo sapiens
ttctatgttgttggt

SEQ ID NO: 857946 - DNA, 15 bp, Homo sapiens
tctatgttgttggtt

SEQ ID NO: 857947 - DNA, 15 bp, Homo sapiens
ctatgttgttggtta

SEQ ID NO: 857948 - DNA, 15 bp, Homo sapiens
tatgttgttggttat

SEQ ID NO: 857949 - DNA, 15 bp, Homo sapiens
atgttgttggttatg

SEQ ID NO: 857950 - DNA, 15 bp, Homo sapiens
tgttgttggttatgg

SEQ ID NO: 857951 - DNA, 15 bp, Homo sapiens
gttgttggttatggt

SEQ ID NO: 857952 - DNA, 15 bp, Homo sapiens
ttgttggttatggtg

SEQ ID NO: 857953 - DNA, 15 bp, Homo sapiens
tgttggttatggtga

SEQ ID NO: 857954 - DNA, 15 bp, Homo sapiens
gttggttatggtgaa

SEQ ID NO: 857955 - DNA, 15 bp, Homo sapiens
ttggttatggtgaag

SEQ ID NO: 857956 - DNA, 15 bp, Homo sapiens
tggttatggtgaaga

SEQ ID NO: 857957 - DNA, 15 bp, Homo sapiens
ggttatggtgaagag

SEQ ID NO: 857958 - DNA, 15 bp, Homo sapiens
gttatggtgaagagg

SEQ ID NO: 857959 - DNA, 15 bp, Homo sapiens
ttatggtgaagaggt

SEQ ID NO: 857960 - DNA, 15 bp, Homo sapiens
tatggtgaagaggtg

SEQ ID NO: 857961 - DNA, 15 bp, Homo sapiens
atggtgaagaggtga

SEQ ID NO: 857962 - DNA, 15 bp, Homo sapiens
tggtgaagaggtgaa

SEQ ID NO: 857963 - DNA, 15 bp, Homo sapiens
ggtgaagaggtgaaa

SEQ ID NO: 857964 - DNA, 15 bp, Homo sapiens
gtgaagaggtgaaaa

SEQ ID NO: 857965 - DNA, 15 bp, Homo sapiens
tgaagaggtgaaaag

SEQ ID NO: 857966 - DNA, 15 bp, Homo sapiens
gaagaggtgaaaaga

SEQ ID NO: 857967 - DNA, 15 bp, Homo sapiens
aagaggtgaaaagaa

SEQ ID NO: 857968 - DNA, 15 bp, Homo sapiens
agaggtgaaaagaat

SEQ ID NO: 857969 - DNA, 15 bp, Homo sapiens
gaggtgaaaagaata

SEQ ID NO: 857970 - DNA, 15 bp, Homo sapiens
aggtgaaaagaataa

SEQ ID NO: 857971 - DNA, 15 bp, Homo sapiens
ggtgaaaagaataaa

SEQ ID NO: 857972 - DNA, 15 bp, Homo sapiens
gtgaaaagaataaat

SEQ ID NO: 857973 - DNA, 15 bp, Homo sapiens
tgaaaagaataaata

SEQ ID NO: 857974 - DNA, 15 bp, Homo sapiens
gaaaagaataaatat

SEQ ID NO: 857975 - DNA, 15 bp, Homo sapiens
aaaagaataaatatt

SEQ ID NO: 857976 - DNA, 15 bp, Homo sapiens
aaagaataaatattc

SEQ ID NO: 857977 - DNA, 15 bp, Homo sapiens
aagaataaatattct

SEQ ID NO: 857978 - DNA, 15 bp, Homo sapiens
agaataaatattctg

SEQ ID NO: 857979 - DNA, 15 bp, Homo sapiens
gaataaatattctgt

SEQ ID NO: 857980 - DNA, 15 bp, Homo sapiens
aataaatattctgtg

SEQ ID NO: 857981 - DNA, 15 bp, Homo sapiens
ataaatattctgtgc

SEQ ID NO: 857982 - DNA, 15 bp, Homo sapiens
taaatattctgtgca

SEQ ID NO: 857983 - DNA, 15 bp, Homo sapiens
aaatattctgtgcag

SEQ ID NO: 857984 - DNA, 15 bp, Homo sapiens
aatattctgtgcaga

SEQ ID NO: 857985 - DNA, 15 bp, Homo sapiens
atattctgtgcagaa

SEQ ID NO: 857986 - DNA, 15 bp, Homo sapiens
tattctgtgcagaaa

SEQ ID NO: 857987 - DNA, 15 bp, Homo sapiens
attctgtgcagaaaa

SEQ ID NO: 857988 - DNA, 15 bp, Homo sapiens
ttctgtgcagaaaaa

SEQ ID NO: 857989 - DNA, 15 bp, Homo sapiens
tctgtgcagaaaaat

SEQ ID NO: 857990 - DNA, 15 bp, Homo sapiens
ctgtgcagaaaaatt

SEQ ID NO: 857991 - DNA, 15 bp, Homo sapiens
tgtgcagaaaaatta

SEQ ID NO: 857992 - DNA, 15 bp, Homo sapiens
gtgcagaaaaattat

SEQ ID NO: 857993 - DNA, 15 bp, Homo sapiens
tgcagaaaaattatt

SEQ ID NO: 857994 - DNA, 15 bp, Homo sapiens
gcagaaaaattattc

SEQ ID NO: 857995 - DNA, 15 bp, Homo sapiens
cagaaaaattattca

SEQ ID NO: 857996 - DNA, 15 bp, Homo sapiens
agaaaaattattcag

SEQ ID NO: 857997 - DNA, 15 bp, Homo sapiens
gaaaaattattcagt

SEQ ID NO: 857998 - DNA, 15 bp, Homo sapiens
aaaaattattcagtc

SEQ ID NO: 857999 - DNA, 15 bp, Homo sapiens
aaaattattcagtct

SEQ ID NO: 858000 - DNA, 15 bp, Homo sapiens
aaattattcagtctt

SEQ ID NO: 858001 - DNA, 15 bp, Homo sapiens
aattattcagtcttc

SEQ ID NO: 858002 - DNA, 15 bp, Homo sapiens
attattcagtcttca

SEQ ID NO: 858003 - DNA, 15 bp, Homo sapiens
ttattcagtcttcat

SEQ ID NO: 858004 - DNA, 15 bp, Homo sapiens
tattcagtcttcatg

SEQ ID NO: 858005 - DNA, 15 bp, Homo sapiens
attcagtcttcatgt

SEQ ID NO: 858006 - DNA, 15 bp, Homo sapiens
ttcagtcttcatgtg

SEQ ID NO: 858007 - DNA, 15 bp, Homo sapiens
tcagtcttcatgtga

SEQ ID NO: 858008 - DNA, 15 bp, Homo sapiens
cagtcttcatgtgaa

SEQ ID NO: 858009 - DNA, 15 bp, Homo sapiens
agtcttcatgtgaaa

SEQ ID NO: 858010 - DNA, 15 bp, Homo sapiens
gtcttcatgtgaaaa

SEQ ID NO: 858011 - DNA, 15 bp, Homo sapiens
tcttcatgtgaaaac

SEQ ID NO: 858012 - DNA, 15 bp, Homo sapiens
cttcatgtgaaaaca

SEQ ID NO: 858013 - DNA, 15 bp, Homo sapiens
ttcatgtgaaaacac

SEQ ID NO: 858014 - DNA, 15 bp, Homo sapiens
tcatgtgaaaacact

SEQ ID NO: 858015 - DNA, 15 bp, Homo sapiens
catgtgaaaacactt

SEQ ID NO: 858016 - DNA, 15 bp, Homo sapiens
atgtgaaaacacttt

SEQ ID NO: 858017 - DNA, 15 bp, Homo sapiens
tgtgaaaacactttg

SEQ ID NO: 858018 - DNA, 15 bp, Homo sapiens
gtgaaaacactttgt

SEQ ID NO: 858019 - DNA, 15 bp, Homo sapiens
tgaaaacactttgtc

SEQ ID NO: 858020 - DNA, 15 bp, Homo sapiens
gaaaacactttgtcc

SEQ ID NO: 858021 - DNA, 15 bp, Homo sapiens
aaaacactttgtcca

SEQ ID NO: 858022 - DNA, 15 bp, Homo sapiens
aaacactttgtccat

SEQ ID NO: 858023 - DNA, 15 bp, Homo sapiens
aacactttgtccata

SEQ ID NO: 858024 - DNA, 15 bp, Homo sapiens
acactttgtccatag

SEQ ID NO: 858025 - DNA, 15 bp, Homo sapiens
cactttgtccatagc

SEQ ID NO: 858026 - DNA, 15 bp, Homo sapiens
actttgtccatagca

SEQ ID NO: 858027 - DNA, 15 bp, Homo sapiens
ctttgtccatagcaa

SEQ ID NO: 858028 - DNA, 15 bp, Homo sapiens
tttgtccatagcaat

SEQ ID NO: 858029 - DNA, 15 bp, Homo sapiens
ttgtccatagcaatt

SEQ ID NO: 858030 - DNA, 15 bp, Homo sapiens
tgtccatagcaatta

SEQ ID NO: 858031 - DNA, 15 bp, Homo sapiens
gtccatagcaattac

SEQ ID NO: 858032 - DNA, 15 bp, Homo sapiens
tccatagcaattact

SEQ ID NO: 858033 - DNA, 15 bp, Homo sapiens
ccatagcaattactt

SEQ ID NO: 858034 - DNA, 15 bp, Homo sapiens
catagcaattacttt

SEQ ID NO: 858035 - DNA, 15 bp, Homo sapiens
atagcaattacttta

SEQ ID NO: 858036 - DNA, 15 bp, Homo sapiens
tagcaattactttat

SEQ ID NO: 858037 - DNA, 15 bp, Homo sapiens
agcaattactttatg

SEQ ID NO: 858038 - DNA, 15 bp, Homo sapiens
gcaattactttatga

SEQ ID NO: 858039 - DNA, 15 bp, Homo sapiens
caattactttatgaa

SEQ ID NO: 858040 - DNA, 15 bp, Homo sapiens
aattactttatgaaa

SEQ ID NO: 858041 - DNA, 15 bp, Homo sapiens
attactttatgaaaa

SEQ ID NO: 858042 - DNA, 15 bp, Homo sapiens
ttactttatgaaaaa

SEQ ID NO: 858043 - DNA, 15 bp, Homo sapiens
tactttatgaaaaag

SEQ ID NO: 858044 - DNA, 15 bp, Homo sapiens
actttatgaaaaaga

SEQ ID NO: 858045 - DNA, 15 bp, Homo sapiens
ctttatgaaaaagat

SEQ ID NO: 858046 - DNA, 15 bp, Homo sapiens
tttatgaaaaagatg

SEQ ID NO: 858047 - DNA, 15 bp, Homo sapiens
ttatgaaaaagatgt

SEQ ID NO: 858048 - DNA, 15 bp, Homo sapiens
tatgaaaaagatgtg

SEQ ID NO: 858049 - DNA, 15 bp, Homo sapiens
atgaaaaagatgtgg

SEQ ID NO: 858050 - DNA, 15 bp, Homo sapiens
tgaaaaagatgtggt

SEQ ID NO: 858051 - DNA, 15 bp, Homo sapiens
gaaaaagatgtggta

SEQ ID NO: 858052 - DNA, 15 bp, Homo sapiens
aaaaagatgtggtat

SEQ ID NO: 858053 - DNA, 15 bp, Homo sapiens
aaaagatgtggtatt

SEQ ID NO: 858054 - DNA, 15 bp, Homo sapiens
aaagatgtggtatta

SEQ ID NO: 858055 - DNA, 15 bp, Homo sapiens
aagatgtggtattac

SEQ ID NO: 858056 - DNA, 15 bp, Homo sapiens
agatgtggtattact

SEQ ID NO: 858057 - DNA, 15 bp, Homo sapiens
gatgtggtattactt

SEQ ID NO: 858058 - DNA, 15 bp, Homo sapiens
atgtggtattacttt

SEQ ID NO: 858059 - DNA, 15 bp, Homo sapiens
tgtggtattactttc

SEQ ID NO: 858060 - DNA, 15 bp, Homo sapiens
gtggtattactttct

SEQ ID NO: 858061 - DNA, 15 bp, Homo sapiens
tggtattactttctt

SEQ ID NO: 858062 - DNA, 15 bp, Homo sapiens
ggtattactttcttt

SEQ ID NO: 858063 - DNA, 15 bp, Homo sapiens
gtattactttctttg

SEQ ID NO: 858064 - DNA, 15 bp, Homo sapiens
tattactttctttgc

SEQ ID NO: 858065 - DNA, 15 bp, Homo sapiens
attactttctttgct

SEQ ID NO: 858066 - DNA, 15 bp, Homo sapiens
ttactttctttgctc

SEQ ID NO: 858067 - DNA, 15 bp, Homo sapiens
tactttctttgctct

SEQ ID NO: 858068 - DNA, 15 bp, Homo sapiens
actttctttgctctt

SEQ ID NO: 858069 - DNA, 15 bp, Homo sapiens
ctttctttgctctta

SEQ ID NO: 858070 - DNA, 15 bp, Homo sapiens
tttctttgctcttaa

SEQ ID NO: 858071 - DNA, 15 bp, Homo sapiens
ttctttgctcttaac

SEQ ID NO: 858072 - DNA, 15 bp, Homo sapiens
tctttgctcttaact

SEQ ID NO: 858073 - DNA, 15 bp, Homo sapiens
ctttgctcttaactg

SEQ ID NO: 858074 - DNA, 15 bp, Homo sapiens
tttgctcttaactga

SEQ ID NO: 858075 - DNA, 15 bp, Homo sapiens
ttgctcttaactgag

SEQ ID NO: 858076 - DNA, 15 bp, Homo sapiens
tgctcttaactgaga

SEQ ID NO: 858077 - DNA, 15 bp, Homo sapiens
gctcttaactgagac

SEQ ID NO: 858078 - DNA, 15 bp, Homo sapiens
ctcttaactgagacc

SEQ ID NO: 858079 - DNA, 15 bp, Homo sapiens
tcttaactgagacct

SEQ ID NO: 858080 - DNA, 15 bp, Homo sapiens
cttaactgagacctt

SEQ ID NO: 858081 - DNA, 15 bp, Homo sapiens
ttaactgagaccttt

SEQ ID NO: 858082 - DNA, 15 bp, Homo sapiens
taactgagaccttta

SEQ ID NO: 858083 - DNA, 15 bp, Homo sapiens
aactgagacctttaa

SEQ ID NO: 858084 - DNA, 15 bp, Homo sapiens
actgagacctttaat

SEQ ID NO: 858085 - DNA, 15 bp, Homo sapiens
ctgagacctttaatt

SEQ ID NO: 858086 - DNA, 15 bp, Homo sapiens
tgagacctttaattt

SEQ ID NO: 858087 - DNA, 15 bp, Homo sapiens
gagacctttaattta

SEQ ID NO: 858088 - DNA, 15 bp, Homo sapiens
agacctttaatttaa

SEQ ID NO: 858089 - DNA, 15 bp, Homo sapiens
gacctttaatttaaa

SEQ ID NO: 858090 - DNA, 15 bp, Homo sapiens
acctttaatttaaag

SEQ ID NO: 858091 - DNA, 15 bp, Homo sapiens
cctttaatttaaaga

SEQ ID NO: 858092 - DNA, 15 bp, Homo sapiens
ctttaatttaaagaa

SEQ ID NO: 858093 - DNA, 15 bp, Homo sapiens
tttaatttaaagaac

SEQ ID NO: 858094 - DNA, 15 bp, Homo sapiens
ttaatttaaagaacc

SEQ ID NO: 858095 - DNA, 15 bp, Homo sapiens
taatttaaagaacct

SEQ ID NO: 858096 - DNA, 15 bp, Homo sapiens
aatttaaagaaccta

SEQ ID NO: 858097 - DNA, 15 bp, Homo sapiens
atttaaagaacctat

SEQ ID NO: 858098 - DNA, 15 bp, Homo sapiens
tttaaagaacctata

SEQ ID NO: 858099 - DNA, 15 bp, Homo sapiens
ttaaagaacctatac

SEQ ID NO: 858100 - DNA, 15 bp, Homo sapiens
taaagaacctatact

SEQ ID NO: 858101 - DNA, 15 bp, Homo sapiens
aaagaacctatactt

SEQ ID NO: 858102 - DNA, 15 bp, Homo sapiens
aagaacctatacttt

SEQ ID NO: 858103 - DNA, 15 bp, Homo sapiens
agaacctatacttta

SEQ ID NO: 858104 - DNA, 15 bp, Homo sapiens
gaacctatactttac

SEQ ID NO: 858105 - DNA, 15 bp, Homo sapiens
aacctatactttaca

SEQ ID NO: 858106 - DNA, 15 bp, Homo sapiens
acctatactttacaa

SEQ ID NO: 858107 - DNA, 15 bp, Homo sapiens
cctatactttacaag

SEQ ID NO: 858108 - DNA, 15 bp, Homo sapiens
ctatactttacaagt

SEQ ID NO: 858109 - DNA, 15 bp, Homo sapiens
tatactttacaagtt

SEQ ID NO: 858110 - DNA, 15 bp, Homo sapiens
atactttacaagttt

SEQ ID NO: 858111 - DNA, 15 bp, Homo sapiens
tactttacaagtttt

SEQ ID NO: 858112 - DNA, 15 bp, Homo sapiens
actttacaagttttt

SEQ ID NO: 858113 - DNA, 15 bp, Homo sapiens
ctttacaagttttta

SEQ ID NO: 858114 - DNA, 15 bp, Homo sapiens
tttacaagtttttat

SEQ ID NO: 858115 - DNA, 15 bp, Homo sapiens
ttacaagtttttatt

SEQ ID NO: 858116 - DNA, 15 bp, Homo sapiens
tacaagtttttattt

SEQ ID NO: 858117 - DNA, 15 bp, Homo sapiens
acaagtttttatttt

SEQ ID NO: 858118 - DNA, 15 bp, Homo sapiens
caagtttttattttc

SEQ ID NO: 858119 - DNA, 15 bp, Homo sapiens
aagtttttattttca

SEQ ID NO: 858120 - DNA, 15 bp, Homo sapiens
agtttttattttcaa

SEQ ID NO: 858121 - DNA, 15 bp, Homo sapiens
gtttttattttcaat

SEQ ID NO: 858122 - DNA, 15 bp, Homo sapiens
tttttattttcaatg

SEQ ID NO: 858123 - DNA, 15 bp, Homo sapiens
ttttattttcaatgc

SEQ ID NO: 858124 - DNA, 15 bp, Homo sapiens
tttattttcaatgca

SEQ ID NO: 858125 - DNA, 15 bp, Homo sapiens
ttattttcaatgcat

SEQ ID NO: 858126 - DNA, 15 bp, Homo sapiens
tattttcaatgcatg

SEQ ID NO: 858127 - DNA, 15 bp, Homo sapiens
attttcaatgcatga

SEQ ID NO: 858128 - DNA, 15 bp, Homo sapiens
ttttcaatgcatgaa

SEQ ID NO: 858129 - DNA, 15 bp, Homo sapiens
tttcaatgcatgaaa

SEQ ID NO: 858130 - DNA, 15 bp, Homo sapiens
ttcaatgcatgaaaa

SEQ ID NO: 858131 - DNA, 15 bp, Homo sapiens
tcaatgcatgaaaaa

SEQ ID NO: 858132 - DNA, 15 bp, Homo sapiens
caatgcatgaaaaat

SEQ ID NO: 858133 - DNA, 15 bp, Homo sapiens
aatgcatgaaaaatg

SEQ ID NO: 858134 - DNA, 15 bp, Homo sapiens
atgcatgaaaaatgt

SEQ ID NO: 858135 - DNA, 15 bp, Homo sapiens
tgcatgaaaaatgta

SEQ ID NO: 858136 - DNA, 15 bp, Homo sapiens
gcatgaaaaatgtag

SEQ ID NO: 858137 - DNA, 15 bp, Homo sapiens
catgaaaaatgtagc

SEQ ID NO: 858138 - DNA, 15 bp, Homo sapiens
atgaaaaatgtagca

SEQ ID NO: 858139 - DNA, 15 bp, Homo sapiens
tgaaaaatgtagcag

SEQ ID NO: 858140 - DNA, 15 bp, Homo sapiens
gaaaaatgtagcagc

SEQ ID NO: 858141 - DNA, 15 bp, Homo sapiens
aaaaatgtagcagct

SEQ ID NO: 858142 - DNA, 15 bp, Homo sapiens
aaaatgtagcagcta

SEQ ID NO: 858143 - DNA, 15 bp, Homo sapiens
aaatgtagcagctat

SEQ ID NO: 858144 - DNA, 15 bp, Homo sapiens
aatgtagcagctatt

SEQ ID NO: 858145 - DNA, 15 bp, Homo sapiens
atgtagcagctattt

SEQ ID NO: 858146 - DNA, 15 bp, Homo sapiens
tgtagcagctatttc

SEQ ID NO: 858147 - DNA, 15 bp, Homo sapiens
gtagcagctatttca

SEQ ID NO: 858148 - DNA, 15 bp, Homo sapiens
tagcagctatttcac

SEQ ID NO: 858149 - DNA, 15 bp, Homo sapiens
agcagctatttcaca

SEQ ID NO: 858150 - DNA, 15 bp, Homo sapiens
gcagctatttcacaa

SEQ ID NO: 858151 - DNA, 15 bp, Homo sapiens
cagctatttcacaac

SEQ ID NO: 858152 - DNA, 15 bp, Homo sapiens
agctatttcacaacc

SEQ ID NO: 858153 - DNA, 15 bp, Homo sapiens
gctatttcacaacct

SEQ ID NO: 858154 - DNA, 15 bp, Homo sapiens
ctatttcacaacctt

SEQ ID NO: 858155 - DNA, 15 bp, Homo sapiens
tatttcacaaccttt

SEQ ID NO: 858156 - DNA, 15 bp, Homo sapiens
atttcacaaccttta

SEQ ID NO: 858157 - DNA, 15 bp, Homo sapiens
tttcacaacctttac

SEQ ID NO: 858158 - DNA, 15 bp, Homo sapiens
ttcacaacctttact

SEQ ID NO: 858159 - DNA, 15 bp, Homo sapiens
tcacaacctttactt

SEQ ID NO: 858160 - DNA, 15 bp, Homo sapiens
cacaacctttacttt

SEQ ID NO: 858161 - DNA, 15 bp, Homo sapiens
acaacctttactttt

SEQ ID NO: 858162 - DNA, 15 bp, Homo sapiens
caacctttactttta

SEQ ID NO: 858163 - DNA, 15 bp, Homo sapiens
aacctttacttttaa

SEQ ID NO: 858164 - DNA, 15 bp, Homo sapiens
acctttacttttaaa

SEQ ID NO: 858165 - DNA, 15 bp, Homo sapiens
cctttacttttaaaa

SEQ ID NO: 858166 - DNA, 15 bp, Homo sapiens
ctttacttttaaaat

SEQ ID NO: 858167 - DNA, 15 bp, Homo sapiens
tttacttttaaaatc

SEQ ID NO: 858168 - DNA, 15 bp, Homo sapiens
ttacttttaaaatcc

SEQ ID NO: 858169 - DNA, 15 bp, Homo sapiens
tacttttaaaatcca

SEQ ID NO: 858170 - DNA, 15 bp, Homo sapiens
acttttaaaatccat

SEQ ID NO: 858171 - DNA, 15 bp, Homo sapiens
cttttaaaatccatt

SEQ ID NO: 858172 - DNA, 15 bp, Homo sapiens
ttttaaaatccattt

SEQ ID NO: 858173 - DNA, 15 bp, Homo sapiens
tttaaaatccatttt

SEQ ID NO: 858174 - DNA, 15 bp, Homo sapiens
ttaaaatccattttt

SEQ ID NO: 858175 - DNA, 15 bp, Homo sapiens
taaaatccatttttc

SEQ ID NO: 858176 - DNA, 15 bp, Homo sapiens
aaaatccatttttct

SEQ ID NO: 858177 - DNA, 15 bp, Homo sapiens
aaatccatttttctt

SEQ ID NO: 858178 - DNA, 15 bp, Homo sapiens
aatccatttttcttt

SEQ ID NO: 858179 - DNA, 15 bp, Homo sapiens
atccatttttctttt

SEQ ID NO: 858180 - DNA, 15 bp, Homo sapiens
tccatttttcttttt

SEQ ID NO: 858181 - DNA, 15 bp, Homo sapiens
ccatttttcttttta

SEQ ID NO: 858182 - DNA, 15 bp, Homo sapiens
catttttctttttaa

SEQ ID NO: 858183 - DNA, 15 bp, Homo sapiens
atttttctttttaat

SEQ ID NO: 858184 - DNA, 15 bp, Homo sapiens
tttttctttttaatc

SEQ ID NO: 858185 - DNA, 15 bp, Homo sapiens
ttttctttttaatct

SEQ ID NO: 858186 - DNA, 15 bp, Homo sapiens
tttctttttaatctc

SEQ ID NO: 858187 - DNA, 15 bp, Homo sapiens
ttctttttaatctca

SEQ ID NO: 858188 - DNA, 15 bp, Homo sapiens
tctttttaatctcaa

SEQ ID NO: 858189 - DNA, 15 bp, Homo sapiens
ctttttaatctcaaa

SEQ ID NO: 858190 - DNA, 15 bp, Homo sapiens
tttttaatctcaaat

SEQ ID NO: 858191 - DNA, 15 bp, Homo sapiens
ttttaatctcaaata

SEQ ID NO: 858192 - DNA, 15 bp, Homo sapiens
tttaatctcaaatag

SEQ ID NO: 858193 - DNA, 15 bp, Homo sapiens
ttaatctcaaatagt

SEQ ID NO: 858194 - DNA, 15 bp, Homo sapiens
taatctcaaatagtt

SEQ ID NO: 858195 - DNA, 15 bp, Homo sapiens
aatctcaaatagttt

SEQ ID NO: 858196 - DNA, 15 bp, Homo sapiens
atctcaaatagtttt

SEQ ID NO: 858197 - DNA, 15 bp, Homo sapiens
tctcaaatagttttt

SEQ ID NO: 858198 - DNA, 15 bp, Homo sapiens
ctcaaatagtttttt

SEQ ID NO: 858199 - DNA, 15 bp, Homo sapiens
tcaaatagttttttc

SEQ ID NO: 858200 - DNA, 15 bp, Homo sapiens
caaatagttttttct

SEQ ID NO: 858201 - DNA, 15 bp, Homo sapiens
aaatagttttttctt

SEQ ID NO: 858202 - DNA, 15 bp, Homo sapiens
aatagttttttctta

SEQ ID NO: 858203 - DNA, 15 bp, Homo sapiens
atagttttttcttaa

SEQ ID NO: 858204 - DNA, 15 bp, Homo sapiens
tagttttttcttaaa

SEQ ID NO: 858205 - DNA, 15 bp, Homo sapiens
agttttttcttaaaa

SEQ ID NO: 858206 - DNA, 15 bp, Homo sapiens
gttttttcttaaaac

SEQ ID NO: 858207 - DNA, 15 bp, Homo sapiens
ttttttcttaaaacc

SEQ ID NO: 858208 - DNA, 15 bp, Homo sapiens
tttttcttaaaacct

SEQ ID NO: 858209 - DNA, 15 bp, Homo sapiens
ttttcttaaaacctt

SEQ ID NO: 858210 - DNA, 15 bp, Homo sapiens
tttcttaaaaccttt

SEQ ID NO: 858211 - DNA, 15 bp, Homo sapiens
ttcttaaaacctttt

SEQ ID NO: 858212 - DNA, 15 bp, Homo sapiens
tcttaaaaccttttg

SEQ ID NO: 858213 - DNA, 15 bp, Homo sapiens
cttaaaaccttttga

SEQ ID NO: 858214 - DNA, 15 bp, Homo sapiens
ttaaaaccttttgac

SEQ ID NO: 858215 - DNA, 15 bp, Homo sapiens
taaaaccttttgact

SEQ ID NO: 858216 - DNA, 15 bp, Homo sapiens
aaaaccttttgactt

SEQ ID NO: 858217 - DNA, 15 bp, Homo sapiens
aaaccttttgacttt

SEQ ID NO: 858218 - DNA, 15 bp, Homo sapiens
aaccttttgactttt

SEQ ID NO: 858219 - DNA, 15 bp, Homo sapiens
accttttgacttttt

SEQ ID NO: 858220 - DNA, 15 bp, Homo sapiens
ccttttgacttttta

SEQ ID NO: 858221 - DNA, 15 bp, Homo sapiens
cttttgactttttat

SEQ ID NO: 858222 - DNA, 15 bp, Homo sapiens
ttttgactttttatc

SEQ ID NO: 858223 - DNA, 15 bp, Homo sapiens
tttgactttttatct

SEQ ID NO: 858224 - DNA, 15 bp, Homo sapiens
ttgactttttatcta

SEQ ID NO: 858225 - DNA, 15 bp, Homo sapiens
tgactttttatctaa

SEQ ID NO: 858226 - DNA, 15 bp, Homo sapiens
gactttttatctaaa

SEQ ID NO: 858227 - DNA, 15 bp, Homo sapiens
actttttatctaaat

SEQ ID NO: 858228 - DNA, 15 bp, Homo sapiens
ctttttatctaaatt

SEQ ID NO: 858229 - DNA, 15 bp, Homo sapiens
tttttatctaaattg

SEQ ID NO: 858230 - DNA, 15 bp, Homo sapiens
ttttatctaaattgt

SEQ ID NO: 858231 - DNA, 15 bp, Homo sapiens
tttatctaaattgta

SEQ ID NO: 858232 - DNA, 15 bp, Homo sapiens
ttatctaaattgtaa

SEQ ID NO: 858233 - DNA, 15 bp, Homo sapiens
tatctaaattgtaat

SEQ ID NO: 858234 - DNA, 15 bp, Homo sapiens
atctaaattgtaata

SEQ ID NO: 858235 - DNA, 15 bp, Homo sapiens
tctaaattgtaatag

SEQ ID NO: 858236 - DNA, 15 bp, Homo sapiens
ctaaattgtaatagc

SEQ ID NO: 858237 - DNA, 15 bp, Homo sapiens
taaattgtaatagcc

SEQ ID NO: 858238 - DNA, 15 bp, Homo sapiens
aaattgtaatagcca

SEQ ID NO: 858239 - DNA, 15 bp, Homo sapiens
aattgtaatagccag

SEQ ID NO: 858240 - DNA, 15 bp, Homo sapiens
attgtaatagccaga

SEQ ID NO: 858241 - DNA, 15 bp, Homo sapiens
ttgtaatagccagag

SEQ ID NO: 858242 - DNA, 15 bp, Homo sapiens
tgtaatagccagagc

SEQ ID NO: 858243 - DNA, 15 bp, Homo sapiens
gtaatagccagagca

SEQ ID NO: 858244 - DNA, 15 bp, Homo sapiens
taatagccagagcac

SEQ ID NO: 858245 - DNA, 15 bp, Homo sapiens
aatagccagagcacc

SEQ ID NO: 858246 - DNA, 15 bp, Homo sapiens
atagccagagcacct

SEQ ID NO: 858247 - DNA, 15 bp, Homo sapiens
tagccagagcacctt

SEQ ID NO: 858248 - DNA, 15 bp, Homo sapiens
agccagagcaccttc

SEQ ID NO: 858249 - DNA, 15 bp, Homo sapiens
gccagagcaccttcc

SEQ ID NO: 858250 - DNA, 15 bp, Homo sapiens
ccagagcaccttccc

SEQ ID NO: 858251 - DNA, 15 bp, Homo sapiens
cagagcaccttccca

SEQ ID NO: 858252 - DNA, 15 bp, Homo sapiens
agagcaccttcccac

SEQ ID NO: 858253 - DNA, 15 bp, Homo sapiens
gagcaccttcccaca

SEQ ID NO: 858254 - DNA, 15 bp, Homo sapiens
agcaccttcccacaa

SEQ ID NO: 858255 - DNA, 15 bp, Homo sapiens
gcaccttcccacaac

SEQ ID NO: 858256 - DNA, 15 bp, Homo sapiens
caccttcccacaact

SEQ ID NO: 858257 - DNA, 15 bp, Homo sapiens
accttcccacaacta

SEQ ID NO: 858258 - DNA, 15 bp, Homo sapiens
ccttcccacaactag

SEQ ID NO: 858259 - DNA, 15 bp, Homo sapiens
cttcccacaactaga

SEQ ID NO: 858260 - DNA, 15 bp, Homo sapiens
ttcccacaactagaa

SEQ ID NO: 858261 - DNA, 15 bp, Homo sapiens
tcccacaactagaat

SEQ ID NO: 858262 - DNA, 15 bp, Homo sapiens
cccacaactagaata

SEQ ID NO: 858263 - DNA, 15 bp, Homo sapiens
ccacaactagaatat

SEQ ID NO: 858264 - DNA, 15 bp, Homo sapiens
cacaactagaatatc

SEQ ID NO: 858265 - DNA, 15 bp, Homo sapiens
acaactagaatatct

SEQ ID NO: 858266 - DNA, 15 bp, Homo sapiens
caactagaatatctc

SEQ ID NO: 858267 - DNA, 15 bp, Homo sapiens
aactagaatatctca

SEQ ID NO: 858268 - DNA, 15 bp, Homo sapiens
actagaatatctcat

SEQ ID NO: 858269 - DNA, 15 bp, Homo sapiens
ctagaatatctcatc

SEQ ID NO: 858270 - DNA, 15 bp, Homo sapiens
tagaatatctcatcc

SEQ ID NO: 858271 - DNA, 15 bp, Homo sapiens
agaatatctcatcct

SEQ ID NO: 858272 - DNA, 15 bp, Homo sapiens
gaatatctcatcctt

SEQ ID NO: 858273 - DNA, 15 bp, Homo sapiens
aatatctcatccttt

SEQ ID NO: 858274 - DNA, 15 bp, Homo sapiens
atatctcatcctttt

SEQ ID NO: 858275 - DNA, 15 bp, Homo sapiens
tatctcatccttttt

SEQ ID NO: 858276 - DNA, 15 bp, Homo sapiens
atctcatcctttttg

SEQ ID NO: 858277 - DNA, 15 bp, Homo sapiens
tctcatcctttttgt

SEQ ID NO: 858278 - DNA, 15 bp, Homo sapiens
ctcatcctttttgtc

SEQ ID NO: 858279 - DNA, 15 bp, Homo sapiens
tcatcctttttgtct

SEQ ID NO: 858280 - DNA, 15 bp, Homo sapiens
catcctttttgtctt

SEQ ID NO: 858281 - DNA, 15 bp, Homo sapiens
atcctttttgtcttt

SEQ ID NO: 858282 - DNA, 15 bp, Homo sapiens
tcctttttgtctttt

SEQ ID NO: 858283 - DNA, 15 bp, Homo sapiens
cctttttgtcttttc

SEQ ID NO: 858284 - DNA, 15 bp, Homo sapiens
ctttttgtcttttct

SEQ ID NO: 858285 - DNA, 15 bp, Homo sapiens
tttttgtcttttctt

SEQ ID NO: 858286 - DNA, 15 bp, Homo sapiens
ttttgtcttttcttt

SEQ ID NO: 858287 - DNA, 15 bp, Homo sapiens
tttgtcttttctttt

SEQ ID NO: 858288 - DNA, 15 bp, Homo sapiens
ttgtcttttcttttt

SEQ ID NO: 858289 - DNA, 15 bp, Homo sapiens
tgtcttttctttttc

SEQ ID NO: 858290 - DNA, 15 bp, Homo sapiens
gtcttttctttttcc

SEQ ID NO: 858291 - DNA, 15 bp, Homo sapiens
tcttttctttttcct

SEQ ID NO: 858292 - DNA, 15 bp, Homo sapiens
cttttctttttcctc

SEQ ID NO: 858293 - DNA, 15 bp, Homo sapiens
ttttctttttcctct

SEQ ID NO: 858294 - DNA, 15 bp, Homo sapiens
tttctttttcctctc

SEQ ID NO: 858295 - DNA, 15 bp, Homo sapiens
ttctttttcctctca

SEQ ID NO: 858296 - DNA, 15 bp, Homo sapiens
tctttttcctctcaa

SEQ ID NO: 858297 - DNA, 15 bp, Homo sapiens
ctttttcctctcaaa

SEQ ID NO: 858298 - DNA, 15 bp, Homo sapiens
tttttcctctcaaaa

SEQ ID NO: 858299 - DNA, 15 bp, Homo sapiens
ttttcctctcaaaat

SEQ ID NO: 858300 - DNA, 15 bp, Homo sapiens
tttcctctcaaaatg

SEQ ID NO: 858301 - DNA, 15 bp, Homo sapiens
ttcctctcaaaatgc

SEQ ID NO: 858302 - DNA, 15 bp, Homo sapiens
tcctctcaaaatgcc

SEQ ID NO: 858303 - DNA, 15 bp, Homo sapiens
cctctcaaaatgcct

SEQ ID NO: 858304 - DNA, 15 bp, Homo sapiens
ctctcaaaatgccta

SEQ ID NO: 858305 - DNA, 15 bp, Homo sapiens
tctcaaaatgcctac

SEQ ID NO: 858306 - DNA, 15 bp, Homo sapiens
ctcaaaatgcctact

SEQ ID NO: 858307 - DNA, 15 bp, Homo sapiens
tcaaaatgcctactg

SEQ ID NO: 858308 - DNA, 15 bp, Homo sapiens
caaaatgcctactgg

SEQ ID NO: 858309 - DNA, 15 bp, Homo sapiens
aaaatgcctactggg

SEQ ID NO: 858310 - DNA, 15 bp, Homo sapiens
aaatgcctactggga

SEQ ID NO: 858311 - DNA, 15 bp, Homo sapiens
aatgcctactgggaa

SEQ ID NO: 858312 - DNA, 15 bp, Homo sapiens
atgcctactgggaac

SEQ ID NO: 858313 - DNA, 15 bp, Homo sapiens
tgcctactgggaact

SEQ ID NO: 858314 - DNA, 15 bp, Homo sapiens
gcctactgggaactt

SEQ ID NO: 858315 - DNA, 15 bp, Homo sapiens
cctactgggaactta

SEQ ID NO: 858316 - DNA, 15 bp, Homo sapiens
ctactgggaacttaa

SEQ ID NO: 858317 - DNA, 15 bp, Homo sapiens
tactgggaacttaat

SEQ ID NO: 858318 - DNA, 15 bp, Homo sapiens
actgggaacttaatt

SEQ ID NO: 858319 - DNA, 15 bp, Homo sapiens
ctgggaacttaattt

SEQ ID NO: 858320 - DNA, 15 bp, Homo sapiens
tgggaacttaatttg

SEQ ID NO: 858321 - DNA, 15 bp, Homo sapiens
gggaacttaatttgg

SEQ ID NO: 858322 - DNA, 15 bp, Homo sapiens
ggaacttaatttgga

SEQ ID NO: 858323 - DNA, 15 bp, Homo sapiens
gaacttaatttggag

SEQ ID NO: 858324 - DNA, 15 bp, Homo sapiens
aacttaatttggagt

SEQ ID NO: 858325 - DNA, 15 bp, Homo sapiens
acttaatttggagtc

SEQ ID NO: 858326 - DNA, 15 bp, Homo sapiens
cttaatttggagtca

SEQ ID NO: 858327 - DNA, 15 bp, Homo sapiens
ttaatttggagtcag

SEQ ID NO: 858328 - DNA, 15 bp, Homo sapiens
taatttggagtcaga

SEQ ID NO: 858329 - DNA, 15 bp, Homo sapiens
aatttggagtcagat

SEQ ID NO: 858330 - DNA, 15 bp, Homo sapiens
atttggagtcagatt

SEQ ID NO: 858331 - DNA, 15 bp, Homo sapiens
tttggagtcagattc

SEQ ID NO: 858332 - DNA, 15 bp, Homo sapiens
ttggagtcagattct

SEQ ID NO: 858333 - DNA, 15 bp, Homo sapiens
tggagtcagattctt

SEQ ID NO: 858334 - DNA, 15 bp, Homo sapiens
ggagtcagattcttc

SEQ ID NO: 858335 - DNA, 15 bp, Homo sapiens
gagtcagattcttca

SEQ ID NO: 858336 - DNA, 15 bp, Homo sapiens
agtcagattcttcat

SEQ ID NO: 858337 - DNA, 15 bp, Homo sapiens
gtcagattcttcatg

SEQ ID NO: 858338 - DNA, 15 bp, Homo sapiens
tcagattcttcatga

SEQ ID NO: 858339 - DNA, 15 bp, Homo sapiens
cagattcttcatgat

SEQ ID NO: 858340 - DNA, 15 bp, Homo sapiens
agattcttcatgata

SEQ ID NO: 858341 - DNA, 15 bp, Homo sapiens
gattcttcatgataa

SEQ ID NO: 858342 - DNA, 15 bp, Homo sapiens
attcttcatgataaa

SEQ ID NO: 858343 - DNA, 15 bp, Homo sapiens
ttcttcatgataaat

SEQ ID NO: 858344 - DNA, 15 bp, Homo sapiens
tcttcatgataaatc

SEQ ID NO: 858345 - DNA, 15 bp, Homo sapiens
cttcatgataaatct

SEQ ID NO: 858346 - DNA, 15 bp, Homo sapiens
ttcatgataaatctg

SEQ ID NO: 858347 - DNA, 15 bp, Homo sapiens
tcatgataaatctgg

SEQ ID NO: 858348 - DNA, 15 bp, Homo sapiens
catgataaatctgga

SEQ ID NO: 858349 - DNA, 15 bp, Homo sapiens
atgataaatctggac

SEQ ID NO: 858350 - DNA, 15 bp, Homo sapiens
tgataaatctggact

SEQ ID NO: 858351 - DNA, 15 bp, Homo sapiens
gataaatctggactt

SEQ ID NO: 858352 - DNA, 15 bp, Homo sapiens
ataaatctggactta

SEQ ID NO: 858353 - DNA, 15 bp, Homo sapiens
taaatctggacttaa

SEQ ID NO: 858354 - DNA, 15 bp, Homo sapiens
aaatctggacttaat

SEQ ID NO: 858355 - DNA, 15 bp, Homo sapiens
aatctggacttaatc

SEQ ID NO: 858356 - DNA, 15 bp, Homo sapiens
atctggacttaatca

SEQ ID NO: 858357 - DNA, 15 bp, Homo sapiens
tctggacttaatcaa

SEQ ID NO: 858358 - DNA, 15 bp, Homo sapiens
ctggacttaatcaaa

SEQ ID NO: 858359 - DNA, 15 bp, Homo sapiens
tggacttaatcaaaa

SEQ ID NO: 858360 - DNA, 15 bp, Homo sapiens
ggacttaatcaaaat

SEQ ID NO: 858361 - DNA, 15 bp, Homo sapiens
gacttaatcaaaatt

SEQ ID NO: 858362 - DNA, 15 bp, Homo sapiens
acttaatcaaaattc

SEQ ID NO: 858363 - DNA, 15 bp, Homo sapiens
cttaatcaaaattcc

SEQ ID NO: 858364 - DNA, 15 bp, Homo sapiens
ttaatcaaaattcct

SEQ ID NO: 858365 - DNA, 15 bp, Homo sapiens
taatcaaaattcctc

SEQ ID NO: 858366 - DNA, 15 bp, Homo sapiens
aatcaaaattcctca

SEQ ID NO: 858367 - DNA, 15 bp, Homo sapiens
atcaaaattcctcat

SEQ ID NO: 858368 - DNA, 15 bp, Homo sapiens
tcaaaattcctcata

SEQ ID NO: 858369 - DNA, 15 bp, Homo sapiens
caaaattcctcatat

SEQ ID NO: 858370 - DNA, 15 bp, Homo sapiens
aaaattcctcatatg

SEQ ID NO: 858371 - DNA, 15 bp, Homo sapiens
aaattcctcatatgg

SEQ ID NO: 858372 - DNA, 15 bp, Homo sapiens
aattcctcatatggt

SEQ ID NO: 858373 - DNA, 15 bp, Homo sapiens
attcctcatatggta

SEQ ID NO: 858374 - DNA, 15 bp, Homo sapiens
ttcctcatatggtat

SEQ ID NO: 858375 - DNA, 15 bp, Homo sapiens
tcctcatatggtata

SEQ ID NO: 858376 - DNA, 15 bp, Homo sapiens
cctcatatggtatat

SEQ ID NO: 858377 - DNA, 15 bp, Homo sapiens
ctcatatggtatatt

SEQ ID NO: 858378 - DNA, 15 bp, Homo sapiens
tcatatggtatattg

SEQ ID NO: 858379 - DNA, 15 bp, Homo sapiens
catatggtatattgt

SEQ ID NO: 858380 - DNA, 15 bp, Homo sapiens
atatggtatattgta

SEQ ID NO: 858381 - DNA, 15 bp, Homo sapiens
tatggtatattgtat

SEQ ID NO: 858382 - DNA, 15 bp, Homo sapiens
atggtatattgtata

SEQ ID NO: 858383 - DNA, 15 bp, Homo sapiens
tggtatattgtatat

SEQ ID NO: 858384 - DNA, 15 bp, Homo sapiens
ggtatattgtatata

SEQ ID NO: 858385 - DNA, 15 bp, Homo sapiens
gtatattgtatatat

SEQ ID NO: 858386 - DNA, 15 bp, Homo sapiens
tatattgtatatatc

SEQ ID NO: 858387 - DNA, 15 bp, Homo sapiens
atattgtatatatca

SEQ ID NO: 858388 - DNA, 15 bp, Homo sapiens
tattgtatatatcac

SEQ ID NO: 858389 - DNA, 15 bp, Homo sapiens
attgtatatatcaca

SEQ ID NO: 858390 - DNA, 15 bp, Homo sapiens
ttgtatatatcacag

SEQ ID NO: 858391 - DNA, 15 bp, Homo sapiens
tgtatatatcacagt

SEQ ID NO: 858392 - DNA, 15 bp, Homo sapiens
gtatatatcacagta

SEQ ID NO: 858393 - DNA, 15 bp, Homo sapiens
tatatatcacagtac

SEQ ID NO: 858394 - DNA, 15 bp, Homo sapiens
atatatcacagtact

SEQ ID NO: 858395 - DNA, 15 bp, Homo sapiens
tatatcacagtactg

SEQ ID NO: 858396 - DNA, 15 bp, Homo sapiens
atatcacagtactgg

SEQ ID NO: 858397 - DNA, 15 bp, Homo sapiens
tatcacagtactgga

SEQ ID NO: 858398 - DNA, 15 bp, Homo sapiens
atcacagtactggat

SEQ ID NO: 858399 - DNA, 15 bp, Homo sapiens
tcacagtactggata

SEQ ID NO: 858400 - DNA, 15 bp, Homo sapiens
cacagtactggatag

SEQ ID NO: 858401 - DNA, 15 bp, Homo sapiens
acagtactggatagt

SEQ ID NO: 858402 - DNA, 15 bp, Homo sapiens
cagtactggatagtc

SEQ ID NO: 858403 - DNA, 15 bp, Homo sapiens
agtactggatagtcc

SEQ ID NO: 858404 - DNA, 15 bp, Homo sapiens
gtactggatagtcct

SEQ ID NO: 858405 - DNA, 15 bp, Homo sapiens
tactggatagtcctc

SEQ ID NO: 858406 - DNA, 15 bp, Homo sapiens
actggatagtcctct

SEQ ID NO: 858407 - DNA, 15 bp, Homo sapiens
ctggatagtcctctg

SEQ ID NO: 858408 - DNA, 15 bp, Homo sapiens
tggatagtcctctga

SEQ ID NO: 858409 - DNA, 15 bp, Homo sapiens
ggatagtcctctgat

SEQ ID NO: 858410 - DNA, 15 bp, Homo sapiens
gatagtcctctgatt

SEQ ID NO: 858411 - DNA, 15 bp, Homo sapiens
atagtcctctgatta

SEQ ID NO: 858412 - DNA, 15 bp, Homo sapiens
tagtcctctgattaa

SEQ ID NO: 858413 - DNA, 15 bp, Homo sapiens
agtcctctgattaaa

SEQ ID NO: 858414 - DNA, 15 bp, Homo sapiens
gtcctctgattaaat

SEQ ID NO: 858415 - DNA, 15 bp, Homo sapiens
tcctctgattaaata

SEQ ID NO: 858416 - DNA, 15 bp, Homo sapiens
cctctgattaaatag

SEQ ID NO: 858417 - DNA, 15 bp, Homo sapiens
ctctgattaaataga

SEQ ID NO: 858418 - DNA, 15 bp, Homo sapiens
tctgattaaatagat

SEQ ID NO: 858419 - DNA, 15 bp, Homo sapiens
ctgattaaatagata

SEQ ID NO: 858420 - DNA, 15 bp, Homo sapiens
tgattaaatagatat

SEQ ID NO: 858421 - DNA, 15 bp, Homo sapiens
gattaaatagatatt

SEQ ID NO: 858422 - DNA, 15 bp, Homo sapiens
attaaatagatattt

SEQ ID NO: 858423 - DNA, 15 bp, Homo sapiens
ttaaatagatatttg

SEQ ID NO: 858424 - DNA, 15 bp, Homo sapiens
taaatagatatttga

SEQ ID NO: 858425 - DNA, 15 bp, Homo sapiens
aaatagatatttgat

SEQ ID NO: 858426 - DNA, 15 bp, Homo sapiens
aatagatatttgata

SEQ ID NO: 858427 - DNA, 15 bp, Homo sapiens
atagatatttgatag

SEQ ID NO: 858428 - DNA, 15 bp, Homo sapiens
tagatatttgatagt

SEQ ID NO: 858429 - DNA, 15 bp, Homo sapiens
agatatttgatagta

SEQ ID NO: 858430 - DNA, 15 bp, Homo sapiens
gatatttgatagtac

SEQ ID NO: 858431 - DNA, 15 bp, Homo sapiens
atatttgatagtact

SEQ ID NO: 858432 - DNA, 15 bp, Homo sapiens
tatttgatagtactt

SEQ ID NO: 858433 - DNA, 15 bp, Homo sapiens
atttgatagtacttt

SEQ ID NO: 858434 - DNA, 15 bp, Homo sapiens
tttgatagtacttta

SEQ ID NO: 858435 - DNA, 15 bp, Homo sapiens
ttgatagtactttaa

SEQ ID NO: 858436 - DNA, 15 bp, Homo sapiens
tgatagtactttaag

SEQ ID NO: 858437 - DNA, 15 bp, Homo sapiens
gatagtactttaagg

SEQ ID NO: 858438 - DNA, 15 bp, Homo sapiens
atagtactttaaggt

SEQ ID NO: 858439 - DNA, 15 bp, Homo sapiens
tagtactttaaggtc

SEQ ID NO: 858440 - DNA, 15 bp, Homo sapiens
agtactttaaggtct

SEQ ID NO: 858441 - DNA, 15 bp, Homo sapiens
gtactttaaggtcta

SEQ ID NO: 858442 - DNA, 15 bp, Homo sapiens
tactttaaggtctat

SEQ ID NO: 858443 - DNA, 15 bp, Homo sapiens
actttaaggtctata

SEQ ID NO: 858444 - DNA, 15 bp, Homo sapiens
ctttaaggtctatac

SEQ ID NO: 858445 - DNA, 15 bp, Homo sapiens
tttaaggtctatact

SEQ ID NO: 858446 - DNA, 15 bp, Homo sapiens
ttaaggtctatactt

SEQ ID NO: 858447 - DNA, 15 bp, Homo sapiens
taaggtctatacttt

SEQ ID NO: 858448 - DNA, 15 bp, Homo sapiens
aaggtctatactttt

SEQ ID NO: 858449 - DNA, 15 bp, Homo sapiens
aggtctatacttttg

SEQ ID NO: 858450 - DNA, 15 bp, Homo sapiens
ggtctatacttttgg

SEQ ID NO: 858451 - DNA, 15 bp, Homo sapiens
gtctatacttttgga

SEQ ID NO: 858452 - DNA, 15 bp, Homo sapiens
tctatacttttggat

SEQ ID NO: 858453 - DNA, 15 bp, Homo sapiens
ctatacttttggatg

SEQ ID NO: 858454 - DNA, 15 bp, Homo sapiens
tatacttttggatga

SEQ ID NO: 858455 - DNA, 15 bp, Homo sapiens
atacttttggatgaa

SEQ ID NO: 858456 - DNA, 15 bp, Homo sapiens
tacttttggatgaac

SEQ ID NO: 858457 - DNA, 15 bp, Homo sapiens
acttttggatgaact

SEQ ID NO: 858458 - DNA, 15 bp, Homo sapiens
cttttggatgaactt

SEQ ID NO: 858459 - DNA, 15 bp, Homo sapiens
ttttggatgaactta

SEQ ID NO: 858460 - DNA, 15 bp, Homo sapiens
tttggatgaacttaa

SEQ ID NO: 858461 - DNA, 15 bp, Homo sapiens
ttggatgaacttaac

SEQ ID NO: 858462 - DNA, 15 bp, Homo sapiens
tggatgaacttaact

SEQ ID NO: 858463 - DNA, 15 bp, Homo sapiens
ggatgaacttaactg

SEQ ID NO: 858464 - DNA, 15 bp, Homo sapiens
gatgaacttaactgc

SEQ ID NO: 858465 - DNA, 15 bp, Homo sapiens
atgaacttaactgct

SEQ ID NO: 858466 - DNA, 15 bp, Homo sapiens
tgaacttaactgctt

SEQ ID NO: 858467 - DNA, 15 bp, Homo sapiens
gaacttaactgcttt

SEQ ID NO: 858468 - DNA, 15 bp, Homo sapiens
aacttaactgctttc

SEQ ID NO: 858469 - DNA, 15 bp, Homo sapiens
acttaactgctttct

SEQ ID NO: 858470 - DNA, 15 bp, Homo sapiens
cttaactgctttctc

SEQ ID NO: 858471 - DNA, 15 bp, Homo sapiens
ttaactgctttctcc

SEQ ID NO: 858472 - DNA, 15 bp, Homo sapiens
taactgctttctcca

SEQ ID NO: 858473 - DNA, 15 bp, Homo sapiens
aactgctttctccat

SEQ ID NO: 858474 - DNA, 15 bp, Homo sapiens
actgctttctccatt

SEQ ID NO: 858475 - DNA, 15 bp, Homo sapiens
ctgctttctccattt

SEQ ID NO: 858476 - DNA, 15 bp, Homo sapiens
tgctttctccatttg

SEQ ID NO: 858477 - DNA, 15 bp, Homo sapiens
gctttctccatttgt

SEQ ID NO: 858478 - DNA, 15 bp, Homo sapiens
ctttctccatttgta

SEQ ID NO: 858479 - DNA, 15 bp, Homo sapiens
tttctccatttgtag

SEQ ID NO: 858480 - DNA, 15 bp, Homo sapiens
ttctccatttgtagt

SEQ ID NO: 858481 - DNA, 15 bp, Homo sapiens
tctccatttgtagtc

SEQ ID NO: 858482 - DNA, 15 bp, Homo sapiens
ctccatttgtagtct

SEQ ID NO: 858483 - DNA, 15 bp, Homo sapiens
tccatttgtagtctc

SEQ ID NO: 858484 - DNA, 15 bp, Homo sapiens
ccatttgtagtctct

SEQ ID NO: 858485 - DNA, 15 bp, Homo sapiens
catttgtagtctctt

SEQ ID NO: 858486 - DNA, 15 bp, Homo sapiens
atttgtagtctcttg

SEQ ID NO: 858487 - DNA, 15 bp, Homo sapiens
tttgtagtctcttga

SEQ ID NO: 858488 - DNA, 15 bp, Homo sapiens
ttgtagtctcttgaa

SEQ ID NO: 858489 - DNA, 15 bp, Homo sapiens
tgtagtctcttgaaa

SEQ ID NO: 858490 - DNA, 15 bp, Homo sapiens
gtagtctcttgaaaa

SEQ ID NO: 858491 - DNA, 15 bp, Homo sapiens
tagtctcttgaaaat

SEQ ID NO: 858492 - DNA, 15 bp, Homo sapiens
agtctcttgaaaata

SEQ ID NO: 858493 - DNA, 15 bp, Homo sapiens
gtctcttgaaaatac

SEQ ID NO: 858494 - DNA, 15 bp, Homo sapiens
tctcttgaaaataca

SEQ ID NO: 858495 - DNA, 15 bp, Homo sapiens
ctcttgaaaatacag

SEQ ID NO: 858496 - DNA, 15 bp, Homo sapiens
tcttgaaaatacaga

SEQ ID NO: 858497 - DNA, 15 bp, Homo sapiens
cttgaaaatacagaa

SEQ ID NO: 858498 - DNA, 15 bp, Homo sapiens
ttgaaaatacagaaa

SEQ ID NO: 858499 - DNA, 15 bp, Homo sapiens
tgaaaatacagaaat

SEQ ID NO: 858500 - DNA, 15 bp, Homo sapiens
gaaaatacagaaatt

SEQ ID NO: 858501 - DNA, 15 bp, Homo sapiens
aaaatacagaaattt

SEQ ID NO: 858502 - DNA, 15 bp, Homo sapiens
aaatacagaaatttc

SEQ ID NO: 858503 - DNA, 15 bp, Homo sapiens
aatacagaaatttca

SEQ ID NO: 858504 - DNA, 15 bp, Homo sapiens
atacagaaatttcag

SEQ ID NO: 858505 - DNA, 15 bp, Homo sapiens
tacagaaatttcaga

SEQ ID NO: 858506 - DNA, 15 bp, Homo sapiens
acagaaatttcagaa

SEQ ID NO: 858507 - DNA, 15 bp, Homo sapiens
cagaaatttcagaaa

SEQ ID NO: 858508 - DNA, 15 bp, Homo sapiens
agaaatttcagaaat

SEQ ID NO: 858509 - DNA, 15 bp, Homo sapiens
gaaatttcagaaata

SEQ ID NO: 858510 - DNA, 15 bp, Homo sapiens
aaatttcagaaataa

SEQ ID NO: 858511 - DNA, 15 bp, Homo sapiens
aatttcagaaataat

SEQ ID NO: 858512 - DNA, 15 bp, Homo sapiens
atttcagaaataatt

SEQ ID NO: 858513 - DNA, 15 bp, Homo sapiens
tttcagaaataattt

SEQ ID NO: 858514 - DNA, 15 bp, Homo sapiens
ttcagaaataattta

SEQ ID NO: 858515 - DNA, 15 bp, Homo sapiens
tcagaaataatttat

SEQ ID NO: 858516 - DNA, 15 bp, Homo sapiens
cagaaataatttata

SEQ ID NO: 858517 - DNA, 15 bp, Homo sapiens
agaaataatttataa

SEQ ID NO: 858518 - DNA, 15 bp, Homo sapiens
gaaataatttataag

SEQ ID NO: 858519 - DNA, 15 bp, Homo sapiens
aaataatttataaga

SEQ ID NO: 858520 - DNA, 15 bp, Homo sapiens
aataatttataagaa

SEQ ID NO: 858521 - DNA, 15 bp, Homo sapiens
ataatttataagaat

SEQ ID NO: 858522 - DNA, 15 bp, Homo sapiens
taatttataagaata

SEQ ID NO: 858523 - DNA, 15 bp, Homo sapiens
aatttataagaatat

SEQ ID NO: 858524 - DNA, 15 bp, Homo sapiens
atttataagaatatc

SEQ ID NO: 858525 - DNA, 15 bp, Homo sapiens
tttataagaatatca

SEQ ID NO: 858526 - DNA, 15 bp, Homo sapiens
ttataagaatatcaa

SEQ ID NO: 858527 - DNA, 15 bp, Homo sapiens
tataagaatatcaag

SEQ ID NO: 858528 - DNA, 15 bp, Homo sapiens
ataagaatatcaagg

SEQ ID NO: 858529 - DNA, 15 bp, Homo sapiens
taagaatatcaagga

SEQ ID NO: 858530 - DNA, 15 bp, Homo sapiens
aagaatatcaaggat

SEQ ID NO: 858531 - DNA, 15 bp, Homo sapiens
agaatatcaaggatt

SEQ ID NO: 858532 - DNA, 15 bp, Homo sapiens
gaatatcaaggattc

SEQ ID NO: 858533 - DNA, 15 bp, Homo sapiens
aatatcaaggattca

SEQ ID NO: 858534 - DNA, 15 bp, Homo sapiens
atatcaaggattcaa

SEQ ID NO: 858535 - DNA, 15 bp, Homo sapiens
tatcaaggattcaaa

SEQ ID NO: 858536 - DNA, 15 bp, Homo sapiens
atcaaggattcaaat

SEQ ID NO: 858537 - DNA, 15 bp, Homo sapiens
tcaaggattcaaatc

SEQ ID NO: 858538 - DNA, 15 bp, Homo sapiens
caaggattcaaatca

SEQ ID NO: 858539 - DNA, 15 bp, Homo sapiens
aaggattcaaatcat

SEQ ID NO: 858540 - DNA, 15 bp, Homo sapiens
aggattcaaatcata

SEQ ID NO: 858541 - DNA, 15 bp, Homo sapiens
ggattcaaatcatat

SEQ ID NO: 858542 - DNA, 15 bp, Homo sapiens
gattcaaatcatatc

SEQ ID NO: 858543 - DNA, 15 bp, Homo sapiens
attcaaatcatatca

SEQ ID NO: 858544 - DNA, 15 bp, Homo sapiens
ttcaaatcatatcag

SEQ ID NO: 858545 - DNA, 15 bp, Homo sapiens
tcaaatcatatcagc

SEQ ID NO: 858546 - DNA, 15 bp, Homo sapiens
caaatcatatcagca

SEQ ID NO: 858547 - DNA, 15 bp, Homo sapiens
aaatcatatcagcac

SEQ ID NO: 858548 - DNA, 15 bp, Homo sapiens
aatcatatcagcaca

SEQ ID NO: 858549 - DNA, 15 bp, Homo sapiens
atcatatcagcacaa

SEQ ID NO: 858550 - DNA, 15 bp, Homo sapiens
tcatatcagcacaaa

SEQ ID NO: 858551 - DNA, 15 bp, Homo sapiens
catatcagcacaaac

SEQ ID NO: 858552 - DNA, 15 bp, Homo sapiens
atatcagcacaaaca

SEQ ID NO: 858553 - DNA, 15 bp, Homo sapiens
tatcagcacaaacac

SEQ ID NO: 858554 - DNA, 15 bp, Homo sapiens
atcagcacaaacacc

SEQ ID NO: 858555 - DNA, 15 bp, Homo sapiens
tcagcacaaacacct

SEQ ID NO: 858556 - DNA, 15 bp, Homo sapiens
cagcacaaacaccta

SEQ ID NO: 858557 - DNA, 15 bp, Homo sapiens
agcacaaacacctaa

SEQ ID NO: 858558 - DNA, 15 bp, Homo sapiens
gcacaaacacctaaa

SEQ ID NO: 858559 - DNA, 15 bp, Homo sapiens
cacaaacacctaaat

SEQ ID NO: 858560 - DNA, 15 bp, Homo sapiens
acaaacacctaaata

SEQ ID NO: 858561 - DNA, 15 bp, Homo sapiens
caaacacctaaatac

SEQ ID NO: 858562 - DNA, 15 bp, Homo sapiens
aaacacctaaatact

SEQ ID NO: 858563 - DNA, 15 bp, Homo sapiens
aacacctaaatactt

SEQ ID NO: 858564 - DNA, 15 bp, Homo sapiens
acacctaaatacttg

SEQ ID NO: 858565 - DNA, 15 bp, Homo sapiens
cacctaaatacttgt

SEQ ID NO: 858566 - DNA, 15 bp, Homo sapiens
acctaaatacttgtt

SEQ ID NO: 858567 - DNA, 15 bp, Homo sapiens
cctaaatacttgttt

SEQ ID NO: 858568 - DNA, 15 bp, Homo sapiens
ctaaatacttgtttg

SEQ ID NO: 858569 - DNA, 15 bp, Homo sapiens
taaatacttgtttgc

SEQ ID NO: 858570 - DNA, 15 bp, Homo sapiens
aaatacttgtttgct

SEQ ID NO: 858571 - DNA, 15 bp, Homo sapiens
aatacttgtttgctt

SEQ ID NO: 858572 - DNA, 15 bp, Homo sapiens
atacttgtttgcttt

SEQ ID NO: 858573 - DNA, 15 bp, Homo sapiens
tacttgtttgctttg

SEQ ID NO: 858574 - DNA, 15 bp, Homo sapiens
acttgtttgctttgt

SEQ ID NO: 858575 - DNA, 15 bp, Homo sapiens
cttgtttgctttgtt

SEQ ID NO: 858576 - DNA, 15 bp, Homo sapiens
ttgtttgctttgtta

SEQ ID NO: 858577 - DNA, 15 bp, Homo sapiens
tgtttgctttgttaa

SEQ ID NO: 858578 - DNA, 15 bp, Homo sapiens
gtttgctttgttaaa

SEQ ID NO: 858579 - DNA, 15 bp, Homo sapiens
tttgctttgttaaac

SEQ ID NO: 858580 - DNA, 15 bp, Homo sapiens
ttgctttgttaaaca

SEQ ID NO: 858581 - DNA, 15 bp, Homo sapiens
tgctttgttaaacac

SEQ ID NO: 858582 - DNA, 15 bp, Homo sapiens
gctttgttaaacaca

SEQ ID NO: 858583 - DNA, 15 bp, Homo sapiens
ctttgttaaacacat

SEQ ID NO: 858584 - DNA, 15 bp, Homo sapiens
tttgttaaacacata

SEQ ID NO: 858585 - DNA, 15 bp, Homo sapiens
ttgttaaacacatat

SEQ ID NO: 858586 - DNA, 15 bp, Homo sapiens
tgttaaacacatatc

SEQ ID NO: 858587 - DNA, 15 bp, Homo sapiens
gttaaacacatatcc

SEQ ID NO: 858588 - DNA, 15 bp, Homo sapiens
ttaaacacatatccc

SEQ ID NO: 858589 - DNA, 15 bp, Homo sapiens
taaacacatatccca

SEQ ID NO: 858590 - DNA, 15 bp, Homo sapiens
aaacacatatcccat

SEQ ID NO: 858591 - DNA, 15 bp, Homo sapiens
aacacatatcccatt

SEQ ID NO: 858592 - DNA, 15 bp, Homo sapiens
acacatatcccattt

SEQ ID NO: 858593 - DNA, 15 bp, Homo sapiens
cacatatcccatttt

SEQ ID NO: 858594 - DNA, 15 bp, Homo sapiens
acatatcccattttc

SEQ ID NO: 858595 - DNA, 15 bp, Homo sapiens
catatcccattttct

SEQ ID NO: 858596 - DNA, 15 bp, Homo sapiens
atatcccattttcta

SEQ ID NO: 858597 - DNA, 15 bp, Homo sapiens
tatcccattttctat

SEQ ID NO: 858598 - DNA, 15 bp, Homo sapiens
atcccattttctatc

SEQ ID NO: 858599 - DNA, 15 bp, Homo sapiens
tcccattttctatct

SEQ ID NO: 858600 - DNA, 15 bp, Homo sapiens
cccattttctatctt

SEQ ID NO: 858601 - DNA, 15 bp, Homo sapiens
ccattttctatcttg

SEQ ID NO: 858602 - DNA, 15 bp, Homo sapiens
cattttctatcttga

SEQ ID NO: 858603 - DNA, 15 bp, Homo sapiens
attttctatcttgat

SEQ ID NO: 858604 - DNA, 15 bp, Homo sapiens
ttttctatcttgata

SEQ ID NO: 858605 - DNA, 15 bp, Homo sapiens
tttctatcttgataa

SEQ ID NO: 858606 - DNA, 15 bp, Homo sapiens
ttctatcttgataaa

SEQ ID NO: 858607 - DNA, 15 bp, Homo sapiens
tctatcttgataaac

SEQ ID NO: 858608 - DNA, 15 bp, Homo sapiens
ctatcttgataaaca

SEQ ID NO: 858609 - DNA, 15 bp, Homo sapiens
tatcttgataaacat

SEQ ID NO: 858610 - DNA, 15 bp, Homo sapiens
atcttgataaacatt

SEQ ID NO: 858611 - DNA, 15 bp, Homo sapiens
tcttgataaacattg

SEQ ID NO: 858612 - DNA, 15 bp, Homo sapiens
cttgataaacattgg

SEQ ID NO: 858613 - DNA, 15 bp, Homo sapiens
ttgataaacattggt

SEQ ID NO: 858614 - DNA, 15 bp, Homo sapiens
tgataaacattggtg

SEQ ID NO: 858615 - DNA, 15 bp, Homo sapiens
gataaacattggtgt

SEQ ID NO: 858616 - DNA, 15 bp, Homo sapiens
ataaacattggtgta

SEQ ID NO: 858617 - DNA, 15 bp, Homo sapiens
taaacattggtgtaa

SEQ ID NO: 858618 - DNA, 15 bp, Homo sapiens
aaacattggtgtaaa

SEQ ID NO: 858619 - DNA, 15 bp, Homo sapiens
aacattggtgtaaag

SEQ ID NO: 858620 - DNA, 15 bp, Homo sapiens
acattggtgtaaagt

SEQ ID NO: 858621 - DNA, 15 bp, Homo sapiens
cattggtgtaaagta

SEQ ID NO: 858622 - DNA, 15 bp, Homo sapiens
attggtgtaaagtag

SEQ ID NO: 858623 - DNA, 15 bp, Homo sapiens
ttggtgtaaagtagt

SEQ ID NO: 858624 - DNA, 15 bp, Homo sapiens
tggtgtaaagtagtt

SEQ ID NO: 858625 - DNA, 15 bp, Homo sapiens
ggtgtaaagtagttg

SEQ ID NO: 858626 - DNA, 15 bp, Homo sapiens
gtgtaaagtagttga

SEQ ID NO: 858627 - DNA, 15 bp, Homo sapiens
tgtaaagtagttgaa

SEQ ID NO: 858628 - DNA, 15 bp, Homo sapiens
gtaaagtagttgaat

SEQ ID NO: 858629 - DNA, 15 bp, Homo sapiens
taaagtagttgaatc

SEQ ID NO: 858630 - DNA, 15 bp, Homo sapiens
aaagtagttgaatca

SEQ ID NO: 858631 - DNA, 15 bp, Homo sapiens
aagtagttgaatcat

SEQ ID NO: 858632 - DNA, 15 bp, Homo sapiens
agtagttgaatcatt

SEQ ID NO: 858633 - DNA, 15 bp, Homo sapiens
gtagttgaatcattc

SEQ ID NO: 858634 - DNA, 15 bp, Homo sapiens
tagttgaatcattca

SEQ ID NO: 858635 - DNA, 15 bp, Homo sapiens
agttgaatcattcag

SEQ ID NO: 858636 - DNA, 15 bp, Homo sapiens
gttgaatcattcagt

SEQ ID NO: 858637 - DNA, 15 bp, Homo sapiens
ttgaatcattcagtg

SEQ ID NO: 858638 - DNA, 15 bp, Homo sapiens
tgaatcattcagtgg

SEQ ID NO: 858639 - DNA, 15 bp, Homo sapiens
gaatcattcagtggg

SEQ ID NO: 858640 - DNA, 15 bp, Homo sapiens
aatcattcagtgggt

SEQ ID NO: 858641 - DNA, 15 bp, Homo sapiens
atcattcagtgggta

SEQ ID NO: 858642 - DNA, 15 bp, Homo sapiens
tcattcagtgggtat

SEQ ID NO: 858643 - DNA, 15 bp, Homo sapiens
cattcagtgggtata

SEQ ID NO: 858644 - DNA, 15 bp, Homo sapiens
attcagtgggtataa

SEQ ID NO: 858645 - DNA, 15 bp, Homo sapiens
ttcagtgggtataag

SEQ ID NO: 858646 - DNA, 15 bp, Homo sapiens
tcagtgggtataagc

SEQ ID NO: 858647 - DNA, 15 bp, Homo sapiens
cagtgggtataagca

SEQ ID NO: 858648 - DNA, 15 bp, Homo sapiens
agtgggtataagcag

SEQ ID NO: 858649 - DNA, 15 bp, Homo sapiens
gtgggtataagcagc

SEQ ID NO: 858650 - DNA, 15 bp, Homo sapiens
tgggtataagcagca

SEQ ID NO: 858651 - DNA, 15 bp, Homo sapiens
gggtataagcagcat

SEQ ID NO: 858652 - DNA, 15 bp, Homo sapiens
ggtataagcagcata

SEQ ID NO: 858653 - DNA, 15 bp, Homo sapiens
gtataagcagcatat

SEQ ID NO: 858654 - DNA, 15 bp, Homo sapiens
tataagcagcatatt

SEQ ID NO: 858655 - DNA, 15 bp, Homo sapiens
ataagcagcatattc

SEQ ID NO: 858656 - DNA, 15 bp, Homo sapiens
taagcagcatattct

SEQ ID NO: 858657 - DNA, 15 bp, Homo sapiens
aagcagcatattctc

SEQ ID NO: 858658 - DNA, 15 bp, Homo sapiens
agcagcatattctca

SEQ ID NO: 858659 - DNA, 15 bp, Homo sapiens
gcagcatattctcaa

SEQ ID NO: 858660 - DNA, 15 bp, Homo sapiens
cagcatattctcaat

SEQ ID NO: 858661 - DNA, 15 bp, Homo sapiens
agcatattctcaata

SEQ ID NO: 858662 - DNA, 15 bp, Homo sapiens
gcatattctcaatac

SEQ ID NO: 858663 - DNA, 15 bp, Homo sapiens
catattctcaatact

SEQ ID NO: 858664 - DNA, 15 bp, Homo sapiens
atattctcaatacta

SEQ ID NO: 858665 - DNA, 15 bp, Homo sapiens
tattctcaatactat

SEQ ID NO: 858666 - DNA, 15 bp, Homo sapiens
attctcaatactatg

SEQ ID NO: 858667 - DNA, 15 bp, Homo sapiens
ttctcaatactatgt

SEQ ID NO: 858668 - DNA, 15 bp, Homo sapiens
tctcaatactatgtt

SEQ ID NO: 858669 - DNA, 15 bp, Homo sapiens
ctcaatactatgttt

SEQ ID NO: 858670 - DNA, 15 bp, Homo sapiens
tcaatactatgtttc

SEQ ID NO: 858671 - DNA, 15 bp, Homo sapiens
caatactatgtttca

SEQ ID NO: 858672 - DNA, 15 bp, Homo sapiens
aatactatgtttcat

SEQ ID NO: 858673 - DNA, 15 bp, Homo sapiens
atactatgtttcatt

SEQ ID NO: 858674 - DNA, 15 bp, Homo sapiens
tactatgtttcatta

SEQ ID NO: 858675 - DNA, 15 bp, Homo sapiens
actatgtttcattaa

SEQ ID NO: 858676 - DNA, 15 bp, Homo sapiens
ctatgtttcattaat

SEQ ID NO: 858677 - DNA, 15 bp, Homo sapiens
tatgtttcattaata

SEQ ID NO: 858678 - DNA, 15 bp, Homo sapiens
atgtttcattaataa

SEQ ID NO: 858679 - DNA, 15 bp, Homo sapiens
tgtttcattaataat

SEQ ID NO: 858680 - DNA, 15 bp, Homo sapiens
gtttcattaataatt

SEQ ID NO: 858681 - DNA, 15 bp, Homo sapiens
tttcattaataatta

SEQ ID NO: 858682 - DNA, 15 bp, Homo sapiens
ttcattaataattaa

SEQ ID NO: 858683 - DNA, 15 bp, Homo sapiens
tcattaataattaat

SEQ ID NO: 858684 - DNA, 15 bp, Homo sapiens
cattaataattaata

SEQ ID NO: 858685 - DNA, 15 bp, Homo sapiens
attaataattaatag

SEQ ID NO: 858686 - DNA, 15 bp, Homo sapiens
ttaataattaataga

SEQ ID NO: 858687 - DNA, 15 bp, Homo sapiens
taataattaatagag

SEQ ID NO: 858688 - DNA, 15 bp, Homo sapiens
aataattaatagaga

SEQ ID NO: 858689 - DNA, 15 bp, Homo sapiens
ataattaatagagat

SEQ ID NO: 858690 - DNA, 15 bp, Homo sapiens
taattaatagagata

SEQ ID NO: 858691 - DNA, 15 bp, Homo sapiens
aattaatagagatat

SEQ ID NO: 858692 - DNA, 15 bp, Homo sapiens
attaatagagatata

SEQ ID NO: 858693 - DNA, 15 bp, Homo sapiens
ttaatagagatatat

SEQ ID NO: 858694 - DNA, 15 bp, Homo sapiens
taatagagatatatg

SEQ ID NO: 858695 - DNA, 15 bp, Homo sapiens
aatagagatatatga

SEQ ID NO: 858696 - DNA, 15 bp, Homo sapiens
atagagatatatgaa

SEQ ID NO: 858697 - DNA, 15 bp, Homo sapiens
tagagatatatgaac

SEQ ID NO: 858698 - DNA, 15 bp, Homo sapiens
agagatatatgaaca

SEQ ID NO: 858699 - DNA, 15 bp, Homo sapiens
gagatatatgaacac

SEQ ID NO: 858700 - DNA, 15 bp, Homo sapiens
agatatatgaacaca

SEQ ID NO: 858701 - DNA, 15 bp, Homo sapiens
gatatatgaacacat

SEQ ID NO: 858702 - DNA, 15 bp, Homo sapiens
atatatgaacacata

SEQ ID NO: 858703 - DNA, 15 bp, Homo sapiens
tatatgaacacataa

SEQ ID NO: 858704 - DNA, 15 bp, Homo sapiens
atatgaacacataaa

SEQ ID NO: 858705 - DNA, 15 bp, Homo sapiens
tatgaacacataaaa

SEQ ID NO: 858706 - DNA, 15 bp, Homo sapiens
atgaacacataaaag

SEQ ID NO: 858707 - DNA, 15 bp, Homo sapiens
tgaacacataaaaga

SEQ ID NO: 858708 - DNA, 15 bp, Homo sapiens
gaacacataaaagat

SEQ ID NO: 858709 - DNA, 15 bp, Homo sapiens
aacacataaaagatt

SEQ ID NO: 858710 - DNA, 15 bp, Homo sapiens
acacataaaagattc

SEQ ID NO: 858711 - DNA, 15 bp, Homo sapiens
cacataaaagattca

SEQ ID NO: 858712 - DNA, 15 bp, Homo sapiens
acataaaagattcaa

SEQ ID NO: 858713 - DNA, 15 bp, Homo sapiens
cataaaagattcaat

SEQ ID NO: 858714 - DNA, 15 bp, Homo sapiens
ataaaagattcaatt

SEQ ID NO: 858715 - DNA, 15 bp, Homo sapiens
taaaagattcaatta

SEQ ID NO: 858716 - DNA, 15 bp, Homo sapiens
aaaagattcaattat

SEQ ID NO: 858717 - DNA, 15 bp, Homo sapiens
aaagattcaattata

SEQ ID NO: 858718 - DNA, 15 bp, Homo sapiens
aagattcaattataa

SEQ ID NO: 858719 - DNA, 15 bp, Homo sapiens
agattcaattataat

SEQ ID NO: 858720 - DNA, 15 bp, Homo sapiens
gattcaattataatc

SEQ ID NO: 858721 - DNA, 15 bp, Homo sapiens
attcaattataatca

SEQ ID NO: 858722 - DNA, 15 bp, Homo sapiens
ttcaattataatcac

SEQ ID NO: 858723 - DNA, 15 bp, Homo sapiens
tcaattataatcacc

SEQ ID NO: 858724 - DNA, 15 bp, Homo sapiens
caattataatcacct

SEQ ID NO: 858725 - DNA, 15 bp, Homo sapiens
aattataatcacctt

SEQ ID NO: 858726 - DNA, 15 bp, Homo sapiens
attataatcaccttg

SEQ ID NO: 858727 - DNA, 15 bp, Homo sapiens
ttataatcaccttgt

SEQ ID NO: 858728 - DNA, 15 bp, Homo sapiens
tataatcaccttgtg

SEQ ID NO: 858729 - DNA, 15 bp, Homo sapiens
ataatcaccttgtgg

SEQ ID NO: 858730 - DNA, 15 bp, Homo sapiens
taatcaccttgtgga

SEQ ID NO: 858731 - DNA, 15 bp, Homo sapiens
aatcaccttgtggat

SEQ ID NO: 858732 - DNA, 15 bp, Homo sapiens
atcaccttgtggatc

SEQ ID NO: 858733 - DNA, 15 bp, Homo sapiens
tcaccttgtggatct

SEQ ID NO: 858734 - DNA, 15 bp, Homo sapiens
caccttgtggatcta

SEQ ID NO: 858735 - DNA, 15 bp, Homo sapiens
accttgtggatctaa

SEQ ID NO: 858736 - DNA, 15 bp, Homo sapiens
ccttgtggatctaaa

SEQ ID NO: 858737 - DNA, 15 bp, Homo sapiens
cttgtggatctaaat

SEQ ID NO: 858738 - DNA, 15 bp, Homo sapiens
ttgtggatctaaatt

SEQ ID NO: 858739 - DNA, 15 bp, Homo sapiens
tgtggatctaaattt

SEQ ID NO: 858740 - DNA, 15 bp, Homo sapiens
gtggatctaaatttc

SEQ ID NO: 858741 - DNA, 15 bp, Homo sapiens
tggatctaaatttca

SEQ ID NO: 858742 - DNA, 15 bp, Homo sapiens
ggatctaaatttcag

SEQ ID NO: 858743 - DNA, 15 bp, Homo sapiens
gatctaaatttcagt

SEQ ID NO: 858744 - DNA, 15 bp, Homo sapiens
atctaaatttcagtt

SEQ ID NO: 858745 - DNA, 15 bp, Homo sapiens
tctaaatttcagttg

SEQ ID NO: 858746 - DNA, 15 bp, Homo sapiens
ctaaatttcagttga

SEQ ID NO: 858747 - DNA, 15 bp, Homo sapiens
taaatttcagttgac

SEQ ID NO: 858748 - DNA, 15 bp, Homo sapiens
aaatttcagttgact

SEQ ID NO: 858749 - DNA, 15 bp, Homo sapiens
aatttcagttgactt

SEQ ID NO: 858750 - DNA, 15 bp, Homo sapiens
atttcagttgacttg

SEQ ID NO: 858751 - DNA, 15 bp, Homo sapiens
tttcagttgacttgt

SEQ ID NO: 858752 - DNA, 15 bp, Homo sapiens
ttcagttgacttgtc

SEQ ID NO: 858753 - DNA, 15 bp, Homo sapiens
tcagttgacttgtca

SEQ ID NO: 858754 - DNA, 15 bp, Homo sapiens
cagttgacttgtcat

SEQ ID NO: 858755 - DNA, 15 bp, Homo sapiens
agttgacttgtcatc

SEQ ID NO: 858756 - DNA, 15 bp, Homo sapiens
gttgacttgtcatct

SEQ ID NO: 858757 - DNA, 15 bp, Homo sapiens
ttgacttgtcatctt

SEQ ID NO: 858758 - DNA, 15 bp, Homo sapiens
tgacttgtcatcttg

SEQ ID NO: 858759 - DNA, 15 bp, Homo sapiens
gacttgtcatcttga

SEQ ID NO: 858760 - DNA, 15 bp, Homo sapiens
acttgtcatcttgat

SEQ ID NO: 858761 - DNA, 15 bp, Homo sapiens
cttgtcatcttgatt

SEQ ID NO: 858762 - DNA, 15 bp, Homo sapiens
ttgtcatcttgattt

SEQ ID NO: 858763 - DNA, 15 bp, Homo sapiens
tgtcatcttgatttc

SEQ ID NO: 858764 - DNA, 15 bp, Homo sapiens
gtcatcttgatttct

SEQ ID NO: 858765 - DNA, 15 bp, Homo sapiens
tcatcttgatttctg

SEQ ID NO: 858766 - DNA, 15 bp, Homo sapiens
catcttgatttctgg

SEQ ID NO: 858767 - DNA, 15 bp, Homo sapiens
atcttgatttctgga

SEQ ID NO: 858768 - DNA, 15 bp, Homo sapiens
tcttgatttctggag

SEQ ID NO: 858769 - DNA, 15 bp, Homo sapiens
cttgatttctggaga

SEQ ID NO: 858770 - DNA, 15 bp, Homo sapiens
ttgatttctggagac

SEQ ID NO: 858771 - DNA, 15 bp, Homo sapiens
tgatttctggagacc

SEQ ID NO: 858772 - DNA, 15 bp, Homo sapiens
gatttctggagacca

SEQ ID NO: 858773 - DNA, 15 bp, Homo sapiens
atttctggagaccac

SEQ ID NO: 858774 - DNA, 15 bp, Homo sapiens
tttctggagaccaca

SEQ ID NO: 858775 - DNA, 15 bp, Homo sapiens
ttctggagaccacaa

SEQ ID NO: 858776 - DNA, 15 bp, Homo sapiens
tctggagaccacaag

SEQ ID NO: 858777 - DNA, 15 bp, Homo sapiens
ctggagaccacaagg

SEQ ID NO: 858778 - DNA, 15 bp, Homo sapiens
tggagaccacaaggt

SEQ ID NO: 858779 - DNA, 15 bp, Homo sapiens
ggagaccacaaggta

SEQ ID NO: 858780 - DNA, 15 bp, Homo sapiens
gagaccacaaggtaa

SEQ ID NO: 858781 - DNA, 15 bp, Homo sapiens
agaccacaaggtaat

SEQ ID NO: 858782 - DNA, 15 bp, Homo sapiens
gaccacaaggtaatg

SEQ ID NO: 858783 - DNA, 15 bp, Homo sapiens
accacaaggtaatga

SEQ ID NO: 858784 - DNA, 15 bp, Homo sapiens
ccacaaggtaatgaa

SEQ ID NO: 858785 - DNA, 15 bp, Homo sapiens
cacaaggtaatgaaa

SEQ ID NO: 858786 - DNA, 15 bp, Homo sapiens
acaaggtaatgaaaa

SEQ ID NO: 858787 - DNA, 15 bp, Homo sapiens
caaggtaatgaaaaa

SEQ ID NO: 858788 - DNA, 15 bp, Homo sapiens
aaggtaatgaaaaat

SEQ ID NO: 858789 - DNA, 15 bp, Homo sapiens
aggtaatgaaaaata

SEQ ID NO: 858790 - DNA, 15 bp, Homo sapiens
ggtaatgaaaaataa

SEQ ID NO: 858791 - DNA, 15 bp, Homo sapiens
gtaatgaaaaataat

SEQ ID NO: 858792 - DNA, 15 bp, Homo sapiens
taatgaaaaataatt

SEQ ID NO: 858793 - DNA, 15 bp, Homo sapiens
aatgaaaaataatta

SEQ ID NO: 858794 - DNA, 15 bp, Homo sapiens
atgaaaaataattac

SEQ ID NO: 858795 - DNA, 15 bp, Homo sapiens
tgaaaaataattaca

SEQ ID NO: 858796 - DNA, 15 bp, Homo sapiens
gaaaaataattacaa

SEQ ID NO: 858797 - DNA, 15 bp, Homo sapiens
aaaaataattacaag

SEQ ID NO: 858798 - DNA, 15 bp, Homo sapiens
aaaataattacaaga

SEQ ID NO: 858799 - DNA, 15 bp, Homo sapiens
aaataattacaagag

SEQ ID NO: 858800 - DNA, 15 bp, Homo sapiens
aataattacaagagt

SEQ ID NO: 858801 - DNA, 15 bp, Homo sapiens
ataattacaagagtc

SEQ ID NO: 858802 - DNA, 15 bp, Homo sapiens
taattacaagagtct

SEQ ID NO: 858803 - DNA, 15 bp, Homo sapiens
aattacaagagtctt

SEQ ID NO: 858804 - DNA, 15 bp, Homo sapiens
attacaagagtcttc

SEQ ID NO: 858805 - DNA, 15 bp, Homo sapiens
ttacaagagtcttcc

SEQ ID NO: 858806 - DNA, 15 bp, Homo sapiens
tacaagagtcttcca

SEQ ID NO: 858807 - DNA, 15 bp, Homo sapiens
acaagagtcttccat

SEQ ID NO: 858808 - DNA, 15 bp, Homo sapiens
caagagtcttccatc

SEQ ID NO: 858809 - DNA, 15 bp, Homo sapiens
aagagtcttccatct

SEQ ID NO: 858810 - DNA, 15 bp, Homo sapiens
agagtcttccatctg

SEQ ID NO: 858811 - DNA, 15 bp, Homo sapiens
gagtcttccatctgt

SEQ ID NO: 858812 - DNA, 15 bp, Homo sapiens
agtcttccatctgtt

SEQ ID NO: 858813 - DNA, 15 bp, Homo sapiens
gtcttccatctgttg

SEQ ID NO: 858814 - DNA, 15 bp, Homo sapiens
tcttccatctgttgc

SEQ ID NO: 858815 - DNA, 15 bp, Homo sapiens
cttccatctgttgca

SEQ ID NO: 858816 - DNA, 15 bp, Homo sapiens
ttccatctgttgcag

SEQ ID NO: 858817 - DNA, 15 bp, Homo sapiens
tccatctgttgcagt

SEQ ID NO: 858818 - DNA, 15 bp, Homo sapiens
ccatctgttgcagta

SEQ ID NO: 858819 - DNA, 15 bp, Homo sapiens
catctgttgcagtat

SEQ ID NO: 858820 - DNA, 15 bp, Homo sapiens
atctgttgcagtatt

SEQ ID NO: 858821 - DNA, 15 bp, Homo sapiens
tctgttgcagtatta

SEQ ID NO: 858822 - DNA, 15 bp, Homo sapiens
ctgttgcagtattaa

SEQ ID NO: 858823 - DNA, 15 bp, Homo sapiens
tgttgcagtattaaa

SEQ ID NO: 858824 - DNA, 15 bp, Homo sapiens
gttgcagtattaaaa

SEQ ID NO: 858825 - DNA, 15 bp, Homo sapiens
ttgcagtattaaaat

SEQ ID NO: 858826 - DNA, 15 bp, Homo sapiens
tgcagtattaaaatg

SEQ ID NO: 858827 - DNA, 15 bp, Homo sapiens
gcagtattaaaatgg

SEQ ID NO: 858828 - DNA, 15 bp, Homo sapiens
cagtattaaaatggc

SEQ ID NO: 858829 - DNA, 15 bp, Homo sapiens
agtattaaaatggcg

SEQ ID NO: 858830 - DNA, 15 bp, Homo sapiens
gtattaaaatggcga

SEQ ID NO: 858831 - DNA, 15 bp, Homo sapiens
tattaaaatggcgag

SEQ ID NO: 858832 - DNA, 15 bp, Homo sapiens
attaaaatggcgagt

SEQ ID NO: 858833 - DNA, 15 bp, Homo sapiens
ttaaaatggcgagta

SEQ ID NO: 858834 - DNA, 15 bp, Homo sapiens
taaaatggcgagtaa

SEQ ID NO: 858835 - DNA, 15 bp, Homo sapiens
aaaatggcgagtaag

SEQ ID NO: 858836 - DNA, 15 bp, Homo sapiens
aaatggcgagtaaga

SEQ ID NO: 858837 - DNA, 15 bp, Homo sapiens
aatggcgagtaagac

SEQ ID NO: 858838 - DNA, 15 bp, Homo sapiens
atggcgagtaagaca

SEQ ID NO: 858839 - DNA, 15 bp, Homo sapiens
tggcgagtaagacac

SEQ ID NO: 858840 - DNA, 15 bp, Homo sapiens
ggcgagtaagacacc

SEQ ID NO: 858841 - DNA, 15 bp, Homo sapiens
gcgagtaagacaccc

SEQ ID NO: 858842 - DNA, 15 bp, Homo sapiens
cgagtaagacaccct

SEQ ID NO: 858843 - DNA, 15 bp, Homo sapiens
gagtaagacaccctg

SEQ ID NO: 858844 - DNA, 15 bp, Homo sapiens
agtaagacaccctga

SEQ ID NO: 858845 - DNA, 15 bp, Homo sapiens
gtaagacaccctgaa

SEQ ID NO: 858846 - DNA, 15 bp, Homo sapiens
taagacaccctgaaa

SEQ ID NO: 858847 - DNA, 15 bp, Homo sapiens
aagacaccctgaaag

SEQ ID NO: 858848 - DNA, 15 bp, Homo sapiens
agacaccctgaaagg

SEQ ID NO: 858849 - DNA, 15 bp, Homo sapiens
gacaccctgaaagga

SEQ ID NO: 858850 - DNA, 15 bp, Homo sapiens
acaccctgaaaggaa

SEQ ID NO: 858851 - DNA, 15 bp, Homo sapiens
caccctgaaaggaaa

SEQ ID NO: 858852 - DNA, 15 bp, Homo sapiens
accctgaaaggaaat

SEQ ID NO: 858853 - DNA, 15 bp, Homo sapiens
ccctgaaaggaaatg

SEQ ID NO: 858854 - DNA, 15 bp, Homo sapiens
cctgaaaggaaatgt

SEQ ID NO: 858855 - DNA, 15 bp, Homo sapiens
ctgaaaggaaatgtt

SEQ ID NO: 858856 - DNA, 15 bp, Homo sapiens
tgaaaggaaatgttc

SEQ ID NO: 858857 - DNA, 15 bp, Homo sapiens
gaaaggaaatgttct

SEQ ID NO: 858858 - DNA, 15 bp, Homo sapiens
aaaggaaatgttcta

SEQ ID NO: 858859 - DNA, 15 bp, Homo sapiens
aaggaaatgttctat

SEQ ID NO: 858860 - DNA, 15 bp, Homo sapiens
aggaaatgttctatt

SEQ ID NO: 858861 - DNA, 15 bp, Homo sapiens
ggaaatgttctattc

SEQ ID NO: 858862 - DNA, 15 bp, Homo sapiens
gaaatgttctattca

SEQ ID NO: 858863 - DNA, 15 bp, Homo sapiens
aaatgttctattcat

SEQ ID NO: 858864 - DNA, 15 bp, Homo sapiens
aatgttctattcatg

SEQ ID NO: 858865 - DNA, 15 bp, Homo sapiens
atgttctattcatgg

SEQ ID NO: 858866 - DNA, 15 bp, Homo sapiens
tgttctattcatggt

SEQ ID NO: 858867 - DNA, 15 bp, Homo sapiens
gttctattcatggta

SEQ ID NO: 858868 - DNA, 15 bp, Homo sapiens
ttctattcatggtac

SEQ ID NO: 858869 - DNA, 15 bp, Homo sapiens
tctattcatggtaca

SEQ ID NO: 858870 - DNA, 15 bp, Homo sapiens
ctattcatggtacaa

SEQ ID NO: 858871 - DNA, 15 bp, Homo sapiens
tattcatggtacaat

SEQ ID NO: 858872 - DNA, 15 bp, Homo sapiens
attcatggtacaatg

SEQ ID NO: 858873 - DNA, 15 bp, Homo sapiens
ttcatggtacaatgc

SEQ ID NO: 858874 - DNA, 15 bp, Homo sapiens
tcatggtacaatgca

SEQ ID NO: 858875 - DNA, 15 bp, Homo sapiens
catggtacaatgcaa

SEQ ID NO: 858876 - DNA, 15 bp, Homo sapiens
atggtacaatgcaat

SEQ ID NO: 858877 - DNA, 15 bp, Homo sapiens
tggtacaatgcaatt

SEQ ID NO: 858878 - DNA, 15 bp, Homo sapiens
ggtacaatgcaatta

SEQ ID NO: 858879 - DNA, 15 bp, Homo sapiens
gtacaatgcaattac

SEQ ID NO: 858880 - DNA, 15 bp, Homo sapiens
tacaatgcaattaca

SEQ ID NO: 858881 - DNA, 15 bp, Homo sapiens
acaatgcaattacag

SEQ ID NO: 858882 - DNA, 15 bp, Homo sapiens
caatgcaattacagc

SEQ ID NO: 858883 - DNA, 15 bp, Homo sapiens
aatgcaattacagct

SEQ ID NO: 858884 - DNA, 15 bp, Homo sapiens
atgcaattacagcta

SEQ ID NO: 858885 - DNA, 15 bp, Homo sapiens
tgcaattacagctag

SEQ ID NO: 858886 - DNA, 15 bp, Homo sapiens
gcaattacagctagc

SEQ ID NO: 858887 - DNA, 15 bp, Homo sapiens
caattacagctagca

SEQ ID NO: 858888 - DNA, 15 bp, Homo sapiens
aattacagctagcac

SEQ ID NO: 858889 - DNA, 15 bp, Homo sapiens
attacagctagcacc

SEQ ID NO: 858890 - DNA, 15 bp, Homo sapiens
ttacagctagcacca

SEQ ID NO: 858891 - DNA, 15 bp, Homo sapiens
tacagctagcaccaa

SEQ ID NO: 858892 - DNA, 15 bp, Homo sapiens
acagctagcaccaaa

SEQ ID NO: 858893 - DNA, 15 bp, Homo sapiens
cagctagcaccaaat

SEQ ID NO: 858894 - DNA, 15 bp, Homo sapiens
agctagcaccaaatt

SEQ ID NO: 858895 - DNA, 15 bp, Homo sapiens
gctagcaccaaattc

SEQ ID NO: 858896 - DNA, 15 bp, Homo sapiens
ctagcaccaaattca

SEQ ID NO: 858897 - DNA, 15 bp, Homo sapiens
tagcaccaaattcaa

SEQ ID NO: 858898 - DNA, 15 bp, Homo sapiens
agcaccaaattcaac

SEQ ID NO: 858899 - DNA, 15 bp, Homo sapiens
gcaccaaattcaaca

SEQ ID NO: 858900 - DNA, 15 bp, Homo sapiens
caccaaattcaacac

SEQ ID NO: 858901 - DNA, 15 bp, Homo sapiens
accaaattcaacact

SEQ ID NO: 858902 - DNA, 15 bp, Homo sapiens
ccaaattcaacactg

SEQ ID NO: 858903 - DNA, 15 bp, Homo sapiens
caaattcaacactgt

SEQ ID NO: 858904 - DNA, 15 bp, Homo sapiens
aaattcaacactgtt

SEQ ID NO: 858905 - DNA, 15 bp, Homo sapiens
aattcaacactgttt

SEQ ID NO: 858906 - DNA, 15 bp, Homo sapiens
attcaacactgttta

SEQ ID NO: 858907 - DNA, 15 bp, Homo sapiens
ttcaacactgtttaa

SEQ ID NO: 858908 - DNA, 15 bp, Homo sapiens
tcaacactgtttaac

SEQ ID NO: 858909 - DNA, 15 bp, Homo sapiens
caacactgtttaact

SEQ ID NO: 858910 - DNA, 15 bp, Homo sapiens
aacactgtttaactt

SEQ ID NO: 858911 - DNA, 15 bp, Homo sapiens
acactgtttaacttt

SEQ ID NO: 858912 - DNA, 15 bp, Homo sapiens
cactgtttaactttc

SEQ ID NO: 858913 - DNA, 15 bp, Homo sapiens
actgtttaactttca

SEQ ID NO: 858914 - DNA, 15 bp, Homo sapiens
ctgtttaactttcaa

SEQ ID NO: 858915 - DNA, 15 bp, Homo sapiens
tgtttaactttcaac

SEQ ID NO: 858916 - DNA, 15 bp, Homo sapiens
gtttaactttcaaca

SEQ ID NO: 858917 - DNA, 15 bp, Homo sapiens
tttaactttcaacat

SEQ ID NO: 858918 - DNA, 15 bp, Homo sapiens
ttaactttcaacata

SEQ ID NO: 858919 - DNA, 15 bp, Homo sapiens
taactttcaacatat

SEQ ID NO: 858920 - DNA, 15 bp, Homo sapiens
aactttcaacatatt

SEQ ID NO: 858921 - DNA, 15 bp, Homo sapiens
actttcaacatatta

SEQ ID NO: 858922 - DNA, 15 bp, Homo sapiens
ctttcaacatattat

SEQ ID NO: 858923 - DNA, 15 bp, Homo sapiens
tttcaacatattatt

SEQ ID NO: 858924 - DNA, 15 bp, Homo sapiens
ttcaacatattattt

SEQ ID NO: 858925 - DNA, 15 bp, Homo sapiens
tcaacatattatttt

SEQ ID NO: 858926 - DNA, 15 bp, Homo sapiens
caacatattattttg

SEQ ID NO: 858927 - DNA, 15 bp, Homo sapiens
aacatattattttga

SEQ ID NO: 858928 - DNA, 15 bp, Homo sapiens
acatattattttgat

SEQ ID NO: 858929 - DNA, 15 bp, Homo sapiens
catattattttgatt

SEQ ID NO: 858930 - DNA, 15 bp, Homo sapiens
atattattttgattt

SEQ ID NO: 858931 - DNA, 15 bp, Homo sapiens
tattattttgattta

SEQ ID NO: 858932 - DNA, 15 bp, Homo sapiens
attattttgatttat

SEQ ID NO: 858933 - DNA, 15 bp, Homo sapiens
ttattttgatttatc

SEQ ID NO: 858934 - DNA, 15 bp, Homo sapiens
tattttgatttatct

SEQ ID NO: 858935 - DNA, 15 bp, Homo sapiens
attttgatttatctt

SEQ ID NO: 858936 - DNA, 15 bp, Homo sapiens
ttttgatttatcttg

SEQ ID NO: 858937 - DNA, 15 bp, Homo sapiens
tttgatttatcttga

SEQ ID NO: 858938 - DNA, 15 bp, Homo sapiens
ttgatttatcttgat

SEQ ID NO: 858939 - DNA, 15 bp, Homo sapiens
tgatttatcttgatc

SEQ ID NO: 858940 - DNA, 15 bp, Homo sapiens
gatttatcttgatcc

SEQ ID NO: 858941 - DNA, 15 bp, Homo sapiens
atttatcttgatcca

SEQ ID NO: 858942 - DNA, 15 bp, Homo sapiens
tttatcttgatccaa

SEQ ID NO: 858943 - DNA, 15 bp, Homo sapiens
ttatcttgatccaac

SEQ ID NO: 858944 - DNA, 15 bp, Homo sapiens
tatcttgatccaaca

SEQ ID NO: 858945 - DNA, 15 bp, Homo sapiens
atcttgatccaacat

SEQ ID NO: 858946 - DNA, 15 bp, Homo sapiens
tcttgatccaacatt

SEQ ID NO: 858947 - DNA, 15 bp, Homo sapiens
cttgatccaacattc

SEQ ID NO: 858948 - DNA, 15 bp, Homo sapiens
ttgatccaacattct

SEQ ID NO: 858949 - DNA, 15 bp, Homo sapiens
tgatccaacattctc

SEQ ID NO: 858950 - DNA, 15 bp, Homo sapiens
gatccaacattctca

SEQ ID NO: 858951 - DNA, 15 bp, Homo sapiens
atccaacattctcag

SEQ ID NO: 858952 - DNA, 15 bp, Homo sapiens
tccaacattctcagg

SEQ ID NO: 858953 - DNA, 15 bp, Homo sapiens
ccaacattctcaggg

SEQ ID NO: 858954 - DNA, 15 bp, Homo sapiens
caacattctcaggga

SEQ ID NO: 858955 - DNA, 15 bp, Homo sapiens
aacattctcagggag

SEQ ID NO: 858956 - DNA, 15 bp, Homo sapiens
acattctcagggagg

SEQ ID NO: 858957 - DNA, 15 bp, Homo sapiens
cattctcagggagga

SEQ ID NO: 858958 - DNA, 15 bp, Homo sapiens
attctcagggaggag

SEQ ID NO: 858959 - DNA, 15 bp, Homo sapiens
ttctcagggaggagg

SEQ ID NO: 858960 - DNA, 15 bp, Homo sapiens
tctcagggaggaggt

SEQ ID NO: 858961 - DNA, 15 bp, Homo sapiens
ctcagggaggaggtg

SEQ ID NO: 858962 - DNA, 15 bp, Homo sapiens
tcagggaggaggtgc

SEQ ID NO: 858963 - DNA, 15 bp, Homo sapiens
cagggaggaggtgca

SEQ ID NO: 858964 - DNA, 15 bp, Homo sapiens
agggaggaggtgcat

SEQ ID NO: 858965 - DNA, 15 bp, Homo sapiens
gggaggaggtgcatt

SEQ ID NO: 858966 - DNA, 15 bp, Homo sapiens
ggaggaggtgcattg

SEQ ID NO: 858967 - DNA, 15 bp, Homo sapiens
gaggaggtgcattga

SEQ ID NO: 858968 - DNA, 15 bp, Homo sapiens
aggaggtgcattgaa

SEQ ID NO: 858969 - DNA, 15 bp, Homo sapiens
ggaggtgcattgaag

SEQ ID NO: 858970 - DNA, 15 bp, Homo sapiens
gaggtgcattgaagt

SEQ ID NO: 858971 - DNA, 15 bp, Homo sapiens
aggtgcattgaagtt

SEQ ID NO: 858972 - DNA, 15 bp, Homo sapiens
ggtgcattgaagtta

SEQ ID NO: 858973 - DNA, 15 bp, Homo sapiens
gtgcattgaagttat

SEQ ID NO: 858974 - DNA, 15 bp, Homo sapiens
tgcattgaagttatt

SEQ ID NO: 858975 - DNA, 15 bp, Homo sapiens
gcattgaagttatta

SEQ ID NO: 858976 - DNA, 15 bp, Homo sapiens
cattgaagttattag

SEQ ID NO: 858977 - DNA, 15 bp, Homo sapiens
attgaagttattaga

SEQ ID NO: 858978 - DNA, 15 bp, Homo sapiens
ttgaagttattagaa

SEQ ID NO: 858979 - DNA, 15 bp, Homo sapiens
tgaagttattagaaa

SEQ ID NO: 858980 - DNA, 15 bp, Homo sapiens
gaagttattagaaaa

SEQ ID NO: 858981 - DNA, 15 bp, Homo sapiens
aagttattagaaaac

SEQ ID NO: 858982 - DNA, 15 bp, Homo sapiens
agttattagaaaaca

SEQ ID NO: 858983 - DNA, 15 bp, Homo sapiens
gttattagaaaacac

SEQ ID NO: 858984 - DNA, 15 bp, Homo sapiens
ttattagaaaacact

SEQ ID NO: 858985 - DNA, 15 bp, Homo sapiens
tattagaaaacactg

SEQ ID NO: 858986 - DNA, 15 bp, Homo sapiens
attagaaaacactga

SEQ ID NO: 858987 - DNA, 15 bp, Homo sapiens
ttagaaaacactgac

SEQ ID NO: 858988 - DNA, 15 bp, Homo sapiens
tagaaaacactgact

SEQ ID NO: 858989 - DNA, 15 bp, Homo sapiens
agaaaacactgactt

SEQ ID NO: 858990 - DNA, 15 bp, Homo sapiens
gaaaacactgactta

SEQ ID NO: 858991 - DNA, 15 bp, Homo sapiens
aaaacactgacttag

SEQ ID NO: 858992 - DNA, 15 bp, Homo sapiens
aaacactgacttaga

SEQ ID NO: 858993 - DNA, 15 bp, Homo sapiens
aacactgacttagat

SEQ ID NO: 858994 - DNA, 15 bp, Homo sapiens
acactgacttagatt

SEQ ID NO: 858995 - DNA, 15 bp, Homo sapiens
cactgacttagattt

SEQ ID NO: 858996 - DNA, 15 bp, Homo sapiens
actgacttagattta

SEQ ID NO: 858997 - DNA, 15 bp, Homo sapiens
ctgacttagatttag

SEQ ID NO: 858998 - DNA, 15 bp, Homo sapiens
tgacttagatttagg

SEQ ID NO: 858999 - DNA, 15 bp, Homo sapiens
gacttagatttaggg

SEQ ID NO: 859000 - DNA, 15 bp, Homo sapiens
acttagatttagggt

SEQ ID NO: 859001 - DNA, 15 bp, Homo sapiens
cttagatttagggta

SEQ ID NO: 859002 - DNA, 15 bp, Homo sapiens
ttagatttagggtat

SEQ ID NO: 859003 - DNA, 15 bp, Homo sapiens
tagatttagggtatg

SEQ ID NO: 859004 - DNA, 15 bp, Homo sapiens
agatttagggtatgt

SEQ ID NO: 859005 - DNA, 15 bp, Homo sapiens
gatttagggtatgtc

SEQ ID NO: 859006 - DNA, 15 bp, Homo sapiens
atttagggtatgtct

SEQ ID NO: 859007 - DNA, 15 bp, Homo sapiens
tttagggtatgtctt

SEQ ID NO: 859008 - DNA, 15 bp, Homo sapiens
ttagggtatgtctta

SEQ ID NO: 859009 - DNA, 15 bp, Homo sapiens
tagggtatgtcttaa

SEQ ID NO: 859010 - DNA, 15 bp, Homo sapiens
agggtatgtcttaaa

SEQ ID NO: 859011 - DNA, 15 bp, Homo sapiens
gggtatgtcttaaaa

SEQ ID NO: 859012 - DNA, 15 bp, Homo sapiens
ggtatgtcttaaaag

SEQ ID NO: 859013 - DNA, 15 bp, Homo sapiens
gtatgtcttaaaagc

SEQ ID NO: 859014 - DNA, 15 bp, Homo sapiens
tatgtcttaaaagct

SEQ ID NO: 859015 - DNA, 15 bp, Homo sapiens
atgtcttaaaagctt

SEQ ID NO: 859016 - DNA, 15 bp, Homo sapiens
tgtcttaaaagctta

SEQ ID NO: 859017 - DNA, 15 bp, Homo sapiens
gtcttaaaagcttat

SEQ ID NO: 859018 - DNA, 15 bp, Homo sapiens
tcttaaaagcttatt

SEQ ID NO: 859019 - DNA, 15 bp, Homo sapiens
cttaaaagcttattt

SEQ ID NO: 859020 - DNA, 15 bp, Homo sapiens
ttaaaagcttatttg

SEQ ID NO: 859021 - DNA, 15 bp, Homo sapiens
taaaagcttatttgc

SEQ ID NO: 859022 - DNA, 15 bp, Homo sapiens
aaaagcttatttgcg

SEQ ID NO: 859023 - DNA, 15 bp, Homo sapiens
aaagcttatttgcgg

SEQ ID NO: 859024 - DNA, 15 bp, Homo sapiens
aagcttatttgcggg

SEQ ID NO: 859025 - DNA, 15 bp, Homo sapiens
agcttatttgcggga

SEQ ID NO: 859026 - DNA, 15 bp, Homo sapiens
gcttatttgcgggaa

SEQ ID NO: 859027 - DNA, 15 bp, Homo sapiens
cttatttgcgggaag

SEQ ID NO: 859028 - DNA, 15 bp, Homo sapiens
ttatttgcgggaagt

SEQ ID NO: 859029 - DNA, 15 bp, Homo sapiens
tatttgcgggaagta

SEQ ID NO: 859030 - DNA, 15 bp, Homo sapiens
atttgcgggaagtac

SEQ ID NO: 859031 - DNA, 15 bp, Homo sapiens
tttgcgggaagtact

SEQ ID NO: 859032 - DNA, 15 bp, Homo sapiens
ttgcgggaagtactc

SEQ ID NO: 859033 - DNA, 15 bp, Homo sapiens
tgcgggaagtactct

SEQ ID NO: 859034 - DNA, 15 bp, Homo sapiens
gcgggaagtactcta

SEQ ID NO: 859035 - DNA, 15 bp, Homo sapiens
cgggaagtactctag

SEQ ID NO: 859036 - DNA, 15 bp, Homo sapiens
gggaagtactctagc

SEQ ID NO: 859037 - DNA, 15 bp, Homo sapiens
ggaagtactctagcc

SEQ ID NO: 859038 - DNA, 15 bp, Homo sapiens
gaagtactctagcct

SEQ ID NO: 859039 - DNA, 15 bp, Homo sapiens
aagtactctagcctt

SEQ ID NO: 859040 - DNA, 15 bp, Homo sapiens
agtactctagcctta

SEQ ID NO: 859041 - DNA, 15 bp, Homo sapiens
gtactctagccttat

SEQ ID NO: 859042 - DNA, 15 bp, Homo sapiens
tactctagccttatt

SEQ ID NO: 859043 - DNA, 15 bp, Homo sapiens
actctagccttattc

SEQ ID NO: 859044 - DNA, 15 bp, Homo sapiens
ctctagccttattca

SEQ ID NO: 859045 - DNA, 15 bp, Homo sapiens
tctagccttattcaa

SEQ ID NO: 859046 - DNA, 15 bp, Homo sapiens
ctagccttattcaac

SEQ ID NO: 859047 - DNA, 15 bp, Homo sapiens
tagccttattcaaca

SEQ ID NO: 859048 - DNA, 15 bp, Homo sapiens
agccttattcaacag

SEQ ID NO: 859049 - DNA, 15 bp, Homo sapiens
gccttattcaacaga

SEQ ID NO: 859050 - DNA, 15 bp, Homo sapiens
ccttattcaacagat

SEQ ID NO: 859051 - DNA, 15 bp, Homo sapiens
cttattcaacagatc

SEQ ID NO: 859052 - DNA, 15 bp, Homo sapiens
ttattcaacagatca

SEQ ID NO: 859053 - DNA, 15 bp, Homo sapiens
tattcaacagatcac

SEQ ID NO: 859054 - DNA, 15 bp, Homo sapiens
attcaacagatcact

SEQ ID NO: 859055 - DNA, 15 bp, Homo sapiens
ttcaacagatcactg

SEQ ID NO: 859056 - DNA, 15 bp, Homo sapiens
tcaacagatcactga

SEQ ID NO: 859057 - DNA, 15 bp, Homo sapiens
caacagatcactgag

SEQ ID NO: 859058 - DNA, 15 bp, Homo sapiens
aacagatcactgaga

SEQ ID NO: 859059 - DNA, 15 bp, Homo sapiens
acagatcactgagaa

SEQ ID NO: 859060 - DNA, 15 bp, Homo sapiens
cagatcactgagaag

SEQ ID NO: 859061 - DNA, 15 bp, Homo sapiens
agatcactgagaagc

SEQ ID NO: 859062 - DNA, 15 bp, Homo sapiens
gatcactgagaagcc

SEQ ID NO: 859063 - DNA, 15 bp, Homo sapiens
atcactgagaagcct

SEQ ID NO: 859064 - DNA, 15 bp, Homo sapiens
tcactgagaagcctg

SEQ ID NO: 859065 - DNA, 15 bp, Homo sapiens
cactgagaagcctgg

SEQ ID NO: 859066 - DNA, 15 bp, Homo sapiens
actgagaagcctgga

SEQ ID NO: 859067 - DNA, 15 bp, Homo sapiens
ctgagaagcctggaa

SEQ ID NO: 859068 - DNA, 15 bp, Homo sapiens
tgagaagcctggaaa

SEQ ID NO: 859069 - DNA, 15 bp, Homo sapiens
gagaagcctggaaaa

SEQ ID NO: 859070 - DNA, 15 bp, Homo sapiens
agaagcctggaaaaa

SEQ ID NO: 859071 - DNA, 15 bp, Homo sapiens
gaagcctggaaaaac

SEQ ID NO: 859072 - DNA, 15 bp, Homo sapiens
aagcctggaaaaaca

SEQ ID NO: 859073 - DNA, 15 bp, Homo sapiens
agcctggaaaaacaa

SEQ ID NO: 859074 - DNA, 15 bp, Homo sapiens
gcctggaaaaacaaa

SEQ ID NO: 859075 - DNA, 15 bp, Homo sapiens
cctggaaaaacaaat

SEQ ID NO: 859076 - DNA, 15 bp, Homo sapiens
ctggaaaaacaaatc

SEQ ID NO: 859077 - DNA, 15 bp, Homo sapiens
tggaaaaacaaatcc

SEQ ID NO: 859078 - DNA, 15 bp, Homo sapiens
ggaaaaacaaatccc

SEQ ID NO: 859079 - DNA, 15 bp, Homo sapiens
gaaaaacaaatcccg

SEQ ID NO: 859080 - DNA, 15 bp, Homo sapiens
aaaaacaaatcccgg

SEQ ID NO: 859081 - DNA, 15 bp, Homo sapiens
aaaacaaatcccgga

SEQ ID NO: 859082 - DNA, 15 bp, Homo sapiens
aaacaaatcccggaa

SEQ ID NO: 859083 - DNA, 15 bp, Homo sapiens
aacaaatcccggaaa

SEQ ID NO: 859084 - DNA, 15 bp, Homo sapiens
acaaatcccggaaac

SEQ ID NO: 859085 - DNA, 15 bp, Homo sapiens
caaatcccggaaact

SEQ ID NO: 859086 - DNA, 15 bp, Homo sapiens
aaatcccggaaacta

SEQ ID NO: 859087 - DNA, 15 bp, Homo sapiens
aatcccggaaactaa

SEQ ID NO: 859088 - DNA, 15 bp, Homo sapiens
atcccggaaactaat

SEQ ID NO: 859089 - DNA, 15 bp, Homo sapiens
tcccggaaactaatt

SEQ ID NO: 859090 - DNA, 15 bp, Homo sapiens
cccggaaactaatta

SEQ ID NO: 859091 - DNA, 15 bp, Homo sapiens
ccggaaactaattat

SEQ ID NO: 859092 - DNA, 15 bp, Homo sapiens
cggaaactaattatt

SEQ ID NO: 859093 - DNA, 15 bp, Homo sapiens
ggaaactaattatta

SEQ ID NO: 859094 - DNA, 15 bp, Homo sapiens
gaaactaattattat

SEQ ID NO: 859095 - DNA, 15 bp, Homo sapiens
aaactaattattatg

SEQ ID NO: 859096 - DNA, 15 bp, Homo sapiens
aactaattattatgt

SEQ ID NO: 859097 - DNA, 15 bp, Homo sapiens
actaattattatgtg

SEQ ID NO: 859098 - DNA, 15 bp, Homo sapiens
ctaattattatgtgc

SEQ ID NO: 859099 - DNA, 15 bp, Homo sapiens
taattattatgtgcc

SEQ ID NO: 859100 - DNA, 15 bp, Homo sapiens
aattattatgtgcca

SEQ ID NO: 859101 - DNA, 15 bp, Homo sapiens
attattatgtgccag

SEQ ID NO: 859102 - DNA, 15 bp, Homo sapiens
ttattatgtgccagt

SEQ ID NO: 859103 - DNA, 15 bp, Homo sapiens
tattatgtgccagtt

SEQ ID NO: 859104 - DNA, 15 bp, Homo sapiens
attatgtgccagtta

SEQ ID NO: 859105 - DNA, 15 bp, Homo sapiens
ttatgtgccagttat

SEQ ID NO: 859106 - DNA, 15 bp, Homo sapiens
tatgtgccagttata

SEQ ID NO: 859107 - DNA, 15 bp, Homo sapiens
atgtgccagttatat

SEQ ID NO: 859108 - DNA, 15 bp, Homo sapiens
tgtgccagttatata

SEQ ID NO: 859109 - DNA, 15 bp, Homo sapiens
gtgccagttatataa

SEQ ID NO: 859110 - DNA, 15 bp, Homo sapiens
tgccagttatataaa

SEQ ID NO: 859111 - DNA, 15 bp, Homo sapiens
gccagttatataaac

SEQ ID NO: 859112 - DNA, 15 bp, Homo sapiens
ccagttatataaaca

SEQ ID NO: 859113 - DNA, 15 bp, Homo sapiens
cagttatataaacaa

SEQ ID NO: 859114 - DNA, 15 bp, Homo sapiens
agttatataaacaag

SEQ ID NO: 859115 - DNA, 15 bp, Homo sapiens
gttatataaacaaga

SEQ ID NO: 859116 - DNA, 15 bp, Homo sapiens
ttatataaacaagaa

SEQ ID NO: 859117 - DNA, 15 bp, Homo sapiens
tatataaacaagaag

SEQ ID NO: 859118 - DNA, 15 bp, Homo sapiens
atataaacaagaaga

SEQ ID NO: 859119 - DNA, 15 bp, Homo sapiens
tataaacaagaagac

SEQ ID NO: 859120 - DNA, 15 bp, Homo sapiens
ataaacaagaagact

SEQ ID NO: 859121 - DNA, 15 bp, Homo sapiens
taaacaagaagactt

SEQ ID NO: 859122 - DNA, 15 bp, Homo sapiens
aaacaagaagacttt

SEQ ID NO: 859123 - DNA, 15 bp, Homo sapiens
aacaagaagactttg

SEQ ID NO: 859124 - DNA, 15 bp, Homo sapiens
acaagaagactttgt

SEQ ID NO: 859125 - DNA, 15 bp, Homo sapiens
caagaagactttgtt

SEQ ID NO: 859126 - DNA, 15 bp, Homo sapiens
aagaagactttgttg

SEQ ID NO: 859127 - DNA, 15 bp, Homo sapiens
agaagactttgttgg

SEQ ID NO: 859128 - DNA, 15 bp, Homo sapiens
gaagactttgttggg

SEQ ID NO: 859129 - DNA, 15 bp, Homo sapiens
aagactttgttgggt

SEQ ID NO: 859130 - DNA, 15 bp, Homo sapiens
agactttgttgggta

SEQ ID NO: 859131 - DNA, 15 bp, Homo sapiens
gactttgttgggtac

SEQ ID NO: 859132 - DNA, 15 bp, Homo sapiens
actttgttgggtaca

SEQ ID NO: 859133 - DNA, 15 bp, Homo sapiens
ctttgttgggtacaa

SEQ ID NO: 859134 - DNA, 15 bp, Homo sapiens
tttgttgggtacaaa

SEQ ID NO: 859135 - DNA, 15 bp, Homo sapiens
ttgttgggtacaaac

SEQ ID NO: 859136 - DNA, 15 bp, Homo sapiens
tgttgggtacaaacc

SEQ ID NO: 859137 - DNA, 15 bp, Homo sapiens
gttgggtacaaacca

SEQ ID NO: 859138 - DNA, 15 bp, Homo sapiens
ttgggtacaaaccag

SEQ ID NO: 859139 - DNA, 15 bp, Homo sapiens
tgggtacaaaccagt

SEQ ID NO: 859140 - DNA, 15 bp, Homo sapiens
gggtacaaaccagtg

SEQ ID NO: 859141 - DNA, 15 bp, Homo sapiens
ggtacaaaccagtga

SEQ ID NO: 859142 - DNA, 15 bp, Homo sapiens
gtacaaaccagtgat

SEQ ID NO: 859143 - DNA, 15 bp, Homo sapiens
tacaaaccagtgatt

SEQ ID NO: 859144 - DNA, 15 bp, Homo sapiens
acaaaccagtgattc

SEQ ID NO: 859145 - DNA, 15 bp, Homo sapiens
caaaccagtgattcc

SEQ ID NO: 859146 - DNA, 15 bp, Homo sapiens
aaaccagtgattcct

SEQ ID NO: 859147 - DNA, 15 bp, Homo sapiens
aaccagtgattcctt

SEQ ID NO: 859148 - DNA, 15 bp, Homo sapiens
accagtgattccttg

SEQ ID NO: 859149 - DNA, 15 bp, Homo sapiens
ccagtgattccttgc

SEQ ID NO: 859150 - DNA, 15 bp, Homo sapiens
cagtgattccttgcc

SEQ ID NO: 859151 - DNA, 15 bp, Homo sapiens
agtgattccttgcct

SEQ ID NO: 859152 - DNA, 15 bp, Homo sapiens
gtgattccttgcctt

SEQ ID NO: 859153 - DNA, 15 bp, Homo sapiens
tgattccttgccttt

SEQ ID NO: 859154 - DNA, 15 bp, Homo sapiens
gattccttgcctttg

SEQ ID NO: 859155 - DNA, 15 bp, Homo sapiens
attccttgcctttga

SEQ ID NO: 859156 - DNA, 15 bp, Homo sapiens
ttccttgcctttgaa

SEQ ID NO: 859157 - DNA, 15 bp, Homo sapiens
tccttgcctttgaaa

SEQ ID NO: 859158 - DNA, 15 bp, Homo sapiens
ccttgcctttgaaaa

SEQ ID NO: 859159 - DNA, 15 bp, Homo sapiens
cttgcctttgaaaaa

SEQ ID NO: 859160 - DNA, 15 bp, Homo sapiens
ttgcctttgaaaaat

SEQ ID NO: 859161 - DNA, 15 bp, Homo sapiens
tgcctttgaaaaatg

SEQ ID NO: 859162 - DNA, 15 bp, Homo sapiens
gcctttgaaaaatgt

SEQ ID NO: 859163 - DNA, 15 bp, Homo sapiens
cctttgaaaaatgtg

SEQ ID NO: 859164 - DNA, 15 bp, Homo sapiens
ctttgaaaaatgtgt

SEQ ID NO: 859165 - DNA, 15 bp, Homo sapiens
tttgaaaaatgtgtc

SEQ ID NO: 859166 - DNA, 15 bp, Homo sapiens
ttgaaaaatgtgtca

SEQ ID NO: 859167 - DNA, 15 bp, Homo sapiens
tgaaaaatgtgtcag

SEQ ID NO: 859168 - DNA, 15 bp, Homo sapiens
gaaaaatgtgtcaga

SEQ ID NO: 859169 - DNA, 15 bp, Homo sapiens
aaaaatgtgtcagat

SEQ ID NO: 859170 - DNA, 15 bp, Homo sapiens
aaaatgtgtcagata

SEQ ID NO: 859171 - DNA, 15 bp, Homo sapiens
aaatgtgtcagatat

SEQ ID NO: 859172 - DNA, 15 bp, Homo sapiens
aatgtgtcagatatc

SEQ ID NO: 859173 - DNA, 15 bp, Homo sapiens
atgtgtcagatatca

SEQ ID NO: 859174 - DNA, 15 bp, Homo sapiens
tgtgtcagatatcat

SEQ ID NO: 859175 - DNA, 15 bp, Homo sapiens
gtgtcagatatcatg

SEQ ID NO: 859176 - DNA, 15 bp, Homo sapiens
tgtcagatatcatgc

SEQ ID NO: 859177 - DNA, 15 bp, Homo sapiens
gtcagatatcatgca

SEQ ID NO: 859178 - DNA, 15 bp, Homo sapiens
tcagatatcatgcat

SEQ ID NO: 859179 - DNA, 15 bp, Homo sapiens
cagatatcatgcatt

SEQ ID NO: 859180 - DNA, 15 bp, Homo sapiens
agatatcatgcatta

SEQ ID NO: 859181 - DNA, 15 bp, Homo sapiens
gatatcatgcattac

SEQ ID NO: 859182 - DNA, 15 bp, Homo sapiens
atatcatgcattacc

SEQ ID NO: 859183 - DNA, 15 bp, Homo sapiens
tatcatgcattacca

SEQ ID NO: 859184 - DNA, 15 bp, Homo sapiens
atcatgcattaccag

SEQ ID NO: 859185 - DNA, 15 bp, Homo sapiens
tcatgcattaccagc

SEQ ID NO: 859186 - DNA, 15 bp, Homo sapiens
catgcattaccagca

SEQ ID NO: 859187 - DNA, 15 bp, Homo sapiens
atgcattaccagcag

SEQ ID NO: 859188 - DNA, 15 bp, Homo sapiens
tgcattaccagcagt

SEQ ID NO: 859189 - DNA, 15 bp, Homo sapiens
gcattaccagcagtt

SEQ ID NO: 859190 - DNA, 15 bp, Homo sapiens
cattaccagcagttc

SEQ ID NO: 859191 - DNA, 15 bp, Homo sapiens
attaccagcagttca

SEQ ID NO: 859192 - DNA, 15 bp, Homo sapiens
ttaccagcagttcaa

SEQ ID NO: 859193 - DNA, 15 bp, Homo sapiens
taccagcagttcaat

SEQ ID NO: 859194 - DNA, 15 bp, Homo sapiens
accagcagttcaatg

SEQ ID NO: 859195 - DNA, 15 bp, Homo sapiens
ccagcagttcaatga

SEQ ID NO: 859196 - DNA, 15 bp, Homo sapiens
cagcagttcaatgat

SEQ ID NO: 859197 - DNA, 15 bp, Homo sapiens
agcagttcaatgata

SEQ ID NO: 859198 - DNA, 15 bp, Homo sapiens
gcagttcaatgatat

SEQ ID NO: 859199 - DNA, 15 bp, Homo sapiens
cagttcaatgatata

SEQ ID NO: 859200 - DNA, 15 bp, Homo sapiens
agttcaatgatataa

SEQ ID NO: 859201 - DNA, 15 bp, Homo sapiens
gttcaatgatataag

SEQ ID NO: 859202 - DNA, 15 bp, Homo sapiens
ttcaatgatataagg

SEQ ID NO: 859203 - DNA, 15 bp, Homo sapiens
tcaatgatataagga

SEQ ID NO: 859204 - DNA, 15 bp, Homo sapiens
caatgatataaggaa

SEQ ID NO: 859205 - DNA, 15 bp, Homo sapiens
aatgatataaggaaa

SEQ ID NO: 859206 - DNA, 15 bp, Homo sapiens
atgatataaggaaac

SEQ ID NO: 859207 - DNA, 15 bp, Homo sapiens
tgatataaggaaacc

SEQ ID NO: 859208 - DNA, 15 bp, Homo sapiens
gatataaggaaacca

SEQ ID NO: 859209 - DNA, 15 bp, Homo sapiens
atataaggaaaccag

SEQ ID NO: 859210 - DNA, 15 bp, Homo sapiens
tataaggaaaccaga

SEQ ID NO: 859211 - DNA, 15 bp, Homo sapiens
ataaggaaaccagag

SEQ ID NO: 859212 - DNA, 15 bp, Homo sapiens
taaggaaaccagagt

SEQ ID NO: 859213 - DNA, 15 bp, Homo sapiens
aaggaaaccagagta

SEQ ID NO: 859214 - DNA, 15 bp, Homo sapiens
aggaaaccagagtaa

SEQ ID NO: 859215 - DNA, 15 bp, Homo sapiens
ggaaaccagagtaat

SEQ ID NO: 859216 - DNA, 15 bp, Homo sapiens
gaaaccagagtaata

SEQ ID NO: 859217 - DNA, 15 bp, Homo sapiens
aaaccagagtaatag

SEQ ID NO: 859218 - DNA, 15 bp, Homo sapiens
aaccagagtaatagc

SEQ ID NO: 859219 - DNA, 15 bp, Homo sapiens
accagagtaatagct

SEQ ID NO: 859220 - DNA, 15 bp, Homo sapiens
ccagagtaatagcta

SEQ ID NO: 859221 - DNA, 15 bp, Homo sapiens
cagagtaatagctaa

SEQ ID NO: 859222 - DNA, 15 bp, Homo sapiens
agagtaatagctaaa

SEQ ID NO: 859223 - DNA, 15 bp, Homo sapiens
gagtaatagctaaaa

SEQ ID NO: 859224 - DNA, 15 bp, Homo sapiens
agtaatagctaaaac

SEQ ID NO: 859225 - DNA, 15 bp, Homo sapiens
gtaatagctaaaacc

SEQ ID NO: 859226 - DNA, 15 bp, Homo sapiens
taatagctaaaacct

SEQ ID NO: 859227 - DNA, 15 bp, Homo sapiens
aatagctaaaacctt

SEQ ID NO: 859228 - DNA, 15 bp, Homo sapiens
atagctaaaaccttt

SEQ ID NO: 859229 - DNA, 15 bp, Homo sapiens
tagctaaaaccttta

SEQ ID NO: 859230 - DNA, 15 bp, Homo sapiens
agctaaaacctttaa

SEQ ID NO: 859231 - DNA, 15 bp, Homo sapiens
gctaaaacctttaaa

SEQ ID NO: 859232 - DNA, 15 bp, Homo sapiens
ctaaaacctttaaag

SEQ ID NO: 859233 - DNA, 15 bp, Homo sapiens
taaaacctttaaagc

SEQ ID NO: 859234 - DNA, 15 bp, Homo sapiens
aaaacctttaaagct

SEQ ID NO: 859235 - DNA, 15 bp, Homo sapiens
aaacctttaaagcta

SEQ ID NO: 859236 - DNA, 15 bp, Homo sapiens
aacctttaaagctaa

SEQ ID NO: 859237 - DNA, 15 bp, Homo sapiens
acctttaaagctaaa

SEQ ID NO: 859238 - DNA, 15 bp, Homo sapiens
cctttaaagctaaac

SEQ ID NO: 859239 - DNA, 15 bp, Homo sapiens
ctttaaagctaaacc

SEQ ID NO: 859240 - DNA, 15 bp, Homo sapiens
tttaaagctaaacca

SEQ ID NO: 859241 - DNA, 15 bp, Homo sapiens
ttaaagctaaaccaa

SEQ ID NO: 859242 - DNA, 15 bp, Homo sapiens
taaagctaaaccaaa

SEQ ID NO: 859243 - DNA, 15 bp, Homo sapiens
aaagctaaaccaaag

SEQ ID NO: 859244 - DNA, 15 bp, Homo sapiens
aagctaaaccaaaga

SEQ ID NO: 859245 - DNA, 15 bp, Homo sapiens
agctaaaccaaagat

SEQ ID NO: 859246 - DNA, 15 bp, Homo sapiens
gctaaaccaaagatt

SEQ ID NO: 859247 - DNA, 15 bp, Homo sapiens
ctaaaccaaagattt

SEQ ID NO: 859248 - DNA, 15 bp, Homo sapiens
taaaccaaagattta

SEQ ID NO: 859249 - DNA, 15 bp, Homo sapiens
aaaccaaagatttac

SEQ ID NO: 859250 - DNA, 15 bp, Homo sapiens
aaccaaagatttaca

SEQ ID NO: 859251 - DNA, 15 bp, Homo sapiens
accaaagatttacaa

SEQ ID NO: 859252 - DNA, 15 bp, Homo sapiens
ccaaagatttacaaa

SEQ ID NO: 859253 - DNA, 15 bp, Homo sapiens
caaagatttacaaat

SEQ ID NO: 859254 - DNA, 15 bp, Homo sapiens
aaagatttacaaatt

SEQ ID NO: 859255 - DNA, 15 bp, Homo sapiens
aagatttacaaattg

SEQ ID NO: 859256 - DNA, 15 bp, Homo sapiens
agatttacaaattgc

SEQ ID NO: 859257 - DNA, 15 bp, Homo sapiens
gatttacaaattgcc

SEQ ID NO: 859258 - DNA, 15 bp, Homo sapiens
atttacaaattgcct

SEQ ID NO: 859259 - DNA, 15 bp, Homo sapiens
tttacaaattgcctc

SEQ ID NO: 859260 - DNA, 15 bp, Homo sapiens
ttacaaattgcctct

SEQ ID NO: 859261 - DNA, 15 bp, Homo sapiens
tacaaattgcctctt

SEQ ID NO: 859262 - DNA, 15 bp, Homo sapiens
acaaattgcctcttc

SEQ ID NO: 859263 - DNA, 15 bp, Homo sapiens
caaattgcctcttca

SEQ ID NO: 859264 - DNA, 15 bp, Homo sapiens
aaattgcctcttcat

SEQ ID NO: 859265 - DNA, 15 bp, Homo sapiens
aattgcctcttcatc

SEQ ID NO: 859266 - DNA, 15 bp, Homo sapiens
attgcctcttcatcc

SEQ ID NO: 859267 - DNA, 15 bp, Homo sapiens
ttgcctcttcatcca

SEQ ID NO: 859268 - DNA, 15 bp, Homo sapiens
tgcctcttcatccag

SEQ ID NO: 859269 - DNA, 15 bp, Homo sapiens
gcctcttcatccagt

SEQ ID NO: 859270 - DNA, 15 bp, Homo sapiens
cctcttcatccagtc

SEQ ID NO: 859271 - DNA, 15 bp, Homo sapiens
ctcttcatccagtct

SEQ ID NO: 859272 - DNA, 15 bp, Homo sapiens
tcttcatccagtctt

SEQ ID NO: 859273 - DNA, 15 bp, Homo sapiens
cttcatccagtcttt

SEQ ID NO: 859274 - DNA, 15 bp, Homo sapiens
ttcatccagtctttc

SEQ ID NO: 859275 - DNA, 15 bp, Homo sapiens
tcatccagtctttcc

SEQ ID NO: 859276 - DNA, 15 bp, Homo sapiens
catccagtctttccc

SEQ ID NO: 859277 - DNA, 15 bp, Homo sapiens
atccagtctttccca

SEQ ID NO: 859278 - DNA, 15 bp, Homo sapiens
tccagtctttcccaa

SEQ ID NO: 859279 - DNA, 15 bp, Homo sapiens
ccagtctttcccaac

SEQ ID NO: 859280 - DNA, 15 bp, Homo sapiens
cagtctttcccaacc

SEQ ID NO: 859281 - DNA, 15 bp, Homo sapiens
agtctttcccaacct

SEQ ID NO: 859282 - DNA, 15 bp, Homo sapiens
gtctttcccaaccta

SEQ ID NO: 859283 - DNA, 15 bp, Homo sapiens
tctttcccaacctaa

SEQ ID NO: 859284 - DNA, 15 bp, Homo sapiens
ctttcccaacctaaa

SEQ ID NO: 859285 - DNA, 15 bp, Homo sapiens
tttcccaacctaaaa

SEQ ID NO: 859286 - DNA, 15 bp, Homo sapiens
ttcccaacctaaaaa

SEQ ID NO: 859287 - DNA, 15 bp, Homo sapiens
tcccaacctaaaaac

SEQ ID NO: 859288 - DNA, 15 bp, Homo sapiens
cccaacctaaaaact

SEQ ID NO: 859289 - DNA, 15 bp, Homo sapiens
ccaacctaaaaactg

SEQ ID NO: 859290 - DNA, 15 bp, Homo sapiens
caacctaaaaactga

SEQ ID NO: 859291 - DNA, 15 bp, Homo sapiens
aacctaaaaactgag

SEQ ID NO: 859292 - DNA, 15 bp, Homo sapiens
acctaaaaactgagt

SEQ ID NO: 859293 - DNA, 15 bp, Homo sapiens
cctaaaaactgagtt

SEQ ID NO: 859294 - DNA, 15 bp, Homo sapiens
ctaaaaactgagttc

SEQ ID NO: 859295 - DNA, 15 bp, Homo sapiens
taaaaactgagttct

SEQ ID NO: 859296 - DNA, 15 bp, Homo sapiens
aaaaactgagttctc

SEQ ID NO: 859297 - DNA, 15 bp, Homo sapiens
aaaactgagttctct

SEQ ID NO: 859298 - DNA, 15 bp, Homo sapiens
aaactgagttctcta

SEQ ID NO: 859299 - DNA, 15 bp, Homo sapiens
aactgagttctctaa

SEQ ID NO: 859300 - DNA, 15 bp, Homo sapiens
actgagttctctaaa

SEQ ID NO: 859301 - DNA, 15 bp, Homo sapiens
ctgagttctctaaaa

SEQ ID NO: 859302 - DNA, 15 bp, Homo sapiens
tgagttctctaaaaa

SEQ ID NO: 859303 - DNA, 15 bp, Homo sapiens
gagttctctaaaaat

SEQ ID NO: 859304 - DNA, 15 bp, Homo sapiens
agttctctaaaaatt

SEQ ID NO: 859305 - DNA, 15 bp, Homo sapiens
gttctctaaaaattt

SEQ ID NO: 859306 - DNA, 15 bp, Homo sapiens
ttctctaaaaatttt

SEQ ID NO: 859307 - DNA, 15 bp, Homo sapiens
tctctaaaaatttta

SEQ ID NO: 859308 - DNA, 15 bp, Homo sapiens
ctctaaaaattttag

SEQ ID NO: 859309 - DNA, 15 bp, Homo sapiens
tctaaaaattttagt

SEQ ID NO: 859310 - DNA, 15 bp, Homo sapiens
ctaaaaattttagta

SEQ ID NO: 859311 - DNA, 15 bp, Homo sapiens
taaaaattttagtat

SEQ ID NO: 859312 - DNA, 15 bp, Homo sapiens
aaaaattttagtatt

SEQ ID NO: 859313 - DNA, 15 bp, Homo sapiens
aaaattttagtattt

SEQ ID NO: 859314 - DNA, 15 bp, Homo sapiens
aaattttagtatttt

SEQ ID NO: 859315 - DNA, 15 bp, Homo sapiens
aattttagtattttt

SEQ ID NO: 859316 - DNA, 15 bp, Homo sapiens
attttagtatttttt

SEQ ID NO: 859317 - DNA, 15 bp, Homo sapiens
ttttagtattttttt

SEQ ID NO: 859318 - DNA, 15 bp, Homo sapiens
tttagtatttttttc

SEQ ID NO: 859319 - DNA, 15 bp, Homo sapiens
ttagtatttttttct

SEQ ID NO: 859320 - DNA, 15 bp, Homo sapiens
tagtatttttttctg

SEQ ID NO: 859321 - DNA, 15 bp, Homo sapiens
agtatttttttctga

SEQ ID NO: 859322 - DNA, 15 bp, Homo sapiens
gtatttttttctgaa

SEQ ID NO: 859323 - DNA, 15 bp, Homo sapiens
tatttttttctgaag

SEQ ID NO: 859324 - DNA, 15 bp, Homo sapiens
atttttttctgaaga

SEQ ID NO: 859325 - DNA, 15 bp, Homo sapiens
tttttttctgaagaa

SEQ ID NO: 859326 - DNA, 15 bp, Homo sapiens
ttttttctgaagaaa

SEQ ID NO: 859327 - DNA, 15 bp, Homo sapiens
tttttctgaagaaaa

SEQ ID NO: 859328 - DNA, 15 bp, Homo sapiens
ttttctgaagaaaag

SEQ ID NO: 859329 - DNA, 15 bp, Homo sapiens
tttctgaagaaaagg

SEQ ID NO: 859330 - DNA, 15 bp, Homo sapiens
ttctgaagaaaaggg

SEQ ID NO: 859331 - DNA, 15 bp, Homo sapiens
tctgaagaaaaggga

SEQ ID NO: 859332 - DNA, 15 bp, Homo sapiens
ctgaagaaaagggaa

SEQ ID NO: 859333 - DNA, 15 bp, Homo sapiens
tgaagaaaagggaac

SEQ ID NO: 859334 - DNA, 15 bp, Homo sapiens
gaagaaaagggaaca

SEQ ID NO: 859335 - DNA, 15 bp, Homo sapiens
aagaaaagggaacat

SEQ ID NO: 859336 - DNA, 15 bp, Homo sapiens
agaaaagggaacatg

SEQ ID NO: 859337 - DNA, 15 bp, Homo sapiens
gaaaagggaacatgg

SEQ ID NO: 859338 - DNA, 15 bp, Homo sapiens
aaaagggaacatgga

SEQ ID NO: 859339 - DNA, 15 bp, Homo sapiens
aaagggaacatggac

SEQ ID NO: 859340 - DNA, 15 bp, Homo sapiens
aagggaacatggaca

SEQ ID NO: 859341 - DNA, 15 bp, Homo sapiens
agggaacatggacat

SEQ ID NO: 859342 - DNA, 15 bp, Homo sapiens
gggaacatggacatt

SEQ ID NO: 859343 - DNA, 15 bp, Homo sapiens
ggaacatggacattt

SEQ ID NO: 859344 - DNA, 15 bp, Homo sapiens
gaacatggacattta

SEQ ID NO: 859345 - DNA, 15 bp, Homo sapiens
aacatggacatttat

SEQ ID NO: 859346 - DNA, 15 bp, Homo sapiens
acatggacatttatc

SEQ ID NO: 859347 - DNA, 15 bp, Homo sapiens
catggacatttatct

SEQ ID NO: 859348 - DNA, 15 bp, Homo sapiens
atggacatttatcta

SEQ ID NO: 859349 - DNA, 15 bp, Homo sapiens
tggacatttatctaa

SEQ ID NO: 859350 - DNA, 15 bp, Homo sapiens
ggacatttatctaat

SEQ ID NO: 859351 - DNA, 15 bp, Homo sapiens
gacatttatctaatc

SEQ ID NO: 859352 - DNA, 15 bp, Homo sapiens
acatttatctaatcc

SEQ ID NO: 859353 - DNA, 15 bp, Homo sapiens
catttatctaatcct

SEQ ID NO: 859354 - DNA, 15 bp, Homo sapiens
atttatctaatcctc

SEQ ID NO: 859355 - DNA, 15 bp, Homo sapiens
tttatctaatcctca

SEQ ID NO: 859356 - DNA, 15 bp, Homo sapiens
ttatctaatcctcat

SEQ ID NO: 859357 - DNA, 15 bp, Homo sapiens
tatctaatcctcatt

SEQ ID NO: 859358 - DNA, 15 bp, Homo sapiens
atctaatcctcatta

SEQ ID NO: 859359 - DNA, 15 bp, Homo sapiens
tctaatcctcattag

SEQ ID NO: 859360 - DNA, 15 bp, Homo sapiens
ctaatcctcattaga

SEQ ID NO: 859361 - DNA, 15 bp, Homo sapiens
taatcctcattagaa

SEQ ID NO: 859362 - DNA, 15 bp, Homo sapiens
aatcctcattagaaa

SEQ ID NO: 859363 - DNA, 15 bp, Homo sapiens
atcctcattagaaat

SEQ ID NO: 859364 - DNA, 15 bp, Homo sapiens
tcctcattagaaatc

SEQ ID NO: 859365 - DNA, 15 bp, Homo sapiens
cctcattagaaatct

SEQ ID NO: 859366 - DNA, 15 bp, Homo sapiens
ctcattagaaatctg

SEQ ID NO: 859367 - DNA, 15 bp, Homo sapiens
tcattagaaatctga

SEQ ID NO: 859368 - DNA, 15 bp, Homo sapiens
cattagaaatctgac

SEQ ID NO: 859369 - DNA, 15 bp, Homo sapiens
attagaaatctgact

SEQ ID NO: 859370 - DNA, 15 bp, Homo sapiens
ttagaaatctgacta

SEQ ID NO: 859371 - DNA, 15 bp, Homo sapiens
tagaaatctgactaa

SEQ ID NO: 859372 - DNA, 15 bp, Homo sapiens
agaaatctgactaat

SEQ ID NO: 859373 - DNA, 15 bp, Homo sapiens
gaaatctgactaatg

SEQ ID NO: 859374 - DNA, 15 bp, Homo sapiens
aaatctgactaatga

SEQ ID NO: 859375 - DNA, 15 bp, Homo sapiens
aatctgactaatgat

SEQ ID NO: 859376 - DNA, 15 bp, Homo sapiens
atctgactaatgata

SEQ ID NO: 859377 - DNA, 15 bp, Homo sapiens
tctgactaatgataa

SEQ ID NO: 859378 - DNA, 15 bp, Homo sapiens
ctgactaatgataac

SEQ ID NO: 859379 - DNA, 15 bp, Homo sapiens
tgactaatgataaca

SEQ ID NO: 859380 - DNA, 15 bp, Homo sapiens
gactaatgataacaa

SEQ ID NO: 859381 - DNA, 15 bp, Homo sapiens
actaatgataacaag

SEQ ID NO: 859382 - DNA, 15 bp, Homo sapiens
ctaatgataacaagg

SEQ ID NO: 859383 - DNA, 15 bp, Homo sapiens
taatgataacaagga

SEQ ID NO: 859384 - DNA, 15 bp, Homo sapiens
aatgataacaaggat

SEQ ID NO: 859385 - DNA, 15 bp, Homo sapiens
atgataacaaggatt

SEQ ID NO: 859386 - DNA, 15 bp, Homo sapiens
tgataacaaggattt

SEQ ID NO: 859387 - DNA, 15 bp, Homo sapiens
gataacaaggattta

SEQ ID NO: 859388 - DNA, 15 bp, Homo sapiens
ataacaaggatttag

SEQ ID NO: 859389 - DNA, 15 bp, Homo sapiens
taacaaggatttaga

SEQ ID NO: 859390 - DNA, 15 bp, Homo sapiens
aacaaggatttagac

SEQ ID NO: 859391 - DNA, 15 bp, Homo sapiens
acaaggatttagacc

SEQ ID NO: 859392 - DNA, 15 bp, Homo sapiens
caaggatttagacct

SEQ ID NO: 859393 - DNA, 15 bp, Homo sapiens
aaggatttagacctc

SEQ ID NO: 859394 - DNA, 15 bp, Homo sapiens
aggatttagacctca

SEQ ID NO: 859395 - DNA, 15 bp, Homo sapiens
ggatttagacctcaa

SEQ ID NO: 859396 - DNA, 15 bp, Homo sapiens
gatttagacctcaag

SEQ ID NO: 859397 - DNA, 15 bp, Homo sapiens
atttagacctcaagc

SEQ ID NO: 859398 - DNA, 15 bp, Homo sapiens
tttagacctcaagca

SEQ ID NO: 859399 - DNA, 15 bp, Homo sapiens
ttagacctcaagcac

SEQ ID NO: 859400 - DNA, 15 bp, Homo sapiens
tagacctcaagcact

SEQ ID NO: 859401 - DNA, 15 bp, Homo sapiens
agacctcaagcactt

SEQ ID NO: 859402 - DNA, 15 bp, Homo sapiens
gacctcaagcacttc

SEQ ID NO: 859403 - DNA, 15 bp, Homo sapiens
acctcaagcacttct

SEQ ID NO: 859404 - DNA, 15 bp, Homo sapiens
cctcaagcacttctt

SEQ ID NO: 859405 - DNA, 15 bp, Homo sapiens
ctcaagcacttctta

SEQ ID NO: 859406 - DNA, 15 bp, Homo sapiens
tcaagcacttcttac

SEQ ID NO: 859407 - DNA, 15 bp, Homo sapiens
caagcacttcttacc

SEQ ID NO: 859408 - DNA, 15 bp, Homo sapiens
aagcacttcttacca

SEQ ID NO: 859409 - DNA, 15 bp, Homo sapiens
agcacttcttaccaa

SEQ ID NO: 859410 - DNA, 15 bp, Homo sapiens
gcacttcttaccaaa

SEQ ID NO: 859411 - DNA, 15 bp, Homo sapiens
cacttcttaccaaaa

SEQ ID NO: 859412 - DNA, 15 bp, Homo sapiens
acttcttaccaaaat

SEQ ID NO: 859413 - DNA, 15 bp, Homo sapiens
cttcttaccaaaatt

SEQ ID NO: 859414 - DNA, 15 bp, Homo sapiens
ttcttaccaaaattc

SEQ ID NO: 859415 - DNA, 15 bp, Homo sapiens
tcttaccaaaattct

SEQ ID NO: 859416 - DNA, 15 bp, Homo sapiens
cttaccaaaattctt

SEQ ID NO: 859417 - DNA, 15 bp, Homo sapiens
ttaccaaaattcttg

SEQ ID NO: 859418 - DNA, 15 bp, Homo sapiens
taccaaaattcttga

SEQ ID NO: 859419 - DNA, 15 bp, Homo sapiens
accaaaattcttgat

SEQ ID NO: 859420 - DNA, 15 bp, Homo sapiens
ccaaaattcttgata

SEQ ID NO: 859421 - DNA, 15 bp, Homo sapiens
caaaattcttgatat

SEQ ID NO: 859422 - DNA, 15 bp, Homo sapiens
aaaattcttgatatg

SEQ ID NO: 859423 - DNA, 15 bp, Homo sapiens
aaattcttgatatga

SEQ ID NO: 859424 - DNA, 15 bp, Homo sapiens
aattcttgatatgac

SEQ ID NO: 859425 - DNA, 15 bp, Homo sapiens
attcttgatatgacc

SEQ ID NO: 859426 - DNA, 15 bp, Homo sapiens
ttcttgatatgacct

SEQ ID NO: 859427 - DNA, 15 bp, Homo sapiens
tcttgatatgacctt

SEQ ID NO: 859428 - DNA, 15 bp, Homo sapiens
cttgatatgacctta

SEQ ID NO: 859429 - DNA, 15 bp, Homo sapiens
ttgatatgaccttat

SEQ ID NO: 859430 - DNA, 15 bp, Homo sapiens
tgatatgaccttata

SEQ ID NO: 859431 - DNA, 15 bp, Homo sapiens
gatatgaccttatag

SEQ ID NO: 859432 - DNA, 15 bp, Homo sapiens
atatgaccttatagc

SEQ ID NO: 859433 - DNA, 15 bp, Homo sapiens
tatgaccttatagca

SEQ ID NO: 859434 - DNA, 15 bp, Homo sapiens
atgaccttatagcaa

SEQ ID NO: 859435 - DNA, 15 bp, Homo sapiens
tgaccttatagcaaa

SEQ ID NO: 859436 - DNA, 15 bp, Homo sapiens
gaccttatagcaaat

SEQ ID NO: 859437 - DNA, 15 bp, Homo sapiens
accttatagcaaatt

SEQ ID NO: 859438 - DNA, 15 bp, Homo sapiens
ccttatagcaaatta

SEQ ID NO: 859439 - DNA, 15 bp, Homo sapiens
cttatagcaaattac

SEQ ID NO: 859440 - DNA, 15 bp, Homo sapiens
ttatagcaaattact

SEQ ID NO: 859441 - DNA, 15 bp, Homo sapiens
tatagcaaattactt

SEQ ID NO: 859442 - DNA, 15 bp, Homo sapiens
atagcaaattacttt

SEQ ID NO: 859443 - DNA, 15 bp, Homo sapiens
tagcaaattactttc

SEQ ID NO: 859444 - DNA, 15 bp, Homo sapiens
agcaaattactttca

SEQ ID NO: 859445 - DNA, 15 bp, Homo sapiens
gcaaattactttcac

SEQ ID NO: 859446 - DNA, 15 bp, Homo sapiens
caaattactttcacc

SEQ ID NO: 859447 - DNA, 15 bp, Homo sapiens
aaattactttcacct

SEQ ID NO: 859448 - DNA, 15 bp, Homo sapiens
aattactttcacctg

SEQ ID NO: 859449 - DNA, 15 bp, Homo sapiens
attactttcacctgt

SEQ ID NO: 859450 - DNA, 15 bp, Homo sapiens
ttactttcacctgtt

SEQ ID NO: 859451 - DNA, 15 bp, Homo sapiens
tactttcacctgttg

SEQ ID NO: 859452 - DNA, 15 bp, Homo sapiens
actttcacctgttga

SEQ ID NO: 859453 - DNA, 15 bp, Homo sapiens
ctttcacctgttgaa

SEQ ID NO: 859454 - DNA, 15 bp, Homo sapiens
tttcacctgttgaac

SEQ ID NO: 859455 - DNA, 15 bp, Homo sapiens
ttcacctgttgaact

SEQ ID NO: 859456 - DNA, 15 bp, Homo sapiens
tcacctgttgaactt

SEQ ID NO: 859457 - DNA, 15 bp, Homo sapiens
cacctgttgaacttt

SEQ ID NO: 859458 - DNA, 15 bp, Homo sapiens
acctgttgaactttc

SEQ ID NO: 859459 - DNA, 15 bp, Homo sapiens
cctgttgaactttcc

SEQ ID NO: 859460 - DNA, 15 bp, Homo sapiens
ctgttgaactttcct

SEQ ID NO: 859461 - DNA, 15 bp, Homo sapiens
tgttgaactttcctt

SEQ ID NO: 859462 - DNA, 15 bp, Homo sapiens
gttgaactttccttt

SEQ ID NO: 859463 - DNA, 15 bp, Homo sapiens
ttgaactttcctttc

SEQ ID NO: 859464 - DNA, 15 bp, Homo sapiens
tgaactttcctttct

SEQ ID NO: 859465 - DNA, 15 bp, Homo sapiens
gaactttcctttctt

SEQ ID NO: 859466 - DNA, 15 bp, Homo sapiens
aactttcctttcttt

SEQ ID NO: 859467 - DNA, 15 bp, Homo sapiens
actttcctttctttt

SEQ ID NO: 859468 - DNA, 15 bp, Homo sapiens
ctttcctttctttta

SEQ ID NO: 859469 - DNA, 15 bp, Homo sapiens
tttcctttcttttat

SEQ ID NO: 859470 - DNA, 15 bp, Homo sapiens
ttcctttcttttatt

SEQ ID NO: 859471 - DNA, 15 bp, Homo sapiens
tcctttcttttattc

SEQ ID NO: 859472 - DNA, 15 bp, Homo sapiens
cctttcttttattcc

SEQ ID NO: 859473 - DNA, 15 bp, Homo sapiens
ctttcttttattccc

SEQ ID NO: 859474 - DNA, 15 bp, Homo sapiens
tttcttttattcccc

SEQ ID NO: 859475 - DNA, 15 bp, Homo sapiens
ttcttttattcccct

SEQ ID NO: 859476 - DNA, 15 bp, Homo sapiens
tcttttattcccctg

SEQ ID NO: 859477 - DNA, 15 bp, Homo sapiens
cttttattcccctgt

SEQ ID NO: 859478 - DNA, 15 bp, Homo sapiens
ttttattcccctgta

SEQ ID NO: 859479 - DNA, 15 bp, Homo sapiens
tttattcccctgtac

SEQ ID NO: 859480 - DNA, 15 bp, Homo sapiens
ttattcccctgtacc

SEQ ID NO: 859481 - DNA, 15 bp, Homo sapiens
tattcccctgtacct

SEQ ID NO: 859482 - DNA, 15 bp, Homo sapiens
attcccctgtacctc

SEQ ID NO: 859483 - DNA, 15 bp, Homo sapiens
ttcccctgtacctca

SEQ ID NO: 859484 - DNA, 15 bp, Homo sapiens
tcccctgtacctcac

SEQ ID NO: 859485 - DNA, 15 bp, Homo sapiens
cccctgtacctcacc

SEQ ID NO: 859486 - DNA, 15 bp, Homo sapiens
ccctgtacctcacct

SEQ ID NO: 859487 - DNA, 15 bp, Homo sapiens
cctgtacctcacctg

SEQ ID NO: 859488 - DNA, 15 bp, Homo sapiens
ctgtacctcacctgc

SEQ ID NO: 859489 - DNA, 15 bp, Homo sapiens
tgtacctcacctgca

SEQ ID NO: 859490 - DNA, 15 bp, Homo sapiens
gtacctcacctgcac

SEQ ID NO: 859491 - DNA, 15 bp, Homo sapiens
tacctcacctgcact

SEQ ID NO: 859492 - DNA, 15 bp, Homo sapiens
acctcacctgcactg

SEQ ID NO: 859493 - DNA, 15 bp, Homo sapiens
cctcacctgcactgg

SEQ ID NO: 859494 - DNA, 15 bp, Homo sapiens
ctcacctgcactggg

SEQ ID NO: 859495 - DNA, 15 bp, Homo sapiens
tcacctgcactgggc

SEQ ID NO: 859496 - DNA, 15 bp, Homo sapiens
cacctgcactgggca

SEQ ID NO: 859497 - DNA, 15 bp, Homo sapiens
acctgcactgggcat

SEQ ID NO: 859498 - DNA, 15 bp, Homo sapiens
cctgcactgggcata

SEQ ID NO: 859499 - DNA, 15 bp, Homo sapiens
ctgcactgggcatat

SEQ ID NO: 859500 - DNA, 15 bp, Homo sapiens
tgcactgggcatatt

SEQ ID NO: 859501 - DNA, 15 bp, Homo sapiens
gcactgggcatattc

SEQ ID NO: 859502 - DNA, 15 bp, Homo sapiens
cactgggcatattca

SEQ ID NO: 859503 - DNA, 15 bp, Homo sapiens
actgggcatattcaa

SEQ ID NO: 859504 - DNA, 15 bp, Homo sapiens
ctgggcatattcaag

SEQ ID NO: 859505 - DNA, 15 bp, Homo sapiens
tgggcatattcaagt

SEQ ID NO: 859506 - DNA, 15 bp, Homo sapiens
gggcatattcaagtt

SEQ ID NO: 859507 - DNA, 15 bp, Homo sapiens
ggcatattcaagttg

SEQ ID NO: 859508 - DNA, 15 bp, Homo sapiens
gcatattcaagttgc

SEQ ID NO: 859509 - DNA, 15 bp, Homo sapiens
catattcaagttgct

SEQ ID NO: 859510 - DNA, 15 bp, Homo sapiens
atattcaagttgctt

SEQ ID NO: 859511 - DNA, 15 bp, Homo sapiens
tattcaagttgctta

SEQ ID NO: 859512 - DNA, 15 bp, Homo sapiens
attcaagttgcttat

SEQ ID NO: 859513 - DNA, 15 bp, Homo sapiens
ttcaagttgcttata

SEQ ID NO: 859514 - DNA, 15 bp, Homo sapiens
tcaagttgcttatac

SEQ ID NO: 859515 - DNA, 15 bp, Homo sapiens
caagttgcttataca

SEQ ID NO: 859516 - DNA, 15 bp, Homo sapiens
aagttgcttatacaa

SEQ ID NO: 859517 - DNA, 15 bp, Homo sapiens
agttgcttatacaac

SEQ ID NO: 859518 - DNA, 15 bp, Homo sapiens
gttgcttatacaaca

SEQ ID NO: 859519 - DNA, 15 bp, Homo sapiens
ttgcttatacaacac

SEQ ID NO: 859520 - DNA, 15 bp, Homo sapiens
tgcttatacaacact

SEQ ID NO: 859521 - DNA, 15 bp, Homo sapiens
gcttatacaacactt

SEQ ID NO: 859522 - DNA, 15 bp, Homo sapiens
cttatacaacacttt

SEQ ID NO: 859523 - DNA, 15 bp, Homo sapiens
ttatacaacacttta

SEQ ID NO: 859524 - DNA, 15 bp, Homo sapiens
tatacaacactttac

SEQ ID NO: 859525 - DNA, 15 bp, Homo sapiens
atacaacactttact

SEQ ID NO: 859526 - DNA, 15 bp, Homo sapiens
tacaacactttacta

SEQ ID NO: 859527 - DNA, 15 bp, Homo sapiens
acaacactttactat

SEQ ID NO: 859528 - DNA, 15 bp, Homo sapiens
caacactttactatt

SEQ ID NO: 859529 - DNA, 15 bp, Homo sapiens
aacactttactattg

SEQ ID NO: 859530 - DNA, 15 bp, Homo sapiens
acactttactattgt

SEQ ID NO: 859531 - DNA, 15 bp, Homo sapiens
cactttactattgtg

SEQ ID NO: 859532 - DNA, 15 bp, Homo sapiens
actttactattgtgt

SEQ ID NO: 859533 - DNA, 15 bp, Homo sapiens
ctttactattgtgtt

SEQ ID NO: 859534 - DNA, 15 bp, Homo sapiens
tttactattgtgtta

SEQ ID NO: 859535 - DNA, 15 bp, Homo sapiens
ttactattgtgttag

SEQ ID NO: 859536 - DNA, 15 bp, Homo sapiens
tactattgtgttaga

SEQ ID NO: 859537 - DNA, 15 bp, Homo sapiens
actattgtgttagaa

SEQ ID NO: 859538 - DNA, 15 bp, Homo sapiens
ctattgtgttagaaa

SEQ ID NO: 859539 - DNA, 15 bp, Homo sapiens
tattgtgttagaaaa

SEQ ID NO: 859540 - DNA, 15 bp, Homo sapiens
attgtgttagaaaaa

SEQ ID NO: 859541 - DNA, 15 bp, Homo sapiens
ttgtgttagaaaaat

SEQ ID NO: 859542 - DNA, 15 bp, Homo sapiens
tgtgttagaaaaatc

SEQ ID NO: 859543 - DNA, 15 bp, Homo sapiens
gtgttagaaaaatca

SEQ ID NO: 859544 - DNA, 15 bp, Homo sapiens
tgttagaaaaatcat

SEQ ID NO: 859545 - DNA, 15 bp, Homo sapiens
gttagaaaaatcatg

SEQ ID NO: 859546 - DNA, 15 bp, Homo sapiens
ttagaaaaatcatga

SEQ ID NO: 859547 - DNA, 15 bp, Homo sapiens
tagaaaaatcatgac

SEQ ID NO: 859548 - DNA, 15 bp, Homo sapiens
agaaaaatcatgaca

SEQ ID NO: 859549 - DNA, 15 bp, Homo sapiens
gaaaaatcatgacac

SEQ ID NO: 859550 - DNA, 15 bp, Homo sapiens
aaaaatcatgacaca

SEQ ID NO: 859551 - DNA, 15 bp, Homo sapiens
aaaatcatgacacat

SEQ ID NO: 859552 - DNA, 15 bp, Homo sapiens
aaatcatgacacatg

SEQ ID NO: 859553 - DNA, 15 bp, Homo sapiens
aatcatgacacatga

SEQ ID NO: 859554 - DNA, 15 bp, Homo sapiens
atcatgacacatgat

SEQ ID NO: 859555 - DNA, 15 bp, Homo sapiens
tcatgacacatgatg

SEQ ID NO: 859556 - DNA, 15 bp, Homo sapiens
catgacacatgatga

SEQ ID NO: 859557 - DNA, 15 bp, Homo sapiens
atgacacatgatgaa

SEQ ID NO: 859558 - DNA, 15 bp, Homo sapiens
tgacacatgatgaat

SEQ ID NO: 859559 - DNA, 15 bp, Homo sapiens
gacacatgatgaatg

SEQ ID NO: 859560 - DNA, 15 bp, Homo sapiens
acacatgatgaatgt

SEQ ID NO: 859561 - DNA, 15 bp, Homo sapiens
cacatgatgaatgtg

SEQ ID NO: 859562 - DNA, 15 bp, Homo sapiens
acatgatgaatgtgt

SEQ ID NO: 859563 - DNA, 15 bp, Homo sapiens
catgatgaatgtgtt

SEQ ID NO: 859564 - DNA, 15 bp, Homo sapiens
atgatgaatgtgttt

SEQ ID NO: 859565 - DNA, 15 bp, Homo sapiens
tgatgaatgtgtttg

SEQ ID NO: 859566 - DNA, 15 bp, Homo sapiens
gatgaatgtgtttgt

SEQ ID NO: 859567 - DNA, 15 bp, Homo sapiens
atgaatgtgtttgtg

SEQ ID NO: 859568 - DNA, 15 bp, Homo sapiens
tgaatgtgtttgtgc

SEQ ID NO: 859569 - DNA, 15 bp, Homo sapiens
gaatgtgtttgtgca

SEQ ID NO: 859570 - DNA, 15 bp, Homo sapiens
aatgtgtttgtgcaa

SEQ ID NO: 859571 - DNA, 15 bp, Homo sapiens
atgtgtttgtgcaac

SEQ ID NO: 859572 - DNA, 15 bp, Homo sapiens
tgtgtttgtgcaaca

SEQ ID NO: 859573 - DNA, 15 bp, Homo sapiens
gtgtttgtgcaacat

SEQ ID NO: 859574 - DNA, 15 bp, Homo sapiens
tgtttgtgcaacatg

SEQ ID NO: 859575 - DNA, 15 bp, Homo sapiens
gtttgtgcaacatga

SEQ ID NO: 859576 - DNA, 15 bp, Homo sapiens
tttgtgcaacatgag

SEQ ID NO: 859577 - DNA, 15 bp, Homo sapiens
ttgtgcaacatgagc

SEQ ID NO: 859578 - DNA, 15 bp, Homo sapiens
tgtgcaacatgagct

SEQ ID NO: 859579 - DNA, 15 bp, Homo sapiens
gtgcaacatgagctg

SEQ ID NO: 859580 - DNA, 15 bp, Homo sapiens
tgcaacatgagctga

SEQ ID NO: 859581 - DNA, 15 bp, Homo sapiens
gcaacatgagctgat

SEQ ID NO: 859582 - DNA, 15 bp, Homo sapiens
caacatgagctgatt

SEQ ID NO: 859583 - DNA, 15 bp, Homo sapiens
aacatgagctgattc

SEQ ID NO: 859584 - DNA, 15 bp, Homo sapiens
acatgagctgattca

SEQ ID NO: 859585 - DNA, 15 bp, Homo sapiens
catgagctgattcat

SEQ ID NO: 859586 - DNA, 15 bp, Homo sapiens
atgagctgattcata

SEQ ID NO: 859587 - DNA, 15 bp, Homo sapiens
tgagctgattcataa

SEQ ID NO: 859588 - DNA, 15 bp, Homo sapiens
gagctgattcataaa

SEQ ID NO: 859589 - DNA, 15 bp, Homo sapiens
agctgattcataaat

SEQ ID NO: 859590 - DNA, 15 bp, Homo sapiens
gctgattcataaatg

SEQ ID NO: 859591 - DNA, 15 bp, Homo sapiens
ctgattcataaatga

SEQ ID NO: 859592 - DNA, 15 bp, Homo sapiens
tgattcataaatgaa

SEQ ID NO: 859593 - DNA, 15 bp, Homo sapiens
gattcataaatgaaa

SEQ ID NO: 859594 - DNA, 15 bp, Homo sapiens
attcataaatgaaaa

SEQ ID NO: 859595 - DNA, 15 bp, Homo sapiens
ttcataaatgaaaat

SEQ ID NO: 859596 - DNA, 15 bp, Homo sapiens
tcataaatgaaaatg

SEQ ID NO: 859597 - DNA, 15 bp, Homo sapiens
cataaatgaaaatgt

SEQ ID NO: 859598 - DNA, 15 bp, Homo sapiens
ataaatgaaaatgtg

SEQ ID NO: 859599 - DNA, 15 bp, Homo sapiens
taaatgaaaatgtgc

SEQ ID NO: 859600 - DNA, 15 bp, Homo sapiens
aaatgaaaatgtgca

SEQ ID NO: 859601 - DNA, 15 bp, Homo sapiens
aatgaaaatgtgcat

SEQ ID NO: 859602 - DNA, 15 bp, Homo sapiens
atgaaaatgtgcatt

SEQ ID NO: 859603 - DNA, 15 bp, Homo sapiens
tgaaaatgtgcattg

SEQ ID NO: 859604 - DNA, 15 bp, Homo sapiens
gaaaatgtgcattga

SEQ ID NO: 859605 - DNA, 15 bp, Homo sapiens
aaaatgtgcattgaa

SEQ ID NO: 859606 - DNA, 15 bp, Homo sapiens
aaatgtgcattgaaa

SEQ ID NO: 859607 - DNA, 15 bp, Homo sapiens
aatgtgcattgaaat

SEQ ID NO: 859608 - DNA, 15 bp, Homo sapiens
atgtgcattgaaatt

SEQ ID NO: 859609 - DNA, 15 bp, Homo sapiens
tgtgcattgaaattc

SEQ ID NO: 859610 - DNA, 15 bp, Homo sapiens
gtgcattgaaattcc

SEQ ID NO: 859611 - DNA, 15 bp, Homo sapiens
tgcattgaaattcca

SEQ ID NO: 859612 - DNA, 15 bp, Homo sapiens
gcattgaaattccac

SEQ ID NO: 859613 - DNA, 15 bp, Homo sapiens
cattgaaattccaca

SEQ ID NO: 859614 - DNA, 15 bp, Homo sapiens
attgaaattccacaa

SEQ ID NO: 859615 - DNA, 15 bp, Homo sapiens
ttgaaattccacaat

SEQ ID NO: 859616 - DNA, 15 bp, Homo sapiens
tgaaattccacaata

SEQ ID NO: 859617 - DNA, 15 bp, Homo sapiens
gaaattccacaatat

SEQ ID NO: 859618 - DNA, 15 bp, Homo sapiens
aaattccacaatatt

SEQ ID NO: 859619 - DNA, 15 bp, Homo sapiens
aattccacaatattt

SEQ ID NO: 859620 - DNA, 15 bp, Homo sapiens
attccacaatatttt

SEQ ID NO: 859621 - DNA, 15 bp, Homo sapiens
ttccacaatatttta

SEQ ID NO: 859622 - DNA, 15 bp, Homo sapiens
tccacaatattttaa

SEQ ID NO: 859623 - DNA, 15 bp, Homo sapiens
ccacaatattttaaa

SEQ ID NO: 859624 - DNA, 15 bp, Homo sapiens
cacaatattttaaaa

SEQ ID NO: 859625 - DNA, 15 bp, Homo sapiens
acaatattttaaaat

SEQ ID NO: 859626 - DNA, 15 bp, Homo sapiens
caatattttaaaatt

SEQ ID NO: 859627 - DNA, 15 bp, Homo sapiens
aatattttaaaatta

SEQ ID NO: 859628 - DNA, 15 bp, Homo sapiens
atattttaaaattag

SEQ ID NO: 859629 - DNA, 15 bp, Homo sapiens
tattttaaaattagg

SEQ ID NO: 859630 - DNA, 15 bp, Homo sapiens
attttaaaattagga

SEQ ID NO: 859631 - DNA, 15 bp, Homo sapiens
ttttaaaattaggag

SEQ ID NO: 859632 - DNA, 15 bp, Homo sapiens
tttaaaattaggagt

SEQ ID NO: 859633 - DNA, 15 bp, Homo sapiens
ttaaaattaggagtt

SEQ ID NO: 859634 - DNA, 15 bp, Homo sapiens
taaaattaggagttt

SEQ ID NO: 859635 - DNA, 15 bp, Homo sapiens
aaaattaggagttta

SEQ ID NO: 859636 - DNA, 15 bp, Homo sapiens
aaattaggagtttat

SEQ ID NO: 859637 - DNA, 15 bp, Homo sapiens
aattaggagtttatc

SEQ ID NO: 859638 - DNA, 15 bp, Homo sapiens
attaggagtttatct

SEQ ID NO: 859639 - DNA, 15 bp, Homo sapiens
ttaggagtttatcta

SEQ ID NO: 859640 - DNA, 15 bp, Homo sapiens
taggagtttatctag

SEQ ID NO: 859641 - DNA, 15 bp, Homo sapiens
aggagtttatctagc

SEQ ID NO: 859642 - DNA, 15 bp, Homo sapiens
ggagtttatctagca

SEQ ID NO: 859643 - DNA, 15 bp, Homo sapiens
gagtttatctagcaa

SEQ ID NO: 859644 - DNA, 15 bp, Homo sapiens
agtttatctagcaat

SEQ ID NO: 859645 - DNA, 15 bp, Homo sapiens
gtttatctagcaatt

SEQ ID NO: 859646 - DNA, 15 bp, Homo sapiens
tttatctagcaattg

SEQ ID NO: 859647 - DNA, 15 bp, Homo sapiens
ttatctagcaattga

SEQ ID NO: 859648 - DNA, 15 bp, Homo sapiens
tatctagcaattgaa

SEQ ID NO: 859649 - DNA, 15 bp, Homo sapiens
atctagcaattgaac

SEQ ID NO: 859650 - DNA, 15 bp, Homo sapiens
tctagcaattgaaca

SEQ ID NO: 859651 - DNA, 15 bp, Homo sapiens
ctagcaattgaacaa

SEQ ID NO: 859652 - DNA, 15 bp, Homo sapiens
tagcaattgaacaaa

SEQ ID NO: 859653 - DNA, 15 bp, Homo sapiens
agcaattgaacaaaa

SEQ ID NO: 859654 - DNA, 15 bp, Homo sapiens
gcaattgaacaaaat

SEQ ID NO: 859655 - DNA, 15 bp, Homo sapiens
caattgaacaaaatt

SEQ ID NO: 859656 - DNA, 15 bp, Homo sapiens
aattgaacaaaattg

SEQ ID NO: 859657 - DNA, 15 bp, Homo sapiens
attgaacaaaattga

SEQ ID NO: 859658 - DNA, 15 bp, Homo sapiens
ttgaacaaaattgat

SEQ ID NO: 859659 - DNA, 15 bp, Homo sapiens
tgaacaaaattgatt

SEQ ID NO: 859660 - DNA, 15 bp, Homo sapiens
gaacaaaattgatta

SEQ ID NO: 859661 - DNA, 15 bp, Homo sapiens
aacaaaattgattaa

SEQ ID NO: 859662 - DNA, 15 bp, Homo sapiens
acaaaattgattaaa

SEQ ID NO: 859663 - DNA, 15 bp, Homo sapiens
caaaattgattaaat

SEQ ID NO: 859664 - DNA, 15 bp, Homo sapiens
aaaattgattaaatc

SEQ ID NO: 859665 - DNA, 15 bp, Homo sapiens
aaattgattaaatcc

SEQ ID NO: 859666 - DNA, 15 bp, Homo sapiens
aattgattaaatcca

SEQ ID NO: 859667 - DNA, 15 bp, Homo sapiens
attgattaaatccat

SEQ ID NO: 859668 - DNA, 15 bp, Homo sapiens
ttgattaaatccatt

SEQ ID NO: 859669 - DNA, 15 bp, Homo sapiens
tgattaaatccatta

SEQ ID NO: 859670 - DNA, 15 bp, Homo sapiens
gattaaatccattat

SEQ ID NO: 859671 - DNA, 15 bp, Homo sapiens
attaaatccattatt

SEQ ID NO: 859672 - DNA, 15 bp, Homo sapiens
ttaaatccattattt

SEQ ID NO: 859673 - DNA, 15 bp, Homo sapiens
taaatccattatttg

SEQ ID NO: 859674 - DNA, 15 bp, Homo sapiens
aaatccattatttgt

SEQ ID NO: 859675 - DNA, 15 bp, Homo sapiens
aatccattatttgtt

SEQ ID NO: 859676 - DNA, 15 bp, Homo sapiens
atccattatttgtta

SEQ ID NO: 859677 - DNA, 15 bp, Homo sapiens
tccattatttgttag

SEQ ID NO: 859678 - DNA, 15 bp, Homo sapiens
ccattatttgttaga

SEQ ID NO: 859679 - DNA, 15 bp, Homo sapiens
cattatttgttagat

SEQ ID NO: 859680 - DNA, 15 bp, Homo sapiens
attatttgttagatc

SEQ ID NO: 859681 - DNA, 15 bp, Homo sapiens
ttatttgttagatca

SEQ ID NO: 859682 - DNA, 15 bp, Homo sapiens
tatttgttagatcag

SEQ ID NO: 859683 - DNA, 15 bp, Homo sapiens
atttgttagatcagc

SEQ ID NO: 859684 - DNA, 15 bp, Homo sapiens
tttgttagatcagct

SEQ ID NO: 859685 - DNA, 15 bp, Homo sapiens
ttgttagatcagcta

SEQ ID NO: 859686 - DNA, 15 bp, Homo sapiens
tgttagatcagctaa

SEQ ID NO: 859687 - DNA, 15 bp, Homo sapiens
gttagatcagctaaa

SEQ ID NO: 859688 - DNA, 15 bp, Homo sapiens
ttagatcagctaaat

SEQ ID NO: 859689 - DNA, 15 bp, Homo sapiens
tagatcagctaaatt

SEQ ID NO: 859690 - DNA, 15 bp, Homo sapiens
agatcagctaaatta

SEQ ID NO: 859691 - DNA, 15 bp, Homo sapiens
gatcagctaaattac

SEQ ID NO: 859692 - DNA, 15 bp, Homo sapiens
atcagctaaattaca

SEQ ID NO: 859693 - DNA, 15 bp, Homo sapiens
tcagctaaattacat

SEQ ID NO: 859694 - DNA, 15 bp, Homo sapiens
cagctaaattacata

SEQ ID NO: 859695 - DNA, 15 bp, Homo sapiens
agctaaattacataa

SEQ ID NO: 859696 - DNA, 15 bp, Homo sapiens
gctaaattacataag

SEQ ID NO: 859697 - DNA, 15 bp, Homo sapiens
ctaaattacataagt

SEQ ID NO: 859698 - DNA, 15 bp, Homo sapiens
taaattacataagtt

SEQ ID NO: 859699 - DNA, 15 bp, Homo sapiens
aaattacataagttc

SEQ ID NO: 859700 - DNA, 15 bp, Homo sapiens
aattacataagttca

SEQ ID NO: 859701 - DNA, 15 bp, Homo sapiens
attacataagttcat

SEQ ID NO: 859702 - DNA, 15 bp, Homo sapiens
ttacataagttcatt

SEQ ID NO: 859703 - DNA, 15 bp, Homo sapiens
tacataagttcattc

SEQ ID NO: 859704 - DNA, 15 bp, Homo sapiens
acataagttcattca

SEQ ID NO: 859705 - DNA, 15 bp, Homo sapiens
cataagttcattcat

SEQ ID NO: 859706 - DNA, 15 bp, Homo sapiens
ataagttcattcatc

SEQ ID NO: 859707 - DNA, 15 bp, Homo sapiens
taagttcattcatct

SEQ ID NO: 859708 - DNA, 15 bp, Homo sapiens
aagttcattcatctg

SEQ ID NO: 859709 - DNA, 15 bp, Homo sapiens
agttcattcatctgc

SEQ ID NO: 859710 - DNA, 15 bp, Homo sapiens
gttcattcatctgct

SEQ ID NO: 859711 - DNA, 15 bp, Homo sapiens
ttcattcatctgctc

SEQ ID NO: 859712 - DNA, 15 bp, Homo sapiens
tcattcatctgctca

SEQ ID NO: 859713 - DNA, 15 bp, Homo sapiens
cattcatctgctcat

SEQ ID NO: 859714 - DNA, 15 bp, Homo sapiens
attcatctgctcata

SEQ ID NO: 859715 - DNA, 15 bp, Homo sapiens
ttcatctgctcataa

SEQ ID NO: 859716 - DNA, 15 bp, Homo sapiens
tcatctgctcataaa

SEQ ID NO: 859717 - DNA, 15 bp, Homo sapiens
catctgctcataaat

SEQ ID NO: 859718 - DNA, 15 bp, Homo sapiens
atctgctcataaatc

SEQ ID NO: 859719 - DNA, 15 bp, Homo sapiens
tctgctcataaatcc

SEQ ID NO: 859720 - DNA, 15 bp, Homo sapiens
ctgctcataaatcca

SEQ ID NO: 859721 - DNA, 15 bp, Homo sapiens
tgctcataaatccat

SEQ ID NO: 859722 - DNA, 15 bp, Homo sapiens
gctcataaatccatc

SEQ ID NO: 859723 - DNA, 15 bp, Homo sapiens
ctcataaatccatcc

SEQ ID NO: 859724 - DNA, 15 bp, Homo sapiens
tcataaatccatcca

SEQ ID NO: 859725 - DNA, 15 bp, Homo sapiens
cataaatccatccat

SEQ ID NO: 859726 - DNA, 15 bp, Homo sapiens
ataaatccatccatt

SEQ ID NO: 859727 - DNA, 15 bp, Homo sapiens
taaatccatccattc

SEQ ID NO: 859728 - DNA, 15 bp, Homo sapiens
aaatccatccattct

SEQ ID NO: 859729 - DNA, 15 bp, Homo sapiens
aatccatccattctt

SEQ ID NO: 859730 - DNA, 15 bp, Homo sapiens
atccatccattcttc

SEQ ID NO: 859731 - DNA, 15 bp, Homo sapiens
tccatccattcttcc

SEQ ID NO: 859732 - DNA, 15 bp, Homo sapiens
ccatccattcttcca

SEQ ID NO: 859733 - DNA, 15 bp, Homo sapiens
catccattcttccat

SEQ ID NO: 859734 - DNA, 15 bp, Homo sapiens
atccattcttccatc

SEQ ID NO: 859735 - DNA, 15 bp, Homo sapiens
tccattcttccatct

SEQ ID NO: 859736 - DNA, 15 bp, Homo sapiens
ccattcttccatctg

SEQ ID NO: 859737 - DNA, 15 bp, Homo sapiens
cattcttccatctgg

SEQ ID NO: 859738 - DNA, 15 bp, Homo sapiens
attcttccatctggc

SEQ ID NO: 859739 - DNA, 15 bp, Homo sapiens
ttcttccatctggct

SEQ ID NO: 859740 - DNA, 15 bp, Homo sapiens
tcttccatctggcta

SEQ ID NO: 859741 - DNA, 15 bp, Homo sapiens
cttccatctggctat

SEQ ID NO: 859742 - DNA, 15 bp, Homo sapiens
ttccatctggctatc

SEQ ID NO: 859743 - DNA, 15 bp, Homo sapiens
tccatctggctatcc

SEQ ID NO: 859744 - DNA, 15 bp, Homo sapiens
ccatctggctatccc

SEQ ID NO: 859745 - DNA, 15 bp, Homo sapiens
catctggctatccct

SEQ ID NO: 859746 - DNA, 15 bp, Homo sapiens
atctggctatccctt

SEQ ID NO: 859747 - DNA, 15 bp, Homo sapiens
tctggctatccctta

SEQ ID NO: 859748 - DNA, 15 bp, Homo sapiens
ctggctatcccttag

SEQ ID NO: 859749 - DNA, 15 bp, Homo sapiens
tggctatcccttagt

SEQ ID NO: 859750 - DNA, 15 bp, Homo sapiens
ggctatcccttagtc

SEQ ID NO: 859751 - DNA, 15 bp, Homo sapiens
gctatcccttagtca

SEQ ID NO: 859752 - DNA, 15 bp, Homo sapiens
ctatcccttagtcaa

SEQ ID NO: 859753 - DNA, 15 bp, Homo sapiens
tatcccttagtcaat

SEQ ID NO: 859754 - DNA, 15 bp, Homo sapiens
atcccttagtcaatt

SEQ ID NO: 859755 - DNA, 15 bp, Homo sapiens
tcccttagtcaattc

SEQ ID NO: 859756 - DNA, 15 bp, Homo sapiens
cccttagtcaattca

SEQ ID NO: 859757 - DNA, 15 bp, Homo sapiens
ccttagtcaattcaa

SEQ ID NO: 859758 - DNA, 15 bp, Homo sapiens
cttagtcaattcaaa

SEQ ID NO: 859759 - DNA, 15 bp, Homo sapiens
ttagtcaattcaaat

SEQ ID NO: 859760 - DNA, 15 bp, Homo sapiens
tagtcaattcaaata

SEQ ID NO: 859761 - DNA, 15 bp, Homo sapiens
agtcaattcaaataa

SEQ ID NO: 859762 - DNA, 15 bp, Homo sapiens
gtcaattcaaataaa

SEQ ID NO: 859763 - DNA, 15 bp, Homo sapiens
tcaattcaaataaat

SEQ ID NO: 859764 - DNA, 15 bp, Homo sapiens
caattcaaataaata

SEQ ID NO: 859765 - DNA, 15 bp, Homo sapiens
aattcaaataaatat

SEQ ID NO: 859766 - DNA, 15 bp, Homo sapiens
attcaaataaatatt

SEQ ID NO: 859767 - DNA, 15 bp, Homo sapiens
ttcaaataaatattt

SEQ ID NO: 859768 - DNA, 15 bp, Homo sapiens
tcaaataaatattta

SEQ ID NO: 859769 - DNA, 15 bp, Homo sapiens
caaataaatatttat

SEQ ID NO: 859770 - DNA, 15 bp, Homo sapiens
aaataaatatttatg

SEQ ID NO: 859771 - DNA, 15 bp, Homo sapiens
aataaatatttatgg

SEQ ID NO: 859772 - DNA, 15 bp, Homo sapiens
ataaatatttatggg

SEQ ID NO: 859773 - DNA, 15 bp, Homo sapiens
taaatatttatgggg

SEQ ID NO: 859774 - DNA, 15 bp, Homo sapiens
aaatatttatggggc

SEQ ID NO: 859775 - DNA, 15 bp, Homo sapiens
aatatttatggggca

SEQ ID NO: 859776 - DNA, 15 bp, Homo sapiens
atatttatggggcac

SEQ ID NO: 859777 - DNA, 15 bp, Homo sapiens
tatttatggggcact

SEQ ID NO: 859778 - DNA, 15 bp, Homo sapiens
atttatggggcactt

SEQ ID NO: 859779 - DNA, 15 bp, Homo sapiens
tttatggggcacttt

SEQ ID NO: 859780 - DNA, 15 bp, Homo sapiens
ttatggggcactttg

SEQ ID NO: 859781 - DNA, 15 bp, Homo sapiens
tatggggcactttgg

SEQ ID NO: 859782 - DNA, 15 bp, Homo sapiens
atggggcactttggg

SEQ ID NO: 859783 - DNA, 15 bp, Homo sapiens
tggggcactttgggt

SEQ ID NO: 859784 - DNA, 15 bp, Homo sapiens
ggggcactttgggta

SEQ ID NO: 859785 - DNA, 15 bp, Homo sapiens
gggcactttgggtaa

SEQ ID NO: 859786 - DNA, 15 bp, Homo sapiens
ggcactttgggtaag

SEQ ID NO: 859787 - DNA, 15 bp, Homo sapiens
gcactttgggtaagc

SEQ ID NO: 859788 - DNA, 15 bp, Homo sapiens
cactttgggtaagcc

SEQ ID NO: 859789 - DNA, 15 bp, Homo sapiens
actttgggtaagcca

SEQ ID NO: 859790 - DNA, 15 bp, Homo sapiens
ctttgggtaagccag

SEQ ID NO: 859791 - DNA, 15 bp, Homo sapiens
tttgggtaagccagg

SEQ ID NO: 859792 - DNA, 15 bp, Homo sapiens
ttgggtaagccaggt

SEQ ID NO: 859793 - DNA, 15 bp, Homo sapiens
tgggtaagccaggtg

SEQ ID NO: 859794 - DNA, 15 bp, Homo sapiens
gggtaagccaggtgc

SEQ ID NO: 859795 - DNA, 15 bp, Homo sapiens
ggtaagccaggtgct

SEQ ID NO: 859796 - DNA, 15 bp, Homo sapiens
gtaagccaggtgcta

SEQ ID NO: 859797 - DNA, 15 bp, Homo sapiens
taagccaggtgctaa

SEQ ID NO: 859798 - DNA, 15 bp, Homo sapiens
aagccaggtgctaag

SEQ ID NO: 859799 - DNA, 15 bp, Homo sapiens
agccaggtgctaaga

SEQ ID NO: 859800 - DNA, 15 bp, Homo sapiens
gccaggtgctaagaa

SEQ ID NO: 859801 - DNA, 15 bp, Homo sapiens
ccaggtgctaagaat

SEQ ID NO: 859802 - DNA, 15 bp, Homo sapiens
caggtgctaagaatt

SEQ ID NO: 859803 - DNA, 15 bp, Homo sapiens
aggtgctaagaattc

SEQ ID NO: 859804 - DNA, 15 bp, Homo sapiens
ggtgctaagaattca

SEQ ID NO: 859805 - DNA, 15 bp, Homo sapiens
gtgctaagaattcaa

SEQ ID NO: 859806 - DNA, 15 bp, Homo sapiens
tgctaagaattcaat

SEQ ID NO: 859807 - DNA, 15 bp, Homo sapiens
gctaagaattcaatg

SEQ ID NO: 859808 - DNA, 15 bp, Homo sapiens
ctaagaattcaatgc

SEQ ID NO: 859809 - DNA, 15 bp, Homo sapiens
taagaattcaatgca

SEQ ID NO: 859810 - DNA, 15 bp, Homo sapiens
aagaattcaatgcaa

SEQ ID NO: 859811 - DNA, 15 bp, Homo sapiens
agaattcaatgcaaa

SEQ ID NO: 859812 - DNA, 15 bp, Homo sapiens
gaattcaatgcaaaa

SEQ ID NO: 859813 - DNA, 15 bp, Homo sapiens
aattcaatgcaaaac

SEQ ID NO: 859814 - DNA, 15 bp, Homo sapiens
attcaatgcaaaaca

SEQ ID NO: 859815 - DNA, 15 bp, Homo sapiens
ttcaatgcaaaacaa

SEQ ID NO: 859816 - DNA, 15 bp, Homo sapiens
tcaatgcaaaacaag

SEQ ID NO: 859817 - DNA, 15 bp, Homo sapiens
caatgcaaaacaaga

SEQ ID NO: 859818 - DNA, 15 bp, Homo sapiens
aatgcaaaacaagat

SEQ ID NO: 859819 - DNA, 15 bp, Homo sapiens
atgcaaaacaagata

SEQ ID NO: 859820 - DNA, 15 bp, Homo sapiens
tgcaaaacaagatag

SEQ ID NO: 859821 - DNA, 15 bp, Homo sapiens
gcaaaacaagataga

SEQ ID NO: 859822 - DNA, 15 bp, Homo sapiens
caaaacaagatagac

SEQ ID NO: 859823 - DNA, 15 bp, Homo sapiens
aaaacaagatagact

SEQ ID NO: 859824 - DNA, 15 bp, Homo sapiens
aaacaagatagactc

SEQ ID NO: 859825 - DNA, 15 bp, Homo sapiens
aacaagatagactcc

SEQ ID NO: 859826 - DNA, 15 bp, Homo sapiens
acaagatagactccc

SEQ ID NO: 859827 - DNA, 15 bp, Homo sapiens
caagatagactcccc

SEQ ID NO: 859828 - DNA, 15 bp, Homo sapiens
aagatagactcccct

SEQ ID NO: 859829 - DNA, 15 bp, Homo sapiens
agatagactcccctg

SEQ ID NO: 859830 - DNA, 15 bp, Homo sapiens
gatagactcccctgt

SEQ ID NO: 859831 - DNA, 15 bp, Homo sapiens
atagactcccctgtc

SEQ ID NO: 859832 - DNA, 15 bp, Homo sapiens
tagactcccctgtcc

SEQ ID NO: 859833 - DNA, 15 bp, Homo sapiens
agactcccctgtcct

SEQ ID NO: 859834 - DNA, 15 bp, Homo sapiens
gactcccctgtcctt

SEQ ID NO: 859835 - DNA, 15 bp, Homo sapiens
actcccctgtccttg

SEQ ID NO: 859836 - DNA, 15 bp, Homo sapiens
ctcccctgtccttgt

SEQ ID NO: 859837 - DNA, 15 bp, Homo sapiens
tcccctgtccttgtt

SEQ ID NO: 859838 - DNA, 15 bp, Homo sapiens
cccctgtccttgttg

SEQ ID NO: 859839 - DNA, 15 bp, Homo sapiens
ccctgtccttgttga

SEQ ID NO: 859840 - DNA, 15 bp, Homo sapiens
cctgtccttgttgaa

SEQ ID NO: 859841 - DNA, 15 bp, Homo sapiens
ctgtccttgttgaac

SEQ ID NO: 859842 - DNA, 15 bp, Homo sapiens
tgtccttgttgaact

SEQ ID NO: 859843 - DNA, 15 bp, Homo sapiens
gtccttgttgaactt

SEQ ID NO: 859844 - DNA, 15 bp, Homo sapiens
tccttgttgaactta

SEQ ID NO: 859845 - DNA, 15 bp, Homo sapiens
ccttgttgaacttat

SEQ ID NO: 859846 - DNA, 15 bp, Homo sapiens
cttgttgaacttata

SEQ ID NO: 859847 - DNA, 15 bp, Homo sapiens
ttgttgaacttatat

SEQ ID NO: 859848 - DNA, 15 bp, Homo sapiens
tgttgaacttatatt

SEQ ID NO: 859849 - DNA, 15 bp, Homo sapiens
gttgaacttatattt

SEQ ID NO: 859850 - DNA, 15 bp, Homo sapiens
ttgaacttatatttt

SEQ ID NO: 859851 - DNA, 15 bp, Homo sapiens
tgaacttatattttt

SEQ ID NO: 859852 - DNA, 15 bp, Homo sapiens
gaacttatatttttg

SEQ ID NO: 859853 - DNA, 15 bp, Homo sapiens
aacttatatttttgg

SEQ ID NO: 859854 - DNA, 15 bp, Homo sapiens
acttatatttttggt

SEQ ID NO: 859855 - DNA, 15 bp, Homo sapiens
cttatatttttggta

SEQ ID NO: 859856 - DNA, 15 bp, Homo sapiens
ttatatttttggtac

SEQ ID NO: 859857 - DNA, 15 bp, Homo sapiens
tatatttttggtaca

SEQ ID NO: 859858 - DNA, 15 bp, Homo sapiens
atatttttggtacaa

SEQ ID NO: 859859 - DNA, 15 bp, Homo sapiens
tatttttggtacaaa

SEQ ID NO: 859860 - DNA, 15 bp, Homo sapiens
atttttggtacaaac

SEQ ID NO: 859861 - DNA, 15 bp, Homo sapiens
tttttggtacaaaca

SEQ ID NO: 859862 - DNA, 15 bp, Homo sapiens
ttttggtacaaacaa

SEQ ID NO: 859863 - DNA, 15 bp, Homo sapiens
tttggtacaaacaaa

SEQ ID NO: 859864 - DNA, 15 bp, Homo sapiens
ttggtacaaacaaaa

SEQ ID NO: 859865 - DNA, 15 bp, Homo sapiens
tggtacaaacaaaag

SEQ ID NO: 859866 - DNA, 15 bp, Homo sapiens
ggtacaaacaaaagc

SEQ ID NO: 859867 - DNA, 15 bp, Homo sapiens
gtacaaacaaaagca

SEQ ID NO: 859868 - DNA, 15 bp, Homo sapiens
tacaaacaaaagcaa

SEQ ID NO: 859869 - DNA, 15 bp, Homo sapiens
acaaacaaaagcaat

SEQ ID NO: 859870 - DNA, 15 bp, Homo sapiens
caaacaaaagcaata

SEQ ID NO: 859871 - DNA, 15 bp, Homo sapiens
aaacaaaagcaataa

SEQ ID NO: 859872 - DNA, 15 bp, Homo sapiens
aacaaaagcaataat

SEQ ID NO: 859873 - DNA, 15 bp, Homo sapiens
acaaaagcaataatc

SEQ ID NO: 859874 - DNA, 15 bp, Homo sapiens
caaaagcaataatca

SEQ ID NO: 859875 - DNA, 15 bp, Homo sapiens
aaaagcaataatcaa

SEQ ID NO: 859876 - DNA, 15 bp, Homo sapiens
aaagcaataatcaag

SEQ ID NO: 859877 - DNA, 15 bp, Homo sapiens
aagcaataatcaaga

SEQ ID NO: 859878 - DNA, 15 bp, Homo sapiens
agcaataatcaagaa

SEQ ID NO: 859879 - DNA, 15 bp, Homo sapiens
gcaataatcaagaaa

SEQ ID NO: 859880 - DNA, 15 bp, Homo sapiens
caataatcaagaaaa

SEQ ID NO: 859881 - DNA, 15 bp, Homo sapiens
aataatcaagaaaaa

SEQ ID NO: 859882 - DNA, 15 bp, Homo sapiens
ataatcaagaaaaaa

SEQ ID NO: 859883 - DNA, 15 bp, Homo sapiens
taatcaagaaaaaat

SEQ ID NO: 859884 - DNA, 15 bp, Homo sapiens
aatcaagaaaaaata

SEQ ID NO: 859885 - DNA, 15 bp, Homo sapiens
atcaagaaaaaataa

SEQ ID NO: 859886 - DNA, 15 bp, Homo sapiens
tcaagaaaaaataaa

SEQ ID NO: 859887 - DNA, 15 bp, Homo sapiens
caagaaaaaataaaa

SEQ ID NO: 859888 - DNA, 15 bp, Homo sapiens
aagaaaaaataaaaa

SEQ ID NO: 859889 - DNA, 15 bp, Homo sapiens
agaaaaaataaaaaa

SEQ ID NO: 859890 - DNA, 15 bp, Homo sapiens
gaaaaaataaaaaaa

SEQ ID NO: 859891 - DNA, 15 bp, Homo sapiens
aaaaaataaaaaaag

SEQ ID NO: 859892 - DNA, 15 bp, Homo sapiens
aaaaataaaaaaagt

SEQ ID NO: 859893 - DNA, 15 bp, Homo sapiens
aaaataaaaaaagta

SEQ ID NO: 859894 - DNA, 15 bp, Homo sapiens
aaataaaaaaagtac

SEQ ID NO: 859895 - DNA, 15 bp, Homo sapiens
aataaaaaaagtact

SEQ ID NO: 859896 - DNA, 15 bp, Homo sapiens
ataaaaaaagtactg

SEQ ID NO: 859897 - DNA, 15 bp, Homo sapiens
taaaaaaagtactga

SEQ ID NO: 859898 - DNA, 15 bp, Homo sapiens
aaaaaaagtactgat

SEQ ID NO: 859899 - DNA, 15 bp, Homo sapiens
aaaaaagtactgatt

SEQ ID NO: 859900 - DNA, 15 bp, Homo sapiens
aaaaagtactgattg

SEQ ID NO: 859901 - DNA, 15 bp, Homo sapiens
aaaagtactgattgt

SEQ ID NO: 859902 - DNA, 15 bp, Homo sapiens
aaagtactgattgtg

SEQ ID NO: 859903 - DNA, 15 bp, Homo sapiens
aagtactgattgtga

SEQ ID NO: 859904 - DNA, 15 bp, Homo sapiens
agtactgattgtgat

SEQ ID NO: 859905 - DNA, 15 bp, Homo sapiens
gtactgattgtgatt

SEQ ID NO: 859906 - DNA, 15 bp, Homo sapiens
tactgattgtgatta

SEQ ID NO: 859907 - DNA, 15 bp, Homo sapiens
actgattgtgattaa

SEQ ID NO: 859908 - DNA, 15 bp, Homo sapiens
ctgattgtgattaat

SEQ ID NO: 859909 - DNA, 15 bp, Homo sapiens
tgattgtgattaata

SEQ ID NO: 859910 - DNA, 15 bp, Homo sapiens
gattgtgattaataa

SEQ ID NO: 859911 - DNA, 15 bp, Homo sapiens
attgtgattaataat

SEQ ID NO: 859912 - DNA, 15 bp, Homo sapiens
ttgtgattaataata

SEQ ID NO: 859913 - DNA, 15 bp, Homo sapiens
tgtgattaataatat

SEQ ID NO: 859914 - DNA, 15 bp, Homo sapiens
gtgattaataatatg

SEQ ID NO: 859915 - DNA, 15 bp, Homo sapiens
tgattaataatatga

SEQ ID NO: 859916 - DNA, 15 bp, Homo sapiens
gattaataatatgaa

SEQ ID NO: 859917 - DNA, 15 bp, Homo sapiens
attaataatatgaag

SEQ ID NO: 859918 - DNA, 15 bp, Homo sapiens
ttaataatatgaaga

SEQ ID NO: 859919 - DNA, 15 bp, Homo sapiens
taataatatgaagaa

SEQ ID NO: 859920 - DNA, 15 bp, Homo sapiens
aataatatgaagaaa

SEQ ID NO: 859921 - DNA, 15 bp, Homo sapiens
ataatatgaagaaat

SEQ ID NO: 859922 - DNA, 15 bp, Homo sapiens
taatatgaagaaatt

SEQ ID NO: 859923 - DNA, 15 bp, Homo sapiens
aatatgaagaaattc

SEQ ID NO: 859924 - DNA, 15 bp, Homo sapiens
atatgaagaaattca

SEQ ID NO: 859925 - DNA, 15 bp, Homo sapiens
tatgaagaaattcaa

SEQ ID NO: 859926 - DNA, 15 bp, Homo sapiens
atgaagaaattcaac

SEQ ID NO: 859927 - DNA, 15 bp, Homo sapiens
tgaagaaattcaaca

SEQ ID NO: 859928 - DNA, 15 bp, Homo sapiens
gaagaaattcaacag

SEQ ID NO: 859929 - DNA, 15 bp, Homo sapiens
aagaaattcaacaga

SEQ ID NO: 859930 - DNA, 15 bp, Homo sapiens
agaaattcaacagag

SEQ ID NO: 859931 - DNA, 15 bp, Homo sapiens
gaaattcaacagagt

SEQ ID NO: 859932 - DNA, 15 bp, Homo sapiens
aaattcaacagagta

SEQ ID NO: 859933 - DNA, 15 bp, Homo sapiens
aattcaacagagtat

SEQ ID NO: 859934 - DNA, 15 bp, Homo sapiens
attcaacagagtatt

SEQ ID NO: 859935 - DNA, 15 bp, Homo sapiens
ttcaacagagtattg

SEQ ID NO: 859936 - DNA, 15 bp, Homo sapiens
tcaacagagtattgt

SEQ ID NO: 859937 - DNA, 15 bp, Homo sapiens
caacagagtattgta

SEQ ID NO: 859938 - DNA, 15 bp, Homo sapiens
aacagagtattgtac

SEQ ID NO: 859939 - DNA, 15 bp, Homo sapiens
acagagtattgtact

SEQ ID NO: 859940 - DNA, 15 bp, Homo sapiens
cagagtattgtactt

SEQ ID NO: 859941 - DNA, 15 bp, Homo sapiens
agagtattgtactta

SEQ ID NO: 859942 - DNA, 15 bp, Homo sapiens
gagtattgtacttaa

SEQ ID NO: 859943 - DNA, 15 bp, Homo sapiens
agtattgtacttaac

SEQ ID NO: 859944 - DNA, 15 bp, Homo sapiens
gtattgtacttaaca

SEQ ID NO: 859945 - DNA, 15 bp, Homo sapiens
tattgtacttaacat

SEQ ID NO: 859946 - DNA, 15 bp, Homo sapiens
attgtacttaacatt

SEQ ID NO: 859947 - DNA, 15 bp, Homo sapiens
ttgtacttaacattt

SEQ ID NO: 859948 - DNA, 15 bp, Homo sapiens
tgtacttaacatttg

SEQ ID NO: 859949 - DNA, 15 bp, Homo sapiens
gtacttaacatttga

SEQ ID NO: 859950 - DNA, 15 bp, Homo sapiens
tacttaacatttgat

SEQ ID NO: 859951 - DNA, 15 bp, Homo sapiens
acttaacatttgatt

SEQ ID NO: 859952 - DNA, 15 bp, Homo sapiens
cttaacatttgattg

SEQ ID NO: 859953 - DNA, 15 bp, Homo sapiens
ttaacatttgattga

SEQ ID NO: 859954 - DNA, 15 bp, Homo sapiens
taacatttgattgat

SEQ ID NO: 859955 - DNA, 15 bp, Homo sapiens
aacatttgattgatc

SEQ ID NO: 859956 - DNA, 15 bp, Homo sapiens
acatttgattgatct

SEQ ID NO: 859957 - DNA, 15 bp, Homo sapiens
catttgattgatctg

SEQ ID NO: 859958 - DNA, 15 bp, Homo sapiens
atttgattgatctga

SEQ ID NO: 859959 - DNA, 15 bp, Homo sapiens
tttgattgatctgat

SEQ ID NO: 859960 - DNA, 15 bp, Homo sapiens
ttgattgatctgatt

SEQ ID NO: 859961 - DNA, 15 bp, Homo sapiens
tgattgatctgattt

SEQ ID NO: 859962 - DNA, 15 bp, Homo sapiens
gattgatctgatttt

SEQ ID NO: 859963 - DNA, 15 bp, Homo sapiens
attgatctgattttc

SEQ ID NO: 859964 - DNA, 15 bp, Homo sapiens
ttgatctgattttct

SEQ ID NO: 859965 - DNA, 15 bp, Homo sapiens
tgatctgattttctc

SEQ ID NO: 859966 - DNA, 15 bp, Homo sapiens
gatctgattttctca

SEQ ID NO: 859967 - DNA, 15 bp, Homo sapiens
atctgattttctcag

SEQ ID NO: 859968 - DNA, 15 bp, Homo sapiens
tctgattttctcagt

SEQ ID NO: 859969 - DNA, 15 bp, Homo sapiens
ctgattttctcagtt

SEQ ID NO: 859970 - DNA, 15 bp, Homo sapiens
tgattttctcagttg

SEQ ID NO: 859971 - DNA, 15 bp, Homo sapiens
gattttctcagttgt

SEQ ID NO: 859972 - DNA, 15 bp, Homo sapiens
attttctcagttgtc

SEQ ID NO: 859973 - DNA, 15 bp, Homo sapiens
ttttctcagttgtct

SEQ ID NO: 859974 - DNA, 15 bp, Homo sapiens
tttctcagttgtctg

SEQ ID NO: 859975 - DNA, 15 bp, Homo sapiens
ttctcagttgtctga

SEQ ID NO: 859976 - DNA, 15 bp, Homo sapiens
tctcagttgtctgag

SEQ ID NO: 859977 - DNA, 15 bp, Homo sapiens
ctcagttgtctgaga

SEQ ID NO: 859978 - DNA, 15 bp, Homo sapiens
tcagttgtctgagaa

SEQ ID NO: 859979 - DNA, 15 bp, Homo sapiens
cagttgtctgagaac

SEQ ID NO: 859980 - DNA, 15 bp, Homo sapiens
agttgtctgagaaca

SEQ ID NO: 859981 - DNA, 15 bp, Homo sapiens
gttgtctgagaacaa

SEQ ID NO: 859982 - DNA, 15 bp, Homo sapiens
ttgtctgagaacaaa

SEQ ID NO: 859983 - DNA, 15 bp, Homo sapiens
tgtctgagaacaaac

SEQ ID NO: 859984 - DNA, 15 bp, Homo sapiens
gtctgagaacaaaca

SEQ ID NO: 859985 - DNA, 15 bp, Homo sapiens
tctgagaacaaacat

SEQ ID NO: 859986 - DNA, 15 bp, Homo sapiens
ctgagaacaaacatt

SEQ ID NO: 859987 - DNA, 15 bp, Homo sapiens
tgagaacaaacattt

SEQ ID NO: 859988 - DNA, 15 bp, Homo sapiens
gagaacaaacatttg

SEQ ID NO: 859989 - DNA, 15 bp, Homo sapiens
agaacaaacatttgt

SEQ ID NO: 859990 - DNA, 15 bp, Homo sapiens
gaacaaacatttgtg

SEQ ID NO: 859991 - DNA, 15 bp, Homo sapiens
aacaaacatttgtga

SEQ ID NO: 859992 - DNA, 15 bp, Homo sapiens
acaaacatttgtgaa

SEQ ID NO: 859993 - DNA, 15 bp, Homo sapiens
caaacatttgtgaaa

SEQ ID NO: 859994 - DNA, 15 bp, Homo sapiens
aaacatttgtgaaaa

SEQ ID NO: 859995 - DNA, 15 bp, Homo sapiens
aacatttgtgaaaat

SEQ ID NO: 859996 - DNA, 15 bp, Homo sapiens
acatttgtgaaaatc

SEQ ID NO: 859997 - DNA, 15 bp, Homo sapiens
catttgtgaaaatct

SEQ ID NO: 859998 - DNA, 15 bp, Homo sapiens
atttgtgaaaatctc

SEQ ID NO: 859999 - DNA, 15 bp, Homo sapiens
tttgtgaaaatctca

SEQ ID NO: 860000 - DNA, 15 bp, Homo sapiens
ttgtgaaaatctcat

SEQ ID NO: 860001 - DNA, 15 bp, Homo sapiens
tgtgaaaatctcatt

SEQ ID NO: 860002 - DNA, 15 bp, Homo sapiens
gtgaaaatctcattg

SEQ ID NO: 860003 - DNA, 15 bp, Homo sapiens
tgaaaatctcattgt

SEQ ID NO: 860004 - DNA, 15 bp, Homo sapiens
gaaaatctcattgta

SEQ ID NO: 860005 - DNA, 15 bp, Homo sapiens
aaaatctcattgtag

SEQ ID NO: 860006 - DNA, 15 bp, Homo sapiens
aaatctcattgtaga

SEQ ID NO: 860007 - DNA, 15 bp, Homo sapiens
aatctcattgtagag

SEQ ID NO: 860008 - DNA, 15 bp, Homo sapiens
atctcattgtagagt

SEQ ID NO: 860009 - DNA, 15 bp, Homo sapiens
tctcattgtagagtt

SEQ ID NO: 860010 - DNA, 15 bp, Homo sapiens
ctcattgtagagttc

SEQ ID NO: 860011 - DNA, 15 bp, Homo sapiens
tcattgtagagttct

SEQ ID NO: 860012 - DNA, 15 bp, Homo sapiens
cattgtagagttctt

SEQ ID NO: 860013 - DNA, 15 bp, Homo sapiens
attgtagagttctta

SEQ ID NO: 860014 - DNA, 15 bp, Homo sapiens
ttgtagagttcttac

SEQ ID NO: 860015 - DNA, 15 bp, Homo sapiens
tgtagagttcttacg

SEQ ID NO: 860016 - DNA, 15 bp, Homo sapiens
gtagagttcttacga

SEQ ID NO: 860017 - DNA, 15 bp, Homo sapiens
tagagttcttacgat

SEQ ID NO: 860018 - DNA, 15 bp, Homo sapiens
agagttcttacgatg

SEQ ID NO: 860019 - DNA, 15 bp, Homo sapiens
gagttcttacgatgg

SEQ ID NO: 860020 - DNA, 15 bp, Homo sapiens
agttcttacgatgga

SEQ ID NO: 860021 - DNA, 15 bp, Homo sapiens
gttcttacgatggat

SEQ ID NO: 860022 - DNA, 15 bp, Homo sapiens
ttcttacgatggata

SEQ ID NO: 860023 - DNA, 15 bp, Homo sapiens
tcttacgatggatag

SEQ ID NO: 860024 - DNA, 15 bp, Homo sapiens
cttacgatggatagg

SEQ ID NO: 860025 - DNA, 15 bp, Homo sapiens
ttacgatggataggg

SEQ ID NO: 860026 - DNA, 15 bp, Homo sapiens
tacgatggatagggg

SEQ ID NO: 860027 - DNA, 15 bp, Homo sapiens
acgatggataggggg

SEQ ID NO: 860028 - DNA, 15 bp, Homo sapiens
cgatggatagggggt

SEQ ID NO: 860029 - DNA, 15 bp, Homo sapiens
gatggatagggggtc

SEQ ID NO: 860030 - DNA, 15 bp, Homo sapiens
atggatagggggtca

SEQ ID NO: 860031 - DNA, 15 bp, Homo sapiens
tggatagggggtcaa

SEQ ID NO: 860032 - DNA, 15 bp, Homo sapiens
ggatagggggtcaac

SEQ ID NO: 860033 - DNA, 15 bp, Homo sapiens
gatagggggtcaact

SEQ ID NO: 860034 - DNA, 15 bp, Homo sapiens
atagggggtcaactg

SEQ ID NO: 860035 - DNA, 15 bp, Homo sapiens
tagggggtcaactgt

SEQ ID NO: 860036 - DNA, 15 bp, Homo sapiens
agggggtcaactgtg

SEQ ID NO: 860037 - DNA, 15 bp, Homo sapiens
gggggtcaactgtgt

SEQ ID NO: 860038 - DNA, 15 bp, Homo sapiens
ggggtcaactgtgtc

SEQ ID NO: 860039 - DNA, 15 bp, Homo sapiens
gggtcaactgtgtca

SEQ ID NO: 860040 - DNA, 15 bp, Homo sapiens
ggtcaactgtgtcat

SEQ ID NO: 860041 - DNA, 15 bp, Homo sapiens
gtcaactgtgtcatt

SEQ ID NO: 860042 - DNA, 15 bp, Homo sapiens
tcaactgtgtcatta

SEQ ID NO: 860043 - DNA, 15 bp, Homo sapiens
caactgtgtcattat

SEQ ID NO: 860044 - DNA, 15 bp, Homo sapiens
aactgtgtcattatt

SEQ ID NO: 860045 - DNA, 15 bp, Homo sapiens
actgtgtcattattg

SEQ ID NO: 860046 - DNA, 15 bp, Homo sapiens
ctgtgtcattattgc

SEQ ID NO: 860047 - DNA, 15 bp, Homo sapiens
tgtgtcattattgct

SEQ ID NO: 860048 - DNA, 15 bp, Homo sapiens
gtgtcattattgctt

SEQ ID NO: 860049 - DNA, 15 bp, Homo sapiens
tgtcattattgctta

SEQ ID NO: 860050 - DNA, 15 bp, Homo sapiens
gtcattattgcttat

SEQ ID NO: 860051 - DNA, 15 bp, Homo sapiens
tcattattgcttatc

SEQ ID NO: 860052 - DNA, 15 bp, Homo sapiens
cattattgcttatca

SEQ ID NO: 860053 - DNA, 15 bp, Homo sapiens
attattgcttatcag

SEQ ID NO: 860054 - DNA, 15 bp, Homo sapiens
ttattgcttatcagc

SEQ ID NO: 860055 - DNA, 15 bp, Homo sapiens
tattgcttatcagct

SEQ ID NO: 860056 - DNA, 15 bp, Homo sapiens
attgcttatcagctt

SEQ ID NO: 860057 - DNA, 15 bp, Homo sapiens
ttgcttatcagctta

SEQ ID NO: 860058 - DNA, 15 bp, Homo sapiens
tgcttatcagcttat

SEQ ID NO: 860059 - DNA, 15 bp, Homo sapiens
gcttatcagcttatc

SEQ ID NO: 860060 - DNA, 15 bp, Homo sapiens
cttatcagcttatcc

SEQ ID NO: 860061 - DNA, 15 bp, Homo sapiens
ttatcagcttatccc

SEQ ID NO: 860062 - DNA, 15 bp, Homo sapiens
tatcagcttatccca

SEQ ID NO: 860063 - DNA, 15 bp, Homo sapiens
atcagcttatcccaa

SEQ ID NO: 860064 - DNA, 15 bp, Homo sapiens
tcagcttatcccaaa

SEQ ID NO: 860065 - DNA, 15 bp, Homo sapiens
cagcttatcccaaag

SEQ ID NO: 860066 - DNA, 15 bp, Homo sapiens
agcttatcccaaaga

SEQ ID NO: 860067 - DNA, 15 bp, Homo sapiens
gcttatcccaaagac

SEQ ID NO: 860068 - DNA, 15 bp, Homo sapiens
cttatcccaaagacc

SEQ ID NO: 860069 - DNA, 15 bp, Homo sapiens
ttatcccaaagacct

SEQ ID NO: 860070 - DNA, 15 bp, Homo sapiens
tatcccaaagaccta

SEQ ID NO: 860071 - DNA, 15 bp, Homo sapiens
atcccaaagacctag

SEQ ID NO: 860072 - DNA, 15 bp, Homo sapiens
tcccaaagacctagt

SEQ ID NO: 860073 - DNA, 15 bp, Homo sapiens
cccaaagacctagtt

SEQ ID NO: 860074 - DNA, 15 bp, Homo sapiens
ccaaagacctagttt

SEQ ID NO: 860075 - DNA, 15 bp, Homo sapiens
caaagacctagttta

SEQ ID NO: 860076 - DNA, 15 bp, Homo sapiens
aaagacctagtttat

SEQ ID NO: 860077 - DNA, 15 bp, Homo sapiens
aagacctagtttatt

SEQ ID NO: 860078 - DNA, 15 bp, Homo sapiens
agacctagtttatta

SEQ ID NO: 860079 - DNA, 15 bp, Homo sapiens
gacctagtttattac

SEQ ID NO: 860080 - DNA, 15 bp, Homo sapiens
acctagtttattacc

SEQ ID NO: 860081 - DNA, 15 bp, Homo sapiens
cctagtttattacca

SEQ ID NO: 860082 - DNA, 15 bp, Homo sapiens
ctagtttattaccag

SEQ ID NO: 860083 - DNA, 15 bp, Homo sapiens
tagtttattaccaga

SEQ ID NO: 860084 - DNA, 15 bp, Homo sapiens
agtttattaccagat

SEQ ID NO: 860085 - DNA, 15 bp, Homo sapiens
gtttattaccagatt

SEQ ID NO: 860086 - DNA, 15 bp, Homo sapiens
tttattaccagattg

SEQ ID NO: 860087 - DNA, 15 bp, Homo sapiens
ttattaccagattgc

SEQ ID NO: 860088 - DNA, 15 bp, Homo sapiens
tattaccagattgca

SEQ ID NO: 860089 - DNA, 15 bp, Homo sapiens
attaccagattgcaa

SEQ ID NO: 860090 - DNA, 15 bp, Homo sapiens
ttaccagattgcaaa

SEQ ID NO: 860091 - DNA, 15 bp, Homo sapiens
taccagattgcaaat

SEQ ID NO: 860092 - DNA, 15 bp, Homo sapiens
accagattgcaaata

SEQ ID NO: 860093 - DNA, 15 bp, Homo sapiens
ccagattgcaaatag

SEQ ID NO: 860094 - DNA, 15 bp, Homo sapiens
cagattgcaaatagt

SEQ ID NO: 860095 - DNA, 15 bp, Homo sapiens
agattgcaaatagtg

SEQ ID NO: 860096 - DNA, 15 bp, Homo sapiens
gattgcaaatagtgt

SEQ ID NO: 860097 - DNA, 15 bp, Homo sapiens
attgcaaatagtgtt

SEQ ID NO: 860098 - DNA, 15 bp, Homo sapiens
ttgcaaatagtgttc

SEQ ID NO: 860099 - DNA, 15 bp, Homo sapiens
tgcaaatagtgttca

SEQ ID NO: 860100 - DNA, 15 bp, Homo sapiens
gcaaatagtgttcaa

SEQ ID NO: 860101 - DNA, 15 bp, Homo sapiens
caaatagtgttcaat

SEQ ID NO: 860102 - DNA, 15 bp, Homo sapiens
aaatagtgttcaata

SEQ ID NO: 860103 - DNA, 15 bp, Homo sapiens
aatagtgttcaataa

SEQ ID NO: 860104 - DNA, 15 bp, Homo sapiens
atagtgttcaataaa

SEQ ID NO: 860105 - DNA, 15 bp, Homo sapiens
tagtgttcaataaat

SEQ ID NO: 860106 - DNA, 15 bp, Homo sapiens
agtgttcaataaatt

SEQ ID NO: 860107 - DNA, 15 bp, Homo sapiens
gtgttcaataaatta

SEQ ID NO: 860108 - DNA, 15 bp, Homo sapiens
tgttcaataaattat

SEQ ID NO: 860109 - DNA, 15 bp, Homo sapiens
gttcaataaattatt

SEQ ID NO: 860110 - DNA, 15 bp, Homo sapiens
ttcaataaattattc

SEQ ID NO: 860111 - DNA, 15 bp, Homo sapiens
tcaataaattattct

SEQ ID NO: 860112 - DNA, 15 bp, Homo sapiens
caataaattattctt

SEQ ID NO: 860113 - DNA, 15 bp, Homo sapiens
aataaattattctta

SEQ ID NO: 860114 - DNA, 15 bp, Homo sapiens
ataaattattcttat

SEQ ID NO: 860115 - DNA, 15 bp, Homo sapiens
taaattattcttatt

SEQ ID NO: 860116 - DNA, 15 bp, Homo sapiens
aaattattcttatta

SEQ ID NO: 860117 - DNA, 15 bp, Homo sapiens
aattattcttattaa

SEQ ID NO: 860118 - DNA, 15 bp, Homo sapiens
attattcttattaag

SEQ ID NO: 860119 - DNA, 15 bp, Homo sapiens
ttattcttattaagg

SEQ ID NO: 860120 - DNA, 15 bp, Homo sapiens
tattcttattaaggg

SEQ ID NO: 860121 - DNA, 15 bp, Homo sapiens
attcttattaagggt

SEQ ID NO: 860122 - DNA, 15 bp, Homo sapiens
ttcttattaagggtt

SEQ ID NO: 860123 - DNA, 15 bp, Homo sapiens
tcttattaagggttg

SEQ ID NO: 860124 - DNA, 15 bp, Homo sapiens
cttattaagggttgt

SEQ ID NO: 860125 - DNA, 15 bp, Homo sapiens
ttattaagggttgtt

SEQ ID NO: 860126 - DNA, 15 bp, Homo sapiens
tattaagggttgtta

SEQ ID NO: 860127 - DNA, 15 bp, Homo sapiens
attaagggttgttat

SEQ ID NO: 860128 - DNA, 15 bp, Homo sapiens
ttaagggttgttatg

SEQ ID NO: 860129 - DNA, 15 bp, Homo sapiens
taagggttgttatgt

SEQ ID NO: 860130 - DNA, 15 bp, Homo sapiens
aagggttgttatgta

SEQ ID NO: 860131 - DNA, 15 bp, Homo sapiens
agggttgttatgtac

SEQ ID NO: 860132 - DNA, 15 bp, Homo sapiens
gggttgttatgtact

SEQ ID NO: 860133 - DNA, 15 bp, Homo sapiens
ggttgttatgtactc

SEQ ID NO: 860134 - DNA, 15 bp, Homo sapiens
gttgttatgtactct

SEQ ID NO: 860135 - DNA, 15 bp, Homo sapiens
ttgttatgtactcta

SEQ ID NO: 860136 - DNA, 15 bp, Homo sapiens
tgttatgtactctaa

SEQ ID NO: 860137 - DNA, 15 bp, Homo sapiens
gttatgtactctaaa

SEQ ID NO: 860138 - DNA, 15 bp, Homo sapiens
ttatgtactctaaaa

SEQ ID NO: 860139 - DNA, 15 bp, Homo sapiens
tatgtactctaaaac

SEQ ID NO: 860140 - DNA, 15 bp, Homo sapiens
atgtactctaaaaca

SEQ ID NO: 860141 - DNA, 15 bp, Homo sapiens
tgtactctaaaacat

SEQ ID NO: 860142 - DNA, 15 bp, Homo sapiens
gtactctaaaacatt

SEQ ID NO: 860143 - DNA, 15 bp, Homo sapiens
tactctaaaacattt

SEQ ID NO: 860144 - DNA, 15 bp, Homo sapiens
actctaaaacattta

SEQ ID NO: 860145 - DNA, 15 bp, Homo sapiens
ctctaaaacatttat

SEQ ID NO: 860146 - DNA, 15 bp, Homo sapiens
tctaaaacatttatt

SEQ ID NO: 860147 - DNA, 15 bp, Homo sapiens
ctaaaacatttattg

SEQ ID NO: 860148 - DNA, 15 bp, Homo sapiens
taaaacatttattgt

SEQ ID NO: 860149 - DNA, 15 bp, Homo sapiens
aaaacatttattgtg

SEQ ID NO: 860150 - DNA, 15 bp, Homo sapiens
aaacatttattgtgg

SEQ ID NO: 860151 - DNA, 15 bp, Homo sapiens
aacatttattgtggt

SEQ ID NO: 860152 - DNA, 15 bp, Homo sapiens
acatttattgtggtc

SEQ ID NO: 860153 - DNA, 15 bp, Homo sapiens
catttattgtggtcc

SEQ ID NO: 860154 - DNA, 15 bp, Homo sapiens
atttattgtggtccc

SEQ ID NO: 860155 - DNA, 15 bp, Homo sapiens
tttattgtggtccct

SEQ ID NO: 860156 - DNA, 15 bp, Homo sapiens
ttattgtggtccctt

SEQ ID NO: 860157 - DNA, 15 bp, Homo sapiens
tattgtggtcccttc

SEQ ID NO: 860158 - DNA, 15 bp, Homo sapiens
attgtggtcccttca

SEQ ID NO: 860159 - DNA, 15 bp, Homo sapiens
ttgtggtcccttcac

SEQ ID NO: 860160 - DNA, 15 bp, Homo sapiens
tgtggtcccttcact

SEQ ID NO: 860161 - DNA, 15 bp, Homo sapiens
gtggtcccttcactg

SEQ ID NO: 860162 - DNA, 15 bp, Homo sapiens
tggtcccttcactgg

SEQ ID NO: 860163 - DNA, 15 bp, Homo sapiens
ggtcccttcactggt

SEQ ID NO: 860164 - DNA, 15 bp, Homo sapiens
gtcccttcactggtt

SEQ ID NO: 860165 - DNA, 15 bp, Homo sapiens
tcccttcactggttc

SEQ ID NO: 860166 - DNA, 15 bp, Homo sapiens
cccttcactggttct

SEQ ID NO: 860167 - DNA, 15 bp, Homo sapiens
ccttcactggttctg

SEQ ID NO: 860168 - DNA, 15 bp, Homo sapiens
cttcactggttctgg

SEQ ID NO: 860169 - DNA, 15 bp, Homo sapiens
ttcactggttctggt

SEQ ID NO: 860170 - DNA, 15 bp, Homo sapiens
tcactggttctggtt

SEQ ID NO: 860171 - DNA, 15 bp, Homo sapiens
cactggttctggttt

SEQ ID NO: 860172 - DNA, 15 bp, Homo sapiens
actggttctggttta

SEQ ID NO: 860173 - DNA, 15 bp, Homo sapiens
ctggttctggtttac

SEQ ID NO: 860174 - DNA, 15 bp, Homo sapiens
tggttctggtttaca

SEQ ID NO: 860175 - DNA, 15 bp, Homo sapiens
ggttctggtttacaa

SEQ ID NO: 860176 - DNA, 15 bp, Homo sapiens
gttctggtttacaaa

SEQ ID NO: 860177 - DNA, 15 bp, Homo sapiens
ttctggtttacaaac

SEQ ID NO: 860178 - DNA, 15 bp, Homo sapiens
tctggtttacaaact

SEQ ID NO: 860179 - DNA, 15 bp, Homo sapiens
ctggtttacaaactt

SEQ ID NO: 860180 - DNA, 15 bp, Homo sapiens
tggtttacaaactta

SEQ ID NO: 860181 - DNA, 15 bp, Homo sapiens
ggtttacaaacttac

SEQ ID NO: 860182 - DNA, 15 bp, Homo sapiens
gtttacaaacttact

SEQ ID NO: 860183 - DNA, 15 bp, Homo sapiens
tttacaaacttactt

SEQ ID NO: 860184 - DNA, 15 bp, Homo sapiens
ttacaaacttacttt

SEQ ID NO: 860185 - DNA, 15 bp, Homo sapiens
tacaaacttactttt

SEQ ID NO: 860186 - DNA, 15 bp, Homo sapiens
acaaacttacttttc

SEQ ID NO: 860187 - DNA, 15 bp, Homo sapiens
caaacttacttttct

SEQ ID NO: 860188 - DNA, 15 bp, Homo sapiens
aaacttacttttcta

SEQ ID NO: 860189 - DNA, 15 bp, Homo sapiens
aacttacttttctat

SEQ ID NO: 860190 - DNA, 15 bp, Homo sapiens
acttacttttctatg

SEQ ID NO: 860191 - DNA, 15 bp, Homo sapiens
cttacttttctatga

SEQ ID NO: 860192 - DNA, 15 bp, Homo sapiens
ttacttttctatgat

SEQ ID NO: 860193 - DNA, 15 bp, Homo sapiens
tacttttctatgatg

SEQ ID NO: 860194 - DNA, 15 bp, Homo sapiens
acttttctatgatga

SEQ ID NO: 860195 - DNA, 15 bp, Homo sapiens
cttttctatgatgac

SEQ ID NO: 860196 - DNA, 15 bp, Homo sapiens
ttttctatgatgaca

SEQ ID NO: 860197 - DNA, 15 bp, Homo sapiens
tttctatgatgacat

SEQ ID NO: 860198 - DNA, 15 bp, Homo sapiens
ttctatgatgacata

SEQ ID NO: 860199 - DNA, 15 bp, Homo sapiens
tctatgatgacatag

SEQ ID NO: 860200 - DNA, 15 bp, Homo sapiens
ctatgatgacatagt

SEQ ID NO: 860201 - DNA, 15 bp, Homo sapiens
tatgatgacatagta

SEQ ID NO: 860202 - DNA, 15 bp, Homo sapiens
atgatgacatagtat

SEQ ID NO: 860203 - DNA, 15 bp, Homo sapiens
tgatgacatagtata

SEQ ID NO: 860204 - DNA, 15 bp, Homo sapiens
gatgacatagtatag

SEQ ID NO: 860205 - DNA, 15 bp, Homo sapiens
atgacatagtataga

SEQ ID NO: 860206 - DNA, 15 bp, Homo sapiens
tgacatagtatagaa

SEQ ID NO: 860207 - DNA, 15 bp, Homo sapiens
gacatagtatagaaa

SEQ ID NO: 860208 - DNA, 15 bp, Homo sapiens
acatagtatagaaat

SEQ ID NO: 860209 - DNA, 15 bp, Homo sapiens
catagtatagaaatt

SEQ ID NO: 860210 - DNA, 15 bp, Homo sapiens
atagtatagaaattg

SEQ ID NO: 860211 - DNA, 15 bp, Homo sapiens
tagtatagaaattga

SEQ ID NO: 860212 - DNA, 15 bp, Homo sapiens
agtatagaaattgag

SEQ ID NO: 860213 - DNA, 15 bp, Homo sapiens
gtatagaaattgaga

SEQ ID NO: 860214 - DNA, 15 bp, Homo sapiens
tatagaaattgagag

SEQ ID NO: 860215 - DNA, 15 bp, Homo sapiens
atagaaattgagagt

SEQ ID NO: 860216 - DNA, 15 bp, Homo sapiens
tagaaattgagagtg

SEQ ID NO: 860217 - DNA, 15 bp, Homo sapiens
agaaattgagagtga

SEQ ID NO: 860218 - DNA, 15 bp, Homo sapiens
gaaattgagagtgaa

SEQ ID NO: 860219 - DNA, 15 bp, Homo sapiens
aaattgagagtgaat

SEQ ID NO: 860220 - DNA, 15 bp, Homo sapiens
aattgagagtgaata

SEQ ID NO: 860221 - DNA, 15 bp, Homo sapiens
attgagagtgaatat

SEQ ID NO: 860222 - DNA, 15 bp, Homo sapiens
ttgagagtgaatatt

SEQ ID NO: 860223 - DNA, 15 bp, Homo sapiens
tgagagtgaatattt

SEQ ID NO: 860224 - DNA, 15 bp, Homo sapiens
gagagtgaatattta

SEQ ID NO: 860225 - DNA, 15 bp, Homo sapiens
agagtgaatatttag

SEQ ID NO: 860226 - DNA, 15 bp, Homo sapiens
gagtgaatatttaga

SEQ ID NO: 860227 - DNA, 15 bp, Homo sapiens
agtgaatatttagaa

SEQ ID NO: 860228 - DNA, 15 bp, Homo sapiens
gtgaatatttagaag

SEQ ID NO: 860229 - DNA, 15 bp, Homo sapiens
tgaatatttagaagt

SEQ ID NO: 860230 - DNA, 15 bp, Homo sapiens
gaatatttagaagtt

SEQ ID NO: 860231 - DNA, 15 bp, Homo sapiens
aatatttagaagttc

SEQ ID NO: 860232 - DNA, 15 bp, Homo sapiens
atatttagaagttca

SEQ ID NO: 860233 - DNA, 15 bp, Homo sapiens
tatttagaagttcat

SEQ ID NO: 860234 - DNA, 15 bp, Homo sapiens
atttagaagttcatt

SEQ ID NO: 860235 - DNA, 15 bp, Homo sapiens
tttagaagttcattt

SEQ ID NO: 860236 - DNA, 15 bp, Homo sapiens
ttagaagttcatttt

SEQ ID NO: 860237 - DNA, 15 bp, Homo sapiens
tagaagttcattttt

SEQ ID NO: 860238 - DNA, 15 bp, Homo sapiens
agaagttcattttta

SEQ ID NO: 860239 - DNA, 15 bp, Homo sapiens
gaagttcatttttat

SEQ ID NO: 860240 - DNA, 15 bp, Homo sapiens
aagttcatttttatt

SEQ ID NO: 860241 - DNA, 15 bp, Homo sapiens
agttcatttttatta

SEQ ID NO: 860242 - DNA, 15 bp, Homo sapiens
gttcatttttattat

SEQ ID NO: 860243 - DNA, 15 bp, Homo sapiens
ttcatttttattata

SEQ ID NO: 860244 - DNA, 15 bp, Homo sapiens
tcatttttattatat

SEQ ID NO: 860245 - DNA, 15 bp, Homo sapiens
catttttattatata

SEQ ID NO: 860246 - DNA, 15 bp, Homo sapiens
atttttattatatat

SEQ ID NO: 860247 - DNA, 15 bp, Homo sapiens
tttttattatatatt

SEQ ID NO: 860248 - DNA, 15 bp, Homo sapiens
ttttattatatattt

SEQ ID NO: 860249 - DNA, 15 bp, Homo sapiens
tttattatatatttt

SEQ ID NO: 860250 - DNA, 15 bp, Homo sapiens
ttattatatattttt

SEQ ID NO: 860251 - DNA, 15 bp, Homo sapiens
tattatatatttttg

SEQ ID NO: 860252 - DNA, 15 bp, Homo sapiens
attatatatttttga

SEQ ID NO: 860253 - DNA, 15 bp, Homo sapiens
ttatatatttttgaa

SEQ ID NO: 860254 - DNA, 15 bp, Homo sapiens
tatatatttttgaag

SEQ ID NO: 860255 - DNA, 15 bp, Homo sapiens
atatatttttgaagt

SEQ ID NO: 860256 - DNA, 15 bp, Homo sapiens
tatatttttgaagta

SEQ ID NO: 860257 - DNA, 15 bp, Homo sapiens
atatttttgaagtat

SEQ ID NO: 860258 - DNA, 15 bp, Homo sapiens
tatttttgaagtatt

SEQ ID NO: 860259 - DNA, 15 bp, Homo sapiens
atttttgaagtattg

SEQ ID NO: 860260 - DNA, 15 bp, Homo sapiens
tttttgaagtattga

SEQ ID NO: 860261 - DNA, 15 bp, Homo sapiens
ttttgaagtattgat

SEQ ID NO: 860262 - DNA, 15 bp, Homo sapiens
tttgaagtattgata

SEQ ID NO: 860263 - DNA, 15 bp, Homo sapiens
ttgaagtattgatat

SEQ ID NO: 860264 - DNA, 15 bp, Homo sapiens
tgaagtattgatatg

SEQ ID NO: 860265 - DNA, 15 bp, Homo sapiens
gaagtattgatatgt

SEQ ID NO: 860266 - DNA, 15 bp, Homo sapiens
aagtattgatatgta

SEQ ID NO: 860267 - DNA, 15 bp, Homo sapiens
agtattgatatgtag

SEQ ID NO: 860268 - DNA, 15 bp, Homo sapiens
gtattgatatgtagt

SEQ ID NO: 860269 - DNA, 15 bp, Homo sapiens
tattgatatgtagtg

SEQ ID NO: 860270 - DNA, 15 bp, Homo sapiens
attgatatgtagtga

SEQ ID NO: 860271 - DNA, 15 bp, Homo sapiens
ttgatatgtagtgaa

SEQ ID NO: 860272 - DNA, 15 bp, Homo sapiens
tgatatgtagtgaat

SEQ ID NO: 860273 - DNA, 15 bp, Homo sapiens
gatatgtagtgaatt

SEQ ID NO: 860274 - DNA, 15 bp, Homo sapiens
atatgtagtgaatta

SEQ ID NO: 860275 - DNA, 15 bp, Homo sapiens
tatgtagtgaattag

SEQ ID NO: 860276 - DNA, 15 bp, Homo sapiens
atgtagtgaattaga

SEQ ID NO: 860277 - DNA, 15 bp, Homo sapiens
tgtagtgaattagaa

SEQ ID NO: 860278 - DNA, 15 bp, Homo sapiens
gtagtgaattagaaa

SEQ ID NO: 860279 - DNA, 15 bp, Homo sapiens
tagtgaattagaaat

SEQ ID NO: 860280 - DNA, 15 bp, Homo sapiens
agtgaattagaaatt

SEQ ID NO: 860281 - DNA, 15 bp, Homo sapiens
gtgaattagaaattt

SEQ ID NO: 860282 - DNA, 15 bp, Homo sapiens
tgaattagaaattta

SEQ ID NO: 860283 - DNA, 15 bp, Homo sapiens
gaattagaaatttaa

SEQ ID NO: 860284 - DNA, 15 bp, Homo sapiens
aattagaaatttaaa

SEQ ID NO: 860285 - DNA, 15 bp, Homo sapiens
attagaaatttaaaa

SEQ ID NO: 860286 - DNA, 15 bp, Homo sapiens
ttagaaatttaaaaa

SEQ ID NO: 860287 - DNA, 15 bp, Homo sapiens
tagaaatttaaaaag

SEQ ID NO: 860288 - DNA, 15 bp, Homo sapiens
agaaatttaaaaaga

SEQ ID NO: 860289 - DNA, 15 bp, Homo sapiens
gaaatttaaaaagaa

SEQ ID NO: 860290 - DNA, 15 bp, Homo sapiens
aaatttaaaaagaaa

SEQ ID NO: 860291 - DNA, 15 bp, Homo sapiens
aatttaaaaagaaaa

SEQ ID NO: 860292 - DNA, 15 bp, Homo sapiens
atttaaaaagaaaac

SEQ ID NO: 860293 - DNA, 15 bp, Homo sapiens
tttaaaaagaaaaca

SEQ ID NO: 860294 - DNA, 15 bp, Homo sapiens
ttaaaaagaaaacaa

SEQ ID NO: 860295 - DNA, 15 bp, Homo sapiens
taaaaagaaaacaaa

SEQ ID NO: 860296 - DNA, 15 bp, Homo sapiens
aaaaagaaaacaaaa

SEQ ID NO: 860297 - DNA, 15 bp, Homo sapiens
aaaagaaaacaaaac

SEQ ID NO: 860298 - DNA, 15 bp, Homo sapiens
aaagaaaacaaaact

SEQ ID NO: 860299 - DNA, 15 bp, Homo sapiens
aagaaaacaaaactg

SEQ ID NO: 860300 - DNA, 15 bp, Homo sapiens
agaaaacaaaactgt

SEQ ID NO: 860301 - DNA, 15 bp, Homo sapiens
gaaaacaaaactgtc

SEQ ID NO: 860302 - DNA, 15 bp, Homo sapiens
aaaacaaaactgtcc

SEQ ID NO: 860303 - DNA, 15 bp, Homo sapiens
aaacaaaactgtcct

SEQ ID NO: 860304 - DNA, 15 bp, Homo sapiens
aacaaaactgtcctt

SEQ ID NO: 860305 - DNA, 15 bp, Homo sapiens
acaaaactgtccttc

SEQ ID NO: 860306 - DNA, 15 bp, Homo sapiens
caaaactgtccttca

SEQ ID NO: 860307 - DNA, 15 bp, Homo sapiens
aaaactgtccttcac

SEQ ID NO: 860308 - DNA, 15 bp, Homo sapiens
aaactgtccttcact

SEQ ID NO: 860309 - DNA, 15 bp, Homo sapiens
aactgtccttcacta

SEQ ID NO: 860310 - DNA, 15 bp, Homo sapiens
actgtccttcactac

SEQ ID NO: 860311 - DNA, 15 bp, Homo sapiens
ctgtccttcactaca

SEQ ID NO: 860312 - DNA, 15 bp, Homo sapiens
tgtccttcactacag

SEQ ID NO: 860313 - DNA, 15 bp, Homo sapiens
gtccttcactacaga

SEQ ID NO: 860314 - DNA, 15 bp, Homo sapiens
tccttcactacagat

SEQ ID NO: 860315 - DNA, 15 bp, Homo sapiens
ccttcactacagatt

SEQ ID NO: 860316 - DNA, 15 bp, Homo sapiens
cttcactacagattg

SEQ ID NO: 860317 - DNA, 15 bp, Homo sapiens
ttcactacagattga

SEQ ID NO: 860318 - DNA, 15 bp, Homo sapiens
tcactacagattgaa

SEQ ID NO: 860319 - DNA, 15 bp, Homo sapiens
cactacagattgaaa

SEQ ID NO: 860320 - DNA, 15 bp, Homo sapiens
actacagattgaaaa

SEQ ID NO: 860321 - DNA, 15 bp, Homo sapiens
ctacagattgaaaag

SEQ ID NO: 860322 - DNA, 15 bp, Homo sapiens
tacagattgaaaagc

SEQ ID NO: 860323 - DNA, 15 bp, Homo sapiens
acagattgaaaagca

SEQ ID NO: 860324 - DNA, 15 bp, Homo sapiens
cagattgaaaagcat

SEQ ID NO: 860325 - DNA, 15 bp, Homo sapiens
agattgaaaagcatt

SEQ ID NO: 860326 - DNA, 15 bp, Homo sapiens
gattgaaaagcatta

SEQ ID NO: 860327 - DNA, 15 bp, Homo sapiens
attgaaaagcattat

SEQ ID NO: 860328 - DNA, 15 bp, Homo sapiens
ttgaaaagcattata

SEQ ID NO: 860329 - DNA, 15 bp, Homo sapiens
tgaaaagcattatac

SEQ ID NO: 860330 - DNA, 15 bp, Homo sapiens
gaaaagcattatact

SEQ ID NO: 860331 - DNA, 15 bp, Homo sapiens
aaaagcattatacta

SEQ ID NO: 860332 - DNA, 15 bp, Homo sapiens
aaagcattatactaa

SEQ ID NO: 860333 - DNA, 15 bp, Homo sapiens
aagcattatactaaa

SEQ ID NO: 860334 - DNA, 15 bp, Homo sapiens
agcattatactaaaa

SEQ ID NO: 860335 - DNA, 15 bp, Homo sapiens
gcattatactaaaag

SEQ ID NO: 860336 - DNA, 15 bp, Homo sapiens
cattatactaaaaga

SEQ ID NO: 860337 - DNA, 15 bp, Homo sapiens
attatactaaaagac

SEQ ID NO: 860338 - DNA, 15 bp, Homo sapiens
ttatactaaaagacc

SEQ ID NO: 860339 - DNA, 15 bp, Homo sapiens
tatactaaaagacca

SEQ ID NO: 860340 - DNA, 15 bp, Homo sapiens
atactaaaagaccat

SEQ ID NO: 860341 - DNA, 15 bp, Homo sapiens
tactaaaagaccatt

SEQ ID NO: 860342 - DNA, 15 bp, Homo sapiens
actaaaagaccattt

SEQ ID NO: 860343 - DNA, 15 bp, Homo sapiens
ctaaaagaccatttg

SEQ ID NO: 860344 - DNA, 15 bp, Homo sapiens
taaaagaccatttgc

SEQ ID NO: 860345 - DNA, 15 bp, Homo sapiens
aaaagaccatttgct

SEQ ID NO: 860346 - DNA, 15 bp, Homo sapiens
aaagaccatttgctc

SEQ ID NO: 860347 - DNA, 15 bp, Homo sapiens
aagaccatttgctca

SEQ ID NO: 860348 - DNA, 15 bp, Homo sapiens
agaccatttgctcag

SEQ ID NO: 860349 - DNA, 15 bp, Homo sapiens
gaccatttgctcagt

SEQ ID NO: 860350 - DNA, 15 bp, Homo sapiens
accatttgctcagtt

SEQ ID NO: 860351 - DNA, 15 bp, Homo sapiens
ccatttgctcagtta

SEQ ID NO: 860352 - DNA, 15 bp, Homo sapiens
catttgctcagttat

SEQ ID NO: 860353 - DNA, 15 bp, Homo sapiens
atttgctcagttata

SEQ ID NO: 860354 - DNA, 15 bp, Homo sapiens
tttgctcagttatag

SEQ ID NO: 860355 - DNA, 15 bp, Homo sapiens
ttgctcagttatagt

SEQ ID NO: 860356 - DNA, 15 bp, Homo sapiens
tgctcagttatagta

SEQ ID NO: 860357 - DNA, 15 bp, Homo sapiens
gctcagttatagtat

SEQ ID NO: 860358 - DNA, 15 bp, Homo sapiens
ctcagttatagtata

SEQ ID NO: 860359 - DNA, 15 bp, Homo sapiens
tcagttatagtatat

SEQ ID NO: 860360 - DNA, 15 bp, Homo sapiens
cagttatagtatata

SEQ ID NO: 860361 - DNA, 15 bp, Homo sapiens
agttatagtatataa

SEQ ID NO: 860362 - DNA, 15 bp, Homo sapiens
gttatagtatataaa

SEQ ID NO: 860363 - DNA, 15 bp, Homo sapiens
ttatagtatataaag

SEQ ID NO: 860364 - DNA, 15 bp, Homo sapiens
tatagtatataaagg

SEQ ID NO: 860365 - DNA, 15 bp, Homo sapiens
atagtatataaaggc

SEQ ID NO: 860366 - DNA, 15 bp, Homo sapiens
tagtatataaaggcc

SEQ ID NO: 860367 - DNA, 15 bp, Homo sapiens
agtatataaaggcca

SEQ ID NO: 860368 - DNA, 15 bp, Homo sapiens
gtatataaaggccaa

SEQ ID NO: 860369 - DNA, 15 bp, Homo sapiens
tatataaaggccaaa

SEQ ID NO: 860370 - DNA, 15 bp, Homo sapiens
atataaaggccaaat

SEQ ID NO: 860371 - DNA, 15 bp, Homo sapiens
tataaaggccaaatg

SEQ ID NO: 860372 - DNA, 15 bp, Homo sapiens
ataaaggccaaatga

SEQ ID NO: 860373 - DNA, 15 bp, Homo sapiens
taaaggccaaatgac

SEQ ID NO: 860374 - DNA, 15 bp, Homo sapiens
aaaggccaaatgact

SEQ ID NO: 860375 - DNA, 15 bp, Homo sapiens
aaggccaaatgactt

SEQ ID NO: 860376 - DNA, 15 bp, Homo sapiens
aggccaaatgactta

SEQ ID NO: 860377 - DNA, 15 bp, Homo sapiens
ggccaaatgacttaa

SEQ ID NO: 860378 - DNA, 15 bp, Homo sapiens
gccaaatgacttaaa

SEQ ID NO: 860379 - DNA, 15 bp, Homo sapiens
ccaaatgacttaaaa

SEQ ID NO: 860380 - DNA, 15 bp, Homo sapiens
caaatgacttaaaaa

SEQ ID NO: 860381 - DNA, 15 bp, Homo sapiens
aaatgacttaaaaac

SEQ ID NO: 860382 - DNA, 15 bp, Homo sapiens
aatgacttaaaaaca

SEQ ID NO: 860383 - DNA, 15 bp, Homo sapiens
atgacttaaaaacaa

SEQ ID NO: 860384 - DNA, 15 bp, Homo sapiens
tgacttaaaaacaaa

SEQ ID NO: 860385 - DNA, 15 bp, Homo sapiens
gacttaaaaacaaat

SEQ ID NO: 860386 - DNA, 15 bp, Homo sapiens
acttaaaaacaaatt

SEQ ID NO: 860387 - DNA, 15 bp, Homo sapiens
cttaaaaacaaatta

SEQ ID NO: 860388 - DNA, 15 bp, Homo sapiens
ttaaaaacaaattat

SEQ ID NO: 860389 - DNA, 15 bp, Homo sapiens
taaaaacaaattatg

SEQ ID NO: 860390 - DNA, 15 bp, Homo sapiens
aaaaacaaattatgt

SEQ ID NO: 860391 - DNA, 15 bp, Homo sapiens
aaaacaaattatgta

SEQ ID NO: 860392 - DNA, 15 bp, Homo sapiens
aaacaaattatgtaa

SEQ ID NO: 860393 - DNA, 15 bp, Homo sapiens
aacaaattatgtaag

SEQ ID NO: 860394 - DNA, 15 bp, Homo sapiens
acaaattatgtaagg

SEQ ID NO: 860395 - DNA, 15 bp, Homo sapiens
caaattatgtaagga

SEQ ID NO: 860396 - DNA, 15 bp, Homo sapiens
aaattatgtaaggag

SEQ ID NO: 860397 - DNA, 15 bp, Homo sapiens
aattatgtaaggaga

SEQ ID NO: 860398 - DNA, 15 bp, Homo sapiens
attatgtaaggagaa

SEQ ID NO: 860399 - DNA, 15 bp, Homo sapiens
ttatgtaaggagaag

SEQ ID NO: 860400 - DNA, 15 bp, Homo sapiens
tatgtaaggagaagg

SEQ ID NO: 860401 - DNA, 15 bp, Homo sapiens
atgtaaggagaagga

SEQ ID NO: 860402 - DNA, 15 bp, Homo sapiens
tgtaaggagaaggaa

SEQ ID NO: 860403 - DNA, 15 bp, Homo sapiens
gtaaggagaaggaaa

SEQ ID NO: 860404 - DNA, 15 bp, Homo sapiens
taaggagaaggaaac

SEQ ID NO: 860405 - DNA, 15 bp, Homo sapiens
aaggagaaggaaaca

SEQ ID NO: 860406 - DNA, 15 bp, Homo sapiens
aggagaaggaaacaa

SEQ ID NO: 860407 - DNA, 15 bp, Homo sapiens
ggagaaggaaacaac

SEQ ID NO: 860408 - DNA, 15 bp, Homo sapiens
gagaaggaaacaacc

SEQ ID NO: 860409 - DNA, 15 bp, Homo sapiens
agaaggaaacaacca

SEQ ID NO: 860410 - DNA, 15 bp, Homo sapiens
gaaggaaacaaccat

SEQ ID NO: 860411 - DNA, 15 bp, Homo sapiens
aaggaaacaaccatt

SEQ ID NO: 860412 - DNA, 15 bp, Homo sapiens
aggaaacaaccattt

SEQ ID NO: 860413 - DNA, 15 bp, Homo sapiens
ggaaacaaccattta

SEQ ID NO: 860414 - DNA, 15 bp, Homo sapiens
gaaacaaccatttat

SEQ ID NO: 860415 - DNA, 15 bp, Homo sapiens
aaacaaccatttatt

SEQ ID NO: 860416 - DNA, 15 bp, Homo sapiens
aacaaccatttattc

SEQ ID NO: 860417 - DNA, 15 bp, Homo sapiens
acaaccatttattca

SEQ ID NO: 860418 - DNA, 15 bp, Homo sapiens
caaccatttattcag

SEQ ID NO: 860419 - DNA, 15 bp, Homo sapiens
aaccatttattcagt

SEQ ID NO: 860420 - DNA, 15 bp, Homo sapiens
accatttattcagtg

SEQ ID NO: 860421 - DNA, 15 bp, Homo sapiens
ccatttattcagtgc

SEQ ID NO: 860422 - DNA, 15 bp, Homo sapiens
catttattcagtgcc

SEQ ID NO: 860423 - DNA, 15 bp, Homo sapiens
atttattcagtgcca

SEQ ID NO: 860424 - DNA, 15 bp, Homo sapiens
tttattcagtgccac

SEQ ID NO: 860425 - DNA, 15 bp, Homo sapiens
ttattcagtgccact

SEQ ID NO: 860426 - DNA, 15 bp, Homo sapiens
tattcagtgccacta

SEQ ID NO: 860427 - DNA, 15 bp, Homo sapiens
attcagtgccactaa

SEQ ID NO: 860428 - DNA, 15 bp, Homo sapiens
ttcagtgccactaac

SEQ ID NO: 860429 - DNA, 15 bp, Homo sapiens
tcagtgccactaact

SEQ ID NO: 860430 - DNA, 15 bp, Homo sapiens
cagtgccactaactg

SEQ ID NO: 860431 - DNA, 15 bp, Homo sapiens
agtgccactaactgt

SEQ ID NO: 860432 - DNA, 15 bp, Homo sapiens
gtgccactaactgtc

SEQ ID NO: 860433 - DNA, 15 bp, Homo sapiens
tgccactaactgtca

SEQ ID NO: 860434 - DNA, 15 bp, Homo sapiens
gccactaactgtcag

SEQ ID NO: 860435 - DNA, 15 bp, Homo sapiens
ccactaactgtcagc

SEQ ID NO: 860436 - DNA, 15 bp, Homo sapiens
cactaactgtcagcc

SEQ ID NO: 860437 - DNA, 15 bp, Homo sapiens
actaactgtcagcca

SEQ ID NO: 860438 - DNA, 15 bp, Homo sapiens
ctaactgtcagccag

SEQ ID NO: 860439 - DNA, 15 bp, Homo sapiens
taactgtcagccagt

SEQ ID NO: 860440 - DNA, 15 bp, Homo sapiens
aactgtcagccagtt

SEQ ID NO: 860441 - DNA, 15 bp, Homo sapiens
actgtcagccagttt

SEQ ID NO: 860442 - DNA, 15 bp, Homo sapiens
ctgtcagccagtttt

SEQ ID NO: 860443 - DNA, 15 bp, Homo sapiens
tgtcagccagttttt

SEQ ID NO: 860444 - DNA, 15 bp, Homo sapiens
gtcagccagtttttt

SEQ ID NO: 860445 - DNA, 15 bp, Homo sapiens
tcagccagttttttc

SEQ ID NO: 860446 - DNA, 15 bp, Homo sapiens
cagccagttttttca

SEQ ID NO: 860447 - DNA, 15 bp, Homo sapiens
agccagttttttcag

SEQ ID NO: 860448 - DNA, 15 bp, Homo sapiens
gccagttttttcagt

SEQ ID NO: 860449 - DNA, 15 bp, Homo sapiens
ccagttttttcagtg

SEQ ID NO: 860450 - DNA, 15 bp, Homo sapiens
cagttttttcagtgg

SEQ ID NO: 860451 - DNA, 15 bp, Homo sapiens
agttttttcagtggt

SEQ ID NO: 860452 - DNA, 15 bp, Homo sapiens
gttttttcagtggtc

SEQ ID NO: 860453 - DNA, 15 bp, Homo sapiens
ttttttcagtggtca

SEQ ID NO: 860454 - DNA, 15 bp, Homo sapiens
tttttcagtggtcag

SEQ ID NO: 860455 - DNA, 15 bp, Homo sapiens
ttttcagtggtcagt

SEQ ID NO: 860456 - DNA, 15 bp, Homo sapiens
tttcagtggtcagtt

SEQ ID NO: 860457 - DNA, 15 bp, Homo sapiens
ttcagtggtcagtta

SEQ ID NO: 860458 - DNA, 15 bp, Homo sapiens
tcagtggtcagttaa

SEQ ID NO: 860459 - DNA, 15 bp, Homo sapiens
cagtggtcagttaat

SEQ ID NO: 860460 - DNA, 15 bp, Homo sapiens
agtggtcagttaatg

SEQ ID NO: 860461 - DNA, 15 bp, Homo sapiens
gtggtcagttaatga

SEQ ID NO: 860462 - DNA, 15 bp, Homo sapiens
tggtcagttaatgac

SEQ ID NO: 860463 - DNA, 15 bp, Homo sapiens
ggtcagttaatgact

SEQ ID NO: 860464 - DNA, 15 bp, Homo sapiens
gtcagttaatgactg

SEQ ID NO: 860465 - DNA, 15 bp, Homo sapiens
tcagttaatgactgc

SEQ ID NO: 860466 - DNA, 15 bp, Homo sapiens
cagttaatgactgca

SEQ ID NO: 860467 - DNA, 15 bp, Homo sapiens
agttaatgactgcag

SEQ ID NO: 860468 - DNA, 15 bp, Homo sapiens
gttaatgactgcagt

SEQ ID NO: 860469 - DNA, 15 bp, Homo sapiens
ttaatgactgcagta

SEQ ID NO: 860470 - DNA, 15 bp, Homo sapiens
taatgactgcagtag

SEQ ID NO: 860471 - DNA, 15 bp, Homo sapiens
aatgactgcagtagt

SEQ ID NO: 860472 - DNA, 15 bp, Homo sapiens
atgactgcagtagtg

SEQ ID NO: 860473 - DNA, 15 bp, Homo sapiens
tgactgcagtagtgt

SEQ ID NO: 860474 - DNA, 15 bp, Homo sapiens
gactgcagtagtgtt

SEQ ID NO: 860475 - DNA, 15 bp, Homo sapiens
actgcagtagtgttc

SEQ ID NO: 860476 - DNA, 15 bp, Homo sapiens
ctgcagtagtgttct

SEQ ID NO: 860477 - DNA, 15 bp, Homo sapiens
tgcagtagtgttcta

SEQ ID NO: 860478 - DNA, 15 bp, Homo sapiens
gcagtagtgttctac

SEQ ID NO: 860479 - DNA, 15 bp, Homo sapiens
cagtagtgttctacc

SEQ ID NO: 860480 - DNA, 15 bp, Homo sapiens
agtagtgttctacct

SEQ ID NO: 860481 - DNA, 15 bp, Homo sapiens
gtagtgttctacctt

SEQ ID NO: 860482 - DNA, 15 bp, Homo sapiens
tagtgttctaccttg

SEQ ID NO: 860483 - DNA, 15 bp, Homo sapiens
agtgttctaccttgc

SEQ ID NO: 860484 - DNA, 15 bp, Homo sapiens
gtgttctaccttgct

SEQ ID NO: 860485 - DNA, 15 bp, Homo sapiens
tgttctaccttgctc

SEQ ID NO: 860486 - DNA, 15 bp, Homo sapiens
gttctaccttgctca

SEQ ID NO: 860487 - DNA, 15 bp, Homo sapiens
ttctaccttgctcaa

SEQ ID NO: 860488 - DNA, 15 bp, Homo sapiens
tctaccttgctcaaa

SEQ ID NO: 860489 - DNA, 15 bp, Homo sapiens
ctaccttgctcaaag

SEQ ID NO: 860490 - DNA, 15 bp, Homo sapiens
taccttgctcaaagc

SEQ ID NO: 860491 - DNA, 15 bp, Homo sapiens
accttgctcaaagca

SEQ ID NO: 860492 - DNA, 15 bp, Homo sapiens
ccttgctcaaagcac

SEQ ID NO: 860493 - DNA, 15 bp, Homo sapiens
cttgctcaaagcacc

SEQ ID NO: 860494 - DNA, 15 bp, Homo sapiens
ttgctcaaagcaccc

SEQ ID NO: 860495 - DNA, 15 bp, Homo sapiens
tgctcaaagcaccct

SEQ ID NO: 860496 - DNA, 15 bp, Homo sapiens
gctcaaagcaccctc

SEQ ID NO: 860497 - DNA, 15 bp, Homo sapiens
ctcaaagcaccctcc

SEQ ID NO: 860498 - DNA, 15 bp, Homo sapiens
tcaaagcaccctcct

SEQ ID NO: 860499 - DNA, 15 bp, Homo sapiens
caaagcaccctcctc

SEQ ID NO: 860500 - DNA, 15 bp, Homo sapiens
aaagcaccctcctca

SEQ ID NO: 860501 - DNA, 15 bp, Homo sapiens
aagcaccctcctcaa

SEQ ID NO: 860502 - DNA, 15 bp, Homo sapiens
agcaccctcctcaag

SEQ ID NO: 860503 - DNA, 15 bp, Homo sapiens
gcaccctcctcaagt

SEQ ID NO: 860504 - DNA, 15 bp, Homo sapiens
caccctcctcaagtt

SEQ ID NO: 860505 - DNA, 15 bp, Homo sapiens
accctcctcaagttc

SEQ ID NO: 860506 - DNA, 15 bp, Homo sapiens
ccctcctcaagttct

SEQ ID NO: 860507 - DNA, 15 bp, Homo sapiens
cctcctcaagttctg

SEQ ID NO: 860508 - DNA, 15 bp, Homo sapiens
ctcctcaagttctgg

SEQ ID NO: 860509 - DNA, 15 bp, Homo sapiens
tcctcaagttctggc

SEQ ID NO: 860510 - DNA, 15 bp, Homo sapiens
cctcaagttctggca

SEQ ID NO: 860511 - DNA, 15 bp, Homo sapiens
ctcaagttctggcat

SEQ ID NO: 860512 - DNA, 15 bp, Homo sapiens
tcaagttctggcatc

SEQ ID NO: 860513 - DNA, 15 bp, Homo sapiens
caagttctggcatct

SEQ ID NO: 860514 - DNA, 15 bp, Homo sapiens
aagttctggcatcta

SEQ ID NO: 860515 - DNA, 15 bp, Homo sapiens
agttctggcatctaa

SEQ ID NO: 860516 - DNA, 15 bp, Homo sapiens
gttctggcatctaag

SEQ ID NO: 860517 - DNA, 15 bp, Homo sapiens
ttctggcatctaagc

SEQ ID NO: 860518 - DNA, 15 bp, Homo sapiens
tctggcatctaagct

SEQ ID NO: 860519 - DNA, 15 bp, Homo sapiens
ctggcatctaagctg

SEQ ID NO: 860520 - DNA, 15 bp, Homo sapiens
tggcatctaagctga

SEQ ID NO: 860521 - DNA, 15 bp, Homo sapiens
ggcatctaagctgac

SEQ ID NO: 860522 - DNA, 15 bp, Homo sapiens
gcatctaagctgaca

SEQ ID NO: 860523 - DNA, 15 bp, Homo sapiens
catctaagctgacat

SEQ ID NO: 860524 - DNA, 15 bp, Homo sapiens
atctaagctgacatc

SEQ ID NO: 860525 - DNA, 15 bp, Homo sapiens
tctaagctgacatca

SEQ ID NO: 860526 - DNA, 15 bp, Homo sapiens
ctaagctgacatcag

SEQ ID NO: 860527 - DNA, 15 bp, Homo sapiens
taagctgacatcaga

SEQ ID NO: 860528 - DNA, 15 bp, Homo sapiens
aagctgacatcagaa

SEQ ID NO: 860529 - DNA, 15 bp, Homo sapiens
agctgacatcagaac

SEQ ID NO: 860530 - DNA, 15 bp, Homo sapiens
gctgacatcagaaca

SEQ ID NO: 860531 - DNA, 15 bp, Homo sapiens
ctgacatcagaacac

SEQ ID NO: 860532 - DNA, 15 bp, Homo sapiens
tgacatcagaacaca

SEQ ID NO: 860533 - DNA, 15 bp, Homo sapiens
gacatcagaacacag

SEQ ID NO: 860534 - DNA, 15 bp, Homo sapiens
acatcagaacacaga

SEQ ID NO: 860535 - DNA, 15 bp, Homo sapiens
catcagaacacagag

SEQ ID NO: 860536 - DNA, 15 bp, Homo sapiens
atcagaacacagagt

SEQ ID NO: 860537 - DNA, 15 bp, Homo sapiens
tcagaacacagagtt

SEQ ID NO: 860538 - DNA, 15 bp, Homo sapiens
cagaacacagagttg

SEQ ID NO: 860539 - DNA, 15 bp, Homo sapiens
agaacacagagttgg

SEQ ID NO: 860540 - DNA, 15 bp, Homo sapiens
gaacacagagttggg

SEQ ID NO: 860541 - DNA, 15 bp, Homo sapiens
aacacagagttgggg

SEQ ID NO: 860542 - DNA, 15 bp, Homo sapiens
acacagagttggggc

SEQ ID NO: 860543 - DNA, 15 bp, Homo sapiens
cacagagttggggct

SEQ ID NO: 860544 - DNA, 15 bp, Homo sapiens
acagagttggggctc

SEQ ID NO: 860545 - DNA, 15 bp, Homo sapiens
cagagttggggctct

SEQ ID NO: 860546 - DNA, 15 bp, Homo sapiens
agagttggggctctc

SEQ ID NO: 860547 - DNA, 15 bp, Homo sapiens
gagttggggctctct

SEQ ID NO: 860548 - DNA, 15 bp, Homo sapiens
agttggggctctctg

SEQ ID NO: 860549 - DNA, 15 bp, Homo sapiens
gttggggctctctgt

SEQ ID NO: 860550 - DNA, 15 bp, Homo sapiens
ttggggctctctgtg

SEQ ID NO: 860551 - DNA, 15 bp, Homo sapiens
tggggctctctgtgg

SEQ ID NO: 860552 - DNA, 15 bp, Homo sapiens
ggggctctctgtggg

SEQ ID NO: 860553 - DNA, 15 bp, Homo sapiens
gggctctctgtgggt

SEQ ID NO: 860554 - DNA, 15 bp, Homo sapiens
ggctctctgtgggtc

SEQ ID NO: 860555 - DNA, 15 bp, Homo sapiens
gctctctgtgggtca

SEQ ID NO: 860556 - DNA, 15 bp, Homo sapiens
ctctctgtgggtcac

SEQ ID NO: 860557 - DNA, 15 bp, Homo sapiens
tctctgtgggtcacc

SEQ ID NO: 860558 - DNA, 15 bp, Homo sapiens
ctctgtgggtcacct

SEQ ID NO: 860559 - DNA, 15 bp, Homo sapiens
tctgtgggtcacctc

SEQ ID NO: 860560 - DNA, 15 bp, Homo sapiens
ctgtgggtcacctct

SEQ ID NO: 860561 - DNA, 15 bp, Homo sapiens
tgtgggtcacctcta

SEQ ID NO: 860562 - DNA, 15 bp, Homo sapiens
gtgggtcacctctag

SEQ ID NO: 860563 - DNA, 15 bp, Homo sapiens
tgggtcacctctagc

SEQ ID NO: 860564 - DNA, 15 bp, Homo sapiens
gggtcacctctagca

SEQ ID NO: 860565 - DNA, 15 bp, Homo sapiens
ggtcacctctagcac

SEQ ID NO: 860566 - DNA, 15 bp, Homo sapiens
gtcacctctagcact

SEQ ID NO: 860567 - DNA, 15 bp, Homo sapiens
tcacctctagcactt

SEQ ID NO: 860568 - DNA, 15 bp, Homo sapiens
cacctctagcacttg

SEQ ID NO: 860569 - DNA, 15 bp, Homo sapiens
acctctagcacttga

SEQ ID NO: 860570 - DNA, 15 bp, Homo sapiens
cctctagcacttgat

SEQ ID NO: 860571 - DNA, 15 bp, Homo sapiens
ctctagcacttgatc

SEQ ID NO: 860572 - DNA, 15 bp, Homo sapiens
tctagcacttgatct

SEQ ID NO: 860573 - DNA, 15 bp, Homo sapiens
ctagcacttgatctc

SEQ ID NO: 860574 - DNA, 15 bp, Homo sapiens
tagcacttgatctcc

SEQ ID NO: 860575 - DNA, 15 bp, Homo sapiens
agcacttgatctcct

SEQ ID NO: 860576 - DNA, 15 bp, Homo sapiens
gcacttgatctcctc

SEQ ID NO: 860577 - DNA, 15 bp, Homo sapiens
cacttgatctcctca

SEQ ID NO: 860578 - DNA, 15 bp, Homo sapiens
acttgatctcctcat

SEQ ID NO: 860579 - DNA, 15 bp, Homo sapiens
cttgatctcctcatg

SEQ ID NO: 860580 - DNA, 15 bp, Homo sapiens
ttgatctcctcatgc

SEQ ID NO: 860581 - DNA, 15 bp, Homo sapiens
tgatctcctcatgca

SEQ ID NO: 860582 - DNA, 15 bp, Homo sapiens
gatctcctcatgcag

SEQ ID NO: 860583 - DNA, 15 bp, Homo sapiens
atctcctcatgcagt

SEQ ID NO: 860584 - DNA, 15 bp, Homo sapiens
tctcctcatgcagtg

SEQ ID NO: 860585 - DNA, 15 bp, Homo sapiens
ctcctcatgcagtgc

SEQ ID NO: 860586 - DNA, 15 bp, Homo sapiens
tcctcatgcagtgca

SEQ ID NO: 860587 - DNA, 15 bp, Homo sapiens
cctcatgcagtgcat

SEQ ID NO: 860588 - DNA, 15 bp, Homo sapiens
ctcatgcagtgcatg

SEQ ID NO: 860589 - DNA, 15 bp, Homo sapiens
tcatgcagtgcatgg

SEQ ID NO: 860590 - DNA, 15 bp, Homo sapiens
catgcagtgcatggt

SEQ ID NO: 860591 - DNA, 15 bp, Homo sapiens
atgcagtgcatggtg

SEQ ID NO: 860592 - DNA, 15 bp, Homo sapiens
tgcagtgcatggtgc

SEQ ID NO: 860593 - DNA, 15 bp, Homo sapiens
gcagtgcatggtgct

SEQ ID NO: 860594 - DNA, 15 bp, Homo sapiens
cagtgcatggtgctc

SEQ ID NO: 860595 - DNA, 15 bp, Homo sapiens
agtgcatggtgctct

SEQ ID NO: 860596 - DNA, 15 bp, Homo sapiens
gtgcatggtgctctc

SEQ ID NO: 860597 - DNA, 15 bp, Homo sapiens
tgcatggtgctctca

SEQ ID NO: 860598 - DNA, 15 bp, Homo sapiens
gcatggtgctctcac

SEQ ID NO: 860599 - DNA, 15 bp, Homo sapiens
catggtgctctcacg

SEQ ID NO: 860600 - DNA, 15 bp, Homo sapiens
atggtgctctcacgt

SEQ ID NO: 860601 - DNA, 15 bp, Homo sapiens
tggtgctctcacgtc

SEQ ID NO: 860602 - DNA, 15 bp, Homo sapiens
ggtgctctcacgtct

SEQ ID NO: 860603 - DNA, 15 bp, Homo sapiens
gtgctctcacgtcta

SEQ ID NO: 860604 - DNA, 15 bp, Homo sapiens
tgctctcacgtctat

SEQ ID NO: 860605 - DNA, 15 bp, Homo sapiens
gctctcacgtctatg

SEQ ID NO: 860606 - DNA, 15 bp, Homo sapiens
ctctcacgtctatgc

SEQ ID NO: 860607 - DNA, 15 bp, Homo sapiens
tctcacgtctatgct

SEQ ID NO: 860608 - DNA, 15 bp, Homo sapiens
ctcacgtctatgcta

SEQ ID NO: 860609 - DNA, 15 bp, Homo sapiens
tcacgtctatgctat

SEQ ID NO: 860610 - DNA, 15 bp, Homo sapiens
cacgtctatgctatg

SEQ ID NO: 860611 - DNA, 15 bp, Homo sapiens
acgtctatgctatgt

SEQ ID NO: 860612 - DNA, 15 bp, Homo sapiens
cgtctatgctatgtt

SEQ ID NO: 860613 - DNA, 15 bp, Homo sapiens
gtctatgctatgttc

SEQ ID NO: 860614 - DNA, 15 bp, Homo sapiens
tctatgctatgttct

SEQ ID NO: 860615 - DNA, 15 bp, Homo sapiens
ctatgctatgttctt

SEQ ID NO: 860616 - DNA, 15 bp, Homo sapiens
tatgctatgttctta

SEQ ID NO: 860617 - DNA, 15 bp, Homo sapiens
atgctatgttcttat

SEQ ID NO: 860618 - DNA, 15 bp, Homo sapiens
tgctatgttcttatg

SEQ ID NO: 860619 - DNA, 15 bp, Homo sapiens
gctatgttcttatgg

SEQ ID NO: 860620 - DNA, 15 bp, Homo sapiens
ctatgttcttatggt

SEQ ID NO: 860621 - DNA, 15 bp, Homo sapiens
tatgttcttatggtc

SEQ ID NO: 860622 - DNA, 15 bp, Homo sapiens
atgttcttatggtct

SEQ ID NO: 860623 - DNA, 15 bp, Homo sapiens
tgttcttatggtctt

SEQ ID NO: 860624 - DNA, 15 bp, Homo sapiens
gttcttatggtcttt

SEQ ID NO: 860625 - DNA, 15 bp, Homo sapiens
ttcttatggtcttta

SEQ ID NO: 860626 - DNA, 15 bp, Homo sapiens
tcttatggtctttag

SEQ ID NO: 860627 - DNA, 15 bp, Homo sapiens
cttatggtctttagg

SEQ ID NO: 860628 - DNA, 15 bp, Homo sapiens
ttatggtctttaggt

SEQ ID NO: 860629 - DNA, 15 bp, Homo sapiens
tatggtctttaggta

SEQ ID NO: 860630 - DNA, 15 bp, Homo sapiens
atggtctttaggtaa

SEQ ID NO: 860631 - DNA, 15 bp, Homo sapiens
tggtctttaggtaac

SEQ ID NO: 860632 - DNA, 15 bp, Homo sapiens
ggtctttaggtaaca

SEQ ID NO: 860633 - DNA, 15 bp, Homo sapiens
gtctttaggtaacaa

SEQ ID NO: 860634 - DNA, 15 bp, Homo sapiens
tctttaggtaacaag

SEQ ID NO: 860635 - DNA, 15 bp, Homo sapiens
ctttaggtaacaaga

SEQ ID NO: 860636 - DNA, 15 bp, Homo sapiens
tttaggtaacaagaa

SEQ ID NO: 860637 - DNA, 15 bp, Homo sapiens
ttaggtaacaagaat

SEQ ID NO: 860638 - DNA, 15 bp, Homo sapiens
taggtaacaagaata

SEQ ID NO: 860639 - DNA, 15 bp, Homo sapiens
aggtaacaagaataa

SEQ ID NO: 860640 - DNA, 15 bp, Homo sapiens
ggtaacaagaataat

SEQ ID NO: 860641 - DNA, 15 bp, Homo sapiens
gtaacaagaataatt

SEQ ID NO: 860642 - DNA, 15 bp, Homo sapiens
taacaagaataattt

SEQ ID NO: 860643 - DNA, 15 bp, Homo sapiens
aacaagaataatttt

SEQ ID NO: 860644 - DNA, 15 bp, Homo sapiens
acaagaataattttc

SEQ ID NO: 860645 - DNA, 15 bp, Homo sapiens
caagaataattttct

SEQ ID NO: 860646 - DNA, 15 bp, Homo sapiens
aagaataattttctt

SEQ ID NO: 860647 - DNA, 15 bp, Homo sapiens
agaataattttcttt

SEQ ID NO: 860648 - DNA, 15 bp, Homo sapiens
gaataattttctttc

SEQ ID NO: 860649 - DNA, 15 bp, Homo sapiens
aataattttctttct

SEQ ID NO: 860650 - DNA, 15 bp, Homo sapiens
ataattttctttctt

SEQ ID NO: 860651 - DNA, 15 bp, Homo sapiens
taattttctttcttt

SEQ ID NO: 860652 - DNA, 15 bp, Homo sapiens
attttctttcttttc

SEQ ID NO: 860653 - DNA, 15 bp, Homo sapiens
ttttctttcttttcc

SEQ ID NO: 860654 - DNA, 15 bp, Homo sapiens
tttctttcttttcct

SEQ ID NO: 860655 - DNA, 15 bp, Homo sapiens
ttctttcttttcctt

SEQ ID NO: 860656 - DNA, 15 bp, Homo sapiens
tctttcttttcctta

SEQ ID NO: 860657 - DNA, 15 bp, Homo sapiens
ctttcttttccttac

SEQ ID NO: 860658 - DNA, 15 bp, Homo sapiens
tttcttttccttact

SEQ ID NO: 860659 - DNA, 15 bp, Homo sapiens
ttcttttccttacta

SEQ ID NO: 860660 - DNA, 15 bp, Homo sapiens
tcttttccttactat

SEQ ID NO: 860661 - DNA, 15 bp, Homo sapiens
cttttccttactata

SEQ ID NO: 860662 - DNA, 15 bp, Homo sapiens
ttttccttactatac

SEQ ID NO: 860663 - DNA, 15 bp, Homo sapiens
tttccttactataca

SEQ ID NO: 860664 - DNA, 15 bp, Homo sapiens
ttccttactatacat

SEQ ID NO: 860665 - DNA, 15 bp, Homo sapiens
tccttactatacatt

SEQ ID NO: 860666 - DNA, 15 bp, Homo sapiens
ccttactatacattt

SEQ ID NO: 860667 - DNA, 15 bp, Homo sapiens
cttactatacatttt

SEQ ID NO: 860668 - DNA, 15 bp, Homo sapiens
ttactatacattttg

SEQ ID NO: 860669 - DNA, 15 bp, Homo sapiens
tactatacattttgc

SEQ ID NO: 860670 - DNA, 15 bp, Homo sapiens
actatacattttgct

SEQ ID NO: 860671 - DNA, 15 bp, Homo sapiens
ctatacattttgctt

SEQ ID NO: 860672 - DNA, 15 bp, Homo sapiens
tatacattttgcttt

SEQ ID NO: 860673 - DNA, 15 bp, Homo sapiens
atacattttgctttc

SEQ ID NO: 860674 - DNA, 15 bp, Homo sapiens
tacattttgctttct

SEQ ID NO: 860675 - DNA, 15 bp, Homo sapiens
acattttgctttctg

SEQ ID NO: 860676 - DNA, 15 bp, Homo sapiens
cattttgctttctga

SEQ ID NO: 860677 - DNA, 15 bp, Homo sapiens
attttgctttctgaa

SEQ ID NO: 860678 - DNA, 15 bp, Homo sapiens
ttttgctttctgaaa

SEQ ID NO: 860679 - DNA, 15 bp, Homo sapiens
tttgctttctgaaat

SEQ ID NO: 860680 - DNA, 15 bp, Homo sapiens
ttgctttctgaaatt

SEQ ID NO: 860681 - DNA, 15 bp, Homo sapiens
tgctttctgaaattc

SEQ ID NO: 860682 - DNA, 15 bp, Homo sapiens
gctttctgaaattcc

SEQ ID NO: 860683 - DNA, 15 bp, Homo sapiens
ctttctgaaattccc

SEQ ID NO: 860684 - DNA, 15 bp, Homo sapiens
tttctgaaattccct

SEQ ID NO: 860685 - DNA, 15 bp, Homo sapiens
ttctgaaattccctt

SEQ ID NO: 860686 - DNA, 15 bp, Homo sapiens
tctgaaattcccttc

SEQ ID NO: 860687 - DNA, 15 bp, Homo sapiens
ctgaaattcccttct

SEQ ID NO: 860688 - DNA, 15 bp, Homo sapiens
tgaaattcccttctc

SEQ ID NO: 860689 - DNA, 15 bp, Homo sapiens
gaaattcccttctcg

SEQ ID NO: 860690 - DNA, 15 bp, Homo sapiens
aaattcccttctcgc

SEQ ID NO: 860691 - DNA, 15 bp, Homo sapiens
aattcccttctcgcc

SEQ ID NO: 860692 - DNA, 15 bp, Homo sapiens
attcccttctcgcca

SEQ ID NO: 860693 - DNA, 15 bp, Homo sapiens
ttcccttctcgccaa

SEQ ID NO: 860694 - DNA, 15 bp, Homo sapiens
tcccttctcgccaat

SEQ ID NO: 860695 - DNA, 15 bp, Homo sapiens
cccttctcgccaatc

SEQ ID NO: 860696 - DNA, 15 bp, Homo sapiens
ccttctcgccaatcc

SEQ ID NO: 860697 - DNA, 15 bp, Homo sapiens
cttctcgccaatcca

SEQ ID NO: 860698 - DNA, 15 bp, Homo sapiens
ttctcgccaatccag

SEQ ID NO: 860699 - DNA, 15 bp, Homo sapiens
tctcgccaatccagg

SEQ ID NO: 860700 - DNA, 15 bp, Homo sapiens
ctcgccaatccaggt

SEQ ID NO: 860701 - DNA, 15 bp, Homo sapiens
tcgccaatccaggtg

SEQ ID NO: 860702 - DNA, 15 bp, Homo sapiens
cgccaatccaggtga

SEQ ID NO: 860703 - DNA, 15 bp, Homo sapiens
gccaatccaggtgaa

SEQ ID NO: 860704 - DNA, 15 bp, Homo sapiens
ccaatccaggtgaat

SEQ ID NO: 860705 - DNA, 15 bp, Homo sapiens
caatccaggtgaatg

SEQ ID NO: 860706 - DNA, 15 bp, Homo sapiens
aatccaggtgaatgt

SEQ ID NO: 860707 - DNA, 15 bp, Homo sapiens
atccaggtgaatgtc

SEQ ID NO: 860708 - DNA, 15 bp, Homo sapiens
tccaggtgaatgtca

SEQ ID NO: 860709 - DNA, 15 bp, Homo sapiens
ccaggtgaatgtcag

SEQ ID NO: 860710 - DNA, 15 bp, Homo sapiens
caggtgaatgtcaga

SEQ ID NO: 860711 - DNA, 15 bp, Homo sapiens
aggtgaatgtcagaa

SEQ ID NO: 860712 - DNA, 15 bp, Homo sapiens
ggtgaatgtcagaat

SEQ ID NO: 860713 - DNA, 15 bp, Homo sapiens
gtgaatgtcagaatg

SEQ ID NO: 860714 - DNA, 15 bp, Homo sapiens
tgaatgtcagaatgt

SEQ ID NO: 860715 - DNA, 15 bp, Homo sapiens
gaatgtcagaatgtg

SEQ ID NO: 860716 - DNA, 15 bp, Homo sapiens
aatgtcagaatgtga

SEQ ID NO: 860717 - DNA, 15 bp, Homo sapiens
atgtcagaatgtgat

SEQ ID NO: 860718 - DNA, 15 bp, Homo sapiens
tgtcagaatgtgatt

SEQ ID NO: 860719 - DNA, 15 bp, Homo sapiens
gtcagaatgtgattt

SEQ ID NO: 860720 - DNA, 15 bp, Homo sapiens
tcagaatgtgatttg

SEQ ID NO: 860721 - DNA, 15 bp, Homo sapiens
cagaatgtgatttga

SEQ ID NO: 860722 - DNA, 15 bp, Homo sapiens
agaatgtgatttgac

SEQ ID NO: 860723 - DNA, 15 bp, Homo sapiens
gaatgtgatttgaca

SEQ ID NO: 860724 - DNA, 15 bp, Homo sapiens
aatgtgatttgacaa

SEQ ID NO: 860725 - DNA, 15 bp, Homo sapiens
atgtgatttgacaac

SEQ ID NO: 860726 - DNA, 15 bp, Homo sapiens
tgtgatttgacaact

SEQ ID NO: 860727 - DNA, 15 bp, Homo sapiens
gtgatttgacaactg

SEQ ID NO: 860728 - DNA, 15 bp, Homo sapiens
tgatttgacaactgt

SEQ ID NO: 860729 - DNA, 15 bp, Homo sapiens
gatttgacaactgtc

SEQ ID NO: 860730 - DNA, 15 bp, Homo sapiens
atttgacaactgtcc

SEQ ID NO: 860731 - DNA, 15 bp, Homo sapiens
tttgacaactgtcca

SEQ ID NO: 860732 - DNA, 15 bp, Homo sapiens
ttgacaactgtccaa

SEQ ID NO: 860733 - DNA, 15 bp, Homo sapiens
tgacaactgtccaaa

SEQ ID NO: 860734 - DNA, 15 bp, Homo sapiens
gacaactgtccaaag

SEQ ID NO: 860735 - DNA, 15 bp, Homo sapiens
acaactgtccaaagt

SEQ ID NO: 860736 - DNA, 15 bp, Homo sapiens
caactgtccaaagta

SEQ ID NO: 860737 - DNA, 15 bp, Homo sapiens
aactgtccaaagtac

SEQ ID NO: 860738 - DNA, 15 bp, Homo sapiens
actgtccaaagtact

SEQ ID NO: 860739 - DNA, 15 bp, Homo sapiens
ctgtccaaagtactc

SEQ ID NO: 860740 - DNA, 15 bp, Homo sapiens
tgtccaaagtactca

SEQ ID NO: 860741 - DNA, 15 bp, Homo sapiens
gtccaaagtactcat

SEQ ID NO: 860742 - DNA, 15 bp, Homo sapiens
tccaaagtactcatt

SEQ ID NO: 860743 - DNA, 15 bp, Homo sapiens
ccaaagtactcattc

SEQ ID NO: 860744 - DNA, 15 bp, Homo sapiens
caaagtactcattca

SEQ ID NO: 860745 - DNA, 15 bp, Homo sapiens
aaagtactcattcac

SEQ ID NO: 860746 - DNA, 15 bp, Homo sapiens
aagtactcattcact

SEQ ID NO: 860747 - DNA, 15 bp, Homo sapiens
agtactcattcactg

SEQ ID NO: 860748 - DNA, 15 bp, Homo sapiens
gtactcattcactga

SEQ ID NO: 860749 - DNA, 15 bp, Homo sapiens
tactcattcactgag

SEQ ID NO: 860750 - DNA, 15 bp, Homo sapiens
actcattcactgagg

SEQ ID NO: 860751 - DNA, 15 bp, Homo sapiens
ctcattcactgagga

SEQ ID NO: 860752 - DNA, 15 bp, Homo sapiens
tcattcactgaggag

SEQ ID NO: 860753 - DNA, 15 bp, Homo sapiens
cattcactgaggagt

SEQ ID NO: 860754 - DNA, 15 bp, Homo sapiens
attcactgaggagtg

SEQ ID NO: 860755 - DNA, 15 bp, Homo sapiens
ttcactgaggagtgg

SEQ ID NO: 860756 - DNA, 15 bp, Homo sapiens
tcactgaggagtggt

SEQ ID NO: 860757 - DNA, 15 bp, Homo sapiens
cactgaggagtggta

SEQ ID NO: 860758 - DNA, 15 bp, Homo sapiens
actgaggagtggtaa

SEQ ID NO: 860759 - DNA, 15 bp, Homo sapiens
ctgaggagtggtaag

SEQ ID NO: 860760 - DNA, 15 bp, Homo sapiens
tgaggagtggtaagg

SEQ ID NO: 860761 - DNA, 15 bp, Homo sapiens
gaggagtggtaaggc

SEQ ID NO: 860762 - DNA, 15 bp, Homo sapiens
aggagtggtaaggcc

SEQ ID NO: 860763 - DNA, 15 bp, Homo sapiens
ggagtggtaaggcct

SEQ ID NO: 860764 - DNA, 15 bp, Homo sapiens
gagtggtaaggcctt

SEQ ID NO: 860765 - DNA, 15 bp, Homo sapiens
agtggtaaggccttc

SEQ ID NO: 860766 - DNA, 15 bp, Homo sapiens
gtggtaaggccttcg

SEQ ID NO: 860767 - DNA, 15 bp, Homo sapiens
tggtaaggccttcgc

SEQ ID NO: 860768 - DNA, 15 bp, Homo sapiens
ggtaaggccttcgcc

SEQ ID NO: 860769 - DNA, 15 bp, Homo sapiens
gtaaggccttcgccc

SEQ ID NO: 860770 - DNA, 15 bp, Homo sapiens
taaggccttcgccca

SEQ ID NO: 860771 - DNA, 15 bp, Homo sapiens
aaggccttcgcccaa

SEQ ID NO: 860772 - DNA, 15 bp, Homo sapiens
aggccttcgcccaac

SEQ ID NO: 860773 - DNA, 15 bp, Homo sapiens
ggccttcgcccaacc

SEQ ID NO: 860774 - DNA, 15 bp, Homo sapiens
gccttcgcccaacct

SEQ ID NO: 860775 - DNA, 15 bp, Homo sapiens
ccttcgcccaacctg

SEQ ID NO: 860776 - DNA, 15 bp, Homo sapiens
cttcgcccaacctgc

SEQ ID NO: 860777 - DNA, 15 bp, Homo sapiens
ttcgcccaacctgcc

SEQ ID NO: 860778 - DNA, 15 bp, Homo sapiens
tcgcccaacctgcct

SEQ ID NO: 860779 - DNA, 15 bp, Homo sapiens
cgcccaacctgcctt

SEQ ID NO: 860780 - DNA, 15 bp, Homo sapiens
gcccaacctgccttc

SEQ ID NO: 860781 - DNA, 15 bp, Homo sapiens
cccaacctgccttct

SEQ ID NO: 860782 - DNA, 15 bp, Homo sapiens
ccaacctgccttctc

SEQ ID NO: 860783 - DNA, 15 bp, Homo sapiens
caacctgccttctct

SEQ ID NO: 860784 - DNA, 15 bp, Homo sapiens
aacctgccttctctg

SEQ ID NO: 860785 - DNA, 15 bp, Homo sapiens
acctgccttctctgg

SEQ ID NO: 860786 - DNA, 15 bp, Homo sapiens
cctgccttctctggg

SEQ ID NO: 860787 - DNA, 15 bp, Homo sapiens
ctgccttctctggga

SEQ ID NO: 860788 - DNA, 15 bp, Homo sapiens
tgccttctctgggaa

SEQ ID NO: 860789 - DNA, 15 bp, Homo sapiens
gccttctctgggaat

SEQ ID NO: 860790 - DNA, 15 bp, Homo sapiens
ccttctctgggaata

SEQ ID NO: 860791 - DNA, 15 bp, Homo sapiens
cttctctgggaatat

SEQ ID NO: 860792 - DNA, 15 bp, Homo sapiens
ttctctgggaatata

SEQ ID NO: 860793 - DNA, 15 bp, Homo sapiens
tctctgggaatatac

SEQ ID NO: 860794 - DNA, 15 bp, Homo sapiens
ctctgggaatatact

SEQ ID NO: 860795 - DNA, 15 bp, Homo sapiens
tctgggaatatactg

SEQ ID NO: 860796 - DNA, 15 bp, Homo sapiens
ctgggaatatactgc

SEQ ID NO: 860797 - DNA, 15 bp, Homo sapiens
tgggaatatactgct

SEQ ID NO: 860798 - DNA, 15 bp, Homo sapiens
gggaatatactgctg

SEQ ID NO: 860799 - DNA, 15 bp, Homo sapiens
ggaatatactgctgc

SEQ ID NO: 860800 - DNA, 15 bp, Homo sapiens
gaatatactgctgcc

SEQ ID NO: 860801 - DNA, 15 bp, Homo sapiens
aatatactgctgcct

SEQ ID NO: 860802 - DNA, 15 bp, Homo sapiens
atatactgctgcctg

SEQ ID NO: 860803 - DNA, 15 bp, Homo sapiens
tatactgctgcctga

SEQ ID NO: 860804 - DNA, 15 bp, Homo sapiens
atactgctgcctgaa

SEQ ID NO: 860805 - DNA, 15 bp, Homo sapiens
tactgctgcctgaac

SEQ ID NO: 860806 - DNA, 15 bp, Homo sapiens
actgctgcctgaaca

SEQ ID NO: 860807 - DNA, 15 bp, Homo sapiens
ctgctgcctgaacat

SEQ ID NO: 860808 - DNA, 15 bp, Homo sapiens
tgctgcctgaacata

SEQ ID NO: 860809 - DNA, 15 bp, Homo sapiens
gctgcctgaacatat

SEQ ID NO: 860810 - DNA, 15 bp, Homo sapiens
ctgcctgaacatatc

SEQ ID NO: 860811 - DNA, 15 bp, Homo sapiens
tgcctgaacatatca

SEQ ID NO: 860812 - DNA, 15 bp, Homo sapiens
gcctgaacatatcat

SEQ ID NO: 860813 - DNA, 15 bp, Homo sapiens
cctgaacatatcatt

SEQ ID NO: 860814 - DNA, 15 bp, Homo sapiens
ctgaacatatcattg

SEQ ID NO: 860815 - DNA, 15 bp, Homo sapiens
tgaacatatcattgt

SEQ ID NO: 860816 - DNA, 15 bp, Homo sapiens
gaacatatcattgtt

SEQ ID NO: 860817 - DNA, 15 bp, Homo sapiens
aacatatcattgttt

SEQ ID NO: 860818 - DNA, 15 bp, Homo sapiens
acatatcattgttta

SEQ ID NO: 860819 - DNA, 15 bp, Homo sapiens
catatcattgtttat

SEQ ID NO: 860820 - DNA, 15 bp, Homo sapiens
atatcattgtttatt

SEQ ID NO: 860821 - DNA, 15 bp, Homo sapiens
tatcattgtttattg

SEQ ID NO: 860822 - DNA, 15 bp, Homo sapiens
atcattgtttattgc

SEQ ID NO: 860823 - DNA, 15 bp, Homo sapiens
tcattgtttattgcc

SEQ ID NO: 860824 - DNA, 15 bp, Homo sapiens
cattgtttattgcca

SEQ ID NO: 860825 - DNA, 15 bp, Homo sapiens
attgtttattgccag

SEQ ID NO: 860826 - DNA, 15 bp, Homo sapiens
ttgtttattgccagg

SEQ ID NO: 860827 - DNA, 15 bp, Homo sapiens
tgtttattgccaggc

SEQ ID NO: 860828 - DNA, 15 bp, Homo sapiens
gtttattgccaggct

SEQ ID NO: 860829 - DNA, 15 bp, Homo sapiens
tttattgccaggctt

SEQ ID NO: 860830 - DNA, 15 bp, Homo sapiens
ttattgccaggcttg

SEQ ID NO: 860831 - DNA, 15 bp, Homo sapiens
tattgccaggcttga

SEQ ID NO: 860832 - DNA, 15 bp, Homo sapiens
attgccaggcttgaa

SEQ ID NO: 860833 - DNA, 15 bp, Homo sapiens
ttgccaggcttgaac

SEQ ID NO: 860834 - DNA, 15 bp, Homo sapiens
tgccaggcttgaact

SEQ ID NO: 860835 - DNA, 15 bp, Homo sapiens
gccaggcttgaactt

SEQ ID NO: 860836 - DNA, 15 bp, Homo sapiens
ccaggcttgaacttc

SEQ ID NO: 860837 - DNA, 15 bp, Homo sapiens
caggcttgaacttca

SEQ ID NO: 860838 - DNA, 15 bp, Homo sapiens
aggcttgaacttcac

SEQ ID NO: 860839 - DNA, 15 bp, Homo sapiens
ggcttgaacttcacc

SEQ ID NO: 860840 - DNA, 15 bp, Homo sapiens
gcttgaacttcacca

SEQ ID NO: 860841 - DNA, 15 bp, Homo sapiens
cttgaacttcaccaa

SEQ ID NO: 860842 - DNA, 15 bp, Homo sapiens
ttgaacttcaccaaa

SEQ ID NO: 860843 - DNA, 15 bp, Homo sapiens
tgaacttcaccaaat

SEQ ID NO: 860844 - DNA, 15 bp, Homo sapiens
gaacttcaccaaatt

SEQ ID NO: 860845 - DNA, 15 bp, Homo sapiens
aacttcaccaaatta

SEQ ID NO: 860846 - DNA, 15 bp, Homo sapiens
acttcaccaaattaa

SEQ ID NO: 860847 - DNA, 15 bp, Homo sapiens
cttcaccaaattaat

SEQ ID NO: 860848 - DNA, 15 bp, Homo sapiens
ttcaccaaattaatt

SEQ ID NO: 860849 - DNA, 15 bp, Homo sapiens
tcaccaaattaattt

SEQ ID NO: 860850 - DNA, 15 bp, Homo sapiens
caccaaattaattta

SEQ ID NO: 860851 - DNA, 15 bp, Homo sapiens
accaaattaatttat

SEQ ID NO: 860852 - DNA, 15 bp, Homo sapiens
ccaaattaatttatt

SEQ ID NO: 860853 - DNA, 15 bp, Homo sapiens
caaattaatttatta

SEQ ID NO: 860854 - DNA, 15 bp, Homo sapiens
aaattaatttattag

SEQ ID NO: 860855 - DNA, 15 bp, Homo sapiens
aattaatttattagg

SEQ ID NO: 860856 - DNA, 15 bp, Homo sapiens
attaatttattaggg

SEQ ID NO: 860857 - DNA, 15 bp, Homo sapiens
ttaatttattagggt

SEQ ID NO: 860858 - DNA, 15 bp, Homo sapiens
taatttattagggtc

SEQ ID NO: 860859 - DNA, 15 bp, Homo sapiens
aatttattagggtca

SEQ ID NO: 860860 - DNA, 15 bp, Homo sapiens
atttattagggtcaa

SEQ ID NO: 860861 - DNA, 15 bp, Homo sapiens
tttattagggtcaac

SEQ ID NO: 860862 - DNA, 15 bp, Homo sapiens
ttattagggtcaaca

SEQ ID NO: 860863 - DNA, 15 bp, Homo sapiens
tattagggtcaacat

SEQ ID NO: 860864 - DNA, 15 bp, Homo sapiens
attagggtcaacatc

SEQ ID NO: 860865 - DNA, 15 bp, Homo sapiens
ttagggtcaacatct

SEQ ID NO: 860866 - DNA, 15 bp, Homo sapiens
tagggtcaacatcta

SEQ ID NO: 860867 - DNA, 15 bp, Homo sapiens
agggtcaacatctaa

SEQ ID NO: 860868 - DNA, 15 bp, Homo sapiens
gggtcaacatctaaa

SEQ ID NO: 860869 - DNA, 15 bp, Homo sapiens
ggtcaacatctaaat

SEQ ID NO: 860870 - DNA, 15 bp, Homo sapiens
gtcaacatctaaata

SEQ ID NO: 860871 - DNA, 15 bp, Homo sapiens
tcaacatctaaatat

SEQ ID NO: 860872 - DNA, 15 bp, Homo sapiens
caacatctaaatatt

SEQ ID NO: 860873 - DNA, 15 bp, Homo sapiens
aacatctaaatatta

SEQ ID NO: 860874 - DNA, 15 bp, Homo sapiens
acatctaaatattag

SEQ ID NO: 860875 - DNA, 15 bp, Homo sapiens
catctaaatattaga

SEQ ID NO: 860876 - DNA, 15 bp, Homo sapiens
atctaaatattagaa

SEQ ID NO: 860877 - DNA, 15 bp, Homo sapiens
tctaaatattagaac

SEQ ID NO: 860878 - DNA, 15 bp, Homo sapiens
ctaaatattagaact

SEQ ID NO: 860879 - DNA, 15 bp, Homo sapiens
taaatattagaacta

SEQ ID NO: 860880 - DNA, 15 bp, Homo sapiens
aaatattagaactat

SEQ ID NO: 860881 - DNA, 15 bp, Homo sapiens
aatattagaactatt

SEQ ID NO: 860882 - DNA, 15 bp, Homo sapiens
atattagaactattt

SEQ ID NO: 860883 - DNA, 15 bp, Homo sapiens
tattagaactatttc

SEQ ID NO: 860884 - DNA, 15 bp, Homo sapiens
attagaactatttca

SEQ ID NO: 860885 - DNA, 15 bp, Homo sapiens
ttagaactatttcag

SEQ ID NO: 860886 - DNA, 15 bp, Homo sapiens
tagaactatttcaga

SEQ ID NO: 860887 - DNA, 15 bp, Homo sapiens
agaactatttcagat

SEQ ID NO: 860888 - DNA, 15 bp, Homo sapiens
gaactatttcagatt

SEQ ID NO: 860889 - DNA, 15 bp, Homo sapiens
aactatttcagatta

SEQ ID NO: 860890 - DNA, 15 bp, Homo sapiens
actatttcagattaa

SEQ ID NO: 860891 - DNA, 15 bp, Homo sapiens
ctatttcagattaat

SEQ ID NO: 860892 - DNA, 15 bp, Homo sapiens
tatttcagattaatt

SEQ ID NO: 860893 - DNA, 15 bp, Homo sapiens
atttcagattaattt

SEQ ID NO: 860894 - DNA, 15 bp, Homo sapiens
tttcagattaatttt

SEQ ID NO: 860895 - DNA, 15 bp, Homo sapiens
ttcagattaattttt

SEQ ID NO: 860896 - DNA, 15 bp, Homo sapiens
tcagattaattttta

SEQ ID NO: 860897 - DNA, 15 bp, Homo sapiens
cagattaatttttaa

SEQ ID NO: 860898 - DNA, 15 bp, Homo sapiens
agattaatttttaag

SEQ ID NO: 860899 - DNA, 15 bp, Homo sapiens
gattaatttttaagt

SEQ ID NO: 860900 - DNA, 15 bp, Homo sapiens
attaatttttaagtc

SEQ ID NO: 860901 - DNA, 15 bp, Homo sapiens
ttaatttttaagtcg

SEQ ID NO: 860902 - DNA, 15 bp, Homo sapiens
taatttttaagtcgt

SEQ ID NO: 860903 - DNA, 15 bp, Homo sapiens
aatttttaagtcgta

SEQ ID NO: 860904 - DNA, 15 bp, Homo sapiens
atttttaagtcgtat

SEQ ID NO: 860905 - DNA, 15 bp, Homo sapiens
tttttaagtcgtatc

SEQ ID NO: 860906 - DNA, 15 bp, Homo sapiens
ttttaagtcgtatcc

SEQ ID NO: 860907 - DNA, 15 bp, Homo sapiens
tttaagtcgtatcca

SEQ ID NO: 860908 - DNA, 15 bp, Homo sapiens
ttaagtcgtatccac

SEQ ID NO: 860909 - DNA, 15 bp, Homo sapiens
taagtcgtatccact

SEQ ID NO: 860910 - DNA, 15 bp, Homo sapiens
aagtcgtatccactt

SEQ ID NO: 860911 - DNA, 15 bp, Homo sapiens
agtcgtatccacttt

SEQ ID NO: 860912 - DNA, 15 bp, Homo sapiens
gtcgtatccactttg

SEQ ID NO: 860913 - DNA, 15 bp, Homo sapiens
tcgtatccactttgg

SEQ ID NO: 860914 - DNA, 15 bp, Homo sapiens
cgtatccactttggg

SEQ ID NO: 860915 - DNA, 15 bp, Homo sapiens
gtatccactttgggt

SEQ ID NO: 860916 - DNA, 15 bp, Homo sapiens
tatccactttgggta

SEQ ID NO: 860917 - DNA, 15 bp, Homo sapiens
atccactttgggtac

SEQ ID NO: 860918 - DNA, 15 bp, Homo sapiens
tccactttgggtact

SEQ ID NO: 860919 - DNA, 15 bp, Homo sapiens
ccactttgggtacta

SEQ ID NO: 860920 - DNA, 15 bp, Homo sapiens
cactttgggtactag

SEQ ID NO: 860921 - DNA, 15 bp, Homo sapiens
actttgggtactaga

SEQ ID NO: 860922 - DNA, 15 bp, Homo sapiens
ctttgggtactagat

SEQ ID NO: 860923 - DNA, 15 bp, Homo sapiens
tttgggtactagatc

SEQ ID NO: 860924 - DNA, 15 bp, Homo sapiens
ttgggtactagatca

SEQ ID NO: 860925 - DNA, 15 bp, Homo sapiens
tgggtactagatcaa

SEQ ID NO: 860926 - DNA, 15 bp, Homo sapiens
gggtactagatcaaa

SEQ ID NO: 860927 - DNA, 15 bp, Homo sapiens
ggtactagatcaaat

SEQ ID NO: 860928 - DNA, 15 bp, Homo sapiens
gtactagatcaaatt

SEQ ID NO: 860929 - DNA, 15 bp, Homo sapiens
tactagatcaaattg

SEQ ID NO: 860930 - DNA, 15 bp, Homo sapiens
actagatcaaattgc

SEQ ID NO: 860931 - DNA, 15 bp, Homo sapiens
ctagatcaaattgca

SEQ ID NO: 860932 - DNA, 15 bp, Homo sapiens
tagatcaaattgcag

SEQ ID NO: 860933 - DNA, 15 bp, Homo sapiens
agatcaaattgcagg

SEQ ID NO: 860934 - DNA, 15 bp, Homo sapiens
gatcaaattgcaggt

SEQ ID NO: 860935 - DNA, 15 bp, Homo sapiens
atcaaattgcaggtc

SEQ ID NO: 860936 - DNA, 15 bp, Homo sapiens
tcaaattgcaggtct

SEQ ID NO: 860937 - DNA, 15 bp, Homo sapiens
caaattgcaggtctc

SEQ ID NO: 860938 - DNA, 15 bp, Homo sapiens
aaattgcaggtctct

SEQ ID NO: 860939 - DNA, 15 bp, Homo sapiens
aattgcaggtctctg

SEQ ID NO: 860940 - DNA, 15 bp, Homo sapiens
attgcaggtctctgc

SEQ ID NO: 860941 - DNA, 15 bp, Homo sapiens
ttgcaggtctctgct

SEQ ID NO: 860942 - DNA, 15 bp, Homo sapiens
tgcaggtctctgctt

SEQ ID NO: 860943 - DNA, 15 bp, Homo sapiens
gcaggtctctgcttc

SEQ ID NO: 860944 - DNA, 15 bp, Homo sapiens
caggtctctgcttct

SEQ ID NO: 860945 - DNA, 15 bp, Homo sapiens
aggtctctgcttctg

SEQ ID NO: 860946 - DNA, 15 bp, Homo sapiens
ggtctctgcttctgg

SEQ ID NO: 860947 - DNA, 15 bp, Homo sapiens
gtctctgcttctggc

SEQ ID NO: 860948 - DNA, 15 bp, Homo sapiens
tctctgcttctggct

SEQ ID NO: 860949 - DNA, 15 bp, Homo sapiens
ctctgcttctggctt

SEQ ID NO: 860950 - DNA, 15 bp, Homo sapiens
tctgcttctggcttg

SEQ ID NO: 860951 - DNA, 15 bp, Homo sapiens
ctgcttctggcttga

SEQ ID NO: 860952 - DNA, 15 bp, Homo sapiens
tgcttctggcttgag

SEQ ID NO: 860953 - DNA, 15 bp, Homo sapiens
gcttctggcttgagc

SEQ ID NO: 860954 - DNA, 15 bp, Homo sapiens
cttctggcttgagcc

SEQ ID NO: 860955 - DNA, 15 bp, Homo sapiens
ttctggcttgagcct

SEQ ID NO: 860956 - DNA, 15 bp, Homo sapiens
tctggcttgagccta

SEQ ID NO: 860957 - DNA, 15 bp, Homo sapiens
ctggcttgagcctat

SEQ ID NO: 860958 - DNA, 15 bp, Homo sapiens
tggcttgagcctatg

SEQ ID NO: 860959 - DNA, 15 bp, Homo sapiens
ggcttgagcctatgt

SEQ ID NO: 860960 - DNA, 15 bp, Homo sapiens
gcttgagcctatgtt

SEQ ID NO: 860961 - DNA, 15 bp, Homo sapiens
cttgagcctatgttt

SEQ ID NO: 860962 - DNA, 15 bp, Homo sapiens
ttgagcctatgttta

SEQ ID NO: 860963 - DNA, 15 bp, Homo sapiens
tgagcctatgtttag

SEQ ID NO: 860964 - DNA, 15 bp, Homo sapiens
gagcctatgtttaga

SEQ ID NO: 860965 - DNA, 15 bp, Homo sapiens
agcctatgtttagag

SEQ ID NO: 860966 - DNA, 15 bp, Homo sapiens
gcctatgtttagaga

SEQ ID NO: 860967 - DNA, 15 bp, Homo sapiens
cctatgtttagagat

SEQ ID NO: 860968 - DNA, 15 bp, Homo sapiens
ctatgtttagagatg

SEQ ID NO: 860969 - DNA, 15 bp, Homo sapiens
tatgtttagagatga

SEQ ID NO: 860970 - DNA, 15 bp, Homo sapiens
atgtttagagatgat

SEQ ID NO: 860971 - DNA, 15 bp, Homo sapiens
tgtttagagatgatg

SEQ ID NO: 860972 - DNA, 15 bp, Homo sapiens
gtttagagatgatgt

SEQ ID NO: 860973 - DNA, 15 bp, Homo sapiens
tttagagatgatgtg

SEQ ID NO: 860974 - DNA, 15 bp, Homo sapiens
ttagagatgatgtgc

SEQ ID NO: 860975 - DNA, 15 bp, Homo sapiens
tagagatgatgtgca

SEQ ID NO: 860976 - DNA, 15 bp, Homo sapiens
agagatgatgtgcat

SEQ ID NO: 860977 - DNA, 15 bp, Homo sapiens
gagatgatgtgcatg

SEQ ID NO: 860978 - DNA, 15 bp, Homo sapiens
agatgatgtgcatga

SEQ ID NO: 860979 - DNA, 15 bp, Homo sapiens
gatgatgtgcatgaa

SEQ ID NO: 860980 - DNA, 15 bp, Homo sapiens
atgatgtgcatgaag

SEQ ID NO: 860981 - DNA, 15 bp, Homo sapiens
tgatgtgcatgaaga

SEQ ID NO: 860982 - DNA, 15 bp, Homo sapiens
gatgtgcatgaagac

SEQ ID NO: 860983 - DNA, 15 bp, Homo sapiens
atgtgcatgaagaca

SEQ ID NO: 860984 - DNA, 15 bp, Homo sapiens
tgtgcatgaagacac

SEQ ID NO: 860985 - DNA, 15 bp, Homo sapiens
gtgcatgaagacact

SEQ ID NO: 860986 - DNA, 15 bp, Homo sapiens
tgcatgaagacactc

SEQ ID NO: 860987 - DNA, 15 bp, Homo sapiens
gcatgaagacactct

SEQ ID NO: 860988 - DNA, 15 bp, Homo sapiens
catgaagacactctt

SEQ ID NO: 860989 - DNA, 15 bp, Homo sapiens
atgaagacactcttt

SEQ ID NO: 860990 - DNA, 15 bp, Homo sapiens
tgaagacactctttg

SEQ ID NO: 860991 - DNA, 15 bp, Homo sapiens
gaagacactctttgc

SEQ ID NO: 860992 - DNA, 15 bp, Homo sapiens
aagacactctttgct

SEQ ID NO: 860993 - DNA, 15 bp, Homo sapiens
agacactctttgctt

SEQ ID NO: 860994 - DNA, 15 bp, Homo sapiens
gacactctttgcttt

SEQ ID NO: 860995 - DNA, 15 bp, Homo sapiens
acactctttgctttt

SEQ ID NO: 860996 - DNA, 15 bp, Homo sapiens
cactctttgcttttc

SEQ ID NO: 860997 - DNA, 15 bp, Homo sapiens
actctttgcttttcc

SEQ ID NO: 860998 - DNA, 15 bp, Homo sapiens
ctctttgcttttcct

SEQ ID NO: 860999 - DNA, 15 bp, Homo sapiens
tctttgcttttcctt

SEQ ID NO: 861000 - DNA, 15 bp, Homo sapiens
ctttgcttttccttt

SEQ ID NO: 861001 - DNA, 15 bp, Homo sapiens
tttgcttttccttta

SEQ ID NO: 861002 - DNA, 15 bp, Homo sapiens
ttgcttttcctttat

SEQ ID NO: 861003 - DNA, 15 bp, Homo sapiens
tgcttttcctttatg

SEQ ID NO: 861004 - DNA, 15 bp, Homo sapiens
gcttttcctttatgc

SEQ ID NO: 861005 - DNA, 15 bp, Homo sapiens
cttttcctttatgca

SEQ ID NO: 861006 - DNA, 15 bp, Homo sapiens
ttttcctttatgcaa

SEQ ID NO: 861007 - DNA, 15 bp, Homo sapiens
tttcctttatgcaaa

SEQ ID NO: 861008 - DNA, 15 bp, Homo sapiens
ttcctttatgcaaaa

SEQ ID NO: 861009 - DNA, 15 bp, Homo sapiens
tcctttatgcaaaat

SEQ ID NO: 861010 - DNA, 15 bp, Homo sapiens
cctttatgcaaaatg

SEQ ID NO: 861011 - DNA, 15 bp, Homo sapiens
ctttatgcaaaatgg

SEQ ID NO: 861012 - DNA, 15 bp, Homo sapiens
tttatgcaaaatggg

SEQ ID NO: 861013 - DNA, 15 bp, Homo sapiens
ttatgcaaaatgggc

SEQ ID NO: 861014 - DNA, 15 bp, Homo sapiens
tatgcaaaatgggca

SEQ ID NO: 861015 - DNA, 15 bp, Homo sapiens
atgcaaaatgggcat

SEQ ID NO: 861016 - DNA, 15 bp, Homo sapiens
tgcaaaatgggcatt

SEQ ID NO: 861017 - DNA, 15 bp, Homo sapiens
gcaaaatgggcattt

SEQ ID NO: 861018 - DNA, 15 bp, Homo sapiens
caaaatgggcatttt

SEQ ID NO: 861019 - DNA, 15 bp, Homo sapiens
aaaatgggcattttc

SEQ ID NO: 861020 - DNA, 15 bp, Homo sapiens
aaatgggcattttca

SEQ ID NO: 861021 - DNA, 15 bp, Homo sapiens
aatgggcattttcaa

SEQ ID NO: 861022 - DNA, 15 bp, Homo sapiens
atgggcattttcaat

SEQ ID NO: 861023 - DNA, 15 bp, Homo sapiens
tgggcattttcaatc

SEQ ID NO: 861024 - DNA, 15 bp, Homo sapiens
gggcattttcaatct

SEQ ID NO: 861025 - DNA, 15 bp, Homo sapiens
ggcattttcaatctt

SEQ ID NO: 861026 - DNA, 15 bp, Homo sapiens
gcattttcaatcttt

SEQ ID NO: 861027 - DNA, 15 bp, Homo sapiens
cattttcaatctttt

SEQ ID NO: 861028 - DNA, 15 bp, Homo sapiens
attttcaatcttttt

SEQ ID NO: 861029 - DNA, 15 bp, Homo sapiens
ttttcaatctttttg

SEQ ID NO: 861030 - DNA, 15 bp, Homo sapiens
tttcaatctttttgt

SEQ ID NO: 861031 - DNA, 15 bp, Homo sapiens
ttcaatctttttgtc

SEQ ID NO: 861032 - DNA, 15 bp, Homo sapiens
tcaatctttttgtca

SEQ ID NO: 861033 - DNA, 15 bp, Homo sapiens
caatctttttgtcat

SEQ ID NO: 861034 - DNA, 15 bp, Homo sapiens
aatctttttgtcatt

SEQ ID NO: 861035 - DNA, 15 bp, Homo sapiens
atctttttgtcatta

SEQ ID NO: 861036 - DNA, 15 bp, Homo sapiens
tctttttgtcattag

SEQ ID NO: 861037 - DNA, 15 bp, Homo sapiens
ctttttgtcattagt

SEQ ID NO: 861038 - DNA, 15 bp, Homo sapiens
tttttgtcattagta

SEQ ID NO: 861039 - DNA, 15 bp, Homo sapiens
ttttgtcattagtaa

SEQ ID NO: 861040 - DNA, 15 bp, Homo sapiens
tttgtcattagtaaa

SEQ ID NO: 861041 - DNA, 15 bp, Homo sapiens
ttgtcattagtaaag

SEQ ID NO: 861042 - DNA, 15 bp, Homo sapiens
tgtcattagtaaagg

SEQ ID NO: 861043 - DNA, 15 bp, Homo sapiens
gtcattagtaaaggt

SEQ ID NO: 861044 - DNA, 15 bp, Homo sapiens
tcattagtaaaggtc

SEQ ID NO: 861045 - DNA, 15 bp, Homo sapiens
cattagtaaaggtca

SEQ ID NO: 861046 - DNA, 15 bp, Homo sapiens
attagtaaaggtcag

SEQ ID NO: 861047 - DNA, 15 bp, Homo sapiens
ttagtaaaggtcagt

SEQ ID NO: 861048 - DNA, 15 bp, Homo sapiens
tagtaaaggtcagtg

SEQ ID NO: 861049 - DNA, 15 bp, Homo sapiens
agtaaaggtcagtga

SEQ ID NO: 861050 - DNA, 15 bp, Homo sapiens
gtaaaggtcagtgat

SEQ ID NO: 861051 - DNA, 15 bp, Homo sapiens
taaaggtcagtgata

SEQ ID NO: 861052 - DNA, 15 bp, Homo sapiens
aaaggtcagtgataa

SEQ ID NO: 861053 - DNA, 15 bp, Homo sapiens
aaggtcagtgataaa

SEQ ID NO: 861054 - DNA, 15 bp, Homo sapiens
aggtcagtgataaag

SEQ ID NO: 861055 - DNA, 15 bp, Homo sapiens
ggtcagtgataaagg

SEQ ID NO: 861056 - DNA, 15 bp, Homo sapiens
gtcagtgataaagga

SEQ ID NO: 861057 - DNA, 15 bp, Homo sapiens
tcagtgataaaggaa

SEQ ID NO: 861058 - DNA, 15 bp, Homo sapiens
cagtgataaaggaag

SEQ ID NO: 861059 - DNA, 15 bp, Homo sapiens
agtgataaaggaagt

SEQ ID NO: 861060 - DNA, 15 bp, Homo sapiens
gtgataaaggaagtc

SEQ ID NO: 861061 - DNA, 15 bp, Homo sapiens
tgataaaggaagtct

SEQ ID NO: 861062 - DNA, 15 bp, Homo sapiens
gataaaggaagtctg

SEQ ID NO: 861063 - DNA, 15 bp, Homo sapiens
ataaaggaagtctgc

SEQ ID NO: 861064 - DNA, 15 bp, Homo sapiens
taaaggaagtctgca

SEQ ID NO: 861065 - DNA, 15 bp, Homo sapiens
aaaggaagtctgcat

SEQ ID NO: 861066 - DNA, 15 bp, Homo sapiens
aaggaagtctgcatc

SEQ ID NO: 861067 - DNA, 15 bp, Homo sapiens
aggaagtctgcatca

SEQ ID NO: 861068 - DNA, 15 bp, Homo sapiens
ggaagtctgcatcag

SEQ ID NO: 861069 - DNA, 15 bp, Homo sapiens
gaagtctgcatcagg

SEQ ID NO: 861070 - DNA, 15 bp, Homo sapiens
aagtctgcatcaggg

SEQ ID NO: 861071 - DNA, 15 bp, Homo sapiens
agtctgcatcagggg

SEQ ID NO: 861072 - DNA, 15 bp, Homo sapiens
gtctgcatcaggggt

SEQ ID NO: 861073 - DNA, 15 bp, Homo sapiens
tctgcatcaggggtc

SEQ ID NO: 861074 - DNA, 15 bp, Homo sapiens
ctgcatcaggggtcc

SEQ ID NO: 861075 - DNA, 15 bp, Homo sapiens
tgcatcaggggtcca

SEQ ID NO: 861076 - DNA, 15 bp, Homo sapiens
gcatcaggggtccaa

SEQ ID NO: 861077 - DNA, 15 bp, Homo sapiens
catcaggggtccaat

SEQ ID NO: 861078 - DNA, 15 bp, Homo sapiens
atcaggggtccaatt

SEQ ID NO: 861079 - DNA, 15 bp, Homo sapiens
tcaggggtccaattc

SEQ ID NO: 861080 - DNA, 15 bp, Homo sapiens
caggggtccaattcc

SEQ ID NO: 861081 - DNA, 15 bp, Homo sapiens
aggggtccaattcct

SEQ ID NO: 861082 - DNA, 15 bp, Homo sapiens
ggggtccaattcctt

SEQ ID NO: 861083 - DNA, 15 bp, Homo sapiens
gggtccaattcctta

SEQ ID NO: 861084 - DNA, 15 bp, Homo sapiens
ggtccaattccttat

SEQ ID NO: 861085 - DNA, 15 bp, Homo sapiens
gtccaattccttatg

SEQ ID NO: 861086 - DNA, 15 bp, Homo sapiens
tccaattccttatgg

SEQ ID NO: 861087 - DNA, 15 bp, Homo sapiens
ccaattccttatggc

SEQ ID NO: 861088 - DNA, 15 bp, Homo sapiens
caattccttatggcc

SEQ ID NO: 861089 - DNA, 15 bp, Homo sapiens
aattccttatggcca

SEQ ID NO: 861090 - DNA, 15 bp, Homo sapiens
attccttatggccag

SEQ ID NO: 861091 - DNA, 15 bp, Homo sapiens
ttccttatggccagt

SEQ ID NO: 861092 - DNA, 15 bp, Homo sapiens
tccttatggccagtt

SEQ ID NO: 861093 - DNA, 15 bp, Homo sapiens
ccttatggccagttt

SEQ ID NO: 861094 - DNA, 15 bp, Homo sapiens
cttatggccagtttc

SEQ ID NO: 861095 - DNA, 15 bp, Homo sapiens
ttatggccagtttct

SEQ ID NO: 861096 - DNA, 15 bp, Homo sapiens
tatggccagtttctc

SEQ ID NO: 861097 - DNA, 15 bp, Homo sapiens
atggccagtttctct

SEQ ID NO: 861098 - DNA, 15 bp, Homo sapiens
tggccagtttctcta

SEQ ID NO: 861099 - DNA, 15 bp, Homo sapiens
ggccagtttctctat

SEQ ID NO: 861100 - DNA, 15 bp, Homo sapiens
gccagtttctctatt

SEQ ID NO: 861101 - DNA, 15 bp, Homo sapiens
ccagtttctctattc

SEQ ID NO: 861102 - DNA, 15 bp, Homo sapiens
cagtttctctattct

SEQ ID NO: 861103 - DNA, 15 bp, Homo sapiens
agtttctctattctg

SEQ ID NO: 861104 - DNA, 15 bp, Homo sapiens
gtttctctattctgt

SEQ ID NO: 861105 - DNA, 15 bp, Homo sapiens
tttctctattctgtt

SEQ ID NO: 861106 - DNA, 15 bp, Homo sapiens
tctattctgttccaa

SEQ ID NO: 861107 - DNA, 15 bp, Homo sapiens
ctattctgttccaag

SEQ ID NO: 861108 - DNA, 15 bp, Homo sapiens
tattctgttccaagg

SEQ ID NO: 861109 - DNA, 15 bp, Homo sapiens
attctgttccaaggt

SEQ ID NO: 861110 - DNA, 15 bp, Homo sapiens
ttctgttccaaggtt

SEQ ID NO: 861111 - DNA, 15 bp, Homo sapiens
tctgttccaaggttg

SEQ ID NO: 861112 - DNA, 15 bp, Homo sapiens
ctgttccaaggttgt

SEQ ID NO: 861113 - DNA, 15 bp, Homo sapiens
tgttccaaggttgtt

SEQ ID NO: 861114 - DNA, 15 bp, Homo sapiens
gttccaaggttgttt

SEQ ID NO: 861115 - DNA, 15 bp, Homo sapiens
ttccaaggttgtttg

SEQ ID NO: 861116 - DNA, 15 bp, Homo sapiens
tccaaggttgtttgt

SEQ ID NO: 861117 - DNA, 15 bp, Homo sapiens
ccaaggttgtttgtc

SEQ ID NO: 861118 - DNA, 15 bp, Homo sapiens
caaggttgtttgtct

SEQ ID NO: 861119 - DNA, 15 bp, Homo sapiens
aaggttgtttgtctc

SEQ ID NO: 861120 - DNA, 15 bp, Homo sapiens
aggttgtttgtctcc

SEQ ID NO: 861121 - DNA, 15 bp, Homo sapiens
ggttgtttgtctcca

SEQ ID NO: 861122 - DNA, 15 bp, Homo sapiens
gttgtttgtctccat

SEQ ID NO: 861123 - DNA, 15 bp, Homo sapiens
ttgtttgtctccata

SEQ ID NO: 861124 - DNA, 15 bp, Homo sapiens
tgtttgtctccatat

SEQ ID NO: 861125 - DNA, 15 bp, Homo sapiens
gtttgtctccatata

SEQ ID NO: 861126 - DNA, 15 bp, Homo sapiens
tttgtctccatatat

SEQ ID NO: 861127 - DNA, 15 bp, Homo sapiens
ttgtctccatatatc

SEQ ID NO: 861128 - DNA, 15 bp, Homo sapiens
tgtctccatatatca

SEQ ID NO: 861129 - DNA, 15 bp, Homo sapiens
gtctccatatatcaa

SEQ ID NO: 861130 - DNA, 15 bp, Homo sapiens
tctccatatatcaac

SEQ ID NO: 861131 - DNA, 15 bp, Homo sapiens
ctccatatatcaaca

SEQ ID NO: 861132 - DNA, 15 bp, Homo sapiens
tccatatatcaacat

SEQ ID NO: 861133 - DNA, 15 bp, Homo sapiens
ccatatatcaacatt

SEQ ID NO: 861134 - DNA, 15 bp, Homo sapiens
catatatcaacattg

SEQ ID NO: 861135 - DNA, 15 bp, Homo sapiens
atatatcaacattgg

SEQ ID NO: 861136 - DNA, 15 bp, Homo sapiens
tatatcaacattggt

SEQ ID NO: 861137 - DNA, 15 bp, Homo sapiens
atatcaacattggtc

SEQ ID NO: 861138 - DNA, 15 bp, Homo sapiens
tatcaacattggtca

SEQ ID NO: 861139 - DNA, 15 bp, Homo sapiens
atcaacattggtcag

SEQ ID NO: 861140 - DNA, 15 bp, Homo sapiens
tcaacattggtcagg

SEQ ID NO: 861141 - DNA, 15 bp, Homo sapiens
caacattggtcagga

SEQ ID NO: 861142 - DNA, 15 bp, Homo sapiens
aacattggtcaggat

SEQ ID NO: 861143 - DNA, 15 bp, Homo sapiens
acattggtcaggatt

SEQ ID NO: 861144 - DNA, 15 bp, Homo sapiens
cattggtcaggattg

SEQ ID NO: 861145 - DNA, 15 bp, Homo sapiens
attggtcaggattga

SEQ ID NO: 861146 - DNA, 15 bp, Homo sapiens
ttggtcaggattgaa

SEQ ID NO: 861147 - DNA, 15 bp, Homo sapiens
tggtcaggattgaaa

SEQ ID NO: 861148 - DNA, 15 bp, Homo sapiens
ggtcaggattgaaag

SEQ ID NO: 861149 - DNA, 15 bp, Homo sapiens
gtcaggattgaaagt

SEQ ID NO: 861150 - DNA, 15 bp, Homo sapiens
tcaggattgaaagtg

SEQ ID NO: 861151 - DNA, 15 bp, Homo sapiens
caggattgaaagtgt

SEQ ID NO: 861152 - DNA, 15 bp, Homo sapiens
aggattgaaagtgtg

SEQ ID NO: 861153 - DNA, 15 bp, Homo sapiens
ggattgaaagtgtgc

SEQ ID NO: 861154 - DNA, 15 bp, Homo sapiens
gattgaaagtgtgca

SEQ ID NO: 861155 - DNA, 15 bp, Homo sapiens
attgaaagtgtgcaa

SEQ ID NO: 861156 - DNA, 15 bp, Homo sapiens
ttgaaagtgtgcaac

SEQ ID NO: 861157 - DNA, 15 bp, Homo sapiens
tgaaagtgtgcaaca

SEQ ID NO: 861158 - DNA, 15 bp, Homo sapiens
gaaagtgtgcaacaa

SEQ ID NO: 861159 - DNA, 15 bp, Homo sapiens
aaagtgtgcaacaag

SEQ ID NO: 861160 - DNA, 15 bp, Homo sapiens
aagtgtgcaacaagg

SEQ ID NO: 861161 - DNA, 15 bp, Homo sapiens
agtgtgcaacaaggt

SEQ ID NO: 861162 - DNA, 15 bp, Homo sapiens
gtgtgcaacaaggtt

SEQ ID NO: 861163 - DNA, 15 bp, Homo sapiens
tgtgcaacaaggttt

SEQ ID NO: 861164 - DNA, 15 bp, Homo sapiens
gtgcaacaaggtttg

SEQ ID NO: 861165 - DNA, 15 bp, Homo sapiens
tgcaacaaggtttga

SEQ ID NO: 861166 - DNA, 15 bp, Homo sapiens
gcaacaaggtttgaa

SEQ ID NO: 861167 - DNA, 15 bp, Homo sapiens
caacaaggtttgaat

SEQ ID NO: 861168 - DNA, 15 bp, Homo sapiens
aacaaggtttgaatg

SEQ ID NO: 861169 - DNA, 15 bp, Homo sapiens
acaaggtttgaatga

SEQ ID NO: 861170 - DNA, 15 bp, Homo sapiens
caaggtttgaatgaa

SEQ ID NO: 861171 - DNA, 15 bp, Homo sapiens
aaggtttgaatgaat

SEQ ID NO: 861172 - DNA, 15 bp, Homo sapiens
aggtttgaatgaata

SEQ ID NO: 861173 - DNA, 15 bp, Homo sapiens
ggtttgaatgaataa

SEQ ID NO: 861174 - DNA, 15 bp, Homo sapiens
gtttgaatgaataag

SEQ ID NO: 861175 - DNA, 15 bp, Homo sapiens
tttgaatgaataagt

SEQ ID NO: 861176 - DNA, 15 bp, Homo sapiens
ttgaatgaataagtg

SEQ ID NO: 861177 - DNA, 15 bp, Homo sapiens
tgaatgaataagtga

SEQ ID NO: 861178 - DNA, 15 bp, Homo sapiens
gaatgaataagtgaa

SEQ ID NO: 861179 - DNA, 15 bp, Homo sapiens
aatgaataagtgaaa

SEQ ID NO: 861180 - DNA, 15 bp, Homo sapiens
atgaataagtgaaaa

SEQ ID NO: 861181 - DNA, 15 bp, Homo sapiens
tgaataagtgaaaat

SEQ ID NO: 861182 - DNA, 15 bp, Homo sapiens
gaataagtgaaaatc

SEQ ID NO: 861183 - DNA, 15 bp, Homo sapiens
aataagtgaaaatct

SEQ ID NO: 861184 - DNA, 15 bp, Homo sapiens
ataagtgaaaatctt

SEQ ID NO: 861185 - DNA, 15 bp, Homo sapiens
taagtgaaaatcttc

SEQ ID NO: 861186 - DNA, 15 bp, Homo sapiens
aagtgaaaatcttcc

SEQ ID NO: 861187 - DNA, 15 bp, Homo sapiens
agtgaaaatcttcca

SEQ ID NO: 861188 - DNA, 15 bp, Homo sapiens
gtgaaaatcttccac

SEQ ID NO: 861189 - DNA, 15 bp, Homo sapiens
tgaaaatcttccact

SEQ ID NO: 861190 - DNA, 15 bp, Homo sapiens
gaaaatcttccactg

SEQ ID NO: 861191 - DNA, 15 bp, Homo sapiens
aaaatcttccactgg

SEQ ID NO: 861192 - DNA, 15 bp, Homo sapiens
aaatcttccactggt

SEQ ID NO: 861193 - DNA, 15 bp, Homo sapiens
aatcttccactggtg

SEQ ID NO: 861194 - DNA, 15 bp, Homo sapiens
atcttccactggtga

SEQ ID NO: 861195 - DNA, 15 bp, Homo sapiens
tcttccactggtgac

SEQ ID NO: 861196 - DNA, 15 bp, Homo sapiens
cttccactggtgaca

SEQ ID NO: 861197 - DNA, 15 bp, Homo sapiens
ttccactggtgacag

SEQ ID NO: 861198 - DNA, 15 bp, Homo sapiens
tccactggtgacagg

SEQ ID NO: 861199 - DNA, 15 bp, Homo sapiens
ccactggtgacagga

SEQ ID NO: 861200 - DNA, 15 bp, Homo sapiens
cactggtgacaggat

SEQ ID NO: 861201 - DNA, 15 bp, Homo sapiens
actggtgacaggata

SEQ ID NO: 861202 - DNA, 15 bp, Homo sapiens
ctggtgacaggataa

SEQ ID NO: 861203 - DNA, 15 bp, Homo sapiens
tggtgacaggataaa

SEQ ID NO: 861204 - DNA, 15 bp, Homo sapiens
ggtgacaggataaaa

SEQ ID NO: 861205 - DNA, 15 bp, Homo sapiens
gtgacaggataaaat

SEQ ID NO: 861206 - DNA, 15 bp, Homo sapiens
tgacaggataaaata

SEQ ID NO: 861207 - DNA, 15 bp, Homo sapiens
gacaggataaaatat

SEQ ID NO: 861208 - DNA, 15 bp, Homo sapiens
acaggataaaatatt

SEQ ID NO: 861209 - DNA, 15 bp, Homo sapiens
caggataaaatattc

SEQ ID NO: 861210 - DNA, 15 bp, Homo sapiens
aggataaaatattcc

SEQ ID NO: 861211 - DNA, 15 bp, Homo sapiens
ggataaaatattcca

SEQ ID NO: 861212 - DNA, 15 bp, Homo sapiens
gataaaatattccaa

SEQ ID NO: 861213 - DNA, 15 bp, Homo sapiens
ataaaatattccaat

SEQ ID NO: 861214 - DNA, 15 bp, Homo sapiens
taaaatattccaatg

SEQ ID NO: 861215 - DNA, 15 bp, Homo sapiens
aaaatattccaatgg

SEQ ID NO: 861216 - DNA, 15 bp, Homo sapiens
aaatattccaatggt

SEQ ID NO: 861217 - DNA, 15 bp, Homo sapiens
aatattccaatggtt

SEQ ID NO: 861218 - DNA, 15 bp, Homo sapiens
atattccaatggttt

SEQ ID NO: 861219 - DNA, 15 bp, Homo sapiens
tattccaatggtttt

SEQ ID NO: 861220 - DNA, 15 bp, Homo sapiens
attccaatggttttt

SEQ ID NO: 861221 - DNA, 15 bp, Homo sapiens
ttccaatggttttta

SEQ ID NO: 861222 - DNA, 15 bp, Homo sapiens
tccaatggtttttat

SEQ ID NO: 861223 - DNA, 15 bp, Homo sapiens
ccaatggtttttatt

SEQ ID NO: 861224 - DNA, 15 bp, Homo sapiens
caatggtttttattg

SEQ ID NO: 861225 - DNA, 15 bp, Homo sapiens
aatggtttttattga

SEQ ID NO: 861226 - DNA, 15 bp, Homo sapiens
atggtttttattgaa

SEQ ID NO: 861227 - DNA, 15 bp, Homo sapiens
tggtttttattgaag

SEQ ID NO: 861228 - DNA, 15 bp, Homo sapiens
ggtttttattgaagt

SEQ ID NO: 861229 - DNA, 15 bp, Homo sapiens
gtttttattgaagta

SEQ ID NO: 861230 - DNA, 15 bp, Homo sapiens
tttttattgaagtac

SEQ ID NO: 861231 - DNA, 15 bp, Homo sapiens
ttttattgaagtaca

SEQ ID NO: 861232 - DNA, 15 bp, Homo sapiens
tttattgaagtacaa

SEQ ID NO: 861233 - DNA, 15 bp, Homo sapiens
ttattgaagtacaat

SEQ ID NO: 861234 - DNA, 15 bp, Homo sapiens
tattgaagtacaata

SEQ ID NO: 861235 - DNA, 15 bp, Homo sapiens
attgaagtacaatac

SEQ ID NO: 861236 - DNA, 15 bp, Homo sapiens
ttgaagtacaatact

SEQ ID NO: 861237 - DNA, 15 bp, Homo sapiens
tgaagtacaatactg

SEQ ID NO: 861238 - DNA, 15 bp, Homo sapiens
gaagtacaatactga

SEQ ID NO: 861239 - DNA, 15 bp, Homo sapiens
aagtacaatactgaa

SEQ ID NO: 861240 - DNA, 15 bp, Homo sapiens
agtacaatactgaat

SEQ ID NO: 861241 - DNA, 15 bp, Homo sapiens
gtacaatactgaatt

SEQ ID NO: 861242 - DNA, 15 bp, Homo sapiens
tacaatactgaatta

SEQ ID NO: 861243 - DNA, 15 bp, Homo sapiens
acaatactgaattat

SEQ ID NO: 861244 - DNA, 15 bp, Homo sapiens
caatactgaattatg

SEQ ID NO: 861245 - DNA, 15 bp, Homo sapiens
aatactgaattatgt

SEQ ID NO: 861246 - DNA, 15 bp, Homo sapiens
atactgaattatgtt

SEQ ID NO: 861247 - DNA, 15 bp, Homo sapiens
tactgaattatgttt

SEQ ID NO: 861248 - DNA, 15 bp, Homo sapiens
actgaattatgttta

SEQ ID NO: 861249 - DNA, 15 bp, Homo sapiens
ctgaattatgtttat

SEQ ID NO: 861250 - DNA, 15 bp, Homo sapiens
tgaattatgtttatg

SEQ ID NO: 861251 - DNA, 15 bp, Homo sapiens
gaattatgtttatgg

SEQ ID NO: 861252 - DNA, 15 bp, Homo sapiens
aattatgtttatggc

SEQ ID NO: 861253 - DNA, 15 bp, Homo sapiens
attatgtttatggca

SEQ ID NO: 861254 - DNA, 15 bp, Homo sapiens
ttatgtttatggcat

SEQ ID NO: 861255 - DNA, 15 bp, Homo sapiens
tatgtttatggcatg

SEQ ID NO: 861256 - DNA, 15 bp, Homo sapiens
atgtttatggcatgg

SEQ ID NO: 861257 - DNA, 15 bp, Homo sapiens
tgtttatggcatggt

SEQ ID NO: 861258 - DNA, 15 bp, Homo sapiens
gtttatggcatggta

SEQ ID NO: 861259 - DNA, 15 bp, Homo sapiens
tttatggcatggtac

SEQ ID NO: 861260 - DNA, 15 bp, Homo sapiens
ttatggcatggtacc

SEQ ID NO: 861261 - DNA, 15 bp, Homo sapiens
tatggcatggtacct

SEQ ID NO: 861262 - DNA, 15 bp, Homo sapiens
atggcatggtaccta

SEQ ID NO: 861263 - DNA, 15 bp, Homo sapiens
tggcatggtacctat

SEQ ID NO: 861264 - DNA, 15 bp, Homo sapiens
ggcatggtacctata

SEQ ID NO: 861265 - DNA, 15 bp, Homo sapiens
gcatggtacctatat

SEQ ID NO: 861266 - DNA, 15 bp, Homo sapiens
catggtacctatatg

SEQ ID NO: 861267 - DNA, 15 bp, Homo sapiens
atggtacctatatgt

SEQ ID NO: 861268 - DNA, 15 bp, Homo sapiens
tggtacctatatgtc

SEQ ID NO: 861269 - DNA, 15 bp, Homo sapiens
ggtacctatatgtca

SEQ ID NO: 861270 - DNA, 15 bp, Homo sapiens
gtacctatatgtcac

SEQ ID NO: 861271 - DNA, 15 bp, Homo sapiens
tacctatatgtcaca

SEQ ID NO: 861272 - DNA, 15 bp, Homo sapiens
acctatatgtcacag

SEQ ID NO: 861273 - DNA, 15 bp, Homo sapiens
cctatatgtcacaga

SEQ ID NO: 861274 - DNA, 15 bp, Homo sapiens
ctatatgtcacagaa

SEQ ID NO: 861275 - DNA, 15 bp, Homo sapiens
tatatgtcacagaag

SEQ ID NO: 861276 - DNA, 15 bp, Homo sapiens
atatgtcacagaagt

SEQ ID NO: 861277 - DNA, 15 bp, Homo sapiens
tatgtcacagaagtg

SEQ ID NO: 861278 - DNA, 15 bp, Homo sapiens
atgtcacagaagtga

SEQ ID NO: 861279 - DNA, 15 bp, Homo sapiens
tgtcacagaagtgat

SEQ ID NO: 861280 - DNA, 15 bp, Homo sapiens
gtcacagaagtgatc

SEQ ID NO: 861281 - DNA, 15 bp, Homo sapiens
tcacagaagtgatcc

SEQ ID NO: 861282 - DNA, 15 bp, Homo sapiens
cacagaagtgatccc

SEQ ID NO: 861283 - DNA, 15 bp, Homo sapiens
acagaagtgatccca

SEQ ID NO: 861284 - DNA, 15 bp, Homo sapiens
cagaagtgatcccat

SEQ ID NO: 861285 - DNA, 15 bp, Homo sapiens
agaagtgatcccatc

SEQ ID NO: 861286 - DNA, 15 bp, Homo sapiens
gaagtgatcccatca

SEQ ID NO: 861287 - DNA, 15 bp, Homo sapiens
aagtgatcccatcac

SEQ ID NO: 861288 - DNA, 15 bp, Homo sapiens
agtgatcccatcact

SEQ ID NO: 861289 - DNA, 15 bp, Homo sapiens
gtgatcccatcactt

SEQ ID NO: 861290 - DNA, 15 bp, Homo sapiens
tgatcccatcacttt

SEQ ID NO: 861291 - DNA, 15 bp, Homo sapiens
gatcccatcactttt

SEQ ID NO: 861292 - DNA, 15 bp, Homo sapiens
atcccatcactttta

SEQ ID NO: 861293 - DNA, 15 bp, Homo sapiens
tcccatcacttttac

SEQ ID NO: 861294 - DNA, 15 bp, Homo sapiens
cccatcacttttacc

SEQ ID NO: 861295 - DNA, 15 bp, Homo sapiens
ccatcacttttacct

SEQ ID NO: 861296 - DNA, 15 bp, Homo sapiens
catcacttttacctt

SEQ ID NO: 861297 - DNA, 15 bp, Homo sapiens
atcacttttacctta

SEQ ID NO: 861298 - DNA, 15 bp, Homo sapiens
tcacttttaccttat

SEQ ID NO: 861299 - DNA, 15 bp, Homo sapiens
cacttttaccttata

SEQ ID NO: 861300 - DNA, 15 bp, Homo sapiens
acttttaccttatag

SEQ ID NO: 861301 - DNA, 15 bp, Homo sapiens
cttttaccttatagg

SEQ ID NO: 861302 - DNA, 15 bp, Homo sapiens
ttttaccttataggt

SEQ ID NO: 861303 - DNA, 15 bp, Homo sapiens
tttaccttataggtg

SEQ ID NO: 861304 - DNA, 15 bp, Homo sapiens
ttaccttataggtgg

SEQ ID NO: 861305 - DNA, 15 bp, Homo sapiens
taccttataggtggg

SEQ ID NO: 861306 - DNA, 15 bp, Homo sapiens
accttataggtgggc

SEQ ID NO: 861307 - DNA, 15 bp, Homo sapiens
ccttataggtgggcc

SEQ ID NO: 861308 - DNA, 15 bp, Homo sapiens
cttataggtgggcct

SEQ ID NO: 861309 - DNA, 15 bp, Homo sapiens
ttataggtgggcctc

SEQ ID NO: 861310 - DNA, 15 bp, Homo sapiens
tataggtgggcctct

SEQ ID NO: 861311 - DNA, 15 bp, Homo sapiens
ataggtgggcctctt

SEQ ID NO: 861312 - DNA, 15 bp, Homo sapiens
taggtgggcctcttg

SEQ ID NO: 861313 - DNA, 15 bp, Homo sapiens
aggtgggcctcttgg

SEQ ID NO: 861314 - DNA, 15 bp, Homo sapiens
ggtgggcctcttggg

SEQ ID NO: 861315 - DNA, 15 bp, Homo sapiens
gtgggcctcttggga

SEQ ID NO: 861316 - DNA, 15 bp, Homo sapiens
tgggcctcttgggaa

SEQ ID NO: 861317 - DNA, 15 bp, Homo sapiens
gggcctcttgggaag

SEQ ID NO: 861318 - DNA, 15 bp, Homo sapiens
ggcctcttgggaaga

SEQ ID NO: 861319 - DNA, 15 bp, Homo sapiens
gcctcttgggaagaa

SEQ ID NO: 861320 - DNA, 15 bp, Homo sapiens
cctcttgggaagaac

SEQ ID NO: 861321 - DNA, 15 bp, Homo sapiens
ctcttgggaagaact

SEQ ID NO: 861322 - DNA, 15 bp, Homo sapiens
tcttgggaagaactg

SEQ ID NO: 861323 - DNA, 15 bp, Homo sapiens
cttgggaagaactgg

SEQ ID NO: 861324 - DNA, 15 bp, Homo sapiens
ttgggaagaactgga

SEQ ID NO: 861325 - DNA, 15 bp, Homo sapiens
tgggaagaactggat

SEQ ID NO: 861326 - DNA, 15 bp, Homo sapiens
gggaagaactggatc

SEQ ID NO: 861327 - DNA, 15 bp, Homo sapiens
ggaagaactggatca

SEQ ID NO: 861328 - DNA, 15 bp, Homo sapiens
gaagaactggatcag

SEQ ID NO: 861329 - DNA, 15 bp, Homo sapiens
aagaactggatcagg

SEQ ID NO: 861330 - DNA, 15 bp, Homo sapiens
agaactggatcaggg

SEQ ID NO: 861331 - DNA, 15 bp, Homo sapiens
gaactggatcaggga

SEQ ID NO: 861332 - DNA, 15 bp, Homo sapiens
aactggatcagggaa

SEQ ID NO: 861333 - DNA, 15 bp, Homo sapiens
actggatcagggaag

SEQ ID NO: 861334 - DNA, 15 bp, Homo sapiens
ctggatcagggaaga

SEQ ID NO: 861335 - DNA, 15 bp, Homo sapiens
tggatcagggaagag

SEQ ID NO: 861336 - DNA, 15 bp, Homo sapiens
ggatcagggaagagt

SEQ ID NO: 861337 - DNA, 15 bp, Homo sapiens
gatcagggaagagta

SEQ ID NO: 861338 - DNA, 15 bp, Homo sapiens
atcagggaagagtac

SEQ ID NO: 861339 - DNA, 15 bp, Homo sapiens
tcagggaagagtact

SEQ ID NO: 861340 - DNA, 15 bp, Homo sapiens
cagggaagagtactt

SEQ ID NO: 861341 - DNA, 15 bp, Homo sapiens
agggaagagtacttt

SEQ ID NO: 861342 - DNA, 15 bp, Homo sapiens
gggaagagtactttg

SEQ ID NO: 861343 - DNA, 15 bp, Homo sapiens
ggaagagtactttgt

SEQ ID NO: 861344 - DNA, 15 bp, Homo sapiens
gaagagtactttgtt

SEQ ID NO: 861345 - DNA, 15 bp, Homo sapiens
aagagtactttgtta

SEQ ID NO: 861346 - DNA, 15 bp, Homo sapiens
agagtactttgttat

SEQ ID NO: 861347 - DNA, 15 bp, Homo sapiens
gagtactttgttatc

SEQ ID NO: 861348 - DNA, 15 bp, Homo sapiens
agtactttgttatca

SEQ ID NO: 861349 - DNA, 15 bp, Homo sapiens
gtactttgttatcag

SEQ ID NO: 861350 - DNA, 15 bp, Homo sapiens
tactttgttatcagc

SEQ ID NO: 861351 - DNA, 15 bp, Homo sapiens
actttgttatcagct

SEQ ID NO: 861352 - DNA, 15 bp, Homo sapiens
ctttgttatcagctt

SEQ ID NO: 861353 - DNA, 15 bp, Homo sapiens
tttgttatcagcttt

SEQ ID NO: 861354 - DNA, 15 bp, Homo sapiens
ttgttatcagctttt

SEQ ID NO: 861355 - DNA, 15 bp, Homo sapiens
tgttatcagcttttt

SEQ ID NO: 861356 - DNA, 15 bp, Homo sapiens
gttatcagctttttt

SEQ ID NO: 861357 - DNA, 15 bp, Homo sapiens
ttatcagcttttttg

SEQ ID NO: 861358 - DNA, 15 bp, Homo sapiens
tatcagcttttttga

SEQ ID NO: 861359 - DNA, 15 bp, Homo sapiens
atcagcttttttgag

SEQ ID NO: 861360 - DNA, 15 bp, Homo sapiens
tcagcttttttgaga

SEQ ID NO: 861361 - DNA, 15 bp, Homo sapiens
cagcttttttgagac

SEQ ID NO: 861362 - DNA, 15 bp, Homo sapiens
agcttttttgagact

SEQ ID NO: 861363 - DNA, 15 bp, Homo sapiens
gcttttttgagacta

SEQ ID NO: 861364 - DNA, 15 bp, Homo sapiens
cttttttgagactac

SEQ ID NO: 861365 - DNA, 15 bp, Homo sapiens
ttttttgagactact

SEQ ID NO: 861366 - DNA, 15 bp, Homo sapiens
tttttgagactactg

SEQ ID NO: 861367 - DNA, 15 bp, Homo sapiens
ttttgagactactga

SEQ ID NO: 861368 - DNA, 15 bp, Homo sapiens
tttgagactactgaa

SEQ ID NO: 861369 - DNA, 15 bp, Homo sapiens
ttgagactactgaac

SEQ ID NO: 861370 - DNA, 15 bp, Homo sapiens
tgagactactgaaca

SEQ ID NO: 861371 - DNA, 15 bp, Homo sapiens
gagactactgaacac

SEQ ID NO: 861372 - DNA, 15 bp, Homo sapiens
agactactgaacact

SEQ ID NO: 861373 - DNA, 15 bp, Homo sapiens
gactactgaacactg

SEQ ID NO: 861374 - DNA, 15 bp, Homo sapiens
actactgaacactga

SEQ ID NO: 861375 - DNA, 15 bp, Homo sapiens
ctactgaacactgaa

SEQ ID NO: 861376 - DNA, 15 bp, Homo sapiens
tactgaacactgaag

SEQ ID NO: 861377 - DNA, 15 bp, Homo sapiens
actgaacactgaagg

SEQ ID NO: 861378 - DNA, 15 bp, Homo sapiens
ctgaacactgaagga

SEQ ID NO: 861379 - DNA, 15 bp, Homo sapiens
tgaacactgaaggag

SEQ ID NO: 861380 - DNA, 15 bp, Homo sapiens
gaacactgaaggaga

SEQ ID NO: 861381 - DNA, 15 bp, Homo sapiens
aacactgaaggagaa

SEQ ID NO: 861382 - DNA, 15 bp, Homo sapiens
acactgaaggagaaa

SEQ ID NO: 861383 - DNA, 15 bp, Homo sapiens
cactgaaggagaaat

SEQ ID NO: 861384 - DNA, 15 bp, Homo sapiens
actgaaggagaaatc

SEQ ID NO: 861385 - DNA, 15 bp, Homo sapiens
ctgaaggagaaatcc

SEQ ID NO: 861386 - DNA, 15 bp, Homo sapiens
tgaaggagaaatcca

SEQ ID NO: 861387 - DNA, 15 bp, Homo sapiens
gaaggagaaatccag

SEQ ID NO: 861388 - DNA, 15 bp, Homo sapiens
aaggagaaatccaga

SEQ ID NO: 861389 - DNA, 15 bp, Homo sapiens
aggagaaatccagat

SEQ ID NO: 861390 - DNA, 15 bp, Homo sapiens
ggagaaatccagatc

SEQ ID NO: 861391 - DNA, 15 bp, Homo sapiens
gagaaatccagatcg

SEQ ID NO: 861392 - DNA, 15 bp, Homo sapiens
agaaatccagatcga

SEQ ID NO: 861393 - DNA, 15 bp, Homo sapiens
gaaatccagatcgat

SEQ ID NO: 861394 - DNA, 15 bp, Homo sapiens
aaatccagatcgatg

SEQ ID NO: 861395 - DNA, 15 bp, Homo sapiens
aatccagatcgatgg

SEQ ID NO: 861396 - DNA, 15 bp, Homo sapiens
atccagatcgatggt

SEQ ID NO: 861397 - DNA, 15 bp, Homo sapiens
tccagatcgatggtg

SEQ ID NO: 861398 - DNA, 15 bp, Homo sapiens
ccagatcgatggtgt

SEQ ID NO: 861399 - DNA, 15 bp, Homo sapiens
cagatcgatggtgtg

SEQ ID NO: 861400 - DNA, 15 bp, Homo sapiens
agatcgatggtgtgt

SEQ ID NO: 861401 - DNA, 15 bp, Homo sapiens
gatcgatggtgtgtc

SEQ ID NO: 861402 - DNA, 15 bp, Homo sapiens
atcgatggtgtgtct

SEQ ID NO: 861403 - DNA, 15 bp, Homo sapiens
tcgatggtgtgtctt

SEQ ID NO: 861404 - DNA, 15 bp, Homo sapiens
cgatggtgtgtcttg

SEQ ID NO: 861405 - DNA, 15 bp, Homo sapiens
gatggtgtgtcttgg

SEQ ID NO: 861406 - DNA, 15 bp, Homo sapiens
atggtgtgtcttggg

SEQ ID NO: 861407 - DNA, 15 bp, Homo sapiens
tggtgtgtcttggga

SEQ ID NO: 861408 - DNA, 15 bp, Homo sapiens
ggtgtgtcttgggat

SEQ ID NO: 861409 - DNA, 15 bp, Homo sapiens
gtgtgtcttgggatt

SEQ ID NO: 861410 - DNA, 15 bp, Homo sapiens
tgtgtcttgggattc

SEQ ID NO: 861411 - DNA, 15 bp, Homo sapiens
gtgtcttgggattca

SEQ ID NO: 861412 - DNA, 15 bp, Homo sapiens
tgtcttgggattcaa

SEQ ID NO: 861413 - DNA, 15 bp, Homo sapiens
gtcttgggattcaat

SEQ ID NO: 861414 - DNA, 15 bp, Homo sapiens
tcttgggattcaata

SEQ ID NO: 861415 - DNA, 15 bp, Homo sapiens
cttgggattcaataa

SEQ ID NO: 861416 - DNA, 15 bp, Homo sapiens
ttgggattcaataac

SEQ ID NO: 861417 - DNA, 15 bp, Homo sapiens
tgggattcaataact

SEQ ID NO: 861418 - DNA, 15 bp, Homo sapiens
gggattcaataactt

SEQ ID NO: 861419 - DNA, 15 bp, Homo sapiens
ggattcaataacttt

SEQ ID NO: 861420 - DNA, 15 bp, Homo sapiens
gattcaataactttg

SEQ ID NO: 861421 - DNA, 15 bp, Homo sapiens
attcaataactttgc

SEQ ID NO: 861422 - DNA, 15 bp, Homo sapiens
ttcaataactttgca

SEQ ID NO: 861423 - DNA, 15 bp, Homo sapiens
tcaataactttgcaa

SEQ ID NO: 861424 - DNA, 15 bp, Homo sapiens
caataactttgcaac

SEQ ID NO: 861425 - DNA, 15 bp, Homo sapiens
aataactttgcaaca

SEQ ID NO: 861426 - DNA, 15 bp, Homo sapiens
ataactttgcaacag

SEQ ID NO: 861427 - DNA, 15 bp, Homo sapiens
taactttgcaacagt

SEQ ID NO: 861428 - DNA, 15 bp, Homo sapiens
aactttgcaacagtg

SEQ ID NO: 861429 - DNA, 15 bp, Homo sapiens
actttgcaacagtgg

SEQ ID NO: 861430 - DNA, 15 bp, Homo sapiens
ctttgcaacagtgga

SEQ ID NO: 861431 - DNA, 15 bp, Homo sapiens
tttgcaacagtggag

SEQ ID NO: 861432 - DNA, 15 bp, Homo sapiens
ttgcaacagtggagg

SEQ ID NO: 861433 - DNA, 15 bp, Homo sapiens
tgcaacagtggagga

SEQ ID NO: 861434 - DNA, 15 bp, Homo sapiens
gcaacagtggaggaa

SEQ ID NO: 861435 - DNA, 15 bp, Homo sapiens
caacagtggaggaaa

SEQ ID NO: 861436 - DNA, 15 bp, Homo sapiens
aacagtggaggaaag

SEQ ID NO: 861437 - DNA, 15 bp, Homo sapiens
acagtggaggaaagc

SEQ ID NO: 861438 - DNA, 15 bp, Homo sapiens
cagtggaggaaagcc

SEQ ID NO: 861439 - DNA, 15 bp, Homo sapiens
agtggaggaaagcct

SEQ ID NO: 861440 - DNA, 15 bp, Homo sapiens
gtggaggaaagcctt

SEQ ID NO: 861441 - DNA, 15 bp, Homo sapiens
tggaggaaagccttt

SEQ ID NO: 861442 - DNA, 15 bp, Homo sapiens
ggaggaaagcctttg

SEQ ID NO: 861443 - DNA, 15 bp, Homo sapiens
gaggaaagcctttgg

SEQ ID NO: 861444 - DNA, 15 bp, Homo sapiens
aggaaagcctttgga

SEQ ID NO: 861445 - DNA, 15 bp, Homo sapiens
ggaaagcctttggag

SEQ ID NO: 861446 - DNA, 15 bp, Homo sapiens
gaaagcctttggagt

SEQ ID NO: 861447 - DNA, 15 bp, Homo sapiens
aaagcctttggagtg

SEQ ID NO: 861448 - DNA, 15 bp, Homo sapiens
aagcctttggagtga

SEQ ID NO: 861449 - DNA, 15 bp, Homo sapiens
agcctttggagtgat

SEQ ID NO: 861450 - DNA, 15 bp, Homo sapiens
gcctttggagtgata

SEQ ID NO: 861451 - DNA, 15 bp, Homo sapiens
cctttggagtgatac

SEQ ID NO: 861452 - DNA, 15 bp, Homo sapiens
ctttggagtgatacc

SEQ ID NO: 861453 - DNA, 15 bp, Homo sapiens
tttggagtgatacca

SEQ ID NO: 861454 - DNA, 15 bp, Homo sapiens
ttggagtgataccac

SEQ ID NO: 861455 - DNA, 15 bp, Homo sapiens
tggagtgataccaca

SEQ ID NO: 861456 - DNA, 15 bp, Homo sapiens
ggagtgataccacag

SEQ ID NO: 861457 - DNA, 15 bp, Homo sapiens
gagtgataccacagg

SEQ ID NO: 861458 - DNA, 15 bp, Homo sapiens
agtgataccacaggt

SEQ ID NO: 861459 - DNA, 15 bp, Homo sapiens
gtgataccacaggtg

SEQ ID NO: 861460 - DNA, 15 bp, Homo sapiens
tgataccacaggtga

SEQ ID NO: 861461 - DNA, 15 bp, Homo sapiens
gataccacaggtgag

SEQ ID NO: 861462 - DNA, 15 bp, Homo sapiens
ataccacaggtgagc

SEQ ID NO: 861463 - DNA, 15 bp, Homo sapiens
taccacaggtgagca

SEQ ID NO: 861464 - DNA, 15 bp, Homo sapiens
accacaggtgagcaa

SEQ ID NO: 861465 - DNA, 15 bp, Homo sapiens
ccacaggtgagcaaa

SEQ ID NO: 861466 - DNA, 15 bp, Homo sapiens
cacaggtgagcaaaa

SEQ ID NO: 861467 - DNA, 15 bp, Homo sapiens
acaggtgagcaaaag

SEQ ID NO: 861468 - DNA, 15 bp, Homo sapiens
caggtgagcaaaagg

SEQ ID NO: 861469 - DNA, 15 bp, Homo sapiens
aggtgagcaaaagga

SEQ ID NO: 861470 - DNA, 15 bp, Homo sapiens
ggtgagcaaaaggac

SEQ ID NO: 861471 - DNA, 15 bp, Homo sapiens
gtgagcaaaaggact

SEQ ID NO: 861472 - DNA, 15 bp, Homo sapiens
tgagcaaaaggactt

SEQ ID NO: 861473 - DNA, 15 bp, Homo sapiens
gagcaaaaggactta

SEQ ID NO: 861474 - DNA, 15 bp, Homo sapiens
agcaaaaggacttag

SEQ ID NO: 861475 - DNA, 15 bp, Homo sapiens
gcaaaaggacttagc

SEQ ID NO: 861476 - DNA, 15 bp, Homo sapiens
caaaaggacttagcc

SEQ ID NO: 861477 - DNA, 15 bp, Homo sapiens
aaaaggacttagcca

SEQ ID NO: 861478 - DNA, 15 bp, Homo sapiens
aaaggacttagccag

SEQ ID NO: 861479 - DNA, 15 bp, Homo sapiens
aaggacttagccaga

SEQ ID NO: 861480 - DNA, 15 bp, Homo sapiens
aggacttagccagaa

SEQ ID NO: 861481 - DNA, 15 bp, Homo sapiens
ggacttagccagaaa

SEQ ID NO: 861482 - DNA, 15 bp, Homo sapiens
gacttagccagaaaa

SEQ ID NO: 861483 - DNA, 15 bp, Homo sapiens
acttagccagaaaaa

SEQ ID NO: 861484 - DNA, 15 bp, Homo sapiens
cttagccagaaaaaa

SEQ ID NO: 861485 - DNA, 15 bp, Homo sapiens
ttagccagaaaaaag

SEQ ID NO: 861486 - DNA, 15 bp, Homo sapiens
tagccagaaaaaagg

SEQ ID NO: 861487 - DNA, 15 bp, Homo sapiens
agccagaaaaaaggc

SEQ ID NO: 861488 - DNA, 15 bp, Homo sapiens
gccagaaaaaaggca

SEQ ID NO: 861489 - DNA, 15 bp, Homo sapiens
ccagaaaaaaggcaa

SEQ ID NO: 861490 - DNA, 15 bp, Homo sapiens
cagaaaaaaggcaac

SEQ ID NO: 861491 - DNA, 15 bp, Homo sapiens
agaaaaaaggcaact

SEQ ID NO: 861492 - DNA, 15 bp, Homo sapiens
gaaaaaaggcaacta

SEQ ID NO: 861493 - DNA, 15 bp, Homo sapiens
aaaaaaggcaactaa

SEQ ID NO: 861494 - DNA, 15 bp, Homo sapiens
aaaaaggcaactaaa

SEQ ID NO: 861495 - DNA, 15 bp, Homo sapiens
aaaaggcaactaaat

SEQ ID NO: 861496 - DNA, 15 bp, Homo sapiens
aaaggcaactaaatt

SEQ ID NO: 861497 - DNA, 15 bp, Homo sapiens
aaggcaactaaatta

SEQ ID NO: 861498 - DNA, 15 bp, Homo sapiens
aggcaactaaattat

SEQ ID NO: 861499 - DNA, 15 bp, Homo sapiens
ggcaactaaattata

SEQ ID NO: 861500 - DNA, 15 bp, Homo sapiens
gcaactaaattatat

SEQ ID NO: 861501 - DNA, 15 bp, Homo sapiens
caactaaattatatt

SEQ ID NO: 861502 - DNA, 15 bp, Homo sapiens
aactaaattatattt

SEQ ID NO: 861503 - DNA, 15 bp, Homo sapiens
actaaattatatttt

SEQ ID NO: 861504 - DNA, 15 bp, Homo sapiens
ctaaattatattttt

SEQ ID NO: 861505 - DNA, 15 bp, Homo sapiens
taaattatatttttt

SEQ ID NO: 861506 - DNA, 15 bp, Homo sapiens
aaattatatttttta

SEQ ID NO: 861507 - DNA, 15 bp, Homo sapiens
aattatattttttac

SEQ ID NO: 861508 - DNA, 15 bp, Homo sapiens
attatattttttact

SEQ ID NO: 861509 - DNA, 15 bp, Homo sapiens
ttatattttttactg

SEQ ID NO: 861510 - DNA, 15 bp, Homo sapiens
tatattttttactgc

SEQ ID NO: 861511 - DNA, 15 bp, Homo sapiens
atattttttactgct

SEQ ID NO: 861512 - DNA, 15 bp, Homo sapiens
tattttttactgcta

SEQ ID NO: 861513 - DNA, 15 bp, Homo sapiens
attttttactgctat

SEQ ID NO: 861514 - DNA, 15 bp, Homo sapiens
ttttttactgctatt

SEQ ID NO: 861515 - DNA, 15 bp, Homo sapiens
tttttactgctattt

SEQ ID NO: 861516 - DNA, 15 bp, Homo sapiens
ttttactgctatttg

SEQ ID NO: 861517 - DNA, 15 bp, Homo sapiens
tttactgctatttga

SEQ ID NO: 861518 - DNA, 15 bp, Homo sapiens
ttactgctatttgat

SEQ ID NO: 861519 - DNA, 15 bp, Homo sapiens
tactgctatttgata

SEQ ID NO: 861520 - DNA, 15 bp, Homo sapiens
actgctatttgatac

SEQ ID NO: 861521 - DNA, 15 bp, Homo sapiens
ctgctatttgatact

SEQ ID NO: 861522 - DNA, 15 bp, Homo sapiens
tgctatttgatactt

SEQ ID NO: 861523 - DNA, 15 bp, Homo sapiens
gctatttgatacttg

SEQ ID NO: 861524 - DNA, 15 bp, Homo sapiens
ctatttgatacttgt

SEQ ID NO: 861525 - DNA, 15 bp, Homo sapiens
tatttgatacttgta

SEQ ID NO: 861526 - DNA, 15 bp, Homo sapiens
atttgatacttgtac

SEQ ID NO: 861527 - DNA, 15 bp, Homo sapiens
tttgatacttgtact

SEQ ID NO: 861528 - DNA, 15 bp, Homo sapiens
ttgatacttgtactc

SEQ ID NO: 861529 - DNA, 15 bp, Homo sapiens
tgatacttgtactca

SEQ ID NO: 861530 - DNA, 15 bp, Homo sapiens
gatacttgtactcaa

SEQ ID NO: 861531 - DNA, 15 bp, Homo sapiens
atacttgtactcaag

SEQ ID NO: 861532 - DNA, 15 bp, Homo sapiens
tacttgtactcaaga

SEQ ID NO: 861533 - DNA, 15 bp, Homo sapiens
acttgtactcaagaa

SEQ ID NO: 861534 - DNA, 15 bp, Homo sapiens
cttgtactcaagaaa

SEQ ID NO: 861535 - DNA, 15 bp, Homo sapiens
ttgtactcaagaaat

SEQ ID NO: 861536 - DNA, 15 bp, Homo sapiens
tgtactcaagaaatt

SEQ ID NO: 861537 - DNA, 15 bp, Homo sapiens
gtactcaagaaattc

SEQ ID NO: 861538 - DNA, 15 bp, Homo sapiens
tactcaagaaattca

SEQ ID NO: 861539 - DNA, 15 bp, Homo sapiens
actcaagaaattcat

SEQ ID NO: 861540 - DNA, 15 bp, Homo sapiens
ctcaagaaattcata

SEQ ID NO: 861541 - DNA, 15 bp, Homo sapiens
tcaagaaattcatat

SEQ ID NO: 861542 - DNA, 15 bp, Homo sapiens
caagaaattcatatt

SEQ ID NO: 861543 - DNA, 15 bp, Homo sapiens
aagaaattcatatta

SEQ ID NO: 861544 - DNA, 15 bp, Homo sapiens
agaaattcatattac

SEQ ID NO: 861545 - DNA, 15 bp, Homo sapiens
gaaattcatattact

SEQ ID NO: 861546 - DNA, 15 bp, Homo sapiens
aaattcatattactc

SEQ ID NO: 861547 - DNA, 15 bp, Homo sapiens
aattcatattactct

SEQ ID NO: 861548 - DNA, 15 bp, Homo sapiens
attcatattactctg

SEQ ID NO: 861549 - DNA, 15 bp, Homo sapiens
ttcatattactctgc

SEQ ID NO: 861550 - DNA, 15 bp, Homo sapiens
tcatattactctgca

SEQ ID NO: 861551 - DNA, 15 bp, Homo sapiens
catattactctgcaa

SEQ ID NO: 861552 - DNA, 15 bp, Homo sapiens
atattactctgcaaa

SEQ ID NO: 861553 - DNA, 15 bp, Homo sapiens
tattactctgcaaaa

SEQ ID NO: 861554 - DNA, 15 bp, Homo sapiens
attactctgcaaaat

SEQ ID NO: 861555 - DNA, 15 bp, Homo sapiens
ttactctgcaaaata

SEQ ID NO: 861556 - DNA, 15 bp, Homo sapiens
tactctgcaaaatat

SEQ ID NO: 861557 - DNA, 15 bp, Homo sapiens
actctgcaaaatata

SEQ ID NO: 861558 - DNA, 15 bp, Homo sapiens
ctctgcaaaatatat

SEQ ID NO: 861559 - DNA, 15 bp, Homo sapiens
tctgcaaaatatatt

SEQ ID NO: 861560 - DNA, 15 bp, Homo sapiens
ctgcaaaatatattt

SEQ ID NO: 861561 - DNA, 15 bp, Homo sapiens
tgcaaaatatatttg

SEQ ID NO: 861562 - DNA, 15 bp, Homo sapiens
gcaaaatatatttgt

SEQ ID NO: 861563 - DNA, 15 bp, Homo sapiens
caaaatatatttgtt

SEQ ID NO: 861564 - DNA, 15 bp, Homo sapiens
aaaatatatttgtta

SEQ ID NO: 861565 - DNA, 15 bp, Homo sapiens
aaatatatttgttat

SEQ ID NO: 861566 - DNA, 15 bp, Homo sapiens
aatatatttgttatg

SEQ ID NO: 861567 - DNA, 15 bp, Homo sapiens
atatatttgttatgc

SEQ ID NO: 861568 - DNA, 15 bp, Homo sapiens
tatatttgttatgca

SEQ ID NO: 861569 - DNA, 15 bp, Homo sapiens
atatttgttatgcat

SEQ ID NO: 861570 - DNA, 15 bp, Homo sapiens
tatttgttatgcatt

SEQ ID NO: 861571 - DNA, 15 bp, Homo sapiens
atttgttatgcattg

SEQ ID NO: 861572 - DNA, 15 bp, Homo sapiens
tttgttatgcattgc

SEQ ID NO: 861573 - DNA, 15 bp, Homo sapiens
ttgttatgcattgct

SEQ ID NO: 861574 - DNA, 15 bp, Homo sapiens
tgttatgcattgctg

SEQ ID NO: 861575 - DNA, 15 bp, Homo sapiens
gttatgcattgctgt

SEQ ID NO: 861576 - DNA, 15 bp, Homo sapiens
ttatgcattgctgtc

SEQ ID NO: 861577 - DNA, 15 bp, Homo sapiens
tatgcattgctgtct

SEQ ID NO: 861578 - DNA, 15 bp, Homo sapiens
atgcattgctgtctt

SEQ ID NO: 861579 - DNA, 15 bp, Homo sapiens
tgcattgctgtcttt

SEQ ID NO: 861580 - DNA, 15 bp, Homo sapiens
gcattgctgtctttt

SEQ ID NO: 861581 - DNA, 15 bp, Homo sapiens
cattgctgtcttttt

SEQ ID NO: 861582 - DNA, 15 bp, Homo sapiens
attgctgtctttttt

SEQ ID NO: 861583 - DNA, 15 bp, Homo sapiens
ttgctgtcttttttc

SEQ ID NO: 861584 - DNA, 15 bp, Homo sapiens
tgctgtcttttttct

SEQ ID NO: 861585 - DNA, 15 bp, Homo sapiens
gctgtcttttttctc

SEQ ID NO: 861586 - DNA, 15 bp, Homo sapiens
ctgtcttttttctcc

SEQ ID NO: 861587 - DNA, 15 bp, Homo sapiens
tgtcttttttctcca

SEQ ID NO: 861588 - DNA, 15 bp, Homo sapiens
gtcttttttctccag

SEQ ID NO: 861589 - DNA, 15 bp, Homo sapiens
tcttttttctccagt

SEQ ID NO: 861590 - DNA, 15 bp, Homo sapiens
cttttttctccagtg

SEQ ID NO: 861591 - DNA, 15 bp, Homo sapiens
ttttttctccagtgc

SEQ ID NO: 861592 - DNA, 15 bp, Homo sapiens
tttttctccagtgca

SEQ ID NO: 861593 - DNA, 15 bp, Homo sapiens
ttttctccagtgcag

SEQ ID NO: 861594 - DNA, 15 bp, Homo sapiens
tttctccagtgcagt

SEQ ID NO: 861595 - DNA, 15 bp, Homo sapiens
ttctccagtgcagtt

SEQ ID NO: 861596 - DNA, 15 bp, Homo sapiens
tctccagtgcagttt

SEQ ID NO: 861597 - DNA, 15 bp, Homo sapiens
ctccagtgcagtttt

SEQ ID NO: 861598 - DNA, 15 bp, Homo sapiens
tccagtgcagttttc

SEQ ID NO: 861599 - DNA, 15 bp, Homo sapiens
ccagtgcagttttct

SEQ ID NO: 861600 - DNA, 15 bp, Homo sapiens
cagtgcagttttctc

SEQ ID NO: 861601 - DNA, 15 bp, Homo sapiens
agtgcagttttctca

SEQ ID NO: 861602 - DNA, 15 bp, Homo sapiens
gtgcagttttctcat

SEQ ID NO: 861603 - DNA, 15 bp, Homo sapiens
tgcagttttctcata

SEQ ID NO: 861604 - DNA, 15 bp, Homo sapiens
gcagttttctcatag

SEQ ID NO: 861605 - DNA, 15 bp, Homo sapiens
cagttttctcatagg

SEQ ID NO: 861606 - DNA, 15 bp, Homo sapiens
agttttctcataggc

SEQ ID NO: 861607 - DNA, 15 bp, Homo sapiens
gttttctcataggca

SEQ ID NO: 861608 - DNA, 15 bp, Homo sapiens
ttttctcataggcag

SEQ ID NO: 861609 - DNA, 15 bp, Homo sapiens
tttctcataggcaga

SEQ ID NO: 861610 - DNA, 15 bp, Homo sapiens
ttctcataggcagaa

SEQ ID NO: 861611 - DNA, 15 bp, Homo sapiens
tctcataggcagaaa

SEQ ID NO: 861612 - DNA, 15 bp, Homo sapiens
ctcataggcagaaaa

SEQ ID NO: 861613 - DNA, 15 bp, Homo sapiens
tcataggcagaaaag

SEQ ID NO: 861614 - DNA, 15 bp, Homo sapiens
cataggcagaaaaga

SEQ ID NO: 861615 - DNA, 15 bp, Homo sapiens
ataggcagaaaagat

SEQ ID NO: 861616 - DNA, 15 bp, Homo sapiens
taggcagaaaagatg

SEQ ID NO: 861617 - DNA, 15 bp, Homo sapiens
aggcagaaaagatgt

SEQ ID NO: 861618 - DNA, 15 bp, Homo sapiens
ggcagaaaagatgtc

SEQ ID NO: 861619 - DNA, 15 bp, Homo sapiens
gcagaaaagatgtct

SEQ ID NO: 861620 - DNA, 15 bp, Homo sapiens
cagaaaagatgtctc

SEQ ID NO: 861621 - DNA, 15 bp, Homo sapiens
agaaaagatgtctct

SEQ ID NO: 861622 - DNA, 15 bp, Homo sapiens
gaaaagatgtctcta

SEQ ID NO: 861623 - DNA, 15 bp, Homo sapiens
aaaagatgtctctaa

SEQ ID NO: 861624 - DNA, 15 bp, Homo sapiens
aaagatgtctctaaa

SEQ ID NO: 861625 - DNA, 15 bp, Homo sapiens
aagatgtctctaaaa

SEQ ID NO: 861626 - DNA, 15 bp, Homo sapiens
agatgtctctaaaag

SEQ ID NO: 861627 - DNA, 15 bp, Homo sapiens
gatgtctctaaaagt

SEQ ID NO: 861628 - DNA, 15 bp, Homo sapiens
atgtctctaaaagtt

SEQ ID NO: 861629 - DNA, 15 bp, Homo sapiens
tgtctctaaaagttt

SEQ ID NO: 861630 - DNA, 15 bp, Homo sapiens
gtctctaaaagtttg

SEQ ID NO: 861631 - DNA, 15 bp, Homo sapiens
tctctaaaagtttgg

SEQ ID NO: 861632 - DNA, 15 bp, Homo sapiens
ctctaaaagtttgga

SEQ ID NO: 861633 - DNA, 15 bp, Homo sapiens
tctaaaagtttggaa

SEQ ID NO: 861634 - DNA, 15 bp, Homo sapiens
ctaaaagtttggaat

SEQ ID NO: 861635 - DNA, 15 bp, Homo sapiens
taaaagtttggaatt

SEQ ID NO: 861636 - DNA, 15 bp, Homo sapiens
aaaagtttggaattc

SEQ ID NO: 861637 - DNA, 15 bp, Homo sapiens
aaagtttggaattct

SEQ ID NO: 861638 - DNA, 15 bp, Homo sapiens
aagtttggaattctc

SEQ ID NO: 861639 - DNA, 15 bp, Homo sapiens
agtttggaattctca

SEQ ID NO: 861640 - DNA, 15 bp, Homo sapiens
gtttggaattctcaa

SEQ ID NO: 861641 - DNA, 15 bp, Homo sapiens
tttggaattctcaaa

SEQ ID NO: 861642 - DNA, 15 bp, Homo sapiens
ttggaattctcaaat

SEQ ID NO: 861643 - DNA, 15 bp, Homo sapiens
tggaattctcaaatt

SEQ ID NO: 861644 - DNA, 15 bp, Homo sapiens
ggaattctcaaattc

SEQ ID NO: 861645 - DNA, 15 bp, Homo sapiens
gaattctcaaattct

SEQ ID NO: 861646 - DNA, 15 bp, Homo sapiens
aattctcaaattctg

SEQ ID NO: 861647 - DNA, 15 bp, Homo sapiens
attctcaaattctgg

SEQ ID NO: 861648 - DNA, 15 bp, Homo sapiens
ttctcaaattctggt

SEQ ID NO: 861649 - DNA, 15 bp, Homo sapiens
tctcaaattctggtt

SEQ ID NO: 861650 - DNA, 15 bp, Homo sapiens
ctcaaattctggtta

SEQ ID NO: 861651 - DNA, 15 bp, Homo sapiens
tcaaattctggttat

SEQ ID NO: 861652 - DNA, 15 bp, Homo sapiens
caaattctggttatt

SEQ ID NO: 861653 - DNA, 15 bp, Homo sapiens
aaattctggttattg

SEQ ID NO: 861654 - DNA, 15 bp, Homo sapiens
aattctggttattga

SEQ ID NO: 861655 - DNA, 15 bp, Homo sapiens
attctggttattgaa

SEQ ID NO: 861656 - DNA, 15 bp, Homo sapiens
ttctggttattgaaa

SEQ ID NO: 861657 - DNA, 15 bp, Homo sapiens
tctggttattgaaat

SEQ ID NO: 861658 - DNA, 15 bp, Homo sapiens
ctggttattgaaatg

SEQ ID NO: 861659 - DNA, 15 bp, Homo sapiens
tggttattgaaatgt

SEQ ID NO: 861660 - DNA, 15 bp, Homo sapiens
ggttattgaaatgtt

SEQ ID NO: 861661 - DNA, 15 bp, Homo sapiens
gttattgaaatgttc

SEQ ID NO: 861662 - DNA, 15 bp, Homo sapiens
ttattgaaatgttca

SEQ ID NO: 861663 - DNA, 15 bp, Homo sapiens
tattgaaatgttcat

SEQ ID NO: 861664 - DNA, 15 bp, Homo sapiens
attgaaatgttcata

SEQ ID NO: 861665 - DNA, 15 bp, Homo sapiens
ttgaaatgttcatag

SEQ ID NO: 861666 - DNA, 15 bp, Homo sapiens
tgaaatgttcatagc

SEQ ID NO: 861667 - DNA, 15 bp, Homo sapiens
gaaatgttcatagct

SEQ ID NO: 861668 - DNA, 15 bp, Homo sapiens
aaatgttcatagctt

SEQ ID NO: 861669 - DNA, 15 bp, Homo sapiens
aatgttcatagcttt

SEQ ID NO: 861670 - DNA, 15 bp, Homo sapiens
atgttcatagctttg

SEQ ID NO: 861671 - DNA, 15 bp, Homo sapiens
tgttcatagctttga

SEQ ID NO: 861672 - DNA, 15 bp, Homo sapiens
gttcatagctttgat

SEQ ID NO: 861673 - DNA, 15 bp, Homo sapiens
ttcatagctttgata

SEQ ID NO: 861674 - DNA, 15 bp, Homo sapiens
tcatagctttgatag

SEQ ID NO: 861675 - DNA, 15 bp, Homo sapiens
catagctttgatagt

SEQ ID NO: 861676 - DNA, 15 bp, Homo sapiens
atagctttgatagtg

SEQ ID NO: 861677 - DNA, 15 bp, Homo sapiens
tagctttgatagtgt

SEQ ID NO: 861678 - DNA, 15 bp, Homo sapiens
agctttgatagtgtt

SEQ ID NO: 861679 - DNA, 15 bp, Homo sapiens
gctttgatagtgttt

SEQ ID NO: 861680 - DNA, 15 bp, Homo sapiens
ctttgatagtgtttt

SEQ ID NO: 861681 - DNA, 15 bp, Homo sapiens
tttgatagtgttttt

SEQ ID NO: 861682 - DNA, 15 bp, Homo sapiens
ttgatagtgtttttc

SEQ ID NO: 861683 - DNA, 15 bp, Homo sapiens
tgatagtgtttttca

SEQ ID NO: 861684 - DNA, 15 bp, Homo sapiens
gatagtgtttttcag

SEQ ID NO: 861685 - DNA, 15 bp, Homo sapiens
atagtgtttttcaga

SEQ ID NO: 861686 - DNA, 15 bp, Homo sapiens
tagtgtttttcagaa

SEQ ID NO: 861687 - DNA, 15 bp, Homo sapiens
agtgtttttcagaag

SEQ ID NO: 861688 - DNA, 15 bp, Homo sapiens
gtgtttttcagaaga

SEQ ID NO: 861689 - DNA, 15 bp, Homo sapiens
tgtttttcagaagac

SEQ ID NO: 861690 - DNA, 15 bp, Homo sapiens
gtttttcagaagacc

SEQ ID NO: 861691 - DNA, 15 bp, Homo sapiens
tttttcagaagacca

SEQ ID NO: 861692 - DNA, 15 bp, Homo sapiens
ttttcagaagaccaa

SEQ ID NO: 861693 - DNA, 15 bp, Homo sapiens
tttcagaagaccaaa

SEQ ID NO: 861694 - DNA, 15 bp, Homo sapiens
ttcagaagaccaaat

SEQ ID NO: 861695 - DNA, 15 bp, Homo sapiens
tcagaagaccaaatt

SEQ ID NO: 861696 - DNA, 15 bp, Homo sapiens
cagaagaccaaattt

SEQ ID NO: 861697 - DNA, 15 bp, Homo sapiens
agaagaccaaattta

SEQ ID NO: 861698 - DNA, 15 bp, Homo sapiens
gaagaccaaatttac

SEQ ID NO: 861699 - DNA, 15 bp, Homo sapiens
aagaccaaatttaca

SEQ ID NO: 861700 - DNA, 15 bp, Homo sapiens
agaccaaatttacag

SEQ ID NO: 861701 - DNA, 15 bp, Homo sapiens
gaccaaatttacagt

SEQ ID NO: 861702 - DNA, 15 bp, Homo sapiens
accaaatttacagtg

SEQ ID NO: 861703 - DNA, 15 bp, Homo sapiens
ccaaatttacagtgg

SEQ ID NO: 861704 - DNA, 15 bp, Homo sapiens
caaatttacagtggg

SEQ ID NO: 861705 - DNA, 15 bp, Homo sapiens
aaatttacagtggga

SEQ ID NO: 861706 - DNA, 15 bp, Homo sapiens
aatttacagtgggag

SEQ ID NO: 861707 - DNA, 15 bp, Homo sapiens
atttacagtgggagc

SEQ ID NO: 861708 - DNA, 15 bp, Homo sapiens
tttacagtgggagcc

SEQ ID NO: 861709 - DNA, 15 bp, Homo sapiens
ttacagtgggagcct

SEQ ID NO: 861710 - DNA, 15 bp, Homo sapiens
tacagtgggagcctt

SEQ ID NO: 861711 - DNA, 15 bp, Homo sapiens
acagtgggagccttg

SEQ ID NO: 861712 - DNA, 15 bp, Homo sapiens
cagtgggagccttgg

SEQ ID NO: 861713 - DNA, 15 bp, Homo sapiens
agtgggagccttggg

SEQ ID NO: 861714 - DNA, 15 bp, Homo sapiens
gtgggagccttgggc

SEQ ID NO: 861715 - DNA, 15 bp, Homo sapiens
tgggagccttgggct

SEQ ID NO: 861716 - DNA, 15 bp, Homo sapiens
gggagccttgggctt

SEQ ID NO: 861717 - DNA, 15 bp, Homo sapiens
ggagccttgggcttt

SEQ ID NO: 861718 - DNA, 15 bp, Homo sapiens
gagccttgggctttt

SEQ ID NO: 861719 - DNA, 15 bp, Homo sapiens
agccttgggcttttg

SEQ ID NO: 861720 - DNA, 15 bp, Homo sapiens
gccttgggcttttgt

SEQ ID NO: 861721 - DNA, 15 bp, Homo sapiens
ccttgggcttttgtt

SEQ ID NO: 861722 - DNA, 15 bp, Homo sapiens
cttgggcttttgttt

SEQ ID NO: 861723 - DNA, 15 bp, Homo sapiens
ttgggcttttgtttt

SEQ ID NO: 861724 - DNA, 15 bp, Homo sapiens
tgggcttttgttttt

SEQ ID NO: 861725 - DNA, 15 bp, Homo sapiens
gggcttttgtttttt

SEQ ID NO: 861726 - DNA, 15 bp, Homo sapiens
ggcttttgtttttta

SEQ ID NO: 861727 - DNA, 15 bp, Homo sapiens
gcttttgttttttaa

SEQ ID NO: 861728 - DNA, 15 bp, Homo sapiens
cttttgttttttaac

SEQ ID NO: 861729 - DNA, 15 bp, Homo sapiens
ttttgttttttaaca

SEQ ID NO: 861730 - DNA, 15 bp, Homo sapiens
tttgttttttaacag

SEQ ID NO: 861731 - DNA, 15 bp, Homo sapiens
ttgttttttaacagc

SEQ ID NO: 861732 - DNA, 15 bp, Homo sapiens
tgttttttaacagct

SEQ ID NO: 861733 - DNA, 15 bp, Homo sapiens
gttttttaacagctc

SEQ ID NO: 861734 - DNA, 15 bp, Homo sapiens
ttttttaacagctct

SEQ ID NO: 861735 - DNA, 15 bp, Homo sapiens
tttttaacagctctt

SEQ ID NO: 861736 - DNA, 15 bp, Homo sapiens
ttttaacagctcttt

SEQ ID NO: 861737 - DNA, 15 bp, Homo sapiens
tttaacagctctttt

SEQ ID NO: 861738 - DNA, 15 bp, Homo sapiens
ttaacagctcttttt

SEQ ID NO: 861739 - DNA, 15 bp, Homo sapiens
taacagctctttttt

SEQ ID NO: 861740 - DNA, 15 bp, Homo sapiens
aacagctcttttttg

SEQ ID NO: 861741 - DNA, 15 bp, Homo sapiens
acagctcttttttgt

SEQ ID NO: 861742 - DNA, 15 bp, Homo sapiens
cagctcttttttgtt

SEQ ID NO: 861743 - DNA, 15 bp, Homo sapiens
agctcttttttgttc

SEQ ID NO: 861744 - DNA, 15 bp, Homo sapiens
gctcttttttgttcc

SEQ ID NO: 861745 - DNA, 15 bp, Homo sapiens
ctcttttttgttcct

SEQ ID NO: 861746 - DNA, 15 bp, Homo sapiens
tcttttttgttcctg

SEQ ID NO: 861747 - DNA, 15 bp, Homo sapiens
cttttttgttcctgc

SEQ ID NO: 861748 - DNA, 15 bp, Homo sapiens
ttttttgttcctgct

SEQ ID NO: 861749 - DNA, 15 bp, Homo sapiens
tttttgttcctgctt

SEQ ID NO: 861750 - DNA, 15 bp, Homo sapiens
ttttgttcctgcttc

SEQ ID NO: 861751 - DNA, 15 bp, Homo sapiens
tttgttcctgcttca

SEQ ID NO: 861752 - DNA, 15 bp, Homo sapiens
ttgttcctgcttcag

SEQ ID NO: 861753 - DNA, 15 bp, Homo sapiens
tgttcctgcttcagt

SEQ ID NO: 861754 - DNA, 15 bp, Homo sapiens
gttcctgcttcagtg

SEQ ID NO: 861755 - DNA, 15 bp, Homo sapiens
ttcctgcttcagtgg

SEQ ID NO: 861756 - DNA, 15 bp, Homo sapiens
tcctgcttcagtggc

SEQ ID NO: 861757 - DNA, 15 bp, Homo sapiens
cctgcttcagtggcc

SEQ ID NO: 861758 - DNA, 15 bp, Homo sapiens
ctgcttcagtggcct

SEQ ID NO: 861759 - DNA, 15 bp, Homo sapiens
tgcttcagtggcctg

SEQ ID NO: 861760 - DNA, 15 bp, Homo sapiens
gcttcagtggcctga

SEQ ID NO: 861761 - DNA, 15 bp, Homo sapiens
cttcagtggcctgac

SEQ ID NO: 861762 - DNA, 15 bp, Homo sapiens
ttcagtggcctgacc

SEQ ID NO: 861763 - DNA, 15 bp, Homo sapiens
tcagtggcctgacct

SEQ ID NO: 861764 - DNA, 15 bp, Homo sapiens
cagtggcctgacctc

SEQ ID NO: 861765 - DNA, 15 bp, Homo sapiens
agtggcctgacctcc

SEQ ID NO: 861766 - DNA, 15 bp, Homo sapiens
gtggcctgacctcca

SEQ ID NO: 861767 - DNA, 15 bp, Homo sapiens
tggcctgacctccaa

SEQ ID NO: 861768 - DNA, 15 bp, Homo sapiens
ggcctgacctccaag

SEQ ID NO: 861769 - DNA, 15 bp, Homo sapiens
gcctgacctccaagt

SEQ ID NO: 861770 - DNA, 15 bp, Homo sapiens
cctgacctccaagtt

SEQ ID NO: 861771 - DNA, 15 bp, Homo sapiens
ctgacctccaagtta

SEQ ID NO: 861772 - DNA, 15 bp, Homo sapiens
tgacctccaagttag

SEQ ID NO: 861773 - DNA, 15 bp, Homo sapiens
gacctccaagttagc

SEQ ID NO: 861774 - DNA, 15 bp, Homo sapiens
acctccaagttagca

SEQ ID NO: 861775 - DNA, 15 bp, Homo sapiens
cctccaagttagcaa

SEQ ID NO: 861776 - DNA, 15 bp, Homo sapiens
ctccaagttagcaat

SEQ ID NO: 861777 - DNA, 15 bp, Homo sapiens
tccaagttagcaatc

SEQ ID NO: 861778 - DNA, 15 bp, Homo sapiens
ccaagttagcaatcg

SEQ ID NO: 861779 - DNA, 15 bp, Homo sapiens
caagttagcaatcgc

SEQ ID NO: 861780 - DNA, 15 bp, Homo sapiens
aagttagcaatcgcc

SEQ ID NO: 861781 - DNA, 15 bp, Homo sapiens
agttagcaatcgcca

SEQ ID NO: 861782 - DNA, 15 bp, Homo sapiens
gttagcaatcgccag

SEQ ID NO: 861783 - DNA, 15 bp, Homo sapiens
ttagcaatcgccagg

SEQ ID NO: 861784 - DNA, 15 bp, Homo sapiens
tagcaatcgccaggt

SEQ ID NO: 861785 - DNA, 15 bp, Homo sapiens
agcaatcgccaggtt

SEQ ID NO: 861786 - DNA, 15 bp, Homo sapiens
gcaatcgccaggttg

SEQ ID NO: 861787 - DNA, 15 bp, Homo sapiens
caatcgccaggttga

SEQ ID NO: 861788 - DNA, 15 bp, Homo sapiens
aatcgccaggttgag

SEQ ID NO: 861789 - DNA, 15 bp, Homo sapiens
atcgccaggttgaga

SEQ ID NO: 861790 - DNA, 15 bp, Homo sapiens
tcgccaggttgagaa

SEQ ID NO: 861791 - DNA, 15 bp, Homo sapiens
ctgcaatgtgaggtg

SEQ ID NO: 861792 - DNA, 15 bp, Homo sapiens
tgcaatgtgaggtgg

SEQ ID NO: 861793 - DNA, 15 bp, Homo sapiens
gcaatgtgaggtggc

SEQ ID NO: 861794 - DNA, 15 bp, Homo sapiens
caatgtgaggtggca

SEQ ID NO: 861795 - DNA, 15 bp, Homo sapiens
aatgtgaggtggcac

SEQ ID NO: 861796 - DNA, 15 bp, Homo sapiens
atgtgaggtggcacg

SEQ ID NO: 861797 - DNA, 15 bp, Homo sapiens
tgtgaggtggcacgg

SEQ ID NO: 861798 - DNA, 15 bp, Homo sapiens
gtgaggtggcacggg

SEQ ID NO: 861799 - DNA, 15 bp, Homo sapiens
tgaggtggcacgggg

SEQ ID NO: 861800 - DNA, 15 bp, Homo sapiens
gaggtggcacggggc

SEQ ID NO: 861801 - DNA, 15 bp, Homo sapiens
aggtggcacggggca

SEQ ID NO: 861802 - DNA, 15 bp, Homo sapiens
ggtggcacggggcag

SEQ ID NO: 861803 - DNA, 15 bp, Homo sapiens
gtggcacggggcagt

SEQ ID NO: 861804 - DNA, 15 bp, Homo sapiens
tggcacggggcagtt

SEQ ID NO: 861805 - DNA, 15 bp, Homo sapiens
ggcacggggcagttg

SEQ ID NO: 861806 - DNA, 15 bp, Homo sapiens
gcacggggcagttgt

SEQ ID NO: 861807 - DNA, 15 bp, Homo sapiens
cacggggcagttgta

SEQ ID NO: 861808 - DNA, 15 bp, Homo sapiens
acggggcagttgtag

SEQ ID NO: 861809 - DNA, 15 bp, Homo sapiens
cggggcagttgtagc

SEQ ID NO: 861810 - DNA, 15 bp, Homo sapiens
ggggcagttgtagcc

SEQ ID NO: 861811 - DNA, 15 bp, Homo sapiens
gggcagttgtagccc

SEQ ID NO: 861812 - DNA, 15 bp, Homo sapiens
ggcagttgtagcccc

SEQ ID NO: 861813 - DNA, 15 bp, Homo sapiens
gcagttgtagcccct

SEQ ID NO: 861814 - DNA, 15 bp, Homo sapiens
cagttgtagcccctc

SEQ ID NO: 861815 - DNA, 15 bp, Homo sapiens
agttgtagcccctcc

SEQ ID NO: 861816 - DNA, 15 bp, Homo sapiens
gttgtagcccctcct

SEQ ID NO: 861817 - DNA, 15 bp, Homo sapiens
ttgtagcccctcctt

SEQ ID NO: 861818 - DNA, 15 bp, Homo sapiens
tgtagcccctccttt

SEQ ID NO: 861819 - DNA, 15 bp, Homo sapiens
gtagcccctcctttg

SEQ ID NO: 861820 - DNA, 15 bp, Homo sapiens
tagcccctcctttga

SEQ ID NO: 861821 - DNA, 15 bp, Homo sapiens
agcccctcctttgaa

SEQ ID NO: 861822 - DNA, 15 bp, Homo sapiens
gcccctcctttgaaa

SEQ ID NO: 861823 - DNA, 15 bp, Homo sapiens
cccctcctttgaaat

SEQ ID NO: 861824 - DNA, 15 bp, Homo sapiens
ccctcctttgaaatc

SEQ ID NO: 861825 - DNA, 15 bp, Homo sapiens
cctcctttgaaatct

SEQ ID NO: 861826 - DNA, 15 bp, Homo sapiens
ctcctttgaaatctt

SEQ ID NO: 861827 - DNA, 15 bp, Homo sapiens
tcctttgaaatcttt

SEQ ID NO: 861828 - DNA, 15 bp, Homo sapiens
cctttgaaatctttc

SEQ ID NO: 861829 - DNA, 15 bp, Homo sapiens
ctttgaaatctttct

SEQ ID NO: 861830 - DNA, 15 bp, Homo sapiens
tttgaaatctttctt

SEQ ID NO: 861831 - DNA, 15 bp, Homo sapiens
ttgaaatctttcttc

SEQ ID NO: 861832 - DNA, 15 bp, Homo sapiens
tgaaatctttcttcc

SEQ ID NO: 861833 - DNA, 15 bp, Homo sapiens
gaaatctttcttccc

SEQ ID NO: 861834 - DNA, 15 bp, Homo sapiens
aaatctttcttccct

SEQ ID NO: 861835 - DNA, 15 bp, Homo sapiens
aatctttcttcccta

SEQ ID NO: 861836 - DNA, 15 bp, Homo sapiens
atctttcttccctac

SEQ ID NO: 861837 - DNA, 15 bp, Homo sapiens
tctttcttccctacc

SEQ ID NO: 861838 - DNA, 15 bp, Homo sapiens
ctttcttccctaccc

SEQ ID NO: 861839 - DNA, 15 bp, Homo sapiens
tttcttccctacccc

SEQ ID NO: 861840 - DNA, 15 bp, Homo sapiens
ttcttccctacccca

SEQ ID NO: 861841 - DNA, 15 bp, Homo sapiens
tcttccctaccccag

SEQ ID NO: 861842 - DNA, 15 bp, Homo sapiens
cttccctaccccagg

SEQ ID NO: 861843 - DNA, 15 bp, Homo sapiens
ttccctaccccaggc

SEQ ID NO: 861844 - DNA, 15 bp, Homo sapiens
tccctaccccaggcc

SEQ ID NO: 861845 - DNA, 15 bp, Homo sapiens
ccctaccccaggcct

SEQ ID NO: 861846 - DNA, 15 bp, Homo sapiens
cctaccccaggcctc

SEQ ID NO: 861847 - DNA, 15 bp, Homo sapiens
ctaccccaggcctct

SEQ ID NO: 861848 - DNA, 15 bp, Homo sapiens
taccccaggcctctg

SEQ ID NO: 861849 - DNA, 15 bp, Homo sapiens
accccaggcctctgc

SEQ ID NO: 861850 - DNA, 15 bp, Homo sapiens
ccccaggcctctgca

SEQ ID NO: 861851 - DNA, 15 bp, Homo sapiens
cccaggcctctgcac

SEQ ID NO: 861852 - DNA, 15 bp, Homo sapiens
ccaggcctctgcact

SEQ ID NO: 861853 - DNA, 15 bp, Homo sapiens
caggcctctgcactc

SEQ ID NO: 861854 - DNA, 15 bp, Homo sapiens
aggcctctgcactct

SEQ ID NO: 861855 - DNA, 15 bp, Homo sapiens
ggcctctgcactctg

SEQ ID NO: 861856 - DNA, 15 bp, Homo sapiens
gcctctgcactctga

SEQ ID NO: 861857 - DNA, 15 bp, Homo sapiens
cctctgcactctgaa

SEQ ID NO: 861858 - DNA, 15 bp, Homo sapiens
ctctgcactctgaac

SEQ ID NO: 861859 - DNA, 15 bp, Homo sapiens
tctgcactctgaact

SEQ ID NO: 861860 - DNA, 15 bp, Homo sapiens
ctgcactctgaacta

SEQ ID NO: 861861 - DNA, 15 bp, Homo sapiens
tgcactctgaactat

SEQ ID NO: 861862 - DNA, 15 bp, Homo sapiens
gcactctgaactatg

SEQ ID NO: 861863 - DNA, 15 bp, Homo sapiens
cactctgaactatga

SEQ ID NO: 861864 - DNA, 15 bp, Homo sapiens
actctgaactatgat

SEQ ID NO: 861865 - DNA, 15 bp, Homo sapiens
ctctgaactatgatg

SEQ ID NO: 861866 - DNA, 15 bp, Homo sapiens
tctgaactatgatgg

SEQ ID NO: 861867 - DNA, 15 bp, Homo sapiens
ctgaactatgatggg

SEQ ID NO: 861868 - DNA, 15 bp, Homo sapiens
tgaactatgatggga

SEQ ID NO: 861869 - DNA, 15 bp, Homo sapiens
gaactatgatgggaa

SEQ ID NO: 861870 - DNA, 15 bp, Homo sapiens
aactatgatgggaaa

SEQ ID NO: 861871 - DNA, 15 bp, Homo sapiens
actatgatgggaaag

SEQ ID NO: 861872 - DNA, 15 bp, Homo sapiens
ctatgatgggaaagg

SEQ ID NO: 861873 - DNA, 15 bp, Homo sapiens
tatgatgggaaaggc

SEQ ID NO: 861874 - DNA, 15 bp, Homo sapiens
atgatgggaaaggca

SEQ ID NO: 861875 - DNA, 15 bp, Homo sapiens
tgatgggaaaggcag

SEQ ID NO: 861876 - DNA, 15 bp, Homo sapiens
gatgggaaaggcagc

SEQ ID NO: 861877 - DNA, 15 bp, Homo sapiens
atgggaaaggcagct

SEQ ID NO: 861878 - DNA, 15 bp, Homo sapiens
tgggaaaggcagctt

SEQ ID NO: 861879 - DNA, 15 bp, Homo sapiens
gggaaaggcagcttg

SEQ ID NO: 861880 - DNA, 15 bp, Homo sapiens
ggaaaggcagcttgg

SEQ ID NO: 861881 - DNA, 15 bp, Homo sapiens
gaaaggcagcttgga

SEQ ID NO: 861882 - DNA, 15 bp, Homo sapiens
aaaggcagcttggaa

SEQ ID NO: 861883 - DNA, 15 bp, Homo sapiens
aaggcagcttggaag

SEQ ID NO: 861884 - DNA, 15 bp, Homo sapiens
aggcagcttggaaga

SEQ ID NO: 861885 - DNA, 15 bp, Homo sapiens
ggcagcttggaagat

SEQ ID NO: 861886 - DNA, 15 bp, Homo sapiens
gcagcttggaagatc

SEQ ID NO: 861887 - DNA, 15 bp, Homo sapiens
cagcttggaagatct

SEQ ID NO: 861888 - DNA, 15 bp, Homo sapiens
agcttggaagatctc

SEQ ID NO: 861889 - DNA, 15 bp, Homo sapiens
gcttggaagatctcc

SEQ ID NO: 861890 - DNA, 15 bp, Homo sapiens
cttggaagatctcca

SEQ ID NO: 861891 - DNA, 15 bp, Homo sapiens
ttggaagatctccaa

SEQ ID NO: 861892 - DNA, 15 bp, Homo sapiens
tggaagatctccaaa

SEQ ID NO: 861893 - DNA, 15 bp, Homo sapiens
ggaagatctccaaat

SEQ ID NO: 861894 - DNA, 15 bp, Homo sapiens
gaagatctccaaatg

SEQ ID NO: 861895 - DNA, 15 bp, Homo sapiens
aagatctccaaatgg

SEQ ID NO: 861896 - DNA, 15 bp, Homo sapiens
agatctccaaatggc

SEQ ID NO: 861897 - DNA, 15 bp, Homo sapiens
gatctccaaatggct

SEQ ID NO: 861898 - DNA, 15 bp, Homo sapiens
atctccaaatggctt

SEQ ID NO: 861899 - DNA, 15 bp, Homo sapiens
tctccaaatggcttt

SEQ ID NO: 861900 - DNA, 15 bp, Homo sapiens
ctccaaatggctttg

SEQ ID NO: 861901 - DNA, 15 bp, Homo sapiens
tccaaatggctttgg

SEQ ID NO: 861902 - DNA, 15 bp, Homo sapiens
ccaaatggctttgga

SEQ ID NO: 861903 - DNA, 15 bp, Homo sapiens
caaatggctttggag

SEQ ID NO: 861904 - DNA, 15 bp, Homo sapiens
aaatggctttggagt

SEQ ID NO: 861905 - DNA, 15 bp, Homo sapiens
aatggctttggagtc

SEQ ID NO: 861906 - DNA, 15 bp, Homo sapiens
atggctttggagtca

SEQ ID NO: 861907 - DNA, 15 bp, Homo sapiens
tggctttggagtcat

SEQ ID NO: 861908 - DNA, 15 bp, Homo sapiens
ggctttggagtcatt

SEQ ID NO: 861909 - DNA, 15 bp, Homo sapiens
gctttggagtcattc

SEQ ID NO: 861910 - DNA, 15 bp, Homo sapiens
ctttggagtcattct

SEQ ID NO: 861911 - DNA, 15 bp, Homo sapiens
tttggagtcattctt

SEQ ID NO: 861912 - DNA, 15 bp, Homo sapiens
ttggagtcattcttc

SEQ ID NO: 861913 - DNA, 15 bp, Homo sapiens
tggagtcattcttcc

SEQ ID NO: 861914 - DNA, 15 bp, Homo sapiens
ggagtcattcttcca

SEQ ID NO: 861915 - DNA, 15 bp, Homo sapiens
gagtcattcttccat

SEQ ID NO: 861916 - DNA, 15 bp, Homo sapiens
agtcattcttccatt

SEQ ID NO: 861917 - DNA, 15 bp, Homo sapiens
gtcattcttccattg

SEQ ID NO: 861918 - DNA, 15 bp, Homo sapiens
tcattcttccattgt

SEQ ID NO: 861919 - DNA, 15 bp, Homo sapiens
cattcttccattgtc

SEQ ID NO: 861920 - DNA, 15 bp, Homo sapiens
attcttccattgtct

SEQ ID NO: 861921 - DNA, 15 bp, Homo sapiens
ttcttccattgtctt

SEQ ID NO: 861922 - DNA, 15 bp, Homo sapiens
tcttccattgtcttg

SEQ ID NO: 861923 - DNA, 15 bp, Homo sapiens
cttccattgtcttgg

SEQ ID NO: 861924 - DNA, 15 bp, Homo sapiens
ttccattgtcttgga

SEQ ID NO: 861925 - DNA, 15 bp, Homo sapiens
tccattgtcttggac

SEQ ID NO: 861926 - DNA, 15 bp, Homo sapiens
ccattgtcttggact

SEQ ID NO: 861927 - DNA, 15 bp, Homo sapiens
cattgtcttggacta

SEQ ID NO: 861928 - DNA, 15 bp, Homo sapiens
attgtcttggactat

SEQ ID NO: 861929 - DNA, 15 bp, Homo sapiens
ttgtcttggactata

SEQ ID NO: 861930 - DNA, 15 bp, Homo sapiens
tgtcttggactataa

SEQ ID NO: 861931 - DNA, 15 bp, Homo sapiens
gtcttggactataaa

SEQ ID NO: 861932 - DNA, 15 bp, Homo sapiens
tcttggactataaat

SEQ ID NO: 861933 - DNA, 15 bp, Homo sapiens
cttggactataaatt

SEQ ID NO: 861934 - DNA, 15 bp, Homo sapiens
ttggactataaattc

SEQ ID NO: 861935 - DNA, 15 bp, Homo sapiens
tggactataaattct

SEQ ID NO: 861936 - DNA, 15 bp, Homo sapiens
ggactataaattctg

SEQ ID NO: 861937 - DNA, 15 bp, Homo sapiens
gactataaattctgg

SEQ ID NO: 861938 - DNA, 15 bp, Homo sapiens
actataaattctggc

SEQ ID NO: 861939 - DNA, 15 bp, Homo sapiens
ctataaattctggct

SEQ ID NO: 861940 - DNA, 15 bp, Homo sapiens
tataaattctggctt

SEQ ID NO: 861941 - DNA, 15 bp, Homo sapiens
ataaattctggcttc

SEQ ID NO: 861942 - DNA, 15 bp, Homo sapiens
taaattctggcttct

SEQ ID NO: 861943 - DNA, 15 bp, Homo sapiens
aaattctggcttctg

SEQ ID NO: 861944 - DNA, 15 bp, Homo sapiens
aattctggcttctgt

SEQ ID NO: 861945 - DNA, 15 bp, Homo sapiens
attctggcttctgtt

SEQ ID NO: 861946 - DNA, 15 bp, Homo sapiens
ttctggcttctgttt

SEQ ID NO: 861947 - DNA, 15 bp, Homo sapiens
tctggcttctgttta

SEQ ID NO: 861948 - DNA, 15 bp, Homo sapiens
ctggcttctgtttag

SEQ ID NO: 861949 - DNA, 15 bp, Homo sapiens
tggcttctgtttagg

SEQ ID NO: 861950 - DNA, 15 bp, Homo sapiens
ggcttctgtttaggt

SEQ ID NO: 861951 - DNA, 15 bp, Homo sapiens
gcttctgtttaggtg

SEQ ID NO: 861952 - DNA, 15 bp, Homo sapiens
cttctgtttaggtgg

SEQ ID NO: 861953 - DNA, 15 bp, Homo sapiens
ttctgtttaggtggc

SEQ ID NO: 861954 - DNA, 15 bp, Homo sapiens
tctgtttaggtggct

SEQ ID NO: 861955 - DNA, 15 bp, Homo sapiens
ctgtttaggtggctg

SEQ ID NO: 861956 - DNA, 15 bp, Homo sapiens
tgtttaggtggctga

SEQ ID NO: 861957 - DNA, 15 bp, Homo sapiens
gtttaggtggctgac

SEQ ID NO: 861958 - DNA, 15 bp, Homo sapiens
tttaggtggctgact

SEQ ID NO: 861959 - DNA, 15 bp, Homo sapiens
ttaggtggctgacta

SEQ ID NO: 861960 - DNA, 15 bp, Homo sapiens
taggtggctgactaa

SEQ ID NO: 861961 - DNA, 15 bp, Homo sapiens
aggtggctgactaat

SEQ ID NO: 861962 - DNA, 15 bp, Homo sapiens
ggtggctgactaata

SEQ ID NO: 861963 - DNA, 15 bp, Homo sapiens
gtggctgactaatat

SEQ ID NO: 861964 - DNA, 15 bp, Homo sapiens
tggctgactaatatc

SEQ ID NO: 861965 - DNA, 15 bp, Homo sapiens
ggctgactaatatcc

SEQ ID NO: 861966 - DNA, 15 bp, Homo sapiens
gctgactaatatccc

SEQ ID NO: 861967 - DNA, 15 bp, Homo sapiens
ctgactaatatcccc

SEQ ID NO: 861968 - DNA, 15 bp, Homo sapiens
tgactaatatcccca

SEQ ID NO: 861969 - DNA, 15 bp, Homo sapiens
gactaatatccccac

SEQ ID NO: 861970 - DNA, 15 bp, Homo sapiens
actaatatccccact

SEQ ID NO: 861971 - DNA, 15 bp, Homo sapiens
ctaatatccccactg

SEQ ID NO: 861972 - DNA, 15 bp, Homo sapiens
taatatccccactgt

SEQ ID NO: 861973 - DNA, 15 bp, Homo sapiens
aatatccccactgtc

SEQ ID NO: 861974 - DNA, 15 bp, Homo sapiens
atatccccactgtct

SEQ ID NO: 861975 - DNA, 15 bp, Homo sapiens
tatccccactgtctg

SEQ ID NO: 861976 - DNA, 15 bp, Homo sapiens
atccccactgtctga

SEQ ID NO: 861977 - DNA, 15 bp, Homo sapiens
tccccactgtctgaa

SEQ ID NO: 861978 - DNA, 15 bp, Homo sapiens
ccccactgtctgaat

SEQ ID NO: 861979 - DNA, 15 bp, Homo sapiens
cccactgtctgaatg

SEQ ID NO: 861980 - DNA, 15 bp, Homo sapiens
ccactgtctgaatgc

SEQ ID NO: 861981 - DNA, 15 bp, Homo sapiens
cactgtctgaatgca

SEQ ID NO: 861982 - DNA, 15 bp, Homo sapiens
actgtctgaatgcat

SEQ ID NO: 861983 - DNA, 15 bp, Homo sapiens
ctgtctgaatgcata

SEQ ID NO: 861984 - DNA, 15 bp, Homo sapiens
tgtctgaatgcatag

SEQ ID NO: 861985 - DNA, 15 bp, Homo sapiens
gtctgaatgcatagc

SEQ ID NO: 861986 - DNA, 15 bp, Homo sapiens
tctgaatgcatagca

SEQ ID NO: 861987 - DNA, 15 bp, Homo sapiens
ctgaatgcatagcac

SEQ ID NO: 861988 - DNA, 15 bp, Homo sapiens
tgaatgcatagcacc

SEQ ID NO: 861989 - DNA, 15 bp, Homo sapiens
gaatgcatagcacct

SEQ ID NO: 861990 - DNA, 15 bp, Homo sapiens
aatgcatagcaccta

SEQ ID NO: 861991 - DNA, 15 bp, Homo sapiens
atgcatagcacctag

SEQ ID NO: 861992 - DNA, 15 bp, Homo sapiens
tgcatagcacctagt

SEQ ID NO: 861993 - DNA, 15 bp, Homo sapiens
gcatagcacctagtt

SEQ ID NO: 861994 - DNA, 15 bp, Homo sapiens
catagcacctagttt

SEQ ID NO: 861995 - DNA, 15 bp, Homo sapiens
atagcacctagtttc

SEQ ID NO: 861996 - DNA, 15 bp, Homo sapiens
tagcacctagtttct

SEQ ID NO: 861997 - DNA, 15 bp, Homo sapiens
agcacctagtttctg

SEQ ID NO: 861998 - DNA, 15 bp, Homo sapiens
gcacctagtttctgt

SEQ ID NO: 861999 - DNA, 15 bp, Homo sapiens
cacctagtttctgtt

SEQ ID NO: 862000 - DNA, 15 bp, Homo sapiens
acctagtttctgttg

SEQ ID NO: 862001 - DNA, 15 bp, Homo sapiens
cctagtttctgttga

SEQ ID NO: 862002 - DNA, 15 bp, Homo sapiens
ctagtttctgttgag

SEQ ID NO: 862003 - DNA, 15 bp, Homo sapiens
tagtttctgttgaga

SEQ ID NO: 862004 - DNA, 15 bp, Homo sapiens
agtttctgttgagat

SEQ ID NO: 862005 - DNA, 15 bp, Homo sapiens
gtttctgttgagatg

SEQ ID NO: 862006 - DNA, 15 bp, Homo sapiens
tttctgttgagatgg

SEQ ID NO: 862007 - DNA, 15 bp, Homo sapiens
ttctgttgagatggc

SEQ ID NO: 862008 - DNA, 15 bp, Homo sapiens
tctgttgagatggct

SEQ ID NO: 862009 - DNA, 15 bp, Homo sapiens
ctgttgagatggcta

SEQ ID NO: 862010 - DNA, 15 bp, Homo sapiens
tgttgagatggctag

SEQ ID NO: 862011 - DNA, 15 bp, Homo sapiens
gttgagatggctagt

SEQ ID NO: 862012 - DNA, 15 bp, Homo sapiens
ttgagatggctagtc

SEQ ID NO: 862013 - DNA, 15 bp, Homo sapiens
tgagatggctagtcc

SEQ ID NO: 862014 - DNA, 15 bp, Homo sapiens
gagatggctagtcca

SEQ ID NO: 862015 - DNA, 15 bp, Homo sapiens
agatggctagtccat

SEQ ID NO: 862016 - DNA, 15 bp, Homo sapiens
gatggctagtccata

SEQ ID NO: 862017 - DNA, 15 bp, Homo sapiens
atggctagtccatag

SEQ ID NO: 862018 - DNA, 15 bp, Homo sapiens
tggctagtccatagt

SEQ ID NO: 862019 - DNA, 15 bp, Homo sapiens
ggctagtccatagta

SEQ ID NO: 862020 - DNA, 15 bp, Homo sapiens
gctagtccatagtaa

SEQ ID NO: 862021 - DNA, 15 bp, Homo sapiens
ctagtccatagtaat

SEQ ID NO: 862022 - DNA, 15 bp, Homo sapiens
tagtccatagtaatt

SEQ ID NO: 862023 - DNA, 15 bp, Homo sapiens
agtccatagtaattt

SEQ ID NO: 862024 - DNA, 15 bp, Homo sapiens
gtccatagtaattta

SEQ ID NO: 862025 - DNA, 15 bp, Homo sapiens
tccatagtaatttac

SEQ ID NO: 862026 - DNA, 15 bp, Homo sapiens
ccatagtaatttact

SEQ ID NO: 862027 - DNA, 15 bp, Homo sapiens
catagtaatttactt

SEQ ID NO: 862028 - DNA, 15 bp, Homo sapiens
atagtaatttactta

SEQ ID NO: 862029 - DNA, 15 bp, Homo sapiens
tagtaatttacttat

SEQ ID NO: 862030 - DNA, 15 bp, Homo sapiens
agtaatttacttatc

SEQ ID NO: 862031 - DNA, 15 bp, Homo sapiens
gtaatttacttatca

SEQ ID NO: 862032 - DNA, 15 bp, Homo sapiens
taatttacttatcaa

SEQ ID NO: 862033 - DNA, 15 bp, Homo sapiens
aatttacttatcaaa

SEQ ID NO: 862034 - DNA, 15 bp, Homo sapiens
atttacttatcaaat

SEQ ID NO: 862035 - DNA, 15 bp, Homo sapiens
tttacttatcaaatt

SEQ ID NO: 862036 - DNA, 15 bp, Homo sapiens
ttacttatcaaattt

SEQ ID NO: 862037 - DNA, 15 bp, Homo sapiens
tacttatcaaatttg

SEQ ID NO: 862038 - DNA, 15 bp, Homo sapiens
acttatcaaatttgg

SEQ ID NO: 862039 - DNA, 15 bp, Homo sapiens
cttatcaaatttggc

SEQ ID NO: 862040 - DNA, 15 bp, Homo sapiens
ttatcaaatttggcc

SEQ ID NO: 862041 - DNA, 15 bp, Homo sapiens
tatcaaatttggcca

SEQ ID NO: 862042 - DNA, 15 bp, Homo sapiens
atcaaatttggccac

SEQ ID NO: 862043 - DNA, 15 bp, Homo sapiens
tcaaatttggccaca

SEQ ID NO: 862044 - DNA, 15 bp, Homo sapiens
caaatttggccacac

SEQ ID NO: 862045 - DNA, 15 bp, Homo sapiens
aaatttggccacacc

SEQ ID NO: 862046 - DNA, 15 bp, Homo sapiens
aatttggccacaccc

SEQ ID NO: 862047 - DNA, 15 bp, Homo sapiens
atttggccacaccct

SEQ ID NO: 862048 - DNA, 15 bp, Homo sapiens
tttggccacaccctt

SEQ ID NO: 862049 - DNA, 15 bp, Homo sapiens
ttggccacacccttt

SEQ ID NO: 862050 - DNA, 15 bp, Homo sapiens
tggccacaccctttg

SEQ ID NO: 862051 - DNA, 15 bp, Homo sapiens
ggccacaccctttgt

SEQ ID NO: 862052 - DNA, 15 bp, Homo sapiens
gccacaccctttgta

SEQ ID NO: 862053 - DNA, 15 bp, Homo sapiens
ccacaccctttgtat

SEQ ID NO: 862054 - DNA, 15 bp, Homo sapiens
cacaccctttgtatt

SEQ ID NO: 862055 - DNA, 15 bp, Homo sapiens
acaccctttgtattc

SEQ ID NO: 862056 - DNA, 15 bp, Homo sapiens
caccctttgtattct

SEQ ID NO: 862057 - DNA, 15 bp, Homo sapiens
accctttgtattctc

SEQ ID NO: 862058 - DNA, 15 bp, Homo sapiens
ccctttgtattctct

SEQ ID NO: 862059 - DNA, 15 bp, Homo sapiens
cctttgtattctctc

SEQ ID NO: 862060 - DNA, 15 bp, Homo sapiens
ctttgtattctctcc

SEQ ID NO: 862061 - DNA, 15 bp, Homo sapiens
tttgtattctctcct

SEQ ID NO: 862062 - DNA, 15 bp, Homo sapiens
ttgtattctctcctg

SEQ ID NO: 862063 - DNA, 15 bp, Homo sapiens
tgtattctctcctga

SEQ ID NO: 862064 - DNA, 15 bp, Homo sapiens
gtattctctcctgag

SEQ ID NO: 862065 - DNA, 15 bp, Homo sapiens
tattctctcctgagc

SEQ ID NO: 862066 - DNA, 15 bp, Homo sapiens
attctctcctgagca

SEQ ID NO: 862067 - DNA, 15 bp, Homo sapiens
ttctctcctgagcag

SEQ ID NO: 862068 - DNA, 15 bp, Homo sapiens
tctctcctgagcagg

SEQ ID NO: 862069 - DNA, 15 bp, Homo sapiens
ctctcctgagcaggc

SEQ ID NO: 862070 - DNA, 15 bp, Homo sapiens
tctcctgagcaggct

SEQ ID NO: 862071 - DNA, 15 bp, Homo sapiens
ctcctgagcaggctt

SEQ ID NO: 862072 - DNA, 15 bp, Homo sapiens
tcctgagcaggcttt

SEQ ID NO: 862073 - DNA, 15 bp, Homo sapiens
cctgagcaggctttc

SEQ ID NO: 862074 - DNA, 15 bp, Homo sapiens
ctgagcaggctttct

SEQ ID NO: 862075 - DNA, 15 bp, Homo sapiens
tgagcaggctttctc

SEQ ID NO: 862076 - DNA, 15 bp, Homo sapiens
gagcaggctttctca

SEQ ID NO: 862077 - DNA, 15 bp, Homo sapiens
agcaggctttctcat

SEQ ID NO: 862078 - DNA, 15 bp, Homo sapiens
gcaggctttctcatc

SEQ ID NO: 862079 - DNA, 15 bp, Homo sapiens
caggctttctcatct

SEQ ID NO: 862080 - DNA, 15 bp, Homo sapiens
aggctttctcatctt

SEQ ID NO: 862081 - DNA, 15 bp, Homo sapiens
ggctttctcatcttt

SEQ ID NO: 862082 - DNA, 15 bp, Homo sapiens
gctttctcatctttc

SEQ ID NO: 862083 - DNA, 15 bp, Homo sapiens
ctttctcatctttca

SEQ ID NO: 862084 - DNA, 15 bp, Homo sapiens
tttctcatctttcac

SEQ ID NO: 862085 - DNA, 15 bp, Homo sapiens
ttctcatctttcaca

SEQ ID NO: 862086 - DNA, 15 bp, Homo sapiens
tctcatctttcacaa

SEQ ID NO: 862087 - DNA, 15 bp, Homo sapiens
ctcatctttcacaat

SEQ ID NO: 862088 - DNA, 15 bp, Homo sapiens
tcatctttcacaata

SEQ ID NO: 862089 - DNA, 15 bp, Homo sapiens
catctttcacaatat

SEQ ID NO: 862090 - DNA, 15 bp, Homo sapiens
atctttcacaatatg

SEQ ID NO: 862091 - DNA, 15 bp, Homo sapiens
tctttcacaatatgg

SEQ ID NO: 862092 - DNA, 15 bp, Homo sapiens
ctttcacaatatgga

SEQ ID NO: 862093 - DNA, 15 bp, Homo sapiens
tttcacaatatggat

SEQ ID NO: 862094 - DNA, 15 bp, Homo sapiens
ttcacaatatggata

SEQ ID NO: 862095 - DNA, 15 bp, Homo sapiens
tcacaatatggatag

SEQ ID NO: 862096 - DNA, 15 bp, Homo sapiens
cacaatatggatagg

SEQ ID NO: 862097 - DNA, 15 bp, Homo sapiens
acaatatggataggc

SEQ ID NO: 862098 - DNA, 15 bp, Homo sapiens
caatatggataggct

SEQ ID NO: 862099 - DNA, 15 bp, Homo sapiens
aatatggataggctg

SEQ ID NO: 862100 - DNA, 15 bp, Homo sapiens
atatggataggctga

SEQ ID NO: 862101 - DNA, 15 bp, Homo sapiens
tatggataggctgag

SEQ ID NO: 862102 - DNA, 15 bp, Homo sapiens
atggataggctgaga

SEQ ID NO: 862103 - DNA, 15 bp, Homo sapiens
tggataggctgagaa

SEQ ID NO: 862104 - DNA, 15 bp, Homo sapiens
ggataggctgagaat

SEQ ID NO: 862105 - DNA, 15 bp, Homo sapiens
gataggctgagaatt

SEQ ID NO: 862106 - DNA, 15 bp, Homo sapiens
ataggctgagaattt

SEQ ID NO: 862107 - DNA, 15 bp, Homo sapiens
taggctgagaatttt

SEQ ID NO: 862108 - DNA, 15 bp, Homo sapiens
aggctgagaattttc

SEQ ID NO: 862109 - DNA, 15 bp, Homo sapiens
ggctgagaattttcc

SEQ ID NO: 862110 - DNA, 15 bp, Homo sapiens
gctgagaattttcca

SEQ ID NO: 862111 - DNA, 15 bp, Homo sapiens
ctgagaattttccaa

SEQ ID NO: 862112 - DNA, 15 bp, Homo sapiens
tgagaattttccaaa

SEQ ID NO: 862113 - DNA, 15 bp, Homo sapiens
gagaattttccaaat

SEQ ID NO: 862114 - DNA, 15 bp, Homo sapiens
agaattttccaaatt

SEQ ID NO: 862115 - DNA, 15 bp, Homo sapiens
gaattttccaaattt

SEQ ID NO: 862116 - DNA, 15 bp, Homo sapiens
aattttccaaatttt

SEQ ID NO: 862117 - DNA, 15 bp, Homo sapiens
attttccaaattttg

SEQ ID NO: 862118 - DNA, 15 bp, Homo sapiens
ttttccaaattttga

SEQ ID NO: 862119 - DNA, 15 bp, Homo sapiens
tttccaaattttgaa

SEQ ID NO: 862120 - DNA, 15 bp, Homo sapiens
ttccaaattttgaag

SEQ ID NO: 862121 - DNA, 15 bp, Homo sapiens
tccaaattttgaagt

SEQ ID NO: 862122 - DNA, 15 bp, Homo sapiens
ccaaattttgaagtt

SEQ ID NO: 862123 - DNA, 15 bp, Homo sapiens
caaattttgaagttc

SEQ ID NO: 862124 - DNA, 15 bp, Homo sapiens
aaattttgaagttct

SEQ ID NO: 862125 - DNA, 15 bp, Homo sapiens
aattttgaagttctg

SEQ ID NO: 862126 - DNA, 15 bp, Homo sapiens
attttgaagttctgc

SEQ ID NO: 862127 - DNA, 15 bp, Homo sapiens
ttttgaagttctgct

SEQ ID NO: 862128 - DNA, 15 bp, Homo sapiens
tttgaagttctgctt

SEQ ID NO: 862129 - DNA, 15 bp, Homo sapiens
ttgaagttctgcttc

SEQ ID NO: 862130 - DNA, 15 bp, Homo sapiens
tgaagttctgcttcc

SEQ ID NO: 862131 - DNA, 15 bp, Homo sapiens
gaagttctgcttccc

SEQ ID NO: 862132 - DNA, 15 bp, Homo sapiens
aagttctgcttccct

SEQ ID NO: 862133 - DNA, 15 bp, Homo sapiens
agttctgcttccctt

SEQ ID NO: 862134 - DNA, 15 bp, Homo sapiens
gttctgcttcccttt

SEQ ID NO: 862135 - DNA, 15 bp, Homo sapiens
ttctgcttccctttt

SEQ ID NO: 862136 - DNA, 15 bp, Homo sapiens
tctgcttcccttttg

SEQ ID NO: 862137 - DNA, 15 bp, Homo sapiens
ctgcttcccttttga

SEQ ID NO: 862138 - DNA, 15 bp, Homo sapiens
tgcttcccttttgat

SEQ ID NO: 862139 - DNA, 15 bp, Homo sapiens
gcttcccttttgatc

SEQ ID NO: 862140 - DNA, 15 bp, Homo sapiens
cttcccttttgatca

SEQ ID NO: 862141 - DNA, 15 bp, Homo sapiens
ttcccttttgatcaa

SEQ ID NO: 862142 - DNA, 15 bp, Homo sapiens
tcccttttgatcaat

SEQ ID NO: 862143 - DNA, 15 bp, Homo sapiens
cccttttgatcaata

SEQ ID NO: 862144 - DNA, 15 bp, Homo sapiens
ccttttgatcaataa

SEQ ID NO: 862145 - DNA, 15 bp, Homo sapiens
cttttgatcaataat

SEQ ID NO: 862146 - DNA, 15 bp, Homo sapiens
ttttgatcaataatt

SEQ ID NO: 862147 - DNA, 15 bp, Homo sapiens
tttgatcaataattc

SEQ ID NO: 862148 - DNA, 15 bp, Homo sapiens
ttgatcaataattcc

SEQ ID NO: 862149 - DNA, 15 bp, Homo sapiens
tgatcaataattcca

SEQ ID NO: 862150 - DNA, 15 bp, Homo sapiens
gatcaataattccat

SEQ ID NO: 862151 - DNA, 15 bp, Homo sapiens
atcaataattccatt

SEQ ID NO: 862152 - DNA, 15 bp, Homo sapiens
tcaataattccattt

SEQ ID NO: 862153 - DNA, 15 bp, Homo sapiens
caataattccatttt

SEQ ID NO: 862154 - DNA, 15 bp, Homo sapiens
aataattccatttta

SEQ ID NO: 862155 - DNA, 15 bp, Homo sapiens
ataattccattttaa

SEQ ID NO: 862156 - DNA, 15 bp, Homo sapiens
taattccattttaaa

SEQ ID NO: 862157 - DNA, 15 bp, Homo sapiens
aattccattttaaag

SEQ ID NO: 862158 - DNA, 15 bp, Homo sapiens
attccattttaaagt

SEQ ID NO: 862159 - DNA, 15 bp, Homo sapiens
ttccattttaaagtc

SEQ ID NO: 862160 - DNA, 15 bp, Homo sapiens
tccattttaaagtca

SEQ ID NO: 862161 - DNA, 15 bp, Homo sapiens
ccattttaaagtcat

SEQ ID NO: 862162 - DNA, 15 bp, Homo sapiens
cattttaaagtcatt

SEQ ID NO: 862163 - DNA, 15 bp, Homo sapiens
attttaaagtcattt

SEQ ID NO: 862164 - DNA, 15 bp, Homo sapiens
ttttaaagtcatttc

SEQ ID NO: 862165 - DNA, 15 bp, Homo sapiens
tttaaagtcatttct

SEQ ID NO: 862166 - DNA, 15 bp, Homo sapiens
ttaaagtcatttctc

SEQ ID NO: 862167 - DNA, 15 bp, Homo sapiens
taaagtcatttctca

SEQ ID NO: 862168 - DNA, 15 bp, Homo sapiens
aaagtcatttctcat

SEQ ID NO: 862169 - DNA, 15 bp, Homo sapiens
aagtcatttctcatc

SEQ ID NO: 862170 - DNA, 15 bp, Homo sapiens
agtcatttctcatct

SEQ ID NO: 862171 - DNA, 15 bp, Homo sapiens
gtcatttctcatctt

SEQ ID NO: 862172 - DNA, 15 bp, Homo sapiens
tcatttctcatcttg

SEQ ID NO: 862173 - DNA, 15 bp, Homo sapiens
catttctcatcttga

SEQ ID NO: 862174 - DNA, 15 bp, Homo sapiens
atttctcatcttgaa

SEQ ID NO: 862175 - DNA, 15 bp, Homo sapiens
tttctcatcttgaat

SEQ ID NO: 862176 - DNA, 15 bp, Homo sapiens
ttctcatcttgaatt

SEQ ID NO: 862177 - DNA, 15 bp, Homo sapiens
tctcatcttgaattt

SEQ ID NO: 862178 - DNA, 15 bp, Homo sapiens
ctcatcttgaatttt

SEQ ID NO: 862179 - DNA, 15 bp, Homo sapiens
tcatcttgaatttta

SEQ ID NO: 862180 - DNA, 15 bp, Homo sapiens
catcttgaattttac

SEQ ID NO: 862181 - DNA, 15 bp, Homo sapiens
atcttgaattttact

SEQ ID NO: 862182 - DNA, 15 bp, Homo sapiens
tcttgaattttacta

SEQ ID NO: 862183 - DNA, 15 bp, Homo sapiens
cttgaattttactat

SEQ ID NO: 862184 - DNA, 15 bp, Homo sapiens
ttgaattttactatg

SEQ ID NO: 862185 - DNA, 15 bp, Homo sapiens
tgaattttactatga

SEQ ID NO: 862186 - DNA, 15 bp, Homo sapiens
gaattttactatgag

SEQ ID NO: 862187 - DNA, 15 bp, Homo sapiens
aattttactatgagc

SEQ ID NO: 862188 - DNA, 15 bp, Homo sapiens
attttactatgagca

SEQ ID NO: 862189 - DNA, 15 bp, Homo sapiens
ttttactatgagcag

SEQ ID NO: 862190 - DNA, 15 bp, Homo sapiens
tttactatgagcagt

SEQ ID NO: 862191 - DNA, 15 bp, Homo sapiens
ttactatgagcagtc

SEQ ID NO: 862192 - DNA, 15 bp, Homo sapiens
tactatgagcagtca

SEQ ID NO: 862193 - DNA, 15 bp, Homo sapiens
actatgagcagtcaa

SEQ ID NO: 862194 - DNA, 15 bp, Homo sapiens
ctatgagcagtcaag

SEQ ID NO: 862195 - DNA, 15 bp, Homo sapiens
tatgagcagtcaaga

SEQ ID NO: 862196 - DNA, 15 bp, Homo sapiens
atgagcagtcaagag

SEQ ID NO: 862197 - DNA, 15 bp, Homo sapiens
tgagcagtcaagagt

SEQ ID NO: 862198 - DNA, 15 bp, Homo sapiens
gagcagtcaagagta

SEQ ID NO: 862199 - DNA, 15 bp, Homo sapiens
agcagtcaagagtaa

SEQ ID NO: 862200 - DNA, 15 bp, Homo sapiens
gcagtcaagagtaac

SEQ ID NO: 862201 - DNA, 15 bp, Homo sapiens
cagtcaagagtaact

SEQ ID NO: 862202 - DNA, 15 bp, Homo sapiens
agtcaagagtaacta

SEQ ID NO: 862203 - DNA, 15 bp, Homo sapiens
gtcaagagtaactaa

SEQ ID NO: 862204 - DNA, 15 bp, Homo sapiens
tcaagagtaactaag

SEQ ID NO: 862205 - DNA, 15 bp, Homo sapiens
caagagtaactaagc

SEQ ID NO: 862206 - DNA, 15 bp, Homo sapiens
aagagtaactaagct

SEQ ID NO: 862207 - DNA, 15 bp, Homo sapiens
agagtaactaagctg

SEQ ID NO: 862208 - DNA, 15 bp, Homo sapiens
gagtaactaagctgc

SEQ ID NO: 862209 - DNA, 15 bp, Homo sapiens
agtaactaagctgct

SEQ ID NO: 862210 - DNA, 15 bp, Homo sapiens
gtaactaagctgctc

SEQ ID NO: 862211 - DNA, 15 bp, Homo sapiens
taactaagctgctcc

SEQ ID NO: 862212 - DNA, 15 bp, Homo sapiens
aactaagctgctcct

SEQ ID NO: 862213 - DNA, 15 bp, Homo sapiens
actaagctgctcctt

SEQ ID NO: 862214 - DNA, 15 bp, Homo sapiens
ctaagctgctccttc

SEQ ID NO: 862215 - DNA, 15 bp, Homo sapiens
taagctgctccttca

SEQ ID NO: 862216 - DNA, 15 bp, Homo sapiens
aagctgctccttcaa

SEQ ID NO: 862217 - DNA, 15 bp, Homo sapiens
agctgctccttcaac

SEQ ID NO: 862218 - DNA, 15 bp, Homo sapiens
gctgctccttcaact

SEQ ID NO: 862219 - DNA, 15 bp, Homo sapiens
ctgctccttcaactt

SEQ ID NO: 862220 - DNA, 15 bp, Homo sapiens
tgctccttcaacttt

SEQ ID NO: 862221 - DNA, 15 bp, Homo sapiens
gctccttcaactttg

SEQ ID NO: 862222 - DNA, 15 bp, Homo sapiens
ctccttcaactttgc

SEQ ID NO: 862223 - DNA, 15 bp, Homo sapiens
tccttcaactttgct

SEQ ID NO: 862224 - DNA, 15 bp, Homo sapiens
ccttcaactttgctt

SEQ ID NO: 862225 - DNA, 15 bp, Homo sapiens
cttcaactttgcttg

SEQ ID NO: 862226 - DNA, 15 bp, Homo sapiens
ttcaactttgcttgg

SEQ ID NO: 862227 - DNA, 15 bp, Homo sapiens
tcaactttgcttgga

SEQ ID NO: 862228 - DNA, 15 bp, Homo sapiens
caactttgcttggat

SEQ ID NO: 862229 - DNA, 15 bp, Homo sapiens
aactttgcttggata

SEQ ID NO: 862230 - DNA, 15 bp, Homo sapiens
actttgcttggatat

SEQ ID NO: 862231 - DNA, 15 bp, Homo sapiens
ctttgcttggatatt

SEQ ID NO: 862232 - DNA, 15 bp, Homo sapiens
tttgcttggatattt

SEQ ID NO: 862233 - DNA, 15 bp, Homo sapiens
ttgcttggatatttc

SEQ ID NO: 862234 - DNA, 15 bp, Homo sapiens
tgcttggatatttcc

SEQ ID NO: 862235 - DNA, 15 bp, Homo sapiens
gcttggatatttcct

SEQ ID NO: 862236 - DNA, 15 bp, Homo sapiens
cttggatatttcctc

SEQ ID NO: 862237 - DNA, 15 bp, Homo sapiens
ttggatatttcctca

SEQ ID NO: 862238 - DNA, 15 bp, Homo sapiens
tggatatttcctcag

SEQ ID NO: 862239 - DNA, 15 bp, Homo sapiens
ggatatttcctcagt

SEQ ID NO: 862240 - DNA, 15 bp, Homo sapiens
gatatttcctcagtc

SEQ ID NO: 862241 - DNA, 15 bp, Homo sapiens
atatttcctcagtca

SEQ ID NO: 862242 - DNA, 15 bp, Homo sapiens
tatttcctcagtcaa

SEQ ID NO: 862243 - DNA, 15 bp, Homo sapiens
atttcctcagtcaaa

SEQ ID NO: 862244 - DNA, 15 bp, Homo sapiens
tttcctcagtcaaac

SEQ ID NO: 862245 - DNA, 15 bp, Homo sapiens
ttcctcagtcaaaca

SEQ ID NO: 862246 - DNA, 15 bp, Homo sapiens
tcctcagtcaaacat

SEQ ID NO: 862247 - DNA, 15 bp, Homo sapiens
cctcagtcaaacatt

SEQ ID NO: 862248 - DNA, 15 bp, Homo sapiens
ctcagtcaaacattc

SEQ ID NO: 862249 - DNA, 15 bp, Homo sapiens
tcagtcaaacattca

SEQ ID NO: 862250 - DNA, 15 bp, Homo sapiens
cagtcaaacattcaa

SEQ ID NO: 862251 - DNA, 15 bp, Homo sapiens
agtcaaacattcaat

SEQ ID NO: 862252 - DNA, 15 bp, Homo sapiens
gtcaaacattcaatt

SEQ ID NO: 862253 - DNA, 15 bp, Homo sapiens
tcaaacattcaattt

SEQ ID NO: 862254 - DNA, 15 bp, Homo sapiens
caaacattcaatttc

SEQ ID NO: 862255 - DNA, 15 bp, Homo sapiens
aaacattcaatttca

SEQ ID NO: 862256 - DNA, 15 bp, Homo sapiens
aacattcaatttcat

SEQ ID NO: 862257 - DNA, 15 bp, Homo sapiens
acattcaatttcatt

SEQ ID NO: 862258 - DNA, 15 bp, Homo sapiens
cattcaatttcattg

SEQ ID NO: 862259 - DNA, 15 bp, Homo sapiens
attcaatttcattgc

SEQ ID NO: 862260 - DNA, 15 bp, Homo sapiens
ttcaatttcattgct

SEQ ID NO: 862261 - DNA, 15 bp, Homo sapiens
tcaatttcattgctt

SEQ ID NO: 862262 - DNA, 15 bp, Homo sapiens
caatttcattgcttt

SEQ ID NO: 862263 - DNA, 15 bp, Homo sapiens
aatttcattgctttc

SEQ ID NO: 862264 - DNA, 15 bp, Homo sapiens
atttcattgctttca

SEQ ID NO: 862265 - DNA, 15 bp, Homo sapiens
tttcattgctttcaa

SEQ ID NO: 862266 - DNA, 15 bp, Homo sapiens
ttcattgctttcaag

SEQ ID NO: 862267 - DNA, 15 bp, Homo sapiens
tcattgctttcaagt

SEQ ID NO: 862268 - DNA, 15 bp, Homo sapiens
cattgctttcaagtt

SEQ ID NO: 862269 - DNA, 15 bp, Homo sapiens
attgctttcaagttc

SEQ ID NO: 862270 - DNA, 15 bp, Homo sapiens
ttgctttcaagttct

SEQ ID NO: 862271 - DNA, 15 bp, Homo sapiens
tgctttcaagttctg

SEQ ID NO: 862272 - DNA, 15 bp, Homo sapiens
gctttcaagttctgc

SEQ ID NO: 862273 - DNA, 15 bp, Homo sapiens
ctttcaagttctgcc

SEQ ID NO: 862274 - DNA, 15 bp, Homo sapiens
tttcaagttctgcct

SEQ ID NO: 862275 - DNA, 15 bp, Homo sapiens
ttcaagttctgcctt

SEQ ID NO: 862276 - DNA, 15 bp, Homo sapiens
tcaagttctgccttc

SEQ ID NO: 862277 - DNA, 15 bp, Homo sapiens
caagttctgccttcc

SEQ ID NO: 862278 - DNA, 15 bp, Homo sapiens
aagttctgccttcca

SEQ ID NO: 862279 - DNA, 15 bp, Homo sapiens
agttctgccttccac

SEQ ID NO: 862280 - DNA, 15 bp, Homo sapiens
gttctgccttccaca

SEQ ID NO: 862281 - DNA, 15 bp, Homo sapiens
ttctgccttccacaa

SEQ ID NO: 862282 - DNA, 15 bp, Homo sapiens
tctgccttccacaaa

SEQ ID NO: 862283 - DNA, 15 bp, Homo sapiens
ctgccttccacaaaa

SEQ ID NO: 862284 - DNA, 15 bp, Homo sapiens
tgccttccacaaaac

SEQ ID NO: 862285 - DNA, 15 bp, Homo sapiens
gccttccacaaaaca

SEQ ID NO: 862286 - DNA, 15 bp, Homo sapiens
ccttccacaaaacac

SEQ ID NO: 862287 - DNA, 15 bp, Homo sapiens
cttccacaaaacact

SEQ ID NO: 862288 - DNA, 15 bp, Homo sapiens
ttccacaaaacacta

SEQ ID NO: 862289 - DNA, 15 bp, Homo sapiens
tccacaaaacactag

SEQ ID NO: 862290 - DNA, 15 bp, Homo sapiens
ccacaaaacactagg

SEQ ID NO: 862291 - DNA, 15 bp, Homo sapiens
cacaaaacactagga

SEQ ID NO: 862292 - DNA, 15 bp, Homo sapiens
acaaaacactaggac

SEQ ID NO: 862293 - DNA, 15 bp, Homo sapiens
caaaacactaggaca

SEQ ID NO: 862294 - DNA, 15 bp, Homo sapiens
aaaacactaggacac

SEQ ID NO: 862295 - DNA, 15 bp, Homo sapiens
aaacactaggacaca

SEQ ID NO: 862296 - DNA, 15 bp, Homo sapiens
aacactaggacacaa

SEQ ID NO: 862297 - DNA, 15 bp, Homo sapiens
acactaggacacaaa

SEQ ID NO: 862298 - DNA, 15 bp, Homo sapiens
cactaggacacaaac

SEQ ID NO: 862299 - DNA, 15 bp, Homo sapiens
actaggacacaaaca

SEQ ID NO: 862300 - DNA, 15 bp, Homo sapiens
ctaggacacaaacag

SEQ ID NO: 862301 - DNA, 15 bp, Homo sapiens
taggacacaaacagc

SEQ ID NO: 862302 - DNA, 15 bp, Homo sapiens
aggacacaaacagct

SEQ ID NO: 862303 - DNA, 15 bp, Homo sapiens
ggacacaaacagctc

SEQ ID NO: 862304 - DNA, 15 bp, Homo sapiens
gacacaaacagctca

SEQ ID NO: 862305 - DNA, 15 bp, Homo sapiens
acacaaacagctcag

SEQ ID NO: 862306 - DNA, 15 bp, Homo sapiens
cacaaacagctcagc

SEQ ID NO: 862307 - DNA, 15 bp, Homo sapiens
acaaacagctcagcc

SEQ ID NO: 862308 - DNA, 15 bp, Homo sapiens
caaacagctcagcca

SEQ ID NO: 862309 - DNA, 15 bp, Homo sapiens
aaacagctcagccaa

SEQ ID NO: 862310 - DNA, 15 bp, Homo sapiens
aacagctcagccaag

SEQ ID NO: 862311 - DNA, 15 bp, Homo sapiens
acagctcagccaagt

SEQ ID NO: 862312 - DNA, 15 bp, Homo sapiens
cagctcagccaagtt

SEQ ID NO: 862313 - DNA, 15 bp, Homo sapiens
agctcagccaagttc

SEQ ID NO: 862314 - DNA, 15 bp, Homo sapiens
gctcagccaagttct

SEQ ID NO: 862315 - DNA, 15 bp, Homo sapiens
ctcagccaagttctt

SEQ ID NO: 862316 - DNA, 15 bp, Homo sapiens
tcagccaagttcttt

SEQ ID NO: 862317 - DNA, 15 bp, Homo sapiens
cagccaagttctttg

SEQ ID NO: 862318 - DNA, 15 bp, Homo sapiens
agccaagttctttga

SEQ ID NO: 862319 - DNA, 15 bp, Homo sapiens
gccaagttctttgac

SEQ ID NO: 862320 - DNA, 15 bp, Homo sapiens
ccaagttctttgaca

SEQ ID NO: 862321 - DNA, 15 bp, Homo sapiens
caagttctttgacat

SEQ ID NO: 862322 - DNA, 15 bp, Homo sapiens
aagttctttgacatt

SEQ ID NO: 862323 - DNA, 15 bp, Homo sapiens
agttctttgacattt

SEQ ID NO: 862324 - DNA, 15 bp, Homo sapiens
gttctttgacatttt

SEQ ID NO: 862325 - DNA, 15 bp, Homo sapiens
ttctttgacatttta

SEQ ID NO: 862326 - DNA, 15 bp, Homo sapiens
tctttgacattttat

SEQ ID NO: 862327 - DNA, 15 bp, Homo sapiens
ctttgacattttata

SEQ ID NO: 862328 - DNA, 15 bp, Homo sapiens
tttgacattttataa

SEQ ID NO: 862329 - DNA, 15 bp, Homo sapiens
ttgacattttataag

SEQ ID NO: 862330 - DNA, 15 bp, Homo sapiens
tgacattttataaga

SEQ ID NO: 862331 - DNA, 15 bp, Homo sapiens
gacattttataagaa

SEQ ID NO: 862332 - DNA, 15 bp, Homo sapiens
acattttataagaag

SEQ ID NO: 862333 - DNA, 15 bp, Homo sapiens
cattttataagaagg

SEQ ID NO: 862334 - DNA, 15 bp, Homo sapiens
attttataagaagga

SEQ ID NO: 862335 - DNA, 15 bp, Homo sapiens
ttttataagaaggat

SEQ ID NO: 862336 - DNA, 15 bp, Homo sapiens
tttataagaaggata

SEQ ID NO: 862337 - DNA, 15 bp, Homo sapiens
ttataagaaggatag

SEQ ID NO: 862338 - DNA, 15 bp, Homo sapiens
tataagaaggatagc

SEQ ID NO: 862339 - DNA, 15 bp, Homo sapiens
ataagaaggatagct

SEQ ID NO: 862340 - DNA, 15 bp, Homo sapiens
taagaaggatagctt

SEQ ID NO: 862341 - DNA, 15 bp, Homo sapiens
aagaaggatagcttt

SEQ ID NO: 862342 - DNA, 15 bp, Homo sapiens
agaaggatagctttt

SEQ ID NO: 862343 - DNA, 15 bp, Homo sapiens
gaaggatagcttttc

SEQ ID NO: 862344 - DNA, 15 bp, Homo sapiens
aaggatagcttttcc

SEQ ID NO: 862345 - DNA, 15 bp, Homo sapiens
aggatagcttttcct

SEQ ID NO: 862346 - DNA, 15 bp, Homo sapiens
ggatagcttttcctc

SEQ ID NO: 862347 - DNA, 15 bp, Homo sapiens
gatagcttttcctcc

SEQ ID NO: 862348 - DNA, 15 bp, Homo sapiens
atagcttttcctcca

SEQ ID NO: 862349 - DNA, 15 bp, Homo sapiens
tagcttttcctccat

SEQ ID NO: 862350 - DNA, 15 bp, Homo sapiens
agcttttcctccatt

SEQ ID NO: 862351 - DNA, 15 bp, Homo sapiens
gcttttcctccattg

SEQ ID NO: 862352 - DNA, 15 bp, Homo sapiens
cttttcctccattgt

SEQ ID NO: 862353 - DNA, 15 bp, Homo sapiens
ttttcctccattgtc

SEQ ID NO: 862354 - DNA, 15 bp, Homo sapiens
tttcctccattgtcc

SEQ ID NO: 862355 - DNA, 15 bp, Homo sapiens
ttcctccattgtcca

SEQ ID NO: 862356 - DNA, 15 bp, Homo sapiens
tcctccattgtccaa

SEQ ID NO: 862357 - DNA, 15 bp, Homo sapiens
cctccattgtccaat

SEQ ID NO: 862358 - DNA, 15 bp, Homo sapiens
ctccattgtccaata

SEQ ID NO: 862359 - DNA, 15 bp, Homo sapiens
tccattgtccaataa

SEQ ID NO: 862360 - DNA, 15 bp, Homo sapiens
ccattgtccaataac

SEQ ID NO: 862361 - DNA, 15 bp, Homo sapiens
cattgtccaataaca

SEQ ID NO: 862362 - DNA, 15 bp, Homo sapiens
attgtccaataacat

SEQ ID NO: 862363 - DNA, 15 bp, Homo sapiens
ttgtccaataacatg

SEQ ID NO: 862364 - DNA, 15 bp, Homo sapiens
tgtccaataacatgt

SEQ ID NO: 862365 - DNA, 15 bp, Homo sapiens
gtccaataacatgtt

SEQ ID NO: 862366 - DNA, 15 bp, Homo sapiens
tccaataacatgttc

SEQ ID NO: 862367 - DNA, 15 bp, Homo sapiens
ccaataacatgttcc

SEQ ID NO: 862368 - DNA, 15 bp, Homo sapiens
caataacatgttcct

SEQ ID NO: 862369 - DNA, 15 bp, Homo sapiens
aataacatgttcctc

SEQ ID NO: 862370 - DNA, 15 bp, Homo sapiens
ataacatgttcctca

SEQ ID NO: 862371 - DNA, 15 bp, Homo sapiens
taacatgttcctcat

SEQ ID NO: 862372 - DNA, 15 bp, Homo sapiens
aacatgttcctcatt

SEQ ID NO: 862373 - DNA, 15 bp, Homo sapiens
acatgttcctcattt

SEQ ID NO: 862374 - DNA, 15 bp, Homo sapiens
catgttcctcatttc

SEQ ID NO: 862375 - DNA, 15 bp, Homo sapiens
atgttcctcatttcc

SEQ ID NO: 862376 - DNA, 15 bp, Homo sapiens
tgttcctcatttcca

SEQ ID NO: 862377 - DNA, 15 bp, Homo sapiens
gttcctcatttccat

SEQ ID NO: 862378 - DNA, 15 bp, Homo sapiens
ttcctcatttccatc

SEQ ID NO: 862379 - DNA, 15 bp, Homo sapiens
tcctcatttccatct

SEQ ID NO: 862380 - DNA, 15 bp, Homo sapiens
cctcatttccatctg

SEQ ID NO: 862381 - DNA, 15 bp, Homo sapiens
ctcatttccatctga

SEQ ID NO: 862382 - DNA, 15 bp, Homo sapiens
tcatttccatctgaa

SEQ ID NO: 862383 - DNA, 15 bp, Homo sapiens
catttccatctgaaa

SEQ ID NO: 862384 - DNA, 15 bp, Homo sapiens
atttccatctgaaaa

SEQ ID NO: 862385 - DNA, 15 bp, Homo sapiens
tttccatctgaaaac

SEQ ID NO: 862386 - DNA, 15 bp, Homo sapiens
ttccatctgaaaacc

SEQ ID NO: 862387 - DNA, 15 bp, Homo sapiens
tccatctgaaaaccc

SEQ ID NO: 862388 - DNA, 15 bp, Homo sapiens
ccatctgaaaaccca

SEQ ID NO: 862389 - DNA, 15 bp, Homo sapiens
catctgaaaacccat

SEQ ID NO: 862390 - DNA, 15 bp, Homo sapiens
atctgaaaacccatc

SEQ ID NO: 862391 - DNA, 15 bp, Homo sapiens
tctgaaaacccatca

SEQ ID NO: 862392 - DNA, 15 bp, Homo sapiens
ctgaaaacccatcag

SEQ ID NO: 862393 - DNA, 15 bp, Homo sapiens
tgaaaacccatcaga

SEQ ID NO: 862394 - DNA, 15 bp, Homo sapiens
gaaaacccatcagat

SEQ ID NO: 862395 - DNA, 15 bp, Homo sapiens
aaaacccatcagatt

SEQ ID NO: 862396 - DNA, 15 bp, Homo sapiens
aaacccatcagattg

SEQ ID NO: 862397 - DNA, 15 bp, Homo sapiens
aacccatcagattgg

SEQ ID NO: 862398 - DNA, 15 bp, Homo sapiens
acccatcagattggc

SEQ ID NO: 862399 - DNA, 15 bp, Homo sapiens
cccatcagattggcc

SEQ ID NO: 862400 - DNA, 15 bp, Homo sapiens
ccatcagattggcct

SEQ ID NO: 862401 - DNA, 15 bp, Homo sapiens
catcagattggcctt

SEQ ID NO: 862402 - DNA, 15 bp, Homo sapiens
atcagattggccttt

SEQ ID NO: 862403 - DNA, 15 bp, Homo sapiens
tcagattggccttta

SEQ ID NO: 862404 - DNA, 15 bp, Homo sapiens
cagattggcctttac

SEQ ID NO: 862405 - DNA, 15 bp, Homo sapiens
agattggcctttacc

SEQ ID NO: 862406 - DNA, 15 bp, Homo sapiens
gattggcctttaccg

SEQ ID NO: 862407 - DNA, 15 bp, Homo sapiens
attggcctttaccgt

SEQ ID NO: 862408 - DNA, 15 bp, Homo sapiens
ttggcctttaccgtc

SEQ ID NO: 862409 - DNA, 15 bp, Homo sapiens
tggcctttaccgtcc

SEQ ID NO: 862410 - DNA, 15 bp, Homo sapiens
ggcctttaccgtcca

SEQ ID NO: 862411 - DNA, 15 bp, Homo sapiens
gcctttaccgtccat

SEQ ID NO: 862412 - DNA, 15 bp, Homo sapiens
cctttaccgtccata

SEQ ID NO: 862413 - DNA, 15 bp, Homo sapiens
ctttaccgtccatat

SEQ ID NO: 862414 - DNA, 15 bp, Homo sapiens
tttaccgtccatatt

SEQ ID NO: 862415 - DNA, 15 bp, Homo sapiens
ttaccgtccatattt

SEQ ID NO: 862416 - DNA, 15 bp, Homo sapiens
taccgtccatatttc

SEQ ID NO: 862417 - DNA, 15 bp, Homo sapiens
accgtccatatttct

SEQ ID NO: 862418 - DNA, 15 bp, Homo sapiens
ccgtccatatttctg

SEQ ID NO: 862419 - DNA, 15 bp, Homo sapiens
cgtccatatttctgg

SEQ ID NO: 862420 - DNA, 15 bp, Homo sapiens
gtccatatttctggg

SEQ ID NO: 862421 - DNA, 15 bp, Homo sapiens
tccatatttctggga

SEQ ID NO: 862422 - DNA, 15 bp, Homo sapiens
ccatatttctgggaa

SEQ ID NO: 862423 - DNA, 15 bp, Homo sapiens
catatttctgggaac

SEQ ID NO: 862424 - DNA, 15 bp, Homo sapiens
atatttctgggaaca

SEQ ID NO: 862425 - DNA, 15 bp, Homo sapiens
tatttctgggaacat

SEQ ID NO: 862426 - DNA, 15 bp, Homo sapiens
atttctgggaacatt

SEQ ID NO: 862427 - DNA, 15 bp, Homo sapiens
tttctgggaacattc

SEQ ID NO: 862428 - DNA, 15 bp, Homo sapiens
ttctgggaacattct

SEQ ID NO: 862429 - DNA, 15 bp, Homo sapiens
tctgggaacattctg

SEQ ID NO: 862430 - DNA, 15 bp, Homo sapiens
ctgggaacattctgc

SEQ ID NO: 862431 - DNA, 15 bp, Homo sapiens
tgggaacattctgct

SEQ ID NO: 862432 - DNA, 15 bp, Homo sapiens
gggaacattctgctc

SEQ ID NO: 862433 - DNA, 15 bp, Homo sapiens
ggaacattctgctca

SEQ ID NO: 862434 - DNA, 15 bp, Homo sapiens
gaacattctgctcat

SEQ ID NO: 862435 - DNA, 15 bp, Homo sapiens
aacattctgctcatg

SEQ ID NO: 862436 - DNA, 15 bp, Homo sapiens
acattctgctcatga

SEQ ID NO: 862437 - DNA, 15 bp, Homo sapiens
cattctgctcatgac

SEQ ID NO: 862438 - DNA, 15 bp, Homo sapiens
attctgctcatgacc

SEQ ID NO: 862439 - DNA, 15 bp, Homo sapiens
ttctgctcatgacca

SEQ ID NO: 862440 - DNA, 15 bp, Homo sapiens
tctgctcatgaccac

SEQ ID NO: 862441 - DNA, 15 bp, Homo sapiens
ctgctcatgaccact

SEQ ID NO: 862442 - DNA, 15 bp, Homo sapiens
tgctcatgaccactt

SEQ ID NO: 862443 - DNA, 15 bp, Homo sapiens
gctcatgaccactta

SEQ ID NO: 862444 - DNA, 15 bp, Homo sapiens
ctcatgaccacttag

SEQ ID NO: 862445 - DNA, 15 bp, Homo sapiens
tcatgaccacttagg

SEQ ID NO: 862446 - DNA, 15 bp, Homo sapiens
catgaccacttaggt

SEQ ID NO: 862447 - DNA, 15 bp, Homo sapiens
atgaccacttaggta

SEQ ID NO: 862448 - DNA, 15 bp, Homo sapiens
tgaccacttaggtat

SEQ ID NO: 862449 - DNA, 15 bp, Homo sapiens
gaccacttaggtatt

SEQ ID NO: 862450 - DNA, 15 bp, Homo sapiens
accacttaggtattc

SEQ ID NO: 862451 - DNA, 15 bp, Homo sapiens
ccacttaggtattcg

SEQ ID NO: 862452 - DNA, 15 bp, Homo sapiens
cacttaggtattcgg

SEQ ID NO: 862453 - DNA, 15 bp, Homo sapiens
acttaggtattcggt

SEQ ID NO: 862454 - DNA, 15 bp, Homo sapiens
cttaggtattcggta

SEQ ID NO: 862455 - DNA, 15 bp, Homo sapiens
ttaggtattcggtaa

SEQ ID NO: 862456 - DNA, 15 bp, Homo sapiens
taggtattcggtaag

SEQ ID NO: 862457 - DNA, 15 bp, Homo sapiens
aggtattcggtaaga

SEQ ID NO: 862458 - DNA, 15 bp, Homo sapiens
ggtattcggtaagaa

SEQ ID NO: 862459 - DNA, 15 bp, Homo sapiens
gtattcggtaagaag

SEQ ID NO: 862460 - DNA, 15 bp, Homo sapiens
tattcggtaagaaga

SEQ ID NO: 862461 - DNA, 15 bp, Homo sapiens
attcggtaagaagat

SEQ ID NO: 862462 - DNA, 15 bp, Homo sapiens
ttcggtaagaagata

SEQ ID NO: 862463 - DNA, 15 bp, Homo sapiens
tcggtaagaagatag

SEQ ID NO: 862464 - DNA, 15 bp, Homo sapiens
cggtaagaagatagt

SEQ ID NO: 862465 - DNA, 15 bp, Homo sapiens
ggtaagaagatagta

SEQ ID NO: 862466 - DNA, 15 bp, Homo sapiens
gtaagaagatagtag

SEQ ID NO: 862467 - DNA, 15 bp, Homo sapiens
taagaagatagtagc

SEQ ID NO: 862468 - DNA, 15 bp, Homo sapiens
aagaagatagtagct

SEQ ID NO: 862469 - DNA, 15 bp, Homo sapiens
agaagatagtagctt

SEQ ID NO: 862470 - DNA, 15 bp, Homo sapiens
gaagatagtagcttt

SEQ ID NO: 862471 - DNA, 15 bp, Homo sapiens
aagatagtagctttc

SEQ ID NO: 862472 - DNA, 15 bp, Homo sapiens
agatagtagctttct

SEQ ID NO: 862473 - DNA, 15 bp, Homo sapiens
gatagtagctttctc

SEQ ID NO: 862474 - DNA, 15 bp, Homo sapiens
atagtagctttctct

SEQ ID NO: 862475 - DNA, 15 bp, Homo sapiens
tagtagctttctcta

SEQ ID NO: 862476 - DNA, 15 bp, Homo sapiens
agtagctttctctat

SEQ ID NO: 862477 - DNA, 15 bp, Homo sapiens
gtagctttctctata

SEQ ID NO: 862478 - DNA, 15 bp, Homo sapiens
tagctttctctatag

SEQ ID NO: 862479 - DNA, 15 bp, Homo sapiens
agctttctctatagc

SEQ ID NO: 862480 - DNA, 15 bp, Homo sapiens
gctttctctatagct

SEQ ID NO: 862481 - DNA, 15 bp, Homo sapiens
ctttctctatagctc

SEQ ID NO: 862482 - DNA, 15 bp, Homo sapiens
tttctctatagctct

SEQ ID NO: 862483 - DNA, 15 bp, Homo sapiens
ttctctatagctctc

SEQ ID NO: 862484 - DNA, 15 bp, Homo sapiens
tctctatagctctcc

SEQ ID NO: 862485 - DNA, 15 bp, Homo sapiens
ctctatagctctcct

SEQ ID NO: 862486 - DNA, 15 bp, Homo sapiens
tctatagctctcctc

SEQ ID NO: 862487 - DNA, 15 bp, Homo sapiens
ctatagctctcctcc

SEQ ID NO: 862488 - DNA, 15 bp, Homo sapiens
tatagctctcctcct

SEQ ID NO: 862489 - DNA, 15 bp, Homo sapiens
atagctctcctcctc

SEQ ID NO: 862490 - DNA, 15 bp, Homo sapiens
tagctctcctcctct

SEQ ID NO: 862491 - DNA, 15 bp, Homo sapiens
agctctcctcctctc

SEQ ID NO: 862492 - DNA, 15 bp, Homo sapiens
gctctcctcctctct

SEQ ID NO: 862493 - DNA, 15 bp, Homo sapiens
ctctcctcctctctg

SEQ ID NO: 862494 - DNA, 15 bp, Homo sapiens
tctcctcctctctgg

SEQ ID NO: 862495 - DNA, 15 bp, Homo sapiens
ctcctcctctctgga

SEQ ID NO: 862496 - DNA, 15 bp, Homo sapiens
tcctcctctctggag

SEQ ID NO: 862497 - DNA, 15 bp, Homo sapiens
cctcctctctggagc

SEQ ID NO: 862498 - DNA, 15 bp, Homo sapiens
ctcctctctggagcc

SEQ ID NO: 862499 - DNA, 15 bp, Homo sapiens
tcctctctggagccc

SEQ ID NO: 862500 - DNA, 15 bp, Homo sapiens
cctctctggagccct

SEQ ID NO: 862501 - DNA, 15 bp, Homo sapiens
ctctctggagccctc

SEQ ID NO: 862502 - DNA, 15 bp, Homo sapiens
tctctggagccctca

SEQ ID NO: 862503 - DNA, 15 bp, Homo sapiens
ctctggagccctcac

SEQ ID NO: 862504 - DNA, 15 bp, Homo sapiens
tctggagccctcacc

SEQ ID NO: 862505 - DNA, 15 bp, Homo sapiens
ctggagccctcacca

SEQ ID NO: 862506 - DNA, 15 bp, Homo sapiens
tggagccctcaccag

SEQ ID NO: 862507 - DNA, 15 bp, Homo sapiens
ggagccctcaccaga

SEQ ID NO: 862508 - DNA, 15 bp, Homo sapiens
gagccctcaccagaa

SEQ ID NO: 862509 - DNA, 15 bp, Homo sapiens
agccctcaccagaat

SEQ ID NO: 862510 - DNA, 15 bp, Homo sapiens
gccctcaccagaatg

SEQ ID NO: 862511 - DNA, 15 bp, Homo sapiens
ccctcaccagaatgg

SEQ ID NO: 862512 - DNA, 15 bp, Homo sapiens
cctcaccagaatggc

SEQ ID NO: 862513 - DNA, 15 bp, Homo sapiens
ctcaccagaatggcc

SEQ ID NO: 862514 - DNA, 15 bp, Homo sapiens
tcaccagaatggcct

SEQ ID NO: 862515 - DNA, 15 bp, Homo sapiens
caccagaatggcctt

SEQ ID NO: 862516 - DNA, 15 bp, Homo sapiens
accagaatggccttt

SEQ ID NO: 862517 - DNA, 15 bp, Homo sapiens
ccagaatggccttta

SEQ ID NO: 862518 - DNA, 15 bp, Homo sapiens
cagaatggcctttaa

SEQ ID NO: 862519 - DNA, 15 bp, Homo sapiens
agaatggcctttaat

SEQ ID NO: 862520 - DNA, 15 bp, Homo sapiens
gaatggcctttaatt

SEQ ID NO: 862521 - DNA, 15 bp, Homo sapiens
aatggcctttaattg

SEQ ID NO: 862522 - DNA, 15 bp, Homo sapiens
atggcctttaattgt

SEQ ID NO: 862523 - DNA, 15 bp, Homo sapiens
tggcctttaattgtc

SEQ ID NO: 862524 - DNA, 15 bp, Homo sapiens
ggcctttaattgtcc

SEQ ID NO: 862525 - DNA, 15 bp, Homo sapiens
gcctttaattgtcca

SEQ ID NO: 862526 - DNA, 15 bp, Homo sapiens
cctttaattgtccat

SEQ ID NO: 862527 - DNA, 15 bp, Homo sapiens
ctttaattgtccatt

SEQ ID NO: 862528 - DNA, 15 bp, Homo sapiens
tttaattgtccattc

SEQ ID NO: 862529 - DNA, 15 bp, Homo sapiens
ttaattgtccattca

SEQ ID NO: 862530 - DNA, 15 bp, Homo sapiens
taattgtccattcac

SEQ ID NO: 862531 - DNA, 15 bp, Homo sapiens
aattgtccattcaca

SEQ ID NO: 862532 - DNA, 15 bp, Homo sapiens
attgtccattcacag

SEQ ID NO: 862533 - DNA, 15 bp, Homo sapiens
ttgtccattcacagc

SEQ ID NO: 862534 - DNA, 15 bp, Homo sapiens
tgtccattcacagca

SEQ ID NO: 862535 - DNA, 15 bp, Homo sapiens
gtccattcacagcaa

SEQ ID NO: 862536 - DNA, 15 bp, Homo sapiens
tccattcacagcaat

SEQ ID NO: 862537 - DNA, 15 bp, Homo sapiens
ccattcacagcaatg

SEQ ID NO: 862538 - DNA, 15 bp, Homo sapiens
cattcacagcaatgt

SEQ ID NO: 862539 - DNA, 15 bp, Homo sapiens
attcacagcaatgta

SEQ ID NO: 862540 - DNA, 15 bp, Homo sapiens
ttcacagcaatgtag

SEQ ID NO: 862541 - DNA, 15 bp, Homo sapiens
tcacagcaatgtagg

SEQ ID NO: 862542 - DNA, 15 bp, Homo sapiens
cacagcaatgtaggc

SEQ ID NO: 862543 - DNA, 15 bp, Homo sapiens
acagcaatgtaggct

SEQ ID NO: 862544 - DNA, 15 bp, Homo sapiens
cagcaatgtaggctt

SEQ ID NO: 862545 - DNA, 15 bp, Homo sapiens
agcaatgtaggcttt

SEQ ID NO: 862546 - DNA, 15 bp, Homo sapiens
gcaatgtaggctttt

SEQ ID NO: 862547 - DNA, 15 bp, Homo sapiens
caatgtaggcttttt

SEQ ID NO: 862548 - DNA, 15 bp, Homo sapiens
aatgtaggctttttc

SEQ ID NO: 862549 - DNA, 15 bp, Homo sapiens
atgtaggctttttct

SEQ ID NO: 862550 - DNA, 15 bp, Homo sapiens
tgtaggctttttcta

SEQ ID NO: 862551 - DNA, 15 bp, Homo sapiens
gtaggctttttctag

SEQ ID NO: 862552 - DNA, 15 bp, Homo sapiens
taggctttttctagc

SEQ ID NO: 862553 - DNA, 15 bp, Homo sapiens
aggctttttctagca

SEQ ID NO: 862554 - DNA, 15 bp, Homo sapiens
ggctttttctagcat

SEQ ID NO: 862555 - DNA, 15 bp, Homo sapiens
gctttttctagcatg

SEQ ID NO: 862556 - DNA, 15 bp, Homo sapiens
ctttttctagcatgt

SEQ ID NO: 862557 - DNA, 15 bp, Homo sapiens
tttttctagcatgta

SEQ ID NO: 862558 - DNA, 15 bp, Homo sapiens
ttttctagcatgtac

SEQ ID NO: 862559 - DNA, 15 bp, Homo sapiens
tttctagcatgtacc

SEQ ID NO: 862560 - DNA, 15 bp, Homo sapiens
ttctagcatgtacct

SEQ ID NO: 862561 - DNA, 15 bp, Homo sapiens
tctagcatgtacctg

SEQ ID NO: 862562 - DNA, 15 bp, Homo sapiens
ctagcatgtacctga

SEQ ID NO: 862563 - DNA, 15 bp, Homo sapiens
tagcatgtacctgaa

SEQ ID NO: 862564 - DNA, 15 bp, Homo sapiens
agcatgtacctgaaa

SEQ ID NO: 862565 - DNA, 15 bp, Homo sapiens
gcatgtacctgaaaa

SEQ ID NO: 862566 - DNA, 15 bp, Homo sapiens
catgtacctgaaaac

SEQ ID NO: 862567 - DNA, 15 bp, Homo sapiens
atgtacctgaaaact

SEQ ID NO: 862568 - DNA, 15 bp, Homo sapiens
tgtacctgaaaactc

SEQ ID NO: 862569 - DNA, 15 bp, Homo sapiens
gtacctgaaaactct

SEQ ID NO: 862570 - DNA, 15 bp, Homo sapiens
tacctgaaaactctt

SEQ ID NO: 862571 - DNA, 15 bp, Homo sapiens
acctgaaaactcttc

SEQ ID NO: 862572 - DNA, 15 bp, Homo sapiens
cctgaaaactcttcc

SEQ ID NO: 862573 - DNA, 15 bp, Homo sapiens
ctgaaaactcttcca

SEQ ID NO: 862574 - DNA, 15 bp, Homo sapiens
tgaaaactcttccag

SEQ ID NO: 862575 - DNA, 15 bp, Homo sapiens
gaaaactcttccagc

SEQ ID NO: 862576 - DNA, 15 bp, Homo sapiens
aaaactcttccagcc

SEQ ID NO: 862577 - DNA, 15 bp, Homo sapiens
aaactcttccagcct

SEQ ID NO: 862578 - DNA, 15 bp, Homo sapiens
aactcttccagcctc

SEQ ID NO: 862579 - DNA, 15 bp, Homo sapiens
actcttccagcctct

SEQ ID NO: 862580 - DNA, 15 bp, Homo sapiens
ctcttccagcctcta

SEQ ID NO: 862581 - DNA, 15 bp, Homo sapiens
tcttccagcctctac

SEQ ID NO: 862582 - DNA, 15 bp, Homo sapiens
cttccagcctctact

SEQ ID NO: 862583 - DNA, 15 bp, Homo sapiens
ttccagcctctactc

SEQ ID NO: 862584 - DNA, 15 bp, Homo sapiens
tccagcctctactca

SEQ ID NO: 862585 - DNA, 15 bp, Homo sapiens
ccagcctctactcat

SEQ ID NO: 862586 - DNA, 15 bp, Homo sapiens
cagcctctactcatt

SEQ ID NO: 862587 - DNA, 15 bp, Homo sapiens
agcctctactcatta

SEQ ID NO: 862588 - DNA, 15 bp, Homo sapiens
gcctctactcattac

SEQ ID NO: 862589 - DNA, 15 bp, Homo sapiens
cctctactcattacc

SEQ ID NO: 862590 - DNA, 15 bp, Homo sapiens
ctctactcattacct

SEQ ID NO: 862591 - DNA, 15 bp, Homo sapiens
tctactcattacctt

SEQ ID NO: 862592 - DNA, 15 bp, Homo sapiens
ctactcattaccttg

SEQ ID NO: 862593 - DNA, 15 bp, Homo sapiens
tactcattaccttgt

SEQ ID NO: 862594 - DNA, 15 bp, Homo sapiens
actcattaccttgtt

SEQ ID NO: 862595 - DNA, 15 bp, Homo sapiens
ctcattaccttgttc

SEQ ID NO: 862596 - DNA, 15 bp, Homo sapiens
tcattaccttgttcc

SEQ ID NO: 862597 - DNA, 15 bp, Homo sapiens
cattaccttgttcca

SEQ ID NO: 862598 - DNA, 15 bp, Homo sapiens
attaccttgttccaa

SEQ ID NO: 862599 - DNA, 15 bp, Homo sapiens
ttaccttgttccaaa

SEQ ID NO: 862600 - DNA, 15 bp, Homo sapiens
taccttgttccaaag

SEQ ID NO: 862601 - DNA, 15 bp, Homo sapiens
accttgttccaaagc

SEQ ID NO: 862602 - DNA, 15 bp, Homo sapiens
ccttgttccaaagct

SEQ ID NO: 862603 - DNA, 15 bp, Homo sapiens
cttgttccaaagctg

SEQ ID NO: 862604 - DNA, 15 bp, Homo sapiens
ttgttccaaagctgc

SEQ ID NO: 862605 - DNA, 15 bp, Homo sapiens
tgttccaaagctgct

SEQ ID NO: 862606 - DNA, 15 bp, Homo sapiens
gttccaaagctgctt

SEQ ID NO: 862607 - DNA, 15 bp, Homo sapiens
ttccaaagctgcttc

SEQ ID NO: 862608 - DNA, 15 bp, Homo sapiens
tccaaagctgcttcc

SEQ ID NO: 862609 - DNA, 15 bp, Homo sapiens
ccaaagctgcttcca

SEQ ID NO: 862610 - DNA, 15 bp, Homo sapiens
caaagctgcttccac

SEQ ID NO: 862611 - DNA, 15 bp, Homo sapiens
aaagctgcttccaca

SEQ ID NO: 862612 - DNA, 15 bp, Homo sapiens
aagctgcttccacat

SEQ ID NO: 862613 - DNA, 15 bp, Homo sapiens
agctgcttccacatt

SEQ ID NO: 862614 - DNA, 15 bp, Homo sapiens
gctgcttccacattg

SEQ ID NO: 862615 - DNA, 15 bp, Homo sapiens
ctgcttccacattga

SEQ ID NO: 862616 - DNA, 15 bp, Homo sapiens
tgcttccacattgag

SEQ ID NO: 862617 - DNA, 15 bp, Homo sapiens
gcttccacattgagt

SEQ ID NO: 862618 - DNA, 15 bp, Homo sapiens
cttccacattgagta

SEQ ID NO: 862619 - DNA, 15 bp, Homo sapiens
ttccacattgagtat

SEQ ID NO: 862620 - DNA, 15 bp, Homo sapiens
tccacattgagtatt

SEQ ID NO: 862621 - DNA, 15 bp, Homo sapiens
ccacattgagtattt

SEQ ID NO: 862622 - DNA, 15 bp, Homo sapiens
cacattgagtatttg

SEQ ID NO: 862623 - DNA, 15 bp, Homo sapiens
acattgagtatttgt

SEQ ID NO: 862624 - DNA, 15 bp, Homo sapiens
cattgagtatttgtt

SEQ ID NO: 862625 - DNA, 15 bp, Homo sapiens
attgagtatttgtta

SEQ ID NO: 862626 - DNA, 15 bp, Homo sapiens
ttgagtatttgttac

SEQ ID NO: 862627 - DNA, 15 bp, Homo sapiens
tgagtatttgttaca

SEQ ID NO: 862628 - DNA, 15 bp, Homo sapiens
gagtatttgttacag

SEQ ID NO: 862629 - DNA, 15 bp, Homo sapiens
agtatttgttacagc

SEQ ID NO: 862630 - DNA, 15 bp, Homo sapiens
gtatttgttacagca

SEQ ID NO: 862631 - DNA, 15 bp, Homo sapiens
tatttgttacagcag

SEQ ID NO: 862632 - DNA, 15 bp, Homo sapiens
atttgttacagcagt

SEQ ID NO: 862633 - DNA, 15 bp, Homo sapiens
tttgttacagcagta

SEQ ID NO: 862634 - DNA, 15 bp, Homo sapiens
ttgttacagcagtac

SEQ ID NO: 862635 - DNA, 15 bp, Homo sapiens
tgttacagcagtacc

SEQ ID NO: 862636 - DNA, 15 bp, Homo sapiens
gttacagcagtaccc

SEQ ID NO: 862637 - DNA, 15 bp, Homo sapiens
ttacagcagtaccca

SEQ ID NO: 862638 - DNA, 15 bp, Homo sapiens
tacagcagtacccag

SEQ ID NO: 862639 - DNA, 15 bp, Homo sapiens
acagcagtacccaga

SEQ ID NO: 862640 - DNA, 15 bp, Homo sapiens
cagcagtacccagat

SEQ ID NO: 862641 - DNA, 15 bp, Homo sapiens
agcagtacccagatc

SEQ ID NO: 862642 - DNA, 15 bp, Homo sapiens
gcagtacccagatcc

SEQ ID NO: 862643 - DNA, 15 bp, Homo sapiens
cagtacccagatccc

SEQ ID NO: 862644 - DNA, 15 bp, Homo sapiens
agtacccagatccca

SEQ ID NO: 862645 - DNA, 15 bp, Homo sapiens
gtacccagatcccag

SEQ ID NO: 862646 - DNA, 15 bp, Homo sapiens
tacccagatcccagt

SEQ ID NO: 862647 - DNA, 15 bp, Homo sapiens
acccagatcccagta

SEQ ID NO: 862648 - DNA, 15 bp, Homo sapiens
cccagatcccagtac

SEQ ID NO: 862649 - DNA, 15 bp, Homo sapiens
ccagatcccagtacc

SEQ ID NO: 862650 - DNA, 15 bp, Homo sapiens
cagatcccagtacca

SEQ ID NO: 862651 - DNA, 15 bp, Homo sapiens
agatcccagtaccaa

SEQ ID NO: 862652 - DNA, 15 bp, Homo sapiens
gatcccagtaccaat

SEQ ID NO: 862653 - DNA, 15 bp, Homo sapiens
atcccagtaccaata

SEQ ID NO: 862654 - DNA, 15 bp, Homo sapiens
tcccagtaccaatat

SEQ ID NO: 862655 - DNA, 15 bp, Homo sapiens
cccagtaccaatatt

SEQ ID NO: 862656 - DNA, 15 bp, Homo sapiens
ccagtaccaatattc

SEQ ID NO: 862657 - DNA, 15 bp, Homo sapiens
cagtaccaatattct

SEQ ID NO: 862658 - DNA, 15 bp, Homo sapiens
agtaccaatattctg

SEQ ID NO: 862659 - DNA, 15 bp, Homo sapiens
gtaccaatattctgt

SEQ ID NO: 862660 - DNA, 15 bp, Homo sapiens
taccaatattctgtc

SEQ ID NO: 862661 - DNA, 15 bp, Homo sapiens
accaatattctgtct

SEQ ID NO: 862662 - DNA, 15 bp, Homo sapiens
ccaatattctgtctt

SEQ ID NO: 862663 - DNA, 15 bp, Homo sapiens
caatattctgtctta

SEQ ID NO: 862664 - DNA, 15 bp, Homo sapiens
aatattctgtcttag

SEQ ID NO: 862665 - DNA, 15 bp, Homo sapiens
atattctgtcttagt

SEQ ID NO: 862666 - DNA, 15 bp, Homo sapiens
tattctgtcttagtc

SEQ ID NO: 862667 - DNA, 15 bp, Homo sapiens
attctgtcttagtcc

SEQ ID NO: 862668 - DNA, 15 bp, Homo sapiens
ttctgtcttagtcca

SEQ ID NO: 862669 - DNA, 15 bp, Homo sapiens
tctgtcttagtccat

SEQ ID NO: 862670 - DNA, 15 bp, Homo sapiens
ctgtcttagtccatt

SEQ ID NO: 862671 - DNA, 15 bp, Homo sapiens
tgtcttagtccattg

SEQ ID NO: 862672 - DNA, 15 bp, Homo sapiens
gtcttagtccattgg

SEQ ID NO: 862673 - DNA, 15 bp, Homo sapiens
tcttagtccattggg

SEQ ID NO: 862674 - DNA, 15 bp, Homo sapiens
cttagtccattgggg

SEQ ID NO: 862675 - DNA, 15 bp, Homo sapiens
ttagtccattggggc

SEQ ID NO: 862676 - DNA, 15 bp, Homo sapiens
tagtccattggggct

SEQ ID NO: 862677 - DNA, 15 bp, Homo sapiens
agtccattggggcta

SEQ ID NO: 862678 - DNA, 15 bp, Homo sapiens
gtccattggggctac

SEQ ID NO: 862679 - DNA, 15 bp, Homo sapiens
tccattggggctact

SEQ ID NO: 862680 - DNA, 15 bp, Homo sapiens
ccattggggctacta

SEQ ID NO: 862681 - DNA, 15 bp, Homo sapiens
cattggggctactac

SEQ ID NO: 862682 - DNA, 15 bp, Homo sapiens
attggggctactaca

SEQ ID NO: 862683 - DNA, 15 bp, Homo sapiens
ttggggctactacac

SEQ ID NO: 862684 - DNA, 15 bp, Homo sapiens
tggggctactacacg

SEQ ID NO: 862685 - DNA, 15 bp, Homo sapiens
ggggctactacacga

SEQ ID NO: 862686 - DNA, 15 bp, Homo sapiens
gggctactacacgat

SEQ ID NO: 862687 - DNA, 15 bp, Homo sapiens
ggctactacacgatg

SEQ ID NO: 862688 - DNA, 15 bp, Homo sapiens
gctactacacgatgt

SEQ ID NO: 862689 - DNA, 15 bp, Homo sapiens
ctactacacgatgtc

SEQ ID NO: 862690 - DNA, 15 bp, Homo sapiens
tactacacgatgtct

SEQ ID NO: 862691 - DNA, 15 bp, Homo sapiens
actacacgatgtctt

SEQ ID NO: 862692 - DNA, 15 bp, Homo sapiens
ctacacgatgtctta

SEQ ID NO: 862693 - DNA, 15 bp, Homo sapiens
tacacgatgtcttat

SEQ ID NO: 862694 - DNA, 15 bp, Homo sapiens
acacgatgtcttata

SEQ ID NO: 862695 - DNA, 15 bp, Homo sapiens
cacgatgtcttataa

SEQ ID NO: 862696 - DNA, 15 bp, Homo sapiens
acgatgtcttataaa

SEQ ID NO: 862697 - DNA, 15 bp, Homo sapiens
cgatgtcttataaac

SEQ ID NO: 862698 - DNA, 15 bp, Homo sapiens
gatgtcttataaaca

SEQ ID NO: 862699 - DNA, 15 bp, Homo sapiens
atgtcttataaacaa

SEQ ID NO: 862700 - DNA, 15 bp, Homo sapiens
tgtcttataaacaac

SEQ ID NO: 862701 - DNA, 15 bp, Homo sapiens
gtcttataaacaaca

SEQ ID NO: 862702 - DNA, 15 bp, Homo sapiens
tcttataaacaacag

SEQ ID NO: 862703 - DNA, 15 bp, Homo sapiens
cttataaacaacagt

SEQ ID NO: 862704 - DNA, 15 bp, Homo sapiens
ttataaacaacagta

SEQ ID NO: 862705 - DNA, 15 bp, Homo sapiens
tataaacaacagtaa

SEQ ID NO: 862706 - DNA, 15 bp, Homo sapiens
ataaacaacagtaaa

SEQ ID NO: 862707 - DNA, 15 bp, Homo sapiens
taaacaacagtaaaa

SEQ ID NO: 862708 - DNA, 15 bp, Homo sapiens
aaacaacagtaaaat

SEQ ID NO: 862709 - DNA, 15 bp, Homo sapiens
aacaacagtaaaatt

SEQ ID NO: 862710 - DNA, 15 bp, Homo sapiens
acaacagtaaaattt

SEQ ID NO: 862711 - DNA, 15 bp, Homo sapiens
caacagtaaaattta

SEQ ID NO: 862712 - DNA, 15 bp, Homo sapiens
aacagtaaaatttat

SEQ ID NO: 862713 - DNA, 15 bp, Homo sapiens
acagtaaaatttatt

SEQ ID NO: 862714 - DNA, 15 bp, Homo sapiens
cagtaaaatttattt

SEQ ID NO: 862715 - DNA, 15 bp, Homo sapiens
agtaaaatttatttt

SEQ ID NO: 862716 - DNA, 15 bp, Homo sapiens
gtaaaatttattttt

SEQ ID NO: 862717 - DNA, 15 bp, Homo sapiens
taaaatttatttttc

SEQ ID NO: 862718 - DNA, 15 bp, Homo sapiens
aaaatttatttttca

SEQ ID NO: 862719 - DNA, 15 bp, Homo sapiens
aaatttatttttcac

SEQ ID NO: 862720 - DNA, 15 bp, Homo sapiens
aatttatttttcaca

SEQ ID NO: 862721 - DNA, 15 bp, Homo sapiens
atttatttttcacag

SEQ ID NO: 862722 - DNA, 15 bp, Homo sapiens
tttatttttcacagt

SEQ ID NO: 862723 - DNA, 15 bp, Homo sapiens
ttatttttcacagtt

SEQ ID NO: 862724 - DNA, 15 bp, Homo sapiens
tatttttcacagttg

SEQ ID NO: 862725 - DNA, 15 bp, Homo sapiens
atttttcacagttgt

SEQ ID NO: 862726 - DNA, 15 bp, Homo sapiens
tttttcacagttgtg

SEQ ID NO: 862727 - DNA, 15 bp, Homo sapiens
ttttcacagttgtgg

SEQ ID NO: 862728 - DNA, 15 bp, Homo sapiens
tttcacagttgtgga

SEQ ID NO: 862729 - DNA, 15 bp, Homo sapiens
ttcacagttgtggag

SEQ ID NO: 862730 - DNA, 15 bp, Homo sapiens
tcacagttgtggagg

SEQ ID NO: 862731 - DNA, 15 bp, Homo sapiens
cacagttgtggaggc

SEQ ID NO: 862732 - DNA, 15 bp, Homo sapiens
acagttgtggaggct

SEQ ID NO: 862733 - DNA, 15 bp, Homo sapiens
cagttgtggaggctg

SEQ ID NO: 862734 - DNA, 15 bp, Homo sapiens
agttgtggaggctgg

SEQ ID NO: 862735 - DNA, 15 bp, Homo sapiens
gttgtggaggctggg

SEQ ID NO: 862736 - DNA, 15 bp, Homo sapiens
ttgtggaggctggga

SEQ ID NO: 862737 - DNA, 15 bp, Homo sapiens
tgtggaggctgggaa

SEQ ID NO: 862738 - DNA, 15 bp, Homo sapiens
gtggaggctgggaag

SEQ ID NO: 862739 - DNA, 15 bp, Homo sapiens
tggaggctgggaagt

SEQ ID NO: 862740 - DNA, 15 bp, Homo sapiens
ggaggctgggaagtt

SEQ ID NO: 862741 - DNA, 15 bp, Homo sapiens
gaggctgggaagttc

SEQ ID NO: 862742 - DNA, 15 bp, Homo sapiens
aggctgggaagttca

SEQ ID NO: 862743 - DNA, 15 bp, Homo sapiens
ggctgggaagttcaa

SEQ ID NO: 862744 - DNA, 15 bp, Homo sapiens
gctgggaagttcaaa

SEQ ID NO: 862745 - DNA, 15 bp, Homo sapiens
ctgggaagttcaaaa

SEQ ID NO: 862746 - DNA, 15 bp, Homo sapiens
tgggaagttcaaaat

SEQ ID NO: 862747 - DNA, 15 bp, Homo sapiens
gggaagttcaaaatc

SEQ ID NO: 862748 - DNA, 15 bp, Homo sapiens
ggaagttcaaaatct

SEQ ID NO: 862749 - DNA, 15 bp, Homo sapiens
gaagttcaaaatctg

SEQ ID NO: 862750 - DNA, 15 bp, Homo sapiens
aagttcaaaatctgg

SEQ ID NO: 862751 - DNA, 15 bp, Homo sapiens
agttcaaaatctggt

SEQ ID NO: 862752 - DNA, 15 bp, Homo sapiens
gttcaaaatctggtg

SEQ ID NO: 862753 - DNA, 15 bp, Homo sapiens
ttcaaaatctggtgc

SEQ ID NO: 862754 - DNA, 15 bp, Homo sapiens
tcaaaatctggtgcc

SEQ ID NO: 862755 - DNA, 15 bp, Homo sapiens
caaaatctggtgcca

SEQ ID NO: 862756 - DNA, 15 bp, Homo sapiens
aaaatctggtgccag

SEQ ID NO: 862757 - DNA, 15 bp, Homo sapiens
aaatctggtgccagc

SEQ ID NO: 862758 - DNA, 15 bp, Homo sapiens
aatctggtgccagca

SEQ ID NO: 862759 - DNA, 15 bp, Homo sapiens
atctggtgccagcag

SEQ ID NO: 862760 - DNA, 15 bp, Homo sapiens
tctggtgccagcaga

SEQ ID NO: 862761 - DNA, 15 bp, Homo sapiens
ctggtgccagcagat

SEQ ID NO: 862762 - DNA, 15 bp, Homo sapiens
tggtgccagcagatt

SEQ ID NO: 862763 - DNA, 15 bp, Homo sapiens
ggtgccagcagattt

SEQ ID NO: 862764 - DNA, 15 bp, Homo sapiens
gtgccagcagatttt

SEQ ID NO: 862765 - DNA, 15 bp, Homo sapiens
tgccagcagattttg

SEQ ID NO: 862766 - DNA, 15 bp, Homo sapiens
gccagcagattttgt

SEQ ID NO: 862767 - DNA, 15 bp, Homo sapiens
ccagcagattttgtg

SEQ ID NO: 862768 - DNA, 15 bp, Homo sapiens
cagcagattttgtgt

SEQ ID NO: 862769 - DNA, 15 bp, Homo sapiens
agcagattttgtgtc

SEQ ID NO: 862770 - DNA, 15 bp, Homo sapiens
gcagattttgtgtct

SEQ ID NO: 862771 - DNA, 15 bp, Homo sapiens
cagattttgtgtctg

SEQ ID NO: 862772 - DNA, 15 bp, Homo sapiens
agattttgtgtctgg

SEQ ID NO: 862773 - DNA, 15 bp, Homo sapiens
gattttgtgtctggt

SEQ ID NO: 862774 - DNA, 15 bp, Homo sapiens
attttgtgtctggtg

SEQ ID NO: 862775 - DNA, 15 bp, Homo sapiens
ttttgtgtctggtga

SEQ ID NO: 862776 - DNA, 15 bp, Homo sapiens
tttgtgtctggtgaa

SEQ ID NO: 862777 - DNA, 15 bp, Homo sapiens
ttgtgtctggtgaag

SEQ ID NO: 862778 - DNA, 15 bp, Homo sapiens
tgtgtctggtgaagg

SEQ ID NO: 862779 - DNA, 15 bp, Homo sapiens
gtgtctggtgaaggc

SEQ ID NO: 862780 - DNA, 15 bp, Homo sapiens
tgtctggtgaaggcc

SEQ ID NO: 862781 - DNA, 15 bp, Homo sapiens
gtctggtgaaggcct

SEQ ID NO: 862782 - DNA, 15 bp, Homo sapiens
tctggtgaaggcctt

SEQ ID NO: 862783 - DNA, 15 bp, Homo sapiens
ctggtgaaggccttc

SEQ ID NO: 862784 - DNA, 15 bp, Homo sapiens
tggtgaaggccttct

SEQ ID NO: 862785 - DNA, 15 bp, Homo sapiens
ggtgaaggccttctt

SEQ ID NO: 862786 - DNA, 15 bp, Homo sapiens
gtgaaggccttcttc

SEQ ID NO: 862787 - DNA, 15 bp, Homo sapiens
tgaaggccttcttcc

SEQ ID NO: 862788 - DNA, 15 bp, Homo sapiens
gaaggccttcttcct

SEQ ID NO: 862789 - DNA, 15 bp, Homo sapiens
aaggccttcttcctc

SEQ ID NO: 862790 - DNA, 15 bp, Homo sapiens
aggccttcttcctca

SEQ ID NO: 862791 - DNA, 15 bp, Homo sapiens
ggccttcttcctcac

SEQ ID NO: 862792 - DNA, 15 bp, Homo sapiens
gccttcttcctcaca

SEQ ID NO: 862793 - DNA, 15 bp, Homo sapiens
ccttcttcctcacag

SEQ ID NO: 862794 - DNA, 15 bp, Homo sapiens
cttcttcctcacaga

SEQ ID NO: 862795 - DNA, 15 bp, Homo sapiens
ttcttcctcacagat

SEQ ID NO: 862796 - DNA, 15 bp, Homo sapiens
tcttcctcacagatg

SEQ ID NO: 862797 - DNA, 15 bp, Homo sapiens
cttcctcacagatgg

SEQ ID NO: 862798 - DNA, 15 bp, Homo sapiens
ttcctcacagatggc

SEQ ID NO: 862799 - DNA, 15 bp, Homo sapiens
tcctcacagatggct

SEQ ID NO: 862800 - DNA, 15 bp, Homo sapiens
cctcacagatggctg

SEQ ID NO: 862801 - DNA, 15 bp, Homo sapiens
ctcacagatggctgt

SEQ ID NO: 862802 - DNA, 15 bp, Homo sapiens
tcacagatggctgtg

SEQ ID NO: 862803 - DNA, 15 bp, Homo sapiens
cacagatggctgtgt

SEQ ID NO: 862804 - DNA, 15 bp, Homo sapiens
acagatggctgtgtt

SEQ ID NO: 862805 - DNA, 15 bp, Homo sapiens
cagatggctgtgttc

SEQ ID NO: 862806 - DNA, 15 bp, Homo sapiens
agatggctgtgttct

SEQ ID NO: 862807 - DNA, 15 bp, Homo sapiens
gatggctgtgttctc

SEQ ID NO: 862808 - DNA, 15 bp, Homo sapiens
atggctgtgttctca

SEQ ID NO: 862809 - DNA, 15 bp, Homo sapiens
tggctgtgttctcac

SEQ ID NO: 862810 - DNA, 15 bp, Homo sapiens
ggctgtgttctcact

SEQ ID NO: 862811 - DNA, 15 bp, Homo sapiens
gctgtgttctcactg

SEQ ID NO: 862812 - DNA, 15 bp, Homo sapiens
ctgtgttctcactgt

SEQ ID NO: 862813 - DNA, 15 bp, Homo sapiens
tgtgttctcactgtg

SEQ ID NO: 862814 - DNA, 15 bp, Homo sapiens
gtgttctcactgtgt

SEQ ID NO: 862815 - DNA, 15 bp, Homo sapiens
tgttctcactgtgtt

SEQ ID NO: 862816 - DNA, 15 bp, Homo sapiens
gttctcactgtgttg

SEQ ID NO: 862817 - DNA, 15 bp, Homo sapiens
ttctcactgtgttgt

SEQ ID NO: 862818 - DNA, 15 bp, Homo sapiens
tctcactgtgttgtt

SEQ ID NO: 862819 - DNA, 15 bp, Homo sapiens
ctcactgtgttgtta

SEQ ID NO: 862820 - DNA, 15 bp, Homo sapiens
tcactgtgttgttac

SEQ ID NO: 862821 - DNA, 15 bp, Homo sapiens
cactgtgttgttaca

SEQ ID NO: 862822 - DNA, 15 bp, Homo sapiens
actgtgttgttacat

SEQ ID NO: 862823 - DNA, 15 bp, Homo sapiens
ctgtgttgttacatg

SEQ ID NO: 862824 - DNA, 15 bp, Homo sapiens
tgtgttgttacatgg

SEQ ID NO: 862825 - DNA, 15 bp, Homo sapiens
gtgttgttacatggc

SEQ ID NO: 862826 - DNA, 15 bp, Homo sapiens
tgttgttacatggca

SEQ ID NO: 862827 - DNA, 15 bp, Homo sapiens
gttgttacatggcag

SEQ ID NO: 862828 - DNA, 15 bp, Homo sapiens
ttgttacatggcaga

SEQ ID NO: 862829 - DNA, 15 bp, Homo sapiens
tgttacatggcagaa

SEQ ID NO: 862830 - DNA, 15 bp, Homo sapiens
gttacatggcagaag

SEQ ID NO: 862831 - DNA, 15 bp, Homo sapiens
ttacatggcagaaga

SEQ ID NO: 862832 - DNA, 15 bp, Homo sapiens
tacatggcagaagag

SEQ ID NO: 862833 - DNA, 15 bp, Homo sapiens
acatggcagaagagt

SEQ ID NO: 862834 - DNA, 15 bp, Homo sapiens
catggcagaagagtg

SEQ ID NO: 862835 - DNA, 15 bp, Homo sapiens
atggcagaagagtgg

SEQ ID NO: 862836 - DNA, 15 bp, Homo sapiens
tggcagaagagtggg

SEQ ID NO: 862837 - DNA, 15 bp, Homo sapiens
ggcagaagagtgggc

SEQ ID NO: 862838 - DNA, 15 bp, Homo sapiens
gcagaagagtgggca

SEQ ID NO: 862839 - DNA, 15 bp, Homo sapiens
cagaagagtgggcag

SEQ ID NO: 862840 - DNA, 15 bp, Homo sapiens
agaagagtgggcagg

SEQ ID NO: 862841 - DNA, 15 bp, Homo sapiens
gaagagtgggcaggc

SEQ ID NO: 862842 - DNA, 15 bp, Homo sapiens
aagagtgggcaggct

SEQ ID NO: 862843 - DNA, 15 bp, Homo sapiens
agagtgggcaggcta

SEQ ID NO: 862844 - DNA, 15 bp, Homo sapiens
gagtgggcaggctag

SEQ ID NO: 862845 - DNA, 15 bp, Homo sapiens
agtgggcaggctagc

SEQ ID NO: 862846 - DNA, 15 bp, Homo sapiens
gtgggcaggctagct

SEQ ID NO: 862847 - DNA, 15 bp, Homo sapiens
tgggcaggctagctc

SEQ ID NO: 862848 - DNA, 15 bp, Homo sapiens
gggcaggctagctct

SEQ ID NO: 862849 - DNA, 15 bp, Homo sapiens
ggcaggctagctctc

SEQ ID NO: 862850 - DNA, 15 bp, Homo sapiens
gcaggctagctctct

SEQ ID NO: 862851 - DNA, 15 bp, Homo sapiens
caggctagctctctg

SEQ ID NO: 862852 - DNA, 15 bp, Homo sapiens
aggctagctctctgg

SEQ ID NO: 862853 - DNA, 15 bp, Homo sapiens
ggctagctctctggg

SEQ ID NO: 862854 - DNA, 15 bp, Homo sapiens
gctagctctctggga

SEQ ID NO: 862855 - DNA, 15 bp, Homo sapiens
ctagctctctgggat

SEQ ID NO: 862856 - DNA, 15 bp, Homo sapiens
tagctctctgggatg

SEQ ID NO: 862857 - DNA, 15 bp, Homo sapiens
agctctctgggatgt

SEQ ID NO: 862858 - DNA, 15 bp, Homo sapiens
gctctctgggatgtc

SEQ ID NO: 862859 - DNA, 15 bp, Homo sapiens
ctctctgggatgtct

SEQ ID NO: 862860 - DNA, 15 bp, Homo sapiens
tctctgggatgtctt

SEQ ID NO: 862861 - DNA, 15 bp, Homo sapiens
ctctgggatgtcttt

SEQ ID NO: 862862 - DNA, 15 bp, Homo sapiens
tctgggatgtctttt

SEQ ID NO: 862863 - DNA, 15 bp, Homo sapiens
ctgggatgtctttta

SEQ ID NO: 862864 - DNA, 15 bp, Homo sapiens
tgggatgtcttttat

SEQ ID NO: 862865 - DNA, 15 bp, Homo sapiens
gggatgtcttttata

SEQ ID NO: 862866 - DNA, 15 bp, Homo sapiens
ggatgtcttttataa

SEQ ID NO: 862867 - DNA, 15 bp, Homo sapiens
gatgtcttttataag

SEQ ID NO: 862868 - DNA, 15 bp, Homo sapiens
atgtcttttataagg

SEQ ID NO: 862869 - DNA, 15 bp, Homo sapiens
tgtcttttataaggg

SEQ ID NO: 862870 - DNA, 15 bp, Homo sapiens
gtcttttataagggc

SEQ ID NO: 862871 - DNA, 15 bp, Homo sapiens
tcttttataagggca

SEQ ID NO: 862872 - DNA, 15 bp, Homo sapiens
cttttataagggcag

SEQ ID NO: 862873 - DNA, 15 bp, Homo sapiens
ttttataagggcagt

SEQ ID NO: 862874 - DNA, 15 bp, Homo sapiens
tttataagggcagta

SEQ ID NO: 862875 - DNA, 15 bp, Homo sapiens
ttataagggcagtaa

SEQ ID NO: 862876 - DNA, 15 bp, Homo sapiens
tataagggcagtaat

SEQ ID NO: 862877 - DNA, 15 bp, Homo sapiens
ataagggcagtaatc

SEQ ID NO: 862878 - DNA, 15 bp, Homo sapiens
taagggcagtaatcc

SEQ ID NO: 862879 - DNA, 15 bp, Homo sapiens
aagggcagtaatcca

SEQ ID NO: 862880 - DNA, 15 bp, Homo sapiens
agggcagtaatccaa

SEQ ID NO: 862881 - DNA, 15 bp, Homo sapiens
gggcagtaatccaaa

SEQ ID NO: 862882 - DNA, 15 bp, Homo sapiens
ggcagtaatccaaat

SEQ ID NO: 862883 - DNA, 15 bp, Homo sapiens
gcagtaatccaaatc

SEQ ID NO: 862884 - DNA, 15 bp, Homo sapiens
cagtaatccaaatca

SEQ ID NO: 862885 - DNA, 15 bp, Homo sapiens
agtaatccaaatcat

SEQ ID NO: 862886 - DNA, 15 bp, Homo sapiens
gtaatccaaatcatg

SEQ ID NO: 862887 - DNA, 15 bp, Homo sapiens
taatccaaatcatgg

SEQ ID NO: 862888 - DNA, 15 bp, Homo sapiens
aatccaaatcatggg

SEQ ID NO: 862889 - DNA, 15 bp, Homo sapiens
atccaaatcatgggt

SEQ ID NO: 862890 - DNA, 15 bp, Homo sapiens
tccaaatcatgggtt

SEQ ID NO: 862891 - DNA, 15 bp, Homo sapiens
ccaaatcatgggttt

SEQ ID NO: 862892 - DNA, 15 bp, Homo sapiens
caaatcatgggttta

SEQ ID NO: 862893 - DNA, 15 bp, Homo sapiens
aaatcatgggtttag

SEQ ID NO: 862894 - DNA, 15 bp, Homo sapiens
aatcatgggtttagg

SEQ ID NO: 862895 - DNA, 15 bp, Homo sapiens
atcatgggtttaggg

SEQ ID NO: 862896 - DNA, 15 bp, Homo sapiens
tcatgggtttagggt

SEQ ID NO: 862897 - DNA, 15 bp, Homo sapiens
catgggtttagggta

SEQ ID NO: 862898 - DNA, 15 bp, Homo sapiens
atgggtttagggtag

SEQ ID NO: 862899 - DNA, 15 bp, Homo sapiens
tgggtttagggtaga

SEQ ID NO: 862900 - DNA, 15 bp, Homo sapiens
gggtttagggtagag

SEQ ID NO: 862901 - DNA, 15 bp, Homo sapiens
ggtttagggtagagc

SEQ ID NO: 862902 - DNA, 15 bp, Homo sapiens
gtttagggtagagcc

SEQ ID NO: 862903 - DNA, 15 bp, Homo sapiens
tttagggtagagccc

SEQ ID NO: 862904 - DNA, 15 bp, Homo sapiens
ttagggtagagccct

SEQ ID NO: 862905 - DNA, 15 bp, Homo sapiens
tagggtagagccctc

SEQ ID NO: 862906 - DNA, 15 bp, Homo sapiens
agggtagagccctca

SEQ ID NO: 862907 - DNA, 15 bp, Homo sapiens
gggtagagccctcat

SEQ ID NO: 862908 - DNA, 15 bp, Homo sapiens
ggtagagccctcatg

SEQ ID NO: 862909 - DNA, 15 bp, Homo sapiens
gtagagccctcatga

SEQ ID NO: 862910 - DNA, 15 bp, Homo sapiens
tagagccctcatgac

SEQ ID NO: 862911 - DNA, 15 bp, Homo sapiens
agagccctcatgacc

SEQ ID NO: 862912 - DNA, 15 bp, Homo sapiens
gagccctcatgacct

SEQ ID NO: 862913 - DNA, 15 bp, Homo sapiens
agccctcatgaccta

SEQ ID NO: 862914 - DNA, 15 bp, Homo sapiens
gccctcatgacctaa

SEQ ID NO: 862915 - DNA, 15 bp, Homo sapiens
ccctcatgacctaaa

SEQ ID NO: 862916 - DNA, 15 bp, Homo sapiens
cctcatgacctaaat

SEQ ID NO: 862917 - DNA, 15 bp, Homo sapiens
ctcatgacctaaatc

SEQ ID NO: 862918 - DNA, 15 bp, Homo sapiens
tcatgacctaaatca

SEQ ID NO: 862919 - DNA, 15 bp, Homo sapiens
catgacctaaatcac

SEQ ID NO: 862920 - DNA, 15 bp, Homo sapiens
atgacctaaatcacc

SEQ ID NO: 862921 - DNA, 15 bp, Homo sapiens
tgacctaaatcacct

SEQ ID NO: 862922 - DNA, 15 bp, Homo sapiens
gacctaaatcacctc

SEQ ID NO: 862923 - DNA, 15 bp, Homo sapiens
acctaaatcacctcc

SEQ ID NO: 862924 - DNA, 15 bp, Homo sapiens
cctaaatcacctccc

SEQ ID NO: 862925 - DNA, 15 bp, Homo sapiens
ctaaatcacctccca

SEQ ID NO: 862926 - DNA, 15 bp, Homo sapiens
taaatcacctcccaa

SEQ ID NO: 862927 - DNA, 15 bp, Homo sapiens
aaatcacctcccaaa

SEQ ID NO: 862928 - DNA, 15 bp, Homo sapiens
aatcacctcccaaag

SEQ ID NO: 862929 - DNA, 15 bp, Homo sapiens
atcacctcccaaagg

SEQ ID NO: 862930 - DNA, 15 bp, Homo sapiens
tcacctcccaaaggc

SEQ ID NO: 862931 - DNA, 15 bp, Homo sapiens
cacctcccaaaggcc

SEQ ID NO: 862932 - DNA, 15 bp, Homo sapiens
acctcccaaaggccc

SEQ ID NO: 862933 - DNA, 15 bp, Homo sapiens
cctcccaaaggcccc

SEQ ID NO: 862934 - DNA, 15 bp, Homo sapiens
ctcccaaaggcccca

SEQ ID NO: 862935 - DNA, 15 bp, Homo sapiens
tcccaaaggccccac

SEQ ID NO: 862936 - DNA, 15 bp, Homo sapiens
cccaaaggccccacc

SEQ ID NO: 862937 - DNA, 15 bp, Homo sapiens
ccaaaggccccacct

SEQ ID NO: 862938 - DNA, 15 bp, Homo sapiens
caaaggccccacctc

SEQ ID NO: 862939 - DNA, 15 bp, Homo sapiens
aaaggccccacctcc

SEQ ID NO: 862940 - DNA, 15 bp, Homo sapiens
aaggccccacctcct

SEQ ID NO: 862941 - DNA, 15 bp, Homo sapiens
aggccccacctccta

SEQ ID NO: 862942 - DNA, 15 bp, Homo sapiens
ggccccacctcctaa

SEQ ID NO: 862943 - DNA, 15 bp, Homo sapiens
gccccacctcctaat

SEQ ID NO: 862944 - DNA, 15 bp, Homo sapiens
ccccacctcctaata

SEQ ID NO: 862945 - DNA, 15 bp, Homo sapiens
cccacctcctaatac

SEQ ID NO: 862946 - DNA, 15 bp, Homo sapiens
ccacctcctaatacc

SEQ ID NO: 862947 - DNA, 15 bp, Homo sapiens
cacctcctaatacca

SEQ ID NO: 862948 - DNA, 15 bp, Homo sapiens
acctcctaataccag

SEQ ID NO: 862949 - DNA, 15 bp, Homo sapiens
cctcctaataccagc

SEQ ID NO: 862950 - DNA, 15 bp, Homo sapiens
ctcctaataccagca

SEQ ID NO: 862951 - DNA, 15 bp, Homo sapiens
tcctaataccagcat

SEQ ID NO: 862952 - DNA, 15 bp, Homo sapiens
cctaataccagcatc

SEQ ID NO: 862953 - DNA, 15 bp, Homo sapiens
ctaataccagcatct

SEQ ID NO: 862954 - DNA, 15 bp, Homo sapiens
taataccagcatctt

SEQ ID NO: 862955 - DNA, 15 bp, Homo sapiens
aataccagcatcttt

SEQ ID NO: 862956 - DNA, 15 bp, Homo sapiens
ataccagcatctttg

SEQ ID NO: 862957 - DNA, 15 bp, Homo sapiens
taccagcatctttga

SEQ ID NO: 862958 - DNA, 15 bp, Homo sapiens
accagcatctttgaa

SEQ ID NO: 862959 - DNA, 15 bp, Homo sapiens
ccagcatctttgaag

SEQ ID NO: 862960 - DNA, 15 bp, Homo sapiens
cagcatctttgaagt

SEQ ID NO: 862961 - DNA, 15 bp, Homo sapiens
agcatctttgaagtt

SEQ ID NO: 862962 - DNA, 15 bp, Homo sapiens
gcatctttgaagtta

SEQ ID NO: 862963 - DNA, 15 bp, Homo sapiens
catctttgaagttag

SEQ ID NO: 862964 - DNA, 15 bp, Homo sapiens
atctttgaagttagg

SEQ ID NO: 862965 - DNA, 15 bp, Homo sapiens
tctttgaagttagga

SEQ ID NO: 862966 - DNA, 15 bp, Homo sapiens
ctttgaagttaggat

SEQ ID NO: 862967 - DNA, 15 bp, Homo sapiens
tttgaagttaggatt

SEQ ID NO: 862968 - DNA, 15 bp, Homo sapiens
ttgaagttaggattt

SEQ ID NO: 862969 - DNA, 15 bp, Homo sapiens
tgaagttaggatttc

SEQ ID NO: 862970 - DNA, 15 bp, Homo sapiens
gaagttaggatttca

SEQ ID NO: 862971 - DNA, 15 bp, Homo sapiens
aagttaggatttcaa

SEQ ID NO: 862972 - DNA, 15 bp, Homo sapiens
agttaggatttcaac

SEQ ID NO: 862973 - DNA, 15 bp, Homo sapiens
gttaggatttcaaca

SEQ ID NO: 862974 - DNA, 15 bp, Homo sapiens
ttaggatttcaacat

SEQ ID NO: 862975 - DNA, 15 bp, Homo sapiens
taggatttcaacata

SEQ ID NO: 862976 - DNA, 15 bp, Homo sapiens
aggatttcaacatat

SEQ ID NO: 862977 - DNA, 15 bp, Homo sapiens
ggatttcaacatatg

SEQ ID NO: 862978 - DNA, 15 bp, Homo sapiens
gatttcaacatatga

SEQ ID NO: 862979 - DNA, 15 bp, Homo sapiens
atttcaacatatgac

SEQ ID NO: 862980 - DNA, 15 bp, Homo sapiens
tttcaacatatgact

SEQ ID NO: 862981 - DNA, 15 bp, Homo sapiens
ttcaacatatgactt

SEQ ID NO: 862982 - DNA, 15 bp, Homo sapiens
tcaacatatgacttt

SEQ ID NO: 862983 - DNA, 15 bp, Homo sapiens
caacatatgactttg

SEQ ID NO: 862984 - DNA, 15 bp, Homo sapiens
aacatatgactttgg

SEQ ID NO: 862985 - DNA, 15 bp, Homo sapiens
acatatgactttggc

SEQ ID NO: 862986 - DNA, 15 bp, Homo sapiens
catatgactttggca

SEQ ID NO: 862987 - DNA, 15 bp, Homo sapiens
atatgactttggcag

SEQ ID NO: 862988 - DNA, 15 bp, Homo sapiens
tatgactttggcagg

SEQ ID NO: 862989 - DNA, 15 bp, Homo sapiens
atgactttggcaggg

SEQ ID NO: 862990 - DNA, 15 bp, Homo sapiens
tgactttggcagggg

SEQ ID NO: 862991 - DNA, 15 bp, Homo sapiens
gactttggcaggggg

SEQ ID NO: 862992 - DNA, 15 bp, Homo sapiens
actttggcaggggga

SEQ ID NO: 862993 - DNA, 15 bp, Homo sapiens
ctttggcagggggac

SEQ ID NO: 862994 - DNA, 15 bp, Homo sapiens
tttggcagggggaca

SEQ ID NO: 862995 - DNA, 15 bp, Homo sapiens
ttggcagggggacag

SEQ ID NO: 862996 - DNA, 15 bp, Homo sapiens
tggcagggggacaga

SEQ ID NO: 862997 - DNA, 15 bp, Homo sapiens
ggcagggggacagaa

SEQ ID NO: 862998 - DNA, 15 bp, Homo sapiens
gcagggggacagaag

SEQ ID NO: 862999 - DNA, 15 bp, Homo sapiens
cagggggacagaagc

SEQ ID NO: 863000 - DNA, 15 bp, Homo sapiens
agggggacagaagct

SEQ ID NO: 863001 - DNA, 15 bp, Homo sapiens
gggggacagaagctt

SEQ ID NO: 863002 - DNA, 15 bp, Homo sapiens
ggggacagaagcttt

SEQ ID NO: 863003 - DNA, 15 bp, Homo sapiens
gggacagaagctttc

SEQ ID NO: 863004 - DNA, 15 bp, Homo sapiens
ggacagaagctttca

SEQ ID NO: 863005 - DNA, 15 bp, Homo sapiens
gacagaagctttcag

SEQ ID NO: 863006 - DNA, 15 bp, Homo sapiens
acagaagctttcagt

SEQ ID NO: 863007 - DNA, 15 bp, Homo sapiens
cagaagctttcagtt

SEQ ID NO: 863008 - DNA, 15 bp, Homo sapiens
agaagctttcagttt

SEQ ID NO: 863009 - DNA, 15 bp, Homo sapiens
gaagctttcagttta

SEQ ID NO: 863010 - DNA, 15 bp, Homo sapiens
aagctttcagtttat

SEQ ID NO: 863011 - DNA, 15 bp, Homo sapiens
agctttcagtttata

SEQ ID NO: 863012 - DNA, 15 bp, Homo sapiens
gctttcagtttatag

SEQ ID NO: 863013 - DNA, 15 bp, Homo sapiens
ctttcagtttatagc

SEQ ID NO: 863014 - DNA, 15 bp, Homo sapiens
tttcagtttatagca

SEQ ID NO: 863015 - DNA, 15 bp, Homo sapiens
ttcagtttatagcaa

SEQ ID NO: 863016 - DNA, 15 bp, Homo sapiens
tcagtttatagcaaa

SEQ ID NO: 863017 - DNA, 15 bp, Homo sapiens
cagtttatagcaaac

SEQ ID NO: 863018 - DNA, 15 bp, Homo sapiens
agtttatagcaaacc

SEQ ID NO: 863019 - DNA, 15 bp, Homo sapiens
gtttatagcaaaccc

SEQ ID NO: 863020 - DNA, 15 bp, Homo sapiens
tttatagcaaaccct

SEQ ID NO: 863021 - DNA, 15 bp, Homo sapiens
ttatagcaaacccta

SEQ ID NO: 863022 - DNA, 15 bp, Homo sapiens
tatagcaaaccctat

SEQ ID NO: 863023 - DNA, 15 bp, Homo sapiens
atagcaaaccctata

SEQ ID NO: 863024 - DNA, 15 bp, Homo sapiens
tagcaaaccctatag

SEQ ID NO: 863025 - DNA, 15 bp, Homo sapiens
agcaaaccctatagg

SEQ ID NO: 863026 - DNA, 15 bp, Homo sapiens
gcaaaccctataggt

SEQ ID NO: 863027 - DNA, 15 bp, Homo sapiens
caaaccctataggta

SEQ ID NO: 863028 - DNA, 15 bp, Homo sapiens
aaaccctataggtag

SEQ ID NO: 863029 - DNA, 15 bp, Homo sapiens
aaccctataggtagc

SEQ ID NO: 863030 - DNA, 15 bp, Homo sapiens
accctataggtagca

SEQ ID NO: 863031 - DNA, 15 bp, Homo sapiens
ccctataggtagcac

SEQ ID NO: 863032 - DNA, 15 bp, Homo sapiens
cctataggtagcact

SEQ ID NO: 863033 - DNA, 15 bp, Homo sapiens
ctataggtagcacta

SEQ ID NO: 863034 - DNA, 15 bp, Homo sapiens
tataggtagcactac

SEQ ID NO: 863035 - DNA, 15 bp, Homo sapiens
ataggtagcactact

SEQ ID NO: 863036 - DNA, 15 bp, Homo sapiens
taggtagcactactt

SEQ ID NO: 863037 - DNA, 15 bp, Homo sapiens
aggtagcactacttt

SEQ ID NO: 863038 - DNA, 15 bp, Homo sapiens
ggtagcactactttg

SEQ ID NO: 863039 - DNA, 15 bp, Homo sapiens
gtagcactactttgt

SEQ ID NO: 863040 - DNA, 15 bp, Homo sapiens
tagcactactttgtc

SEQ ID NO: 863041 - DNA, 15 bp, Homo sapiens
agcactactttgtcc

SEQ ID NO: 863042 - DNA, 15 bp, Homo sapiens
gcactactttgtcct

SEQ ID NO: 863043 - DNA, 15 bp, Homo sapiens
cactactttgtcctt

SEQ ID NO: 863044 - DNA, 15 bp, Homo sapiens
actactttgtccttt

SEQ ID NO: 863045 - DNA, 15 bp, Homo sapiens
ctactttgtcctttc

SEQ ID NO: 863046 - DNA, 15 bp, Homo sapiens
tactttgtcctttcc

SEQ ID NO: 863047 - DNA, 15 bp, Homo sapiens
actttgtcctttcct

SEQ ID NO: 863048 - DNA, 15 bp, Homo sapiens
ctttgtcctttccta

SEQ ID NO: 863049 - DNA, 15 bp, Homo sapiens
tttgtcctttcctaa

SEQ ID NO: 863050 - DNA, 15 bp, Homo sapiens
ttgtcctttcctaat

SEQ ID NO: 863051 - DNA, 15 bp, Homo sapiens
tgtcctttcctaatc

SEQ ID NO: 863052 - DNA, 15 bp, Homo sapiens
gtcctttcctaatca

SEQ ID NO: 863053 - DNA, 15 bp, Homo sapiens
tcctttcctaatcaa

SEQ ID NO: 863054 - DNA, 15 bp, Homo sapiens
cctttcctaatcaat

SEQ ID NO: 863055 - DNA, 15 bp, Homo sapiens
ctttcctaatcaatt

SEQ ID NO: 863056 - DNA, 15 bp, Homo sapiens
tttcctaatcaattt

SEQ ID NO: 863057 - DNA, 15 bp, Homo sapiens
ttcctaatcaatttg

SEQ ID NO: 863058 - DNA, 15 bp, Homo sapiens
tcctaatcaatttgc

SEQ ID NO: 863059 - DNA, 15 bp, Homo sapiens
cctaatcaatttgcg

SEQ ID NO: 863060 - DNA, 15 bp, Homo sapiens
ctaatcaatttgcgt

SEQ ID NO: 863061 - DNA, 15 bp, Homo sapiens
taatcaatttgcgtc

SEQ ID NO: 863062 - DNA, 15 bp, Homo sapiens
aatcaatttgcgtca

SEQ ID NO: 863063 - DNA, 15 bp, Homo sapiens
atcaatttgcgtcaa

SEQ ID NO: 863064 - DNA, 15 bp, Homo sapiens
tcaatttgcgtcaat

SEQ ID NO: 863065 - DNA, 15 bp, Homo sapiens
caatttgcgtcaatg

SEQ ID NO: 863066 - DNA, 15 bp, Homo sapiens
aatttgcgtcaatga

SEQ ID NO: 863067 - DNA, 15 bp, Homo sapiens
atttgcgtcaatgaa

SEQ ID NO: 863068 - DNA, 15 bp, Homo sapiens
tttgcgtcaatgaaa

SEQ ID NO: 863069 - DNA, 15 bp, Homo sapiens
ttgcgtcaatgaaac

SEQ ID NO: 863070 - DNA, 15 bp, Homo sapiens
tgcgtcaatgaaaca

SEQ ID NO: 863071 - DNA, 15 bp, Homo sapiens
gcgtcaatgaaacat

SEQ ID NO: 863072 - DNA, 15 bp, Homo sapiens
cgtcaatgaaacatg

SEQ ID NO: 863073 - DNA, 15 bp, Homo sapiens
gtcaatgaaacatga

SEQ ID NO: 863074 - DNA, 15 bp, Homo sapiens
tcaatgaaacatgaa

SEQ ID NO: 863075 - DNA, 15 bp, Homo sapiens
caatgaaacatgaat

SEQ ID NO: 863076 - DNA, 15 bp, Homo sapiens
aatgaaacatgaatt

SEQ ID NO: 863077 - DNA, 15 bp, Homo sapiens
atgaaacatgaatta

SEQ ID NO: 863078 - DNA, 15 bp, Homo sapiens
tgaaacatgaattag

SEQ ID NO: 863079 - DNA, 15 bp, Homo sapiens
gaaacatgaattaga

SEQ ID NO: 863080 - DNA, 15 bp, Homo sapiens
aaacatgaattagaa

SEQ ID NO: 863081 - DNA, 15 bp, Homo sapiens
aacatgaattagaag

SEQ ID NO: 863082 - DNA, 15 bp, Homo sapiens
acatgaattagaaga

SEQ ID NO: 863083 - DNA, 15 bp, Homo sapiens
catgaattagaagag

SEQ ID NO: 863084 - DNA, 15 bp, Homo sapiens
atgaattagaagaga

SEQ ID NO: 863085 - DNA, 15 bp, Homo sapiens
tgaattagaagagac

SEQ ID NO: 863086 - DNA, 15 bp, Homo sapiens
gaattagaagagacc

SEQ ID NO: 863087 - DNA, 15 bp, Homo sapiens
aattagaagagacct

SEQ ID NO: 863088 - DNA, 15 bp, Homo sapiens
attagaagagaccta

SEQ ID NO: 863089 - DNA, 15 bp, Homo sapiens
ttagaagagacctag

SEQ ID NO: 863090 - DNA, 15 bp, Homo sapiens
tagaagagacctagg

SEQ ID NO: 863091 - DNA, 15 bp, Homo sapiens
agaagagacctaggc

SEQ ID NO: 863092 - DNA, 15 bp, Homo sapiens
gaagagacctaggcg

SEQ ID NO: 863093 - DNA, 15 bp, Homo sapiens
aagagacctaggcga

SEQ ID NO: 863094 - DNA, 15 bp, Homo sapiens
agagacctaggcgac

SEQ ID NO: 863095 - DNA, 15 bp, Homo sapiens
gagacctaggcgact

SEQ ID NO: 863096 - DNA, 15 bp, Homo sapiens
agacctaggcgactc

SEQ ID NO: 863097 - DNA, 15 bp, Homo sapiens
gacctaggcgactcc

SEQ ID NO: 863098 - DNA, 15 bp, Homo sapiens
acctaggcgactcca

SEQ ID NO: 863099 - DNA, 15 bp, Homo sapiens
cctaggcgactccac

SEQ ID NO: 863100 - DNA, 15 bp, Homo sapiens
ctaggcgactccact

SEQ ID NO: 863101 - DNA, 15 bp, Homo sapiens
taggcgactccacta

SEQ ID NO: 863102 - DNA, 15 bp, Homo sapiens
aggcgactccactat

SEQ ID NO: 863103 - DNA, 15 bp, Homo sapiens
ggcgactccactata

SEQ ID NO: 863104 - DNA, 15 bp, Homo sapiens
gcgactccactatac

SEQ ID NO: 863105 - DNA, 15 bp, Homo sapiens
cgactccactatact

SEQ ID NO: 863106 - DNA, 15 bp, Homo sapiens
gactccactatactg

SEQ ID NO: 863107 - DNA, 15 bp, Homo sapiens
actccactatactgg

SEQ ID NO: 863108 - DNA, 15 bp, Homo sapiens
ctccactatactggg

SEQ ID NO: 863109 - DNA, 15 bp, Homo sapiens
tccactatactggga

SEQ ID NO: 863110 - DNA, 15 bp, Homo sapiens
ccactatactgggat

SEQ ID NO: 863111 - DNA, 15 bp, Homo sapiens
cactatactgggatt

SEQ ID NO: 863112 - DNA, 15 bp, Homo sapiens
actatactgggatta

SEQ ID NO: 863113 - DNA, 15 bp, Homo sapiens
ctatactgggattat

SEQ ID NO: 863114 - DNA, 15 bp, Homo sapiens
tatactgggattatt

SEQ ID NO: 863115 - DNA, 15 bp, Homo sapiens
atactgggattattc

SEQ ID NO: 863116 - DNA, 15 bp, Homo sapiens
tactgggattattcc

SEQ ID NO: 863117 - DNA, 15 bp, Homo sapiens
actgggattattccc

SEQ ID NO: 863118 - DNA, 15 bp, Homo sapiens
ctgggattattccca

SEQ ID NO: 863119 - DNA, 15 bp, Homo sapiens
tgggattattcccag

SEQ ID NO: 863120 - DNA, 15 bp, Homo sapiens
gggattattcccagt

SEQ ID NO: 863121 - DNA, 15 bp, Homo sapiens
ggattattcccagta

SEQ ID NO: 863122 - DNA, 15 bp, Homo sapiens
gattattcccagtat

SEQ ID NO: 863123 - DNA, 15 bp, Homo sapiens
attattcccagtata

SEQ ID NO: 863124 - DNA, 15 bp, Homo sapiens
ttattcccagtataa

SEQ ID NO: 863125 - DNA, 15 bp, Homo sapiens
tattcccagtataaa

SEQ ID NO: 863126 - DNA, 15 bp, Homo sapiens
attcccagtataaat

SEQ ID NO: 863127 - DNA, 15 bp, Homo sapiens
ttcccagtataaatt

SEQ ID NO: 863128 - DNA, 15 bp, Homo sapiens
tcccagtataaatta

SEQ ID NO: 863129 - DNA, 15 bp, Homo sapiens
cccagtataaattat

SEQ ID NO: 863130 - DNA, 15 bp, Homo sapiens
ccagtataaattatc

SEQ ID NO: 863131 - DNA, 15 bp, Homo sapiens
cagtataaattatca

SEQ ID NO: 863132 - DNA, 15 bp, Homo sapiens
agtataaattatcat

SEQ ID NO: 863133 - DNA, 15 bp, Homo sapiens
gtataaattatcatc

SEQ ID NO: 863134 - DNA, 15 bp, Homo sapiens
tataaattatcatct

SEQ ID NO: 863135 - DNA, 15 bp, Homo sapiens
ataaattatcatctc

SEQ ID NO: 863136 - DNA, 15 bp, Homo sapiens
taaattatcatctct

SEQ ID NO: 863137 - DNA, 15 bp, Homo sapiens
aaattatcatctctc

SEQ ID NO: 863138 - DNA, 15 bp, Homo sapiens
aattatcatctctcc

SEQ ID NO: 863139 - DNA, 15 bp, Homo sapiens
attatcatctctcca

SEQ ID NO: 863140 - DNA, 15 bp, Homo sapiens
ttatcatctctccac

SEQ ID NO: 863141 - DNA, 15 bp, Homo sapiens
tatcatctctccaca

SEQ ID NO: 863142 - DNA, 15 bp, Homo sapiens
atcatctctccacac

SEQ ID NO: 863143 - DNA, 15 bp, Homo sapiens
tcatctctccacacc

SEQ ID NO: 863144 - DNA, 15 bp, Homo sapiens
catctctccacacct

SEQ ID NO: 863145 - DNA, 15 bp, Homo sapiens
atctctccacacctt

SEQ ID NO: 863146 - DNA, 15 bp, Homo sapiens
tctctccacaccttc

SEQ ID NO: 863147 - DNA, 15 bp, Homo sapiens
ctctccacaccttct

SEQ ID NO: 863148 - DNA, 15 bp, Homo sapiens
tctccacaccttctc

SEQ ID NO: 863149 - DNA, 15 bp, Homo sapiens
ctccacaccttctca

SEQ ID NO: 863150 - DNA, 15 bp, Homo sapiens
tccacaccttctcat

SEQ ID NO: 863151 - DNA, 15 bp, Homo sapiens
ccacaccttctcatc

SEQ ID NO: 863152 - DNA, 15 bp, Homo sapiens
cacaccttctcatct

SEQ ID NO: 863153 - DNA, 15 bp, Homo sapiens
acaccttctcatcta

SEQ ID NO: 863154 - DNA, 15 bp, Homo sapiens
caccttctcatctac

SEQ ID NO: 863155 - DNA, 15 bp, Homo sapiens
accttctcatctact

SEQ ID NO: 863156 - DNA, 15 bp, Homo sapiens
ccttctcatctactc

SEQ ID NO: 863157 - DNA, 15 bp, Homo sapiens
cttctcatctactcc

SEQ ID NO: 863158 - DNA, 15 bp, Homo sapiens
ttctcatctactccc

SEQ ID NO: 863159 - DNA, 15 bp, Homo sapiens
tctcatctactccct

SEQ ID NO: 863160 - DNA, 15 bp, Homo sapiens
ctcatctactcccta

SEQ ID NO: 863161 - DNA, 15 bp, Homo sapiens
tcatctactccctat

SEQ ID NO: 863162 - DNA, 15 bp, Homo sapiens
catctactccctatc

SEQ ID NO: 863163 - DNA, 15 bp, Homo sapiens
atctactccctatct

SEQ ID NO: 863164 - DNA, 15 bp, Homo sapiens
tctactccctatctg

SEQ ID NO: 863165 - DNA, 15 bp, Homo sapiens
ctactccctatctga

SEQ ID NO: 863166 - DNA, 15 bp, Homo sapiens
tactccctatctgag

SEQ ID NO: 863167 - DNA, 15 bp, Homo sapiens
actccctatctgagt

SEQ ID NO: 863168 - DNA, 15 bp, Homo sapiens
ctccctatctgagtt

SEQ ID NO: 863169 - DNA, 15 bp, Homo sapiens
tccctatctgagttc

SEQ ID NO: 863170 - DNA, 15 bp, Homo sapiens
ccctatctgagttct

SEQ ID NO: 863171 - DNA, 15 bp, Homo sapiens
cctatctgagttctg

SEQ ID NO: 863172 - DNA, 15 bp, Homo sapiens
ctatctgagttctga

SEQ ID NO: 863173 - DNA, 15 bp, Homo sapiens
tatctgagttctgaa

SEQ ID NO: 863174 - DNA, 15 bp, Homo sapiens
atctgagttctgaag

SEQ ID NO: 863175 - DNA, 15 bp, Homo sapiens
tctgagttctgaagc

SEQ ID NO: 863176 - DNA, 15 bp, Homo sapiens
ctgagttctgaagct

SEQ ID NO: 863177 - DNA, 15 bp, Homo sapiens
tgagttctgaagctc

SEQ ID NO: 863178 - DNA, 15 bp, Homo sapiens
gagttctgaagctct

SEQ ID NO: 863179 - DNA, 15 bp, Homo sapiens
agttctgaagctctc

SEQ ID NO: 863180 - DNA, 15 bp, Homo sapiens
gttctgaagctctcc

SEQ ID NO: 863181 - DNA, 15 bp, Homo sapiens
ttctgaagctctcca

SEQ ID NO: 863182 - DNA, 15 bp, Homo sapiens
tctgaagctctccac

SEQ ID NO: 863183 - DNA, 15 bp, Homo sapiens
ctgaagctctccact

SEQ ID NO: 863184 - DNA, 15 bp, Homo sapiens
tgaagctctccacta

SEQ ID NO: 863185 - DNA, 15 bp, Homo sapiens
gaagctctccactac

SEQ ID NO: 863186 - DNA, 15 bp, Homo sapiens
aagctctccactaca

SEQ ID NO: 863187 - DNA, 15 bp, Homo sapiens
agctctccactacaa

SEQ ID NO: 863188 - DNA, 15 bp, Homo sapiens
gctctccactacaag

SEQ ID NO: 863189 - DNA, 15 bp, Homo sapiens
ctctccactacaaga

SEQ ID NO: 863190 - DNA, 15 bp, Homo sapiens
tctccactacaagaa

SEQ ID NO: 863191 - DNA, 15 bp, Homo sapiens
ctccactacaagaag

SEQ ID NO: 863192 - DNA, 15 bp, Homo sapiens
tccactacaagaagg

SEQ ID NO: 863193 - DNA, 15 bp, Homo sapiens
ccactacaagaagga

SEQ ID NO: 863194 - DNA, 15 bp, Homo sapiens
cactacaagaaggag

SEQ ID NO: 863195 - DNA, 15 bp, Homo sapiens
actacaagaaggagg

SEQ ID NO: 863196 - DNA, 15 bp, Homo sapiens
ctacaagaaggaggc

SEQ ID NO: 863197 - DNA, 15 bp, Homo sapiens
tacaagaaggaggct

SEQ ID NO: 863198 - DNA, 15 bp, Homo sapiens
acaagaaggaggctt

SEQ ID NO: 863199 - DNA, 15 bp, Homo sapiens
caagaaggaggcttt

SEQ ID NO: 863200 - DNA, 15 bp, Homo sapiens
aagaaggaggctttg

SEQ ID NO: 863201 - DNA, 15 bp, Homo sapiens
agaaggaggctttgg

SEQ ID NO: 863202 - DNA, 15 bp, Homo sapiens
gaaggaggctttggt

SEQ ID NO: 863203 - DNA, 15 bp, Homo sapiens
aaggaggctttggtt

SEQ ID NO: 863204 - DNA, 15 bp, Homo sapiens
aggaggctttggttt

SEQ ID NO: 863205 - DNA, 15 bp, Homo sapiens
ggaggctttggtttg

SEQ ID NO: 863206 - DNA, 15 bp, Homo sapiens
gaggctttggtttga

SEQ ID NO: 863207 - DNA, 15 bp, Homo sapiens
aggctttggtttgac

SEQ ID NO: 863208 - DNA, 15 bp, Homo sapiens
ggctttggtttgact

SEQ ID NO: 863209 - DNA, 15 bp, Homo sapiens
gctttggtttgactt

SEQ ID NO: 863210 - DNA, 15 bp, Homo sapiens
ctttggtttgacttg

SEQ ID NO: 863211 - DNA, 15 bp, Homo sapiens
tttggtttgacttga

SEQ ID NO: 863212 - DNA, 15 bp, Homo sapiens
ttggtttgacttgat

SEQ ID NO: 863213 - DNA, 15 bp, Homo sapiens
tggtttgacttgata

SEQ ID NO: 863214 - DNA, 15 bp, Homo sapiens
ggtttgacttgatat

SEQ ID NO: 863215 - DNA, 15 bp, Homo sapiens
gtttgacttgatata

SEQ ID NO: 863216 - DNA, 15 bp, Homo sapiens
tttgacttgatatac

SEQ ID NO: 863217 - DNA, 15 bp, Homo sapiens
ttgacttgatatact

SEQ ID NO: 863218 - DNA, 15 bp, Homo sapiens
tgacttgatatactt

SEQ ID NO: 863219 - DNA, 15 bp, Homo sapiens
gacttgatatacttc

SEQ ID NO: 863220 - DNA, 15 bp, Homo sapiens
acttgatatacttct

SEQ ID NO: 863221 - DNA, 15 bp, Homo sapiens
cttgatatacttctc

SEQ ID NO: 863222 - DNA, 15 bp, Homo sapiens
ttgatatacttctct

SEQ ID NO: 863223 - DNA, 15 bp, Homo sapiens
tgatatacttctctg

SEQ ID NO: 863224 - DNA, 15 bp, Homo sapiens
gatatacttctctgg

SEQ ID NO: 863225 - DNA, 15 bp, Homo sapiens
atatacttctctggg

SEQ ID NO: 863226 - DNA, 15 bp, Homo sapiens
tatacttctctggga

SEQ ID NO: 863227 - DNA, 15 bp, Homo sapiens
atacttctctgggaa

SEQ ID NO: 863228 - DNA, 15 bp, Homo sapiens
tacttctctgggaaa

SEQ ID NO: 863229 - DNA, 15 bp, Homo sapiens
acttctctgggaaac

SEQ ID NO: 863230 - DNA, 15 bp, Homo sapiens
cttctctgggaaaca

SEQ ID NO: 863231 - DNA, 15 bp, Homo sapiens
ttctctgggaaacag

SEQ ID NO: 863232 - DNA, 15 bp, Homo sapiens
tctctgggaaacagg

SEQ ID NO: 863233 - DNA, 15 bp, Homo sapiens
ctctgggaaacaggt

SEQ ID NO: 863234 - DNA, 15 bp, Homo sapiens
tctgggaaacaggtt

SEQ ID NO: 863235 - DNA, 15 bp, Homo sapiens
ctgggaaacaggttt

SEQ ID NO: 863236 - DNA, 15 bp, Homo sapiens
tgggaaacaggttta

SEQ ID NO: 863237 - DNA, 15 bp, Homo sapiens
gggaaacaggtttag

SEQ ID NO: 863238 - DNA, 15 bp, Homo sapiens
ggaaacaggtttagc

SEQ ID NO: 863239 - DNA, 15 bp, Homo sapiens
gaaacaggtttagca

SEQ ID NO: 863240 - DNA, 15 bp, Homo sapiens
aaacaggtttagcat

SEQ ID NO: 863241 - DNA, 15 bp, Homo sapiens
aacaggtttagcata

SEQ ID NO: 863242 - DNA, 15 bp, Homo sapiens
acaggtttagcataa

SEQ ID NO: 863243 - DNA, 15 bp, Homo sapiens
caggtttagcataaa

SEQ ID NO: 863244 - DNA, 15 bp, Homo sapiens
aggtttagcataaaa

SEQ ID NO: 863245 - DNA, 15 bp, Homo sapiens
ggtttagcataaaac

SEQ ID NO: 863246 - DNA, 15 bp, Homo sapiens
gtttagcataaaaca

SEQ ID NO: 863247 - DNA, 15 bp, Homo sapiens
tttagcataaaacag

SEQ ID NO: 863248 - DNA, 15 bp, Homo sapiens
ttagcataaaacagt

SEQ ID NO: 863249 - DNA, 15 bp, Homo sapiens
tagcataaaacagtg

SEQ ID NO: 863250 - DNA, 15 bp, Homo sapiens
agcataaaacagtga

SEQ ID NO: 863251 - DNA, 15 bp, Homo sapiens
gcataaaacagtgat

SEQ ID NO: 863252 - DNA, 15 bp, Homo sapiens
cataaaacagtgatg

SEQ ID NO: 863253 - DNA, 15 bp, Homo sapiens
ataaaacagtgatgc

SEQ ID NO: 863254 - DNA, 15 bp, Homo sapiens
taaaacagtgatgct

SEQ ID NO: 863255 - DNA, 15 bp, Homo sapiens
aaaacagtgatgctc

SEQ ID NO: 863256 - DNA, 15 bp, Homo sapiens
aaacagtgatgctca

SEQ ID NO: 863257 - DNA, 15 bp, Homo sapiens
aacagtgatgctcat

SEQ ID NO: 863258 - DNA, 15 bp, Homo sapiens
acagtgatgctcatt

SEQ ID NO: 863259 - DNA, 15 bp, Homo sapiens
cagtgatgctcattc

SEQ ID NO: 863260 - DNA, 15 bp, Homo sapiens
agtgatgctcattct

SEQ ID NO: 863261 - DNA, 15 bp, Homo sapiens
gtgatgctcattcta

SEQ ID NO: 863262 - DNA, 15 bp, Homo sapiens
tgatgctcattctag

SEQ ID NO: 863263 - DNA, 15 bp, Homo sapiens
gatgctcattctaga

SEQ ID NO: 863264 - DNA, 15 bp, Homo sapiens
atgctcattctagaa

SEQ ID NO: 863265 - DNA, 15 bp, Homo sapiens
tgctcattctagaac

SEQ ID NO: 863266 - DNA, 15 bp, Homo sapiens
gctcattctagaaca

SEQ ID NO: 863267 - DNA, 15 bp, Homo sapiens
ctcattctagaacac

SEQ ID NO: 863268 - DNA, 15 bp, Homo sapiens
tcattctagaacacc

SEQ ID NO: 863269 - DNA, 15 bp, Homo sapiens
cattctagaacacct

SEQ ID NO: 863270 - DNA, 15 bp, Homo sapiens
attctagaacacctg

SEQ ID NO: 863271 - DNA, 15 bp, Homo sapiens
ttctagaacacctgc

SEQ ID NO: 863272 - DNA, 15 bp, Homo sapiens
tctagaacacctgca

SEQ ID NO: 863273 - DNA, 15 bp, Homo sapiens
ctagaacacctgcaa

SEQ ID NO: 863274 - DNA, 15 bp, Homo sapiens
tagaacacctgcaaa

SEQ ID NO: 863275 - DNA, 15 bp, Homo sapiens
agaacacctgcaaat

SEQ ID NO: 863276 - DNA, 15 bp, Homo sapiens
gaacacctgcaaatg

SEQ ID NO: 863277 - DNA, 15 bp, Homo sapiens
aacacctgcaaatga

SEQ ID NO: 863278 - DNA, 15 bp, Homo sapiens
acacctgcaaatgac

SEQ ID NO: 863279 - DNA, 15 bp, Homo sapiens
cacctgcaaatgaca

SEQ ID NO: 863280 - DNA, 15 bp, Homo sapiens
acctgcaaatgacaa

SEQ ID NO: 863281 - DNA, 15 bp, Homo sapiens
cctgcaaatgacaat

SEQ ID NO: 863282 - DNA, 15 bp, Homo sapiens
ctgcaaatgacaata

SEQ ID NO: 863283 - DNA, 15 bp, Homo sapiens
tgcaaatgacaatag

SEQ ID NO: 863284 - DNA, 15 bp, Homo sapiens
gcaaatgacaatagt

SEQ ID NO: 863285 - DNA, 15 bp, Homo sapiens
caaatgacaatagtt

SEQ ID NO: 863286 - DNA, 15 bp, Homo sapiens
aaatgacaatagttt

SEQ ID NO: 863287 - DNA, 15 bp, Homo sapiens
aatgacaatagtttt

SEQ ID NO: 863288 - DNA, 15 bp, Homo sapiens
atgacaatagttttc

SEQ ID NO: 863289 - DNA, 15 bp, Homo sapiens
tgacaatagttttct

SEQ ID NO: 863290 - DNA, 15 bp, Homo sapiens
gacaatagttttctt

SEQ ID NO: 863291 - DNA, 15 bp, Homo sapiens
acaatagttttcttt

SEQ ID NO: 863292 - DNA, 15 bp, Homo sapiens
caatagttttctttc

SEQ ID NO: 863293 - DNA, 15 bp, Homo sapiens
aatagttttctttcg

SEQ ID NO: 863294 - DNA, 15 bp, Homo sapiens
atagttttctttcga

SEQ ID NO: 863295 - DNA, 15 bp, Homo sapiens
tagttttctttcgaa

SEQ ID NO: 863296 - DNA, 15 bp, Homo sapiens
agttttctttcgaag

SEQ ID NO: 863297 - DNA, 15 bp, Homo sapiens
gttttctttcgaagt

SEQ ID NO: 863298 - DNA, 15 bp, Homo sapiens
ttttctttcgaagtc

SEQ ID NO: 863299 - DNA, 15 bp, Homo sapiens
tttctttcgaagtcg

SEQ ID NO: 863300 - DNA, 15 bp, Homo sapiens
ttctttcgaagtcgc

SEQ ID NO: 863301 - DNA, 15 bp, Homo sapiens
tctttcgaagtcgcc

SEQ ID NO: 863302 - DNA, 15 bp, Homo sapiens
ctttcgaagtcgcca

SEQ ID NO: 863303 - DNA, 15 bp, Homo sapiens
tttcgaagtcgccag

SEQ ID NO: 863304 - DNA, 15 bp, Homo sapiens
ttcgaagtcgccagg

SEQ ID NO: 863305 - DNA, 15 bp, Homo sapiens
tcgaagtcgccagga

SEQ ID NO: 863306 - DNA, 15 bp, Homo sapiens
cgaagtcgccaggaa

SEQ ID NO: 863307 - DNA, 15 bp, Homo sapiens
gaagtcgccaggaat

SEQ ID NO: 863308 - DNA, 15 bp, Homo sapiens
aagtcgccaggaatc

SEQ ID NO: 863309 - DNA, 15 bp, Homo sapiens
agtcgccaggaatcg

SEQ ID NO: 863310 - DNA, 15 bp, Homo sapiens
gtcgccaggaatcgt

SEQ ID NO: 863311 - DNA, 15 bp, Homo sapiens
tcgccaggaatcgtc

SEQ ID NO: 863312 - DNA, 15 bp, Homo sapiens
cgccaggaatcgtct

SEQ ID NO: 863313 - DNA, 15 bp, Homo sapiens
gccaggaatcgtctg

SEQ ID NO: 863314 - DNA, 15 bp, Homo sapiens
ccaggaatcgtctgc

SEQ ID NO: 863315 - DNA, 15 bp, Homo sapiens
caggaatcgtctgcc

SEQ ID NO: 863316 - DNA, 15 bp, Homo sapiens
aggaatcgtctgcct

SEQ ID NO: 863317 - DNA, 15 bp, Homo sapiens
ggaatcgtctgcctt

SEQ ID NO: 863318 - DNA, 15 bp, Homo sapiens
gaatcgtctgccttt

SEQ ID NO: 863319 - DNA, 15 bp, Homo sapiens
aatcgtctgcctttg

SEQ ID NO: 863320 - DNA, 15 bp, Homo sapiens
atcgtctgcctttgg

SEQ ID NO: 863321 - DNA, 15 bp, Homo sapiens
tcgtctgcctttggg

SEQ ID NO: 863322 - DNA, 15 bp, Homo sapiens
cgtctgcctttgggt

SEQ ID NO: 863323 - DNA, 15 bp, Homo sapiens
gtctgcctttgggta

SEQ ID NO: 863324 - DNA, 15 bp, Homo sapiens
tctgcctttgggtat

SEQ ID NO: 863325 - DNA, 15 bp, Homo sapiens
ctgcctttgggtatg

SEQ ID NO: 863326 - DNA, 15 bp, Homo sapiens
tgcctttgggtatgt

SEQ ID NO: 863327 - DNA, 15 bp, Homo sapiens
gcctttgggtatgtg

SEQ ID NO: 863328 - DNA, 15 bp, Homo sapiens
cctttgggtatgtgg

SEQ ID NO: 863329 - DNA, 15 bp, Homo sapiens
ctttgggtatgtggc

SEQ ID NO: 863330 - DNA, 15 bp, Homo sapiens
tttgggtatgtggct

SEQ ID NO: 863331 - DNA, 15 bp, Homo sapiens
ttgggtatgtggctg

SEQ ID NO: 863332 - DNA, 15 bp, Homo sapiens
tgggtatgtggctgt

SEQ ID NO: 863333 - DNA, 15 bp, Homo sapiens
gggtatgtggctgtg

SEQ ID NO: 863334 - DNA, 15 bp, Homo sapiens
ggtatgtggctgtga

SEQ ID NO: 863335 - DNA, 15 bp, Homo sapiens
gtatgtggctgtgag

SEQ ID NO: 863336 - DNA, 15 bp, Homo sapiens
tatgtggctgtgagc

SEQ ID NO: 863337 - DNA, 15 bp, Homo sapiens
atgtggctgtgagca

SEQ ID NO: 863338 - DNA, 15 bp, Homo sapiens
tgtggctgtgagcac

SEQ ID NO: 863339 - DNA, 15 bp, Homo sapiens
gtggctgtgagcact

SEQ ID NO: 863340 - DNA, 15 bp, Homo sapiens
tggctgtgagcactg

SEQ ID NO: 863341 - DNA, 15 bp, Homo sapiens
ggctgtgagcactgc

SEQ ID NO: 863342 - DNA, 15 bp, Homo sapiens
gctgtgagcactgcc

SEQ ID NO: 863343 - DNA, 15 bp, Homo sapiens
ctgtgagcactgccg

SEQ ID NO: 863344 - DNA, 15 bp, Homo sapiens
tgtgagcactgccgg

SEQ ID NO: 863345 - DNA, 15 bp, Homo sapiens
gtgagcactgccggg

SEQ ID NO: 863346 - DNA, 15 bp, Homo sapiens
tgagcactgccgggc

SEQ ID NO: 863347 - DNA, 15 bp, Homo sapiens
gagcactgccgggca

SEQ ID NO: 863348 - DNA, 15 bp, Homo sapiens
agcactgccgggcaa

SEQ ID NO: 863349 - DNA, 15 bp, Homo sapiens
gcactgccgggcaaa

SEQ ID NO: 863350 - DNA, 15 bp, Homo sapiens
cactgccgggcaaaa

SEQ ID NO: 863351 - DNA, 15 bp, Homo sapiens
actgccgggcaaaat

SEQ ID NO: 863352 - DNA, 15 bp, Homo sapiens
ctgccgggcaaaatg

SEQ ID NO: 863353 - DNA, 15 bp, Homo sapiens
tgccgggcaaaatgc

SEQ ID NO: 863354 - DNA, 15 bp, Homo sapiens
gccgggcaaaatgcc

SEQ ID NO: 863355 - DNA, 15 bp, Homo sapiens
ccgggcaaaatgcca

SEQ ID NO: 863356 - DNA, 15 bp, Homo sapiens
cgggcaaaatgccat

SEQ ID NO: 863357 - DNA, 15 bp, Homo sapiens
gggcaaaatgccata

SEQ ID NO: 863358 - DNA, 15 bp, Homo sapiens
ggcaaaatgccatat

SEQ ID NO: 863359 - DNA, 15 bp, Homo sapiens
gcaaaatgccatatg

SEQ ID NO: 863360 - DNA, 15 bp, Homo sapiens
caaaatgccatatga

SEQ ID NO: 863361 - DNA, 15 bp, Homo sapiens
aaaatgccatatgac

SEQ ID NO: 863362 - DNA, 15 bp, Homo sapiens
aaatgccatatgacc

SEQ ID NO: 863363 - DNA, 15 bp, Homo sapiens
aatgccatatgacct

SEQ ID NO: 863364 - DNA, 15 bp, Homo sapiens
atgccatatgaccta

SEQ ID NO: 863365 - DNA, 15 bp, Homo sapiens
tgccatatgacctag

SEQ ID NO: 863366 - DNA, 15 bp, Homo sapiens
gccatatgacctaga

SEQ ID NO: 863367 - DNA, 15 bp, Homo sapiens
ccatatgacctagat

SEQ ID NO: 863368 - DNA, 15 bp, Homo sapiens
catatgacctagatg

SEQ ID NO: 863369 - DNA, 15 bp, Homo sapiens
atatgacctagatga

SEQ ID NO: 863370 - DNA, 15 bp, Homo sapiens
tatgacctagatgag

SEQ ID NO: 863371 - DNA, 15 bp, Homo sapiens
atgacctagatgagg

SEQ ID NO: 863372 - DNA, 15 bp, Homo sapiens
tgacctagatgaggc

SEQ ID NO: 863373 - DNA, 15 bp, Homo sapiens
gacctagatgaggca

SEQ ID NO: 863374 - DNA, 15 bp, Homo sapiens
acctagatgaggcat

SEQ ID NO: 863375 - DNA, 15 bp, Homo sapiens
cctagatgaggcata

SEQ ID NO: 863376 - DNA, 15 bp, Homo sapiens
ctagatgaggcatat

SEQ ID NO: 863377 - DNA, 15 bp, Homo sapiens
tagatgaggcatatg

SEQ ID NO: 863378 - DNA, 15 bp, Homo sapiens
agatgaggcatatgc

SEQ ID NO: 863379 - DNA, 15 bp, Homo sapiens
gatgaggcatatgcc

SEQ ID NO: 863380 - DNA, 15 bp, Homo sapiens
atgaggcatatgcca

SEQ ID NO: 863381 - DNA, 15 bp, Homo sapiens
tgaggcatatgccat

SEQ ID NO: 863382 - DNA, 15 bp, Homo sapiens
gaggcatatgccatc

SEQ ID NO: 863383 - DNA, 15 bp, Homo sapiens
aggcatatgccatcc

SEQ ID NO: 863384 - DNA, 15 bp, Homo sapiens
ggcatatgccatcct

SEQ ID NO: 863385 - DNA, 15 bp, Homo sapiens
gcatatgccatcctt

SEQ ID NO: 863386 - DNA, 15 bp, Homo sapiens
catatgccatccttt

SEQ ID NO: 863387 - DNA, 15 bp, Homo sapiens
atatgccatcctttg

SEQ ID NO: 863388 - DNA, 15 bp, Homo sapiens
tatgccatcctttga

SEQ ID NO: 863389 - DNA, 15 bp, Homo sapiens
atgccatcctttgaa

SEQ ID NO: 863390 - DNA, 15 bp, Homo sapiens
tgccatcctttgaag

SEQ ID NO: 863391 - DNA, 15 bp, Homo sapiens
gccatcctttgaagc

SEQ ID NO: 863392 - DNA, 15 bp, Homo sapiens
ccatcctttgaagcc

SEQ ID NO: 863393 - DNA, 15 bp, Homo sapiens
catcctttgaagcca

SEQ ID NO: 863394 - DNA, 15 bp, Homo sapiens
atcctttgaagccat

SEQ ID NO: 863395 - DNA, 15 bp, Homo sapiens
tcctttgaagccatt

SEQ ID NO: 863396 - DNA, 15 bp, Homo sapiens
cctttgaagccatta

SEQ ID NO: 863397 - DNA, 15 bp, Homo sapiens
ctttgaagccattag

SEQ ID NO: 863398 - DNA, 15 bp, Homo sapiens
tttgaagccattagg

SEQ ID NO: 863399 - DNA, 15 bp, Homo sapiens
ttgaagccattagga

SEQ ID NO: 863400 - DNA, 15 bp, Homo sapiens
tgaagccattaggac

SEQ ID NO: 863401 - DNA, 15 bp, Homo sapiens
gaagccattaggaca

SEQ ID NO: 863402 - DNA, 15 bp, Homo sapiens
aagccattaggacat

SEQ ID NO: 863403 - DNA, 15 bp, Homo sapiens
agccattaggacatt

SEQ ID NO: 863404 - DNA, 15 bp, Homo sapiens
gccattaggacatta

SEQ ID NO: 863405 - DNA, 15 bp, Homo sapiens
ccattaggacattat

SEQ ID NO: 863406 - DNA, 15 bp, Homo sapiens
cattaggacattata

SEQ ID NO: 863407 - DNA, 15 bp, Homo sapiens
attaggacattatat

SEQ ID NO: 863408 - DNA, 15 bp, Homo sapiens
ttaggacattatata

SEQ ID NO: 863409 - DNA, 15 bp, Homo sapiens
taggacattatatag

SEQ ID NO: 863410 - DNA, 15 bp, Homo sapiens
aggacattatatagg

SEQ ID NO: 863411 - DNA, 15 bp, Homo sapiens
ggacattatatagga

SEQ ID NO: 863412 - DNA, 15 bp, Homo sapiens
gacattatataggaa

SEQ ID NO: 863413 - DNA, 15 bp, Homo sapiens
acattatataggaaa

SEQ ID NO: 863414 - DNA, 15 bp, Homo sapiens
cattatataggaaat

SEQ ID NO: 863415 - DNA, 15 bp, Homo sapiens
attatataggaaata

SEQ ID NO: 863416 - DNA, 15 bp, Homo sapiens
ttatataggaaatat

SEQ ID NO: 863417 - DNA, 15 bp, Homo sapiens
tatataggaaatata

SEQ ID NO: 863418 - DNA, 15 bp, Homo sapiens
atataggaaatatat

SEQ ID NO: 863419 - DNA, 15 bp, Homo sapiens
tataggaaatatatt

SEQ ID NO: 863420 - DNA, 15 bp, Homo sapiens
ataggaaatatatta

SEQ ID NO: 863421 - DNA, 15 bp, Homo sapiens
taggaaatatattaa

SEQ ID NO: 863422 - DNA, 15 bp, Homo sapiens
aggaaatatattaac

SEQ ID NO: 863423 - DNA, 15 bp, Homo sapiens
ggaaatatattaact

SEQ ID NO: 863424 - DNA, 15 bp, Homo sapiens
gaaatatattaacta

SEQ ID NO: 863425 - DNA, 15 bp, Homo sapiens
aaatatattaactaa

SEQ ID NO: 863426 - DNA, 15 bp, Homo sapiens
aatatattaactaaa

SEQ ID NO: 863427 - DNA, 15 bp, Homo sapiens
atatattaactaaaa

SEQ ID NO: 863428 - DNA, 15 bp, Homo sapiens
tatattaactaaaat

SEQ ID NO: 863429 - DNA, 15 bp, Homo sapiens
atattaactaaaatg

SEQ ID NO: 863430 - DNA, 15 bp, Homo sapiens
tattaactaaaatgg

SEQ ID NO: 863431 - DNA, 15 bp, Homo sapiens
attaactaaaatgga

SEQ ID NO: 863432 - DNA, 15 bp, Homo sapiens
ttaactaaaatggaa

SEQ ID NO: 863433 - DNA, 15 bp, Homo sapiens
taactaaaatggaat

SEQ ID NO: 863434 - DNA, 15 bp, Homo sapiens
aactaaaatggaata

SEQ ID NO: 863435 - DNA, 15 bp, Homo sapiens
actaaaatggaataa

SEQ ID NO: 863436 - DNA, 15 bp, Homo sapiens
ctaaaatggaataaa

SEQ ID NO: 863437 - DNA, 15 bp, Homo sapiens
taaaatggaataaaa

SEQ ID NO: 863438 - DNA, 15 bp, Homo sapiens
aaaatggaataaaat

SEQ ID NO: 863439 - DNA, 15 bp, Homo sapiens
aaatggaataaaatt

SEQ ID NO: 863440 - DNA, 15 bp, Homo sapiens
aatggaataaaattt

SEQ ID NO: 863441 - DNA, 15 bp, Homo sapiens
atggaataaaatttt

SEQ ID NO: 863442 - DNA, 15 bp, Homo sapiens
tggaataaaattttc

SEQ ID NO: 863443 - DNA, 15 bp, Homo sapiens
ggaataaaattttct

SEQ ID NO: 863444 - DNA, 15 bp, Homo sapiens
gaataaaattttcta

SEQ ID NO: 863445 - DNA, 15 bp, Homo sapiens
aataaaattttctaa

SEQ ID NO: 863446 - DNA, 15 bp, Homo sapiens
ataaaattttctaaa

SEQ ID NO: 863447 - DNA, 15 bp, Homo sapiens
taaaattttctaaat

SEQ ID NO: 863448 - DNA, 15 bp, Homo sapiens
aaaattttctaaata

SEQ ID NO: 863449 - DNA, 15 bp, Homo sapiens
aaattttctaaataa

SEQ ID NO: 863450 - DNA, 15 bp, Homo sapiens
aattttctaaataac

SEQ ID NO: 863451 - DNA, 15 bp, Homo sapiens
attttctaaataaca

SEQ ID NO: 863452 - DNA, 15 bp, Homo sapiens
ttttctaaataacac

SEQ ID NO: 863453 - DNA, 15 bp, Homo sapiens
tttctaaataacacc

SEQ ID NO: 863454 - DNA, 15 bp, Homo sapiens
ttctaaataacacct

SEQ ID NO: 863455 - DNA, 15 bp, Homo sapiens
tctaaataacacctt

SEQ ID NO: 863456 - DNA, 15 bp, Homo sapiens
ctaaataacacctta

SEQ ID NO: 863457 - DNA, 15 bp, Homo sapiens
taaataacaccttat

SEQ ID NO: 863458 - DNA, 15 bp, Homo sapiens
aaataacaccttatg

SEQ ID NO: 863459 - DNA, 15 bp, Homo sapiens
aataacaccttatgt

SEQ ID NO: 863460 - DNA, 15 bp, Homo sapiens
ataacaccttatgtt

SEQ ID NO: 863461 - DNA, 15 bp, Homo sapiens
taacaccttatgttt

SEQ ID NO: 863462 - DNA, 15 bp, Homo sapiens
aacaccttatgttta

SEQ ID NO: 863463 - DNA, 15 bp, Homo sapiens
acaccttatgtttat

SEQ ID NO: 863464 - DNA, 15 bp, Homo sapiens
caccttatgtttatc

SEQ ID NO: 863465 - DNA, 15 bp, Homo sapiens
accttatgtttatcc

SEQ ID NO: 863466 - DNA, 15 bp, Homo sapiens
ccttatgtttatcca

SEQ ID NO: 863467 - DNA, 15 bp, Homo sapiens
cttatgtttatccaa

SEQ ID NO: 863468 - DNA, 15 bp, Homo sapiens
ttatgtttatccaac

SEQ ID NO: 863469 - DNA, 15 bp, Homo sapiens
tatgtttatccaaca

SEQ ID NO: 863470 - DNA, 15 bp, Homo sapiens
atgtttatccaacag

SEQ ID NO: 863471 - DNA, 15 bp, Homo sapiens
tgtttatccaacagg

SEQ ID NO: 863472 - DNA, 15 bp, Homo sapiens
gtttatccaacaggt

SEQ ID NO: 863473 - DNA, 15 bp, Homo sapiens
tttatccaacaggtg

SEQ ID NO: 863474 - DNA, 15 bp, Homo sapiens
ttatccaacaggtgg

SEQ ID NO: 863475 - DNA, 15 bp, Homo sapiens
tatccaacaggtggt

SEQ ID NO: 863476 - DNA, 15 bp, Homo sapiens
atccaacaggtggtt

SEQ ID NO: 863477 - DNA, 15 bp, Homo sapiens
tccaacaggtggttc

SEQ ID NO: 863478 - DNA, 15 bp, Homo sapiens
ccaacaggtggttca

SEQ ID NO: 863479 - DNA, 15 bp, Homo sapiens
caacaggtggttcat

SEQ ID NO: 863480 - DNA, 15 bp, Homo sapiens
aacaggtggttcatt

SEQ ID NO: 863481 - DNA, 15 bp, Homo sapiens
acaggtggttcatta

SEQ ID NO: 863482 - DNA, 15 bp, Homo sapiens
caggtggttcattat

SEQ ID NO: 863483 - DNA, 15 bp, Homo sapiens
aggtggttcattata

SEQ ID NO: 863484 - DNA, 15 bp, Homo sapiens
ggtggttcattatac

SEQ ID NO: 863485 - DNA, 15 bp, Homo sapiens
gtggttcattatact

SEQ ID NO: 863486 - DNA, 15 bp, Homo sapiens
tggttcattatactt

SEQ ID NO: 863487 - DNA, 15 bp, Homo sapiens
ggttcattatacttg

SEQ ID NO: 863488 - DNA, 15 bp, Homo sapiens
gttcattatacttga

SEQ ID NO: 863489 - DNA, 15 bp, Homo sapiens
ttcattatacttgag

SEQ ID NO: 863490 - DNA, 15 bp, Homo sapiens
tcattatacttgaga

SEQ ID NO: 863491 - DNA, 15 bp, Homo sapiens
cattatacttgagag

SEQ ID NO: 863492 - DNA, 15 bp, Homo sapiens
attatacttgagagc

SEQ ID NO: 863493 - DNA, 15 bp, Homo sapiens
ttatacttgagagca

SEQ ID NO: 863494 - DNA, 15 bp, Homo sapiens
tatacttgagagcat

SEQ ID NO: 863495 - DNA, 15 bp, Homo sapiens
atacttgagagcatt

SEQ ID NO: 863496 - DNA, 15 bp, Homo sapiens
tacttgagagcatta

SEQ ID NO: 863497 - DNA, 15 bp, Homo sapiens
acttgagagcattat

SEQ ID NO: 863498 - DNA, 15 bp, Homo sapiens
cttgagagcattata

SEQ ID NO: 863499 - DNA, 15 bp, Homo sapiens
ttgagagcattatac

SEQ ID NO: 863500 - DNA, 15 bp, Homo sapiens
tgagagcattataca

SEQ ID NO: 863501 - DNA, 15 bp, Homo sapiens
gagagcattatacag

SEQ ID NO: 863502 - DNA, 15 bp, Homo sapiens
agagcattatacaga

SEQ ID NO: 863503 - DNA, 15 bp, Homo sapiens
gagcattatacagag

SEQ ID NO: 863504 - DNA, 15 bp, Homo sapiens
agcattatacagagg

SEQ ID NO: 863505 - DNA, 15 bp, Homo sapiens
gcattatacagagga

SEQ ID NO: 863506 - DNA, 15 bp, Homo sapiens
cattatacagaggaa

SEQ ID NO: 863507 - DNA, 15 bp, Homo sapiens
attatacagaggaat

SEQ ID NO: 863508 - DNA, 15 bp, Homo sapiens
ttatacagaggaatt

SEQ ID NO: 863509 - DNA, 15 bp, Homo sapiens
tatacagaggaattt

SEQ ID NO: 863510 - DNA, 15 bp, Homo sapiens
atacagaggaatttg

SEQ ID NO: 863511 - DNA, 15 bp, Homo sapiens
tacagaggaatttga

SEQ ID NO: 863512 - DNA, 15 bp, Homo sapiens
acagaggaatttgat

SEQ ID NO: 863513 - DNA, 15 bp, Homo sapiens
cagaggaatttgatg

SEQ ID NO: 863514 - DNA, 15 bp, Homo sapiens
agaggaatttgatgg

SEQ ID NO: 863515 - DNA, 15 bp, Homo sapiens
gaggaatttgatggg

SEQ ID NO: 863516 - DNA, 15 bp, Homo sapiens
aggaatttgatgggg

SEQ ID NO: 863517 - DNA, 15 bp, Homo sapiens
ggaatttgatgggga

SEQ ID NO: 863518 - DNA, 15 bp, Homo sapiens
gaatttgatggggag

SEQ ID NO: 863519 - DNA, 15 bp, Homo sapiens
aatttgatggggagg

SEQ ID NO: 863520 - DNA, 15 bp, Homo sapiens
atttgatggggagga

SEQ ID NO: 863521 - DNA, 15 bp, Homo sapiens
tttgatggggaggag

SEQ ID NO: 863522 - DNA, 15 bp, Homo sapiens
ttgatggggaggaga

SEQ ID NO: 863523 - DNA, 15 bp, Homo sapiens
tgatggggaggagag

SEQ ID NO: 863524 - DNA, 15 bp, Homo sapiens
gatggggaggagagc

SEQ ID NO: 863525 - DNA, 15 bp, Homo sapiens
atggggaggagagct

SEQ ID NO: 863526 - DNA, 15 bp, Homo sapiens
tggggaggagagctg

SEQ ID NO: 863527 - DNA, 15 bp, Homo sapiens
ggggaggagagctgg

SEQ ID NO: 863528 - DNA, 15 bp, Homo sapiens
gggaggagagctgga

SEQ ID NO: 863529 - DNA, 15 bp, Homo sapiens
ggaggagagctggag

SEQ ID NO: 863530 - DNA, 15 bp, Homo sapiens
gaggagagctggaga

SEQ ID NO: 863531 - DNA, 15 bp, Homo sapiens
aggagagctggagaa

SEQ ID NO: 863532 - DNA, 15 bp, Homo sapiens
ggagagctggagaaa

SEQ ID NO: 863533 - DNA, 15 bp, Homo sapiens
gagagctggagaaat

SEQ ID NO: 863534 - DNA, 15 bp, Homo sapiens
agagctggagaaatt

SEQ ID NO: 863535 - DNA, 15 bp, Homo sapiens
gagctggagaaattc

SEQ ID NO: 863536 - DNA, 15 bp, Homo sapiens
agctggagaaattct

SEQ ID NO: 863537 - DNA, 15 bp, Homo sapiens
gctggagaaattctc

SEQ ID NO: 863538 - DNA, 15 bp, Homo sapiens
ctggagaaattctcg

SEQ ID NO: 863539 - DNA, 15 bp, Homo sapiens
tggagaaattctcga

SEQ ID NO: 863540 - DNA, 15 bp, Homo sapiens
ggagaaattctcgaa

SEQ ID NO: 863541 - DNA, 15 bp, Homo sapiens
gagaaattctcgaaa

SEQ ID NO: 863542 - DNA, 15 bp, Homo sapiens
agaaattctcgaaat

SEQ ID NO: 863543 - DNA, 15 bp, Homo sapiens
gaaattctcgaaatt

SEQ ID NO: 863544 - DNA, 15 bp, Homo sapiens
aaattctcgaaattc

SEQ ID NO: 863545 - DNA, 15 bp, Homo sapiens
aattctcgaaattct

SEQ ID NO: 863546 - DNA, 15 bp, Homo sapiens
attctcgaaattctg

SEQ ID NO: 863547 - DNA, 15 bp, Homo sapiens
ttctcgaaattctgg

SEQ ID NO: 863548 - DNA, 15 bp, Homo sapiens
tctcgaaattctggg

SEQ ID NO: 863549 - DNA, 15 bp, Homo sapiens
ctcgaaattctgggt

SEQ ID NO: 863550 - DNA, 15 bp, Homo sapiens
tcgaaattctgggtt

SEQ ID NO: 863551 - DNA, 15 bp, Homo sapiens
cgaaattctgggttt

SEQ ID NO: 863552 - DNA, 15 bp, Homo sapiens
gaaattctgggtttc

SEQ ID NO: 863553 - DNA, 15 bp, Homo sapiens
aaattctgggtttct

SEQ ID NO: 863554 - DNA, 15 bp, Homo sapiens
aattctgggtttctt

SEQ ID NO: 863555 - DNA, 15 bp, Homo sapiens
attctgggtttcttt

SEQ ID NO: 863556 - DNA, 15 bp, Homo sapiens
ttctgggtttcttta

SEQ ID NO: 863557 - DNA, 15 bp, Homo sapiens
tctgggtttctttaa

SEQ ID NO: 863558 - DNA, 15 bp, Homo sapiens
ctgggtttctttaac

SEQ ID NO: 863559 - DNA, 15 bp, Homo sapiens
tgggtttctttaaca

SEQ ID NO: 863560 - DNA, 15 bp, Homo sapiens
gggtttctttaacag

SEQ ID NO: 863561 - DNA, 15 bp, Homo sapiens
ggtttctttaacaga

SEQ ID NO: 863562 - DNA, 15 bp, Homo sapiens
gtttctttaacagaa

SEQ ID NO: 863563 - DNA, 15 bp, Homo sapiens
tttctttaacagaat

SEQ ID NO: 863564 - DNA, 15 bp, Homo sapiens
ttctttaacagaata

SEQ ID NO: 863565 - DNA, 15 bp, Homo sapiens
tctttaacagaatac

SEQ ID NO: 863566 - DNA, 15 bp, Homo sapiens
ctttaacagaatact

SEQ ID NO: 863567 - DNA, 15 bp, Homo sapiens
tttaacagaatactc

SEQ ID NO: 863568 - DNA, 15 bp, Homo sapiens
ttaacagaatactct

SEQ ID NO: 863569 - DNA, 15 bp, Homo sapiens
taacagaatactcta

SEQ ID NO: 863570 - DNA, 15 bp, Homo sapiens
aacagaatactctag

SEQ ID NO: 863571 - DNA, 15 bp, Homo sapiens
acagaatactctagc

SEQ ID NO: 863572 - DNA, 15 bp, Homo sapiens
cagaatactctagct

SEQ ID NO: 863573 - DNA, 15 bp, Homo sapiens
agaatactctagcta

SEQ ID NO: 863574 - DNA, 15 bp, Homo sapiens
gaatactctagctat

SEQ ID NO: 863575 - DNA, 15 bp, Homo sapiens
aatactctagctata

SEQ ID NO: 863576 - DNA, 15 bp, Homo sapiens
atactctagctataa

SEQ ID NO: 863577 - DNA, 15 bp, Homo sapiens
tactctagctataaa

SEQ ID NO: 863578 - DNA, 15 bp, Homo sapiens
actctagctataaac

SEQ ID NO: 863579 - DNA, 15 bp, Homo sapiens
ctctagctataaact

SEQ ID NO: 863580 - DNA, 15 bp, Homo sapiens
tctagctataaactt

SEQ ID NO: 863581 - DNA, 15 bp, Homo sapiens
ctagctataaactta

SEQ ID NO: 863582 - DNA, 15 bp, Homo sapiens
tagctataaacttat

SEQ ID NO: 863583 - DNA, 15 bp, Homo sapiens
agctataaacttata

SEQ ID NO: 863584 - DNA, 15 bp, Homo sapiens
gctataaacttataa

SEQ ID NO: 863585 - DNA, 15 bp, Homo sapiens
ctataaacttataat

SEQ ID NO: 863586 - DNA, 15 bp, Homo sapiens
tataaacttataatt

SEQ ID NO: 863587 - DNA, 15 bp, Homo sapiens
ataaacttataattt

SEQ ID NO: 863588 - DNA, 15 bp, Homo sapiens
taaacttataatttt

SEQ ID NO: 863589 - DNA, 15 bp, Homo sapiens
aaacttataatttta

SEQ ID NO: 863590 - DNA, 15 bp, Homo sapiens
aacttataattttaa

SEQ ID NO: 863591 - DNA, 15 bp, Homo sapiens
acttataattttaaa

SEQ ID NO: 863592 - DNA, 15 bp, Homo sapiens
cttataattttaaaa

SEQ ID NO: 863593 - DNA, 15 bp, Homo sapiens
ttataattttaaaaa

SEQ ID NO: 863594 - DNA, 15 bp, Homo sapiens
tataattttaaaaaa

SEQ ID NO: 863595 - DNA, 15 bp, Homo sapiens
ataattttaaaaaat

SEQ ID NO: 863596 - DNA, 15 bp, Homo sapiens
taattttaaaaaata

SEQ ID NO: 863597 - DNA, 15 bp, Homo sapiens
aattttaaaaaataa

SEQ ID NO: 863598 - DNA, 15 bp, Homo sapiens
attttaaaaaataag

SEQ ID NO: 863599 - DNA, 15 bp, Homo sapiens
ttttaaaaaataagc

SEQ ID NO: 863600 - DNA, 15 bp, Homo sapiens
tttaaaaaataagca

SEQ ID NO: 863601 - DNA, 15 bp, Homo sapiens
ttaaaaaataagcat

SEQ ID NO: 863602 - DNA, 15 bp, Homo sapiens
taaaaaataagcatt

SEQ ID NO: 863603 - DNA, 15 bp, Homo sapiens
aaaaaataagcatta

SEQ ID NO: 863604 - DNA, 15 bp, Homo sapiens
aaaaataagcattat

SEQ ID NO: 863605 - DNA, 15 bp, Homo sapiens
aaaataagcattata

SEQ ID NO: 863606 - DNA, 15 bp, Homo sapiens
aaataagcattatat

SEQ ID NO: 863607 - DNA, 15 bp, Homo sapiens
aataagcattatatt

SEQ ID NO: 863608 - DNA, 15 bp, Homo sapiens
ataagcattatatta

SEQ ID NO: 863609 - DNA, 15 bp, Homo sapiens
taagcattatattaa

SEQ ID NO: 863610 - DNA, 15 bp, Homo sapiens
aagcattatattaaa

SEQ ID NO: 863611 - DNA, 15 bp, Homo sapiens
agcattatattaaag

SEQ ID NO: 863612 - DNA, 15 bp, Homo sapiens
gcattatattaaaga

SEQ ID NO: 863613 - DNA, 15 bp, Homo sapiens
cattatattaaagaa

SEQ ID NO: 863614 - DNA, 15 bp, Homo sapiens
attatattaaagaaa

SEQ ID NO: 863615 - DNA, 15 bp, Homo sapiens
ttatattaaagaaaa

SEQ ID NO: 863616 - DNA, 15 bp, Homo sapiens
tatattaaagaaaag

SEQ ID NO: 863617 - DNA, 15 bp, Homo sapiens
atattaaagaaaagg

SEQ ID NO: 863618 - DNA, 15 bp, Homo sapiens
tattaaagaaaaggg

SEQ ID NO: 863619 - DNA, 15 bp, Homo sapiens
attaaagaaaaggga

SEQ ID NO: 863620 - DNA, 15 bp, Homo sapiens
ttaaagaaaagggaa

SEQ ID NO: 863621 - DNA, 15 bp, Homo sapiens
taaagaaaagggaac

SEQ ID NO: 863622 - DNA, 15 bp, Homo sapiens
aaagaaaagggaaca

SEQ ID NO: 863623 - DNA, 15 bp, Homo sapiens
agaaaagggaacata

SEQ ID NO: 863624 - DNA, 15 bp, Homo sapiens
gaaaagggaacataa

SEQ ID NO: 863625 - DNA, 15 bp, Homo sapiens
aaaagggaacataaa

SEQ ID NO: 863626 - DNA, 15 bp, Homo sapiens
aaagggaacataaat

SEQ ID NO: 863627 - DNA, 15 bp, Homo sapiens
aagggaacataaatt

SEQ ID NO: 863628 - DNA, 15 bp, Homo sapiens
agggaacataaatta

SEQ ID NO: 863629 - DNA, 15 bp, Homo sapiens
gggaacataaattat

SEQ ID NO: 863630 - DNA, 15 bp, Homo sapiens
ggaacataaattatt

SEQ ID NO: 863631 - DNA, 15 bp, Homo sapiens
gaacataaattattt

SEQ ID NO: 863632 - DNA, 15 bp, Homo sapiens
aacataaattatttt

SEQ ID NO: 863633 - DNA, 15 bp, Homo sapiens
acataaattattttg

SEQ ID NO: 863634 - DNA, 15 bp, Homo sapiens
cataaattattttgt

SEQ ID NO: 863635 - DNA, 15 bp, Homo sapiens
ataaattattttgtt

SEQ ID NO: 863636 - DNA, 15 bp, Homo sapiens
taaattattttgttt

SEQ ID NO: 863637 - DNA, 15 bp, Homo sapiens
aaattattttgtttt

SEQ ID NO: 863638 - DNA, 15 bp, Homo sapiens
aattattttgtttta

SEQ ID NO: 863639 - DNA, 15 bp, Homo sapiens
attattttgttttat

SEQ ID NO: 863640 - DNA, 15 bp, Homo sapiens
ttattttgttttatt

SEQ ID NO: 863641 - DNA, 15 bp, Homo sapiens
tattttgttttatta

SEQ ID NO: 863642 - DNA, 15 bp, Homo sapiens
attttgttttattaa

SEQ ID NO: 863643 - DNA, 15 bp, Homo sapiens
ttttgttttattaaa

SEQ ID NO: 863644 - DNA, 15 bp, Homo sapiens
tttgttttattaaac

SEQ ID NO: 863645 - DNA, 15 bp, Homo sapiens
ttgttttattaaact

SEQ ID NO: 863646 - DNA, 15 bp, Homo sapiens
tgttttattaaactt

SEQ ID NO: 863647 - DNA, 15 bp, Homo sapiens
gttttattaaactta

SEQ ID NO: 863648 - DNA, 15 bp, Homo sapiens
ttttattaaacttaa

SEQ ID NO: 863649 - DNA, 15 bp, Homo sapiens
tttattaaacttaag

SEQ ID NO: 863650 - DNA, 15 bp, Homo sapiens
ttattaaacttaagt

SEQ ID NO: 863651 - DNA, 15 bp, Homo sapiens
tattaaacttaagtc

SEQ ID NO: 863652 - DNA, 15 bp, Homo sapiens
attaaacttaagtcc

SEQ ID NO: 863653 - DNA, 15 bp, Homo sapiens
ttaaacttaagtcca

SEQ ID NO: 863654 - DNA, 15 bp, Homo sapiens
taaacttaagtccaa

SEQ ID NO: 863655 - DNA, 15 bp, Homo sapiens
aaacttaagtccaaa

SEQ ID NO: 863656 - DNA, 15 bp, Homo sapiens
aacttaagtccaaag

SEQ ID NO: 863657 - DNA, 15 bp, Homo sapiens
acttaagtccaaagg

SEQ ID NO: 863658 - DNA, 15 bp, Homo sapiens
cttaagtccaaaggt

SEQ ID NO: 863659 - DNA, 15 bp, Homo sapiens
ttaagtccaaaggtc

SEQ ID NO: 863660 - DNA, 15 bp, Homo sapiens
taagtccaaaggtct

SEQ ID NO: 863661 - DNA, 15 bp, Homo sapiens
aagtccaaaggtctg

SEQ ID NO: 863662 - DNA, 15 bp, Homo sapiens
agtccaaaggtctgg

SEQ ID NO: 863663 - DNA, 15 bp, Homo sapiens
gtccaaaggtctgga

SEQ ID NO: 863664 - DNA, 15 bp, Homo sapiens
tccaaaggtctggat

SEQ ID NO: 863665 - DNA, 15 bp, Homo sapiens
ccaaaggtctggatt

SEQ ID NO: 863666 - DNA, 15 bp, Homo sapiens
caaaggtctggattg

SEQ ID NO: 863667 - DNA, 15 bp, Homo sapiens
aaaggtctggattgt

SEQ ID NO: 863668 - DNA, 15 bp, Homo sapiens
aaggtctggattgtg

SEQ ID NO: 863669 - DNA, 15 bp, Homo sapiens
aggtctggattgtgg

SEQ ID NO: 863670 - DNA, 15 bp, Homo sapiens
ggtctggattgtggc

SEQ ID NO: 863671 - DNA, 15 bp, Homo sapiens
gtctggattgtggca

SEQ ID NO: 863672 - DNA, 15 bp, Homo sapiens
tctggattgtggcag

SEQ ID NO: 863673 - DNA, 15 bp, Homo sapiens
ctggattgtggcaga

SEQ ID NO: 863674 - DNA, 15 bp, Homo sapiens
tggattgtggcagaa

SEQ ID NO: 863675 - DNA, 15 bp, Homo sapiens
ggattgtggcagaat

SEQ ID NO: 863676 - DNA, 15 bp, Homo sapiens
gattgtggcagaata

SEQ ID NO: 863677 - DNA, 15 bp, Homo sapiens
attgtggcagaatag

SEQ ID NO: 863678 - DNA, 15 bp, Homo sapiens
ttgtggcagaatagg

SEQ ID NO: 863679 - DNA, 15 bp, Homo sapiens
tgtggcagaatagga

SEQ ID NO: 863680 - DNA, 15 bp, Homo sapiens
gtggcagaataggat

SEQ ID NO: 863681 - DNA, 15 bp, Homo sapiens
tggcagaataggatc

SEQ ID NO: 863682 - DNA, 15 bp, Homo sapiens
ggcagaataggatca

SEQ ID NO: 863683 - DNA, 15 bp, Homo sapiens
gcagaataggatcag

SEQ ID NO: 863684 - DNA, 15 bp, Homo sapiens
cagaataggatcagg

SEQ ID NO: 863685 - DNA, 15 bp, Homo sapiens
agaataggatcaggg

SEQ ID NO: 863686 - DNA, 15 bp, Homo sapiens
gaataggatcagggg

SEQ ID NO: 863687 - DNA, 15 bp, Homo sapiens
aataggatcagggga

SEQ ID NO: 863688 - DNA, 15 bp, Homo sapiens
ataggatcaggggac

SEQ ID NO: 863689 - DNA, 15 bp, Homo sapiens
taggatcaggggacc

SEQ ID NO: 863690 - DNA, 15 bp, Homo sapiens
aggatcaggggacct

SEQ ID NO: 863691 - DNA, 15 bp, Homo sapiens
ggatcaggggaccta

SEQ ID NO: 863692 - DNA, 15 bp, Homo sapiens
gatcaggggacctaa

SEQ ID NO: 863693 - DNA, 15 bp, Homo sapiens
atcaggggacctaaa

SEQ ID NO: 863694 - DNA, 15 bp, Homo sapiens
tcaggggacctaaaa

SEQ ID NO: 863695 - DNA, 15 bp, Homo sapiens
caggggacctaaaat

SEQ ID NO: 863696 - DNA, 15 bp, Homo sapiens
aggggacctaaaatg

SEQ ID NO: 863697 - DNA, 15 bp, Homo sapiens
ggggacctaaaatgt

SEQ ID NO: 863698 - DNA, 15 bp, Homo sapiens
gggacctaaaatgtt

SEQ ID NO: 863699 - DNA, 15 bp, Homo sapiens
ggacctaaaatgttg

SEQ ID NO: 863700 - DNA, 15 bp, Homo sapiens
gacctaaaatgttga

SEQ ID NO: 863701 - DNA, 15 bp, Homo sapiens
acctaaaatgttgag

SEQ ID NO: 863702 - DNA, 15 bp, Homo sapiens
cctaaaatgttgagc

SEQ ID NO: 863703 - DNA, 15 bp, Homo sapiens
ctaaaatgttgagcc

SEQ ID NO: 863704 - DNA, 15 bp, Homo sapiens
taaaatgttgagcct

SEQ ID NO: 863705 - DNA, 15 bp, Homo sapiens
aaaatgttgagcctc

SEQ ID NO: 863706 - DNA, 15 bp, Homo sapiens
aaatgttgagcctca

SEQ ID NO: 863707 - DNA, 15 bp, Homo sapiens
aatgttgagcctcaa

SEQ ID NO: 863708 - DNA, 15 bp, Homo sapiens
atgttgagcctcaaa

SEQ ID NO: 863709 - DNA, 15 bp, Homo sapiens
tgttgagcctcaaag

SEQ ID NO: 863710 - DNA, 15 bp, Homo sapiens
gttgagcctcaaagg

SEQ ID NO: 863711 - DNA, 15 bp, Homo sapiens
ttgagcctcaaaggt

SEQ ID NO: 863712 - DNA, 15 bp, Homo sapiens
tgagcctcaaaggtc

SEQ ID NO: 863713 - DNA, 15 bp, Homo sapiens
gagcctcaaaggtct

SEQ ID NO: 863714 - DNA, 15 bp, Homo sapiens
agcctcaaaggtctt

SEQ ID NO: 863715 - DNA, 15 bp, Homo sapiens
gcctcaaaggtcttc

SEQ ID NO: 863716 - DNA, 15 bp, Homo sapiens
cctcaaaggtcttct

SEQ ID NO: 863717 - DNA, 15 bp, Homo sapiens
ctcaaaggtcttctt

SEQ ID NO: 863718 - DNA, 15 bp, Homo sapiens
tcaaaggtcttctta

SEQ ID NO: 863719 - DNA, 15 bp, Homo sapiens
caaaggtcttcttag

SEQ ID NO: 863720 - DNA, 15 bp, Homo sapiens
aaaggtcttcttaga

SEQ ID NO: 863721 - DNA, 15 bp, Homo sapiens
aaggtcttcttagag

SEQ ID NO: 863722 - DNA, 15 bp, Homo sapiens
aggtcttcttagaga

SEQ ID NO: 863723 - DNA, 15 bp, Homo sapiens
ggtcttcttagagaa

SEQ ID NO: 863724 - DNA, 15 bp, Homo sapiens
gtcttcttagagaac

SEQ ID NO: 863725 - DNA, 15 bp, Homo sapiens
tcttcttagagaaca

SEQ ID NO: 863726 - DNA, 15 bp, Homo sapiens
cttcttagagaacaa

SEQ ID NO: 863727 - DNA, 15 bp, Homo sapiens
ttcttagagaacaac

SEQ ID NO: 863728 - DNA, 15 bp, Homo sapiens
tcttagagaacaact

SEQ ID NO: 863729 - DNA, 15 bp, Homo sapiens
cttagagaacaactg

SEQ ID NO: 863730 - DNA, 15 bp, Homo sapiens
ttagagaacaactgt

SEQ ID NO: 863731 - DNA, 15 bp, Homo sapiens
tagagaacaactgta

SEQ ID NO: 863732 - DNA, 15 bp, Homo sapiens
agagaacaactgtat

SEQ ID NO: 863733 - DNA, 15 bp, Homo sapiens
gagaacaactgtatt

SEQ ID NO: 863734 - DNA, 15 bp, Homo sapiens
agaacaactgtattc

SEQ ID NO: 863735 - DNA, 15 bp, Homo sapiens
gaacaactgtattcc

SEQ ID NO: 863736 - DNA, 15 bp, Homo sapiens
aacaactgtattcca

SEQ ID NO: 863737 - DNA, 15 bp, Homo sapiens
acaactgtattccac

SEQ ID NO: 863738 - DNA, 15 bp, Homo sapiens
caactgtattccact

SEQ ID NO: 863739 - DNA, 15 bp, Homo sapiens
aactgtattccacta

SEQ ID NO: 863740 - DNA, 15 bp, Homo sapiens
actgtattccactat

SEQ ID NO: 863741 - DNA, 15 bp, Homo sapiens
ctgtattccactatt

SEQ ID NO: 863742 - DNA, 15 bp, Homo sapiens
tgtattccactatta

SEQ ID NO: 863743 - DNA, 15 bp, Homo sapiens
gtattccactattag

SEQ ID NO: 863744 - DNA, 15 bp, Homo sapiens
tattccactattagc

SEQ ID NO: 863745 - DNA, 15 bp, Homo sapiens
attccactattagcg

SEQ ID NO: 863746 - DNA, 15 bp, Homo sapiens
ttccactattagcgc

SEQ ID NO: 863747 - DNA, 15 bp, Homo sapiens
tccactattagcgct

SEQ ID NO: 863748 - DNA, 15 bp, Homo sapiens
ccactattagcgctt

SEQ ID NO: 863749 - DNA, 15 bp, Homo sapiens
cactattagcgcttt

SEQ ID NO: 863750 - DNA, 15 bp, Homo sapiens
actattagcgctttt

SEQ ID NO: 863751 - DNA, 15 bp, Homo sapiens
ctattagcgcttttg

SEQ ID NO: 863752 - DNA, 15 bp, Homo sapiens
tattagcgcttttgg

SEQ ID NO: 863753 - DNA, 15 bp, Homo sapiens
attagcgcttttggt

SEQ ID NO: 863754 - DNA, 15 bp, Homo sapiens
ttagcgcttttggtc

SEQ ID NO: 863755 - DNA, 15 bp, Homo sapiens
tagcgcttttggtcc

SEQ ID NO: 863756 - DNA, 15 bp, Homo sapiens
agcgcttttggtcct

SEQ ID NO: 863757 - DNA, 15 bp, Homo sapiens
gcgcttttggtcctt

SEQ ID NO: 863758 - DNA, 15 bp, Homo sapiens
cgcttttggtccttt

SEQ ID NO: 863759 - DNA, 15 bp, Homo sapiens
gcttttggtcctttt

SEQ ID NO: 863760 - DNA, 15 bp, Homo sapiens
cttttggtcctttta

SEQ ID NO: 863761 - DNA, 15 bp, Homo sapiens
ttttggtccttttag

SEQ ID NO: 863762 - DNA, 15 bp, Homo sapiens
tttggtccttttagc

SEQ ID NO: 863763 - DNA, 15 bp, Homo sapiens
ttggtccttttagcc

SEQ ID NO: 863764 - DNA, 15 bp, Homo sapiens
tggtccttttagccc

SEQ ID NO: 863765 - DNA, 15 bp, Homo sapiens
ggtccttttagccca

SEQ ID NO: 863766 - DNA, 15 bp, Homo sapiens
gtccttttagcccaa

SEQ ID NO: 863767 - DNA, 15 bp, Homo sapiens
tccttttagcccaat

SEQ ID NO: 863768 - DNA, 15 bp, Homo sapiens
ccttttagcccaatt

SEQ ID NO: 863769 - DNA, 15 bp, Homo sapiens
cttttagcccaattt

SEQ ID NO: 863770 - DNA, 15 bp, Homo sapiens
ttttagcccaatttc

SEQ ID NO: 863771 - DNA, 15 bp, Homo sapiens
tttagcccaatttct

SEQ ID NO: 863772 - DNA, 15 bp, Homo sapiens
ttagcccaatttctg

SEQ ID NO: 863773 - DNA, 15 bp, Homo sapiens
tagcccaatttctgt

SEQ ID NO: 863774 - DNA, 15 bp, Homo sapiens
agcccaatttctgtt

SEQ ID NO: 863775 - DNA, 15 bp, Homo sapiens
gcccaatttctgttt

SEQ ID NO: 863776 - DNA, 15 bp, Homo sapiens
cccaatttctgttta

SEQ ID NO: 863777 - DNA, 15 bp, Homo sapiens
ccaatttctgtttat

SEQ ID NO: 863778 - DNA, 15 bp, Homo sapiens
caatttctgtttatc

SEQ ID NO: 863779 - DNA, 15 bp, Homo sapiens
aatttctgtttatcc

SEQ ID NO: 863780 - DNA, 15 bp, Homo sapiens
atttctgtttatccc

SEQ ID NO: 863781 - DNA, 15 bp, Homo sapiens
tttctgtttatccca

SEQ ID NO: 863782 - DNA, 15 bp, Homo sapiens
ttctgtttatcccaa

SEQ ID NO: 863783 - DNA, 15 bp, Homo sapiens
tctgtttatcccaaa

SEQ ID NO: 863784 - DNA, 15 bp, Homo sapiens
ctgtttatcccaaat

SEQ ID NO: 863785 - DNA, 15 bp, Homo sapiens
tgtttatcccaaatg

SEQ ID NO: 863786 - DNA, 15 bp, Homo sapiens
gtttatcccaaatgt

SEQ ID NO: 863787 - DNA, 15 bp, Homo sapiens
tttatcccaaatgtt

SEQ ID NO: 863788 - DNA, 15 bp, Homo sapiens
ttatcccaaatgttc

SEQ ID NO: 863789 - DNA, 15 bp, Homo sapiens
tatcccaaatgttct

SEQ ID NO: 863790 - DNA, 15 bp, Homo sapiens
atcccaaatgttctt

SEQ ID NO: 863791 - DNA, 15 bp, Homo sapiens
tcccaaatgttcttc

SEQ ID NO: 863792 - DNA, 15 bp, Homo sapiens
cccaaatgttcttcc

SEQ ID NO: 863793 - DNA, 15 bp, Homo sapiens
ccaaatgttcttccc

SEQ ID NO: 863794 - DNA, 15 bp, Homo sapiens
caaatgttcttccct

SEQ ID NO: 863795 - DNA, 15 bp, Homo sapiens
aaatgttcttccctt

SEQ ID NO: 863796 - DNA, 15 bp, Homo sapiens
aatgttcttcccttt

SEQ ID NO: 863797 - DNA, 15 bp, Homo sapiens
atgttcttccctttt

SEQ ID NO: 863798 - DNA, 15 bp, Homo sapiens
tgttcttcccttttc

SEQ ID NO: 863799 - DNA, 15 bp, Homo sapiens
gttcttcccttttct

SEQ ID NO: 863800 - DNA, 15 bp, Homo sapiens
ttcttcccttttctg

SEQ ID NO: 863801 - DNA, 15 bp, Homo sapiens
tcttcccttttctgc

SEQ ID NO: 863802 - DNA, 15 bp, Homo sapiens
cttcccttttctgcc

SEQ ID NO: 863803 - DNA, 15 bp, Homo sapiens
ttcccttttctgcct

SEQ ID NO: 863804 - DNA, 15 bp, Homo sapiens
tcccttttctgcctt

SEQ ID NO: 863805 - DNA, 15 bp, Homo sapiens
cccttttctgccttc

SEQ ID NO: 863806 - DNA, 15 bp, Homo sapiens
ccttttctgccttcc

SEQ ID NO: 863807 - DNA, 15 bp, Homo sapiens
cttttctgccttcct

SEQ ID NO: 863808 - DNA, 15 bp, Homo sapiens
ttttctgccttcctt

SEQ ID NO: 863809 - DNA, 15 bp, Homo sapiens
tttctgccttccttc

SEQ ID NO: 863810 - DNA, 15 bp, Homo sapiens
ttctgccttccttca

SEQ ID NO: 863811 - DNA, 15 bp, Homo sapiens
tctgccttccttcac

SEQ ID NO: 863812 - DNA, 15 bp, Homo sapiens
ctgccttccttcaca

SEQ ID NO: 863813 - DNA, 15 bp, Homo sapiens
tgccttccttcacag

SEQ ID NO: 863814 - DNA, 15 bp, Homo sapiens
gccttccttcacagt

SEQ ID NO: 863815 - DNA, 15 bp, Homo sapiens
ccttccttcacagtg

SEQ ID NO: 863816 - DNA, 15 bp, Homo sapiens
cttccttcacagtgg

SEQ ID NO: 863817 - DNA, 15 bp, Homo sapiens
ttccttcacagtgga

SEQ ID NO: 863818 - DNA, 15 bp, Homo sapiens
tccttcacagtggac

SEQ ID NO: 863819 - DNA, 15 bp, Homo sapiens
ccttcacagtggacc

SEQ ID NO: 863820 - DNA, 15 bp, Homo sapiens
cttcacagtggaccc

SEQ ID NO: 863821 - DNA, 15 bp, Homo sapiens
ttcacagtggaccct

SEQ ID NO: 863822 - DNA, 15 bp, Homo sapiens
tcacagtggaccctg

SEQ ID NO: 863823 - DNA, 15 bp, Homo sapiens
cacagtggaccctgc

SEQ ID NO: 863824 - DNA, 15 bp, Homo sapiens
acagtggaccctgcc

SEQ ID NO: 863825 - DNA, 15 bp, Homo sapiens
cagtggaccctgcca

SEQ ID NO: 863826 - DNA, 15 bp, Homo sapiens
agtggaccctgccag

SEQ ID NO: 863827 - DNA, 15 bp, Homo sapiens
gtggaccctgccagg

SEQ ID NO: 863828 - DNA, 15 bp, Homo sapiens
tggaccctgccagga

SEQ ID NO: 863829 - DNA, 15 bp, Homo sapiens
ggaccctgccaggag

SEQ ID NO: 863830 - DNA, 15 bp, Homo sapiens
gaccctgccaggagc

SEQ ID NO: 863831 - DNA, 15 bp, Homo sapiens
accctgccaggagct

SEQ ID NO: 863832 - DNA, 15 bp, Homo sapiens
ccctgccaggagctt

SEQ ID NO: 863833 - DNA, 15 bp, Homo sapiens
cctgccaggagcttt

SEQ ID NO: 863834 - DNA, 15 bp, Homo sapiens
ctgccaggagctttg

SEQ ID NO: 863835 - DNA, 15 bp, Homo sapiens
tgccaggagctttga

SEQ ID NO: 863836 - DNA, 15 bp, Homo sapiens
gccaggagctttgaa

SEQ ID NO: 863837 - DNA, 15 bp, Homo sapiens
ccaggagctttgaaa

SEQ ID NO: 863838 - DNA, 15 bp, Homo sapiens
caggagctttgaaat

SEQ ID NO: 863839 - DNA, 15 bp, Homo sapiens
aggagctttgaaatg

SEQ ID NO: 863840 - DNA, 15 bp, Homo sapiens
ggagctttgaaatgc

SEQ ID NO: 863841 - DNA, 15 bp, Homo sapiens
gagctttgaaatgcc

SEQ ID NO: 863842 - DNA, 15 bp, Homo sapiens
agctttgaaatgcct

SEQ ID NO: 863843 - DNA, 15 bp, Homo sapiens
gctttgaaatgcctg

SEQ ID NO: 863844 - DNA, 15 bp, Homo sapiens
ctttgaaatgcctgt

SEQ ID NO: 863845 - DNA, 15 bp, Homo sapiens
tttgaaatgcctgtg

SEQ ID NO: 863846 - DNA, 15 bp, Homo sapiens
ttgaaatgcctgtga

SEQ ID NO: 863847 - DNA, 15 bp, Homo sapiens
tgaaatgcctgtgag

SEQ ID NO: 863848 - DNA, 15 bp, Homo sapiens
gaaatgcctgtgagt

SEQ ID NO: 863849 - DNA, 15 bp, Homo sapiens
aaatgcctgtgagtg

SEQ ID NO: 863850 - DNA, 15 bp, Homo sapiens
aatgcctgtgagtgt

SEQ ID NO: 863851 - DNA, 15 bp, Homo sapiens
atgcctgtgagtgtt

SEQ ID NO: 863852 - DNA, 15 bp, Homo sapiens
tgcctgtgagtgtta

SEQ ID NO: 863853 - DNA, 15 bp, Homo sapiens
gcctgtgagtgttaa

SEQ ID NO: 863854 - DNA, 15 bp, Homo sapiens
cctgtgagtgttaaa

SEQ ID NO: 863855 - DNA, 15 bp, Homo sapiens
ctgtgagtgttaaac

SEQ ID NO: 863856 - DNA, 15 bp, Homo sapiens
tgtgagtgttaaaca

SEQ ID NO: 863857 - DNA, 15 bp, Homo sapiens
gtgagtgttaaacac

SEQ ID NO: 863858 - DNA, 15 bp, Homo sapiens
tgagtgttaaacact

SEQ ID NO: 863859 - DNA, 15 bp, Homo sapiens
gagtgttaaacactt

SEQ ID NO: 863860 - DNA, 15 bp, Homo sapiens
agtgttaaacactta

SEQ ID NO: 863861 - DNA, 15 bp, Homo sapiens
gtgttaaacacttac

SEQ ID NO: 863862 - DNA, 15 bp, Homo sapiens
tgttaaacacttacc

SEQ ID NO: 863863 - DNA, 15 bp, Homo sapiens
gttaaacacttaccc

SEQ ID NO: 863864 - DNA, 15 bp, Homo sapiens
ttaaacacttaccca

SEQ ID NO: 863865 - DNA, 15 bp, Homo sapiens
taaacacttacccat

SEQ ID NO: 863866 - DNA, 15 bp, Homo sapiens
aaacacttacccatt

SEQ ID NO: 863867 - DNA, 15 bp, Homo sapiens
aacacttacccattg

SEQ ID NO: 863868 - DNA, 15 bp, Homo sapiens
acacttacccattga

SEQ ID NO: 863869 - DNA, 15 bp, Homo sapiens
cacttacccattgag

SEQ ID NO: 863870 - DNA, 15 bp, Homo sapiens
acttacccattgagt

SEQ ID NO: 863871 - DNA, 15 bp, Homo sapiens
cttacccattgagtg

SEQ ID NO: 863872 - DNA, 15 bp, Homo sapiens
ttacccattgagtgc

SEQ ID NO: 863873 - DNA, 15 bp, Homo sapiens
tacccattgagtgcc

SEQ ID NO: 863874 - DNA, 15 bp, Homo sapiens
acccattgagtgccc

SEQ ID NO: 863875 - DNA, 15 bp, Homo sapiens
cccattgagtgccca

SEQ ID NO: 863876 - DNA, 15 bp, Homo sapiens
ccattgagtgcccaa

SEQ ID NO: 863877 - DNA, 15 bp, Homo sapiens
cattgagtgcccaac

SEQ ID NO: 863878 - DNA, 15 bp, Homo sapiens
attgagtgcccaacc

SEQ ID NO: 863879 - DNA, 15 bp, Homo sapiens
ttgagtgcccaacct

SEQ ID NO: 863880 - DNA, 15 bp, Homo sapiens
tgagtgcccaacctt

SEQ ID NO: 863881 - DNA, 15 bp, Homo sapiens
gagtgcccaacctta

SEQ ID NO: 863882 - DNA, 15 bp, Homo sapiens
agtgcccaaccttaa

SEQ ID NO: 863883 - DNA, 15 bp, Homo sapiens
gtgcccaaccttaac

SEQ ID NO: 863884 - DNA, 15 bp, Homo sapiens
tgcccaaccttaaca

SEQ ID NO: 863885 - DNA, 15 bp, Homo sapiens
gcccaaccttaacat

SEQ ID NO: 863886 - DNA, 15 bp, Homo sapiens
cccaaccttaacatg

SEQ ID NO: 863887 - DNA, 15 bp, Homo sapiens
ccaaccttaacatgc

SEQ ID NO: 863888 - DNA, 15 bp, Homo sapiens
caaccttaacatgcc

SEQ ID NO: 863889 - DNA, 15 bp, Homo sapiens
aaccttaacatgccc

SEQ ID NO: 863890 - DNA, 15 bp, Homo sapiens
accttaacatgcccc

SEQ ID NO: 863891 - DNA, 15 bp, Homo sapiens
ccttaacatgcccct

SEQ ID NO: 863892 - DNA, 15 bp, Homo sapiens
cttaacatgccccta

SEQ ID NO: 863893 - DNA, 15 bp, Homo sapiens
ttaacatgcccctaa

SEQ ID NO: 863894 - DNA, 15 bp, Homo sapiens
taacatgcccctaat

SEQ ID NO: 863895 - DNA, 15 bp, Homo sapiens
aacatgcccctaata

SEQ ID NO: 863896 - DNA, 15 bp, Homo sapiens
acatgcccctaataa

SEQ ID NO: 863897 - DNA, 15 bp, Homo sapiens
catgcccctaataaa

SEQ ID NO: 863898 - DNA, 15 bp, Homo sapiens
atgcccctaataaaa

SEQ ID NO: 863899 - DNA, 15 bp, Homo sapiens
tgcccctaataaaat

SEQ ID NO: 863900 - DNA, 15 bp, Homo sapiens
gcccctaataaaatg

SEQ ID NO: 863901 - DNA, 15 bp, Homo sapiens
cccctaataaaatgt

SEQ ID NO: 863902 - DNA, 15 bp, Homo sapiens
ccctaataaaatgta

SEQ ID NO: 863903 - DNA, 15 bp, Homo sapiens
cctaataaaatgtac

SEQ ID NO: 863904 - DNA, 15 bp, Homo sapiens
ctaataaaatgtact

SEQ ID NO: 863905 - DNA, 15 bp, Homo sapiens
taataaaatgtactt

SEQ ID NO: 863906 - DNA, 15 bp, Homo sapiens
aataaaatgtactta

SEQ ID NO: 863907 - DNA, 15 bp, Homo sapiens
ataaaatgtacttag

SEQ ID NO: 863908 - DNA, 15 bp, Homo sapiens
taaaatgtacttaga

SEQ ID NO: 863909 - DNA, 15 bp, Homo sapiens
aaaatgtacttagat

SEQ ID NO: 863910 - DNA, 15 bp, Homo sapiens
aaatgtacttagatt

SEQ ID NO: 863911 - DNA, 15 bp, Homo sapiens
aatgtacttagatta

SEQ ID NO: 863912 - DNA, 15 bp, Homo sapiens
atgtacttagattaa

SEQ ID NO: 863913 - DNA, 15 bp, Homo sapiens
tgtacttagattaac

SEQ ID NO: 863914 - DNA, 15 bp, Homo sapiens
gtacttagattaacc

SEQ ID NO: 863915 - DNA, 15 bp, Homo sapiens
tacttagattaaccg

SEQ ID NO: 863916 - DNA, 15 bp, Homo sapiens
acttagattaaccgt

SEQ ID NO: 863917 - DNA, 15 bp, Homo sapiens
cttagattaaccgtt

SEQ ID NO: 863918 - DNA, 15 bp, Homo sapiens
ttagattaaccgttt

SEQ ID NO: 863919 - DNA, 15 bp, Homo sapiens
tagattaaccgtttt

SEQ ID NO: 863920 - DNA, 15 bp, Homo sapiens
agattaaccgttttc

SEQ ID NO: 863921 - DNA, 15 bp, Homo sapiens
gattaaccgttttca

SEQ ID NO: 863922 - DNA, 15 bp, Homo sapiens
attaaccgttttcat

SEQ ID NO: 863923 - DNA, 15 bp, Homo sapiens
ttaaccgttttcatt

SEQ ID NO: 863924 - DNA, 15 bp, Homo sapiens
taaccgttttcatta

SEQ ID NO: 863925 - DNA, 15 bp, Homo sapiens
aaccgttttcattat

SEQ ID NO: 863926 - DNA, 15 bp, Homo sapiens
accgttttcattatc

SEQ ID NO: 863927 - DNA, 15 bp, Homo sapiens
ccgttttcattatca

SEQ ID NO: 863928 - DNA, 15 bp, Homo sapiens
cgttttcattatcaa

SEQ ID NO: 863929 - DNA, 15 bp, Homo sapiens
gttttcattatcaaa

SEQ ID NO: 863930 - DNA, 15 bp, Homo sapiens
ttttcattatcaaag

SEQ ID NO: 863931 - DNA, 15 bp, Homo sapiens
tttcattatcaaagt

SEQ ID NO: 863932 - DNA, 15 bp, Homo sapiens
ttcattatcaaagtt

SEQ ID NO: 863933 - DNA, 15 bp, Homo sapiens
tcattatcaaagttt

SEQ ID NO: 863934 - DNA, 15 bp, Homo sapiens
cattatcaaagtttc

SEQ ID NO: 863935 - DNA, 15 bp, Homo sapiens
attatcaaagtttcc

SEQ ID NO: 863936 - DNA, 15 bp, Homo sapiens
ttatcaaagtttcct

SEQ ID NO: 863937 - DNA, 15 bp, Homo sapiens
tatcaaagtttcctt

SEQ ID NO: 863938 - DNA, 15 bp, Homo sapiens
atcaaagtttcctta

SEQ ID NO: 863939 - DNA, 15 bp, Homo sapiens
tcaaagtttccttat

SEQ ID NO: 863940 - DNA, 15 bp, Homo sapiens
caaagtttccttatt

SEQ ID NO: 863941 - DNA, 15 bp, Homo sapiens
aaagtttccttatta

SEQ ID NO: 863942 - DNA, 15 bp, Homo sapiens
aagtttccttattac

SEQ ID NO: 863943 - DNA, 15 bp, Homo sapiens
agtttccttattacc

SEQ ID NO: 863944 - DNA, 15 bp, Homo sapiens
gtttccttattaccc

SEQ ID NO: 863945 - DNA, 15 bp, Homo sapiens
tttccttattaccca

SEQ ID NO: 863946 - DNA, 15 bp, Homo sapiens
ttccttattacccaa

SEQ ID NO: 863947 - DNA, 15 bp, Homo sapiens
tccttattacccaac

SEQ ID NO: 863948 - DNA, 15 bp, Homo sapiens
ccttattacccaaca

SEQ ID NO: 863949 - DNA, 15 bp, Homo sapiens
cttattacccaacaa

SEQ ID NO: 863950 - DNA, 15 bp, Homo sapiens
ttattacccaacaaa

SEQ ID NO: 863951 - DNA, 15 bp, Homo sapiens
tattacccaacaaac

SEQ ID NO: 863952 - DNA, 15 bp, Homo sapiens
attacccaacaaaca

SEQ ID NO: 863953 - DNA, 15 bp, Homo sapiens
ttacccaacaaacac

SEQ ID NO: 863954 - DNA, 15 bp, Homo sapiens
tacccaacaaacaca

SEQ ID NO: 863955 - DNA, 15 bp, Homo sapiens
acccaacaaacacag

SEQ ID NO: 863956 - DNA, 15 bp, Homo sapiens
cccaacaaacacagg

SEQ ID NO: 863957 - DNA, 15 bp, Homo sapiens
ccaacaaacacaggc

SEQ ID NO: 863958 - DNA, 15 bp, Homo sapiens
caacaaacacaggcg

SEQ ID NO: 863959 - DNA, 15 bp, Homo sapiens
aacaaacacaggcgc

SEQ ID NO: 863960 - DNA, 15 bp, Homo sapiens
acaaacacaggcgct

SEQ ID NO: 863961 - DNA, 15 bp, Homo sapiens
caaacacaggcgctt

SEQ ID NO: 863962 - DNA, 15 bp, Homo sapiens
aaacacaggcgcttt

SEQ ID NO: 863963 - DNA, 15 bp, Homo sapiens
aacacaggcgcttta

SEQ ID NO: 863964 - DNA, 15 bp, Homo sapiens
acacaggcgctttaa

SEQ ID NO: 863965 - DNA, 15 bp, Homo sapiens
cacaggcgctttaaa

SEQ ID NO: 863966 - DNA, 15 bp, Homo sapiens
acaggcgctttaaag

SEQ ID NO: 863967 - DNA, 15 bp, Homo sapiens
caggcgctttaaaga

SEQ ID NO: 863968 - DNA, 15 bp, Homo sapiens
aggcgctttaaagaa

SEQ ID NO: 863969 - DNA, 15 bp, Homo sapiens
ggcgctttaaagaaa

SEQ ID NO: 863970 - DNA, 15 bp, Homo sapiens
gcgctttaaagaaaa

SEQ ID NO: 863971 - DNA, 15 bp, Homo sapiens
cgctttaaagaaaac

SEQ ID NO: 863972 - DNA, 15 bp, Homo sapiens
gctttaaagaaaaca

SEQ ID NO: 863973 - DNA, 15 bp, Homo sapiens
ctttaaagaaaacat

SEQ ID NO: 863974 - DNA, 15 bp, Homo sapiens
tttaaagaaaacatt

SEQ ID NO: 863975 - DNA, 15 bp, Homo sapiens
ttaaagaaaacatta

SEQ ID NO: 863976 - DNA, 15 bp, Homo sapiens
taaagaaaacattaa

SEQ ID NO: 863977 - DNA, 15 bp, Homo sapiens
aaagaaaacattaac

SEQ ID NO: 863978 - DNA, 15 bp, Homo sapiens
aagaaaacattaact

SEQ ID NO: 863979 - DNA, 15 bp, Homo sapiens
agaaaacattaacta

SEQ ID NO: 863980 - DNA, 15 bp, Homo sapiens
gaaaacattaactaa

SEQ ID NO: 863981 - DNA, 15 bp, Homo sapiens
aaaacattaactaaa

SEQ ID NO: 863982 - DNA, 15 bp, Homo sapiens
aaacattaactaaat

SEQ ID NO: 863983 - DNA, 15 bp, Homo sapiens
aacattaactaaatt

SEQ ID NO: 863984 - DNA, 15 bp, Homo sapiens
acattaactaaattg

SEQ ID NO: 863985 - DNA, 15 bp, Homo sapiens
cattaactaaattgc

SEQ ID NO: 863986 - DNA, 15 bp, Homo sapiens
attaactaaattgca

SEQ ID NO: 863987 - DNA, 15 bp, Homo sapiens
ttaactaaattgcaa

SEQ ID NO: 863988 - DNA, 15 bp, Homo sapiens
taactaaattgcaag

SEQ ID NO: 863989 - DNA, 15 bp, Homo sapiens
aactaaattgcaagt

SEQ ID NO: 863990 - DNA, 15 bp, Homo sapiens
actaaattgcaagtg

SEQ ID NO: 863991 - DNA, 15 bp, Homo sapiens
ctaaattgcaagtga

SEQ ID NO: 863992 - DNA, 15 bp, Homo sapiens
taaattgcaagtgac

SEQ ID NO: 863993 - DNA, 15 bp, Homo sapiens
aaattgcaagtgaca

SEQ ID NO: 863994 - DNA, 15 bp, Homo sapiens
aattgcaagtgacac

SEQ ID NO: 863995 - DNA, 15 bp, Homo sapiens
attgcaagtgacaca

SEQ ID NO: 863996 - DNA, 15 bp, Homo sapiens
ttgcaagtgacacat

SEQ ID NO: 863997 - DNA, 15 bp, Homo sapiens
tgcaagtgacacatt

SEQ ID NO: 863998 - DNA, 15 bp, Homo sapiens
gcaagtgacacattt

SEQ ID NO: 863999 - DNA, 15 bp, Homo sapiens
caagtgacacatttt

SEQ ID NO: 864000 - DNA, 15 bp, Homo sapiens
aagtgacacatttta

SEQ ID NO: 864001 - DNA, 15 bp, Homo sapiens
agtgacacattttaa

SEQ ID NO: 864002 - DNA, 15 bp, Homo sapiens
gtgacacattttaag

SEQ ID NO: 864003 - DNA, 15 bp, Homo sapiens
tgacacattttaaga

SEQ ID NO: 864004 - DNA, 15 bp, Homo sapiens
gacacattttaagat

SEQ ID NO: 864005 - DNA, 15 bp, Homo sapiens
acacattttaagatc

SEQ ID NO: 864006 - DNA, 15 bp, Homo sapiens
cacattttaagatct

SEQ ID NO: 864007 - DNA, 15 bp, Homo sapiens
acattttaagatctt

SEQ ID NO: 864008 - DNA, 15 bp, Homo sapiens
cattttaagatcttt

SEQ ID NO: 864009 - DNA, 15 bp, Homo sapiens
attttaagatctttg

SEQ ID NO: 864010 - DNA, 15 bp, Homo sapiens
ttttaagatctttga

SEQ ID NO: 864011 - DNA, 15 bp, Homo sapiens
tttaagatctttgat

SEQ ID NO: 864012 - DNA, 15 bp, Homo sapiens
ttaagatctttgata

SEQ ID NO: 864013 - DNA, 15 bp, Homo sapiens
taagatctttgatat

SEQ ID NO: 864014 - DNA, 15 bp, Homo sapiens
aagatctttgatatg

SEQ ID NO: 864015 - DNA, 15 bp, Homo sapiens
agatctttgatatga

SEQ ID NO: 864016 - DNA, 15 bp, Homo sapiens
gatctttgatatgac

SEQ ID NO: 864017 - DNA, 15 bp, Homo sapiens
atctttgatatgact

SEQ ID NO: 864018 - DNA, 15 bp, Homo sapiens
tctttgatatgactt

SEQ ID NO: 864019 - DNA, 15 bp, Homo sapiens
ctttgatatgacttc

SEQ ID NO: 864020 - DNA, 15 bp, Homo sapiens
tttgatatgacttca

SEQ ID NO: 864021 - DNA, 15 bp, Homo sapiens
ttgatatgacttcag

SEQ ID NO: 864022 - DNA, 15 bp, Homo sapiens
tgatatgacttcaga

SEQ ID NO: 864023 - DNA, 15 bp, Homo sapiens
gatatgacttcagag

SEQ ID NO: 864024 - DNA, 15 bp, Homo sapiens
atatgacttcagaga

SEQ ID NO: 864025 - DNA, 15 bp, Homo sapiens
tatgacttcagagaa

SEQ ID NO: 864026 - DNA, 15 bp, Homo sapiens
atgacttcagagaat

SEQ ID NO: 864027 - DNA, 15 bp, Homo sapiens
tgacttcagagaatg

SEQ ID NO: 864028 - DNA, 15 bp, Homo sapiens
gacttcagagaatgc

SEQ ID NO: 864029 - DNA, 15 bp, Homo sapiens
acttcagagaatgca

SEQ ID NO: 864030 - DNA, 15 bp, Homo sapiens
cttcagagaatgcac

SEQ ID NO: 864031 - DNA, 15 bp, Homo sapiens
ttcagagaatgcact

SEQ ID NO: 864032 - DNA, 15 bp, Homo sapiens
tcagagaatgcacta

SEQ ID NO: 864033 - DNA, 15 bp, Homo sapiens
cagagaatgcactat

SEQ ID NO: 864034 - DNA, 15 bp, Homo sapiens
agagaatgcactata

SEQ ID NO: 864035 - DNA, 15 bp, Homo sapiens
gagaatgcactatag

SEQ ID NO: 864036 - DNA, 15 bp, Homo sapiens
agaatgcactatagg

SEQ ID NO: 864037 - DNA, 15 bp, Homo sapiens
gaatgcactatagga

SEQ ID NO: 864038 - DNA, 15 bp, Homo sapiens
aatgcactataggaa

SEQ ID NO: 864039 - DNA, 15 bp, Homo sapiens
atgcactataggaac

SEQ ID NO: 864040 - DNA, 15 bp, Homo sapiens
tgcactataggaaca

SEQ ID NO: 864041 - DNA, 15 bp, Homo sapiens
gcactataggaacac

SEQ ID NO: 864042 - DNA, 15 bp, Homo sapiens
cactataggaacaca

SEQ ID NO: 864043 - DNA, 15 bp, Homo sapiens
actataggaacacaa

SEQ ID NO: 864044 - DNA, 15 bp, Homo sapiens
ctataggaacacaat

SEQ ID NO: 864045 - DNA, 15 bp, Homo sapiens
tataggaacacaatg

SEQ ID NO: 864046 - DNA, 15 bp, Homo sapiens
ataggaacacaatgc

SEQ ID NO: 864047 - DNA, 15 bp, Homo sapiens
taggaacacaatgca

SEQ ID NO: 864048 - DNA, 15 bp, Homo sapiens
aggaacacaatgcaa

SEQ ID NO: 864049 - DNA, 15 bp, Homo sapiens
ggaacacaatgcaat

SEQ ID NO: 864050 - DNA, 15 bp, Homo sapiens
gaacacaatgcaatg

SEQ ID NO: 864051 - DNA, 15 bp, Homo sapiens
aacacaatgcaatgg

SEQ ID NO: 864052 - DNA, 15 bp, Homo sapiens
acacaatgcaatggg

SEQ ID NO: 864053 - DNA, 15 bp, Homo sapiens
cacaatgcaatggga

SEQ ID NO: 864054 - DNA, 15 bp, Homo sapiens
acaatgcaatgggag

SEQ ID NO: 864055 - DNA, 15 bp, Homo sapiens
caatgcaatgggagg

SEQ ID NO: 864056 - DNA, 15 bp, Homo sapiens
aatgcaatgggaggg

SEQ ID NO: 864057 - DNA, 15 bp, Homo sapiens
atgcaatgggaggga

SEQ ID NO: 864058 - DNA, 15 bp, Homo sapiens
tgcaatgggagggaa

SEQ ID NO: 864059 - DNA, 15 bp, Homo sapiens
gcaatgggagggaaa

SEQ ID NO: 864060 - DNA, 15 bp, Homo sapiens
caatgggagggaaac

SEQ ID NO: 864061 - DNA, 15 bp, Homo sapiens
aatgggagggaaact

SEQ ID NO: 864062 - DNA, 15 bp, Homo sapiens
atgggagggaaactt

SEQ ID NO: 864063 - DNA, 15 bp, Homo sapiens
tgggagggaaacttg

SEQ ID NO: 864064 - DNA, 15 bp, Homo sapiens
gggagggaaacttgg

SEQ ID NO: 864065 - DNA, 15 bp, Homo sapiens
ggagggaaacttggg

SEQ ID NO: 864066 - DNA, 15 bp, Homo sapiens
gagggaaacttggga

SEQ ID NO: 864067 - DNA, 15 bp, Homo sapiens
agggaaacttgggag

SEQ ID NO: 864068 - DNA, 15 bp, Homo sapiens
gggaaacttgggagg

SEQ ID NO: 864069 - DNA, 15 bp, Homo sapiens
ggaaacttgggaggg

SEQ ID NO: 864070 - DNA, 15 bp, Homo sapiens
gaaacttgggaggga

SEQ ID NO: 864071 - DNA, 15 bp, Homo sapiens
aaacttgggagggaa

SEQ ID NO: 864072 - DNA, 15 bp, Homo sapiens
aacttgggagggaag

SEQ ID NO: 864073 - DNA, 15 bp, Homo sapiens
acttgggagggaaga

SEQ ID NO: 864074 - DNA, 15 bp, Homo sapiens
cttgggagggaagac

SEQ ID NO: 864075 - DNA, 15 bp, Homo sapiens
ttgggagggaagaca

SEQ ID NO: 864076 - DNA, 15 bp, Homo sapiens
tgggagggaagacat

SEQ ID NO: 864077 - DNA, 15 bp, Homo sapiens
gggagggaagacatt

SEQ ID NO: 864078 - DNA, 15 bp, Homo sapiens
ggagggaagacatta

SEQ ID NO: 864079 - DNA, 15 bp, Homo sapiens
gagggaagacattag

SEQ ID NO: 864080 - DNA, 15 bp, Homo sapiens
agggaagacattagc

SEQ ID NO: 864081 - DNA, 15 bp, Homo sapiens
gggaagacattagcc

SEQ ID NO: 864082 - DNA, 15 bp, Homo sapiens
ggaagacattagcct

SEQ ID NO: 864083 - DNA, 15 bp, Homo sapiens
gaagacattagcctt

SEQ ID NO: 864084 - DNA, 15 bp, Homo sapiens
aagacattagccttt

SEQ ID NO: 864085 - DNA, 15 bp, Homo sapiens
agacattagccttta

SEQ ID NO: 864086 - DNA, 15 bp, Homo sapiens
gacattagcctttat

SEQ ID NO: 864087 - DNA, 15 bp, Homo sapiens
acattagcctttata

SEQ ID NO: 864088 - DNA, 15 bp, Homo sapiens
cattagcctttataa

SEQ ID NO: 864089 - DNA, 15 bp, Homo sapiens
attagcctttataaa

SEQ ID NO: 864090 - DNA, 15 bp, Homo sapiens
ttagcctttataaaa

SEQ ID NO: 864091 - DNA, 15 bp, Homo sapiens
tagcctttataaaat

SEQ ID NO: 864092 - DNA, 15 bp, Homo sapiens
agcctttataaaatc

SEQ ID NO: 864093 - DNA, 15 bp, Homo sapiens
gcctttataaaatct

SEQ ID NO: 864094 - DNA, 15 bp, Homo sapiens
cctttataaaatctg

SEQ ID NO: 864095 - DNA, 15 bp, Homo sapiens
ctttataaaatctgc

SEQ ID NO: 864096 - DNA, 15 bp, Homo sapiens
tttataaaatctgca

SEQ ID NO: 864097 - DNA, 15 bp, Homo sapiens
ttataaaatctgcaa

SEQ ID NO: 864098 - DNA, 15 bp, Homo sapiens
tataaaatctgcaag

SEQ ID NO: 864099 - DNA, 15 bp, Homo sapiens
ataaaatctgcaagt

SEQ ID NO: 864100 - DNA, 15 bp, Homo sapiens
taaaatctgcaagta

SEQ ID NO: 864101 - DNA, 15 bp, Homo sapiens
aaaatctgcaagtat

SEQ ID NO: 864102 - DNA, 15 bp, Homo sapiens
aaatctgcaagtatt

SEQ ID NO: 864103 - DNA, 15 bp, Homo sapiens
aatctgcaagtattg

SEQ ID NO: 864104 - DNA, 15 bp, Homo sapiens
atctgcaagtattgc

SEQ ID NO: 864105 - DNA, 15 bp, Homo sapiens
tctgcaagtattgcc

SEQ ID NO: 864106 - DNA, 15 bp, Homo sapiens
ctgcaagtattgcca

SEQ ID NO: 864107 - DNA, 15 bp, Homo sapiens
tgcaagtattgccaa

SEQ ID NO: 864108 - DNA, 15 bp, Homo sapiens
gcaagtattgccaaa

SEQ ID NO: 864109 - DNA, 15 bp, Homo sapiens
caagtattgccaaat

SEQ ID NO: 864110 - DNA, 15 bp, Homo sapiens
aagtattgccaaatc

SEQ ID NO: 864111 - DNA, 15 bp, Homo sapiens
agtattgccaaatca

SEQ ID NO: 864112 - DNA, 15 bp, Homo sapiens
gtattgccaaatcaa

SEQ ID NO: 864113 - DNA, 15 bp, Homo sapiens
tattgccaaatcaaa

SEQ ID NO: 864114 - DNA, 15 bp, Homo sapiens
attgccaaatcaaaa

SEQ ID NO: 864115 - DNA, 15 bp, Homo sapiens
ttgccaaatcaaaat

SEQ ID NO: 864116 - DNA, 15 bp, Homo sapiens
tgccaaatcaaaata

SEQ ID NO: 864117 - DNA, 15 bp, Homo sapiens
gccaaatcaaaataa

SEQ ID NO: 864118 - DNA, 15 bp, Homo sapiens
aatcaaaataaaatt

SEQ ID NO: 864119 - DNA, 15 bp, Homo sapiens
atcaaaataaaattt

SEQ ID NO: 864120 - DNA, 15 bp, Homo sapiens
tcaaaataaaattta

SEQ ID NO: 864121 - DNA, 15 bp, Homo sapiens
caaaataaaatttac

SEQ ID NO: 864122 - DNA, 15 bp, Homo sapiens
aaaataaaatttaca

SEQ ID NO: 864123 - DNA, 15 bp, Homo sapiens
aaataaaatttacag

SEQ ID NO: 864124 - DNA, 15 bp, Homo sapiens
aataaaatttacagg

SEQ ID NO: 864125 - DNA, 15 bp, Homo sapiens
ataaaatttacagga

SEQ ID NO: 864126 - DNA, 15 bp, Homo sapiens
taaaatttacaggaa

SEQ ID NO: 864127 - DNA, 15 bp, Homo sapiens
aaaatttacaggaaa

SEQ ID NO: 864128 - DNA, 15 bp, Homo sapiens
aaatttacaggaaag

SEQ ID NO: 864129 - DNA, 15 bp, Homo sapiens
aatttacaggaaagc

SEQ ID NO: 864130 - DNA, 15 bp, Homo sapiens
atttacaggaaagca

SEQ ID NO: 864131 - DNA, 15 bp, Homo sapiens
tttacaggaaagcag

SEQ ID NO: 864132 - DNA, 15 bp, Homo sapiens
ttacaggaaagcagg

SEQ ID NO: 864133 - DNA, 15 bp, Homo sapiens
tacaggaaagcagga

SEQ ID NO: 864134 - DNA, 15 bp, Homo sapiens
acaggaaagcaggat

SEQ ID NO: 864135 - DNA, 15 bp, Homo sapiens
caggaaagcaggatc

SEQ ID NO: 864136 - DNA, 15 bp, Homo sapiens
aggaaagcaggatca

SEQ ID NO: 864137 - DNA, 15 bp, Homo sapiens
ggaaagcaggatcat

SEQ ID NO: 864138 - DNA, 15 bp, Homo sapiens
gaaagcaggatcata

SEQ ID NO: 864139 - DNA, 15 bp, Homo sapiens
aaagcaggatcataa

SEQ ID NO: 864140 - DNA, 15 bp, Homo sapiens
aagcaggatcataaa

SEQ ID NO: 864141 - DNA, 15 bp, Homo sapiens
agcaggatcataaat

SEQ ID NO: 864142 - DNA, 15 bp, Homo sapiens
gcaggatcataaata

SEQ ID NO: 864143 - DNA, 15 bp, Homo sapiens
caggatcataaatat

SEQ ID NO: 864144 - DNA, 15 bp, Homo sapiens
aggatcataaatata

SEQ ID NO: 864145 - DNA, 15 bp, Homo sapiens
ggatcataaatataa

SEQ ID NO: 864146 - DNA, 15 bp, Homo sapiens
gatcataaatataat

SEQ ID NO: 864147 - DNA, 15 bp, Homo sapiens
atcataaatataatc

SEQ ID NO: 864148 - DNA, 15 bp, Homo sapiens
tcataaatataatct

SEQ ID NO: 864149 - DNA, 15 bp, Homo sapiens
cataaatataatcta

SEQ ID NO: 864150 - DNA, 15 bp, Homo sapiens
ataaatataatctaa

SEQ ID NO: 864151 - DNA, 15 bp, Homo sapiens
taaatataatctaaa

SEQ ID NO: 864152 - DNA, 15 bp, Homo sapiens
aaatataatctaaaa

SEQ ID NO: 864153 - DNA, 15 bp, Homo sapiens
aatataatctaaaat

SEQ ID NO: 864154 - DNA, 15 bp, Homo sapiens
atataatctaaaatc

SEQ ID NO: 864155 - DNA, 15 bp, Homo sapiens
tataatctaaaatct

SEQ ID NO: 864156 - DNA, 15 bp, Homo sapiens
ataatctaaaatctt

SEQ ID NO: 864157 - DNA, 15 bp, Homo sapiens
taatctaaaatctta

SEQ ID NO: 864158 - DNA, 15 bp, Homo sapiens
aatctaaaatcttag

SEQ ID NO: 864159 - DNA, 15 bp, Homo sapiens
atctaaaatcttaga

SEQ ID NO: 864160 - DNA, 15 bp, Homo sapiens
tctaaaatcttagaa

SEQ ID NO: 864161 - DNA, 15 bp, Homo sapiens
ctaaaatcttagaac

SEQ ID NO: 864162 - DNA, 15 bp, Homo sapiens
taaaatcttagaacc

SEQ ID NO: 864163 - DNA, 15 bp, Homo sapiens
aaaatcttagaacct

SEQ ID NO: 864164 - DNA, 15 bp, Homo sapiens
aaatcttagaacctg

SEQ ID NO: 864165 - DNA, 15 bp, Homo sapiens
aatcttagaacctgt

SEQ ID NO: 864166 - DNA, 15 bp, Homo sapiens
atcttagaacctgtg

SEQ ID NO: 864167 - DNA, 15 bp, Homo sapiens
tcttagaacctgtgg

SEQ ID NO: 864168 - DNA, 15 bp, Homo sapiens
cttagaacctgtggt

SEQ ID NO: 864169 - DNA, 15 bp, Homo sapiens
ttagaacctgtggtt

SEQ ID NO: 864170 - DNA, 15 bp, Homo sapiens
tagaacctgtggtta

SEQ ID NO: 864171 - DNA, 15 bp, Homo sapiens
agaacctgtggttat

SEQ ID NO: 864172 - DNA, 15 bp, Homo sapiens
gaacctgtggttatg

SEQ ID NO: 864173 - DNA, 15 bp, Homo sapiens
aacctgtggttatga

SEQ ID NO: 864174 - DNA, 15 bp, Homo sapiens
acctgtggttatgat

SEQ ID NO: 864175 - DNA, 15 bp, Homo sapiens
cctgtggttatgatt

SEQ ID NO: 864176 - DNA, 15 bp, Homo sapiens
ctgtggttatgattt

SEQ ID NO: 864177 - DNA, 15 bp, Homo sapiens
tgtggttatgatttt

SEQ ID NO: 864178 - DNA, 15 bp, Homo sapiens
gtggttatgatttta

SEQ ID NO: 864179 - DNA, 15 bp, Homo sapiens
tggttatgattttaa

SEQ ID NO: 864180 - DNA, 15 bp, Homo sapiens
ggttatgattttaaa

SEQ ID NO: 864181 - DNA, 15 bp, Homo sapiens
gttatgattttaaat

SEQ ID NO: 864182 - DNA, 15 bp, Homo sapiens
ttatgattttaaata

SEQ ID NO: 864183 - DNA, 15 bp, Homo sapiens
tatgattttaaatac

SEQ ID NO: 864184 - DNA, 15 bp, Homo sapiens
atgattttaaatact

SEQ ID NO: 864185 - DNA, 15 bp, Homo sapiens
tgattttaaatacta

SEQ ID NO: 864186 - DNA, 15 bp, Homo sapiens
gattttaaatactaa

SEQ ID NO: 864187 - DNA, 15 bp, Homo sapiens
attttaaatactaat

SEQ ID NO: 864188 - DNA, 15 bp, Homo sapiens
ttttaaatactaata

SEQ ID NO: 864189 - DNA, 15 bp, Homo sapiens
tttaaatactaatac

SEQ ID NO: 864190 - DNA, 15 bp, Homo sapiens
ttaaatactaataca

SEQ ID NO: 864191 - DNA, 15 bp, Homo sapiens
taaatactaatacaa

SEQ ID NO: 864192 - DNA, 15 bp, Homo sapiens
aaatactaatacaat

SEQ ID NO: 864193 - DNA, 15 bp, Homo sapiens
aatactaatacaatg

SEQ ID NO: 864194 - DNA, 15 bp, Homo sapiens
atactaatacaatgc

SEQ ID NO: 864195 - DNA, 15 bp, Homo sapiens
tactaatacaatgca

SEQ ID NO: 864196 - DNA, 15 bp, Homo sapiens
actaatacaatgcaa

SEQ ID NO: 864197 - DNA, 15 bp, Homo sapiens
ctaatacaatgcaaa

SEQ ID NO: 864198 - DNA, 15 bp, Homo sapiens
taatacaatgcaaaa

SEQ ID NO: 864199 - DNA, 15 bp, Homo sapiens
aatacaatgcaaaat

SEQ ID NO: 864200 - DNA, 15 bp, Homo sapiens
atacaatgcaaaatt

SEQ ID NO: 864201 - DNA, 15 bp, Homo sapiens
tacaatgcaaaattt

SEQ ID NO: 864202 - DNA, 15 bp, Homo sapiens
acaatgcaaaatttt

SEQ ID NO: 864203 - DNA, 15 bp, Homo sapiens
caatgcaaaattttt

SEQ ID NO: 864204 - DNA, 15 bp, Homo sapiens
aatgcaaaattttta

SEQ ID NO: 864205 - DNA, 15 bp, Homo sapiens
atgcaaaatttttac

SEQ ID NO: 864206 - DNA, 15 bp, Homo sapiens
tgcaaaatttttacc

SEQ ID NO: 864207 - DNA, 15 bp, Homo sapiens
gcaaaatttttacct

SEQ ID NO: 864208 - DNA, 15 bp, Homo sapiens
caaaatttttacctg

SEQ ID NO: 864209 - DNA, 15 bp, Homo sapiens
aaaatttttacctgt

SEQ ID NO: 864210 - DNA, 15 bp, Homo sapiens
aaatttttacctgtt

SEQ ID NO: 864211 - DNA, 15 bp, Homo sapiens
aatttttacctgttt

SEQ ID NO: 864212 - DNA, 15 bp, Homo sapiens
atttttacctgttta

SEQ ID NO: 864213 - DNA, 15 bp, Homo sapiens
tttttacctgtttag

SEQ ID NO: 864214 - DNA, 15 bp, Homo sapiens
ttttacctgtttagg

SEQ ID NO: 864215 - DNA, 15 bp, Homo sapiens
tttacctgtttaggt

SEQ ID NO: 864216 - DNA, 15 bp, Homo sapiens
ttacctgtttaggtt

SEQ ID NO: 864217 - DNA, 15 bp, Homo sapiens
tacctgtttaggttt

SEQ ID NO: 864218 - DNA, 15 bp, Homo sapiens
acctgtttaggtttt

SEQ ID NO: 864219 - DNA, 15 bp, Homo sapiens
cctgtttaggttttt

SEQ ID NO: 864220 - DNA, 15 bp, Homo sapiens
ctgtttaggttttta

SEQ ID NO: 864221 - DNA, 15 bp, Homo sapiens
tgtttaggtttttat

SEQ ID NO: 864222 - DNA, 15 bp, Homo sapiens
gtttaggtttttatt

SEQ ID NO: 864223 - DNA, 15 bp, Homo sapiens
tttaggtttttattt

SEQ ID NO: 864224 - DNA, 15 bp, Homo sapiens
ttaggtttttatttc

SEQ ID NO: 864225 - DNA, 15 bp, Homo sapiens
taggtttttatttca

SEQ ID NO: 864226 - DNA, 15 bp, Homo sapiens
aggtttttatttcat

SEQ ID NO: 864227 - DNA, 15 bp, Homo sapiens
ggtttttatttcatc

SEQ ID NO: 864228 - DNA, 15 bp, Homo sapiens
gtttttatttcatca

SEQ ID NO: 864229 - DNA, 15 bp, Homo sapiens
tttttatttcatcag

SEQ ID NO: 864230 - DNA, 15 bp, Homo sapiens
ttttatttcatcagt

SEQ ID NO: 864231 - DNA, 15 bp, Homo sapiens
tttatttcatcagtt

SEQ ID NO: 864232 - DNA, 15 bp, Homo sapiens
ttatttcatcagttc

SEQ ID NO: 864233 - DNA, 15 bp, Homo sapiens
tatttcatcagttca

SEQ ID NO: 864234 - DNA, 15 bp, Homo sapiens
atttcatcagttcat

SEQ ID NO: 864235 - DNA, 15 bp, Homo sapiens
tttcatcagttcata

SEQ ID NO: 864236 - DNA, 15 bp, Homo sapiens
ttcatcagttcatat

SEQ ID NO: 864237 - DNA, 15 bp, Homo sapiens
tcatcagttcatatt

SEQ ID NO: 864238 - DNA, 15 bp, Homo sapiens
catcagttcatattt

SEQ ID NO: 864239 - DNA, 15 bp, Homo sapiens
atcagttcatattta

SEQ ID NO: 864240 - DNA, 15 bp, Homo sapiens
tcagttcatatttag

SEQ ID NO: 864241 - DNA, 15 bp, Homo sapiens
cagttcatatttagg

SEQ ID NO: 864242 - DNA, 15 bp, Homo sapiens
agttcatatttaggt

SEQ ID NO: 864243 - DNA, 15 bp, Homo sapiens
gttcatatttaggta

SEQ ID NO: 864244 - DNA, 15 bp, Homo sapiens
ttcatatttaggtat

SEQ ID NO: 864245 - DNA, 15 bp, Homo sapiens
tcatatttaggtata

SEQ ID NO: 864246 - DNA, 15 bp, Homo sapiens
catatttaggtatat

SEQ ID NO: 864247 - DNA, 15 bp, Homo sapiens
atatttaggtatata

SEQ ID NO: 864248 - DNA, 15 bp, Homo sapiens
tatttaggtatatac

SEQ ID NO: 864249 - DNA, 15 bp, Homo sapiens
atttaggtatatact

SEQ ID NO: 864250 - DNA, 15 bp, Homo sapiens
tttaggtatatactt

SEQ ID NO: 864251 - DNA, 15 bp, Homo sapiens
ttaggtatatacttt

SEQ ID NO: 864252 - DNA, 15 bp, Homo sapiens
taggtatatactttt

SEQ ID NO: 864253 - DNA, 15 bp, Homo sapiens
aggtatatactttta

SEQ ID NO: 864254 - DNA, 15 bp, Homo sapiens
ggtatatacttttac

SEQ ID NO: 864255 - DNA, 15 bp, Homo sapiens
gtatatacttttact

SEQ ID NO: 864256 - DNA, 15 bp, Homo sapiens
tatatacttttactg

SEQ ID NO: 864257 - DNA, 15 bp, Homo sapiens
atatacttttactgt

SEQ ID NO: 864258 - DNA, 15 bp, Homo sapiens
tatacttttactgtt

SEQ ID NO: 864259 - DNA, 15 bp, Homo sapiens
atacttttactgttc

SEQ ID NO: 864260 - DNA, 15 bp, Homo sapiens
tacttttactgttct

SEQ ID NO: 864261 - DNA, 15 bp, Homo sapiens
acttttactgttctc

SEQ ID NO: 864262 - DNA, 15 bp, Homo sapiens
cttttactgttctcc

SEQ ID NO: 864263 - DNA, 15 bp, Homo sapiens
ttttactgttctcct

SEQ ID NO: 864264 - DNA, 15 bp, Homo sapiens
tttactgttctcctt

SEQ ID NO: 864265 - DNA, 15 bp, Homo sapiens
ttactgttctccttt

SEQ ID NO: 864266 - DNA, 15 bp, Homo sapiens
tactgttctcctttt

SEQ ID NO: 864267 - DNA, 15 bp, Homo sapiens
actgttctccttttt

SEQ ID NO: 864268 - DNA, 15 bp, Homo sapiens
ctgttctcctttttt

SEQ ID NO: 864269 - DNA, 15 bp, Homo sapiens
tgttctcctttttta

SEQ ID NO: 864270 - DNA, 15 bp, Homo sapiens
gttctccttttttat

SEQ ID NO: 864271 - DNA, 15 bp, Homo sapiens
ttctccttttttata

SEQ ID NO: 864272 - DNA, 15 bp, Homo sapiens
tctccttttttataa

SEQ ID NO: 864273 - DNA, 15 bp, Homo sapiens
ctccttttttataat

SEQ ID NO: 864274 - DNA, 15 bp, Homo sapiens
tccttttttataatt

SEQ ID NO: 864275 - DNA, 15 bp, Homo sapiens
ccttttttataattt

SEQ ID NO: 864276 - DNA, 15 bp, Homo sapiens
cttttttataattta

SEQ ID NO: 864277 - DNA, 15 bp, Homo sapiens
ttttttataatttac

SEQ ID NO: 864278 - DNA, 15 bp, Homo sapiens
tttttataatttacc

SEQ ID NO: 864279 - DNA, 15 bp, Homo sapiens
ttttataatttacca

SEQ ID NO: 864280 - DNA, 15 bp, Homo sapiens
tttataatttaccat

SEQ ID NO: 864281 - DNA, 15 bp, Homo sapiens
ttataatttaccatt

SEQ ID NO: 864282 - DNA, 15 bp, Homo sapiens
tataatttaccattc

SEQ ID NO: 864283 - DNA, 15 bp, Homo sapiens
ataatttaccattca

SEQ ID NO: 864284 - DNA, 15 bp, Homo sapiens
taatttaccattcac

SEQ ID NO: 864285 - DNA, 15 bp, Homo sapiens
aatttaccattcaca

SEQ ID NO: 864286 - DNA, 15 bp, Homo sapiens
atttaccattcacaa

SEQ ID NO: 864287 - DNA, 15 bp, Homo sapiens
tttaccattcacaaa

SEQ ID NO: 864288 - DNA, 15 bp, Homo sapiens
ttaccattcacaaag

SEQ ID NO: 864289 - DNA, 15 bp, Homo sapiens
taccattcacaaaga

SEQ ID NO: 864290 - DNA, 15 bp, Homo sapiens
accattcacaaagat

SEQ ID NO: 864291 - DNA, 15 bp, Homo sapiens
ccattcacaaagatg

SEQ ID NO: 864292 - DNA, 15 bp, Homo sapiens
cattcacaaagatga

SEQ ID NO: 864293 - DNA, 15 bp, Homo sapiens
attcacaaagatgat

SEQ ID NO: 864294 - DNA, 15 bp, Homo sapiens
ttcacaaagatgatg

SEQ ID NO: 864295 - DNA, 15 bp, Homo sapiens
tcacaaagatgatga

SEQ ID NO: 864296 - DNA, 15 bp, Homo sapiens
cacaaagatgatgat

SEQ ID NO: 864297 - DNA, 15 bp, Homo sapiens
acaaagatgatgatg

SEQ ID NO: 864298 - DNA, 15 bp, Homo sapiens
caaagatgatgatgt

SEQ ID NO: 864299 - DNA, 15 bp, Homo sapiens
aaagatgatgatgtt

SEQ ID NO: 864300 - DNA, 15 bp, Homo sapiens
aagatgatgatgtta

SEQ ID NO: 864301 - DNA, 15 bp, Homo sapiens
agatgatgatgttag

SEQ ID NO: 864302 - DNA, 15 bp, Homo sapiens
gatgatgatgttagt

SEQ ID NO: 864303 - DNA, 15 bp, Homo sapiens
atgatgatgttagtc

SEQ ID NO: 864304 - DNA, 15 bp, Homo sapiens
tgatgatgttagtct

SEQ ID NO: 864305 - DNA, 15 bp, Homo sapiens
gatgatgttagtcta

SEQ ID NO: 864306 - DNA, 15 bp, Homo sapiens
atgatgttagtctaa

SEQ ID NO: 864307 - DNA, 15 bp, Homo sapiens
tgatgttagtctaac

SEQ ID NO: 864308 - DNA, 15 bp, Homo sapiens
gatgttagtctaact

SEQ ID NO: 864309 - DNA, 15 bp, Homo sapiens
atgttagtctaactt

SEQ ID NO: 864310 - DNA, 15 bp, Homo sapiens
tgttagtctaacttt

SEQ ID NO: 864311 - DNA, 15 bp, Homo sapiens
gttagtctaacttta

SEQ ID NO: 864312 - DNA, 15 bp, Homo sapiens
ttagtctaactttaa

SEQ ID NO: 864313 - DNA, 15 bp, Homo sapiens
tagtctaactttaat

SEQ ID NO: 864314 - DNA, 15 bp, Homo sapiens
agtctaactttaatg

SEQ ID NO: 864315 - DNA, 15 bp, Homo sapiens
gtctaactttaatgt

SEQ ID NO: 864316 - DNA, 15 bp, Homo sapiens
tctaactttaatgtc

SEQ ID NO: 864317 - DNA, 15 bp, Homo sapiens
ctaactttaatgtca

SEQ ID NO: 864318 - DNA, 15 bp, Homo sapiens
taactttaatgtcat

SEQ ID NO: 864319 - DNA, 15 bp, Homo sapiens
aactttaatgtcatg

SEQ ID NO: 864320 - DNA, 15 bp, Homo sapiens
actttaatgtcatga

SEQ ID NO: 864321 - DNA, 15 bp, Homo sapiens
ctttaatgtcatgag

SEQ ID NO: 864322 - DNA, 15 bp, Homo sapiens
tttaatgtcatgagt

SEQ ID NO: 864323 - DNA, 15 bp, Homo sapiens
ttaatgtcatgagtg

SEQ ID NO: 864324 - DNA, 15 bp, Homo sapiens
taatgtcatgagtgc

SEQ ID NO: 864325 - DNA, 15 bp, Homo sapiens
aatgtcatgagtgct

SEQ ID NO: 864326 - DNA, 15 bp, Homo sapiens
atgtcatgagtgctt

SEQ ID NO: 864327 - DNA, 15 bp, Homo sapiens
tgtcatgagtgcttt

SEQ ID NO: 864328 - DNA, 15 bp, Homo sapiens
gtcatgagtgctttg

SEQ ID NO: 864329 - DNA, 15 bp, Homo sapiens
tcatgagtgctttga

SEQ ID NO: 864330 - DNA, 15 bp, Homo sapiens
catgagtgctttgag

SEQ ID NO: 864331 - DNA, 15 bp, Homo sapiens
atgagtgctttgagt

SEQ ID NO: 864332 - DNA, 15 bp, Homo sapiens
tgagtgctttgagta

SEQ ID NO: 864333 - DNA, 15 bp, Homo sapiens
gagtgctttgagtag

SEQ ID NO: 864334 - DNA, 15 bp, Homo sapiens
agtgctttgagtagt

SEQ ID NO: 864335 - DNA, 15 bp, Homo sapiens
gtgctttgagtagta

SEQ ID NO: 864336 - DNA, 15 bp, Homo sapiens
tgctttgagtagtag

SEQ ID NO: 864337 - DNA, 15 bp, Homo sapiens
gctttgagtagtagt

SEQ ID NO: 864338 - DNA, 15 bp, Homo sapiens
ctttgagtagtagtg

SEQ ID NO: 864339 - DNA, 15 bp, Homo sapiens
tttgagtagtagtgc

SEQ ID NO: 864340 - DNA, 15 bp, Homo sapiens
ttgagtagtagtgct

SEQ ID NO: 864341 - DNA, 15 bp, Homo sapiens
tgagtagtagtgcta

SEQ ID NO: 864342 - DNA, 15 bp, Homo sapiens
gagtagtagtgctaa

SEQ ID NO: 864343 - DNA, 15 bp, Homo sapiens
agtagtagtgctaag

SEQ ID NO: 864344 - DNA, 15 bp, Homo sapiens
gtagtagtgctaagt

SEQ ID NO: 864345 - DNA, 15 bp, Homo sapiens
tagtagtgctaagtt

SEQ ID NO: 864346 - DNA, 15 bp, Homo sapiens
agtagtgctaagttt

SEQ ID NO: 864347 - DNA, 15 bp, Homo sapiens
gtagtgctaagtttt

SEQ ID NO: 864348 - DNA, 15 bp, Homo sapiens
tagtgctaagttttt

SEQ ID NO: 864349 - DNA, 15 bp, Homo sapiens
agtgctaagtttttg

SEQ ID NO: 864350 - DNA, 15 bp, Homo sapiens
gtgctaagtttttgt

SEQ ID NO: 864351 - DNA, 15 bp, Homo sapiens
tgctaagtttttgtt

SEQ ID NO: 864352 - DNA, 15 bp, Homo sapiens
gctaagtttttgttg

SEQ ID NO: 864353 - DNA, 15 bp, Homo sapiens
ctaagtttttgttga

SEQ ID NO: 864354 - DNA, 15 bp, Homo sapiens
taagtttttgttgag

SEQ ID NO: 864355 - DNA, 15 bp, Homo sapiens
aagtttttgttgagt

SEQ ID NO: 864356 - DNA, 15 bp, Homo sapiens
agtttttgttgagta

SEQ ID NO: 864357 - DNA, 15 bp, Homo sapiens
gtttttgttgagtag

SEQ ID NO: 864358 - DNA, 15 bp, Homo sapiens
tttttgttgagtagt

SEQ ID NO: 864359 - DNA, 15 bp, Homo sapiens
ttttgttgagtagta

SEQ ID NO: 864360 - DNA, 15 bp, Homo sapiens
tttgttgagtagtag

SEQ ID NO: 864361 - DNA, 15 bp, Homo sapiens
ttgttgagtagtagt

SEQ ID NO: 864362 - DNA, 15 bp, Homo sapiens
tgttgagtagtagtg

SEQ ID NO: 864363 - DNA, 15 bp, Homo sapiens
gttgagtagtagtgt

SEQ ID NO: 864364 - DNA, 15 bp, Homo sapiens
ttgagtagtagtgtg

SEQ ID NO: 864365 - DNA, 15 bp, Homo sapiens
tgagtagtagtgtgc

SEQ ID NO: 864366 - DNA, 15 bp, Homo sapiens
gagtagtagtgtgct

SEQ ID NO: 864367 - DNA, 15 bp, Homo sapiens
agtagtagtgtgctt

SEQ ID NO: 864368 - DNA, 15 bp, Homo sapiens
gtagtagtgtgcttt

SEQ ID NO: 864369 - DNA, 15 bp, Homo sapiens
tagtagtgtgctttt

SEQ ID NO: 864370 - DNA, 15 bp, Homo sapiens
agtagtgtgcttttt

SEQ ID NO: 864371 - DNA, 15 bp, Homo sapiens
gtagtgtgctttttt

SEQ ID NO: 864372 - DNA, 15 bp, Homo sapiens
tagtgtgcttttttg

SEQ ID NO: 864373 - DNA, 15 bp, Homo sapiens
agtgtgcttttttga

SEQ ID NO: 864374 - DNA, 15 bp, Homo sapiens
gtgtgcttttttgat

SEQ ID NO: 864375 - DNA, 15 bp, Homo sapiens
tgtgcttttttgatt

SEQ ID NO: 864376 - DNA, 15 bp, Homo sapiens
gtgcttttttgatta

SEQ ID NO: 864377 - DNA, 15 bp, Homo sapiens
tgcttttttgattag

SEQ ID NO: 864378 - DNA, 15 bp, Homo sapiens
gcttttttgattagt

SEQ ID NO: 864379 - DNA, 15 bp, Homo sapiens
cttttttgattagta

SEQ ID NO: 864380 - DNA, 15 bp, Homo sapiens
ttttttgattagtag

SEQ ID NO: 864381 - DNA, 15 bp, Homo sapiens
tttttgattagtagt

SEQ ID NO: 864382 - DNA, 15 bp, Homo sapiens
ttttgattagtagtg

SEQ ID NO: 864383 - DNA, 15 bp, Homo sapiens
tttgattagtagtga

SEQ ID NO: 864384 - DNA, 15 bp, Homo sapiens
ttgattagtagtgat

SEQ ID NO: 864385 - DNA, 15 bp, Homo sapiens
tgattagtagtgata

SEQ ID NO: 864386 - DNA, 15 bp, Homo sapiens
gattagtagtgatag

SEQ ID NO: 864387 - DNA, 15 bp, Homo sapiens
attagtagtgatagg

SEQ ID NO: 864388 - DNA, 15 bp, Homo sapiens
ttagtagtgataggt

SEQ ID NO: 864389 - DNA, 15 bp, Homo sapiens
tagtagtgataggtt

SEQ ID NO: 864390 - DNA, 15 bp, Homo sapiens
agtagtgataggttt

SEQ ID NO: 864391 - DNA, 15 bp, Homo sapiens
gtagtgataggtttt

SEQ ID NO: 864392 - DNA, 15 bp, Homo sapiens
tagtgataggttttt

SEQ ID NO: 864393 - DNA, 15 bp, Homo sapiens
agtgataggtttttg

SEQ ID NO: 864394 - DNA, 15 bp, Homo sapiens
gtgataggtttttga

SEQ ID NO: 864395 - DNA, 15 bp, Homo sapiens
tgataggtttttgat

SEQ ID NO: 864396 - DNA, 15 bp, Homo sapiens
gataggtttttgatg

SEQ ID NO: 864397 - DNA, 15 bp, Homo sapiens
ataggtttttgatga

SEQ ID NO: 864398 - DNA, 15 bp, Homo sapiens
taggtttttgatgag

SEQ ID NO: 864399 - DNA, 15 bp, Homo sapiens
aggtttttgatgagt

SEQ ID NO: 864400 - DNA, 15 bp, Homo sapiens
ggtttttgatgagta

SEQ ID NO: 864401 - DNA, 15 bp, Homo sapiens
gtttttgatgagtaa

SEQ ID NO: 864402 - DNA, 15 bp, Homo sapiens
tttttgatgagtaag

SEQ ID NO: 864403 - DNA, 15 bp, Homo sapiens
ttttgatgagtaagc

SEQ ID NO: 864404 - DNA, 15 bp, Homo sapiens
tttgatgagtaagcc

SEQ ID NO: 864405 - DNA, 15 bp, Homo sapiens
ttgatgagtaagcct

SEQ ID NO: 864406 - DNA, 15 bp, Homo sapiens
tgatgagtaagcctg

SEQ ID NO: 864407 - DNA, 15 bp, Homo sapiens
gatgagtaagcctgc

SEQ ID NO: 864408 - DNA, 15 bp, Homo sapiens
atgagtaagcctgct

SEQ ID NO: 864409 - DNA, 15 bp, Homo sapiens
tgagtaagcctgcta

SEQ ID NO: 864410 - DNA, 15 bp, Homo sapiens
gagtaagcctgctag

SEQ ID NO: 864411 - DNA, 15 bp, Homo sapiens
agtaagcctgctagc

SEQ ID NO: 864412 - DNA, 15 bp, Homo sapiens
gtaagcctgctagca

SEQ ID NO: 864413 - DNA, 15 bp, Homo sapiens
taagcctgctagcag

SEQ ID NO: 864414 - DNA, 15 bp, Homo sapiens
aagcctgctagcagc

SEQ ID NO: 864415 - DNA, 15 bp, Homo sapiens
agcctgctagcagca

SEQ ID NO: 864416 - DNA, 15 bp, Homo sapiens
gcctgctagcagcat

SEQ ID NO: 864417 - DNA, 15 bp, Homo sapiens
cctgctagcagcata

SEQ ID NO: 864418 - DNA, 15 bp, Homo sapiens
ctgctagcagcatac

SEQ ID NO: 864419 - DNA, 15 bp, Homo sapiens
tgctagcagcataca

SEQ ID NO: 864420 - DNA, 15 bp, Homo sapiens
gctagcagcatacaa

SEQ ID NO: 864421 - DNA, 15 bp, Homo sapiens
ctagcagcatacaaa

SEQ ID NO: 864422 - DNA, 15 bp, Homo sapiens
tagcagcatacaaac

SEQ ID NO: 864423 - DNA, 15 bp, Homo sapiens
agcagcatacaaaca

SEQ ID NO: 864424 - DNA, 15 bp, Homo sapiens
gcagcatacaaacaa

SEQ ID NO: 864425 - DNA, 15 bp, Homo sapiens
cagcatacaaacaaa

SEQ ID NO: 864426 - DNA, 15 bp, Homo sapiens
agcatacaaacaaac

SEQ ID NO: 864427 - DNA, 15 bp, Homo sapiens
gcatacaaacaaaca

SEQ ID NO: 864428 - DNA, 15 bp, Homo sapiens
catacaaacaaacaa

SEQ ID NO: 864429 - DNA, 15 bp, Homo sapiens
atacaaacaaacaag

SEQ ID NO: 864430 - DNA, 15 bp, Homo sapiens
tacaaacaaacaagc

SEQ ID NO: 864431 - DNA, 15 bp, Homo sapiens
acaaacaaacaagca

SEQ ID NO: 864432 - DNA, 15 bp, Homo sapiens
caaacaaacaagcaa

SEQ ID NO: 864433 - DNA, 15 bp, Homo sapiens
aaacaaacaagcaag

SEQ ID NO: 864434 - DNA, 15 bp, Homo sapiens
aacaaacaagcaagt

SEQ ID NO: 864435 - DNA, 15 bp, Homo sapiens
acaaacaagcaagta

SEQ ID NO: 864436 - DNA, 15 bp, Homo sapiens
caaacaagcaagtat

SEQ ID NO: 864437 - DNA, 15 bp, Homo sapiens
aaacaagcaagtatc

SEQ ID NO: 864438 - DNA, 15 bp, Homo sapiens
aacaagcaagtatca

SEQ ID NO: 864439 - DNA, 15 bp, Homo sapiens
acaagcaagtatcag

SEQ ID NO: 864440 - DNA, 15 bp, Homo sapiens
caagcaagtatcagc

SEQ ID NO: 864441 - DNA, 15 bp, Homo sapiens
aagcaagtatcagcc

SEQ ID NO: 864442 - DNA, 15 bp, Homo sapiens
agcaagtatcagcct

SEQ ID NO: 864443 - DNA, 15 bp, Homo sapiens
gcaagtatcagccta

SEQ ID NO: 864444 - DNA, 15 bp, Homo sapiens
caagtatcagcctag

SEQ ID NO: 864445 - DNA, 15 bp, Homo sapiens
aagtatcagcctaga

SEQ ID NO: 864446 - DNA, 15 bp, Homo sapiens
agtatcagcctagag

SEQ ID NO: 864447 - DNA, 15 bp, Homo sapiens
gtatcagcctagaga

SEQ ID NO: 864448 - DNA, 15 bp, Homo sapiens
tatcagcctagagaa

SEQ ID NO: 864449 - DNA, 15 bp, Homo sapiens
atcagcctagagaag

SEQ ID NO: 864450 - DNA, 15 bp, Homo sapiens
tcagcctagagaagc

SEQ ID NO: 864451 - DNA, 15 bp, Homo sapiens
cagcctagagaagca

SEQ ID NO: 864452 - DNA, 15 bp, Homo sapiens
agcctagagaagcag

SEQ ID NO: 864453 - DNA, 15 bp, Homo sapiens
gcctagagaagcaga

SEQ ID NO: 864454 - DNA, 15 bp, Homo sapiens
cctagagaagcagaa

SEQ ID NO: 864455 - DNA, 15 bp, Homo sapiens
ctagagaagcagaaa

SEQ ID NO: 864456 - DNA, 15 bp, Homo sapiens
tagagaagcagaaaa

SEQ ID NO: 864457 - DNA, 15 bp, Homo sapiens
agagaagcagaaaag

SEQ ID NO: 864458 - DNA, 15 bp, Homo sapiens
gagaagcagaaaagg

SEQ ID NO: 864459 - DNA, 15 bp, Homo sapiens
agaagcagaaaaggc

SEQ ID NO: 864460 - DNA, 15 bp, Homo sapiens
gaagcagaaaaggca

SEQ ID NO: 864461 - DNA, 15 bp, Homo sapiens
aagcagaaaaggcat

SEQ ID NO: 864462 - DNA, 15 bp, Homo sapiens
agcagaaaaggcatt

SEQ ID NO: 864463 - DNA, 15 bp, Homo sapiens
gcagaaaaggcattt

SEQ ID NO: 864464 - DNA, 15 bp, Homo sapiens
cagaaaaggcatttg

SEQ ID NO: 864465 - DNA, 15 bp, Homo sapiens
agaaaaggcatttgg

SEQ ID NO: 864466 - DNA, 15 bp, Homo sapiens
gaaaaggcatttggg

SEQ ID NO: 864467 - DNA, 15 bp, Homo sapiens
aaaaggcatttgggt

SEQ ID NO: 864468 - DNA, 15 bp, Homo sapiens
aaaggcatttgggtt

SEQ ID NO: 864469 - DNA, 15 bp, Homo sapiens
aaggcatttgggttt

SEQ ID NO: 864470 - DNA, 15 bp, Homo sapiens
aggcatttgggtttc

SEQ ID NO: 864471 - DNA, 15 bp, Homo sapiens
ggcatttgggtttca

SEQ ID NO: 864472 - DNA, 15 bp, Homo sapiens
gcatttgggtttcaa

SEQ ID NO: 864473 - DNA, 15 bp, Homo sapiens
catttgggtttcaaa

SEQ ID NO: 864474 - DNA, 15 bp, Homo sapiens
atttgggtttcaaag

SEQ ID NO: 864475 - DNA, 15 bp, Homo sapiens
tttgggtttcaaagt

SEQ ID NO: 864476 - DNA, 15 bp, Homo sapiens
ttgggtttcaaagtc

SEQ ID NO: 864477 - DNA, 15 bp, Homo sapiens
tgggtttcaaagtca

SEQ ID NO: 864478 - DNA, 15 bp, Homo sapiens
gggtttcaaagtcac

SEQ ID NO: 864479 - DNA, 15 bp, Homo sapiens
ggtttcaaagtcaca

SEQ ID NO: 864480 - DNA, 15 bp, Homo sapiens
gtttcaaagtcacaa

SEQ ID NO: 864481 - DNA, 15 bp, Homo sapiens
tttcaaagtcacaag

SEQ ID NO: 864482 - DNA, 15 bp, Homo sapiens
ttcaaagtcacaagg

SEQ ID NO: 864483 - DNA, 15 bp, Homo sapiens
tcaaagtcacaaggc

SEQ ID NO: 864484 - DNA, 15 bp, Homo sapiens
caaagtcacaaggcc

SEQ ID NO: 864485 - DNA, 15 bp, Homo sapiens
aaagtcacaaggcct

SEQ ID NO: 864486 - DNA, 15 bp, Homo sapiens
aagtcacaaggccta

SEQ ID NO: 864487 - DNA, 15 bp, Homo sapiens
agtcacaaggcctag

SEQ ID NO: 864488 - DNA, 15 bp, Homo sapiens
gtcacaaggcctagg

SEQ ID NO: 864489 - DNA, 15 bp, Homo sapiens
tcacaaggcctaggc

SEQ ID NO: 864490 - DNA, 15 bp, Homo sapiens
cacaaggcctaggct

SEQ ID NO: 864491 - DNA, 15 bp, Homo sapiens
acaaggcctaggctt

SEQ ID NO: 864492 - DNA, 15 bp, Homo sapiens
caaggcctaggcttt

SEQ ID NO: 864493 - DNA, 15 bp, Homo sapiens
aaggcctaggcttta

SEQ ID NO: 864494 - DNA, 15 bp, Homo sapiens
aggcctaggctttag

SEQ ID NO: 864495 - DNA, 15 bp, Homo sapiens
ggcctaggctttagt

SEQ ID NO: 864496 - DNA, 15 bp, Homo sapiens
gcctaggctttagtc

SEQ ID NO: 864497 - DNA, 15 bp, Homo sapiens
cctaggctttagtct

SEQ ID NO: 864498 - DNA, 15 bp, Homo sapiens
ctaggctttagtcta

SEQ ID NO: 864499 - DNA, 15 bp, Homo sapiens
taggctttagtctaa

SEQ ID NO: 864500 - DNA, 15 bp, Homo sapiens
aggctttagtctaat

SEQ ID NO: 864501 - DNA, 15 bp, Homo sapiens
ggctttagtctaata

SEQ ID NO: 864502 - DNA, 15 bp, Homo sapiens
gctttagtctaatac

SEQ ID NO: 864503 - DNA, 15 bp, Homo sapiens
ctttagtctaataca

SEQ ID NO: 864504 - DNA, 15 bp, Homo sapiens
tttagtctaatacag

SEQ ID NO: 864505 - DNA, 15 bp, Homo sapiens
ttagtctaatacagc

SEQ ID NO: 864506 - DNA, 15 bp, Homo sapiens
tagtctaatacagct

SEQ ID NO: 864507 - DNA, 15 bp, Homo sapiens
agtctaatacagctg

SEQ ID NO: 864508 - DNA, 15 bp, Homo sapiens
gtctaatacagctga

SEQ ID NO: 864509 - DNA, 15 bp, Homo sapiens
tctaatacagctgat

SEQ ID NO: 864510 - DNA, 15 bp, Homo sapiens
ctaatacagctgata

SEQ ID NO: 864511 - DNA, 15 bp, Homo sapiens
taatacagctgataa

SEQ ID NO: 864512 - DNA, 15 bp, Homo sapiens
aatacagctgataat

SEQ ID NO: 864513 - DNA, 15 bp, Homo sapiens
atacagctgataata

SEQ ID NO: 864514 - DNA, 15 bp, Homo sapiens
tacagctgataatac

SEQ ID NO: 864515 - DNA, 15 bp, Homo sapiens
acagctgataataca

SEQ ID NO: 864516 - DNA, 15 bp, Homo sapiens
cagctgataatacaa

SEQ ID NO: 864517 - DNA, 15 bp, Homo sapiens
agctgataatacaat

SEQ ID NO: 864518 - DNA, 15 bp, Homo sapiens
gctgataatacaatt

SEQ ID NO: 864519 - DNA, 15 bp, Homo sapiens
ctgataatacaattt

SEQ ID NO: 864520 - DNA, 15 bp, Homo sapiens
tgataatacaatttg

SEQ ID NO: 864521 - DNA, 15 bp, Homo sapiens
gataatacaatttgt

SEQ ID NO: 864522 - DNA, 15 bp, Homo sapiens
ataatacaatttgtc

SEQ ID NO: 864523 - DNA, 15 bp, Homo sapiens
taatacaatttgtcc

SEQ ID NO: 864524 - DNA, 15 bp, Homo sapiens
aatacaatttgtcca

SEQ ID NO: 864525 - DNA, 15 bp, Homo sapiens
atacaatttgtccaa

SEQ ID NO: 864526 - DNA, 15 bp, Homo sapiens
tacaatttgtccaaa

SEQ ID NO: 864527 - DNA, 15 bp, Homo sapiens
acaatttgtccaaac

SEQ ID NO: 864528 - DNA, 15 bp, Homo sapiens
caatttgtccaaaca

SEQ ID NO: 864529 - DNA, 15 bp, Homo sapiens
aatttgtccaaacag

SEQ ID NO: 864530 - DNA, 15 bp, Homo sapiens
atttgtccaaacagg

SEQ ID NO: 864531 - DNA, 15 bp, Homo sapiens
tttgtccaaacagga

SEQ ID NO: 864532 - DNA, 15 bp, Homo sapiens
ttgtccaaacaggac

SEQ ID NO: 864533 - DNA, 15 bp, Homo sapiens
tgtccaaacaggaca

SEQ ID NO: 864534 - DNA, 15 bp, Homo sapiens
gtccaaacaggacat

SEQ ID NO: 864535 - DNA, 15 bp, Homo sapiens
tccaaacaggacatt

SEQ ID NO: 864536 - DNA, 15 bp, Homo sapiens
ccaaacaggacattt

SEQ ID NO: 864537 - DNA, 15 bp, Homo sapiens
caaacaggacatttt

SEQ ID NO: 864538 - DNA, 15 bp, Homo sapiens
aaacaggacattttt

SEQ ID NO: 864539 - DNA, 15 bp, Homo sapiens
aacaggacatttttg

SEQ ID NO: 864540 - DNA, 15 bp, Homo sapiens
acaggacatttttgg

SEQ ID NO: 864541 - DNA, 15 bp, Homo sapiens
caggacatttttggg

SEQ ID NO: 864542 - DNA, 15 bp, Homo sapiens
aggacatttttgggt

SEQ ID NO: 864543 - DNA, 15 bp, Homo sapiens
ggacatttttgggtg

SEQ ID NO: 864544 - DNA, 15 bp, Homo sapiens
gacatttttgggtgt

SEQ ID NO: 864545 - DNA, 15 bp, Homo sapiens
acatttttgggtgtg

SEQ ID NO: 864546 - DNA, 15 bp, Homo sapiens
catttttgggtgtgt

SEQ ID NO: 864547 - DNA, 15 bp, Homo sapiens
atttttgggtgtgtc

SEQ ID NO: 864548 - DNA, 15 bp, Homo sapiens
tttttgggtgtgtca

SEQ ID NO: 864549 - DNA, 15 bp, Homo sapiens
ttttgggtgtgtcaa

SEQ ID NO: 864550 - DNA, 15 bp, Homo sapiens
tttgggtgtgtcaaa

SEQ ID NO: 864551 - DNA, 15 bp, Homo sapiens
ttgggtgtgtcaaac

SEQ ID NO: 864552 - DNA, 15 bp, Homo sapiens
tgggtgtgtcaaaca

SEQ ID NO: 864553 - DNA, 15 bp, Homo sapiens
gggtgtgtcaaacac

SEQ ID NO: 864554 - DNA, 15 bp, Homo sapiens
ggtgtgtcaaacact

SEQ ID NO: 864555 - DNA, 15 bp, Homo sapiens
gtgtgtcaaacacta

SEQ ID NO: 864556 - DNA, 15 bp, Homo sapiens
tgtgtcaaacactaa

SEQ ID NO: 864557 - DNA, 15 bp, Homo sapiens
gtgtcaaacactaaa

SEQ ID NO: 864558 - DNA, 15 bp, Homo sapiens
tgtcaaacactaaac

SEQ ID NO: 864559 - DNA, 15 bp, Homo sapiens
gtcaaacactaaact

SEQ ID NO: 864560 - DNA, 15 bp, Homo sapiens
tcaaacactaaactg

SEQ ID NO: 864561 - DNA, 15 bp, Homo sapiens
caaacactaaactgg

SEQ ID NO: 864562 - DNA, 15 bp, Homo sapiens
aaacactaaactgga

SEQ ID NO: 864563 - DNA, 15 bp, Homo sapiens
aacactaaactggac

SEQ ID NO: 864564 - DNA, 15 bp, Homo sapiens
acactaaactggaca

SEQ ID NO: 864565 - DNA, 15 bp, Homo sapiens
cactaaactggacag

SEQ ID NO: 864566 - DNA, 15 bp, Homo sapiens
actaaactggacagg

SEQ ID NO: 864567 - DNA, 15 bp, Homo sapiens
ctaaactggacagga

SEQ ID NO: 864568 - DNA, 15 bp, Homo sapiens
taaactggacaggac

SEQ ID NO: 864569 - DNA, 15 bp, Homo sapiens
aaactggacaggaca

SEQ ID NO: 864570 - DNA, 15 bp, Homo sapiens
aactggacaggacat

SEQ ID NO: 864571 - DNA, 15 bp, Homo sapiens
actggacaggacatt

SEQ ID NO: 864572 - DNA, 15 bp, Homo sapiens
ctggacaggacatta

SEQ ID NO: 864573 - DNA, 15 bp, Homo sapiens
tggacaggacattat

SEQ ID NO: 864574 - DNA, 15 bp, Homo sapiens
ggacaggacattatg

SEQ ID NO: 864575 - DNA, 15 bp, Homo sapiens
gacaggacattatga

SEQ ID NO: 864576 - DNA, 15 bp, Homo sapiens
acaggacattatgac

SEQ ID NO: 864577 - DNA, 15 bp, Homo sapiens
caggacattatgaca

SEQ ID NO: 864578 - DNA, 15 bp, Homo sapiens
aggacattatgacaa

SEQ ID NO: 864579 - DNA, 15 bp, Homo sapiens
ggacattatgacaaa

SEQ ID NO: 864580 - DNA, 15 bp, Homo sapiens
gacattatgacaaaa

SEQ ID NO: 864581 - DNA, 15 bp, Homo sapiens
acattatgacaaaag

SEQ ID NO: 864582 - DNA, 15 bp, Homo sapiens
cattatgacaaaagt

SEQ ID NO: 864583 - DNA, 15 bp, Homo sapiens
attatgacaaaagtg

SEQ ID NO: 864584 - DNA, 15 bp, Homo sapiens
ttatgacaaaagtgc

SEQ ID NO: 864585 - DNA, 15 bp, Homo sapiens
tatgacaaaagtgca

SEQ ID NO: 864586 - DNA, 15 bp, Homo sapiens
atgacaaaagtgcaa

SEQ ID NO: 864587 - DNA, 15 bp, Homo sapiens
tgacaaaagtgcaaa

SEQ ID NO: 864588 - DNA, 15 bp, Homo sapiens
gacaaaagtgcaaag

SEQ ID NO: 864589 - DNA, 15 bp, Homo sapiens
acaaaagtgcaaagc

SEQ ID NO: 864590 - DNA, 15 bp, Homo sapiens
caaaagtgcaaagca

SEQ ID NO: 864591 - DNA, 15 bp, Homo sapiens
aaaagtgcaaagcag

SEQ ID NO: 864592 - DNA, 15 bp, Homo sapiens
aaagtgcaaagcagg

SEQ ID NO: 864593 - DNA, 15 bp, Homo sapiens
aagtgcaaagcagga

SEQ ID NO: 864594 - DNA, 15 bp, Homo sapiens
agtgcaaagcaggac

SEQ ID NO: 864595 - DNA, 15 bp, Homo sapiens
gtgcaaagcaggact

SEQ ID NO: 864596 - DNA, 15 bp, Homo sapiens
tgcaaagcaggactt

SEQ ID NO: 864597 - DNA, 15 bp, Homo sapiens
gcaaagcaggacttt

SEQ ID NO: 864598 - DNA, 15 bp, Homo sapiens
caaagcaggactttc

SEQ ID NO: 864599 - DNA, 15 bp, Homo sapiens
aaagcaggactttcc

SEQ ID NO: 864600 - DNA, 15 bp, Homo sapiens
aagcaggactttccg

SEQ ID NO: 864601 - DNA, 15 bp, Homo sapiens
agcaggactttccgg

SEQ ID NO: 864602 - DNA, 15 bp, Homo sapiens
gcaggactttccggg

SEQ ID NO: 864603 - DNA, 15 bp, Homo sapiens
caggactttccgggg

SEQ ID NO: 864604 - DNA, 15 bp, Homo sapiens
aggactttccggggc

SEQ ID NO: 864605 - DNA, 15 bp, Homo sapiens
ggactttccggggca

SEQ ID NO: 864606 - DNA, 15 bp, Homo sapiens
gactttccggggcaa

SEQ ID NO: 864607 - DNA, 15 bp, Homo sapiens
actttccggggcaaa

SEQ ID NO: 864608 - DNA, 15 bp, Homo sapiens
ctttccggggcaaac

SEQ ID NO: 864609 - DNA, 15 bp, Homo sapiens
tttccggggcaaacc

SEQ ID NO: 864610 - DNA, 15 bp, Homo sapiens
ttccggggcaaacca

SEQ ID NO: 864611 - DNA, 15 bp, Homo sapiens
tccggggcaaaccag

SEQ ID NO: 864612 - DNA, 15 bp, Homo sapiens
ccggggcaaaccagg

SEQ ID NO: 864613 - DNA, 15 bp, Homo sapiens
cggggcaaaccagga

SEQ ID NO: 864614 - DNA, 15 bp, Homo sapiens
ggggcaaaccaggat

SEQ ID NO: 864615 - DNA, 15 bp, Homo sapiens
gggcaaaccaggatg

SEQ ID NO: 864616 - DNA, 15 bp, Homo sapiens
ggcaaaccaggatgt

SEQ ID NO: 864617 - DNA, 15 bp, Homo sapiens
gcaaaccaggatgta

SEQ ID NO: 864618 - DNA, 15 bp, Homo sapiens
caaaccaggatgtat

SEQ ID NO: 864619 - DNA, 15 bp, Homo sapiens
aaaccaggatgtatg

SEQ ID NO: 864620 - DNA, 15 bp, Homo sapiens
aaccaggatgtatgt

SEQ ID NO: 864621 - DNA, 15 bp, Homo sapiens
accaggatgtatgtc

SEQ ID NO: 864622 - DNA, 15 bp, Homo sapiens
ccaggatgtatgtca

SEQ ID NO: 864623 - DNA, 15 bp, Homo sapiens
caggatgtatgtcat

SEQ ID NO: 864624 - DNA, 15 bp, Homo sapiens
aggatgtatgtcatc

SEQ ID NO: 864625 - DNA, 15 bp, Homo sapiens
ggatgtatgtcatct

SEQ ID NO: 864626 - DNA, 15 bp, Homo sapiens
gatgtatgtcatctc

SEQ ID NO: 864627 - DNA, 15 bp, Homo sapiens
atgtatgtcatctca

SEQ ID NO: 864628 - DNA, 15 bp, Homo sapiens
tgtatgtcatctcac

SEQ ID NO: 864629 - DNA, 15 bp, Homo sapiens
gtatgtcatctcact

SEQ ID NO: 864630 - DNA, 15 bp, Homo sapiens
tatgtcatctcactg

SEQ ID NO: 864631 - DNA, 15 bp, Homo sapiens
atgtcatctcactga

SEQ ID NO: 864632 - DNA, 15 bp, Homo sapiens
tgtcatctcactgag

SEQ ID NO: 864633 - DNA, 15 bp, Homo sapiens
gtcatctcactgagt

SEQ ID NO: 864634 - DNA, 15 bp, Homo sapiens
tcatctcactgagtc

SEQ ID NO: 864635 - DNA, 15 bp, Homo sapiens
catctcactgagtcc

SEQ ID NO: 864636 - DNA, 15 bp, Homo sapiens
atctcactgagtcct

SEQ ID NO: 864637 - DNA, 15 bp, Homo sapiens
tctcactgagtcctc

SEQ ID NO: 864638 - DNA, 15 bp, Homo sapiens
ctcactgagtcctct

SEQ ID NO: 864639 - DNA, 15 bp, Homo sapiens
tcactgagtcctctc

SEQ ID NO: 864640 - DNA, 15 bp, Homo sapiens
cactgagtcctctct

SEQ ID NO: 864641 - DNA, 15 bp, Homo sapiens
actgagtcctctctt

SEQ ID NO: 864642 - DNA, 15 bp, Homo sapiens
ctgagtcctctcttt

SEQ ID NO: 864643 - DNA, 15 bp, Homo sapiens
tgagtcctctctttg

SEQ ID NO: 864644 - DNA, 15 bp, Homo sapiens
gagtcctctctttgt

SEQ ID NO: 864645 - DNA, 15 bp, Homo sapiens
agtcctctctttgtc

SEQ ID NO: 864646 - DNA, 15 bp, Homo sapiens
gtcctctctttgtcc

SEQ ID NO: 864647 - DNA, 15 bp, Homo sapiens
tcctctctttgtcct

SEQ ID NO: 864648 - DNA, 15 bp, Homo sapiens
cctctctttgtcctt

SEQ ID NO: 864649 - DNA, 15 bp, Homo sapiens
ctctctttgtccttg

SEQ ID NO: 864650 - DNA, 15 bp, Homo sapiens
tctctttgtccttgc

SEQ ID NO: 864651 - DNA, 15 bp, Homo sapiens
ctctttgtccttgcc

SEQ ID NO: 864652 - DNA, 15 bp, Homo sapiens
tctttgtccttgcca

SEQ ID NO: 864653 - DNA, 15 bp, Homo sapiens
ctttgtccttgccat

SEQ ID NO: 864654 - DNA, 15 bp, Homo sapiens
tttgtccttgccatg

SEQ ID NO: 864655 - DNA, 15 bp, Homo sapiens
ttgtccttgccatga

SEQ ID NO: 864656 - DNA, 15 bp, Homo sapiens
tgtccttgccatgac

SEQ ID NO: 864657 - DNA, 15 bp, Homo sapiens
gtccttgccatgact

SEQ ID NO: 864658 - DNA, 15 bp, Homo sapiens
tccttgccatgacta

SEQ ID NO: 864659 - DNA, 15 bp, Homo sapiens
ccttgccatgactag

SEQ ID NO: 864660 - DNA, 15 bp, Homo sapiens
cttgccatgactagt

SEQ ID NO: 864661 - DNA, 15 bp, Homo sapiens
ttgccatgactagta

SEQ ID NO: 864662 - DNA, 15 bp, Homo sapiens
tgccatgactagtat

SEQ ID NO: 864663 - DNA, 15 bp, Homo sapiens
gccatgactagtatc

SEQ ID NO: 864664 - DNA, 15 bp, Homo sapiens
ccatgactagtatct

SEQ ID NO: 864665 - DNA, 15 bp, Homo sapiens
catgactagtatctc

SEQ ID NO: 864666 - DNA, 15 bp, Homo sapiens
atgactagtatctct

SEQ ID NO: 864667 - DNA, 15 bp, Homo sapiens
tgactagtatctcta

SEQ ID NO: 864668 - DNA, 15 bp, Homo sapiens
gactagtatctctag

SEQ ID NO: 864669 - DNA, 15 bp, Homo sapiens
actagtatctctaga

SEQ ID NO: 864670 - DNA, 15 bp, Homo sapiens
ctagtatctctagag

SEQ ID NO: 864671 - DNA, 15 bp, Homo sapiens
tagtatctctagagg

SEQ ID NO: 864672 - DNA, 15 bp, Homo sapiens
agtatctctagaggt

SEQ ID NO: 864673 - DNA, 15 bp, Homo sapiens
gtatctctagaggta

SEQ ID NO: 864674 - DNA, 15 bp, Homo sapiens
tatctctagaggtaa

SEQ ID NO: 864675 - DNA, 15 bp, Homo sapiens
atctctagaggtaaa

SEQ ID NO: 864676 - DNA, 15 bp, Homo sapiens
tctctagaggtaaat

SEQ ID NO: 864677 - DNA, 15 bp, Homo sapiens
ctctagaggtaaatg

SEQ ID NO: 864678 - DNA, 15 bp, Homo sapiens
tctagaggtaaatga

SEQ ID NO: 864679 - DNA, 15 bp, Homo sapiens
ctagaggtaaatgaa

SEQ ID NO: 864680 - DNA, 15 bp, Homo sapiens
tagaggtaaatgaac

SEQ ID NO: 864681 - DNA, 15 bp, Homo sapiens
agaggtaaatgaaca

SEQ ID NO: 864682 - DNA, 15 bp, Homo sapiens
gaggtaaatgaacag

SEQ ID NO: 864683 - DNA, 15 bp, Homo sapiens
aggtaaatgaacaga

SEQ ID NO: 864684 - DNA, 15 bp, Homo sapiens
ggtaaatgaacagag

SEQ ID NO: 864685 - DNA, 15 bp, Homo sapiens
gtaaatgaacagagt

SEQ ID NO: 864686 - DNA, 15 bp, Homo sapiens
taaatgaacagagta

SEQ ID NO: 864687 - DNA, 15 bp, Homo sapiens
aaatgaacagagtaa

SEQ ID NO: 864688 - DNA, 15 bp, Homo sapiens
aatgaacagagtaat

SEQ ID NO: 864689 - DNA, 15 bp, Homo sapiens
atgaacagagtaatg

SEQ ID NO: 864690 - DNA, 15 bp, Homo sapiens
tgaacagagtaatga

SEQ ID NO: 864691 - DNA, 15 bp, Homo sapiens
gaacagagtaatgac

SEQ ID NO: 864692 - DNA, 15 bp, Homo sapiens
aacagagtaatgaca

SEQ ID NO: 864693 - DNA, 15 bp, Homo sapiens
acagagtaatgacaa

SEQ ID NO: 864694 - DNA, 15 bp, Homo sapiens
cagagtaatgacaaa

SEQ ID NO: 864695 - DNA, 15 bp, Homo sapiens
agagtaatgacaaat

SEQ ID NO: 864696 - DNA, 15 bp, Homo sapiens
gagtaatgacaaata

SEQ ID NO: 864697 - DNA, 15 bp, Homo sapiens
agtaatgacaaatag

SEQ ID NO: 864698 - DNA, 15 bp, Homo sapiens
gtaatgacaaatagc

SEQ ID NO: 864699 - DNA, 15 bp, Homo sapiens
taatgacaaatagcc

SEQ ID NO: 864700 - DNA, 15 bp, Homo sapiens
aatgacaaatagcca

SEQ ID NO: 864701 - DNA, 15 bp, Homo sapiens
atgacaaatagccag

SEQ ID NO: 864702 - DNA, 15 bp, Homo sapiens
tgacaaatagccaga

SEQ ID NO: 864703 - DNA, 15 bp, Homo sapiens
gacaaatagccagac

SEQ ID NO: 864704 - DNA, 15 bp, Homo sapiens
acaaatagccagaca

SEQ ID NO: 864705 - DNA, 15 bp, Homo sapiens
caaatagccagacac

SEQ ID NO: 864706 - DNA, 15 bp, Homo sapiens
aaatagccagacacc

SEQ ID NO: 864707 - DNA, 15 bp, Homo sapiens
aatagccagacacct

SEQ ID NO: 864708 - DNA, 15 bp, Homo sapiens
atagccagacacctg

SEQ ID NO: 864709 - DNA, 15 bp, Homo sapiens
tagccagacacctga

SEQ ID NO: 864710 - DNA, 15 bp, Homo sapiens
agccagacacctgaa

SEQ ID NO: 864711 - DNA, 15 bp, Homo sapiens
gccagacacctgaat

SEQ ID NO: 864712 - DNA, 15 bp, Homo sapiens
ccagacacctgaatc

SEQ ID NO: 864713 - DNA, 15 bp, Homo sapiens
cagacacctgaatct

SEQ ID NO: 864714 - DNA, 15 bp, Homo sapiens
agacacctgaatctt

SEQ ID NO: 864715 - DNA, 15 bp, Homo sapiens
gacacctgaatctta

SEQ ID NO: 864716 - DNA, 15 bp, Homo sapiens
acacctgaatcttat

SEQ ID NO: 864717 - DNA, 15 bp, Homo sapiens
cacctgaatcttatc

SEQ ID NO: 864718 - DNA, 15 bp, Homo sapiens
acctgaatcttatcc

SEQ ID NO: 864719 - DNA, 15 bp, Homo sapiens
cctgaatcttatccc

SEQ ID NO: 864720 - DNA, 15 bp, Homo sapiens
ctgaatcttatccca

SEQ ID NO: 864721 - DNA, 15 bp, Homo sapiens
tgaatcttatcccaa

SEQ ID NO: 864722 - DNA, 15 bp, Homo sapiens
gaatcttatcccaac

SEQ ID NO: 864723 - DNA, 15 bp, Homo sapiens
aatcttatcccaaca

SEQ ID NO: 864724 - DNA, 15 bp, Homo sapiens
atcttatcccaacag

SEQ ID NO: 864725 - DNA, 15 bp, Homo sapiens
tcttatcccaacagc

SEQ ID NO: 864726 - DNA, 15 bp, Homo sapiens
cttatcccaacagca

SEQ ID NO: 864727 - DNA, 15 bp, Homo sapiens
ttatcccaacagcac

SEQ ID NO: 864728 - DNA, 15 bp, Homo sapiens
tatcccaacagcacc

SEQ ID NO: 864729 - DNA, 15 bp, Homo sapiens
atcccaacagcacct

SEQ ID NO: 864730 - DNA, 15 bp, Homo sapiens
tcccaacagcacctc

SEQ ID NO: 864731 - DNA, 15 bp, Homo sapiens
cccaacagcacctcc

SEQ ID NO: 864732 - DNA, 15 bp, Homo sapiens
ccaacagcacctcct

SEQ ID NO: 864733 - DNA, 15 bp, Homo sapiens
caacagcacctccta

SEQ ID NO: 864734 - DNA, 15 bp, Homo sapiens
aacagcacctcctac

SEQ ID NO: 864735 - DNA, 15 bp, Homo sapiens
acagcacctcctaca

SEQ ID NO: 864736 - DNA, 15 bp, Homo sapiens
cagcacctcctacat

SEQ ID NO: 864737 - DNA, 15 bp, Homo sapiens
agcacctcctacata

SEQ ID NO: 864738 - DNA, 15 bp, Homo sapiens
gcacctcctacataa

SEQ ID NO: 864739 - DNA, 15 bp, Homo sapiens
cacctcctacataat

SEQ ID NO: 864740 - DNA, 15 bp, Homo sapiens
acctcctacataatt

SEQ ID NO: 864741 - DNA, 15 bp, Homo sapiens
cctcctacataattc

SEQ ID NO: 864742 - DNA, 15 bp, Homo sapiens
ctcctacataattcc

SEQ ID NO: 864743 - DNA, 15 bp, Homo sapiens
tcctacataattccc

SEQ ID NO: 864744 - DNA, 15 bp, Homo sapiens
cctacataattcccc

SEQ ID NO: 864745 - DNA, 15 bp, Homo sapiens
ctacataattcccca

SEQ ID NO: 864746 - DNA, 15 bp, Homo sapiens
tacataattccccat

SEQ ID NO: 864747 - DNA, 15 bp, Homo sapiens
acataattccccatt

SEQ ID NO: 864748 - DNA, 15 bp, Homo sapiens
cataattccccatta

SEQ ID NO: 864749 - DNA, 15 bp, Homo sapiens
ataattccccattat

SEQ ID NO: 864750 - DNA, 15 bp, Homo sapiens
taattccccattatc

SEQ ID NO: 864751 - DNA, 15 bp, Homo sapiens
aattccccattatcc

SEQ ID NO: 864752 - DNA, 15 bp, Homo sapiens
attccccattatccc

SEQ ID NO: 864753 - DNA, 15 bp, Homo sapiens
ttccccattatccca

SEQ ID NO: 864754 - DNA, 15 bp, Homo sapiens
tccccattatcccaa

SEQ ID NO: 864755 - DNA, 15 bp, Homo sapiens
ccccattatcccaaa

SEQ ID NO: 864756 - DNA, 15 bp, Homo sapiens
cccattatcccaaat

SEQ ID NO: 864757 - DNA, 15 bp, Homo sapiens
ccattatcccaaatg

SEQ ID NO: 864758 - DNA, 15 bp, Homo sapiens
cattatcccaaatgg

SEQ ID NO: 864759 - DNA, 15 bp, Homo sapiens
attatcccaaatgga

SEQ ID NO: 864760 - DNA, 15 bp, Homo sapiens
ttatcccaaatggaa

SEQ ID NO: 864761 - DNA, 15 bp, Homo sapiens
tatcccaaatggaaa

SEQ ID NO: 864762 - DNA, 15 bp, Homo sapiens
atcccaaatggaaat

SEQ ID NO: 864763 - DNA, 15 bp, Homo sapiens
tcccaaatggaaatt

SEQ ID NO: 864764 - DNA, 15 bp, Homo sapiens
cccaaatggaaatta

SEQ ID NO: 864765 - DNA, 15 bp, Homo sapiens
ccaaatggaaattaa

SEQ ID NO: 864766 - DNA, 15 bp, Homo sapiens
caaatggaaattaaa

SEQ ID NO: 864767 - DNA, 15 bp, Homo sapiens
aaatggaaattaaaa

SEQ ID NO: 864768 - DNA, 15 bp, Homo sapiens
aatggaaattaaaaa

SEQ ID NO: 864769 - DNA, 15 bp, Homo sapiens
atggaaattaaaaat

SEQ ID NO: 864770 - DNA, 15 bp, Homo sapiens
tggaaattaaaaata

SEQ ID NO: 864771 - DNA, 15 bp, Homo sapiens
ggaaattaaaaatat

SEQ ID NO: 864772 - DNA, 15 bp, Homo sapiens
gaaattaaaaatata

SEQ ID NO: 864773 - DNA, 15 bp, Homo sapiens
aaattaaaaatatat

SEQ ID NO: 864774 - DNA, 15 bp, Homo sapiens
aattaaaaatatata

SEQ ID NO: 864775 - DNA, 15 bp, Homo sapiens
attaaaaatatatac

SEQ ID NO: 864776 - DNA, 15 bp, Homo sapiens
ttaaaaatatataca

SEQ ID NO: 864777 - DNA, 15 bp, Homo sapiens
taaaaatatatacag

SEQ ID NO: 864778 - DNA, 15 bp, Homo sapiens
aaaaatatatacagt

SEQ ID NO: 864779 - DNA, 15 bp, Homo sapiens
aaaatatatacagtg

SEQ ID NO: 864780 - DNA, 15 bp, Homo sapiens
aaatatatacagtga

SEQ ID NO: 864781 - DNA, 15 bp, Homo sapiens
aatatatacagtgat

SEQ ID NO: 864782 - DNA, 15 bp, Homo sapiens
atatatacagtgata

SEQ ID NO: 864783 - DNA, 15 bp, Homo sapiens
tatatacagtgataa

SEQ ID NO: 864784 - DNA, 15 bp, Homo sapiens
atatacagtgataat

SEQ ID NO: 864785 - DNA, 15 bp, Homo sapiens
tatacagtgataatt

SEQ ID NO: 864786 - DNA, 15 bp, Homo sapiens
atacagtgataattc

SEQ ID NO: 864787 - DNA, 15 bp, Homo sapiens
tacagtgataattcc

SEQ ID NO: 864788 - DNA, 15 bp, Homo sapiens
acagtgataattcca

SEQ ID NO: 864789 - DNA, 15 bp, Homo sapiens
cagtgataattccag

SEQ ID NO: 864790 - DNA, 15 bp, Homo sapiens
agtgataattccagg

SEQ ID NO: 864791 - DNA, 15 bp, Homo sapiens
gtgataattccaggc

SEQ ID NO: 864792 - DNA, 15 bp, Homo sapiens
tgataattccaggcc

SEQ ID NO: 864793 - DNA, 15 bp, Homo sapiens
gataattccaggcca

SEQ ID NO: 864794 - DNA, 15 bp, Homo sapiens
ataattccaggccaa

SEQ ID NO: 864795 - DNA, 15 bp, Homo sapiens
taattccaggccaag

SEQ ID NO: 864796 - DNA, 15 bp, Homo sapiens
aattccaggccaaga

SEQ ID NO: 864797 - DNA, 15 bp, Homo sapiens
attccaggccaagaa

SEQ ID NO: 864798 - DNA, 15 bp, Homo sapiens
ttccaggccaagaaa

SEQ ID NO: 864799 - DNA, 15 bp, Homo sapiens
tccaggccaagaaat

SEQ ID NO: 864800 - DNA, 15 bp, Homo sapiens
ccaggccaagaaatg

SEQ ID NO: 864801 - DNA, 15 bp, Homo sapiens
caggccaagaaatgc

SEQ ID NO: 864802 - DNA, 15 bp, Homo sapiens
aggccaagaaatgct

SEQ ID NO: 864803 - DNA, 15 bp, Homo sapiens
ggccaagaaatgctt

SEQ ID NO: 864804 - DNA, 15 bp, Homo sapiens
gccaagaaatgcttt

SEQ ID NO: 864805 - DNA, 15 bp, Homo sapiens
ccaagaaatgcttta

SEQ ID NO: 864806 - DNA, 15 bp, Homo sapiens
caagaaatgctttat

SEQ ID NO: 864807 - DNA, 15 bp, Homo sapiens
aagaaatgctttatt

SEQ ID NO: 864808 - DNA, 15 bp, Homo sapiens
agaaatgctttattt

SEQ ID NO: 864809 - DNA, 15 bp, Homo sapiens
gaaatgctttatttc

SEQ ID NO: 864810 - DNA, 15 bp, Homo sapiens
aaatgctttatttct

SEQ ID NO: 864811 - DNA, 15 bp, Homo sapiens
aatgctttatttcta

SEQ ID NO: 864812 - DNA, 15 bp, Homo sapiens
atgctttatttctag

SEQ ID NO: 864813 - DNA, 15 bp, Homo sapiens
tgctttatttctagc

SEQ ID NO: 864814 - DNA, 15 bp, Homo sapiens
gctttatttctagct

SEQ ID NO: 864815 - DNA, 15 bp, Homo sapiens
ctttatttctagctt

SEQ ID NO: 864816 - DNA, 15 bp, Homo sapiens
tttatttctagcttg

SEQ ID NO: 864817 - DNA, 15 bp, Homo sapiens
ttatttctagcttgg

SEQ ID NO: 864818 - DNA, 15 bp, Homo sapiens
tatttctagcttgga

SEQ ID NO: 864819 - DNA, 15 bp, Homo sapiens
atttctagcttggac

SEQ ID NO: 864820 - DNA, 15 bp, Homo sapiens
tttctagcttggact

SEQ ID NO: 864821 - DNA, 15 bp, Homo sapiens
ttctagcttggactt

SEQ ID NO: 864822 - DNA, 15 bp, Homo sapiens
tctagcttggacttg

SEQ ID NO: 864823 - DNA, 15 bp, Homo sapiens
ctagcttggacttgg

SEQ ID NO: 864824 - DNA, 15 bp, Homo sapiens
tagcttggacttggc

SEQ ID NO: 864825 - DNA, 15 bp, Homo sapiens
agcttggacttggct

SEQ ID NO: 864826 - DNA, 15 bp, Homo sapiens
gcttggacttggctt

SEQ ID NO: 864827 - DNA, 15 bp, Homo sapiens
cttggacttggcttc

SEQ ID NO: 864828 - DNA, 15 bp, Homo sapiens
ttggacttggcttcc

SEQ ID NO: 864829 - DNA, 15 bp, Homo sapiens
tggacttggcttcca

SEQ ID NO: 864830 - DNA, 15 bp, Homo sapiens
ggacttggcttccat

SEQ ID NO: 864831 - DNA, 15 bp, Homo sapiens
gacttggcttccatg

SEQ ID NO: 864832 - DNA, 15 bp, Homo sapiens
acttggcttccatgt

SEQ ID NO: 864833 - DNA, 15 bp, Homo sapiens
cttggcttccatgtc

SEQ ID NO: 864834 - DNA, 15 bp, Homo sapiens
ttggcttccatgtcc

SEQ ID NO: 864835 - DNA, 15 bp, Homo sapiens
tggcttccatgtcca

SEQ ID NO: 864836 - DNA, 15 bp, Homo sapiens
ggcttccatgtccag

SEQ ID NO: 864837 - DNA, 15 bp, Homo sapiens
gcttccatgtccagt

SEQ ID NO: 864838 - DNA, 15 bp, Homo sapiens
cttccatgtccagtg

SEQ ID NO: 864839 - DNA, 15 bp, Homo sapiens
ttccatgtccagtgt

SEQ ID NO: 864840 - DNA, 15 bp, Homo sapiens
tccatgtccagtgta

SEQ ID NO: 864841 - DNA, 15 bp, Homo sapiens
ccatgtccagtgtag

SEQ ID NO: 864842 - DNA, 15 bp, Homo sapiens
catgtccagtgtaga

SEQ ID NO: 864843 - DNA, 15 bp, Homo sapiens
atgtccagtgtagaa

SEQ ID NO: 864844 - DNA, 15 bp, Homo sapiens
tgtccagtgtagaat

SEQ ID NO: 864845 - DNA, 15 bp, Homo sapiens
gtccagtgtagaatc

SEQ ID NO: 864846 - DNA, 15 bp, Homo sapiens
tccagtgtagaatct

SEQ ID NO: 864847 - DNA, 15 bp, Homo sapiens
ccagtgtagaatctt

SEQ ID NO: 864848 - DNA, 15 bp, Homo sapiens
cagtgtagaatctta

SEQ ID NO: 864849 - DNA, 15 bp, Homo sapiens
agtgtagaatcttat

SEQ ID NO: 864850 - DNA, 15 bp, Homo sapiens
gtgtagaatcttatc

SEQ ID NO: 864851 - DNA, 15 bp, Homo sapiens
tgtagaatcttatcc

SEQ ID NO: 864852 - DNA, 15 bp, Homo sapiens
gtagaatcttatcct

SEQ ID NO: 864853 - DNA, 15 bp, Homo sapiens
tagaatcttatcctt

SEQ ID NO: 864854 - DNA, 15 bp, Homo sapiens
agaatcttatccttg

SEQ ID NO: 864855 - DNA, 15 bp, Homo sapiens
gaatcttatccttgc

SEQ ID NO: 864856 - DNA, 15 bp, Homo sapiens
aatcttatccttgct

SEQ ID NO: 864857 - DNA, 15 bp, Homo sapiens
atcttatccttgctg

SEQ ID NO: 864858 - DNA, 15 bp, Homo sapiens
tcttatccttgctga

SEQ ID NO: 864859 - DNA, 15 bp, Homo sapiens
cttatccttgctgat

SEQ ID NO: 864860 - DNA, 15 bp, Homo sapiens
ttatccttgctgatc

SEQ ID NO: 864861 - DNA, 15 bp, Homo sapiens
tatccttgctgatct

SEQ ID NO: 864862 - DNA, 15 bp, Homo sapiens
atccttgctgatctg

SEQ ID NO: 864863 - DNA, 15 bp, Homo sapiens
tccttgctgatctgg

SEQ ID NO: 864864 - DNA, 15 bp, Homo sapiens
ccttgctgatctgga

SEQ ID NO: 864865 - DNA, 15 bp, Homo sapiens
cttgctgatctggac

SEQ ID NO: 864866 - DNA, 15 bp, Homo sapiens
ttgctgatctggact

SEQ ID NO: 864867 - DNA, 15 bp, Homo sapiens
tgctgatctggactg

SEQ ID NO: 864868 - DNA, 15 bp, Homo sapiens
gctgatctggactgt

SEQ ID NO: 864869 - DNA, 15 bp, Homo sapiens
ctgatctggactgta

SEQ ID NO: 864870 - DNA, 15 bp, Homo sapiens
tgatctggactgtat

SEQ ID NO: 864871 - DNA, 15 bp, Homo sapiens
gatctggactgtatc

SEQ ID NO: 864872 - DNA, 15 bp, Homo sapiens
atctggactgtatct

SEQ ID NO: 864873 - DNA, 15 bp, Homo sapiens
tctggactgtatctc

SEQ ID NO: 864874 - DNA, 15 bp, Homo sapiens
ctggactgtatctca

SEQ ID NO: 864875 - DNA, 15 bp, Homo sapiens
tggactgtatctcat

SEQ ID NO: 864876 - DNA, 15 bp, Homo sapiens
ggactgtatctcatg

SEQ ID NO: 864877 - DNA, 15 bp, Homo sapiens
gactgtatctcatga

SEQ ID NO: 864878 - DNA, 15 bp, Homo sapiens
actgtatctcatgaa

SEQ ID NO: 864879 - DNA, 15 bp, Homo sapiens
ctgtatctcatgaag

SEQ ID NO: 864880 - DNA, 15 bp, Homo sapiens
tgtatctcatgaagc

SEQ ID NO: 864881 - DNA, 15 bp, Homo sapiens
gtatctcatgaagcc

SEQ ID NO: 864882 - DNA, 15 bp, Homo sapiens
tatctcatgaagcca

SEQ ID NO: 864883 - DNA, 15 bp, Homo sapiens
atctcatgaagccat

SEQ ID NO: 864884 - DNA, 15 bp, Homo sapiens
tctcatgaagccatg

SEQ ID NO: 864885 - DNA, 15 bp, Homo sapiens
ctcatgaagccatga

SEQ ID NO: 864886 - DNA, 15 bp, Homo sapiens
tcatgaagccatgac

SEQ ID NO: 864887 - DNA, 15 bp, Homo sapiens
catgaagccatgact

SEQ ID NO: 864888 - DNA, 15 bp, Homo sapiens
atgaagccatgactt

SEQ ID NO: 864889 - DNA, 15 bp, Homo sapiens
tgaagccatgacttg

SEQ ID NO: 864890 - DNA, 15 bp, Homo sapiens
gaagccatgacttgt

SEQ ID NO: 864891 - DNA, 15 bp, Homo sapiens
aagccatgacttgta

SEQ ID NO: 864892 - DNA, 15 bp, Homo sapiens
agccatgacttgtac

SEQ ID NO: 864893 - DNA, 15 bp, Homo sapiens
gccatgacttgtacc

SEQ ID NO: 864894 - DNA, 15 bp, Homo sapiens
ccatgacttgtacct

SEQ ID NO: 864895 - DNA, 15 bp, Homo sapiens
catgacttgtaccta

SEQ ID NO: 864896 - DNA, 15 bp, Homo sapiens
atgacttgtacctag

SEQ ID NO: 864897 - DNA, 15 bp, Homo sapiens
tgacttgtacctagt

SEQ ID NO: 864898 - DNA, 15 bp, Homo sapiens
gacttgtacctagtt

SEQ ID NO: 864899 - DNA, 15 bp, Homo sapiens
acttgtacctagtta

SEQ ID NO: 864900 - DNA, 15 bp, Homo sapiens
cttgtacctagttac

SEQ ID NO: 864901 - DNA, 15 bp, Homo sapiens
ttgtacctagttact

SEQ ID NO: 864902 - DNA, 15 bp, Homo sapiens
tgtacctagttacta

SEQ ID NO: 864903 - DNA, 15 bp, Homo sapiens
gtacctagttactag

SEQ ID NO: 864904 - DNA, 15 bp, Homo sapiens
tacctagttactagc

SEQ ID NO: 864905 - DNA, 15 bp, Homo sapiens
acctagttactagct

SEQ ID NO: 864906 - DNA, 15 bp, Homo sapiens
cctagttactagctg

SEQ ID NO: 864907 - DNA, 15 bp, Homo sapiens
ctagttactagctgg

SEQ ID NO: 864908 - DNA, 15 bp, Homo sapiens
tagttactagctgga

SEQ ID NO: 864909 - DNA, 15 bp, Homo sapiens
agttactagctggaa

SEQ ID NO: 864910 - DNA, 15 bp, Homo sapiens
gttactagctggaag

SEQ ID NO: 864911 - DNA, 15 bp, Homo sapiens
ttactagctggaagg

SEQ ID NO: 864912 - DNA, 15 bp, Homo sapiens
tactagctggaaggc

SEQ ID NO: 864913 - DNA, 15 bp, Homo sapiens
actagctggaaggct

SEQ ID NO: 864914 - DNA, 15 bp, Homo sapiens
ctagctggaaggctt

SEQ ID NO: 864915 - DNA, 15 bp, Homo sapiens
tagctggaaggctta

SEQ ID NO: 864916 - DNA, 15 bp, Homo sapiens
agctggaaggcttag

SEQ ID NO: 864917 - DNA, 15 bp, Homo sapiens
gctggaaggcttaga

SEQ ID NO: 864918 - DNA, 15 bp, Homo sapiens
ctggaaggcttagaa

SEQ ID NO: 864919 - DNA, 15 bp, Homo sapiens
tggaaggcttagaac

SEQ ID NO: 864920 - DNA, 15 bp, Homo sapiens
ggaaggcttagaaca

SEQ ID NO: 864921 - DNA, 15 bp, Homo sapiens
gaaggcttagaacaa

SEQ ID NO: 864922 - DNA, 15 bp, Homo sapiens
aaggcttagaacaaa

SEQ ID NO: 864923 - DNA, 15 bp, Homo sapiens
aggcttagaacaaaa

SEQ ID NO: 864924 - DNA, 15 bp, Homo sapiens
ggcttagaacaaaag

SEQ ID NO: 864925 - DNA, 15 bp, Homo sapiens
gcttagaacaaaagc

SEQ ID NO: 864926 - DNA, 15 bp, Homo sapiens
cttagaacaaaagct

SEQ ID NO: 864927 - DNA, 15 bp, Homo sapiens
ttagaacaaaagctg

SEQ ID NO: 864928 - DNA, 15 bp, Homo sapiens
tagaacaaaagctgg

SEQ ID NO: 864929 - DNA, 15 bp, Homo sapiens
agaacaaaagctggt

SEQ ID NO: 864930 - DNA, 15 bp, Homo sapiens
gaacaaaagctggtc

SEQ ID NO: 864931 - DNA, 15 bp, Homo sapiens
aacaaaagctggtcc

SEQ ID NO: 864932 - DNA, 15 bp, Homo sapiens
acaaaagctggtcca

SEQ ID NO: 864933 - DNA, 15 bp, Homo sapiens
caaaagctggtccag

SEQ ID NO: 864934 - DNA, 15 bp, Homo sapiens
aaaagctggtccaga

SEQ ID NO: 864935 - DNA, 15 bp, Homo sapiens
aaagctggtccagag

SEQ ID NO: 864936 - DNA, 15 bp, Homo sapiens
aagctggtccagaga

SEQ ID NO: 864937 - DNA, 15 bp, Homo sapiens
agctggtccagagag

SEQ ID NO: 864938 - DNA, 15 bp, Homo sapiens
gctggtccagagagc

SEQ ID NO: 864939 - DNA, 15 bp, Homo sapiens
ctggtccagagagcc

SEQ ID NO: 864940 - DNA, 15 bp, Homo sapiens
tggtccagagagcct

SEQ ID NO: 864941 - DNA, 15 bp, Homo sapiens
ggtccagagagcctc

SEQ ID NO: 864942 - DNA, 15 bp, Homo sapiens
gtccagagagcctcc

SEQ ID NO: 864943 - DNA, 15 bp, Homo sapiens
tccagagagcctcct

SEQ ID NO: 864944 - DNA, 15 bp, Homo sapiens
ccagagagcctcctt

SEQ ID NO: 864945 - DNA, 15 bp, Homo sapiens
cagagagcctccttt

SEQ ID NO: 864946 - DNA, 15 bp, Homo sapiens
agagagcctcctttt

SEQ ID NO: 864947 - DNA, 15 bp, Homo sapiens
gagagcctccttttt

SEQ ID NO: 864948 - DNA, 15 bp, Homo sapiens
agagcctcctttttc

SEQ ID NO: 864949 - DNA, 15 bp, Homo sapiens
gagcctcctttttcc

SEQ ID NO: 864950 - DNA, 15 bp, Homo sapiens
agcctcctttttcct

SEQ ID NO: 864951 - DNA, 15 bp, Homo sapiens
gcctcctttttcctt

SEQ ID NO: 864952 - DNA, 15 bp, Homo sapiens
cctcctttttcctta

SEQ ID NO: 864953 - DNA, 15 bp, Homo sapiens
ctcctttttccttat

SEQ ID NO: 864954 - DNA, 15 bp, Homo sapiens
tcctttttccttatt

SEQ ID NO: 864955 - DNA, 15 bp, Homo sapiens
cctttttccttattt

SEQ ID NO: 864956 - DNA, 15 bp, Homo sapiens
ctttttccttatttc

SEQ ID NO: 864957 - DNA, 15 bp, Homo sapiens
tttttccttatttcc

SEQ ID NO: 864958 - DNA, 15 bp, Homo sapiens
ttttccttatttcct

SEQ ID NO: 864959 - DNA, 15 bp, Homo sapiens
tttccttatttcctg

SEQ ID NO: 864960 - DNA, 15 bp, Homo sapiens
ttccttatttcctgg

SEQ ID NO: 864961 - DNA, 15 bp, Homo sapiens
tccttatttcctggg

SEQ ID NO: 864962 - DNA, 15 bp, Homo sapiens
ccttatttcctgggt

SEQ ID NO: 864963 - DNA, 15 bp, Homo sapiens
cttatttcctgggtc

SEQ ID NO: 864964 - DNA, 15 bp, Homo sapiens
ttatttcctgggtcc

SEQ ID NO: 864965 - DNA, 15 bp, Homo sapiens
tatttcctgggtcca

SEQ ID NO: 864966 - DNA, 15 bp, Homo sapiens
atttcctgggtccac

SEQ ID NO: 864967 - DNA, 15 bp, Homo sapiens
tttcctgggtccaca

SEQ ID NO: 864968 - DNA, 15 bp, Homo sapiens
ttcctgggtccacac

SEQ ID NO: 864969 - DNA, 15 bp, Homo sapiens
tcctgggtccacacc

SEQ ID NO: 864970 - DNA, 15 bp, Homo sapiens
cctgggtccacacct

SEQ ID NO: 864971 - DNA, 15 bp, Homo sapiens
ctgggtccacacctt

SEQ ID NO: 864972 - DNA, 15 bp, Homo sapiens
tgggtccacaccttt

SEQ ID NO: 864973 - DNA, 15 bp, Homo sapiens
gggtccacaccttta

SEQ ID NO: 864974 - DNA, 15 bp, Homo sapiens
ggtccacacctttac

SEQ ID NO: 864975 - DNA, 15 bp, Homo sapiens
gtccacacctttacc

SEQ ID NO: 864976 - DNA, 15 bp, Homo sapiens
tccacacctttacca

SEQ ID NO: 864977 - DNA, 15 bp, Homo sapiens
ccacacctttaccat

SEQ ID NO: 864978 - DNA, 15 bp, Homo sapiens
cacacctttaccatg

SEQ ID NO: 864979 - DNA, 15 bp, Homo sapiens
acacctttaccatgg

SEQ ID NO: 864980 - DNA, 15 bp, Homo sapiens
cacctttaccatggc

SEQ ID NO: 864981 - DNA, 15 bp, Homo sapiens
acctttaccatggca

SEQ ID NO: 864982 - DNA, 15 bp, Homo sapiens
cctttaccatggcag

SEQ ID NO: 864983 - DNA, 15 bp, Homo sapiens
ctttaccatggcagt

SEQ ID NO: 864984 - DNA, 15 bp, Homo sapiens
tttaccatggcagtc

SEQ ID NO: 864985 - DNA, 15 bp, Homo sapiens
ttaccatggcagtct

SEQ ID NO: 864986 - DNA, 15 bp, Homo sapiens
taccatggcagtctg

SEQ ID NO: 864987 - DNA, 15 bp, Homo sapiens
accatggcagtctgc

SEQ ID NO: 864988 - DNA, 15 bp, Homo sapiens
ccatggcagtctgcc

SEQ ID NO: 864989 - DNA, 15 bp, Homo sapiens
catggcagtctgcct

SEQ ID NO: 864990 - DNA, 15 bp, Homo sapiens
atggcagtctgccta

SEQ ID NO: 864991 - DNA, 15 bp, Homo sapiens
tggcagtctgcctat

SEQ ID NO: 864992 - DNA, 15 bp, Homo sapiens
ggcagtctgcctatc

SEQ ID NO: 864993 - DNA, 15 bp, Homo sapiens
gcagtctgcctatca

SEQ ID NO: 864994 - DNA, 15 bp, Homo sapiens
cagtctgcctatcat

SEQ ID NO: 864995 - DNA, 15 bp, Homo sapiens
agtctgcctatcatt

SEQ ID NO: 864996 - DNA, 15 bp, Homo sapiens
gtctgcctatcattt

SEQ ID NO: 864997 - DNA, 15 bp, Homo sapiens
tctgcctatcatttg

SEQ ID NO: 864998 - DNA, 15 bp, Homo sapiens
ctgcctatcatttga

SEQ ID NO: 864999 - DNA, 15 bp, Homo sapiens
tgcctatcatttgat

SEQ ID NO: 865000 - DNA, 15 bp, Homo sapiens
gcctatcatttgatg

SEQ ID NO: 865001 - DNA, 15 bp, Homo sapiens
cctatcatttgatgg

SEQ ID NO: 865002 - DNA, 15 bp, Homo sapiens
ctatcatttgatgga

SEQ ID NO: 865003 - DNA, 15 bp, Homo sapiens
tatcatttgatggag

SEQ ID NO: 865004 - DNA, 15 bp, Homo sapiens
atcatttgatggagg

SEQ ID NO: 865005 - DNA, 15 bp, Homo sapiens
tcatttgatggagga

SEQ ID NO: 865006 - DNA, 15 bp, Homo sapiens
catttgatggaggaa

SEQ ID NO: 865007 - DNA, 15 bp, Homo sapiens
atttgatggaggaat

SEQ ID NO: 865008 - DNA, 15 bp, Homo sapiens
tttgatggaggaatt

SEQ ID NO: 865009 - DNA, 15 bp, Homo sapiens
ttgatggaggaattt

SEQ ID NO: 865010 - DNA, 15 bp, Homo sapiens
tgatggaggaattta

SEQ ID NO: 865011 - DNA, 15 bp, Homo sapiens
gatggaggaatttaa

SEQ ID NO: 865012 - DNA, 15 bp, Homo sapiens
atggaggaatttaaa

SEQ ID NO: 865013 - DNA, 15 bp, Homo sapiens
tggaggaatttaaag

SEQ ID NO: 865014 - DNA, 15 bp, Homo sapiens
ggaggaatttaaagc

SEQ ID NO: 865015 - DNA, 15 bp, Homo sapiens
gaggaatttaaagca

SEQ ID NO: 865016 - DNA, 15 bp, Homo sapiens
aggaatttaaagcaa

SEQ ID NO: 865017 - DNA, 15 bp, Homo sapiens
ggaatttaaagcaag

SEQ ID NO: 865018 - DNA, 15 bp, Homo sapiens
gaatttaaagcaagt

SEQ ID NO: 865019 - DNA, 15 bp, Homo sapiens
aatttaaagcaagtc

SEQ ID NO: 865020 - DNA, 15 bp, Homo sapiens
atttaaagcaagtcc

SEQ ID NO: 865021 - DNA, 15 bp, Homo sapiens
tttaaagcaagtcca

SEQ ID NO: 865022 - DNA, 15 bp, Homo sapiens
ttaaagcaagtccaa

SEQ ID NO: 865023 - DNA, 15 bp, Homo sapiens
taaagcaagtccaag

SEQ ID NO: 865024 - DNA, 15 bp, Homo sapiens
aaagcaagtccaagg

SEQ ID NO: 865025 - DNA, 15 bp, Homo sapiens
aagcaagtccaaggg

SEQ ID NO: 865026 - DNA, 15 bp, Homo sapiens
agcaagtccaaggga

SEQ ID NO: 865027 - DNA, 15 bp, Homo sapiens
gcaagtccaagggaa

SEQ ID NO: 865028 - DNA, 15 bp, Homo sapiens
caagtccaagggaag

SEQ ID NO: 865029 - DNA, 15 bp, Homo sapiens
aagtccaagggaagg

SEQ ID NO: 865030 - DNA, 15 bp, Homo sapiens
agtccaagggaaggg

SEQ ID NO: 865031 - DNA, 15 bp, Homo sapiens
gtccaagggaaggga

SEQ ID NO: 865032 - DNA, 15 bp, Homo sapiens
tccaagggaagggaa

SEQ ID NO: 865033 - DNA, 15 bp, Homo sapiens
ccaagggaagggaag

SEQ ID NO: 865034 - DNA, 15 bp, Homo sapiens
caagggaagggaaga

SEQ ID NO: 865035 - DNA, 15 bp, Homo sapiens
aagggaagggaagag

SEQ ID NO: 865036 - DNA, 15 bp, Homo sapiens
agggaagggaagaga

SEQ ID NO: 865037 - DNA, 15 bp, Homo sapiens
gggaagggaagagag

SEQ ID NO: 865038 - DNA, 15 bp, Homo sapiens
ggaagggaagagagt

SEQ ID NO: 865039 - DNA, 15 bp, Homo sapiens
gaagggaagagagtt

SEQ ID NO: 865040 - DNA, 15 bp, Homo sapiens
aagggaagagagttt

SEQ ID NO: 865041 - DNA, 15 bp, Homo sapiens
agggaagagagtttc

SEQ ID NO: 865042 - DNA, 15 bp, Homo sapiens
gggaagagagtttct

SEQ ID NO: 865043 - DNA, 15 bp, Homo sapiens
ggaagagagtttcta

SEQ ID NO: 865044 - DNA, 15 bp, Homo sapiens
gaagagagtttctaa

SEQ ID NO: 865045 - DNA, 15 bp, Homo sapiens
aagagagtttctaaa

SEQ ID NO: 865046 - DNA, 15 bp, Homo sapiens
agagagtttctaaaa

SEQ ID NO: 865047 - DNA, 15 bp, Homo sapiens
gagagtttctaaaat

SEQ ID NO: 865048 - DNA, 15 bp, Homo sapiens
agagtttctaaaatc

SEQ ID NO: 865049 - DNA, 15 bp, Homo sapiens
gagtttctaaaatct

SEQ ID NO: 865050 - DNA, 15 bp, Homo sapiens
agtttctaaaatcta

SEQ ID NO: 865051 - DNA, 15 bp, Homo sapiens
gtttctaaaatctag

SEQ ID NO: 865052 - DNA, 15 bp, Homo sapiens
tttctaaaatctaga

SEQ ID NO: 865053 - DNA, 15 bp, Homo sapiens
ttctaaaatctagaa

SEQ ID NO: 865054 - DNA, 15 bp, Homo sapiens
tctaaaatctagaac

SEQ ID NO: 865055 - DNA, 15 bp, Homo sapiens
ctaaaatctagaact

SEQ ID NO: 865056 - DNA, 15 bp, Homo sapiens
taaaatctagaactt

SEQ ID NO: 865057 - DNA, 15 bp, Homo sapiens
aaaatctagaacttg

SEQ ID NO: 865058 - DNA, 15 bp, Homo sapiens
aaatctagaacttgg

SEQ ID NO: 865059 - DNA, 15 bp, Homo sapiens
aatctagaacttgga

SEQ ID NO: 865060 - DNA, 15 bp, Homo sapiens
atctagaacttggat

SEQ ID NO: 865061 - DNA, 15 bp, Homo sapiens
tctagaacttggata

SEQ ID NO: 865062 - DNA, 15 bp, Homo sapiens
ctagaacttggatag

SEQ ID NO: 865063 - DNA, 15 bp, Homo sapiens
tagaacttggatagt

SEQ ID NO: 865064 - DNA, 15 bp, Homo sapiens
agaacttggatagtt

SEQ ID NO: 865065 - DNA, 15 bp, Homo sapiens
gaacttggatagttt

SEQ ID NO: 865066 - DNA, 15 bp, Homo sapiens
aacttggatagttta

SEQ ID NO: 865067 - DNA, 15 bp, Homo sapiens
acttggatagtttaa

SEQ ID NO: 865068 - DNA, 15 bp, Homo sapiens
cttggatagtttaat

SEQ ID NO: 865069 - DNA, 15 bp, Homo sapiens
ttggatagtttaatt

SEQ ID NO: 865070 - DNA, 15 bp, Homo sapiens
tggatagtttaattt

SEQ ID NO: 865071 - DNA, 15 bp, Homo sapiens
ggatagtttaattta

SEQ ID NO: 865072 - DNA, 15 bp, Homo sapiens
gatagtttaatttac

SEQ ID NO: 865073 - DNA, 15 bp, Homo sapiens
atagtttaatttacc

SEQ ID NO: 865074 - DNA, 15 bp, Homo sapiens
tagtttaatttacct

SEQ ID NO: 865075 - DNA, 15 bp, Homo sapiens
agtttaatttaccta

SEQ ID NO: 865076 - DNA, 15 bp, Homo sapiens
gtttaatttacctat

SEQ ID NO: 865077 - DNA, 15 bp, Homo sapiens
tttaatttacctatc

SEQ ID NO: 865078 - DNA, 15 bp, Homo sapiens
ttaatttacctatcc

SEQ ID NO: 865079 - DNA, 15 bp, Homo sapiens
taatttacctatccc

SEQ ID NO: 865080 - DNA, 15 bp, Homo sapiens
aatttacctatccca

SEQ ID NO: 865081 - DNA, 15 bp, Homo sapiens
atttacctatcccaa

SEQ ID NO: 865082 - DNA, 15 bp, Homo sapiens
tttacctatcccaaa

SEQ ID NO: 865083 - DNA, 15 bp, Homo sapiens
ttacctatcccaaaa

SEQ ID NO: 865084 - DNA, 15 bp, Homo sapiens
tacctatcccaaaac

SEQ ID NO: 865085 - DNA, 15 bp, Homo sapiens
acctatcccaaaaca

SEQ ID NO: 865086 - DNA, 15 bp, Homo sapiens
cctatcccaaaacag

SEQ ID NO: 865087 - DNA, 15 bp, Homo sapiens
ctatcccaaaacagc

SEQ ID NO: 865088 - DNA, 15 bp, Homo sapiens
tatcccaaaacagct

SEQ ID NO: 865089 - DNA, 15 bp, Homo sapiens
atcccaaaacagctt

SEQ ID NO: 865090 - DNA, 15 bp, Homo sapiens
tcccaaaacagctta

SEQ ID NO: 865091 - DNA, 15 bp, Homo sapiens
cccaaaacagcttag

SEQ ID NO: 865092 - DNA, 15 bp, Homo sapiens
ccaaaacagcttagg

SEQ ID NO: 865093 - DNA, 15 bp, Homo sapiens
caaaacagcttaggc

SEQ ID NO: 865094 - DNA, 15 bp, Homo sapiens
aaaacagcttaggcc

SEQ ID NO: 865095 - DNA, 15 bp, Homo sapiens
aaacagcttaggccc

SEQ ID NO: 865096 - DNA, 15 bp, Homo sapiens
aacagcttaggccca

SEQ ID NO: 865097 - DNA, 15 bp, Homo sapiens
acagcttaggcccag

SEQ ID NO: 865098 - DNA, 15 bp, Homo sapiens
cagcttaggcccaga

SEQ ID NO: 865099 - DNA, 15 bp, Homo sapiens
agcttaggcccagac

SEQ ID NO: 865100 - DNA, 15 bp, Homo sapiens
gcttaggcccagaca

SEQ ID NO: 865101 - DNA, 15 bp, Homo sapiens
cttaggcccagacag

SEQ ID NO: 865102 - DNA, 15 bp, Homo sapiens
ttaggcccagacagc

SEQ ID NO: 865103 - DNA, 15 bp, Homo sapiens
taggcccagacagct

SEQ ID NO: 865104 - DNA, 15 bp, Homo sapiens
aggcccagacagctt

SEQ ID NO: 865105 - DNA, 15 bp, Homo sapiens
ggcccagacagcttc

SEQ ID NO: 865106 - DNA, 15 bp, Homo sapiens
gcccagacagcttct

SEQ ID NO: 865107 - DNA, 15 bp, Homo sapiens
cccagacagcttctc

SEQ ID NO: 865108 - DNA, 15 bp, Homo sapiens
ccagacagcttctct

SEQ ID NO: 865109 - DNA, 15 bp, Homo sapiens
cagacagcttctctc

SEQ ID NO: 865110 - DNA, 15 bp, Homo sapiens
agacagcttctctcc

SEQ ID NO: 865111 - DNA, 15 bp, Homo sapiens
gacagcttctctcca

SEQ ID NO: 865112 - DNA, 15 bp, Homo sapiens
acagcttctctccaa

SEQ ID NO: 865113 - DNA, 15 bp, Homo sapiens
cagcttctctccaag

SEQ ID NO: 865114 - DNA, 15 bp, Homo sapiens
agcttctctccaaga

SEQ ID NO: 865115 - DNA, 15 bp, Homo sapiens
gcttctctccaagat

SEQ ID NO: 865116 - DNA, 15 bp, Homo sapiens
cttctctccaagatt

SEQ ID NO: 865117 - DNA, 15 bp, Homo sapiens
ttctctccaagattg

SEQ ID NO: 865118 - DNA, 15 bp, Homo sapiens
tctctccaagattgg

SEQ ID NO: 865119 - DNA, 15 bp, Homo sapiens
ctctccaagattggt

SEQ ID NO: 865120 - DNA, 15 bp, Homo sapiens
tctccaagattggtg

SEQ ID NO: 865121 - DNA, 15 bp, Homo sapiens
ctccaagattggtgc

SEQ ID NO: 865122 - DNA, 15 bp, Homo sapiens
tccaagattggtgcc

SEQ ID NO: 865123 - DNA, 15 bp, Homo sapiens
ccaagattggtgcca

SEQ ID NO: 865124 - DNA, 15 bp, Homo sapiens
caagattggtgccaa

SEQ ID NO: 865125 - DNA, 15 bp, Homo sapiens
aagattggtgccaaa

SEQ ID NO: 865126 - DNA, 15 bp, Homo sapiens
agattggtgccaaac

SEQ ID NO: 865127 - DNA, 15 bp, Homo sapiens
gattggtgccaaact

SEQ ID NO: 865128 - DNA, 15 bp, Homo sapiens
attggtgccaaactg

SEQ ID NO: 865129 - DNA, 15 bp, Homo sapiens
ttggtgccaaactga

SEQ ID NO: 865130 - DNA, 15 bp, Homo sapiens
tggtgccaaactgaa

SEQ ID NO: 865131 - DNA, 15 bp, Homo sapiens
ggtgccaaactgaaa

SEQ ID NO: 865132 - DNA, 15 bp, Homo sapiens
gtgccaaactgaaat

SEQ ID NO: 865133 - DNA, 15 bp, Homo sapiens
tgccaaactgaaatt

SEQ ID NO: 865134 - DNA, 15 bp, Homo sapiens
gccaaactgaaatta

SEQ ID NO: 865135 - DNA, 15 bp, Homo sapiens
ccaaactgaaattac

SEQ ID NO: 865136 - DNA, 15 bp, Homo sapiens
caaactgaaattacc

SEQ ID NO: 865137 - DNA, 15 bp, Homo sapiens
aaactgaaattacca

SEQ ID NO: 865138 - DNA, 15 bp, Homo sapiens
aactgaaattaccag

SEQ ID NO: 865139 - DNA, 15 bp, Homo sapiens
actgaaattaccagc

SEQ ID NO: 865140 - DNA, 15 bp, Homo sapiens
ctgaaattaccagct

SEQ ID NO: 865141 - DNA, 15 bp, Homo sapiens
tgaaattaccagctg

SEQ ID NO: 865142 - DNA, 15 bp, Homo sapiens
gaaattaccagctgt

SEQ ID NO: 865143 - DNA, 15 bp, Homo sapiens
aaattaccagctgtg

SEQ ID NO: 865144 - DNA, 15 bp, Homo sapiens
aattaccagctgtgt

SEQ ID NO: 865145 - DNA, 15 bp, Homo sapiens
attaccagctgtgta

SEQ ID NO: 865146 - DNA, 15 bp, Homo sapiens
ttaccagctgtgtag

SEQ ID NO: 865147 - DNA, 15 bp, Homo sapiens
taccagctgtgtaga

SEQ ID NO: 865148 - DNA, 15 bp, Homo sapiens
accagctgtgtagac

SEQ ID NO: 865149 - DNA, 15 bp, Homo sapiens
ccagctgtgtagacc

SEQ ID NO: 865150 - DNA, 15 bp, Homo sapiens
cagctgtgtagacca

SEQ ID NO: 865151 - DNA, 15 bp, Homo sapiens
agctgtgtagaccaa

SEQ ID NO: 865152 - DNA, 15 bp, Homo sapiens
gctgtgtagaccaaa

SEQ ID NO: 865153 - DNA, 15 bp, Homo sapiens
ctgtgtagaccaaag

SEQ ID NO: 865154 - DNA, 15 bp, Homo sapiens
tgtgtagaccaaaga

SEQ ID NO: 865155 - DNA, 15 bp, Homo sapiens
gtgtagaccaaagag

SEQ ID NO: 865156 - DNA, 15 bp, Homo sapiens
tgtagaccaaagaga

SEQ ID NO: 865157 - DNA, 15 bp, Homo sapiens
gtagaccaaagagaa

SEQ ID NO: 865158 - DNA, 15 bp, Homo sapiens
tagaccaaagagaat

SEQ ID NO: 865159 - DNA, 15 bp, Homo sapiens
agaccaaagagaatt

SEQ ID NO: 865160 - DNA, 15 bp, Homo sapiens
gaccaaagagaattt

SEQ ID NO: 865161 - DNA, 15 bp, Homo sapiens
accaaagagaatttc

SEQ ID NO: 865162 - DNA, 15 bp, Homo sapiens
ccaaagagaatttca

SEQ ID NO: 865163 - DNA, 15 bp, Homo sapiens
caaagagaatttcaa

SEQ ID NO: 865164 - DNA, 15 bp, Homo sapiens
aaagagaatttcaaa

SEQ ID NO: 865165 - DNA, 15 bp, Homo sapiens
aagagaatttcaaaa

SEQ ID NO: 865166 - DNA, 15 bp, Homo sapiens
agagaatttcaaaag

SEQ ID NO: 865167 - DNA, 15 bp, Homo sapiens
gagaatttcaaaaga

SEQ ID NO: 865168 - DNA, 15 bp, Homo sapiens
agaatttcaaaagaa

SEQ ID NO: 865169 - DNA, 15 bp, Homo sapiens
gaatttcaaaagaaa

SEQ ID NO: 865170 - DNA, 15 bp, Homo sapiens
aatttcaaaagaaac

SEQ ID NO: 865171 - DNA, 15 bp, Homo sapiens
atttcaaaagaaact

SEQ ID NO: 865172 - DNA, 15 bp, Homo sapiens
tttcaaaagaaactg

SEQ ID NO: 865173 - DNA, 15 bp, Homo sapiens
ttcaaaagaaactga

SEQ ID NO: 865174 - DNA, 15 bp, Homo sapiens
tcaaaagaaactgaa

SEQ ID NO: 865175 - DNA, 15 bp, Homo sapiens
caaaagaaactgaat

SEQ ID NO: 865176 - DNA, 15 bp, Homo sapiens
aaaagaaactgaatc

SEQ ID NO: 865177 - DNA, 15 bp, Homo sapiens
aaagaaactgaatcc

SEQ ID NO: 865178 - DNA, 15 bp, Homo sapiens
aagaaactgaatccc

SEQ ID NO: 865179 - DNA, 15 bp, Homo sapiens
agaaactgaatccca

SEQ ID NO: 865180 - DNA, 15 bp, Homo sapiens
gaaactgaatcccaa

SEQ ID NO: 865181 - DNA, 15 bp, Homo sapiens
aaactgaatcccaag

SEQ ID NO: 865182 - DNA, 15 bp, Homo sapiens
aactgaatcccaaga

SEQ ID NO: 865183 - DNA, 15 bp, Homo sapiens
actgaatcccaagag

SEQ ID NO: 865184 - DNA, 15 bp, Homo sapiens
ctgaatcccaagaga

SEQ ID NO: 865185 - DNA, 15 bp, Homo sapiens
tgaatcccaagagaa

SEQ ID NO: 865186 - DNA, 15 bp, Homo sapiens
gaatcccaagagaaa

SEQ ID NO: 865187 - DNA, 15 bp, Homo sapiens
aatcccaagagaaaa

SEQ ID NO: 865188 - DNA, 15 bp, Homo sapiens
atcccaagagaaaaa

SEQ ID NO: 865189 - DNA, 15 bp, Homo sapiens
tcccaagagaaaaaa

SEQ ID NO: 865190 - DNA, 15 bp, Homo sapiens
cccaagagaaaaaaa

SEQ ID NO: 865191 - DNA, 15 bp, Homo sapiens
ccaagagaaaaaaaa

SEQ ID NO: 865192 - DNA, 15 bp, Homo sapiens
caagagaaaaaaaaa

SEQ ID NO: 865193 - DNA, 15 bp, Homo sapiens
aagagaaaaaaaaaa

SEQ ID NO: 865194 - DNA, 15 bp, Homo sapiens
agagaaaaaaaaaag

SEQ ID NO: 865195 - DNA, 15 bp, Homo sapiens
gagaaaaaaaaaaga

SEQ ID NO: 865196 - DNA, 15 bp, Homo sapiens
agaaaaaaaaaagac

SEQ ID NO: 865197 - DNA, 15 bp, Homo sapiens
gaaaaaaaaaagact

SEQ ID NO: 865198 - DNA, 15 bp, Homo sapiens
aaaaaaaaaagactt

SEQ ID NO: 865199 - DNA, 15 bp, Homo sapiens
aaaaaaaaagacttc

SEQ ID NO: 865200 - DNA, 15 bp, Homo sapiens
aaaaaaaagacttct

SEQ ID NO: 865201 - DNA, 15 bp, Homo sapiens
aaaaaaagacttctg

SEQ ID NO: 865202 - DNA, 15 bp, Homo sapiens
aaaaaagacttctgg

SEQ ID NO: 865203 - DNA, 15 bp, Homo sapiens
aaaaagacttctggc

SEQ ID NO: 865204 - DNA, 15 bp, Homo sapiens
aaaagacttctggca

SEQ ID NO: 865205 - DNA, 15 bp, Homo sapiens
aaagacttctggcat

SEQ ID NO: 865206 - DNA, 15 bp, Homo sapiens
aagacttctggcatt

SEQ ID NO: 865207 - DNA, 15 bp, Homo sapiens
agacttctggcattg

SEQ ID NO: 865208 - DNA, 15 bp, Homo sapiens
gacttctggcattgt

SEQ ID NO: 865209 - DNA, 15 bp, Homo sapiens
acttctggcattgtg

SEQ ID NO: 865210 - DNA, 15 bp, Homo sapiens
cttctggcattgtgg

SEQ ID NO: 865211 - DNA, 15 bp, Homo sapiens
ttctggcattgtggc

SEQ ID NO: 865212 - DNA, 15 bp, Homo sapiens
tctggcattgtggcc

SEQ ID NO: 865213 - DNA, 15 bp, Homo sapiens
ctggcattgtggccc

SEQ ID NO: 865214 - DNA, 15 bp, Homo sapiens
tggcattgtggccca

SEQ ID NO: 865215 - DNA, 15 bp, Homo sapiens
ggcattgtggcccaa

SEQ ID NO: 865216 - DNA, 15 bp, Homo sapiens
gcattgtggcccaat

SEQ ID NO: 865217 - DNA, 15 bp, Homo sapiens
cattgtggcccaata

SEQ ID NO: 865218 - DNA, 15 bp, Homo sapiens
attgtggcccaataa

SEQ ID NO: 865219 - DNA, 15 bp, Homo sapiens
ttgtggcccaataaa

SEQ ID NO: 865220 - DNA, 15 bp, Homo sapiens
tgtggcccaataaat

SEQ ID NO: 865221 - DNA, 15 bp, Homo sapiens
gtggcccaataaatt

SEQ ID NO: 865222 - DNA, 15 bp, Homo sapiens
tggcccaataaattg

SEQ ID NO: 865223 - DNA, 15 bp, Homo sapiens
ggcccaataaattgg

SEQ ID NO: 865224 - DNA, 15 bp, Homo sapiens
gcccaataaattggt

SEQ ID NO: 865225 - DNA, 15 bp, Homo sapiens
cccaataaattggta

SEQ ID NO: 865226 - DNA, 15 bp, Homo sapiens
ccaataaattggtag

SEQ ID NO: 865227 - DNA, 15 bp, Homo sapiens
caataaattggtagg

SEQ ID NO: 865228 - DNA, 15 bp, Homo sapiens
aataaattggtagga

SEQ ID NO: 865229 - DNA, 15 bp, Homo sapiens
ataaattggtaggat

SEQ ID NO: 865230 - DNA, 15 bp, Homo sapiens
taaattggtaggatt

SEQ ID NO: 865231 - DNA, 15 bp, Homo sapiens
aaattggtaggattg

SEQ ID NO: 865232 - DNA, 15 bp, Homo sapiens
aattggtaggattgt

SEQ ID NO: 865233 - DNA, 15 bp, Homo sapiens
attggtaggattgtt

SEQ ID NO: 865234 - DNA, 15 bp, Homo sapiens
ttggtaggattgttg

SEQ ID NO: 865235 - DNA, 15 bp, Homo sapiens
tggtaggattgttgt

SEQ ID NO: 865236 - DNA, 15 bp, Homo sapiens
ggtaggattgttgtg

SEQ ID NO: 865237 - DNA, 15 bp, Homo sapiens
gtaggattgttgtga

SEQ ID NO: 865238 - DNA, 15 bp, Homo sapiens
taggattgttgtgac

SEQ ID NO: 865239 - DNA, 15 bp, Homo sapiens
aggattgttgtgact

SEQ ID NO: 865240 - DNA, 15 bp, Homo sapiens
ggattgttgtgactt

SEQ ID NO: 865241 - DNA, 15 bp, Homo sapiens
gattgttgtgacttt

SEQ ID NO: 865242 - DNA, 15 bp, Homo sapiens
attgttgtgactttt

SEQ ID NO: 865243 - DNA, 15 bp, Homo sapiens
ttgttgtgacttttc

SEQ ID NO: 865244 - DNA, 15 bp, Homo sapiens
tgttgtgacttttca

SEQ ID NO: 865245 - DNA, 15 bp, Homo sapiens
gttgtgacttttcaa

SEQ ID NO: 865246 - DNA, 15 bp, Homo sapiens
ttgtgacttttcaag

SEQ ID NO: 865247 - DNA, 15 bp, Homo sapiens
tgtgacttttcaagt

SEQ ID NO: 865248 - DNA, 15 bp, Homo sapiens
gtgacttttcaagtt

SEQ ID NO: 865249 - DNA, 15 bp, Homo sapiens
tgacttttcaagttt

SEQ ID NO: 865250 - DNA, 15 bp, Homo sapiens
gacttttcaagttta

SEQ ID NO: 865251 - DNA, 15 bp, Homo sapiens
acttttcaagtttac

SEQ ID NO: 865252 - DNA, 15 bp, Homo sapiens
cttttcaagtttaca

SEQ ID NO: 865253 - DNA, 15 bp, Homo sapiens
ttttcaagtttacat

SEQ ID NO: 865254 - DNA, 15 bp, Homo sapiens
tttcaagtttacatg

SEQ ID NO: 865255 - DNA, 15 bp, Homo sapiens
ttcaagtttacatgt

SEQ ID NO: 865256 - DNA, 15 bp, Homo sapiens
tcaagtttacatgta

SEQ ID NO: 865257 - DNA, 15 bp, Homo sapiens
caagtttacatgtaa

SEQ ID NO: 865258 - DNA, 15 bp, Homo sapiens
aagtttacatgtaaa

SEQ ID NO: 865259 - DNA, 15 bp, Homo sapiens
agtttacatgtaaaa

SEQ ID NO: 865260 - DNA, 15 bp, Homo sapiens
gtttacatgtaaaat

SEQ ID NO: 865261 - DNA, 15 bp, Homo sapiens
tttacatgtaaaatg

SEQ ID NO: 865262 - DNA, 15 bp, Homo sapiens
ttacatgtaaaatgg

SEQ ID NO: 865263 - DNA, 15 bp, Homo sapiens
tacatgtaaaatggg

SEQ ID NO: 865264 - DNA, 15 bp, Homo sapiens
acatgtaaaatgggc

SEQ ID NO: 865265 - DNA, 15 bp, Homo sapiens
catgtaaaatgggcc

SEQ ID NO: 865266 - DNA, 15 bp, Homo sapiens
atgtaaaatgggccc

SEQ ID NO: 865267 - DNA, 15 bp, Homo sapiens
tgtaaaatgggccca

SEQ ID NO: 865268 - DNA, 15 bp, Homo sapiens
gtaaaatgggcccag

SEQ ID NO: 865269 - DNA, 15 bp, Homo sapiens
taaaatgggcccagc

SEQ ID NO: 865270 - DNA, 15 bp, Homo sapiens
aaaatgggcccagcg

SEQ ID NO: 865271 - DNA, 15 bp, Homo sapiens
aaatgggcccagcgc

SEQ ID NO: 865272 - DNA, 15 bp, Homo sapiens
aatgggcccagcgca

SEQ ID NO: 865273 - DNA, 15 bp, Homo sapiens
atgggcccagcgcag

SEQ ID NO: 865274 - DNA, 15 bp, Homo sapiens
tgggcccagcgcagt

SEQ ID NO: 865275 - DNA, 15 bp, Homo sapiens
gggcccagcgcagtg

SEQ ID NO: 865276 - DNA, 15 bp, Homo sapiens
ggcccagcgcagtgc

SEQ ID NO: 865277 - DNA, 15 bp, Homo sapiens
gcccagcgcagtgcc

SEQ ID NO: 865278 - DNA, 15 bp, Homo sapiens
cccagcgcagtgcct

SEQ ID NO: 865279 - DNA, 15 bp, Homo sapiens
ccagcgcagtgcctg

SEQ ID NO: 865280 - DNA, 15 bp, Homo sapiens
cagcgcagtgcctgg

SEQ ID NO: 865281 - DNA, 15 bp, Homo sapiens
agcgcagtgcctggc

SEQ ID NO: 865282 - DNA, 15 bp, Homo sapiens
gcgcagtgcctggca

SEQ ID NO: 865283 - DNA, 15 bp, Homo sapiens
cgcagtgcctggcaa

SEQ ID NO: 865284 - DNA, 15 bp, Homo sapiens
gcagtgcctggcaaa

SEQ ID NO: 865285 - DNA, 15 bp, Homo sapiens
cagtgcctggcaaat

SEQ ID NO: 865286 - DNA, 15 bp, Homo sapiens
agtgcctggcaaata

SEQ ID NO: 865287 - DNA, 15 bp, Homo sapiens
gtgcctggcaaatat

SEQ ID NO: 865288 - DNA, 15 bp, Homo sapiens
tgcctggcaaatatg

SEQ ID NO: 865289 - DNA, 15 bp, Homo sapiens
gcctggcaaatatgg

SEQ ID NO: 865290 - DNA, 15 bp, Homo sapiens
cctggcaaatatggg

SEQ ID NO: 865291 - DNA, 15 bp, Homo sapiens
ctggcaaatatgggt

SEQ ID NO: 865292 - DNA, 15 bp, Homo sapiens
tggcaaatatgggta

SEQ ID NO: 865293 - DNA, 15 bp, Homo sapiens
ggcaaatatgggtac

SEQ ID NO: 865294 - DNA, 15 bp, Homo sapiens
gcaaatatgggtact

SEQ ID NO: 865295 - DNA, 15 bp, Homo sapiens
caaatatgggtacta

SEQ ID NO: 865296 - DNA, 15 bp, Homo sapiens
aaatatgggtactaa

SEQ ID NO: 865297 - DNA, 15 bp, Homo sapiens
aatatgggtactaag

SEQ ID NO: 865298 - DNA, 15 bp, Homo sapiens
atatgggtactaagt

SEQ ID NO: 865299 - DNA, 15 bp, Homo sapiens
tatgggtactaagta

SEQ ID NO: 865300 - DNA, 15 bp, Homo sapiens
atgggtactaagtaa

SEQ ID NO: 865301 - DNA, 15 bp, Homo sapiens
tgggtactaagtaaa

SEQ ID NO: 865302 - DNA, 15 bp, Homo sapiens
gggtactaagtaaaa

SEQ ID NO: 865303 - DNA, 15 bp, Homo sapiens
ggtactaagtaaaag

SEQ ID NO: 865304 - DNA, 15 bp, Homo sapiens
gtactaagtaaaagt

SEQ ID NO: 865305 - DNA, 15 bp, Homo sapiens
tactaagtaaaagta

SEQ ID NO: 865306 - DNA, 15 bp, Homo sapiens
actaagtaaaagtaa

SEQ ID NO: 865307 - DNA, 15 bp, Homo sapiens
ctaagtaaaagtaac

SEQ ID NO: 865308 - DNA, 15 bp, Homo sapiens
taagtaaaagtaact

SEQ ID NO: 865309 - DNA, 15 bp, Homo sapiens
aagtaaaagtaacta

SEQ ID NO: 865310 - DNA, 15 bp, Homo sapiens
agtaaaagtaactat

SEQ ID NO: 865311 - DNA, 15 bp, Homo sapiens
gtaaaagtaactata

SEQ ID NO: 865312 - DNA, 15 bp, Homo sapiens
taaaagtaactataa

SEQ ID NO: 865313 - DNA, 15 bp, Homo sapiens
aaaagtaactataat

SEQ ID NO: 865314 - DNA, 15 bp, Homo sapiens
aaagtaactataatc

SEQ ID NO: 865315 - DNA, 15 bp, Homo sapiens
aagtaactataatca

SEQ ID NO: 865316 - DNA, 15 bp, Homo sapiens
agtaactataatcat

SEQ ID NO: 865317 - DNA, 15 bp, Homo sapiens
gtaactataatcatg

SEQ ID NO: 865318 - DNA, 15 bp, Homo sapiens
taactataatcatgt

SEQ ID NO: 865319 - DNA, 15 bp, Homo sapiens
aactataatcatgtt

SEQ ID NO: 865320 - DNA, 15 bp, Homo sapiens
actataatcatgttt

SEQ ID NO: 865321 - DNA, 15 bp, Homo sapiens
ctataatcatgtttt

SEQ ID NO: 865322 - DNA, 15 bp, Homo sapiens
tataatcatgttttt

SEQ ID NO: 865323 - DNA, 15 bp, Homo sapiens
ataatcatgtttttt

SEQ ID NO: 865324 - DNA, 15 bp, Homo sapiens
taatcatgttttttt

SEQ ID NO: 865325 - DNA, 15 bp, Homo sapiens
aatcatgttttttta

SEQ ID NO: 865326 - DNA, 15 bp, Homo sapiens
atcatgtttttttaa

SEQ ID NO: 865327 - DNA, 15 bp, Homo sapiens
tcatgtttttttaat

SEQ ID NO: 865328 - DNA, 15 bp, Homo sapiens
catgtttttttaatc

SEQ ID NO: 865329 - DNA, 15 bp, Homo sapiens
atgtttttttaatct

SEQ ID NO: 865330 - DNA, 15 bp, Homo sapiens
tgtttttttaatctg

SEQ ID NO: 865331 - DNA, 15 bp, Homo sapiens
gtttttttaatctgg

SEQ ID NO: 865332 - DNA, 15 bp, Homo sapiens
tttttttaatctgga

SEQ ID NO: 865333 - DNA, 15 bp, Homo sapiens
ttttttaatctggac

SEQ ID NO: 865334 - DNA, 15 bp, Homo sapiens
tttttaatctggact

SEQ ID NO: 865335 - DNA, 15 bp, Homo sapiens
ttttaatctggactt

SEQ ID NO: 865336 - DNA, 15 bp, Homo sapiens
tttaatctggacttc

SEQ ID NO: 865337 - DNA, 15 bp, Homo sapiens
ttaatctggacttca

SEQ ID NO: 865338 - DNA, 15 bp, Homo sapiens
taatctggacttcac

SEQ ID NO: 865339 - DNA, 15 bp, Homo sapiens
aatctggacttcact

SEQ ID NO: 865340 - DNA, 15 bp, Homo sapiens
atctggacttcactt

SEQ ID NO: 865341 - DNA, 15 bp, Homo sapiens
tctggacttcacttg

SEQ ID NO: 865342 - DNA, 15 bp, Homo sapiens
ctggacttcacttgg

SEQ ID NO: 865343 - DNA, 15 bp, Homo sapiens
tggacttcacttggt

SEQ ID NO: 865344 - DNA, 15 bp, Homo sapiens
ggacttcacttggtc

SEQ ID NO: 865345 - DNA, 15 bp, Homo sapiens
gacttcacttggtca

SEQ ID NO: 865346 - DNA, 15 bp, Homo sapiens
acttcacttggtcat

SEQ ID NO: 865347 - DNA, 15 bp, Homo sapiens
cttcacttggtcatc

SEQ ID NO: 865348 - DNA, 15 bp, Homo sapiens
ttcacttggtcatcc

SEQ ID NO: 865349 - DNA, 15 bp, Homo sapiens
tcacttggtcatcct

SEQ ID NO: 865350 - DNA, 15 bp, Homo sapiens
cacttggtcatcctt

SEQ ID NO: 865351 - DNA, 15 bp, Homo sapiens
acttggtcatccttt

SEQ ID NO: 865352 - DNA, 15 bp, Homo sapiens
cttggtcatccttta

SEQ ID NO: 865353 - DNA, 15 bp, Homo sapiens
ttggtcatcctttaa

SEQ ID NO: 865354 - DNA, 15 bp, Homo sapiens
tggtcatcctttaaa

SEQ ID NO: 865355 - DNA, 15 bp, Homo sapiens
ggtcatcctttaaat

SEQ ID NO: 865356 - DNA, 15 bp, Homo sapiens
gtcatcctttaaatg

SEQ ID NO: 865357 - DNA, 15 bp, Homo sapiens
tcatcctttaaatgg

SEQ ID NO: 865358 - DNA, 15 bp, Homo sapiens
catcctttaaatggt

SEQ ID NO: 865359 - DNA, 15 bp, Homo sapiens
atcctttaaatggtg

SEQ ID NO: 865360 - DNA, 15 bp, Homo sapiens
tcctttaaatggtgt

SEQ ID NO: 865361 - DNA, 15 bp, Homo sapiens
cctttaaatggtgtc

SEQ ID NO: 865362 - DNA, 15 bp, Homo sapiens
ctttaaatggtgtct

SEQ ID NO: 865363 - DNA, 15 bp, Homo sapiens
tttaaatggtgtctg

SEQ ID NO: 865364 - DNA, 15 bp, Homo sapiens
ttaaatggtgtctga

SEQ ID NO: 865365 - DNA, 15 bp, Homo sapiens
taaatggtgtctgac

SEQ ID NO: 865366 - DNA, 15 bp, Homo sapiens
aaatggtgtctgaca

SEQ ID NO: 865367 - DNA, 15 bp, Homo sapiens
aatggtgtctgacag

SEQ ID NO: 865368 - DNA, 15 bp, Homo sapiens
atggtgtctgacaga

SEQ ID NO: 865369 - DNA, 15 bp, Homo sapiens
tggtgtctgacagaa

SEQ ID NO: 865370 - DNA, 15 bp, Homo sapiens
ggtgtctgacagaat

SEQ ID NO: 865371 - DNA, 15 bp, Homo sapiens
gtgtctgacagaatc

SEQ ID NO: 865372 - DNA, 15 bp, Homo sapiens
tgtctgacagaatcc

SEQ ID NO: 865373 - DNA, 15 bp, Homo sapiens
gtctgacagaatcct

SEQ ID NO: 865374 - DNA, 15 bp, Homo sapiens
tctgacagaatccta

SEQ ID NO: 865375 - DNA, 15 bp, Homo sapiens
ctgacagaatcctag

SEQ ID NO: 865376 - DNA, 15 bp, Homo sapiens
tgacagaatcctagt

SEQ ID NO: 865377 - DNA, 15 bp, Homo sapiens
gacagaatcctagtt

SEQ ID NO: 865378 - DNA, 15 bp, Homo sapiens
acagaatcctagttc

SEQ ID NO: 865379 - DNA, 15 bp, Homo sapiens
cagaatcctagttct

SEQ ID NO: 865380 - DNA, 15 bp, Homo sapiens
agaatcctagttctt

SEQ ID NO: 865381 - DNA, 15 bp, Homo sapiens
gaatcctagttcttg

SEQ ID NO: 865382 - DNA, 15 bp, Homo sapiens
aatcctagttcttgt

SEQ ID NO: 865383 - DNA, 15 bp, Homo sapiens
atcctagttcttgtc

SEQ ID NO: 865384 - DNA, 15 bp, Homo sapiens
tcctagttcttgtct

SEQ ID NO: 865385 - DNA, 15 bp, Homo sapiens
cctagttcttgtctc

SEQ ID NO: 865386 - DNA, 15 bp, Homo sapiens
ctagttcttgtctca

SEQ ID NO: 865387 - DNA, 15 bp, Homo sapiens
tagttcttgtctcac

SEQ ID NO: 865388 - DNA, 15 bp, Homo sapiens
agttcttgtctcact

SEQ ID NO: 865389 - DNA, 15 bp, Homo sapiens
gttcttgtctcactt

SEQ ID NO: 865390 - DNA, 15 bp, Homo sapiens
ttcttgtctcacttt

SEQ ID NO: 865391 - DNA, 15 bp, Homo sapiens
tcttgtctcacttta

SEQ ID NO: 865392 - DNA, 15 bp, Homo sapiens
cttgtctcactttac

SEQ ID NO: 865393 - DNA, 15 bp, Homo sapiens
ttgtctcactttact

SEQ ID NO: 865394 - DNA, 15 bp, Homo sapiens
tgtctcactttactt

SEQ ID NO: 865395 - DNA, 15 bp, Homo sapiens
gtctcactttactta

SEQ ID NO: 865396 - DNA, 15 bp, Homo sapiens
tctcactttacttag

SEQ ID NO: 865397 - DNA, 15 bp, Homo sapiens
ctcactttacttagt

SEQ ID NO: 865398 - DNA, 15 bp, Homo sapiens
tcactttacttagtt

SEQ ID NO: 865399 - DNA, 15 bp, Homo sapiens
cactttacttagttt

SEQ ID NO: 865400 - DNA, 15 bp, Homo sapiens
actttacttagtttc

SEQ ID NO: 865401 - DNA, 15 bp, Homo sapiens
ctttacttagtttcc

SEQ ID NO: 865402 - DNA, 15 bp, Homo sapiens
tttacttagtttccc

SEQ ID NO: 865403 - DNA, 15 bp, Homo sapiens
ttacttagtttccct

SEQ ID NO: 865404 - DNA, 15 bp, Homo sapiens
tacttagtttccctg

SEQ ID NO: 865405 - DNA, 15 bp, Homo sapiens
acttagtttccctgg

SEQ ID NO: 865406 - DNA, 15 bp, Homo sapiens
cttagtttccctggg

SEQ ID NO: 865407 - DNA, 15 bp, Homo sapiens
ttagtttccctggga

SEQ ID NO: 865408 - DNA, 15 bp, Homo sapiens
tagtttccctgggaa

SEQ ID NO: 865409 - DNA, 15 bp, Homo sapiens
agtttccctgggaaa

SEQ ID NO: 865410 - DNA, 15 bp, Homo sapiens
gtttccctgggaaat

SEQ ID NO: 865411 - DNA, 15 bp, Homo sapiens
tttccctgggaaatt

SEQ ID NO: 865412 - DNA, 15 bp, Homo sapiens
ttccctgggaaattt

SEQ ID NO: 865413 - DNA, 15 bp, Homo sapiens
tccctgggaaatttc

SEQ ID NO: 865414 - DNA, 15 bp, Homo sapiens
ccctgggaaatttca

SEQ ID NO: 865415 - DNA, 15 bp, Homo sapiens
cctgggaaatttcat

SEQ ID NO: 865416 - DNA, 15 bp, Homo sapiens
ctgggaaatttcatg

SEQ ID NO: 865417 - DNA, 15 bp, Homo sapiens
tgggaaatttcatgt

SEQ ID NO: 865418 - DNA, 15 bp, Homo sapiens
gggaaatttcatgtg

SEQ ID NO: 865419 - DNA, 15 bp, Homo sapiens
ggaaatttcatgtgt

SEQ ID NO: 865420 - DNA, 15 bp, Homo sapiens
gaaatttcatgtgtc

SEQ ID NO: 865421 - DNA, 15 bp, Homo sapiens
aaatttcatgtgtcc

SEQ ID NO: 865422 - DNA, 15 bp, Homo sapiens
aatttcatgtgtcct

SEQ ID NO: 865423 - DNA, 15 bp, Homo sapiens
atttcatgtgtcctt

SEQ ID NO: 865424 - DNA, 15 bp, Homo sapiens
tttcatgtgtccttt

SEQ ID NO: 865425 - DNA, 15 bp, Homo sapiens
ttcatgtgtcctttt

SEQ ID NO: 865426 - DNA, 15 bp, Homo sapiens
tcatgtgtccttttg

SEQ ID NO: 865427 - DNA, 15 bp, Homo sapiens
catgtgtccttttgg

SEQ ID NO: 865428 - DNA, 15 bp, Homo sapiens
atgtgtccttttggc

SEQ ID NO: 865429 - DNA, 15 bp, Homo sapiens
tgtgtccttttggct

SEQ ID NO: 865430 - DNA, 15 bp, Homo sapiens
gtgtccttttggctt

SEQ ID NO: 865431 - DNA, 15 bp, Homo sapiens
tgtccttttggcttt

SEQ ID NO: 865432 - DNA, 15 bp, Homo sapiens
gtccttttggcttta

SEQ ID NO: 865433 - DNA, 15 bp, Homo sapiens
tccttttggctttaa

SEQ ID NO: 865434 - DNA, 15 bp, Homo sapiens
ccttttggctttaat

SEQ ID NO: 865435 - DNA, 15 bp, Homo sapiens
cttttggctttaatt

SEQ ID NO: 865436 - DNA, 15 bp, Homo sapiens
ttttggctttaatta

SEQ ID NO: 865437 - DNA, 15 bp, Homo sapiens
tttggctttaattaa

SEQ ID NO: 865438 - DNA, 15 bp, Homo sapiens
ttggctttaattaat

SEQ ID NO: 865439 - DNA, 15 bp, Homo sapiens
tggctttaattaata

SEQ ID NO: 865440 - DNA, 15 bp, Homo sapiens
ggctttaattaatat

SEQ ID NO: 865441 - DNA, 15 bp, Homo sapiens
gctttaattaatatc

SEQ ID NO: 865442 - DNA, 15 bp, Homo sapiens
ctttaattaatatct

SEQ ID NO: 865443 - DNA, 15 bp, Homo sapiens
tttaattaatatctc

SEQ ID NO: 865444 - DNA, 15 bp, Homo sapiens
ttaattaatatctct

SEQ ID NO: 865445 - DNA, 15 bp, Homo sapiens
taattaatatctcta

SEQ ID NO: 865446 - DNA, 15 bp, Homo sapiens
aattaatatctctat

SEQ ID NO: 865447 - DNA, 15 bp, Homo sapiens
attaatatctctatt

SEQ ID NO: 865448 - DNA, 15 bp, Homo sapiens
ttaatatctctattt

SEQ ID NO: 865449 - DNA, 15 bp, Homo sapiens
taatatctctatttt

SEQ ID NO: 865450 - DNA, 15 bp, Homo sapiens
aatatctctattttg

SEQ ID NO: 865451 - DNA, 15 bp, Homo sapiens
atatctctattttga

SEQ ID NO: 865452 - DNA, 15 bp, Homo sapiens
tatctctattttgat

SEQ ID NO: 865453 - DNA, 15 bp, Homo sapiens
atctctattttgatg

SEQ ID NO: 865454 - DNA, 15 bp, Homo sapiens
tctctattttgatga

SEQ ID NO: 865455 - DNA, 15 bp, Homo sapiens
ctctattttgatgac

SEQ ID NO: 865456 - DNA, 15 bp, Homo sapiens
tctattttgatgacc

SEQ ID NO: 865457 - DNA, 15 bp, Homo sapiens
ctattttgatgacct

SEQ ID NO: 865458 - DNA, 15 bp, Homo sapiens
tattttgatgacctc

SEQ ID NO: 865459 - DNA, 15 bp, Homo sapiens
attttgatgacctcc

SEQ ID NO: 865460 - DNA, 15 bp, Homo sapiens
ttttgatgacctcca

SEQ ID NO: 865461 - DNA, 15 bp, Homo sapiens
tttgatgacctccat

SEQ ID NO: 865462 - DNA, 15 bp, Homo sapiens
ttgatgacctccatt

SEQ ID NO: 865463 - DNA, 15 bp, Homo sapiens
tgatgacctccatta

SEQ ID NO: 865464 - DNA, 15 bp, Homo sapiens
gatgacctccattat

SEQ ID NO: 865465 - DNA, 15 bp, Homo sapiens
atgacctccattatc

SEQ ID NO: 865466 - DNA, 15 bp, Homo sapiens
tgacctccattatct

SEQ ID NO: 865467 - DNA, 15 bp, Homo sapiens
gacctccattatctg

SEQ ID NO: 865468 - DNA, 15 bp, Homo sapiens
acctccattatctgc

SEQ ID NO: 865469 - DNA, 15 bp, Homo sapiens
cctccattatctgcc

SEQ ID NO: 865470 - DNA, 15 bp, Homo sapiens
ctccattatctgcct

SEQ ID NO: 865471 - DNA, 15 bp, Homo sapiens
tccattatctgccta

SEQ ID NO: 865472 - DNA, 15 bp, Homo sapiens
ccattatctgcctat

SEQ ID NO: 865473 - DNA, 15 bp, Homo sapiens
cattatctgcctatt

SEQ ID NO: 865474 - DNA, 15 bp, Homo sapiens
attatctgcctattc

SEQ ID NO: 865475 - DNA, 15 bp, Homo sapiens
ttatctgcctattcc

SEQ ID NO: 865476 - DNA, 15 bp, Homo sapiens
tatctgcctattccc

SEQ ID NO: 865477 - DNA, 15 bp, Homo sapiens
atctgcctattccca

SEQ ID NO: 865478 - DNA, 15 bp, Homo sapiens
tctgcctattcccag

SEQ ID NO: 865479 - DNA, 15 bp, Homo sapiens
ctgcctattcccaga

SEQ ID NO: 865480 - DNA, 15 bp, Homo sapiens
tgcctattcccagag

SEQ ID NO: 865481 - DNA, 15 bp, Homo sapiens
gcctattcccagagc

SEQ ID NO: 865482 - DNA, 15 bp, Homo sapiens
cctattcccagagct

SEQ ID NO: 865483 - DNA, 15 bp, Homo sapiens
ctattcccagagctt

SEQ ID NO: 865484 - DNA, 15 bp, Homo sapiens
tattcccagagcttt

SEQ ID NO: 865485 - DNA, 15 bp, Homo sapiens
attcccagagctttc

SEQ ID NO: 865486 - DNA, 15 bp, Homo sapiens
ttcccagagctttcc

SEQ ID NO: 865487 - DNA, 15 bp, Homo sapiens
tcccagagctttcca

SEQ ID NO: 865488 - DNA, 15 bp, Homo sapiens
cccagagctttccac

SEQ ID NO: 865489 - DNA, 15 bp, Homo sapiens
ccagagctttccacc

SEQ ID NO: 865490 - DNA, 15 bp, Homo sapiens
cagagctttccacct

SEQ ID NO: 865491 - DNA, 15 bp, Homo sapiens
agagctttccacctg

SEQ ID NO: 865492 - DNA, 15 bp, Homo sapiens
gagctttccacctga

SEQ ID NO: 865493 - DNA, 15 bp, Homo sapiens
agctttccacctgat

SEQ ID NO: 865494 - DNA, 15 bp, Homo sapiens
gctttccacctgata

SEQ ID NO: 865495 - DNA, 15 bp, Homo sapiens
ctttccacctgatat

SEQ ID NO: 865496 - DNA, 15 bp, Homo sapiens
tttccacctgatatc

SEQ ID NO: 865497 - DNA, 15 bp, Homo sapiens
ttccacctgatatct

SEQ ID NO: 865498 - DNA, 15 bp, Homo sapiens
tccacctgatatctc

SEQ ID NO: 865499 - DNA, 15 bp, Homo sapiens
ccacctgatatctca

SEQ ID NO: 865500 - DNA, 15 bp, Homo sapiens
cacctgatatctcag

SEQ ID NO: 865501 - DNA, 15 bp, Homo sapiens
acctgatatctcagc

SEQ ID NO: 865502 - DNA, 15 bp, Homo sapiens
cctgatatctcagca

SEQ ID NO: 865503 - DNA, 15 bp, Homo sapiens
ctgatatctcagcac

SEQ ID NO: 865504 - DNA, 15 bp, Homo sapiens
tgatatctcagcaca

SEQ ID NO: 865505 - DNA, 15 bp, Homo sapiens
gatatctcagcacat

SEQ ID NO: 865506 - DNA, 15 bp, Homo sapiens
atatctcagcacatg

SEQ ID NO: 865507 - DNA, 15 bp, Homo sapiens
tatctcagcacatga

SEQ ID NO: 865508 - DNA, 15 bp, Homo sapiens
atctcagcacatgaa

SEQ ID NO: 865509 - DNA, 15 bp, Homo sapiens
tctcagcacatgaaa

SEQ ID NO: 865510 - DNA, 15 bp, Homo sapiens
ctcagcacatgaaaa

SEQ ID NO: 865511 - DNA, 15 bp, Homo sapiens
tcagcacatgaaaag

SEQ ID NO: 865512 - DNA, 15 bp, Homo sapiens
cagcacatgaaaagc

SEQ ID NO: 865513 - DNA, 15 bp, Homo sapiens
agcacatgaaaagca

SEQ ID NO: 865514 - DNA, 15 bp, Homo sapiens
gcacatgaaaagcac

SEQ ID NO: 865515 - DNA, 15 bp, Homo sapiens
cacatgaaaagcacc

SEQ ID NO: 865516 - DNA, 15 bp, Homo sapiens
acatgaaaagcacct

SEQ ID NO: 865517 - DNA, 15 bp, Homo sapiens
catgaaaagcacctt

SEQ ID NO: 865518 - DNA, 15 bp, Homo sapiens
atgaaaagcacctta

SEQ ID NO: 865519 - DNA, 15 bp, Homo sapiens
tgaaaagcaccttat

SEQ ID NO: 865520 - DNA, 15 bp, Homo sapiens
gaaaagcaccttatg

SEQ ID NO: 865521 - DNA, 15 bp, Homo sapiens
aaaagcaccttatgt

SEQ ID NO: 865522 - DNA, 15 bp, Homo sapiens
aaagcaccttatgtc

SEQ ID NO: 865523 - DNA, 15 bp, Homo sapiens
aagcaccttatgtca

SEQ ID NO: 865524 - DNA, 15 bp, Homo sapiens
agcaccttatgtcaa

SEQ ID NO: 865525 - DNA, 15 bp, Homo sapiens
gcaccttatgtcaat

SEQ ID NO: 865526 - DNA, 15 bp, Homo sapiens
caccttatgtcaata

SEQ ID NO: 865527 - DNA, 15 bp, Homo sapiens
accttatgtcaataa

SEQ ID NO: 865528 - DNA, 15 bp, Homo sapiens
ccttatgtcaataag

SEQ ID NO: 865529 - DNA, 15 bp, Homo sapiens
cttatgtcaataagt

SEQ ID NO: 865530 - DNA, 15 bp, Homo sapiens
ttatgtcaataagtg

SEQ ID NO: 865531 - DNA, 15 bp, Homo sapiens
tatgtcaataagtga

SEQ ID NO: 865532 - DNA, 15 bp, Homo sapiens
atgtcaataagtgag

SEQ ID NO: 865533 - DNA, 15 bp, Homo sapiens
tgtcaataagtgagt

SEQ ID NO: 865534 - DNA, 15 bp, Homo sapiens
gtcaataagtgagtt

SEQ ID NO: 865535 - DNA, 15 bp, Homo sapiens
tcaataagtgagttc

SEQ ID NO: 865536 - DNA, 15 bp, Homo sapiens
caataagtgagttcc

SEQ ID NO: 865537 - DNA, 15 bp, Homo sapiens
aataagtgagttcct

SEQ ID NO: 865538 - DNA, 15 bp, Homo sapiens
ataagtgagttcctt

SEQ ID NO: 865539 - DNA, 15 bp, Homo sapiens
taagtgagttccttc

SEQ ID NO: 865540 - DNA, 15 bp, Homo sapiens
aagtgagttccttcc

SEQ ID NO: 865541 - DNA, 15 bp, Homo sapiens
agtgagttccttccc

SEQ ID NO: 865542 - DNA, 15 bp, Homo sapiens
gtgagttccttccct

SEQ ID NO: 865543 - DNA, 15 bp, Homo sapiens
tgagttccttccctg

SEQ ID NO: 865544 - DNA, 15 bp, Homo sapiens
gagttccttccctgc

SEQ ID NO: 865545 - DNA, 15 bp, Homo sapiens
agttccttccctgcc

SEQ ID NO: 865546 - DNA, 15 bp, Homo sapiens
gttccttccctgccc

SEQ ID NO: 865547 - DNA, 15 bp, Homo sapiens
ttccttccctgcccc

SEQ ID NO: 865548 - DNA, 15 bp, Homo sapiens
tccttccctgcccca

SEQ ID NO: 865549 - DNA, 15 bp, Homo sapiens
ccttccctgccccac

SEQ ID NO: 865550 - DNA, 15 bp, Homo sapiens
cttccctgccccacc

SEQ ID NO: 865551 - DNA, 15 bp, Homo sapiens
ttccctgccccacca

SEQ ID NO: 865552 - DNA, 15 bp, Homo sapiens
tccctgccccaccac

SEQ ID NO: 865553 - DNA, 15 bp, Homo sapiens
ccctgccccaccaca

SEQ ID NO: 865554 - DNA, 15 bp, Homo sapiens
cctgccccaccacat

SEQ ID NO: 865555 - DNA, 15 bp, Homo sapiens
ctgccccaccacata

SEQ ID NO: 865556 - DNA, 15 bp, Homo sapiens
tgccccaccacatac

SEQ ID NO: 865557 - DNA, 15 bp, Homo sapiens
gccccaccacatacc

SEQ ID NO: 865558 - DNA, 15 bp, Homo sapiens
ccccaccacatacct

SEQ ID NO: 865559 - DNA, 15 bp, Homo sapiens
cccaccacatacctg

SEQ ID NO: 865560 - DNA, 15 bp, Homo sapiens
ccaccacatacctgt

SEQ ID NO: 865561 - DNA, 15 bp, Homo sapiens
caccacatacctgtc

SEQ ID NO: 865562 - DNA, 15 bp, Homo sapiens
accacatacctgtcc

SEQ ID NO: 865563 - DNA, 15 bp, Homo sapiens
ccacatacctgtcct

SEQ ID NO: 865564 - DNA, 15 bp, Homo sapiens
cacatacctgtcctg

SEQ ID NO: 865565 - DNA, 15 bp, Homo sapiens
acatacctgtcctgt

SEQ ID NO: 865566 - DNA, 15 bp, Homo sapiens
catacctgtcctgtg

SEQ ID NO: 865567 - DNA, 15 bp, Homo sapiens
atacctgtcctgtgt

SEQ ID NO: 865568 - DNA, 15 bp, Homo sapiens
tacctgtcctgtgtt

SEQ ID NO: 865569 - DNA, 15 bp, Homo sapiens
acctgtcctgtgttc

SEQ ID NO: 865570 - DNA, 15 bp, Homo sapiens
cctgtcctgtgttcc

SEQ ID NO: 865571 - DNA, 15 bp, Homo sapiens
ctgtcctgtgttcct

SEQ ID NO: 865572 - DNA, 15 bp, Homo sapiens
tgtcctgtgttccta

SEQ ID NO: 865573 - DNA, 15 bp, Homo sapiens
gtcctgtgttcctaa

SEQ ID NO: 865574 - DNA, 15 bp, Homo sapiens
tcctgtgttcctaat

SEQ ID NO: 865575 - DNA, 15 bp, Homo sapiens
cctgtgttcctaatt

SEQ ID NO: 865576 - DNA, 15 bp, Homo sapiens
ctgtgttcctaattc

SEQ ID NO: 865577 - DNA, 15 bp, Homo sapiens
tgtgttcctaattcc

SEQ ID NO: 865578 - DNA, 15 bp, Homo sapiens
gtgttcctaattcca

SEQ ID NO: 865579 - DNA, 15 bp, Homo sapiens
tgttcctaattccac

SEQ ID NO: 865580 - DNA, 15 bp, Homo sapiens
gttcctaattccact

SEQ ID NO: 865581 - DNA, 15 bp, Homo sapiens
ttcctaattccactg

SEQ ID NO: 865582 - DNA, 15 bp, Homo sapiens
tcctaattccactga

SEQ ID NO: 865583 - DNA, 15 bp, Homo sapiens
cctaattccactgaa

SEQ ID NO: 865584 - DNA, 15 bp, Homo sapiens
ctaattccactgaat

SEQ ID NO: 865585 - DNA, 15 bp, Homo sapiens
taattccactgaatg

SEQ ID NO: 865586 - DNA, 15 bp, Homo sapiens
aattccactgaatgg

SEQ ID NO: 865587 - DNA, 15 bp, Homo sapiens
attccactgaatggc

SEQ ID NO: 865588 - DNA, 15 bp, Homo sapiens
ttccactgaatggca

SEQ ID NO: 865589 - DNA, 15 bp, Homo sapiens
tccactgaatggcat

SEQ ID NO: 865590 - DNA, 15 bp, Homo sapiens
ccactgaatggcatc

SEQ ID NO: 865591 - DNA, 15 bp, Homo sapiens
cactgaatggcatcc

SEQ ID NO: 865592 - DNA, 15 bp, Homo sapiens
actgaatggcatccc

SEQ ID NO: 865593 - DNA, 15 bp, Homo sapiens
ctgaatggcatccca

SEQ ID NO: 865594 - DNA, 15 bp, Homo sapiens
tgaatggcatcccat

SEQ ID NO: 865595 - DNA, 15 bp, Homo sapiens
gaatggcatcccatc

SEQ ID NO: 865596 - DNA, 15 bp, Homo sapiens
aatggcatcccatcc

SEQ ID NO: 865597 - DNA, 15 bp, Homo sapiens
atggcatcccatcct

SEQ ID NO: 865598 - DNA, 15 bp, Homo sapiens
tggcatcccatcctc

SEQ ID NO: 865599 - DNA, 15 bp, Homo sapiens
ggcatcccatcctcc

SEQ ID NO: 865600 - DNA, 15 bp, Homo sapiens
gcatcccatcctcca

SEQ ID NO: 865601 - DNA, 15 bp, Homo sapiens
catcccatcctccag

SEQ ID NO: 865602 - DNA, 15 bp, Homo sapiens
atcccatcctccagt

SEQ ID NO: 865603 - DNA, 15 bp, Homo sapiens
tcccatcctccagtt

SEQ ID NO: 865604 - DNA, 15 bp, Homo sapiens
cccatcctccagttt

SEQ ID NO: 865605 - DNA, 15 bp, Homo sapiens
ccatcctccagtttc

SEQ ID NO: 865606 - DNA, 15 bp, Homo sapiens
catcctccagtttcc

SEQ ID NO: 865607 - DNA, 15 bp, Homo sapiens
atcctccagtttccc

SEQ ID NO: 865608 - DNA, 15 bp, Homo sapiens
tcctccagtttccca

SEQ ID NO: 865609 - DNA, 15 bp, Homo sapiens
cctccagtttcccaa

SEQ ID NO: 865610 - DNA, 15 bp, Homo sapiens
ctccagtttcccaag

SEQ ID NO: 865611 - DNA, 15 bp, Homo sapiens
tccagtttcccaagg

SEQ ID NO: 865612 - DNA, 15 bp, Homo sapiens
ccagtttcccaaggc

SEQ ID NO: 865613 - DNA, 15 bp, Homo sapiens
cagtttcccaaggcc

SEQ ID NO: 865614 - DNA, 15 bp, Homo sapiens
agtttcccaaggcca

SEQ ID NO: 865615 - DNA, 15 bp, Homo sapiens
gtttcccaaggccaa

SEQ ID NO: 865616 - DNA, 15 bp, Homo sapiens
tttcccaaggccaag

SEQ ID NO: 865617 - DNA, 15 bp, Homo sapiens
ttcccaaggccaaga

SEQ ID NO: 865618 - DNA, 15 bp, Homo sapiens
tcccaaggccaagac

SEQ ID NO: 865619 - DNA, 15 bp, Homo sapiens
cccaaggccaagacc

SEQ ID NO: 865620 - DNA, 15 bp, Homo sapiens
ccaaggccaagacct

SEQ ID NO: 865621 - DNA, 15 bp, Homo sapiens
caaggccaagacctg

SEQ ID NO: 865622 - DNA, 15 bp, Homo sapiens
aaggccaagacctgg

SEQ ID NO: 865623 - DNA, 15 bp, Homo sapiens
aggccaagacctggg

SEQ ID NO: 865624 - DNA, 15 bp, Homo sapiens
ggccaagacctggga

SEQ ID NO: 865625 - DNA, 15 bp, Homo sapiens
gccaagacctgggac

SEQ ID NO: 865626 - DNA, 15 bp, Homo sapiens
ccaagacctgggact

SEQ ID NO: 865627 - DNA, 15 bp, Homo sapiens
caagacctgggactc

SEQ ID NO: 865628 - DNA, 15 bp, Homo sapiens
aagacctgggactca

SEQ ID NO: 865629 - DNA, 15 bp, Homo sapiens
agacctgggactcat

SEQ ID NO: 865630 - DNA, 15 bp, Homo sapiens
gacctgggactcatc

SEQ ID NO: 865631 - DNA, 15 bp, Homo sapiens
acctgggactcatct

SEQ ID NO: 865632 - DNA, 15 bp, Homo sapiens
cctgggactcatctt

SEQ ID NO: 865633 - DNA, 15 bp, Homo sapiens
ctgggactcatcttt

SEQ ID NO: 865634 - DNA, 15 bp, Homo sapiens
tgggactcatctttc

SEQ ID NO: 865635 - DNA, 15 bp, Homo sapiens
gggactcatctttca

SEQ ID NO: 865636 - DNA, 15 bp, Homo sapiens
ggactcatctttcac

SEQ ID NO: 865637 - DNA, 15 bp, Homo sapiens
gactcatctttcact

SEQ ID NO: 865638 - DNA, 15 bp, Homo sapiens
actcatctttcactc

SEQ ID NO: 865639 - DNA, 15 bp, Homo sapiens
ctcatctttcactct

SEQ ID NO: 865640 - DNA, 15 bp, Homo sapiens
tcatctttcactctc

SEQ ID NO: 865641 - DNA, 15 bp, Homo sapiens
catctttcactctca

SEQ ID NO: 865642 - DNA, 15 bp, Homo sapiens
atctttcactctcaa

SEQ ID NO: 865643 - DNA, 15 bp, Homo sapiens
tctttcactctcaag

SEQ ID NO: 865644 - DNA, 15 bp, Homo sapiens
ctttcactctcaagt

SEQ ID NO: 865645 - DNA, 15 bp, Homo sapiens
tttcactctcaagtt

SEQ ID NO: 865646 - DNA, 15 bp, Homo sapiens
ttcactctcaagttc

SEQ ID NO: 865647 - DNA, 15 bp, Homo sapiens
tcactctcaagttcc

SEQ ID NO: 865648 - DNA, 15 bp, Homo sapiens
cactctcaagttcct

SEQ ID NO: 865649 - DNA, 15 bp, Homo sapiens
actctcaagttcctc

SEQ ID NO: 865650 - DNA, 15 bp, Homo sapiens
ctctcaagttcctcc

SEQ ID NO: 865651 - DNA, 15 bp, Homo sapiens
tctcaagttcctcca

SEQ ID NO: 865652 - DNA, 15 bp, Homo sapiens
ctcaagttcctccac

SEQ ID NO: 865653 - DNA, 15 bp, Homo sapiens
tcaagttcctccacg

SEQ ID NO: 865654 - DNA, 15 bp, Homo sapiens
caagttcctccacgg

SEQ ID NO: 865655 - DNA, 15 bp, Homo sapiens
aagttcctccacggg

SEQ ID NO: 865656 - DNA, 15 bp, Homo sapiens
agttcctccacgggt

SEQ ID NO: 865657 - DNA, 15 bp, Homo sapiens
gttcctccacgggta

SEQ ID NO: 865658 - DNA, 15 bp, Homo sapiens
ttcctccacgggtac

SEQ ID NO: 865659 - DNA, 15 bp, Homo sapiens
tcctccacgggtacc

SEQ ID NO: 865660 - DNA, 15 bp, Homo sapiens
cctccacgggtaccc

SEQ ID NO: 865661 - DNA, 15 bp, Homo sapiens
ctccacgggtaccca

SEQ ID NO: 865662 - DNA, 15 bp, Homo sapiens
tccacgggtacccac

SEQ ID NO: 865663 - DNA, 15 bp, Homo sapiens
ccacgggtacccaca

SEQ ID NO: 865664 - DNA, 15 bp, Homo sapiens
cacgggtacccacat

SEQ ID NO: 865665 - DNA, 15 bp, Homo sapiens
acgggtacccacatg

SEQ ID NO: 865666 - DNA, 15 bp, Homo sapiens
cgggtacccacatgt

SEQ ID NO: 865667 - DNA, 15 bp, Homo sapiens
gggtacccacatgtc

SEQ ID NO: 865668 - DNA, 15 bp, Homo sapiens
ggtacccacatgtca

SEQ ID NO: 865669 - DNA, 15 bp, Homo sapiens
gtacccacatgtcac

SEQ ID NO: 865670 - DNA, 15 bp, Homo sapiens
tacccacatgtcaca

SEQ ID NO: 865671 - DNA, 15 bp, Homo sapiens
acccacatgtcacat

SEQ ID NO: 865672 - DNA, 15 bp, Homo sapiens
cccacatgtcacatc

SEQ ID NO: 865673 - DNA, 15 bp, Homo sapiens
ccacatgtcacatcc

SEQ ID NO: 865674 - DNA, 15 bp, Homo sapiens
cacatgtcacatcct

SEQ ID NO: 865675 - DNA, 15 bp, Homo sapiens
acatgtcacatcctg

SEQ ID NO: 865676 - DNA, 15 bp, Homo sapiens
catgtcacatcctgt

SEQ ID NO: 865677 - DNA, 15 bp, Homo sapiens
atgtcacatcctgtc

SEQ ID NO: 865678 - DNA, 15 bp, Homo sapiens
tgtcacatcctgtca

SEQ ID NO: 865679 - DNA, 15 bp, Homo sapiens
gtcacatcctgtcaa

SEQ ID NO: 865680 - DNA, 15 bp, Homo sapiens
tcacatcctgtcaat

SEQ ID NO: 865681 - DNA, 15 bp, Homo sapiens
cacatcctgtcaatg

SEQ ID NO: 865682 - DNA, 15 bp, Homo sapiens
acatcctgtcaatgc

SEQ ID NO: 865683 - DNA, 15 bp, Homo sapiens
catcctgtcaatgct

SEQ ID NO: 865684 - DNA, 15 bp, Homo sapiens
atcctgtcaatgctg

SEQ ID NO: 865685 - DNA, 15 bp, Homo sapiens
tcctgtcaatgctgt

SEQ ID NO: 865686 - DNA, 15 bp, Homo sapiens
cctgtcaatgctgtc

SEQ ID NO: 865687 - DNA, 15 bp, Homo sapiens
ctgtcaatgctgtcc

SEQ ID NO: 865688 - DNA, 15 bp, Homo sapiens
tgtcaatgctgtccc

SEQ ID NO: 865689 - DNA, 15 bp, Homo sapiens
gtcaatgctgtccct

SEQ ID NO: 865690 - DNA, 15 bp, Homo sapiens
tcaatgctgtccctg

SEQ ID NO: 865691 - DNA, 15 bp, Homo sapiens
caatgctgtccctgg

SEQ ID NO: 865692 - DNA, 15 bp, Homo sapiens
aatgctgtccctggg

SEQ ID NO: 865693 - DNA, 15 bp, Homo sapiens
atgctgtccctgggg

SEQ ID NO: 865694 - DNA, 15 bp, Homo sapiens
tgctgtccctgggga

SEQ ID NO: 865695 - DNA, 15 bp, Homo sapiens
gctgtccctggggag

SEQ ID NO: 865696 - DNA, 15 bp, Homo sapiens
ctgtccctggggagt

SEQ ID NO: 865697 - DNA, 15 bp, Homo sapiens
tgtccctggggagta

SEQ ID NO: 865698 - DNA, 15 bp, Homo sapiens
gtccctggggagtat

SEQ ID NO: 865699 - DNA, 15 bp, Homo sapiens
tccctggggagtatc

SEQ ID NO: 865700 - DNA, 15 bp, Homo sapiens
ccctggggagtatct

SEQ ID NO: 865701 - DNA, 15 bp, Homo sapiens
cctggggagtatctg

SEQ ID NO: 865702 - DNA, 15 bp, Homo sapiens
ctggggagtatctga

SEQ ID NO: 865703 - DNA, 15 bp, Homo sapiens
tggggagtatctgaa

SEQ ID NO: 865704 - DNA, 15 bp, Homo sapiens
ggggagtatctgaaa

SEQ ID NO: 865705 - DNA, 15 bp, Homo sapiens
gggagtatctgaaat

SEQ ID NO: 865706 - DNA, 15 bp, Homo sapiens
ggagtatctgaaata

SEQ ID NO: 865707 - DNA, 15 bp, Homo sapiens
gagtatctgaaatat

SEQ ID NO: 865708 - DNA, 15 bp, Homo sapiens
agtatctgaaatata

SEQ ID NO: 865709 - DNA, 15 bp, Homo sapiens
gtatctgaaatatat

SEQ ID NO: 865710 - DNA, 15 bp, Homo sapiens
tatctgaaatatatt

SEQ ID NO: 865711 - DNA, 15 bp, Homo sapiens
atctgaaatatattc

SEQ ID NO: 865712 - DNA, 15 bp, Homo sapiens
tctgaaatatattca

SEQ ID NO: 865713 - DNA, 15 bp, Homo sapiens
ctgaaatatattcac

SEQ ID NO: 865714 - DNA, 15 bp, Homo sapiens
tgaaatatattcact

SEQ ID NO: 865715 - DNA, 15 bp, Homo sapiens
gaaatatattcactt

SEQ ID NO: 865716 - DNA, 15 bp, Homo sapiens
aaatatattcacttt

SEQ ID NO: 865717 - DNA, 15 bp, Homo sapiens
aatatattcactttt

SEQ ID NO: 865718 - DNA, 15 bp, Homo sapiens
atatattcacttttc

SEQ ID NO: 865719 - DNA, 15 bp, Homo sapiens
tatattcacttttct

SEQ ID NO: 865720 - DNA, 15 bp, Homo sapiens
atattcacttttctt

SEQ ID NO: 865721 - DNA, 15 bp, Homo sapiens
tattcacttttcttc

SEQ ID NO: 865722 - DNA, 15 bp, Homo sapiens
attcacttttcttca

SEQ ID NO: 865723 - DNA, 15 bp, Homo sapiens
ttcacttttcttcat

SEQ ID NO: 865724 - DNA, 15 bp, Homo sapiens
tcacttttcttcatt

SEQ ID NO: 865725 - DNA, 15 bp, Homo sapiens
cacttttcttcattt

SEQ ID NO: 865726 - DNA, 15 bp, Homo sapiens
acttttcttcatttc

SEQ ID NO: 865727 - DNA, 15 bp, Homo sapiens
cttttcttcatttcc

SEQ ID NO: 865728 - DNA, 15 bp, Homo sapiens
ttttcttcatttcca

SEQ ID NO: 865729 - DNA, 15 bp, Homo sapiens
tttcttcatttccac

SEQ ID NO: 865730 - DNA, 15 bp, Homo sapiens
ttcttcatttccacc

SEQ ID NO: 865731 - DNA, 15 bp, Homo sapiens
tcttcatttccacct

SEQ ID NO: 865732 - DNA, 15 bp, Homo sapiens
cttcatttccacctg

SEQ ID NO: 865733 - DNA, 15 bp, Homo sapiens
ttcatttccacctga

SEQ ID NO: 865734 - DNA, 15 bp, Homo sapiens
tcatttccacctgac

SEQ ID NO: 865735 - DNA, 15 bp, Homo sapiens
catttccacctgaca

SEQ ID NO: 865736 - DNA, 15 bp, Homo sapiens
atttccacctgacac

SEQ ID NO: 865737 - DNA, 15 bp, Homo sapiens
tttccacctgacacc

SEQ ID NO: 865738 - DNA, 15 bp, Homo sapiens
ttccacctgacacca

SEQ ID NO: 865739 - DNA, 15 bp, Homo sapiens
tccacctgacaccac

SEQ ID NO: 865740 - DNA, 15 bp, Homo sapiens
ccacctgacaccact

SEQ ID NO: 865741 - DNA, 15 bp, Homo sapiens
cacctgacaccacta

SEQ ID NO: 865742 - DNA, 15 bp, Homo sapiens
acctgacaccactat

SEQ ID NO: 865743 - DNA, 15 bp, Homo sapiens
cctgacaccactatt

SEQ ID NO: 865744 - DNA, 15 bp, Homo sapiens
ctgacaccactatta

SEQ ID NO: 865745 - DNA, 15 bp, Homo sapiens
tgacaccactattaa

SEQ ID NO: 865746 - DNA, 15 bp, Homo sapiens
gacaccactattaac

SEQ ID NO: 865747 - DNA, 15 bp, Homo sapiens
acaccactattaaca

SEQ ID NO: 865748 - DNA, 15 bp, Homo sapiens
caccactattaacac

SEQ ID NO: 865749 - DNA, 15 bp, Homo sapiens
accactattaacact

SEQ ID NO: 865750 - DNA, 15 bp, Homo sapiens
ccactattaacactt

SEQ ID NO: 865751 - DNA, 15 bp, Homo sapiens
cactattaacacttg

SEQ ID NO: 865752 - DNA, 15 bp, Homo sapiens
actattaacacttgc

SEQ ID NO: 865753 - DNA, 15 bp, Homo sapiens
ctattaacacttgca

SEQ ID NO: 865754 - DNA, 15 bp, Homo sapiens
tattaacacttgcac

SEQ ID NO: 865755 - DNA, 15 bp, Homo sapiens
attaacacttgcaca

SEQ ID NO: 865756 - DNA, 15 bp, Homo sapiens
ttaacacttgcacaa

SEQ ID NO: 865757 - DNA, 15 bp, Homo sapiens
taacacttgcacaaa

SEQ ID NO: 865758 - DNA, 15 bp, Homo sapiens
aacacttgcacaaat

SEQ ID NO: 865759 - DNA, 15 bp, Homo sapiens
acacttgcacaaatt

SEQ ID NO: 865760 - DNA, 15 bp, Homo sapiens
cacttgcacaaattt

SEQ ID NO: 865761 - DNA, 15 bp, Homo sapiens
acttgcacaaatttc

SEQ ID NO: 865762 - DNA, 15 bp, Homo sapiens
cttgcacaaatttct

SEQ ID NO: 865763 - DNA, 15 bp, Homo sapiens
ttgcacaaatttctg

SEQ ID NO: 865764 - DNA, 15 bp, Homo sapiens
tgcacaaatttctga

SEQ ID NO: 865765 - DNA, 15 bp, Homo sapiens
gcacaaatttctgag

SEQ ID NO: 865766 - DNA, 15 bp, Homo sapiens
cacaaatttctgagg

SEQ ID NO: 865767 - DNA, 15 bp, Homo sapiens
acaaatttctgaggt

SEQ ID NO: 865768 - DNA, 15 bp, Homo sapiens
caaatttctgaggtt

SEQ ID NO: 865769 - DNA, 15 bp, Homo sapiens
aaatttctgaggttc

SEQ ID NO: 865770 - DNA, 15 bp, Homo sapiens
aatttctgaggttcc

SEQ ID NO: 865771 - DNA, 15 bp, Homo sapiens
atttctgaggttcct

SEQ ID NO: 865772 - DNA, 15 bp, Homo sapiens
tttctgaggttcctg

SEQ ID NO: 865773 - DNA, 15 bp, Homo sapiens
ttctgaggttcctgg

SEQ ID NO: 865774 - DNA, 15 bp, Homo sapiens
tctgaggttcctggc

SEQ ID NO: 865775 - DNA, 15 bp, Homo sapiens
ctgaggttcctggct

SEQ ID NO: 865776 - DNA, 15 bp, Homo sapiens
tgaggttcctggctc

SEQ ID NO: 865777 - DNA, 15 bp, Homo sapiens
gaggttcctggctca

SEQ ID NO: 865778 - DNA, 15 bp, Homo sapiens
aggttcctggctcat

SEQ ID NO: 865779 - DNA, 15 bp, Homo sapiens
ggttcctggctcatt

SEQ ID NO: 865780 - DNA, 15 bp, Homo sapiens
gttcctggctcattt

SEQ ID NO: 865781 - DNA, 15 bp, Homo sapiens
ttcctggctcatttc

SEQ ID NO: 865782 - DNA, 15 bp, Homo sapiens
tcctggctcatttcc

SEQ ID NO: 865783 - DNA, 15 bp, Homo sapiens
cctggctcatttccc

SEQ ID NO: 865784 - DNA, 15 bp, Homo sapiens
ctggctcatttccct

SEQ ID NO: 865785 - DNA, 15 bp, Homo sapiens
tggctcatttccctc

SEQ ID NO: 865786 - DNA, 15 bp, Homo sapiens
ggctcatttccctca

SEQ ID NO: 865787 - DNA, 15 bp, Homo sapiens
gctcatttccctcat

SEQ ID NO: 865788 - DNA, 15 bp, Homo sapiens
ctcatttccctcatt

SEQ ID NO: 865789 - DNA, 15 bp, Homo sapiens
tcatttccctcattg

SEQ ID NO: 865790 - DNA, 15 bp, Homo sapiens
catttccctcattga

SEQ ID NO: 865791 - DNA, 15 bp, Homo sapiens
atttccctcattgac

SEQ ID NO: 865792 - DNA, 15 bp, Homo sapiens
tttccctcattgacc

SEQ ID NO: 865793 - DNA, 15 bp, Homo sapiens
ttccctcattgaccc

SEQ ID NO: 865794 - DNA, 15 bp, Homo sapiens
tccctcattgacccc

SEQ ID NO: 865795 - DNA, 15 bp, Homo sapiens
ccctcattgaccccc

SEQ ID NO: 865796 - DNA, 15 bp, Homo sapiens
cctcattgaccccca

SEQ ID NO: 865797 - DNA, 15 bp, Homo sapiens
ctcattgacccccaa

SEQ ID NO: 865798 - DNA, 15 bp, Homo sapiens
tcattgacccccaat

SEQ ID NO: 865799 - DNA, 15 bp, Homo sapiens
cattgacccccaata

SEQ ID NO: 865800 - DNA, 15 bp, Homo sapiens
attgacccccaatag

SEQ ID NO: 865801 - DNA, 15 bp, Homo sapiens
ttgacccccaatagt

SEQ ID NO: 865802 - DNA, 15 bp, Homo sapiens
tgacccccaatagtt

SEQ ID NO: 865803 - DNA, 15 bp, Homo sapiens
gacccccaatagttc

SEQ ID NO: 865804 - DNA, 15 bp, Homo sapiens
acccccaatagttca

SEQ ID NO: 865805 - DNA, 15 bp, Homo sapiens
cccccaatagttcat

SEQ ID NO: 865806 - DNA, 15 bp, Homo sapiens
ccccaatagttcatt

SEQ ID NO: 865807 - DNA, 15 bp, Homo sapiens
cccaatagttcattc

SEQ ID NO: 865808 - DNA, 15 bp, Homo sapiens
ccaatagttcattct

SEQ ID NO: 865809 - DNA, 15 bp, Homo sapiens
caatagttcattctg

SEQ ID NO: 865810 - DNA, 15 bp, Homo sapiens
aatagttcattctgc

SEQ ID NO: 865811 - DNA, 15 bp, Homo sapiens
atagttcattctgct

SEQ ID NO: 865812 - DNA, 15 bp, Homo sapiens
tagttcattctgctc

SEQ ID NO: 865813 - DNA, 15 bp, Homo sapiens
agttcattctgctct

SEQ ID NO: 865814 - DNA, 15 bp, Homo sapiens
gttcattctgctctt

SEQ ID NO: 865815 - DNA, 15 bp, Homo sapiens
ttcattctgctcttt

SEQ ID NO: 865816 - DNA, 15 bp, Homo sapiens
tcattctgctctttg

SEQ ID NO: 865817 - DNA, 15 bp, Homo sapiens
cattctgctctttgc

SEQ ID NO: 865818 - DNA, 15 bp, Homo sapiens
attctgctctttgca

SEQ ID NO: 865819 - DNA, 15 bp, Homo sapiens
ttctgctctttgcag

SEQ ID NO: 865820 - DNA, 15 bp, Homo sapiens
tctgctctttgcagc

SEQ ID NO: 865821 - DNA, 15 bp, Homo sapiens
ctgctctttgcagct

SEQ ID NO: 865822 - DNA, 15 bp, Homo sapiens
tgctctttgcagctc

SEQ ID NO: 865823 - DNA, 15 bp, Homo sapiens
gctctttgcagctct

SEQ ID NO: 865824 - DNA, 15 bp, Homo sapiens
ctctttgcagctctg

SEQ ID NO: 865825 - DNA, 15 bp, Homo sapiens
tctttgcagctctgg

SEQ ID NO: 865826 - DNA, 15 bp, Homo sapiens
ctttgcagctctggt

SEQ ID NO: 865827 - DNA, 15 bp, Homo sapiens
ccattggtcctaaca

SEQ ID NO: 865828 - DNA, 15 bp, Homo sapiens
cattggtcctaacac

SEQ ID NO: 865829 - DNA, 15 bp, Homo sapiens
attggtcctaacaca

SEQ ID NO: 865830 - DNA, 15 bp, Homo sapiens
ttggtcctaacacaa

SEQ ID NO: 865831 - DNA, 15 bp, Homo sapiens
tggtcctaacacaac

SEQ ID NO: 865832 - DNA, 15 bp, Homo sapiens
ggtcctaacacaact

SEQ ID NO: 865833 - DNA, 15 bp, Homo sapiens
gtcctaacacaactt

SEQ ID NO: 865834 - DNA, 15 bp, Homo sapiens
tcctaacacaacttt

SEQ ID NO: 865835 - DNA, 15 bp, Homo sapiens
cctaacacaactttc

SEQ ID NO: 865836 - DNA, 15 bp, Homo sapiens
ctaacacaactttca

SEQ ID NO: 865837 - DNA, 15 bp, Homo sapiens
taacacaactttcat

SEQ ID NO: 865838 - DNA, 15 bp, Homo sapiens
aacacaactttcata

SEQ ID NO: 865839 - DNA, 15 bp, Homo sapiens
acacaactttcatat

SEQ ID NO: 865840 - DNA, 15 bp, Homo sapiens
cacaactttcatatt

SEQ ID NO: 865841 - DNA, 15 bp, Homo sapiens
acaactttcatattc

SEQ ID NO: 865842 - DNA, 15 bp, Homo sapiens
caactttcatattct

SEQ ID NO: 865843 - DNA, 15 bp, Homo sapiens
aactttcatattcta

SEQ ID NO: 865844 - DNA, 15 bp, Homo sapiens
actttcatattctac

SEQ ID NO: 865845 - DNA, 15 bp, Homo sapiens
ctttcatattctacc

SEQ ID NO: 865846 - DNA, 15 bp, Homo sapiens
tttcatattctaccc

SEQ ID NO: 865847 - DNA, 15 bp, Homo sapiens
ttcatattctacccc

SEQ ID NO: 865848 - DNA, 15 bp, Homo sapiens
tcatattctacccca

SEQ ID NO: 865849 - DNA, 15 bp, Homo sapiens
catattctaccccaa

SEQ ID NO: 865850 - DNA, 15 bp, Homo sapiens
atattctaccccaat

SEQ ID NO: 865851 - DNA, 15 bp, Homo sapiens
tattctaccccaata

SEQ ID NO: 865852 - DNA, 15 bp, Homo sapiens
attctaccccaatat

SEQ ID NO: 865853 - DNA, 15 bp, Homo sapiens
ttctaccccaatatc

SEQ ID NO: 865854 - DNA, 15 bp, Homo sapiens
tctaccccaatatca

SEQ ID NO: 865855 - DNA, 15 bp, Homo sapiens
ctaccccaatatcaa

SEQ ID NO: 865856 - DNA, 15 bp, Homo sapiens
taccccaatatcaaa

SEQ ID NO: 865857 - DNA, 15 bp, Homo sapiens
accccaatatcaaag

SEQ ID NO: 865858 - DNA, 15 bp, Homo sapiens
ccccaatatcaaaga

SEQ ID NO: 865859 - DNA, 15 bp, Homo sapiens
cccaatatcaaagag

SEQ ID NO: 865860 - DNA, 15 bp, Homo sapiens
ccaatatcaaagagg

SEQ ID NO: 865861 - DNA, 15 bp, Homo sapiens
caatatcaaagaggc

SEQ ID NO: 865862 - DNA, 15 bp, Homo sapiens
aatatcaaagaggct

SEQ ID NO: 865863 - DNA, 15 bp, Homo sapiens
atatcaaagaggctt

SEQ ID NO: 865864 - DNA, 15 bp, Homo sapiens
tatcaaagaggctta

SEQ ID NO: 865865 - DNA, 15 bp, Homo sapiens
atcaaagaggcttaa

SEQ ID NO: 865866 - DNA, 15 bp, Homo sapiens
tcaaagaggcttaaa

SEQ ID NO: 865867 - DNA, 15 bp, Homo sapiens
caaagaggcttaaaa

SEQ ID NO: 865868 - DNA, 15 bp, Homo sapiens
aaagaggcttaaaat

SEQ ID NO: 865869 - DNA, 15 bp, Homo sapiens
aagaggcttaaaatc

SEQ ID NO: 865870 - DNA, 15 bp, Homo sapiens
agaggcttaaaatct

SEQ ID NO: 865871 - DNA, 15 bp, Homo sapiens
gaggcttaaaatctc

SEQ ID NO: 865872 - DNA, 15 bp, Homo sapiens
aggcttaaaatctcc

SEQ ID NO: 865873 - DNA, 15 bp, Homo sapiens
ggcttaaaatctcct

SEQ ID NO: 865874 - DNA, 15 bp, Homo sapiens
gcttaaaatctcctg

SEQ ID NO: 865875 - DNA, 15 bp, Homo sapiens
cttaaaatctcctgg

SEQ ID NO: 865876 - DNA, 15 bp, Homo sapiens
ttaaaatctcctggt

SEQ ID NO: 865877 - DNA, 15 bp, Homo sapiens
taaaatctcctggtc

SEQ ID NO: 865878 - DNA, 15 bp, Homo sapiens
aaaatctcctggtcg

SEQ ID NO: 865879 - DNA, 15 bp, Homo sapiens
aaatctcctggtcgt

SEQ ID NO: 865880 - DNA, 15 bp, Homo sapiens
aatctcctggtcgtg

SEQ ID NO: 865881 - DNA, 15 bp, Homo sapiens
atctcctggtcgtgt

SEQ ID NO: 865882 - DNA, 15 bp, Homo sapiens
tctcctggtcgtgtg

SEQ ID NO: 865883 - DNA, 15 bp, Homo sapiens
ctcctggtcgtgtga

SEQ ID NO: 865884 - DNA, 15 bp, Homo sapiens
tcctggtcgtgtgat

SEQ ID NO: 865885 - DNA, 15 bp, Homo sapiens
cctggtcgtgtgatg

SEQ ID NO: 865886 - DNA, 15 bp, Homo sapiens
ctggtcgtgtgatgg

SEQ ID NO: 865887 - DNA, 15 bp, Homo sapiens
tggtcgtgtgatggg

SEQ ID NO: 865888 - DNA, 15 bp, Homo sapiens
ggtcgtgtgatgggc

SEQ ID NO: 865889 - DNA, 15 bp, Homo sapiens
gtcgtgtgatgggca

SEQ ID NO: 865890 - DNA, 15 bp, Homo sapiens
tcgtgtgatgggcac

SEQ ID NO: 865891 - DNA, 15 bp, Homo sapiens
cgtgtgatgggcaca

SEQ ID NO: 865892 - DNA, 15 bp, Homo sapiens
gtgtgatgggcacac

SEQ ID NO: 865893 - DNA, 15 bp, Homo sapiens
tgtgatgggcacaca

SEQ ID NO: 865894 - DNA, 15 bp, Homo sapiens
gtgatgggcacacag

SEQ ID NO: 865895 - DNA, 15 bp, Homo sapiens
tgatgggcacacagt

SEQ ID NO: 865896 - DNA, 15 bp, Homo sapiens
gatgggcacacagtt

SEQ ID NO: 865897 - DNA, 15 bp, Homo sapiens
atgggcacacagtta

SEQ ID NO: 865898 - DNA, 15 bp, Homo sapiens
tgggcacacagttaa

SEQ ID NO: 865899 - DNA, 15 bp, Homo sapiens
gggcacacagttaat

SEQ ID NO: 865900 - DNA, 15 bp, Homo sapiens
ggcacacagttaatt

SEQ ID NO: 865901 - DNA, 15 bp, Homo sapiens
gcacacagttaattt

SEQ ID NO: 865902 - DNA, 15 bp, Homo sapiens
cacacagttaatttt

SEQ ID NO: 865903 - DNA, 15 bp, Homo sapiens
acacagttaattttt

SEQ ID NO: 865904 - DNA, 15 bp, Homo sapiens
cacagttaatttttt

SEQ ID NO: 865905 - DNA, 15 bp, Homo sapiens
acagttaattttttg

SEQ ID NO: 865906 - DNA, 15 bp, Homo sapiens
cagttaattttttgt

SEQ ID NO: 865907 - DNA, 15 bp, Homo sapiens
agttaattttttgtg

SEQ ID NO: 865908 - DNA, 15 bp, Homo sapiens
gttaattttttgtga

SEQ ID NO: 865909 - DNA, 15 bp, Homo sapiens
ttaattttttgtgaa

SEQ ID NO: 865910 - DNA, 15 bp, Homo sapiens
taattttttgtgaac

SEQ ID NO: 865911 - DNA, 15 bp, Homo sapiens
aattttttgtgaaca

SEQ ID NO: 865912 - DNA, 15 bp, Homo sapiens
attttttgtgaacaa

SEQ ID NO: 865913 - DNA, 15 bp, Homo sapiens
ttttttgtgaacaaa

SEQ ID NO: 865914 - DNA, 15 bp, Homo sapiens
tttttgtgaacaaac

SEQ ID NO: 865915 - DNA, 15 bp, Homo sapiens
ttttgtgaacaaaca

SEQ ID NO: 865916 - DNA, 15 bp, Homo sapiens
tttgtgaacaaacac

SEQ ID NO: 865917 - DNA, 15 bp, Homo sapiens
ttgtgaacaaacaca

SEQ ID NO: 865918 - DNA, 15 bp, Homo sapiens
tgtgaacaaacacag

SEQ ID NO: 865919 - DNA, 15 bp, Homo sapiens
gtgaacaaacacagt

SEQ ID NO: 865920 - DNA, 15 bp, Homo sapiens
tgaacaaacacagtg

SEQ ID NO: 865921 - DNA, 15 bp, Homo sapiens
gaacaaacacagtgt

SEQ ID NO: 865922 - DNA, 15 bp, Homo sapiens
aacaaacacagtgtt

SEQ ID NO: 865923 - DNA, 15 bp, Homo sapiens
acaaacacagtgtta

SEQ ID NO: 865924 - DNA, 15 bp, Homo sapiens
caaacacagtgttat

SEQ ID NO: 865925 - DNA, 15 bp, Homo sapiens
aaacacagtgttatg

SEQ ID NO: 865926 - DNA, 15 bp, Homo sapiens
aacacagtgttatgg

SEQ ID NO: 865927 - DNA, 15 bp, Homo sapiens
acacagtgttatggg

SEQ ID NO: 865928 - DNA, 15 bp, Homo sapiens
cacagtgttatgggc

SEQ ID NO: 865929 - DNA, 15 bp, Homo sapiens
acagtgttatgggcc

SEQ ID NO: 865930 - DNA, 15 bp, Homo sapiens
cagtgttatgggcca

SEQ ID NO: 865931 - DNA, 15 bp, Homo sapiens
agtgttatgggccat

SEQ ID NO: 865932 - DNA, 15 bp, Homo sapiens
gtgttatgggccatt

SEQ ID NO: 865933 - DNA, 15 bp, Homo sapiens
tgttatgggccattt

SEQ ID NO: 865934 - DNA, 15 bp, Homo sapiens
gttatgggccatttc

SEQ ID NO: 865935 - DNA, 15 bp, Homo sapiens
ttatgggccatttct

SEQ ID NO: 865936 - DNA, 15 bp, Homo sapiens
tatgggccatttctg

SEQ ID NO: 865937 - DNA, 15 bp, Homo sapiens
atgggccatttctga

SEQ ID NO: 865938 - DNA, 15 bp, Homo sapiens
tgggccatttctgaa

SEQ ID NO: 865939 - DNA, 15 bp, Homo sapiens
gggccatttctgaat

SEQ ID NO: 865940 - DNA, 15 bp, Homo sapiens
ggccatttctgaatt

SEQ ID NO: 865941 - DNA, 15 bp, Homo sapiens
gccatttctgaattt

SEQ ID NO: 865942 - DNA, 15 bp, Homo sapiens
ccatttctgaattta

SEQ ID NO: 865943 - DNA, 15 bp, Homo sapiens
catttctgaatttat

SEQ ID NO: 865944 - DNA, 15 bp, Homo sapiens
atttctgaatttatc

SEQ ID NO: 865945 - DNA, 15 bp, Homo sapiens
tttctgaatttatct

SEQ ID NO: 865946 - DNA, 15 bp, Homo sapiens
ttctgaatttatctc

SEQ ID NO: 865947 - DNA, 15 bp, Homo sapiens
tctgaatttatctct

SEQ ID NO: 865948 - DNA, 15 bp, Homo sapiens
ctgaatttatctctg

SEQ ID NO: 865949 - DNA, 15 bp, Homo sapiens
tgaatttatctctga

SEQ ID NO: 865950 - DNA, 15 bp, Homo sapiens
gaatttatctctgaa

SEQ ID NO: 865951 - DNA, 15 bp, Homo sapiens
aatttatctctgaaa

SEQ ID NO: 865952 - DNA, 15 bp, Homo sapiens
atttatctctgaaat

SEQ ID NO: 865953 - DNA, 15 bp, Homo sapiens
tttatctctgaaatc

SEQ ID NO: 865954 - DNA, 15 bp, Homo sapiens
ttatctctgaaatca

SEQ ID NO: 865955 - DNA, 15 bp, Homo sapiens
tatctctgaaatcat

SEQ ID NO: 865956 - DNA, 15 bp, Homo sapiens
atctctgaaatcata

SEQ ID NO: 865957 - DNA, 15 bp, Homo sapiens
tctctgaaatcataa

SEQ ID NO: 865958 - DNA, 15 bp, Homo sapiens
ctctgaaatcataag

SEQ ID NO: 865959 - DNA, 15 bp, Homo sapiens
tctgaaatcataaga

SEQ ID NO: 865960 - DNA, 15 bp, Homo sapiens
ctgaaatcataagat

SEQ ID NO: 865961 - DNA, 15 bp, Homo sapiens
tgaaatcataagatt

SEQ ID NO: 865962 - DNA, 15 bp, Homo sapiens
gaaatcataagattc

SEQ ID NO: 865963 - DNA, 15 bp, Homo sapiens
aaatcataagattct

SEQ ID NO: 865964 - DNA, 15 bp, Homo sapiens
aatcataagattctt

SEQ ID NO: 865965 - DNA, 15 bp, Homo sapiens
atcataagattcttt

SEQ ID NO: 865966 - DNA, 15 bp, Homo sapiens
tcataagattctttc

SEQ ID NO: 865967 - DNA, 15 bp, Homo sapiens
cataagattctttct

SEQ ID NO: 865968 - DNA, 15 bp, Homo sapiens
ataagattctttctg

SEQ ID NO: 865969 - DNA, 15 bp, Homo sapiens
taagattctttctga

SEQ ID NO: 865970 - DNA, 15 bp, Homo sapiens
aagattctttctgag

SEQ ID NO: 865971 - DNA, 15 bp, Homo sapiens
agattctttctgagc

SEQ ID NO: 865972 - DNA, 15 bp, Homo sapiens
gattctttctgagcc

SEQ ID NO: 865973 - DNA, 15 bp, Homo sapiens
attctttctgagcca

SEQ ID NO: 865974 - DNA, 15 bp, Homo sapiens
ttctttctgagccat

SEQ ID NO: 865975 - DNA, 15 bp, Homo sapiens
tctttctgagccatt

SEQ ID NO: 865976 - DNA, 15 bp, Homo sapiens
ctttctgagccatta

SEQ ID NO: 865977 - DNA, 15 bp, Homo sapiens
tttctgagccattat

SEQ ID NO: 865978 - DNA, 15 bp, Homo sapiens
ttctgagccattatc

SEQ ID NO: 865979 - DNA, 15 bp, Homo sapiens
tctgagccattatct

SEQ ID NO: 865980 - DNA, 15 bp, Homo sapiens
ctgagccattatctc

SEQ ID NO: 865981 - DNA, 15 bp, Homo sapiens
tgagccattatctca

SEQ ID NO: 865982 - DNA, 15 bp, Homo sapiens
gagccattatctcat

SEQ ID NO: 865983 - DNA, 15 bp, Homo sapiens
agccattatctcatt

SEQ ID NO: 865984 - DNA, 15 bp, Homo sapiens
gccattatctcattc

SEQ ID NO: 865985 - DNA, 15 bp, Homo sapiens
ccattatctcattct

SEQ ID NO: 865986 - DNA, 15 bp, Homo sapiens
cattatctcattcta

SEQ ID NO: 865987 - DNA, 15 bp, Homo sapiens
attatctcattctat

SEQ ID NO: 865988 - DNA, 15 bp, Homo sapiens
ttatctcattctata

SEQ ID NO: 865989 - DNA, 15 bp, Homo sapiens
tatctcattctatat

SEQ ID NO: 865990 - DNA, 15 bp, Homo sapiens
atctcattctatatt

SEQ ID NO: 865991 - DNA, 15 bp, Homo sapiens
tctcattctatatta

SEQ ID NO: 865992 - DNA, 15 bp, Homo sapiens
ctcattctatattac

SEQ ID NO: 865993 - DNA, 15 bp, Homo sapiens
tcattctatattaca

SEQ ID NO: 865994 - DNA, 15 bp, Homo sapiens
cattctatattacag

SEQ ID NO: 865995 - DNA, 15 bp, Homo sapiens
attctatattacagt

SEQ ID NO: 865996 - DNA, 15 bp, Homo sapiens
ttctatattacagtc

SEQ ID NO: 865997 - DNA, 15 bp, Homo sapiens
tctatattacagtca

SEQ ID NO: 865998 - DNA, 15 bp, Homo sapiens
ctatattacagtcag

SEQ ID NO: 865999 - DNA, 15 bp, Homo sapiens
tatattacagtcagg

SEQ ID NO: 866000 - DNA, 15 bp, Homo sapiens
atattacagtcaggt

SEQ ID NO: 866001 - DNA, 15 bp, Homo sapiens
tattacagtcaggtg

SEQ ID NO: 866002 - DNA, 15 bp, Homo sapiens
attacagtcaggtgg

SEQ ID NO: 866003 - DNA, 15 bp, Homo sapiens
ttacagtcaggtgga

SEQ ID NO: 866004 - DNA, 15 bp, Homo sapiens
tacagtcaggtggag

SEQ ID NO: 866005 - DNA, 15 bp, Homo sapiens
acagtcaggtggagc

SEQ ID NO: 866006 - DNA, 15 bp, Homo sapiens
cagtcaggtggagcc

SEQ ID NO: 866007 - DNA, 15 bp, Homo sapiens
agtcaggtggagccc

SEQ ID NO: 866008 - DNA, 15 bp, Homo sapiens
gtcaggtggagccca

SEQ ID NO: 866009 - DNA, 15 bp, Homo sapiens
tcaggtggagcccat

SEQ ID NO: 866010 - DNA, 15 bp, Homo sapiens
caggtggagcccatc

SEQ ID NO: 866011 - DNA, 15 bp, Homo sapiens
aggtggagcccatct

SEQ ID NO: 866012 - DNA, 15 bp, Homo sapiens
ggtggagcccatctt

SEQ ID NO: 866013 - DNA, 15 bp, Homo sapiens
gtggagcccatctta

SEQ ID NO: 866014 - DNA, 15 bp, Homo sapiens
tggagcccatcttac

SEQ ID NO: 866015 - DNA, 15 bp, Homo sapiens
ggagcccatcttacc

SEQ ID NO: 866016 - DNA, 15 bp, Homo sapiens
gagcccatcttacct

SEQ ID NO: 866017 - DNA, 15 bp, Homo sapiens
agcccatcttacctc

SEQ ID NO: 866018 - DNA, 15 bp, Homo sapiens
gcccatcttacctcc

SEQ ID NO: 866019 - DNA, 15 bp, Homo sapiens
cccatcttacctcct

SEQ ID NO: 866020 - DNA, 15 bp, Homo sapiens
ccatcttacctcctc

SEQ ID NO: 866021 - DNA, 15 bp, Homo sapiens
catcttacctcctca

SEQ ID NO: 866022 - DNA, 15 bp, Homo sapiens
atcttacctcctcat

SEQ ID NO: 866023 - DNA, 15 bp, Homo sapiens
tcttacctcctcata

SEQ ID NO: 866024 - DNA, 15 bp, Homo sapiens
cttacctcctcatac

SEQ ID NO: 866025 - DNA, 15 bp, Homo sapiens
ttacctcctcatact

SEQ ID NO: 866026 - DNA, 15 bp, Homo sapiens
tacctcctcatacta

SEQ ID NO: 866027 - DNA, 15 bp, Homo sapiens
acctcctcatactaa

SEQ ID NO: 866028 - DNA, 15 bp, Homo sapiens
cctcctcatactaaa

SEQ ID NO: 866029 - DNA, 15 bp, Homo sapiens
ctcctcatactaaat

SEQ ID NO: 866030 - DNA, 15 bp, Homo sapiens
tcctcatactaaatt

SEQ ID NO: 866031 - DNA, 15 bp, Homo sapiens
cctcatactaaattc

SEQ ID NO: 866032 - DNA, 15 bp, Homo sapiens
ctcatactaaattct

SEQ ID NO: 866033 - DNA, 15 bp, Homo sapiens
tcatactaaattcta

SEQ ID NO: 866034 - DNA, 15 bp, Homo sapiens
catactaaattctag

SEQ ID NO: 866035 - DNA, 15 bp, Homo sapiens
atactaaattctaga

SEQ ID NO: 866036 - DNA, 15 bp, Homo sapiens
tactaaattctagac

SEQ ID NO: 866037 - DNA, 15 bp, Homo sapiens
actaaattctagact

SEQ ID NO: 866038 - DNA, 15 bp, Homo sapiens
ctaaattctagactt

SEQ ID NO: 866039 - DNA, 15 bp, Homo sapiens
taaattctagacttc

SEQ ID NO: 866040 - DNA, 15 bp, Homo sapiens
aaattctagacttct

SEQ ID NO: 866041 - DNA, 15 bp, Homo sapiens
aattctagacttctc

SEQ ID NO: 866042 - DNA, 15 bp, Homo sapiens
attctagacttctca

SEQ ID NO: 866043 - DNA, 15 bp, Homo sapiens
ttctagacttctcaa

SEQ ID NO: 866044 - DNA, 15 bp, Homo sapiens
tctagacttctcaag

SEQ ID NO: 866045 - DNA, 15 bp, Homo sapiens
ctagacttctcaagg

SEQ ID NO: 866046 - DNA, 15 bp, Homo sapiens
tagacttctcaaggg

SEQ ID NO: 866047 - DNA, 15 bp, Homo sapiens
agacttctcaagggc

SEQ ID NO: 866048 - DNA, 15 bp, Homo sapiens
gacttctcaagggca

SEQ ID NO: 866049 - DNA, 15 bp, Homo sapiens
acttctcaagggcag

SEQ ID NO: 866050 - DNA, 15 bp, Homo sapiens
cttctcaagggcagg

SEQ ID NO: 866051 - DNA, 15 bp, Homo sapiens
ttctcaagggcagga

SEQ ID NO: 866052 - DNA, 15 bp, Homo sapiens
tctcaagggcaggag

SEQ ID NO: 866053 - DNA, 15 bp, Homo sapiens
ctcaagggcaggaga

SEQ ID NO: 866054 - DNA, 15 bp, Homo sapiens
tcaagggcaggagac

SEQ ID NO: 866055 - DNA, 15 bp, Homo sapiens
caagggcaggagaca

SEQ ID NO: 866056 - DNA, 15 bp, Homo sapiens
aagggcaggagacaa

SEQ ID NO: 866057 - DNA, 15 bp, Homo sapiens
agggcaggagacaat

SEQ ID NO: 866058 - DNA, 15 bp, Homo sapiens
gggcaggagacaatc

SEQ ID NO: 866059 - DNA, 15 bp, Homo sapiens
ggcaggagacaatca

SEQ ID NO: 866060 - DNA, 15 bp, Homo sapiens
gcaggagacaatcat

SEQ ID NO: 866061 - DNA, 15 bp, Homo sapiens
caggagacaatcatc

SEQ ID NO: 866062 - DNA, 15 bp, Homo sapiens
aggagacaatcatct

SEQ ID NO: 866063 - DNA, 15 bp, Homo sapiens
ggagacaatcatctg

SEQ ID NO: 866064 - DNA, 15 bp, Homo sapiens
gagacaatcatctgt

SEQ ID NO: 866065 - DNA, 15 bp, Homo sapiens
agacaatcatctgta

SEQ ID NO: 866066 - DNA, 15 bp, Homo sapiens
gacaatcatctgtat

SEQ ID NO: 866067 - DNA, 15 bp, Homo sapiens
acaatcatctgtata

SEQ ID NO: 866068 - DNA, 15 bp, Homo sapiens
caatcatctgtatat

SEQ ID NO: 866069 - DNA, 15 bp, Homo sapiens
aatcatctgtatatc

SEQ ID NO: 866070 - DNA, 15 bp, Homo sapiens
atcatctgtatatct

SEQ ID NO: 866071 - DNA, 15 bp, Homo sapiens
tcatctgtatatctc

SEQ ID NO: 866072 - DNA, 15 bp, Homo sapiens
catctgtatatctct

SEQ ID NO: 866073 - DNA, 15 bp, Homo sapiens
atctgtatatctctt

SEQ ID NO: 866074 - DNA, 15 bp, Homo sapiens
tctgtatatctcttt

SEQ ID NO: 866075 - DNA, 15 bp, Homo sapiens
ctgtatatctctttg

SEQ ID NO: 866076 - DNA, 15 bp, Homo sapiens
tgtatatctctttgg

SEQ ID NO: 866077 - DNA, 15 bp, Homo sapiens
gtatatctctttggc

SEQ ID NO: 866078 - DNA, 15 bp, Homo sapiens
tatatctctttggcc

SEQ ID NO: 866079 - DNA, 15 bp, Homo sapiens
atatctctttggcct

SEQ ID NO: 866080 - DNA, 15 bp, Homo sapiens
tatctctttggcctt

SEQ ID NO: 866081 - DNA, 15 bp, Homo sapiens
atctctttggccttc

SEQ ID NO: 866082 - DNA, 15 bp, Homo sapiens
tctctttggccttca

SEQ ID NO: 866083 - DNA, 15 bp, Homo sapiens
ctctttggccttcat

SEQ ID NO: 866084 - DNA, 15 bp, Homo sapiens
tctttggccttcata

SEQ ID NO: 866085 - DNA, 15 bp, Homo sapiens
ctttggccttcatac

SEQ ID NO: 866086 - DNA, 15 bp, Homo sapiens
tttggccttcataca

SEQ ID NO: 866087 - DNA, 15 bp, Homo sapiens
ttggccttcatacac

SEQ ID NO: 866088 - DNA, 15 bp, Homo sapiens
tggccttcatacact

SEQ ID NO: 866089 - DNA, 15 bp, Homo sapiens
ggccttcatacactc

SEQ ID NO: 866090 - DNA, 15 bp, Homo sapiens
gccttcatacactca

SEQ ID NO: 866091 - DNA, 15 bp, Homo sapiens
ccttcatacactcag

SEQ ID NO: 866092 - DNA, 15 bp, Homo sapiens
cttcatacactcagg

SEQ ID NO: 866093 - DNA, 15 bp, Homo sapiens
ttcatacactcagga

SEQ ID NO: 866094 - DNA, 15 bp, Homo sapiens
tcatacactcaggag

SEQ ID NO: 866095 - DNA, 15 bp, Homo sapiens
catacactcaggagt

SEQ ID NO: 866096 - DNA, 15 bp, Homo sapiens
atacactcaggagta

SEQ ID NO: 866097 - DNA, 15 bp, Homo sapiens
tacactcaggagtac

SEQ ID NO: 866098 - DNA, 15 bp, Homo sapiens
acactcaggagtact

SEQ ID NO: 866099 - DNA, 15 bp, Homo sapiens
cactcaggagtactt

SEQ ID NO: 866100 - DNA, 15 bp, Homo sapiens
actcaggagtacttg

SEQ ID NO: 866101 - DNA, 15 bp, Homo sapiens
ctcaggagtacttgc

SEQ ID NO: 866102 - DNA, 15 bp, Homo sapiens
tcaggagtacttgcc

SEQ ID NO: 866103 - DNA, 15 bp, Homo sapiens
caggagtacttgcca

SEQ ID NO: 866104 - DNA, 15 bp, Homo sapiens
aggagtacttgccaa

SEQ ID NO: 866105 - DNA, 15 bp, Homo sapiens
ggagtacttgccaaa

SEQ ID NO: 866106 - DNA, 15 bp, Homo sapiens
gagtacttgccaaaa

SEQ ID NO: 866107 - DNA, 15 bp, Homo sapiens
agtacttgccaaaaa

SEQ ID NO: 866108 - DNA, 15 bp, Homo sapiens
gtacttgccaaaaat

SEQ ID NO: 866109 - DNA, 15 bp, Homo sapiens
tacttgccaaaaata

SEQ ID NO: 866110 - DNA, 15 bp, Homo sapiens
acttgccaaaaataa

SEQ ID NO: 866111 - DNA, 15 bp, Homo sapiens
cttgccaaaaataaa

SEQ ID NO: 866112 - DNA, 15 bp, Homo sapiens
ttgccaaaaataaac

SEQ ID NO: 866113 - DNA, 15 bp, Homo sapiens
tgccaaaaataaaca

SEQ ID NO: 866114 - DNA, 15 bp, Homo sapiens
gccaaaaataaacat

SEQ ID NO: 866115 - DNA, 15 bp, Homo sapiens
ccaaaaataaacatt

SEQ ID NO: 866116 - DNA, 15 bp, Homo sapiens
caaaaataaacattt

SEQ ID NO: 866117 - DNA, 15 bp, Homo sapiens
aaaaataaacattta

SEQ ID NO: 866118 - DNA, 15 bp, Homo sapiens
aaaataaacatttaa

SEQ ID NO: 866119 - DNA, 15 bp, Homo sapiens
aaataaacatttaat

SEQ ID NO: 866120 - DNA, 15 bp, Homo sapiens
aataaacatttaatg

SEQ ID NO: 866121 - DNA, 15 bp, Homo sapiens
aaacatttaatgcac

SEQ ID NO: 866122 - DNA, 15 bp, Homo sapiens
aacatttaatgcaca

SEQ ID NO: 866123 - DNA, 15 bp, Homo sapiens
acatttaatgcacat

SEQ ID NO: 866124 - DNA, 15 bp, Homo sapiens
catttaatgcacatt

SEQ ID NO: 866125 - DNA, 15 bp, Homo sapiens
atttaatgcacattt

SEQ ID NO: 866126 - DNA, 15 bp, Homo sapiens
tttaatgcacattta

SEQ ID NO: 866127 - DNA, 15 bp, Homo sapiens
ttaatgcacatttat

SEQ ID NO: 866128 - DNA, 15 bp, Homo sapiens
taatgcacatttatt

SEQ ID NO: 866129 - DNA, 15 bp, Homo sapiens
aatgcacatttattt

SEQ ID NO: 866130 - DNA, 15 bp, Homo sapiens
atgcacatttatttg

SEQ ID NO: 866131 - DNA, 15 bp, Homo sapiens
tgcacatttatttga

SEQ ID NO: 866132 - DNA, 15 bp, Homo sapiens
gcacatttatttgaa

SEQ ID NO: 866133 - DNA, 15 bp, Homo sapiens
cacatttatttgaat

SEQ ID NO: 866134 - DNA, 15 bp, Homo sapiens
acatttatttgaata

SEQ ID NO: 866135 - DNA, 15 bp, Homo sapiens
catttatttgaataa

SEQ ID NO: 866136 - DNA, 15 bp, Homo sapiens
atttatttgaataat

SEQ ID NO: 866137 - DNA, 15 bp, Homo sapiens
tttatttgaataatt

SEQ ID NO: 866138 - DNA, 15 bp, Homo sapiens
ttatttgaataattg

SEQ ID NO: 866139 - DNA, 15 bp, Homo sapiens
tatttgaataattga

SEQ ID NO: 866140 - DNA, 15 bp, Homo sapiens
atttgaataattgat

SEQ ID NO: 866141 - DNA, 15 bp, Homo sapiens
tttgaataattgata

SEQ ID NO: 866142 - DNA, 15 bp, Homo sapiens
ttgaataattgataa

SEQ ID NO: 866143 - DNA, 15 bp, Homo sapiens
tgaataattgataag

SEQ ID NO: 866144 - DNA, 15 bp, Homo sapiens
gaataattgataaga

SEQ ID NO: 866145 - DNA, 15 bp, Homo sapiens
aataattgataagat

SEQ ID NO: 866146 - DNA, 15 bp, Homo sapiens
ataattgataagatc

SEQ ID NO: 866147 - DNA, 15 bp, Homo sapiens
taattgataagatcc

SEQ ID NO: 866148 - DNA, 15 bp, Homo sapiens
aattgataagatcca

SEQ ID NO: 866149 - DNA, 15 bp, Homo sapiens
attgataagatccaa

SEQ ID NO: 866150 - DNA, 15 bp, Homo sapiens
ttgataagatccaat

SEQ ID NO: 866151 - DNA, 15 bp, Homo sapiens
tgataagatccaata

SEQ ID NO: 866152 - DNA, 15 bp, Homo sapiens
gataagatccaatac

SEQ ID NO: 866153 - DNA, 15 bp, Homo sapiens
ataagatccaatact

SEQ ID NO: 866154 - DNA, 15 bp, Homo sapiens
taagatccaatactt

SEQ ID NO: 866155 - DNA, 15 bp, Homo sapiens
aagatccaatacttc

SEQ ID NO: 866156 - DNA, 15 bp, Homo sapiens
agatccaatacttca

SEQ ID NO: 866157 - DNA, 15 bp, Homo sapiens
gatccaatacttcaa

SEQ ID NO: 866158 - DNA, 15 bp, Homo sapiens
atccaatacttcaat

SEQ ID NO: 866159 - DNA, 15 bp, Homo sapiens
tccaatacttcaata

SEQ ID NO: 866160 - DNA, 15 bp, Homo sapiens
ccaatacttcaataa

SEQ ID NO: 866161 - DNA, 15 bp, Homo sapiens
caatacttcaataac

SEQ ID NO: 866162 - DNA, 15 bp, Homo sapiens
aatacttcaataact

SEQ ID NO: 866163 - DNA, 15 bp, Homo sapiens
atacttcaataactt

SEQ ID NO: 866164 - DNA, 15 bp, Homo sapiens
tacttcaataacttt

SEQ ID NO: 866165 - DNA, 15 bp, Homo sapiens
acttcaataactttg

SEQ ID NO: 866166 - DNA, 15 bp, Homo sapiens
cttcaataactttgt

SEQ ID NO: 866167 - DNA, 15 bp, Homo sapiens
ttcaataactttgtc

SEQ ID NO: 866168 - DNA, 15 bp, Homo sapiens
tcaataactttgtca

SEQ ID NO: 866169 - DNA, 15 bp, Homo sapiens
caataactttgtcat

SEQ ID NO: 866170 - DNA, 15 bp, Homo sapiens
aataactttgtcata

SEQ ID NO: 866171 - DNA, 15 bp, Homo sapiens
ataactttgtcatat

SEQ ID NO: 866172 - DNA, 15 bp, Homo sapiens
taactttgtcatatt

SEQ ID NO: 866173 - DNA, 15 bp, Homo sapiens
aactttgtcatattt

SEQ ID NO: 866174 - DNA, 15 bp, Homo sapiens
actttgtcatatttt

SEQ ID NO: 866175 - DNA, 15 bp, Homo sapiens
ctttgtcatattttt

SEQ ID NO: 866176 - DNA, 15 bp, Homo sapiens
tttgtcatattttta

SEQ ID NO: 866177 - DNA, 15 bp, Homo sapiens
ttgtcatatttttat

SEQ ID NO: 866178 - DNA, 15 bp, Homo sapiens
tgtcatatttttata

SEQ ID NO: 866179 - DNA, 15 bp, Homo sapiens
gtcatatttttatag

SEQ ID NO: 866180 - DNA, 15 bp, Homo sapiens
tcatatttttataga

SEQ ID NO: 866181 - DNA, 15 bp, Homo sapiens
catatttttatagaa

SEQ ID NO: 866182 - DNA, 15 bp, Homo sapiens
atatttttatagaat

SEQ ID NO: 866183 - DNA, 15 bp, Homo sapiens
tatttttatagaatg

SEQ ID NO: 866184 - DNA, 15 bp, Homo sapiens
atttttatagaatgg

SEQ ID NO: 866185 - DNA, 15 bp, Homo sapiens
tttttatagaatggg

SEQ ID NO: 866186 - DNA, 15 bp, Homo sapiens
ttttatagaatgggt

SEQ ID NO: 866187 - DNA, 15 bp, Homo sapiens
tttatagaatgggtt

SEQ ID NO: 866188 - DNA, 15 bp, Homo sapiens
ttatagaatgggttt

SEQ ID NO: 866189 - DNA, 15 bp, Homo sapiens
tatagaatgggtttc

SEQ ID NO: 866190 - DNA, 15 bp, Homo sapiens
atagaatgggtttct

SEQ ID NO: 866191 - DNA, 15 bp, Homo sapiens
tagaatgggtttcta

SEQ ID NO: 866192 - DNA, 15 bp, Homo sapiens
agaatgggtttctat

SEQ ID NO: 866193 - DNA, 15 bp, Homo sapiens
gaatgggtttctata

SEQ ID NO: 866194 - DNA, 15 bp, Homo sapiens
aatgggtttctatat

SEQ ID NO: 866195 - DNA, 15 bp, Homo sapiens
atgggtttctatatc

SEQ ID NO: 866196 - DNA, 15 bp, Homo sapiens
tgggtttctatatct

SEQ ID NO: 866197 - DNA, 15 bp, Homo sapiens
gggtttctatatctc

SEQ ID NO: 866198 - DNA, 15 bp, Homo sapiens
ggtttctatatctca

SEQ ID NO: 866199 - DNA, 15 bp, Homo sapiens
gtttctatatctcat

SEQ ID NO: 866200 - DNA, 15 bp, Homo sapiens
tttctatatctcatt

SEQ ID NO: 866201 - DNA, 15 bp, Homo sapiens
ttctatatctcattt

SEQ ID NO: 866202 - DNA, 15 bp, Homo sapiens
tctatatctcatttg

SEQ ID NO: 866203 - DNA, 15 bp, Homo sapiens
ctatatctcatttgc

SEQ ID NO: 866204 - DNA, 15 bp, Homo sapiens
tatatctcatttgca

SEQ ID NO: 866205 - DNA, 15 bp, Homo sapiens
atatctcatttgcat

SEQ ID NO: 866206 - DNA, 15 bp, Homo sapiens
tatctcatttgcatt

SEQ ID NO: 866207 - DNA, 15 bp, Homo sapiens
atctcatttgcattt

SEQ ID NO: 866208 - DNA, 15 bp, Homo sapiens
tctcatttgcatttt

SEQ ID NO: 866209 - DNA, 15 bp, Homo sapiens
ctcatttgcattttc

SEQ ID NO: 866210 - DNA, 15 bp, Homo sapiens
tcatttgcattttca

SEQ ID NO: 866211 - DNA, 15 bp, Homo sapiens
catttgcattttcaa

SEQ ID NO: 866212 - DNA, 15 bp, Homo sapiens
atttgcattttcaaa

SEQ ID NO: 866213 - DNA, 15 bp, Homo sapiens
tttgcattttcaaac

SEQ ID NO: 866214 - DNA, 15 bp, Homo sapiens
ttgcattttcaaact

SEQ ID NO: 866215 - DNA, 15 bp, Homo sapiens
tgcattttcaaactt

SEQ ID NO: 866216 - DNA, 15 bp, Homo sapiens
gcattttcaaacttt

SEQ ID NO: 866217 - DNA, 15 bp, Homo sapiens
cattttcaaacttta

SEQ ID NO: 866218 - DNA, 15 bp, Homo sapiens
attttcaaactttac

SEQ ID NO: 866219 - DNA, 15 bp, Homo sapiens
ttttcaaactttact

SEQ ID NO: 866220 - DNA, 15 bp, Homo sapiens
tttcaaactttactt

SEQ ID NO: 866221 - DNA, 15 bp, Homo sapiens
ttcaaactttacttt

SEQ ID NO: 866222 - DNA, 15 bp, Homo sapiens
tcaaactttactttt

SEQ ID NO: 866223 - DNA, 15 bp, Homo sapiens
caaactttactttta

SEQ ID NO: 866224 - DNA, 15 bp, Homo sapiens
aaactttacttttac

SEQ ID NO: 866225 - DNA, 15 bp, Homo sapiens
aactttacttttact

SEQ ID NO: 866226 - DNA, 15 bp, Homo sapiens
actttacttttactg

SEQ ID NO: 866227 - DNA, 15 bp, Homo sapiens
ctttacttttactgt

SEQ ID NO: 866228 - DNA, 15 bp, Homo sapiens
tttacttttactgtc

SEQ ID NO: 866229 - DNA, 15 bp, Homo sapiens
ttacttttactgtct

SEQ ID NO: 866230 - DNA, 15 bp, Homo sapiens
tacttttactgtcta

SEQ ID NO: 866231 - DNA, 15 bp, Homo sapiens
acttttactgtctag

SEQ ID NO: 866232 - DNA, 15 bp, Homo sapiens
cttttactgtctagc

SEQ ID NO: 866233 - DNA, 15 bp, Homo sapiens
ttttactgtctagct

SEQ ID NO: 866234 - DNA, 15 bp, Homo sapiens
tttactgtctagctt

SEQ ID NO: 866235 - DNA, 15 bp, Homo sapiens
ttactgtctagcttt

SEQ ID NO: 866236 - DNA, 15 bp, Homo sapiens
tactgtctagcttta

SEQ ID NO: 866237 - DNA, 15 bp, Homo sapiens
actgtctagctttaa

SEQ ID NO: 866238 - DNA, 15 bp, Homo sapiens
ctgtctagctttaaa

SEQ ID NO: 866239 - DNA, 15 bp, Homo sapiens
tgtctagctttaaaa

SEQ ID NO: 866240 - DNA, 15 bp, Homo sapiens
gtctagctttaaaaa

SEQ ID NO: 866241 - DNA, 15 bp, Homo sapiens
tctagctttaaaaaa

SEQ ID NO: 866242 - DNA, 15 bp, Homo sapiens
ctagctttaaaaaaa

SEQ ID NO: 866243 - DNA, 15 bp, Homo sapiens
tagctttaaaaaaaa

SEQ ID NO: 866244 - DNA, 15 bp, Homo sapiens
agctttaaaaaaaaa

SEQ ID NO: 866245 - DNA, 15 bp, Homo sapiens
gctttaaaaaaaaag

SEQ ID NO: 866246 - DNA, 15 bp, Homo sapiens
ctttaaaaaaaaagc

SEQ ID NO: 866247 - DNA, 15 bp, Homo sapiens
tttaaaaaaaaagcc

SEQ ID NO: 866248 - DNA, 15 bp, Homo sapiens
ttaaaaaaaaagcct

SEQ ID NO: 866249 - DNA, 15 bp, Homo sapiens
taaaaaaaaagcctt

SEQ ID NO: 866250 - DNA, 15 bp, Homo sapiens
aaaaaaaaagccttt

SEQ ID NO: 866251 - DNA, 15 bp, Homo sapiens
aaaaaaaagcctttg

SEQ ID NO: 866252 - DNA, 15 bp, Homo sapiens
aaaaaaagcctttga

SEQ ID NO: 866253 - DNA, 15 bp, Homo sapiens
aaaaaagcctttgac

SEQ ID NO: 866254 - DNA, 15 bp, Homo sapiens
aaaaagcctttgact

SEQ ID NO: 866255 - DNA, 15 bp, Homo sapiens
aaaagcctttgactc

SEQ ID NO: 866256 - DNA, 15 bp, Homo sapiens
aaagcctttgactct

SEQ ID NO: 866257 - DNA, 15 bp, Homo sapiens
aagcctttgactcta

SEQ ID NO: 866258 - DNA, 15 bp, Homo sapiens
agcctttgactctaa

SEQ ID NO: 866259 - DNA, 15 bp, Homo sapiens
gcctttgactctaat

SEQ ID NO: 866260 - DNA, 15 bp, Homo sapiens
cctttgactctaata

SEQ ID NO: 866261 - DNA, 15 bp, Homo sapiens
ctttgactctaatac

SEQ ID NO: 866262 - DNA, 15 bp, Homo sapiens
tttgactctaataca

SEQ ID NO: 866263 - DNA, 15 bp, Homo sapiens
ttgactctaatacag

SEQ ID NO: 866264 - DNA, 15 bp, Homo sapiens
tgactctaatacagc

SEQ ID NO: 866265 - DNA, 15 bp, Homo sapiens
gactctaatacagcc

SEQ ID NO: 866266 - DNA, 15 bp, Homo sapiens
actctaatacagccc

SEQ ID NO: 866267 - DNA, 15 bp, Homo sapiens
ctctaatacagccct

SEQ ID NO: 866268 - DNA, 15 bp, Homo sapiens
tctaatacagccctc

SEQ ID NO: 866269 - DNA, 15 bp, Homo sapiens
ctaatacagccctca

SEQ ID NO: 866270 - DNA, 15 bp, Homo sapiens
taatacagccctcat

SEQ ID NO: 866271 - DNA, 15 bp, Homo sapiens
aatacagccctcata

SEQ ID NO: 866272 - DNA, 15 bp, Homo sapiens
atacagccctcatat

SEQ ID NO: 866273 - DNA, 15 bp, Homo sapiens
tacagccctcatatt

SEQ ID NO: 866274 - DNA, 15 bp, Homo sapiens
acagccctcatattc

SEQ ID NO: 866275 - DNA, 15 bp, Homo sapiens
cagccctcatattct

SEQ ID NO: 866276 - DNA, 15 bp, Homo sapiens
agccctcatattcta

SEQ ID NO: 866277 - DNA, 15 bp, Homo sapiens
gccctcatattctac

SEQ ID NO: 866278 - DNA, 15 bp, Homo sapiens
ccctcatattctacc

SEQ ID NO: 866279 - DNA, 15 bp, Homo sapiens
cctcatattctaccc

SEQ ID NO: 866280 - DNA, 15 bp, Homo sapiens
ctcatattctacccc

SEQ ID NO: 866281 - DNA, 15 bp, Homo sapiens
tctaccccaatatct

SEQ ID NO: 866282 - DNA, 15 bp, Homo sapiens
ctaccccaatatcta

SEQ ID NO: 866283 - DNA, 15 bp, Homo sapiens
taccccaatatctaa

SEQ ID NO: 866284 - DNA, 15 bp, Homo sapiens
accccaatatctaag

SEQ ID NO: 866285 - DNA, 15 bp, Homo sapiens
ccccaatatctaaga

SEQ ID NO: 866286 - DNA, 15 bp, Homo sapiens
cccaatatctaagag

SEQ ID NO: 866287 - DNA, 15 bp, Homo sapiens
ccaatatctaagagg

SEQ ID NO: 866288 - DNA, 15 bp, Homo sapiens
caatatctaagaggc

SEQ ID NO: 866289 - DNA, 15 bp, Homo sapiens
aatatctaagaggct

SEQ ID NO: 866290 - DNA, 15 bp, Homo sapiens
atatctaagaggctt

SEQ ID NO: 866291 - DNA, 15 bp, Homo sapiens
tatctaagaggcttt

SEQ ID NO: 866292 - DNA, 15 bp, Homo sapiens
atctaagaggcttta

SEQ ID NO: 866293 - DNA, 15 bp, Homo sapiens
tctaagaggctttat

SEQ ID NO: 866294 - DNA, 15 bp, Homo sapiens
ctaagaggctttata

SEQ ID NO: 866295 - DNA, 15 bp, Homo sapiens
taagaggctttatat

SEQ ID NO: 866296 - DNA, 15 bp, Homo sapiens
aagaggctttatatc

SEQ ID NO: 866297 - DNA, 15 bp, Homo sapiens
agaggctttatatct

SEQ ID NO: 866298 - DNA, 15 bp, Homo sapiens
gaggctttatatctc

SEQ ID NO: 866299 - DNA, 15 bp, Homo sapiens
aggctttatatctcc

SEQ ID NO: 866300 - DNA, 15 bp, Homo sapiens
ggctttatatctcct

SEQ ID NO: 866301 - DNA, 15 bp, Homo sapiens
gctttatatctccta

SEQ ID NO: 866302 - DNA, 15 bp, Homo sapiens
ctttatatctcctag

SEQ ID NO: 866303 - DNA, 15 bp, Homo sapiens
tttatatctcctagt

SEQ ID NO: 866304 - DNA, 15 bp, Homo sapiens
ttatatctcctagtg

SEQ ID NO: 866305 - DNA, 15 bp, Homo sapiens
tatatctcctagtgt

SEQ ID NO: 866306 - DNA, 15 bp, Homo sapiens
atatctcctagtgtt

SEQ ID NO: 866307 - DNA, 15 bp, Homo sapiens
tatctcctagtgttg

SEQ ID NO: 866308 - DNA, 15 bp, Homo sapiens
atctcctagtgttgt

SEQ ID NO: 866309 - DNA, 15 bp, Homo sapiens
tctcctagtgttgta

SEQ ID NO: 866310 - DNA, 15 bp, Homo sapiens
ctcctagtgttgtac

SEQ ID NO: 866311 - DNA, 15 bp, Homo sapiens
tcctagtgttgtacc

SEQ ID NO: 866312 - DNA, 15 bp, Homo sapiens
cctagtgttgtacca

SEQ ID NO: 866313 - DNA, 15 bp, Homo sapiens
ctagtgttgtaccac

SEQ ID NO: 866314 - DNA, 15 bp, Homo sapiens
tagtgttgtaccact

SEQ ID NO: 866315 - DNA, 15 bp, Homo sapiens
agtgttgtaccacta

SEQ ID NO: 866316 - DNA, 15 bp, Homo sapiens
gtgttgtaccactat

SEQ ID NO: 866317 - DNA, 15 bp, Homo sapiens
tgttgtaccactatt

SEQ ID NO: 866318 - DNA, 15 bp, Homo sapiens
gttgtaccactattt

SEQ ID NO: 866319 - DNA, 15 bp, Homo sapiens
ttgtaccactatttt

SEQ ID NO: 866320 - DNA, 15 bp, Homo sapiens
tgtaccactatttta

SEQ ID NO: 866321 - DNA, 15 bp, Homo sapiens
gtaccactattttaa

SEQ ID NO: 866322 - DNA, 15 bp, Homo sapiens
taccactattttaac

SEQ ID NO: 866323 - DNA, 15 bp, Homo sapiens
accactattttaact

SEQ ID NO: 866324 - DNA, 15 bp, Homo sapiens
ccactattttaactc

SEQ ID NO: 866325 - DNA, 15 bp, Homo sapiens
cactattttaactcc

SEQ ID NO: 866326 - DNA, 15 bp, Homo sapiens
actattttaactcca

SEQ ID NO: 866327 - DNA, 15 bp, Homo sapiens
ctattttaactccag

SEQ ID NO: 866328 - DNA, 15 bp, Homo sapiens
tattttaactccagt

SEQ ID NO: 866329 - DNA, 15 bp, Homo sapiens
attttaactccagta

SEQ ID NO: 866330 - DNA, 15 bp, Homo sapiens
ttttaactccagtat

SEQ ID NO: 866331 - DNA, 15 bp, Homo sapiens
tttaactccagtatt

SEQ ID NO: 866332 - DNA, 15 bp, Homo sapiens
ttaactccagtattt

SEQ ID NO: 866333 - DNA, 15 bp, Homo sapiens
taactccagtatttt

SEQ ID NO: 866334 - DNA, 15 bp, Homo sapiens
aactccagtattttt

SEQ ID NO: 866335 - DNA, 15 bp, Homo sapiens
actccagtatttttt

SEQ ID NO: 866336 - DNA, 15 bp, Homo sapiens
ctccagtatttttta

SEQ ID NO: 866337 - DNA, 15 bp, Homo sapiens
tccagtattttttac

SEQ ID NO: 866338 - DNA, 15 bp, Homo sapiens
ccagtattttttact

SEQ ID NO: 866339 - DNA, 15 bp, Homo sapiens
cagtattttttactt

SEQ ID NO: 866340 - DNA, 15 bp, Homo sapiens
agtattttttacttc

SEQ ID NO: 866341 - DNA, 15 bp, Homo sapiens
gtattttttacttca

SEQ ID NO: 866342 - DNA, 15 bp, Homo sapiens
tattttttacttcat

SEQ ID NO: 866343 - DNA, 15 bp, Homo sapiens
attttttacttcata

SEQ ID NO: 866344 - DNA, 15 bp, Homo sapiens
ttttttacttcatag

SEQ ID NO: 866345 - DNA, 15 bp, Homo sapiens
tttttacttcatagt

SEQ ID NO: 866346 - DNA, 15 bp, Homo sapiens
ttttacttcatagtt

SEQ ID NO: 866347 - DNA, 15 bp, Homo sapiens
tttacttcatagttt

SEQ ID NO: 866348 - DNA, 15 bp, Homo sapiens
ttacttcatagtttt

SEQ ID NO: 866349 - DNA, 15 bp, Homo sapiens
tacttcatagtttta

SEQ ID NO: 866350 - DNA, 15 bp, Homo sapiens
acttcatagttttac

SEQ ID NO: 866351 - DNA, 15 bp, Homo sapiens
cttcatagttttacc

SEQ ID NO: 866352 - DNA, 15 bp, Homo sapiens
ttcatagttttacct

SEQ ID NO: 866353 - DNA, 15 bp, Homo sapiens
tcatagttttaccta

SEQ ID NO: 866354 - DNA, 15 bp, Homo sapiens
catagttttacctat

SEQ ID NO: 866355 - DNA, 15 bp, Homo sapiens
atagttttacctatt

SEQ ID NO: 866356 - DNA, 15 bp, Homo sapiens
tagttttacctattt

SEQ ID NO: 866357 - DNA, 15 bp, Homo sapiens
agttttacctatttg

SEQ ID NO: 866358 - DNA, 15 bp, Homo sapiens
gttttacctatttgt

SEQ ID NO: 866359 - DNA, 15 bp, Homo sapiens
ttttacctatttgtt

SEQ ID NO: 866360 - DNA, 15 bp, Homo sapiens
tttacctatttgtta

SEQ ID NO: 866361 - DNA, 15 bp, Homo sapiens
ttacctatttgttac

SEQ ID NO: 866362 - DNA, 15 bp, Homo sapiens
tacctatttgttaca

SEQ ID NO: 866363 - DNA, 15 bp, Homo sapiens
acctatttgttacag

SEQ ID NO: 866364 - DNA, 15 bp, Homo sapiens
cctatttgttacagt

SEQ ID NO: 866365 - DNA, 15 bp, Homo sapiens
ctatttgttacagtt

SEQ ID NO: 866366 - DNA, 15 bp, Homo sapiens
tatttgttacagtta

SEQ ID NO: 866367 - DNA, 15 bp, Homo sapiens
atttgttacagttag

SEQ ID NO: 866368 - DNA, 15 bp, Homo sapiens
tttgttacagttagt

SEQ ID NO: 866369 - DNA, 15 bp, Homo sapiens
ttgttacagttagtt

SEQ ID NO: 866370 - DNA, 15 bp, Homo sapiens
tgttacagttagttt

SEQ ID NO: 866371 - DNA, 15 bp, Homo sapiens
gttacagttagtttt

SEQ ID NO: 866372 - DNA, 15 bp, Homo sapiens
ttacagttagttttt

SEQ ID NO: 866373 - DNA, 15 bp, Homo sapiens
tacagttagttttta

SEQ ID NO: 866374 - DNA, 15 bp, Homo sapiens
acagttagtttttat

SEQ ID NO: 866375 - DNA, 15 bp, Homo sapiens
cagttagtttttatg

SEQ ID NO: 866376 - DNA, 15 bp, Homo sapiens
agttagtttttatga

SEQ ID NO: 866377 - DNA, 15 bp, Homo sapiens
gttagtttttatgaa

SEQ ID NO: 866378 - DNA, 15 bp, Homo sapiens
ttagtttttatgaat

SEQ ID NO: 866379 - DNA, 15 bp, Homo sapiens
tagtttttatgaatt

SEQ ID NO: 866380 - DNA, 15 bp, Homo sapiens
agtttttatgaattc

SEQ ID NO: 866381 - DNA, 15 bp, Homo sapiens
gtttttatgaattca

SEQ ID NO: 866382 - DNA, 15 bp, Homo sapiens
tttttatgaattcaa

SEQ ID NO: 866383 - DNA, 15 bp, Homo sapiens
ttttatgaattcaag

SEQ ID NO: 866384 - DNA, 15 bp, Homo sapiens
tttatgaattcaaga

SEQ ID NO: 866385 - DNA, 15 bp, Homo sapiens
ttatgaattcaagag

SEQ ID NO: 866386 - DNA, 15 bp, Homo sapiens
tatgaattcaagaga

SEQ ID NO: 866387 - DNA, 15 bp, Homo sapiens
atgaattcaagagat

SEQ ID NO: 866388 - DNA, 15 bp, Homo sapiens
tgaattcaagagatg

SEQ ID NO: 866389 - DNA, 15 bp, Homo sapiens
gaattcaagagatga

SEQ ID NO: 866390 - DNA, 15 bp, Homo sapiens
aattcaagagatgaa

SEQ ID NO: 866391 - DNA, 15 bp, Homo sapiens
attcaagagatgaat

SEQ ID NO: 866392 - DNA, 15 bp, Homo sapiens
ttcaagagatgaata

SEQ ID NO: 866393 - DNA, 15 bp, Homo sapiens
tcaagagatgaatag

SEQ ID NO: 866394 - DNA, 15 bp, Homo sapiens
caagagatgaatagc

SEQ ID NO: 866395 - DNA, 15 bp, Homo sapiens
aagagatgaatagca

SEQ ID NO: 866396 - DNA, 15 bp, Homo sapiens
agagatgaatagcaa

SEQ ID NO: 866397 - DNA, 15 bp, Homo sapiens
gagatgaatagcaat

SEQ ID NO: 866398 - DNA, 15 bp, Homo sapiens
agatgaatagcaatt

SEQ ID NO: 866399 - DNA, 15 bp, Homo sapiens
gatgaatagcaattt

SEQ ID NO: 866400 - DNA, 15 bp, Homo sapiens
atgaatagcaatttt

SEQ ID NO: 866401 - DNA, 15 bp, Homo sapiens
tgaatagcaattttc

SEQ ID NO: 866402 - DNA, 15 bp, Homo sapiens
gaatagcaattttcc

SEQ ID NO: 866403 - DNA, 15 bp, Homo sapiens
aatagcaattttcca

SEQ ID NO: 866404 - DNA, 15 bp, Homo sapiens
atagcaattttccat

SEQ ID NO: 866405 - DNA, 15 bp, Homo sapiens
tagcaattttccata

SEQ ID NO: 866406 - DNA, 15 bp, Homo sapiens
agcaattttccatat

SEQ ID NO: 866407 - DNA, 15 bp, Homo sapiens
gcaattttccatatg

SEQ ID NO: 866408 - DNA, 15 bp, Homo sapiens
caattttccatatgt

SEQ ID NO: 866409 - DNA, 15 bp, Homo sapiens
aattttccatatgta

SEQ ID NO: 866410 - DNA, 15 bp, Homo sapiens
attttccatatgtaa

SEQ ID NO: 866411 - DNA, 15 bp, Homo sapiens
ttttccatatgtaat

SEQ ID NO: 866412 - DNA, 15 bp, Homo sapiens
tttccatatgtaatt

SEQ ID NO: 866413 - DNA, 15 bp, Homo sapiens
ttccatatgtaattt

SEQ ID NO: 866414 - DNA, 15 bp, Homo sapiens
tccatatgtaattta

SEQ ID NO: 866415 - DNA, 15 bp, Homo sapiens
ccatatgtaatttaa

SEQ ID NO: 866416 - DNA, 15 bp, Homo sapiens
catatgtaatttaaa

SEQ ID NO: 866417 - DNA, 15 bp, Homo sapiens
atatgtaatttaaaa

SEQ ID NO: 866418 - DNA, 15 bp, Homo sapiens
tatgtaatttaaaaa

SEQ ID NO: 866419 - DNA, 15 bp, Homo sapiens
atgtaatttaaaaaa

SEQ ID NO: 866420 - DNA, 15 bp, Homo sapiens
tgtaatttaaaaaac

SEQ ID NO: 866421 - DNA, 15 bp, Homo sapiens
gtaatttaaaaaacc

SEQ ID NO: 866422 - DNA, 15 bp, Homo sapiens
taatttaaaaaaccc

SEQ ID NO: 866423 - DNA, 15 bp, Homo sapiens
aatttaaaaaacccc

SEQ ID NO: 866424 - DNA, 15 bp, Homo sapiens
atttaaaaaacccca

SEQ ID NO: 866425 - DNA, 15 bp, Homo sapiens
tttaaaaaaccccac

SEQ ID NO: 866426 - DNA, 15 bp, Homo sapiens
ttaaaaaaccccaca

SEQ ID NO: 866427 - DNA, 15 bp, Homo sapiens
taaaaaaccccacag

SEQ ID NO: 866428 - DNA, 15 bp, Homo sapiens
aaaaaaccccacagt

SEQ ID NO: 866429 - DNA, 15 bp, Homo sapiens
aaaaaccccacagtt

SEQ ID NO: 866430 - DNA, 15 bp, Homo sapiens
aaaaccccacagttg

SEQ ID NO: 866431 - DNA, 15 bp, Homo sapiens
aaaccccacagttga

SEQ ID NO: 866432 - DNA, 15 bp, Homo sapiens
aaccccacagttgac

SEQ ID NO: 866433 - DNA, 15 bp, Homo sapiens
accccacagttgact

SEQ ID NO: 866434 - DNA, 15 bp, Homo sapiens
ccccacagttgacta

SEQ ID NO: 866435 - DNA, 15 bp, Homo sapiens
cccacagttgactat

SEQ ID NO: 866436 - DNA, 15 bp, Homo sapiens
ccacagttgactatt

SEQ ID NO: 866437 - DNA, 15 bp, Homo sapiens
cacagttgactattt

SEQ ID NO: 866438 - DNA, 15 bp, Homo sapiens
acagttgactatttt

SEQ ID NO: 866439 - DNA, 15 bp, Homo sapiens
cagttgactatttta

SEQ ID NO: 866440 - DNA, 15 bp, Homo sapiens
agttgactattttat

SEQ ID NO: 866441 - DNA, 15 bp, Homo sapiens
gttgactattttatg

SEQ ID NO: 866442 - DNA, 15 bp, Homo sapiens
ttgactattttatgc

SEQ ID NO: 866443 - DNA, 15 bp, Homo sapiens
tgactattttatgct

SEQ ID NO: 866444 - DNA, 15 bp, Homo sapiens
gactattttatgcta

SEQ ID NO: 866445 - DNA, 15 bp, Homo sapiens
actattttatgctat

SEQ ID NO: 866446 - DNA, 15 bp, Homo sapiens
ctattttatgctatc

SEQ ID NO: 866447 - DNA, 15 bp, Homo sapiens
tattttatgctatct

SEQ ID NO: 866448 - DNA, 15 bp, Homo sapiens
attttatgctatctt

SEQ ID NO: 866449 - DNA, 15 bp, Homo sapiens
ttttatgctatcttt

SEQ ID NO: 866450 - DNA, 15 bp, Homo sapiens
tttatgctatctttt

SEQ ID NO: 866451 - DNA, 15 bp, Homo sapiens
ttatgctatcttttg

SEQ ID NO: 866452 - DNA, 15 bp, Homo sapiens
tatgctatcttttgt

SEQ ID NO: 866453 - DNA, 15 bp, Homo sapiens
atgctatcttttgtc

SEQ ID NO: 866454 - DNA, 15 bp, Homo sapiens
tgctatcttttgtcc

SEQ ID NO: 866455 - DNA, 15 bp, Homo sapiens
gctatcttttgtcct

SEQ ID NO: 866456 - DNA, 15 bp, Homo sapiens
ctatcttttgtcctc

SEQ ID NO: 866457 - DNA, 15 bp, Homo sapiens
tatcttttgtcctca

SEQ ID NO: 866458 - DNA, 15 bp, Homo sapiens
atcttttgtcctcag

SEQ ID NO: 866459 - DNA, 15 bp, Homo sapiens
tcttttgtcctcagt

SEQ ID NO: 866460 - DNA, 15 bp, Homo sapiens
cttttgtcctcagtc

SEQ ID NO: 866461 - DNA, 15 bp, Homo sapiens
ttttgtcctcagtca

SEQ ID NO: 866462 - DNA, 15 bp, Homo sapiens
tttgtcctcagtcat

SEQ ID NO: 866463 - DNA, 15 bp, Homo sapiens
ttgtcctcagtcatg

SEQ ID NO: 866464 - DNA, 15 bp, Homo sapiens
tgtcctcagtcatga

SEQ ID NO: 866465 - DNA, 15 bp, Homo sapiens
gtcctcagtcatgac

SEQ ID NO: 866466 - DNA, 15 bp, Homo sapiens
tcctcagtcatgaca

SEQ ID NO: 866467 - DNA, 15 bp, Homo sapiens
cctcagtcatgacag

SEQ ID NO: 866468 - DNA, 15 bp, Homo sapiens
ctcagtcatgacaga

SEQ ID NO: 866469 - DNA, 15 bp, Homo sapiens
tcagtcatgacagag

SEQ ID NO: 866470 - DNA, 15 bp, Homo sapiens
cagtcatgacagagt

SEQ ID NO: 866471 - DNA, 15 bp, Homo sapiens
agtcatgacagagta

SEQ ID NO: 866472 - DNA, 15 bp, Homo sapiens
gtcatgacagagtag

SEQ ID NO: 866473 - DNA, 15 bp, Homo sapiens
tcatgacagagtaga

SEQ ID NO: 866474 - DNA, 15 bp, Homo sapiens
catgacagagtagaa

SEQ ID NO: 866475 - DNA, 15 bp, Homo sapiens
atgacagagtagaag

SEQ ID NO: 866476 - DNA, 15 bp, Homo sapiens
tgacagagtagaaga

SEQ ID NO: 866477 - DNA, 15 bp, Homo sapiens
gacagagtagaagat

SEQ ID NO: 866478 - DNA, 15 bp, Homo sapiens
acagagtagaagatg

SEQ ID NO: 866479 - DNA, 15 bp, Homo sapiens
cagagtagaagatgg

SEQ ID NO: 866480 - DNA, 15 bp, Homo sapiens
agagtagaagatggg

SEQ ID NO: 866481 - DNA, 15 bp, Homo sapiens
gagtagaagatggga

SEQ ID NO: 866482 - DNA, 15 bp, Homo sapiens
agtagaagatgggag

SEQ ID NO: 866483 - DNA, 15 bp, Homo sapiens
gtagaagatgggagg

SEQ ID NO: 866484 - DNA, 15 bp, Homo sapiens
tagaagatgggaggt

SEQ ID NO: 866485 - DNA, 15 bp, Homo sapiens
agaagatgggaggta

SEQ ID NO: 866486 - DNA, 15 bp, Homo sapiens
gaagatgggaggtag

SEQ ID NO: 866487 - DNA, 15 bp, Homo sapiens
aagatgggaggtagc

SEQ ID NO: 866488 - DNA, 15 bp, Homo sapiens
agatgggaggtagca

SEQ ID NO: 866489 - DNA, 15 bp, Homo sapiens
gatgggaggtagcac

SEQ ID NO: 866490 - DNA, 15 bp, Homo sapiens
atgggaggtagcacc

SEQ ID NO: 866491 - DNA, 15 bp, Homo sapiens
tgggaggtagcacca

SEQ ID NO: 866492 - DNA, 15 bp, Homo sapiens
gggaggtagcaccaa

SEQ ID NO: 866493 - DNA, 15 bp, Homo sapiens
ggaggtagcaccaag

SEQ ID NO: 866494 - DNA, 15 bp, Homo sapiens
gaggtagcaccaagg

SEQ ID NO: 866495 - DNA, 15 bp, Homo sapiens
aggtagcaccaagga

SEQ ID NO: 866496 - DNA, 15 bp, Homo sapiens
ggtagcaccaaggat

SEQ ID NO: 866497 - DNA, 15 bp, Homo sapiens
gtagcaccaaggatg

SEQ ID NO: 866498 - DNA, 15 bp, Homo sapiens
tagcaccaaggatga

SEQ ID NO: 866499 - DNA, 15 bp, Homo sapiens
agcaccaaggatgat

SEQ ID NO: 866500 - DNA, 15 bp, Homo sapiens
gcaccaaggatgatg

SEQ ID NO: 866501 - DNA, 15 bp, Homo sapiens
caccaaggatgatgt

SEQ ID NO: 866502 - DNA, 15 bp, Homo sapiens
accaaggatgatgtc

SEQ ID NO: 866503 - DNA, 15 bp, Homo sapiens
ccaaggatgatgtca

SEQ ID NO: 866504 - DNA, 15 bp, Homo sapiens
caaggatgatgtcat

SEQ ID NO: 866505 - DNA, 15 bp, Homo sapiens
aaggatgatgtcata

SEQ ID NO: 866506 - DNA, 15 bp, Homo sapiens
aggatgatgtcatac

SEQ ID NO: 866507 - DNA, 15 bp, Homo sapiens
ggatgatgtcatacc

SEQ ID NO: 866508 - DNA, 15 bp, Homo sapiens
gatgatgtcatacct

SEQ ID NO: 866509 - DNA, 15 bp, Homo sapiens
atgatgtcatacctc

SEQ ID NO: 866510 - DNA, 15 bp, Homo sapiens
tgatgtcatacctcc

SEQ ID NO: 866511 - DNA, 15 bp, Homo sapiens
gatgtcatacctcca

SEQ ID NO: 866512 - DNA, 15 bp, Homo sapiens
atgtcatacctccat

SEQ ID NO: 866513 - DNA, 15 bp, Homo sapiens
tgtcatacctccatc

SEQ ID NO: 866514 - DNA, 15 bp, Homo sapiens
gtcatacctccatcc

SEQ ID NO: 866515 - DNA, 15 bp, Homo sapiens
tcatacctccatcct

SEQ ID NO: 866516 - DNA, 15 bp, Homo sapiens
catacctccatcctt

SEQ ID NO: 866517 - DNA, 15 bp, Homo sapiens
atacctccatccttt

SEQ ID NO: 866518 - DNA, 15 bp, Homo sapiens
tacctccatccttta

SEQ ID NO: 866519 - DNA, 15 bp, Homo sapiens
acctccatcctttat

SEQ ID NO: 866520 - DNA, 15 bp, Homo sapiens
cctccatcctttatg

SEQ ID NO: 866521 - DNA, 15 bp, Homo sapiens
ctccatcctttatgc

SEQ ID NO: 866522 - DNA, 15 bp, Homo sapiens
tccatcctttatgct

SEQ ID NO: 866523 - DNA, 15 bp, Homo sapiens
ccatcctttatgcta

SEQ ID NO: 866524 - DNA, 15 bp, Homo sapiens
catcctttatgctac

SEQ ID NO: 866525 - DNA, 15 bp, Homo sapiens
atcctttatgctaca

SEQ ID NO: 866526 - DNA, 15 bp, Homo sapiens
tcctttatgctacat

SEQ ID NO: 866527 - DNA, 15 bp, Homo sapiens
cctttatgctacatt

SEQ ID NO: 866528 - DNA, 15 bp, Homo sapiens
ctttatgctacattc

SEQ ID NO: 866529 - DNA, 15 bp, Homo sapiens
tttatgctacattct

SEQ ID NO: 866530 - DNA, 15 bp, Homo sapiens
ttatgctacattcta

SEQ ID NO: 866531 - DNA, 15 bp, Homo sapiens
tatgctacattctat

SEQ ID NO: 866532 - DNA, 15 bp, Homo sapiens
atgctacattctatc

SEQ ID NO: 866533 - DNA, 15 bp, Homo sapiens
tgctacattctatct

SEQ ID NO: 866534 - DNA, 15 bp, Homo sapiens
gctacattctatctt

SEQ ID NO: 866535 - DNA, 15 bp, Homo sapiens
ctacattctatcttc

SEQ ID NO: 866536 - DNA, 15 bp, Homo sapiens
tacattctatcttct

SEQ ID NO: 866537 - DNA, 15 bp, Homo sapiens
acattctatcttctg

SEQ ID NO: 866538 - DNA, 15 bp, Homo sapiens
cattctatcttctgt

SEQ ID NO: 866539 - DNA, 15 bp, Homo sapiens
attctatcttctgtc

SEQ ID NO: 866540 - DNA, 15 bp, Homo sapiens
ttctatcttctgtct

SEQ ID NO: 866541 - DNA, 15 bp, Homo sapiens
tctatcttctgtcta

SEQ ID NO: 866542 - DNA, 15 bp, Homo sapiens
ctatcttctgtctac

SEQ ID NO: 866543 - DNA, 15 bp, Homo sapiens
tatcttctgtctaca

SEQ ID NO: 866544 - DNA, 15 bp, Homo sapiens
atcttctgtctacat

SEQ ID NO: 866545 - DNA, 15 bp, Homo sapiens
tcttctgtctacata

SEQ ID NO: 866546 - DNA, 15 bp, Homo sapiens
cttctgtctacataa

SEQ ID NO: 866547 - DNA, 15 bp, Homo sapiens
ttctgtctacataag

SEQ ID NO: 866548 - DNA, 15 bp, Homo sapiens
tctgtctacataaga

SEQ ID NO: 866549 - DNA, 15 bp, Homo sapiens
ctgtctacataagat

SEQ ID NO: 866550 - DNA, 15 bp, Homo sapiens
tgtctacataagatg

SEQ ID NO: 866551 - DNA, 15 bp, Homo sapiens
gtctacataagatgt

SEQ ID NO: 866552 - DNA, 15 bp, Homo sapiens
tctacataagatgtc

SEQ ID NO: 866553 - DNA, 15 bp, Homo sapiens
ctacataagatgtca

SEQ ID NO: 866554 - DNA, 15 bp, Homo sapiens
tacataagatgtcat

SEQ ID NO: 866555 - DNA, 15 bp, Homo sapiens
acataagatgtcata

SEQ ID NO: 866556 - DNA, 15 bp, Homo sapiens
cataagatgtcatac

SEQ ID NO: 866557 - DNA, 15 bp, Homo sapiens
ataagatgtcatact

SEQ ID NO: 866558 - DNA, 15 bp, Homo sapiens
taagatgtcatacta

SEQ ID NO: 866559 - DNA, 15 bp, Homo sapiens
aagatgtcatactag

SEQ ID NO: 866560 - DNA, 15 bp, Homo sapiens
agatgtcatactaga

SEQ ID NO: 866561 - DNA, 15 bp, Homo sapiens
gatgtcatactagag

SEQ ID NO: 866562 - DNA, 15 bp, Homo sapiens
atgtcatactagagg

SEQ ID NO: 866563 - DNA, 15 bp, Homo sapiens
tgtcatactagaggg

SEQ ID NO: 866564 - DNA, 15 bp, Homo sapiens
gtcatactagagggc

SEQ ID NO: 866565 - DNA, 15 bp, Homo sapiens
tcatactagagggca

SEQ ID NO: 866566 - DNA, 15 bp, Homo sapiens
catactagagggcat

SEQ ID NO: 866567 - DNA, 15 bp, Homo sapiens
atactagagggcata

SEQ ID NO: 866568 - DNA, 15 bp, Homo sapiens
tactagagggcatat

SEQ ID NO: 866569 - DNA, 15 bp, Homo sapiens
actagagggcatatc

SEQ ID NO: 866570 - DNA, 15 bp, Homo sapiens
ctagagggcatatct

SEQ ID NO: 866571 - DNA, 15 bp, Homo sapiens
tagagggcatatctg

SEQ ID NO: 866572 - DNA, 15 bp, Homo sapiens
agagggcatatctgc

SEQ ID NO: 866573 - DNA, 15 bp, Homo sapiens
gagggcatatctgca

SEQ ID NO: 866574 - DNA, 15 bp, Homo sapiens
agggcatatctgcaa

SEQ ID NO: 866575 - DNA, 15 bp, Homo sapiens
gggcatatctgcaat

SEQ ID NO: 866576 - DNA, 15 bp, Homo sapiens
ggcatatctgcaatg

SEQ ID NO: 866577 - DNA, 15 bp, Homo sapiens
gcatatctgcaatgt

SEQ ID NO: 866578 - DNA, 15 bp, Homo sapiens
catatctgcaatgta

SEQ ID NO: 866579 - DNA, 15 bp, Homo sapiens
atatctgcaatgtat

SEQ ID NO: 866580 - DNA, 15 bp, Homo sapiens
tatctgcaatgtata

SEQ ID NO: 866581 - DNA, 15 bp, Homo sapiens
atctgcaatgtatac

SEQ ID NO: 866582 - DNA, 15 bp, Homo sapiens
tctgcaatgtataca

SEQ ID NO: 866583 - DNA, 15 bp, Homo sapiens
ctgcaatgtatacat

SEQ ID NO: 866584 - DNA, 15 bp, Homo sapiens
tgcaatgtatacata

SEQ ID NO: 866585 - DNA, 15 bp, Homo sapiens
gcaatgtatacatat

SEQ ID NO: 866586 - DNA, 15 bp, Homo sapiens
caatgtatacatatt

SEQ ID NO: 866587 - DNA, 15 bp, Homo sapiens
aatgtatacatatta

SEQ ID NO: 866588 - DNA, 15 bp, Homo sapiens
atgtatacatattat

SEQ ID NO: 866589 - DNA, 15 bp, Homo sapiens
tgtatacatattatc

SEQ ID NO: 866590 - DNA, 15 bp, Homo sapiens
gtatacatattatct

SEQ ID NO: 866591 - DNA, 15 bp, Homo sapiens
tatacatattatctt

SEQ ID NO: 866592 - DNA, 15 bp, Homo sapiens
atacatattatcttt

SEQ ID NO: 866593 - DNA, 15 bp, Homo sapiens
tacatattatctttt

SEQ ID NO: 866594 - DNA, 15 bp, Homo sapiens
acatattatcttttc

SEQ ID NO: 866595 - DNA, 15 bp, Homo sapiens
catattatcttttcc

SEQ ID NO: 866596 - DNA, 15 bp, Homo sapiens
atattatcttttcca

SEQ ID NO: 866597 - DNA, 15 bp, Homo sapiens
tattatcttttccag

SEQ ID NO: 866598 - DNA, 15 bp, Homo sapiens
attatcttttccagc

SEQ ID NO: 866599 - DNA, 15 bp, Homo sapiens
ttatcttttccagca

SEQ ID NO: 866600 - DNA, 15 bp, Homo sapiens
tatcttttccagcat

SEQ ID NO: 866601 - DNA, 15 bp, Homo sapiens
atcttttccagcatg

SEQ ID NO: 866602 - DNA, 15 bp, Homo sapiens
tcttttccagcatgc

SEQ ID NO: 866603 - DNA, 15 bp, Homo sapiens
cttttccagcatgca

SEQ ID NO: 866604 - DNA, 15 bp, Homo sapiens
ttttccagcatgcat

SEQ ID NO: 866605 - DNA, 15 bp, Homo sapiens
tttccagcatgcatt

SEQ ID NO: 866606 - DNA, 15 bp, Homo sapiens
ttccagcatgcattc

SEQ ID NO: 866607 - DNA, 15 bp, Homo sapiens
tccagcatgcattca

SEQ ID NO: 866608 - DNA, 15 bp, Homo sapiens
ccagcatgcattcag

SEQ ID NO: 866609 - DNA, 15 bp, Homo sapiens
cagcatgcattcagt

SEQ ID NO: 866610 - DNA, 15 bp, Homo sapiens
agcatgcattcagtt

SEQ ID NO: 866611 - DNA, 15 bp, Homo sapiens
gcatgcattcagttg

SEQ ID NO: 866612 - DNA, 15 bp, Homo sapiens
catgcattcagttgt

SEQ ID NO: 866613 - DNA, 15 bp, Homo sapiens
atgcattcagttgtg

SEQ ID NO: 866614 - DNA, 15 bp, Homo sapiens
tgcattcagttgtgt

SEQ ID NO: 866615 - DNA, 15 bp, Homo sapiens
gcattcagttgtgtt

SEQ ID NO: 866616 - DNA, 15 bp, Homo sapiens
cattcagttgtgttg

SEQ ID NO: 866617 - DNA, 15 bp, Homo sapiens
attcagttgtgttgg

SEQ ID NO: 866618 - DNA, 15 bp, Homo sapiens
ttcagttgtgttgga

SEQ ID NO: 866619 - DNA, 15 bp, Homo sapiens
tcagttgtgttggaa

SEQ ID NO: 866620 - DNA, 15 bp, Homo sapiens
cagttgtgttggaat

SEQ ID NO: 866621 - DNA, 15 bp, Homo sapiens
agttgtgttggaata

SEQ ID NO: 866622 - DNA, 15 bp, Homo sapiens
gttgtgttggaataa

SEQ ID NO: 866623 - DNA, 15 bp, Homo sapiens
ttgtgttggaataat

SEQ ID NO: 866624 - DNA, 15 bp, Homo sapiens
tgtgttggaataatt

SEQ ID NO: 866625 - DNA, 15 bp, Homo sapiens
gtgttggaataattt

SEQ ID NO: 866626 - DNA, 15 bp, Homo sapiens
tgttggaataattta

SEQ ID NO: 866627 - DNA, 15 bp, Homo sapiens
gttggaataatttat

SEQ ID NO: 866628 - DNA, 15 bp, Homo sapiens
ttggaataatttatg

SEQ ID NO: 866629 - DNA, 15 bp, Homo sapiens
tggaataatttatgt

SEQ ID NO: 866630 - DNA, 15 bp, Homo sapiens
ggaataatttatgta

SEQ ID NO: 866631 - DNA, 15 bp, Homo sapiens
gaataatttatgtac

SEQ ID NO: 866632 - DNA, 15 bp, Homo sapiens
aataatttatgtaca

SEQ ID NO: 866633 - DNA, 15 bp, Homo sapiens
ataatttatgtacac

SEQ ID NO: 866634 - DNA, 15 bp, Homo sapiens
taatttatgtacacc

SEQ ID NO: 866635 - DNA, 15 bp, Homo sapiens
aatttatgtacacct

SEQ ID NO: 866636 - DNA, 15 bp, Homo sapiens
atttatgtacacctt

SEQ ID NO: 866637 - DNA, 15 bp, Homo sapiens
tttatgtacaccttt

SEQ ID NO: 866638 - DNA, 15 bp, Homo sapiens
ttatgtacaccttta

SEQ ID NO: 866639 - DNA, 15 bp, Homo sapiens
tatgtacacctttat

SEQ ID NO: 866640 - DNA, 15 bp, Homo sapiens
atgtacacctttata

SEQ ID NO: 866641 - DNA, 15 bp, Homo sapiens
tgtacacctttataa

SEQ ID NO: 866642 - DNA, 15 bp, Homo sapiens
gtacacctttataaa

SEQ ID NO: 866643 - DNA, 15 bp, Homo sapiens
tacacctttataaac

SEQ ID NO: 866644 - DNA, 15 bp, Homo sapiens
acacctttataaacg

SEQ ID NO: 866645 - DNA, 15 bp, Homo sapiens
cacctttataaacgc

SEQ ID NO: 866646 - DNA, 15 bp, Homo sapiens
acctttataaacgct

SEQ ID NO: 866647 - DNA, 15 bp, Homo sapiens
cctttataaacgctg

SEQ ID NO: 866648 - DNA, 15 bp, Homo sapiens
ctttataaacgctga

SEQ ID NO: 866649 - DNA, 15 bp, Homo sapiens
tttataaacgctgag

SEQ ID NO: 866650 - DNA, 15 bp, Homo sapiens
ttataaacgctgagc

SEQ ID NO: 866651 - DNA, 15 bp, Homo sapiens
tataaacgctgagcc

SEQ ID NO: 866652 - DNA, 15 bp, Homo sapiens
ataaacgctgagcct

SEQ ID NO: 866653 - DNA, 15 bp, Homo sapiens
taaacgctgagcctc

SEQ ID NO: 866654 - DNA, 15 bp, Homo sapiens
aaacgctgagcctca

SEQ ID NO: 866655 - DNA, 15 bp, Homo sapiens
aacgctgagcctcac

SEQ ID NO: 866656 - DNA, 15 bp, Homo sapiens
acgctgagcctcaca

SEQ ID NO: 866657 - DNA, 15 bp, Homo sapiens
cgctgagcctcacaa

SEQ ID NO: 866658 - DNA, 15 bp, Homo sapiens
gctgagcctcacaag

SEQ ID NO: 866659 - DNA, 15 bp, Homo sapiens
ctgagcctcacaaga

SEQ ID NO: 866660 - DNA, 15 bp, Homo sapiens
tgagcctcacaagag

SEQ ID NO: 866661 - DNA, 15 bp, Homo sapiens
gagcctcacaagagc

SEQ ID NO: 866662 - DNA, 15 bp, Homo sapiens
agcctcacaagagcc

SEQ ID NO: 866663 - DNA, 15 bp, Homo sapiens
gcctcacaagagcca

SEQ ID NO: 866664 - DNA, 15 bp, Homo sapiens
cctcacaagagccat

SEQ ID NO: 866665 - DNA, 15 bp, Homo sapiens
ctcacaagagccatg

SEQ ID NO: 866666 - DNA, 15 bp, Homo sapiens
tcacaagagccatgt

SEQ ID NO: 866667 - DNA, 15 bp, Homo sapiens
cacaagagccatgtg

SEQ ID NO: 866668 - DNA, 15 bp, Homo sapiens
acaagagccatgtgc

SEQ ID NO: 866669 - DNA, 15 bp, Homo sapiens
caagagccatgtgcc

SEQ ID NO: 866670 - DNA, 15 bp, Homo sapiens
aagagccatgtgcca

SEQ ID NO: 866671 - DNA, 15 bp, Homo sapiens
agagccatgtgccac

SEQ ID NO: 866672 - DNA, 15 bp, Homo sapiens
gagccatgtgccacg

SEQ ID NO: 866673 - DNA, 15 bp, Homo sapiens
agccatgtgccacgt

SEQ ID NO: 866674 - DNA, 15 bp, Homo sapiens
gccatgtgccacgta

SEQ ID NO: 866675 - DNA, 15 bp, Homo sapiens
ccatgtgccacgtat

SEQ ID NO: 866676 - DNA, 15 bp, Homo sapiens
catgtgccacgtatt

SEQ ID NO: 866677 - DNA, 15 bp, Homo sapiens
atgtgccacgtattg

SEQ ID NO: 866678 - DNA, 15 bp, Homo sapiens
tgtgccacgtattgt

SEQ ID NO: 866679 - DNA, 15 bp, Homo sapiens
gtgccacgtattgtt

SEQ ID NO: 866680 - DNA, 15 bp, Homo sapiens
tgccacgtattgttt

SEQ ID NO: 866681 - DNA, 15 bp, Homo sapiens
gccacgtattgtttt

SEQ ID NO: 866682 - DNA, 15 bp, Homo sapiens
ccacgtattgttttc

SEQ ID NO: 866683 - DNA, 15 bp, Homo sapiens
cacgtattgttttct

SEQ ID NO: 866684 - DNA, 15 bp, Homo sapiens
acgtattgttttctt

SEQ ID NO: 866685 - DNA, 15 bp, Homo sapiens
cgtattgttttctta

SEQ ID NO: 866686 - DNA, 15 bp, Homo sapiens
gtattgttttcttac

SEQ ID NO: 866687 - DNA, 15 bp, Homo sapiens
tattgttttcttact

SEQ ID NO: 866688 - DNA, 15 bp, Homo sapiens
attgttttcttacta

SEQ ID NO: 866689 - DNA, 15 bp, Homo sapiens
ttgttttcttactac

SEQ ID NO: 866690 - DNA, 15 bp, Homo sapiens
tgttttcttactact

SEQ ID NO: 866691 - DNA, 15 bp, Homo sapiens
gttttcttactactt

SEQ ID NO: 866692 - DNA, 15 bp, Homo sapiens
ttttcttactacttt

SEQ ID NO: 866693 - DNA, 15 bp, Homo sapiens
tttcttactactttt

SEQ ID NO: 866694 - DNA, 15 bp, Homo sapiens
ttcttactacttttt

SEQ ID NO: 866695 - DNA, 15 bp, Homo sapiens
tcttactactttttg

SEQ ID NO: 866696 - DNA, 15 bp, Homo sapiens
cttactactttttgg

SEQ ID NO: 866697 - DNA, 15 bp, Homo sapiens
ttactactttttggg

SEQ ID NO: 866698 - DNA, 15 bp, Homo sapiens
tactactttttggga

SEQ ID NO: 866699 - DNA, 15 bp, Homo sapiens
actactttttgggat

SEQ ID NO: 866700 - DNA, 15 bp, Homo sapiens
ctactttttgggata

SEQ ID NO: 866701 - DNA, 15 bp, Homo sapiens
tactttttgggatac

SEQ ID NO: 866702 - DNA, 15 bp, Homo sapiens
actttttgggatacc

SEQ ID NO: 866703 - DNA, 15 bp, Homo sapiens
ctttttgggatacct

SEQ ID NO: 866704 - DNA, 15 bp, Homo sapiens
tttttgggatacctg

SEQ ID NO: 866705 - DNA, 15 bp, Homo sapiens
ttttgggatacctgg

SEQ ID NO: 866706 - DNA, 15 bp, Homo sapiens
tttgggatacctggc

SEQ ID NO: 866707 - DNA, 15 bp, Homo sapiens
ttgggatacctggca

SEQ ID NO: 866708 - DNA, 15 bp, Homo sapiens
tgggatacctggcac

SEQ ID NO: 866709 - DNA, 15 bp, Homo sapiens
gggatacctggcacg

SEQ ID NO: 866710 - DNA, 15 bp, Homo sapiens
ggatacctggcacgt

SEQ ID NO: 866711 - DNA, 15 bp, Homo sapiens
gatacctggcacgta

SEQ ID NO: 866712 - DNA, 15 bp, Homo sapiens
atacctggcacgtaa

SEQ ID NO: 866713 - DNA, 15 bp, Homo sapiens
tacctggcacgtaat

SEQ ID NO: 866714 - DNA, 15 bp, Homo sapiens
acctggcacgtaata

SEQ ID NO: 866715 - DNA, 15 bp, Homo sapiens
cctggcacgtaatag

SEQ ID NO: 866716 - DNA, 15 bp, Homo sapiens
ctggcacgtaataga

SEQ ID NO: 866717 - DNA, 15 bp, Homo sapiens
tggcacgtaatagac

SEQ ID NO: 866718 - DNA, 15 bp, Homo sapiens
ggcacgtaatagaca

SEQ ID NO: 866719 - DNA, 15 bp, Homo sapiens
gcacgtaatagacac

SEQ ID NO: 866720 - DNA, 15 bp, Homo sapiens
cacgtaatagacact

SEQ ID NO: 866721 - DNA, 15 bp, Homo sapiens
acgtaatagacactc

SEQ ID NO: 866722 - DNA, 15 bp, Homo sapiens
cgtaatagacactca

SEQ ID NO: 866723 - DNA, 15 bp, Homo sapiens
gtaatagacactcat

SEQ ID NO: 866724 - DNA, 15 bp, Homo sapiens
taatagacactcatt

SEQ ID NO: 866725 - DNA, 15 bp, Homo sapiens
aatagacactcattg

SEQ ID NO: 866726 - DNA, 15 bp, Homo sapiens
atagacactcattga

SEQ ID NO: 866727 - DNA, 15 bp, Homo sapiens
tagacactcattgaa

SEQ ID NO: 866728 - DNA, 15 bp, Homo sapiens
agacactcattgaaa

SEQ ID NO: 866729 - DNA, 15 bp, Homo sapiens
gacactcattgaaag

SEQ ID NO: 866730 - DNA, 15 bp, Homo sapiens
acactcattgaaagt

SEQ ID NO: 866731 - DNA, 15 bp, Homo sapiens
cactcattgaaagtt

SEQ ID NO: 866732 - DNA, 15 bp, Homo sapiens
actcattgaaagttt

SEQ ID NO: 866733 - DNA, 15 bp, Homo sapiens
ctcattgaaagtttc

SEQ ID NO: 866734 - DNA, 15 bp, Homo sapiens
tcattgaaagtttcc

SEQ ID NO: 866735 - DNA, 15 bp, Homo sapiens
cattgaaagtttcct

SEQ ID NO: 866736 - DNA, 15 bp, Homo sapiens
attgaaagtttccta

SEQ ID NO: 866737 - DNA, 15 bp, Homo sapiens
ttgaaagtttcctaa

SEQ ID NO: 866738 - DNA, 15 bp, Homo sapiens
tgaaagtttcctaat

SEQ ID NO: 866739 - DNA, 15 bp, Homo sapiens
gaaagtttcctaatg

SEQ ID NO: 866740 - DNA, 15 bp, Homo sapiens
aaagtttcctaatga

SEQ ID NO: 866741 - DNA, 15 bp, Homo sapiens
aagtttcctaatgaa

SEQ ID NO: 866742 - DNA, 15 bp, Homo sapiens
agtttcctaatgaat

SEQ ID NO: 866743 - DNA, 15 bp, Homo sapiens
gtttcctaatgaatg

SEQ ID NO: 866744 - DNA, 15 bp, Homo sapiens
tttcctaatgaatga

SEQ ID NO: 866745 - DNA, 15 bp, Homo sapiens
ttcctaatgaatgaa

SEQ ID NO: 866746 - DNA, 15 bp, Homo sapiens
tcctaatgaatgaag

SEQ ID NO: 866747 - DNA, 15 bp, Homo sapiens
cctaatgaatgaagt

SEQ ID NO: 866748 - DNA, 15 bp, Homo sapiens
ctaatgaatgaagta

SEQ ID NO: 866749 - DNA, 15 bp, Homo sapiens
taatgaatgaagtac

SEQ ID NO: 866750 - DNA, 15 bp, Homo sapiens
aatgaatgaagtaca

SEQ ID NO: 866751 - DNA, 15 bp, Homo sapiens
atgaatgaagtacaa

SEQ ID NO: 866752 - DNA, 15 bp, Homo sapiens
tgaatgaagtacaaa

SEQ ID NO: 866753 - DNA, 15 bp, Homo sapiens
gaatgaagtacaaag

SEQ ID NO: 866754 - DNA, 15 bp, Homo sapiens
aatgaagtacaaaga

SEQ ID NO: 866755 - DNA, 15 bp, Homo sapiens
atgaagtacaaagat

SEQ ID NO: 866756 - DNA, 15 bp, Homo sapiens
tgaagtacaaagata

SEQ ID NO: 866757 - DNA, 15 bp, Homo sapiens
gaagtacaaagataa

SEQ ID NO: 866758 - DNA, 15 bp, Homo sapiens
aagtacaaagataaa

SEQ ID NO: 866759 - DNA, 15 bp, Homo sapiens
agtacaaagataaaa

SEQ ID NO: 866760 - DNA, 15 bp, Homo sapiens
gtacaaagataaaac

SEQ ID NO: 866761 - DNA, 15 bp, Homo sapiens
tacaaagataaaaca

SEQ ID NO: 866762 - DNA, 15 bp, Homo sapiens
acaaagataaaacaa

SEQ ID NO: 866763 - DNA, 15 bp, Homo sapiens
caaagataaaacaag

SEQ ID NO: 866764 - DNA, 15 bp, Homo sapiens
aaagataaaacaagt

SEQ ID NO: 866765 - DNA, 15 bp, Homo sapiens
aagataaaacaagtt

SEQ ID NO: 866766 - DNA, 15 bp, Homo sapiens
agataaaacaagtta

SEQ ID NO: 866767 - DNA, 15 bp, Homo sapiens
gataaaacaagttat

SEQ ID NO: 866768 - DNA, 15 bp, Homo sapiens
ataaaacaagttata

SEQ ID NO: 866769 - DNA, 15 bp, Homo sapiens
taaaacaagttatag

SEQ ID NO: 866770 - DNA, 15 bp, Homo sapiens
aaaacaagttataga

SEQ ID NO: 866771 - DNA, 15 bp, Homo sapiens
aaacaagttatagac

SEQ ID NO: 866772 - DNA, 15 bp, Homo sapiens
aacaagttatagact

SEQ ID NO: 866773 - DNA, 15 bp, Homo sapiens
acaagttatagactg

SEQ ID NO: 866774 - DNA, 15 bp, Homo sapiens
caagttatagactga

SEQ ID NO: 866775 - DNA, 15 bp, Homo sapiens
aagttatagactgat

SEQ ID NO: 866776 - DNA, 15 bp, Homo sapiens
agttatagactgatt

SEQ ID NO: 866777 - DNA, 15 bp, Homo sapiens
gttatagactgattc

SEQ ID NO: 866778 - DNA, 15 bp, Homo sapiens
ttatagactgattct

SEQ ID NO: 866779 - DNA, 15 bp, Homo sapiens
tatagactgattctt

SEQ ID NO: 866780 - DNA, 15 bp, Homo sapiens
atagactgattcttt

SEQ ID NO: 866781 - DNA, 15 bp, Homo sapiens
tagactgattctttt

SEQ ID NO: 866782 - DNA, 15 bp, Homo sapiens
agactgattcttttg

SEQ ID NO: 866783 - DNA, 15 bp, Homo sapiens
gactgattcttttga

SEQ ID NO: 866784 - DNA, 15 bp, Homo sapiens
actgattcttttgag

SEQ ID NO: 866785 - DNA, 15 bp, Homo sapiens
ctgattcttttgagc

SEQ ID NO: 866786 - DNA, 15 bp, Homo sapiens
tgattcttttgagct

SEQ ID NO: 866787 - DNA, 15 bp, Homo sapiens
gattcttttgagctg

SEQ ID NO: 866788 - DNA, 15 bp, Homo sapiens
attcttttgagctgt

SEQ ID NO: 866789 - DNA, 15 bp, Homo sapiens
ttcttttgagctgtc

SEQ ID NO: 866790 - DNA, 15 bp, Homo sapiens
tcttttgagctgtca

SEQ ID NO: 866791 - DNA, 15 bp, Homo sapiens
cttttgagctgtcaa

SEQ ID NO: 866792 - DNA, 15 bp, Homo sapiens
ttttgagctgtcaag

SEQ ID NO: 866793 - DNA, 15 bp, Homo sapiens
tttgagctgtcaagg

SEQ ID NO: 866794 - DNA, 15 bp, Homo sapiens
ttgagctgtcaaggt

SEQ ID NO: 866795 - DNA, 15 bp, Homo sapiens
tgagctgtcaaggtt

SEQ ID NO: 866796 - DNA, 15 bp, Homo sapiens
gagctgtcaaggttg

SEQ ID NO: 866797 - DNA, 15 bp, Homo sapiens
agctgtcaaggttgt

SEQ ID NO: 866798 - DNA, 15 bp, Homo sapiens
gctgtcaaggttgta

SEQ ID NO: 866799 - DNA, 15 bp, Homo sapiens
ctgtcaaggttgtaa

SEQ ID NO: 866800 - DNA, 15 bp, Homo sapiens
tgtcaaggttgtaaa

SEQ ID NO: 866801 - DNA, 15 bp, Homo sapiens
gtcaaggttgtaaat

SEQ ID NO: 866802 - DNA, 15 bp, Homo sapiens
tcaaggttgtaaata

SEQ ID NO: 866803 - DNA, 15 bp, Homo sapiens
caaggttgtaaatag

SEQ ID NO: 866804 - DNA, 15 bp, Homo sapiens
aaggttgtaaataga

SEQ ID NO: 866805 - DNA, 15 bp, Homo sapiens
aggttgtaaatagac

SEQ ID NO: 866806 - DNA, 15 bp, Homo sapiens
ggttgtaaatagact

SEQ ID NO: 866807 - DNA, 15 bp, Homo sapiens
gttgtaaatagactt

SEQ ID NO: 866808 - DNA, 15 bp, Homo sapiens
ttgtaaatagacttt

SEQ ID NO: 866809 - DNA, 15 bp, Homo sapiens
tgtaaatagactttt

SEQ ID NO: 866810 - DNA, 15 bp, Homo sapiens
gtaaatagacttttg

SEQ ID NO: 866811 - DNA, 15 bp, Homo sapiens
taaatagacttttgc

SEQ ID NO: 866812 - DNA, 15 bp, Homo sapiens
aaatagacttttgct

SEQ ID NO: 866813 - DNA, 15 bp, Homo sapiens
aatagacttttgctc

SEQ ID NO: 866814 - DNA, 15 bp, Homo sapiens
atagacttttgctca

SEQ ID NO: 866815 - DNA, 15 bp, Homo sapiens
tagacttttgctcaa

SEQ ID NO: 866816 - DNA, 15 bp, Homo sapiens
agacttttgctcaat

SEQ ID NO: 866817 - DNA, 15 bp, Homo sapiens
gacttttgctcaatc

SEQ ID NO: 866818 - DNA, 15 bp, Homo sapiens
acttttgctcaatca

SEQ ID NO: 866819 - DNA, 15 bp, Homo sapiens
cttttgctcaatcaa

SEQ ID NO: 866820 - DNA, 15 bp, Homo sapiens
ttttgctcaatcaat

SEQ ID NO: 866821 - DNA, 15 bp, Homo sapiens
tttgctcaatcaatt

SEQ ID NO: 866822 - DNA, 15 bp, Homo sapiens
ttgctcaatcaattc

SEQ ID NO: 866823 - DNA, 15 bp, Homo sapiens
tgctcaatcaattca

SEQ ID NO: 866824 - DNA, 15 bp, Homo sapiens
gctcaatcaattcaa

SEQ ID NO: 866825 - DNA, 15 bp, Homo sapiens
ctcaatcaattcaaa

SEQ ID NO: 866826 - DNA, 15 bp, Homo sapiens
tcaatcaattcaaat

SEQ ID NO: 866827 - DNA, 15 bp, Homo sapiens
caatcaattcaaatg

SEQ ID NO: 866828 - DNA, 15 bp, Homo sapiens
aatcaattcaaatgg

SEQ ID NO: 866829 - DNA, 15 bp, Homo sapiens
atcaattcaaatggt

SEQ ID NO: 866830 - DNA, 15 bp, Homo sapiens
tcaattcaaatggtg

SEQ ID NO: 866831 - DNA, 15 bp, Homo sapiens
caattcaaatggtgg

SEQ ID NO: 866832 - DNA, 15 bp, Homo sapiens
aattcaaatggtggc

SEQ ID NO: 866833 - DNA, 15 bp, Homo sapiens
attcaaatggtggca

SEQ ID NO: 866834 - DNA, 15 bp, Homo sapiens
ttcaaatggtggcag

SEQ ID NO: 866835 - DNA, 15 bp, Homo sapiens
tcaaatggtggcagg

SEQ ID NO: 866836 - DNA, 15 bp, Homo sapiens
caaatggtggcaggt

SEQ ID NO: 866837 - DNA, 15 bp, Homo sapiens
aaatggtggcaggta

SEQ ID NO: 866838 - DNA, 15 bp, Homo sapiens
aatggtggcaggtag

SEQ ID NO: 866839 - DNA, 15 bp, Homo sapiens
atggtggcaggtagt

SEQ ID NO: 866840 - DNA, 15 bp, Homo sapiens
tggtggcaggtagtg

SEQ ID NO: 866841 - DNA, 15 bp, Homo sapiens
ggtggcaggtagtgg

SEQ ID NO: 866842 - DNA, 15 bp, Homo sapiens
gtggcaggtagtggg

SEQ ID NO: 866843 - DNA, 15 bp, Homo sapiens
tggcaggtagtgggg

SEQ ID NO: 866844 - DNA, 15 bp, Homo sapiens
ggcaggtagtggggg

SEQ ID NO: 866845 - DNA, 15 bp, Homo sapiens
gcaggtagtgggggt

SEQ ID NO: 866846 - DNA, 15 bp, Homo sapiens
caggtagtgggggta

SEQ ID NO: 866847 - DNA, 15 bp, Homo sapiens
aggtagtgggggtag

SEQ ID NO: 866848 - DNA, 15 bp, Homo sapiens
ggtagtgggggtaga

SEQ ID NO: 866849 - DNA, 15 bp, Homo sapiens
gtagtgggggtagag

SEQ ID NO: 866850 - DNA, 15 bp, Homo sapiens
tagtgggggtagagg

SEQ ID NO: 866851 - DNA, 15 bp, Homo sapiens
agtgggggtagaggg

SEQ ID NO: 866852 - DNA, 15 bp, Homo sapiens
gtgggggtagaggga

SEQ ID NO: 866853 - DNA, 15 bp, Homo sapiens
tgggggtagagggat

SEQ ID NO: 866854 - DNA, 15 bp, Homo sapiens
gggggtagagggatt

SEQ ID NO: 866855 - DNA, 15 bp, Homo sapiens
ggggtagagggattg

SEQ ID NO: 866856 - DNA, 15 bp, Homo sapiens
gggtagagggattgg

SEQ ID NO: 866857 - DNA, 15 bp, Homo sapiens
ggtagagggattggt

SEQ ID NO: 866858 - DNA, 15 bp, Homo sapiens
gtagagggattggta

SEQ ID NO: 866859 - DNA, 15 bp, Homo sapiens
tagagggattggtat

SEQ ID NO: 866860 - DNA, 15 bp, Homo sapiens
agagggattggtatg

SEQ ID NO: 866861 - DNA, 15 bp, Homo sapiens
gagggattggtatga

SEQ ID NO: 866862 - DNA, 15 bp, Homo sapiens
agggattggtatgaa

SEQ ID NO: 866863 - DNA, 15 bp, Homo sapiens
gggattggtatgaaa

SEQ ID NO: 866864 - DNA, 15 bp, Homo sapiens
ggattggtatgaaaa

SEQ ID NO: 866865 - DNA, 15 bp, Homo sapiens
gattggtatgaaaaa

SEQ ID NO: 866866 - DNA, 15 bp, Homo sapiens
attggtatgaaaaac

SEQ ID NO: 866867 - DNA, 15 bp, Homo sapiens
ttggtatgaaaaaca

SEQ ID NO: 866868 - DNA, 15 bp, Homo sapiens
tggtatgaaaaacat

SEQ ID NO: 866869 - DNA, 15 bp, Homo sapiens
ggtatgaaaaacata

SEQ ID NO: 866870 - DNA, 15 bp, Homo sapiens
gtatgaaaaacataa

SEQ ID NO: 866871 - DNA, 15 bp, Homo sapiens
tatgaaaaacataag

SEQ ID NO: 866872 - DNA, 15 bp, Homo sapiens
atgaaaaacataagc

SEQ ID NO: 866873 - DNA, 15 bp, Homo sapiens
tgaaaaacataagct

SEQ ID NO: 866874 - DNA, 15 bp, Homo sapiens
gaaaaacataagctt

SEQ ID NO: 866875 - DNA, 15 bp, Homo sapiens
aaaaacataagcttt

SEQ ID NO: 866876 - DNA, 15 bp, Homo sapiens
aaaacataagctttc

SEQ ID NO: 866877 - DNA, 15 bp, Homo sapiens
aaacataagctttca

SEQ ID NO: 866878 - DNA, 15 bp, Homo sapiens
aacataagctttcag

SEQ ID NO: 866879 - DNA, 15 bp, Homo sapiens
acataagctttcaga

SEQ ID NO: 866880 - DNA, 15 bp, Homo sapiens
cataagctttcagaa

SEQ ID NO: 866881 - DNA, 15 bp, Homo sapiens
ataagctttcagaac

SEQ ID NO: 866882 - DNA, 15 bp, Homo sapiens
taagctttcagaact

SEQ ID NO: 866883 - DNA, 15 bp, Homo sapiens
aagctttcagaactc

SEQ ID NO: 866884 - DNA, 15 bp, Homo sapiens
agctttcagaactcc

SEQ ID NO: 866885 - DNA, 15 bp, Homo sapiens
gctttcagaactcct

SEQ ID NO: 866886 - DNA, 15 bp, Homo sapiens
ctttcagaactcctg

SEQ ID NO: 866887 - DNA, 15 bp, Homo sapiens
tttcagaactcctgt

SEQ ID NO: 866888 - DNA, 15 bp, Homo sapiens
ttcagaactcctgtg

SEQ ID NO: 866889 - DNA, 15 bp, Homo sapiens
tcagaactcctgtgt

SEQ ID NO: 866890 - DNA, 15 bp, Homo sapiens
cagaactcctgtgtt

SEQ ID NO: 866891 - DNA, 15 bp, Homo sapiens
agaactcctgtgttt

SEQ ID NO: 866892 - DNA, 15 bp, Homo sapiens
gaactcctgtgttta

SEQ ID NO: 866893 - DNA, 15 bp, Homo sapiens
aactcctgtgtttat

SEQ ID NO: 866894 - DNA, 15 bp, Homo sapiens
actcctgtgtttatt

SEQ ID NO: 866895 - DNA, 15 bp, Homo sapiens
ctcctgtgtttattt

SEQ ID NO: 866896 - DNA, 15 bp, Homo sapiens
tcctgtgtttatttt

SEQ ID NO: 866897 - DNA, 15 bp, Homo sapiens
cctgtgtttattttt

SEQ ID NO: 866898 - DNA, 15 bp, Homo sapiens
ctgtgtttattttta

SEQ ID NO: 866899 - DNA, 15 bp, Homo sapiens
tgtgtttatttttag

SEQ ID NO: 866900 - DNA, 15 bp, Homo sapiens
gtgtttatttttaga

SEQ ID NO: 866901 - DNA, 15 bp, Homo sapiens
tgtttatttttagaa

SEQ ID NO: 866902 - DNA, 15 bp, Homo sapiens
gtttatttttagaat

SEQ ID NO: 866903 - DNA, 15 bp, Homo sapiens
tttatttttagaatg

SEQ ID NO: 866904 - DNA, 15 bp, Homo sapiens
ttatttttagaatgt

SEQ ID NO: 866905 - DNA, 15 bp, Homo sapiens
tatttttagaatgtc

SEQ ID NO: 866906 - DNA, 15 bp, Homo sapiens
atttttagaatgtca

SEQ ID NO: 866907 - DNA, 15 bp, Homo sapiens
tttttagaatgtcaa

SEQ ID NO: 866908 - DNA, 15 bp, Homo sapiens
ttttagaatgtcaac

SEQ ID NO: 866909 - DNA, 15 bp, Homo sapiens
tttagaatgtcaact

SEQ ID NO: 866910 - DNA, 15 bp, Homo sapiens
ttagaatgtcaactg

SEQ ID NO: 866911 - DNA, 15 bp, Homo sapiens
tagaatgtcaactgc

SEQ ID NO: 866912 - DNA, 15 bp, Homo sapiens
agaatgtcaactgct

SEQ ID NO: 866913 - DNA, 15 bp, Homo sapiens
gaatgtcaactgctt

SEQ ID NO: 866914 - DNA, 15 bp, Homo sapiens
aatgtcaactgcttg

SEQ ID NO: 866915 - DNA, 15 bp, Homo sapiens
atgtcaactgcttga

SEQ ID NO: 866916 - DNA, 15 bp, Homo sapiens
tgtcaactgcttgag

SEQ ID NO: 866917 - DNA, 15 bp, Homo sapiens
gtcaactgcttgagt

SEQ ID NO: 866918 - DNA, 15 bp, Homo sapiens
tcaactgcttgagtg

SEQ ID NO: 866919 - DNA, 15 bp, Homo sapiens
caactgcttgagtgt

SEQ ID NO: 866920 - DNA, 15 bp, Homo sapiens
aactgcttgagtgtt

SEQ ID NO: 866921 - DNA, 15 bp, Homo sapiens
actgcttgagtgttt

SEQ ID NO: 866922 - DNA, 15 bp, Homo sapiens
ctgcttgagtgtttt

SEQ ID NO: 866923 - DNA, 15 bp, Homo sapiens
tgcttgagtgttttt

SEQ ID NO: 866924 - DNA, 15 bp, Homo sapiens
gcttgagtgttttta

SEQ ID NO: 866925 - DNA, 15 bp, Homo sapiens
cttgagtgtttttaa

SEQ ID NO: 866926 - DNA, 15 bp, Homo sapiens
ttgagtgtttttaac

SEQ ID NO: 866927 - DNA, 15 bp, Homo sapiens
tgagtgtttttaact

SEQ ID NO: 866928 - DNA, 15 bp, Homo sapiens
gagtgtttttaactc

SEQ ID NO: 866929 - DNA, 15 bp, Homo sapiens
agtgtttttaactct

SEQ ID NO: 866930 - DNA, 15 bp, Homo sapiens
gtgtttttaactctg

SEQ ID NO: 866931 - DNA, 15 bp, Homo sapiens
tgtttttaactctgt

SEQ ID NO: 866932 - DNA, 15 bp, Homo sapiens
gtttttaactctgtg

SEQ ID NO: 866933 - DNA, 15 bp, Homo sapiens
tttttaactctgtgg

SEQ ID NO: 866934 - DNA, 15 bp, Homo sapiens
ttttaactctgtggt

SEQ ID NO: 866935 - DNA, 15 bp, Homo sapiens
tttaactctgtggta

SEQ ID NO: 866936 - DNA, 15 bp, Homo sapiens
ttaactctgtggtat

SEQ ID NO: 866937 - DNA, 15 bp, Homo sapiens
taactctgtggtatc

SEQ ID NO: 866938 - DNA, 15 bp, Homo sapiens
aactctgtggtatct

SEQ ID NO: 866939 - DNA, 15 bp, Homo sapiens
actctgtggtatctg

SEQ ID NO: 866940 - DNA, 15 bp, Homo sapiens
ctctgtggtatctga

SEQ ID NO: 866941 - DNA, 15 bp, Homo sapiens
tctgtggtatctgaa

SEQ ID NO: 866942 - DNA, 15 bp, Homo sapiens
ctgtggtatctgaac

SEQ ID NO: 866943 - DNA, 15 bp, Homo sapiens
tgtggtatctgaact

SEQ ID NO: 866944 - DNA, 15 bp, Homo sapiens
gtggtatctgaacta

SEQ ID NO: 866945 - DNA, 15 bp, Homo sapiens
tggtatctgaactat

SEQ ID NO: 866946 - DNA, 15 bp, Homo sapiens
ggtatctgaactatc

SEQ ID NO: 866947 - DNA, 15 bp, Homo sapiens
gtatctgaactatct

SEQ ID NO: 866948 - DNA, 15 bp, Homo sapiens
tatctgaactatctt

SEQ ID NO: 866949 - DNA, 15 bp, Homo sapiens
atctgaactatcttc

SEQ ID NO: 866950 - DNA, 15 bp, Homo sapiens
tctgaactatcttct

SEQ ID NO: 866951 - DNA, 15 bp, Homo sapiens
ctgaactatcttctc

SEQ ID NO: 866952 - DNA, 15 bp, Homo sapiens
tgaactatcttctct

SEQ ID NO: 866953 - DNA, 15 bp, Homo sapiens
gaactatcttctcta

SEQ ID NO: 866954 - DNA, 15 bp, Homo sapiens
aactatcttctctaa

SEQ ID NO: 866955 - DNA, 15 bp, Homo sapiens
actatcttctctaac

SEQ ID NO: 866956 - DNA, 15 bp, Homo sapiens
ctatcttctctaact

SEQ ID NO: 866957 - DNA, 15 bp, Homo sapiens
tatcttctctaactg

SEQ ID NO: 866958 - DNA, 15 bp, Homo sapiens
atcttctctaactgc

SEQ ID NO: 866959 - DNA, 15 bp, Homo sapiens
tcttctctaactgca

SEQ ID NO: 866960 - DNA, 15 bp, Homo sapiens
cttctctaactgcag

SEQ ID NO: 866961 - DNA, 15 bp, Homo sapiens
ttctctaactgcagg

SEQ ID NO: 866962 - DNA, 15 bp, Homo sapiens
tctctaactgcaggt

SEQ ID NO: 866963 - DNA, 15 bp, Homo sapiens
ctctaactgcaggtt

SEQ ID NO: 866964 - DNA, 15 bp, Homo sapiens
tctaactgcaggttg

SEQ ID NO: 866965 - DNA, 15 bp, Homo sapiens
ctaactgcaggttgg

SEQ ID NO: 866966 - DNA, 15 bp, Homo sapiens
taactgcaggttggg

SEQ ID NO: 866967 - DNA, 15 bp, Homo sapiens
aactgcaggttgggc

SEQ ID NO: 866968 - DNA, 15 bp, Homo sapiens
actgcaggttgggct

SEQ ID NO: 866969 - DNA, 15 bp, Homo sapiens
ctgcaggttgggctc

SEQ ID NO: 866970 - DNA, 15 bp, Homo sapiens
tgcaggttgggctca

SEQ ID NO: 866971 - DNA, 15 bp, Homo sapiens
gcaggttgggctcag

SEQ ID NO: 866972 - DNA, 15 bp, Homo sapiens
caggttgggctcaga

SEQ ID NO: 866973 - DNA, 15 bp, Homo sapiens
aggttgggctcagat

SEQ ID NO: 866974 - DNA, 15 bp, Homo sapiens
ggttgggctcagatc

SEQ ID NO: 866975 - DNA, 15 bp, Homo sapiens
gttgggctcagatct

SEQ ID NO: 866976 - DNA, 15 bp, Homo sapiens
ttgggctcagatctg

SEQ ID NO: 866977 - DNA, 15 bp, Homo sapiens
tgggctcagatctgt

SEQ ID NO: 866978 - DNA, 15 bp, Homo sapiens
gggctcagatctgtg

SEQ ID NO: 866979 - DNA, 15 bp, Homo sapiens
ggctcagatctgtga

SEQ ID NO: 866980 - DNA, 15 bp, Homo sapiens
gctcagatctgtgat

SEQ ID NO: 866981 - DNA, 15 bp, Homo sapiens
ctcagatctgtgata

SEQ ID NO: 866982 - DNA, 15 bp, Homo sapiens
tcagatctgtgatag

SEQ ID NO: 866983 - DNA, 15 bp, Homo sapiens
cagatctgtgataga

SEQ ID NO: 866984 - DNA, 15 bp, Homo sapiens
agatctgtgatagaa

SEQ ID NO: 866985 - DNA, 15 bp, Homo sapiens
gatctgtgatagaac

SEQ ID NO: 866986 - DNA, 15 bp, Homo sapiens
atctgtgatagaaca

SEQ ID NO: 866987 - DNA, 15 bp, Homo sapiens
tctgtgatagaacag

SEQ ID NO: 866988 - DNA, 15 bp, Homo sapiens
ctgtgatagaacagt

SEQ ID NO: 866989 - DNA, 15 bp, Homo sapiens
tgtgatagaacagtt

SEQ ID NO: 866990 - DNA, 15 bp, Homo sapiens
gtgatagaacagttt

SEQ ID NO: 866991 - DNA, 15 bp, Homo sapiens
tgatagaacagtttc

SEQ ID NO: 866992 - DNA, 15 bp, Homo sapiens
gatagaacagtttcc

SEQ ID NO: 866993 - DNA, 15 bp, Homo sapiens
atagaacagtttcct

SEQ ID NO: 866994 - DNA, 15 bp, Homo sapiens
tagaacagtttcctg

SEQ ID NO: 866995 - DNA, 15 bp, Homo sapiens
agaacagtttcctgg

SEQ ID NO: 866996 - DNA, 15 bp, Homo sapiens
gaacagtttcctggg

SEQ ID NO: 866997 - DNA, 15 bp, Homo sapiens
aacagtttcctggga

SEQ ID NO: 866998 - DNA, 15 bp, Homo sapiens
acagtttcctgggaa

SEQ ID NO: 866999 - DNA, 15 bp, Homo sapiens
cagtttcctgggaag

SEQ ID NO: 867000 - DNA, 15 bp, Homo sapiens
agtttcctgggaagc

SEQ ID NO: 867001 - DNA, 15 bp, Homo sapiens
gtttcctgggaagct

SEQ ID NO: 867002 - DNA, 15 bp, Homo sapiens
tttcctgggaagctt

SEQ ID NO: 867003 - DNA, 15 bp, Homo sapiens
ttcctgggaagcttg

SEQ ID NO: 867004 - DNA, 15 bp, Homo sapiens
tcctgggaagcttga

SEQ ID NO: 867005 - DNA, 15 bp, Homo sapiens
cctgggaagcttgac

SEQ ID NO: 867006 - DNA, 15 bp, Homo sapiens
ctgggaagcttgact

SEQ ID NO: 867007 - DNA, 15 bp, Homo sapiens
tgggaagcttgactt

SEQ ID NO: 867008 - DNA, 15 bp, Homo sapiens
gggaagcttgacttt

SEQ ID NO: 867009 - DNA, 15 bp, Homo sapiens
ggaagcttgactttg

SEQ ID NO: 867010 - DNA, 15 bp, Homo sapiens
gaagcttgactttgt

SEQ ID NO: 867011 - DNA, 15 bp, Homo sapiens
aagcttgactttgtc

SEQ ID NO: 867012 - DNA, 15 bp, Homo sapiens
agcttgactttgtcc

SEQ ID NO: 867013 - DNA, 15 bp, Homo sapiens
gcttgactttgtcct

SEQ ID NO: 867014 - DNA, 15 bp, Homo sapiens
cttgactttgtcctt

SEQ ID NO: 867015 - DNA, 15 bp, Homo sapiens
ttgactttgtccttg

SEQ ID NO: 867016 - DNA, 15 bp, Homo sapiens
tgactttgtccttgt

SEQ ID NO: 867017 - DNA, 15 bp, Homo sapiens
gactttgtccttgtg

SEQ ID NO: 867018 - DNA, 15 bp, Homo sapiens
actttgtccttgtgg

SEQ ID NO: 867019 - DNA, 15 bp, Homo sapiens
ctttgtccttgtgga

SEQ ID NO: 867020 - DNA, 15 bp, Homo sapiens
tttgtccttgtggat

SEQ ID NO: 867021 - DNA, 15 bp, Homo sapiens
ttgtccttgtggatg

SEQ ID NO: 867022 - DNA, 15 bp, Homo sapiens
tgtccttgtggatgg

SEQ ID NO: 867023 - DNA, 15 bp, Homo sapiens
gtccttgtggatggg

SEQ ID NO: 867024 - DNA, 15 bp, Homo sapiens
tccttgtggatgggg

SEQ ID NO: 867025 - DNA, 15 bp, Homo sapiens
ccttgtggatggggg

SEQ ID NO: 867026 - DNA, 15 bp, Homo sapiens
cttgtggatgggggc

SEQ ID NO: 867027 - DNA, 15 bp, Homo sapiens
ttgtggatgggggct

SEQ ID NO: 867028 - DNA, 15 bp, Homo sapiens
tgtggatgggggctg

SEQ ID NO: 867029 - DNA, 15 bp, Homo sapiens
gtggatgggggctgt

SEQ ID NO: 867030 - DNA, 15 bp, Homo sapiens
tggatgggggctgtg

SEQ ID NO: 867031 - DNA, 15 bp, Homo sapiens
ggatgggggctgtgt

SEQ ID NO: 867032 - DNA, 15 bp, Homo sapiens
gatgggggctgtgtc

SEQ ID NO: 867033 - DNA, 15 bp, Homo sapiens
atgggggctgtgtcc

SEQ ID NO: 867034 - DNA, 15 bp, Homo sapiens
tgggggctgtgtcct

SEQ ID NO: 867035 - DNA, 15 bp, Homo sapiens
gggggctgtgtccta

SEQ ID NO: 867036 - DNA, 15 bp, Homo sapiens
ggggctgtgtcctaa

SEQ ID NO: 867037 - DNA, 15 bp, Homo sapiens
gggctgtgtcctaag

SEQ ID NO: 867038 - DNA, 15 bp, Homo sapiens
ggctgtgtcctaagc

SEQ ID NO: 867039 - DNA, 15 bp, Homo sapiens
gctgtgtcctaagcc

SEQ ID NO: 867040 - DNA, 15 bp, Homo sapiens
ctgtgtcctaagcca

SEQ ID NO: 867041 - DNA, 15 bp, Homo sapiens
tgtgtcctaagccat

SEQ ID NO: 867042 - DNA, 15 bp, Homo sapiens
gtgtcctaagccatg

SEQ ID NO: 867043 - DNA, 15 bp, Homo sapiens
tgtcctaagccatgg

SEQ ID NO: 867044 - DNA, 15 bp, Homo sapiens
gtcctaagccatggc

SEQ ID NO: 867045 - DNA, 15 bp, Homo sapiens
tcctaagccatggcc

SEQ ID NO: 867046 - DNA, 15 bp, Homo sapiens
cctaagccatggcca

SEQ ID NO: 867047 - DNA, 15 bp, Homo sapiens
ctaagccatggccac

SEQ ID NO: 867048 - DNA, 15 bp, Homo sapiens
taagccatggccaca

SEQ ID NO: 867049 - DNA, 15 bp, Homo sapiens
aagccatggccacaa

SEQ ID NO: 867050 - DNA, 15 bp, Homo sapiens
agccatggccacaag

SEQ ID NO: 867051 - DNA, 15 bp, Homo sapiens
gccatggccacaagc

SEQ ID NO: 867052 - DNA, 15 bp, Homo sapiens
ccatggccacaagca

SEQ ID NO: 867053 - DNA, 15 bp, Homo sapiens
catggccacaagcag

SEQ ID NO: 867054 - DNA, 15 bp, Homo sapiens
atggccacaagcagt

SEQ ID NO: 867055 - DNA, 15 bp, Homo sapiens
tggccacaagcagtt

SEQ ID NO: 867056 - DNA, 15 bp, Homo sapiens
ggccacaagcagttg

SEQ ID NO: 867057 - DNA, 15 bp, Homo sapiens
gccacaagcagttga

SEQ ID NO: 867058 - DNA, 15 bp, Homo sapiens
ccacaagcagttgat

SEQ ID NO: 867059 - DNA, 15 bp, Homo sapiens
cacaagcagttgatg

SEQ ID NO: 867060 - DNA, 15 bp, Homo sapiens
acaagcagttgatgt

SEQ ID NO: 867061 - DNA, 15 bp, Homo sapiens
caagcagttgatgtg

SEQ ID NO: 867062 - DNA, 15 bp, Homo sapiens
aagcagttgatgtgc

SEQ ID NO: 867063 - DNA, 15 bp, Homo sapiens
agcagttgatgtgct

SEQ ID NO: 867064 - DNA, 15 bp, Homo sapiens
gcagttgatgtgctt

SEQ ID NO: 867065 - DNA, 15 bp, Homo sapiens
cagttgatgtgcttg

SEQ ID NO: 867066 - DNA, 15 bp, Homo sapiens
agttgatgtgcttgg

SEQ ID NO: 867067 - DNA, 15 bp, Homo sapiens
gttgatgtgcttggc

SEQ ID NO: 867068 - DNA, 15 bp, Homo sapiens
ttgatgtgcttggct

SEQ ID NO: 867069 - DNA, 15 bp, Homo sapiens
tgatgtgcttggcta

SEQ ID NO: 867070 - DNA, 15 bp, Homo sapiens
gatgtgcttggctag

SEQ ID NO: 867071 - DNA, 15 bp, Homo sapiens
atgtgcttggctaga

SEQ ID NO: 867072 - DNA, 15 bp, Homo sapiens
tgtgcttggctagat

SEQ ID NO: 867073 - DNA, 15 bp, Homo sapiens
gtgcttggctagatc

SEQ ID NO: 867074 - DNA, 15 bp, Homo sapiens
tgcttggctagatct

SEQ ID NO: 867075 - DNA, 15 bp, Homo sapiens
gcttggctagatctg

SEQ ID NO: 867076 - DNA, 15 bp, Homo sapiens
cttggctagatctgt

SEQ ID NO: 867077 - DNA, 15 bp, Homo sapiens
ttggctagatctgtt

SEQ ID NO: 867078 - DNA, 15 bp, Homo sapiens
tggctagatctgttc

SEQ ID NO: 867079 - DNA, 15 bp, Homo sapiens
ggctagatctgttct

SEQ ID NO: 867080 - DNA, 15 bp, Homo sapiens
gctagatctgttctc

SEQ ID NO: 867081 - DNA, 15 bp, Homo sapiens
ctagatctgttctca

SEQ ID NO: 867082 - DNA, 15 bp, Homo sapiens
tagatctgttctcag

SEQ ID NO: 867083 - DNA, 15 bp, Homo sapiens
agatctgttctcagt

SEQ ID NO: 867084 - DNA, 15 bp, Homo sapiens
gatctgttctcagta

SEQ ID NO: 867085 - DNA, 15 bp, Homo sapiens
atctgttctcagtaa

SEQ ID NO: 867086 - DNA, 15 bp, Homo sapiens
tctgttctcagtaag

SEQ ID NO: 867087 - DNA, 15 bp, Homo sapiens
ctgttctcagtaagg

SEQ ID NO: 867088 - DNA, 15 bp, Homo sapiens
tgttctcagtaaggc

SEQ ID NO: 867089 - DNA, 15 bp, Homo sapiens
gttctcagtaaggcg

SEQ ID NO: 867090 - DNA, 15 bp, Homo sapiens
ttctcagtaaggcga

SEQ ID NO: 867091 - DNA, 15 bp, Homo sapiens
tctcagtaaggcgaa

SEQ ID NO: 867092 - DNA, 15 bp, Homo sapiens
ctcagtaaggcgaag

SEQ ID NO: 867093 - DNA, 15 bp, Homo sapiens
tcagtaaggcgaaga

SEQ ID NO: 867094 - DNA, 15 bp, Homo sapiens
cagtaaggcgaagat

SEQ ID NO: 867095 - DNA, 15 bp, Homo sapiens
agtaaggcgaagatc

SEQ ID NO: 867096 - DNA, 15 bp, Homo sapiens
gtaaggcgaagatct

SEQ ID NO: 867097 - DNA, 15 bp, Homo sapiens
taaggcgaagatctt

SEQ ID NO: 867098 - DNA, 15 bp, Homo sapiens
aaggcgaagatcttg

SEQ ID NO: 867099 - DNA, 15 bp, Homo sapiens
aggcgaagatcttgc

SEQ ID NO: 867100 - DNA, 15 bp, Homo sapiens
ggcgaagatcttgct

SEQ ID NO: 867101 - DNA, 15 bp, Homo sapiens
gcgaagatcttgctg

SEQ ID NO: 867102 - DNA, 15 bp, Homo sapiens
cgaagatcttgctgc

SEQ ID NO: 867103 - DNA, 15 bp, Homo sapiens
gaagatcttgctgct

SEQ ID NO: 867104 - DNA, 15 bp, Homo sapiens
aagatcttgctgctt

SEQ ID NO: 867105 - DNA, 15 bp, Homo sapiens
agatcttgctgcttg

SEQ ID NO: 867106 - DNA, 15 bp, Homo sapiens
gatcttgctgcttga

SEQ ID NO: 867107 - DNA, 15 bp, Homo sapiens
atcttgctgcttgat

SEQ ID NO: 867108 - DNA, 15 bp, Homo sapiens
tcttgctgcttgatg

SEQ ID NO: 867109 - DNA, 15 bp, Homo sapiens
cttgctgcttgatga

SEQ ID NO: 867110 - DNA, 15 bp, Homo sapiens
ttgctgcttgatgaa

SEQ ID NO: 867111 - DNA, 15 bp, Homo sapiens
tgctgcttgatgaac

SEQ ID NO: 867112 - DNA, 15 bp, Homo sapiens
gctgcttgatgaacc

SEQ ID NO: 867113 - DNA, 15 bp, Homo sapiens
ctgcttgatgaaccc

SEQ ID NO: 867114 - DNA, 15 bp, Homo sapiens
tgcttgatgaaccca

SEQ ID NO: 867115 - DNA, 15 bp, Homo sapiens
gcttgatgaacccag

SEQ ID NO: 867116 - DNA, 15 bp, Homo sapiens
cttgatgaacccagt

SEQ ID NO: 867117 - DNA, 15 bp, Homo sapiens
ttgatgaacccagtg

SEQ ID NO: 867118 - DNA, 15 bp, Homo sapiens
tgatgaacccagtgc

SEQ ID NO: 867119 - DNA, 15 bp, Homo sapiens
gatgaacccagtgct

SEQ ID NO: 867120 - DNA, 15 bp, Homo sapiens
atgaacccagtgctc

SEQ ID NO: 867121 - DNA, 15 bp, Homo sapiens
tgaacccagtgctca

SEQ ID NO: 867122 - DNA, 15 bp, Homo sapiens
gaacccagtgctcat

SEQ ID NO: 867123 - DNA, 15 bp, Homo sapiens
aacccagtgctcatt

SEQ ID NO: 867124 - DNA, 15 bp, Homo sapiens
acccagtgctcattt

SEQ ID NO: 867125 - DNA, 15 bp, Homo sapiens
cccagtgctcatttg

SEQ ID NO: 867126 - DNA, 15 bp, Homo sapiens
ccagtgctcatttgg

SEQ ID NO: 867127 - DNA, 15 bp, Homo sapiens
cagtgctcatttgga

SEQ ID NO: 867128 - DNA, 15 bp, Homo sapiens
agtgctcatttggat

SEQ ID NO: 867129 - DNA, 15 bp, Homo sapiens
gtgctcatttggatc

SEQ ID NO: 867130 - DNA, 15 bp, Homo sapiens
tgctcatttggatcc

SEQ ID NO: 867131 - DNA, 15 bp, Homo sapiens
gctcatttggatcca

SEQ ID NO: 867132 - DNA, 15 bp, Homo sapiens
ctcatttggatccag

SEQ ID NO: 867133 - DNA, 15 bp, Homo sapiens
tcatttggatccagt

SEQ ID NO: 867134 - DNA, 15 bp, Homo sapiens
catttggatccagtg

SEQ ID NO: 867135 - DNA, 15 bp, Homo sapiens
atttggatccagtgt

SEQ ID NO: 867136 - DNA, 15 bp, Homo sapiens
tttggatccagtgtg

SEQ ID NO: 867137 - DNA, 15 bp, Homo sapiens
ttggatccagtgtga

SEQ ID NO: 867138 - DNA, 15 bp, Homo sapiens
tggatccagtgtgag

SEQ ID NO: 867139 - DNA, 15 bp, Homo sapiens
ggatccagtgtgagt

SEQ ID NO: 867140 - DNA, 15 bp, Homo sapiens
gatccagtgtgagtt

SEQ ID NO: 867141 - DNA, 15 bp, Homo sapiens
atccagtgtgagttt

SEQ ID NO: 867142 - DNA, 15 bp, Homo sapiens
tccagtgtgagtttc

SEQ ID NO: 867143 - DNA, 15 bp, Homo sapiens
ccagtgtgagtttca

SEQ ID NO: 867144 - DNA, 15 bp, Homo sapiens
cagtgtgagtttcag

SEQ ID NO: 867145 - DNA, 15 bp, Homo sapiens
agtgtgagtttcaga

SEQ ID NO: 867146 - DNA, 15 bp, Homo sapiens
gtgtgagtttcagat

SEQ ID NO: 867147 - DNA, 15 bp, Homo sapiens
tgtgagtttcagatg

SEQ ID NO: 867148 - DNA, 15 bp, Homo sapiens
gtgagtttcagatgt

SEQ ID NO: 867149 - DNA, 15 bp, Homo sapiens
tgagtttcagatgtt

SEQ ID NO: 867150 - DNA, 15 bp, Homo sapiens
gagtttcagatgttc

SEQ ID NO: 867151 - DNA, 15 bp, Homo sapiens
agtttcagatgttct

SEQ ID NO: 867152 - DNA, 15 bp, Homo sapiens
gtttcagatgttctg

SEQ ID NO: 867153 - DNA, 15 bp, Homo sapiens
tttcagatgttctgt

SEQ ID NO: 867154 - DNA, 15 bp, Homo sapiens
ttcagatgttctgtt

SEQ ID NO: 867155 - DNA, 15 bp, Homo sapiens
tcagatgttctgtta

SEQ ID NO: 867156 - DNA, 15 bp, Homo sapiens
cagatgttctgttac

SEQ ID NO: 867157 - DNA, 15 bp, Homo sapiens
agatgttctgttact

SEQ ID NO: 867158 - DNA, 15 bp, Homo sapiens
gatgttctgttactt

SEQ ID NO: 867159 - DNA, 15 bp, Homo sapiens
atgttctgttactta

SEQ ID NO: 867160 - DNA, 15 bp, Homo sapiens
tgttctgttacttaa

SEQ ID NO: 867161 - DNA, 15 bp, Homo sapiens
gttctgttacttaat

SEQ ID NO: 867162 - DNA, 15 bp, Homo sapiens
ttctgttacttaata

SEQ ID NO: 867163 - DNA, 15 bp, Homo sapiens
tctgttacttaatag

SEQ ID NO: 867164 - DNA, 15 bp, Homo sapiens
ctgttacttaatagc

SEQ ID NO: 867165 - DNA, 15 bp, Homo sapiens
tgttacttaatagca

SEQ ID NO: 867166 - DNA, 15 bp, Homo sapiens
gttacttaatagcac

SEQ ID NO: 867167 - DNA, 15 bp, Homo sapiens
ttacttaatagcaca

SEQ ID NO: 867168 - DNA, 15 bp, Homo sapiens
tacttaatagcacag

SEQ ID NO: 867169 - DNA, 15 bp, Homo sapiens
acttaatagcacagt

SEQ ID NO: 867170 - DNA, 15 bp, Homo sapiens
cttaatagcacagtg

SEQ ID NO: 867171 - DNA, 15 bp, Homo sapiens
ttaatagcacagtgg

SEQ ID NO: 867172 - DNA, 15 bp, Homo sapiens
taatagcacagtggg

SEQ ID NO: 867173 - DNA, 15 bp, Homo sapiens
aatagcacagtggga

SEQ ID NO: 867174 - DNA, 15 bp, Homo sapiens
atagcacagtgggaa

SEQ ID NO: 867175 - DNA, 15 bp, Homo sapiens
tagcacagtgggaac

SEQ ID NO: 867176 - DNA, 15 bp, Homo sapiens
agcacagtgggaaca

SEQ ID NO: 867177 - DNA, 15 bp, Homo sapiens
gcacagtgggaacag

SEQ ID NO: 867178 - DNA, 15 bp, Homo sapiens
cacagtgggaacaga

SEQ ID NO: 867179 - DNA, 15 bp, Homo sapiens
acagtgggaacagaa

SEQ ID NO: 867180 - DNA, 15 bp, Homo sapiens
cagtgggaacagaat

SEQ ID NO: 867181 - DNA, 15 bp, Homo sapiens
agtgggaacagaatc

SEQ ID NO: 867182 - DNA, 15 bp, Homo sapiens
gtgggaacagaatca

SEQ ID NO: 867183 - DNA, 15 bp, Homo sapiens
tgggaacagaatcat

SEQ ID NO: 867184 - DNA, 15 bp, Homo sapiens
gggaacagaatcatt

SEQ ID NO: 867185 - DNA, 15 bp, Homo sapiens
ggaacagaatcatta

SEQ ID NO: 867186 - DNA, 15 bp, Homo sapiens
gaacagaatcattat

SEQ ID NO: 867187 - DNA, 15 bp, Homo sapiens
aacagaatcattatg

SEQ ID NO: 867188 - DNA, 15 bp, Homo sapiens
acagaatcattatgc

SEQ ID NO: 867189 - DNA, 15 bp, Homo sapiens
cagaatcattatgcc

SEQ ID NO: 867190 - DNA, 15 bp, Homo sapiens
agaatcattatgcct

SEQ ID NO: 867191 - DNA, 15 bp, Homo sapiens
gaatcattatgcctg

SEQ ID NO: 867192 - DNA, 15 bp, Homo sapiens
aatcattatgcctgc

SEQ ID NO: 867193 - DNA, 15 bp, Homo sapiens
atcattatgcctgct

SEQ ID NO: 867194 - DNA, 15 bp, Homo sapiens
tcattatgcctgctt

SEQ ID NO: 867195 - DNA, 15 bp, Homo sapiens
cattatgcctgcttc

SEQ ID NO: 867196 - DNA, 15 bp, Homo sapiens
attatgcctgcttca

SEQ ID NO: 867197 - DNA, 15 bp, Homo sapiens
ttatgcctgcttcat

SEQ ID NO: 867198 - DNA, 15 bp, Homo sapiens
tatgcctgcttcatg

SEQ ID NO: 867199 - DNA, 15 bp, Homo sapiens
atgcctgcttcatgg

SEQ ID NO: 867200 - DNA, 15 bp, Homo sapiens
tgcctgcttcatggt

SEQ ID NO: 867201 - DNA, 15 bp, Homo sapiens
gcctgcttcatggtg

SEQ ID NO: 867202 - DNA, 15 bp, Homo sapiens
cctgcttcatggtga

SEQ ID NO: 867203 - DNA, 15 bp, Homo sapiens
ctgcttcatggtgac

SEQ ID NO: 867204 - DNA, 15 bp, Homo sapiens
tgcttcatggtgaca

SEQ ID NO: 867205 - DNA, 15 bp, Homo sapiens
gcttcatggtgacac

SEQ ID NO: 867206 - DNA, 15 bp, Homo sapiens
cttcatggtgacaca

SEQ ID NO: 867207 - DNA, 15 bp, Homo sapiens
ttcatggtgacacat

SEQ ID NO: 867208 - DNA, 15 bp, Homo sapiens
tcatggtgacacata

SEQ ID NO: 867209 - DNA, 15 bp, Homo sapiens
catggtgacacatat

SEQ ID NO: 867210 - DNA, 15 bp, Homo sapiens
atggtgacacatatt

SEQ ID NO: 867211 - DNA, 15 bp, Homo sapiens
tggtgacacatattt

SEQ ID NO: 867212 - DNA, 15 bp, Homo sapiens
ggtgacacatatttc

SEQ ID NO: 867213 - DNA, 15 bp, Homo sapiens
gtgacacatatttct

SEQ ID NO: 867214 - DNA, 15 bp, Homo sapiens
tgacacatatttcta

SEQ ID NO: 867215 - DNA, 15 bp, Homo sapiens
gacacatatttctat

SEQ ID NO: 867216 - DNA, 15 bp, Homo sapiens
acacatatttctatt

SEQ ID NO: 867217 - DNA, 15 bp, Homo sapiens
cacatatttctatta

SEQ ID NO: 867218 - DNA, 15 bp, Homo sapiens
acatatttctattag

SEQ ID NO: 867219 - DNA, 15 bp, Homo sapiens
catatttctattagg

SEQ ID NO: 867220 - DNA, 15 bp, Homo sapiens
atatttctattaggc

SEQ ID NO: 867221 - DNA, 15 bp, Homo sapiens
tatttctattaggct

SEQ ID NO: 867222 - DNA, 15 bp, Homo sapiens
atttctattaggctg

SEQ ID NO: 867223 - DNA, 15 bp, Homo sapiens
tttctattaggctgt

SEQ ID NO: 867224 - DNA, 15 bp, Homo sapiens
ttctattaggctgtc

SEQ ID NO: 867225 - DNA, 15 bp, Homo sapiens
tctattaggctgtca

SEQ ID NO: 867226 - DNA, 15 bp, Homo sapiens
ctattaggctgtcat

SEQ ID NO: 867227 - DNA, 15 bp, Homo sapiens
tattaggctgtcatg

SEQ ID NO: 867228 - DNA, 15 bp, Homo sapiens
attaggctgtcatgt

SEQ ID NO: 867229 - DNA, 15 bp, Homo sapiens
ttaggctgtcatgtc

SEQ ID NO: 867230 - DNA, 15 bp, Homo sapiens
taggctgtcatgtct

SEQ ID NO: 867231 - DNA, 15 bp, Homo sapiens
aggctgtcatgtctg

SEQ ID NO: 867232 - DNA, 15 bp, Homo sapiens
ggctgtcatgtctgc

SEQ ID NO: 867233 - DNA, 15 bp, Homo sapiens
gctgtcatgtctgcg

SEQ ID NO: 867234 - DNA, 15 bp, Homo sapiens
ctgtcatgtctgcgt

SEQ ID NO: 867235 - DNA, 15 bp, Homo sapiens
tgtcatgtctgcgtg

SEQ ID NO: 867236 - DNA, 15 bp, Homo sapiens
gtcatgtctgcgtgt

SEQ ID NO: 867237 - DNA, 15 bp, Homo sapiens
tcatgtctgcgtgtg

SEQ ID NO: 867238 - DNA, 15 bp, Homo sapiens
catgtctgcgtgtgg

SEQ ID NO: 867239 - DNA, 15 bp, Homo sapiens
atgtctgcgtgtggg

SEQ ID NO: 867240 - DNA, 15 bp, Homo sapiens
tgtctgcgtgtgggg

SEQ ID NO: 867241 - DNA, 15 bp, Homo sapiens
gtctgcgtgtggggg

SEQ ID NO: 867242 - DNA, 15 bp, Homo sapiens
tctgcgtgtgggggt

SEQ ID NO: 867243 - DNA, 15 bp, Homo sapiens
ctgcgtgtgggggtc

SEQ ID NO: 867244 - DNA, 15 bp, Homo sapiens
tgcgtgtgggggtct

SEQ ID NO: 867245 - DNA, 15 bp, Homo sapiens
gcgtgtgggggtctc

SEQ ID NO: 867246 - DNA, 15 bp, Homo sapiens
cgtgtgggggtctcc

SEQ ID NO: 867247 - DNA, 15 bp, Homo sapiens
gtgtgggggtctccc

SEQ ID NO: 867248 - DNA, 15 bp, Homo sapiens
tgtgggggtctcccc

SEQ ID NO: 867249 - DNA, 15 bp, Homo sapiens
gtgggggtctccccc

SEQ ID NO: 867250 - DNA, 15 bp, Homo sapiens
tgggggtctccccca

SEQ ID NO: 867251 - DNA, 15 bp, Homo sapiens
gggggtctcccccaa

SEQ ID NO: 867252 - DNA, 15 bp, Homo sapiens
ggggtctcccccaag

SEQ ID NO: 867253 - DNA, 15 bp, Homo sapiens
gggtctcccccaaga

SEQ ID NO: 867254 - DNA, 15 bp, Homo sapiens
ggtctcccccaagat

SEQ ID NO: 867255 - DNA, 15 bp, Homo sapiens
gtctcccccaagata

SEQ ID NO: 867256 - DNA, 15 bp, Homo sapiens
tctcccccaagatat

SEQ ID NO: 867257 - DNA, 15 bp, Homo sapiens
ctcccccaagatatg

SEQ ID NO: 867258 - DNA, 15 bp, Homo sapiens
tcccccaagatatga

SEQ ID NO: 867259 - DNA, 15 bp, Homo sapiens
cccccaagatatgaa

SEQ ID NO: 867260 - DNA, 15 bp, Homo sapiens
ccccaagatatgaaa

SEQ ID NO: 867261 - DNA, 15 bp, Homo sapiens
cccaagatatgaaat

SEQ ID NO: 867262 - DNA, 15 bp, Homo sapiens
ccaagatatgaaata

SEQ ID NO: 867263 - DNA, 15 bp, Homo sapiens
caagatatgaaataa

SEQ ID NO: 867264 - DNA, 15 bp, Homo sapiens
aagatatgaaataat

SEQ ID NO: 867265 - DNA, 15 bp, Homo sapiens
agatatgaaataatt

SEQ ID NO: 867266 - DNA, 15 bp, Homo sapiens
gatatgaaataattg

SEQ ID NO: 867267 - DNA, 15 bp, Homo sapiens
atatgaaataattgc

SEQ ID NO: 867268 - DNA, 15 bp, Homo sapiens
tatgaaataattgcc

SEQ ID NO: 867269 - DNA, 15 bp, Homo sapiens
atgaaataattgccc

SEQ ID NO: 867270 - DNA, 15 bp, Homo sapiens
tgaaataattgccca

SEQ ID NO: 867271 - DNA, 15 bp, Homo sapiens
gaaataattgcccag

SEQ ID NO: 867272 - DNA, 15 bp, Homo sapiens
aaataattgcccagt

SEQ ID NO: 867273 - DNA, 15 bp, Homo sapiens
aataattgcccagtg

SEQ ID NO: 867274 - DNA, 15 bp, Homo sapiens
ataattgcccagtgg

SEQ ID NO: 867275 - DNA, 15 bp, Homo sapiens
taattgcccagtgga

SEQ ID NO: 867276 - DNA, 15 bp, Homo sapiens
aattgcccagtggaa

SEQ ID NO: 867277 - DNA, 15 bp, Homo sapiens
attgcccagtggaaa

SEQ ID NO: 867278 - DNA, 15 bp, Homo sapiens
ttgcccagtggaaat

SEQ ID NO: 867279 - DNA, 15 bp, Homo sapiens
tgcccagtggaaatg

SEQ ID NO: 867280 - DNA, 15 bp, Homo sapiens
gcccagtggaaatga

SEQ ID NO: 867281 - DNA, 15 bp, Homo sapiens
cccagtggaaatgag

SEQ ID NO: 867282 - DNA, 15 bp, Homo sapiens
ccagtggaaatgagc

SEQ ID NO: 867283 - DNA, 15 bp, Homo sapiens
cagtggaaatgagca

SEQ ID NO: 867284 - DNA, 15 bp, Homo sapiens
agtggaaatgagcat

SEQ ID NO: 867285 - DNA, 15 bp, Homo sapiens
gtggaaatgagcata

SEQ ID NO: 867286 - DNA, 15 bp, Homo sapiens
tggaaatgagcataa

SEQ ID NO: 867287 - DNA, 15 bp, Homo sapiens
ggaaatgagcataaa

SEQ ID NO: 867288 - DNA, 15 bp, Homo sapiens
gaaatgagcataaat

SEQ ID NO: 867289 - DNA, 15 bp, Homo sapiens
aaatgagcataaatg

SEQ ID NO: 867290 - DNA, 15 bp, Homo sapiens
aatgagcataaatgc

SEQ ID NO: 867291 - DNA, 15 bp, Homo sapiens
atgagcataaatgca

SEQ ID NO: 867292 - DNA, 15 bp, Homo sapiens
tgagcataaatgcat

SEQ ID NO: 867293 - DNA, 15 bp, Homo sapiens
gagcataaatgcata

SEQ ID NO: 867294 - DNA, 15 bp, Homo sapiens
agcataaatgcatat

SEQ ID NO: 867295 - DNA, 15 bp, Homo sapiens
gcataaatgcatatt

SEQ ID NO: 867296 - DNA, 15 bp, Homo sapiens
cataaatgcatattt

SEQ ID NO: 867297 - DNA, 15 bp, Homo sapiens
ataaatgcatatttc

SEQ ID NO: 867298 - DNA, 15 bp, Homo sapiens
taaatgcatatttcc

SEQ ID NO: 867299 - DNA, 15 bp, Homo sapiens
aaatgcatatttcct

SEQ ID NO: 867300 - DNA, 15 bp, Homo sapiens
aatgcatatttcctt

SEQ ID NO: 867301 - DNA, 15 bp, Homo sapiens
atgcatatttccttg

SEQ ID NO: 867302 - DNA, 15 bp, Homo sapiens
tgcatatttccttgc

SEQ ID NO: 867303 - DNA, 15 bp, Homo sapiens
gcatatttccttgct

SEQ ID NO: 867304 - DNA, 15 bp, Homo sapiens
catatttccttgcta

SEQ ID NO: 867305 - DNA, 15 bp, Homo sapiens
atatttccttgctaa

SEQ ID NO: 867306 - DNA, 15 bp, Homo sapiens
tatttccttgctaag

SEQ ID NO: 867307 - DNA, 15 bp, Homo sapiens
atttccttgctaaga

SEQ ID NO: 867308 - DNA, 15 bp, Homo sapiens
tttccttgctaagag

SEQ ID NO: 867309 - DNA, 15 bp, Homo sapiens
ttccttgctaagagt

SEQ ID NO: 867310 - DNA, 15 bp, Homo sapiens
tccttgctaagagtc

SEQ ID NO: 867311 - DNA, 15 bp, Homo sapiens
ccttgctaagagtct

SEQ ID NO: 867312 - DNA, 15 bp, Homo sapiens
cttgctaagagtctt

SEQ ID NO: 867313 - DNA, 15 bp, Homo sapiens
ttgctaagagtcttg

SEQ ID NO: 867314 - DNA, 15 bp, Homo sapiens
tgctaagagtcttgt

SEQ ID NO: 867315 - DNA, 15 bp, Homo sapiens
gctaagagtcttgtg

SEQ ID NO: 867316 - DNA, 15 bp, Homo sapiens
ctaagagtcttgtgt

SEQ ID NO: 867317 - DNA, 15 bp, Homo sapiens
taagagtcttgtgtt

SEQ ID NO: 867318 - DNA, 15 bp, Homo sapiens
aagagtcttgtgttt

SEQ ID NO: 867319 - DNA, 15 bp, Homo sapiens
agagtcttgtgtttt

SEQ ID NO: 867320 - DNA, 15 bp, Homo sapiens
gagtcttgtgttttc

SEQ ID NO: 867321 - DNA, 15 bp, Homo sapiens
agtcttgtgttttct

SEQ ID NO: 867322 - DNA, 15 bp, Homo sapiens
gtcttgtgttttctt

SEQ ID NO: 867323 - DNA, 15 bp, Homo sapiens
tcttgtgttttcttc

SEQ ID NO: 867324 - DNA, 15 bp, Homo sapiens
cttgtgttttcttcc

SEQ ID NO: 867325 - DNA, 15 bp, Homo sapiens
ttgtgttttcttccg

SEQ ID NO: 867326 - DNA, 15 bp, Homo sapiens
tgtgttttcttccga

SEQ ID NO: 867327 - DNA, 15 bp, Homo sapiens
gtgttttcttccgaa

SEQ ID NO: 867328 - DNA, 15 bp, Homo sapiens
tgttttcttccgaag

SEQ ID NO: 867329 - DNA, 15 bp, Homo sapiens
gttttcttccgaaga

SEQ ID NO: 867330 - DNA, 15 bp, Homo sapiens
ttttcttccgaagat

SEQ ID NO: 867331 - DNA, 15 bp, Homo sapiens
tttcttccgaagata

SEQ ID NO: 867332 - DNA, 15 bp, Homo sapiens
ttcttccgaagatag

SEQ ID NO: 867333 - DNA, 15 bp, Homo sapiens
tcttccgaagatagt

SEQ ID NO: 867334 - DNA, 15 bp, Homo sapiens
cttccgaagatagtt

SEQ ID NO: 867335 - DNA, 15 bp, Homo sapiens
ttccgaagatagttt

SEQ ID NO: 867336 - DNA, 15 bp, Homo sapiens
tccgaagatagtttt

SEQ ID NO: 867337 - DNA, 15 bp, Homo sapiens
ccgaagatagttttt

SEQ ID NO: 867338 - DNA, 15 bp, Homo sapiens
cgaagatagttttta

SEQ ID NO: 867339 - DNA, 15 bp, Homo sapiens
gaagatagtttttag

SEQ ID NO: 867340 - DNA, 15 bp, Homo sapiens
aagatagtttttagt

SEQ ID NO: 867341 - DNA, 15 bp, Homo sapiens
agatagtttttagtt

SEQ ID NO: 867342 - DNA, 15 bp, Homo sapiens
gatagtttttagttt

SEQ ID NO: 867343 - DNA, 15 bp, Homo sapiens
atagtttttagtttc

SEQ ID NO: 867344 - DNA, 15 bp, Homo sapiens
tagtttttagtttca

SEQ ID NO: 867345 - DNA, 15 bp, Homo sapiens
agtttttagtttcat

SEQ ID NO: 867346 - DNA, 15 bp, Homo sapiens
gtttttagtttcata

SEQ ID NO: 867347 - DNA, 15 bp, Homo sapiens
tttttagtttcatac

SEQ ID NO: 867348 - DNA, 15 bp, Homo sapiens
ttttagtttcataca

SEQ ID NO: 867349 - DNA, 15 bp, Homo sapiens
tttagtttcatacaa

SEQ ID NO: 867350 - DNA, 15 bp, Homo sapiens
ttagtttcatacaaa

SEQ ID NO: 867351 - DNA, 15 bp, Homo sapiens
tagtttcatacaaac

SEQ ID NO: 867352 - DNA, 15 bp, Homo sapiens
agtttcatacaaact

SEQ ID NO: 867353 - DNA, 15 bp, Homo sapiens
gtttcatacaaactc

SEQ ID NO: 867354 - DNA, 15 bp, Homo sapiens
tttcatacaaactct

SEQ ID NO: 867355 - DNA, 15 bp, Homo sapiens
ttcatacaaactctt

SEQ ID NO: 867356 - DNA, 15 bp, Homo sapiens
tcatacaaactcttc

SEQ ID NO: 867357 - DNA, 15 bp, Homo sapiens
catacaaactcttcc

SEQ ID NO: 867358 - DNA, 15 bp, Homo sapiens
atacaaactcttccc

SEQ ID NO: 867359 - DNA, 15 bp, Homo sapiens
tacaaactcttcccc

SEQ ID NO: 867360 - DNA, 15 bp, Homo sapiens
acaaactcttccccc

SEQ ID NO: 867361 - DNA, 15 bp, Homo sapiens
caaactcttccccct

SEQ ID NO: 867362 - DNA, 15 bp, Homo sapiens
aaactcttccccctt

SEQ ID NO: 867363 - DNA, 15 bp, Homo sapiens
aactcttcccccttg

SEQ ID NO: 867364 - DNA, 15 bp, Homo sapiens
actcttcccccttgt

SEQ ID NO: 867365 - DNA, 15 bp, Homo sapiens
ctcttcccccttgtc

SEQ ID NO: 867366 - DNA, 15 bp, Homo sapiens
tcttcccccttgtca

SEQ ID NO: 867367 - DNA, 15 bp, Homo sapiens
cttcccccttgtcaa

SEQ ID NO: 867368 - DNA, 15 bp, Homo sapiens
ttcccccttgtcaac

SEQ ID NO: 867369 - DNA, 15 bp, Homo sapiens
tcccccttgtcaaca

SEQ ID NO: 867370 - DNA, 15 bp, Homo sapiens
cccccttgtcaacac

SEQ ID NO: 867371 - DNA, 15 bp, Homo sapiens
ccccttgtcaacaca

SEQ ID NO: 867372 - DNA, 15 bp, Homo sapiens
cccttgtcaacacat

SEQ ID NO: 867373 - DNA, 15 bp, Homo sapiens
ccttgtcaacacatg

SEQ ID NO: 867374 - DNA, 15 bp, Homo sapiens
cttgtcaacacatga

SEQ ID NO: 867375 - DNA, 15 bp, Homo sapiens
ttgtcaacacatgat

SEQ ID NO: 867376 - DNA, 15 bp, Homo sapiens
tgtcaacacatgatg

SEQ ID NO: 867377 - DNA, 15 bp, Homo sapiens
gtcaacacatgatga

SEQ ID NO: 867378 - DNA, 15 bp, Homo sapiens
tcaacacatgatgaa

SEQ ID NO: 867379 - DNA, 15 bp, Homo sapiens
caacacatgatgaag

SEQ ID NO: 867380 - DNA, 15 bp, Homo sapiens
aacacatgatgaagc

SEQ ID NO: 867381 - DNA, 15 bp, Homo sapiens
acacatgatgaagct

SEQ ID NO: 867382 - DNA, 15 bp, Homo sapiens
cacatgatgaagctt

SEQ ID NO: 867383 - DNA, 15 bp, Homo sapiens
acatgatgaagcttt

SEQ ID NO: 867384 - DNA, 15 bp, Homo sapiens
catgatgaagctttt

SEQ ID NO: 867385 - DNA, 15 bp, Homo sapiens
atgatgaagctttta

SEQ ID NO: 867386 - DNA, 15 bp, Homo sapiens
tgatgaagcttttaa

SEQ ID NO: 867387 - DNA, 15 bp, Homo sapiens
gatgaagcttttaaa

SEQ ID NO: 867388 - DNA, 15 bp, Homo sapiens
atgaagcttttaaat

SEQ ID NO: 867389 - DNA, 15 bp, Homo sapiens
tgaagcttttaaata

SEQ ID NO: 867390 - DNA, 15 bp, Homo sapiens
gaagcttttaaatac

SEQ ID NO: 867391 - DNA, 15 bp, Homo sapiens
aagcttttaaataca

SEQ ID NO: 867392 - DNA, 15 bp, Homo sapiens
agcttttaaatacat

SEQ ID NO: 867393 - DNA, 15 bp, Homo sapiens
gcttttaaatacatg

SEQ ID NO: 867394 - DNA, 15 bp, Homo sapiens
cttttaaatacatgg

SEQ ID NO: 867395 - DNA, 15 bp, Homo sapiens
ttttaaatacatggg

SEQ ID NO: 867396 - DNA, 15 bp, Homo sapiens
tttaaatacatgggc

SEQ ID NO: 867397 - DNA, 15 bp, Homo sapiens
ttaaatacatgggcc

SEQ ID NO: 867398 - DNA, 15 bp, Homo sapiens
taaatacatgggcct

SEQ ID NO: 867399 - DNA, 15 bp, Homo sapiens
aaatacatgggccta

SEQ ID NO: 867400 - DNA, 15 bp, Homo sapiens
aatacatgggcctaa

SEQ ID NO: 867401 - DNA, 15 bp, Homo sapiens
atacatgggcctaat

SEQ ID NO: 867402 - DNA, 15 bp, Homo sapiens
tacatgggcctaatc

SEQ ID NO: 867403 - DNA, 15 bp, Homo sapiens
acatgggcctaatct

SEQ ID NO: 867404 - DNA, 15 bp, Homo sapiens
catgggcctaatctg

SEQ ID NO: 867405 - DNA, 15 bp, Homo sapiens
atgggcctaatctga

SEQ ID NO: 867406 - DNA, 15 bp, Homo sapiens
tgggcctaatctgat

SEQ ID NO: 867407 - DNA, 15 bp, Homo sapiens
gggcctaatctgatc

SEQ ID NO: 867408 - DNA, 15 bp, Homo sapiens
ggcctaatctgatcc

SEQ ID NO: 867409 - DNA, 15 bp, Homo sapiens
gcctaatctgatcct

SEQ ID NO: 867410 - DNA, 15 bp, Homo sapiens
cctaatctgatcctt

SEQ ID NO: 867411 - DNA, 15 bp, Homo sapiens
ctaatctgatcctta

SEQ ID NO: 867412 - DNA, 15 bp, Homo sapiens
taatctgatccttat

SEQ ID NO: 867413 - DNA, 15 bp, Homo sapiens
aatctgatccttatg

SEQ ID NO: 867414 - DNA, 15 bp, Homo sapiens
atctgatccttatga

SEQ ID NO: 867415 - DNA, 15 bp, Homo sapiens
tctgatccttatgat

SEQ ID NO: 867416 - DNA, 15 bp, Homo sapiens
ctgatccttatgatt

SEQ ID NO: 867417 - DNA, 15 bp, Homo sapiens
tgatccttatgattt

SEQ ID NO: 867418 - DNA, 15 bp, Homo sapiens
gatccttatgatttg

SEQ ID NO: 867419 - DNA, 15 bp, Homo sapiens
atccttatgatttgc

SEQ ID NO: 867420 - DNA, 15 bp, Homo sapiens
tccttatgatttgcc

SEQ ID NO: 867421 - DNA, 15 bp, Homo sapiens
ccttatgatttgcct

SEQ ID NO: 867422 - DNA, 15 bp, Homo sapiens
cttatgatttgcctt

SEQ ID NO: 867423 - DNA, 15 bp, Homo sapiens
ttatgatttgccttt

SEQ ID NO: 867424 - DNA, 15 bp, Homo sapiens
tatgatttgcctttg

SEQ ID NO: 867425 - DNA, 15 bp, Homo sapiens
atgatttgcctttgt

SEQ ID NO: 867426 - DNA, 15 bp, Homo sapiens
tgatttgcctttgta

SEQ ID NO: 867427 - DNA, 15 bp, Homo sapiens
gatttgcctttgtat

SEQ ID NO: 867428 - DNA, 15 bp, Homo sapiens
atttgcctttgtatc

SEQ ID NO: 867429 - DNA, 15 bp, Homo sapiens
tttgcctttgtatcc

SEQ ID NO: 867430 - DNA, 15 bp, Homo sapiens
ttgcctttgtatccc

SEQ ID NO: 867431 - DNA, 15 bp, Homo sapiens
tgcctttgtatccca

SEQ ID NO: 867432 - DNA, 15 bp, Homo sapiens
gcctttgtatcccat

SEQ ID NO: 867433 - DNA, 15 bp, Homo sapiens
cctttgtatcccatt

SEQ ID NO: 867434 - DNA, 15 bp, Homo sapiens
ctttgtatcccattt

SEQ ID NO: 867435 - DNA, 15 bp, Homo sapiens
tttgtatcccattta

SEQ ID NO: 867436 - DNA, 15 bp, Homo sapiens
ttgtatcccatttat

SEQ ID NO: 867437 - DNA, 15 bp, Homo sapiens
tgtatcccatttata

SEQ ID NO: 867438 - DNA, 15 bp, Homo sapiens
gtatcccatttatac

SEQ ID NO: 867439 - DNA, 15 bp, Homo sapiens
tatcccatttatacc

SEQ ID NO: 867440 - DNA, 15 bp, Homo sapiens
atcccatttatacca

SEQ ID NO: 867441 - DNA, 15 bp, Homo sapiens
tcccatttataccat

SEQ ID NO: 867442 - DNA, 15 bp, Homo sapiens
cccatttataccata

SEQ ID NO: 867443 - DNA, 15 bp, Homo sapiens
ccatttataccataa

SEQ ID NO: 867444 - DNA, 15 bp, Homo sapiens
catttataccataag

SEQ ID NO: 867445 - DNA, 15 bp, Homo sapiens
atttataccataagc

SEQ ID NO: 867446 - DNA, 15 bp, Homo sapiens
tttataccataagca

SEQ ID NO: 867447 - DNA, 15 bp, Homo sapiens
ttataccataagcat

SEQ ID NO: 867448 - DNA, 15 bp, Homo sapiens
tataccataagcatg

SEQ ID NO: 867449 - DNA, 15 bp, Homo sapiens
ataccataagcatgt

SEQ ID NO: 867450 - DNA, 15 bp, Homo sapiens
taccataagcatgtt

SEQ ID NO: 867451 - DNA, 15 bp, Homo sapiens
accataagcatgttt

SEQ ID NO: 867452 - DNA, 15 bp, Homo sapiens
ccataagcatgttta

SEQ ID NO: 867453 - DNA, 15 bp, Homo sapiens
cataagcatgtttat

SEQ ID NO: 867454 - DNA, 15 bp, Homo sapiens
ataagcatgtttata

SEQ ID NO: 867455 - DNA, 15 bp, Homo sapiens
taagcatgtttatag

SEQ ID NO: 867456 - DNA, 15 bp, Homo sapiens
aagcatgtttatagc

SEQ ID NO: 867457 - DNA, 15 bp, Homo sapiens
agcatgtttatagcc

SEQ ID NO: 867458 - DNA, 15 bp, Homo sapiens
gcatgtttatagccc

SEQ ID NO: 867459 - DNA, 15 bp, Homo sapiens
catgtttatagcccc

SEQ ID NO: 867460 - DNA, 15 bp, Homo sapiens
atgtttatagcccca

SEQ ID NO: 867461 - DNA, 15 bp, Homo sapiens
tgtttatagccccaa

SEQ ID NO: 867462 - DNA, 15 bp, Homo sapiens
gtttatagccccaaa

SEQ ID NO: 867463 - DNA, 15 bp, Homo sapiens
tttatagccccaaat

SEQ ID NO: 867464 - DNA, 15 bp, Homo sapiens
ttatagccccaaata

SEQ ID NO: 867465 - DNA, 15 bp, Homo sapiens
tatagccccaaataa

SEQ ID NO: 867466 - DNA, 15 bp, Homo sapiens
atagccccaaataaa

SEQ ID NO: 867467 - DNA, 15 bp, Homo sapiens
tagccccaaataaag

SEQ ID NO: 867468 - DNA, 15 bp, Homo sapiens
agccccaaataaaga

SEQ ID NO: 867469 - DNA, 15 bp, Homo sapiens
gccccaaataaagaa

SEQ ID NO: 867470 - DNA, 15 bp, Homo sapiens
ccccaaataaagaag

SEQ ID NO: 867471 - DNA, 15 bp, Homo sapiens
cccaaataaagaagt

SEQ ID NO: 867472 - DNA, 15 bp, Homo sapiens
ccaaataaagaagta

SEQ ID NO: 867473 - DNA, 15 bp, Homo sapiens
caaataaagaagtac

SEQ ID NO: 867474 - DNA, 15 bp, Homo sapiens
aaataaagaagtact

SEQ ID NO: 867475 - DNA, 15 bp, Homo sapiens
aataaagaagtactg

SEQ ID NO: 867476 - DNA, 15 bp, Homo sapiens
ataaagaagtactgg

SEQ ID NO: 867477 - DNA, 15 bp, Homo sapiens
taaagaagtactggt

SEQ ID NO: 867478 - DNA, 15 bp, Homo sapiens
aaagaagtactggtg

SEQ ID NO: 867479 - DNA, 15 bp, Homo sapiens
aagaagtactggtga

SEQ ID NO: 867480 - DNA, 15 bp, Homo sapiens
agaagtactggtgat

SEQ ID NO: 867481 - DNA, 15 bp, Homo sapiens
gaagtactggtgatt

SEQ ID NO: 867482 - DNA, 15 bp, Homo sapiens
aagtactggtgattc

SEQ ID NO: 867483 - DNA, 15 bp, Homo sapiens
agtactggtgattct

SEQ ID NO: 867484 - DNA, 15 bp, Homo sapiens
gtactggtgattcta

SEQ ID NO: 867485 - DNA, 15 bp, Homo sapiens
tactggtgattctac

SEQ ID NO: 867486 - DNA, 15 bp, Homo sapiens
actggtgattctaca

SEQ ID NO: 867487 - DNA, 15 bp, Homo sapiens
ctggtgattctacat

SEQ ID NO: 867488 - DNA, 15 bp, Homo sapiens
tggtgattctacata

SEQ ID NO: 867489 - DNA, 15 bp, Homo sapiens
ggtgattctacataa

SEQ ID NO: 867490 - DNA, 15 bp, Homo sapiens
gtgattctacataat

SEQ ID NO: 867491 - DNA, 15 bp, Homo sapiens
tgattctacataatg

SEQ ID NO: 867492 - DNA, 15 bp, Homo sapiens
gattctacataatga

SEQ ID NO: 867493 - DNA, 15 bp, Homo sapiens
attctacataatgaa

SEQ ID NO: 867494 - DNA, 15 bp, Homo sapiens
ttctacataatgaaa

SEQ ID NO: 867495 - DNA, 15 bp, Homo sapiens
tctacataatgaaaa

SEQ ID NO: 867496 - DNA, 15 bp, Homo sapiens
ctacataatgaaaaa

SEQ ID NO: 867497 - DNA, 15 bp, Homo sapiens
tacataatgaaaaat

SEQ ID NO: 867498 - DNA, 15 bp, Homo sapiens
acataatgaaaaatg

SEQ ID NO: 867499 - DNA, 15 bp, Homo sapiens
cataatgaaaaatgt

SEQ ID NO: 867500 - DNA, 15 bp, Homo sapiens
ataatgaaaaatgta

SEQ ID NO: 867501 - DNA, 15 bp, Homo sapiens
taatgaaaaatgtac

SEQ ID NO: 867502 - DNA, 15 bp, Homo sapiens
aatgaaaaatgtact

SEQ ID NO: 867503 - DNA, 15 bp, Homo sapiens
atgaaaaatgtactc

SEQ ID NO: 867504 - DNA, 15 bp, Homo sapiens
tgaaaaatgtactca

SEQ ID NO: 867505 - DNA, 15 bp, Homo sapiens
gaaaaatgtactcat

SEQ ID NO: 867506 - DNA, 15 bp, Homo sapiens
aaaaatgtactcatt

SEQ ID NO: 867507 - DNA, 15 bp, Homo sapiens
aaaatgtactcattt

SEQ ID NO: 867508 - DNA, 15 bp, Homo sapiens
aaatgtactcattta

SEQ ID NO: 867509 - DNA, 15 bp, Homo sapiens
aatgtactcatttat

SEQ ID NO: 867510 - DNA, 15 bp, Homo sapiens
atgtactcatttatt

SEQ ID NO: 867511 - DNA, 15 bp, Homo sapiens
tgtactcatttatta

SEQ ID NO: 867512 - DNA, 15 bp, Homo sapiens
gtactcatttattaa

SEQ ID NO: 867513 - DNA, 15 bp, Homo sapiens
tactcatttattaaa

SEQ ID NO: 867514 - DNA, 15 bp, Homo sapiens
actcatttattaaag

SEQ ID NO: 867515 - DNA, 15 bp, Homo sapiens
ctcatttattaaagt

SEQ ID NO: 867516 - DNA, 15 bp, Homo sapiens
tcatttattaaagtt

SEQ ID NO: 867517 - DNA, 15 bp, Homo sapiens
catttattaaagttt

SEQ ID NO: 867518 - DNA, 15 bp, Homo sapiens
atttattaaagtttc

SEQ ID NO: 867519 - DNA, 15 bp, Homo sapiens
tttattaaagtttct

SEQ ID NO: 867520 - DNA, 15 bp, Homo sapiens
ttattaaagtttctt

SEQ ID NO: 867521 - DNA, 15 bp, Homo sapiens
tattaaagtttcttt

SEQ ID NO: 867522 - DNA, 15 bp, Homo sapiens
attaaagtttctttg

SEQ ID NO: 867523 - DNA, 15 bp, Homo sapiens
ttaaagtttctttga

SEQ ID NO: 867524 - DNA, 15 bp, Homo sapiens
taaagtttctttgaa

SEQ ID NO: 867525 - DNA, 15 bp, Homo sapiens
aaagtttctttgaaa

SEQ ID NO: 867526 - DNA, 15 bp, Homo sapiens
aagtttctttgaaat

SEQ ID NO: 867527 - DNA, 15 bp, Homo sapiens
agtttctttgaaata

SEQ ID NO: 867528 - DNA, 15 bp, Homo sapiens
gtttctttgaaatat

SEQ ID NO: 867529 - DNA, 15 bp, Homo sapiens
tttctttgaaatatt

SEQ ID NO: 867530 - DNA, 15 bp, Homo sapiens
ttctttgaaatattt

SEQ ID NO: 867531 - DNA, 15 bp, Homo sapiens
tctttgaaatatttg

SEQ ID NO: 867532 - DNA, 15 bp, Homo sapiens
ctttgaaatatttgt

SEQ ID NO: 867533 - DNA, 15 bp, Homo sapiens
tttgaaatatttgtc

SEQ ID NO: 867534 - DNA, 15 bp, Homo sapiens
ttgaaatatttgtcc

SEQ ID NO: 867535 - DNA, 15 bp, Homo sapiens
tgaaatatttgtcct

SEQ ID NO: 867536 - DNA, 15 bp, Homo sapiens
gaaatatttgtcctg

SEQ ID NO: 867537 - DNA, 15 bp, Homo sapiens
aaatatttgtcctgt

SEQ ID NO: 867538 - DNA, 15 bp, Homo sapiens
aatatttgtcctgtt

SEQ ID NO: 867539 - DNA, 15 bp, Homo sapiens
atatttgtcctgttt

SEQ ID NO: 867540 - DNA, 15 bp, Homo sapiens
tatttgtcctgttta

SEQ ID NO: 867541 - DNA, 15 bp, Homo sapiens
atttgtcctgtttat

SEQ ID NO: 867542 - DNA, 15 bp, Homo sapiens
tttgtcctgtttatt

SEQ ID NO: 867543 - DNA, 15 bp, Homo sapiens
ttgtcctgtttattt

SEQ ID NO: 867544 - DNA, 15 bp, Homo sapiens
tgtcctgtttattta

SEQ ID NO: 867545 - DNA, 15 bp, Homo sapiens
gtcctgtttatttat

SEQ ID NO: 867546 - DNA, 15 bp, Homo sapiens
tcctgtttatttatg

SEQ ID NO: 867547 - DNA, 15 bp, Homo sapiens
cctgtttatttatgg

SEQ ID NO: 867548 - DNA, 15 bp, Homo sapiens
ctgtttatttatgga

SEQ ID NO: 867549 - DNA, 15 bp, Homo sapiens
tgtttatttatggat

SEQ ID NO: 867550 - DNA, 15 bp, Homo sapiens
gtttatttatggata

SEQ ID NO: 867551 - DNA, 15 bp, Homo sapiens
tttatttatggatac

SEQ ID NO: 867552 - DNA, 15 bp, Homo sapiens
ttatttatggatact

SEQ ID NO: 867553 - DNA, 15 bp, Homo sapiens
tatttatggatactt

SEQ ID NO: 867554 - DNA, 15 bp, Homo sapiens
atttatggatactta

SEQ ID NO: 867555 - DNA, 15 bp, Homo sapiens
tttatggatacttag

SEQ ID NO: 867556 - DNA, 15 bp, Homo sapiens
ttatggatacttaga

SEQ ID NO: 867557 - DNA, 15 bp, Homo sapiens
tatggatacttagag

SEQ ID NO: 867558 - DNA, 15 bp, Homo sapiens
atggatacttagagt

SEQ ID NO: 867559 - DNA, 15 bp, Homo sapiens
tggatacttagagtc

SEQ ID NO: 867560 - DNA, 15 bp, Homo sapiens
ggatacttagagtct

SEQ ID NO: 867561 - DNA, 15 bp, Homo sapiens
gatacttagagtcta

SEQ ID NO: 867562 - DNA, 15 bp, Homo sapiens
atacttagagtctac

SEQ ID NO: 867563 - DNA, 15 bp, Homo sapiens
tacttagagtctacc

SEQ ID NO: 867564 - DNA, 15 bp, Homo sapiens
acttagagtctaccc

SEQ ID NO: 867565 - DNA, 15 bp, Homo sapiens
cttagagtctacccc

SEQ ID NO: 867566 - DNA, 15 bp, Homo sapiens
ttagagtctacccca

SEQ ID NO: 867567 - DNA, 15 bp, Homo sapiens
tagagtctaccccat

SEQ ID NO: 867568 - DNA, 15 bp, Homo sapiens
agagtctaccccatg

SEQ ID NO: 867569 - DNA, 15 bp, Homo sapiens
gagtctaccccatgg

SEQ ID NO: 867570 - DNA, 15 bp, Homo sapiens
agtctaccccatggt

SEQ ID NO: 867571 - DNA, 15 bp, Homo sapiens
gtctaccccatggtt

SEQ ID NO: 867572 - DNA, 15 bp, Homo sapiens
tctaccccatggttg

SEQ ID NO: 867573 - DNA, 15 bp, Homo sapiens
ctaccccatggttga

SEQ ID NO: 867574 - DNA, 15 bp, Homo sapiens
taccccatggttgaa

SEQ ID NO: 867575 - DNA, 15 bp, Homo sapiens
accccatggttgaaa

SEQ ID NO: 867576 - DNA, 15 bp, Homo sapiens
ccccatggttgaaaa

SEQ ID NO: 867577 - DNA, 15 bp, Homo sapiens
cccatggttgaaaag

SEQ ID NO: 867578 - DNA, 15 bp, Homo sapiens
ccatggttgaaaagc

SEQ ID NO: 867579 - DNA, 15 bp, Homo sapiens
catggttgaaaagct

SEQ ID NO: 867580 - DNA, 15 bp, Homo sapiens
atggttgaaaagctg

SEQ ID NO: 867581 - DNA, 15 bp, Homo sapiens
tggttgaaaagctga

SEQ ID NO: 867582 - DNA, 15 bp, Homo sapiens
ggttgaaaagctgat

SEQ ID NO: 867583 - DNA, 15 bp, Homo sapiens
gttgaaaagctgatt

SEQ ID NO: 867584 - DNA, 15 bp, Homo sapiens
ttgaaaagctgattg

SEQ ID NO: 867585 - DNA, 15 bp, Homo sapiens
tgaaaagctgattgt

SEQ ID NO: 867586 - DNA, 15 bp, Homo sapiens
gaaaagctgattgtg

SEQ ID NO: 867587 - DNA, 15 bp, Homo sapiens
aaaagctgattgtgg

SEQ ID NO: 867588 - DNA, 15 bp, Homo sapiens
aaagctgattgtggc

SEQ ID NO: 867589 - DNA, 15 bp, Homo sapiens
aagctgattgtggct

SEQ ID NO: 867590 - DNA, 15 bp, Homo sapiens
agctgattgtggcta

SEQ ID NO: 867591 - DNA, 15 bp, Homo sapiens
gctgattgtggctaa

SEQ ID NO: 867592 - DNA, 15 bp, Homo sapiens
ctgattgtggctaac

SEQ ID NO: 867593 - DNA, 15 bp, Homo sapiens
tgattgtggctaacg

SEQ ID NO: 867594 - DNA, 15 bp, Homo sapiens
gattgtggctaacgc

SEQ ID NO: 867595 - DNA, 15 bp, Homo sapiens
attgtggctaacgct

SEQ ID NO: 867596 - DNA, 15 bp, Homo sapiens
ttgtggctaacgcta

SEQ ID NO: 867597 - DNA, 15 bp, Homo sapiens
tgtggctaacgctat

SEQ ID NO: 867598 - DNA, 15 bp, Homo sapiens
gtggctaacgctata

SEQ ID NO: 867599 - DNA, 15 bp, Homo sapiens
tggctaacgctatat

SEQ ID NO: 867600 - DNA, 15 bp, Homo sapiens
ggctaacgctatatc

SEQ ID NO: 867601 - DNA, 15 bp, Homo sapiens
gctaacgctatatca

SEQ ID NO: 867602 - DNA, 15 bp, Homo sapiens
ctaacgctatatcaa

SEQ ID NO: 867603 - DNA, 15 bp, Homo sapiens
taacgctatatcaac

SEQ ID NO: 867604 - DNA, 15 bp, Homo sapiens
aacgctatatcaaca

SEQ ID NO: 867605 - DNA, 15 bp, Homo sapiens
acgctatatcaacat

SEQ ID NO: 867606 - DNA, 15 bp, Homo sapiens
cgctatatcaacatt

SEQ ID NO: 867607 - DNA, 15 bp, Homo sapiens
gctatatcaacatta

SEQ ID NO: 867608 - DNA, 15 bp, Homo sapiens
ctatatcaacattat

SEQ ID NO: 867609 - DNA, 15 bp, Homo sapiens
tatatcaacattatg

SEQ ID NO: 867610 - DNA, 15 bp, Homo sapiens
atatcaacattatgt

SEQ ID NO: 867611 - DNA, 15 bp, Homo sapiens
tatcaacattatgtg

SEQ ID NO: 867612 - DNA, 15 bp, Homo sapiens
atcaacattatgtga

SEQ ID NO: 867613 - DNA, 15 bp, Homo sapiens
tcaacattatgtgaa

SEQ ID NO: 867614 - DNA, 15 bp, Homo sapiens
caacattatgtgaaa

SEQ ID NO: 867615 - DNA, 15 bp, Homo sapiens
aacattatgtgaaaa

SEQ ID NO: 867616 - DNA, 15 bp, Homo sapiens
acattatgtgaaaag

SEQ ID NO: 867617 - DNA, 15 bp, Homo sapiens
cattatgtgaaaaga

SEQ ID NO: 867618 - DNA, 15 bp, Homo sapiens
attatgtgaaaagaa

SEQ ID NO: 867619 - DNA, 15 bp, Homo sapiens
ttatgtgaaaagaac

SEQ ID NO: 867620 - DNA, 15 bp, Homo sapiens
tatgtgaaaagaact

SEQ ID NO: 867621 - DNA, 15 bp, Homo sapiens
atgtgaaaagaactt

SEQ ID NO: 867622 - DNA, 15 bp, Homo sapiens
tgtgaaaagaactta

SEQ ID NO: 867623 - DNA, 15 bp, Homo sapiens
gtgaaaagaacttaa

SEQ ID NO: 867624 - DNA, 15 bp, Homo sapiens
tgaaaagaacttaaa

SEQ ID NO: 867625 - DNA, 15 bp, Homo sapiens
gaaaagaacttaaag

SEQ ID NO: 867626 - DNA, 15 bp, Homo sapiens
aaaagaacttaaaga

SEQ ID NO: 867627 - DNA, 15 bp, Homo sapiens
aaagaacttaaagaa

SEQ ID NO: 867628 - DNA, 15 bp, Homo sapiens
aagaacttaaagaaa

SEQ ID NO: 867629 - DNA, 15 bp, Homo sapiens
agaacttaaagaaat

SEQ ID NO: 867630 - DNA, 15 bp, Homo sapiens
gaacttaaagaaata

SEQ ID NO: 867631 - DNA, 15 bp, Homo sapiens
aacttaaagaaataa

SEQ ID NO: 867632 - DNA, 15 bp, Homo sapiens
acttaaagaaataag

SEQ ID NO: 867633 - DNA, 15 bp, Homo sapiens
cttaaagaaataagt

SEQ ID NO: 867634 - DNA, 15 bp, Homo sapiens
ttaaagaaataagta

SEQ ID NO: 867635 - DNA, 15 bp, Homo sapiens
taaagaaataagtaa

SEQ ID NO: 867636 - DNA, 15 bp, Homo sapiens
aaagaaataagtaat

SEQ ID NO: 867637 - DNA, 15 bp, Homo sapiens
aagaaataagtaatt

SEQ ID NO: 867638 - DNA, 15 bp, Homo sapiens
agaaataagtaattt

SEQ ID NO: 867639 - DNA, 15 bp, Homo sapiens
gaaataagtaattta

SEQ ID NO: 867640 - DNA, 15 bp, Homo sapiens
aaataagtaatttaa

SEQ ID NO: 867641 - DNA, 15 bp, Homo sapiens
aataagtaatttaaa

SEQ ID NO: 867642 - DNA, 15 bp, Homo sapiens
ataagtaatttaaag

SEQ ID NO: 867643 - DNA, 15 bp, Homo sapiens
taagtaatttaaaga

SEQ ID NO: 867644 - DNA, 15 bp, Homo sapiens
aagtaatttaaagag

SEQ ID NO: 867645 - DNA, 15 bp, Homo sapiens
agtaatttaaagaga

SEQ ID NO: 867646 - DNA, 15 bp, Homo sapiens
gtaatttaaagagat

SEQ ID NO: 867647 - DNA, 15 bp, Homo sapiens
taatttaaagagata

SEQ ID NO: 867648 - DNA, 15 bp, Homo sapiens
aatttaaagagataa

SEQ ID NO: 867649 - DNA, 15 bp, Homo sapiens
atttaaagagataat

SEQ ID NO: 867650 - DNA, 15 bp, Homo sapiens
tttaaagagataata

SEQ ID NO: 867651 - DNA, 15 bp, Homo sapiens
ttaaagagataatag

SEQ ID NO: 867652 - DNA, 15 bp, Homo sapiens
taaagagataataga

SEQ ID NO: 867653 - DNA, 15 bp, Homo sapiens
aaagagataatagaa

SEQ ID NO: 867654 - DNA, 15 bp, Homo sapiens
aagagataatagaac

SEQ ID NO: 867655 - DNA, 15 bp, Homo sapiens
agagataatagaaca

SEQ ID NO: 867656 - DNA, 15 bp, Homo sapiens
gagataatagaacaa

SEQ ID NO: 867657 - DNA, 15 bp, Homo sapiens
agataatagaacaat

SEQ ID NO: 867658 - DNA, 15 bp, Homo sapiens
gataatagaacaata

SEQ ID NO: 867659 - DNA, 15 bp, Homo sapiens
ataatagaacaatag

SEQ ID NO: 867660 - DNA, 15 bp, Homo sapiens
taatagaacaataga

SEQ ID NO: 867661 - DNA, 15 bp, Homo sapiens
aatagaacaatagac

SEQ ID NO: 867662 - DNA, 15 bp, Homo sapiens
atagaacaatagaca

SEQ ID NO: 867663 - DNA, 15 bp, Homo sapiens
tagaacaatagacat

SEQ ID NO: 867664 - DNA, 15 bp, Homo sapiens
agaacaatagacata

SEQ ID NO: 867665 - DNA, 15 bp, Homo sapiens
gaacaatagacatat

SEQ ID NO: 867666 - DNA, 15 bp, Homo sapiens
aacaatagacatatt

SEQ ID NO: 867667 - DNA, 15 bp, Homo sapiens
acaatagacatatta

SEQ ID NO: 867668 - DNA, 15 bp, Homo sapiens
caatagacatattat

SEQ ID NO: 867669 - DNA, 15 bp, Homo sapiens
aatagacatattatc

SEQ ID NO: 867670 - DNA, 15 bp, Homo sapiens
atagacatattatca

SEQ ID NO: 867671 - DNA, 15 bp, Homo sapiens
tagacatattatcaa

SEQ ID NO: 867672 - DNA, 15 bp, Homo sapiens
agacatattatcaag

SEQ ID NO: 867673 - DNA, 15 bp, Homo sapiens
gacatattatcaagg

SEQ ID NO: 867674 - DNA, 15 bp, Homo sapiens
acatattatcaaggt

SEQ ID NO: 867675 - DNA, 15 bp, Homo sapiens
catattatcaaggta

SEQ ID NO: 867676 - DNA, 15 bp, Homo sapiens
atattatcaaggtaa

SEQ ID NO: 867677 - DNA, 15 bp, Homo sapiens
tattatcaaggtaaa

SEQ ID NO: 867678 - DNA, 15 bp, Homo sapiens
attatcaaggtaaat

SEQ ID NO: 867679 - DNA, 15 bp, Homo sapiens
ttatcaaggtaaata

SEQ ID NO: 867680 - DNA, 15 bp, Homo sapiens
tatcaaggtaaatac

SEQ ID NO: 867681 - DNA, 15 bp, Homo sapiens
atcaaggtaaataca

SEQ ID NO: 867682 - DNA, 15 bp, Homo sapiens
tcaaggtaaatacag

SEQ ID NO: 867683 - DNA, 15 bp, Homo sapiens
caaggtaaatacaga

SEQ ID NO: 867684 - DNA, 15 bp, Homo sapiens
aaggtaaatacagat

SEQ ID NO: 867685 - DNA, 15 bp, Homo sapiens
aggtaaatacagatc

SEQ ID NO: 867686 - DNA, 15 bp, Homo sapiens
ggtaaatacagatca

SEQ ID NO: 867687 - DNA, 15 bp, Homo sapiens
gtaaatacagatcat

SEQ ID NO: 867688 - DNA, 15 bp, Homo sapiens
taaatacagatcatt

SEQ ID NO: 867689 - DNA, 15 bp, Homo sapiens
aaatacagatcatta

SEQ ID NO: 867690 - DNA, 15 bp, Homo sapiens
aatacagatcattac

SEQ ID NO: 867691 - DNA, 15 bp, Homo sapiens
atacagatcattact

SEQ ID NO: 867692 - DNA, 15 bp, Homo sapiens
tacagatcattactg

SEQ ID NO: 867693 - DNA, 15 bp, Homo sapiens
acagatcattactgt

SEQ ID NO: 867694 - DNA, 15 bp, Homo sapiens
cagatcattactgtt

SEQ ID NO: 867695 - DNA, 15 bp, Homo sapiens
agatcattactgttc

SEQ ID NO: 867696 - DNA, 15 bp, Homo sapiens
gatcattactgttct

SEQ ID NO: 867697 - DNA, 15 bp, Homo sapiens
atcattactgttctg

SEQ ID NO: 867698 - DNA, 15 bp, Homo sapiens
tcattactgttctgt

SEQ ID NO: 867699 - DNA, 15 bp, Homo sapiens
cattactgttctgtg

SEQ ID NO: 867700 - DNA, 15 bp, Homo sapiens
attactgttctgtga

SEQ ID NO: 867701 - DNA, 15 bp, Homo sapiens
ttactgttctgtgat

SEQ ID NO: 867702 - DNA, 15 bp, Homo sapiens
tactgttctgtgata

SEQ ID NO: 867703 - DNA, 15 bp, Homo sapiens
actgttctgtgatat

SEQ ID NO: 867704 - DNA, 15 bp, Homo sapiens
ctgttctgtgatatt

SEQ ID NO: 867705 - DNA, 15 bp, Homo sapiens
tgttctgtgatatta

SEQ ID NO: 867706 - DNA, 15 bp, Homo sapiens
gttctgtgatattat

SEQ ID NO: 867707 - DNA, 15 bp, Homo sapiens
ttctgtgatattatg

SEQ ID NO: 867708 - DNA, 15 bp, Homo sapiens
tctgtgatattatgt

SEQ ID NO: 867709 - DNA, 15 bp, Homo sapiens
ctgtgatattatgtg

SEQ ID NO: 867710 - DNA, 15 bp, Homo sapiens
tgtgatattatgtgt

SEQ ID NO: 867711 - DNA, 15 bp, Homo sapiens
gtgatattatgtgtg

SEQ ID NO: 867712 - DNA, 15 bp, Homo sapiens
tgatattatgtgtgg

SEQ ID NO: 867713 - DNA, 15 bp, Homo sapiens
gatattatgtgtggt

SEQ ID NO: 867714 - DNA, 15 bp, Homo sapiens
atattatgtgtggta

SEQ ID NO: 867715 - DNA, 15 bp, Homo sapiens
tattatgtgtggtat

SEQ ID NO: 867716 - DNA, 15 bp, Homo sapiens
attatgtgtggtatt

SEQ ID NO: 867717 - DNA, 15 bp, Homo sapiens
ttatgtgtggtattt

SEQ ID NO: 867718 - DNA, 15 bp, Homo sapiens
tatgtgtggtatttt

SEQ ID NO: 867719 - DNA, 15 bp, Homo sapiens
atgtgtggtattttc

SEQ ID NO: 867720 - DNA, 15 bp, Homo sapiens
tgtgtggtattttct

SEQ ID NO: 867721 - DNA, 15 bp, Homo sapiens
gtgtggtattttctt

SEQ ID NO: 867722 - DNA, 15 bp, Homo sapiens
tgtggtattttcttt

SEQ ID NO: 867723 - DNA, 15 bp, Homo sapiens
gtggtattttctttc

SEQ ID NO: 867724 - DNA, 15 bp, Homo sapiens
tggtattttctttct

SEQ ID NO: 867725 - DNA, 15 bp, Homo sapiens
ggtattttctttctt

SEQ ID NO: 867726 - DNA, 15 bp, Homo sapiens
gtattttctttcttt

SEQ ID NO: 867727 - DNA, 15 bp, Homo sapiens
tattttctttctttt

SEQ ID NO: 867728 - DNA, 15 bp, Homo sapiens
ttttctttcttttct

SEQ ID NO: 867729 - DNA, 15 bp, Homo sapiens
tttctttcttttcta

SEQ ID NO: 867730 - DNA, 15 bp, Homo sapiens
ttctttcttttctag

SEQ ID NO: 867731 - DNA, 15 bp, Homo sapiens
tctttcttttctaga

SEQ ID NO: 867732 - DNA, 15 bp, Homo sapiens
ctttcttttctagaa

SEQ ID NO: 867733 - DNA, 15 bp, Homo sapiens
tttcttttctagaac

SEQ ID NO: 867734 - DNA, 15 bp, Homo sapiens
ttcttttctagaaca

SEQ ID NO: 867735 - DNA, 15 bp, Homo sapiens
tcttttctagaacat

SEQ ID NO: 867736 - DNA, 15 bp, Homo sapiens
cttttctagaacata

SEQ ID NO: 867737 - DNA, 15 bp, Homo sapiens
ttttctagaacatac

SEQ ID NO: 867738 - DNA, 15 bp, Homo sapiens
tttctagaacatacc

SEQ ID NO: 867739 - DNA, 15 bp, Homo sapiens
ttctagaacatacca

SEQ ID NO: 867740 - DNA, 15 bp, Homo sapiens
tctagaacataccaa

SEQ ID NO: 867741 - DNA, 15 bp, Homo sapiens
ctagaacataccaaa

SEQ ID NO: 867742 - DNA, 15 bp, Homo sapiens
tagaacataccaaat

SEQ ID NO: 867743 - DNA, 15 bp, Homo sapiens
agaacataccaaata

SEQ ID NO: 867744 - DNA, 15 bp, Homo sapiens
gaacataccaaataa

SEQ ID NO: 867745 - DNA, 15 bp, Homo sapiens
aacataccaaataat

SEQ ID NO: 867746 - DNA, 15 bp, Homo sapiens
acataccaaataatt

SEQ ID NO: 867747 - DNA, 15 bp, Homo sapiens
cataccaaataatta

SEQ ID NO: 867748 - DNA, 15 bp, Homo sapiens
ataccaaataattag

SEQ ID NO: 867749 - DNA, 15 bp, Homo sapiens
taccaaataattaga

SEQ ID NO: 867750 - DNA, 15 bp, Homo sapiens
accaaataattagaa

SEQ ID NO: 867751 - DNA, 15 bp, Homo sapiens
ccaaataattagaag

SEQ ID NO: 867752 - DNA, 15 bp, Homo sapiens
caaataattagaaga

SEQ ID NO: 867753 - DNA, 15 bp, Homo sapiens
aaataattagaagaa

SEQ ID NO: 867754 - DNA, 15 bp, Homo sapiens
aataattagaagaac

SEQ ID NO: 867755 - DNA, 15 bp, Homo sapiens
ataattagaagaact

SEQ ID NO: 867756 - DNA, 15 bp, Homo sapiens
taattagaagaactc

SEQ ID NO: 867757 - DNA, 15 bp, Homo sapiens
aattagaagaactct

SEQ ID NO: 867758 - DNA, 15 bp, Homo sapiens
attagaagaactcta

SEQ ID NO: 867759 - DNA, 15 bp, Homo sapiens
ttagaagaactctaa

SEQ ID NO: 867760 - DNA, 15 bp, Homo sapiens
tagaagaactctaaa

SEQ ID NO: 867761 - DNA, 15 bp, Homo sapiens
agaagaactctaaaa

SEQ ID NO: 867762 - DNA, 15 bp, Homo sapiens
gaagaactctaaaac

SEQ ID NO: 867763 - DNA, 15 bp, Homo sapiens
aagaactctaaaaca

SEQ ID NO: 867764 - DNA, 15 bp, Homo sapiens
agaactctaaaacaa

SEQ ID NO: 867765 - DNA, 15 bp, Homo sapiens
gaactctaaaacaag

SEQ ID NO: 867766 - DNA, 15 bp, Homo sapiens
aactctaaaacaagc

SEQ ID NO: 867767 - DNA, 15 bp, Homo sapiens
actctaaaacaagca

SEQ ID NO: 867768 - DNA, 15 bp, Homo sapiens
ctctaaaacaagcat

SEQ ID NO: 867769 - DNA, 15 bp, Homo sapiens
tctaaaacaagcatt

SEQ ID NO: 867770 - DNA, 15 bp, Homo sapiens
ctaaaacaagcattt

SEQ ID NO: 867771 - DNA, 15 bp, Homo sapiens
taaaacaagcatttg

SEQ ID NO: 867772 - DNA, 15 bp, Homo sapiens
aaaacaagcatttgc

SEQ ID NO: 867773 - DNA, 15 bp, Homo sapiens
aaacaagcatttgct

SEQ ID NO: 867774 - DNA, 15 bp, Homo sapiens
aacaagcatttgctg

SEQ ID NO: 867775 - DNA, 15 bp, Homo sapiens
acaagcatttgctga

SEQ ID NO: 867776 - DNA, 15 bp, Homo sapiens
caagcatttgctgat

SEQ ID NO: 867777 - DNA, 15 bp, Homo sapiens
aagcatttgctgatt

SEQ ID NO: 867778 - DNA, 15 bp, Homo sapiens
agcatttgctgattg

SEQ ID NO: 867779 - DNA, 15 bp, Homo sapiens
gcatttgctgattgc

SEQ ID NO: 867780 - DNA, 15 bp, Homo sapiens
catttgctgattgca

SEQ ID NO: 867781 - DNA, 15 bp, Homo sapiens
atttgctgattgcac

SEQ ID NO: 867782 - DNA, 15 bp, Homo sapiens
tttgctgattgcaca

SEQ ID NO: 867783 - DNA, 15 bp, Homo sapiens
ttgctgattgcacag

SEQ ID NO: 867784 - DNA, 15 bp, Homo sapiens
tgctgattgcacagt

SEQ ID NO: 867785 - DNA, 15 bp, Homo sapiens
gctgattgcacagta

SEQ ID NO: 867786 - DNA, 15 bp, Homo sapiens
ctgattgcacagtaa

SEQ ID NO: 867787 - DNA, 15 bp, Homo sapiens
tgattgcacagtaat

SEQ ID NO: 867788 - DNA, 15 bp, Homo sapiens
gattgcacagtaatt

SEQ ID NO: 867789 - DNA, 15 bp, Homo sapiens
attgcacagtaattc

SEQ ID NO: 867790 - DNA, 15 bp, Homo sapiens
ttgcacagtaattct

SEQ ID NO: 867791 - DNA, 15 bp, Homo sapiens
tgcacagtaattctc

SEQ ID NO: 867792 - DNA, 15 bp, Homo sapiens
gcacagtaattctct

SEQ ID NO: 867793 - DNA, 15 bp, Homo sapiens
cacagtaattctctg

SEQ ID NO: 867794 - DNA, 15 bp, Homo sapiens
acagtaattctctgt

SEQ ID NO: 867795 - DNA, 15 bp, Homo sapiens
cagtaattctctgtg

SEQ ID NO: 867796 - DNA, 15 bp, Homo sapiens
agtaattctctgtga

SEQ ID NO: 867797 - DNA, 15 bp, Homo sapiens
gtaattctctgtgaa

SEQ ID NO: 867798 - DNA, 15 bp, Homo sapiens
taattctctgtgaac

SEQ ID NO: 867799 - DNA, 15 bp, Homo sapiens
aattctctgtgaaca

SEQ ID NO: 867800 - DNA, 15 bp, Homo sapiens
attctctgtgaacac

SEQ ID NO: 867801 - DNA, 15 bp, Homo sapiens
ttctctgtgaacaca

SEQ ID NO: 867802 - DNA, 15 bp, Homo sapiens
tctctgtgaacacag

SEQ ID NO: 867803 - DNA, 15 bp, Homo sapiens
ctctgtgaacacagg

SEQ ID NO: 867804 - DNA, 15 bp, Homo sapiens
tctgtgaacacagga

SEQ ID NO: 867805 - DNA, 15 bp, Homo sapiens
ctgtgaacacaggat

SEQ ID NO: 867806 - DNA, 15 bp, Homo sapiens
tgtgaacacaggata

SEQ ID NO: 867807 - DNA, 15 bp, Homo sapiens
gtgaacacaggatag

SEQ ID NO: 867808 - DNA, 15 bp, Homo sapiens
tgaacacaggataga

SEQ ID NO: 867809 - DNA, 15 bp, Homo sapiens
gaacacaggatagaa

SEQ ID NO: 867810 - DNA, 15 bp, Homo sapiens
aacacaggatagaag

SEQ ID NO: 867811 - DNA, 15 bp, Homo sapiens
acacaggatagaagc

SEQ ID NO: 867812 - DNA, 15 bp, Homo sapiens
cacaggatagaagca

SEQ ID NO: 867813 - DNA, 15 bp, Homo sapiens
acaggatagaagcaa

SEQ ID NO: 867814 - DNA, 15 bp, Homo sapiens
caggatagaagcaat

SEQ ID NO: 867815 - DNA, 15 bp, Homo sapiens
aggatagaagcaatg

SEQ ID NO: 867816 - DNA, 15 bp, Homo sapiens
ggatagaagcaatgc

SEQ ID NO: 867817 - DNA, 15 bp, Homo sapiens
gatagaagcaatgct

SEQ ID NO: 867818 - DNA, 15 bp, Homo sapiens
atagaagcaatgctg

SEQ ID NO: 867819 - DNA, 15 bp, Homo sapiens
tagaagcaatgctgg

SEQ ID NO: 867820 - DNA, 15 bp, Homo sapiens
agaagcaatgctgga

SEQ ID NO: 867821 - DNA, 15 bp, Homo sapiens
gaagcaatgctggaa

SEQ ID NO: 867822 - DNA, 15 bp, Homo sapiens
aagcaatgctggaat

SEQ ID NO: 867823 - DNA, 15 bp, Homo sapiens
agcaatgctggaatg

SEQ ID NO: 867824 - DNA, 15 bp, Homo sapiens
gcaatgctggaatgc

SEQ ID NO: 867825 - DNA, 15 bp, Homo sapiens
caatgctggaatgcc

SEQ ID NO: 867826 - DNA, 15 bp, Homo sapiens
aatgctggaatgcca

SEQ ID NO: 867827 - DNA, 15 bp, Homo sapiens
atgctggaatgccaa

SEQ ID NO: 867828 - DNA, 15 bp, Homo sapiens
tgctggaatgccaac

SEQ ID NO: 867829 - DNA, 15 bp, Homo sapiens
gctggaatgccaaca

SEQ ID NO: 867830 - DNA, 15 bp, Homo sapiens
ctggaatgccaacaa

SEQ ID NO: 867831 - DNA, 15 bp, Homo sapiens
tggaatgccaacaat

SEQ ID NO: 867832 - DNA, 15 bp, Homo sapiens
ggaatgccaacaatt

SEQ ID NO: 867833 - DNA, 15 bp, Homo sapiens
gaatgccaacaattt

SEQ ID NO: 867834 - DNA, 15 bp, Homo sapiens
aatgccaacaatttt

SEQ ID NO: 867835 - DNA, 15 bp, Homo sapiens
atgccaacaattttt

SEQ ID NO: 867836 - DNA, 15 bp, Homo sapiens
tgccaacaatttttg

SEQ ID NO: 867837 - DNA, 15 bp, Homo sapiens
gccaacaatttttgg

SEQ ID NO: 867838 - DNA, 15 bp, Homo sapiens
ccaacaatttttggt

SEQ ID NO: 867839 - DNA, 15 bp, Homo sapiens
caacaatttttggtg

SEQ ID NO: 867840 - DNA, 15 bp, Homo sapiens
aacaatttttggtga

SEQ ID NO: 867841 - DNA, 15 bp, Homo sapiens
acaatttttggtgag

SEQ ID NO: 867842 - DNA, 15 bp, Homo sapiens
caatttttggtgagt

SEQ ID NO: 867843 - DNA, 15 bp, Homo sapiens
aatttttggtgagtc

SEQ ID NO: 867844 - DNA, 15 bp, Homo sapiens
atttttggtgagtct

SEQ ID NO: 867845 - DNA, 15 bp, Homo sapiens
tttttggtgagtctt

SEQ ID NO: 867846 - DNA, 15 bp, Homo sapiens
ttttggtgagtcttt

SEQ ID NO: 867847 - DNA, 15 bp, Homo sapiens
tttggtgagtcttta

SEQ ID NO: 867848 - DNA, 15 bp, Homo sapiens
ttggtgagtctttat

SEQ ID NO: 867849 - DNA, 15 bp, Homo sapiens
tggtgagtctttata

SEQ ID NO: 867850 - DNA, 15 bp, Homo sapiens
ggtgagtctttataa

SEQ ID NO: 867851 - DNA, 15 bp, Homo sapiens
gtgagtctttataac

SEQ ID NO: 867852 - DNA, 15 bp, Homo sapiens
tgagtctttataact

SEQ ID NO: 867853 - DNA, 15 bp, Homo sapiens
gagtctttataactt

SEQ ID NO: 867854 - DNA, 15 bp, Homo sapiens
agtctttataacttt

SEQ ID NO: 867855 - DNA, 15 bp, Homo sapiens
gtctttataacttta

SEQ ID NO: 867856 - DNA, 15 bp, Homo sapiens
tctttataactttac

SEQ ID NO: 867857 - DNA, 15 bp, Homo sapiens
ctttataactttact

SEQ ID NO: 867858 - DNA, 15 bp, Homo sapiens
tttataactttactt

SEQ ID NO: 867859 - DNA, 15 bp, Homo sapiens
ttataactttactta

SEQ ID NO: 867860 - DNA, 15 bp, Homo sapiens
tataactttacttaa

SEQ ID NO: 867861 - DNA, 15 bp, Homo sapiens
ataactttacttaag

SEQ ID NO: 867862 - DNA, 15 bp, Homo sapiens
taactttacttaaga

SEQ ID NO: 867863 - DNA, 15 bp, Homo sapiens
aactttacttaagat

SEQ ID NO: 867864 - DNA, 15 bp, Homo sapiens
actttacttaagatc

SEQ ID NO: 867865 - DNA, 15 bp, Homo sapiens
ctttacttaagatct

SEQ ID NO: 867866 - DNA, 15 bp, Homo sapiens
tttacttaagatctc

SEQ ID NO: 867867 - DNA, 15 bp, Homo sapiens
ttacttaagatctca

SEQ ID NO: 867868 - DNA, 15 bp, Homo sapiens
tacttaagatctcat

SEQ ID NO: 867869 - DNA, 15 bp, Homo sapiens
acttaagatctcatt

SEQ ID NO: 867870 - DNA, 15 bp, Homo sapiens
cttaagatctcattg

SEQ ID NO: 867871 - DNA, 15 bp, Homo sapiens
ttaagatctcattgc

SEQ ID NO: 867872 - DNA, 15 bp, Homo sapiens
taagatctcattgcc

SEQ ID NO: 867873 - DNA, 15 bp, Homo sapiens
aagatctcattgccc

SEQ ID NO: 867874 - DNA, 15 bp, Homo sapiens
agatctcattgccct

SEQ ID NO: 867875 - DNA, 15 bp, Homo sapiens
gatctcattgccctt

SEQ ID NO: 867876 - DNA, 15 bp, Homo sapiens
atctcattgcccttg

SEQ ID NO: 867877 - DNA, 15 bp, Homo sapiens
tctcattgcccttgt

SEQ ID NO: 867878 - DNA, 15 bp, Homo sapiens
ctcattgcccttgta

SEQ ID NO: 867879 - DNA, 15 bp, Homo sapiens
tcattgcccttgtaa

SEQ ID NO: 867880 - DNA, 15 bp, Homo sapiens
cattgcccttgtaat

SEQ ID NO: 867881 - DNA, 15 bp, Homo sapiens
attgcccttgtaatt

SEQ ID NO: 867882 - DNA, 15 bp, Homo sapiens
ttgcccttgtaattc

SEQ ID NO: 867883 - DNA, 15 bp, Homo sapiens
tgcccttgtaattct

SEQ ID NO: 867884 - DNA, 15 bp, Homo sapiens
gcccttgtaattctt

SEQ ID NO: 867885 - DNA, 15 bp, Homo sapiens
cccttgtaattcttg

SEQ ID NO: 867886 - DNA, 15 bp, Homo sapiens
ccttgtaattcttga

SEQ ID NO: 867887 - DNA, 15 bp, Homo sapiens
cttgtaattcttgat

SEQ ID NO: 867888 - DNA, 15 bp, Homo sapiens
ttgtaattcttgata

SEQ ID NO: 867889 - DNA, 15 bp, Homo sapiens
tgtaattcttgataa

SEQ ID NO: 867890 - DNA, 15 bp, Homo sapiens
gtaattcttgataac

SEQ ID NO: 867891 - DNA, 15 bp, Homo sapiens
taattcttgataaca

SEQ ID NO: 867892 - DNA, 15 bp, Homo sapiens
aattcttgataacaa

SEQ ID NO: 867893 - DNA, 15 bp, Homo sapiens
attcttgataacaat

SEQ ID NO: 867894 - DNA, 15 bp, Homo sapiens
ttcttgataacaatc

SEQ ID NO: 867895 - DNA, 15 bp, Homo sapiens
tcttgataacaatct

SEQ ID NO: 867896 - DNA, 15 bp, Homo sapiens
cttgataacaatctc

SEQ ID NO: 867897 - DNA, 15 bp, Homo sapiens
ttgataacaatctca

SEQ ID NO: 867898 - DNA, 15 bp, Homo sapiens
tgataacaatctcac

SEQ ID NO: 867899 - DNA, 15 bp, Homo sapiens
gataacaatctcaca

SEQ ID NO: 867900 - DNA, 15 bp, Homo sapiens
ataacaatctcacat

SEQ ID NO: 867901 - DNA, 15 bp, Homo sapiens
taacaatctcacatg

SEQ ID NO: 867902 - DNA, 15 bp, Homo sapiens
aacaatctcacatgt

SEQ ID NO: 867903 - DNA, 15 bp, Homo sapiens
acaatctcacatgtg

SEQ ID NO: 867904 - DNA, 15 bp, Homo sapiens
caatctcacatgtga

SEQ ID NO: 867905 - DNA, 15 bp, Homo sapiens
aatctcacatgtgat

SEQ ID NO: 867906 - DNA, 15 bp, Homo sapiens
atctcacatgtgata

SEQ ID NO: 867907 - DNA, 15 bp, Homo sapiens
tctcacatgtgatag

SEQ ID NO: 867908 - DNA, 15 bp, Homo sapiens
ctcacatgtgatagt

SEQ ID NO: 867909 - DNA, 15 bp, Homo sapiens
tcacatgtgatagtt

SEQ ID NO: 867910 - DNA, 15 bp, Homo sapiens
cacatgtgatagttc

SEQ ID NO: 867911 - DNA, 15 bp, Homo sapiens
acatgtgatagttcc

SEQ ID NO: 867912 - DNA, 15 bp, Homo sapiens
catgtgatagttcct

SEQ ID NO: 867913 - DNA, 15 bp, Homo sapiens
atgtgatagttcctg

SEQ ID NO: 867914 - DNA, 15 bp, Homo sapiens
tgtgatagttcctgc

SEQ ID NO: 867915 - DNA, 15 bp, Homo sapiens
gtgatagttcctgca

SEQ ID NO: 867916 - DNA, 15 bp, Homo sapiens
tgatagttcctgcaa

SEQ ID NO: 867917 - DNA, 15 bp, Homo sapiens
gatagttcctgcaaa

SEQ ID NO: 867918 - DNA, 15 bp, Homo sapiens
atagttcctgcaaat

SEQ ID NO: 867919 - DNA, 15 bp, Homo sapiens
tagttcctgcaaatt

SEQ ID NO: 867920 - DNA, 15 bp, Homo sapiens
agttcctgcaaattg

SEQ ID NO: 867921 - DNA, 15 bp, Homo sapiens
gttcctgcaaattgc

SEQ ID NO: 867922 - DNA, 15 bp, Homo sapiens
ttcctgcaaattgca

SEQ ID NO: 867923 - DNA, 15 bp, Homo sapiens
tcctgcaaattgcaa

SEQ ID NO: 867924 - DNA, 15 bp, Homo sapiens
cctgcaaattgcaac

SEQ ID NO: 867925 - DNA, 15 bp, Homo sapiens
ctgcaaattgcaaca

SEQ ID NO: 867926 - DNA, 15 bp, Homo sapiens
tgcaaattgcaacaa

SEQ ID NO: 867927 - DNA, 15 bp, Homo sapiens
gcaaattgcaacaat

SEQ ID NO: 867928 - DNA, 15 bp, Homo sapiens
caaattgcaacaatg

SEQ ID NO: 867929 - DNA, 15 bp, Homo sapiens
aaattgcaacaatgt

SEQ ID NO: 867930 - DNA, 15 bp, Homo sapiens
aattgcaacaatgta

SEQ ID NO: 867931 - DNA, 15 bp, Homo sapiens
attgcaacaatgtac

SEQ ID NO: 867932 - DNA, 15 bp, Homo sapiens
ttgcaacaatgtaca

SEQ ID NO: 867933 - DNA, 15 bp, Homo sapiens
tgcaacaatgtacaa

SEQ ID NO: 867934 - DNA, 15 bp, Homo sapiens
gcaacaatgtacaag

SEQ ID NO: 867935 - DNA, 15 bp, Homo sapiens
caacaatgtacaagt

SEQ ID NO: 867936 - DNA, 15 bp, Homo sapiens
aacaatgtacaagtt

SEQ ID NO: 867937 - DNA, 15 bp, Homo sapiens
acaatgtacaagttc

SEQ ID NO: 867938 - DNA, 15 bp, Homo sapiens
caatgtacaagttct

SEQ ID NO: 867939 - DNA, 15 bp, Homo sapiens
aatgtacaagttctt

SEQ ID NO: 867940 - DNA, 15 bp, Homo sapiens
atgtacaagttcttt

SEQ ID NO: 867941 - DNA, 15 bp, Homo sapiens
tgtacaagttctttt

SEQ ID NO: 867942 - DNA, 15 bp, Homo sapiens
gtacaagttcttttc

SEQ ID NO: 867943 - DNA, 15 bp, Homo sapiens
tacaagttcttttca

SEQ ID NO: 867944 - DNA, 15 bp, Homo sapiens
acaagttcttttcaa

SEQ ID NO: 867945 - DNA, 15 bp, Homo sapiens
caagttcttttcaaa

SEQ ID NO: 867946 - DNA, 15 bp, Homo sapiens
aagttcttttcaaaa

SEQ ID NO: 867947 - DNA, 15 bp, Homo sapiens
agttcttttcaaaaa

SEQ ID NO: 867948 - DNA, 15 bp, Homo sapiens
gttcttttcaaaaat

SEQ ID NO: 867949 - DNA, 15 bp, Homo sapiens
ttcttttcaaaaata

SEQ ID NO: 867950 - DNA, 15 bp, Homo sapiens
tcttttcaaaaatat

SEQ ID NO: 867951 - DNA, 15 bp, Homo sapiens
cttttcaaaaatatg

SEQ ID NO: 867952 - DNA, 15 bp, Homo sapiens
ttttcaaaaatatgt

SEQ ID NO: 867953 - DNA, 15 bp, Homo sapiens
tttcaaaaatatgta

SEQ ID NO: 867954 - DNA, 15 bp, Homo sapiens
ttcaaaaatatgtat

SEQ ID NO: 867955 - DNA, 15 bp, Homo sapiens
tcaaaaatatgtatc

SEQ ID NO: 867956 - DNA, 15 bp, Homo sapiens
caaaaatatgtatca

SEQ ID NO: 867957 - DNA, 15 bp, Homo sapiens
aaaaatatgtatcat

SEQ ID NO: 867958 - DNA, 15 bp, Homo sapiens
aaaatatgtatcata

SEQ ID NO: 867959 - DNA, 15 bp, Homo sapiens
aaatatgtatcatac

SEQ ID NO: 867960 - DNA, 15 bp, Homo sapiens
aatatgtatcataca

SEQ ID NO: 867961 - DNA, 15 bp, Homo sapiens
atatgtatcatacag

SEQ ID NO: 867962 - DNA, 15 bp, Homo sapiens
tatgtatcatacagc

SEQ ID NO: 867963 - DNA, 15 bp, Homo sapiens
atgtatcatacagcc

SEQ ID NO: 867964 - DNA, 15 bp, Homo sapiens
tgtatcatacagcca

SEQ ID NO: 867965 - DNA, 15 bp, Homo sapiens
gtatcatacagccat

SEQ ID NO: 867966 - DNA, 15 bp, Homo sapiens
tatcatacagccatc

SEQ ID NO: 867967 - DNA, 15 bp, Homo sapiens
atcatacagccatcc

SEQ ID NO: 867968 - DNA, 15 bp, Homo sapiens
tcatacagccatcca

SEQ ID NO: 867969 - DNA, 15 bp, Homo sapiens
catacagccatccag

SEQ ID NO: 867970 - DNA, 15 bp, Homo sapiens
atacagccatccagc

SEQ ID NO: 867971 - DNA, 15 bp, Homo sapiens
tacagccatccagct

SEQ ID NO: 867972 - DNA, 15 bp, Homo sapiens
acagccatccagctt

SEQ ID NO: 867973 - DNA, 15 bp, Homo sapiens
cagccatccagcttt

SEQ ID NO: 867974 - DNA, 15 bp, Homo sapiens
agccatccagcttta

SEQ ID NO: 867975 - DNA, 15 bp, Homo sapiens
gccatccagctttac

SEQ ID NO: 867976 - DNA, 15 bp, Homo sapiens
ccatccagctttact

SEQ ID NO: 867977 - DNA, 15 bp, Homo sapiens
catccagctttactc

SEQ ID NO: 867978 - DNA, 15 bp, Homo sapiens
atccagctttactca

SEQ ID NO: 867979 - DNA, 15 bp, Homo sapiens
tccagctttactcaa

SEQ ID NO: 867980 - DNA, 15 bp, Homo sapiens
ccagctttactcaaa

SEQ ID NO: 867981 - DNA, 15 bp, Homo sapiens
cagctttactcaaaa

SEQ ID NO: 867982 - DNA, 15 bp, Homo sapiens
agctttactcaaaat

SEQ ID NO: 867983 - DNA, 15 bp, Homo sapiens
gctttactcaaaata

SEQ ID NO: 867984 - DNA, 15 bp, Homo sapiens
ctttactcaaaatag

SEQ ID NO: 867985 - DNA, 15 bp, Homo sapiens
tttactcaaaatagc

SEQ ID NO: 867986 - DNA, 15 bp, Homo sapiens
ttactcaaaatagct

SEQ ID NO: 867987 - DNA, 15 bp, Homo sapiens
tactcaaaatagctg

SEQ ID NO: 867988 - DNA, 15 bp, Homo sapiens
actcaaaatagctgc

SEQ ID NO: 867989 - DNA, 15 bp, Homo sapiens
ctcaaaatagctgca

SEQ ID NO: 867990 - DNA, 15 bp, Homo sapiens
tcaaaatagctgcac

SEQ ID NO: 867991 - DNA, 15 bp, Homo sapiens
caaaatagctgcaca

SEQ ID NO: 867992 - DNA, 15 bp, Homo sapiens
aaaatagctgcacaa

SEQ ID NO: 867993 - DNA, 15 bp, Homo sapiens
aaatagctgcacaag

SEQ ID NO: 867994 - DNA, 15 bp, Homo sapiens
aatagctgcacaagt

SEQ ID NO: 867995 - DNA, 15 bp, Homo sapiens
atagctgcacaagtt

SEQ ID NO: 867996 - DNA, 15 bp, Homo sapiens
tagctgcacaagttt

SEQ ID NO: 867997 - DNA, 15 bp, Homo sapiens
agctgcacaagtttt

SEQ ID NO: 867998 - DNA, 15 bp, Homo sapiens
gctgcacaagttttt

SEQ ID NO: 867999 - DNA, 15 bp, Homo sapiens
ctgcacaagtttttc

SEQ ID NO: 868000 - DNA, 15 bp, Homo sapiens
tgcacaagtttttca

SEQ ID NO: 868001 - DNA, 15 bp, Homo sapiens
gcacaagtttttcac

SEQ ID NO: 868002 - DNA, 15 bp, Homo sapiens
cacaagtttttcact

SEQ ID NO: 868003 - DNA, 15 bp, Homo sapiens
acaagtttttcactt

SEQ ID NO: 868004 - DNA, 15 bp, Homo sapiens
caagtttttcacttt

SEQ ID NO: 868005 - DNA, 15 bp, Homo sapiens
aagtttttcactttg

SEQ ID NO: 868006 - DNA, 15 bp, Homo sapiens
agtttttcactttga

SEQ ID NO: 868007 - DNA, 15 bp, Homo sapiens
gtttttcactttgat

SEQ ID NO: 868008 - DNA, 15 bp, Homo sapiens
tttttcactttgatc

SEQ ID NO: 868009 - DNA, 15 bp, Homo sapiens
ttttcactttgatct

SEQ ID NO: 868010 - DNA, 15 bp, Homo sapiens
tttcactttgatctg

SEQ ID NO: 868011 - DNA, 15 bp, Homo sapiens
ttcactttgatctga

SEQ ID NO: 868012 - DNA, 15 bp, Homo sapiens
tcactttgatctgag

SEQ ID NO: 868013 - DNA, 15 bp, Homo sapiens
cactttgatctgagc

SEQ ID NO: 868014 - DNA, 15 bp, Homo sapiens
actttgatctgagcc

SEQ ID NO: 868015 - DNA, 15 bp, Homo sapiens
ctttgatctgagcca

SEQ ID NO: 868016 - DNA, 15 bp, Homo sapiens
tttgatctgagccat

SEQ ID NO: 868017 - DNA, 15 bp, Homo sapiens
ttgatctgagccatg

SEQ ID NO: 868018 - DNA, 15 bp, Homo sapiens
tgatctgagccatgt

SEQ ID NO: 868019 - DNA, 15 bp, Homo sapiens
gatctgagccatgtg

SEQ ID NO: 868020 - DNA, 15 bp, Homo sapiens
atctgagccatgtgg

SEQ ID NO: 868021 - DNA, 15 bp, Homo sapiens
tctgagccatgtggt

SEQ ID NO: 868022 - DNA, 15 bp, Homo sapiens
ctgagccatgtggtg

SEQ ID NO: 868023 - DNA, 15 bp, Homo sapiens
tgagccatgtggtga

SEQ ID NO: 868024 - DNA, 15 bp, Homo sapiens
gagccatgtggtgag

SEQ ID NO: 868025 - DNA, 15 bp, Homo sapiens
agccatgtggtgagg

SEQ ID NO: 868026 - DNA, 15 bp, Homo sapiens
gccatgtggtgaggt

SEQ ID NO: 868027 - DNA, 15 bp, Homo sapiens
ccatgtggtgaggtt

SEQ ID NO: 868028 - DNA, 15 bp, Homo sapiens
catgtggtgaggttg

SEQ ID NO: 868029 - DNA, 15 bp, Homo sapiens
atgtggtgaggttga

SEQ ID NO: 868030 - DNA, 15 bp, Homo sapiens
tgtggtgaggttgaa

SEQ ID NO: 868031 - DNA, 15 bp, Homo sapiens
gtggtgaggttgaaa

SEQ ID NO: 868032 - DNA, 15 bp, Homo sapiens
tggtgaggttgaaat

SEQ ID NO: 868033 - DNA, 15 bp, Homo sapiens
ggtgaggttgaaata

SEQ ID NO: 868034 - DNA, 15 bp, Homo sapiens
gtgaggttgaaatat

SEQ ID NO: 868035 - DNA, 15 bp, Homo sapiens
tgaggttgaaatata

SEQ ID NO: 868036 - DNA, 15 bp, Homo sapiens
gaggttgaaatatag

SEQ ID NO: 868037 - DNA, 15 bp, Homo sapiens
aggttgaaatatagt

SEQ ID NO: 868038 - DNA, 15 bp, Homo sapiens
ggttgaaatatagta

SEQ ID NO: 868039 - DNA, 15 bp, Homo sapiens
gttgaaatatagtaa

SEQ ID NO: 868040 - DNA, 15 bp, Homo sapiens
ttgaaatatagtaaa

SEQ ID NO: 868041 - DNA, 15 bp, Homo sapiens
tgaaatatagtaaat

SEQ ID NO: 868042 - DNA, 15 bp, Homo sapiens
gaaatatagtaaatc

SEQ ID NO: 868043 - DNA, 15 bp, Homo sapiens
aaatatagtaaatct

SEQ ID NO: 868044 - DNA, 15 bp, Homo sapiens
aatatagtaaatcta

SEQ ID NO: 868045 - DNA, 15 bp, Homo sapiens
atatagtaaatctaa

SEQ ID NO: 868046 - DNA, 15 bp, Homo sapiens
tatagtaaatctaaa

SEQ ID NO: 868047 - DNA, 15 bp, Homo sapiens
atagtaaatctaaaa

SEQ ID NO: 868048 - DNA, 15 bp, Homo sapiens
tagtaaatctaaaat

SEQ ID NO: 868049 - DNA, 15 bp, Homo sapiens
agtaaatctaaaatg

SEQ ID NO: 868050 - DNA, 15 bp, Homo sapiens
gtaaatctaaaatgg

SEQ ID NO: 868051 - DNA, 15 bp, Homo sapiens
taaatctaaaatggc

SEQ ID NO: 868052 - DNA, 15 bp, Homo sapiens
aaatctaaaatggca

SEQ ID NO: 868053 - DNA, 15 bp, Homo sapiens
aatctaaaatggcag

SEQ ID NO: 868054 - DNA, 15 bp, Homo sapiens
atctaaaatggcagc

SEQ ID NO: 868055 - DNA, 15 bp, Homo sapiens
tctaaaatggcagca

SEQ ID NO: 868056 - DNA, 15 bp, Homo sapiens
ctaaaatggcagcat

SEQ ID NO: 868057 - DNA, 15 bp, Homo sapiens
taaaatggcagcata

SEQ ID NO: 868058 - DNA, 15 bp, Homo sapiens
aaaatggcagcatat

SEQ ID NO: 868059 - DNA, 15 bp, Homo sapiens
aaatggcagcatatt

SEQ ID NO: 868060 - DNA, 15 bp, Homo sapiens
aatggcagcatatta

SEQ ID NO: 868061 - DNA, 15 bp, Homo sapiens
atggcagcatattac

SEQ ID NO: 868062 - DNA, 15 bp, Homo sapiens
tggcagcatattact

SEQ ID NO: 868063 - DNA, 15 bp, Homo sapiens
ggcagcatattacta

SEQ ID NO: 868064 - DNA, 15 bp, Homo sapiens
gcagcatattactaa

SEQ ID NO: 868065 - DNA, 15 bp, Homo sapiens
cagcatattactaag

SEQ ID NO: 868066 - DNA, 15 bp, Homo sapiens
agcatattactaagt

SEQ ID NO: 868067 - DNA, 15 bp, Homo sapiens
gcatattactaagtt

SEQ ID NO: 868068 - DNA, 15 bp, Homo sapiens
catattactaagtta

SEQ ID NO: 868069 - DNA, 15 bp, Homo sapiens
atattactaagttat

SEQ ID NO: 868070 - DNA, 15 bp, Homo sapiens
tattactaagttatg

SEQ ID NO: 868071 - DNA, 15 bp, Homo sapiens
attactaagttatgt

SEQ ID NO: 868072 - DNA, 15 bp, Homo sapiens
ttactaagttatgtt

SEQ ID NO: 868073 - DNA, 15 bp, Homo sapiens
tactaagttatgttt

SEQ ID NO: 868074 - DNA, 15 bp, Homo sapiens
actaagttatgttta

SEQ ID NO: 868075 - DNA, 15 bp, Homo sapiens
ctaagttatgtttat

SEQ ID NO: 868076 - DNA, 15 bp, Homo sapiens
taagttatgtttata

SEQ ID NO: 868077 - DNA, 15 bp, Homo sapiens
aagttatgtttataa

SEQ ID NO: 868078 - DNA, 15 bp, Homo sapiens
agttatgtttataaa

SEQ ID NO: 868079 - DNA, 15 bp, Homo sapiens
gttatgtttataaat

SEQ ID NO: 868080 - DNA, 15 bp, Homo sapiens
ttatgtttataaata

SEQ ID NO: 868081 - DNA, 15 bp, Homo sapiens
tatgtttataaatag

SEQ ID NO: 868082 - DNA, 15 bp, Homo sapiens
atgtttataaatagg

SEQ ID NO: 868083 - DNA, 15 bp, Homo sapiens
tgtttataaatagga

SEQ ID NO: 868084 - DNA, 15 bp, Homo sapiens
gtttataaataggat

SEQ ID NO: 868085 - DNA, 15 bp, Homo sapiens
tttataaataggata

SEQ ID NO: 868086 - DNA, 15 bp, Homo sapiens
ttataaataggatat

SEQ ID NO: 868087 - DNA, 15 bp, Homo sapiens
tataaataggatata

SEQ ID NO: 868088 - DNA, 15 bp, Homo sapiens
ataaataggatatat

SEQ ID NO: 868089 - DNA, 15 bp, Homo sapiens
taaataggatatata

SEQ ID NO: 868090 - DNA, 15 bp, Homo sapiens
aaataggatatatat

SEQ ID NO: 868091 - DNA, 15 bp, Homo sapiens
aataggatatatata

SEQ ID NO: 868092 - DNA, 15 bp, Homo sapiens
ataggatatatatac

SEQ ID NO: 868093 - DNA, 15 bp, Homo sapiens
taggatatatatact

SEQ ID NO: 868094 - DNA, 15 bp, Homo sapiens
aggatatatatactt

SEQ ID NO: 868095 - DNA, 15 bp, Homo sapiens
ggatatatatacttt

SEQ ID NO: 868096 - DNA, 15 bp, Homo sapiens
gatatatatactttt

SEQ ID NO: 868097 - DNA, 15 bp, Homo sapiens
atatatatacttttt

SEQ ID NO: 868098 - DNA, 15 bp, Homo sapiens
tatatatactttttg

SEQ ID NO: 868099 - DNA, 15 bp, Homo sapiens
atatatactttttga

SEQ ID NO: 868100 - DNA, 15 bp, Homo sapiens
tatatactttttgag

SEQ ID NO: 868101 - DNA, 15 bp, Homo sapiens
atatactttttgagc

SEQ ID NO: 868102 - DNA, 15 bp, Homo sapiens
tatactttttgagcc

SEQ ID NO: 868103 - DNA, 15 bp, Homo sapiens
atactttttgagccc

SEQ ID NO: 868104 - DNA, 15 bp, Homo sapiens
tactttttgagccct

SEQ ID NO: 868105 - DNA, 15 bp, Homo sapiens
actttttgagccctt

SEQ ID NO: 868106 - DNA, 15 bp, Homo sapiens
ctttttgagcccttt

SEQ ID NO: 868107 - DNA, 15 bp, Homo sapiens
tttttgagcccttta

SEQ ID NO: 868108 - DNA, 15 bp, Homo sapiens
ttttgagccctttat

SEQ ID NO: 868109 - DNA, 15 bp, Homo sapiens
tttgagccctttatt

SEQ ID NO: 868110 - DNA, 15 bp, Homo sapiens
ttgagccctttattt

SEQ ID NO: 868111 - DNA, 15 bp, Homo sapiens
tgagccctttatttg

SEQ ID NO: 868112 - DNA, 15 bp, Homo sapiens
gagccctttatttgg

SEQ ID NO: 868113 - DNA, 15 bp, Homo sapiens
agccctttatttggg

SEQ ID NO: 868114 - DNA, 15 bp, Homo sapiens
gccctttatttgggg

SEQ ID NO: 868115 - DNA, 15 bp, Homo sapiens
ccctttatttgggga

SEQ ID NO: 868116 - DNA, 15 bp, Homo sapiens
cctttatttggggac

SEQ ID NO: 868117 - DNA, 15 bp, Homo sapiens
ctttatttggggacc

SEQ ID NO: 868118 - DNA, 15 bp, Homo sapiens
tttatttggggacca

SEQ ID NO: 868119 - DNA, 15 bp, Homo sapiens
ttatttggggaccaa

SEQ ID NO: 868120 - DNA, 15 bp, Homo sapiens
tatttggggaccaag

SEQ ID NO: 868121 - DNA, 15 bp, Homo sapiens
atttggggaccaagt

SEQ ID NO: 868122 - DNA, 15 bp, Homo sapiens
tttggggaccaagtc

SEQ ID NO: 868123 - DNA, 15 bp, Homo sapiens
ttggggaccaagtca

SEQ ID NO: 868124 - DNA, 15 bp, Homo sapiens
tggggaccaagtcat

SEQ ID NO: 868125 - DNA, 15 bp, Homo sapiens
ggggaccaagtcata

SEQ ID NO: 868126 - DNA, 15 bp, Homo sapiens
gggaccaagtcatac

SEQ ID NO: 868127 - DNA, 15 bp, Homo sapiens
ggaccaagtcataca

SEQ ID NO: 868128 - DNA, 15 bp, Homo sapiens
gaccaagtcatacaa

SEQ ID NO: 868129 - DNA, 15 bp, Homo sapiens
accaagtcatacaaa

SEQ ID NO: 868130 - DNA, 15 bp, Homo sapiens
ccaagtcatacaaaa

SEQ ID NO: 868131 - DNA, 15 bp, Homo sapiens
caagtcatacaaaat

SEQ ID NO: 868132 - DNA, 15 bp, Homo sapiens
aagtcatacaaaata

SEQ ID NO: 868133 - DNA, 15 bp, Homo sapiens
agtcatacaaaatac

SEQ ID NO: 868134 - DNA, 15 bp, Homo sapiens
gtcatacaaaatact

SEQ ID NO: 868135 - DNA, 15 bp, Homo sapiens
tcatacaaaatactc

SEQ ID NO: 868136 - DNA, 15 bp, Homo sapiens
catacaaaatactct

SEQ ID NO: 868137 - DNA, 15 bp, Homo sapiens
atacaaaatactcta

SEQ ID NO: 868138 - DNA, 15 bp, Homo sapiens
tacaaaatactctac

SEQ ID NO: 868139 - DNA, 15 bp, Homo sapiens
acaaaatactctact

SEQ ID NO: 868140 - DNA, 15 bp, Homo sapiens
caaaatactctactg

SEQ ID NO: 868141 - DNA, 15 bp, Homo sapiens
aaaatactctactgt

SEQ ID NO: 868142 - DNA, 15 bp, Homo sapiens
aaatactctactgtt

SEQ ID NO: 868143 - DNA, 15 bp, Homo sapiens
aatactctactgttt

SEQ ID NO: 868144 - DNA, 15 bp, Homo sapiens
atactctactgttta

SEQ ID NO: 868145 - DNA, 15 bp, Homo sapiens
tactctactgtttaa

SEQ ID NO: 868146 - DNA, 15 bp, Homo sapiens
actctactgtttaag

SEQ ID NO: 868147 - DNA, 15 bp, Homo sapiens
ctctactgtttaaga

SEQ ID NO: 868148 - DNA, 15 bp, Homo sapiens
tctactgtttaagat

SEQ ID NO: 868149 - DNA, 15 bp, Homo sapiens
ctactgtttaagatt

SEQ ID NO: 868150 - DNA, 15 bp, Homo sapiens
tactgtttaagattt

SEQ ID NO: 868151 - DNA, 15 bp, Homo sapiens
actgtttaagatttt

SEQ ID NO: 868152 - DNA, 15 bp, Homo sapiens
ctgtttaagatttta

SEQ ID NO: 868153 - DNA, 15 bp, Homo sapiens
tgtttaagattttaa

SEQ ID NO: 868154 - DNA, 15 bp, Homo sapiens
gtttaagattttaaa

SEQ ID NO: 868155 - DNA, 15 bp, Homo sapiens
tttaagattttaaaa

SEQ ID NO: 868156 - DNA, 15 bp, Homo sapiens
ttaagattttaaaaa

SEQ ID NO: 868157 - DNA, 15 bp, Homo sapiens
taagattttaaaaaa

SEQ ID NO: 868158 - DNA, 15 bp, Homo sapiens
aagattttaaaaaag

SEQ ID NO: 868159 - DNA, 15 bp, Homo sapiens
agattttaaaaaagg

SEQ ID NO: 868160 - DNA, 15 bp, Homo sapiens
gattttaaaaaaggt

SEQ ID NO: 868161 - DNA, 15 bp, Homo sapiens
attttaaaaaaggtc

SEQ ID NO: 868162 - DNA, 15 bp, Homo sapiens
ttttaaaaaaggtcc

SEQ ID NO: 868163 - DNA, 15 bp, Homo sapiens
tttaaaaaaggtccc

SEQ ID NO: 868164 - DNA, 15 bp, Homo sapiens
ttaaaaaaggtccct

SEQ ID NO: 868165 - DNA, 15 bp, Homo sapiens
taaaaaaggtccctg

SEQ ID NO: 868166 - DNA, 15 bp, Homo sapiens
aaaaaaggtccctgt

SEQ ID NO: 868167 - DNA, 15 bp, Homo sapiens
aaaaaggtccctgtg

SEQ ID NO: 868168 - DNA, 15 bp, Homo sapiens
aaaaggtccctgtga

SEQ ID NO: 868169 - DNA, 15 bp, Homo sapiens
aaaggtccctgtgat

SEQ ID NO: 868170 - DNA, 15 bp, Homo sapiens
aaggtccctgtgatt

SEQ ID NO: 868171 - DNA, 15 bp, Homo sapiens
aggtccctgtgattc

SEQ ID NO: 868172 - DNA, 15 bp, Homo sapiens
ggtccctgtgattct

SEQ ID NO: 868173 - DNA, 15 bp, Homo sapiens
gtccctgtgattctt

SEQ ID NO: 868174 - DNA, 15 bp, Homo sapiens
tccctgtgattcttt

SEQ ID NO: 868175 - DNA, 15 bp, Homo sapiens
ccctgtgattctttc

SEQ ID NO: 868176 - DNA, 15 bp, Homo sapiens
cctgtgattctttca

SEQ ID NO: 868177 - DNA, 15 bp, Homo sapiens
ctgtgattctttcaa

SEQ ID NO: 868178 - DNA, 15 bp, Homo sapiens
tgtgattctttcaat

SEQ ID NO: 868179 - DNA, 15 bp, Homo sapiens
gtgattctttcaata

SEQ ID NO: 868180 - DNA, 15 bp, Homo sapiens
tgattctttcaataa

SEQ ID NO: 868181 - DNA, 15 bp, Homo sapiens
gattctttcaataac

SEQ ID NO: 868182 - DNA, 15 bp, Homo sapiens
attctttcaataact

SEQ ID NO: 868183 - DNA, 15 bp, Homo sapiens
ttctttcaataacta

SEQ ID NO: 868184 - DNA, 15 bp, Homo sapiens
tctttcaataactaa

SEQ ID NO: 868185 - DNA, 15 bp, Homo sapiens
ctttcaataactaaa

SEQ ID NO: 868186 - DNA, 15 bp, Homo sapiens
tttcaataactaaat

SEQ ID NO: 868187 - DNA, 15 bp, Homo sapiens
ttcaataactaaatg

SEQ ID NO: 868188 - DNA, 15 bp, Homo sapiens
tcaataactaaatgt

SEQ ID NO: 868189 - DNA, 15 bp, Homo sapiens
caataactaaatgtc

SEQ ID NO: 868190 - DNA, 15 bp, Homo sapiens
aataactaaatgtcc

SEQ ID NO: 868191 - DNA, 15 bp, Homo sapiens
ataactaaatgtccc

SEQ ID NO: 868192 - DNA, 15 bp, Homo sapiens
taactaaatgtccca

SEQ ID NO: 868193 - DNA, 15 bp, Homo sapiens
aactaaatgtcccat

SEQ ID NO: 868194 - DNA, 15 bp, Homo sapiens
actaaatgtcccatg

SEQ ID NO: 868195 - DNA, 15 bp, Homo sapiens
ctaaatgtcccatgg

SEQ ID NO: 868196 - DNA, 15 bp, Homo sapiens
taaatgtcccatgga

SEQ ID NO: 868197 - DNA, 15 bp, Homo sapiens
aaatgtcccatggat

SEQ ID NO: 868198 - DNA, 15 bp, Homo sapiens
aatgtcccatggatg

SEQ ID NO: 868199 - DNA, 15 bp, Homo sapiens
atgtcccatggatgt

SEQ ID NO: 868200 - DNA, 15 bp, Homo sapiens
tgtcccatggatgtg

SEQ ID NO: 868201 - DNA, 15 bp, Homo sapiens
gtcccatggatgtgg

SEQ ID NO: 868202 - DNA, 15 bp, Homo sapiens
tcccatggatgtggt

SEQ ID NO: 868203 - DNA, 15 bp, Homo sapiens
cccatggatgtggtc

SEQ ID NO: 868204 - DNA, 15 bp, Homo sapiens
ccatggatgtggtct

SEQ ID NO: 868205 - DNA, 15 bp, Homo sapiens
catggatgtggtctg

SEQ ID NO: 868206 - DNA, 15 bp, Homo sapiens
atggatgtggtctgg

SEQ ID NO: 868207 - DNA, 15 bp, Homo sapiens
tggatgtggtctggg

SEQ ID NO: 868208 - DNA, 15 bp, Homo sapiens
ggatgtggtctggga

SEQ ID NO: 868209 - DNA, 15 bp, Homo sapiens
gatgtggtctgggac

SEQ ID NO: 868210 - DNA, 15 bp, Homo sapiens
atgtggtctgggaca

SEQ ID NO: 868211 - DNA, 15 bp, Homo sapiens
tgtggtctgggacag

SEQ ID NO: 868212 - DNA, 15 bp, Homo sapiens
gtggtctgggacagg

SEQ ID NO: 868213 - DNA, 15 bp, Homo sapiens
tggtctgggacaggc

SEQ ID NO: 868214 - DNA, 15 bp, Homo sapiens
ggtctgggacaggcc

SEQ ID NO: 868215 - DNA, 15 bp, Homo sapiens
gtctgggacaggcct

SEQ ID NO: 868216 - DNA, 15 bp, Homo sapiens
tctgggacaggccta

SEQ ID NO: 868217 - DNA, 15 bp, Homo sapiens
ctgggacaggcctag

SEQ ID NO: 868218 - DNA, 15 bp, Homo sapiens
tgggacaggcctagt

SEQ ID NO: 868219 - DNA, 15 bp, Homo sapiens
gggacaggcctagtt

SEQ ID NO: 868220 - DNA, 15 bp, Homo sapiens
ggacaggcctagttg

SEQ ID NO: 868221 - DNA, 15 bp, Homo sapiens
gacaggcctagttgt

SEQ ID NO: 868222 - DNA, 15 bp, Homo sapiens
acaggcctagttgtc

SEQ ID NO: 868223 - DNA, 15 bp, Homo sapiens
caggcctagttgtct

SEQ ID NO: 868224 - DNA, 15 bp, Homo sapiens
aggcctagttgtctt

SEQ ID NO: 868225 - DNA, 15 bp, Homo sapiens
ggcctagttgtctta

SEQ ID NO: 868226 - DNA, 15 bp, Homo sapiens
gcctagttgtcttac

SEQ ID NO: 868227 - DNA, 15 bp, Homo sapiens
cctagttgtcttaca

SEQ ID NO: 868228 - DNA, 15 bp, Homo sapiens
ctagttgtcttacag

SEQ ID NO: 868229 - DNA, 15 bp, Homo sapiens
tagttgtcttacagt

SEQ ID NO: 868230 - DNA, 15 bp, Homo sapiens
agttgtcttacagtc

SEQ ID NO: 868231 - DNA, 15 bp, Homo sapiens
gttgtcttacagtct

SEQ ID NO: 868232 - DNA, 15 bp, Homo sapiens
ttgtcttacagtctg

SEQ ID NO: 868233 - DNA, 15 bp, Homo sapiens
tgtcttacagtctga

SEQ ID NO: 868234 - DNA, 15 bp, Homo sapiens
gtcttacagtctgat

SEQ ID NO: 868235 - DNA, 15 bp, Homo sapiens
tcttacagtctgatt

SEQ ID NO: 868236 - DNA, 15 bp, Homo sapiens
cttacagtctgattt

SEQ ID NO: 868237 - DNA, 15 bp, Homo sapiens
ttacagtctgattta

SEQ ID NO: 868238 - DNA, 15 bp, Homo sapiens
tacagtctgatttat

SEQ ID NO: 868239 - DNA, 15 bp, Homo sapiens
acagtctgatttatg

SEQ ID NO: 868240 - DNA, 15 bp, Homo sapiens
cagtctgatttatgg

SEQ ID NO: 868241 - DNA, 15 bp, Homo sapiens
agtctgatttatggt

SEQ ID NO: 868242 - DNA, 15 bp, Homo sapiens
gtctgatttatggta

SEQ ID NO: 868243 - DNA, 15 bp, Homo sapiens
tctgatttatggtat

SEQ ID NO: 868244 - DNA, 15 bp, Homo sapiens
ctgatttatggtatt

SEQ ID NO: 868245 - DNA, 15 bp, Homo sapiens
tgatttatggtatta

SEQ ID NO: 868246 - DNA, 15 bp, Homo sapiens
gatttatggtattaa

SEQ ID NO: 868247 - DNA, 15 bp, Homo sapiens
atttatggtattaat

SEQ ID NO: 868248 - DNA, 15 bp, Homo sapiens
tttatggtattaatg

SEQ ID NO: 868249 - DNA, 15 bp, Homo sapiens
ttatggtattaatga

SEQ ID NO: 868250 - DNA, 15 bp, Homo sapiens
tatggtattaatgac

SEQ ID NO: 868251 - DNA, 15 bp, Homo sapiens
atggtattaatgaca

SEQ ID NO: 868252 - DNA, 15 bp, Homo sapiens
tggtattaatgacaa

SEQ ID NO: 868253 - DNA, 15 bp, Homo sapiens
ggtattaatgacaaa

SEQ ID NO: 868254 - DNA, 15 bp, Homo sapiens
gtattaatgacaaag

SEQ ID NO: 868255 - DNA, 15 bp, Homo sapiens
tattaatgacaaagt

SEQ ID NO: 868256 - DNA, 15 bp, Homo sapiens
attaatgacaaagtt

SEQ ID NO: 868257 - DNA, 15 bp, Homo sapiens
ttaatgacaaagttg

SEQ ID NO: 868258 - DNA, 15 bp, Homo sapiens
taatgacaaagttga

SEQ ID NO: 868259 - DNA, 15 bp, Homo sapiens
aatgacaaagttgag

SEQ ID NO: 868260 - DNA, 15 bp, Homo sapiens
atgacaaagttgaga

SEQ ID NO: 868261 - DNA, 15 bp, Homo sapiens
tgacaaagttgagag

SEQ ID NO: 868262 - DNA, 15 bp, Homo sapiens
gacaaagttgagagg

SEQ ID NO: 868263 - DNA, 15 bp, Homo sapiens
acaaagttgagaggc

SEQ ID NO: 868264 - DNA, 15 bp, Homo sapiens
caaagttgagaggca

SEQ ID NO: 868265 - DNA, 15 bp, Homo sapiens
aaagttgagaggcac

SEQ ID NO: 868266 - DNA, 15 bp, Homo sapiens
aagttgagaggcaca

SEQ ID NO: 868267 - DNA, 15 bp, Homo sapiens
agttgagaggcacat

SEQ ID NO: 868268 - DNA, 15 bp, Homo sapiens
gttgagaggcacatt

SEQ ID NO: 868269 - DNA, 15 bp, Homo sapiens
ttgagaggcacattt

SEQ ID NO: 868270 - DNA, 15 bp, Homo sapiens
tgagaggcacatttc

SEQ ID NO: 868271 - DNA, 15 bp, Homo sapiens
gagaggcacatttca

SEQ ID NO: 868272 - DNA, 15 bp, Homo sapiens
agaggcacatttcat

SEQ ID NO: 868273 - DNA, 15 bp, Homo sapiens
gaggcacatttcatt

SEQ ID NO: 868274 - DNA, 15 bp, Homo sapiens
aggcacatttcattt

SEQ ID NO: 868275 - DNA, 15 bp, Homo sapiens
ggcacatttcatttt

SEQ ID NO: 868276 - DNA, 15 bp, Homo sapiens
gcacatttcattttt

SEQ ID NO: 868277 - DNA, 15 bp, Homo sapiens
cacatttcatttttc

SEQ ID NO: 868278 - DNA, 15 bp, Homo sapiens
acatttcatttttct

SEQ ID NO: 868279 - DNA, 15 bp, Homo sapiens
catttcatttttcta

SEQ ID NO: 868280 - DNA, 15 bp, Homo sapiens
atttcatttttctag

SEQ ID NO: 868281 - DNA, 15 bp, Homo sapiens
tttcatttttctagc

SEQ ID NO: 868282 - DNA, 15 bp, Homo sapiens
ttcatttttctagcc

SEQ ID NO: 868283 - DNA, 15 bp, Homo sapiens
tcatttttctagcca

SEQ ID NO: 868284 - DNA, 15 bp, Homo sapiens
catttttctagccat

SEQ ID NO: 868285 - DNA, 15 bp, Homo sapiens
atttttctagccatg

SEQ ID NO: 868286 - DNA, 15 bp, Homo sapiens
tttttctagccatga

SEQ ID NO: 868287 - DNA, 15 bp, Homo sapiens
ttttctagccatgat

SEQ ID NO: 868288 - DNA, 15 bp, Homo sapiens
tttctagccatgatt

SEQ ID NO: 868289 - DNA, 15 bp, Homo sapiens
ttctagccatgattt

SEQ ID NO: 868290 - DNA, 15 bp, Homo sapiens
tctagccatgatttg

SEQ ID NO: 868291 - DNA, 15 bp, Homo sapiens
ctagccatgatttgg

SEQ ID NO: 868292 - DNA, 15 bp, Homo sapiens
tagccatgatttggg

SEQ ID NO: 868293 - DNA, 15 bp, Homo sapiens
agccatgatttgggt

SEQ ID NO: 868294 - DNA, 15 bp, Homo sapiens
gccatgatttgggtt

SEQ ID NO: 868295 - DNA, 15 bp, Homo sapiens
ccatgatttgggttc

SEQ ID NO: 868296 - DNA, 15 bp, Homo sapiens
catgatttgggttca

SEQ ID NO: 868297 - DNA, 15 bp, Homo sapiens
atgatttgggttcag

SEQ ID NO: 868298 - DNA, 15 bp, Homo sapiens
tgatttgggttcagg

SEQ ID NO: 868299 - DNA, 15 bp, Homo sapiens
gatttgggttcaggt

SEQ ID NO: 868300 - DNA, 15 bp, Homo sapiens
atttgggttcaggta

SEQ ID NO: 868301 - DNA, 15 bp, Homo sapiens
tttgggttcaggtag

SEQ ID NO: 868302 - DNA, 15 bp, Homo sapiens
ttgggttcaggtagt

SEQ ID NO: 868303 - DNA, 15 bp, Homo sapiens
tgggttcaggtagta

SEQ ID NO: 868304 - DNA, 15 bp, Homo sapiens
gggttcaggtagtac

SEQ ID NO: 868305 - DNA, 15 bp, Homo sapiens
ggttcaggtagtacc

SEQ ID NO: 868306 - DNA, 15 bp, Homo sapiens
gttcaggtagtacct

SEQ ID NO: 868307 - DNA, 15 bp, Homo sapiens
ttcaggtagtacctt

SEQ ID NO: 868308 - DNA, 15 bp, Homo sapiens
tcaggtagtaccttt

SEQ ID NO: 868309 - DNA, 15 bp, Homo sapiens
caggtagtacctttc

SEQ ID NO: 868310 - DNA, 15 bp, Homo sapiens
aggtagtacctttct

SEQ ID NO: 868311 - DNA, 15 bp, Homo sapiens
ggtagtacctttctc

SEQ ID NO: 868312 - DNA, 15 bp, Homo sapiens
gtagtacctttctca

SEQ ID NO: 868313 - DNA, 15 bp, Homo sapiens
tagtacctttctcaa

SEQ ID NO: 868314 - DNA, 15 bp, Homo sapiens
agtacctttctcaac

SEQ ID NO: 868315 - DNA, 15 bp, Homo sapiens
gtacctttctcaacc

SEQ ID NO: 868316 - DNA, 15 bp, Homo sapiens
tacctttctcaacca

SEQ ID NO: 868317 - DNA, 15 bp, Homo sapiens
acctttctcaaccac

SEQ ID NO: 868318 - DNA, 15 bp, Homo sapiens
cctttctcaaccacc

SEQ ID NO: 868319 - DNA, 15 bp, Homo sapiens
ctttctcaaccacct

SEQ ID NO: 868320 - DNA, 15 bp, Homo sapiens
tttctcaaccacctt

SEQ ID NO: 868321 - DNA, 15 bp, Homo sapiens
ttctcaaccaccttc

SEQ ID NO: 868322 - DNA, 15 bp, Homo sapiens
tctcaaccaccttct

SEQ ID NO: 868323 - DNA, 15 bp, Homo sapiens
ctcaaccaccttctc

SEQ ID NO: 868324 - DNA, 15 bp, Homo sapiens
tcaaccaccttctca

SEQ ID NO: 868325 - DNA, 15 bp, Homo sapiens
caaccaccttctcac

SEQ ID NO: 868326 - DNA, 15 bp, Homo sapiens
aaccaccttctcact

SEQ ID NO: 868327 - DNA, 15 bp, Homo sapiens
accaccttctcactg

SEQ ID NO: 868328 - DNA, 15 bp, Homo sapiens
ccaccttctcactgt

SEQ ID NO: 868329 - DNA, 15 bp, Homo sapiens
caccttctcactgtt

SEQ ID NO: 868330 - DNA, 15 bp, Homo sapiens
accttctcactgttc

SEQ ID NO: 868331 - DNA, 15 bp, Homo sapiens
ccttctcactgttct

SEQ ID NO: 868332 - DNA, 15 bp, Homo sapiens
cttctcactgttctt

SEQ ID NO: 868333 - DNA, 15 bp, Homo sapiens
ttctcactgttctta

SEQ ID NO: 868334 - DNA, 15 bp, Homo sapiens
tctcactgttcttaa

SEQ ID NO: 868335 - DNA, 15 bp, Homo sapiens
ctcactgttcttaaa

SEQ ID NO: 868336 - DNA, 15 bp, Homo sapiens
tcactgttcttaaaa

SEQ ID NO: 868337 - DNA, 15 bp, Homo sapiens
cactgttcttaaaaa

SEQ ID NO: 868338 - DNA, 15 bp, Homo sapiens
actgttcttaaaaaa

SEQ ID NO: 868339 - DNA, 15 bp, Homo sapiens
ctgttcttaaaaaaa

SEQ ID NO: 868340 - DNA, 15 bp, Homo sapiens
tgttcttaaaaaaac

SEQ ID NO: 868341 - DNA, 15 bp, Homo sapiens
gttcttaaaaaaact

SEQ ID NO: 868342 - DNA, 15 bp, Homo sapiens
ttcttaaaaaaactg

SEQ ID NO: 868343 - DNA, 15 bp, Homo sapiens
tcttaaaaaaactgt

SEQ ID NO: 868344 - DNA, 15 bp, Homo sapiens
cttaaaaaaactgtc

SEQ ID NO: 868345 - DNA, 15 bp, Homo sapiens
ttaaaaaaactgtca

SEQ ID NO: 868346 - DNA, 15 bp, Homo sapiens
taaaaaaactgtcac

SEQ ID NO: 868347 - DNA, 15 bp, Homo sapiens
aaaaaaactgtcaca

SEQ ID NO: 868348 - DNA, 15 bp, Homo sapiens
aaaaaactgtcacat

SEQ ID NO: 868349 - DNA, 15 bp, Homo sapiens
aaaaactgtcacatg

SEQ ID NO: 868350 - DNA, 15 bp, Homo sapiens
aaaactgtcacatgg

SEQ ID NO: 868351 - DNA, 15 bp, Homo sapiens
aaactgtcacatggc

SEQ ID NO: 868352 - DNA, 15 bp, Homo sapiens
aactgtcacatggcc

SEQ ID NO: 868353 - DNA, 15 bp, Homo sapiens
actgtcacatggcca

SEQ ID NO: 868354 - DNA, 15 bp, Homo sapiens
ctgtcacatggccag

SEQ ID NO: 868355 - DNA, 15 bp, Homo sapiens
tgtcacatggccagg

SEQ ID NO: 868356 - DNA, 15 bp, Homo sapiens
gtcacatggccaggc

SEQ ID NO: 868357 - DNA, 15 bp, Homo sapiens
tcacatggccaggca

SEQ ID NO: 868358 - DNA, 15 bp, Homo sapiens
cacatggccaggcac

SEQ ID NO: 868359 - DNA, 15 bp, Homo sapiens
acatggccaggcaca

SEQ ID NO: 868360 - DNA, 15 bp, Homo sapiens
catggccaggcacag

SEQ ID NO: 868361 - DNA, 15 bp, Homo sapiens
atggccaggcacagt

SEQ ID NO: 868362 - DNA, 15 bp, Homo sapiens
tggccaggcacagtg

SEQ ID NO: 868363 - DNA, 15 bp, Homo sapiens
ggccaggcacagtgg

SEQ ID NO: 868364 - DNA, 15 bp, Homo sapiens
gccaggcacagtggc

SEQ ID NO: 868365 - DNA, 15 bp, Homo sapiens
ccaggcacagtggct

SEQ ID NO: 868366 - DNA, 15 bp, Homo sapiens
caggcacagtggctt

SEQ ID NO: 868367 - DNA, 15 bp, Homo sapiens
aggcacagtggctta

SEQ ID NO: 868368 - DNA, 15 bp, Homo sapiens
ggcacagtggcttac

SEQ ID NO: 868369 - DNA, 15 bp, Homo sapiens
gcacagtggcttaca

SEQ ID NO: 868370 - DNA, 15 bp, Homo sapiens
cacagtggcttacat

SEQ ID NO: 868371 - DNA, 15 bp, Homo sapiens
acagtggcttacatc

SEQ ID NO: 868372 - DNA, 15 bp, Homo sapiens
cagtggcttacatct

SEQ ID NO: 868373 - DNA, 15 bp, Homo sapiens
agtggcttacatctg

SEQ ID NO: 868374 - DNA, 15 bp, Homo sapiens
gtggcttacatctgt

SEQ ID NO: 868375 - DNA, 15 bp, Homo sapiens
tggcttacatctgta

SEQ ID NO: 868376 - DNA, 15 bp, Homo sapiens
ggcttacatctgtaa

SEQ ID NO: 868377 - DNA, 15 bp, Homo sapiens
gcttacatctgtaat

SEQ ID NO: 868378 - DNA, 15 bp, Homo sapiens
cttacatctgtaatc

SEQ ID NO: 868379 - DNA, 15 bp, Homo sapiens
ttacatctgtaatcc

SEQ ID NO: 868380 - DNA, 15 bp, Homo sapiens
tacatctgtaatccc

SEQ ID NO: 868381 - DNA, 15 bp, Homo sapiens
acatctgtaatccca

SEQ ID NO: 868382 - DNA, 15 bp, Homo sapiens
catctgtaatcccaa

SEQ ID NO: 868383 - DNA, 15 bp, Homo sapiens
atctgtaatcccaat

SEQ ID NO: 868384 - DNA, 15 bp, Homo sapiens
tctgtaatcccaata

SEQ ID NO: 868385 - DNA, 15 bp, Homo sapiens
ctgtaatcccaatac

SEQ ID NO: 868386 - DNA, 15 bp, Homo sapiens
tgtaatcccaatact

SEQ ID NO: 868387 - DNA, 15 bp, Homo sapiens
gtaatcccaatactt

SEQ ID NO: 868388 - DNA, 15 bp, Homo sapiens
taatcccaatacttt

SEQ ID NO: 868389 - DNA, 15 bp, Homo sapiens
aatcccaatactttg

SEQ ID NO: 868390 - DNA, 15 bp, Homo sapiens
atcccaatactttgg

SEQ ID NO: 868391 - DNA, 15 bp, Homo sapiens
tcccaatactttggg

SEQ ID NO: 868392 - DNA, 15 bp, Homo sapiens
cccaatactttggga

SEQ ID NO: 868393 - DNA, 15 bp, Homo sapiens
ccaatactttgggag

SEQ ID NO: 868394 - DNA, 15 bp, Homo sapiens
caatactttgggagg

SEQ ID NO: 868395 - DNA, 15 bp, Homo sapiens
aatactttgggaggc

SEQ ID NO: 868396 - DNA, 15 bp, Homo sapiens
atactttgggaggct

SEQ ID NO: 868397 - DNA, 15 bp, Homo sapiens
tactttgggaggctg

SEQ ID NO: 868398 - DNA, 15 bp, Homo sapiens
actttgggaggctga

SEQ ID NO: 868399 - DNA, 15 bp, Homo sapiens
ctttgggaggctgag

SEQ ID NO: 868400 - DNA, 15 bp, Homo sapiens
tttgggaggctgagg

SEQ ID NO: 868401 - DNA, 15 bp, Homo sapiens
gaggctgaggtgggg

SEQ ID NO: 868402 - DNA, 15 bp, Homo sapiens
aggctgaggtggggg

SEQ ID NO: 868403 - DNA, 15 bp, Homo sapiens
ggctgaggtgggggg

SEQ ID NO: 868404 - DNA, 15 bp, Homo sapiens
gctgaggtgggggga

SEQ ID NO: 868405 - DNA, 15 bp, Homo sapiens
ctgaggtggggggat

SEQ ID NO: 868406 - DNA, 15 bp, Homo sapiens
tgaggtggggggatt

SEQ ID NO: 868407 - DNA, 15 bp, Homo sapiens
gaggtggggggatta

SEQ ID NO: 868408 - DNA, 15 bp, Homo sapiens
aggtggggggattac

SEQ ID NO: 868409 - DNA, 15 bp, Homo sapiens
ggtggggggattact

SEQ ID NO: 868410 - DNA, 15 bp, Homo sapiens
gtggggggattactt

SEQ ID NO: 868411 - DNA, 15 bp, Homo sapiens
tggggggattacttg

SEQ ID NO: 868412 - DNA, 15 bp, Homo sapiens
ggggggattacttga

SEQ ID NO: 868413 - DNA, 15 bp, Homo sapiens
gggggattacttgag

SEQ ID NO: 868414 - DNA, 15 bp, Homo sapiens
ggggattacttgagg

SEQ ID NO: 868415 - DNA, 15 bp, Homo sapiens
gggattacttgaggc

SEQ ID NO: 868416 - DNA, 15 bp, Homo sapiens
ggattacttgaggcc

SEQ ID NO: 868417 - DNA, 15 bp, Homo sapiens
gattacttgaggcca

SEQ ID NO: 868418 - DNA, 15 bp, Homo sapiens
attacttgaggccag

SEQ ID NO: 868419 - DNA, 15 bp, Homo sapiens
ttacttgaggccagg

SEQ ID NO: 868420 - DNA, 15 bp, Homo sapiens
tacttgaggccagga

SEQ ID NO: 868421 - DNA, 15 bp, Homo sapiens
acttgaggccaggaa

SEQ ID NO: 868422 - DNA, 15 bp, Homo sapiens
cttgaggccaggaat

SEQ ID NO: 868423 - DNA, 15 bp, Homo sapiens
ttgaggccaggaatt

SEQ ID NO: 868424 - DNA, 15 bp, Homo sapiens
tgaggccaggaattc

SEQ ID NO: 868425 - DNA, 15 bp, Homo sapiens
gaggccaggaattca

SEQ ID NO: 868426 - DNA, 15 bp, Homo sapiens
aggccaggaattcaa

SEQ ID NO: 868427 - DNA, 15 bp, Homo sapiens
ggccaggaattcaag

SEQ ID NO: 868428 - DNA, 15 bp, Homo sapiens
gccaggaattcaaga

SEQ ID NO: 868429 - DNA, 15 bp, Homo sapiens
ccaggaattcaagac

SEQ ID NO: 868430 - DNA, 15 bp, Homo sapiens
caggaattcaagacc

SEQ ID NO: 868431 - DNA, 15 bp, Homo sapiens
aggaattcaagacca

SEQ ID NO: 868432 - DNA, 15 bp, Homo sapiens
ggaattcaagaccag

SEQ ID NO: 868433 - DNA, 15 bp, Homo sapiens
gaattcaagaccagc

SEQ ID NO: 868434 - DNA, 15 bp, Homo sapiens
aattcaagaccagcc

SEQ ID NO: 868435 - DNA, 15 bp, Homo sapiens
attcaagaccagccc

SEQ ID NO: 868436 - DNA, 15 bp, Homo sapiens
ttcaagaccagccca

SEQ ID NO: 868437 - DNA, 15 bp, Homo sapiens
tcaagaccagcccag

SEQ ID NO: 868438 - DNA, 15 bp, Homo sapiens
caagaccagcccagg

SEQ ID NO: 868439 - DNA, 15 bp, Homo sapiens
aagaccagcccaggc

SEQ ID NO: 868440 - DNA, 15 bp, Homo sapiens
agaccagcccaggca

SEQ ID NO: 868441 - DNA, 15 bp, Homo sapiens
gaccagcccaggcaa

SEQ ID NO: 868442 - DNA, 15 bp, Homo sapiens
accagcccaggcaac

SEQ ID NO: 868443 - DNA, 15 bp, Homo sapiens
ccagcccaggcaaca

SEQ ID NO: 868444 - DNA, 15 bp, Homo sapiens
cagcccaggcaacat

SEQ ID NO: 868445 - DNA, 15 bp, Homo sapiens
agcccaggcaacata

SEQ ID NO: 868446 - DNA, 15 bp, Homo sapiens
gcccaggcaacatag

SEQ ID NO: 868447 - DNA, 15 bp, Homo sapiens
cccaggcaacatagt

SEQ ID NO: 868448 - DNA, 15 bp, Homo sapiens
ccaggcaacatagtg

SEQ ID NO: 868449 - DNA, 15 bp, Homo sapiens
caggcaacatagtga

SEQ ID NO: 868450 - DNA, 15 bp, Homo sapiens
aggcaacatagtgag

SEQ ID NO: 868451 - DNA, 15 bp, Homo sapiens
ggcaacatagtgagg

SEQ ID NO: 868452 - DNA, 15 bp, Homo sapiens
gcaacatagtgaggc

SEQ ID NO: 868453 - DNA, 15 bp, Homo sapiens
caacatagtgaggcc

SEQ ID NO: 868454 - DNA, 15 bp, Homo sapiens
aacatagtgaggccc

SEQ ID NO: 868455 - DNA, 15 bp, Homo sapiens
acatagtgaggcccc

SEQ ID NO: 868456 - DNA, 15 bp, Homo sapiens
catagtgaggcccca

SEQ ID NO: 868457 - DNA, 15 bp, Homo sapiens
atagtgaggccccat

SEQ ID NO: 868458 - DNA, 15 bp, Homo sapiens
tagtgaggccccatc

SEQ ID NO: 868459 - DNA, 15 bp, Homo sapiens
agtgaggccccatct

SEQ ID NO: 868460 - DNA, 15 bp, Homo sapiens
gtgaggccccatctg

SEQ ID NO: 868461 - DNA, 15 bp, Homo sapiens
tgaggccccatctgt

SEQ ID NO: 868462 - DNA, 15 bp, Homo sapiens
gaggccccatctgtc

SEQ ID NO: 868463 - DNA, 15 bp, Homo sapiens
aggccccatctgtct

SEQ ID NO: 868464 - DNA, 15 bp, Homo sapiens
ggccccatctgtctt

SEQ ID NO: 868465 - DNA, 15 bp, Homo sapiens
gccccatctgtcttt

SEQ ID NO: 868466 - DNA, 15 bp, Homo sapiens
ccccatctgtcttta

SEQ ID NO: 868467 - DNA, 15 bp, Homo sapiens
cccatctgtctttat

SEQ ID NO: 868468 - DNA, 15 bp, Homo sapiens
ccatctgtctttatt

SEQ ID NO: 868469 - DNA, 15 bp, Homo sapiens
catctgtctttatta

SEQ ID NO: 868470 - DNA, 15 bp, Homo sapiens
atctgtctttattaa

SEQ ID NO: 868471 - DNA, 15 bp, Homo sapiens
tctgtctttattaaa

SEQ ID NO: 868472 - DNA, 15 bp, Homo sapiens
ctgtctttattaaaa

SEQ ID NO: 868473 - DNA, 15 bp, Homo sapiens
tgtctttattaaaac

SEQ ID NO: 868474 - DNA, 15 bp, Homo sapiens
gtctttattaaaaca

SEQ ID NO: 868475 - DNA, 15 bp, Homo sapiens
tctttattaaaacaa

SEQ ID NO: 868476 - DNA, 15 bp, Homo sapiens
ctttattaaaacaaa

SEQ ID NO: 868477 - DNA, 15 bp, Homo sapiens
tttattaaaacaaaa

SEQ ID NO: 868478 - DNA, 15 bp, Homo sapiens
ttattaaaacaaaac

SEQ ID NO: 868479 - DNA, 15 bp, Homo sapiens
tattaaaacaaaaca

SEQ ID NO: 868480 - DNA, 15 bp, Homo sapiens
attaaaacaaaacaa

SEQ ID NO: 868481 - DNA, 15 bp, Homo sapiens
aaaacaaaacaaaac

SEQ ID NO: 868482 - DNA, 15 bp, Homo sapiens
aaacaaaacaaaact

SEQ ID NO: 868483 - DNA, 15 bp, Homo sapiens
aacaaaacaaaactg

SEQ ID NO: 868484 - DNA, 15 bp, Homo sapiens
acaaaacaaaactgt

SEQ ID NO: 868485 - DNA, 15 bp, Homo sapiens
caaaacaaaactgtc

SEQ ID NO: 868486 - DNA, 15 bp, Homo sapiens
aaaacaaaactgtca

SEQ ID NO: 868487 - DNA, 15 bp, Homo sapiens
aaacaaaactgtcac

SEQ ID NO: 868488 - DNA, 15 bp, Homo sapiens
aacaaaactgtcaca

SEQ ID NO: 868489 - DNA, 15 bp, Homo sapiens
acaaaactgtcacag

SEQ ID NO: 868490 - DNA, 15 bp, Homo sapiens
caaaactgtcacagc

SEQ ID NO: 868491 - DNA, 15 bp, Homo sapiens
aaaactgtcacagct

SEQ ID NO: 868492 - DNA, 15 bp, Homo sapiens
aaactgtcacagctt

SEQ ID NO: 868493 - DNA, 15 bp, Homo sapiens
aactgtcacagcttc

SEQ ID NO: 868494 - DNA, 15 bp, Homo sapiens
actgtcacagcttct

SEQ ID NO: 868495 - DNA, 15 bp, Homo sapiens
ctgtcacagcttctt

SEQ ID NO: 868496 - DNA, 15 bp, Homo sapiens
tgtcacagcttcttt

SEQ ID NO: 868497 - DNA, 15 bp, Homo sapiens
gtcacagcttctttc

SEQ ID NO: 868498 - DNA, 15 bp, Homo sapiens
tcacagcttctttca

SEQ ID NO: 868499 - DNA, 15 bp, Homo sapiens
cacagcttctttcaa

SEQ ID NO: 868500 - DNA, 15 bp, Homo sapiens
acagcttctttcaag

SEQ ID NO: 868501 - DNA, 15 bp, Homo sapiens
cagcttctttcaagt

SEQ ID NO: 868502 - DNA, 15 bp, Homo sapiens
agcttctttcaagtg

SEQ ID NO: 868503 - DNA, 15 bp, Homo sapiens
gcttctttcaagtga

SEQ ID NO: 868504 - DNA, 15 bp, Homo sapiens
cttctttcaagtgat

SEQ ID NO: 868505 - DNA, 15 bp, Homo sapiens
ttctttcaagtgatg

SEQ ID NO: 868506 - DNA, 15 bp, Homo sapiens
tctttcaagtgatgt

SEQ ID NO: 868507 - DNA, 15 bp, Homo sapiens
ctttcaagtgatgtt

SEQ ID NO: 868508 - DNA, 15 bp, Homo sapiens
tttcaagtgatgttt

SEQ ID NO: 868509 - DNA, 15 bp, Homo sapiens
ttcaagtgatgttta

SEQ ID NO: 868510 - DNA, 15 bp, Homo sapiens
tcaagtgatgtttac

SEQ ID NO: 868511 - DNA, 15 bp, Homo sapiens
caagtgatgtttaca

SEQ ID NO: 868512 - DNA, 15 bp, Homo sapiens
aagtgatgtttacaa

SEQ ID NO: 868513 - DNA, 15 bp, Homo sapiens
agtgatgtttacaaa

SEQ ID NO: 868514 - DNA, 15 bp, Homo sapiens
gtgatgtttacaaat

SEQ ID NO: 868515 - DNA, 15 bp, Homo sapiens
tgatgtttacaaatt

SEQ ID NO: 868516 - DNA, 15 bp, Homo sapiens
gatgtttacaaattc

SEQ ID NO: 868517 - DNA, 15 bp, Homo sapiens
atgtttacaaattcc

SEQ ID NO: 868518 - DNA, 15 bp, Homo sapiens
tgtttacaaattccc

SEQ ID NO: 868519 - DNA, 15 bp, Homo sapiens
gtttacaaattccct

SEQ ID NO: 868520 - DNA, 15 bp, Homo sapiens
tttacaaattcccta

SEQ ID NO: 868521 - DNA, 15 bp, Homo sapiens
ttacaaattccctat

SEQ ID NO: 868522 - DNA, 15 bp, Homo sapiens
tacaaattccctatg

SEQ ID NO: 868523 - DNA, 15 bp, Homo sapiens
acaaattccctatgg

SEQ ID NO: 868524 - DNA, 15 bp, Homo sapiens
caaattccctatggt

SEQ ID NO: 868525 - DNA, 15 bp, Homo sapiens
aaattccctatggtt

SEQ ID NO: 868526 - DNA, 15 bp, Homo sapiens
aattccctatggttt

SEQ ID NO: 868527 - DNA, 15 bp, Homo sapiens
attccctatggttta

SEQ ID NO: 868528 - DNA, 15 bp, Homo sapiens
ttccctatggtttag

SEQ ID NO: 868529 - DNA, 15 bp, Homo sapiens
tccctatggtttagt

SEQ ID NO: 868530 - DNA, 15 bp, Homo sapiens
ccctatggtttagtc

SEQ ID NO: 868531 - DNA, 15 bp, Homo sapiens
cctatggtttagtca

SEQ ID NO: 868532 - DNA, 15 bp, Homo sapiens
ctatggtttagtcac

SEQ ID NO: 868533 - DNA, 15 bp, Homo sapiens
tatggtttagtcaca

SEQ ID NO: 868534 - DNA, 15 bp, Homo sapiens
atggtttagtcacaa

SEQ ID NO: 868535 - DNA, 15 bp, Homo sapiens
tggtttagtcacaag

SEQ ID NO: 868536 - DNA, 15 bp, Homo sapiens
ggtttagtcacaagg

SEQ ID NO: 868537 - DNA, 15 bp, Homo sapiens
gtttagtcacaagga

SEQ ID NO: 868538 - DNA, 15 bp, Homo sapiens
tttagtcacaaggaa

SEQ ID NO: 868539 - DNA, 15 bp, Homo sapiens
ttagtcacaaggaag

SEQ ID NO: 868540 - DNA, 15 bp, Homo sapiens
tagtcacaaggaagt

SEQ ID NO: 868541 - DNA, 15 bp, Homo sapiens
agtcacaaggaagtt

SEQ ID NO: 868542 - DNA, 15 bp, Homo sapiens
gtcacaaggaagttc

SEQ ID NO: 868543 - DNA, 15 bp, Homo sapiens
tcacaaggaagttct

SEQ ID NO: 868544 - DNA, 15 bp, Homo sapiens
cacaaggaagttctg

SEQ ID NO: 868545 - DNA, 15 bp, Homo sapiens
acaaggaagttctga

SEQ ID NO: 868546 - DNA, 15 bp, Homo sapiens
caaggaagttctgag

SEQ ID NO: 868547 - DNA, 15 bp, Homo sapiens
aaggaagttctgagg

SEQ ID NO: 868548 - DNA, 15 bp, Homo sapiens
aggaagttctgagga

SEQ ID NO: 868549 - DNA, 15 bp, Homo sapiens
ggaagttctgaggat

SEQ ID NO: 868550 - DNA, 15 bp, Homo sapiens
gaagttctgaggatg

SEQ ID NO: 868551 - DNA, 15 bp, Homo sapiens
aagttctgaggatga

SEQ ID NO: 868552 - DNA, 15 bp, Homo sapiens
agttctgaggatgat

SEQ ID NO: 868553 - DNA, 15 bp, Homo sapiens
gttctgaggatgatg

SEQ ID NO: 868554 - DNA, 15 bp, Homo sapiens
ttctgaggatgatgt

SEQ ID NO: 868555 - DNA, 15 bp, Homo sapiens
tctgaggatgatgta

SEQ ID NO: 868556 - DNA, 15 bp, Homo sapiens
ctgaggatgatgtat

SEQ ID NO: 868557 - DNA, 15 bp, Homo sapiens
tgaggatgatgtatc

SEQ ID NO: 868558 - DNA, 15 bp, Homo sapiens
gaggatgatgtatca

SEQ ID NO: 868559 - DNA, 15 bp, Homo sapiens
aggatgatgtatcac

SEQ ID NO: 868560 - DNA, 15 bp, Homo sapiens
ggatgatgtatcacg

SEQ ID NO: 868561 - DNA, 15 bp, Homo sapiens
gatgatgtatcacgt

SEQ ID NO: 868562 - DNA, 15 bp, Homo sapiens
atgatgtatcacgtc

SEQ ID NO: 868563 - DNA, 15 bp, Homo sapiens
tgatgtatcacgtca

SEQ ID NO: 868564 - DNA, 15 bp, Homo sapiens
gatgtatcacgtcat

SEQ ID NO: 868565 - DNA, 15 bp, Homo sapiens
atgtatcacgtcatt

SEQ ID NO: 868566 - DNA, 15 bp, Homo sapiens
tgtatcacgtcattt

SEQ ID NO: 868567 - DNA, 15 bp, Homo sapiens
gtatcacgtcatttc

SEQ ID NO: 868568 - DNA, 15 bp, Homo sapiens
tatcacgtcatttct

SEQ ID NO: 868569 - DNA, 15 bp, Homo sapiens
atcacgtcatttctg

SEQ ID NO: 868570 - DNA, 15 bp, Homo sapiens
tcacgtcatttctgt

SEQ ID NO: 868571 - DNA, 15 bp, Homo sapiens
cacgtcatttctgtt

SEQ ID NO: 868572 - DNA, 15 bp, Homo sapiens
acgtcatttctgttc

SEQ ID NO: 868573 - DNA, 15 bp, Homo sapiens
cgtcatttctgttca

SEQ ID NO: 868574 - DNA, 15 bp, Homo sapiens
gtcatttctgttcag

SEQ ID NO: 868575 - DNA, 15 bp, Homo sapiens
tcatttctgttcagg

SEQ ID NO: 868576 - DNA, 15 bp, Homo sapiens
catttctgttcaggc

SEQ ID NO: 868577 - DNA, 15 bp, Homo sapiens
atttctgttcaggct

SEQ ID NO: 868578 - DNA, 15 bp, Homo sapiens
tttctgttcaggctt

SEQ ID NO: 868579 - DNA, 15 bp, Homo sapiens
ttctgttcaggcttt

SEQ ID NO: 868580 - DNA, 15 bp, Homo sapiens
tctgttcaggctttt

SEQ ID NO: 868581 - DNA, 15 bp, Homo sapiens
ctgttcaggcttttg

SEQ ID NO: 868582 - DNA, 15 bp, Homo sapiens
tgttcaggcttttga

SEQ ID NO: 868583 - DNA, 15 bp, Homo sapiens
gttcaggcttttgag

SEQ ID NO: 868584 - DNA, 15 bp, Homo sapiens
ttcaggcttttgagc

SEQ ID NO: 868585 - DNA, 15 bp, Homo sapiens
tcaggcttttgagcc

SEQ ID NO: 868586 - DNA, 15 bp, Homo sapiens
caggcttttgagcct

SEQ ID NO: 868587 - DNA, 15 bp, Homo sapiens
aggcttttgagcctc

SEQ ID NO: 868588 - DNA, 15 bp, Homo sapiens
ggcttttgagcctcc

SEQ ID NO: 868589 - DNA, 15 bp, Homo sapiens
gcttttgagcctcct

SEQ ID NO: 868590 - DNA, 103278 bp, Homo sapiens
ctaatggagccacctctgattacacacttcaagggcactccacctctcaggataaagataaaagttccttgccatggttgacatggtctaccccaaggagctttccactcgcatcttcaaccaagttccccattgtttctgcaatatgacctttgctcatgctattccttctgcctggaaggttctggaaggttccaggttcttcccttcccttttcatctagatatttctactttgctctctgagattgcaaaaacttcctagggaaaagttctcacagcattatgtacatctccttcatgacacttgttaagattacaaatttgaatttattcctgtgatttgactaatgtctgtattagtctattctcatgctgctaataaagacatacccaagaccgggtaattaataaaggaaagaggtttaattgacccaccattctgcagggctgaggaggcctcaggaaactgacaatcatggtggaaggggaagcaaacacatcctttttcacatggtggcaggaaggaaaagtgccgagcaaaagagaaaaaagccttttataaaaccatcagatatcctgaaaactcatttattaccatgagaacagcagcatgggggcatgagaacgccccaatttgggtggtggcacagccaaaccatataaatctccatttgctaaaagaaacataaactcaggaaggcagttataatcatagaacctagaaaagtggctctcttgcagcaaaagctgaacaaatatttttagattgggtgggtggatctcatgtctagtcccccaagtgtctccttagccctagacctcagccacctttttccctggtgagacagacacagaggaattagcaaaagaatttatatccacaatcaggtctgtgtcttatcaggaaactgagcaccccatggcctgatggactgtgtacctcagaatatgtgcctccaaaattttttattagatgagtagtgactgcagtctccaaaactcatgctttcaaatggtcaaacctaccaagtccctgcaagggtcaggggtctctaagtggataggggtgtttagaccacgccccttccactaaacattttgcttcccttgagaaccagagggaaaagataatggggactttctccagccctgacatcaccatacctgatattttgctttctatcccagaagactacaatatctcagacttctcatccacacaatgagaatactaaaaacctatcagtcaacagtaatttattgtacatttaaaaataactaaaagtataattggattgtttgtaacacaaagaaaggataaatgcttgaggtgacagataccccatttaccctgatgtgattatgactcattgtatgattgtatcaaaatatctcatgtaccccacaaatatatacaactactatgtacccacatatattaaacattaaaaaattttaaaataaaagcgtatctcattggactgtagaaagtatcaagtgagataacctttccgatgtgcctggtactgaataactaagtgctgaattaatttttgtttctctctctttccagaaggaatgaaatagaaagaataaagctgaaggacatttcatttatgttcaactagaaatccaatatagttttaggcaaactatattttcccttgcaactgtactcccttacatacatgtaagtgggaaagaataaatgtgacaaacaaaatatcactcctgattccacaatctaaacaaaacactgcctctttctaggttttgttttttggtttttgtttgtttgttttttggcatagggttggggtgtatgcttcttgacgtacctacataatgaggaatacaaggctttgtatcttttatcagtaattattcatagcttaattgtgtaaattgtaaaatatcacacttttataatcttaatttttttttgtggctgcagctattatttgaataaactgtaattaattattttccctgagctgaagatttcatttctccccacactatctggaatcatgttgccctgaacatacttgtgcatatttttctacatttctgattatactagtaagcattgaacacataatgtgcatcaggcaccatgcttagtcctgaggatttagaaatactgatatttgatctctgtcctgagagttcttagtccaggagaggagacagaagagtggaaacaaaatcacaagagagtgtgtgagtttgcagagaaaactgccaggcagtatctgggccaaggaaggatgcccacctctgactaggagcaatgagtcagaaaaaaaaaaaaaaaaaaacttttttgaagatgtagtgtatgaattgacctggtgagtgttgatccttactcctaagccttccattttggcagcctcccctagctttcaccttgaatttttcttcagaccaagcataccctgataactttggatttgatgtccctttctctgttatcaatggctgagccttctctgcccctaagtgtcttctattcctaatgacattgttgctctgtcctctgagccatcagacttcaatccagtcctatttgtgactttgctaccatagtaatagtcagtggggttgcggtaaatgtttagcaacccacccacccaaacaaacagtgcttgctaattatcatggtgtaaagactcactctatgactgacttcaagctaccaacatcatgtcactgaacacagaattgggaagagaggtacagtagcatattatgtcatatttctaccacatagatacaatggacataaaataacattaaaagcataggtagtaataaaatgcagtaaagtaattagaagtaatcttcttggagtatttattacctttgtttttaatataattgattcaatcacaaatttacataattttgtttttaattgtggttctgtttagaaatatgctcacaaaattattgataagttcttgaaaaatagtctctggaatgtctatgtgaactatcaggttggtgcaaaagtaattgtggtttttgcatttttttaatggcaaaaactgcaattacttttgcaccagtctaatacttttagctcacaactggctatgaaccagttacatgaatttgtcgtgcctacttctccagactcagcttacacctctctccttttcactctctttacccgcccccccaacaactggcttatgtatgctcctcagaaaagtcccatttactcatatattagagattttgtatagatgtttcctctaccagaaatcccttcccctagctctttgcatttggagcctttccataattcagttctcagctcaaacattaccttgttgaatagatcttccctcagcacccgacttaaaccagtatcccccatatagtctcttacctctttttaaaactcagtgtcttcttggtcactgtaagtactgagtttatcttgccttttttgtctatttatttaatgttcctgtttcctaataggatgtgaaattactttgagtagactctcctgtttatcataaacagtgcctggcacttagtacatcttcaacaaacgtttgttgaataaatgtgtgcatgaatgacagcacctcagtgatctcactctgatgttgccgagaagggatgctcatgcaatgacttcagagtcttgagatcatacatataatgtatattatatatatattggtttgtacttaaacttggatcaaatgcacttgatttactaactgactttattatgactcaatgtaaagtctaaattctgctaagaattcctggaatagcctgcctgaaatcttattttaatgaaaaccatgacttcataccttaattgcattgggtttatgtgggctttggctgatctttagatttctgggttgtctgtgagggaaaagttagactaaaacgaaggatgccattgaaacaaggttctgaagaagttcgtgagtcatgctgacttattaggaagtctcctttgtgtctgcaatgagacgttgcatttttctctgaagtctgatgaagaaagaacagttttaggacaagtaaatccatcttaaatatcaatccgtgtctcttagattgttgtgattagatttgattgtgagtgacagaaacgtcaaaaaaatgagtttaaagaaagtagaagttaatttttctcatcaaattctaagtcagcagtctaaggctgctgaagtgatgctttatgatatcaataaccacaaatgcttcttctgtcttgaacctttcctcctttgctctgaaaaacatgtctccattcctaaatttaccttataatgcaatatggctgctcctgctccagtcagcatatctgcattccatcctgcaagaaggagaaaataaaaggagaagggtgtgcctcctctatggacactacttaggtattgcacagactacttctccttgcatttctttggccaaatattagacctgtagttacactcagctgcaagaaaggctgggaaaggcagtttttattctatgaaggattggggaaaactaatattgagtttccatttccatgcgaaagaaggaaagaaaatggagaacctagctgtatatgccacaggtccctttctttcctatcaacttgccaagcaattcctgaacatcagtgtaacttctaggcagactttccacactttcataacattggcaaatgagtaaaccaggaatccaaatgaatttacacagtttattgttcagggcacaataggcaacatgaggtccatattttcattgattctccttgtcccccaagtccatgggtaatgcagagtagatccaggtgtatgctgagcatacagtttcacagccaaggaacactgagcttaggacattctgattcatacagaagctgatggcaacttcctcatcctcctcttcaaagataggcattatctttaccttggcatggaaacaagttttcttctggtgagaggttgaagactttattattatggaatgtcttcagagatggagatgttctctgtaattattatactggacaataaataattctgctgtctgacccaaagggacagactagcctctaatgctctttgctgtgcatatatccttgaaaaggtagtccaagatatatagaaatgccatagaaattgtctctaacatctccatttgttaaattctttacaaatgcataaaactggttaaatatttaaggaagtagcttaatttaaaaaaaaaacccatcagtctagttgctgctaatagtacattgaatgtgattgttttgtttttgctgctttggagtttgagactttctatacaggacatgcatgctaagagatggagaatcccattttgcagcattagattcaatactcactgtaaggatttataagaacaaaccagaagactaaaacaaatggctgggaagagaatttcactagagatgtgtcaatgtgctgtgacatttctcttttgcttccattggaaggggagaagtattccctcctctttaccttataccaagttagggtggttaaaaagaacctaccagagagcttggcctacgtcctctggattttgcaggtgtagaaactgcctaactcgtgtataaaggcaagaaactggataacttctttgaatattgagcatagacagaaaagaagtccagagaagaagctggactccaccattggcaggacaaaggtatgtttttcttaaaataggctgcacggtgagataaccccaaaagacaattgattgtgggatggacctctttaagtcaggtggtattatctggactgtgagaccatgttgaaaaacctctgggaaatccccaagacaggtacaaaatatcccattagagaaataatcagaatttagacatcttaggtgtagacagttcacagaaataacaatagaaattacttttaaatatgtacaaacattgctcaaaataaggtacattctaatttaaactataatatgtttttccccctctagaatggtgagaatcaaaaattttggtaagttctcatggatggtctataggccacatgcctgggtacctaacatttgttctggtcccacagcaataaatttataaatgttcttggttcaagcaacttacattagcatgaagagcttgaatatgattaatgagaagtttgttcaggcataagggtaccctgtgctatatccatttcaccaaactgtgcaatgtgtgattaacgtgttatgctgaaaccaagtttgttgtatacagtcaagtccctgtccagaactgctttagtctcatgctcatcaggctgtgtgtgaaggaggagctgagcttccataaggtctagcatatctctcattcacgcaggcattatcatccacaagtgtgtaccccctgctgtaaacatatcctgcttgttcataggtgatactgatgatctttttgctgtgaatcttgactcagcagacctcttgatttactcaagtgatgtctggtctttctgtaaatctgaacttacttgttgacatttgcccagtggtaaagtatacaatgtcacattgggttgaaaactatagggaaagtggacattcttatattttgttggtaaaatgtaagttggtagaactcatatggattgatagaccatacataaccgtttaacggagacagtccaatttatatctggttttttttctgtgtaattataactagtacctcctttcactatcaaaacattccaacatggataataaattatatggtcatcctctaaagggtaatttgtcagtatgtactaaaatgatacattctcatgtcctttgactcatacattcaacttaatgtattatttcacatagctatcttcttacacatgtgtaaaatgatacatacaaagttcttcattaaagcattacttgtaatagtgaaagattagaaacaacataaatgttaatacttaccaacagagtactgatgaaataaattacgataatccacataaaaatacaatggagccattacaaaagaataaataaggtcttcctgtagtaaacagcgtgacctcaagatatatcattaagtttaaagtttaaaaaggcaaggtttagggccgggcgtggtgactcacgcctgtaatcccagcagtttggaaggctgaggtgggtggatcatgagttcaggagatcgagactaacctggccaacatgatgaaacactgtctctactaaaatacaaaaaattagctgggcatggtggtgcgcacctgtagacccagctactaaggatgctgaggtgggggaatcacttgaactggggaggtggaggttgcagtgagctgagatcgtaccactgtattccagcctggcaacagagcgagacttcatctcaaaaaaaaaaaaaaaaaggcaagatttagaatcatgtatagtatgctactatttgtgtaagaaaaggagggaaggaatatatgcatatacactatcataaatatttgcttaaagatctctagaagaaactgacaacattggttatctttggagaagagaatcaggtgcctgatgaacaggggaatgtgaaataattttcactaggttttatattttgatgtttgagccatatgagtgctcacctcctcaaaaataaatgaaaaaagttatatctaaaaggaaaaaattatataacttggagcaaaaaaataaaaatacagcaaaaaaattaaaatataagggataactttcaaatcagagaaagaaaatttgatctatatatctagcggaaagttaaaataggctctatggtgagaaaatcccaaaagacaattgattgtgggattggcctctttaagttaagtggtattacctggactgtgggaccatgttgaaaagcctctaagaaatccccaaggcatgtacaggtatatctacaatgcaggtagattaaagatctagctatgatagatctagatgctagagagaagagcacctctttggaactttgggatggggaaggacttcttaaacaatactctatagtacaaaccacaaaaatttttaaaaggatggacttgttatttcaaaattacttgttttattgtttaatcaaggaaggacaccagttgacaattaactgacagtgacacattgggaggcaatgtgttcagtgactgagaagggcacagagctaatatttggacacagagctaacagaaattattgcaacaaatctacaagacaggaatcctagtagaaaatgggtagaaaatatgatgataaactattcatagcatgggaaatctaagaggtataagtatataaagagatgctcaaactcatgagttatgagagaaattcaaattaaaaacaacaagacaccagcttatgctgatcagattggcaaaaattctgacctttggagaataccacatattaggtatacccaccaataggaactcttttgcctgctggttggtgtgtagactggtccaagccactctaaagggcaatctggcagcactttgtgaaattaagagtgcatgttccctatgattcataatagcaccactcttctatcccagaaaatttctaccccaggcctataagggaagaaagataaggaaatttatcacagtattgtttggggtggtgaaaaattagcaatgacttagatgtccataactggaaaataaagaagtcaagtgtggcaaatacacactgggatattctgaaccatttagaaaagcaaagaactagatacatattcagcagcatggctggatcctaagaacacagttgaaagaaaaaagaaactatgaaatctatagtacatccatagattgtagtaaatctatagtgccacatcacatatccatgaaaaatacatatacgcacaaacatttctatgtattttacaagttcaaggctaaacatcatattagagaagttgcctctggggaaaggcagtgagagtgaggaattatgataaaagagaatgaataaaaaaacaagagaagggtcatgtaggttttgtttctgtgccatgaactcatggattatgattaactcaaccttctgcacatgaagataaacaagaaagaactgataaacctgcaatggttgggtaatcttcaacttccaaatcagcaaaggtcagctctaagtttgccaagtacacaacttctcatcttgtgacatgttccccacctctgtgcagtgttaaaaaatacctcagtggtctactgactgactgtggatgcttcttctagatgtgcctttttttcctccatttccttagcacccagcactgctctcattatagcagcacattgcattccaaccaaattgaacaaaaaggtggcttaaaaatcatctgcaagtttatggcacaagcaatctcttatttttatcttagtgcataaataaatttttcctttttgccagaataattttttttaaagaagcgattagtttttcttctctcagatagcaatgatgtgctttcctctcaacctagatttagggcatttttatgtgagataggattaaaaattccatttttgtacaaccactatggagaacagtttggcagttccccaaaaaactaaaaatagagctactatatgatctagtgatcccactgctgggtatatacctataagaaaggaaatcagtatatcaaagagatgtctgttcttttatgtttgttgcagcactgttcacaatagccaagatctggaagcaacccaagtctccatcaacatgggttttaaaaaaatgtggtactttaatacacaatggagtactattcagcaataaaaaagaatgagatcctgttatttgcaataacatggacagaactggaggtcattatgtcaaatgaaataagccaggcacagaaagccaaacatcacatattctcactcatatgtggggtctaaaaatcaaaacaatctgattcatggagctagagagtagagagctaattaccagaggtggggaagggtagtaggggcctggaggggaggtggagatggttaataggtacaaaaaaatatagaaagaatgaataagacctagtatttgatagtacaacagggcgaatatagtcaaaataatttaattatacatttaaaaatacctgaaagagtataattggcttgtttgcaacacaaaagataaatgcttgaggggatggatgccccattttcaatgatgtgattattacacattgcatgcctgtatcaaaatattgcacatactccatgaatgcatacatctactatgttcccacaaaaattaaacattagaaaaaagagttgcattttcagctgttatggggagaagaaagaaaagctatcattttgttgtcctaaaaattatgttgtcctcatttcaaacaggaaagcaaaagtatttgagagccagtgcagtgccttggtgttgggtgaaacatagattgaatttgggccatttgtttaaacttcctaggcctcagtttcttgcctattaaaagggagtgcatagttcatgggattgttaagaggaagaagtgaaaccatgcacgtggagagcgtggcacagtgtctaagacagagtgtgcatgcaaataagtagataatattctttgcttttctttattgcatgcctgtaatatttttggagttgtcacattcattgccctcaagtagcatcaagggatgaaattatgtttgtaagaaaatcctgaggctgaggaatacaacatgttttatgtctactacactgaaaaatgccggagtcagataaagaatacagattctcctgaggatggaaatcaagatcttcgccttcaatatttaacaacattgagcttccaacttactatgggaaatattcatcaggcccctaaaggttccttttggacagaaattgcacttgttatatctgtattcttagcagacagtagacagcctggcacatcataaaggcttaaggaatcctaaatatcccttaaaattctcattttaaagacaaaaacaaaacaaaaaaaaaaaacaaaaaaaaactgaggcatgggcttgaccaaatcagtggtagaaccaagagttaaaccacttgttttgaatcctaaacctgagttttattttacttatttatttatttatttgtttatttattttcagatgcttggtcaaagaacagtgggaggagagggatgggcttccagcaacctttattattggcttattttcttacagcccattactttctcttgggaaaatattaagcaggcactcaaggcttgaggcccctgagttttcacatcctttctgaacctctgaacctgctttccagcattcttttatactttgttttacctcctggtcagtaatgcctcaccctcagtcttctctaaaagtgtggttaatggcatcttcctgactatttgaagaccactggccaaatcccaccagctcactcatagaccatccccctactttactttcttcaaaagacttagccctacctaaacttatttatatgtttattttctgcccaccagaatggcagcatagctggggaggcagagtctgttttgttcattgctgtattcccaaagactagaacaccaccaagcacacggtacaggtctcagtaattattgtcaaatttatgtggatttgcttttaaacaatatcttccatttactgagtgtttatgtggaagaactgtactaaattttaatgcatttctttattcctattcttaaaaccttccagcaaggtggctctaccaccctcttttccgagcttcaggagcagttgtgcgaatagctggagaacaccaggctggatttaaacccagatcgctcttacatttgctctttacctgctgtgctcagcgttcacgtgccctctagctgtagttttctgaagtcagcgcacagcaaggcagtgtgcttagaggttaacagaagggaaaacaacaacaacaaaaatctaaatgagaatcctgactgtttcagctgggggtaaggggggcggattattcatataattgttataccagacggtcgcaggcttagtccaattgcagagaactcgcttcccaggcttctgagagtcccggaagtgcctaaacctgtctaatcgacggggcttgggtggcccgtcgctccctggcttcttccctttacccagggcgggcagcgaagtggtgcctcctgcgtcccccacaccctccctcagcccctcccctccggcccgtcctgggcaggtgacctggagcatccggcaggctgccctggcctcctgcgtcaggacaacgcccacgaggggcgttactgtgcggagatgcaccacgcaagagacaccctttgtaactctcttctcctccctagtgcgaggttaaaaccttcagccccacgtgctgtttgcaaacctgcctgtacctgaggccctaaaaagccagagacctcactcccggggagccagcatgtccactgcggtcctggaaaacccaggcttgggcaggaaactctctgactttggacaggtgagccacggcagcctgagctgctcagttaggggaatttgggcctccagagaaagagatccgaagactgctggtgcttcctggtttcataagctcagtaagaagtctgaattcgttggaagctgatgagaatatccaggaagtcaacagacaaatgtcctcaacaattgtttctaagtaggagaacatctgtcctcggtggctttcacaggaatgaatgaccattgctttagggggttggggatctggcctccagaactgccaccaattagctgtgtgtctttggacaagttactgtccctctctgttgtctgtttactcttctgtacactgaaggggctggtccctaatgatctgggatgggatgtggaatccttctagatttcttttgtaatatttataaagtgctctcagcaaggtatcaaaatggcaaaattgtgagtaactatcctcctttcattttgggaagaagatgaggcatgaagagaattcagacagaaacttactcagaccaggggaggcagaaactaagcagagaggaaaatgaccaagagttagccctgggcatggaatgtgaaagaaccctaaacgtgacttggaaataatgcccaaggtatattccattctccgggatttgttggcattttcttgaggtgaagaattgcagaatacattctttaatgtgacctacatatttacccatgggaggaagtctgctcctggactcttgagattcagtcataaagcccaggccagggaaataatgtaagtctgcaggcccctgtcatcagtaggattagggagaagagttctcagtagaaaacagggaggctggagagaaaagaatggttaatgttaacgttaatataactagaaagactgcagaacttaggactgatttttatttgaatccttaaaaaaaaaaatttcttatgaaaatagtacatggctcttaggagacagaacttattgtacagaggaacagcgtgagagtcagagtgatcccagaacaggtcctggctccatcctgcacatagttttggtgctgctggcaatacggtccccacaactgtgggaaggggttaggggcagggatctcatcaggaaagcataggggtttaaagttctttatagagcacttagaagattgagaatccacaaattatattaataacaaacaaagtagtgtcgtgttatatagtaaatgtgaatttgcagacacatttagggaaaagttataattaaaaaaataggctgtatatatatcaatggttccaaaattttctatggttaagaatcacctgggatggttttgaaatggcagattctaagacaacttgattcaacaggtttaggtaaagcccagggaactgcattataagaaggaatcacctgtaattttggagtcaagatccaaggaacactcattgagaaacactgatttacaaagtgcatggagagaaatggagcaagtgaagggggatcagcatggtgaaatataggctgttaggagtgctattgactaactgtctggtgactggaccagagtaaatcttttactttgcaagaaacaggactaaattcccatattatgtccatagcaaagggaattatgtagaaaaattgataattaggagcctgagttcttgaccagcctccactacctatgtggcctcaggtgagttattttctccctttggctctaagttttccccatctgtaatgtaagggagtttaactagatgagcactaaggacaaatcaatttctgtgagtcaattattatgaaataccatgtgggcatcaaatgccaagtggaaagcatagataaagaagtgattgtgcacctgggctgaggggaacaaacatttcctaagagaattgagacccaaaagagcctttaaggaaggtgagatcttggaaagggaaatttggtgaatactctaatgaggagctaaaaaggcaagaaagaaagcagcttggctggaaaggaggttcctgtaggtgggcctccagagattcggtaccacagaaactgccaaacatcagcaagaagccatggggatggagcgtttgagggattctaaatagaaggacaagagtaaaaatgtcaggctggatcgatgcaggccactaagaaatggattcaggtgatggcagtgggaagaaaggacctgatgcccagaggcatttctggagaagatgagatcagacttgtgattggctgaacacacactgtagtggggtggggtttagggggtgactcaacttcaagcccaggtacattcaagtctgaattgccctagtcaaaagtggcatctgtggatgtgtatcagaaatatcttacttttcttggaagccaacaggagaaaagagtgctaccaagtgaactagagacaggaatatcttttgtcatttcaaggaaactggaaagaagaaggctcagtattctttagtaggaagaagacttaagtcagagactcatctgtacctctctggcagggtttaaaagggggaagaggaatagaggctgcaagagattgtgattcatggacagtatgcagagatcaaatgacctgggttcagatcctggctccactgctaactgtgtaactataggcaagttccttaacctctctaagccttaatcttgtcatcaataaaagggggcacttggtgcctaataaaacctacctcttaggttgttgccaaattacatgagataatccaaatcaagtgcttattataatacccagaaattataggctctaaataaatgtttatataggctctaaataaatgaagttttttagaaagataacatcatgatcaaaatgggatatttaacagtttagtcttccatttcatttgaagctccctaaaatcactcttgctgataaatttgttttttccttcacacctcagtttcatgggatgttttggcaaaaatctgaattttctgaattgaaagaattttttgctaagggtcatcagtattcatgcagggcttgttattctgagtcactaagagtttcctaacacagccttctctcattgagatgatgtaacatctattccattaatttcattaacttgcttacaagagagtaattgttctgcaaatttttttcttcccagttttaggtacctgctgcttattgtggacacacatagaattttatgtattatttttcgacttaggctaatgatttagcaaactctggaatgtcagccctaaccccaaccttggttttctgtcacatgcatgtagtaagtgctagatcctggacattctttgagatttagtttaagactaagtttattttctgataggttatttgtgtactttcatggattttgtaactctttttcaacaattggatgtctcagatctcagcatatgggagcaagttaatgcttcctgagatctttgccaaaggtcaagaggtcatttttgtgtatttataattttccatcatttttatatacttctcaatattctttttaaactattcttttccttttttcatcctctgaatactgttttgacagatcttgttattagcatgctttcacggatgagaaaactaagaaagctgaatgatttgcccaaagtagtccacctggaaaatgaaagagagaggattccaatccaggtcttacgattcaaaagcctgtgcatgttccatttttagtactttccacactgtatttctcaatgtctttctgggacattttataaatcatattatatcacctctaaggatctttcagtttgttatatatgtgtctattaagttagattgtgagctcctaaaagataaagcattgtcttattcatctttaaatttctcagagcccaaatagtgcctggaacctagtagttgctcaataaaaggtattgaatttacaggattgaatggtgacatcaatgaataattgaagattccttaagctgataactgacccagtagcatcattgatcatttaattgccctggacttacttattttccaccacactacatatttctgtatagaatatatatagctcattgtattgcaagatttaactagaagaaagagttcatgcttgctttgtccatggaggtttaacaggaatgaattgctaaactgtggaaaatgttttaaacaaatgcatcttatcctgtaggaaacaagctatattgaagacaactgcaatcaaaatggtgccatatcactgatcttctcactcaaagaagaagttggtgcattggccaaagtattgcgcttatttgaggtcagtgctacaatcatgtttgtcttggataatgtcgtagcaaacttccatgttcttttctagttagatgcaatgaaaagaacacaggatctggaacaggcagatttgaatttgagctcaagtttttacattaaccaactgtgtgaccttagttaagtcattcaatctctctgagcttcagtttttccattcataatatagtgctgataatatgtgccttgtcagtttcaacaggaactttgtgatgaaataatgtgttttgtaaaatgcctaatcatatgtgtgattaggcatgattaactataagtcatatgtgacacgtgattacatttcacataacatgtaatcacatgtgtcacatgtgattacagttaaagagtaaacaagaaataaatattaattcttttattcactaaattaatattgattgtcttctatgtataagtgtaaaataatatgcaagacaccgtccctttcttcaagtagcttaacccaaaactatgctttagaaaatagctaatgttcttcaagacattggtaaatgtcttatgattaaagtggttccataattaataaacttgggaaattcgggcatattattttacctgatttctttattataggacttttagagtctataaaactaattatactaagttgtttacagagagaaatgtatgtattattttccaaacttacttgactgtggatcctttttattttaagaacatgtattcacatctgggaacagagtttaggaaacgttgatttgggtgtttgctgggcagccaaacttcacagaactccaaataggtttcctcagccagattccttccgagtactatgctaatatttttggtgggattttgtcccacctgaaaatacattgctttatgctaagattcctgtgacctctctagctgattgggaggcaggggtagcacattggtcagggctgtgcacatacttagtgctcagtgtgtttgggcatgcaatcaacaaatccttttggggcatgactggatacgattagatatcttgtgaaaacctatgatgttctcagcactgtgggtggggaggaagatgggggacacatagaaattgtaaggaagagaaactgcctcctttaggatctaacaggggaagcaaatattctgagcagctggggagggaaggcagagcatgagaagttatctcagtaaaaggtagctttatagacatgatcttattcagtctaatgaaaataacatgaggtaggagctatttctgcccccatttttcagagatagaaactgatgcttagaggggttaggtaaatgtgcccaaggtcaaacagctagtaaatacggaagaaatcatttaaacccaggcattctgagtctagaacctacatacactcttaactgctattcagtactgccccagacagaacgggcttcatagtttgcagggcgcagtgcaaaatgaaaacgtggggtctcttcctcaataacaggaaataatgctgttaaaagtactaaaatatataactttatcctttcttctgtggtctctctcatgtcctgttatggtgtttttgatttgccatttagttgtgctctcctcccctgggcaccttggccctctaactgctgggttccctgtccagccagggctgggctgacagccaagcccctaccaaggatggggaaatccatcttccatttccgtggacctgctgcaccaacccacagtgatgagctatcccccaagagattgtaacctctggaatgagaatggaaaggaagcttgcctgaagccaaatcacccaccaaatcccctgccagatctcccagggttggcggagagtggcagcagaatataaacttccccccaaagcccatgcctcctggtcatgactctgggcaaagggcagtagtggtggtgaggtaagaccagggaggggaaggctgcgtgggtccagagggccaacgtgcttgaaagcaaccccttagaaccatggctgagaaggtaaggagagggcaaatggtgtgattacacatgagctgagtctccaaatacccagcatgtgcttcattgtcccactggactttgcttatgaaacacaaattcaaaagtcgttattaagaatttcaactcacgcctgtaatcccagcactttgggaggctgaggctgacggatcacaaggtcaggagatcgagaccatcctggctaacatggtgaaaccccgtctgtactaaaaatacaaaaaattagcccggcgtggtggtgggtgcctgtagtcccacctatttgggaggccaaggcaggagaatggcgtgaaccctggaggcggagcttgcagtgagcccggatcgtgccactgcactctagcctgggtgacagagcaagactccctccccaaaaaaaaaaaaaaaggaatttcaaggaggttgcaaagaacatgaaaccccaagtgtgattcctgtggtatgacagtggttgcatatcccagaagctggccctgacctcagacctcttttatcaagctttccctgaattaattacaatcttctcagtgttcccaaagcacttcttacttttaactgcagcacttccttgcgtgctcagcatatacattatgtctagccctgaggatggtttcttcaagaagagaaccttgtctcagtcatgtttatatcctcaacagaacctgagttttatatatgttgtgttcaattaagaatgaaattcaatctaaagaaaattttttaccttaataaatatttttaagttaaaaaaatattttaaaagtatcttttcactttttgagccaattaattttgttttttgagacagagtcttactctgtcacacaggctggagtgtagtggtgcgatctcagctcactgcaacctccgcctcccaggttcaggcgattctcatgcctcagcctccccagtagctgggactacaggcacatgccaccatgcccagctaatttttataattttagtagagacagggtttcaccatgttgcccaagctgatctggaactcctggactcaagtcatctgcctgccttggcctcccaaagtgctgggattacaggcgtgagctaccagccagggccaattaatttttaccctgagtttttaaatataattaaatcttgtgatcaaatatatgaataagtagagaaaagatagatctcctatttagagttccaaataatttaagtagtgggtttttatagtgactttttttccaaaaagtaccacatggaagggggagaagagtttctttacagtggagaaatatgacaaagacacctcagccatgtgaccaaaatcaacattattcaaaaagaaactgaatattaaaacaaacctttccttaatagtaaaaaaaaattaaaattaaaattaacatcatcagtgatgtcatgttgatggtatgcattcttggtaggatgaaaatggcacattacccctgtggtcttcctccacacaatccataacctccatctaaccatgagagaaaaaatcaaatgaatcctaattgaggaacattatccaaaatacatgaccattactcctgaaaactctcagggtcatcaaaaacaagtactgtctgagcgactgtcacagccgagaggagcttaaagaggcatgaagactagggccaggcacggtggctcacgtctgtaatcccagcactttgagaggctgaggcgggagtatcacctgaggtcaggagtttaagaccagcctggccaacatggtgaaacccggtctttactaaaaacacaaaaaaattagctgggcatggtggcagctacttgggaggctgaggcaggagaattgcttgaaccagggagacagaggttgcagaaagctgagatcacgccattgcactccagcctgagcagcgagagtgaaactctgtctcaaaaaaaaaaaaaaaaaaaaagagacatgaggactaaatgtaacgtggtattttgaatgggatcctagaacagacaaaggactttagatataaactaaagaaatttgaataaagtatggtctttcgtttataacgtgcatcaatattggttcattaattgtaacctatgttccacattaatgtaagatgttcatatgttcataatgggggacactgagtccaggttatgtggaaactctgtgctatcatttctattttttcataaatcaaaattattctttaaaaactgccttaaaaaattaaacctgggggaggagaatgtatgtctgagtgagagcaagcgagcaatgggtgtagagaagagagacagcattttctgagcaacaaactgtccatgagaaagaatatatctgtaaaatgcacctatgtaactttttagcttttatattagataatcagcattttctccttgagaggttgccccttaggcctaagtcagagttaatagattaaataatagtaaatgaacagaatgttttcaacctaataaataaacgacaagtaactaaattaccagaattggatggaatgcactcaagacatgtgtgtttgtgtgtgtgtgtgtgtgtgtgtgtgtcggggctgcagggggtggtagggaggggggcgcatgcatgtatgtgaactctgggtgaactctctgaagcattatccagaatctcaactgcacaggtcagtaagtgatgttattacacccattttacagaagaggaaacagaggtcactgtattgggtgattgaagaagggttgttagtgagtattgatttttttttttccaaacatacttcagaagttgctgtataaattgtataggccagtatacttctcgccttagtaacagcctggcaaaatgttaaaatcactcaaagtgctgagttaaggctgggcatggtggctcacacctgtagtcccagcactttggaaggccaaggcgggcagatcacttgaggccaggagttcaaaccagcctggccaaaatggcgaatccccatcactactaaaaatacaaaaattatctgggcgtgatggcgcatacttgtaatcccagctactaaggtggctgaggcatgagaattgcttgaacccaggaggcagagtttgaagttagctaagatcaccccactgcactccagcctgggcaacagagtgagactctgtccgccccctccctccccacaaaaaaaaaaagaaaagaaaagaaggaaaaagatgctacgttaagagagagaatcaaattctagtatttgtggaaccgcattatgcaatgagctgggcacatatgactcttcatttaatccgcattaaactaagtgaaggtggtactctcactttatggatgagggaactgaggttcagagcggttgagtaatttgctcaagatcacacagctaatgtgcagtggaaatggcattgaactctgaatctcagattccgaagcccatgatctttctattacaccccacacctctgccaaatacagctatccctgaacatctgaatcactctggagttttttaaaaaatgcaaatatcctggtcccagtctctcattcttggggtgagggggcaaaagtacctgtctctgggtattttttctttcatattgaaaaatgcatttaaatgcaagacaattaactactaatattccttccatctattatcaaccgctgttaacatttggacatatcactttcattttttcctgtgtcattgcagtttcaaatattacaaattaacatatcatttcttaagaaaaaaattagaagataaagctacagtcttttctcatctctcctctatcctgatcattctaattctacaaactttctagccaagacagcatcattatgagtttagcatatttccttccagtcctttggaaaagtatgttgatattgacaagtgtcatgctatgcacattggtctgcagcctctttcagtaagcacaatggagtggccaagaggatggactccatggatgcagggctgtggcttagagagggtgacttgacttctctgtgcctcagttcctcatctgtaaaatggaaatagtaatcgtatctgcttcatagggtagttctaaagattaaatcacttaatgcatgtgatctaaagattaaatcacttaatgcatgtgatctaaagattaaatcacttaatgtgccctcagaatatttattaactgttaagtaagaattactatatatatattttgtgaatgcaacatttaaaaaatgtatacatgctgatacatatagatcaggttcataacttttaacctctgaagtatagttcttaatatctgtgtatcatattttatttatcatccctctatttttggcatccatggtgttttctagtttctatagtcacagacaattctgcagtattttgttcaatttttttggtaagtaatatgcaaaaatttctttagggtagatacctagaagtggaatctggtcgtaggatatggacatttttagttttaatcagaactacaaagtttttctccaaatgtcctgtaagaatttatactcccactggttcaacatgagaatactcatttctctatacatttaagaatatatgcttattattgcctttaatcttgaacaatataatgagtgaaatatggtaatttgttgatttaatgttcatttttctgactattagtgagatgtaggtcatatttcataacatttataatttgtctttttgtaaattgtgatttgtctacacattgtattttttgtggcaaatgtgcctttttcttaccgattttttgacattttatatactctgaatactgttatgtgtgttacaaagattttctcccagtctttctcattttacttgggtttatggtataatttgtcatactgaaatttaaaattctgatataatcaatactttcagtcattttttcatgtgttttggatttttgtttattcttgaatttttttttttttttttaaattccactggtgactctgatgccaagtcgggaatgagaaccattgttctaagctattgcccgggaaggggttcttgctgtgcatgagagactgtgttatcacttcacatgaattaagtcatatttaatactcatcacagtgctgtggggagtcagcgatgccatactgatcttagagaggaggaaactaaacctcagagactcagtagcttgtctaaggtagacaaggtggtaggacttcagaaattgacctaggtctattatgctaaaacctccggccttatattttttttaatcagagaaaaaccaattgttatgagaaagcagaatgacacagcagttattttgcatctctttttgttgtaaagagaacgatctttaaactgggaatgttgaaacaaaatattgagagccaagagaagcttggctggtagatcttggtaccctgtccttggactagtgacttcaccccatcacctatctgttacttacaagggggtgaatcagggagctatttggggccaaggttttatgagaaatcaagagatcactatttgcccgtagaagaattcatatctttggttccaaacattatagtagccccatgttatgacataaagagtaggaggaatataggcttgatattgggcatctaaatcccagatctaccagtgattgacttactggtcttgctatgcctggtgtgactctgaggccacagaagatgctcacacaatttttattcctttacccctttcacgtgttttattttaccccatcaggaatctttgagaaagcgtgaagatgagaaagatgttggaagactagggagagtagaaagcttttattttaaagtgttgttttttgttttaatgaaaatctagaatgaatgacttgtattgtttgtgaatacttacagaaaaatggcaatgagcaataagagctggggttgagccattcgccagaagaaaagtagcttggtagagcagggggactgtggtgtgcatagtctactcgggtgtttacatctctcccaacatctttgtgaatgaaatggagaagcaagccatagatgaaaatacggatgagacctttaagctgtgcagtttacaacacatttctggaccctataaaatgaaattaaaggaaataagtggcaaaacaaatgaaataatctagactatactttagagcagtgtttcccaaataatattctgtcaaaatctgtatgatagtaggtattttatcagaaaagaattccaagggtcattatatctgaaaaattccacatctaggttttagagagccatagtgcacatgaacttattaaagactctgagaagttctgtagggaggaaacctgttcaatgtaatctcactcagcatttcctatatgtatttaccatgggaccctgtttagggaagatctcttaatatcttccaggcactagtgttccactaaactcatgctgttttagagttatgaactccaaactatcagtgataacctaggtttggggtcctgagggatggaatggcattggggttaaggatataccatctagagtcaaaccgtttggattcagaacccagttgcacaacctgtgagcttgaagacctcaagaaaagtatttaacttcttagtggctaggtttcctcattctaaaaattaagataagaagtagaagttctagtgaattggggccaaatgattaggagtataccaaaacccttacctgctaacctacaacatcccactgacctcagtagattgttccaactttcaattatttatgcattggtttaaacattttctgtagtgctctatatttttagcctctactagctcatgtccatgccttttaggaaaatactctcctgagagtctttactgtaagtggcttagtaatgggctacaaaatgagaagcaggctcctgggggaagtacactgttcaccttaccacatattctctagggaagggaacaagcaaacaagcagatgtacagagctctgagctccaaggtcatctctgacgtatgtgggtaggttcaaagacagcatcattcaattgatgaagacacagaggctcagactaaacaagcttccaggagctagacacttagagacaaaaactgcttcagaatttaccttccatttttacagtagacagaccttttggaagcaaatgggaaaggcacagtatctattagtcatacccacttttttgtgccctactcctgcctaggggatccactcctccccctcatcagatattcaatgatctcatcagatacccagtgatcatgacctcatcagatattcagagatcaatgacctcatcagatattcaatgatcacagaggttgtggcctattgatagcatatgagttgtgattattgctccatacataaggttgtttttttttgtttgttttttgtgtgtgtgtgtgttttttttttttgagacagaatctcactctatcccccaggctacagtgcattggtacgatctcagcccacctcaacctccacctccctggttcaagagactctcttgcctcagcttcctgagtagctgggattacaggcacctgccactatgcctggctaatttttgtatttttagttgagacggggtttcactatgttggccaggctgttctcgaactcctgacctcaggtgatccacctgccttggcctcccagggtgctgggattacaggcgtgagccaccgtgcccagcccacagggtctttttgacctagaatattttaccaatttggtggtataggaaaagaaacacaaagaaaagacagttcttttctctaaaggcgtgagctgagccagattaagctgcaaccctggctttctcctgcaaggagtctcccctgagttaggcagccccagccacctggaagggagggtgggggaagaaataatctcatgaagtgggaggtgactgaaagaaaaaatgtccaaagaatcacacaggagacatgccaagaggaagcaagagtgagatcccaaaagatggtctttggggtgagaatcccatggaaggtccagcttgaacctctccaagatctcctcctccagactagagtgggggataatcttgagctccctgtagaatttaattgtgctgctcatactttcttgaatatttctggtttcctgtaaatgccagtgggtttaatttccatattgttggtcaactggggcattgctggccctcccagaagaggaaatcagtgaaacatgtaagaagttccatcagtatctccttgcgacttctccaacctttgcaactaccgtatctcaccccaaatactgttgttgccccagacagttcctgtcttgtcccactacagtctagtcttaaaacagctgccagaatgtgtcttttaaaacatgaatcaaatgatacctctcttctgcctaattacctctcatagcttcttatatcactcagagtgaaaaccaaacaaagttcaggtaatggccaaaatggccttccatgatctattcctggtaacttctctgcctggtgtcttcacacccccgcttcctgctcactctgccccagtcacaccggtctccttgttggtctgccctcacattgtgcattctcttactccaggacccttgcactggctgttccctcacgtttttctccctcactgatttcaggttcatgcttaaaggttacctgtttatttttttatgacttcgtggctgcattgtttaaaaatagcacccccatgcacaatggtgtagccagtccctctttcctgcttcatctttctccatggtgctgaccaccatctgaagactgtatattttacttatttaccataactactgtttgtctcctcctttgagaacataaagctccacaagggcagagatttttttttctgcttttcccactgttacactccagcacctagaacagtggttaacacaaaaatggtgcttaactgagtgaattattgaatggtcctgtctatttacctaagaccagtgatttagggcattttttgtaaatgtctttgatgttgtccccagcaacctctgaaataggccaggacataacttcacttaagtttactccaagataacagcacatagtggtccaagaagttctcccttgccagtctattctcatctcaaaagatgcctaggctttccttctttttgaagtgtgctctcaaaaaaaaaattaaaaaaaagagctgagaaaaatttagggtaaaacaaatattgaaggataaaatgacacataaaatgtgatgtgctccatctttcagagaaatgggtatctataccaagttgaggaggcagagtataaggagtacctactgaatatatattaatgaagacaaaaattattaggtgcagacaaaaattgttgggtgcttttgcttttttaaactctcattaagctgccaggtaaaattatctttattttaaacacagaataccaacttcagaatggccaattaatatatccaaaggtagtgagtagcagaaccagaatttgaacccagatagcccacatacttgcaagataccattatctcttgtcagtgaataagatagaggaggaggaggagacggggcgcccagtatgcagtcaaaagaagatccagaaagacaagccaacttttcaccattatgaactctgtttctatagttttatttacttgtgaccaatccccctttagaaaggctttcttaaaggataggagaagaaagtggtttctggtgaatccttagaaaaattggtgattcatttcaccttgcctatatcttctgtttgaatcctgattagcaaggttttatgctgccatcttttatgcataaattaaatattagacaaatcgtgaaattgtttttgaaaagttcaagcctttattgccttccccgagatgcccacttggagtaatatcaagagtgctttctttatccctcagcaaagatgtggtgagcgtatatgggtcaatttgtaaacctacacaaacctcttgttgaaaagtaaaaattcatttgttaaaagtatgatcctaatcaggcttgtaaattaacttttgaggctctcttagcaatcaaaattattggtttctaaggatccatactagtaaattagaaagacgccaataaggaaattacatgccaaactggagggttattttttaacaaattgactcaaagggaaagaaatgatttaaacaattcagctctatgttcagtgtgtaattaaccagaaacttcactcatataagacttttgccaagtaagtagcagttacataactcccacaccccaccccccatttgtcagcccgggcataattttttaaacattttttaataatcccatacctatatctattataagtatttaccccaatggttatcattataaccatttaacagataaagttaagtttttattataaaagtaataaatgtgtctgggcacagtggctcacgcctgtaatcccggcactttgggaggctgaggcaggcggatcacgaagtcaggagatcaagaccatcctggttaacacggtgaaacctcatctctactaaaaatacagaaaattagccaggcgtggtgacaggtgccagtagtcccagctactcatgaggctgaggcaggagaatggcatgaacctgggaggcggagcttgcagtgagccgagatcacgccactgcactccagcctgggcgacagagcaagactccatctcaaaaaaaaaaaaaaaaaagcaataaatgtttctaggaaacttgaactatgattttaaaaaaagagaaagaaggaaacaaaatcatccctaagcccttcatctagagaccgccactgcactcatgtcttgaagtgcttactgacacgttttttaatacatgttgttgtttttgttactcactttttttttttttttttttttttttttttgagacggagtctcgctctgtcgcccaggctggagtgcagtggcgggatctcggctcactgcaagctccgcctcccgggttcacgccattctcctgcctcagcctcccaagtagctgggactacaggcgcccgccactacgcccggctaattttttgtatttttagtagagacggggtttcaccgttttagctgggatggtctcgatctcctgacctcgtgatccgcccgcctcggcctcccaaagtgctgggattacaggcgtgagccaccgcgcccggccgttactcactttttaatgattgcctaatcttccattgtgtaattataccacagtccacttcatcattcctctattatgggagtttagttagcttagaagttttggtgaaatgctatgtgaattttcccataagttaaatctctagcactagaaaaactgagtcataaaacataaattgttttattgttatcctcaaagctgtggaagtggatgcttccaggggtggggtatgagtgatgagcactgtatcctatggtctgcttcccagaacttcttctttgctcccctcccttccaaaactctcccacaaataagcgtgccagaggtgtgtccattctcggttcttggatttgctgtgctctcagctctacataaggcagggattggttatgtctccttttgaagtttcatcttaggtaaatagtaggtggaacctacccattctctttattcctgagccaagaaggatgacattgctctttgctttgtttaacaagtaatctctgtttgccagagaaagcttcagatctatctatatctctctggcattacctcctcactattctctctctccctagtggggtcccctctgtgggtttccctagccacagccctcaggggtgtgttgtctgcagttggagccataaataatggctgcaccgtgagcctgtttgaggttacttattatatttactacacccagaggttttaattatttgtgtttgacataatggtagtaataataatcaaagttgatatttgtggagtgctcactgtatgtatgcctggcaggaaaggcagtgtggttaaaaaactaatgactgaaattagaaaaaaaatgggcctcgctctctagctacttgcggccaagcaccttcatctctgattttatttttttatgtctcccttaaccttttcaaaggattgttgggatggtcacagaaaagaattctatactataaagtgttacttaagtatgaaaaggcatcactacagttcttttgaaccttataccgttaatgatcaaggcaaaagatacacctcttcaactacaagttcagtgaattttaattttttgaaattttagagttatttagttatattttcagatactttctgtccatttaaatattggaataacccctattatgtgtttgtttgttttaataaagtgtatatgatactccttggttttctccaaaataaatagcattactaaggaaatcacatactttctgactaagtagcagatgatttgctgggcatttatgttagaggaccaactaaaataaatgactttgtttttgtaataaccataagagctaaaatatcccatctaaagacactgaaattgagaagctgtagtaaataatcattattttcacatttttatggcatttaatgaaagcagcttcccagctctttgcacgaatgtgggagtgggatgcttccatgcttagcaagtgcttccagcaggaaaacactgactgatgactgcaggttgaaatctttgtgttgggggttcagtgtattttagtagactttgccaagtgttgctgctgaccaacattcattttttagttcatttctgcttcagaaccagtgtaaagagtccaggttttacaagaaaactgtggcataattacagatgagctccagtcccccacagcccattcttggaaagggacaagagagttgtaaataaaactcttgagtcatccagcctaatattttttagaggatgcatttggacaaattatacaacccaccttgtgcttcttatttatgtctggtgattttgcacctagcactcagcagatgccatagtaatccagaggagtccaaggaatttggttctacaattagggacatttgagacatcaagcaaactctgatactcaggcagttattgcctttgagaaagaagttattgccttttttctgataatgcatcacagctacattccttaaaaactctaagactatttatacttgtgatgttccaacattttttgagagcattttaaaaattgttttttcactgaggtgtttaagaatagccaagaataaatgtcagtttgaattatatatatatatatatatatatatatacacacacacacacatatatatgagagttaatatgaaaatataaaaaattattacaaatcagtaaaaaatctctataataagaaaatggtataaactgataattcataaaagaaatgcaaatggccactaaacctaggaaaaatgtttagtgtcatcagcagttaaataaaaaattgaacaatgagttatttgctgttttcatctgtcaagtcaagaatattgaaaatccttaaaggtggtacaggtgagaaacatggatcctctagtgggaagatagaagagatgagtatagactttctggaaggcaatgggacaatatatagagaatctttaaagggtagtttctgattaaacaatttgacccctaggcatttattctgagaaatcagttagacaagtaggcaaaactttatgtatattgctgaccgttatttctagtggcagaaaaacaagaagcaacatacccatcactagggtattggttaaagaatttatgaccacatctgtgctgcggatcatcaggcagccactaaaaatggtctgatgagggtacgaatggctaatgtaaaagcaggaaatatcttattcatccttgcattgtccaagtacctagcctggcccatgatatttgatttaaagacgatattcctcagggagatatgatgtgctctttttttcccgttggattcctgaaattctctttatttagccacatagacaacagagtaatagtcaaatctgagggtggcatggaatatgatggactttttccattttcctacccacaaactcttctcatatccttggataattttgatccttttgaggtgattatagaagacgtcctgaatgtaatatcttcttaccatttccactcccaccaacatagacatagccaccttcacgtcttgtctgcatttcagcaatggcctcttgacaggacttgcttggtctatcttatcccttaaagtttattctcaacatagaaattagactggtccttttaagcctatgagatcatattcttcctctgctcaaaatcttgcaaagatccctatttctttcagaatcaaaaccataattcttaaaatggcctgcaatgaccctgtgattattctgacactgtctcctgttattttccccttgacctcatccactctcatcaacccaccttgtggctgtctcttcaacaggccaggcatgctgccaccttccggccttcacctctctcaactcctttaggactgtacataaatcttgccatcccaatgaggccccatgtgcctgccctatttagtcctgcaatctgccctcaccctgtctcaggaatgcccatttgcttccccctgctctgtgttgcatttttgccttagtctttctcatgataacatgcacaaatgagtttctgtttgttgtttgtatcccctcaacttgaatgtaagctttataaaggaaagcatctttattttgttcactggtggatcccaagccgctagaaggatgattggccactgttgggtgttacaaatgtatatatttattgaataccttgaatggaaagtaattttatatacatatatatatatatatatatattttttttttttttttgagacagagtctcgctctgtcgcccaggctggagtgcagtggcgcgatcttggctcactgcaacttccacctccgtggttcaagcaattcccctgtctcagcctcccaagtagctgggattgggattacaggcacacaccaccatgcccagctaattcttttgtgttttcagtagagacagggtttcaccatgttggccagacttgtctccaactcctgacctcaggcaatctgcccacctcggcccctcaaagtgctgggattacaggcgtgagccacagcgccaggcctatataaatatattagtggtaattatattagataatttttactgagcatttactatgtgccaagtggtgcacatgtatcatatcatccaacactcccaatgaacttatgaagcaggtataattaagaccagcaagttacagatggaaaaactgaggaatggaaacatgaaagtacatcgtctcacaagcaataaatttagatattagatataaatcaaataagtctgaccccctattcaagcagaacaatgttgcttctatattatttatttattgtaattccatagaatttcgtttggaaagtgggggtgtttcctatgtaaatatttttggcagccactgtcctaaatattttaaccaaatcaaaatcttatagtggcaattctaggcctttagcagattttcatgtgattaaattgtgacatgtgaactaactgccccacctcctgccacttagtacttggttttaaagaagaaaaagtaaacaacttttgcaaatttaaggacttttttatactcttataaaaataattgtattcttgaactctccattttgttgcgttaggttttcctgttctggttctgcatctttggcctgcgttagttccagtgactgtctcctcaccctccccattctctcttctaggagaatgatgtaaacctgacccacattgaatctagaccttctcgtttaaagaaagatgagtatgaatttttcacccatttggataaacgtagcctgcctgctctgacaaacatcatcaagatcttgaggcatgacattggtgccactgtccatgagctttcacgagataagaagaaagacacaggtaagaattagaggaattttgcaacataagtaactccacactgtcttcataaaataacagcaatatacatatttaacagcatatttaaatatatgtatatttaatatatattgctgttattttgcggaagcaaaattaatatatatgtattggaaataatgccttggaagactgtttgggggattaaatgagtggacataggttggggacctaggcaagtgcctggtatattttagacatatagtgaattttagttatttttccccttcctaaagatagctatttcttttttcttttttttttttactttataagcttttaatttttatttatttttatttttctctctcttttttcttttgacttttattttaaattcagggttatatgtacaggtttgttacacgggtaaattgtgtgtcatgggaatttggtatacagataattttgtcacccaggtaatcagcataatacccaataagtagtatctaattttcaacaaaacccatgaaagcaagcaatgaagaaaggaattcctagtcaataaatactgctgggataactcgaaagccatatgcagaaaattgaaactggaccactgccttttaccatatacaaaaatcaactcaagatgattgaatggatttttgaatctctccactccaaccaaagggatctcttcaagtcctttttgtaacatgccaattccagagctggagacacctggctccttgttactagggctttcattgtcattttccatcttcttatctgtctcttcttctcatacaatctccttgtgggcaggtagactctcttacctatatttatatcctcagagtttagcacactgcttggtacacaggtgctctgcacatatttctgagtgaatgactaatataggagttgtcaaaacttgcattgtcccattatttacgtactgaaatgctactcatcctccggggaggaaaagggtggtagagtatagaaattataagtgtgggcttgaagttgaatagactgtggttcaagtcctacttcttccacatattgagtttgataccctgacaaattgctttaactgccctgacctcaatttttcatagggcttttgtgaggattaaatgaagtcatacataaacagtgcttagaacagtgcctggtgcactgtagggctggacaaatgatagcatgtggttgttattatgattatgattagcctgaaagcaatacagaggaagaaggtgactgctttttagggcctcaagcatattcaaatgaaccattttttaatagactttttattttattttttatttttatttttatttttttagacagaatttcgttcttgttgcccaggctggagtgcaatggtgcgatctcagctcactgcaacctctgcctcctgggttcaggcaattctcctgcctcaacctcttgagtagctgggattacaggcatgccccaccacgcctggctaatttttgtattttccatagagacgggatttcaccatgtttgtcaagctggtctcaaactctcgacctcaggtgaaccacccgcctcagcctcccaaagtgttgggattacaggcatgagccactgtgcctggccttaatagactttttaaaagagcagtattaggtttacagaaaaactgcacagaaagtacagagagttcccaggtctttcatccctacctcagtttcttctattaacatcttgcatttgtgtggtatttttttttagaactgatgagccgatattgatatattatcactaattgaagtccatagtttatattcgggatcatgctttgtattttacagttttattggttttgacaaatgcgtaatgtcatgtatctaccatttcaatgtcatacagaatagtttcattgccctaaaaaatgccctgtgctccagctattcattccttcttctttacagactccttccagcaaccactgctctttttgctagctccatagttttgctttttcaagaatgtcacatagttgaaatcatacagtatgtagccttttcagactggcttcctccatttagcaatacatatttacaaatcctccatgtctttctgtgacttgatagctcatttctttttgttcctgaataatattccatggtcaagatgtaccacagtttgtttattcattcacctattgaaggacatcttggttgcttccaatttttgatgattatgaataaagctgtgaataaacatttatgtgcagtttttttgtgtgaagataagttttcaactgattcaagtaaatacctaagaatgtgattgctgaggttaacttctttaaaaaattattttttttctactgtaaaatcgagtttctttcaaaaacacttggaaagactttgggtcaagaggagttcaggcaccatagctgaaagaagcatttgaataggcagagatgctttaaaatgagacaagatccaccccgtaaaacaggccactgaaacattttttaaaaggtagctccatggcctttctaggagactcatctctgccttcattctcctgtaggtataaccaaggcaaggaaagcccactccagtgttctggccttgtggagagtggacagccatgcagatgggctcaggtccctggagggcaggcacttggaattcctccctggattagtcctatcctgccttctttccttttcagcctcccaagctgcttccccaatgactgccctcccttgcttttttccggccacctgctctcaacaggagctgcagaccctttggacaaagggcctgccagatcctggggcaattcagcctctggttggagcaggtggaggctgggccagctggggccatgaggaaggaaatcaaagcaattgacaggcagacagccagcccctggaggagccagggaatatatagtaaaccagctggagagccggcagcctgaactggaggctcagaaaggaggttcttagtggggacattgagggggagttaagagtgcagattcaggaagcacggcgaccacactcggtgtgactttgagcaaatcattgacccttgcagtctcccactgtatcaaaggggagtcacaagagcctctgccttataggattggtgaaatcacacaagtgaagcactgggaacagagcagagcatgtttaattaaggacttaaagttattctctattcttaccattatcatcattattattataaacactggcatgagcacaagagcgaccaaaatgcagcctgtacacagctactttttcagagtctggcaactggaaaatgacctgagaggtcatgcagccctacagaccccttcatttttcattgtgaaaacagaggctgtgacttgccttaaggcaaacagtgggttctggggggtcatgcgcaagggtgtgttgagagcagctctgtgccgggcacagtgctaggaaagaaagggtcaatctgcctgttcttaaggagctcacagcctggcaaaggggaagacacacccaggtaagtagaatagagggacaggtgctgtgacaaagacagggttggtgtgattccgcctgttctccactcatgtttagctctgaggatccaggaagtaagaaagtaaaaaagctaatgttttcctttttttgagatggagcctcactctgtcgcccaggctggagtacagtggcacaatctctgctcactgcaacctccgcctctcgggttcaagccattctcctgcctcagcctccccgagtagctgagattacaggcacatgacaccacgcccggctaatttttatatttttagtagagacggggtttcgccatgttgttcaggctggtctcacactcctgacctcaggtgatccgcccacctcggcctcccaaagtgctgagattacaagtgtgagccacagtgcccggcctaaaaagttaatgttttcacatagaggcatcatgtaataaaagttgggtttattggagcctggaggaagcacagattcaattccctaatggggcttctcgctttcttgctcaaaatgtcaaagttgttgatatttgaagtgggatgacattttccctagggaagaaaaactagctaagaccaaccctttaaaataacatgtgttttgtgacccttatttcttcagatgattggtcacccaatcccatagtggctgcccccacctgaccttaccatacctgtaatgagagagctgatgttgacatgccacgacctggcatctgccaagaaagactctttgggtttctgtggtagtttccgtgaagtggggtctgggccaagaaacaggtttttcttaaggggaacaaccattcctttgcaaagttgccctttctataggactcagtgggagaacagtcagaggaagaaaagcattgtagtagatctgaacctttgattctttctccggacaaaatgccctttttattgtggggctcagatctcagaggcgagtctgacagcaggttcaagtaggagatctgaacccctcaaatcaattaagctaaactactttccactctagtttttaaaccattcaaaaagccatgtgggtgatagaaaataaaagtttttcagtttcttaattgcgaaagttccccacccaaaacagcttaagagaaggttaattacagcgacatggtaaagaaaccccaaccttctcaaatgcctcctggagaagctgatgtgaatttaataggattttaatccagagagtcttttgaatacttgaggtctattctcctgctaccctctttcctgatgacttcaaatccttcttcaacccaacatgaaagagcattaatatctttcatcgatcaatctactaatccttttacctttccctttgagtcgactgcatgacattacatttagtgggggctagaaaattcctacgtggagagagattgcagccaggagaagcagacagacacaatgtcttgggtagacagaagttaggaacatcaccatttgagaaatatgtttgcagttattttccaagagcagataaatatctgttgggttttgtttaatctatggtgattataagggtcctggtggggaagaaaagtgagttcaaattgccagaacaactactggttctgtggaaagcagaaagacctatctgcctgtctatctatctatctatctatctgtctatctatctatccgtctatctatccatcatctatcatctacacctgtctatctatcatctatctacctatctatctgtccatcaatcatctatcatctatctatctatctatctatctatctatctatctatctatctatctatgttgtctgggaacacttatgattactgtgagaagacaaaagcaacatcattatagtcattccttccctcttgttgcccctccttgccttcttgagtttcttctgcttcaacattgctgacctgaagaactgtgctgagtaaagctgacatttcagatcaattggggttgaagggaggataggattccttagagggctctgaaaagcccctgggattgtgggcaagataatacatgggtgtgcatgcataatttttaggagacaagatttttcaaaggggctatggttcccaaagagttaagaatttttagagagaagccgcttagggctggaagggaatccatctggttagagtttttccccactcccaccacctgcacttttctttcctctctcctttcctctgcttggcttttctgtctccaccttcccattgccctcttctcagttctaaaccttctcccgtgcatttcactttgtgcattccatgtgtgcctttcacagctgtagatgtatgtggctctgtgtctgcaggagaccaagtatctgcatgtttgcaaaaacacacaggattggctgtctttttcagtctttacctggatgcttgctggatgcactgatgtagcactaagtcctggcagctggggaggtcactcgtttcagcaaactgcctcactgagacaagcagactccagctgagaggatcagcccattcagggggaggtgacaccaacccaggagtgggaagcagagtcccttcatatccttggtagactgtctgctccctgcagtcagtcacaggcaactctattcattggcaaaggaagatcctgagcaaatgctatttctgcagcccatctagtttgccaggtcacagagcttcaagctcaggaagattacaaaattataaggaggctctcattctaagaggaatccctcagtgatatgccacacccagtgttttccaaattctttcgcattaggttatctcatttaagctttgcaacaaccaactcaggcagctaaagcaaacatagtattattcttgttttcaatattagaaaacaagtcagaaaggtataattaaaaggttgcatggattttccagttcaattcctgggctgtagctgttcggccaagttgctttccctctttaggcctcaattttctcatctgcaaatgaagaaatccaggtaccagtgtggttgtgtggattatatgatataatttgcataaagtgcctagcgtgtagggcccatgcaaaaggttacaagtaaacttacccttaagtctctcataagggtacacaatgaatcttagggttgagcaagtccaaactcccaaaactcctgaagtttgataaacaaaggcaaccgtgaaatgccatttgggtcagtccaaaagattgtgaaaggtagaaaaatttagactgggaatacattttctctgtgtgacaggtgtgttctctcaattgaagaaggaagtaaaaggacatggaatgactaactaaatatcactttgccatcatgctggattgagggagtattgtcgtgatgcactaagggccatgaatttagagtcaagagccaggatttgggtctccattttgtacactactagctaggtttgaattccatctgacacccttccagatggatgaccgcttctccttcatctgtgaaatggagcaaagacccactctcccaattcctgtggctcatggaggggattatgtggagtaccctgtgcataagggtgcttgaaagatcaaattggacttgcttgagttgaataggcccttgatcttagacatccttaagtttcaatagggagagctctctatgatctataaccccagccaataacaggtcacttgtcaccaccagctccgtggacatagacacttagcaggccaataataatatataaagagttggtggcagccaccacctcattgaagccaggcttacctagcagccacggagacaacttcatgtgtgggattgtatgagggtccctgtgaatgatctctcatttccaaatattttttgtgcttaacatcatccacttgactttgtgctagattgcacatggcactggcatatgagatagaaggtcagcttttcatgcagcttttctttctccttcccttctttcttcctcgttccttccctacttccaccatcctctttcctccttgcttccttctttcttctttcccttttttcttctcatcttcctttctcttgtaccattctgacaatactcaaaaccaatagcctctctttttttcatcctcttcgacatttttgtagcatttgatacaaatatcccccaggaattctctctttccttagcatgttatgaattatgtggcccttactttttaaaaaccttgactgttgggattttcttccttctcttactactccttctcaaacagcacagagtcagcgttgccaacttcctctctcattcacatctatctcctaattcagttgatcatttatgctaccgatattgattgagtgcccactcggtgtcagccacatgataggatgcaatagtgaaaaagacagacatggtgcctagacccatgcattttgtaatctagtaggttgtggctacatggcataatacatggcaatgatagagaagatggcatgcctcagtagtcttaggaggtgcaccaaggcactgagcccaggcgtggggtcagttgatgagaagaaggggagcagggccaaataagtgctcctggagtgacataaccaatacatggaggaggctttagatgtcttctgtttgacccaatgttgcttgaccataactagggttgtcagtgacaggtaaccagatctcaatgcaatggtgagctctcagaagacagaattagatatttggggatatgggggccaacctgccaatggataatgtttatgagatacatagtatcttaaaaaggatattgggagggtagttgtaatttaggtgggtggttggaataaatagccctacaggttattttatttattcataattccactcatatctattcactcactccctccgcttattaagcacagtttcactctttacttcatgtgtgagatcccttttattcatctggtttggggattcttatttttccatgtgaacagagagaacagatgctttgtcctaaaatcaccactcctgacttctgaccactgctgtctccaggaggcagagggtaatagctgggcatcatcagccagcctttggctcatcattcttgccaagagcttcctgaagagcattccttctccagaaagaaagtagaagctacttaaaagagaagaataaaaccctcaaaagtcttcctcctgcaggatgttggcatgccatctcttcttcctttgtgggagctgtggagatcagcacacagggactgcttctctggggggctggaggccattgcctaagaggagacatccgggagcctgggaggaggtggtgaaaacagccttctatttcagacccaagaaaccaggatttattgctctctctgagacaggctggaggcaagcctgggtgccttgctggctaacccctggggctggtgaacatcgggtggagggaggggctaagattggactcagcctgcaccttgaactgctgtaaattgaatgggcctcctctgacccactggccaggaagcaggctctggccaggcctggggggtcttttgctcagtggtgctcctgagccagccaccccttggcgtcccggctgagcagttgaccccgacttaatgggaccactacgtgggtgtccagggccagctctccagcgggctgcttcctttggagccaaatcaatatttattaatgatctgcccccaccgggtgcctccgctccacagagggcctctgttgccccagcctgcccaagtcattcattaaccgcggagcccagccgcccgccggagaggctgttaaggggctcacagaggccagcccaccggccgaggtatttggcaaggccattaatgagctaatctgatttaacttttcaaaacggaggcctgggtcgctggggtcagtctctatttccagctttgtgagagagaccgggtagggggaagggacctgcagccttcactaaagaaaataaggggtatgtgaagagaacttaggttaaaaagtgactatccctaaatccagggatgctcaggatggggcagactcaaggctgtcctagggatcttcttcaagcacctttagagccttagtttgtcacgcttcctttccttctcaaggtgggagaaaaggaatctaaaatttaaaagcaccccttcaccaccaccacacctttattctaagcccagcattgctttttggtgaagtgcatcggctgcaaaattgttctttcggctcagctagctcagtgatcttgagcaaatcactttgtctctttgagcctatttgctcatcagtgaacagcaataatgtctaccacctgggactgttttgcgaattaaaggagatgatgaaagtaaagcacttagcacagtatctggtgcataataagcgctcaagaaaatgtaactttagaggaaaaagggtagtcctacctttttgcctgggaaaaatcagaagagcccaggtgcagaggttagagacataagcatggactggcttggcctctagtggcctctgggaccactatcttagtcagacaagcaactctggagtttattatgaggctcaggtgcaaggactgatgccacagatgcacctgttttgggtcagtttcttcccaccccaaagaaggaggcaggcaagtgctcagcaccttgcccatttcacagatgcaaagccagagacgcaggaattaagtagtttgctcagacttccatgttgtgtgggtgggaaagatgagacttgaactcagacctgctggcttcaaacccaggatgtgcacaccctttgcacaatgtaaagagtcagcacatgtgtcaaggctcggcactgagtttgtctggggtcctctgtggtctctcctgaggtcctcacattgcctgcttcacaactctgcaagctgggaagtgagccacatcagggatcgacccccagtccccaacacccagcacccaggtgcctctccctggtcttgttcctcaggctttgtccctgctctccaacatgacagctggtgaatttctcttaatggttaggtctgacctgggtcctcatcctaccctagaagacaaataggctgcacccaagggcattaactttatgtaagggaatagatcaaatgtggagctgggctgctgcctggaggaagtgagcaccagagcttctcaccctttctcacttgtccttctataatgataataccactatcagatacttagaagcacttgtgtgccagacaccattctaagaactcttcatacatgagttcattttaatcctcccatcaaccctctgaaggacgtactattagtatagctattttgtaaatgggaaactagggaacagagggcttaagtaatttgcacaaagttccaaagtagagattggagctaggtggtctggctccaaagtgtgtatgatgagtccccaggctttgccacttctctggcctggctgtgttttggaccttttcttgaagatgatggggtcctgaagccaccaaaggcccctggactcaggtgagcaccctgcagcctcgcagtgctacctcggggtccctcacagcctctgcgacaaggtgcagagctcagaggtctgggatgtggtgagctgttttgatctttgtcttctttttacaaagacttgaatcctctgagtcttggcaactttctcaagttcttcaaattttttgttttcgttttgttttattttgtcttgtttctcctaccaagagggctgaatgaagccaggtggcccgataagaattttcctctggagaaggaaaaagtcacccagagctagaaatatgctggttctgctgccctctggcgttcgctgagcgccagccagcctgcacagccctgagtcaaggtggtgcaccctgactgaggtctgtggggaagaatgttgtttctctggtgggaggagaaaggaaaatgaggctgtgcatttgggagctgaacaaatgtagtgactgtacttctgaaaaataaatgaggttgacacattgattgaagtggagctgacttttcaagtatcatctggccagcctcagcccttcagaggatcccacaggtctctgaatatgaaactcaaaagggtttgctgcgccgataaatctaatacccacatgttacagaaactaaagcccaagattagaaacctcttaatacccaagctggacagagaaccagcttcctgatcccaatctctgttctttcctcctccctcctcctcttcttcctcctcctcctcctttaatcatcatcattaaaatctttgtcatattaatggttaacattgataaaacacatattatgggccactgtgctaagatgtgtcatattgctgcagcatttaattcatccaataatacggaaagagcattttaattcattttgtgaataaggaaactaaggctccaggagataagacacttgccagttacacaacgaaataagtggtagagactttctaggcttgctggaaaactttccactctgctctctgctatgataagctaaggatacagtagaaaaaaattttatatatatatatatatatatatatatatatatagtgtatatatatgcatatatatacagatatatatagtatgtgtgtatacgtgtatgtgtatatatacatacacacatatgtaactcacagctgagcagtaatactgtctactatgtgccagtattgttttccataaatcacgcatattaactcatttaacatcatgttgttcttataaagcaatactttctagtactactattatcaccatttcaaagataggaagagtgaggcacaaagagatgtaataacttttcctgggctcatagatagtaaatgcagagataagattcaaacctgggctgtctggctgttttaagactcttaaccattgctggactgactattcatgacacaaataggaaaccaactctggactagggccagatcctgagtatcccagatttcattgagccatgccaaggcaatttcaagtcaccagggtcttccctctggggtctagaggcagaggatttcatagtaaatagcatgttgtctttaacatcaaaaggacaagaggtaagagttggcaaggatgcggagaagagagaacccttgtactctgctggtggggatgtcagttggcacagccattatggaaaacagcatgaaagtttctcaaacaattaaaatatagctaccatactttccagaaatctcatgtctgagtatatactcaaaggaaatgaaatcagtatgtcaaagagatatctgcaccccctgttcattgcagtattattcacaacagccaagggaaacaacctacatatctatcaacaggtggatgaatgaagaaaatgcgataccctcctgacacacacacaatggaatattattcagccatgaaaaaagaaatattgtcatttgggagaacatgggtgaaccctaagagcattatgccaagtgaaataagccagacacagaaagacaaatactgcttgatctcacttatatccaattcaaaatgtgttgaatttatagaagcagagagtagaatggtggttgccagggggtagggtgatgagagaaattgggagatggtcaagggtacaaagtttcagtcataagatgagcaagtactggggggtcaaatgtactgcatggtgactattgttaatcacactttactgtgtacttgaaatttgctcagagagatctcaagtgtccttgtcccactccatacccgcacaggaaaaatgactacatgagatgatgaatatgttcattaacttgatcatggtaaccatgatgtatgcatttattaaataattacattgtatttataattttataatataaatatatatgtgttatataaaatatatgcaataggtcaggtgcagtgacttacacctgtaatcccagaactttgggaggccgaggtgggcagatcatgaggtcaggagttcgagaccagcctggccaacatggcgaaatcctgtctctactaaaagtacaaaaattagccgagtgtggtggcacgcacctgtattcccagctacttgggaggctgaggcaggaaaattgcttgaacccgggaggcgtaggttgcagtgagccgagacaacaacactgcactccagcctgggtgatagagcaagactctgtctcaaataaataaattaaattaataaataataaaatatatgcaatatatacaaatataattatgtaaatataaattatacaattttatgcaattgtaattttatattataaatatatatgcattttttattgttcaattataccccaataaagatggaattttttaaaaagaatttaaaaaagagcatccccatcactttccatttccttatgcttctttattcttcttcttcaagaatttcctgacattgtcatgtatttacatttatttattgcttatctcgtgttgtccctgccagaatgtaagcaccactaggatggtgactcccttgtatgcaccccacaatgctttgtgcttggtacgcaggaggtgctcagtacatatttgtggaatctcctttggtcattctaaatgtcccctaagtaagaaggggttgcagcaagaaaggacttgttctgccttatttctgggggcagcagttactgccagaattatgaacgattcccaggcaaaagagagatgatgaatgagtggaggcaggctacctccgcagtgtggggatgagattatccatggtcctgaacatagaggaaagagtcaggcccccttgtccaggtgggtgccattcattgaaaccccttggtggcaatgtcctggagaagcaagaaagatcttttagaagatgctgagccctgggtgactctaaagtgctgattcctttctcaagcccatgcaaacctgggtgggaaacaactcccattcttggcactgacaacagaggttcagtgtacaacgcaaatgctggacccactgaggaaggagagcttggggaggagtgtaggtgacaaggcgggaagccacgttcctcaccaaatgaacagagcatggtattgagtcatccgagactccaaagtttcagcagttgggaccaaggaggtctatcaagagacttgccctcattgttcctcagtttcttcatctgtaaaacgggataataataatacctacctcaaaggactgttgcagaaattgaagggggtagcatatgtgaaatgtttagggcagtgtccaacacacagcaagtacgacagaagtgttacctggagtgatggctgcagcatctgcctctgttcttgctgtccatagggagccaatctggaaaagagggctgtgctttaggggcatggaaacttctgggcaggaaatctggcttcacagtcagccctccttatcagtatgctctgccaccttcccatgattggcaagatgcattgacgatcaagaccagaggccagagagtcagctggacctgcatttgaatcctgactccactgtttcttagcagtgtgtgtttgagtttgcactaaacctctctgtacctcagtgtcctcgtctttaaaatgggaacattaatagtaccccccccccacaggtaaaatatttagaacaccattcagtgttagttttattgctaacatgggtggtagagagcctaggttcctcagctctgcagaaacaagggtctaaatggacctttatgaactgctggaatcagctctccttgttttgctggaatgcagctgctgctcctcctgaggctcctgtttagatcacggagggaatttccccagattggccactagatagcacacatgctctttcctgccccatctaagcaggtcagaatcatgaatcatgggtgtcagattgaaagtcacgttttatgtaccagacgctgagcggcgccctttgcttgtttctcatcactgcccacagcaatcctcagattcaagtagctactccaccagaaatgctccaccagaagtgcctggcacgtaggaaggcttcaaaaacacgtttgctgttcttcctatagttgtgtatcccagttgtttattcctcctcctcccggaggaggaactgagacacagagaggataagtaggcagatggaacccggattctaagccagaccgcatgctgattggaagttcagcatcttcccctcgacctcatttcaggggaagttctggaagccttgcactcacttcagggttcccaccacgtctattttggctctctggattctttttgaatctaccactttcttactcctggtgtgatctcaaatcagctatttaagcttttagagccccagtttcttacccgcgcaagaggggttatcatgccttccttattttgaaggtacgtcagaaatagcaactgtaccaaagcaggcactctggatggtggttactgctgtcaataccttaaatgttaacacaaccagggtgaatccattacttcccttctttcttccctccttttctttcttccttccttccttatcttgttttctccctcctttctttccttttcttccctccctctcttccctcttccttccctccttctttttctctttatgcccggtacaacaaagtacccatggtttctgccctcatgaaacttacggtccaaaatgcccttgtctctgttcattcctgggaaaatttcacctgcaatgtatcttgtttcctgtaacccacagggatgtcggtgctgccacctgcccttctccctgggcccctctctctgcaagacccaggtgttgtagtccaccccactcaagcccaaccccttccccactacactggctcagaagcaagtctgaaatcctttaggtgctgcaaggcatcttcagatcccaactatctgactctgttcactctgcttcaacaacggctttctaactggctttgcgatcgaaagattttgctgcagtgcctggggcctttgggagggaaacacataatgggaagatgggttctcatgagctcatttacagtagaacagtctggttttatataatttatattttgggcctatatgtaatattctgctgctaatggccggacgcagtggctcatgcctgtaatcccagcactttgggaggccaagggggtgggtcacctgaggtcaaaagtttgagaccagcctggtcaacatggtagaactctgcctctacctaaactacaaaaattgggcaggcatgatggcgtgcacctgtaatcccagctactcgggaggctgaggcaggagagtcacttgaacccaggaggcagaggtttcagtgagccaagatcacatgcaactgtactccagcctgggtgacagaagggaaaaaaattctgctgctaaagaaaaccatcaaagaaaactaccatgacgggtgggagggagatgagttttgagataattcagagaacatctccaggaaagagaatgtatttgggaatgggttttaaaaccggtttctaaggaaaatggagtttaacttttgaacgatagtaatttgggggttatctggaagccagcccacttgccatcaccattggctgggatccccacttctgatctcagcaaggcctttggccatgttctgccaatctgtactcaggacgttgccttctctgtgtttcagtgccctggttcccaagaaccattcaagagctggacagatttgccaatcagattctcagctatggagcggaactggatgctgaccaccctgtgagtccatggcccgtaggatgagattttttcagtgcctctcctccactcccctcccttcctcttaccttctctacttggagcaatgtacttgttcacttgttcaacaaacacttattgtgttcctatttacacgagggctgggaaaaattagcaagactttattgtcatcatcattatcatggtcattatttttgtaggagcaaatataaatcactgtccagaaactattgtctctatatactaggtctgtgtatgcacaaacacacacacagatgcaaatcatcattgtttctgcctgtgtacatctatggaggtttaagtcaagtgcttggtaaacagcaacctgtactaacaactctgccaactgcagggggcagcggggagtggcgacgttgaaactgaatcttaaaaactgagtaggagatgcgggtcagataaggaacggagagggcttatggctgaaagaacagtgtatgagaataccgagagtcttggaagcatccacaatactgtgggaatgactggttggtgcattaagtatgagaatgagagatgtggctggggcagtgggttgggatcagattgtaaaagggctaatggaccagaaagaggaacacggactgggcctgtgtcttgcagccatgggggcaggtcctttaatggtttttgagtagagggccggggtgggggatatttcatcgttccctctactctggggcagagggtctggggaggaacagcccaggctgcggtggctcagggccaggtctcacagcctccatcggtgggaagggccaccgtcctgttgcctgccctttattctctgccaggcaaatgactccttcatctttaaatgacttgcagccatttacatcggtgaaggttgagcagaacgcagaggaagcatttacacttccacaggagtctgttttctcctcacatttatgtgggtctttataatcagcaaagaatgttcgcaaaggcgcttttcaggaggcaaagcagatgcttccatcttacagaactagtgaggcccgaggagcctgatgacttttctaaggcccggtgctaaactgtgagtcctgagagctcatggtgcctgaagacaaaggcctagctagtggcagaaatccaggctcttttacagaggccaaaggcaagctatttcaggggcaagctggccttttgaaatatgaatgattgatgcttcttctaattcaaattgtaaaaccaattatagtgggcttgaaaacacagaggggcatgaggaggaagatgaaaagcaaccataatttcagttatttctatttttctctctggacagttctgcatttttcaaataatgagaaagcatatatcaacagaaacaaaggtgaatttcctccaatctcccagacttccaaacagaaaaaaaaaaatcacctattatcacactattctaaaataatcaataaatcaatattaatatttgggtgtgcctccatccttcctcctttctcgctctgtctatatatatatgtatatatatatatggtgtatatatatgcacacaaatatgtgtgtgtgtgtttgtgtgtattaactgtcacaacttactaaccagcacccaattgcaaacgtgtaggaagtttgagtctcacctatgtattttcacgtgaacttccaatggctgccttgaatattagttgtgaaattaaactaagttatatttaaactgaggataggaattaaatttaaagctcctagtgtatattacttaaatactctctctccccgaaaagtaaaggtaaatgtggggacttttgacccccattccatcctatataccatgtagcctactcccaggagccctggggcgccaaggttgctccaggtgggattctgctctgtgtacccgttcaacagatctctgtctggggcctcttagccatcaactctgtcagcaaagcatctccaaagatactggttctcagaaaagctgtctgttcacctctgacccatccaaggggtctgcccagcagggcgttattctcctcttaccaaactcctgtcttcctgccccaaaccggcattcttcccattcgtttcactcccttttcatttgggacagtggaagactccaatgcaaagagatggacatttttctccctgtatcctcaagtcccctccaaagcagctggcactggctttaaaactctctggaatgcattggtttttaaaagccacatctttgactccctgccctctcaatgttatgaattttattgtaaaaatacaacatatcaggtacacagttccctgaagacgaggcgccaggctctctctgttcctttcatttctcatcagatcccagggacgtgggccaaggacaaaacaaaccctccagcgtgctttcccagagaccccggggcccacaggcctggcctcagtgtgtgagtgcaaacagacaccagcacaaggagtggtgcagtcagcgggtgttcttctcgaaaggaccctctgttctctctgtcccgttgcatcctgtgtgatctctttgtccctgaacccggcccttggcagtatgcatggatgtgtgacccaatatctctcatcaggtcctccaaagcagtcactttgaaaaatgaagtaaaggaaggactgtttccaagacagagggaaaatggcctctgcctttcagttttagctaagtgggaaaatgaaatagggaagctagatttcctggtgaccatcttgcctcctttccccttctttcccagtctccttcctttcctttcccctttcccaccttgctttctttttttccaaaatcttttagttaactaatgatattaggagctaatgcttcttgagcaggggctgtgtgccaggcacaatgctaaatgcttggcattccttttttaatttgaatattatcaccaccgtatgagggctgtacatctcattttcagataagaaatctcagagggagagggccgtgtaacatcatctgtgtgtgaactatgtctcaggccatataaaagaaaggaggttgaagtgacagatgacatgatccctgccctccaggggcctgtggttgtacagtagagagagaaggggtgttgactgttctcaaagcagtgcaggagggagctggaatagtaactgcaaacttggcaggcagaatccaactggttctatttaatttccatttccaaaatttactcccctttctgtccatgttgttccctttacctgacatgttttttcttgccaacccacctgttatttccccacttggaaacctctattcatctaaggtctaaatcatatatgttgcctccctaaagccttcctcctgtctcttccaagacttaagtttctcacactgttactatctcagagatggcaacaatcacattgtgtttatactttgggtacagagtatcagatcacaataagtttacttcttcatgacttataacctcatgggaggcacaagatatatatatgcaagtgaaagggccatatgcatgtttccgaaactgtagtttatgaaaaatatcccatgatcaaagagagaaactctgtattctataaccctactttaagtatgcaaattccattatctcattagaaactttggaaaatcctgcaaaaatgaaacccagtcaatgcaatgtttcctaaaacttacttacccacggaactctttttaatgaaatacctagcaacattatcttatcgtgagtggtagttttccatggaatacagttgggataataactagtatataattatataataataactcaaaaaagtgcataaatgccaggtttcatgagtcagatagcatgtgctatcatttctaaggtcactgtgtactggaatggttagggaggacttctagaaagaggaagatctgagtctagccctctagcaaccagagcaggctaactgctcagcaaaaacccccagatctccgtggccaacccaataaaagttcacttccaatgtgggtcagtaaggaaactgctccacaaagtctttcagaaccaagcctccttccaccaatggctgtaccctccttcaactccttggagcccactcattctgccagtggatgggagaagagagagtgagaattgcttctgggaagttttcatgggccatgtctggagatgactcacatcccttcaatcaaattccattgagtagagctcagtcacgtgcccactactaactgcaaagaagatgggggaaaatagtttagcaacgttctctgaacaaaggagagaggacagatcttggggagcaccagcaacctctgccacatagacccccaactccagagctacctattccagtttacctggcagctgcactggagtctaggctacagatctacaatagagggggcttcttagtgaagaaaatatcagccaacacaactgtccttctgtggatatttctacttcttgacccaagtctttgaaactacatggttttttttaatggagtttcactcttgctgcccaggctggagtacaatggtgcaatctcagctcactgcaacctccacctcctgggttcaagtgattctcctgcctcagcctcccacatagctgggattacaggtgtgtgccaccacacccagctaatttttgtatttttagtagagatggggtttcgtcatgttggccaagctggtctcaaactcctgatctcaggtgatccgctcgcctcagcctcccaaaatgctgggattatgggcatgagccaccacaccaggcctgaaactgtttttaacctttcaaggtgtgggcatcaagttttcctgctctcctgtaggaaatttcttcttcagcaaattgcccaataacaagactatatttttcaatacttttctccttttctcttccttttgcccacctaattttctccacctgaggccctgtcagagttccttctaagagtcagtcagctagttgagtcatcaaagacttgttgcattcttactaaattgctctatccaagcataatttgtgaaaagttaaaaacataactgtcatgcaggtatatagtgaacacctgtcaaagatccatttaactcactattgagggaaccagcaagatgacaaagatagtgcagaaaagatacaagagacgaaagtacacgtggtcatcggaaaatagaaagccagaataaggtcacaaagatggatgcacaagtgattaatgttccataagacaataaagccataattatgtgtcttaacctttctactaggcagaaacaacttacaatttgataataaaatgaatattttgcaacttattggtcttctaaaaagccagcatctactttgaagtgattgtaactttataagtagtaaatatatgtccccttagagcacagagtgagcttgtgagacaatgatctcatatgacatttaaaaggcacacagtaatttttttgccctaggttttgcaaatatatatatatatatatatatatatatatatatattttttttttttttttttttttttttttgaggcagagttttgctcttgtcacccaggctggagtgcaatggcatgatctcagctcactgcaacctctgcctcccaggttcaagcagttctcctgcctcagcctcccgagtagctgggattacaggcatgcgccaccacgcctgactaattttgtatttttagcagagacaggatttcactatgtgggccaggctggtcttgaactcctgacctcaggcgatctgcccaccttggactcccaaagtgctgggattacaggcatgagccactgcacctggcctgttttgcataatttttgaacagcttctacttggggatatgctgagtgtgctatgccctgaaaatccagtgatatgtaaaagagtttcctgagtttaatcattattaacatatgtgagaccatctgaaacgagaaacatacaacacactgagagaaaccaataaactttggaaaaatccaggaagacagaaagaacagatagtgacttattggtctaaacgagtggggaagagggtcccactcagagggtagaacacgtgtgaaggccttgatgtgggaaagagcatggtgtgtttaaggaattaaagcaagaccagtgcactctgcagcatcataggaaggccagagtgagtcagcacagggctggacacatagacagagctggatcatgtaaagccttgtggactgtgctaaatattttggacaatagtctaatagcaatgagaagcccttgaagggcttttgaagaggcaagtggcctcaccagacttgcactttataaatataatttgggatgaagtggagggggtgagaggccacttacccagcagctacaatagtcaggcaagaaatggtggtggtcgaatgcaggtgcagcagtgagaatgaagtaggaaggacagactcagatgtttgaatggtagaatgggcagaaattgattgctggatgtgaaggaagagagaagggggaagtaaaacaataactcctggcttatgggcttgggcaactaggtacatacatttttccagaataggcttcttggccaattgtagggtgagcaaagggattgggcatggtcggtgctcccctagtctactgtttgcaagtcctccttgaccaatgtctataggatgggaatggcagctacttaataaatgccagtttgaaccttttgtcttctgtgttccatccttcccccagttgtcatgaaacattatgaaaaatgcaaaaagcctcttgttattggcctagctgaaatatacacagcaaggtaagaattctgtagatgttggtttaaaagccccttgtggctggtggggatcactgacccattccagagtacatcttttttatattctgagccagacttctctgtctttggatttcctgccattttgcacaaatgcatcatgctttgagcaactacaatgtgctcagaattttgcttaatgtgctgccgacattacctgacttaaactgtacaacactgtgaagcaggtaggattgacagtcttattttactgatgaggaaactaaggctctgagagataaactggccactcccaggccatgctccttgtgaataaatgaattagtattccaacacagcttttctgactttaaaacctgtgttctcactagcctaaagagagcacttctgaggtttaaccttagctatgatattaggaaatgatggaataaatatctcagtctacaagaatactcaagacttttccatatatgtagttaccctctcccctaaacccacccacacacacaaattatacctctcaatacatgcagacttcagttgatgtcatgacttgcatcctgtagaactctctcgactttctcccgtcttctatcccctcccctccccctcaccactccttcaccaacaatatattttcctgtcaaaacatacttggttacatgcagtgcaactaaaattgctgctattagtttaattgagacagggtgattataaataaattacatgcagtgctactgaaattgctgctattagtctaaattgagacagggtgatcagtcatcaccaactgtgatttgattcagaatgtactccacatggacggctacagaggccctgtggtcgtctggtagcccaaggaatgcaaggccagatccccaagaggctgggcgtcaggccacagagctctctgaccactggtaactgagaaagcaaaactccctgcaacctggttggttggggccccttgcaggctgataatgaacttagaaaccaggagctggaaagggtcatggttagaaaccttcccacatggaagatctgtatagtgcattatctgtgtgtgtgttcctgtataccaatgtgtgaatctcctgctacttcactaaaatgatttgagatggatatttaatactattttcttttttttattctaaaagaaacccgttctcacattagaaaacttgaaaagcataaatagttttcaagaatacaactgttagtgttacttatttttcccactacctggaggtaacacttgttagagtttggtgtatttctttaatcattttatttatatacttacatatttcctctgacataattgatatatgacataattgacataattgataatatcaactgggtatacagtattacattagcttttattttcacaagtagaaaatctttaaaccacctaggcaaggtacatgaaagataaacaataaaggcaaatgggggtaagaactgttcatggatatctcattcctagaagcagcatgatgaagtggaaatccacggattgaaggaattctcttttcttcctggattcctacttcagtgctcaaatctcaacttgccagcctagggaggaccacaaaatccaaatggaggtgctagttctgtagttttgggcctttaggcaaatggctccatgggcttcatattcttcaagtctagaccaaaatatagaaatggacctttctacaaggtgccttacagggtcaaaagtctacatattatccttagggcctggagaaaaactattcactactaactattaaataagaatggcaagtgagaatgactgtaacaatcaaaccttaatgactgaccaatattacatgtttattttgagccccaagtatggagatatggacaaataaatgttctttgtttagtccagtagacaggtttctaaaatggtgtgttactgatatttggaaagtaaatcatggtgcccagttttattttttttttttaaccacatcatctcaaaccaacttaccttcacccagtagaaacgaggcacaacagtagttttaagtactcagattcctaagctttctaatctgtaattaacgattaaaaaccattcagtgctctagggaaaggaagagttatactttgcaataaccgtgtcataaaatcttttctaaacagagtaatcacattatttatctgggatttagatttggagtaaaaaaaaatgtgtagtagttttacttcacttttcaagtgtgaaacatttggatgtttctatttttcaaaatatattcccggaaataaactaattaactcctatcttccctcccttcctttcttccaacaagtgtctgtagttttttcctgtgtgccagaatcaatgccgcagattctcagaacaaattacattatattacattgccctctgtgtctttacaattactggtaggccctgatatatatatatatatatatatatatatacacatatatgtatatatatgtgtatatatatatatatatatatatatatacacatatatgtatatatatgtgtatatatatatatatacacacacacatatatgtatatatatgtgtatatatatacatatatataggtgtatatacatgtatatatgtatatatgtatatacatatatacatgtaatatacatctatatatacatgtatatatacatctatatatgtatatacatgtatatatacatctatatatgtatatacatgtatatatacatctatatatgtatatacatgtatatatacatctatatatgtatatacatagagagagagagggggagagagagagagagagaaagagagagagagaaaactctcccaaaacaaaaattcaaccaatcaagcaaccaaaacaaaaaacaaatctaaaaatcagggaatatttctctttttaaaagtctcctttaaacattacactctgtgacataagcttttgttttgaattcactactgccttggtttggagggacagtggagcagagaaattgtgagctaaagtggtggatggcatggcttactgggaaaggcttggaagaaccacagcagagttctacggaaatgatatcagtctcttgtcttaccaaaatttagactgcaatcaactgtttttggaaaattgtctttcaatcagttggaatcccatttccaccccaaacactcaaagacacacttagcctcctttcactcggaaatgtgctgcttacaaatcactgggaaaaggctgcctgtgaatcagcttcagaggagactccattatcatcctttttaggtcctgagacagactctcagttagctaggcccctgccagattgtaaaggctgacaattactgatggtgatccaaatcccagcctcaccgtcactatggatccacttctctgaaccaccatttattccggaaagaacaggataatcatactcatcgaactcgcaagtttgttgtgagaattatatgtaaaatcagttcctagtactcacaaactggcacatagtatgtatttaatcaatggtatttttaaaaattgcaagagcaataagcatgtgcctgctcgtctatcaagaaattaaaaggtagagctagacacaaaccttaatcaggaattaaatggatattgtacatcttcatcatagacatccatcctatgaactttgcttagtttagcaagtgtgtcagtcagatatgctgtagatgaggtttctttaagaacagatcatgcacattggaatccacagcaaggaggctcatgctaaatcaaagaagttactaataaggtgtcactcacaatatctggtaggagagctaagtttaaccgagactttagttttagggtataaccaagggaaggagacatgcactgtcatggcttgagagcccccattcaaagcattcataaaggtaccagacctcttcctatgaagccttgaaaaatcaggtgtctcttttctcctagggttttaaagatcctgtgtaccgtgcaagacggaagcagtttgctgacattgcctacaactaccgccagtaagtctgccttgcttgttgaggggaagagagaaaaacacacccctagcctgcttctcccttgccctcatccagttgaggatggaaaataccagcatgaagagtcctgccttctgtgtgtgcatgtgttcatgtgcatgcgtgtatgtgtgtgtgggggtgtgtttaaaccctccctttaataacacatgataaaaaatgattgctgctagacaaaacaaaattacccactgtgcgggggccctgctctctcccaagctttgttgtctaattacgcagtggtgtctgcagtaattagaaaaggcctcggtcctgaataaaacagcctccggtcttctctacattaaacagggaagaaggaaaaagagaatcatttacattcaagaaggagctggctgctttactgaaataatgaatcattcaagatttcaggccagccaaacttcagctttctacttttatctggtctgacccagctgtgaaggacaattttaggatggttttttttttttcctgtctggggttctgtgttcctcccctaccctattttagccaaaagaaaatgcaaatataaaacatgtttgagaagacaacagctttgctcctttgagtcttaaggaactacagaaatgccaccatgggaaacttagtgttttgacaagtgctgttactgagttaagggattaagaaaagacatgcacaagaagaaacttaaaatttgtccagaatgctcatggcatagtactttgacagctttgatagaatctcagggagatggagaagatgatgggcctttctatactgaatacaaagttactttcaacatggaaaaacctccggaaaaagagagagaaagcttttctgaatgacttttggtagtggaagaattcaaaaatgtgctgtctttagtcagatctaagcccatctgggccttggatcctgctgagcaggattcacagaagatggtgacctccctttcctgactccacctttgccccagctcagtcaggtggacaccatcaaagcaggtacaggcaaaagtccttcagatagtcagcaataacagatcatacttattatcttcttgctgtgtgtctgggggctttggtgaatgctttgtatatatcattttgtttagcctcaataataacttctcatttttctgatggggtaatcaaagcttacaaaggttaagtaagttgccaacatcatgtagctagtatgtgacataatcaggttttaaactcaggtttgttgaattctaagggtatttttagccactcttctgagtgtctggggactcctagagtctagagactgcacttcatataatcaaggaggaggtgcttagaaagtacattcacttacttctgggttgctgggatttggggagagcggagacagatcctcctcaacctccttctcatagaaatgtgaaaccttatgaagaagagtgaaattggtgaatcacctcacaatcctggatgttaatcagttaacttggttactgaaaatcatctatagatagctggactctcagaagtacgttaaaattttttagtcaatttctcaccttttatagatgaatcccacatgattaactaactgatgtgccgaaggtcatgtagctagtaaagggctcgcctttttaaaaaattaaaagcctatttcagacttgactttatctcatctcatttaagctttcggtgctctttttaccatgtctttcttcttcaaaatagtctcttacttcagggtctgatatagttcatccttgtttttttttttttgcagattctattttgcgaatttgcctacttgcttaagtgtatttgtgaccccaaaatcgatactcactgtacactttcacagtcattcccagactagcacagagaggagaaaaaatttgattctactgaggtgtatatctccaactgaggtcaaagaaggcaacactctacctttctgtttctaccctcattttgtcaacatgtgtcctttacatggtctgtttagtgtcacatttttaacatttttgtgctttcgtttgtgattttgctttttaaaaattgaccaaggtctcactcagttaggaagcggcagggttagaattgagattctcctgcttttcccaggaaagcagtaaactgctgagccactgctatcaagcttgggatgagcagccccaataactgcataaaggggatactgcggtcactgctttagacttcaggggctggtgcgaatcagattaacctgcagaaaagcagaatcagaatctcaaatagttatgttcaagctaaatggaagactccagagtgaagcaccgaggcctcatctcctcaggttttcatttagatgtcaccttctcagccatgccctctctacaccctatgtaaaattgaaaccccactctgaaactccctatacctttgccccttttttctctatagcatttgtcatcatctaacggagttgtgttggctttctgtctgcctctactagaaatgtggactccatgagggcaggggtaattgactgttttgtcacagtgctcaattaacatttgttgaatgaatgaatgaatccaagagaccatataaaagtaaagattcaaaatggtgaattggaggcagagccaggaattgtgtctagaatcatctagaaggctgctacagcaggttttgatgatattactggagtggaagttgggcttttaagttttatctaggaatagataaaacggatcataggagcttatatttttcatctgcaaaacaactcaaacataaaggagagctctactggatactataaatgaagagtttaaggcgggtagtttaggctcaggcaggtccaggattcagcatctcattatttgcctctctgactctagtgtcctttgctttggccttgctttcagacattggcctcatttctcttggagagggaatctagcacctctaggctgatacgccaactcaattagaggtcctgtctatttccaacaaagtcaaccacagttctggcattgagtccactgactctgattaggacatagtcccatctctcagccaggcacaatgcaggagaatgagggatttcaattggcttagtctggtcacatgcccacttctgaaggtaggagtggagtctctcctcacctgaacctcacagactgagaggggagaaaggtgctttactgatgaatggggaacagatgttgagtccctagaacagcaggtgtcaaccagcagaacatcttggtgctcaggatgttaccatttcttgaaatttgttgcaggaataacagatgcctttcttttaaaatgagaatcagtcataatggtaatgatcaattatccaattgttaggatttgtcagtactaatactaggtactttatacatagtattagacttaaatttatccacaccatacaggtacttatgtttagcccacgtagcagctgcacagattgaggctcagagaggtttactaaattgcctgagctgatacagctagggaatggcagggccaaggattgaacagtctctgtctgtttccaaagtctgtttgtctcctgtatcagtgcttagtctcgataatggcgcgttcttgggcaagagcttacctgattttttttttttcaccatcattgctggctaccacaagaccttctgaacttgcctggctttcaataatacttaagcaaaatgctatctttttgcctaatccctgtcactcgtctgtagacaataacaaagactgtgctctaatgtgtttggatgaggtacaattctgaaagggcaagaaagacctaatctggagcctaatgatgatccataattctgagatcaacagtctcactttgtcccagactctgtgttcctgttagagaaataggcctgcagcctaggggacagtcactgatctttgaagtcaggctttatttggtttacatctgtttgtgctgttccgaacacagttcattcccaggtggttttcaaaaggactttttttttaaaatctttaatttagctttcattttaagttcaagggtacatgggcaggtatttacatataggtaaacttgtgtcatgggggtttgttttacagactatttcatcactcaggtattaagcctagcacccattagttatttttcctgatcctctccctcctcccaccctccacccttcattagactcagtgtgtgttgttcccctctatgtgtctgtatgttctcaccatttagctcccacttacaagtgagaacatgtggtctttggttttctcttccattagtttgctaaggataatggcctccagctccatccatgttcctgcaaaggacatgatgtcattttttatggccacatagtattccatggtgtatatgtacaacattttctttatccagtccaccactgatgggcaatgaagttgattccatgtctgtgctatcgtgaatagtgctgcagtgaacatatgcgtgtatgtgtctttatgatagaatgatttatattcctttgggtatgtacctcataataggattgctgggtcaaatggtatttctgtttttaggtctttgaggaattgccacagtctttcttttttttttttttttatactttaagttctagggtacatgtgcacaacgtgcaggtttgttacatatgtatacatgtgccatgttggtgtgctgcacccattaacttgtcaggtatatctcctaatgctatccctcccccttcccccaaccccacaacaggcccgtgtgtgatgttccccttcctgtgtccaagtgttctcattgttcaattcccacctatgagtgagaacatgcagtgtttggttttctgtccctgcgatagtttgctgagaatgatggtttccagtttcacccatgtccctataaaggacatgaactcatccttttttatggctgcatagtattccatggtgtatatgtgccacattttcttaatccagtctatcactgatggacatttgggttggttccaagtctttactattatgaatagtgctgcaataaacatatgtgtgcatgtgtctttatagcagcatgatttataatcctttgggtatatacccagtaatgggatggctgtgtcaaatggtagttctagttatagatccttgaggaattgccacactgtcttccacaatggttgaaccagtttacagtcccaccaacagtataaaagtgttcctatttctccatatcctctccagcacctgttgtttcctgactttttaatgatcgccattctaactggtgtgagatggtatctcactgtggttttgatttgcatttctctgatggccagtgatgatgagcattttttcatgtgtctgttggctgcataaatgtcttcttttgagaagtgtctgttcatatcctttgcccattttttgatggggttgtttttttcttgtaaatttgtttgagttctttgtagattctggatattatccctttgtcagatgagtagattgcaaaaattttctcccattctgtcagttgcctgttcactctgatggtagtttcttttgctgtgcagaagctctttagtttaattatatcccatttgtcaatttcggcttttgttgccattgcttttggtgtttaagacatgaagtccttgcccatgcctatgtcctgaatggtattacctaagttttcttctagggtttttatggttttaggtctaacatttaagtctttaatccatcttgaattaatttttgtataaggtgtaaggaagggatccagtttcagctttctacacgtggctagccaattttcccagcaccatttattaaatagggaatcctttccccatttcttgtttttgtcaggtttgtcaaagatcagttggttgtagatgtgtggtattattaatgagggctctgttttgttccattggtgtatacctctgttttgataccagtaccatgctgttttggttactgtagccttgtagtatagtttgaaggcaggtagtgtgatgcctccagctttgttcttttggcttaggattgtcttggcaatgcgggctatttttggttccatatgaactttaaagtagttttttccaattctgtgaagaaagtcattggtagcttcatggggatagcattaaatctataaattaccttgggcagtatggccattttcacgacattgattcttcctgtccatgagcatggaatgttcttccatttgtctgtgttctcttttatttctttgaacagtggttcaactacaagttctccttgaagaggtccttcacatcccttgtaagttggattcctaggtattttattctctttgaagcaattgtgaatgggagttccctcatgatttggctctctgtttgtctgttattggtgtataagaatgcttgtgatttttgcacattgattttgtatcctgagactttgctgaagttgattatcagcttaaggagattttgggctgagacaatggggttttctaaatatacaatcatgtcatctgcaaacagggacaatttgatttcctcttttcctaattgaataccgtttatttctttctgctgcccgattgccctgaccagaacttccaacactatgttgaataggagtagtgagagagggcatccctgtcttgtgccaggtttcaaagggaagggaatgcttccagcttttgcccattcagtatgatattggctgtgggtttgtcataaatagctcttattattttgagatacatcccatcaatacctaatttattgagagtttttagcatgaaaggctgttgaattttgtcaaaggccttctctgcatctattgagataatcatgtggtttttgtctttggttctgtttatatgctggattacatttattgatttgtgtatgttgaaccagccttgcatcccagggatgaagcccacttgatcgtggtggataagctttttgatgtgctgctggattcggtttgccagtattttattgaggatttttgcattgatgttcatcagggatattggtctgaaattctcttttttgttgtgtctctgccaggctttggtatcaggatgatgctggcctcataaaatgagttagggaggattccctctttttctattgattggaatagtttcagaaggaatggtaccagctcctccttgtacctctggtagaattcggctatgaatccatctggtcctgtactttttttggtgggtaggctattaattattgcctcaatttcagagcctgttattggtctattcagggattcaacttcttcctggtttagtcttgggagggtgtatgtgtccaggaatttatctatttcttctagattttctagtttatttgcatagaggtgtttatagtattcttgatggtagtttgtatttctgtgggatcggtggtgatatcccctttatcattttttattgtgtctatttaatttttctctcttttcttctttattagtcttgctagcagtctatcaattttgtcgatcttttcaaaaaaaccagctcctggattcattgattttttgaaggtttttttgtgtctctatctccttcagttctgctctgatctcagttatttcttgccttctgctggcttttgaatgtgtttgttcttgcttctctagttctttccattgtgatgttagtgtatcagttttaaatctttcctgctttctcttgtgggcatttagtgctataaatttccctctacacactgccttaaatgtgtcccagagattctggtatgttgtgtctttgttctcattggtttcaaagaacgtctttatctctgccttcatttcgttatgtacccaggagtcattcaggagcaggttcttcagtttccatgtagttgagtggttttgagtgagtttcttaatcctgagctctagtttgattgcactgtggtctgagagacagtttgttatattttctgttctttcacatttgctgaggagtgctttacttccaactatgtggtcaattttggaatgagtgcaatgtggtgagaagaatgtatattctgttgatttggagtggagagttctgtagatgtctgttaggtccgcttggtgcagagctgagttcaattcctggacatccttgttaactttctttcttgttgatctgtctaatgttgacagtggggtgttaaacgctctcattactattgtgtgggagtctaagtctctttgtaggtctctaacgacttgctttatgaatctgggtgctcctgtattgggtgcatatacatttaggatagttagctcttcttgttgaattgatccctttaccattgtgtagtgaccttctttgtctctttttatcattgttggtttaaagtctgttttatcagagactaggattgcaacccctgccttttttcattttccatttgcttgatagatcttcctccatccctttattttgggcctatgtgtgtctctgcacgtgagatgggtctcctgaatacagcacactgatacgtcttgactctttatccaatttgccagtctgtgtcttttaattggagcatttagccccatttacatttaaggttaatattgttatgtgtgaatttgatcctgtcattatgatgttagctggttattttgctcgttagttgatgcagtttcttcccggaatcaatggtctttacaatttggcatgtttttgcagtggctggtaccagttgttcctttccatgtttagtgcttccttcaggagctcttgtagggcaggcatggtggtgacaaaatctctcagcatttgcttgtctgtaaaggattttatttctccttcacttatgaagcttagtttgtctggatatgaaattctgagttgaaattccttttctttaagaatgttgaatattggcccccactctcttctggctggtagagtttctgccgagagatcagctgttagtctgatgggcttccctttgtgggtaacctgacctttctctctggctgcccttaacatttttttccttcatttcaactttggcgaatctgacaattatgtgtcttggagttgctcttctcgaggagtatctttgtggcattctctgtatttcctgaatttgaatgttggcctgccttgctaggttggggaagttctcctggatagtatccttcagagtgttttccaacttggttccattctccccgtcactttcaggtacaccgatcagatgtagatttggtcttttcacatagtaccatatttcttggaggctttgttcatttctttttactcttttttctctaaacttctcacttcatttcattcatttgatcttcaatcactgataccctttcttccagttggttgaatcagctactgaagcttgtgcatttgtcacgtagttctcgtgccatggttttcagctccatcaggtcatttaaggacttctctacattgtttattctagttagccattcatctaatcttttttcaaggtttttagcttctttgcaatgggttcgaacttcctcctttagctcagagaagttttatcgtctgaagccttcttctctcatcaaagtcattctctgtccagctttgttccattgctggcgaggagctgtgttcctttggacggggagaggtgctctgatttttagaattttcagcttttctgctctgttttttccccatctttgtggttttatctacctttggtctttgatgatggtgacacacagatggggttttggtgtggatgtcctttttgtttgttagttttccttctaacagtcaggaccctcagctgcagatctgttggagttggctggaggtccactccagaccctgtttgcctgggtgtcagcagcggaggctgcagaacagcaaatatttctgaacaccaaatgttgctgcctgatcattcctctggaagctttgtctcagaggggtacccggccgtgtgcggtgtcagtctgcccctgctggggggtgcctcccagttaggctactcgggggtcagggactcacttgagaaggcagtctgtacgttctcagatctcaaactccatgctgggagaaccactactctcttcaaagctgtcagacagggacatttaagtctgcagaggtttctgctgccttttgtttggctatgcactgcccccagaggtggagtctacagaggcaggcaggcctccttgagctgtggtgggctccacccagtttgagcttcccggacttttaaaactaacgacttttaaactatagtttgcatcagagtcacctggggagcttactagaatccagatatgtgagccttcccttccccaagagattcaggatctatgcggcctggcatatgtacttgaacaagctcagtgaagagaaggtatgaggcattttataccttagcatggatttatatatttattttctctcctttgttccaatatttatttattatccttgatctagaacttatttatttagttttctaattgacaaataaaaattgtatataatttttaattatatacaattatataattgtatataattatataattgtatataaaatatggtgtacaacatgatgttttgatatatgtatacaatgtggaatcttaattagtatgtatttaaatacctttataacttcccaggagcagaaatatcaaacccaataagtgcatgcctaccaaacaaaggggatctcagattcgtggcctacatattaaatccagtttagcccactggtttaattgctttagctaacaccataaaaatacactgtgttgctttaacttagatgccctggtttagaaagggaatatattctcctgccagcccccattctccttattgccaatctctgcaactttacagctttgtgatacctgactggcccgtgcaggtaagtgaatttctaccccaggtaagcaattagagaattagaagagtagaaaaaccaagtgatttcccgaaagtgagagcaaatcctcattgtagcctgtatcactgcttaaccaaatcaccctttcatgtgggaaatcaaaacaacaatgtttcctatatcaagatgtggaatttttctctttcaaataatgtatgaaattcactgtagcaagtgatggcagctcacaggttctggtccccgactccctctgctaacctaacctgcgttctgctgtgcccctgccctgcttgagacacctattttgtgcctgtattctagtgggcagcccatccctcgagtggaatacatggaggaagaaaagaaaacatggggcacagtgttcaagactctgaagtccttgtataaaacccatgcttgctatgagtacaatcacatttttccacttcttgaaaagtactgtggcttccatgaagataacattccccagctggaagacgtttctcagttcctgcagagtaagtccacatcagggtcaatggccctgcagaaagttgggggaggattgaggcagaggagagggaaggggaagacaagtatgtggaggcaagtatgaaagcatgtgcttgtaggaatgcatgcaggttgattcctccaggaagaactaaatttcactgtgctctgccttccctccagcccctactgtgtttatccactttcattcaatcaaacacctgaggctgtggattttgccgtgtacctgtccctgaaaagtattttctttcacacttaaagcccaaggtgcttcactgaggtttttttttgttttgttttgttttgtttgccctgtagttcctgctgtgttatgagttaggagtgtgtgtttgtgtaagaaatgtgctattttcggggatggtgccaagagccctgagctctgagtctgtgcatctggtatgaatcctgccttcaatcctctccagctgagtaaacctgcctcagttttgtcatctgtcaaatggacactgtatcaactctttagcttttcccatagggaaattatgagaatgaagtaaggtgctgcatatggaaacaaccagcacagtcttgcatatacagcaggtattcagtgaatttggactgaattgaaatctgagtagcttaataggtaagtacattgagtcgcaagcctctctgtacagtatatccaggtgaaatgggtgttactctttctgtcaagaggatgttaatttagcaaaaacaaaataatgaactagcacatattgaacacctactgtgtgccaggtagaataagcagaagtggggagacagactacaggttacaaaattttctatatatcagagctgtgcagagatgggccactgtgggggcaatgagccagggaaattacttggcaggaagggaagttgtagccaggacagtttgggggtgagttagatgaccttttgggtcccttccattagaaagtctttgcttcttagataaagaagggagtaagggtccaagcagagtgtgcttcagcctgaagacacagagaacatgggggcaagaggcaaggggatctcaaagacttctttagctaattacttccattgccatggccaataataagaataataaaacagtaatactagcagttgggaagctacataatagtaattaagagaacagactttgaagctagactgcctgtggctgtgaccttgaataaaacctttaacctatctctgtctcagctttcccatcggtaaagtgggcataataaaagtgtctacttcatagggctattgtggggattagtagcatatctaaagtagcttaaaacagtgtcttacatacagtaggtcaaatatagtgttagctattattaccattatcactgtcactatccttatcctccaaagtttgcaacaaactgagagacagatacaggaaccatagagatggtgatcagaggtcagctttaaaattgagcgatttagagaatgtgatatagatatgcacacaaatggacttgctaatattttaccccttaattaggtaaacttacctgccaattcatagagcatagtccattgcatggccaagagcagactggaatgaggtcctctgtgaacaatcaagagagaaagagcagtacagaaagagttaaattgacaatattcatattctcttcccaaatgctccagtcagacaggtcactgctacttatggggtagactgtgtgaggtgcagtacagaagctggaagcactctatccatactcttcccttctgggaaatgaggttcaaattccctcttcactctagaagcaggagaagtagggaatcattgttccaccctaacaaatggtaatgaaagctaaatttattgcatgtttccaatgtgctaggctctgtgctaagtactttgtattcattagctctttttattcttggaacatttctaagaagtatctatccacattatgcagatgaggaaactgaggctcagaaatgggaatttacttgatccagatcacctagctagaaagcagcgaggcagacatctgaagccaagtctgcctagcgtcaaagcctatgtccctgggcagttatgtgtactactccactacctaaaggtctcctagtgcctctgactcagtggtgatgagctttgagttttctttcttcttttcatcccagcttgcactggtttccgcctccgacctgtggctggcctgctttcctctcgggatttcttgggtggcctggccttccgagtcttccactgcacacagtacatcagacatggatccaagcccatgtatacccccgaaccgtgagtactgtcctccagctaccagttgccaggcacaatgagcgccatcttttcctgctgcaagaatgaggtttgggttcattgctggctggtccacaggactagttgtctagactgtttgctggtagtactaaaaacaattcatctattctggagatttgctccatccaagtagatagaccagactgattggagatttggtcatcctgtgatccaataactcagaactcccttggcagtgagaatgagagatcccaatcaagttccaaagtcaaagctacgaagttgcaaatgagaacaggaacaagtggcagccaagctatctcaatacttcctaagtatacatctagattactcttatctttctttgcctagattgtgtattgggtagaggtagagaattgcagccattatgcttcttacttgggtgtttcgttatccccttagtctgataaaacttatgcaacttataaaaaaattaatggaacatccaaaattgtttttccttgcccataaagttcattgctacaaatccaaaaagacctgttccaaatggacatagcacatacagtgttaaataaatgtaggttttcttccctcactgctgtccacctccagactaacagaagagcagcactgtttttgttttagttcccagtggaatagctgagcatattgtatctgcccagggaagtcaataccagggagaagacaggatgagaagtgttcatgactcatagctcacttaggtatatgggagcatgtccacaggaatattagctcttctgcctggtaccccactggggatactcttaagacccttggctgctgtgccctaccctgcacctgtctcttatttttccttccttttcttctttttaccttgtaccctgccttttatgatcccaacctctgcatatcacttattcctgggagagggatcataagcctaaaagagttatttccattctttctgcccattcctcatgtagaaagactgagtctggcttggcttaaacctcctcccctccgagctctctgtgctttctgtctttcagtgacatctgccatgagctgttgggacatgtgcccttgttttcagatcgcagctttgcccagttttcccaggtaaggaatggattttttagccttctagttataggtctgtgacctgaatttctcaaatgagttgagcccagggaggggtcctcatgccctctgcaagagcggaaaccaggtacagttctatgatcccacctgaaatgggtgtgtggttctgggaagctaaatacccatttcggagatcaagcatggggttggtgaatcactcatcctctgaatcatatgtgtgttcttcagtgtactaatctcatttttcctgctagagcctttcatccatgaaagcctccctgattcccatgcaggaactacctcaccttcttccaatctcttagtacattccccttaccttttcagggctgttgcaactttctaccttgtcaggcagttatttgtgtatatgcttgaattaagtgaggtgacatttgccaagaatccaatgctgataccctgacttagagttaacaaagaaaaaaatgagctgaatatcttatcaccatcatcaaagctgcaaccctgcaacctagaatttcattcatctttcacagtggttaacaagctcaaaaaaaagctttctttttctttttctttcttttttttttcttttaaggcaaggtctcactctgtcacccaggctggactggagtgcagtggtataatcacggttcactgcagcctcagacttctgggctcaaacaatcctcccacctcagcctcctgagtggctgggactacaagcacatactttcatgcctggctgaatgttttaatttttgtggagacagagtctcactacattgctgaggctgacctcaaactcttggcctcaatcctcccatctcaccctcccaaagtgctaagattacaggcaagagccaccacacctggccaaaaaagaaagttttgggctgagtaaaataatgctaccaattctctccaggcactgagaggcagcctaaaaccatggtttggtagctgggatcatgagaaggttgaatggtgttctgatgtacctaggctccaaccctgccactaaccagctgtgtgacctggggttacattatcagccaccctgtgcctcagttttaataaaagtggatcagtcaaaagccctctccaccagtcatcttcctcacaaagaagcacaagaatcaaatggaatgacctatgagcaaatgctgagccaagtattgggatttcagaataatgggattgtgtgtgaatttaatgggcattttccctcagctggcagaaataaacattcccactgtcaaataaagaagctaccactaaatatttgaaacaaacaaacaaaaaagtggaatttattgcttgctaagtgagggaaaactgtacttgtaagatgcagcctctctaaacaaaaggaaaattacttttatgtgaggtttggggaattatggagttcaaagatcgttggacttttggaagtggaagtgtttcgggattagttgaactttaactgtagaagcatcaccaatgacattcagaagtgtggttactgctgccaagatatctttgattgcttgggacagttttaaaatctggatttgttactgtggccaaaaaacaatcagatttttccttgaagaataggaaccttttattcttaccaccagaagttagtttacgaagtcagaggctaagtggcagtcctccttaagccatttccactttggggaaccccacagaagagtggacagttgctcaagtcaacaaacaggagctcttggggcatcagtgtcacatggttccaactttgatctggacagttccaaggcagcaagtcatgttgaaagtttcctgagaacattcctttttgatcagaggcaggacttgcttcccactacagtacaggatggagtggggctggagcacagggaatgtggggccccccttgttgtaggcaaactctaggctcacaaagaatggtgactaagagaacaaggcgccattttggtcttggatttatcagtggtttctagttgaattgagagagcagatccaggctaagaatttgaatttggttcactctaaatcagaaagtattttataagcctaatctgaaccaggctctggacttggcccagggagtgatatagagatgcagaccatgtagcttcttgcttcaaagtgggtctaatcatagtcttcatctctgtctacaagcactcctctggtgatctcactcaatttcatggctttaaataccatctctactctgatgacggacacatttacatctgcagccaagacttcaatccccaaattcagacttgcatattgaattgcctattcaacatctccccttggatgtctataagacatctctaacatcctatccaaaactgagttctggatcttccttctcaaaccttctccagcacagctttttctattatcagttcataggaattccgcccttccagctgatcaaaccataagcactttgggacattaccaactcctttttctcttaaccccacagccaatctttcagaaaatcctgtgtgttctaccttcaaaatatgtgtagagtctgaccatttcaattatgtctactgctaccaacttggtctcagccactatcatttctcatcctagtgactgcggtagcctcctcagtggccccctctagtggtctctaccctggacccctccagtctccatgtgttctgtctacactcagcctctccagtctcctggtgtcccatttactctcaacctctccagtgtcctggtgtcccgtctacactcagcctctccagtctccttgtgttctgtctaccctccacctctccagtctcctggtgtccctttaaccctcagcctttcggtgccctggtattgtgtctacactcagcctctccagtctcctggtgtcctgtttaccctctacctctccagtctcctggtgacctgtctaccctcaacctctccagtctcctggtgtcctgtctactctccgcctctccagtgtcctggtgtcctgtctacactcagcctctccattctcctggtgtcctgtttaccctctacctctccagtgtcctggtgtcttgtctaccctcaacctctccagtctcctgatgtcctgtctacactcagcctctccagtctcctggtgtcctgtctaccctccacctctccagtctcctggtgtcctgtctatcctcaacctctccagtctcctggtgtcctgtctaccctccacctctccagtctcctggtgtcctgtctatcctcaacctctccagtctcctggtgtcccatctacactcagcctttctagtgtcctggtgtcccgtctaccctccacctcttcagtctcctggtatcctgtctaccctccacctctccagtctcctggtgtcctgtctacacttaacctctccagtctcctggtgtcctgtctatcctcaaccccttcagtctccttgttccctgtctaccctccagtctcctggtgtcctactctaccctcaacccctaccatctcttggtgtcctgcctctaccctcaactgctaccatctattctcatacagcaggcagaaggagtgcttggtaacacaagtgagatcatgaccatctatctgctcattaccctgcaatggctcctgtttcactgaaaggaaaaactcaagccctaaaacatctaaaaatattctacatgatctggctctggatccctctttgatatcacctgccactgccccctcactaattcttctccagccacattggttcctccctgtgtcttgacccaaacaacgctgccttttcttgggaaagaaatgcaagcttttgcactggctatatgcttggccaacagtgtgcttccctcagaagtcagtataaccaacaactccacttccttcaagtctgtgctcaaatatgaccttctcaatgatgcttaccctggaaccctatttaaaattgaagtctcccctgaatcccctggagctcttagtccctcttgtttatttcttcttttgtttcttctttccaaagaacttatattcttctaacatagttatgtatatgttcattatttattgtctgtctccactaaaactcacaagatgtctttactgattttatacactgcctggcacatcaaatgaacttaataaatattttgagagtgaattaatatatacagtaggaaagacacatacacacaaggcaggctgcagtaagtgctgtaaaagagacaatgagacagtagaggaattctgcaacagaagctgtggtgagaattaatctatgatgtgttagactctccagctatatatatgcctggaccgatgtcaccacttatctgcagttctcctgtgatgtttccagggtacatgattaagactcatttaacattccaggaatattctgctgatgaataatcactgagctggagtcaagagaagaagctttagatactaaccgaccctgtgatcatgagcaagtcacttcccttctctgtgcctcaatttcctcacttataaagtgaaaacaaagggccaagtgagggtggaaggatccccctaccctggagatctgtgattctataacatatgggcaggaaagacttgataacacactcagggtctatgtgggctgttctgaaggcatctggccacccatcacctttttatggccaagtactaggttggttctgtggttccaattacaggaacagaacaggttctattttcccccaattacaggaaattggccttgcctctctgggtgcacctgatgaatacattgaaaagctcgccacagtaagtcccttctctccctgggtggatggtggagtgctataggctatggccctcaggtctttgaaactttcctactcccctggaagccaggttatctggggaaaaaaatcagaatgtggtgggttacatttgcacaagtgaaacttcacattttgatagatttctccttaataatttgattttgaaatcagctacctacagatgtttacatctcttaaattttaagcagtatcttgaacccaccaacaggctataatagtagcccttgaaaacccttggcataaagtgtgtgtatgaagtaatctggatccagagctttgaacatggaatgtttacatctctacttttcacaccagagcatacattaggatcttttctttctcagacatgagggagaaatgggggtgggctttccccttcttgctgaacactttcctctcctgagtatatctgatgacacttgtccactggggctatagaagcaattctacatagcaggtgatttccttccttcatactcgtttctaattttagtacatcccaccccagccactagccacattgcctgtcctggaagttgaaaaataaacatttataattgaattgtggactgccaatgagtgcaaatctattattaagatatatcagtttagaagcttatgaactcgttccatcaaaaggctaaaaactcccagaaggttatcttctcactgacagctgctttcaggtgctggacaagtggctttttcttcctcatctctaacaatgggatgcaatagctcatatcttgcccatctcaaaggcaactaaaaatttaactatttaaattgaattatttaaatttttgtgaacatgggtttttaaatgccagaggctacagagatacaaggagcggctttcaaagaagttacagagctagatagaatttctcatctctacaaagaaaataaacttggaagtcaaagcatcatgttatctgccataacaatattaaaatgacttatcaccaatgcgacttttctaaaaaattgttactgattgaaaaaatgttactgattggttgaggaacagtcctggattcttgctgcccttaatttgctgtgtaactacatgcatgttgccttaccttcctgggctgaagactcctcacctgtatgtgaggaggtcagactgactgagctctgacagccctcccaggtttaacattttctagtccaataaacagatgtaactaataacctacccctaattctccaaaactgtgactgtctccagcagctaactgagctctgggttcctcttagccccagaaccccaatattctttttttcaggccaactctctaggacatattgaactgtcagttattgaaagaaaagtacttggttatttgcataaatgcagtagttgacttcagaaacatccccaagttttagcatggatgatgggacattctcctcactgattctatcactacccagtctgctacctcccactgttgtgcctaatgagctctgccagcttcagagcatctgaggaacatctcagtctagttgacaccacagagaaaaaaacaaaagagatggaggagttcctgtcatatggagaacatattgttgggagcctccttttggggcttcttagtacctcctgatattttccatcatgctttacattcagccagcactcaacaggtgactagatagagtgagacacaggacacagagacgtgatcacaggtcatgctgattcagagaacaaacctgcacaggcttctacctgggcaatcctgtccatggcactggggcagttgctgccttctccttctttgaggtgtgtactagtcaaagatctccagagagaaagaaccagtgagatatatatagagagagaaagagagagagggaaatctgagaggggacttattaggggaattggcttacacagttatcaaggctgagaggtcccacgatatgctgcctgcaagctggagaacctgaaaagtcagtggcgtagattagtcaaagttcaaaagcctcagaaccatggaagttgatggtatagctctcagtctgagaccaaaggcctgagaacccctgggtggtggttgggtgcgagtcccagaatccaaaggccagaaagcctggagttctgatgtctaagggtaggagaaacagggtgtcctggttccaagagagatagaatacgtatgtggctttcctctgcctttttcttccatctgggattccagcccattgggtggttcccgcccacaatgaggaaagatcttccccactcagtccactgactcacatgccaatcccctccagaaacaccctcatagacatagacacaccccaaaataatgctttactatctattcaggtatcccttcatccagtcaaggtgacacataaaattaaccatcatagagtgtgctctcagattgactttccattccagatttactggtttactgtggagtttgggctctgcaaacaaggagactccataaaggcatatggtgctgggctcctgtcatcctttggtgaattacaggtatgaccttcacaggaaccaaggatagatttaaaagtggtgggtacagaaaaccattattgtgctttcaatattgttgaaaccctatttgtatccgttttgatatgcaacctgggaactcattctccagtgattggtaccttagcagctatgatttgatgatggctgtgggttttacagatagaaatggaattgcaagtacacatatctctggggagaaggggcctcctgattccaaggctgacctatgcatgcagccttgtgagtatgcaaacacatgccagaaagtgtggttggctcccacgtcatctattgaccaccttacttgaaagtaattggaatgaattactcctttctcccttggctgtaggttttagatgagctatgaagggtagaacctagtatgtgcaaagtaatttggctcacagcatttgggctgtgatgtagaaggaatcggggtgagatgagagaaggggcacaaatggcctatgggatgcagcagggaatactgatcctgatttaacagtgataataacttttcacttggggcctacagtactgcttatcagagaagccaaagcttctccccctggagctggagaagacagccatccaaaattacactgtcacggagttccagcccctctattacgtggcagagagttttaatgatgccaaggagaaagtaaggtgaggtggtgacaaaggtgagccactagctctgggggcctcctgactggtgccactcatctgtgggtggttggccaggagagtggactccaatgtctacagcaactttgtaccatagacagtttctctcccatgttctccaccctccttttcttccgttctctgttggaaggttgggcatgctgacctttgcacacacccctgccacctggtccctgttcaacgcaaccaccaagtcaagacactgaaccctcctgcatacagagtggccacagaagtctccccacaaaatcaaagaagtcttataacctaggaagtcctttcttcactttcttctcccaaacacctacaaaatttgcttcctcctttgtgtctttacccaaatttaatctctatatgtctttctctaaccaacttatttctactcatccctgccaccagtgcgtctgtaatacttattaacttgtaatatattacataaggtaagctccatgagggtagaaattttgttctttctattttctgtttttcctccagcccctggaacaatacctgacacagagtaagcactcaataaataattggtgaaggcattaatcccagaggcagttcagcaagaggctgatggagtggttctgggactctgagactgttggccctctgagtgcacagttcctgcacccaagcaggagacagactgggcagagggtccacctggacatgaatatcctaatactcactgtatgttaccacttaaaaaaatcttatcagtgatggatgacaggcatggaacatacaggcctttgggagtctatgacactgggtatgttagctttcaaccctatctatggcctctgagaggtcagaggaatggaggggagtggtgatagaataaatgacttctcaaagaaatccgcacttttgaaaagagagacatgagggaggaaagagagacataagggagaaagtcaaagacaaatgaacatacatcttagtccttcctttctaaatccaaattccatcccccccagacccctcacaaagaaaggtaaaaattatccttttgccagctcattcacttaccttacatttgcaaggtaagattgtgggacaagacaggtccagctaacatttgtttgagaaccctttggaataaagagacttcaaagaggactaactttctttcttttaaaatggatattccttaatttatgtctactatctttagataattaaaggtaaaatgctggcccacaaatccacttggtgtggcctaaaatgactatttctccagctctgtccagagctctcaagtccttctggctctgcttttttaattctctcctaaactgggagcctagcctccttccagcatcatccccctctccctccaaggcccaaggtttggacccaggcattggagcttagaggcagtgctgatgagcaccctgtcatgccaagatcacatttggatgggccctcctggagacaactctctaaccagcaagtgatcagtcccagaccagcagggaagagcttgccaggaaacaggcctgtcagtaccgaggcctcaagggaaacaaccatgaaaaccccattctgctgagaagtggctcagagaatcaaagagaatgctaaagaacagagttcaaaacaaggaatctgcacatccctttggattccctcaaagcatctcagccaagagaaaccaattctaaccacttggagttttaagattcaagttgtaggcagagatgtgattggctgagcatggttcacatgctacctcctttccagaggagggctggcaccgaatactgacttctggactgatacacacctagtagggtaggggtaaatcacccaaagcaaaaatgagctgctttatgggaagaaggaggaagaggtgcagagcaggcaaaatcacagatgtgtaacatgtggctcatgccaccagctgggttgagacagctcctttcagagaagaaggggtggaaatatatacttggccatttgttcttcatgaaagatagcaactaacactcatagggcacttacaccatagtataacagcatttgctgcaaccccctgaggcaggtaccactaatgccccaattttacagaggaaattggggtacagaagagtggtcccctgtgcccatggtcacaagggccataatagacagaggcagggtttcagcccaggcagcttgacttggaacttggggagccactcttgccaaacttggaggtccctactgtctcccgtaacattgtattttcagtacagcagcttataggttcaccagaggccaacttagaaatctgtgattactttgcaacatcttgttaatggtattgcatgatgtccctcatagaggccctcatggtggatttctcccagatccaggagtaaggcactgggaaggcaggaaagcaaagggtccaggccagtgtcagactgcctgggttccttcccagctgcataacttactgacagtatggccttagtagtcacgcagccttcccaagcctgtttcctcatccataaaatgggtatagcaatggtgcctttctcctaaggtttttgtgaaggttaaataaggaaggatatttgtaaagagcattggacagttagaacttaacatagttcttggaacatagaaggtactccatcaatgttaaatttcattattaacatagtgctttcttcaccacttgagagctatttccctctgcattgattgtcaaccatttcagagcttttttccctctatatagcattctttagctagattttacttactcttgattttatttaatgataggagtttgtggctttattgtattcagtagtttcattgtaagctatctctgtcttcttggagccaggggactaaataaacatgtgtatatatgtgtttgtacatacacatacacacatacagaggcttcccaagaagactcattaaaactccattccccccgcctcagccctggctgttgaagaccctgctctagggaggtgtccgtgttcctaaaaaagaagtaaaatgccactgagaactctcttaagactacctttctccaaatggtgcccttcactcaagcctgtggttttggtcttaggaactttgctgccacaatacctcggcccttctcagttcgctacgacccatacacccaaaggattgaggtcttggacaatacccagcagcttaagattttggctgattccattaacagtaagtaatttacaccttacgaggccactcggtttctcagtaatcgaagactgtctttccctaccatcgccataggaaaaataataaatttattgaaatatttaattaaggagaaaagcacctccatgtaagccatgggttcattgatggagaagaacttgacaaaaaggtcagaattacccttgtgtcctttttcctttgaccttcctagattccactccacctcctaccatcattccacctttccacacttggtctgtcactgccatgttcctttttctccctcgcctctccatcccttctacgctaagtgtccagttgttatcactctgcctggttctatccactttataagctgtccagtggctcatctgttggccttccactcttccttcataatgagaatattataataattgcccttaagaatatcacagggttacctcatttatcacctgattatctctctagcccttcatactctcttccagcaacactgatcaatttttagttctcatgctctttccagactcctaacccttgcccatgcagttgtttatgtttaaaatgttctcctttccaatctcatttacctggtatgtgaagacatagcataaatggaaggctgcatcacaccttcatccagtgatcttgccatctagactgagttatctgcttagaccatggattctaaaatttgaatgtgcatcagaatcaaatgaaaagccagctaaaaattaatagctttgagtcatagccaaggctaaatttaccaaatttgtgataacttttgggagtttatagacctcaggtgattctgacactagagttttgtgtgaaccatactattaggttcaatgatttcgcttcttgtagcatatgcagatggtaatgtaaaagagaaatggaacagctaatgatttgcctggggagagacctgttaagtccttccctgggaagtgacctatggaaaagggatgctgattacattaatggctctggcattttctaaaacatgcaagtacttataccataatgaggctgtaagctccttgaaagttggggtggcacccagctcatccaagaagcccacttatcccctagtgctttgcactgaggacacttgaagagtttttgcttattatacaagtggcccattttgatggtgtttttctttgtaggtgaaattggaatcctttgcagtgccctccagaaaataaagtaaagccatggacagaatgtggtctgtcagctgtgaatctgttgatggagatccaactatttctttcatcagaaaaagtccgaaaagcaaaccttaatttgaaataacagccttaaatcctttacaagatggagaaacaacaaataagtcaaaataatctgaaatgacaggatatgagtacatactcaagagcataatggtaaatcttttggggtcatctttgatttagagatgataatcccatactctcaattgagttaaatcagtaatctgtcgcatttcatcaagattaattaaaatttgggacctgcttcattcaagcttcatatatgctttgcagagaactcataaaggagcatataaggctaaatgtaaaacacaagactgtcattagaattgaattattgggcttaatataaatcgtaacctatgaagtttattttctattttagttaactatgattccaattactactttgttattgtacctaagtaaattttctttaagtcagaagcccattaaaatagttacaagcattgaacttctttagtattatattaatataaaaacatttttgtatgttttattgtaatcataaatactgctgtataaggtaataaaactctgcacctaatccccataacttccagtatcattttccaattaattatcaagtctgttttgggaaacactttgaggacatttatgatgcagcagatgttgactaaaggcttggttggtagatattcaggaaatgttcactgaataaataagtaaatacattattgaaaagcaaatctgtataaatgtgaaatttttatttgtattagtaataaaacattagtagtttaaacaatttcactgtttcagttatttcctggaatgaaatattcctctcactgccttagaaatacattagctagatagttttgtaacatgagaaaatggccagaggctcatatctccaaccctttgcaggggctccttgtgacactcaaagtcatgcctggacagtcaacggactttgacttttgttgattgtgtgtttgccatgaaaacatgaatatctgagaagcagtggggagaaaaaaaacaatatctttgtagctatgatttgaaattctcatactactttacattttattttggaaatagttaagtcttaaagaatttgcatagtgtttctttgagtttagttctcagaacagctgtagtatcatcaacagcaaattctgggtaccttcccagctccacccaatttgaatctctgaagataaggcccagagacctgtatttttaagtaccccatttttttaattattcatagccaaattctatcaggtacattcagtttgagaaaacctgatttgtggtggtcagtctgccactgccaatgatgtcaatgtggataagctgtttcccttctttagacctcagtgtcactctaacaatgagggagttaaactttataaaccaaggtccattgcagccttgaaatatgattcaagtgttcatatgtgtctttatatagctatgcctgatccactgatggggtgttacaatacctgcttatatatgccagctgggaggaaagaggaatttactgaatgtgtctgaagtttcattgttttgaagttggaattttatgcctgtatctatgtttatgcctttgtaaaacccactgattttaaaagtgaaaaaggacttttttctctgcttttactctaaacaccaaacaatccctgcaaagggattattctgatgtttcttcatttcacatgaaaagttaattattgactctggaacttaaatattagataatatttttgacaatattgaagagtgagttttagtccagtaaagatgttttaatgagcttgaaggtaaagtttcggttaagttatgattttcacaggaagttacatactgaatgaaagataatatttgtatttttggtaatgtgctactcagttcttagctcttttttatccagatataaaagcccagtctatagctatgggatttaataaatttccaatatgtaagtgtttttatttgtttaatttctagtaaatgagcaatattttagaaacagtatcagtctttactgacagatgatcttgctgagtacaatcaaaataaatacataaaaaattctaagcatgtggcattgatgtttaataagtttctgaaagtaggaatctgaattttaactgtaggtttctaagttatataatttagttgtgtttcaaaaaatccaccaataaaatgtcagctttataaaaacagaaaccttgactttattttcacctctaaaaccattagcacttagcccataatagatgctcaataatttattttaaaacagttgctgtgtgagctgcatcacagggaaggtagcgaaaattgtttatcacaaataaactattgtgtaagaaaagtttagaaacaactaaatttgtaattttttcttttaaaagttatcaaaaatttataaattagacaaaatagtgattttttttgagatggagtcttgctctgttgcccaggctggagtgcagtggcatgatctcggttcactgcaacctcagcctcctgggcttaagcgattctcctgcctcagcctcccaagtagttgggattacaggcatgcaccaccatacctggctaatttttgtatttttagtagagatgggtttcgccatgttggccaggctggtcttgaactcctgacctcaagtgattcacccgcctcagcctgccaaagtgctgggattacaagtgtgagctaccatgcccagacaaaattgcaatttttttaaaagaaagatattaccccttatatctagtttagactagattatggctagtttgtatttatgctgcttggataataactgcactatggtaagtgcttaataaatgtttgttgataaataaagataaaaaattataccagtgaaacttcacagttgtccatggtcaggctgaaatgctcagaaagcatttagtgacttctctaacatttgcaaaaaaaagaaaaaaatcatcgaggaaacaaaattaagaaagtatataaaaatgtatttattttgcaaaggaaagattaaaaatgtgtttaaagtatcttcttcccagtaaagtgtgtatgcaccctcaacacacacacacatacacacacacacacacacagatggtcactgtcttttaatagatttcctgtgaagtttcgaaagtaaaattgcttgaaacttgaaagttgctaagagtagattttaatgttctcacccgccaaaaatataaatatgttatgtgatggatatgctaattaccttgatttaatcattttacaatgtgtgtgcacatatatgtatatgcatatgtacgtatgcacatatatgtatatgcatatgtacgtatgcacatatatgtatatgcatatgtacgtatgcacatatatgtatatgcatatgtacgtatgcacatatatgtatatgcatatgtacgtatgcacatatatgtatgtgcatatgtacgtatgcacatatatgtatgtgcatatgtacataggcacatatatgtatgtgcatatgtatgtatacatataaatgcatatatgtgcatatctatatatgtattgcacacatatatatacaccacattatacaccataaatatatacaatttgtatttgtgaattttaaaactttcttttaaaaagatgtgcttctctgagagatgggattcttaagtttccaagaaaacattactaaagaaatcataacagccttttaattttttaatttgcctaaatgaataaaagataaacagcaattaagcttgaactgcagtacttatttttctttagatcattcttaggtggtacacgatgtccagaggaagtaagtggatcagcatctttcattgatgttattaaaatttgtctaaactttggatgcctttaatttgctattcctagaagtagacataaattaaggaacatctattttaaaagaaagaaacttagtcctctttgaggtctctttattccaaagggttctcaaactaatgttagctggacctgtcttgtcccacaatcttaccttgcaaatgtaaggtaagtgaatgagttgtgtcaaagggataatttttatctttccttgtgagcggtctggggaggatggaatttggatttagaaacgaaggactaagatgtatgttcatttgtaactttgagtctctccctcatgtctctcttttcaaaagtgtggatttctttgagaagtcatttattctatcaccactcccctccattcctccaacctctcagaggccatagatagggctaagttgaggaattcatcagcaaaggcacagagcagctggccctttccctaagacccaccctgccatatattggagtagaacacattttaaagctgttcattagagagtcaccaggcatcaaaatcatcccaaagcaaaaaattagcttggaacaactactttgcttgcaaaaggtaactgttggtctagaaaggcttcccagctctggcaacacccaaatactgcttctgcccaccttccccaaatctgtgaagataaactctgtttccttggcctaacaaaataaatcaagtttgagagtgaaaaaggaggaagcagaaactttcccaaactttctgttcctagaatgtccttgggaaagccaaggaggcaggaggctgtctttgaagtcactcttgtgaaaaataactactaattttcccgcatggaatgcagcctggaattacacaatagaggttttgtgactgtgaagtgccttgtgccttctaagacaaggcacctcagcctggggcaaagacagaggagcagactatacatgccttccagagtggagattctcagcaccgaggacagcacccacatttgttgccagtactgagggcagggaagtggatggtaatcctgaaaacctttattaattaattaatttatttatttatttatttatttatttatttatattttgagacagagtctcgctcttgttgcccaggctggagtacagtggtgcgatcttgtctcactgaaacctccgcctcccgggttaaagcgattctcctgcttcagctacccaagtagctggtatgtgacatgactcctggctaattttttgtatttagtagagacaaggtttcaccatgttggtcaggctggtctcgaactcctgcctcaggtaatccacccgcctcggcctcccaaagtgctgggagccagcatgcctggctgaaagcctatcttttaatggagcaagagtcaggcatggaaagagaatgagtttgtacaaacaccaggaaacaagatgatgacaattattttgtttacaggaaactttgaataaattttggctgcataaagacagaatgaaaaagtgtgccatttatctccttaatgacaatgtccaatgtctcacattttacacagacaaaaatcaggcaccattttttttaaaagaagcagtacactcctacatgttacaatataggatagagatagaaagatgtagcatctttcaggagactgctctggtgatcccaattcaaatggcagtttttccatcaagctgaacttacttaaatagactcttaatctccccaagtctcaattttttatctgtaaggtggagaagatgcatgtctatcttataaggttgtcacaaagatcaaacaacatattgtgtatatggaagctctcaatcacttccaatattacataacaattttaaatatttattattcttattcaaagcacaaatgggctctaataagtcttggttattattactctgatcatcttggtccagcaacataatcccaactgaccactctttccaaagagatgacaactgtagagaagcttccagttgagaaaagaattttaattaaagtagaatttagaaatgtgggggggaggagccaagatggccgaataggaacagctccagtctacagctcccagcgtgagcgacgcagaagacggtgatttctgcatttccatctgaggtacagggttcatctcactagggagtgccagacagtgggcgcaggtcagtgggtgcgcacaccgtgcgcgagccgaagcagggagaggcattgcctcactcgggaagcgcaaggggtcagggagttccctttccaagtcaaagaaaggggtgacggacggcacctggaaaatcgggtcactcccacccgaatactgcgcttttctgatgggcttaaaaaacggcgcaccacgagattatatcccacacctggctcggagggtcctacgcccacagagtctcgctgattgctagcacagcagtctgagatcaaactgcaagctggcagcgaggctgggggaggggcgcccgccattgcccaggcttgcttaggtaaacaaagcagcctggaagctcgaactgggtggagcccaccacagctcaaggaggcctgcctgcctctgtaggctccacctctgggggcagggcacagacaaacaaaaagacagcagtaacctctgcagacttaaatgtccctgtctgacagctttgaagagagcagtggttctcccagcatgcagctggagatctgagaacaggcagactgcctcctcaagtgggtccctgacccctgacccccaagcagcctaactgggaggcaccccccagcaggggcacactgacacctcacacggcagggtattccaacagaactgcagctgagggtcctgtccattagaaggaaaactaacaaacagaaaggacatccacaccaaaaacccatctgtacatcaccatcgtcaaagaccaaaagtagataaaaccacaaagatggggaaaaaacagaacagaaaaactggaaactctaaaaagcagagcacctctcctcctgcaaaggaacgcagttcctcaccagcaacggaacaaagctggatggagaatgactttgacgacctgagagaagaaggcttcagacgatcaaattactctgagctacgggaggacgttcaaaccaaaggcaaagaagttgaaaactttgaaaaaaatttagaagaatgtataactagaataaccgatacagagaagtgcttaaaggagctgatggagctgaaaaccaaggctcgagaactacgtgaagaatgcagaagcctcaggagccgatgcgatcaactggaagaaagggtatcagcgatggaagatgaaatgaatgaaatgaagcgagaaaggaagtttagagaaaaaagaataaaaagaaatgagcaaagcctccaagaaatatgggactatgtgaaaagaccaaatctacgtctgattggtgtacctgaaagtgatggggagaatggaaccaagttggaaaacactctgcaggatattatccaggagaacttccccagtctagcaaggcaggccaacgttcagattcaggaaatacagagaacgccacaaagatactcctcgagaagagcaactccaagacacataattgtcagattcaccaaagttgaaatgaaggaaaaaatgttaagggcagccagagagaaaggtcgggttacccacaaagggaagcccatcagactaacagcagatctctctgcagaaaccctacaagccagaagagagtgggggccaatattcaacattcttaaagaaaagaattttcaacccagaatttcatatccagccaaactaagcttcataagtgaaggagaaataaaatactttacagacaagcaaatgctgagagattttgtcaccaccaggcctgccctaaaagagctcctgaaggaagtgctaaacatggaaaggaacaaccggtaccagccgctgcaaaatcatgccaaaatgtaaacaccatcaaggctaggaagaaactgcatcaactaacgaacaaaataaccagctaacatcataatgacaggatcaaattcacacataacaatattaactttaaatgtaaatggactaaatgctccaattaaaagacacagactggcaaattggataaagagtcaagacccatcagtgtgctgtattcaggagacccatctcacgtgcagagacacacataggctcaaaataaaaggatggaggaagatctaccaagcaaatggaaaacaaaaaaaggcaggggttgcaatcctagtctctgataaaacagactttaaaccaacaatgataaaaagagacaaagaaggccattacctaatggtaaagggatcaattcaacaagaagagctaactatcctaaatatatatgcacccaatacaggagcacccagattcataaagcaagtcctgagtgacctacaaagagacttagactcccacacattaataatgggagactttaacaccccactgtcaacattagacagatcaactagacagaaagttaacaaggatacccaggaattgaactcagctctgcaccaagcaacctaatagacatctacagaactctccaccccaaatcaacagaatatacatttttttcagcaccacaccacacctattccaaaattgaccacatacttggaagtaaagctctcctcagcaaatgtaaaagaacagaaattataacaaactgtctctcagaccacagtgcaatcaaactagaattcaggattaagaatctcactcaaaaccactcaactacatggaaactgaacaacctgctcctgaatgactactgggtacataacgaaatgaaggcagaaataaagatgttctttgaaaccaacgagaacaaagacacaacataccagaatctctgggacgcattgaaagcagtgtgtagagggaaatttatagcactaaatgcccacaagagaaagcaggaaagatccaaaattgacaccctaacatcacaattaaaagaactagaaaagcaagtgcaaacacattcaaaagctagcagaagtcaagaaataactaaaatcagagcagaactgaaggaaatagagacacaaaaaacccttcaaaaaattaatgaatccaggagcttgttttttgaaaggatcaacaaaattgatagaccgctagcaagactaataaagaaaaaaagagagaagaatcaaatagacacaataaaaaatgataaaggggataacaccaccgatcccacagaaatacaaactaccatcagagaatactacaaacacctctatgcaaataaactaaaaaatctagaagaaatggataaattcctcgacacatacactctcccaagactaaaccaggaagaagttgaatctctgaatagaccaataacaggctctgaaattgtggcaataatcaatagcttaccaactaaaaagagtacgggaccagatggattcacagccgaattctaccagaggtacaaggaggaattggtaccattccttctgaaactattccaatcaatagaaaaagagggaatcctctctaactcattttatgaggccagcatcatcctgataccaaagcctggcagagacacaacaaaaaaaagagaattttagaccaatatccttgatgaacattgatgcaaatatcttcaataaaatactggcaaaacgaatccagcagcacatcaaaaagcttattcaccatgatcaagtgggcttcatccctgggatgcaaggctggttcaatatacacaaatcaataaatgtaatccagcatataaacagagccaaagacaaaaaccacatgattatctcaatagatgcagaaaaagccattgacaaaattcaacaacccttcatgctaaaaactctcaataaattaggtattgatgggacgtatttcaaaataataagagctatctatgacaaacccacagccaatatcatactgaatgggcaaaaactggaagcattccctttgaaaactggcacaagacagggatgccctctctcaccacttctattcaacatagtgttggaagttctggccagggcaattaggcaggagaaggaaataaagggtattcaattaggaaaagaggaagtcaaattgtccctgtttgcagacgacatgattgtatatctagaaaaccccactgtctcagcccaaaatctccttaagctgataagcaacttcagcaaagtctcaggatacaaaatcaatgtacaaaaatcacaagcattcttatacaccaacaacagacaaacagagagccaaatcatgagtgaagtcccattcacaattgcttcaaagagaataaaatacctaggaatccaacttacaagggatgtgaaggacctcttcaaggagaactacaaaccactgctcaaggaaataaaagaggatacaaacaaatggaagaacattccatgctcatgggtaggaagaatcaatatcgtgaaaatggccatactgcccaaggtaatttacagattcaatgccatccccatcaagttaccaatgactttcttcacagaattggaaaaaactactttaaagttcatatggaaccaaaaaagagcccgcatcttcaagtcaatcctaagccaaaagaacaaagctggaggcatcacactacctgccttcaaactatactacaaggctacagtaaccaaaacagcatggtactggtaccaaaacagagatatagatcaatggaacagaacagagccctcagaaataatgccgcatatctacaactatctgatctttgacaaacctcagaaaaacaagcaatggggaaaggattccctatttaataaatggtgctgggaaaactggctagccatatgtagaaagctgaaactggatcccttccttacaccttatacaaaaatcaattcaagatggattaaagacttaaacgttagacataaaaccataaaaaccctagaagaaaacctaggcattaccattcaggacataggcatggggaaggacttcatgtctaaaacaccaaaagcaatggcaacaaaagacaaaattgacaaatgggatctaattaaactaaagggcttctgcacagcaagagaaactaccatcagagtgaacaggcaacctacaaaatgggagaaaaatttcgcaacctactcatctgacaaagggctaatatccagaatctacaatgaactcaaacaaatttacaagaaaaaaacaaacaaccccatcaaaaagtgggcaaaggacatgaacagacacctcttaaaagaagacatttatgcagccaaaaaacacatgaaaaaatgctcatcatcactggccatcagagaaatgcaaatcaaaaccacaatgagataccatctcacaccagttagaatggcaatcattaaaaagtcaggaaacagcaggtgctggagaggatgtggagaaataggaacacttttacactgttggtgggactgtaaactagttcaaccattgtggaagtcagtgtggcgattcctcagggatctagaactggaaataccatttgacccagccatcccattactgggtatatacccaaaggactataaatcatgctgctataaagacacatgcacacgtatgtttattgcggcattattcacaatagcaaagacttggaaccaacccaaatgtccaacaatgatagactggattaagaaaatgtggcacatatacaccatggaatactatgcagccataaaaatgatgagttcgtgtcctttgtagggacatggatgaaattggaaatcatcattgtcagtaaactatcacaagaacaaaaaaccaaacaccgcatattctcactcataggtgggaattgaacaatgagagcacatggacacaggaaggggaatatcacactctggggactgttgtggggtggggggaggggggagggatagcattgggagatatacctaatgctagatgacgagttagtgggtgcagtgcaccagcatggcacatgtctacatatgtaactaacctgcacaatgtgcacatgtaccctagaacttaaaatataataaaagaaaaaaaagaaaaagaaaaaaaaaaagaaaatgtggtatatacatccaatagaatattatgcagccttaaaaaggaagaaatcttgtcatattttacaacatggatgaaatttgctgaatacgccagtaataaaaggacacatgctatatgattccatgtatatgaaatatctaaagtagtccaaatcataccaacagaaagtagaaaggcgagtgtcaaatactggggagggaagagggggaataaatatttggtggatatagagcttcatttttgcaagacaaaaaagttctagagatctgtttcacaacaatgtgaatgtatttaattgaactatacatttaaaaatggttgagatggtaaattttatgctatgtgttttcttaccacaataaaccagactttttctttaaagtcaaaaaaataaaataaaataaaataaagtagaatttaaacctttcaacacacactgcacatgcacacacacacacacatgtacacacatgggcatgtgttatgaacaataaaataataaaatttgcatcaacttgaaactaaaactatcttgaaaacggcaactttagagattgaaattgaaatttcccatttgaagcttaaggcaatagaccttcattctttcaccctcatttctgacattgttcttcattttgcaacctcctttctctcatggagctgcagcattaccagacttgtagatcataatcttcaaaaagtcagcatttgctttattgctaaagacatttcttgaaatgatctgtctctgtgtccccgaacaaatcacattttgaatccaaattgtaatccccacaagttgggggagagatctcatggaaggtga

SEQ ID NO: 868591 - DNA, 103278 bp, Homo sapiens
tcaccttccatgagatctctcccccaacttgtggggattacaatttggattcaaaatgtgatttgttcggggacacagagacagatcatttcaagaaatgtctttagcaataaagcaaatgctgactttttgaagattatgatctacaagtctggtaatgctgcagctccatgagagaaaggaggttgcaaaatgaagaacaatgtcagaaatgagggtgaaagaatgaaggtctattgccttaagcttcaaatgggaaatttcaatttcaatctctaaagttgccgttttcaagatagttttagtttcaagttgatgcaaattttattattttattgttcataacacatgcccatgtgtgtacatgtgtgtgtgtgtgtgcatgtgcagtgtgtgttgaaaggtttaaattctactttattttattttattttatttttttgactttaaagaaaaagtctggtttattgtggtaagaaaacacatagcataaaatttaccatctcaaccatttttaaatgtatagttcaattaaatacattcacattgttgtgaaacagatctctagaacttttttgtcttgcaaaaatgaagctctatatccaccaaatatttattccccctcttccctccccagtatttgacactcgcctttctactttctgttggtatgatttggactactttagatatttcatatacatggaatcatatagcatgtgtccttttattactggcgtattcagcaaatttcatccatgttgtaaaatatgacaagatttcttcctttttaaggctgcataatattctattggatgtatataccacattttctttttttttttctttttcttttttttcttttattatattttaagttctagggtacatgtgcacattgtgcaggttagttacatatgtagacatgtgccatgctggtgcactgcacccactaactcgtcatctagcattaggtatatctcccaatgctatccctcccccctccccccaccccacaacagtccccagagtgtgatattccccttcctgtgtccatgtgctctcattgttcaattcccacctatgagtgagaatatgcggtgtttggttttttgttcttgtgatagtttactgacaatgatgatttccaatttcatccatgtccctacaaaggacacgaactcatcatttttatggctgcatagtattccatggtgtatatgtgccacattttcttaatccagtctatcattgttggacatttgggttggttccaagtctttgctattgtgaataatgccgcaataaacatacgtgtgcatgtgtctttatagcagcatgatttatagtcctttgggtatatacccagtaatgggatggctgggtcaaatggtatttccagttctagatccctgaggaatcgccacactgacttccacaatggttgaactagtttacagtcccaccaacagtgtaaaagtgttcctatttctccacatcctctccagcacctgctgtttcctgactttttaatgattgccattctaactggtgtgagatggtatctcattgtggttttgatttgcatttctctgatggccagtgatgatgagcattttttcatgtgttttttggctgcataaatgtcttcttttaagaggtgtctgttcatgtcctttgcccactttttgatggggttgtttgtttttttcttgtaaatttgtttgagttcattgtagattctggatattagccctttgtcagatgagtaggttgcgaaatttttctcccattttgtaggttgcctgttcactctgatggtagtttctcttgctgtgcagaagccctttagtttaattagatcccatttgtcaattttgtcttttgttgccattgcttttggtgttttagacatgaagtccttccccatgcctatgtcctgaatggtaatgcctaggttttcttctagggtttttatggttttatgtctaacgtttaagtctttaatccatcttgaattgatttttgtataaggtgtaaggaagggatccagtttcagctttctacatatggctagccagttttcccagcaccatttattaaatagggaatcctttccccattgcttgtttttctgaggtttgtcaaagatcagatagttgtagatatgcggcattatttctgagggctctgttctgttccattgatctatatctctgttttggtaccagtaccatgctgttttggttactgtagccttgtagtatagtttgaaggcaggtagtgtgatgcctccagctttgttcttttggcttaggattgacttgaagatgcgggctcttttttggttccatatgaactttaaagtagttttttccaattctgtgaagaaagtcattggtaacttgatggggatggcattgaatctgtaaattaccttgggcagtatggccattttcacgatattgattcttcctacccatgagcatggaatgttcttccatttgtttgtatcctcttttatttccttgagcagtggtttgtagttctccttgaagaggtccttcacatcccttgtaagttggattcctaggtattttattctctttgaagcaattgtgaatgggacttcactcatgatttggctctctgtttgtctgttgttggtgtataagaatgcttgtgatttttgtacattgattttgtatcctgagactttgctgaagttgcttatcagcttaaggagattttgggctgagacagtggggttttctagatatacaatcatgtcgtctgcaaacagggacaatttgacttcctcttttcctaattgaataccctttatttccttctcctgcctaattgccctggccagaacttccaacactatgttgaatagaagtggtgagagagggcatccctgtcttgtgccagttttcaaagggaatgcttccagtttttgcccattcagtatgatattggctgtgggtttgtcatagatagctcttattattttgaaatacgtcccatcaatacctaatttattgagagtttttagcatgaagggttgttgaattttgtcaatggctttttctgcatctattgagataatcatgtggtttttgtctttggctctgtttatatgctggattacatttattgatttgtgtatattgaaccagccttgcatcccagggatgaagcccacttgatcatggtgaataagctttttgatgtgctgctggattcgttttgccagtattttattgaagatatttgcatcaatgttcatcaaggatattggtctaaaattctcttttttttgttgtgtctctgccaggctttggtatcaggatgatgctggcctcataaaatgagttagagaggattccctctttttctattgattggaatagtttcagaaggaatggtaccaattcctccttgtacctctggtagaattcggctgtgaatccatctggtcccgtactctttttagttggtaagctattgattattgccacaatttcagagcctgttattggtctattcagagattcaacttcttcctggtttagtcttgggagagtgtatgtgtcgaggaatttatccatttcttctagattttttagtttatttgcatagaggtgtttgtagtattctctgatggtagtttgtatttctgtgggatcggtggtgttatcccctttatcattttttattgtgtctatttgattcttctctctttttttctttattagtcttgctagcggtctatcaattttgttgatcctttcaaaaaacaagctcctggattcattaattttttgaagggttttttgtgtctctatttccttcagttctgctctgattttagttatttcttgacttctgctagcttttgaatgtgtttgcacttgcttttctagttcttttaattgtgatgttagggtgtcaattttggatctttcctgctttctcttgtgggcatttagtgctataaatttccctctacacactgctttcaatgcgtcccagagattctggtatgttgtgtctttgttctcgttggtttcaaagaacatctttatttctgccttcatttcgttatgtacccagtagtcattcaggagcaggttgttcagtttccatgtagttgagtggttttgagtgagattcttaatcctgaattctagtttgattgcactgtggtctgagagacagtttgttataatttctgttcttttacatttgctgaggagagctttacttccaagtatgtggtcaattttggaataggtgtggtgtggtgctgaaaaaaatgtatattctgttgatttggggtggagagttctgtagatgtctattaggttgcttggtgcagagctgagttcaattcctgggtatccttgttaactttctgtctagttgatctgtctaatgttgacagtggggtgttaaagtctcccattattaatgtgtgggagtctaagtctctttgtaggtcactcaggacttgctttatgaatctgggtgctcctgtattgggtgcatatatatttaggatagttagctcttcttgttgaattgatccctttaccattaggtaatggccttctttgtctctttttatcattgttggtttaaagtctgttttatcagagactaggattgcaacccctgcctttttttgttttccatttgcttggtagatcttcctccatccttttattttgagcctatgtgtgtctctgcacgtgagatgggtctcctgaatacagcacactgatgggtcttgactctttatccaatttgccagtctgtgtcttttaattggagcatttagtccatttacatttaaagttaatattgttatgtgtgaatttgatcctgtcattatgatgttagctggttattttgttcgttagttgatgcagtttcttcctagccttgatggtgtttacattttggcatgattttgcagcggctggtaccggttgttcctttccatgtttagcacttccttcaggagctcttttagggcaggcctggtggtgacaaaatctctcagcatttgcttgtctgtaaagtattttatttctccttcacttatgaagcttagtttggctggatatgaaattctgggttgaaaattcttttctttaagaatgttgaatattggcccccactctcttctggcttgtagggtttctgcagagagatctgctgttagtctgatgggcttccctttgtgggtaacccgacctttctctctggctgcccttaacattttttccttcatttcaactttggtgaatctgacaattatgtgtcttggagttgctcttctcgaggagtatctttgtggcgttctctgtatttcctgaatctgaacgttggcctgccttgctagactggggaagttctcctggataatatcctgcagagtgttttccaacttggttccattctccccatcactttcaggtacaccaatcagacgtagatttggtcttttcacatagtcccatatttcttggaggctttgctcatttctttttattcttttttctctaaacttcctttctcgcttcatttcattcatttcatcttccatcgctgataccctttcttccagttgatcgcatcggctcctgaggcttctgcattcttcacgtagttctcgagccttggttttcagctccatcagctcctttaagcacttctctgtatcggttattctagttatacattcttctaaatttttttcaaagttttcaacttctttgcctttggtttgaacgtcctcccgtagctcagagtaatttgatcgtctgaagccttcttctctcaggtcgtcaaagtcattctccatccagctttgttccgttgctggtgaggaactgcgttcctttgcaggaggagaggtgctctgctttttagagtttccagtttttctgttctgttttttccccatctttgtggttttatctacttttggtctttgacgatggtgatgtacagatgggtttttggtgtggatgtcctttctgtttgttagttttccttctaatggacaggaccctcagctgcagttctgttggaataccctgccgtgtgaggtgtcagtgtgcccctgctggggggtgcctcccagttaggctgcttgggggtcaggggtcagggacccacttgaggaggcagtctgcctgttctcagatctccagctgcatgctgggagaaccactgctctcttcaaagctgtcagacagggacatttaagtctgcagaggttactgctgtctttttgtttgtctgtgccctgcccccagaggtggagcctacagaggcaggcaggcctccttgagctgtggtgggctccacccagttcgagcttccaggctgctttgtttacctaagcaagcctgggcaatggcgggcgcccctcccccagcctcgctgccagcttgcagtttgatctcagactgctgtgctagcaatcagcgagactctgtgggcgtaggaccctccgagccaggtgtgggatataatctcgtggtgcgccgttttttaagcccatcagaaaagcgcagtattcgggtgggagtgacccgattttccaggtgccgtccgtcacccctttctttgacttggaaagggaactccctgaccccttgcgcttcccgagtgaggcaatgcctctccctgcttcggctcgcgcacggtgtgcgcacccactgacctgcgcccactgtctggcactccctagtgagatgaaccctgtacctcagatggaaatgcagaaatcaccgtcttctgcgtcgctcacgctgggagctgtagactggagctgttcctattcggccatcttggctcctcccccccacatttctaaattctactttaattaaaattcttttctcaactggaagcttctctacagttgtcatctctttggaaagagtggtcagttgggattatgttgctggaccaagatgatcagagtaataataaccaagacttattagagcccatttgtgctttgaataagaataataaatatttaaaattgttatgtaatattggaagtgattgagagcttccatatacacaatatgttgtttgatctttgtgacaaccttataagatagacatgcatcttctccaccttacagataaaaaattgagacttggggagattaagagtctatttaagtaagttcagcttgatggaaaaactgccatttgaattgggatcaccagagcagtctcctgaaagatgctacatctttctatctctatcctatattgtaacatgtaggagtgtactgcttcttttaaaaaaaatggtgcctgatttttgtctgtgtaaaatgtgagacattggacattgtcattaaggagataaatggcacactttttcattctgtctttatgcagccaaaatttattcaaagtttcctgtaaacaaaataattgtcatcatcttgtttcctggtgtttgtacaaactcattctctttccatgcctgactcttgctccattaaaagataggctttcagccaggcatgctggctcccagcactttgggaggccgaggcgggtggattacctgaggcaggagttcgagaccagcctgaccaacatggtgaaaccttgtctctactaaatacaaaaaattagccaggagtcatgtcacataccagctacttgggtagctgaagcaggagaatcgctttaacccgggaggcggaggtttcagtgagacaagatcgcaccactgtactccagcctgggcaacaagagcgagactctgtctcaaaatataaataaataaataaataaataaataaataaattaattaattaataaaggttttcaggattaccatccacttccctgccctcagtactggcaacaaatgtgggtgctgtcctcggtgctgagaatctccactctggaaggcatgtatagtctgctcctctgtctttgccccaggctgaggtgccttgtcttagaaggcacaaggcacttcacagtcacaaaacctctattgtgtaattccaggctgcattccatgcgggaaaattagtagttatttttcacaagagtgacttcaaagacagcctcctgcctccttggctttcccaaggacattctaggaacagaaagtttgggaaagtttctgcttcctcctttttcactctcaaacttgatttattttgttaggccaaggaaacagagtttatcttcacagatttggggaaggtgggcagaagcagtatttgggtgttgccagagctgggaagcctttctagaccaacagttaccttttgcaagcaaagtagttgttccaagctaattttttgctttgggatgattttgatgcctggtgactctctaatgaacagctttaaaatgtgttctactccaatatatggcagggtgggtcttagggaaagggccagctgctctgtgcctttgctgatgaattcctcaacttagccctatctatggcctctgagaggttggaggaatggaggggagtggtgatagaataaatgacttctcaaagaaatccacacttttgaaaagagagacatgagggagagactcaaagttacaaatgaacatacatcttagtccttcgtttctaaatccaaattccatcctccccagaccgctcacaaggaaagataaaaattatccctttgacacaactcattcacttaccttacatttgcaaggtaagattgtgggacaagacaggtccagctaacattagtttgagaaccctttggaataaagagacctcaaagaggactaagtttctttcttttaaaatagatgttccttaatttatgtctacttctaggaatagcaaattaaaggcatccaaagtttagacaaattttaataacatcaatgaaagatgctgatccacttacttcctctggacatcgtgtaccacctaagaatgatctaaagaaaaataagtactgcagttcaagcttaattgctgtttatcttttattcatttaggcaaattaaaaaattaaaaggctgttatgatttctttagtaatgttttcttggaaacttaagaatcccatctctcagagaagcacatctttttaaaagaaagttttaaaattcacaaatacaaattgtatatatttatggtgtataatgtggtgtatatatatgtgtgcaatacatatatagatatgcacatatatgcatttatatgtatacatacatatgcacatacatatatgtgcctatgtacatatgcacatacatatatgtgcatacgtacatatgcacatacatatatgtgcatacgtacatatgcatatacatatatgtgcatacgtacatatgcatatacatatatgtgcatacgtacatatgcatatacatatatgtgcatacgtacatatgcatatacatatatgtgcatacgtacatatgcatatacatatatgtgcacacacattgtaaaatgattaaatcaaggtaattagcatatccatcacataacatatttatatttttggcgggtgagaacattaaaatctactcttagcaactttcaagtttcaagcaattttactttcgaaacttcacaggaaatctattaaaagacagtgaccatctgtgtgtgtgtgtgtgtgtatgtgtgtgtgtgttgagggtgcatacacactttactgggaagaagatactttaaacacatttttaatctttcctttgcaaaataaatacatttttatatactttcttaattttgtttcctcgatgatttttttcttttttttgcaaatgttagagaagtcactaaatgctttctgagcatttcagcctgaccatggacaactgtgaagtttcactggtataattttttatctttatttatcaacaaacatttattaagcacttaccatagtgcagttattatccaagcagcataaatacaaactagccataatctagtctaaactagatataaggggtaatatctttcttttaaaaaaattgcaattttgtctgggcatggtagctcacacttgtaatcccagcactttggcaggctgaggcgggtgaatcacttgaggtcaggagttcaagaccagcctggccaacatggcgaaacccatctctactaaaaatacaaaaattagccaggtatggtggtgcatgcctgtaatcccaactacttgggaggctgaggcaggagaatcgcttaagcccaggaggctgaggttgcagtgaaccgagatcatgccactgcactccagcctgggcaacagagcaagactccatctcaaaaaaaatcactattttgtctaatttataaatttttgataacttttaaaagaaaaaattacaaatttagttgtttctaaacttttcttacacaatagtttatttgtgataaacaattttcgctaccttccctgtgatgcagctcacacagcaactgttttaaaataaattattgagcatctattatgggctaagtgctaatggttttagaggtgaaaataaagtcaaggtttctgtttttataaagctgacattttattggtggattttttgaaacacaactaaattatataacttagaaacctacagttaaaattcagattcctactttcagaaacttattaaacatcaatgccacatgcttagaattttttatgtatttattttgattgtactcagcaagatcatctgtcagtaaagactgatactgtttctaaaatattgctcatttactagaaattaaacaaataaaaacacttacatattggaaatttattaaatcccatagctatagactgggcttttatatctggataaaaaagagctaagaactgagtagcacattaccaaaaatacaaatattatctttcattcagtatgtaacttcctgtgaaaatcataacttaaccgaaactttaccttcaagctcattaaaacatctttactggactaaaactcactcttcaatattgtcaaaaatattatctaatatttaagttccagagtcaataattaacttttcatgtgaaatgaagaaacatcagaataatccctttgcagggattgtttggtgtttagagtaaaagcagagaaaaaagtcctttttcacttttaaaatcagtgggttttacaaaggcataaacatagatacaggcataaaattccaacttcaaaacaatgaaacttcagacacattcagtaaattcctctttcctcccagctggcatatataagcaggtattgtaacaccccatcagtggatcaggcatagctatataaagacacatatgaacacttgaatcatatttcaaggctgcaatggaccttggtttataaagtttaactccctcattgttagagtgacactgaggtctaaagaagggaaacagcttatccacattgacatcattggcagtggcagactgaccaccacaaatcaggttttctcaaactgaatgtacctgatagaatttggctatgaataattaaaaaaatggggtacttaaaaatacaggtctctgggccttatcttcagagattcaaattgggtggagctgggaaggtacccagaatttgctgttgatgatactacagctgttctgagaactaaactcaaagaaacactatgcaaattctttaagacttaactatttccaaaataaaatgtaaagtagtatgagaatttcaaatcatagctacaaagatattgttttttttctccccactgcttctcagatattcatgttttcatggcaaacacacaatcaacaaaagtcaaagtccgttgactgtccaggcatgactttgagtgtcacaaggagcccctgcaaagggttggagatatgagcctctggccattttctcatgttacaaaactatctagctaatgtatttctaaggcagtgagaggaatatttcattccaggaaataactgaaacagtgaaattgtttaaactactaatgttttattactaatacaaataaaaatttcacatttatacagatttgcttttcaataatgtatttacttatttattcagtgaacatttcctgaatatctaccaaccaagcctttagtcaacatctgctgcatcataaatgtcctcaaagtgtttcccaaaacagacttgataattaattggaaaatgatactggaagttatggggattaggtgcagagttttattaccttatacagcagtatttatgattacaataaaacatacaaaaatgtttttatattaatataatactaaagaagttcaatgcttgtaactattttaatgggcttctgacttaaagaaaatttacttaggtacaataacaaagtagtaattggaatcatagttaactaaaatagaaaataaacttcataggttacgatttatattaagcccaataattcaattctaatgacagtcttgtgttttacatttagccttatatgctcctttatgagttctctgcaaagcatatatgaagcttgaatgaagcaggtcccaaattttaattaatcttgatgaaatgcgacagattactgatttaactcaattgagagtatgggattatcatctctaaatcaaagatgaccccaaaagatttaccattatgctcttgagtatgtactcatatcctgtcatttcagattattttgacttatttgttgtttctccatcttgtaaaggatttaaggctgttatttcaaattaaggtttgcttttcggactttttctgatgaaagaaatagttggatctccatcaacagattcacagctgacagaccacattctgtccatggctttactttattttctggagggcactgcaaaggattccaatttcacctacaaagaaaaacaccatcaaaatgggccacttgtataataagcaaaaactcttcaagtgtcctcagtgcaaagcactaggggataagtgggcttcttggatgagctgggtgccaccccaactttcaaggagcttacagcctcattatggtataagtacttgcatgttttagaaaatgccagagccattaatgtaatcagcatcccttttccataggtcacttcccagggaaggacttaacaggtctctccccaggcaaatcattagctgttccatttctcttttacattaccatctgcatatgctacaagaagcgaaatcattgaacctaatagtatggttcacacaaaactctagtgtcagaatcacctgaggtctataaactcccaaaagttatcacaaatttggtaaatttagccttggctatgactcaaagctattaatttttagctggcttttcatttgattctgatgcacattcaaattttagaatccatggtctaagcagataactcagtctagatggcaagatcactggatgaaggtgtgatgcagccttccatttatgctatgtcttcacataccaggtaaatgagattggaaaggagaacattttaaacataaacaactgcatgggcaagggttaggagtctggaaagagcatgagaactaaaaattgatcagtgttgctggaagagagtatgaagggctagagagataatcaggtgataaatgaggtaaccctgtgatattcttaagggcaattattataatattctcattatgaaggaagagtggaaggccaacagatgagccactggacagcttataaagtggatagaaccaggcagagtgataacaactggacacttagcgtagaagggatggagaggcgagggagaaaaaggaacatggcagtgacagaccaagtgtggaaaggtggaatgatggtaggaggtggagtggaatctaggaaggtcaaaggaaaaaggacacaagggtaattctgacctttttgtcaagttcttctccatcaatgaacccatggcttacatggaggtgcttttctccttaattaaatatttcaataaatttattatttttcctatggcgatggtagggaaagacagtcttcgattactgagaaaccgagtggcctcgtaaggtgtaaattacttactgttaatggaatcagccaaaatcttaagctgctgggtattgtccaagacctcaatcctttgggtgtatgggtcgtagcgaactgagaagggccgaggtattgtggcagcaaagttcctaagaccaaaaccacaggcttgagtgaagggcaccatttggagaaaggtagtcttaagagagttctcagtggcattttacttcttttttaggaacacggacacctccctagagcagggtcttcaacagccagggctgaggcggggggaatggagttttaatgagtcttcttgggaagcctctgtatgtgtgtatgtgtatgtacaaacacatatatacacatgtttatttagtcccctggctccaagaagacagagatagcttacaatgaaactactgaatacaataaagccacaaactcctatcattaaataaaatcaagagtaagtaaaatctagctaaagaatgctatatagagggaaaaaagctctgaaatggttgacaatcaatgcagagggaaatagctctcaagtggtgaagaaagcactatgttaataatgaaatttaacattgatggagtaccttctatgttccaagaactatgttaagttctaactgtccaatgctctttacaaatatccttccttatttaaccttcacaaaaaccttaggagaaaggcaccattgctatacccattttatggatgaggaaacaggcttgggaaggctgcgtgactactaaggccatactgtcagtaagttatgcagctgggaaggaacccaggcagtctgacactggcctggaccctttgctttcctgccttcccagtgccttactcctggatctgggagaaatccaccatgagggcctctatgagggacatcatgcaataccattaacaagatgttgcaaagtaatcacagatttctaagttggcctctggtgaacctataagctgctgtactgaaaatacaatgttacgggagacagtagggacctccaagtttggcaagagtggctccccaagttccaagtcaagctgcctgggctgaaaccctgcctctgtctattatggcccttgtgaccatgggcacaggggaccactcttctgtaccccaatttcctctgtaaaattggggcattagtggtacctgcctcagggggttgcagcaaatgctgttatactatggtgtaagtgccctatgagtgttagttgctatctttcatgaagaacaaatggccaagtatatatttccaccccttcttctctgaaaggagctgtctcaacccagctggtggcatgagccacatgttacacatctgtgattttgcctgctctgcacctcttcctccttcttcccataaagcagctcatttttgctttgggtgatttacccctaccctactaggtgtgtatcagtccagaagtcagtattcggtgccagccctcctctggaaaggaggtagcatgtgaaccatgctcagccaatcacatctctgcctacaacttgaatcttaaaactccaagtggttagaattggtttctcttggctgagatgctttgagggaatccaaagggatgtgcagattccttgttttgaactctgttctttagcattctctttgattctctgagccacttctcagcagaatggggttttcatggttgtttcccttgaggcctcggtactgacaggcctgtttcctggcaagctcttccctgctggtctgggactgatcacttgctggttagagagttgtctccaggagggcccatccaaatgtgatcttggcatgacagggtgctcatcagcactgcctctaagctccaatgcctgggtccaaaccttgggccttggagggagagggggatgatgctggaaggaggctaggctcccagtttaggagagaattaaaaaagcagagccagaaggacttgagagctctggacagagctggagaaatagtcattttaggccacaccaagtggatttgtgggccagcattttacctttaattatctaaagatagtagacataaattaaggaatatccattttaaaagaaagaaagttagtcctctttgaagtctctttattccaaagggttctcaaacaaatgttagctggacctgtcttgtcccacaatcttaccttgcaaatgtaaggtaagtgaatgagctggcaaaaggataatttttacctttctttgtgaggggtctgggggggatggaatttggatttagaaaggaaggactaagatgtatgttcatttgtctttgactttctcccttatgtctctctttcctccctcatgtctctcttttcaaaagtgcggatttctttgagaagtcatttattctatcaccactcccctccattcctctgacctctcagaggccatagatagggttgaaagctaacatacccagtgtcatagactcccaaaggcctgtatgttccatgcctgtcatccatcactgataagatttttttaagtggtaacatacagtgagtattaggatattcatgtccaggtggaccctctgcccagtctgtctcctgcttgggtgcaggaactgtgcactcagagggccaacagtctcagagtcccagaaccactccatcagcctcttgctgaactgcctctgggattaatgccttcaccaattatttattgagtgcttactctgtgtcaggtattgttccaggggctggaggaaaaacagaaaatagaaagaacaaaatttctaccctcatggagcttaccttatgtaatatattacaagttaataagtattacagacgcactggtggcagggatgagtagaaataagttggttagagaaagacatatagagattaaatttgggtaaagacacaaaggaggaagcaaattttgtaggtgtttgggagaagaaagtgaagaaaggacttcctaggttataagacttctttgattttgtggggagacttctgtggccactctgtatgcaggagggttcagtgtcttgacttggtggttgcgttgaacagggaccaggtggcaggggtgtgtgcaaaggtcagcatgcccaaccttccaacagagaacggaagaaaaggagggtggagaacatgggagagaaactgtctatggtacaaagttgctgtagacattggagtccactctcctggccaaccacccacagatgagtggcaccagtcaggaggcccccagagctagtggctcacctttgtcaccacctcaccttactttctccttggcatcattaaaactctctgccacgtaatagaggggctggaactccgtgacagtgtaattttggatggctgtcttctccagctccagggggagaagctttggcttctctgataagcagtactgtaggccccaagtgaaaagttattatcactgttaaatcaggatcagtattccctgctgcatcccataggccatttgtgccccttctctcatctcaccccgattccttctacatcacagcccaaatgctgtgagccaaattactttgcacatactaggttctacccttcatagctcatctaaaacctacagccaagggagaaaggagtaattcattccaattactttcaagtaaggtggtcaatagatgacgtgggagccaaccacactttctggcatgtgtttgcatactcacaaggctgcatgcataggtcagccttggaatcaggaggccccttctccccagagatatgtgtacttgcaattccatttctatctgtaaaacccacagccatcatcaaatcatagctgctaaggtaccaatcactggagaatgagttcccaggttgcatatcaaaacggatacaaatagggtttcaacaatattgaaagcacaataatggttttctgtacccaccacttttaaatctatccttggttcctgtgaaggtcatacctgtaattcaccaaaggatgacaggagcccagcaccatatgcctttatggagtctccttgtttgcagagcccaaactccacagtaaaccagtaaatctggaatggaaagtcaatctgagagcacactctatgatggttaattttatgtgtcaccttgactggatgaagggatacctgaatagatagtaaagcattattttggggtgtgtctatgtctatgagggtgtttctggaggggattggcatgtgagtcagtggactgagtggggaagatctttcctcattgtgggcgggaaccacccaatgggctggaatcccagatggaagaaaaaggcagaggaaagccacatacgtattctatctctcttggaaccaggacaccctgtttctcctacccttagacatcagaactccaggctttctggcctttggattctgggactcgcacccaaccaccacccaggggttctcaggcctttggtctcagactgagagctataccatcaacttccatggttctgaggcttttgaactttgactaatctacgccactgacttttcaggttctccagcttgcaggcagcatatcgtgggacctctcagccttgataactgtgtaagccaattcccctaataagtcccctctcagatttccctctctctctttctctctctatatatatctcactggttctttctctctggagatctttgactagtacacacctcaaagaaggagaaggcagcaactgccccagtgccatggacaggattgcccaggtagaagcctgtgcaggtttgttctctgaatcagcatgacctgtgatcacgtctctgtgtcctgtgtctcactctatctagtcacctgttgagtgctggctgaatgtaaagcatgatggaaaatatcaggaggtactaagaagccccaaaaggaggctcccaacaatatgttctccatatgacaggaactcctccatctcttttgtttttttctctgtggtgtcaactagactgagatgttcctcagatgctctgaagctggcagagctcattaggcacaacagtgggaggtagcagactgggtagtgatagaatcagtgaggagaatgtcccatcatccatgctaaaacttggggatgtttctgaagtcaactactgcatttatgcaaataaccaagtacttttctttcaataactgacagttcaatatgtcctagagagttggcctgaaaaaaagaatattggggttctggggctaagaggaacccagagctcagttagctgctggagacagtcacagttttggagaattaggggtaggttattagttacatctgtttattggactagaaaatgttaaacctgggagggctgtcagagctcagtcagtctgacctcctcacatacaggtgaggagtcttcagcccaggaaggtaaggcaacatgcatgtagttacacagcaaattaagggcagcaagaatccaggactgttcctcaaccaatcagtaacattttttcaatcagtaacaattttttagaaaagtcgcattggtgataagtcattttaatattgttatggcagataacatgatgctttgacttccaagtttattttctttgtagagatgagaaattctatctagctctgtaacttctttgaaagccgctccttgtatctctgtagcctctggcatttaaaaacccatgttcacaaaaatttaaataattcaatttaaatagttaaatttttagttgcctttgagatgggcaagatatgagctattgcatcccattgttagagatgaggaagaaaaagccacttgtccagcacctgaaagcagctgtcagtgagaagataaccttctgggagtttttagccttttgatggaacgagttcataagcttctaaactgatatatcttaataatagatttgcactcattggcagtccacaattcaattataaatgtttatttttcaacttccaggacaggcaatgtggctagtggctggggtgggatgtactaaaattagaaacgagtatgaaggaaggaaatcacctgctatgtagaattgcttctatagccccagtggacaagtgtcatcagatatactcaggagaggaaagtgttcagcaagaaggggaaagcccacccccatttctccctcatgtctgagaaagaaaagatcctaatgtatgctctggtgtgaaaagtagagatgtaaacattccatgttcaaagctctggatccagattacttcatacacacactttatgccaagggttttcaagggctactattatagcctgttggtgggttcaagatactgcttaaaatttaagagatgtaaacatctgtaggtagctgatttcaaaatcaaattattaaggagaaatctatcaaaatgtgaagtttcacttgtgcaaatgtaacccaccacattctgatttttttccccagataacctggcttccaggggagtaggaaagtttcaaagacctgagggccatagcctatagcactccaccatccacccagggagagaagggacttactgtggcgagcttttcaatgtattcatcaggtgcacccagagaggcaaggccaatttcctgtaattgggggaaaatagaacctgttctgttcctgtaattggaaccacagaaccaacctagtacttggccataaaaaggtgatgggtggccagatgccttcagaacagcccacatagaccctgagtgtgttatcaagtctttcctgcccatatgttatagaatcacagatctccagggtagggggatccttccaccctcacttggccctttgttttcactttataagtgaggaaattgaggcacagagaagggaagtgacttgctcatgatcacagggtcggttagtatctaaagcttcttctcttgactccagctcagtgattattcatcagcagaatattcctggaatgttaaatgagtcttaatcatgtaccctggaaacatcacaggagaactgcagataagtggtgacatcggtccaggcatatatatagctggagagtctaacacatcatagattaattctcaccacagcttctgttgcagaattcctctactgtctcattgtctcttttacagcacttactgcagcctgccttgtgtgtatgtgtctttcctactgtatatattaattcactctcaaaatatttattaagttcatttgatgtgccaggcagtgtataaaatcagtaaagacatcttgtgagttttagtggagacagacaataaataatgaacatatacataactatgttagaagaatataagttctttggaaagaagaaacaaaagaagaaataaacaagagggactaagagctccaggggattcaggggagacttcaattttaaatagggttccagggtaagcatcattgagaaggtcatatttgagcacagacttgaaggaagtggagttgttggttatactgacttctgagggaagcacactgttggccaagcatatagccagtgcaaaagcttgcatttctttcccaagaaaaggcagcgttgtttgggtcaagacacagggaggaaccaatgtggctggagaagaattagtgagggggcagtggcaggtgatatcaaagagggatccagagccagatcatgtagaatatttttagatgttttagggcttgagtttttcctttcagtgaaacaggagccattgcagggtaatgagcagatagatggtcatgatctcacttgtgttaccaagcactccttctgcctgctgtatgagaatagatggtagcagttgagggtagaggcaggacaccaagagatggtaggggttgagggtagagtaggacaccaggagactggagggtagacagggaacaaggagactgaaggggttgaggatagacaggacaccaggagactggagaggttaagtgtagacaggacaccaggagactggagaggtggagggtagacaggataccaggagactgaagaggtggagggtagacgggacaccaggacactagaaaggctgagtgtagatgggacaccaggagactggagaggttgaggatagacaggacaccaggagactggagaggtggagggtagacaggacaccaggagactggagaggttgaggatagacaggacaccaggagactggagaggtggagggtagacaggacaccaggagactggagaggctgagtgtagacaggacatcaggagactggagaggttgagggtagacaagacaccaggacactggagaggtagagggtaaacaggacaccaggagaatggagaggctgagtgtagacaggacaccaggacactggagaggcggagagtagacaggacaccaggagactggagaggttgagggtagacaggtcaccaggagactggagaggtagagggtaaacaggacaccaggagactggagaggctgagtgtagacacaataccagggcaccgaaaggctgagggttaaagggacaccaggagactggagaggtggagggtagacagaacacaaggagactggagaggctgagtgtagacgggacaccaggacactggagaggttgagagtaaatgggacaccaggagactggagaggctgagtgtagacagaacacatggagactggaggggtccagggtagagaccactagagggggccactgaggaggctaccgcagtcactaggatgagaaatgatagtggctgagaccaagttggtagcagtagacataattgaaatggtcagactctacacatattttgaaggtagaacacacaggattttctgaaagattggctgtggggttaagagaaaaaggagttggtaatgtcccaaagtgcttatggtttgatcagctggaagggcggaattcctatgaactgataatagaaaaagctgtgctggagaaggtttgagaaggaagatccagaactcagttttggataggatgttagagatgtcttatagacatccaaggggagatgttgaataggcaattcaatatgcaagtctgaatttggggattgaagtcttggctgcagatgtaaatgtgtccgtcatcagagtagagatggtatttaaagccatgaaattgagtgagatcaccagaggagtgcttgtagacagagatgaagactatgattagacccactttgaagcaagaagctacatggtctgcatctctatatcactccctgggccaagtccagagcctggttcagattaggcttataaaatactttctgatttagagtgaaccaaattcaaattcttagcctggatctgctctctcaattcaactagaaaccactgataaatccaagaccaaaatggcgccttgttctcttagtcaccattctttgtgagcctagagtttgcctacaacaaggggggccccacattccctgtgctccagccccactccatcctgtactgtagtgggaagcaagtcctgcctctgatcaaaaaggaatgttctcaggaaactttcaacatgacttgctgccttggaactgtccagatcaaagttggaaccatgtgacactgatgccccaagagctcctgtttgttgacttgagcaactgtccactcttctgtggggttccccaaagtggaaatggcttaaggaggactgccacttagcctctgacttcgtaaactaacttctggtggtaagaataaaaggttcctattcttcaaggaaaaatctgattgttttttggccacagtaacaaatccagattttaaaactgtcccaagcaatcaaagatatcttggcagcagtaaccacacttctgaatgtcattggtgatgcttctacagttaaagttcaactaatcccgaaacacttccacttccaaaagtccaacgatctttgaactccataattccccaaacctcacataaaagtaattttccttttgtttagagaggctgcatcttacaagtacagttttccctcacttagcaagcaataaattccacttttttgtttgtttgtttcaaatatttagtggtagcttctttatttgacagtgggaatgtttatttctgccagctgagggaaaatgcccattaaattcacacacaatcccattattctgaaatcccaatacttggctcagcatttgctcataggtcattccatttgattcttgtgcttctttgtgaggaagatgactggtggagagggcttttgactgatccacttttattaaaactgaggcacagggtggctgataatgtaaccccaggtcacacagctggttagtggcagggttggagcctaggtacatcagaacaccattcaaccttctcatgatcccagctaccaaaccatggttttaggctgcctctcagtgcctggagagaattggtagcattattttactcagcccaaaactttcttttttggccaggtgtggtggctcttgcctgtaatcttagcactttgggagggtgagatgggaggattgaggccaagagtttgaggtcagcctcagcaatgtagtgagactctgtctccacaaaaattaaaacattcagccaggcatgaaagtatgtgcttgtagtcccagccactcaggaggctgaggtgggaggattgtttgagcccagaagtctgaggctgcagtgaaccgtgattataccactgcactccagtccagcctgggtgacagagtgagaccttgccttaaaagaaaaaaaaaagaaagaaaaagaaaaagaaagcttttttttgagcttgttaaccactgtgaaagatgaatgaaattctaggttgcagggttgcagctttgatgatggtgataagatattcagctcatttttttctttgttaactctaagtcagggtatcagcattggattcttggcaaatgtcacctcacttaattcaagcatatacacaaataactgcctgacaaggtagaaagttgcaacagccctgaaaaggtaaggggaatgtactaagagattggaagaaggtgaggtagttcctgcatgggaatcagggaggctttcatggatgaaaggctctagcaggaaaaatgagattagtacactgaagaacacacatatgattcagaggatgagtgattcaccaaccccatgcttgatctccgaaatgggtatttagcttcccagaaccacacacccatttcaggtgggatcatagaactgtacctggtttccgctcttgcagagggcatgaggacccctccctgggctcaactcatttgagaaattcaggtcacagacctataactagaaggctaaaaaatccattccttacctgggaaaactgggcaaagctgcgatctgaaaacaagggcacatgtcccaacagctcatggcagatgtcactgaaagacagaaagcacagagagctcggaggggaggaggtttaagccaagccagactcagtctttctacatgaggaatgggcagaaagaatggaaataactcttttaggcttatgatccctctcccaggaataagtgatatgcagaggttgggatcataaaaggcagggtacaaggtaaaaagaagaaaaggaaggaaaaataagagacaggtgcagggtagggcacagcagccaagggtcttaagagtatccccagtggggtaccaggcagaagagctaatattcctgtggacatgctcccatatacctaagtgagctatgagtcatgaacacttctcatcctgtcttctccctggtattgacttccctgggcagatacaatatgctcagctattccactgggaactaaaacaaaaacagtgctgctcttctgttagtctggaggtggacagcagtgagggaagaaaacctacatttatttaacactgtatgtgctatgtccatttggaacaggtctttttggatttgtagcaatgaactttatgggcaaggaaaaacaattttggatgttccattaatttttttataagttgcataagttttatcagactaaggggataacgaaacacccaagtaagaagcataatggctgcaattctctacctctacccaatacacaatctaggcaaagaaagataagagtaatctagatgtatacttaggaagtattgagatagcttggctgccacttgttcctgttctcatttgcaacttcgtagctttgactttggaacttgattgggatctctcattctcactgccaagggagttctgagttattggatcacaggatgaccaaatctccaatcagtctggtctatctacttggatggagcaaatctccagaatagatgaattgtttttagtactaccagcaaacagtctagacaactagtcctgtggaccagccagcaatgaacccaaacctcattcttgcagcaggaaaagatggcgctcattgtgcctggcaactggtagctggaggacagtactcacggttcgggggtatacatgggcttggatccatgtctgatgtactgtgtgcagtggaagactcggaaggccaggccacccaagaaatcccgagaggaaagcaggccagccacaggtcggaggcggaaaccagtgcaagctgggatgaaaagaagaaagaaaactcaaagctcatcaccactgagtcagaggcactaggagacctttaggtagtggagtagtacacataactgcccagggacataggctttgacgctaggcagacttggcttcagatgtctgcctcgctgctttctagctaggtgatctggatcaagtaaattcccatttctgagcctcagtttcctcatctgcataatgtggatagatacttcttagaaatgttccaagaataaaaagagctaatgaatacaaagtacttagcacagagcctagcacattggaaacatgcaataaatttagctttcattaccatttgttagggtggaacaatgattccctacttctcctgcttctagagtgaagagggaatttgaacctcatttcccagaagggaagagtatggatagagtgcttccagcttctgtactgcacctcacacagtctaccccataagtagcagtgacctgtctgactggagcatttgggaagagaatatgaatattgtcaatttaactctttctgtactgctctttctctcttgattgttcacagaggacctcattccagtctgctcttggccatgcaatggactatgctctatgaattggcaggtaagtttacctaattaaggggtaaaatattagcaagtccatttgtgtgcatatctatatcacattctctaaatcgctcaattttaaagctgacctctgatcaccatctctatggttcctgtatctgtctctcagtttgttgcaaactttggaggataaggatagtgacagtgataatggtaataatagctaacactatatttgacctactgtatgtaagacactgttttaagctactttagatatgctactaatccccacaatagccctatgaagtagacacttttattatgcccactttaccgatgggaaagctgagacagagataggttaaaggttttattcaaggtcacagccacaggcagtctagcttcaaagtctgttctcttaattactattatgtagcttcccaactgctagtattactgttttattattcttattattggccatggcaatggaagtaattagctaaagaagtctttgagatccccttgcctcttgcccccatgttctctgtgtcttcaggctgaagcacactctgcttggacccttactcccttctttatctaagaagcaaagactttctaatggaagggacccaaaaggtcatctaactcacccccaaactgtcctggctacaacttcccttcctgccaagtaatttccctggctcattgcccccacagtggcccatctctgcacagctctgatatatagaaaattttgtaacctgtagtctgtctccccacttctgcttattctacctggcacacagtaggtgttcaatatgtgctagttcattattttgtttttgctaaattaacatcctcttgacagaaagagtaacacccatttcacctggatatactgtacagagaggcttgcgactcaatgtacttacctattaagctactcagatttcaattcagtccaaattcactgaatacctgctgtatatgcaagactgtgctggttgtttccatatgcagcaccttacttcattctcataatttccctatgggaaaagctaaagagttgatacagtgtccatttgacagatgacaaaactgaggcaggtttactcagctggagaggattgaaggcaggattcataccagatgcacagactcagagctcagggctcttggcaccatccccgaaaatagcacatttcttacacaaacacacactcctaactcataacacagcaggaactacagggcaaacaaaacaaaacaaaacaaaaaaaaacctcagtgaagcaccttgggctttaagtgtgaaagaaaatacttttcagggacaggtacacggcaaaatccacagcctcaggtgtttgattgaatgaaagtggataaacacagtaggggctggagggaaggcagagcacagtgaaatttagttcttcctggaggaatcaacctgcatgcattcctacaagcacatgctttcatacttgcctccacatacttgtcttccccttccctctcctctgcctcaatcctcccccaactttctgcagggccattgaccctgatgtggacttactctgcaggaactgagaaacgtcttccagctggggaatgttatcttcatggaagccacagtacttttcaagaagtggaaaaatgtgattgtactcatagcaagcatgggttttatacaaggacttcagagtcttgaacactgtgccccatgttttcttttcttcctccatgtattccactcgagggatgggctgcccactagaatacaggcacaaaataggtgtctcaagcagggcaggggcacagcagaacgcaggttaggttagcagagggagtcggggaccagaacctgtgagctgccatcacttgctacagtgaatttcatacattatttgaaagagaaaaattccacatcttgatataggaaacattgttgttttgatttcccacatgaaagggtgatttggttaagcagtgatacaggctacaatgaggatttgctctcactttcgggaaatcacttggtttttctactcttctaattctctaattgcttacctggggtagaaattcacttacctgcacgggccagtcaggtatcacaaagctgtaaagttgcagagattggcaataaggagaatgggggctggcaggagaatatattccctttctaaaccagggcatctaagttaaagcaacacagtgtatttttatggtgttagctaaagcaattaaaccagtgggctaaactggatttaatatgtaggccacgaatctgagatcccctttgtttggtaggcatgcacttattgggtttgatatttctgctcctgggaagttataaaggtatttaaatacatactaattaagattccacattgtatacatatatcaaaacatcatgttgtacaccatattttatatacaattatataattatatacaattatataattgtatataattaaaaattatatacaatttttatttgtcaattagaaaactaaataaataagttctagatcaaggataataaataaatattggaacaaaggagagaaaataaatatataaatccatgctaaggtataaaatgcctcataccttctcttcactgagcttgttcaagtacatatgccaggccgcatagatcctgaatctcttggggaagggaaggctcacatatctggattctagtaagctccccaggtgactctgatgcaaactatagtttaaaagtcgttagttttaaaagtccgggaagctcaaactgggtggagcccaccacagctcaaggaggcctgcctgcctctgtagactccacctctgggggcagtgcatagccaaacaaaaggcagcagaaacctctgcagacttaaatgtccctgtctgacagctttgaagagagtagtggttctcccagcatggagtttgagatctgagaacgtacagactgccttctcaagtgagtccctgacccccgagtagcctaactgggaggcaccccccagcaggggcagactgacaccgcacacggccgggtacccctctgagacaaagcttccagaggaatgatcaggcagcaacatttggtgttcagaaatatttgctgttctgcagcctccgctgctgacacccaggcaaacagggtctggagtggacctccagccaactccaacagatctgcagctgagggtcctgactgttagaaggaaaactaacaaacaaaaaggacatccacaccaaaaccccatctgtgtgtcaccatcatcaaagaccaaaggtagataaaaccacaaagatggggaaaaaacagagcagaaaagctgaaaattctaaaaatcagagcacctctccccgtccaaaggaacacagctcctcgccagcaatggaacaaagctggacagagaatgactttgatgagagaagaaggcttcagacgataaaacttctctgagctaaaggaggaagttcgaacccattgcaaagaagctaaaaaccttgaaaaaagattagatgaatggctaactagaataaacaatgtagagaagtccttaaatgacctgatggagctgaaaaccatggcacgagaactacgtgacaaatgcacaagcttcagtagctgattcaaccaactggaagaaagggtatcagtgattgaagatcaaatgaatgaaatgaagtgagaagtttagagaaaaaagagtaaaaagaaatgaacaaagcctccaagaaatatggtactatgtgaaaagaccaaatctacatctgatcggtgtacctgaaagtgacggggagaatggaaccaagttggaaaacactctgaaggatactatccaggagaacttccccaacctagcaaggcaggccaacattcaaattcaggaaatacagagaatgccacaaagatactcctcgagaagagcaactccaagacacataattgtcagattcgccaaagttgaaatgaaggaaaaaaatgttaagggcagccagagagaaaggtcaggttacccacaaagggaagcccatcagactaacagctgatctctcggcagaaactctaccagccagaagagagtgggggccaatattcaacattcttaaagaaaaggaatttcaactcagaatttcatatccagacaaactaagcttcataagtgaaggagaaataaaatcctttacagacaagcaaatgctgagagattttgtcaccaccatgcctgccctacaagagctcctgaaggaagcactaaacatggaaaggaacaactggtaccagccactgcaaaaacatgccaaattgtaaagaccattgattccgggaagaaactgcatcaactaacgagcaaaataaccagctaacatcataatgacaggatcaaattcacacataacaatattaaccttaaatgtaaatggggctaaatgctccaattaaaagacacagactggcaaattggataaagagtcaagacgtatcagtgtgctgtattcaggagacccatctcacgtgcagagacacacataggcccaaaataaagggatggaggaagatctatcaagcaaatggaaaatgaaaaaaggcaggggttgcaatcctagtctctgataaaacagactttaaaccaacaatgataaaaagagacaaagaaggtcactacacaatggtaaagggatcaattcaacaagaagagctaactatcctaaatgtatatgcacccaatacaggagcacccagattcataaagcaagtcgttagagacctacaaagagacttagactcccacacaatagtaatgagagcgtttaacaccccactgtcaacattagacagatcaacaagaaagaaagttaacaaggatgtccaggaattgaactcagctctgcaccaagcggacctaacagacatctacagaactctccactccaaatcaacagaatatacattcttctcaccacattgcactcattccaaaattgaccacatagttggaagtaaagcactcctcagcaaatgtgaaagaacagaaaatataacaaactgtctctcagaccacagtgcaatcaaactagagctcaggattaagaaactcactcaaaaccactcaactacatggaaactgaagaacctgctcctgaatgactcctgggtacataacgaaatgaaggcagagataaagacgttctttgaaaccaatgagaacaaagacacaacataccagaatctctgggacacatttaaggcagtgtgtagagggaaatttatagcactaaatgcccacaagagaaagcaggaaagatttaaaactgatacactaacatcacaatggaaagaactagagaagcaagaacaaacacattcaaaagccagcagaaggcaagaaataactgagatcagagcagaactgaaggagatagagacacaaaaaaaccttcaaaaaatcaatgaatccaggagctggtttttttgaaaagatcgacaaaattgatagactgctagcaagactaataaagaagaaaagagagaaaaattaaatagacacaataaaaaatgataaaggggatatcaccaccgatcccacagaaatacaaactaccatcaagaatactataaacacctctatgcaaataaactagaaaatctagaagaaatagataaattcctggacacatacaccctcccaagactaaaccaggaagaagttgaatccctgaatagaccaataacaggctctgaaattgaggcaataattaatagcctacccaccaaaaaaagtacaggaccagatggattcatagccgaattctaccagaggtacaaggaggagctggtaccattccttctgaaactattccaatcaatagaaaaagagggaatcctccctaactcattttatgaggccagcatcatcctgataccaaagcctggcagagacacaacaaaaaagagaatttcagaccaatatccctgatgaacatcaatgcaaaaatcctcaataaaatactggcaaaccgaatccagcagcacatcaaaaagcttatccaccacgatcaagtgggcttcatccctgggatgcaaggctggttcaacatacacaaatcaataaatgtaatccagcatataaacagaaccaaagacaaaaaccacatgattatctcaatagatgcagagaaggcctttgacaaaattcaacagcctttcatgctaaaaactctcaataaattaggtattgatgggatgtatctcaaaataataagagctatttatgacaaacccacagccaatatcatactgaatgggcaaaagctggaagcattcccttccctttgaaacctggcacaagacagggatgccctctctcactactcctattcaacatagtgttggaagttctggtcagggcaatcgggcagcagaaagaaataaacggtattcaattaggaaaagaggaaatcaaattgtccctgtttgcagatgacatgattgtatatttagaaaaccccattgtctcagcccaaaatctccttaagctgataatcaacttcagcaaagtctcaggatacaaaatcaatgtgcaaaaatcacaagcattcttatacaccaataacagacaaacagagagccaaatcatgagggaactcccattcacaattgcttcaaagagaataaaatacctaggaatccaacttacaagggatgtgaaggacctcttcaaggagaacttgtagttgaaccactgttcaaagaaataaaagagaacacagacaaatggaagaacattccatgctcatggacaggaagaatcaatgtcgtgaaaatggccatactgcccaaggtaatttatagatttaatgctatccccatgaagctaccaatgactttcttcacagaattggaaaaaactactttaaagttcatatggaaccaaaaatagcccgcattgccaagacaatcctaagccaaaagaacaaagctggaggcatcacactacctgccttcaaactatactacaaggctacagtaaccaaaacagcatggtactggtatcaaaacagaggtatacaccaatggaacaaaacagagccctcattaataataccacacatctacaaccaactgatctttgacaaacctgacaaaaacaagaaatggggaaaggattccctatttaataaatggtgctgggaaaattggctagccacgtgtagaaagctgaaactggatcccttccttacaccttatacaaaaattaattcaagatggattaaagacttaaatgttagacctaaaaccataaaaaccctagaagaaaacttaggtaataccattcaggacataggcatgggcaaggacttcatgtcttaaacaccaaaagcaatggcaacaaaagccgaaattgacaaatgggatataattaaactaaagagcttctgcacagcaaaagaaactaccatcagagtgaacaggcaactgacagaatgggagaaaatttttgcaatctactcatctgacaaagggataatatccagaatctacaaagaactcaaacaaatttacaagaaaaaaacaaccccatcaaaaaatgggcaaaggatatgaacagacacttctcaaaagaagacatttatgcagccaacagacacatgaaaaaatgctcatcatcactggccatcagagaaatgcaaatcaaaaccacagtgagataccatctcacaccagttagaatggcgatcattaaaaagtcaggaaacaacaggtgctggagaggatatggagaaataggaacacttttatactgttggtgggactgtaaactggttcaaccattgtggaagacagtgtggcaattcctcaaggatctataactagaactaccatttgacacagccatcccattactgggtatatacccaaaggattataaatcatgctgctataaagacacatgcacacatatgtttattgcagcactattcataatagtaaagacttggaaccaacccaaatgtccatcagtgatagactggattaagaaaatgtggcacatatacaccatggaatactatgcagccataaaaaaggatgagttcatgtcctttatagggacatgggtgaaactggaaaccatcattctcagcaaactatcgcagggacagaaaaccaaacactgcatgttctcactcataggtgggaattgaacaatgagaacacttggacacaggaaggggaacatcacacacgggcctgttgtggggttgggggaagggggagggatagcattaggagatatacctgacaagttaatgggtgcagcacaccaacatggcacatgtatacatatgtaacaaacctgcacgttgtgcacatgtaccctagaacttaaagtataaaaaaaaaaaaaaaagaaagactgtggcaattcctcaaagacctaaaaacagaaataccatttgacccagcaatcctattatgaggtacatacccaaaggaatataaatcattctatcataaagacacatacacgcatatgttcactgcagcactattcacgatagcacagacatggaatcaacttcattgcccatcagtggtggactggataaagaaaatgttgtacatatacaccatggaatactatgtggccataaaaaatgacatcatgtcctttgcaggaacatggatggagctggaggccattatccttagcaaactaatggaagagaaaaccaaagaccacatgttctcacttgtaagtgggagctaaatggtgagaacatacagacacatagaggggaacaacacacactgagtctaatgaagggtggagggtgggaggagggagaggatcaggaaaaataactaatgggtgctaggcttaatacctgagtgatgaaatagtctgtaaaacaaacccccatgacacaagtttacctatatgtaaatacctgcccatgtacccttgaacttaaaatgaaagctaaattaaagattttaaaaaaaaagtccttttgaaaaccacctgggaatgaactgtgttcggaacagcacaaacagatgtaaaccaaataaagcctgacttcaaagatcagtgactgtcccctaggctgcaggcctatttctctaacaggaacacagagtctgggacaaagtgagactgttgatctcagaattatggatcatcattaggctccagattaggtctttcttgccctttcagaattgtacctcatccaaacacattagagcacagtctttgttattgtctacagacgagtgacagggattaggcaaaaagatagcattttgcttaagtattattgaaagccaggcaagttcagaaggtcttgtggtagccagcaatgatggtgaaaaaaaaaaaatcaggtaagctcttgcccaagaacgcgccattatcgagactaagcactgatacaggagacaaacagactttggaaacagacagagactgttcaatccttggccctgccattccctagctgtatcagctcaggcaatttagtaaacctctctgagcctcaatctgtgcagctgctacgtgggctaaacataagtacctgtatggtgtggataaatttaagtctaatactatgtataaagtacctagtattagtactgacaaatcctaacaattggataattgatcattaccattatgactgattctcattttaaaagaaaggcatctgttattcctgcaacaaatttcaagaaatggtaacatcctgagcaccaagatgttctgctggttgacacctgctgttctagggactcaacatctgttccccattcatcagtaaagcacctttctcccctctcagtctgtgaggttcaggtgaggagagactccactcctaccttcagaagtgggcatgtgaccagactaagccaattgaaatccctcattctcctgcattgtgcctggctgagagatgggactatgtcctaatcagagtcagtggactcaatgccagaactgtggttgactttgttggaaatagacaggacctctaattgagttggcgtatcagcctagaggtgctagattccctctccaagagaaatgaggccaatgtctgaaagcaaggccaaagcaaaggacactagagtcagagaggcaaataatgagatgctgaatcctggacctgcctgagcctaaactacccgccttaaactcttcatttatagtatccagtagagctctcctttatgtttgagttgttttgcagatgaaaaatataagctcctatgatccgttttatctattcctagataaaacttaaaagcccaacttccactccagtaatatcatcaaaacctgctgtagcagccttctagatgattctagacacaattcctggctctgcctccaattcaccattttgaatctttacttttatatggtctcttggattcattcattcattcaacaaatgttaattgagcactgtgacaaaacagtcaattacccctgccctcatggagtccacatttctagtagaggcagacagaaagccaacacaactccgttagatgatgacaaatgctatagagaaaaaaggggcaaaggtatagggagtttcagagtggggtttcaattttacatagggtgtagagagggcatggctgagaaggtgacatctaaatgaaaacctgaggagatgaggcctcggtgcttcactctggagtcttccatttagcttgaacataactatttgagattctgattctgcttttctgcaggttaatctgattcgcaccagcccctgaagtctaaagcagtgaccgcagtatcccctttatgcagttattggggctgctcatcccaagcttgatagcagtggctcagcagtttactgctttcctgggaaaagcaggagaatctcaattctaaccctgccgcttcctaactgagtgagaccttggtcaatttttaaaaagcaaaatcacaaacgaaagcacaaaaatgttaaaaatgtgacactaaacagaccatgtaaaggacacatgttgacaaaatgagggtagaaacagaaaggtagagtgttgccttctttgacctcagttggagatatacacctcagtagaatcaaattttttctcctctctgtgctagtctgggaatgactgtgaaagtgtacagtgagtatcgattttggggtcacaaatacacttaagcaagtaggcaaattcgcaaaatagaatctgcaaaaaaaaaaaaacaaggatgaactatatcagaccctgaagtaagagactattttgaagaagaaagacatggtaaaaagagcaccgaaagcttaaatgagatgagataaagtcaagtctgaaataggcttttaattttttaaaaaggcgagccctttactagctacatgaccttcggcacatcagttagttaatcatgtgggattcatctataaaaggtgagaaattgactaaaaaattttaacgtacttctgagagtccagctatctatagatgattttcagtaaccaagttaactgattaacatccaggattgtgaggtgattcaccaatttcactcttcttcataaggtttcacatttctatgagaaggaggttgaggaggatctgtctccgctctccccaaatcccagcaacccagaagtaagtgaatgtactttctaagcacctcctccttgattatatgaagtgcagtctctagactctaggagtccccagacactcagaagagtggctaaaaatacccttagaattcaacaaacctgagtttaaaacctgattatgtcacatactagctacatgatgttggcaacttacttaacctttgtaagctttgattaccccatcagaaaaatgagaagttattattgaggctaaacaaaatgatatatacaaagcattcaccaaagcccccagacacacagcaagaagataataagtatgatctgttattgctgactatctgaaggacttttgcctgtacctgctttgatggtgtccacctgactgagctggggcaaaggtggagtcaggaaagggaggtcaccatcttctgtgaatcctgctcagcaggatccaaggcccagatgggcttagatctgactaaagacagcacatttttgaattcttccactaccaaaagtcattcagaaaagctttctctctctttttccggaggtttttccatgttgaaagtaactttgtattcagtatagaaaggcccatcatcttctccatctccctgagattctatcaaagctgtcaaagtactatgccatgagcattctggacaaattttaagtttcttcttgtgcatgtcttttcttaatcccttaactcagtaacagcacttgtcaaaacactaagtttcccatggtggcatttctgtagttccttaagactcaaaggagcaaagctgttgtcttctcaaacatgttttatatttgcattttcttttggctaaaatagggtaggggaggaacacagaaccccagacaggaaaaaaaaaaaaccatcctaaaattgtccttcacagctgggtcagaccagataaaagtagaaagctgaagtttggctggcctgaaatcttgaatgattcattatttcagtaaagcagccagctccttcttgaatgtaaatgattctctttttccttcttccctgtttaatgtagagaagaccggaggctgttttattcaggaccgaggccttttctaattactgcagacaccactgcgtaattagacaacaaagcttgggagagagcagggcccccgcacagtgggtaattttgttttgtctagcagcaatcattttttatcatgtgttattaaagggagggtttaaacacacccccacacacacatacacgcatgcacatgaacacatgcacacacagaaggcaggactcttcatgctggtattttccatcctcaactggatgagggcaagggagaagcaggctaggggtgtgtttttctctcttcccctcaacaagcaaggcagacttactggcggtagttgtaggcaatgtcagcaaactgcttccgtcttgcacggtacacaggatctttaaaaccctaggagaaaagagacacctgatttttcaaggcttcataggaagaggtctggtacctttatgaatgctttgaatgggggctctcaagccatgacagtgcatgtctccttcccttggttataccctaaaactaaagtctcggttaaacttagctctcctaccagatattgtgagtgacaccttattagtaacttctttgatttagcatgagcctccttgctgtggattccaatgtgcatgatctgttcttaaagaaacctcatctacagcatatctgactgacacacttgctaaactaagcaaagttcataggatggatgtctatgatgaagatgtacaatatccatttaattcctgattaaggtttgtgtctagctctaccttttaatttcttgatagacgagcaggcacatgcttattgctcttgcaatttttaaaaataccattgattaaatacatactatgtgccagtttgtgagtactaggaactgattttacatataattctcacaacaaacttgcgagttcgatgagtatgattatcctgttctttccggaataaatggtggttcagagaagtggatccatagtgacggtgaggctgggatttggatcaccatcagtaattgtcagcctttacaatctggcaggggcctagctaactgagagtctgtctcaggacctaaaaaggatgataatggagtctcctctgaagctgattcacaggcagccttttcccagtgatttgtaagcagcacatttccgagtgaaaggaggctaagtgtgtctttgagtgtttggggtggaaatgggattccaactgattgaaagacaattttccaaaaacagttgattgcagtctaaattttggtaagacaagagactgatatcatttccgtagaactctgctgtggttcttccaagcctttcccagtaagccatgccatccaccactttagctcacaatttctctgctccactgtccctccaaaccaaggcagtagtgaattcaaaacaaaagcttatgtcacagagtgtaatgtttaaaggagacttttaaaaagagaaatattccctgatttttagatttgttttttgttttggttgcttgattggttgaatttttgttttgggagagttttctctctctctctttctctctctctctctctccccctctctctctctatgtatatacatatatagatgtatatatacatgtatatacatatatagatgtatatatacatgtatatacatatatagatgtatatatacatgtatatacatatatagatgtatatatacatgtatatatagatgtatattacatgtatatatgtatatacatatatacatatatacatgtatatacacctatatatatgtatatatatacacatatatatacatatatgtgtgtgtgtatatatatatatatacacatatatatacatatatgtgtatatatatatatatatatatatatatacacatatatatacatatatgtgtatatatatatatatatatatatatatatcagggcctaccagtaattgtaaagacacagagggcaatgtaatataatgtaatttgttctgagaatctgcggcattgattctggcacacaggaaaaaactacagacacttgttggaagaaaggaagggagggaagataggagttaattagtttatttccgggaatatattttgaaaaatagaaacatccaaatgtttcacacttgaaaagtgaagtaaaactactacacatttttttttactccaaatctaaatcccagataaataatgtgattactctgtttagaaaagattttatgacacggttattgcaaagtataactcttcctttccctagagcactgaatggtttttaatcgttaattacagattagaaagcttaggaatctgagtacttaaaactactgttgtgcctcgtttctactgggtgaaggtaagttggtttgagatgatgtggttaaaaaaaaaaaataaaactgggcaccatgatttactttccaaatatcagtaacacaccattttagaaacctgtctactggactaaacaaagaacatttatttgtccatatctccatacttggggctcaaaataaacatgtaatattggtcagtcattaaggtttgattgttacagtcattctcacttgccattcttatttaatagttagtagtgaatagtttttctccaggccctaaggataatatgtagacttttgaccctgtaaggcaccttgtagaaaggtccatttctatattttggtctagacttgaagaatatgaagcccatggagccatttgcctaaaggcccaaaactacagaactagcacctccatttggattttgtggtcctccctaggctggcaagttgagatttgagcactgaagtaggaatccaggaagaaaagagaattccttcaatccgtggatttccacttcatcatgctgcttctaggaatgagatatccatgaacagttcttacccccatttgcctttattgtttatctttcatgtaccttgcctaggtggtttaaagattttctacttgtgaaaataaaagctaatgtaatactgtatacccagttgatattatcaattatgtcaattatgtcatatatcaattatgtcagaggaaatatgtaagtatataaataaaatgattaaagaaatacaccaaactctaacaagtgttacctccaggtagtgggaaaaataagtaacactaacagttgtattcttgaaaactatttatgcttttcaagttttctaatgtgagaacgggtttcttttagaataaaaaaaagaaaatagtattaaatatccatctcaaatcattttagtgaagtagcaggagattcacacattggtatacaggaacacacacacagataatgcactatacagatcttccatgtgggaaggtttctaaccatgaccctttccagctcctggtttctaagttcattatcagcctgcaaggggccccaaccaaccaggttgcagggagttttgctttctcagttaccagtggtcagagagctctgtggcctgacgcccagcctcttggggatctggccttgcattccttgggctaccagacgaccacagggcctctgtagccgtccatgtggagtacattctgaatcaaatcacagttggtgatgactgatcaccctgtctcaatttagactaatagcagcaatttcagtagcactgcatgtaatttatttataatcaccctgtctcaattaaactaatagcagcaattttagttgcactgcatgtaaccaagtatgttttgacaggaaaatatattgttggtgaaggagtggtgagggggaggggaggggatagaagacgggagaaagtcgagagagttctacaggatgcaagtcatgacatcaactgaagtctgcatgtattgagaggtataatttgtgtgtgtgggtgggtttaggggagagggtaactacatatatggaaaagtcttgagtattcttgtagactgagatatttattccatcatttcctaatatcatagctaaggttaaacctcagaagtgctctctttaggctagtgagaacacaggttttaaagtcagaaaagctgtgttggaatactaattcatttattcacaaggagcatggcctgggagtggccagtttatctctcagagccttagtttcctcatcagtaaaataagactgtcaatcctacctgcttcacagtgttgtacagtttaagtcaggtaatgtcggcagcacattaagcaaaattctgagcacattgtagttgctcaaagcatgatgcatttgtgcaaaatggcaggaaatccaaagacagagaagtctggctcagaatataaaaaagatgtactctggaatgggtcagtgatccccaccagccacaaggggcttttaaaccaacatctacagaattcttaccttgctgtgtatatttcagctaggccaataacaagaggctttttgcatttttcataatgtttcatgacaactgggggaaggatggaacacagaagacaaaaggttcaaactggcatttattaagtagctgccattcccatcctatagacattggtcaaggaggacttgcaaacagtagactaggggagcaccgaccatgcccaatccctttgctcaccctacaattggccaagaagcctattctggaaaaatgtatgtacctagttgcccaagcccataagccaggagttattgttttacttcccccttctctcttccttcacatccagcaatcaatttctgcccattctaccattcaaacatctgagtctgtccttcctacttcattctcactgctgcacctgcattcgaccaccaccatttcttgcctgactattgtagctgctgggtaagtggcctctcaccccctccacttcatcccaaattatatttataaagtgcaagtctggtgaggccacttgcctcttcaaaagcccttcaagggcttctcattgctattagactattgtccaaaatatttagcacagtccacaaggctttacatgatccagctctgtctatgtgtccagccctgtgctgactcactctggccttcctatgatgctgcagagtgcactggtcttgctttaattccttaaacacaccatgctctttcccacatcaaggccttcacacgtgttctaccctctgagtgggaccctcttccccactcgtttagaccaataagtcactatctgttctttctgtcttcctggatttttccaaagtttattggtttctctcagtgtgttgtatgtttctcgtttcagatggtctcacatatgttaataatgattaaactcaggaaactcttttacatatcactggattttcagggcatagcacactcagcatatccccaagtagaagctgttcaaaaattatgcaaaacaggccaggtgcagtggctcatgcctgtaatcccagcactttgggagtccaaggtgggcagatcgcctgaggtcaggagttcaagaccagcctggcccacatagtgaaatcctgtctctgctaaaaatacaaaattagtcaggcgtggtggcgcatgcctgtaatcccagctactcgggaggctgaggcaggagaactgcttgaacctgggaggcagaggttgcagtgagctgagatcatgccattgcactccagcctgggtgacaagagcaaaactctgcctcaaaaaaaaaaaaaaaaaaaaaaaaaaaatatatatatatatatatatatatatatatatatatttgcaaaacctagggcaaaaaaattactgtgtgccttttaaatgtcatatgagatcattgtctcacaagctcactctgtgctctaaggggacatatatttactacttataaagttacaatcacttcaaagtagatgctggctttttagaagaccaataagttgcaaaatattcattttattatcaaattgtaagttgtttctgcctagtagaaaggttaagacacataattatggctttattgtcttatggaacattaatcacttgtgcatccatctttgtgaccttattctggctttctattttccgatgaccacgtgtactttcgtctcttgtatcttttctgcactatctttgtcatcttgctggttccctcaatagtgagttaaatggatctttgacaggtgttcactatatacctgcatgacagttatgtttttaacttttcacaaattatgcttggatagagcaatttagtaagaatgcaacaagtctttgatgactcaactagctgactgactcttagaaggaactctgacagggcctcaggtggagaaaattaggtgggcaaaaggaagagaaaaggagaaaagtattgaaaaatatagtcttgttattgggcaatttgctgaagaagaaatttcctacaggagagcaggaaaacttgatgcccacaccttgaaaggttaaaaacagtttcaggcctggtgtggtggctcatgcccataatcccagcattttgggaggctgaggcgagcggatcacctgagatcaggagtttgagaccagcttggccaacatgacgaaaccccatctctactaaaaatacaaaaattagctgggtgtggtggcacacacctgtaatcccagctatgtgggaggctgaggcaggagaatcacttgaacccaggaggtggaggttgcagtgagctgagattgcaccattgtactccagcctgggcagcaagagtgaaactccattaaaaaaaaccatgtagtttcaaagacttgggtcaagaagtagaaatatccacagaaggacagttgtgttggctgatattttcttcactaagaagccccctctattgtagatctgtagcctagactccagtgcagctgccaggtaaactggaataggtagctctggagttgggggtctatgtggcagaggttgctggtgctccccaagatctgtcctctctcctttgttcagagaacgttgctaaactattttcccccatcttctttgcagttagtagtgggcacgtgactgagctctactcaatggaatttgattgaagggatgtgagtcatctccagacatggcccatgaaaacttcccagaagcaattctcactctctcttctcccatccactggcagaatgagtgggctccaaggagttgaaggagggtacagccattggtggaaggaggcttggttctgaaagactttgtggagcagtttccttactgacccacattggaagtgaacttttattgggttggccacggagatctgggggtttttgctgagcagttagcctgctctggttgctagagggctagactcagatcttcctctttctagaagtcctccctaaccattccagtacacagtgaccttagaaatgatagcacatgctatctgactcatgaaacctggcatttatgcacttttttgagttattattatataattatatactagttattatcccaactgtattccatggaaaactaccactcacgataagataatgttgctaggtatttcattaaaaagagttccgtgggtaagtaagttttaggaaacattgcattgactgggtttcatttttgcaggattttccaaagtttctaatgagataatggaatttgcatacttaaagtagggttatagaatacagagtttctctctttgatcatgggatatttttcataaactacagtttcggaaacatgcatatggccctttcacttgcatatatatatcttgtgcctcccatgaggttataagtcatgaagaagtaaacttattgtgatctgatactctgtacccaaagtataaacacaatgtgattgttgccatctctgagatagtaacagtgtgagaaacttaagtcttggaagagacaggaggaaggctttagggaggcaacatatatgatttagaccttagatgaatagaggtttccaagtggggaaataacaggtgggttggcaagaaaaaacatgtcaggtaaagggaacaacatggacagaaaggggagtaaattttggaaatggaaattaaatagaaccagttggattctgcctgccaagtttgcagttactattccagctccctcctgcactgctttgagaacagtcaacaccccttctctctctactgtacaaccacaggcccctggagggcagggatcatgtcatctgtcacttcaacctcctttcttttatatggcctgagacatagttcacacacagatgatgttacacggccctctccctctgagatttcttatctgaaaatgagatgtacagccctcatacggtggtgataatattcaaattaaaaaaggaatgccaagcatttagcattgtgcctggcacacagcccctgctcaagaagcattagctcctaatatcattagttaactaaaagattttggaaaaaaagaaagcaaggtgggaaaggggaaaggaaaggaaggagactgggaaagaaggggaaaggaggcaagatggtcaccaggaaatctagcttccctatttcattttcccacttagctaaaactgaaaggcagaggccattttccctctgtcttggaaacagtccttcctttacttcatttttcaaagtgactgctttggaggacctgatgagagatattgggtcacacatccatgcatactgccaagggccgggttcagggacaaagagatcacacaggatgcaacgggacagagagaacagagggtcctttcgagaagaacacccgctgactgcaccactccttgtgctggtgtctgtttgcactcacacactgaggccaggcctgtgggccccggggtctctgggaaagcacgctggagggtttgttttgtccttggcccacgtccctgggatctgatgagaaatgaaaggaacagagagagcctggcgcctcgtcttcagggaactgtgtacctgatatgttgtatttttacaataaaattcataacattgagagggcagggagtcaaagatgtggcttttaaaaaccaatgcattccagagagttttaaagccagtgccagctgctttggaggggacttgaggatacagggagaaaaatgtccatctctttgcattggagtcttccactgtcccaaatgaaaagggagtgaaacgaatgggaagaatgccggtttggggcaggaagacaggagtttggtaagaggagaataacgccctgctgggcagaccccttggatgggtcagaggtgaacagacagcttttctgagaaccagtatctttggagatgctttgctgacagagttgatggctaagaggccccagacagagatctgttgaacgggtacacagagcagaatcccacctggagcaaccttggcgccccagggctcctgggagtaggctacatggtatataggatggaatgggggtcaaaagtccccacatttacctttacttttcggggagagagagtatttaagtaatatacactaggagctttaaatttaattcctatcctcagtttaaatataacttagtttaatttcacaactaatattcaaggcagccattggaagttcacgtgaaaatacataggtgagactcaaacttcctacacgtttgcaattgggtgctggttagtaagttgtgacagttaatacacacaaacacacacacacatatttgtgtgcatatatatacaccatatatatatatacatatatatatagacagagcgagaaaggaggaaggatggaggcacacccaaatattaatattgatttattgattattttagaatagtgtgataataggtgatttttttttttctgtttggaagtctgggagattggaggaaattcacctttgtttctgttgatatatgctttctcattatttgaaaaatgcagaactgtccagagagaaaaatagaaataactgaaattatggttgcttttcatcttcctcctcatgcccctctgtgttttcaagcccactataattggttttacaatttgaattagaagaagcatcaatcattcatatttcaaaaggccagcttgcccctgaaatagcttgcctttggcctctgtaaaagagcctggatttctgccactagctaggcctttgtcttcaggcaccatgagctctcaggactcacagtttagcaccgggccttagaaaagtcatcaggctcctcgggcctcactagttctgtaagatggaagcatctgctttgcctcctgaaaagcgcctttgcgaacattctttgctgattataaagacccacataaatgtgaggagaaaacagactcctgtggaagtgtaaatgcttcctctgcgttctgctcaaccttcaccgatgtaaatggctgcaagtcatttaaagatgaaggagtcatttgcctggcagagaataaagggcaggcaacaggacggtggcccttcccaccgatggaggctgtgagacctggccctgagccaccgcagcctgggctgttcctccccagaccctctgccccagagtagagggaacgatgaaatatcccccaccccggccctctactcaaaaaccattaaaggacctgcccccatggctgcaagacacaggcccagtccgtgttcctctttctggtccattagcccttttacaatctgatcccaacccactgccccagccacatctctcattctcatacttaatgcaccaaccagtcattcccacagtattgtggatgcttccaagactctcggtattctcatacactgttctttcagccataagccctctccgttccttatctgacccgcatctcctactcagtttttaagattcagtttcaacgtcgccactccccgctgccccctgcagttggcagagttgttagtacaggttgctgtttaccaagcacttgacttaaacctccatagatgtacacaggcagaaacaatgatgatttgcatctgtgtgtgtgtttgtgcatacacagacctagtatatagagacaatagtttctggacagtgatttatatttgctcctacaaaaataatgaccatgataatgatgatgacaataaagtcttgctaatttttcccagccctcgtgtaaataggaacacaataagtgtttgttgaacaagtgaacaagtacattgctccaagtagagaaggtaagaggaagggaggggagtggaggagaggcactgaaaaaatctcatcctacgggccatggactcacagggtggtcagcatccagttccgctccatagctgagaatctgattggcaaatctgtccagctcttgaatggttcttgggaaccagggcactgaaacacagagaaggcaacgtcctgagtacagattggcagaacatggccaaaggccttgctgagatcagaagtggggatcccagccaatggtgatggcaagtgggctggcttccagataacccccaaattactatcgttcaaaagttaaactccattttccttagaaaccggttttaaaacccattcccaaatacattctctttcctggagatgttctctgaattatctcaaaactcatctccctcccacccgtcatggtagttttctttgatggttttctttagcagcagaatttttttcccttctgtcacccaggctggagtacagttgcatgtgatcttggctcactgaaacctctgcctcctgggttcaagtgactctcctgcctcagcctcccgagtagctgggattacaggtgcacgccatcatgcctgcccaatttttgtagtttaggtagaggcagagttctaccatgttgaccaggctggtctcaaacttttgacctcaggtgacccacccccttggcctcccaaagtgctgggattacaggcatgagccactgcgtccggccattagcagcagaatattacatataggcccaaaatataaattatataaaaccagactgttctactgtaaatgagctcatgagaacccatcttcccattatgtgtttccctcccaaaggccccaggcactgcagcaaaatctttcgatcgcaaagccagttagaaagccgttgttgaagcagagtgaacagagtcagatagttgggatctgaagatgccttgcagcacctaaaggatttcagacttgcttctgagccagtgtagtggggaaggggttgggcttgagtggggtggactacaacacctgggtcttgcagagagaggggcccagggagaagggcaggtggcagcaccgacatccctgtgggttacaggaaacaagatacattgcaggtgaaattttcccaggaatgaacagagacaagggcattttggaccgtaagtttcatgagggcagaaaccatgggtactttgttgtaccgggcataaagagaaaaagaaggagggaaggaagagggaagagagggagggaagaaaaggaaagaaaggagggagaaaacaagataaggaaggaaggaagaaagaaaaggagggaagaaagaagggaagtaatggattcaccctggttgtgttaacatttaaggtattgacagcagtaaccaccatccagagtgcctgctttggtacagttgctatttctgacgtaccttcaaaataaggaaggcatgataacccctcttgcgcgggtaagaaactggggctctaaaagcttaaatagctgatttgagatcacaccaggagtaagaaagtggtagattcaaaaagaatccagagagccaaaatagacgtggtgggaaccctgaagtgagtgcaaggcttccagaacttcccctgaaatgaggtcgaggggaagatgctgaacttccaatcagcatgcggtctggcttagaatccgggttccatctgcctacttatcctctctgtgtctcagttcctcctccgggaggaggaggaataaacaactgggatacacaactataggaagaacagcaaacgtgtttttgaagccttcctacgtgccaggcacttctggtggagcatttctggtggagtagctacttgaatctgaggattgctgtgggcagtgatgagaaacaagcaaagggcgccgctcagcgtctggtacataaaacgtgactttcaatctgacacccatgattcatgattctgacctgcttagatggggcaggaaagagcatgtgtgctatctagtggccaatctggggaaattccctccgtgatctaaacaggagcctcaggaggagcagcagctgcattccagcaaaacaaggagagctgattccagcagttcataaaggtccatttagacccttgtttctgcagagctgaggaacctaggctctctaccacccatgttagcaataaaactaacactgaatggtgttctaaatattttacctgtggggggggggtactattaatgttcccattttaaagacgaggacactgaggtacagagaggtttagtgcaaactcaaacacacactgctaagaaacagtggagtcaggattcaaatgcaggtccagctgactctctggcctctggtcttgatcgtcaatgcatcttgccaatcatgggaaggtggcagagcatactgataaggagggctgactgtgaagccagatttcctgcccagaagtttccatgcccctaaagcacagccctcttttccagattggctccctatggacagcaagaacagaggcagatgctgcagccatcactccaggtaacacttctgtcgtacttgctgtgtgttggacactgccctaaacatttcacatatgctacccccttcaatttctgcaacagtcctttgaggtaggtattattattatcccgttttacagatgaagaaactgaggaacaatgagggcaagtctcttgatagacctccttggtcccaactgctgaaactttggagtctcggatgactcaataccatgctctgttcatttggtgaggaacgtggcttcccgccttgtcacctacactcctccccaagctctccttcctcagtgggtccagcatttgcgttgtacactgaacctctgttgtcagtgccaagaatgggagttgtttcccacccaggtttgcatgggcttgagaaaggaatcagcactttagagtcacccagggctcagcatcttctaaaagatctttcttgcttctccaggacattgccaccaaggggtttcaatgaatggcacccacctggacaagggggcctgactctttcctctatgttcaggaccatggataatctcatccccacactgcggaggtagcctgcctccactcattcatcatctctcttttgcctgggaatcgttcataattctggcagtaactgctgcccccagaaataaggcagaacaagtcctttcttgctgcaaccccttcttacttaggggacatttagaatgaccaaaggagattccacaaatatgtactgagcacctcctgcgtaccaagcacaaagcattgtggggtgcatacaagggagtcaccatcctagtggtgcttacattctggcagggacaacacgagataagcaataaataaatgtaaatacatgacaatgtcaggaaattcttgaagaagaagaataaagaagcataaggaaatggaaagtgatggggatgctcttttttaaattctttttaaaaaattccatctttattggggtataattgaacaataaaaaatgcatatatatttataatataaaattacaattgcataaaattgtataatttatatttacataattatatttgtatatattgcatatattttattatttattaatttaatttatttatttgagacagagtcttgctctatcacccaggctggagtgcagtgttgttgtctcggctcactgcaacctacgcctcccgggttcaagcaattttcctgcctcagcctcccaagtagctgggaatacaggtgcgtgccaccacactcggctaatttttgtacttttagtagagacaggatttcgccatgttggccaggctggtctcgaactcctgacctcatgatctgcccacctcggcctcccaaagttctgggattacaggtgtaagtcactgcacctgacctattgcatatattttatataacacatatatatttatattataaaattataaatacaatgtaattatttaataaatgcatacatcatggttaccatgatcaagttaatgaacatattcatcatctcatgtagtcatttttcctgtgcgggtatggagtgggacaaggacacttgagatctctctgagcaaatttcaagtacacagtaaagtgtgattaacaatagtcaccatgcagtacatttgaccccccagtacttgctcatcttatgactgaaactttgtacccttgaccatctcccaatttctctcatcaccctaccccctggcaaccaccattctactctctgcttctataaattcaacacattttgaattggatataagtgagatcaagcagtatttgtctttctgtgtctggcttatttcacttggcataatgctcttagggttcacccatgttctcccaaatgacaatatttcttttttcatggctgaataatattccattgtgtgtgtgtcaggagggtatcgcattttcttcattcatccacctgttgatagatatgtaggttgtttcccttggctgttgtgaataatactgcaatgaacagggggtgcagatatctctttgacatactgatttcatttcctttgagtatatactcagacatgagatttctggaaagtatggtagctatattttaattgtttgagaaactttcatgctgttttccataatggctgtgccaactgacatccccaccagcagagtacaagggttctctcttctccgcatccttgccaactcttacctcttgtccttttgatgttaaagacaacatgctatttactatgaaatcctctgcctctagaccccagagggaagaccctggtgacttgaaattgccttggcatggctcaatgaaatctgggatactcaggatctggccctagtccagagttggtttcctatttgtgtcatgaatagtcagtccagcaatggttaagagtcttaaaacagccagacagcccaggtttgaatcttatctctgcatttactatctatgagcccaggaaaagttattacatctctttgtgcctcactcttcctatctttgaaatggtgataatagtagtactagaaagtattgctttataagaacaacatgatgttaaatgagttaatatgcgtgatttatggaaaacaatactggcacatagtagacagtattactgctcagctgtgagttacatatgtgtgtatgtatatatacacatacacgtatacacacatactatatatatctgtatatatatgcatatatatacactatatatatatatatatatatatatatatatataaaatttttttctactgtatccttagcttatcatagcagagagcagagtggaaagttttccagcaagcctagaaagtctctaccacttatttcgttgtgtaactggcaagtgtcttatctcctggagccttagtttccttattcacaaaatgaattaaaatgctctttccgtattattggatgaattaaatgctgcagcaatatgacacatcttagcacagtggcccataatatgtgttttatcaatgttaaccattaatatgacaaagattttaatgatgatgattaaaggaggaggaggaggaagaagaggaggagggaggaggaaagaacagagattgggatcaggaagctggttctctgtccagcttgggtattaagaggtttctaatcttgggctttagtttctgtaacatgtgggtattagatttatcggcgcagcaaacccttttgagtttcatattcagagacctgtgggatcctctgaagggctgaggctggccagatgatacttgaaaagtcagctccacttcaatcaatgtgtcaacctcatttatttttcagaagtacagtcactacatttgttcagctcccaaatgcacagcctcattttcctttctcctcccaccagagaaacaacattcttccccacagacctcagtcagggtgcaccaccttgactcagggctgtgcaggctggctggcgctcagcgaacgccagagggcagcagaaccagcatatttctagctctgggtgactttttccttctccagaggaaaattcttatcgggccacctggcttcattcagccctcttggtaggagaaacaagacaaaataaaacaaaacgaaaacaaaaaatttgaagaacttgagaaagttgccaagactcagaggattcaagtctttgtaaaaagaagacaaagatcaaaacagctcaccacatcccagacctctgagctctgcaccttgtcgcagaggctgtgagggaccccgaggtagcactgcgaggctgcagggtgctcacctgagtccaggggcctttggtggcttcaggaccccatcatcttcaagaaaaggtccaaaacacagccaggccagagaagtggcaaagcctggggactcatcatacacactttggagccagaccacctagctccaatctctactttggaactttgtgcaaattacttaagccctctgttccctagtttcccatttacaaaatagctatactaatagtacgtccttcagagggttgatgggaggattaaaatgaactcatgtatgaagagttcttagaatggtgtctggcacacaagtgcttctaagtatctgatagtggtattatcattatagaaggacaagtgagaaagggtgagaagctctggtgctcacttcctccaggcagcagcccagctccacatttgatctattcccttacataaagttaatgcccttgggtgcagcctatttgtcttctagggtaggatgaggacccaggtcagacctaaccattaagagaaattcaccagctgtcatgttggagagcagggacaaagcctgaggaacaagaccagggagaggcacctgggtgctgggtgttggggactgggggtcgatccctgatgtggctcacttcccagcttgcagagttgtgaagcaggcaatgtgaggacctcaggagagaccacagaggaccccagacaaactcagtgccgagccttgacacatgtgctgactctttacattgtgcaaagggtgtgcacatcctgggtttgaagccagcaggtctgagttcaagtctcatctttcccacccacacaacatggaagtctgagcaaactacttaattcctgcgtctctggctttgcatctgtgaaatgggcaaggtgctgagcacttgcctgcctccttctttggggtgggaagaaactgacccaaaacaggtgcatctgtggcatcagtccttgcacctgagcctcataataaactccagagttgcttgtctgactaagatagtggtcccagaggccactagaggccaagccagtccatgcttatgtctctaacctctgcacctgggctcttctgatttttcccaggcaaaaaggtaggactaccctttttcctctaaagttacattttcttgagcgcttattatgcaccagatactgtgctaagtgctttactttcatcatctcctttaattcgcaaaacagtcccaggtggtagacattattgctgttcactgatgagcaaataggctcaaagagacaaagtgatttgctcaagatcactgagctagctgagccgaaagaacaattttgcagccgatgcacttcaccaaaaagcaatgctgggcttagaataaaggtgtggtggtggtgaaggggtgcttttaaattttagattccttttctcccaccttgagaaggaaaggaagcgtgacaaactaaggctctaaaggtgcttgaagaagatccctaggacagccttgagtctgccccatcctgagcatccctggatttagggatagtcactttttaacctaagttctcttcacataccccttattttctttagtgaaggctgcaggtcccttccccctacccggtctctctcacaaagctggaaatagagactgaccccagcgacccaggcctccgttttgaaaagttaaatcagattagctcattaatggccttgccaaatacctcggccggtgggctggcctctgtgagccccttaacagcctctccggcgggcggctgggctccgcggttaatgaatgacttgggcaggctggggcaacagaggccctctgtggagcggaggcacccggtgggggcagatcattaataaatattgatttggctccaaaggaagcagcccgctggagagctggccctggacacccacgtagtggtcccattaagtcggggtcaactgctcagccgggacgccaaggggtggctggctcaggagcaccactgagcaaaagaccccccaggcctggccagagcctgcttcctggccagtgggtcagaggaggcccattcaatttacagcagttcaaggtgcaggctgagtccaatcttagcccctccctccacccgatgttcaccagccccaggggttagccagcaaggcacccaggcttgcctccagcctgtctcagagagagcaataaatcctggtttcttgggtctgaaatagaaggctgttttcaccacctcctcccaggctcccggatgtctcctcttaggcaatggcctccagccccccagagaagcagtccctgtgtgctgatctccacagctcccacaaaggaagaagagatggcatgccaacatcctgcaggaggaagacttttgagggttttattcttctcttttaagtagcttctactttctttctggagaaggaatgctcttcaggaagctcttggcaagaatgatgagccaaaggctggctgatgatgcccagctattaccctctgcctcctggagacagcagtggtcagaagtcaggagtggtgattttaggacaaagcatctgttctctctgttcacatggaaaaataagaatccccaaaccagatgaataaaagggatctcacacatgaagtaaagagtgaaactgtgcttaataagcggagggagtgagtgaatagatatgagtggaattatgaataaataaaataacctgtagggctatttattccaaccacccacctaaattacaactaccctcccaatatcctttttaagatactatgtatctcataaacattatccattggcaggttggcccccatatccccaaatatctaattctgtcttctgagagctcaccattgcattgagatctggttacctgtcactgacaaccctagttatggtcaagcaacattgggtcaaacagaagacatctaaagcctcctccatgtattggttatgtcactccaggagcacttatttggccctgctccccttcttctcatcaactgaccccacgcctgggctcagtgccttggtgcacctcctaagactactgaggcatgccatcttctctatcattgccatgtattatgccatgtagccacaacctactagattacaaaatgcatgggtctaggcaccatgtctgtctttttcactattgcatcctatcatgtggctgacaccgagtgggcactcaatcaatatcggtagcataaatgatcaactgaattaggagatagatgtgaatgagagaggaagttggcaacgctgactctgtgctgtttgagaaggagtagtaagagaaggaagaaaatcccaacagtcaaggtttttaaaaagtaagggccacataattcataacatgctaaggaaagagagaattcctgggggatatttgtatcaaatgctacaaaaatgtcgaagaggatgaaaaaaagagaggctattggttttgagtattgtcagaatggtacaagagaaaggaagatgagaagaaaaaagggaaagaagaaagaaggaagcaaggaggaaagaggatggtggaagtagggaaggaacgaggaagaaagaagggaaggagaaagaaaagctgcatgaaaagctgaccttctatctcatatgccagtgccatgtgcaatctagcacaaagtcaagtggatgatgttaagcacaaaaaatatttggaaatgagagatcattcacagggaccctcatacaatcccacacatgaagttgtctccgtggctgctaggtaagcctggcttcaatgaggtggtggctgccaccaactctttatatattattattggcctgctaagtgtctatgtccacggagctggtggtgacaagtgacctgttattggctggggttatagatcatagagagctctccctattgaaacttaaggatgtctaagatcaagggcctattcaactcaagcaagtccaatttgatctttcaagcacccttatgcacagggtactccacataatcccctccatgagccacaggaattgggagagtgggtctttgctccatttcacagatgaaggagaagcggtcatccatctggaagggtgtcagatggaattcaaacctagctagtagtgtacaaaatggagacccaaatcctggctcttgactctaaattcatggcccttagtgcatcacgacaatactccctcaatccagcatgatggcaaagtgatatttagttagtcattccatgtccttttacttccttcttcaattgagagaacacacctgtcacacagagaaaatgtattcccagtctaaatttttctacctttcacaatcttttggactgacccaaatggcatttcacggttgcctttgtttatcaaacttcaggagttttgggagtttggacttgctcaaccctaagattcattgtgtacccttatgagagacttaagggtaagtttacttgtaaccttttgcatgggccctacacgctaggcactttatgcaaattatatcatataatccacacaaccacactggtacctggatttcttcatttgcagatgagaaaattgaggcctaaagagggaaagcaacttggccgaacagctacagcccaggaattgaactggaaaatccatgcaaccttttaattatacctttctgacttgttttctaatattgaaaacaagaataatactatgtttgctttagctgcctgagttggttgttgcaaagcttaaatgagataacctaatgcgaaagaatttggaaaacactgggtgtggcatatcactgagggattcctcttagaatgagagcctccttataattttgtaatcttcctgagcttgaagctctgtgacctggcaaactagatgggctgcagaaatagcatttgctcaggatcttcctttgccaatgaatagagttgcctgtgactgactgcagggagcagacagtctaccaaggatatgaagggactctgcttcccactcctgggttggtgtcacctccccctgaatgggctgatcctctcagctggagtctgcttgtctcagtgaggcagtttgctgaaacgagtgacctccccagctgccaggacttagtgctacatcagtgcatccagcaagcatccaggtaaagactgaaaaagacagccaatcctgtgtgtttttgcaaacatgcagatacttggtctcctgcagacacagagccacatacatctacagctgtgaaaggcacacatggaatgcacaaagtgaaatgcacgggagaaggtttagaactgagaagagggcaatgggaaggtggagacagaaaagccaagcagaggaaaggagagaggaaagaaaagtgcaggtggtgggagtggggaaaaactctaaccagatggattcccttccagccctaagcggcttctctctaaaaattcttaactctttgggaaccatagcccctttgaaaaatcttgtctcctaaaaattatgcatgcacacccatgtattatcttgcccacaatcccaggggcttttcagagccctctaaggaatcctatcctcccttcaaccccaattgatctgaaatgtcagctttactcagcacagttcttcaggtcagcaatgttgaagcagaagaaactcaagaaggcaaggaggggcaacaagagggaaggaatgactataatgatgttgcttttgtcttctcacagtaatcataagtgttcccagacaacatagatagatagatagatagatagatagatagatagatagatagatagatgatagatgattgatggacagatagataggtagatagatgatagatagacaggtgtagatgatagatgatggatagatagacggatagatagatagacagatagatagatagatagatagacaggcagataggtctttctgctttccacagaaccagtagttgttctggcaatttgaactcacttttcttccccaccaggacccttataatcaccatagattaaacaaaacccaacagatatttatctgctcttggaaaataactgcaaacatatttctcaaatggtgatgttcctaacttctgtctacccaagacattgtgtctgtctgcttctcctggctgcaatctctctccacgtaggaattttctagcccccactaaatgtaatgtcatgcagtcgactcaaagggaaaggtaaaaggattagtagattgatcgatgaaagatattaatgctctttcatgttgggttgaagaaggatttgaagtcatcaggaaagagggtagcaggagaatagacctcaagtattcaaaagactctctggattaaaatcctattaaattcacatcagcttctccaggaggcatttgagaaggttggggtttctttaccatgtcgctgtaattaaccttctcttaagctgttttgggtggggaactttcgcaattaagaaactgaaaaacttttattttctatcacccacatggctttttgaatggtttaaaaactagagtggaaagtagtttagcttaattgatttgaggggttcagatctcctacttgaacctgctgtcagactcgcctctgagatctgagccccacaataaaaagggcattttgtccggagaaagaatcaaaggttcagatctactacaatgcttttcttcctctgactgttctcccactgagtcctatagaaagggcaactttgcaaaggaatggttgttccccttaagaaaaacctgtttcttggcccagaccccacttcacggaaactaccacagaaacccaaagagtctttcttggcagatgccaggtcgtggcatgtcaacatcagctctctcattacaggtatggtaaggtcaggtgggggcagccactatgggattgggtgaccaatcatctgaagaaataagggtcacaaaacacatgttattttaaagggttggtcttagctagtttttcttccctagggaaaatgtcatcccacttcaaatatcaacaactttgacattttgagcaagaaagcgagaagccccattagggaattgaatctgtgcttcctccaggctccaataaacccaacttttattacatgatgcctctatgtgaaaacattaactttttaggccgggcactgtggctcacacttgtaatctcagcactttgggaggccgaggtgggcggatcacctgaggtcaggagtgtgagaccagcctgaacaacatggcgaaaccccgtctctactaaaaatataaaaattagccgggcgtggtgtcatgtgcctgtaatctcagctactcggggaggctgaggcaggagaatggcttgaacccgagaggcggaggttgcagtgagcagagattgtgccactgtactccagcctgggcgacagagtgaggctccatctcaaaaaaaggaaaacattagcttttttactttcttacttcctggatcctcagagctaaacatgagtggagaacaggcggaatcacaccaaccctgtctttgtcacagcacctgtccctctattctacttacctgggtgtgtcttcccctttgccaggctgtgagctccttaagaacaggcagattgaccctttctttcctagcactgtgcccggcacagagctgctctcaacacacccttgcgcatgaccccccagaacccactgtttgccttaaggcaagtcacagcctctgttttcacaatgaaaaatgaaggggtctgtagggctgcatgacctctcaggtcattttccagttgccagactctgaaaaagtagctgtgtacaggctgcattttggtcgctcttgtgctcatgccagtgtttataataataatgatgataatggtaagaatagagaataactttaagtccttaattaaacatgctctgctctgttcccagtgcttcacttgtgtgatttcaccaatcctataaggcagaggctcttgtgactcccctttgatacagtgggagactgcaagggtcaatgatttgctcaaagtcacaccgagtgtggtcgccgtgcttcctgaatctgcactcttaactccccctcaatgtccccactaagaacctcctttctgagcctccagttcaggctgccggctctccagctggtttactatatattccctggctcctccaggggctggctgtctgcctgtcaattgctttgatttccttcctcatggccccagctggcccagcctccacctgctccaaccagaggctgaattgccccaggatctggcaggccctttgtccaaagggtctgcagctcctgttgagagcaggtggccggaaaaaagcaagggagggcagtcattggggaagcagcttgggaggctgaaaaggaaagaaggcaggataggactaatccagggaggaattccaagtgcctgccctccagggacctgagcccatctgcatggctgtccactctccacaaggccagaacactggagtgggctttccttgccttggttatacctacaggagaatgaaggcagagatgagtctcctagaaaggccatggagctaccttttaaaaaatgtttcagtggcctgttttacggggtggatcttgtctcattttaaagcatctctgcctattcaaatgcttctttcagctatggtgcctgaactcctcttgacccaaagtctttccaagtgtttttgaaagaaactcgattttacagtagaaaaaaaataattttttaaagaagttaacctcagcaatcacattcttaggtatttacttgaatcagttgaaaacttatcttcacacaaaaaaactgcacataaatgtttattcacagctttattcataatcatcaaaaattggaagcaaccaagatgtccttcaataggtgaatgaataaacaaactgtggtacatcttgaccatggaatattattcaggaacaaaaagaaatgagctatcaagtcacagaaagacatggaggatttgtaaatatgtattgctaaatggaggaagccagtctgaaaaggctacatactgtatgatttcaactatgtgacattcttgaaaaagcaaaactatggagctagcaaaaagagcagtggttgctggaaggagtctgtaaagaagaaggaatgaatagctggagcacagggcattttttagggcaatgaaactattctgtatgacattgaaatggtagatacatgacattacgcatttgtcaaaaccaataaaactgtaaaatacaaagcatgatcccgaatataaactatggacttcaattagtgataatatatcaatatcggctcatcagttctaaaaaaaaataccacacaaatgcaagatgttaatagaagaaactgaggtagggatgaaagacctgggaactctctgtactttctgtgcagtttttctgtaaacctaatactgctcttttaaaaagtctattaaggccaggcacagtggctcatgcctgtaatcccaacactttgggaggctgaggcgggtggttcacctgaggtcgagagtttgagaccagcttgacaaacatggtgaaatcccgtctctatggaaaatacaaaaattagccaggcgtggtggggcatgcctgtaatcccagctactcaagaggttgaggcaggagaattgcctgaacccaggaggcagaggttgcagtgagctgagatcgcaccattgcactccagcctgggcaacaagaacgaaattctgtctaaaaaaataaaaataaaaataaaaaataaaataaaaagtctattaaaaaatggttcatttgaatatgcttgaggccctaaaaagcagtcaccttcttcctctgtattgctttcaggctaatcataatcataataacaaccacatgctatcatttgtccagccctacagtgcaccaggcactgttctaagcactgtttatgtatgacttcatttaatcctcacaaaagccctatgaaaaattgaggtcagggcagttaaagcaatttgtcagggtatcaaactcaatatgtggaagaagtaggacttgaaccacagtctattcaacttcaagcccacacttataatttctatactctaccacccttttcctccccggaggatgagtagcatttcagtacgtaaataatgggacaatgcaagttttgacaactcctatattagtcattcactcagaaatatgtgcagagcacctgtgtaccaagcagtgtgctaaactctgaggatataaatataggtaagagagtctacctgcccacaaggagattgtatgagaagaagagacagataagaagatggaaaatgacaatgaaagccctagtaacaaggagccaggtgtctccagctctggaattggcatgttacaaaaaggacttgaagagatccctttggttggagtggagagattcaaaaatccattcaatcatcttgagttgatttttgtatatggtaaaaggcagtggtccagtttcaattttctgcatatggctttcgagttatcccagcagtatttattgactaggaattcctttcttcattgcttgctttcatgggttttgttgaaaattagatactacttattgggtattatgctgattacctgggtgacaaaattatctgtataccaaattcccatgacacacaatttacccgtgtaacaaacctgtacatataaccctgaatttaaaataaaagtcaaaagaaaaaagagagagaaaaataaaaataaataaaaattaaaagcttataaagtaaaaaaaaaaaagaaaaaagaaatagctatctttaggaaggggaaaaataactaaaattcactatatgtctaaaatataccaggcacttgcctaggtccccaacctatgtccactcatttaatcccccaaacagtcttccaaggcattatttccaatacatatatattaattttgcttccgcaaaataacagcaatatatattaaatatacatatatttaaatatgctgttaaatatgtatattgctgttattttatgaagacagtgtggagttacttatgttgcaaaattcctctaattcttacctgtgtctttcttcttatctcgtgaaagctcatggacagtggcaccaatgtcatgcctcaagatcttgatgatgtttgtcagagcaggcaggctacgtttatccaaatgggtgaaaaattcatactcatctttctttaaacgagaaggtctagattcaatgtgggtcaggtttacatcattctcctagaagagagaatggggagggtgaggagacagtcactggaactaacgcaggccaaagatgcagaaccagaacaggaaaacctaacgcaacaaaatggagagttcaagaatacaattatttttataagagtataaaaaagtccttaaatttgcaaaagttgtttactttttcttctttaaaaccaagtactaagtggcaggaggtggggcagttagttcacatgtcacaatttaatcacatgaaaatctgctaaaggcctagaattgccactataagattttgatttggttaaaatatttaggacagtggctgccaaaaatatttacataggaaacacccccactttccaaacgaaattctatggaattacaataaataaataatatagaagcaacattgttctgcttgaatagggggtcagacttatttgatttatatctaatatctaaatttattgcttgtgagacgatgtactttcatgtttccattcctcagtttttccatctgtaacttgctggtcttaattatacctgcttcataagttcattgggagtgttggatgatatgatacatgtgcaccacttggcacatagtaaatgctcagtaaaaattatctaatataattaccactaatatatttatataggcctggcgctgtggctcacgcctgtaatcccagcactttgaggggccgaggtgggcagattgcctgaggtcaggagttggagacaagtctggccaacatggtgaaaccctgtctctactgaaaacacaaaagaattagctgggcatggtggtgtgtgcctgtaatcccaatcccagctacttgggaggctgagacaggggaattgcttgaaccacggaggtggaagttgcagtgagccaagatcgcgccactgcactccagcctgggcgacagagcgagactctgtctcaaaaaaaaaaaaaaaatatatatatatatatatatatgtatataaaattactttccattcaaggtattcaataaatatatacatttgtaacacccaacagtggccaatcatccttctagcggcttgggatccaccagtgaacaaaataaagatgctttcctttataaagcttacattcaagttgaggggatacaaacaacaaacagaaactcatttgtgcatgttatcatgagaaagactaaggcaaaaatgcaacacagagcagggggaagcaaatgggcattcctgagacagggtgagggcagattgcaggactaaatagggcaggcacatggggcctcattgggatggcaagatttatgtacagtcctaaaggagttgagagaggtgaaggccggaaggtggcagcatgcctggcctgttgaagagacagccacaaggtgggttgatgagagtggatgaggtcaaggggaaaataacaggagacagtgtcagaataatcacagggtcattgcaggccattttaagaattatggttttgattctgaaagaaatagggatctttgcaagattttgagcagaggaagaatatgatctcataggcttaaaaggaccagtctaatttctatgttgagaataaactttaagggataagatagaccaagcaagtcctgtcaagaggccattgctgaaatgcagacaagacgtgaaggtggctatgtctatgttggtgggagtggaaatggtaagaagatattacattcaggacgtcttctataatcacctcaaaaggatcaaaattatccaaggatatgagaagagtttgtgggtaggaaaatggaaaaagtccatcatattccatgccaccctcagatttgactattactctgttgtctatgtggctaaataaagagaatttcaggaatccaacgggaaaaaaagagcacatcatatctccctgaggaatatcgtctttaaatcaaatatcatgggccaggctaggtacttggacaatgcaaggatgaataagatatttcctgcttttacattagccattcgtaccctcatcagaccatttttagtggctgcctgatgatccgcagcacagatgtggtcataaattctttaaccaataccctagtgatgggtatgttgcttcttgtttttctgccactagaaataacggtcagcaatatacataaagttttgcctacttgtctaactgatttctcagaataaatgcctaggggtcaaattgtttaatcagaaactaccctttaaagattctctatatattgtcccattgccttccagaaagtctatactcatctcttctatcttcccactagaggatccatgtttctcacctgtaccacctttaaggattttcaatattcttgacttgacagatgaaaacagcaaataactcattgttcaattttttatttaactgctgatgacactaaacatttttcctaggtttagtggccatttgcatttcttttatgaattatcagtttataccattttcttattatagagattttttactgatttgtaataattttttatattttcatattaactctcatatatatgtgtgtgtgtgtgtatatatatatatatatatatatatataattcaaactgacatttattcttggctattcttaaacacctcagtgaaaaaacaatttttaaaatgctctcaaaaaatgttggaacatcacaagtataaatagtcttagagtttttaaggaatgtagctgtgatgcattatcagaaaaaaggcaataacttctttctcaaaggcaataactgcctgagtatcagagtttgcttgatgtctcaaatgtccctaattgtagaaccaaattccttggactcctctggattactatggcatctgctgagtgctaggtgcaaaatcaccagacataaataagaagcacaaggtgggttgtataatttgtccaaatgcatcctctaaaaaatattaggctggatgactcaagagttttatttacaactctcttgtccctttccaagaatgggctgtgggggactggagctcatctgtaattatgccacagttttcttgtaaaacctggactctttacactggttctgaagcagaaatgaactaaaaaatgaatgttggtcagcagcaacacttggcaaagtctactaaaatacactgaacccccaacacaaagatttcaacctgcagtcatcagtcagtgttttcctgctggaagcacttgctaagcatggaagcatcccactcccacattcgtgcaaagagctgggaagctgctttcattaaatgccataaaaatgtgaaaataatgattatttactacagcttctcaatttcagtgtctttagatgggatattttagctcttatggttattacaaaaacaaagtcatttattttagttggtcctctaacataaatgcccagcaaatcatctgctacttagtcagaaagtatgtgatttccttagtaatgctatttattttggagaaaaccaaggagtatcatatacactttattaaaacaaacaaacacataataggggttattccaatatttaaatggacagaaagtatctgaaaatataactaaataactctaaaatttcaaaaaattaaaattcactgaacttgtagttgaagaggtgtatcttttgccttgatcattaacggtataaggttcaaaagaactgtagtgatgccttttcatacttaagtaacactttatagtatagaattcttttctgtgaccatcccaacaatcctttgaaaaggttaagggagacataaaaaaataaaatcagagatgaaggtgcttggccgcaagtagctagagagcgaggcccattttttttctaatttcagtcattagttttttaaccacactgcctttcctgccaggcatacatacagtgagcactccacaaatatcaactttgattattattactaccattatgtcaaacacaaataattaaaacctctgggtgtagtaaatataataagtaacctcaaacaggctcacggtgcagccattatttatggctccaactgcagacaacacacccctgagggctgtggctagggaaacccacagaggggaccccactagggagagagagaatagtgaggaggtaatgccagagagatatagatagatctgaagctttctctggcaaacagagattacttgttaaacaaagcaaagagcaatgtcatccttcttggctcaggaataaagagaatgggtaggttccacctactatttacctaagatgaaacttcaaaaggagacataaccaatccctgccttatgtagagctgagagcacagcaaatccaagaaccgagaatggacacacctctggcacgcttatttgtgggagagttttggaagggaggggagcaaagaagaagttctgggaagcagaccataggatacagtgctcatcactcataccccacccctggaagcatccacttccacagctttgaggataacaataaaacaatttatgttttatgactcagtttttctagtgctagagatttaacttatgggaaaattcacatagcatttcaccaaaacttctaagctaactaaactcccataatagaggaatgatgaagtggactgtggtataattacacaatggaagattaggcaatcattaaaaagtgagtaacggccgggcgcggtggctcacgcctgtaatcccagcactttgggaggccgaggcgggcggatcacgaggtcaggagatcgagaccatcccagctaaaacggtgaaaccccgtctctactaaaaatacaaaaaattagccgggcgtagtggcgggcgcctgtagtcccagctacttgggaggctgaggcaggagaatggcgtgaacccgggaggcggagcttgcagtgagccgagatcccgccactgcactccagcctgggcgacagagcgagactccgtctcaaaaaaaaaaaaaaaaaaaaaaaaaaaaagtgagtaacaaaaacaacaacatgtattaaaaaacgtgtcagtaagcacttcaagacatgagtgcagtggcggtctctagatgaagggcttagggatgattttgtttccttctttctctttttttaaaatcatagttcaagtttcctagaaacatttattgcttttttttttttttttttgagatggagtcttgctctgtcgcccaggctggagtgcagtggcgtgatctcggctcactgcaagctccgcctcccaggttcatgccattctcctgcctcagcctcatgagtagctgggactactggcacctgtcaccacgcctggctaattttctgtatttttagtagagatgaggtttcaccgtgttaaccaggatggtcttgatctcctgacttcgtgatccgcctgcctcagcctcccaaagtgccgggattacaggcgtgagccactgtgcccagacacatttattacttttataataaaaacttaactttatctgttaaatggttataatgataaccattggggtaaatacttataatagatataggtatgggattattaaaaaatgtttaaaaaattatgcccgggctgacaaatggggggtggggtgtgggagttatgtaactgctacttacttggcaaaagtcttatatgagtgaagtttctggttaattacacactgaacatagagctgaattgtttaaatcatttctttccctttgagtcaatttgttaaaaaataaccctccagtttggcatgtaatttccttattggcgtctttctaatttactagtatggatccttagaaaccaataattttgattgctaagagagcctcaaaagttaatttacaagcctgattaggatcatacttttaacaaatgaatttttacttttcaacaagaggtttgtgtaggtttacaaattgacccatatacgctcaccacatctttgctgagggataaagaaagcactcttgatattactccaagtgggcatctcggggaaggcaataaaggcttgaacttttcaaaaacaatttcacgatttgtctaatatttaatttatgcataaaagatggcagcataaaaccttgctaatcaggattcaaacagaagatataggcaaggtgaaatgaatcaccaatttttctaaggattcaccagaaaccactttcttctcctatcctttaagaaagcctttctaaagggggattggtcacaagtaaataaaactatagaaacagagttcataatggtgaaaagttggcttgtctttctggatcttcttttgactgcatactgggcgccccgtctcctcctcctcctctatcttattcactgacaagagataatggtatcttgcaagtatgtgggctatctgggttcaaattctggttctgctactcactacctttggatatattaattggccattctgaagttggtattctgtgtttaaaataaagataattttacctggcagcttaatgagagtttaaaaaagcaaaagcacccaacaatttttgtctgcacctaataatttttgtcttcattaatatatattcagtaggtactccttatactctgcctcctcaacttggtatagatacccatttctctgaaagatggagcacatcacattttatgtgtcattttatccttcaatatttgttttaccctaaatttttctcagctcttttttttaattttttttttgagagcacacttcaaaaagaaggaaagcctaggcatcttttgagatgagaatagactggcaagggagaacttcttggaccactatgtgctgttatcttggagtaaacttaagtgaagttatgtcctggcctatttcagaggttgctggggacaacatcaaagacatttacaaaaaatgccctaaatcactggtcttaggtaaatagacaggaccattcaataattcactcagttaagcaccatttttgtgttaaccactgttctaggtgctggagtgtaacagtgggaaaagcagaaaaaaaaatctctgcccttgtggagctttatgttctcaaaggaggagacaaacagtagttatggtaaataagtaaaatatacagtcttcagatggtggtcagcaccatggagaaagatgaagcaggaaagagggactggctacaccattgtgcatgggggtgctatttttaaacaatgcagccacgaagtcataaaaaaataaacaggtaacctttaagcatgaacctgaaatcagtgagggagaaaaacgtgagggaacagccagtgcaagggtcctggagtaagagaatgcacaatgtgagggcagaccaacaaggagaccggtgtgactggggcagagtgagcaggaagcgggggtgtgaagacaccaggcagagaagttaccaggaatagatcatggaaggccattttggccattacctgaactttgtttggttttcactctgagtgatataagaagctatgagaggtaattaggcagaagagaggtatcatttgattcatgttttaaaagacacattctggcagctgttttaagactagactgtagtgggacaagacaggaactgtctggggcaacaacagtatttggggtgagatacggtagttgcaaaggttggagaagtcgcaaggagatactgatggaacttcttacatgtttcactgatttcctcttctgggagggccagcaatgccccagttgaccaacaatatggaaattaaacccactggcatttacaggaaaccagaaatattcaagaaagtatgagcagcacaattaaattctacagggagctcaagattatcccccactctagtctggaggaggagatcttggagaggttcaagctggaccttccatgggattctcaccccaaagaccatcttttgggatctcactcttgcttcctcttggcatgtctcctgtgtgattctttggacattttttctttcagtcacctcccacttcatgagattatttcttcccccaccctcccttccaggtggctggggctgcctaactcaggggagactccttgcaggagaaagccagggttgcagcttaatctggctcagctcacgcctttagagaaaagaactgtcttttctttgtgtttcttttcctataccaccaaattggtaaaatattctaggtcaaaaagaccctgtgggctgggcacggtggctcacgcctgtaatcccagcaccctgggaggccaaggcaggtggatcacctgaggtcaggagttcgagaacagcctggccaacatagtgaaaccccgtctcaactaaaaatacaaaaattagccaggcatagtggcaggtgcctgtaatcccagctactcaggaagctgaggcaagagagtctcttgaaccagggaggtggaggttgaggtgggctgagatcgtaccaatgcactgtagcctgggggatagagtgagattctgtctcaaaaaaaaaaaacacacacacacacaaaaaacaaacaaaaaaaaacaaccttatgtatggagcaataatcacaactcatatgctatcaataggccacaacctctgtgatcattgaatatctgatgaggtcattgatctctgaatatctgatgaggtcatgatcactgggtatctgatgagatcattgaatatctgatgagggggaggagtggatcccctaggcaggagtagggcacaaaaaagtgggtatgactaatagatactgtgcctttcccatttgcttccaaaaggtctgtctactgtaaaaatggaaggtaaattctgaagcagtttttgtctctaagtgtctagctcctggaagcttgtttagtctgagcctctgtgtcttcatcaattgaatgatgctgtctttgaacctacccacatacgtcagagatgaccttggagctcagagctctgtacatctgcttgtttgcttgttcccttccctagagaatatgtggtaaggtgaacagtgtacttcccccaggagcctgcttctcattttgtagcccattactaagccacttacagtaaagactctcaggagagtattttcctaaaaggcatggacatgagctagtagaggctaaaaatatagagcactacagaaaatgtttaaaccaatgcataaataattgaaagttggaacaatctactgaggtcagtgggatgttgtaggttagcaggtaagggttttggtatactcctaatcatttggccccaattcactagaacttctacttcttatcttaatttttagaatgaggaaacctagccactaagaagttaaatacttttcttgaggtcttcaagctcacaggttgtgcaactgggttctgaatccaaacggtttgactctagatggtatatccttaaccccaatgccattccatccctcaggaccccaaacctaggttatcactgatagtttggagttcataactctaaaacagcatgagtttagtggaacactagtgcctggaagatattaagagatcttccctaaacagggtcccatggtaaatacatataggaaatgctgagtgagattacattgaacaggtttcctccctacagaacttctcagagtctttaataagttcatgtgcactatggctctctaaaacctagatgtggaatttttcagatataatgacccttggaattcttttctgataaaatacctactatcatacagattttgacagaatattatttgggaaacactgctctaaagtatagtctagattatttcatttgttttgccacttatttcctttaatttcattttatagggtccagaaatgtgttgtaaactgcacagcttaaaggtctcatccgtattttcatctatggcttgcttctccatttcattcacaaagatgttgggagagatgtaaacacccgagtagactatgcacaccacagtccccctgctctaccaagctacttttcttctggcgaatggctcaaccccagctcttattgctcattgccatttttctgtaagtattcacaaacaatacaagtcattcattctagattttcattaaaacaaaaaacaacactttaaaataaaagctttctactctccctagtcttccaacatctttctcatcttcacgctttctcaaagattcctgatggggtaaaataaaacacgtgaaaggggtaaaggaataaaaattgtgtgagcatcttctgtggcctcagagtcacaccaggcatagcaagaccagtaagtcaatcactggtagatctgggatttagatgcccaatatcaagcctatattcctcctactctttatgtcataacatggggctactataatgtttggaaccaaagatatgaattcttctacgggcaaatagtgatctcttgatttctcataaaaccttggccccaaatagctccctgattcacccccttgtaagtaacagataggtgatggggtgaagtcactagtccaaggacagggtaccaagatctaccagccaagcttctcttggctctcaatattttgtttcaacattcccagtttaaagatcgttctctttacaacaaaaagagatgcaaaataactgctgtgtcattctgctttctcataacaattggtttttctctgattaaaaaaaatataaggccggaggttttagcataatagacctaggtcaatttctgaagtcctaccaccttgtctaccttagacaagctactgagtctctgaggtttagtttcctcctctctaagatcagtatggcatcgctgactccccacagcactgtgatgagtattaaatatgacttaattcatgtgaagtgataacacagtctctcatgcacagcaagaaccccttcccgggcaatagcttagaacaatggttctcattcccgacttggcatcagagtcaccagtggaatttaaaaaaaaaaaaaaaaattcaagaataaacaaaaatccaaaacacatgaaaaaatgactgaaagtattgattatatcagaattttaaatttcagtatgacaaattataccataaacccaagtaaaatgagaaagactgggagaaaatctttgtaacacacataacagtattcagagtatataaaatgtcaaaaaatcggtaagaaaaaggcacatttgccacaaaaaatacaatgtgtagacaaatcacaatttacaaaaagacaaattataaatgttatgaaatatgacctacatctcactaatagtcagaaaaatgaacattaaatcaacaaattaccatatttcactcattatattgttcaagattaaaggcaataataagcatatattcttaaatgtatagagaaatgagtattctcatgttgaaccagtgggagtataaattcttacaggacatttggagaaaaactttgtagttctgattaaaactaaaaatgtccatatcctacgaccagattccacttctaggtatctaccctaaagaaatttttgcatattacttaccaaaaaaattgaacaaaatactgcagaattgtctgtgactatagaaactagaaaacaccatggatgccaaaaatagagggatgataaataaaatatgatacacagatattaagaactatacttcagaggttaaaagttatgaacctgatctatatgtatcagcatgtatacattttttaaatgttgcattcacaaaatatatatatagtaattcttacttaacagttaataaatattctgagggcacattaagtgatttaatctttagatcacatgcattaagtgatttaatctttagatcacatgcattaagtgatttaatctttagaactaccctatgaagcagatacgattactatttccattttacagatgaggaactgaggcacagagaagtcaagtcaccctctctaagccacagccctgcatccatggagtccatcctcttggccactccattgtgcttactgaaagaggctgcagaccaatgtgcatagcatgacacttgtcaatatcaacatacttttccaaaggactggaaggaaatatgctaaactcataatgatgctgtcttggctagaaagtttgtagaattagaatgatcaggatagaggagagatgagaaaagactgtagctttatcttctaatttttttcttaagaaatgatatgttaatttgtaatatttgaaactgcaatgacacaggaaaaaatgaaagtgatatgtccaaatgttaacagcggttgataatagatggaaggaatattagtagttaattgtcttgcatttaaatgcatttttcaatatgaaagaaaaaatacccagagacaggtacttttgccccctcaccccaagaatgagagactgggaccaggatatttgcattttttaaaaaactccagagtgattcagatgttcagggatagctgtatttggcagaggtgtggggtgtaatagaaagatcatgggcttcggaatctgagattcagagttcaatgccatttccactgcacattagctgtgtgatcttgagcaaattactcaaccgctctgaacctcagttccctcatccataaagtgagagtaccaccttcacttagtttaatgcggattaaatgaagagtcatatgtgcccagctcattgcataatgcggttccacaaatactagaatttgattctctctcttaacgtagcatctttttccttcttttcttttctttttttttttgtggggagggagggggcggacagagtctcactctgttgcccaggctggagtgcagtggggtgatcttagctaacttcaaactctgcctcctgggttcaagcaattctcatgcctcagccaccttagtagctgggattacaagtatgcgccatcacgcccagataatttttgtatttttagtagtgatggggattcgccattttggccaggctggtttgaactcctggcctcaagtgatctgcccgccttggccttccaaagtgctgggactacaggtgtgagccaccatgcccagccttaactcagcactttgagtgattttaacattttgccaggctgttactaaggcgagaagtatactggcctatacaatttatacagcaacttctgaagtatgtttggaaaaaaaaaaatcaatactcactaacaacccttcttcaatcacccaatacagtgacctctgtttcctcttctgtaaaatgggtgtaataacatcacttactgacctgtgcagttgagattctggataatgcttcagagagttcacccagagttcacatacatgcatgcgcccccctccctaccaccccctgcagccccgacacacacacacacacacacacacacaaacacacatgtcttgagtgcattccatccaattctggtaatttagttacttgtcgtttatttattaggttgaaaacattctgttcatttactattatttaatctattaactctgacttaggcctaaggggcaacctctcaaggagaaaatgctgattatctaatataaaagctaaaaagttacataggtgcattttacagatatattctttctcatggacagtttgttgctcagaaaatgctgtctctcttctctacacccattgctcgcttgctctcactcagacatacattctcctcccccaggtttaattttttaaggcagtttttaaagaataattttgatttatgaaaaaatagaaatgatagcacagagtttccacataacctggactcagtgtcccccattatgaacatatgaacatcttacattaatgtggaacataggttacaattaatgaaccaatattgatgcacgttataaacgaaagaccatactttattcaaatttctttagtttatatctaaagtcctttgtctgttctaggatcccattcaaaataccacgttacatttagtcctcatgtctctttttttttttttttttttttgagacagagtttcactctcgctgctcaggctggagtgcaatggcgtgatctcagctttctgcaacctctgtctccctggttcaagcaattctcctgcctcagcctcccaagtagctgccaccatgcccagctaatttttttgtgtttttagtaaagaccgggtttcaccatgttggccaggctggtcttaaactcctgacctcaggtgatactcccgcctcagcctctcaaagtgctgggattacagacgtgagccaccgtgcctggccctagtcttcatgcctctttaagctcctctcggctgtgacagtcgctcagacagtacttgtttttgatgaccctgagagttttcaggagtaatggtcatgtattttggataatgttcctcaattaggattcatttgattttttctctcatggttagatggaggttatggattgtgtggaggaagaccacaggggtaatgtgccattttcatcctaccaagaatgcataccatcaacatgacatcactgatgatgttaattttaattttaatttttttttactattaaggaaaggtttgttttaatattcagtttctttttgaataatgttgattttggtcacatggctgaggtgtctttgtcatatttctccactgtaaagaaactcttctcccccttccatgtggtactttttggaaaaaaagtcactataaaaacccactacttaaattatttggaactctaaataggagatctatcttttctctacttattcatatatttgatcacaagatttaattatatttaaaaactcagggtaaaaattaattggccctggctggtagctcacgcctgtaatcccagcactttgggaggccaaggcaggcagatgacttgagtccaggagttccagatcagcttgggcaacatggtgaaaccctgtctctactaaaattataaaaattagctgggcatggtggcatgtgcctgtagtcccagctactggggaggctgaggcatgagaatcgcctgaacctgggaggcggaggttgcagtgagctgagatcgcaccactacactccagcctgtgtgacagagtaagactctgtctcaaaaaacaaaattaattggctcaaaaagtgaaaagatacttttaaaatatttttttaacttaaaaatatttattaaggtaaaaaattttctttagattgaatttcattcttaattgaacacaacatatataaaactcaggttctgttgaggatataaacatgactgagacaaggttctcttcttgaagaaaccatcctcagggctagacataatgtatatgctgagcacgcaaggaagtgctgcagttaaaagtaagaagtgctttgggaacactgagaagattgtaattaattcagggaaagcttgataaaagaggtctgaggtcagggccagcttctgggatatgcaaccactgtcataccacaggaatcacacttggggtttcatgttctttgcaacctccttgaaattcctttttttttttttttggggagggagtcttgctctgtcacccaggctagagtgcagtggcacgatccgggctcactgcaagctccgcctccagggttcacgccattctcctgccttggcctcccaaataggtgggactacaggcacccaccaccacgccgggctaattttttgtatttttagtacagacggggtttcaccatgttagccaggatggtctcgatctcctgaccttgtgatccgtcagcctcagcctcccaaagtgctgggattacaggcgtgagttgaaattcttaataacgacttttgaatttgtgtttcataagcaaagtccagtgggacaatgaagcacatgctgggtatttggagactcagctcatgtgtaatcacaccatttgccctctccttaccttctcagccatggttctaaggggttgctttcaagcacgttggccctctggacccacgcagccttcccctccctggtcttacctcaccaccactactgccctttgcccagagtcatgaccaggaggcatgggctttggggggaagtttatattctgctgccactctccgccaaccctgggagatctggcaggggatttggtgggtgatttggcttcaggcaagcttcctttccattctcattccagaggttacaatctcttgggggatagctcatcactgtgggttggtgcagcaggtccacggaaatggaagatggatttccccatccttggtaggggcttggctgtcagcccagccctggctggacagggaacccagcagttagagggccaaggtgcccaggggaggagagcacaactaaatggcaaatcaaaaacaccataacaggacatgagagagaccacagaagaaaggataaagttatatattttagtacttttaacagcattatttcctgttattgaggaagagaccccacgttttcattttgcactgcgccctgcaaactatgaagcccgttctgtctggggcagtactgaatagcagttaagagtgtatgtaggttctagactcagaatgcctgggtttaaatgatttcttccgtatttactagctgtttgaccttgggcacatttacctaacccctctaagcatcagtttctatctctgaaaaatgggggcagaaatagctcctacctcatgttattttcattagactgaataagatcatgtctataaagctaccttttactgagataacttctcatgctctgccttccctccccagctgctcagaatatttgcttcccctgttagatcctaaaggaggcagtttctcttccttacaatttctatgtgtcccccatcttcctccccacccacagtgctgagaacatcataggttttcacaagatatctaatcgtatccagtcatgccccaaaaggatttgttgattgcatgcccaaacacactgagcactaagtatgtgcacagccctgaccaatgtgctacccctgcctcccaatcagctagagaggtcacaggaatcttagcataaagcaatgtattttcaggtgggacaaaatcccaccaaaaatattagcatagtactcggaaggaatctggctgaggaaacctatttggagttctgtgaagtttggctgcccagcaaacacccaaatcaacgtttcctaaactctgttcccagatgtgaatacatgttcttaaaataaaaaggatccacagtcaagtaagtttggaaaataatacatacatttctctctgtaaacaacttagtataattagttttatagactctaaaagtcctataataaagaaatcaggtaaaataatatgcccgaatttcccaagtttattaattatggaaccactttaatcataagacatttaccaatgtcttgaagaacattagctattttctaaagcatagttttgggttaagctacttgaagaaagggacggtgtcttgcatattattttacacttatacatagaagacaatcaatattaatttagtgaataaaagaattaatatttatttcttgtttactctttaactgtaatcacatgtgacacatgtgattacatgttatgtgaaatgtaatcacgtgtcacatatgacttatagttaatcatgcctaatcacacatatgattaggcattttacaaaacacattatttcatcacaaagttcctgttgaaactgacaaggcacatattatcagcactatattatgaatggaaaaactgaagctcagagagattgaatgacttaactaaggtcacacagttggttaatgtaaaaacttgagctcaaattcaaatctgcctgttccagatcctgtgttcttttcattgcatctaactagaaaagaacatggaagtttgctacgacattatccaagacaaacatgattgtagcactgacctcaaataagcgcaatactttggccaatgcaccaacttcttctttgagtgagaagatcagtgatatggcaccattttgattgcagttgtcttcaatatagcttgtttcctacaggataagatgcatttgtttaaaacattttccacagtttagcaattcattcctgttaaacctccatggacaaagcaagcatgaactctttcttctagttaaatcttgcaatacaatgagctatatatattctatacagaaatatgtagtgtggtggaaaataagtaagtccagggcaattaaatgatcaatgatgctactgggtcagttatcagcttaaggaatcttcaattattcattgatgtcaccattcaatcctgtaaattcaataccttttattgagcaactactaggttccaggcactatttgggctctgagaaatttaaagatgaataagacaatgctttatcttttaggagctcacaatctaacttaatagacacatatataacaaactgaaagatccttagaggtgatataatatgatttataaaatgtcccagaaagacattgagaaatacagtgtggaaagtactaaaaatggaacatgcacaggcttttgaatcgtaagacctggattggaatcctctctctttcattttccaggtggactactttgggcaaatcattcagctttcttagttttctcatccgtgaaagcatgctaataacaagatctgtcaaaacagtattcagaggatgaaaaaaggaaaagaatagtttaaaaagaatattgagaagtatataaaaatgatggaaaattataaatacacaaaaatgacctcttgacctttggcaaagatctcaggaagcattaacttgctcccatatgctgagatctgagacatccaattgttgaaaaagagttacaaaatccatgaaagtacacaaataacctatcagaaaataaacttagtcttaaactaaatctcaaagaatgtccaggatctagcacttactacatgcatgtgacagaaaaccaaggttggggttagggctgacattccagagtttgctaaatcattagcctaagtcgaaaaataatacataaaattctatgtgtgtccacaataagcagcaggtacctaaaactgggaagaaaaaaatttgcagaacaattactctcttgtaagcaagttaatgaaattaatggaatagatgttacatcatctcaatgagagaaggctgtgttaggaaactcttagtgactcagaataacaagccctgcatgaatactgatgacccttagcaaaaaattctttcaattcagaaaattcagatttttgccaaaacatcccatgaaactgaggtgtgaaggaaaaaacaaatttatcagcaagagtgattttagggagcttcaaatgaaatggaagactaaactgttaaatatcccattttgatcatgatgttatctttctaaaaaacttcatttatttagagcctatataaacatttatttagagcctataatttctgggtattataataagcacttgatttggattatctcatgtaatttggcaacaacctaagaggtaggttttattaggcaccaagtgcccccttttattgatgacaagattaaggcttagagaggttaaggaacttgcctatagttacacagttagcagtggagccaggatctgaacccaggtcatttgatctctgcatactgtccatgaatcacaatctcttgcagcctctattcctcttcccccttttaaaccctgccagagaggtacagatgagtctctgacttaagtcttcttcctactaaagaatactgagccttcttctttccagtttccttgaaatgacaaaagatattcctgtctctagttcacttggtagcactcttttctcctgttggcttccaagaaaagtaagatatttctgatacacatccacagatgccacttttgactagggcaattcagacttgaatgtacctgggcttgaagttgagtcaccccctaaaccccaccccactacagtgtgtgttcagccaatcacaagtctgatctcatcttctccagaaatgcctctgggcatcaggtcctttcttcccactgccatcacctgaatccatttcttagtggcctgcatcgatccagcctgacatttttactcttgtccttctatttagaatccctcaaacgctccatccccatggcttcttgctgatgtttggcagtttctgtggtaccgaatctctggaggcccacctacaggaacctcctttccagccaagctgctttctttcttgcctttttagctcctcattagagtattcaccaaatttccctttccaagatctcaccttccttaaaggctcttttgggtctcaattctcttaggaaatgtttgttcccctcagcccaggtgcacaatcacttctttatctatgctttccacttggcatttgatgcccacatggtatttcataataattgactcacagaaattgatttgtccttagtgctcatctagttaaactcccttacattacagatggggaaaacttagagccaaagggagaaaataactcacctgaggccacataggtagtggaggctggtcaagaactcaggctcctaattatcaatttttctacataattccctttgctatggacataatatgggaatttagtcctgtttcttgcaaagtaaaagatttactctggtccagtcaccagacagttagtcaatagcactcctaacagcctatatttcaccatgctgatcccccttcacttgctccatttctctccatgcactttgtaaatcagtgtttctcaatgagtgttccttggatcttgactccaaaattacaggtgattccttcttataatgcagttccctgggctttacctaaacctgttgaatcaagttgtcttagaatctgccatttcaaaaccatcccaggtgattcttaaccatagaaaattttggaaccattgatatatatacagcctatttttttaattataacttttccctaaatgtgtctgcaaattcacatttactatataacacgacactactttgtttgttattaatataatttgtggattctcaatcttctaagtgctctataaagaactttaaacccctatgctttcctgatgagatccctgcccctaaccccttcccacagttgtggggaccgtattgccagcagcaccaaaactatgtgcaggatggagccaggacctgttctgggatcactctgactctcacgctgttcctctgtacaataagttctgtctcctaagagccatgtactattttcataagaaatttttttttttaaggattcaaataaaaatcagtcctaagttctgcagtctttctagttatattaacgttaacattaaccattcttttctctccagcctccctgttttctactgagaactcttctccctaatcctactgatgacaggggcctgcagacttacattatttccctggcctgggctttatgactgaatctcaagagtccaggagcagacttcctcccatgggtaaatatgtaggtcacattaaagaatgtattctgcaattcttcacctcaagaaaatgccaacaaatcccggagaatggaatataccttgggcattatttccaagtcacgtttagggttctttcacattccatgcccagggctaactcttggtcattttcctctctgcttagtttctgcctcccctggtctgagtaagtttctgtctgaattctcttcatgcctcatcttcttcccaaaatgaaaggaggatagttactcacaattttgccattttgataccttgctgagagcactttataaatattacaaaagaaatctagaaggattccacatcccatcccagatcattagggaccagccccttcagtgtacagaagagtaaacagacaacagagagggacagtaacttgtccaaagacacacagctaattggtggcagttctggaggccagatccccaaccccctaaagcaatggtcattcattcctgtgaaagccaccgaggacagatgttctcctacttagaaacaattgttgaggacatttgtctgttgacttcctggatattctcatcagcttccaacgaattcagacttcttactgagcttatgaaaccaggaagcaccagcagtcttcggatctctttctctggaggcccaaattcccctaactgagcagctcaggctgccgtggctcacctgtccaaagtcagagagtttcctgcccaagcctgggttttccaggaccgcagtggacatgctggctccccgggagtgaggtctctggctttttagggcctcaggtacaggcaggtttgcaaacagcacgtggggctgaaggttttaacctcgcactagggaggagaagagagttacaaagggtgtctcttgcgtggtgcatctccgcacagtaacgcccctcgtgggcgttgtcctgacgcaggaggccagggcagcctgccggatgctccaggtcacctgcccaggacgggccggaggggaggggctgagggagggtgtgggggacgcaggaggcaccacttcgctgcccgccctgggtaaagggaagaagccagggagcgacgggccacccaagccccgtcgattagacaggtttaggcacttccgggactctcagaagcctgggaagcgagttctctgcaattggactaagcctgcgaccgtctggtataacaattatatgaataatccgccccccttacccccagctgaaacagtcaggattctcatttagatttttgttgttgttgttttcccttctgttaacctctaagcacactgccttgctgtgcgctgacttcagaaaactacagctagagggcacgtgaacgctgagcacagcaggtaaagagcaaatgtaagagcgatctgggtttaaatccagcctggtgttctccagctattcgcacaactgctcctgaagctcggaaaagagggtggtagagccaccttgctggaaggttttaagaataggaataaagaaatgcattaaaatttagtacagttcttccacataaacactcagtaaatggaagatattgtttaaaagcaaatccacataaatttgacaataattactgagacctgtaccgtgtgcttggtggtgttctagtctttgggaatacagcaatgaacaaaacagactctgcctccccagctatgctgccattctggtgggcagaaaataaacatataaataagtttaggtagggctaagtcttttgaagaaagtaaagtagggggatggtctatgagtgagctggtgggatttggccagtggtcttcaaatagtcaggaagatgccattaaccacacttttagagaagactgagggtgaggcattactgaccaggaggtaaaacaaagtataaaagaatgctggaaagcaggttcagaggttcagaaaggatgtgaaaactcaggggcctcaagccttgagtgcctgcttaatattttcccaagagaaagtaatgggctgtaagaaaataagccaataataaaggttgctggaagcccatccctctcctcccactgttctttgaccaagcatctgaaaataaataaacaaataaataaataaataagtaaaataaaactcaggtttaggattcaaaacaagtggtttaactcttggttctaccactgatttggtcaagcccatgcctcagtttttttttgttttttttttttgttttgtttttgtctttaaaatgagaattttaagggatatttaggattccttaagcctttatgatgtgccaggctgtctactgtctgctaagaatacagatataacaagtgcaatttctgtccaaaaggaacctttaggggcctgatgaatatttcccatagtaagttggaagctcaatgttgttaaatattgaaggcgaagatcttgatttccatcctcaggagaatctgtattctttatctgactccggcatttttcagtgtagtagacataaaacatgttgtattcctcagcctcaggattttcttacaaacataatttcatcccttgatgctacttgagggcaatgaatgtgacaactccaaaaatattacaggcatgcaataaagaaaagcaaagaatattatctacttatttgcatgcacactctgtcttagacactgtgccacgctctccacgtgcatggtttcacttcttcctcttaacaatcccatgaactatgcactcccttttaataggcaagaaactgaggcctaggaagtttaaacaaatggcccaaattcaatctatgtttcacccaacaccaaggcactgcactggctctcaaatacttttgctttcctgtttgaaatgaggacaacataatttttaggacaacaaaatgatagcttttctttcttctccccataacagctgaaaatgcaactcttttttctaatgtttaatttttgtgggaacatagtagatgtatgcattcatggagtatgtgcaatattttgatacaggcatgcaatgtgtaataatcacatcattgaaaatggggcatccatcccctcaagcatttatcttttgtgttgcaaacaagccaattatactctttcaggtatttttaaatgtataattaaattattttgactatattcgccctgttgtactatcaaatactaggtcttattcattctttctatatttttttgtacctattaaccatctccacctcccctccaggcccctactacccttccccacctctggtaattagctctctactctctagctccatgaatcagattgttttgatttttagaccccacatatgagtgagaatatgtgatgtttggctttctgtgcctggcttatttcatttgacataatgacctccagttctgtccatgttattgcaaataacaggatctcattcttttttattgctgaatagtactccattgtgtattaaagtaccacatttttttaaaacccatgttgatggagacttgggttgcttccagatcttggctattgtgaacagtgctgcaacaaacataaaagaacagacatctctttgatatactgatttcctttcttataggtatatacccagcagtgggatcactagatcatatagtagctctatttttagttttttggggaactgccaaactgttctccatagtggttgtacaaaaatggaatttttaatcctatctcacataaaaatgccctaaatctaggttgagaggaaagcacatcattgctatctgagagaagaaaaactaatcgcttctttaaaaaaaattattctggcaaaaaggaaaaatttatttatgcactaagataaaaataagagattgcttgtgccataaacttgcagatgatttttaagccacctttttgttcaatttggttggaatgcaatgtgctgctataatgagagcagtgctgggtgctaaggaaatggaggaaaaaaaggcacatctagaagaagcatccacagtcagtcagtagaccactgaggtattttttaacactgcacagaggtggggaacatgtcacaagatgagaagttgtgtacttggcaaacttagagctgacctttgctgatttggaagttgaagattacccaaccattgcaggtttatcagttctttcttgtttatcttcatgtgcagaaggttgagttaatcataatccatgagttcatggcacagaaacaaaacctacatgacccttctcttgtttttttattcattctcttttatcataattcctcactctcactgcctttccccagaggcaacttctctaatatgatgtttagccttgaacttgtaaaatacatagaaatgtttgtgcgtatatgtatttttcatggatatgtgatgtggcactatagatttactacaatctatggatgtactatagatttcatagtttcttttttctttcaactgtgttcttaggatccagccatgctgctgaatatgtatctagttctttgcttttctaaatggttcagaatatcccagtgtgtatttgccacacttgacttctttattttccagttatggacatctaagtcattgctaatttttcaccaccccaaacaatactgtgataaatttccttatctttcttcccttataggcctggggtagaaattttctgggatagaagagtggtgctattatgaatcatagggaacatgcactcttaatttcacaaagtgctgccagattgccctttagagtggcttggaccagtctacacaccaaccagcaggcaaaagagttcctattggtgggtatacctaatatgtggtattctccaaaggtcagaatttttgccaatctgatcagcataagctggtgtcttgttgtttttaatttgaatttctctcataactcatgagtttgagcatctctttatatacttatacctcttagatttcccatgctatgaatagtttatcatcatattttctacccattttctactaggattcctgtcttgtagatttgttgcaataatttctgttagctctgtgtccaaatattagctctgtgcccttctcagtcactgaacacattgcctcccaatgtgtcactgtcagttaattgtcaactggtgtccttccttgattaaacaataaaacaagtaattttgaaataacaagtccatccttttaaaaatttttgtggtttgtactatagagtattgtttaagaagtccttccccatcccaaagttccaaagaggtgctcttctctctagcatctagatctatcatagctagatctttaatctacctgcattgtagatatacctgtacatgccttggggatttcttagaggcttttcaacatggtcccacagtccaggtaataccacttaacttaaagaggccaatcccacaatcaattgtcttttgggattttctcaccatagagcctattttaactttccgctagatatatagatcaaattttctttctctgatttgaaagttatcccttatattttaatttttttgctgtatttttatttttttgctccaagttatataattttttccttttagatataacttttttcatttatttttgaggaggtgagcactcatatggctcaaacatcaaaatataaaacctagtgaaaattatttcacattcccctgttcatcaggcacctgattctcttctccaaagataaccaatgttgtcagtttcttctagagatctttaagcaaatatttatgatagtgtatatgcatatattccttccctccttttcttacacaaatagtagcatactatacatgattctaaatcttgcctttttttttttttttttgagatgaagtctcgctctgttgccaggctggaatacagtggtacgatctcagctcactgcaacctccacctccccagttcaagtgattcccccacctcagcatccttagtagctgggtctacaggtgcgcaccaccatgcccagctaattttttgtattttagtagagacagtgtttcatcatgttggccaggttagtctcgatctcctgaactcatgatccacccacctcagccttccaaactgctgggattacaggcgtgagtcaccacgcccggccctaaaccttgcctttttaaactttaaacttaatgatatatcttgaggtcacgctgtttactacaggaagaccttatttattcttttgtaatggctccattgtatttttatgtggattatcgtaatttatttcatcagtactctgttggtaagtattaacatttatgttgtttctaatctttcactattacaagtaatgctttaatgaagaactttgtatgtatcattttacacatgtgtaagaagatagctatgtgaaataatacattaagttgaatgtatgagtcaaaggacatgagaatgtatcattttagtacatactgacaaattaccctttagaggatgaccatataatttattatccatgttggaatgttttgatagtgaaaggaggtactagttataattacacagaaaaaaaaccagatataaattggactgtctccgttaaacggttatgtatggtctatcaatccatatgagttctaccaacttacattttaccaacaaaatataagaatgtccactttccctatagttttcaacccaatgtgacattgtatactttaccactgggcaaatgtcaacaagtaagttcagatttacagaaagaccagacatcacttgagtaaatcaagaggtctgctgagtcaagattcacagcaaaaagatcatcagtatcacctatgaacaagcaggatatgtttacagcagggggtacacacttgtggatgataatgcctgcgtgaatgagagatatgctagaccttatggaagctcagctcctccttcacacacagcctgatgagcatgagactaaagcagttctggacagggacttgactgtatacaacaaacttggtttcagcataacacgttaatcacacattgcacagtttggtgaaatggatatagcacagggtacccttatgcctgaacaaacttctcattaatcatattcaagctcttcatgctaatgtaagttgcttgaaccaagaacatttataaatttattgctgtgggaccagaacaaatgttaggtacccaggcatgtggcctatagaccatccatgagaacttaccaaaatttttgattctcaccattctagagggggaaaaacatattatagtttaaattagaatgtaccttattttgagcaatgtttgtacatatttaaaagtaatttctattgttatttctgtgaactgtctacacctaagatgtctaaattctgattatttctctaatgggatattttgtacctgtcttggggatttcccagaggtttttcaacatggtctcacagtccagataataccacctgacttaaagaggtccatcccacaatcaattgtcttttggggttatctcaccgtgcagcctattttaagaaaaacatacctttgtcctgccaatggtggagtccagcttcttctctggacttcttttctgtctatgctcaatattcaaagaagttatccagtttcttgcctttatacacgagttaggcagtttctacacctgcaaaatccagaggacgtaggccaagctctctggtaggttctttttaaccaccctaacttggtataaggtaaagaggagggaatacttctccccttccaatggaagcaaaagagaaatgtcacagcacattgacacatctctagtgaaattctcttcccagccatttgttttagtcttctggtttgttcttataaatccttacagtgagtattgaatctaatgctgcaaaatgggattctccatctcttagcatgcatgtcctgtatagaaagtctcaaactccaaagcagcaaaaacaaaacaatcacattcaatgtactattagcagcaactagactgatgggttttttttttaaattaagctacttccttaaatatttaaccagttttatgcatttgtaaagaatttaacaaatggagatgttagagacaatttctatggcatttctatatatcttggactaccttttcaaggatatatgcacagcaaagagcattagaggctagtctgtccctttgggtcagacagcagaattatttattgtccagtataataattacagagaacatctccatctctgaagacattccataataataaagtcttcaacctctcaccagaagaaaacttgtttccatgccaaggtaaagataatgcctatctttgaagaggaggatgaggaagttgccatcagcttctgtatgaatcagaatgtcctaagctcagtgttccttggctgtgaaactgtatgctcagcatacacctggatctactctgcattacccatggacttgggggacaaggagaatcaatgaaaatatggacctcatgttgcctattgtgccctgaacaataaactgtgtaaattcatttggattcctggtttactcatttgccaatgttatgaaagtgtggaaagtctgcctagaagttacactgatgttcaggaattgcttggcaagttgataggaaagaaagggacctgtggcatatacagctaggttctccattttctttccttctttcgcatggaaatggaaactcaatattagttttccccaatccttcatagaataaaaactgcctttcccagcctttcttgcagctgagtgtaactacaggtctaatatttggccaaagaaatgcaaggagaagtagtctgtgcaatacctaagtagtgtccatagaggaggcacacccttctccttttattttctccttcttgcaggatggaatgcagatatgctgactggagcaggagcagccatattgcattataaggtaaatttaggaatggagacatgtttttcagagcaaaggaggaaaggttcaagacagaagaagcatttgtggttattgatatcataaagcatcacttcagcagccttagactgctgacttagaatttgatgagaaaaattaacttctactttctttaaactcatttttttgacgtttctgtcactcacaatcaaatctaatcacaacaatctaagagacacggattgatatttaagatggatttacttgtcctaaaactgttctttcttcatcagacttcagagaaaaatgcaacgtctcattgcagacacaaaggagacttcctaataagtcagcatgactcacgaacttcttcagaaccttgtttcaatggcatccttcgttttagtctaacttttccctcacagacaacccagaaatctaaagatcagccaaagcccacataaacccaatgcaattaaggtatgaagtcatggttttcattaaaataagatttcaggcaggctattccaggaattcttagcagaatttagactttacattgagtcataataaagtcagttagtaaatcaagtgcatttgatccaagtttaagtacaaaccaatatatatataatatacattatatgtatgatctcaagactctgaagtcattgcatgagcatcccttctcggcaacatcagagtgagatcactgaggtgctgtcattcatgcacacatttattcaacaaacgtttgttgaagatgtactaagtgccaggcactgtttatgataaacaggagagtctactcaaagtaatttcacatcctattaggaaacaggaacattaaataaatagacaaaaaaggcaagataaactcagtacttacagtgaccaagaagacactgagttttaaaaagaggtaagagactatatgggggatactggtttaagtcgggtgctgagggaagatctattcaacaaggtaatgtttgagctgagaactgaattatggaaaggctccaaatgcaaagagctaggggaagggatttctggtagaggaaacatctatacaaaatctctaatatatgagtaaatgggacttttctgaggagcatacataagccagttgttgggggggcgggtaaagagagtgaaaaggagagaggtgtaagctgagtctggagaagtaggcacgacaaattcatgtaactggttcatagccagttgtgagctaaaagtattagactggtgcaaaagtaattgcagtttttgccattaaaaaaatgcaaaaaccacaattacttttgcaccaacctgatagttcacatagacattccagagactatttttcaagaacttatcaataattttgtgagcatatttctaaacagaaccacaattaaaaacaaaattatgtaaatttgtgattgaatcaattatattaaaaacaaaggtaataaatactccaagaagattacttctaattactttactgcattttattactacctatgcttttaatgttattttatgtccattgtatctatgtggtagaaatatgacataatatgctactgtacctctcttcccaattctgtgttcagtgacatgatgttggtagcttgaagtcagtcatagagtgagtctttacaccatgataattagcaagcactgtttgtttgggtgggtgggttgctaaacatttaccgcaaccccactgactattactatggtagcaaagtcacaaataggactggattgaagtctgatggctcagaggacagagcaacaatgtcattaggaatagaagacacttaggggcagagaaggctcagccattgataacagagaaagggacatcaaatccaaagttatcagggtatgcttggtctgaagaaaaattcaaggtgaaagctaggggaggctgccaaaatggaaggcttaggagtaaggatcaacactcaccaggtcaattcatacactacatcttcaaaaaagtttttttttttttttttttctgactcattgctcctagtcagaggtgggcatccttccttggcccagatactgcctggcagttttctctgcaaactcacacactctcttgtgattttgtttccactcttctgtctcctctcctggactaagaactctcaggacagagatcaaatatcagtatttctaaatcctcaggactaagcatggtgcctgatgcacattatgtgttcaatgcttactagtataatcagaaatgtagaaaaatatgcacaagtatgttcagggcaacatgattccagatagtgtggggagaaatgaaatcttcagctcagggaaaataattaattacagtttattcaaataatagctgcagccacaaaaaaaaattaagattataaaagtgtgatattttacaatttacacaattaagctatgaataattactgataaaagatacaaagccttgtattcctcattatgtaggtacgtcaagaagcatacaccccaaccctatgccaaaaaacaaacaaacaaaaaccaaaaaacaaaacctagaaagaggcagtgttttgtttagattgtggaatcaggagtgatattttgtttgtcacatttattctttcccacttacatgtatgtaagggagtacagttgcaagggaaaatatagtttgcctaaaactatattggatttctagttgaacataaatgaaatgtccttcagctttattctttctatttcattccttctggaaagagagagaaacaaaaattaattcagcacttagttattcagtaccaggcacatcggaaaggttatctcacttgatactttctacagtccaatgagatacgcttttattttaaaattttttaatgtttaatatatgtgggtacatagtagttgtatatatttgtggggtacatgagatattttgatacaatcatacaatgagtcataatcacatcagggtaaatggggtatctgtcacctcaagcatttatcctttctttgtgttacaaacaatccaattatacttttagttatttttaaatgtacaataaattactgttgactgataggtttttagtattctcattgtgtggatgagaagtctgagatattgtagtcttctgggatagaaagcaaaatatcaggtatggtgatgtcagggctggagaaagtccccattatcttttccctctggttctcaagggaagcaaaatgtttagtggaaggggcgtggtctaaacacccctatccacttagagacccctgacccttgcagggacttggtaggtttgaccatttgaaagcatgagttttggagactgcagtcactactcatctaataaaaaattttggaggcacatattctgaggtacacagtccatcaggccatggggtgctcagtttcctgataagacacagacctgattgtggatataaattcttttgctaattcctctgtgtctgtctcaccagggaaaaaggtggctgaggtctagggctaaggagacacttgggggactagacatgagatccacccacccaatctaaaaatatttgttcagcttttgctgcaagagagccacttttctaggttctatgattataactgccttcctgagtttatgtttcttttagcaaatggagatttatatggtttggctgtgccaccacccaaattggggcgttctcatgcccccatgctgctgttctcatggtaataaatgagttttcaggatatctgatggttttataaaaggcttttttctcttttgctcggcacttttccttcctgccaccatgtgaaaaaggatgtgtttgcttccccttccaccatgattgtcagtttcctgaggcctcctcagccctgcagaatggtgggtcaattaaacctctttcctttattaattacccggtcttgggtatgtctttattagcagcatgagaatagactaatacagacattagtcaaatcacaggaataaattcaaatttgtaatcttaacaagtgtcatgaaggagatgtacataatgctgtgagaacttttccctaggaagtttttgcaatctcagagagcaaagtagaaatatctagatgaaaagggaagggaagaacctggaaccttccagaaccttccaggcagaaggaatagcatgagcaaaggtcatattgcagaaacaatggggaacttggttgaagatgcgagtggaaagctccttggggtagaccatgtcaaccatggcaaggaacttttatctttatcctgagaggtggagtgcccttgaagtgtgtaatcagaggtggctccattag

SEQ ID NO: 868592 - DNA, 86343 bp, Mus musculus
gagtcagcagtagtggcactatctagcagaaacagccaggcctccacctgattggcataagtcagcaggacccaccaggtccaaccgagatgccaggagaagttctctgccatgcctctctcaacaaagtgaagatcagcaaaaatgaagacacgagaccaacaaagtgttgcaaaactatctatgcaagatccatcactgtctgctgagtccaaacatcacgtgtcctctcacgggtcttgtctcagtaaaatacagcatgagtatgtatcacctgacgtatctagaaacttccacttcagggttgagtctcatatttttgataaatatgctttactcaactgtgagtttatgtaattaatctttaagtcacaattatagttaggatcaggcttaccaaatgtttgaaaagttagctcttcaaagcctagctaagcttgccctagtgtgccactgattatggtacatcagttcagttgtgtgaacagtggctggtcatctcaccccaactcacacttttctctcctcccctaggtacaagtacctttaggtatactcctgaatgttcctgagaactgtcccatttaactctaccctcgagatttcatatacaggggttctttctattcgaaacccccttttgctcccgaatctgcttatttgtaaacttcagttttcaatacagagtctctatgttcaataagtcctctcttgttttaaccagcctcccttaaaacctctttcataatagctcttcataaaacttagtttcttcttggtcatactcagtgccaggtttattttgcttctttgtttttcctttctagtctccatgtttaaccatttatgtcccgattagactgtgaagtcaacgggaatggtaaccctgacagtcctcatcatcattgtctagaacagtgcctggttaaatatgtacccagaaaacatttaccgagtacatgagcggacagatgaccatacccgatgacctcattctgatgctgcagagacaggatgctgatggaaaggctccagaagctgggctacatccacgaacatcttcttttcatttaatagacctttaatcagaggcacttgatttactaattgatttcattataagccaacaatgcctacgttctgctaagaattcccagaatagctagccctaaatattattctgacaaaaaaagcatgacttcatatcttaatcacattttgtatatgcggggtattagtcagtaatgatgtacagatttctgggctgtctatgtgggtaagaagattaaacagaaagacatgagagaaacaaaattctttaggaggtgactgtgtcctttaagtccttgtgaagacagagcagttctcctaacggtaaatctacctcatgtgtctttcccttgcatctcatcttgttaggattagatgtagctgtgaaaaaaacaaccttcaaaaccctgaatttagataaactagcagtttatttttcttttctacaaaatgccagtcagtcaactaccccacccttcctctcttgactccaatttttttgctttgaaaagtagaaatggttgacattttagtggctgatgttctctcgctaattgctttagccaaataaccctgtttgcagtgtcctgcaaagttaaagaaagcttgccccatagctggatttgattggtaataaagaattgccatacaaccaatggctgggcaaaaggagctggggcaggagccttagagttgcacaggctaagatgcaggagaaggaaaggagaatctgcatgaccggggagacataggcagatttagagctggaggggggaaccatctgaaatgtagaagtaaagagtaagagctccccgaagggctgcccagaagtgtcttgggcagcaaagaccaatgggcatcacagaacgtaacagggaagcaaagttaaaattagatttagaaggtgttgacccaggagtactggagggaagagaatgatagtcctggaaggcttagaagtgcccaaccactgagctagtaaggcatgttaaaaaaacaagctaatgtgtgtgtgtgtgtgtgtgtgtgtgtgtgtgtgtgtgtgtgtgtgtgatcgtgtgatctgccgggagccaaaacagtgcagcaaaaactcctgccacatgatgttcctaaatttatctcataacccaacatggcgactactgccccaacagtgtttccacactgaaacccttaaggagaaaaaaaaggagaagggcatacctttgtaaaagcacttcctagcaggcatgcagattttctccttgcatttcttgggtcacaaatttgatttgtagctacaaggaagtctgagaattgcacctgtttactctacaaagattttcagctacaccccacaccccagttactgtttttgaaaagtgagaagaatgtagctgtacagtgtaggtgtgtgtgctgcagctccctgccttcccatcagccaactctgtcgttcctgaaagtgggctggtcatgcatccataaagtgggcttgtggggaaaacagagagcacaaatggactcagttgttactgaaagcataagagatgatatgacaaaaaaaaaaaaaaaaaagatggtctagtcggccatcactgcaaagagaggcccattggacttgcaaactttatatgccccagtacaggggaacgccagggccaaaaagggggagtgggtgggtaggggagtgggggtgggtgggtatgggggacttttggtatagcattggaaatgtaaatgagctaaatacctaataaaaatgggaaaaaaagagatgatatgactttccttggtccctctcatcaatttggaataccttcaggtaggatctaagcctagaatgttctgcagtgggaactgagggcaactacttaatgttcttttccaaagacaggcatgatgtttaactccagaataaagaaagttttttctttctccttccttccttccttccttccttccttccttccttccttccttccttccttccttccttctttctttctttctttctttctttctttctttctttttgaggaagaggtagacattaataacatgggatatcagggcactcataaaatactgcatcatagaaatagagtcaagatttaaaaaagaaaagaaaaaaaaagaaaaatttaggtgacagtgtactatcacactataaaagttaggaaattccaactgtctaatatccctgtggctatgtagatcataggtcttagaagagaaaccaatataattattctgttaagtggttatagccccccctaaaatttcttactgattctttgcaagtttcacatttaccaccctgatgagtatctggtgagagtgcagaccatgaacatggccccctgctgcagtacaaccatggactcagacagggtccttgtgggctgtctggaccacagacatcaacatgacctcaaggtggcagtacaggccacccacatcaatatgaatctaggcagcagcatggcctatagacatccacatggctacaggttgcagcagagaccacagacatctgcatggcctttggtggtagtgtggaccatggacatcaacacagtccttggctatagtaggaccacagacccagacatgtcctctggtgcagtatgggcctcaggtggcagcacaggccacccagaacagtatggcccatggtggaagtgtggcccatggacactgtgaatattaaattggcttaaggcaacagcacagaccacagatatcttcatgacctttgatggtaacactgcccacagacatcaacacagacgccagctgtagtaggtcctggaatcctacagcatggctcatggacactgatatggcctccatgaatatagtcttaaaacagctccgaaggacttactgctcttcccataaatcagagcatcattcaatccaaaccagagaagtttctcctttcagtaggtgacaactaacacagatcccccagttggtcaatgtgcagagagtaagaggatgccaagtgctcagccctaagtgggatgtccatatcaacccctctgccccaagactcctgaaagatcgggtggaagcttgagaaacccagagatgccggggcctccctattctgaagactaactggaaaacacacacttgactgatggggaaaatacctccaagttgggtaggaagggtaaggagagtgaagaggatgcttattagaggagctagagatagtggatatggtgaatatggtcaaaacacatagtagtaaattctaaaaattttgctaaatattgttaaagaaggaagaaagcatccaatgccgtgttgctactatgggacttcttttctgcctcagtggacctagatatggaagtggtgctgggtagagacaaatcttttatcctggctgatacttttttttttttttatcttttttactttgcagaaaactgaaaataaattatatttatagaagcaagaatatagctaagtggtagagcatttatcaaggatgtgcaagatcccaagttaaatccccagcatcacaaatattacatttaagtatatgaaagcattgcttaaaataaaagatatcgcaatttaaactcacaatgcataaaacatgatgagaattattaactaatatacctgcaaccaaacacacttgattgttgtggacagccctgctgctgtttgtattttgattctaattctgcttccccaagaggggctgcctggaatgaggagtgaatcactcgctactcaggtgacttcctgtggaccttccctctagtgaataaagatttctaggaaccaatcattgtgtgaggagtgggcaggacttcctggttagagaggggaagaggagaggcaggaaaaggtgacttgcttttgtacaagggagtgggggtggggaagtgtgtgtgggggggggggaaggggatggggggcgggcttggaggacaaaatgtagcaaacaagaggccccaaagtgctcagccctaatgggatgtccatcagaggattttagaatggcttataaattaggatgctagttgctgtgtccagtgattgagttacctattaattctgagctaagtttgtgtgatgttttccttcaagcggtgacacaaccgggttccagagagaaaagtacagcggcaaagtgtgggtttgcgagaagtacactccaaggggccatggagatttggaagtgtggaggtggcatagcagtgacctgctgatgggaaattagcgaaccaggatggagagatttcagagctccaggtcatgagatgagaataggccggtgccttgtcagcgatagtgtggactgctttttaatatttcacgctatacttgatttactaattgatttcattatgaagtaatgtaatgtataagttctaagaattccaaggattcttaggtctctgccctttttatcgatatagaagttaagaaatttttatgaatggctaaaggctacatgtctatgtatgtaagatttgtttggccccatgtgtgagactgtgataggcagcctattttagttgaatggggcttgctcctgcgacccaatagagaaatgtacaaaggacagaaaggcgagacacattcccagaatcgggtgtctgtccataattctgtgactatcagtcatgcagacaatgtcccaagcttctggctttctggctagactgcacccctacaggtacctgactatagccaggtatgctccgccccacagttacctggcaacagtaagatagcccatcccactataagaggggctgcttggcccctcctcgctctttttaagccctcacctttcttactctttagccctccttctctctttcccttctcttctctctctacgtggccatggccggtctctctctctaccttctctcctttctccctgcctttctacaataaagctctacaaccatagactgtctctgctcatcaaggcctgccgtgcctgaatgatgggatgggctttctcttaactagccacgtctagcctcccaccagaaggccatcctgtgctccagccacgcacctgaccaaggactcttgcctgcgtgggaaccatccagcacccctctcccctgccctctcccccttcagccctggggccaatgacccccctcccaggggcccccattctgttctcagctcttccgcggtatccagcatgggatgcccaaggctgagaacctggtacctagggctaacacttgtccaccacccgctgagatggggtcagtggcttaacacagctagactcgccccccaccccacagtcctcgtggaaaatgtgcggcagtcctcccgtgtctgcctgcccaaagcagcgaaactctggtgggacacgggcactctcccactcccctctttcccccacacccacggccccgcacccatgcagtaaattcaaaaaggctattgctttgaatggtttacattcatcctacagggactggctgctgtaagtggggagagtttgcttgagcataaggagaatgctatattctattcatctgaccatgcagcacacacatgatatttacatgttatattcgctccaggtgtttgcatctaggtaaggttctcccagaactcctttgatgccctttccattaatctgggggtgatgcagggaggcaagctgccatgaggtctgacattcacacaggtggtgttgtctctgcagggaactgaccttgtgaagattgtcccaaaccatggaaatggcctctttctgtgaaaaatggctaagcaggctgctgagattcactcaactaaagattggtctttctttgagtctgaacttattgatattcatcactagtgttacattccagctcatgttgggttagaatagattcaggaaaaaaagtattgcattttgccaggagacaataaattggtagaagccaattagaaataaggaggaaagctgagaatatcccaagtatctggaatttaaataatgtgttctttcaaactcttaaatcgttgagaaaattatattcaaaacttcaaactgaacaatagtaaaccaaataaatggaacccaactatggtagcacttatatttcattttaaatgtattgattagaaaacacagatgtcactgcaaagagaggcccagtggacttgcaaactgtatatgccccagtacaggggaaccccagggccaaaacaggggagtgggtgggtagtggattgggggggtgggtatggcggacttttgggatagcattgaaaatgtaaacgaggaaaatacctaataaaaataaaataaaatttaaaaaaaaaaagaaaacacagatgactgaaaacaaattagtgctcaacccaagaagttgggaaaggtctaacaaagcatacaaggaaatagtaaggacaagcagagagtcatcaatgaaagagagaacatcacagagaccggtgtgatgaaatgcccgctcttcatggaccaatatcaggcaagatgagagataaataaagcacaatacagggtaaacaggccggtaaggtttgctagccaaccaagccagcttaatcagagagcctcaggatcaaaatgcaggtaaaatgtgtgcatgcacctattccccaacagaccaacaaataatagaatacagaaaaaatgaaaataaatataggtaggaaaataatattatgaacagtaatttattcgtttcatggagcccttaagaagctgcgttagtttctggaaaaatataaaactggctgaaatagattttaggaatgacataactgttaaagaacctgaatgtaaccttgaactttcccataacatccctactcccttatctcaggcccagcaaatataagaaggccaccaaattctcaaggaacaaacaatgtctattttctgttgatgagaatcaaaattataaacacacagaaagctgtgctgggtcttacataaagcagttataattgttatttcaacatgagatgacatctaagtaaagaaatgaaggttcctcttttcccataaacatcagtagaaagatcctatatgaagtatggactgatggacctgtgagatgtctcagtgggtgaaggaaagactcttgccaccacgcctgatgacttgcgcatgtcctctgtaccccaaacggtggaatgaaaaaacagactgtgcaagttgttcactggcctatatacatgtggcatgggagacttgggaccacacacataaacaaataagtgcataaataaatgtaagaaaattaaaatatatgaataaaccatgtaaaaatagagcattaaaatgaataaaccacaaacaagggttaccttagaacaaaaacaacttaacgtctgaaaaaaacctgtgcctataatattaacatgttattttgttaatagttagccacattaacagactaagcagaataggtgccatacttagcaatttctaaatgtcagttgtccaactcaacacattattttgaaaacaaatgaacatttctctacactcagaaggactttgcaaagtcaatgaaggttacaccataaacctgcatcaaacaccaacaatagtagttgcacacagaggacattttacaccaagtagatcatcagagaactaagtccacatcccaggccaggcttatgttttcaaagcagaatctgaactctatagtacacctcttgaccagcattacatatcaggaaaacatattcttatataacaggtgtacatctgacatcaaacagggcagtgaaggtaccagggacattactctatcttgagtaatcaagataagagggaaagaacaaatctcctaagaaaagtgacttgtaggttttggttatgtgccatgaacccatggattatgattaactcagccctgtgagcatgaagttaagtaaaaagaagctgataagctagcaaaggttgggaaatcttcaacttttaaatcagttaagtcagctctaaggttgccaagtacagagctagctgctcatctggctgcatggtgctgacgtccacacacccactaccatgccccagtggtcgatagagcatcctcataaatacttgtagatctgtgctttttactggattttcttagtgttcaccactgccactgttagttccagcacactctgcatccaatcatctacaatgtgtgcttcaccagaaatctcctatgatgtcaagttttgtgttggtccatagataagtgttatcattttgcccaagtaaattttgtttgcttttggagacacgttttcatatagctcaggctaggttcaaacttacttcagagccaaggatattctccactttctgattttcctgcttatactatcttattgctgagattgcaggcatgtactaccaagccaagtttcctgatcaaacctaggacttccagcatgctaggcaactatactaactcataaaccacatcccagcccacaaagattttcctctatctatctatctatctatctatctatctatctatctatctatctatctatctatctatgtatgagtgtctgtcgtcacatatacccaggaatcagatcccattacacatggttgtgagccaccatgtgtctctgggatttgaactcaggacctctggaagagcagccagtgttcttaacttgtgacccatctctccagccctagatttctgtttttaactggtgttcagagaaaagagaagggtcatcactgtgttctcctaagaacaaaacaaatcaaaacacaaaaaagggaaacaaaaaaacaaaacaaaacaaaacaaaaaataacaaaaaaggtcatgtgcttttttcgaaaaggagagaaagaatatttttaaaagccaaggctttggtcttgaatcaaacattgtttgaattacagctgtggatttaaatgtgttgggcagccattgctttgtctatacagagtagaggaattgtctgcaagatggatggcaggaagaaataaaacctcatataggaagagcttggcttggtgcttagcgcacagtgtgcatgcagataaggcctcatcactgctgcctggtgtttagcacacaatgtgcatgcagataagacctccatcactgttgccttcattcatttcttcactttcacgctgcaggttcttttggtgacattgccctctgtagtatacgataacagagtgacatttctaaggcagtcctgagctgagtgcacatcccatttcatatctacaatctggagagcagtagttctcaacttccctaacacagcagccttcatttttgttgctacttcataactgtaatttgctactgttaggagttgcaatgtaaattttttggagctaggagtttgacaaagggttgtgacttgcgggttgaggctgttgctcaggagaaatgctggactcagacaggcaggttgaaatttaaacatgtgctctggtaacttaccacagggaagattaatagatatctaagcatgccttttggacagaaattattctttcagtattgatattcttgggattcaggagaaagtcggttgcattatggaagttcatgaaatcctaagcaatgcccctagacgcacattttaaaagcaaagacactggggtattggtaggagtggctgtccatccaatgaggaagcaatccatttgctttgagtctccaacttgaaatgttgtcttttttcttttggcagatacttgtttattagatcaagggattgtgggaggggatggggtggactcctagtcccttctattattgacctgctccctcatagttcattaactttgcctgggtaattattaagcaggctctgagtcccctgatgcccccgacttctctgtctttctgaaattgaccttcctgtactttcatactttatttctctgctagcaatgaatatctgccttcagtttccttctccgaaaaatggggttctgacatgccaccttcatgtccacttgagaccacttcccagtacctggtactcagctcactcctcgttcctgtttctatttgcccctcccctgaggcttagtcctatctgaacttgcttattttgcctgaccactagaatggtgcagtgctgatggggaggttgcttgcttctgctgtagtcccagtgcagagaaccccaccactacacacacagagcaaatgctccatggcagtctgttgtttcatttcttttctttctttctttctttctttctttctttctttctttctttctttctttctttctttctttctttctttctttcttccttccttccttccttccttcctccctccctccctccctccctccctcccttccttccttccttccttccttccttctttttttagacagacatttaagcattagcttccatttatgcagtgtaaatggtgagaacagccccgactgaatacccagagcatcatctcgtctgtgtcattcatgcacataacatatctcagcgaggtggcccttctgtcctctttgcagagacccagccaccatactagtacctagagaactggctggatttcagccccgatacctccgggcttttgctcatgttcgcctcatagggtcatctgggtggttgcctaaggaaaagtatgtcatggagactaacttgcttggcattgaataaaaggtgagttgagagtggagcgtgtttaaattgcaatcctgcctctatttctgtgcttgcagggaacagtcatccttaattgctatcctccatcatcatcatgattatttctggtttttctctggttgcggagaatccatactccaggtattccaatgtctcagcattgccaggcctgtctgagcgtcaggatgtaggtagtctgggctctctgccttctattcttgtccaggatactctgccaaaagaatcatgttgtggctgccacccctcccacaaagcctcccgcttgggtcagtccaggactggagttgggtatggactgttcatgtctatccactgctacgtcagggcaacacccactgagagtgaccttgtagactgcagtgggagacacccttcaaaacctctcctctcctgtcctgagagccaggttaaaaccatcagccccgcatcctgagtgcaaacttttcctaaccctgctgctaagctagacacctcacttactgagagccagcatggcagctgttgtcctggagaacggagtcctgagcagaaaactctcagactttgggcaggtaagcctgttgggcttccactgctaggagagaattggttccccacatgtgaaagcagtctgggaaatgctggtatttccagtctcctaaggctactaagaaatatgactttatttagaggcgaggaaaatgcccaggaagtcaactgatgagactagtcttaacaagttgaggatacagaaagttggggatctgagctgctaccaacatctgtgtgtctttgggtggctcattggtatcctctgcctattggctttatcttctgtacactgaaaggaaatggctggtccttagtcacctggggtgggagtccctatctctccagggatacttattcaatcctttcttctgggtatcaaaatgacaagcttgtaagaaactgtcctctttcggctttcaggaggtgatgtcgcatgaagagaatttggggggggggacttactcagaaccaaggagggagaaattaaacagagagggaaatgaacaggagttagcccggagcctgaagcaccttggggattatgctgggggtggagggaatccattgtcctccctagggagggcttgcagaacatgttcttttctgtgatatttgtactttccccagattgcaaatcatggtttgtacactgagattcagtctctggaggtaatatgccttttctagcttttccttggacaggactaaggggttgagggttgcctggagtcagagaaatttgtgttaaagaaggttgatatgagggtcgggcagatcagcccaaggattctggctctaccctattttaagctcctatattgcaggctgcacagtcccttggccatctggggagctcaagacagaaatctgggagtggggagctagggggagtggcttataaaacacttagatgtttgtgaatctacagattgttcctaccaaaaacagggacactcgaagagggtccaaacatgtcctggtataggctcagcatcagaagcagaacattttccttcaaaaaaaaaaaaaagaataccccacccccatattgtaggattaagatgaaagcaactgaacatcgactacgaatctcttactacatttcctagaacatttgaaactgctgatgtgcttttggtcaaagttggttagtttgttcaacagaatgagtcttgaagagcaggaaagacagacagcaaggcagatgctgtgcttggtatagctcactcatgggaaatccaccacacacacagtcaagacaacaggcgtgtcgtatttgcgtatgtaagctatgtactgagaagttgcttggctaggatgagggggttgcttagtgtctgtaaaattgaggtgggctgctgggatagcttagttagggcatcttctagctctgtcagtctgcaagagacgcatgtatgcattcttaggattttcaattatatttacgtgtgtgaggaggtggagcatatgcagaagacagaagacagtttggagttacctctctcctttcacagtgtgggtcctgggtattgaactcaagtcatcaggcttgatgagcaagtcctttatccactgagctctcttgccaggtctgtttacatccctttaacacgtctaacctagatgaacagtatatatttgatttaattctaataaaagggacatttcagggaggagccactgtttgttgaaggcgcataataggtcaaagctatacccacctaacaagcataagcagtctgatggagtgagtgatttaacaccttcagtcacccaatagatcaagaagcacctactgtgtgcaagtcacagcagtatttttcatttgtaaaactaatttatttcaggagataaatgataaaggaactaacagaataaaagcatcctatagcttcttatagagacaagtgttgtgaagaaaacttaggcagaggagaaggatcagggtggagctcagagctaaccagcaggagagacagggcagccggtgctcaaatctaatccgtttcctacaaccaagcaaacacagtggattactggaacatagcctcctgtgggaaaatgctgatgcggacacatatgtctacaccctgccacagagagacacatggcttaggatgattgcatcttgcttgtaatagttcttcagtgtagatgtatgcaaggggcttgtgaccacacgagcgtatatctcctgcaagctccagatcaccaatattgaccctgaaacacccttgacagagcatattgcctataaatgtgacatatgattatttccagagataatagaagagaacagtcaggatttattgctgaatgcattgctcagtgatcaaagctcttcactctatgattcctcattcttttctttgtgtaatttcttcctagacagttttggagatatttttgcttgtgtgtcaatccacatgcctgttagaatcaaataaggtatagcttctgagccaacaaaaataatctataaaagagatttgctcaagggtccgggattggctaggtaaaccttgaattcagatccaccaaagcccagagcacctcacaaactcctctgagctttctttcatgtaaagtcctttatgctttgaaaagaaggagctgttgtgtccatcgagcctatcactgggaaacagtaatgatgctgagaaagctgaacatgggttctaaaccaggctttcttacgtgttagctggattgcctaggacaaacctaggcttttcaaaacagcagcaccctctcacctctcatagcttttgtgaggactgaatggtctgttctaggttaaaccatgcaaagagtggtagtagccgctgccggtggcaacatgtatcaagagtgaaatgacatggtttagttcctgtaaataagtggatgcccattcaggggcagatcaggacagtgtcactaataacagcaacgtagggccatgttacatcataaatgtgaatttgcaggcagctgtgggaagaggtacaatttatgtacatatttattatcagtggttttgaaattttccatggttaaaattcattaacagagattttgttgatgaaggacgtgggaaaaccttgttaggataaggtcattgtgaagcacctgtagctatatgcatgtaatggcagtgagaacaacagaaaacaacctggctcttaagaatcatttctggagaattaagggccagttgcttgatattctctctgtctctgtctccctgtctctgtgtgtgtgtgtgtgtgtgtgtgtgtgtgtgtgtgtgtgtgtgagagagagagagagagagagagagagagagagagagagagagagagagagagagagagctctgggtttctattacaggaatcttcaactctgaacagccctagtcagaggtagcacatgccgatatgcaccaagaatgcctcctttttcttggaggtcaacaagacaatagtggactagaaacagggaattcctttgttgttttaaggaagccagaaaagactaagggctctctgctgtgaaaaagagactcatctgcgcgtgcctgggaggctttagaagaaagagaggcagtaccaaagtaggtcatggctcatggatagcatacatagtctaaaggcccagtttaaacactaacttcaatgttaattgtagaattaagggccagttgcttgatattctctctgtctctgtctctgtctccctgtctttgtctctctctgtctccctgtgtgtgtgtgtgtgtgtgtgtgtgtgtgagagagagagagagagagagagagagagagagagagagagagagagagagagagagaatgagagaaaaagagagagaattcatgtgaatgcagttgtaaaaatatatatgagccaaaggccaactttgagcttcatttctttggcaccttctatcatatttattgagacagttgtctcagtggtctggaacttgccacacagctagcctgaatggccagggagctccagggatccatctggatccatctcctaaatcttgggactaaaattttatgtctgagttggctctctcttttttttttattggatatttcatttatttacatttcaaatggtatcccctgtcttggttttccctcaggaaaacccctatcccaccctccctccccctgttcctgtaagggcgctcatctacccgcccacccactcccccctctctgccctggcattcccctacactggggcatagagccttgacagtaccaaggactctcttcccattgatgtctgacaaggtcatcctctgttacaaatgtggctggagccatgggtccctccatgtgtactctttggttggtggtttagttcctgggagctctgggggatctggttggttgatattgttgttcttcctatgggttgcaaaccccttccgcccctttggttctttctctaactcctccattgggaaccccatgctcagtccagtgattggctttgagatctccatctaagttatctctctaacccagttccttgggtaagttatctctctaacccagttccttgggtaagttatctctctaacccagttccttggcgtctctaagcctgaatcctgccatcaatgaaagagtggacttgttacctaataaaacccatttcctagactgctttcaaagttaaatgagattgttcaaatcaaatgaggaccttgattaaaatcaaagtcttttaaaaataatatagtgtttttctttaaaaatatttatttactttatgtgtatttatatgtgcccaagcgtgtgcaagcaggagcccatagaggtcactggaggctctagatccccagaactggagttactgatggttgttagccaccatgtagatattgggaattgaatcaaggtcctttataagggcaacaagtgctcttaaccactgagccatcccttcagcccctacacattactatttttagaagatagatgataacatagtccaggtagggacaaatgcctaatttattttgaagcgtcctataattctaacttgctgataaatttggtacttccaactttattataaggttctggaaggaaactataaatttcctgaacttaaatatttttgtcctaagagtcttcagtgttctaaagcccactcttctagaatcttcccaccattgcctcctgtccctgggatgatggaccatccacaccactaacttaattaacttgcttacaagagagtaattgatcttcacattttctactccttttgggggacatgctgtgcattggtgggtacatacagaatgtcgtgtattattttaaaatttaagaaaatgtcttggcaaactttggaatgcccacccgtattctgacttagtttgttcccttattaaaggcacccattttctgatagcttagtatctatgtgttcctgtgactcatttcagcaatgagctatcacctattgctgcacatgggacaacttgatgctttttgctaaaacacaaaaggccattaacatatgtgcaataatatttttatcatttttaaaataaccctaatattctatttaaacatatattttcttttatttccccaacacttggatattatttggccaggactaattcttactattatttcgaggtaatgaggtaaatgaagcattgagaacatgagtaaagtgatctgctcagaatggttcaggtggtaaatggatgagaaagaatagcacccaggtcttggatccatagcctacggatgtcccatttttattgctttttatattttgtctcccagtgtctttttgaggattttttttttttttttgcatcacttgctcttcctctaagaatctcctgacttcttgtacatgtgtctgatggtcagaattttagcactgaagtatgggcgtatttatcataattcaggtttatatcctttcagatatgggctagggtctggtattagggtgctcattaaaaaatgttgatttttgtcagtgactagtgacatcaatgcataatttaaggttctataaattgaaagctaacccaggagtgactcatcctctcattgttttcaacttacttatttctgatcacactgacttccctgtggaatacacgtggttcactgtgttccaaagcttaacgagcagaaaaaggttatgctcgtctcttcttgagaggttttaagagaataattgctaagctgtgaaaaacattttaaccaagtgatctaattatgtaggaaacaagttacatcgaagacaactccaatcaaaatggtgctgtatctctgatattctcactcaaagaggaagttggtgccctggccaaggtcctgcgcttatttgaggtaagtgtgtaatatatttcgatcacattcagccttcctctgatttctgcttgatctatttcttcttctctacccttaacatcaaactttgttgacttgccaggaccacagcctcaaacaaacaaacaaacaaacaaacaaacaaaaacagaacaaaacaaaacaaaagaaccaacaacaacaacaacaaaaaccaaactcccctcctctaccagcaattatatgacaatagcgcctcagctaagagtggcacttctggtctacctccactttctatagtgtagttttgcctggcttgagctccgcacaggtctcctgcctgctaccacaactgttttgagttcatatgcataattgcactgctaggtctggaaagtgctgttttgctttagtcatcgttcctttggctcttacagttgtcccggttcttctgcaatgactctggcaatttccaaggaggggtgtgatacatacgactcattgaaggttgagcatgttagtccccctttctcgaaaacttgaccagctgtgggcttctattaaccaccatctaccacaaacagaagtttatctgataatagttgagagatacactgatctgtaggcacgatagtgatacgttattaagtattggtttaatattatgtcaatttagctgaataaaagtaaggaggttctcccctcaaagcctatgacttgcagacagaccttcacaaacacatccagatgtttgttttctaggccattgcaaatccaatcaaattgataatgaagatcggccatcattatatgacattagatgcaattaacacaatatcaataacaatggcttggtactgtgtttaaaatccagagtgtttcacctgtcaggcaagtgctgtaatgctgagagacaccttcagccctatggctccatttcagacatctaaatctgctctagtaaagggagtgtatttagaacttaaaacccagttttctaaagtggtggtgatagttgtgggtaaatgaatgcctaatagcgagtagaaggcagtggggagaaaaaaaaggtgttttctgagggacaaactgctcctgaaaatgatgtttttgtaaaatactccagtgcacttgcttagcctttgtatcagggaatcacatattcttgagcagttgccccttcggactgagttagttaatggattaaataataataaatgaagaaactgttgacaatataataaacaaaccacaagcagaactggatgaagtgcacctaagaggtgtgtgtgtgcatgtttgtgcatgtttgtgtgtgtatttgtgtgtgtgtgtacattcatgcatgcatgtatgaactctccatgaattctttgatacattatccagatctcaattccttgaggatctcactgtacccatcctgcagaggaagatatggtactcagcatgctgattggttggtggaaggctgttattagtgtatattgatttttttctccaaaacaccctcagcagctatcatggaaactccccatcctggtacagcttttatacccttattaacagcctgataaaattcatagtactataactccaagtgagcaagttaatcaagaaagcaaattcttctacacatggcaccacacatatatgccaggcataaatcaggctcttgatttgatatccatgaaactcagaggtggaagccattcttttactgtatggaggagggagctgaggctccaagaaatgttgaacaattcactgaagataagtcagggaatgtgcaggcagaagtgggtttaaaaccccgaaccccaggcttccaagtccatgatctgtctgtaacactcacccttctgccaaacaaagggagcttggcagcgggaggaagaggggaagctgctgaggtcactgtgcatctgtgtgtttctatcttttattacaccatcatgttctgacaaagtttctggacataaaaagtgaaacttaaaagagtaaataacagagcaaatgaaaaaaaaagactcaactgtacaataaggcaatatgatctttaaaaaacattctagcaaattctatattgttaaaaaagcattctgacaatccattctacatctggattttggagagccatagtgcacacacagacacttgcatgaccaggaagcctgcagtggaaagacccactcaatgtggtcacactttatatttcttaaacacatttgaccatggtaccttcttttttttttaatttttttattaggtattttcctcgtttacattttcaatgctatcccaaaggtcccccatacccacccccccaatcccctacccacccactgtccctttttgaccctggtgttcccctgtactggggcatataaagtttgcaagtccaatgggcctctctttgcagtgatgaccgactaggccatcttttgatacatatgcagctaaagacaagagctcccgggtactggttagttcatattgttgttccacctatagggttgcagttccctttagctccttgggtaatttctctagctcctccataaggggccgtgtgacccatccaatagctgactgtgatcatccacttctgtgtttgctaggccccggcatagtctcacaagagtgagctatatctggtcctttcagcaaccatggtaccttcttaacatctaggtttcagtattgtggtggcttaagttttgagctctaaactatcagcaacagcatgtgtggtgtgaaagacttttcctggggagacataactcacatagacaatgcagacctcttagcacatgaaagaccaaagtaaagactgcaacaaaggaatttttgttggggtcactatatcaagtacgggggaggtgttagttacaggagcaggaaagcaggaatgatttaaaaaaaaaaaagcagtcaagccattgcataaccaagcaaaaaacatcctgggcaaatcatatgagtgacagctctcaaaacttacaatcctggagttcactgcaaaacttcctggtgatcactgttccaggataccaggctctttgcaacttagtaggtcagagcactctcctagcacagtggatgctataaacctgagggggaccttttagaatcttctgagttgtcactttccaggtcatgtgactctttgtttccctctagagtttccagagcctcctgctccctcctagatagaatctttcagtttggaaaaactgccattcagcagcctgaatttgtggcactgaggaatagaaccaaagtgaagagtctattgtttagaaccaaactcagttgatccacttgttatcgagatgggcaaaaggaagcttttaacctcttggcttagtttccttagtttcaaagtgaaggtagtggtaaaccttcaccaatagggtttccacaaaaatcaaaccaaatcatttgtgaaaactaattataacagcaactgtcatagagtaagttctcaattagcattttttttcaaaagttgttgctgtgtactgtagcctaaagaactcttaaattcttggatataggaaaacctgttgaagactgaggttcgtttggttggaaaggaaaagactctgtatgggaatgctcacctgtttgaggttgtccatggaaggaaacttctagatatttgttagtgtcaagacctcaatgagtagaaataccgggaatatacttcacatcatttacaagtgattctttaatatagaggacaatgggaggcgctcatttcaagtatcccttctgttaagttaaacccccaaagaacaacatcagagtaaaaactgtgatctaaatacacttttattttttttttcttttacagaaggtaaaaatctatattctcaatattggtctgagagggaaaagtatttcatgtggggataatcacctatctactgatacttttcttattaaatagccttataatgactctaggcttaatgagcagccccaacactcaatacttatagcatggcagtcatacaactggataattagccaactcttactaaatactcagaggactaaggagagactcacagtgatgtacagtctctagactagaatgcgaagggtcagactagatcaccttgtcctctggcctgctgaaagtggacactttcttgacttggctgctagtagaacatactaaagcatgcaggcatctcagagaaagaaaggcctgtagtatgtgtgtaggcccctcttggattagtcaggattacgtaccttccattcaacttcaaagccaccacctcataaaggaaccaattttttttctctttgggcttgtagacttcagctggtaactacatcagaatgcataccaatgtagcccatatttatttgtttttgtttcattttccagtaatttatttttattagctttgcatcctgatcatagcctcctctctcctcagtcccacttttacaaatcccttccccccaatacccctgcccttctcctcagagatagggagcccccccttgggtaccatcctatccgggacataaagtctcagcgggactctgcacatcctctctcactgaggcccaaccaggaagtccaggtcgggagaagggaatccaatggctgggaataagcaaagaaacagatccacaaaaacccgagttgtgcgaggtcatctcagtcattctccagcagcctcatctagactgtttaatcggtggcatcgaagagcttcaggacaagcaagttgccaacatctggagaggctcagctggatattgcttctgaatttatactccactttcgtggatatgattcatcttttagaaacaattgaaaggaaactgactacatttattacgcagatttcctgtgccctactctcgtccagggaacacactcctgccacccctccactgttggatgtagattctgctgttaggttctatagagacgatggagtcactgaagtgagctagtcatccctccttggtggctatagcacttagactccttgctaccaggcaatacaaatagagttatcattgttaacttgtgttacgaaagctgttgttacttgctttataggattttattggatgattgtgctataatccatttaaccattccccagctgagagtgtttaattagatgacaaaatttggttgaaagactttgtgaatttttttccctgagttagatttccagtattataacaaatgaagtcattctgtataaactgttgttttgtggttattcccaaagcaaggagctggtactgcttccgcttcttctcttctccccctcttcctcctcttctttttcctcctcctcttcctcctctttctcccccatctcttcctcttcctcctccttttcctcttattctcccctcctccttccccatcttctcttcctttctcttctccttttgttttttattgggatggtgtctcattagatagctttagctgtcctggggctcatgtagagcaggttggcttcatacagaggcctcctgcctctacctccctagtatgctaccacttctggagtacaaagagcttcttggagaaagtggctacttccagggatgtcttatgggtgggtggtcaagttgtcctaaagtgtggtttgccttctggcatgtcttctaccatgtgcacacacatcttctctcttctgtccttgtaccttctcaaacggttagacaaatacatgagctcaccttgcttcttggctttactgtatccctttctctgatttttgccacatacataaactttcttgccattatttattaatttttatcatgcagtatattttgatcacatttccccatcccctcatgcctcgcagaccctccccactttgctctatacagcatagaccttggttgcctcttaaattttaacagaagtcaataggggaggggatgtgaccccaggaagggttcacaaattctctttcttcctaagccaagaagcatgaccttgctttttgctttgtttaggaaatgacctctgtttgctcatagtagcttttgagttccagctgtctctctggtcctccctctgcagtatttctctgtcctgcttggggttttgatgtttcccacaccagatcagggttctctttgtctgcagatcaggatatagctctcagctgctgttccagcatatgctgccaaacctctgaaactataagcaagcttctaatttaaatgctttcttttataagagttgcattggtcatgatgtctgtcttagtcagggtttctattcctgcacaaacatcatgaccaagaagcaagttagggaggaaagggtttattcagcttacatttccatattgctgttcatcaccaaaggatgcaggactggaactcaagcaggtcaggaagcaggagctgatgcagaggccatggagggatgttccttactagcttgcctctcctggcctcctcagcctgctctcttatcgaaccaagactaccagccccgagatcgtcccacccacaaggggcctttcccccttgatcactaattgagaaaatgccttacagctggatctcatggaggcatttcctcaactgaagctcctttctctgtgataactccagctgtgtcaagttgacacaaaactagccagtacaatgtctcttcatagtaatagaacagtgactaagacccacaatcatacacatatgcacagaatcatttaagggaagctgtaaccagtggtaaaatcctggggcctcaggggacacaaagaagtctcggcagaaagagagcatgtgtcaggttcattactctgttccttgtacccagagattctgatgcttttgtgtttgatgtcatattaatgataatgaaaaaaaatcaacattttaagagagcttactgtatccctggaagagaaggcagtgtttacaaaagaaaaatgactttgctgtgaatcatgtgctttcttcctctgttcttcacaacagagctttttcatctatgattttattgtttctcttcctcaatttcctcaaaggccaaaaagaagggcccataaatgaccttcataggtggtatttgagaggaggagctatcaccattgtagtgacatatgttctcctcagcattgcattgtttataactggacatacactgcttcaaccacaaaaagggtgaattttattttaagttttggatctattcaagttcctgcacctgcagtacaagctttgtccatttgaatattggtatttatttttttaagttatgaattcatgatgtgtcctggttttctacttagtgaacactaacatagctgtactggtggaatcagtcatagtgtaaagcatatgttttttaaagtatttttaaatttgggagcccatgtaagtgattctatatgtaggtgtttgtgtgtgtgtcttagtcattgttatttggcatgaagagacaccatgacaaatgcagctcttatgaaagaaagcatttagttagaagcttgcataaagtttcagaggtttggtctaatatcatcatggcagggaacatgacagcatatgctggatcagtagctgacagctacatcctgaaatgaaggcccagagggagaacctgggcctggtgtcggcttttgaaacatcaaagcttaaaaattgtttgtgtgaagatatttaaaaatagacaaggatagtattatcataaaaaataatacacagtagaattaatatcaatctatacacaagtattactgatcagaaaatagaatataggttctctcatggagggtagaacagatgatgttgcccctttgagagcagcggggtaagtaagatacagaaactttaaggggtgaatactttctggttcaccatggaggccccaaggcatttaatttgggaaatcatctaggtaatcagggacaagcatgcagacaatgtcagtcattgcttctagtggcaaagcatatgaggaaagtcacttgccagtcactaaaacactggttgtagaaatcaaggcacgtctagatagtgtactctagcaagtgctgaaaaattgtataatgggtccgctggcagattgaatctgcaggtaaaggcattttctgccaagtctgatgacttgtttttatctctgagatccacagctatggtagatgtggctaatgacaaataagaagtatttgttcatctctctagctttgctatagatttttttctttttttaattcaaagaagaaactctagggagatttttgtgtatgtgctggccccttaggaattctgaattctcactcagctgcacagtgtttctaaacagacgatgaaatgggacctactgatccctttcccattttgttatctacaaattcctctcatagtccttatcattttactctttgaggtcattacatgaaatatcagcctgtgactcctgacgctgtcacacttgccaccatagttacacccactatcatatgggatttcagaagcaactttgcggcagaacttagtggttctgccaggtctacaagggttattctcaacatggatgacagattgatcattctaataccatgagatccggttttctgtctgctcaaaacttcataaggacccctaaaagtttcagaatcaaggccagatccattcaaataatttgtctagctgtccttcatcttttgtggctattccaacttatcagacttcttttattacttcttctaggacaatcccatccaccattcccatggggtcatcctgtctgttaactcctttagaatgtgcatatggtttgctttttcaagaagacctcatgtgcagatcctcttaaatactagactgtatcctaatgctaccccagggcagctcatccattttgtctgtcctgccttgtatttatttttatcccctgacattataaaataatacttaagttaattgctttttatggctgctgtctttattacctcaacttgaatgtaaactttagaaagaaaaaaacatctaggtctgagttgtgattggcatttagtgaatactgcatatgtatttatataggttatatatgtatatgtacatgcattttcaaatataatacaaataatataccttacatagttatataacatatgatgatattaatagtagttctacaaattatgttgcagagtgtatgtatgtattaatttgtccaagacccccaaagagctcatggtgcagttattaatgagaccacccatgtgtagatggggaaactgaggctatgcagaagcatgaaaataaaatagctagcatttcatagatgatacaatttagagattatgaatgcagagcctgtgccctggggattatattcaagcaaaacaatgttgtgtctatatgatttattgatttctgtggcatttcattgggtggaagggagactttcccatgccatacctttacaaccattgtcttagacatttgatccaaacccaagccttacacaggcaactgtaggctggtattagatttctgtgtgattaagtttggatgcacttgactcattcttcctatctcttgtcaattggcgcttggttttgcagaaggtaaaacagagtctaaatatttaagggtttccttattctcatgtaatacaaaatgtttttaaaccctgctcttcaactctagttgttctggctctgtatatttggactgtggtaataatgaacaccagactcccacacctataattttctctttcaggagaatgagatcaacctgacacacattgaatccagaccttcccgtttaaacaaagatgagtatgagtttttcacctatctggataagcgtagcaagcccgtcctgggcagcatcatcaagagcctgaggaacgacattggtgccactgtccatgagctttcccgagacaaggaaaagaacacaggtgagagtctgaagaatctcgtgacctaaacaataccacactgtcttcatttaataatagcatacataacaacgtgggcataatggagaggaactaagctaaggacctagacaaaggcctagcataacaggtacatagtcatctctttccctcttcctcagggtagctgtttcttacactcactgaatatgtttaaaaggcaagatattgtggagcccagagtgatctcaagctcattaagtaaccaaggttgctcttgaacttctgatcgttctgctggtggtaagatgaagtaccatgacaaaaagcaatgtaggggagaaaagatttatttcagcttatggttgcaggttactgtccatcattgtggaggaagttaaggtgacagaagcatgaagcaatgatttacaaagaattcagtcaagaacagagagaaaataagtgcatgcatgcctagtgattagcttacttttctctactcttatacaagccaggatccaaacctaagggatggtgccgcccacatttaggatggttttttttccacatcagttaatataaccagaacaatctctcccccaaagacatgcccatgggccaacctgatctagacaattcttcagtgagactctttcccagtgtgagtgaagttgataattaaccatcatgttcagtgtggtttctagatgaatgcaaagtaaaaacaatatgctctgttatctctaccccaacaaaagagtgttctctagcatattgtagggactggctcaatggtaatatggggttgctatacttaggtgtagcctatgaagaatatggacaagcaagatgcttgatggtattttattttaggatgaaaggcatattcatatgaacaattttgaatagaattcatttttaattttagagaaaaatgaaaaaatgtacagagaatttttctgtattgtactccccttgttaccaatctgcattcatacagcacatttaaaaattaattgggggccctgtgatccatccaatagctgactgtaagcatccacttctgtgtttactaggccccggcatagcctcacaagagacagctatatcagggtcctttcagcaaaatcttgctagtgtatgcaatggtgtcagcgtttggaggggtctgcaaccctataggtggaacaacaatatgaactaaccagtacccccggagcttgtgtctctagctgcatgtgtatcagaagatggcctagttggccatcattggaaagagaggccccttggtcttgcaaactttatatgcctcagtacaggggaaagccagggccaagaagtgggagtgggtgggtaggggagtgagggtcggtatatgggggactttggggatagcattggaaatgtaaatgaagaaaatacctaataaataaaaaaataattgatgggccagtagtgattgatttattactaggaagtaaagtccaatggtcacactcaaaacctgctttgtgttgtcgacttttattggttttaaccaatgtatggtggctctgtgtctgccaccaccgtggcatacagcttagtgccagcgtcttaaaattgcctgtagtccacccctccttcacacctcctttctcttatttacagtcctgtagttttgccttttccagaagcaacattttagatgggcttggctcacgcttgactttatatatcatttcatttttactcttgaataatatcctaatgtattaccttaaccccagattgcctattcacttattttaatggcatcttggttgactccaatttgggattatgatgaacgagcatattataaaaacattcatgtataggttttcaatgcattttggtagacacttaagagcatgcttgttgagatgaacctaatttcaatgaactccttttctatcccaggatctaaagtagctttcccaaacaccaaatgctttgggtagagaacacactgttgctgaattagtgcccaggtacagatactaagcattagtaagacagaagaaacaagtctgggtgttctgctgtagaaaaggatgactccaggtaacaataatgtgctctactctttaagtaaaaaaatgggagaaaccgttttaaacatttgaccaagtgatcactggttgaggaggataagtatgattattccaatttggacattataaaatttacatatatatggaaaatattacattgtaccatctgagttatccacccattccttcctctctttgttcagggtatcaaactcgtatctttgagtgtgatacagaatcggtacagttcttatgtgccaatgaaaagttatttataaaaatttcacttaaaaagcagagactctttaaaataagacaaaatgcaccttgtagaacgggcaacagaaatggctcccgaaaggtagctctaagactctctaaagatgtcttctcaccctcattagctagtttatcatttaaatctctgcctacttttcggcattttttacagtgctccacccatggacatgcctggtctatgaaaataaaaaaagtttatcaaaaaaaaaaaaaagatgtcttctctatcttcatctctcagatatagctccccaattctggcctgcccttgcccagagtgatcatataggctcaggtcttgagagggaccttgtaattcctcttgttcagacttctttgcctcctccatcttcttcccaagctgatggctttcctctcctgcttttcaggccacctgctcccagtaggaatttcgggccctctggacaaagaaagggcctgcagggtcctggggcaagctctgcttttggttggagcaggtggagtctgagccagctgggctctggagttggaaatcaaagcaattgacaggcaggcaggcaggcaggcaggcaggcgccacttggagagctaggaagatgtatgtaggccagctggagggctgcatgcagcctgagctggaagttccaagaggaggttcttggagaggatctagagaattaatttagagcccagtttcttgaatcgaaacatagcacacttggtgtgactttagacaaattgctgaggctgatgatctcaagctgcatccagcagaagaaacaagagttcctggcattatggggctaatggaatcacatcagcagccactggaaatagagcagaggatgttgaggggcttcataagtgttctatattcttgccattattatgagttatgagaaaaggcacaactactggagttccagcaatccagcttgtacaaatactttcttcatacaattcagaagtgggaatatgatctcggaggtcatgtggccctactgactactacattttacatagcgcaaatagaggttgtgacttgggtttaaggcagggtaaaatctgtatagtcatgggccagagtatgttaagtcctaactgatgtctgttagatactgtgttaggagctggaggaaaaaaaagtaagtggagtgcttgttcctaagtagctcacagtctggcaaagggcgcaagacacctaggtagacacagaaaaaggactgttgttggaaggaggaaaatgctctatcatgtaactctcaagattagcagtgagaaagtaaaacaagctcatgttttgttacggaggtatcctgcaatcactgctgaacttcttacacactaaaaattgcgtgaacttaatgccttaggaggctgctcacctccttgctcacatggcagggtgctaatgtttgaaataagtgtgagtgtgcaaatgtgtgtgtgtatgtgtgggtaaaatggggatggcaattgtatgtagcaaagaaagagccagtagtatttgaaacctattttgtgatcctactgctttgtaacctctacttcttggagcagctggtcactcacccatagggctagtcccacctagactgaacttatctatgactcaacagctgctagggatatggcagatgctgaggtgacacctgctgagagagactggccatcaggactccagtggtaaatttgcagagaggactctgggtccggaagtagggattttgaaagaaaagcaagcatgactgtatagtcgctcttttctgtcagcctcactcggggaatgagaagaggaagaaagctgaggaggagattggaacctttgattctttctctggacaaaatgccctttttaatgaggggctcagatctcaggggcaagtctgacagcaggttcaagtgagagacctgaacccctcaaatcaattaagctaaaccactttgcactctggtctccaaagcattcaaacagaggcgtgggtgatagaaaatgaaagtttctcagtttcttaattgctaatgtgccccacccaaaacagcttgggggaaggttaattatggtgacaggttaaagaaacccaacctcctcaaacgcctcctggagaagctgatgggaacttaataggattttaatccagagagccttttgaatacttagtctattctcctgccgccttctctcctgatgacctcaaatccttcttcaacccaacatgaaagagcattaatatcagccatcgatccatctactaatccgtttactttccctttgaatctcctgcatgacattgcatttagtggggggtggaaaatacctacatggagacagactgcagccagggcaagcagacaccaacacagtgtcttaggtagttagaggttaggggcatggccttttgagagactttcctttttgttgatgtttctgaaaagtaaacggacaccttttagactttctccaaatggggattgtttaacaggatactgtgtggaaacagtaaacccagattcccattactttgtattatattctgtgcaaacaggaagattgactgatatctgtctatctatctatctatctatctatctatctatctatctatctatcatctctctcattcattcacatgttttcccatgtgtctgtgtatatatgcacaagaacacatgtttatatatatatatgtgtgtgtgtgtgtgtgtgtatgtatcatatatctgtctgattatcttgtctgtctgtctatcctatctatctatctatctatctatctatctatctatctatctatctattaaccatctaaccatttacctgttttaccatcagactacttatatacataagtacatatatgtgtatatctgtatatatcgtctatctatatatctatcaatccatcatttgtttatctatttatctatcctctattgtctatctatctatctatctatccatctatccatctatcatctatctatctatctatctatctatctatctatctatcaaccatctatctatctctatactatcgcttatttatctgcctagcatagagttgatattactgatagaagacagacgaatcattattacacacatttcttgcctctaagctcaatcccctacaggtttctcttttcttcttcaatatccccgctctgcagagccatactgagtaagacagatgtttgacattcatttaggatttctgtgatcagtggtaggatcccataaaaggctctgacctgcctctcccaagacttggcaaagtggtgcacatgtgtgcacgcctatttgcttttaaaacaagaacacttttcaaagaagtcatggttcctaagagtctttagccaaaagctgcttaaggctgagtagtccagatggttgaagtttcttcagtctcaccacctgcatctttattttttttctattgctttctctgtctgtgtattctgtttctaactcctccttcccttgtcaattaaaactttcccctatacatttggctttgccctgtgtgtggctttcacaggcacaactgttagatgctcatggtcctgtatctgcaggagatggcatatctttggatttgtggaaactcacggttgtatcactgttttaagtctttgtttagatgctccctgaatgctatattgctctccttaagcctcttgcatctcatttgaaatgtgaagatatttggtgctaatgtgattgtgtggattacatgatataattttgatagaggctgtcacgcagggcctatattgtcagtaaattaatacacgagccttttaacaagatacacaatgattttcactgatgttcaggtccagagtccccaaacttacagtctttgttaaatagagggcagtaccacatgctatttgggctaagactgagattgtgaaagttagagggaacagaccgagaatgtcttttctccatgtgacacggatgtttcgaaaatgattgtaactaaatgccaacttgtcattcatactggcccaaggggaaccccatagtgacccagaaagagcaataatttaaaagtcaagggccagtgcttacttctctactttctacatggccacttgtcccctttcaatggtcaatcccaccagccttttcttcttcatctgagagacataactaagacccactgtgctacttcctatacttcatggacaagatcgtggaagaggctctaatcttggggtgtaaaatgattgaactgaacgtgatccagatgaatgggaccttagtctctgacacatctgggcctccatagagagatgtggctgtcatccacaacttcagccaacatcaggccatgtgttaccaccagcaccatgggtgtgggtccaggatagcgatgcagagggaattggtggcaaccttccccacattagggttgacattatctatcagtcatcaggggtttaacagtaggagggaaagcaggtgtgatgcccaccctggtgcagagtcattgttgtatgatgtgacatatggcaatgatggggagacacggtatttctgaggagtatccttttgcgtacactgaactcagtctctggtccaacaggtgggaggagaggaagacttggggttagataaggcattacatgtattatgtttgacctgacataggccagttgaacataacacaggttgtgagagatatatcagcttatctcagatcctgtaagtatttagaaggcagaattggatgctatgggaatataatgggtaacctgccactatgtacctgtaagagacatgtagtatatttgaggctggagagatggttcatagtttaaaacacatagtactctttctgaggatgggaattgggtgcccagccaccaagtgccatggctcacaactttctgtaacccccatctctaaggggccccaatgacctggcctcctctggctatagcactcgtatgcacatgcctcctctggttaaaaataaagtaaatcttaaaaaaatggagacacgtgactcattggaagggtcagtgggagagtagctctaactttaaaggaccctacagattttattatttatttataatttcaatgtttcactgaaattcctagtcttcgctcatttctatttgtgattctaagaatcggattaggaaatagaggctgtgtgcttcgccaggatcccatcatgtcagatactgctatgtccaggatgcagagtgtgttagcttatcctaccggccaagctttggctcctttactcttgccaagaccttgatggtggtttttctggccctagaaacagacatagaagtaagttctttaaaggaagaataagaccttgcaggtcttcacctgcaacatcgggcagccatgccctctcccttcgcaatggctcctggaactcacacagtagctgcttcagtaggaggctggggccatggcctcggaggagacacgggggagcctagagttggggtgaaaatatccttctgttctgggtctctgtgtcggaggatttattgctcttcctgagacaggctggccaccatcctgggtgccttgttgactcagccccggggctggtgaacatctgatggaggacgagagttagattgggatctgtctgccttgaactactgtggatttaatggactctaactgacccacgaagcaggaagtcagctcttgggagccttttctttgggagcactctggagccagcggtcccctcgacgtctgggtagaacagttgaccctgacttaatgggaccgcaacgtgggtgtccaggggcctgctctctggcaggctgcttcctttggagccaaatcaatatttattaatgatctgcaccccctcccgggtgccactggcttcacagagagcttctgttgcaccagccggctcggtaattcattaaccccaagcccagcgcctctggaggggcttgcagagcctgacccaccactggggtatttggcaaggtcattaatgagctaatctgatttaagttttcaaaatgaaggcctgggtcactggggtcagtgcctcttctcagcattgtgagtgagacccctgtgtatggggagggtggggtgggggtggggctgaaaccctactgagaagaaagtgtacagagaagaaggtaggttttatggtatccaggaaggtccggatggaagacagaaaggaattcttcaaggccctgtcgggtcctgctttagctcatcaaaagaaaaaaaaaaaggtaattagaacctttttggctgacaaattggtcaagcctacgggctgcggggcgcaaaagtgggcttcagctgggccaccagcagcttaaatcaccatatttacttagccacaagcacctgtggactttgctatgaggttcaaacacaatggctggcgatagagccacctgttacaggttcattgcttcccataccaaagaaggagacggatagttggttttattctctcataaattttacggaggaaaatccagactcttgggggagcaaggcactcgctcagactcacatggattatgcttaggaagatatccttgggcatggagagacctgctggcttcccgtcttgggtgttcacccttccctgtgtggtgtctaggcagagatgtgtttggagctgagtgcgaaaggtgctttctctgggctccatacttttaatttagggggtccccagactgcttgtttcttcagactctgaagagaaatgaagtcatgtgcccctgtccattcttacccctatactgggtccttgtctccacggggtctcttttcccaagactcctgctttattccaaggtgagagcctgcaaacgtttaatggacctgggttcttctattccataggacacaggttgctggccagggctgaggaggaggaggagaaggaagaggaggaggaggaggaggaggaggagagttgaggtagggctgggaagctgccaacagtgaatcccaggccttttttttttggccttctaatagcagcaagaatcataatatgatgaaatattttaaaatcccttactatgtgttaaacactgctgtaagacttctttatgggcttgtacatagctcatcattttaatctctcttgtatgtgtgcacacccagtgtgcagtgtgtacatgtcccagcataagtgtggagctcctaggacgacctctggtactggtcccctccttctactttgaaacagtatctctttgtttcatctgagagctactggtgagtctcctgtccccacctccgattttgcaacaggaaccttgagatcacaggcgcttgactggctctccatggagttcgtgagtgtgaatccaggttctcacgtttgctaggaaggtgctttatgcactgaatcatctccccaccccaccccacccccccgaggtcatcttgaccctcactaactctgagagacatatgatttttatgatcattttttcaaacgcgacacttcggaaccaccgagagagaaagcaaatcgcataaagtccaaaagctgtgaactagctttcaacacaaaacatgaaatgccttttatttttcctgcattgctttgtgctctggacatttctgtttgatagtgaggcttgaaggtcatcagaggccgctgcacctgggtagacaaaaatgccccttccttataaagaggccttgtggtctcccgtagtctctagaccaggccctgatctcaaatgccaggggcctaccaaccaggctgttgagttgtttatgtcttgaactctttgtaattttttcaatgataattatttaattaactaagtcatttcttttctactaagaggcctgaactaagctatatgagcccaaatagattgtttttgctctgagggaagaacttgtcagagctgggactagctgtctttgttgccctctggggttcaattgggagatagcacagctcagtctgaggaggagatgctgtggacagtaacttgagggctgaaaatgtagggactctactcccagaagataaatccctgttgactgcggtgaaagcctcttttcacaggtcctctgggccacctctcacagcattccacacatctcagaacacaaaactcacccaggacctcagcaaaaagtaaacacaacacgcatgtcttatgaggggaaactgaggcacagtatttagaggggtgttaatacccggactggatgaagaaacagttcttcactccaaactctggttctcctctttctttcattgctgccagaattattaaatctattgtcatgacaaacatggatcgaccacgatctgtgtgctgaccatcgggactaagatgtgtcctgtctgctgtagcattcagttcatctagcagcaaagaaagatgatttgaatctgttttgtggatccagaagtcaaattacaactgtgtatataattatattacaaaggaaatggcatgtttattagcttttctagaagttttactctgctttttgtgtgacgaagaacccaactccctctccctttccctccccctcccctctctttccttctccccttctccttcccttccccactctctccttctgtgagtgtgtgtgtgtgtgtgtgtgtgtgtgtacatatgtgacaatatatgcaatcaggcccatataaaggtgttacagacaacagtggaccccatatattgcttagtgatagtgacggatgagcttgcatgaatattgtctgaatctctctctctctctctctctctctctctctctctctctctctctctctctcctctctctctctctctctctctctctctgtgtgtttacaattgaccaagttatgaaccataacttttcatcaaaagcatatatattgactcatttaattgttcgtatgaaggtatgctctgtggctgttctcccatgaacattttacagaagaaatactgagtcccaagaggcatcactactcctctggtcccttcaatgaaaagagcagagcacagtctggcctcactgtggggctctttgccattgctagaccgactgtactcagaagacacaggaaaacagtgaagcaggcacaaacttccactcttccagatccctctgggctccagcagagtaggactgagtctctagcatctcaaggaacaggaggcatagatatctttacatagcatcctatgactcacagaatagggaagagatgaccagtgttggtgagggagtggaaaaagagaatccttgtacacgattgagtggacagtgcactggtttggtttaatgggacccagtatgtcattgcccctcatattaaattagaacagcatgtgacccagctataccacctaaagttatacattcaaagaacatgaaatcagtatcttaaaagcacaccagaacttccttgtttactgtggagaaatctccataggtatatgagtagatacagaaaatggtgtgtgtgtgtgtgtgtgtgtgtgtgtgtgtgtgtgtgtgtaaatggaatatcatccagccatggtaggtgactttctatttgctgcaatatgaatgggggcctttgcgaaggaaaatcagctcatcgtaggaaaacaaatacttcggggcctttcttatacaaggagtccagaaagtcaaattcacaggggcagagaatggctctttccaggtgctgggggcagagaaatcaggagatattggtcaaatggtacaaagtttaagttgtatgataaataagctctggagatctaacatgaaaaaaaaataatacagtgtatacttgaagttgatgagagacattttgtatcctacacacacacacacacacacacacacacacacacacacgcacacgcacacgcacatggacccacacatatatctgtatatatgcatgttcacagatgtagacatgcatacatgtacatacatgtacatacatctgcatgtgcacacacacagtggtaaccatatgaagcaatggatgaattcattaacctgactgtggtaatcatttcacaatgcagatgtatatagaatgattattgttaaatacatacatatacgtgttttgtttcttaactatacctcaactaagctggagaattttaaaaagaaattaatgcaatagcatacccatgacttccatcttctggctccattttcttctttggaagcttctggtgatgtgtatttgtggtttcgctattgcttgttttgtgctgccctcatagaatgtaatcacctcagagtagcccagtgttgccccctctcatgcccagggtatggactgcatgggtgctgaatgcatgctgggatgctggggagcctgagtgtctggggagggcactgtgacagacaaaaaagtttagcttgggctcctgctgacactggtgctgcctgacctgcaagcgactctcaggcaattagtaagcaatcagcaacaaaggataatgggaactgagaggatggggctgttaattgtgctcagtgtaggggagaagggcaggtctcattgtccagaccaggaccattcagagaggccctttggttgtaacacctggagagacaggtgaggtctcatgggagacctggccttttcttggcacttctgatattacaagaaaacagacaccagtgtcaatgcaagagtttcaatacaccaggaaaatgctgggctcgaggagaaagggctgcttcgggcaaagcttaggggacagggctggaaagcagttctcatcgctgtggggggggggggtccctgtaaagagaaatgattcttgtggggcaggaaggaaatctagttcaatatgacctagttagctggtgttggttcaaacttctagatctgattccggtccgtttatatttttaggcatttaagaacagtagtagtatttttggaaaagattttctggtaacattgatctcaatgccatccatgtgtgcagtagagcttaaggtagtttaagggcctggggggagaatcaggtgtggcttctgacatgtccccaagggatggtttcaattcagtgagagacaatgcttaagctaaaggtctagagaggaagggtctgggacaaactatagtctggtggactcaggcgtgcctggccctacagatagcacaaatcactaggctgttaattgcattcactcccagctctctgggtggaaagcaggtatacacatccctttcattgacaaggtacgtctccatgtgtagcattcttggtttccctagggcacgagaaccttgtgccccctatacatggtgggtaggaggaatgcatttttgaatagagactccaaagttccagtagtcaggagtaagaagttttctttctagacttttctcccttctctctacagttctactctaaagtagggaaaaaaaatgtgaccttcctcatggtgccttggtgagagtgggaggaggcagcttccttgaggaccacatccgtcatgtaagcgcctatgctaagagagcatctgttgtcaccactcaaagggatgcagacaagtgacctgcgctttaaagtcatgaaaaccccagtgtgagaaactaaagagccagtcaggcttgagagccagtgctgtcgatcaggtggccctcttgctgcccccatgtgacagatggattgagatcaagacccaggggccagcatggaggcagctggatgtgaatcctggctccatcattcactagcagtgcatgcacatgtgcttatgtgtgcatgtgcgttcaggcaggcatgtgtccatgtgccttgcaattatgtatgtatattgtctgtgacctacggaactctggaattgagttatccctgacataagccagaaataaggggctggtttcggggataagttcctcagccaaaggagagacacacttaaaaaacctgttgataactagggtgctttgcagtcacaaagcgtttgagcactcctgtctgtgcctttgttatactgatatccaaacagttcaccatataaagaatatttagagcggcacctgcatttttctgcattgctgatgtgggaattgtagagcttgggcagcttggatccacaaaaaccaggctctgacttcatttgatgagcacagttggggaagttttagggaaatccttgctgagacgcctgcttagagctccagggagcatttcctcgacttggccactagatggcagtagtgctctttctcatcccacttgagccagtagatggcggaaccttaccttgggctgtacccattacttccttctgtccttcctcacagcaacctcgggattaaaggacaaactccatctcaaatgtaaccccagtacctagcacatggtaatgcttcagaaaacatcagctgcccttccttttgttaccgtttccattttcgcagagaagggagtggacacagagtcaccgatcttctggcgctaggctggggctgcttgcaaattcaacattgggccctccggcctcctttcagggttaatagccactgccttggctcactaaaaagaaccctgccatgtctatctgctcctaagattctagccctgtcttagtccccgtttgatcttaagccaattattttgactctcagatttttaaatccttgctttttcatctgtataatagaggctgtaatatcttccttacctaaggaaggactgcagaaacagaaactaggtcagagtagagactgtgaatggtggttgctattgttaaaaccttgtatgttaatataaccagagacctaccattttttttgatcttcccttcaacctttccacagccactcagccctcatggctctttccctcaaaggacctagagttcacactttcctggtctctgttcatacacagaggcacttggacccagtacatctcttataaggctcgaggatttggatagtgtcatcttctctttgctgtgatcgctctctaggaaggacaccatcattgcagacacaaaactcacgtaccttgcccttccccatggtgttactttggaaagcaagctccaagtgacctgactctgtcaaattgactttgagatcaaaaggtttttataggggatgcccaaggtactgaggagggagtcacgagctacagagttggtgtctgaagactcatctttctcttcttaacttctgtctaatttatatttggggctatgtatcatttgttttgctgctaaagaaaatctttgttgacgctactataaagggtgggcaggggatgaatttgagacagttcgtgaaaactttcaggcgtgagatggagctgggtgtgggctctgcttcagtcagagttccaaaggtctaatattccagggtgcagaatttgcctttgtcctgtgctcagtggacagggaaagagtcctttagttgcagtaaaggactgggtagaagaccctcctcgttccttaatctctgagacagagggtcccaaagaacagcctaggccaaggttcagtctaagtctggtggcctctttgggttgtgttttaaaatcagtttcccaagaaactggaaatggaatttaagagctatgcagagccttgtttactgtcaccatcaacatgactgatcagggctcagagaggctgctagccatgtgtcctacagcctgcactcagaacttgtccttttctgtgttacagtgccctggttcccaaggaccattcaggagctggacagattcgccaatcagattctcagctatggagccgaactggatgcagaccacccagtgagtccaggactctgaagagtcttccacccttctctccaccttctctccatcttctcttcctctcccctcctcccacaccttcagcttggagcaatgtgtttgtttattcagttacaagaatgctactgagctcctgcagaagccaggactgggaaagcaaagattaacgagacctcactgtcgtcattgcttcggtcattgctgttagagtgactgtgaaccgctgcccagaaaatgctatccctatacagtcgtgtgtatttacttttctgcctttgtacgttttatgggcatttaaatcaagcacagccaggggacagggagagaggtgacattgtaccttcagagagccgagaagaaggttctagtcagatgagggaagtgggggcagtgggggtggttgggtatttggctgagagactcacatctgctttgaagagttaggccagtggtgaaggtgggtgggtggtaccttgggtatgacatcatcgagagagccagctgacacaggggttgggtcagactttcaaaagtcttatacaccagagtgagtggtggcgaagttcactgtgccctgagtcctgtggcagagggcatggatttttgctgttttgtttcgtcttttaatgggttctcactagaagaatggatcaggattggtgtgtgtgtgtgtgtgtgtgtgtgaaagagagagagacacacacacacacacacacacacacacagagagagagagagagagagagagagagagagagagagagagagaggatcttcttattccttgttcttggggccaatggtccttggaagtgaacagcttaggccaagctcagggcggtctagtagcttctgtgggtgggcagtgtgttattatgaccttaggttctccgctctctgccaggcagtggactctctggcctttaataagctgtttttatgaacaaggttttagtgtagctggtgctagggtatgtctgcgtctattcagcgtctcttcactaccttgtgaggtccaacagctaacaggaggcttgctcttcccagaggcagtttcccataagcaggttgactctgtctgggagagtcgccctatactcaagttcccatgtatgcacatatgcatgtctacctggtgctgtcacttaccaggtattgccagccacaaacccatcttcactgtttcaccgagtgtcagtctctgcctcacatctttgtaaagactcacaatggctttcctgaaccttagttgtgatgttagaataaattatcttacaataaggatggaagtgtttgtaggcatcctatgtaagcctggcatacattgtctcacaggcatggtggtgagcactggtgagactcaggcaggaggctcctgaattctaagacagcctgggctatgtagtaagactctaaagccaaaccaaaccaaagcaaagcaaagcaaagcagaccaaaccagagcagaccaaaactaggtcaaaccaaatgaaattgaaccaaactgaaaacaatttgaaaataccagctcgggggagacagattctctgctttcttcctgtatatgacacagcccatgttatggagcctagaggtggcaaaggccacacttcagacattatttaacaagcctctgtctttgcctctcagctgggggccctgcaagcaaaaacagctctagagatttcttcccccaggaaagcaagtctgacctgactcaacctgcagggtgcacacatcaggacttctctcaccagtcgccagcatcctgccttgaccctctgttcttcccattggcctcaatcctaaacatttgggtgggtgggagaggccagtccagagagagagggacatgtccttcccattagtcttgtgtcccctcagaagccaaagctggccttaaaattccgcggaattcattcccctctgccaacccgggctacatctttggcttcccaccctctccatgtcatgaattttatcataaaaacacagcgtatcaggtacacagtccccctgtagaggaggcgccagggtctttctgttccctccatctttcatcagatgctgggaacaggggccaagcagagagcaacatcgagggtgtttccctgaagctgcaggccccacaggcctggcctcaaggtgtgaactgcaagcagacaccagcctagcttagaaggggatgttcttcttcaaggaccctctgttctgccctgtcccttgcagtcagtatgattccttcctcccctgactccctgcccttggcaagaggcatttgtgtgtgaccttgtgctccagagcctcccaaacagccactctgtgaaatgaggcaaaggaaggattgttctagaaatccagggtaaaagtgctctgcctacagcttcaatggaatagagacagtagtctgtccttcactctatccctcctgccttatttgtgttctccctccctcctttcctccctccctcctttcctccttccctccctccctccctcctcctcttccctaccccctctccccctccctccctttcttcctccctccctcctgctccctttccctctctctctcccttcctgctctcacccccctcctccttcatacacccccccttcctttccacaagtatttatcaagcacttactagctaacctttttggattatgggctgtgtactagtctaaatcctcagcacatggttaattctagtgtcaatcaacacctgggagggccggacttttcattttcaggtgaggaccctcgggaggttgtatcggtgagccttgttccgtggcagtaagggtagggagctgaagtagcaccggagagctcctctgtgccctcgagtctctctaactgtacagcagaaggggaggaaggcgcatcaacttctctcagagtcacaccgagggaagctgagccagcaactatgagctttgtaggcagatcgcaagggatgtgcttaatttccatcccgtaaattgatcataccatgccctccacctgaggtgctctctaccacaccgtctctttttttcccactggcaaacctccaccagactttcaaggctacactctcatctcttgcccctgaaagccactcttccatctcctcctcaggggtcagcgtttgcacgctgtcaccataggactgtgtgcgcgtgggtttagctaggagtatgagagcgctgcttttcatgcttagagacttcagactgtgttctgtgatggctacactattttatgtccccacaaatagaattcaagcagttcctcttccttagaaaaatttcaacacccgtgctgcggggaatatttaaaaagtggcaccatcccgcgctaaacccagctactctctgccccccccgcggtcttgctgcctctgtctctaggctagcccctgcagcgaccagtgtggtcagcggccccaaatcccactaacccgataaaatcaaaactcttgaggcttataatttataagtcagatttatatcagtaaattctcaccccgcaaaacagccacacaatttactcagagctaatcaatattgatataaattgcccacctagataagacgaattgtcctgtaattgtccatagctacctgtggctatttaaagccaccgggaatctggatagtcctcttcttcctccgtcttccttccctctcctctgactctgtaaaccgtagctccgcctcccttttccatatccaatcacaggcttcttgtattaatatttcaattgattggacagggaaaattctgctacacacctgttctcttttattttaaaaattaatttatagcatgtgtttggtggcacacgattttaatcccagcacttgggaggtcaagtcaggcagatcacttgagtctgaggccagcctggtctacatagtaaattctaggacagccggggctaggagagagaaagatagaatgcaggccagaggccagcttgagggtgtcttctttccttctgtgtgggtcccaggtaccaaactcaggtctgagggagcaagtgccttatctgcggagccatctggctggccctgtaggtgccttgacaaggcctaagggtgtggaaggagctcaggggcccatcccagcgtgtacttcctacattctgagatggggtccccaagtctcatgtctctgggtttttgctcacatgtgcctgttctgggctcacagtttaaattaactaattaatatgtattaattatttttattcattagttaattttaattaattagttaatcatccacttcacaccccagtatcagcccctttctcctcccagtgtcccctcacacagctcctcccccagcctcctcctcacttctctgagaagcgggagcctcctctgggtacccctccccacggacaatcaaatcactgcagaactaagtgactcctctccactgagggcgaacaaggcagctcaatcagttagggagacaggatccacaggcaggcaacagatacagggaaagcccccagtccagttgctgagggacccgcatgaagaccaagctgcgcttccgctacatatgtgcagggggcctaggtccagcccattgtgctcatgtgttttacatgatgctctgcctgtgacttaacctatccatgctatcctgtaagcaggtgggacccgcaatcccatttccttaagagggaacgaaagcttccagggaaaagctgaccaccaggtgaccaccaggaggccacactcgtagggagtgggcatggcagcttgaaacctatgatctctttgctgtcctgaagatggcagatctgagctttaactgcggcagtgacaggaacaatgatgaacaagatatgtcagtctagaagagtcctgagaaggcttgtcacaaatactcttttttttttaaataatttttttttagatttatttattattatatgtaagtgcactgtagctgtcttcagacacaccagaagagggagtcagatcttgttacggatggttgtgagccaccatgtggttgctgggatttgaactctggaccttcggaagagtagtcgggtgctcttacccactgagccatctcaccagcccacaaatactcttaagtaataaaatttctgagagagaaaagggattacatatagactcagatggtaccatgacttcttatctcctagactagtctctccctctgacacccttcccttcaccaatgacgatatgttctcctgttaaaacacacttggttacacgcaggacagcccaaatcgctgctattaagcttacttgagacagggtgattattaaaaaactacacgcggtgctagtgaaatggctgctattattctaaactgagacagggtgatcagctaacaccagttatagcttaactcaaagtgcagctcagctcacagggatggttacctggcaacctaaaagatggaaagccaaggccccagaaaggacaggcttcaaggtcacaagtctgaccagaggtgagtctaacttagctgaggtgacagagatctgggtgctgggagctctttgctgggacggctgttttagagccgtcccaaatgatgaatccccataacatgcaaggcacatctgctcatgtaatgaatctcttgatgctgtttccaagtggtttgaaatagagctagaatattattttgcttcctctcaattacaaaaaaaacaaaaaaacaaaacaaaacaagaacaaaaacaaaaacaacacaaactcccagcagaaaactgcagaaacatacagaagagcattgctggctagccactctgcgcactgcatccatggagcgtttattagagttagacgtattccatccattgttccctatgtgttcccctcaacacagggactttctattagatatgtaattttgtattgagcttttacattcagaggtggaaaattccctaaagcatccagacaaggcacattaatgatgaattgtcgttgagtgggcatgagagttaggcctgggtttccccttccaggaggcagtgtgaaatggaattccttcctttacaaggtgttttctctcatgtccctacttttctaaagcagctctcaaatttcagcttgccagtgtggttaggcctggaaaaccttaatgaaaatgttgtatttaatctttatttatttattacatttcaggacccttcagtaaacagcctaacagggcttcattgtctacccttccaatctcaaaacaactagacattcttcagagttcccgatgctgggaaaatctttcttttatattttggggggctagagagagagacacatactgtcatctgttaagactgtctagtcaggatgacaattgctcaatttaagttaatgagttcaagtgtgaagatatgatagataaatgtttatcgtttagtctagttgaagtgttccctgattgtgtgctggtgatgcttggaaattaaactagttctcctcctacaatacccaaagacactcatcctggatcagcataaatgagccctatgttaattacaagttcttaggtctttggagcatgtgtggttcgtgtacagctatgatcccaatatacatgatgatgactacaagctagccggagctacagagtaggaccctgtctcaaatactgacagcaaacaagctaacagaaactcccaaattccccattagttttattttaattttacttatgcataggtgtatgtatttgtgtcagagtatttgacacatgtgtatgaaagcccatggagccaagcagaggatgtggaccctggagctggagttacaagtggttgtgagccaccttgtgtgagtgctggaaaccaaaccagtatcctctggaggagcagcgagagctcttaaccgctgggccatctctccagtgtccctatttgtagttaacagttttaagctagccagtgttttagagacatcaacagcttgtattgtgtaaccaacatgccacagaatctttaaactgaggaatatttcttatcattggggtgtgggtttggaataactataagataattttgctttactagtgtgaaacattcaggtttttaaaaaattgtttcttaaaatgcgtcctagtaaacacatagaaatatccctacccacatctttcctactgtccctccctccctccctccctccctccctccctccctccctccttccctccctccagctctcttgtttcttttttctatgcccccatgccccaggttctcaggtaaaatttccttatatgaatttctttcattttttttaaaaattttttttgaagatgttggttgaccctgatttaaaaaaaacaagcaaaacctaacaagccagtcaagcaaagaaagcaaaggcaacatttgaaagtcagggaacattgaccttcaaaggcatctttaaacaccgcctgtgatacacagccttagttttcaagtcattcagtctatggtttggaggactggagagacagggaaattgcaaactgaagtgatttctggaagggattgctgggaaatgtttgcaaggaacaaagaaaagttctatggcagtggaccagtctcttgtctcaccacaactcagaccacagtgaatggttctgtaaaatactctgctcatctacggggacacttcccactcatgatgtgcccactccaccctaaacactcagagacacatttggctgctttgcacttggaaatgcgctgcttggcaggattgggaagacggcctgccagtcaacctcagagaagacattgccatccttttctcagtcaatggagcgcctgcctgccaggtcagagagattcacaagtcctgaagggtgagccacagccgggcctatcctttatggatctacttcctggggactctgttgtttctggaagaacatacttactgatcaacctgacaagtttgtgccagaagctgacacaggtgtagagaggtggtgaatgacattttcctagcacttctgggtggctgaggcaagagaactgaggtctgcccagaaataccctatttcaagagattaaaatgcaaaacaaaattaccacagcagtaagtccatttgtagacccatttgtctaccaaggaatgaagaggggcctccatactaatttccatagtggtgattatttttaaatggaagctgtggagacagctgatttgaaaaattccattatataaaacttgatgacccaggttccatccccagcatccatgtaaagagctaggcatggtgtcacatgcttttctcataaaacaaggtagaaggttcctgaatattgacacccaaagttgatatttgaattcagcatgttcccaacttctatcccccaaaatgtacatacatcccagcacatacacgcacacacacacacacaaacatacacacacacacatatataagcacataaacatacatatactcacatacacacatacatgcacacacatataaatgcacatatacatacaaacatacataaatacacatgcatacatatacatagagacatacatacacacacagacacacatacatgaggaagcattactaaacacaacacttgccagaaattgtgtgaataatctatcccttcatcacaggcacttgtgtgaataatctatgccttcatcgcaggcatctgatttggcttgatcaagttaatttagaagccaggaatggagtagatgacatttcttatgactagagtatatgtgtagatactgaaatttcagaaaggagatttccctgatttgaaggcttggtagaatgtgtcactcactccttctgggtttaacagagaccttattttagagcatcatcaaggagacacgtgtcatcatagctcaaaaacttccactcagatcattgctggaggtgccaggcctctccctctgcagacttgagtcatcaagtgtcttctctttcttagggctttaaagatcctgtgtaccgggcgagacgaaagcagtttgctgacattgcctacaactaccgccagtaagtctttctgttggacaactgagagaagaacataccataaccccccattctaggttggaaacgatcagtctagaaccccctgctttgtgtgtgtgcccatgtctgtgtatatgtgtgtatttatgtgtgtgtatgcatgtatgtatgcatgtacatatgtatatgtgtgtatatgtatttgtatatgtatgtatatgtgtattgtgattatgtgtgagcatgtgtgtatgtatgtatgtgtgtatatgtgtacatatgtatgtaggcatgtgtatatgtgtgtatgtttgtacatgtgtgtgtataaccttccttaataacacatttttaaatgtcgccactagatcaaacaaaactacccactgtgctacagtctatgtctcgcctaagctttgttagttaattgtttgttgtgtctgaaatgattggaaaggcttccacatgaacgaaacaggctctggtcttctccacattagaccagaacaaagaaatctggctcctccagtaagtaacgaatcaccggagccttcggaccggaccagctgcactcccgtgttctacttatctggtgtgacccagtcctgtagggcaactgccagatgggatgtactttttttttgctccgttgagaattctattgtattttagccaagagaaaatggccatatcaaatgtgttgtttgggaacataatggctttgctgttgtgagtcctcggggaataatatgtaaattgggacttgggaaacttggtgttttggagacagcagtttctgagttaagggaacaaatagaaaattgtactcaaaaagaaactctagagctgtcccagaggctgaggtattaggtctttagtaggataacaacaacataaggaaatgatagggctttatgtggtgaacacaaacctatatgtggatagagagacatctagaacactatcttctctgaaatatatacgtgtgtgtgtgtgtgtgtgtgtgtgtgtgtatgtgtgtgtgtgtgcacacgcgtgcatgcgtgcagttagtgttgtaataaatcctcattttttggatgaggaaaccgaggctgaaagaagttaaataatgttttaaagccattttcctagtaggtgacaaaggcaggtttcaattttatctgtccccagaaccatagtcagcatctccactgtgcctattaaccctgtgcctaggcaggtccaggactcagggtctcactcctgctgcctttctggctcaagttcttgggactgatcttggtttcaggctcagcctcatctgtctcagagacaggtcccatgcgatgttctagctcagttagaagttctaagcctttcctacaaggagtgctaaggttttgtgattgggtctcagttctgcgacatggacccatgtcagccgatcactgtggacaggataaaggagctgtgattgtacaactctgaccgcagtcccttattcggaggagggagcattgagtgtcctctttctcaaaccccacacactgaaaagaggtgcgaggtgctttgctgcaagaaggggaaaagatgctgggtcactgggagagaaagtgtgaaccaggactgacgtatgatcaaaatgtcaccgcctttggaaatttgttgcagcaaaagtaccagttgtctttcttggttttgtttttacattaatgaattaactaattaattaattattggggtgtgtgtgtgtgtgtgtgtgtgtgtgtgtgtgtgtgcctgctatgactcatgtgtggaagttagagaacaacttgtgaggatctcagctttctctgccatgtgggttctgggcagacttggtagcaagtacccttagccacagacctatgtcactggtcccatcgatccctatctttctaatgagaactagttattttaatgatcaggggttactgaagttccaatattaggaatctaatcacaaatatatatatattcatacacacatagatatatatacacacacacacacacacacacatatatatatatacctacatatattactttatgcatataaatgtccacactaagaatacttgtcaagtgcaagactaaggctcataggagtttactacattacctgagattacatccaaagcctttttcttttctccgttcactacttaaccctggagtatggtacagtcttgggcaaaagttagcctgacactgtttcgtggtctttgccgggtaatcaggagctcctctgagcttgagaccttctcatttctcaatcaacaatctatctctcctccccagtccctgtccacctttctctagaaaataatagtctctgctccaatgttcttggatgaggttcaattttgaaagttcaggaggggcctagtttggaaccagacccacagttccaaggtaaacagtcccactttgtcccagactgtgtccctagcgagaggagcaggccagggaacagtcactggcccaggagccaggctttgcttgctcttcattgtttcaggacacagcctggaagcttccagactaatgactcttaaactgcaacttgcatcattcacctagagagcttgttaagacccactcgtccttgacagtccctccccagggcattcaggacagtgggacaggggtctcatgtatatgctttggcacatacaaacatattttatatcatagcatgggcttgctcgttttgttaccccatcccagtatttataagtctcatacttttggtccagagctctgttaattgacaaatctctgtacttatgacatgtagcttctctctccctctccctctccccctccccctttccctcccccctccccgtctccctctcctcctcccctctccctctccctctccttcttcctctccctcgccgtctccttctctccttatccctgcccctgtccttgttcccccccccaacacacacaccttaagatatatagatttatacaccgtggaaccctagcctaaatttaaataacttcataatttcccaggatcagaagcatcaaactcagcaagcgcaaactccccagacaagtttttaacacacacacacacacacacacacacacacacacacacctatctattaaatccaggttagccagagtcgattgctttcatggacataatacaagacactacagtgttttccctgaacttcagggcctttgcctggaagaagatgaattgtccagttgtctctgctcccattcgtcatcctgccctggacaatctgcgctacacatgtgccacctgccaggcccctgaaaataagtctctaccttgaacaaacagtctagagcaatggttcccaacttgtgggccatgacccttttggggtcaaatgaccttttctccggggccacatataagatatcccgtgtatcagatatttacattatgattcataacagtaaccaacttacagttatgaagtagcaatgaaaataattttgtggttgggggtcaccacaatatgagaaactgtataaaaggtttgtagcttttagaaggttgagaaccattggcttaggctctgagaagaacagaaaggccaaataacttccaaaaatgatagcaaatcctcaaccaaaccatgtttccatggggggaaaacaacacaataaggttttctatgaggcatttgtctttcaaactatgcttgaagtccgtgctggtcactggcagcattggggccttgactccctgtgctgacctcaccacatcatgtgccctgacccttcccaactggagacaccttttccatgcctgtattctagtgggcagcccattcctcgggtggaatacacagaggaggagaggaagacctggggaacggtgttcaggactctgaaggccttgtataaaacacatgcctgctacgagcacaaccacatcttccctcttctggaaaagtactgcggtttccgtgaagacaacatcccgcagctggaagatgtttctcagtttctgcagagtaagtccacatcagggtcagagcccggcagacagtggagtggggggtggggggaaggagtgagggagggggtaaatagaacctgttgtgagacttggtggcaggcacaggatgaagtctcccaggaagaacccagctgcagtgtctcctgctttccctctcccctccattattgatcttccatccatgcaagaatgttaggtgtgaatatttttatatcatataattgctctgaaaggatttttattttcatattcaaagcccaaggtgcttaacctagtgtttaccctgcagctctctgttaagaagcggctgcaatgtcagttcaaggaaaaagtatgctttctgcgggccaatgccaagagttgctcactctgagtctgtgcatctgggacagatcctgcctttgaccttttctgcttgtgcaaagctacctccatgttgtcatctgtcaaatagacacagtcgccctattggcatccttcacagactgagacagatgtggcatacgagagcacctggcatacagctgtgtccgaagtcagtgttcagcaagtttgcgggttagcggccatgtgagatgctcagaggagctttagctaagtgatgagatttggtgtagcctttccagggaagagtatggtttccttgctgaggctcattcagttcattcagcaaaccccaaatagtcgactaattcctattgaacacctactaatgctagctgagtaaggagacataggaagacagaccacagttctatagaaggggagaatttttctatatattaaaccatgaatagataggaaatggaccagaaaactatgtggcagggagggaggttagaatggggacagatcagatgaggtgatgatcttcgaggtatcttccacttctaggataaagcaaggagcaaatgttcaaacagtaattaacaacaatatgaaccaacaagtacctccccagagctcccagggactaaaccgccaaccaaagagtacacatggagggacccatggctccagctgcatatgtagcagagggtggccttgtcggtcatcaatgggaggagaggcccttggtcctgtgtagggtcgatgccccattgtaggggaatgccaggacagggaagcaggagtgggtgggttagtgagcagggggatggggggatggcatagggggttttcggaggggaaaccaagaaagggggtaacatttgaaatctaagtaaagaaaatatctaattaaaaaataaatgaaaatttccaaaaggaaaaacaagagatttgagaaagtagagggaaggaaattaaaacaaaacaaacaaacaaacaaacaaacaaacacctccccccaaatcccaatcaatgtgcagtgacaggagagagggcaggtcctgaagatggtttaaccctaatgctgtggccagtagtaagaataatgaaacatcaatgttagcagttgggaagtgatataattataatcaataggctttgtgcagtcagggaggcagagaccagaaaccacgtctctcttggcaaagctcataatttgggcactggttctttacaaccacttagcctgtggtttgtgaccctggattgaaagctttaacccatacctcagctttcccatctttaaagtggggatgataagatggcttcctcacagttattgattgcaaaggttagtttgtgcaaaatacttagagttgtacctagcatatgttaggtagtatgtagtgttagttactgtcgtttgcaatgccgctattctagttctagtgtgagcagaccaagaaacagatatagaaagcagagaatggttatcaattggtagctttaaagaaaagctatttagagggtatggtatcgatgtgtgctcaaaaacttcccaatatcttagtccttgattagggaaacacttaccagttctcagtgcatcctataatttaaaactaagagaaaccagcatacactgttttgtggataggatagggcagagggagagggacagagagggagggaggaggaagagaaggaagggagggaagggggagggaaggggaggagggagggagggagagagagaaattggatgcacattttctcttccctgttgctccactctgacaggatgtttctcctccctggttgggctgtgtatgacgtggtggagaaggtggaaatgcttgtagtatgctctactcctgatgttgattatacatctccttgtcacgcagagaacacgagaagtagtgggaaagtgtttggtcctaattaacactagccaaagagaaatttacttggatgtttgcaatggactagtctttgctatgtaacttttagtcattattgttttgatgcttacgacatccctcagtaatgccaagagacattttgcttgggataaaactgaggctcaacaatgtgaggttacatgacccaaagcagtaggggggttgtagtctctctggatttaccataaggcttacaattctcaaccttcctaatgctgcaacctggtaatactgatcctcatgttgtggtgaccaccaaccacaaaattactttgttgctactttataactgcaattttgctattcttatgaatcataacatttgatttatttgatatgcaggatatctaaggtgccacccccttggggagtcatacctcacaggttgtaaaccacttataaaaagccttgagttttaggttcttttctgctttccagcttgtactggtttccgcctccgtcctgttgctggcttactgtcgtctcgagatttcttgggtggcctggccttccgagtcttccactgcacacagtacattaggcatggatctaagcccatgtacacacctgaaccgtaagtatcattcttcagctacccctgccaaccacaatggatgctcaaagaatgctgatcaggctcattgcaggctggtccccatgatccactgcctgctttatttgatcatagtcctaaaggaaactcatactctgtgaattttctctgtccaaatagatgaaatttggactcacagagctggacatcctgtgaaccaaggatttggaactctttgagtaccaggaaaagggattccatcaagctccaatgttccaaataggacaggaacaagagtagccaagtgatctcagcatctcctagatgtacctggatgattccagctcttggctgagattattggctaaggagagaattagtggctactgtgcttcctatcaggaccattagcctatttgggtcatcaatcacatagtaattgatccaaagagatcattaggaatcctctaatcatgtctccttctttgggatgtcaatggatcctaattagaaagaacctgttgcactgttttagataaatgtaacctctctcttttgactgctgacctactctgggccaagagaagagcaacactattattttaagtccttattggaagaactggacacattatccttcttcatgtaagttagtgaccagaagatttggagtgggaggagtctgtaacccataactcattcaggtatctgagaagagacccataggaattctgggtccttagctctgcatctcagcccctcctgtctcccaggactcatgaggactttgtctagtgcttactcttgagagcaaagctccatgagttatttcttcatataaaatcagagtctagtttggtttaacttgcctttcctctaagcactgtgccttctgtgttctagtgatatctgtcatgaactcttgggacatgtgcccttgttttcagatagaagctttgcccagttttctcaggtaaggaacaaagacttagtcaatgggttggggctgtattgctggaatgaatgaattcctcatgaaggggctgtcacatgctctgttagagtggaaacactatacaattacatgatcctgaccctacctgagaagaatggtagggagaagggtggtttagtgaactgggttgaacactcattttaagaactgcagcctggggttgttggtaattacctatcctatggtcaatttgctgatatcaatgatcttaacaggtgcacactaagagccttctcactgatgaaagcatctctgatctctatgcagacatcatctcctactttccatccactacactttttcgagactgtggcattttgcacattgtcaggtagtcatgtgcatggattcttgaactataagatgacatttaccaagaatccaatgtcaatgatcttatgtatacaagattaaagaaagaaggaaacaaagaaaaaaagataaaagaaagagccatatatctcattgccactgtctaaacagcaccatggcctcaattaacttttttatggtagtgaggaagctcacaactattttttgatgagttaaaaattatgcttattttctcatcactaaggagactaaaaacatggttttgtgggggtggggagtgtggagttcggtctagggagatggctcagtagttagaagagtacacttttcttgcagagggccagtttttgtctaagcactccagcaggtaattaatggccatctgtaactctagcttcattggatcttatgactgtaatctctacaagcatcttcacttgtgggcacacacccacacatagacccacaggcatatggatgataaaggctatcaaatatttgaaaacacagatggctagctgggatcatggaagagtaaatgatgtctctaaaagtactcagaagcccaatccagagcactgatgaactattgctgtgtgaactaggacaagctatgaggctgtcctgtgcctcagtttccacagctttggatcagtgacatgccttccttgttattcttcttcctcactagaaagaactatgatctaaggatgattcatgagtaaacattgccccaagtaggaatttcaaagtaatgatcttgcgtgtgaatgaatttacaagcatttcccattagctgtaagaagttacttctaccatgggacgatgaagctgccccttgatatttgaaacgaaccaaataataagttcaaccaattccttgatttcttagaagacgtatgttctccaaacaaaagcacctgctacttgcatgtgacgttttgggaaatatggagcccagaaaccattggactagagacatgggagtgtctggttgaactttaactgtggaagtgttattgccaatagtgtagtttgagctgccaagatggtgttgattgcttaagatggtttgaaaacatggacttgttactgtgacaggagaattagatgctttccccttggagaatagaaattttgaatttttgactccagagatattctgtctcgctggagggcaattggaagtcttgcttgagttatttgcattttggataaccctggggagaagtggacaattaatatcaacagacatcataggatctctgtttgacacattctcaactttgacatagatggttccagggaaagagttgttttatgagaatttttttttttatttaaaggcagattttttttttgccacagtagggcagagggataatggggggccttgttttattcaagtgcttggctttcaaagaaagatgacaagatgttgggttttgtggcacacacctataatttcagcacttgggagatgtaggctggaatatcaggaattagagcctatccttgactatatagtcatttttgggctagcctggaatacatgagagcctatcctaaacaaacaaacaaacaaacaaacaaacaaacaaacaaacaaacatgacgccaagagaaaaggtgagggatttgacctcagttttattaatggattctgctaaacttgggactggtctatctaataatgtgggtagagtagacatggaagagagatgggatagtagagccagaatagggactatgtgaatttggtttgccttaaatctgacagtactttttataagtttagtgtaggccaaactccagctgagacccagacagaggtagtgacatagagtatgtagcctcttgcttcatgatagacaatatctgtagtctttctttctgttcacacacattcctttggttttcttagacaacctcatgactttgaatatatatctgtaatataataatgaacattcatgttttgtcttcaatgccaatttcaggtttacatatgaaccatcaagtcagcatctttactttgatgttgattatacatctctattttcctgtccaaggctgaattttgagtcttcttcaaaacttctctacccttaggtttccttgtatgtgtccatggcaactctattctttgactcactcaaaccaaatacacatctgggggctattattgactcttttctctgaaacaacaaagtatttctgcaaatttaatgtgttctactctcaaactgtataataactgattgtttctcatcatatccactaacactaatatggcctcagatgctatcattcattattgattttctgtatcttcctcattgccatccagcccttgcccttgacccctacggtctattcttacaaagtagcagtctgatgacacacactagatcttgtatgctacagtgtaatttatatacattcatgaaattaccaaagatgaaaactaataaaagttattaaaatcctagaataggttttcacttcactgaaaagaaaaacccaagtcctaaaatacctttttaaaaagtccacatgattgcatttagaatcttccatattacccaccaatactctcactgctccagtgtttgctcccctctgctccttgaggtagcccatattttccttgcttagagaggtttcttactaattatatgcttgctgtttggtctggctcttggacaagatgtctagaacagattgctagagttagtttgaggtgaagcagtgcaattcaggagaggttgagagagaagccagattgaatcagttagcttggagaggagtttgagccagaatagctgagttgaaccaacaacactccttccatcatcaatagaaccaataacattcaagtatttccccaagtactaccttcttagtgatgcctcccaggaacccaaattaataataaagccttcccaagattacttgaagctcccattccttttcgtctcttcctccacgtctttcttttccccccaagaccttgacgaactttatatttattgacgaactttaaacatatttaaaaacatattaacaattgtgtagtataagtcacaaggtcaaggctattttccaattttgtctatgtcctgacacataggaagcatttaatgcacgcttttggagtggatgaatgtatatgtttggaaagatacacacagaaagaaataaagggagctagtgaagagacaaaaagaccaccagaggacttctgtagttgaggttgtaattaatgatcagtggcacttcatctccagctatgtgttgttgcaggataattgatcatacagtgaaccttgaaattgagttgcttactggaaaaacctgtttcttgttgtggtgtggctcagctttagcacacacctttagttcctctagctggatacagacacgcccttagtatatacctttaatctcaaacaacaaaggtaaagttaatttgtaaaaggaagcacccatatttgaaagtgatatttgattgagtagcagacaaagtgatgaatcagagaaagatttgacaaaataggctatgcctaactctcatgagaagagagaggatagggaagctatttaagagagcagtgcagagggaagatggtgggaagacagtttcactgggaaagttgtacagtgacaagttgaagagagaaaaagctgaacacaggaagacacaatgagtcagagaatgagaaggagccatcagattagaacagattgctagaattagtttgaggccaagcagagcaattcaggagaggttgagcgaagtcagatagaatcagtcagcctggagaggagtttgacccagaacagctgagttgaaccaattagcaagagatcaaaaagaaaagaaagggtgagcttattcagctgcaagtctcagaggatgaaaacattctagacctacattagactgtattggaggctagacgcttccaagattaggcctagtttagcacacagaggcagtaagcctcagagatgataattaaatcaggtgaataaaaggtactcttgcaatgagtatttctggaaagatataatcacttattttcagtctttctgtggtattttaaagatacctgattaagattcattccatatcccagagatttctgtctcatgctgagtgtgtgggactcactaggctgatgtcaaacaatgacacagtagatgctaactgacctcgcataggctaccttattattcctttttgtaaagtgagtacaaaggaatcaagtattggggacacattttttgctgctcttgaggtctgtgactcttttctatctgacctggatgggacagatgtctaacaatattcagggtctatctggacccttcagaaggtacttagtcatctattaccctgcccataactgtatgccaggttggcactgagggtgaagttttaatatggtccatgccagtgactctgtttctccacacacaggaaattgggcttgcatcgctgggggcacctgatgagtacattgagaaactggccacagtaagtttttcttgccaatgggggcagggttatgggtatactatacttcatatctttgaagatttattctctccctggcagctgtttgaaataatgataagaatgtgacaaagcacattcacatgaatgaaatgtcacattttggtttctctttagtggactgacttttatatcagcttgcatgtggatattctcacatacttattaatagaatcttcttggaaatgccattcatctataattacagcccaaaattctttggcccaaagtgtgtcaggcactggttggctttatacttctgcttggagagtggttacctctctacctatgcactagaaccaaccttagggttgttctcagccagatgataaaaatgataatgtgattcccattcttttttttaatattaatttatttgttttttgtttgtttgtttggttggttggtttattatatgtaagtacactgtagctgtcttcactcagaagagaacatcagatctcatcatggatggttgtaaatcaccatgttgttacagggatttgaactcaggacctttggaagagcagtcagtgctcttaagccctgaggcatctctccagccctgggcttcccattattgtcaaacatttcccacttacaagagaagcaggtgccatggacacacaggaggggagctatggaaacaccagatctgcaccattggcaaattctttccttacattttccagttttcgtatgtccctctacaggtatagaaccatgttccttatcatatgtgaagcctggaagattaaaaaacaaacttcatatgaaattaaaaactaccacatatgtaaagctaggattgagatatatccagttagaagtttatacattcacttcctcagaaaggctagaaaattctaagttttggtttctgagcatactttgagattgagggtaagtggcttttggttgttgtttatctttaaaactgggcatataagtttgttgtccatctcaaaagtatttcatgagggtctaaagagttaaatttgtgtgaacatgagattttatattttatatatcttagaggagcagctttcaaaggggttgagaaaaagtggatagaattatttataggaagtgaagtcttaaaattcagagaacctcatcctgtcccttcctgataacaaaggaaccaccatattggtacactggacttggaacagacccatgtctcttctgtgcctttaattttgtgtctcaatgtaagtatgttgctttgacttcctgggctaaagactcgctgtgtatgatgaagtcatattgactgggctctgatgaccttcttggacttaatgttccttggtctaacaaagagacttccctgttaacccacctctaattctccaagatggtgaccatcttgaacatctaactgagccctggtcttctctgggcaccagaactccaagactgttaatcaggccaggtatcaaagacatgttggaacagagggtgctgaaggaagagggtgtgattatttgggaacacacatgtagaggttgacttaaacatcatcttctcccatgttttcatctcatgtttctcccacattcccatagcagatgaagtgtacatctccttgactctctcacaatccagtcccttaaccacccacttctttgcctgataaaaataccagatgaaccctagtaatctaagagcaatatcaaaatctatcattctggtttgtgacacagacagaaaagcaaaagatatggagaagtttctgtcaaacagagaggaatttgttggggaggtctttgtagaatattaatacattctaacatgtatgatattacaccaggactcattcaccatcaattcaacaggcaactggatagaataagacatgggatacagaagtgatactaggtcatactggttcagagagcatatctgcacagactcctaccaaccagatctgtcttaatgctttgagtatctggatgccttgctcacccctgacgtgtgccttttccttgcattctgtttcagatttactggtttactgtggagtttgggctttgcaaggaaggagattctataaaggcatatggtgctgggctcttgtcatcctttggagaattacaggtatgagtctaatagaaaccattcatgggtacttaagtgcagaggcatggaggatcactctcagcctcaaggcttttctaaagtgtattagtagatagctgtaggtatacttgcacagtcaattggtactgtagcagctatggtttgactacatctgttttgttagagatagaaattcaagtatgagtctatggggctgggtagagaagaggcctcctgagcccaaggctcacctaagactacaagtttgtaggtatggtccactctcacaatgtctattgaacttcatattagaaagggtttgaaatgaattgttaccttctagttaactgtaggtttttgatgagctataaagagtttaatctagtccatgctaaatgtctcagttttagggaatttgcactagggtagagaaatggggagatggaagaagcttcgcaggtggactatgaaatgcatgagagaatgcgggcttaactggaaacttttcgctgcagtactgtttatcagacaagccaaagctcctgcccctggagctagagaagacagcctgccaggagtatactgtcacagagttccagcctctgtactatgtggccgagagtttcaatgatgccaaggagaaagtgaggtgaggttaccaaagaggatcgctggttgtctgggtctcctggatcaggctagcagcgctacctggactccaatgtccacagcaactgtgcacacagatagaccctgccgtctccccactcacccttgcccattttgttgggaggttggatgtacctacctcatttccctatcccagcttaaattcagaaactcttatctgttcaacacagatacaaagtcctcctgtgtgcagagcagctataacagctcaccacacctaaccaaccagatgcctttgagtcttgaaaagtaccttctcctctttattctcccagatactagcagagcccaccttatcatctcttcatattttcacccaaattcatctgtttgccagccaaatataatcatgcctaaaaataagtgagctacttctgagaagtggactatttggtgatttcaacattgtgtgaacatcttagcatattacatacatgagcatagaagacagcatctactacagatacagattgtgtgacatataaattggatggccttaaggccatgatgaaccaaataagataaaaaattacataagagaaaattacagaaatgatataataaattcaagctgtttgaggctattgtgggtataatatggtatattattttatctttgtaagcaggaggacactagaattaaaacatggttagtatataagccagcagcataggaacttgttagtattgctatctactaactatgcatacttataaccacaacacctttgtacagctgttaatgcaatgggttgttaaccctcacacagacataaacacacaagttgcatgcctgtgtatgatgcctctcggagataataatctttcaaatttatcacaatcatatggtatcatgcaaatacattattggaggagatgtgattatatgatatgtgtctactaaatctctaacgttcaccctgccagcttctgtgatttatcttttcttcatagtaattattgactacaaatatttcatttagaaaagcaccacatatagaaggtttttttttttaacttcatttaatgccttggactttctttagtacccttaaccatgcctggcacatagtaagtacttcataaatcactgatggtctcagagaagttcagagaaggctgagagaggtaccccagaccatggaactcttggccctttcaattgagaaccttgtctatgagctatgccacctgtgagctatgccacctcatctaatcaggggacagtctacttggagttctacctgggcacagatgtcctgatactgctaccacttttagaaaaccaccttattgatggtgaatggtgtacagagggcatttgggtctctgcaatgtcagtttttatgtatatgccttaaggaatttaagtgctggcccagaagtccgtttgctgttgcctatgatggtcccctttctcctctcgccaaatcctgcactgtttttagatttctttttactctggagtttcttcttcattatatccccaagactccactatctgaacttgaatgaaacctgatgaatccgtttagtgttcttatggatatgtctttggggctgactatttgggattggatcaactaccaggggacttgtccctggtgaggactgtttctctctcacgcgcagccactattaattgaatgtagccttttctttgtgtctctgtgagctgcccctcagcagaatggaaccaaatgggtattctgccctggatcctggcactgatggcacagctgagactttaaaggtctgacaggctgcatgctgacaatctttctcttgctgttgtggactgatcacttgctggctagggatttgtctctagaagagcccatcttgaaagctcctttcagagagggaagatggggcagtagacataacaaattcctaagtccccagccactaataaaaggcaacaattagctacgccttactctgtgatgtgactacacttgctatgcccttctgagctgaagactgttactaccctcttcttgcagaagaataagggaatgaggaacggagatgaagaattattgtctacgatcttttgagctgtaactgaggaggaaggaacacagacagcctgacttggggacttagggtgctgctcttgccaaacctggggcaaccagctgcctgtcccgataattgtcattttcaacacggtagcatttacttacatcataggaataatatctgagttgtcttggagctgtcttgttaattatattaatgtcactcataaagatcctcctgggaggtatccgcagaagtcatgcatagggaaagcaagaaagcactcagatcagaagcaggctgccagggttagtggcattacttaattcttagggcttttgtaaatggtaatgtaagaatgatgtttttaaagggttagaacagttagaatttactgtggtcctcagttcatatcagacacctaatccatggtactcttcctgctgatccaacattttataaattgtccaggactgtgtctctgtttgcattgattgtcaagtaacttagagatattttttttaaatagtattcgtgcataggtttcatttactcttttatcttacataataagtgttcgtggtttcattgtattttgtgccctttcacattcacataaacaaaggcttccccatatgacctcattcaattgtatatcacatctcagcccagtatctgagcctctgttctaggaaactttggggctcacagcaaggaaaaagccacttggaactcctccaggataacctgtctttaaatggtgtccttcactggggtccttggttttggtttcaggacttttgctgccacaatcccccggcccttctccgttcgctatgacccctacactcaaagggttgaggtcctggacaatactcagcagttgaagattttagctgactccattaatagtaagtagctcacacctgctgggactaccttctttcccagaaatagaggctatatctccttacatttcctataggggcaaaattaatttcttaagggttgaattaaggagaaaacatctccatatatgccataggtggggggaaagaactatgcaaattgcctcccatgcccctttccttcctatctctatagcctaattctctatagccatagaaataatcctctagcaacacgaatcagcttctggtccctgtgctctctcctggcctttgccttcatcctttctccatgcctatgtgacatgtctaaagcgccaatgtatctcatgtgtctagactagaccccccccccctctctctccctctccctctctccctctccctctctctctctccctctccctctctctctctctctctccctctccctctccctctccttctccctctccctctctccctctccctctccctctccctctccctctccctctccctctccctctccctctccctctccctctccctctccctctccctctccctctccctctccctctccctctccctctccctctccctctctctggattcactattatattttaaaactgtttactttctacttatgattatcaaagatttcacaaccccaacactcaattacacaaaactaggtctaagtgtccagcaatatagctgaggttttctgtgtaaactttagtgtgtaacagaaccacttggagaaccacaacaactcttataaaggaaaacatttaattgagatttgcttacagttttagaggctgggttcattatcagtatggcaggaagcatggcgacaggcaagcagacatggtgctagtgaggcagctgagagttctatatctgaataggcaggcagcaagaagagaaagagctacagggcttagcttgggcttttgaaaccccaaagcccacttccagtcatacccttcccccagtaaggccacacccacttcctcgaggctacacctcttaatctttcttgagaagctctactccctaatgaccatgcatccaaatatttgagcctatggggaccattcctattgaaatcaccacaagaattgaaaaaaaatcataactttgaattatagtccccaaataaatttagtaaatttgtgcatatacttggaatctcagatgactctaacatgggagacttaaataaaccccacctaaataaatcccactcctttaggtttaacaacttagtgacttgaagtttttatgaataggtatgccaaaaagagctatactttttatttgtttgttttttgttgtttttgttttggaaaacatgttgcttaggaaaaaacaaaaaaacaaaaaaccttgaagctccaggaaacaacttgtgaaaggaggaagtaaattactcattacacacagcagaacagggctagtatagtcttcataactaagctataagcatcgtgaagtttaggatgatacatcccagaaccatattgggctttgcatttattaatgagtggctcacttcccttgctgttcttcttttgtaggtgaggttggaatcctttgccatgccctgcagaaaataaagtcatgaacagaaagtgacgtcatagacagaacttaggaggtcaaccaaaaaaatctgctgatagaagtatagtaactgcttcttttccctgaagaagaaaagttttatttgcaatgtcagcttttaatatattttcctaacatagtggaggatcaccaaataaatcaatttctctgaaatgaaagtatattaaaacccatcagtggtagatccttcagagtcacatttgatttagatatctcagaccttcaatttggtttaaaatgtaatttctcagttctcatcaacattcatcaaatttgggactcatatcatttgggctctgtctgttcatttttaacctctcaggtaagctctgatggaatacatattgcttagtgtaaaatgtgagactgtcatcgggaacaaattattccattcagtacagattgtaatctacaaagcttagtttctacattcattcattatggctctgagaactactttgttagcctgcttacataaatgtcctctgatctaagactctattaagatagttacaagcaataaagcattatataaaacattctgtgttctttattttacgtgctgaaaactgttaggagatatagacctacccacctgatcccacaacttccgacaccattttaatgctatttttcaaatacgtttgagagatatttggaagggacttgtgattcactagacattagccaaagacacagtagatgtctgggaaacccagggaaaatagctggatacattttaaaatagtaaattcattagaaagtgagagtcctatctatgttggaaaaaatattaataatattaatatcacaaaatttaaaatttcaaatggttgcttgcatgaaatatttcactcactgctttagaaatctattagctggaaaatcttgtgacacaaattagatgctcaggagcccagtccactgcatgaatcattgcgataattgaagtcagttgtggagagtcaaccgattttgatttttgttggtaatgaattttacaagtgtaaatgttgcttttatttccccagatgaagcaatgagattagagccatattcaagctgtgtgaatgcttggcctgggctgagtctaggacattttcttctttgatctaactatctcttgacctaggtctggaagcttctaatctctacacaatataatcttccaagctgactgattaattcggcttctcttggcttttgattgaattgctctgtctggcctcatactaactttggcaatatattctaatcttttggctccttctgtcttcacctgtgtctagctctagcttgttctttctgcagcctgtctctataaaactgtcttggtaaaactgccacacacacatgcgcacgcgcacgcgcgcacgcacacacacacacacacacacacacacacacacacacacaaaccccacacaccatgtgctctctcttgttgcacttaagtcgcctctctttcctctgctattctcatgtgagttggacataacctatctttgactcattctgtcaaatctctgtctgattcattagtttgtctacccccaattagatgtcacattcaaacatggcttcttccttctacaaactaaccttaacttcattgttagaaattaaaggtatgtactaagggtgtgtttgtattccagctagatcatagtgcaatccagcgtgcatatgcattctggatggaccatatttttaagtcttagggaatttacatggtgcttctcaagtgtactactaagaccagttgtagtatcgacaataaacctggacacactcctatctcttcccatttacagttactgggcaagatgctcagagagccacattttgaggcactctaggttattctttctcttacattcagttatctattaatttggggtctgtgtgtatgtgtaatatatgcatacatcaatgtgtttacatgtgagcaatatatgcatatacagatgtgtttgcctgtgcttgttcatctgaaggtcagaaataagttaggtttctccccctaatattgttcaccttaagtttttgaagcatggtctctcattgaaccttgagctctgtaataggcagccaattagctcatgatcctctggtctccactcttcagagctgggattacaagtagatgcagtcttacctgcccttttgcttgggtgctggggatctgaatgagggccctatgcttatacagcaagaactttacctaccatgctctctctatctctctatcctctgttgctaacacagcaagaactttattcaccatgctatctctctaccctacaccccaaattggaaattactaagaagaaaaacaaatgaagagatatactatgttcatggattagaagaaataatattgctaataagtccatctaaggatgtttcccccctttacagtcaggagtatatgggaagcacagatggacttggtggagtattaaaacataaagagaacatgaagttgggaagtgtgtgggcagggagctggatcagaaagaagtcatggagaggaaagtggggtgaatatgattaaactacattgcaagaaatctaaacaaattagttataagtgtccatctaatctaaagcaactaacatgtataatgtaatccctgccaaaattccactgaccttttaacagaaatggaaatatatattctaaaatacataagacccttaaaagatctttattggctaaggaaatcttgagcaaaaggaataaggcttgagatacagcactacttgacctcataatatcttataaatcttaataatcaaaatatcatggaactgtcatgtgaaaaagacatacagagaaatgacagaatatggatcccagcaataaatacacatttatggtcagttgaaatttaacagatgtgtcacagatataccaaagggaaaagacaaactttaaaatataatattgtaaaagctaaatatacatatacagaagaataaatttgggattttatctcatatcacatataaaaatcagttcaaaatggattaaagaaacacatcaagacaaccaacagaggcaacctgtggaataaaaacattatctatctatctatctatctatctatctatctatctatctatctatcatttctctatcaaaaaatataaaaagctcaactaaaatgcaagaaaaacacctgattgcaaaatacctaaagaaccaaattcagcaactccaaattcctcccagaagttgccccaaggcggaactgaccatggccttaaatacccacttggcaatgatggccaggaccaaggacagctcccactccctggtccttggactgtgcatgaatcagtctctagtctaatcactggaataagtattgtgctgatgaaactatctttcactagttacagaaatgtctaccaacccctatgtgttctctgggctgctggagttcatccttgagctaggaggtacacaaagttccagaaccaaagaagtgaagaaggaattccctgcaaaggacaatgtttgcagcaggctggagctcagtgtccatgttcttatatgacaagtgacaatttactaggacacccaacagggaaagaagcagatagagagctagagctattagggcctaagtcactgctctttctctagtgggtgatgttggcaatgaaatgacttgttgaaaagaggccagacctgcttcctctgtgatcttattcatatccaagaatggaaaagatgaaagagagacatgtcagagtcctccacacagtagatatatggaaagagatggattagatagatagatagatagatagatagatagatagatagatagatagataggcaagtagacagaaagacagtcagacagacaaagttagttttatgtcagtgtctgtggttgcatgtatatgtgcttgttcatgtggaggcaggaagtcaatgttgagtgttttcttcaattgctctccacttcattttctgagacagagtctctccctgaacttggagctccctgaccaagcaaatatgacttgttgaggatggagctgagattgttagtcagaattggcagcgtttctcctttcccctctttctcactcatctttttgtccttccccacctgtttgtagtagaggatctttctatttaatattattcttcttaatgttcatattccagccaccgttgtaaggtcttaacactcttctactctccttcctttttcttaaagatcaatatttttatgtactctttgaaaatctattgtgcttatacaatgcattttggtggtagctcctgtcttcttctgactccctctagtgcactcaaccctctcaacttcctcacttcatgtccttcattttactgttattaataatgcccagttagtgttacccatttgtgcacgagtatggagccatctattggagcatggacaacctaccagtagctgcatctccaaaggtgagtgactctcccttcctcagcagccatcagtcatcaacagctcatccaccagggttgatgcctcaagggctctgtctccatacatgctagggttttggctggctcgatctcgttcgggtcttatgcaggtatccaccatagctgctgtgagttgatatgtacagcagatatgtcatgtactcagaagccagcacttcacagctatcctcctgccctagttagttttgattgaccacttgatgcagcctcgtatcttgggaagaggaaacctcaaatgaagaattgactctgtcagaatgcctgtgggacatagtcttgatggacagttgatggaagatggtgtagccttgattgatagttgatggaggatggtctagccttagacaggtgaacttgtgttgtcttaaaaagctagccaagcaagctagagagcaacattactctactggttctgctatgacctcctgcttacgttcctaccctggatgctctgaatgattaaacatgtaagctggaatagaccctgaccttcccaagttccttttggtcagaatgttttatcacaggaatagaatcaaagggcagcacagctcccttcattgccttttacactctttccttgccctcttctgctgtgttccctgagcttcaaacagggaataggttgatgcagatgacactccacagctgggcattcacatcaccttacaatcagcacttgatacgttataagtctctgcattaaacccccacccactgcaaaaagaaacctatgtcttatattagtaagtttcttgaaacgattctcttctatcaggaagaggttggttagatatagtctgtgtactggaatatgatacatataaatttgcaacaaggaaatctagtatatattataaaatgaagaaaagacaacattttcagtttttagaagataatactaccttagatgtcttgatcatagaggaaataatgtgtgccaattaagaatgtcaacagtggtcaccgctgtgactgggacccaaggtgaaatctgctttctttaccttatactatcttttgtctctttcaaaattcatgttgaaagttaattccagttatgagacagtaagtggtgggaacagatagcatcataagaagtgatcagggcttttggattaatcatttgtgtgattaatgagttaaatgggtttcttgacatatcttgctttaagaaccagtttagctgagtctcttgggtgctctgcacttatcatgtgacatgtgtttgtctaaataatcctcttcttttcacacatgtgtgtatgtgtgcatatgttcatgtatgtctgtatatatgtgtgtgtgtttgtgtatatgtgtatgtgtgtattatgtgtgtatgtgagtatatatatgtgtatgtatgtgtatatatgtgtgtatgtgtgtatacatgtatgtgtgtatatgtgactatgtgtatatatgtgtatgtatacgtatgtgtgtatgtatgtgtatatatgtgtgtgtataggtgtatgaatgtgtatgtatgtgtatgcatgtgtacgcatgtgtgtgtatttatttacatttgtatattttaactcagtttttggtggttgtggtattaataagcaacaaaggatgaacaaaagacgttgtctaaaagagaaaaaaagtggtatggttgaagttgatatgattttgattttgactgctgattttattttcattccagtatcatatagtgatgacaaaatactattgaaatcagaaaagacctcagaatgtgaggttgttattcactaatgtgttaccttcttttaaccccttggagaaatatttctcatctatagcccagaattgctccaaaaaccaagggtgatttggcctgagggaaattcacaagcaacaagacatttctaagtctggtgctagcctatgtatctatgtcataaaacaaaacccggtcatgtgcaagcctgcttcaaaaggaaggacgtctcattgtgtttcagactttataaaacaaataggatagccctggactggctatgtgtactaagcttgtttcattttaaaggctgttctcggcaccatggagtagtgcagtctagacaagggggcagcaggatgacaaggttgatgacaatgatggtggcagccataacaatgatctcatagattgttcatacacattccagaatggttgtctttcaagattagaaatcacaaactcttatctaaggaaaaaattaatttccatgtttcttttttcttttgaattttaggtatattcacacctattttgtatagctcaatggttttcagactacacaatcactagttgttaaacaagtaaaaaaaaatcaatatagactactatcagtccacaagtagcaccttggccatcatttcatcctataacttatcatttatctctccaacagctaatagaggattccaagtgactgctaatctgtacccaaaataaatactgctaaggtcgtagtcatgcaggattttgactggcagactcagattttttttctaaaaggatgtggcttatgaacatggattcaggtcagtacatgtcctgcactttaaccccaaatgcatagacagctataagctgagctcttctgttcatatgtacccaagaaacatcattctacaaactagagaaagactaggctcacatcctggctatttcacggctaggtatgtaatccaatgatacagatacaaccttaggggagaggttggtaggaattaaataagccaatcctttccaagtacttaaacatctggaatgtatcagtcctcactcttcctatggacaccaatagcatcaatttatgagagaaccacaaagagtcgagtatcacaatggaatttatagatcctgaggctggaaagagaccatgctatttcagagcacaacattcctgactgaagtgagttgaggaggaattataaacttgattaagcaagtgaatatttcttagaattattggttctaggggtattactacagtcactatagacaaaggagagaccttgttagaaagtaaaaagtctgtaggtctgtgtaaatacctcgtatcgcaggaggtcagctgtaacaccaaacacctgttaaaagtagaagacaatttctatttcataggcaaggctattgccaggaatctatttactgaggaagggaactgagttttacagtgtatagttttctagaaggaaatacagtgtaactggataaacactgaggtgtagatgaagggaacagcaaaggaagcatggcttccttctgtttacacattctttgtggacttacatcttaatcacctagtttctaggaaagaaagatacccattatgcactggtcggtcactgtcaggagcagacagcaggattccccataggaatttttggacctttccttaaatcctgtgcctgggatctacaggaacgtaaattcagaaatgttaatgcaaacaaagcccccctccctcccgttgccacatgaacttctctgtacattactttttctaaagaaccattatgttggagactggtgtgagggctctgcatgaaaaaaacttgctgctcttttagatgtcccaggtttggttcccagaacccacatgacagctcactaatgcttgtaactccacttccagggaatctggtttcctcttctgcctctgtaggttccacttgcatgtgttatatgtacaaacatgatggcaaacactcattcacataaatcaaaaataaatacttgaaatagaaccattattctcatggcaaaaattacaatcttaaacactgcactatttattcaaaccttataaaggatgcacacctgacaagcttttcctggggagatacaatacatacatgtctacttgctccaaagagagaacccccaacagaccaaagatcacaccaaagttaacctggtgaaatgatgaatttttttattgggattaatagcaagagttataggtgagggattatttataaaagcaaaaatgactcagaacagcagttatatcacaaaaagtccaccccaacacacctaaccactcatgaaagctacaaccctggaccctctgcaccacctgcaggcagctagactggttcaggaaagctttttgcagcccatctggtcagagttcctcatcccactcccaggagctgcttactagtactataaatctggagaggggtctttaagaatcttctgaggtcacactttctgagacatgtgacgttttgcttacctttggaatttcactaactttcccctccattaggagagagggattggggagatgtagtgtgcttttgctgtccccatgccctcaggataatcacagtgcctgggagagactgcctgtgacaatgaataaatgtaacatttaaaggaaatgcacttcagaaatgcctggcactgttactaatgactttaacgtcactgtgactacaaccattaacatcatcactgagaaaatcaaatgagactgtgtgggagaagtgtgttaaacgagaggatgctccgtgtattagagaagtaccactaaacctgcagaagctctcgttccctcaggagcaaatcacaaaacactcctgcacacaaacaaagacagagtggacaaggcttaacccttacgaaaagttcttatttctataatagtaagcttaagatgttggtaggcatggtccagtgtcactattccaggctctaccttgtcagtgtgttcttttctgttaagtatgtctcctgcttataggaaaactgatcctgtacattgaggtcaggtgctttccttgttttcccaaacaactgactaatcagcaatcaggagctcacattgctttccaactattcacctttccttccttccttctttccttcttttcttccttccttccttccttccttccttccttccttccttctcctccttcttctctcccccccctctctctctctccctccttctctctctctctctccctccttcccccccccctctctgacaggtttctctgtgtagtaccagatgtcttggaacaagctctgtagaccaggctggtctcaaacgcagagatcctcctgcctctaactctggaatgttggtactaaaggcatgattcacacttcccagccaactttcttaacagagtatccatacactaattgccttaacaacggtgtctgaactgataactggtaatgaaaactagaagactagattgagccaatcactatccatgccctgaaactgggatatgagtcatacaatattttatatagggtctcagcagaaagcagatgatatgctaaacatagtaaaatgaggagaatttagtaaagtgaccgaagtagtagacaaagaccatgagggagtcaactagaggtggtgcagaacccaggggctgccagcaacagacaggtggtgcttccctgagctgcaagaaggggaagctggtattaggacatgggtcctaagacctgcatagagaacattgctgttgagtacctttgtccatttataggagaatgctgtgaagctgaggctactagtcaagtaaaaagcccacagaaagatgggtgacattactctgaaagctacaatataagggagccattagtatgaagctattcccagaacaggcacccagagtgtgttagaagaaagaagaacaagagtgcatttggaggagtaaagggacttagtacaaggggtgctgagcatgtgtggggtgcacaggaggaaagggacacggacataaaatcatgacttgggaggcaaaaggggagggctctgtggatggccagcaggattctctgtgagtgtggaattgttcaaaataaagttattctgcttctcttccaagtgtaaattatctgaaactgcagacagctttagtttgtaagtacaaaccctcttgggaacaacacaagaagatagcaaagggctgacccatcaccacttgatgagggattcagggaaaggcgggtgtcctgacctttcagggaagactgaagaaatctactcccaggagggtttgcaaagggaagtggctgttccctctgtaaggccaaggagggcaagcttaatgaggagtgagccagttacatggtataatttactgaatggtgctggctgcctcgaaatgcttcaagacaattttttttctcaatacataattagcaggaagaaaaagatttggatgttgccattttccaaaggaaacttgactacagtcagaaacagcggacaatatccttgagaagtcttatatttctatgcaaaggggtgtctcaactcagaatttacacaatgtgttattgcctagcctgtgaaggccatctaattagtttcgaaccaaatgccaagataaacatcccagtccttaaagaattccaagaagccatgtgactaaggcaccttcaggggtaaggagagggcacaccactggttaatcactgctgctcattagggctccatgggagatttaaaactctatgccaagagtccacccacaattgatccagaatttctttctttgatgcccaggtttagggtatgttattgatttgtttttgcctttgttttttgtttttgtttgaaagaaaagcagccatagccatatcctgtcagagttgagaccctgtggtctataagatactccttcatttctaatacatgtcacatgcctgaggccctcagatcaattgttttgctgattagtcaattccaccccgatagccatcctggcatgaatatcatatggctttttccccattatctttttactagattttgagataatatggcagtggtgttaaggattggtggaggctgagatcatgctatgtcagttgaatatctgactctacttatggatggtgtgacatcagctaagtcatacagttgagccctaatttcatcatgtggggactggaagcaatggtaggaactatgctagcttagatcagtggttctcaacttttctgatgccgcaacccttcaatacagttcctcatgctgtggtgaccccaaccatcaaattgtatcataactgtaatttgtctactgttataaattttaatgtaaataaataatctgtgttttccgatggtcttaggcaatccctgtgaaaggttgtgcaacccaaaaaggggtcatgacccataggtttagaacctctggcctagaatattttgaatatgaggctgggaaacagtaataaagatctcagtgcagtgaccattagagggtcttctcaggcagcctgtcctgctaaatgtgacacagatctagagcgtaggagggaagggttgactcttggaagctcactgggttacagagaataggcagaccccttagacgatggccttggatccagagctttccctggaaggagaattactttcttcacgagagaactccatgaacctttggtgcctgtttgagtcttggctctcatacttagccttgggtggccatgcatggatagaagaggcactcctacgatccctttgcagagataaaatgatgaaatacttgcttagttctattgagatttgtttaatatactgatctttatattcaatcactttagcctcgctatgatgctatgaagtatgaacctaagctttcagctgggaaaaccacaacccgtagaagtcaagaatttagccaatgggttctgaatacatctttaatatctatcaggactcagcaggagtaggggcactcgcataattagggtaaatggaagagattaaatagatagtgtccaaggaaatgtaaatgggagagatgtcctatccttgcagtgaaagacctgttggaggaacagtgatctggattggagggaggacccaggactcaggagggaaagagttcacagaacagctaccccattcccctcctctttgtcctctttcagagttctccattgcctcagtggcaacagataagaccagctgatgctcaaagcttcctgcctaagcaatgcccgggatttctcccagtctatcctctctagtgtt

SEQ ID NO: 868593 - DNA, 86343 bp, Mus musculus
aacactagagaggatagactgggagaaatcccgggcattgcttaggcaggaagctttgagcatcagctggtcttatctgttgccactgaggcaatggagaactctgaaagaggacaaagaggaggggaatggggtagctgttctgtgaactctttccctcctgagtcctgggtcctccctccaatccagatcactgttcctccaacaggtctttcactgcaaggataggacatctctcccatttacatttccttggacactatctatttaatctcttccatttaccctaattatgcgagtgcccctactcctgctgagtcctgatagatattaaagatgtattcagaacccattggctaaattcttgacttctacgggttgtggttttcccagctgaaagcttaggttcatacttcatagcatcatagcgaggctaaagtgattgaatataaagatcagtatattaaacaaatctcaatagaactaagcaagtatttcatcattttatctctgcaaagggatcgtaggagtgcctcttctatccatgcatggccacccaaggctaagtatgagagccaagactcaaacaggcaccaaaggttcatggagttctctcgtgaagaaagtaattctccttccagggaaagctctggatccaaggccatcgtctaaggggtctgcctattctctgtaacccagtgagcttccaagagtcaacccttccctcctacgctctagatctgtgtcacatttagcaggacaggctgcctgagaagaccctctaatggtcactgcactgagatctttattactgtttcccagcctcatattcaaaatattctaggccagaggttctaaacctatgggtcatgacccctttttgggttgcacaacctttcacagggattgcctaagaccatcggaaaacacagattatttatttacattaaaatttataacagtagacaaattacagttatgatacaatttgatggttggggtcaccacagcatgaggaactgtattgaagggttgcggcatcagaaaagttgagaaccactgatctaagctagcatagttcctaccattgcttccagtccccacatgatgaaattagggctcaactgtatgacttagctgatgtcacaccatccataagtagagtcagatattcaactgacatagcatgatctcagcctccaccaatccttaacaccactgccatattatctcaaaatctagtaaaaagataatggggaaaaagccatatgatattcatgccaggatggctatcggggtggaattgactaatcagcaaaacaattgatctgagggcctcaggcatgtgacatgtattagaaatgaaggagtatcttatagaccacagggtctcaactctgacaggatatggctatggctgcttttctttcaaacaaaaacaaaaaacaaaggcaaaaacaaatcaataacataccctaaacctgggcatcaaagaaagaaattctggatcaattgtgggtggactcttggcatagagttttaaatctcccatggagccctaatgagcagcagtgattaaccagtggtgtgccctctccttacccctgaaggtgccttagtcacatggcttcttggaattctttaaggactgggatgtttatcttggcatttggttcgaaactaattagatggccttcacaggctaggcaataacacattgtgtaaattctgagttgagacacccctttgcatagaaatataagacttctcaaggatattgtccgctgtttctgactgtagtcaagtttcctttggaaaatggcaacatccaaatctttttcttcctgctaattatgtattgagaaaaaaaattgtcttgaagcatttcgaggcagccagcaccattcagtaaattataccatgtaactggctcactcctcattaagcttgccctccttggccttacagagggaacagccacttccctttgcaaaccctcctgggagtagatttcttcagtcttccctgaaaggtcaggacacccgcctttccctgaatccctcatcaagtggtgatgggtcagccctttgctatcttcttgtgttgttcccaagagggtttgtacttacaaactaaagctgtctgcagtttcagataatttacacttggaagagaagcagaataactttattttgaacaattccacactcacagagaatcctgctggccatccacagagccctccccttttgcctcccaagtcatgattttatgtccgtgtccctttcctcctgtgcaccccacacatgctcagcaccccttgtactaagtccctttactcctccaaatgcactcttgttcttctttcttctaacacactctgggtgcctgttctgggaatagcttcatactaatggctcccttatattgtagctttcagagtaatgtcacccatctttctgtgggctttttacttgactagtagcctcagcttcacagcattctcctataaatggacaaaggtactcaacagcaatgttctctatgcaggtcttaggacccatgtcctaataccagcttccccttcttgcagctcagggaagcaccacctgtctgttgctggcagcccctgggttctgcaccacctctagttgactccctcatggtctttgtctactacttcggtcactttactaaattctcctcattttactatgtttagcatatcatctgctttctgctgagaccctatataaaatattgtatgactcatatcccagtttcagggcatggatagtgattggctcaatctagtcttctagttttcattaccagttatcagttcagacaccgttgttaaggcaattagtgtatggatactctgttaagaaagttggctgggaagtgtgaatcatgcctttagtaccaacattccagagttagaggcaggaggatctctgcgtttgagaccagcctggtctacagagcttgttccaagacatctggtactacacagagaaacctgtcagagaggggggggggaaggagggagagagagagagagaaggagggagagagagagaggggggggagagaagaaggaggagaaggaaggaaggaaggaaggaaggaaggaaggaaggaagaaaagaaggaaagaaggaaggaaggaaaggtgaatagttggaaagcaatgtgagctcctgattgctgattagtcagttgtttgggaaaacaaggaaagcacctgacctcaatgtacaggatcagttttcctataagcaggagacatacttaacagaaaagaacacactgacaaggtagagcctggaatagtgacactggaccatgcctaccaacatcttaagcttactattatagaaataagaacttttcgtaagggttaagccttgtccactctgtctttgtttgtgtgcaggagtgttttgtgatttgctcctgagggaacgagagcttctgcaggtttagtggtacttctctaatacacggagcatcctctcgtttaacacacttctcccacacagtctcatttgattttctcagtgatgatgttaatggttgtagtcacagtgacgttaaagtcattagtaacagtgccaggcatttctgaagtgcatttcctttaaatgttacatttattcattgtcacaggcagtctctcccaggcactgtgattatcctgagggcatggggacagcaaaagcacactacatctccccaatccctctctcctaatggaggggaaagttagtgaaattccaaaggtaagcaaaacgtcacatgtctcagaaagtgtgacctcagaagattcttaaagacccctctccagatttatagtactagtaagcagctcctgggagtgggatgaggaactctgaccagatgggctgcaaaaagctttcctgaaccagtctagctgcctgcaggtggtgcagagggtccagggttgtagctttcatgagtggttaggtgtgttggggtggactttttgtgatataactgctgttctgagtcatttttgcttttataaataatccctcacctataactcttgctattaatcccaataaaaaaattcatcatttcaccaggttaactttggtgtgatctttggtctgttgggggttctctctttggagcaagtagacatgtatgtattgtatctccccaggaaaagcttgtcaggtgtgcatcctttataaggtttgaataaatagtgcagtgtttaagattgtaatttttgccatgagaataatggttctatttcaagtatttatttttgatttatgtgaatgagtgtttgccatcatgtttgtacatataacacatgcaagtggaacctacagaggcagaagaggaaaccagattccctggaagtggagttacaagcattagtgagctgtcatgtgggttctgggaaccaaacctgggacatctaaaagagcagcaagtttttttcatgcagagccctcacaccagtctccaacataatggttctttagaaaaagtaatgtacagagaagttcatgtggcaacgggagggaggggggctttgtttgcattaacatttctgaatttacgttcctgtagatcccaggcacaggatttaaggaaaggtccaaaaattcctatggggaatcctgctgtctgctcctgacagtgaccgaccagtgcataatgggtatctttctttcctagaaactaggtgattaagatgtaagtccacaaagaatgtgtaaacagaaggaagccatgcttcctttgctgttcccttcatctacacctcagtgtttatccagttacactgtatttccttctagaaaactatacactgtaaaactcagttcccttcctcagtaaatagattcctggcaatagccttgcctatgaaatagaaattgtcttctacttttaacaggtgtttggtgttacagctgacctcctgcgatacgaggtatttacacagacctacagactttttactttctaacaaggtctctcctttgtctatagtgactgtagtaatacccctagaaccaataattctaagaaatattcacttgcttaatcaagtttataattcctcctcaactcacttcagtcaggaatgttgtgctctgaaatagcatggtctctttccagcctcaggatctataaattccattgtgatactcgactctttgtggttctctcataaattgatgctattggtgtccataggaagagtgaggactgatacattccagatgtttaagtacttggaaaggattggcttatttaattcctaccaacctctcccctaaggttgtatctgtatcattggattacatacctagccgtgaaatagccaggatgtgagcctagtctttctctagtttgtagaatgatgtttcttgggtacatatgaacagaagagctcagcttatagctgtctatgcatttggggttaaagtgcaggacatgtactgacctgaatccatgttcataagccacatccttttagaaaaaaaatctgagtctgccagtcaaaatcctgcatgactacgaccttagcagtatttattttgggtacagattagcagtcacttggaatcctctattagctgttggagagataaatgataagttataggatgaaatgatggccaaggtgctacttgtggactgatagtagtctatattgatttttttttacttgtttaacaactagtgattgtgtagtctgaaaaccattgagctatacaaaataggtgtgaatatacctaaaattcaaaagaaaaaagaaacatggaaattaattttttccttagataagagtttgtgatttctaatcttgaaagacaaccattctggaatgtgtatgaacaatctatgagatcattgttatggctgccaccatcattgtcatcaaccttgtcatcctgctgcccccttgtctagactgcactactccatggtgccgagaacagcctttaaaatgaaacaagcttagtacacatagccagtccagggctatcctatttgttttataaagtctgaaacacaatgagacgtccttccttttgaagcaggcttgcacatgaccgggttttgttttatgacatagatacataggctagcaccagacttagaaatgtcttgttgcttgtgaatttccctcaggccaaatcacccttggtttttggagcaattctgggctatagatgagaaatatttctccaaggggttaaaagaaggtaacacattagtgaataacaacctcacattctgaggtcttttctgatttcaatagtattttgtcatcactatatgatactggaatgaaaataaaatcagcagtcaaaatcaaaatcatatcaacttcaaccataccactttttttctcttttagacaacgtcttttgttcatcctttgttgcttattaataccacaaccaccaaaaactgagttaaaatatacaaatgtaaataaatacacacacatgcgtacacatgcatacacatacatacacattcatacacctatacacacacatatatacacatacatacacacatacgtatacatacacatatatacacatagtcacatatacacacatacatgtatacacacatacacacatatatacacatacatacacatatatatactcacatacacacataatacacacatacacatatacacaaacacacacacatatatacagacatacatgaacatatgcacacatacacacatgtgtgaaaagaagaggattatttagacaaacacatgtcacatgataagtgcagagcacccaagagactcagctaaactggttcttaaagcaagatatgtcaagaaacccatttaactcattaatcacacaaatgattaatccaaaagccctgatcacttcttatgatgctatctgttcccaccacttactgtctcataactggaattaactttcaacatgaattttgaaagagacaaaagatagtataaggtaaagaaagcagatttcaccttgggtcccagtcacagcggtgaccactgttgacattcttaattggcacacattatttcctctatgatcaagacatctaaggtagtattatcttctaaaaactgaaaatgttgtcttttcttcattttataatatatactagatttccttgttgcaaatttatatgtatcatattccagtacacagactatatctaaccaacctcttcctgatagaagagaatcgtttcaagaaacttactaatataagacataggtttctttttgcagtgggtgggggtttaatgcagagacttataacgtatcaagtgctgattgtaaggtgatgtgaatgcccagctgtggagtgtcatctgcatcaacctattccctgtttgaagctcagggaacacagcagaagagggcaaggaaagagtgtaaaaggcaatgaagggagctgtgctgccctttgattctattcctgtgataaaacattctgaccaaaaggaacttgggaaggtcagggtctattccagcttacatgtttaatcattcagagcatccagggtaggaacgtaagcaggaggtcatagcagaaccagtagagtaatgttgctctctagcttgcttggctagctttttaagacaacacaagttcacctgtctaaggctagaccatcctccatcaactatcaatcaaggctacaccatcttccatcaactgtccatcaagactatgtcccacaggcattctgacagagtcaattcttcatttgaggtttcctcttcccaagatacgaggctgcatcaagtggtcaatcaaaactaactagggcaggaggatagctgtgaagtgctggcttctgagtacatgacatatctgctgtacatatcaactcacagcagctatggtggatacctgcataagacccgaacgagatcgagccagccaaaaccctagcatgtatggagacagagcccttgaggcatcaaccctggtggatgagctgttgatgactgatggctgctgaggaagggagagtcactcacctttggagatgcagctactggtaggttgtccatgctccaatagatggctccatactcgtgcacaaatgggtaacactaactgggcattattaataacagtaaaatgaaggacatgaagtgaggaagttgagagggttgagtgcactagagggagtcagaagaagacaggagctaccaccaaaatgcattgtataagcacaatagattttcaaagagtacataaaaatattgatctttaagaaaaaggaaggagagtagaagagtgttaagaccttacaacggtggctggaatatgaacattaagaagaataatattaaatagaaagatcctctactacaaacaggtggggaaggacaaaaagatgagtgagaaagaggggaaaggagaaacgctgccaattctgactaacaatctcagctccatcctcaacaagtcatatttgcttggtcagggagctccaagttcagggagagactctgtctcagaaaatgaagtggagagcaattgaagaaaacactcaacattgacttcctgcctccacatgaacaagcacatatacatgcaaccacagacactgacataaaactaactttgtctgtctgactgtctttctgtctacttgcctatctatctatctatctatctatctatctatctatctatctatctatctaatccatctctttccatatatctactgtgtggaggactctgacatgtctctctttcatcttttccattcttggatatgaataagatcacagaggaagcaggtctggcctcttttcaacaagtcatttcattgccaacatcacccactagagaaagagcagtgacttaggccctaatagctctagctctctatctgcttctttccctgttgggtgtcctagtaaattgtcacttgtcatataagaacatggacactgagctccagcctgctgcaaacattgtcctttgcagggaattccttcttcacttctttggttctggaactttgtgtacctcctagctcaaggatgaactccagcagcccagagaacacataggggttggtagacatttctgtaactagtgaaagatagtttcatcagcacaatacttattccagtgattagactagagactgattcatgcacagtccaaggaccagggagtgggagctgtccttggtcctggccatcattgccaagtgggtatttaaggccatggtcagttccgccttggggcaacttctgggaggaatttggagttgctgaatttggttctttaggtattttgcaatcaggtgtttttcttgcattttagttgagctttttatattttttgatagagaaatgatagatagatagatagatagatagatagatagatagatagatagataatgtttttattccacaggttgcctctgttggttgtcttgatgtgtttctttaatccattttgaactgatttttatatgtgatatgagataaaatcccaaatttattcttctgtatatgtatatttagcttttacaatattatattttaaagtttgtcttttccctttggtatatctgtgacacatctgttaaatttcaactgaccataaatgtgtatttattgctgggatccatattctgtcatttctctgtatgtctttttcacatgacagttccatgatattttgattattaagatttataagatattatgaggtcaagtagtgctgtatctcaagccttattccttttgctcaagatttccttagccaataaagatcttttaagggtcttatgtattttagaatatatatttccatttctgttaaaaggtcagtggaattttggcagggattacattatacatgttagttgctttagattagatggacacttataactaatttgtttagatttcttgcaatgtagtttaatcatattcaccccactttcctctccatgacttctttctgatccagctccctgcccacacacttcccaacttcatgttctctttatgttttaatactccaccaagtccatctgtgcttcccatatactcctgactgtaaaggggggaaacatccttagatggacttattagcaatattatttcttctaatccatgaacatagtatatctcttcatttgtttttcttcttagtaatttccaatttggggtgtagggtagagagatagcatggtgaataaagttcttgctgtgttagcaacagaggatagagagatagagagagcatggtaggtaaagttcttgctgtataagcatagggccctcattcagatccccagcacccaagcaaaagggcaggtaagactgcatctacttgtaatcccagctctgaagagtggagaccagaggatcatgagctaattggctgcctattacagagctcaaggttcaatgagagaccatgcttcaaaaacttaaggtgaacaatattagggggagaaacctaacttatttctgaccttcagatgaacaagcacaggcaaacacatctgtatatgcatatattgctcacatgtaaacacattgatgtatgcatatattacacatacacacagaccccaaattaatagataactgaatgtaagagaaagaataacctagagtgcctcaaaatgtggctctctgagcatcttgcccagtaactgtaaatgggaagagataggagtgtgtccaggtttattgtcgatactacaactggtcttagtagtacacttgagaagcaccatgtaaattccctaagacttaaaaatatggtccatccagaatgcatatgcacgctggattgcactatgatctagctggaatacaaacacacccttagtacatacctttaatttctaacaatgaagttaaggttagtttgtagaaggaagaagccatgtttgaatgtgacatctaattgggggtagacaaactaatgaatcagacagagatttgacagaatgagtcaaagataggttatgtccaactcacatgagaatagcagaggaaagagaggcgacttaagtgcaacaagagagagcacatggtgtgtggggtttgtgtgtgtgtgtgtgtgtgtgtgtgtgtgtgtgtgtgtgcgtgcgcgcgtgcgcgtgcgcatgtgtgtgtggcagttttaccaagacagttttatagagacaggctgcagaaagaacaagctagagctagacacaggtgaagacagaaggagccaaaagattagaatatattgccaaagttagtatgaggccagacagagcaattcaatcaaaagccaagagaagccgaattaatcagtcagcttggaagattatattgtgtagagattagaagcttccagacctaggtcaagagatagttagatcaaagaagaaaatgtcctagactcagcccaggccaagcattcacacagcttgaatatggctctaatctcattgcttcatctggggaaataaaagcaacatttacacttgtaaaattcattaccaacaaaaatcaaaatcggttgactctccacaactgacttcaattatcgcaatgattcatgcagtggactgggctcctgagcatctaatttgtgtcacaagattttccagctaatagatttctaaagcagtgagtgaaatatttcatgcaagcaaccatttgaaattttaaattttgtgatattaatattattaatattttttccaacatagataggactctcactttctaatgaatttactattttaaaatgtatccagctattttccctgggtttcccagacatctactgtgtctttggctaatgtctagtgaatcacaagtcccttccaaatatctctcaaacgtatttgaaaaatagcattaaaatggtgtcggaagttgtgggatcaggtgggtaggtctatatctcctaacagttttcagcacgtaaaataaagaacacagaatgttttatataatgctttattgcttgtaactatcttaatagagtcttagatcagaggacatttatgtaagcaggctaacaaagtagttctcagagccataatgaatgaatgtagaaactaagctttgtagattacaatctgtactgaatggaataatttgttcccgatgacagtctcacattttacactaagcaatatgtattccatcagagcttacctgagaggttaaaaatgaacagacagagcccaaatgatatgagtcccaaatttgatgaatgttgatgagaactgagaaattacattttaaaccaaattgaaggtctgagatatctaaatcaaatgtgactctgaaggatctaccactgatgggttttaatatactttcatttcagagaaattgatttatttggtgatcctccactatgttaggaaaatatattaaaagctgacattgcaaataaaacttttcttcttcagggaaaagaagcagttactatacttctatcagcagatttttttggttgacctcctaagttctgtctatgacgtcactttctgttcatgactttattttctgcagggcatggcaaaggattccaacctcacctacaaaagaagaacagcaagggaagtgagccactcattaataaatgcaaagcccaatatggttctgggatgtatcatcctaaacttcacgatgcttatagcttagttatgaagactatactagccctgttctgctgtgtgtaatgagtaatttacttcctcctttcacaagttgtttcctggagcttcaaggttttttgtttttttgttttttcctaagcaacatgttttccaaaacaaaaacaacaaaaaacaaacaaataaaaagtatagctctttttggcatacctattcataaaaacttcaagtcactaagttgttaaacctaaaggagtgggatttatttaggtggggtttatttaagtctcccatgttagagtcatctgagattccaagtatatgcacaaatttactaaatttatttggggactataattcaaagttatgattttttttcaattcttgtggtgatttcaataggaatggtccccataggctcaaatatttggatgcatggtcattagggagtagagcttctcaagaaagattaagaggtgtagcctcgaggaagtgggtgtggccttactgggggaagggtatgactggaagtgggctttggggtttcaaaagcccaagctaagccctgtagctctttctcttcttgctgcctgcctattcagatatagaactctcagctgcctcactagcaccatgtctgcttgcctgtcgccatgcttcctgccatactgataatgaacccagcctctaaaactgtaagcaaatctcaattaaatgttttcctttataagagttgttgtggttctccaagtggttctgttacacactaaagtttacacagaaaacctcagctatattgctggacacttagacctagttttgtgtaattgagtgttggggttgtgaaatctttgataatcataagtagaaagtaaacagttttaaaatataatagtgaatccagagagagggagagggagagggagagggagagggagagggagagggagagggagagggagagggagagggagagggagagggagagggagagggagagggagagggagagggagagggagagggagagggagagagggagagggagaaggagagggagagggagagggagagagagagagagagagggagagggagagagagagagggagagggagagagggagagggagagagagggggggggggtctagtctagacacatgagatacattggcgctttagacatgtcacataggcatggagaaaggatgaaggcaaaggccaggagagagcacagggaccagaagctgattcgtgttgctagaggattatttctatggctatagagaattaggctatagagataggaaggaaaggggcatgggaggcaatttgcatagttctttccccccacctatggcatatatggagatgttttctccttaattcaacccttaagaaattaattttgcccctataggaaatgtaaggagatatagcctctatttctgggaaagaaggtagtcccagcaggtgtgagctacttactattaatggagtcagctaaaatcttcaactgctgagtattgtccaggacctcaaccctttgagtgtaggggtcatagcgaacggagaagggccgggggattgtggcagcaaaagtcctgaaaccaaaaccaaggaccccagtgaaggacaccatttaaagacaggttatcctggaggagttccaagtggctttttccttgctgtgagccccaaagtttcctagaacagaggctcagatactgggctgagatgtgatatacaattgaatgaggtcatatggggaagcctttgtttatgtgaatgtgaaagggcacaaaatacaatgaaaccacgaacacttattatgtaagataaaagagtaaatgaaacctatgcacgaatactatttaaaaaaaatatctctaagttacttgacaatcaatgcaaacagagacacagtcctggacaatttataaaatgttggatcagcaggaagagtaccatggattaggtgtctgatatgaactgaggaccacagtaaattctaactgttctaaccctttaaaaacatcattcttacattaccatttacaaaagccctaagaattaagtaatgccactaaccctggcagcctgcttctgatctgagtgctttcttgctttccctatgcatgacttctgcggatacctcccaggaggatctttatgagtgacattaatataattaacaagacagctccaagacaactcagatattattcctatgatgtaagtaaatgctaccgtgttgaaaatgacaattatcgggacaggcagctggttgccccaggtttggcaagagcagcaccctaagtccccaagtcaggctgtctgtgttccttcctcctcagttacagctcaaaagatcgtagacaataattcttcatctccgttcctcattcccttattcttctgcaagaagagggtagtaacagtcttcagctcagaagggcatagcaagtgtagtcacatcacagagtaaggcgtagctaattgttgccttttattagtggctggggacttaggaatttgttatgtctactgccccatcttccctctctgaaaggagctttcaagatgggctcttctagagacaaatccctagccagcaagtgatcagtccacaacagcaagagaaagattgtcagcatgcagcctgtcagacctttaaagtctcagctgtgccatcagtgccaggatccagggcagaatacccatttggttccattctgctgaggggcagctcacagagacacaaagaaaaggctacattcaattaatagtggctgcgcgtgagagagaaacagtcctcaccagggacaagtcccctggtagttgatccaatcccaaatagtcagccccaaagacatatccataagaacactaaacggattcatcaggtttcattcaagttcagatagtggagtcttggggatataatgaagaagaaactccagagtaaaaagaaatctaaaaacagtgcaggatttggcgagaggagaaaggggaccatcataggcaacagcaaacggacttctgggccagcacttaaattccttaaggcatatacataaaaactgacattgcagagacccaaatgccctctgtacaccattcaccatcaataaggtggttttctaaaagtggtagcagtatcaggacatctgtgcccaggtagaactccaagtagactgtcccctgattagatgaggtggcatagctcacaggtggcatagctcatagacaaggttctcaattgaaagggccaagagttccatggtctggggtacctctctcagccttctctgaacttctctgagaccatcagtgatttatgaagtacttactatgtgccaggcatggttaagggtactaaagaaagtccaaggcattaaatgaagttaaaaaaaaaaaccttctatatgtggtgcttttctaaatgaaatatttgtagtcaataattactatgaagaaaagataaatcacagaagctggcagggtgaacgttagagatttagtagacacatatcatataatcacatctcctccaataatgtatttgcatgataccatatgattgtgataaatttgaaagattattatctccgagaggcatcatacacaggcatgcaacttgtgtgtttatgtctgtgtgagggttaacaacccattgcattaacagctgtacaaaggtgttgtggttataagtatgcatagttagtagatagcaatactaacaagttcctatgctgctggcttatatactaaccatgttttaattctagtgtcctcctgcttacaaagataaaataatataccatattatacccacaatagcctcaaacagcttgaatttattatatcatttctgtaattttctcttatgtaattttttatcttatttggttcatcatggccttaaggccatccaatttatatgtcacacaatctgtatctgtagtagatgctgtcttctatgctcatgtatgtaatatgctaagatgttcacacaatgttgaaatcaccaaatagtccacttctcagaagtagctcacttatttttaggcatgattatatttggctggcaaacagatgaatttgggtgaaaatatgaagagatgataaggtgggctctgctagtatctgggagaataaagaggagaaggtacttttcaagactcaaaggcatctggttggttaggtgtggtgagctgttatagctgctctgcacacaggaggactttgtatctgtgttgaacagataagagtttctgaatttaagctgggatagggaaatgaggtaggtacatccaacctcccaacaaaatgggcaagggtgagtggggagacggcagggtctatctgtgtgcacagttgctgtggacattggagtccaggtagcgctgctagcctgatccaggagacccagacaaccagcgatcctctttggtaacctcacctcactttctccttggcatcattgaaactctcggccacatagtacagaggctggaactctgtgacagtatactcctggcaggctgtcttctctagctccaggggcaggagctttggcttgtctgataaacagtactgcagcgaaaagtttccagttaagcccgcattctctcatgcatttcatagtccacctgcgaagcttcttccatctccccatttctctaccctagtgcaaattccctaaaactgagacatttagcatggactagattaaactctttatagctcatcaaaaacctacagttaactagaaggtaacaattcatttcaaaccctttctaatatgaagttcaatagacattgtgagagtggaccatacctacaaacttgtagtcttaggtgagccttgggctcaggaggcctcttctctacccagccccatagactcatacttgaatttctatctctaacaaaacagatgtagtcaaaccatagctgctacagtaccaattgactgtgcaagtatacctacagctatctactaatacactttagaaaagccttgaggctgagagtgatcctccatgcctctgcacttaagtacccatgaatggtttctattagactcatacctgtaattctccaaaggatgacaagagcccagcaccatatgcctttatagaatctccttccttgcaaagcccaaactccacagtaaaccagtaaatctgaaacagaatgcaaggaaaaggcacacgtcaggggtgagcaaggcatccagatactcaaagcattaagacagatctggttggtaggagtctgtgcagatatgctctctgaaccagtatgacctagtatcacttctgtatcccatgtcttattctatccagttgcctgttgaattgatggtgaatgagtcctggtgtaatatcatacatgttagaatgtattaatattctacaaagacctccccaacaaattcctctctgtttgacagaaacttctccatatcttttgcttttctgtctgtgtcacaaaccagaatgatagattttgatattgctcttagattactagggttcatctggtatttttatcaggcaaagaagtgggtggttaagggactggattgtgagagagtcaaggagatgtacacttcatctgctatgggaatgtgggagaaacatgagatgaaaacatgggagaagatgatgtttaagtcaacctctacatgtgtgttcccaaataatcacaccctcttccttcagcaccctctgttccaacatgtctttgatacctggcctgattaacagtcttggagttctggtgcccagagaagaccagggctcagttagatgttcaagatggtcaccatcttggagaattagaggtgggttaacagggaagtctctttgttagaccaaggaacattaagtccaagaaggtcatcagagcccagtcaatatgacttcatcatacacagcgagtctttagcccaggaagtcaaagcaacatacttacattgagacacaaaattaaaggcacagaagagacatgggtctgttccaagtccagtgtaccaatatggtggttcctttgttatcaggaagggacaggatgaggttctctgaattttaagacttcacttcctataaataattctatccactttttctcaacccctttgaaagctgctcctctaagatatataaaatataaaatctcatgttcacacaaatttaactctttagaccctcatgaaatacttttgagatggacaacaaacttatatgcccagttttaaagataaacaacaaccaaaagccacttaccctcaatctcaaagtatgctcagaaaccaaaacttagaattttctagcctttctgaggaagtgaatgtataaacttctaactggatatatctcaatcctagctttacatatgtggtagtttttaatttcatatgaagtttgttttttaatcttccaggcttcacatatgataaggaacatggttctatacctgtagagggacatacgaaaactggaaaatgtaaggaaagaatttgccaatggtgcagatctggtgtttccatagctcccctcctgtgtgtccatggcacctgcttctcttgtaagtgggaaatgtttgacaataatgggaagcccagggctggagagatgcctcagggcttaagagcactgactgctcttccaaaggtcctgagttcaaatccctgtaacaacatggtgatttacaaccatccatgatgagatctgatgttctcttctgagtgaagacagctacagtgtacttacatataataaaccaaccaaccaaacaaacaaacaaaaaacaaataaattaatattaaaaaaaagaatgggaatcacattatcatttttatcatctggctgagaacaaccctaaggttggttctagtgcataggtagagaggtaaccactctccaagcagaagtataaagccaaccagtgcctgacacactttgggccaaagaattttgggctgtaattatagatgaatggcatttccaagaagattctattaataagtatgtgagaatatccacatgcaagctgatataaaagtcagtccactaaagagaaaccaaaatgtgacatttcattcatgtgaatgtgctttgtcacattcttatcattatttcaaacagctgccagggagagaataaatcttcaaagatatgaagtatagtatacccataaccctgcccccattggcaagaaaaacttactgtggccagtttctcaatgtactcatcaggtgcccccagcgatgcaagcccaatttcctgtgtgtggagaaacagagtcactggcatggaccatattaaaacttcaccctcagtgccaacctggcatacagttatgggcagggtaatagatgactaagtaccttctgaagggtccagatagaccctgaatattgttagacatctgtcccatccaggtcagatagaaaagagtcacagacctcaagagcagcaaaaaatgtgtccccaatacttgattcctttgtactcactttacaaaaaggaataataaggtagcctatgcgaggtcagttagcatctactgtgtcattgtttgacatcagcctagtgagtcccacacactcagcatgagacagaaatctctgggatatggaatgaatcttaatcaggtatctttaaaataccacagaaagactgaaaataagtgattatatctttccagaaatactcattgcaagagtaccttttattcacctgatttaattatcatctctgaggcttactgcctctgtgtgctaaactaggcctaatcttggaagcgtctagcctccaatacagtctaatgtaggtctagaatgttttcatcctctgagacttgcagctgaataagctcaccctttcttttctttttgatctcttgctaattggttcaactcagctgttctgggtcaaactcctctccaggctgactgattctatctgacttcgctcaacctctcctgaattgctctgcttggcctcaaactaattctagcaatctgttctaatctgatggctccttctcattctctgactcattgtgtcttcctgtgttcagctttttctctcttcaacttgtcactgtacaactttcccagtgaaactgtcttcccaccatcttccctctgcactgctctcttaaatagcttccctatcctctctcttctcatgagagttaggcatagcctattttgtcaaatctttctctgattcatcactttgtctgctactcaatcaaatatcactttcaaatatgggtgcttccttttacaaattaactttacctttgttgtttgagattaaaggtatatactaagggcgtgtctgtatccagctagaggaactaaaggtgtgtgctaaagctgagccacaccacaacaagaaacaggtttttccagtaagcaactcaatttcaaggttcactgtatgatcaattatcctgcaacaacacatagctggagatgaagtgccactgatcattaattacaacctcaactacagaagtcctctggtggtctttttgtctcttcactagctccctttatttctttctgtgtgtatctttccaaacatatacattcatccactccaaaagcgtgcattaaatgcttcctatgtgtcaggacatagacaaaattggaaaatagccttgaccttgtgacttatactacacaattgttaatatgtttttaaatatgtttaaagttcgtcaataaatataaagttcgtcaaggtcttggggggaaaagaaagacgtggaggaagagacgaaaaggaatgggagcttcaagtaatcttgggaaggctttattattaatttgggttcctgggaggcatcactaagaaggtagtacttggggaaatacttgaatgttattggttctattgatgatggaaggagtgttgttggttcaactcagctattctggctcaaactcctctccaagctaactgattcaatctggcttctctctcaacctctcctgaattgcactgcttcacctcaaactaactctagcaatctgttctagacatcttgtccaagagccagaccaaacagcaagcatataattagtaagaaacctctctaagcaaggaaaatatgggctacctcaaggagcagaggggagcaaacactggagcagtgagagtattggtgggtaatatggaagattctaaatgcaatcatgtggactttttaaaaaggtattttaggacttgggtttttcttttcagtgaagtgaaaacctattctaggattttaataacttttattagttttcatctttggtaatttcatgaatgtatataaattacactgtagcatacaagatctagtgtgtgtcatcagactgctactttgtaagaatagaccgtaggggtcaagggcaagggctggatggcaatgaggaagatacagaaaatcaataatgaatgatagcatctgaggccatattagtgttagtggatatgatgagaaacaatcagttattatacagtttgagagtagaacacattaaatttgcagaaatactttgttgtttcagagaaaagagtcaataatagcccccagatgtgtatttggtttgagtgagtcaaagaatagagttgccatggacacatacaaggaaacctaagggtagagaagttttgaagaagactcaaaattcagccttggacaggaaaatagagatgtataatcaacatcaaagtaaagatgctgacttgatggttcatatgtaaacctgaaattggcattgaagacaaaacatgaatgttcattattatattacagatatatattcaaagtcatgaggttgtctaagaaaaccaaaggaatgtgtgtgaacagaaagaaagactacagatattgtctatcatgaagcaagaggctacatactctatgtcactacctctgtctgggtctcagctggagtttggcctacactaaacttataaaaagtactgtcagatttaaggcaaaccaaattcacatagtccctattctggctctactatcccatctctcttccatgtctactctacccacattattagatagaccagtcccaagtttagcagaatccattaataaaactgaggtcaaatccctcaccttttctcttggcgtcatgtttgtttgtttgtttgtttgtttgtttgtttgtttgtttgtttaggataggctctcatgtattccaggctagcccaaaaatgactatatagtcaaggataggctctaattcctgatattccagcctacatctcccaagtgctgaaattataggtgtgtgccacaaaacccaacatcttgtcatctttctttgaaagccaagcacttgaataaaacaaggccccccattatccctctgccctactgtggcaaaaaaaaaatctgcctttaaataaaaaaaaaaattctcataaaacaactctttccctggaaccatctatgtcaaagttgagaatgtgtcaaacagagatcctatgatgtctgttgatattaattgtccacttctccccagggttatccaaaatgcaaataactcaagcaagacttccaattgccctccagcgagacagaatatctctggagtcaaaaattcaaaatttctattctccaaggggaaagcatctaattctcctgtcacagtaacaagtccatgttttcaaaccatcttaagcaatcaacaccatcttggcagctcaaactacactattggcaataacacttccacagttaaagttcaaccagacactcccatgtctctagtccaatggtttctgggctccatatttcccaaaacgtcacatgcaagtagcaggtgcttttgtttggagaacatacgtcttctaagaaatcaaggaattggttgaacttattatttggttcgtttcaaatatcaaggggcagcttcatcgtcccatggtagaagtaacttcttacagctaatgggaaatgcttgtaaattcattcacacgcaagatcattactttgaaattcctacttggggcaatgtttactcatgaatcatccttagatcatagttctttctagtgaggaagaagaataacaaggaaggcatgtcactgatccaaagctgtggaaactgaggcacaggacagcctcatagcttgtcctagttcacacagcaatagttcatcagtgctctggattgggcttctgagtacttttagagacatcatttactcttccatgatcccagctagccatctgtgttttcaaatatttgatagcctttatcatccatatgcctgtgggtctatgtgtgggtgtgtgcccacaagtgaagatgcttgtagagattacagtcataagatccaatgaagctagagttacagatggccattaattacctgctggagtgcttagacaaaaactggccctctgcaagaaaagtgtactcttctaactactgagccatctccctagaccgaactccacactccccacccccacaaaaccatgtttttagtctccttagtgatgagaaaataagcataatttttaactcatcaaaaaatagttgtgagcttcctcactaccataaaaaagttaattgaggccatggtgctgtttagacagtggcaatgagatatatggctctttcttttatctttttttctttgtttccttctttctttaatcttgtatacataagatcattgacattggattcttggtaaatgtcatcttatagttcaagaatccatgcacatgactacctgacaatgtgcaaaatgccacagtctcgaaaaagtgtagtggatggaaagtaggagatgatgtctgcatagagatcagagatgctttcatcagtgagaaggctcttagtgtgcacctgttaagatcattgatatcagcaaattgaccataggataggtaattaccaacaaccccaggctgcagttcttaaaatgagtgttcaacccagttcactaaaccacccttctccctaccattcttctcaggtagggtcaggatcatgtaattgtatagtgtttccactctaacagagcatgtgacagccccttcatgaggaattcattcattccagcaatacagccccaacccattgactaagtctttgttccttacctgagaaaactgggcaaagcttctatctgaaaacaagggcacatgtcccaagagttcatgacagatatcactagaacacagaaggcacagtgcttagaggaaaggcaagttaaaccaaactagactctgattttatatgaagaaataactcatggagctttgctctcaagagtaagcactagacaaagtcctcatgagtcctgggagacaggaggggctgagatgcagagctaaggacccagaattcctatgggtctcttctcagatacctgaatgagttatgggttacagactcctcccactccaaatcttctggtcactaacttacatgaagaaggataatgtgtccagttcttccaataaggacttaaaataatagtgttgctcttctcttggcccagagtaggtcagcagtcaaaagagagaggttacatttatctaaaacagtgcaacaggttctttctaattaggatccattgacatcccaaagaaggagacatgattagaggattcctaatgatctctttggatcaattactatgtgattgatgacccaaataggctaatggtcctgataggaagcacagtagccactaattctctccttagccaataatctcagccaagagctggaatcatccaggtacatctaggagatgctgagatcacttggctactcttgttcctgtcctatttggaacattggagcttgatggaatcccttttcctggtactcaaagagttccaaatccttggttcacaggatgtccagctctgtgagtccaaatttcatctatttggacagagaaaattcacagagtatgagtttcctttaggactatgatcaaataaagcaggcagtggatcatggggaccagcctgcaatgagcctgatcagcattctttgagcatccattgtggttggcaggggtagctgaagaatgatacttacggttcaggtgtgtacatgggcttagatccatgcctaatgtactgtgtgcagtggaagactcggaaggccaggccacccaagaaatctcgagacgacagtaagccagcaacaggacggaggcggaaaccagtacaagctggaaagcagaaaagaacctaaaactcaaggctttttataagtggtttacaacctgtgaggtatgactccccaagggggtggcaccttagatatcctgcatatcaaataaatcaaatgttatgattcataagaatagcaaaattgcagttataaagtagcaacaaagtaattttgtggttggtggtcaccacaacatgaggatcagtattaccaggttgcagcattaggaaggttgagaattgtaagccttatggtaaatccagagagactacaacccccctactgctttgggtcatgtaacctcacattgttgagcctcagttttatcccaagcaaaatgtctcttggcattactgagggatgtcgtaagcatcaaaacaataatgactaaaagttacatagcaaagactagtccattgcaaacatccaagtaaatttctctttggctagtgttaattaggaccaaacactttcccactacttctcgtgttctctgcgtgacaaggagatgtataatcaacatcaggagtagagcatactacaagcatttccaccttctccaccacgtcatacacagcccaaccagggaggagaaacatcctgtcagagtggagcaacagggaagagaaaatgtgcatccaatttctctctctccctccctccctcctccccttccctcccccttccctcccttccttctcttcctcctccctccctctctgtccctctccctctgccctatcctatccacaaaacagtgtatgctggtttctcttagttttaaattataggatgcactgagaactggtaagtgtttccctaatcaaggactaagatattgggaagtttttgagcacacatcgataccataccctctaaatagcttttctttaaagctaccaattgataaccattctctgctttctatatctgtttcttggtctgctcacactagaactagaatagcggcattgcaaacgacagtaactaacactacatactacctaacatatgctaggtacaactctaagtattttgcacaaactaacctttgcaatcaataactgtgaggaagccatcttatcatccccactttaaagatgggaaagctgaggtatgggttaaagctttcaatccagggtcacaaaccacaggctaagtggttgtaaagaaccagtgcccaaattatgagctttgccaagagagacgtggtttctggtctctgcctccctgactgcacaaagcctattgattataattatatcacttcccaactgctaacattgatgtttcattattcttactactggccacagcattagggttaaaccatcttcaggacctgccctctctcctgtcactgcacattgattgggatttggggggaggtgtttgtttgtttgtttgtttgtttgttttgttttaatttccttccctctactttctcaaatctcttgtttttccttttggaaattttcatttattttttaattagatattttctttacttagatttcaaatgttaccccctttcttggtttcccctccgaaaaccccctatgccatccccccatccccctgctcactaacccacccactcctgcttccctgtcctggcattcccctacaatggggcatcgaccctacacaggaccaagggcctctcctcccattgatgaccgacaaggccaccctctgctacatatgcagctggagccatgggtccctccatgtgtactctttggttggcggtttagtccctgggagctctggggaggtacttgttggttcatattgttgttaattactgtttgaacatttgctccttgctttatcctagaagtggaagatacctcgaagatcatcacctcatctgatctgtccccattctaacctccctccctgccacatagttttctggtccatttcctatctattcatggtttaatatatagaaaaattctccccttctatagaactgtggtctgtcttcctatgtctccttactcagctagcattagtaggtgttcaataggaattagtcgactatttggggtttgctgaatgaactgaatgagcctcagcaaggaaaccatactcttccctggaaaggctacaccaaatctcatcacttagctaaagctcctctgagcatctcacatggccgctaacccgcaaacttgctgaacactgacttcggacacagctgtatgccaggtgctctcgtatgccacatctgtctcagtctgtgaaggatgccaatagggcgactgtgtctatttgacagatgacaacatggaggtagctttgcacaagcagaaaaggtcaaaggcaggatctgtcccagatgcacagactcagagtgagcaactcttggcattggcccgcagaaagcatactttttccttgaactgacattgcagccgcttcttaacagagagctgcagggtaaacactaggttaagcaccttgggctttgaatatgaaaataaaaatcctttcagagcaattatatgatataaaaatattcacacctaacattcttgcatggatggaagatcaataatggaggggagagggaaagcaggagacactgcagctgggttcttcctgggagacttcatcctgtgcctgccaccaagtctcacaacaggttctatttaccccctccctcactccttccccccaccccccactccactgtctgccgggctctgaccctgatgtggacttactctgcagaaactgagaaacatcttccagctgcgggatgttgtcttcacggaaaccgcagtacttttccagaagagggaagatgtggttgtgctcgtagcaggcatgtgttttatacaaggccttcagagtcctgaacaccgttccccaggtcttcctctcctcctctgtgtattccacccgaggaatgggctgcccactagaatacaggcatggaaaaggtgtctccagttgggaagggtcagggcacatgatgtggtgaggtcagcacagggagtcaaggccccaatgctgccagtgaccagcacggacttcaagcatagtttgaaagacaaatgcctcatagaaaaccttattgtgttgttttccccccatggaaacatggtttggttgaggatttgctatcatttttggaagttatttggcctttctgttcttctcagagcctaagccaatggttctcaaccttctaaaagctacaaaccttttatacagtttctcatattgtggtgacccccaaccacaaaattattttcattgctacttcataactgtaagttggttactgttatgaatcataatgtaaatatctgatacacgggatatcttatatgtggccccggagaaaaggtcatttgaccccaaaagggtcatggcccacaagttgggaaccattgctctagactgtttgttcaaggtagagacttattttcaggggcctggcaggtggcacatgtgtagcgcagattgtccagggcaggatgacgaatgggagcagagacaactggacaattcatcttcttccaggcaaaggccctgaagttcagggaaaacactgtagtgtcttgtattatgtccatgaaagcaatcgactctggctaacctggatttaatagataggtgtgtgtgtgtgtgtgtgtgtgtgtgtgtgtgtgtgttaaaaacttgtctggggagtttgcgcttgctgagtttgatgcttctgatcctgggaaattatgaagttatttaaatttaggctagggttccacggtgtataaatctatatatcttaaggtgtgtgtgttgggggggggaacaaggacaggggcagggataaggagagaaggagacggcgagggagaggaagaaggagagggagagggagaggggaggaggagagggagacggggaggggggagggaaagggggagggggagagggagagggagagagaagctacatgtcataagtacagagatttgtcaattaacagagctctggaccaaaagtatgagacttataaatactgggatggggtaacaaaacgagcaagcccatgctatgatataaaatatgtttgtatgtgccaaagcatatacatgagacccctgtcccactgtcctgaatgccctggggagggactgtcaaggacgagtgggtcttaacaagctctctaggtgaatgatgcaagttgcagtttaagagtcattagtctggaagcttccaggctgtgtcctgaaacaatgaagagcaagcaaagcctggctcctgggccagtgactgttccctggcctgctcctctcgctagggacacagtctgggacaaagtgggactgtttaccttggaactgtgggtctggttccaaactaggcccctcctgaactttcaaaattgaacctcatccaagaacattggagcagagactattattttctagagaaaggtggacagggactggggaggagagatagattgttgattgagaaatgagaaggtctcaagctcagaggagctcctgattacccggcaaagaccacgaaacagtgtcaggctaacttttgcccaagactgtaccatactccagggttaagtagtgaacggagaaaagaaaaaggctttggatgtaatctcaggtaatgtagtaaactcctatgagccttagtcttgcacttgacaagtattcttagtgtggacatttatatgcataaagtaatatatgtaggtatatatatatatgtgtgtgtgtgtgtgtgtgtgtatatatatctatgtgtgtatgaatatatatatatttgtgattagattcctaatattggaacttcagtaacccctgatcattaaaataactagttctcattagaaagatagggatcgatgggaccagtgacataggtctgtggctaagggtacttgctaccaagtctgcccagaacccacatggcagagaaagctgagatcctcacaagttgttctctaacttccacacatgagtcatagcaggcacacacacacacacacacacacacacacacacacaccccaataattaattaattagttaattcattaatgtaaaaacaaaaccaagaaagacaactggtacttttgctgcaacaaatttccaaaggcggtgacattttgatcatacgtcagtcctggttcacactttctctcccagtgacccagcatcttttccccttcttgcagcaaagcacctcgcacctcttttcagtgtgtggggtttgagaaagaggacactcaatgctccctcctccgaataagggactgcggtcagagttgtacaatcacagctcctttatcctgtccacagtgatcggctgacatgggtccatgtcgcagaactgagacccaatcacaaaaccttagcactccttgtaggaaaggcttagaacttctaactgagctagaacatcgcatgggacctgtctctgagacagatgaggctgagcctgaaaccaagatcagtcccaagaacttgagccagaaaggcagcaggagtgagaccctgagtcctggacctgcctaggcacagggttaataggcacagtggagatgctgactatggttctggggacagataaaattgaaacctgcctttgtcacctactaggaaaatggctttaaaacattatttaacttctttcagcctcggtttcctcatccaaaaaatgaggatttattacaacactaactgcacgcatgcacgcgtgtgcacacacacacacatacacacacacacacacacacacacacacacgtatatatttcagagaagatagtgttctagatgtctctctatccacatataggtttgtgttcaccacataaagccctatcatttccttatgttgttgttatcctactaaagacctaatacctcagcctctgggacagctctagagtttctttttgagtacaattttctatttgttcccttaactcagaaactgctgtctccaaaacaccaagtttcccaagtcccaatttacatattattccccgaggactcacaacagcaaagccattatgttcccaaacaacacatttgatatggccattttctcttggctaaaatacaatagaattctcaacggagcaaaaaaaaagtacatcccatctggcagttgccctacaggactgggtcacaccagataagtagaacacgggagtgcagctggtccggtccgaaggctccggtgattcgttacttactggaggagccagatttctttgttctggtctaatgtggagaagaccagagcctgtttcgttcatgtggaagcctttccaatcatttcagacacaacaaacaattaactaacaaagcttaggcgagacatagactgtagcacagtgggtagttttgtttgatctagtggcgacatttaaaaatgtgttattaaggaaggttatacacacacatgtacaaacatacacacatatacacatgcctacatacatatgtacacatatacacacatacatacatacacacatgctcacacataatcacaatacacatatacatacatatacaaatacatatacacacatatacatatgtacatgcatacatacatgcatacacacacataaatacacacatatacacagacatgggcacacacacaaagcagggggttctagactgatcgtttccaacctagaatggggggttatggtatgttcttctctcagttgtccaacagaaagacttactggcggtagttgtaggcaatgtcagcaaactgctttcgtctcgcccggtacacaggatctttaaagccctaagaaagagaagacacttgatgactcaagtctgcagagggagaggcctggcacctccagcaatgatctgagtggaagtttttgagctatgatgacacgtgtctccttgatgatgctctaaaataaggtctctgttaaacccagaaggagtgagtgacacattctaccaagccttcaaatcagggaaatctcctttctgaaatttcagtatctacacatatactctagtcataagaaatgtcatctactccattcctggcttctaaattaacttgatcaagccaaatcagatgcctgcgatgaaggcatagattattcacacaagtgcctgtgatgaagggatagattattcacacaatttctggcaagtgttgtgtttagtaatgcttcctcatgtatgtgtgtctgtgtgtgtatgtatgtctctatgtatatgtatgcatgtgtatttatgtatgtttgtatgtatatgtgcatttatatgtgtgtgcatgtatgtgtgtatgtgagtatatgtatgtttatgtgcttatatatgtgtgtgtgtgtatgtttgtgtgtgtgtgtgtgcgtgtatgtgctgggatgtatgtacattttgggggatagaagttgggaacatgctgaattcaaatatcaactttgggtgtcaatattcaggaaccttctaccttgttttatgagaaaagcatgtgacaccatgcctagctctttacatggatgctggggatggaacctgggtcatcaagttttatataatggaatttttcaaatcagctgtctccacagcttccatttaaaaataatcaccactatggaaattagtatggaggcccctcttcattccttggtagacaaatgggtctacaaatggacttactgctgtggtaattttgttttgcattttaatctcttgaaatagggtatttctgggcagacctcagttctcttgcctcagccacccagaagtgctaggaaaatgtcattcaccacctctctacacctgtgtcagcttctggcacaaacttgtcaggttgatcagtaagtatgttcttccagaaacaacagagtccccaggaagtagatccataaaggataggcccggctgtggctcacccttcaggacttgtgaatctctctgacctggcaggcaggcgctccattgactgagaaaaggatggcaatgtcttctctgaggttgactggcaggccgtcttcccaatcctgccaagcagcgcatttccaagtgcaaagcagccaaatgtgtctctgagtgtttagggtggagtgggcacatcatgagtgggaagtgtccccgtagatgagcagagtattttacagaaccattcactgtggtctgagttgtggtgagacaagagactggtccactgccatagaacttttctttgttccttgcaaacatttcccagcaatcccttccagaaatcacttcagtttgcaatttccctgtctctccagtcctccaaaccatagactgaatgacttgaaaactaaggctgtgtatcacaggcggtgtttaaagatgcctttgaaggtcaatgttccctgactttcaaatgttgcctttgctttctttgcttgactggcttgttaggttttgcttgttttttttaaatcagggtcaaccaacatcttcaaaaaaaatttttaaaaaaaatgaaagaaattcatataaggaaattttacctgagaacctggggcatgggggcatagaaaaaagaaacaagagagctggagggagggaaggagggagggagggagggagggagggagggagggagggagggacagtaggaaagatgtgggtagggatatttctatgtgtttactaggacgcattttaagaaacaattttttaaaaacctgaatgtttcacactagtaaagcaaaattatcttatagttattccaaacccacaccccaatgataagaaatattcctcagtttaaagattctgtggcatgttggttacacaatacaagctgttgatgtctctaaaacactggctagcttaaaactgttaactacaaatagggacactggagagatggcccagcggttaagagctctcgctgctcctccagaggatactggtttggtttccagcactcacacaaggtggctcacaaccacttgtaactccagctccagggtccacatcctctgcttggctccatgggctttcatacacatgtgtcaaatactctgacacaaatacatacacctatgcataagtaaaattaaaataaaactaatggggaatttgggagtttctgttagcttgtttgctgtcagtatttgagacagggtcctactctgtagctccggctagcttgtagtcatcatcatgtatattgggatcatagctgtacacgaaccacacatgctccaaagacctaagaacttgtaattaacatagggctcatttatgctgatccaggatgagtgtctttgggtattgtaggaggagaactagtttaatttccaagcatcaccagcacacaatcagggaacacttcaactagactaaacgataaacatttatctatcatatcttcacacttgaactcattaacttaaattgagcaattgtcatcctgactagacagtcttaacagatgacagtatgtgtctctctctctagccccccaaaatataaaagaaagattttcccagcatcgggaactctgaagaatgtctagttgttttgagattggaagggtagacaatgaagccctgttaggctgtttactgaagggtcctgaaatgtaataaataaataaagattaaatacaacattttcattaaggttttccaggcctaaccacactggcaagctgaaatttgagagctgctttagaaaagtagggacatgagagaaaacaccttgtaaaggaaggaattccatttcacactgcctcctggaaggggaaacccaggcctaactctcatgcccactcaacgacaattcatcattaatgtgccttgtctggatgctttagggaattttccacctctgaatgtaaaagctcaatacaaaattacatatctaatagaaagtccctgtgttgaggggaacacatagggaacaatggatggaatacgtctaactctaataaacgctccatggatgcagtgcgcagagtggctagccagcaatgctcttctgtatgtttctgcagttttctgctgggagtttgtgttgtttttgtttttgttcttgttttgttttgtttttttgttttttttgtaattgagaggaagcaaaataatattctagctctatttcaaaccacttggaaacagcatcaagagattcattacatgagcagatgtgccttgcatgttatggggattcatcatttgggacggctctaaaacagccgtcccagcaaagagctcccagcacccagatctctgtcacctcagctaagttagactcacctctggtcagacttgtgaccttgaagcctgtcctttctggggccttggctttccatcttttaggttgccaggtaaccatccctgtgagctgagctgcactttgagttaagctataactggtgttagctgatcaccctgtctcagtttagaataatagcagccatttcactagcaccgcgtgtagttttttaataatcaccctgtctcaagtaagcttaatagcagcgatttgggctgtcctgcgtgtaaccaagtgtgttttaacaggagaacatatcgtcattggtgaagggaagggtgtcagagggagagactagtctaggagataagaagtcatggtaccatctgagtctatatgtaatcccttttctctctcagaaattttattacttaagagtatttgtgggctggtgagatggctcagtgggtaagagcacccgactactcttccgaaggtccagagttcaaatcccagcaaccacatggtggctcacaaccatccgtaacaagatctgactccctcttctggtgtgtctgaagacagctacagtgcacttacatataataataaataaatctaaaaaaaaattatttaaaaaaaaaagagtatttgtgacaagccttctcaggactcttctagactgacatatcttgttcatcattgttcctgtcactgccgcagttaaagctcagatctgccatcttcaggacagcaaagagatcataggtttcaagctgccatgcccactccctacgagtgtggcctcctggtggtcacctggtggtcagcttttccctggaagctttcgttccctcttaaggaaatgggattgcgggtcccacctgcttacaggatagcatggataggttaagtcacaggcagagcatcatgtaaaacacatgagcacaatgggctggacctaggccccctgcacatatgtagcggaagcgcagcttggtcttcatgcgggtccctcagcaactggactgggggctttccctgtatctgttgcctgcctgtggatcctgtctccctaactgattgagctgccttgttcgccctcagtggagaggagtcacttagttctgcagtgatttgattgtccgtggggaggggtacccagaggaggctcccgcttctcagagaagtgaggaggaggctgggggaggagctgtgtgaggggacactgggaggagaaaggggctgatactggggtgtgaagtggatgattaactaattaattaaaattaactaatgaataaaaataattaatacatattaattagttaatttaaactgtgagcccagaacaggcacatgtgagcaaaaacccagagacatgagacttggggaccccatctcagaatgtaggaagtacacgctgggatgggcccctgagctccttccacacccttaggccttgtcaaggcacctacagggccagccagatggctccgcagataaggcacttgctccctcagacctgagtttggtacctgggacccacacagaaggaaagaagacaccctcaagctggcctctggcctgcattctatctttctctctcctagccccggctgtcctagaatttactatgtagaccaggctggcctcagactcaagtgatctgcctgacttgacctcccaagtgctgggattaaaatcgtgtgccaccaaacacatgctataaattaatttttaaaataaaagagaacaggtgtgtagcagaattttccctgtccaatcaattgaaatattaatacaagaagcctgtgattggatatggaaaagggaggcggagctacggtttacagagtcagaggagagggaaggaagacggaggaagaagaggactatccagattcccggtggctttaaatagccacaggtagctatggacaattacaggacaattcgtcttatctaggtgggcaatttatatcaatattgattagctctgagtaaattgtgtggctgttttgcggggtgagaatttactgatataaatctgacttataaattataagcctcaagagttttgattttatcgggttagtgggatttggggccgctgaccacactggtcgctgcaggggctagcctagagacagaggcagcaagaccgcggggggggcagagagtagctgggtttagcgcgggatggtgccactttttaaatattccccgcagcacgggtgttgaaatttttctaaggaagaggaactgcttgaattctatttgtggggacataaaatagtgtagccatcacagaacacagtctgaagtctctaagcatgaaaagcagcgctctcatactcctagctaaacccacgcgcacacagtcctatggtgacagcgtgcaaacgctgacccctgaggaggagatggaagagtggctttcaggggcaagagatgagagtgtagccttgaaagtctggtggaggtttgccagtgggaaaaaaagagacggtgtggtagagagcacctcaggtggagggcatggtatgatcaatttacgggatggaaattaagcacatcccttgcgatctgcctacaaagctcatagttgctggctcagcttccctcggtgtgactctgagagaagttgatgcgccttcctccccttctgctgtacagttagagagactcgagggcacagaggagctctccggtgctacttcagctccctacccttactgccacggaacaaggctcaccgatacaacctcccgagggtcctcacctgaaaatgaaaagtccggccctcccaggtgttgattgacactagaattaaccatgtgctgaggatttagactagtacacagcccataatccaaaaaggttagctagtaagtgcttgataaatacttgtggaaaggaagggggggtgtatgaaggaggaggggggtgagagcaggaagggagagagagagggaaagggagcaggagggagggaggaagaaagggagggagggggagagggggtagggaagaggaggagggagggagggagggaaggaggaaaggagggagggaggaaaggagggagggagaacacaaataaggcaggagggatagagtgaaggacagactactgtctctattccattgaagctgtaggcagagcacttttaccctggatttctagaacaatccttcctttgcctcatttcacagagtggctgtttgggaggctctggagcacaaggtcacacacaaatgcctcttgccaagggcagggagtcaggggaggaaggaatcatactgactgcaagggacagggcagaacagagggtccttgaagaagaacatccccttctaagctaggctggtgtctgcttgcagttcacaccttgaggccaggcctgtggggcctgcagcttcagggaaacaccctcgatgttgctctctgcttggcccctgttcccagcatctgatgaaagatggagggaacagaaagaccctggcgcctcctctacagggggactgtgtacctgatacgctgtgtttttatgataaaattcatgacatggagagggtgggaagccaaagatgtagcccgggttggcagaggggaatgaattccgcggaattttaaggccagctttggcttctgaggggacacaagactaatgggaaggacatgtccctctctctctggactggcctctcccacccacccaaatgtttaggattgaggccaatgggaagaacagagggtcaaggcaggatgctggcgactggtgagagaagtcctgatgtgtgcaccctgcaggttgagtcaggtcagacttgctttcctgggggaagaaatctctagagctgtttttgcttgcagggcccccagctgagaggcaaagacagaggcttgttaaataatgtctgaagtgtggcctttgccacctctaggctccataacatgggctgtgtcatatacaggaagaaagcagagaatctgtctcccccgagctggtattttcaaattgttttcagtttggttcaatttcatttggtttgacctagttttggtctgctctggtttggtctgctttgctttgctttgctttggtttggtttggctttagagtcttactacatagcccaggctgtcttagaattcaggagcctcctgcctgagtctcaccagtgctcaccaccatgcctgtgagacaatgtatgccaggcttacataggatgcctacaaacacttccatccttattgtaagataatttattctaacatcacaactaaggttcaggaaagccattgtgagtctttacaaagatgtgaggcagagactgacactcggtgaaacagtgaagatgggtttgtggctggcaatacctggtaagtgacagcaccaggtagacatgcatatgtgcatacatgggaacttgagtatagggcgactctcccagacagagtcaacctgcttatgggaaactgcctctgggaagagcaagcctcctgttagctgttggacctcacaaggtagtgaagagacgctgaatagacgcagacataccctagcaccagctacactaaaaccttgttcataaaaacagcttattaaaggccagagagtccactgcctggcagagagcggagaacctaaggtcataataacacactgcccacccacagaagctactagaccgccctgagcttggcctaagctgttcacttccaaggaccattggccccaagaacaaggaataagaagatcctctctctctctctctctctctctctctctctctctctctctctctgtgtgtgtgtgtgtgtgtgtgtgtgtgtctctctctctttcacacacacacacacacacacacaccaatcctgatccattcttctagtgagaacccattaaaagacgaaacaaaacagcaaaaatccatgccctctgccacaggactcagggcacagtgaacttcgccaccactcactctggtgtataagacttttgaaagtctgacccaacccctgtgtcagctggctctctcgatgatgtcatacccaaggtaccacccacccaccttcaccactggcctaactcttcaaagcagatgtgagtctctcagccaaatacccaaccacccccactgcccccacttccctcatctgactagaaccttcttctcggctctctgaaggtacaatgtcacctctctccctgtcccctggctgtgcttgatttaaatgcccataaaacgtacaaaggcagaaaagtaaatacacacgactgtatagggatagcattttctgggcagcggttcacagtcactctaacagcaatgaccgaagcaatgacgacagtgaggtctcgttaatctttgctttcccagtcctggcttctgcaggagctcagtagcattcttgtaactgaataaacaaacacattgctccaagctgaaggtgtgggaggaggggagaggaagagaagatggagagaaggtggagagaagggtggaagactcttcagagtcctggactcactgggtggtctgcatccagttcggctccatagctgagaatctgattggcgaatctgtccagctcctgaatggtccttgggaaccagggcactgtaacacagaaaaggacaagttctgagtgcaggctgtaggacacatggctagcagcctctctgagccctgatcagtcatgttgatggtgacagtaaacaaggctctgcatagctcttaaattccatttccagtttcttgggaaactgattttaaaacacaacccaaagaggccaccagacttagactgaaccttggcctaggctgttctttgggaccctctgtctcagagattaaggaacgaggagggtcttctacccagtcctttactgcaactaaaggactctttccctgtccactgagcacaggacaaaggcaaattctgcaccctggaatattagacctttggaactctgactgaagcagagcccacacccagctccatctcacgcctgaaagttttcacgaactgtctcaaattcatcccctgcccaccctttatagtagcgtcaacaaagattttctttagcagcaaaacaaatgatacatagccccaaatataaattagacagaagttaagaagagaaagatgagtcttcagacaccaactctgtagctcgtgactccctcctcagtaccttgggcatcccctataaaaaccttttgatctcaaagtcaatttgacagagtcaggtcacttggagcttgctttccaaagtaacaccatggggaagggcaaggtacgtgagttttgtgtctgcaatgatggtgtccttcctagagagcgatcacagcaaagagaagatgacactatccaaatcctcgagccttataagagatgtactgggtccaagtgcctctgtgtatgaacagagaccaggaaagtgtgaactctaggtcctttgagggaaagagccatgagggctgagtggctgtggaaaggttgaagggaagatcaaaaaaaatggtaggtctctggttatattaacatacaaggttttaacaatagcaaccaccattcacagtctctactctgacctagtttctgtttctgcagtccttccttaggtaaggaagatattacagcctctattatacagatgaaaaagcaaggatttaaaaatctgagagtcaaaataattggcttaagatcaaacggggactaagacagggctagaatcttaggagcagatagacatggcagggttctttttagtgagccaaggcagtggctattaaccctgaaaggaggccggagggcccaatgttgaatttgcaagcagccccagcctagcgccagaagatcggtgactctgtgtccactcccttctctgcgaaaatggaaacggtaacaaaaggaagggcagctgatgttttctgaagcattaccatgtgctaggtactggggttacatttgagatggagtttgtcctttaatcccgaggttgctgtgaggaaggacagaaggaagtaatgggtacagcccaaggtaaggttccgccatctactggctcaagtgggatgagaaagagcactactgccatctagtggccaagtcgaggaaatgctccctggagctctaagcaggcgtctcagcaaggatttccctaaaacttccccaactgtgctcatcaaatgaagtcagagcctggtttttgtggatccaagctgcccaagctctacaattcccacatcagcaatgcagaaaaatgcaggtgccgctctaaatattctttatatggtgaactgtttggatatcagtataacaaaggcacagacaggagtgctcaaacgctttgtgactgcaaagcaccctagttatcaacaggttttttaagtgtgtctctcctttggctgaggaacttatccccgaaaccagccccttatttctggcttatgtcagggataactcaattccagagttccgtaggtcacagacaatatacatacataattgcaaggcacatggacacatgcctgcctgaacgcacatgcacacataagcacatgtgcatgcactgctagtgaatgatggagccaggattcacatccagctgcctccatgctggcccctgggtcttgatctcaatccatctgtcacatgggggcagcaagagggccacctgatcgacagcactggctctcaagcctgactggctctttagtttctcacactggggttttcatgactttaaagcgcaggtcacttgtctgcatccctttgagtggtgacaacagatgctctcttagcataggcgcttacatgacggatgtggtcctcaaggaagctgcctcctcccactctcaccaaggcaccatgaggaaggtcacattttttttccctactttagagtagaactgtagagagaagggagaaaagtctagaaagaaaacttcttactcctgactactggaactttggagtctctattcaaaaatgcattcctcctacccaccatgtatagggggcacaaggttctcgtgccctagggaaaccaagaatgctacacatggagacgtaccttgtcaatgaaagggatgtgtatacctgctttccacccagagagctgggagtgaatgcaattaacagcctagtgatttgtgctatctgtagggccaggcacgcctgagtccaccagactatagtttgtcccagacccttcctctctagacctttagcttaagcattgtctctcactgaattgaaaccatcccttggggacatgtcagaagccacacctgattctccccccaggcccttaaactaccttaagctctactgcacacatggatggcattgagatcaatgttaccagaaaatcttttccaaaaatactactactgttcttaaatgcctaaaaatataaacggaccggaatcagatctagaagtttgaaccaacaccagctaactaggtcatattgaactagatttccttcctgccccacaagaatcatttctctttacagggaccccccccccccacagcgatgagaactgctttccagccctgtcccctaagctttgcccgaagcagccctttctcctcgagcccagcattttcctggtgtattgaaactcttgcattgacactggtgtctgttttcttgtaatatcagaagtgccaagaaaaggccaggtctcccatgagacctcacctgtctctccaggtgttacaaccaaagggcctctctgaatggtcctggtctggacaatgagacctgcccttctcccctacactgagcacaattaacagccccatcctctcagttcccattatcctttgttgctgattgcttactaattgcctgagagtcgcttgcaggtcaggcagcaccagtgtcagcaggagcccaagctaaacttttttgtctgtcacagtgccctccccagacactcaggctccccagcatcccagcatgcattcagcacccatgcagtccataccctgggcatgagagggggcaacactgggctactctgaggtgattacattctatgagggcagcacaaaacaagcaatagcgaaaccacaaatacacatcaccagaagcttccaaagaagaaaatggagccagaagatggaagtcatgggtatgctattgcattaatttctttttaaaattctccagcttagttgaggtatagttaagaaacaaaacacgtatatgtatgtatttaacaataatcattctatatacatctgcattgtgaaatgattaccacagtcaggttaatgaattcatccattgcttcatatggttaccactgtgtgtgtgcacatgcagatgtatgtacatgtatgtacatgtatgcatgtctacatctgtgaacatgcatatatacagatatatgtgtgggtccatgtgcgtgtgcgtgtgcgtgtgtgtgtgtgtgtgtgtgtgtgtgtgtgtgtgtgtaggatacaaaatgtctctcatcaacttcaagtatacactgtattatttttttttcatgttagatctccagagcttatttatcatacaacttaaactttgtaccatttgaccaatatctcctgatttctctgcccccagcacctggaaagagccattctctgcccctgtgaatttgactttctggactccttgtataagaaaggccccgaagtatttgttttcctacgatgagctgattttccttcgcaaaggcccccattcatattgcagcaaatagaaagtcacctaccatggctggatgatattccatttacacacacacacacacacacacacacacacacacacacacaccattttctgtatctactcatatacctatggagatttctccacagtaaacaaggaagttctggtgtgcttttaagatactgatttcatgttctttgaatgtataactttaggtggtatagctgggtcacatgctgttctaatttaatatgaggggcaatgacatactgggtcccattaaaccaaaccagtgcactgtccactcaatcgtgtacaaggattctctttttccactccctcaccaacactggtcatctcttccctattctgtgagtcataggatgctatgtaaagatatctatgcctcctgttccttgagatgctagagactcagtcctactctgctggagcccagagggatctggaagagtggaagtttgtgcctgcttcactgttttcctgtgtcttctgagtacagtcggtctagcaatggcaaagagccccacagtgaggccagactgtgctctgctcttttcattgaagggaccagaggagtagtgatgcctcttgggactcagtatttcttctgtaaaatgttcatgggagaacagccacagagcataccttcatacgaacaattaaatgagtcaatatatatgcttttgatgaaaagttatggttcataacttggtcaattgtaaacacacagagagagagagagagagagagagagaggagagagagagagagagagagagagagagagagagagagagagagagagagattcagacaatattcatgcaagctcatccgtcactatcactaagcaatatatggggtccactgttgtctgtaacacctttatatgggcctgattgcatatattgtcacatatgtacacacacacacacacacacacacacactcacagaaggagagagtggggaagggaaggagaaggggagaaggaaagagaggggagggggagggaaagggagagggagttgggttcttcgtcacacaaaaagcagagtaaaacttctagaaaagctaataaacatgccatttcctttgtaatataattatatacacagttgtaatttgacttctggatccacaaaacagattcaaatcatctttctttgctgctagatgaactgaatgctacagcagacaggacacatcttagtcccgatggtcagcacacagatcgtggtcgatccatgtttgtcatgacaatagatttaataattctggcagcaatgaaagaaagaggagaaccagagtttggagtgaagaactgtttcttcatccagtccgggtattaacacccctctaaatactgtgcctcagtttcccctcataagacatgcgtgttgtgtttactttttgctgaggtcctgggtgagttttgtgttctgagatgtgtggaatgctgtgagaggtggcccagaggacctgtgaaaagaggctttcaccgcagtcaacagggatttatcttctgggagtagagtccctacattttcagccctcaagttactgtccacagcatctcctcctcagactgagctgtgctatctcccaattgaaccccagagggcaacaaagacagctagtcccagctctgacaagttcttccctcagagcaaaaacaatctatttgggctcatatagcttagttcaggcctcttagtagaaaagaaatgacttagttaattaaataattatcattgaaaaaattacaaagagttcaagacataaacaactcaacagcctggttggtaggcccctggcatttgagatcagggcctggtctagagactacgggagaccacaaggcctctttataaggaaggggcatttttgtctacccaggtgcagcggcctctgatgaccttcaagcctcactatcaaacagaaatgtccagagcacaaagcaatgcaggaaaaataaaaggcatttcatgttttgtgttgaaagctagttcacagcttttggactttatgcgatttgctttctctctcggtggttccgaagtgtcgcgtttgaaaaaatgatcataaaaatcatatgtctctcagagttagtgagggtcaagatgacctcgggggggtggggtggggtggggagatgattcagtgcataaagcaccttcctagcaaacgtgagaacctggattcacactcacgaactccatggagagccagtcaagcgcctgtgatctcaaggttcctgttgcaaaatcggaggtggggacaggagactcaccagtagctctcagatgaaacaaagagatactgtttcaaagtagaaggaggggaccagtaccagaggtcgtcctaggagctccacacttatgctgggacatgtacacactgcacactgggtgtgcacacatacaagagagattaaaatgatgagctatgtacaagcccataaagaagtcttacagcagtgtttaacacatagtaagggattttaaaatatttcatcatattatgattcttgctgctattagaaggccaaaaaaaaaaggcctgggattcactgttggcagcttcccagccctacctcaactctcctcctcctcctcctcctcctcctcttccttctcctcctcctcctcagccctggccagcaacctgtgtcctatggaatagaagaacccaggtccattaaacgtttgcaggctctcaccttggaataaagcaggagtcttgggaaaagagaccccgtggagacaaggacccagtataggggtaagaatggacaggggcacatgacttcatttctcttcagagtctgaagaaacaagcagtctggggaccccctaaattaaaagtatggagcccagagaaagcacctttcgcactcagctccaaacacatctctgcctagacaccacacagggaagggtgaacacccaagacgggaagccagcaggtctctccatgcccaaggatatcttcctaagcataatccatgtgagtctgagcgagtgccttgctcccccaagagtctggattttcctccgtaaaatttatgagagaataaaaccaactatccgtctccttctttggtatgggaagcaatgaacctgtaacaggtggctctatcgccagccattgtgtttgaacctcatagcaaagtccacaggtgcttgtggctaagtaaatatggtgatttaagctgctggtggcccagctgaagcccacttttgcgccccgcagcccgtaggcttgaccaatttgtcagccaaaaaggttctaattacctttttttttttcttttgatgagctaaagcaggacccgacagggccttgaagaattcctttctgtcttccatccggaccttcctggataccataaaacctaccttcttctctgtacactttcttctcagtagggtttcagccccacccccaccccaccctccccatacacaggggtctcactcacaatgctgagaagaggcactgaccccagtgacccaggccttcattttgaaaacttaaatcagattagctcattaatgaccttgccaaataccccagtggtgggtcaggctctgcaagcccctccagaggcgctgggcttggggttaatgaattaccgagccggctggtgcaacagaagctctctgtgaagccagtggcacccgggagggggtgcagatcattaataaatattgatttggctccaaaggaagcagcctgccagagagcaggcccctggacacccacgttgcggtcccattaagtcagggtcaactgttctacccagacgtcgaggggaccgctggctccagagtgctcccaaagaaaaggctcccaagagctgacttcctgcttcgtgggtcagttagagtccattaaatccacagtagttcaaggcagacagatcccaatctaactctcgtcctccatcagatgttcaccagccccggggctgagtcaacaaggcacccaggatggtggccagcctgtctcaggaagagcaataaatcctccgacacagagacccagaacagaaggatattttcaccccaactctaggctcccccgtgtctcctccgaggccatggccccagcctcctactgaagcagctactgtgtgagttccaggagccattgcgaagggagagggcatggctgcccgatgttgcaggtgaagacctgcaaggtcttattcttcctttaaagaacttacttctatgtctgtttctagggccagaaaaaccaccatcaaggtcttggcaagagtaaaggagccaaagcttggccggtaggataagctaacacactctgcatcctggacatagcagtatctgacatgatgggatcctggcgaagcacacagcctctatttcctaatccgattcttagaatcacaaatagaaatgagcgaagactaggaatttcagtgaaacattgaaattataaataaataataaaatctgtagggtcctttaaagttagagctactctcccactgacccttccaatgagtcacgtgtctccatttttttaagatttactttatttttaaccagaggaggcatgtgcatacgagtgctatagccagaggaggccaggtcattggggccccttagagatgggggttacagaaagttgtgagccatggcacttggtggctgggcacccaattcccatcctcagaaagagtactatgtgttttaaactatgaaccatctctccagcctcaaatatactacatgtctcttacaggtacatagtggcaggttacccattatattcccatagcatccaattctgccttctaaatacttacaggatctgagataagctgatatatctctcacaacctgtgttatgttcaactggcctatgtcaggtcaaacataatacatgtaatgccttatctaaccccaagtcttcctctcctcccacctgttggaccagagactgagttcagtgtacgcaaaaggatactcctcagaaataccgtgtctccccatcattgccatatgtcacatcatacaacaatgactctgcaccagggtgggcatcacacctgctttccctcctactgttaaacccctgatgactgatagataatgtcaaccctaatgtggggaaggttgccaccaattccctctgcatcgctatcctggacccacacccatggtgctggtggtaacacatggcctgatgttggctgaagttgtggatgacagccacatctctctatggaggcccagatgtgtcagagactaaggtcccattcatctggatcacgttcagttcaatcattttacaccccaagattagagcctcttccacgatcttgtccatgaagtataggaagtagcacagtgggtcttagttatgtctctcagatgaagaagaaaaggctggtgggattgaccattgaaaggggacaagtggccatgtagaaagtagagaagtaagcactggcccttgacttttaaattattgctctttctgggtcactatggggttccccttgggccagtatgaatgacaagttggcatttagttacaatcattttcgaaacatccgtgtcacatggagaaaagacattctcggtctgttccctctaactttcacaatctcagtcttagcccaaatagcatgtggtactgccctctatttaacaaagactgtaagtttggggactctggacctgaacatcagtgaaaatcattgtgtatcttgttaaaaggctcgtgtattaatttactgacaatataggccctgcgtgacagcctctatcaaaattatatcatgtaatccacacaatcacattagcaccaaatatcttcacatttcaaatgagatgcaagaggcttaaggagagcaatatagcattcagggagcatctaaacaaagacttaaaacagtgatacaaccgtgagtttccacaaatccaaagatatgccatctcctgcagatacaggaccatgagcatctaacagttgtgcctgtgaaagccacacacagggcaaagccaaatgtataggggaaagttttaattgacaagggaaggaggagttagaaacagaatacacagacagagaaagcaatagaaaaaaaataaagatgcaggtggtgagactgaagaaacttcaaccatctggactactcagccttaagcagcttttggctaaagactcttaggaaccatgacttctttgaaaagtgttcttgttttaaaagcaaataggcgtgcacacatgtgcaccactttgccaagtcttgggagaggcaggtcagagccttttatgggatcctaccactgatcacagaaatcctaaatgaatgtcaaacatctgtcttactcagtatggctctgcagagcggggatattgaagaagaaaagagaaacctgtaggggattgagcttagaggcaagaaatgtgtgtaataatgattcgtctgtcttctatcagtaatatcaactctatgctaggcagataaataagcgatagtatagagatagatagatggttgatagatagatagatagatagatagatagatagatagatgatagatggatagatggatagatagatagatagatagacaatagaggatagataaatagataaacaaatgatggattgatagatatatagatagacgatatatacagatatacacatatatgtacttatgtatataagtagtctgatggtaaaacaggtaaatggttagatggttaatagatagatagatagatagatagatagatagatagatagatagataggatagacagacagacaagataatcagacagatatatgatacatacacacacacacacacacacatatatatatataaacatgtgttcttgtgcatatatacacagacacatgggaaaacatgtgaatgaatgagagagatgatagatagatagatagatagatagatagatagatagatagatagacagatatcagtcaatcttcctgtttgcacagaatataatacaaagtaatgggaatctgggtttactgtttccacacagtatcctgttaaacaatccccatttggagaaagtctaaaaggtgtccgtttacttttcagaaacatcaacaaaaaggaaagtctctcaaaaggccatgcccctaacctctaactacctaagacactgtgttggtgtctgcttgccctggctgcagtctgtctccatgtaggtattttccaccccccactaaatgcaatgtcatgcaggagattcaaagggaaagtaaacggattagtagatggatcgatggctgatattaatgctctttcatgttgggttgaagaaggatttgaggtcatcaggagagaaggcggcaggagaatagactaagtattcaaaaggctctctggattaaaatcctattaagttcccatcagcttctccaggaggcgtttgaggaggttgggtttctttaacctgtcaccataattaaccttcccccaagctgttttgggtggggcacattagcaattaagaaactgagaaactttcattttctatcacccacgcctctgtttgaatgctttggagaccagagtgcaaagtggtttagcttaattgatttgaggggttcaggtctctcacttgaacctgctgtcagacttgcccctgagatctgagcccctcattaaaaagggcattttgtccagagaaagaatcaaaggttccaatctcctcctcagctttcttcctcttctcattccccgagtgaggctgacagaaaagagcgactatacagtcatgcttgcttttctttcaaaatccctacttccggacccagagtcctctctgcaaatttaccactggagtcctgatggccagtctctctcagcaggtgtcacctcagcatctgccatatccctagcagctgttgagtcatagataagttcagtctaggtgggactagccctatgggtgagtgaccagctgctccaagaagtagaggttacaaagcagtaggatcacaaaataggtttcaaatactactggctctttctttgctacatacaattgccatccccattttacccacacatacacacacacatttgcacactcacacttatttcaaacattagcaccctgccatgtgagcaaggaggtgagcagcctcctaaggcattaagttcacgcaatttttagtgtgtaagaagttcagcagtgattgcaggatacctccgtaacaaaacatgagcttgttttactttctcactgctaatcttgagagttacatgatagagcattttcctccttccaacaacagtcctttttctgtgtctacctaggtgtcttgcgccctttgccagactgtgagctacttaggaacaagcactccacttacttttttttcctccagctcctaacacagtatctaacagacatcagttaggacttaacatactctggcccatgactatacagattttaccctgccttaaacccaagtcacaacctctatttgcgctatgtaaaatgtagtagtcagtagggccacatgacctccgagatcatattcccacttctgaattgtatgaagaaagtatttgtacaagctggattgctggaactccagtagttgtgccttttctcataactcataataatggcaagaatatagaacacttatgaagcccctcaacatcctctgctctatttccagtggctgctgatgtgattccattagccccataatgccaggaactcttgtttcttctgctggatgcagcttgagatcatcagcctcagcaatttgtctaaagtcacaccaagtgtgctatgtttcgattcaagaaactgggctctaaattaattctctagatcctctccaagaacctcctcttggaacttccagctcaggctgcatgcagccctccagctggcctacatacatcttcctagctctccaagtggcgcctgcctgcctgcctgcctgcctgcctgtcaattgctttgatttccaactccagagcccagctggctcagactccacctgctccaaccaaaagcagagcttgccccaggaccctgcaggccctttctttgtccagagggcccgaaattcctactgggagcaggtggcctgaaaagcaggagaggaaagccatcagcttgggaagaagatggaggaggcaaagaagtctgaacaagaggaattacaaggtccctctcaagacctgagcctatatgatcactctgggcaagggcaggccagaattggggagctatatctgagagatgaagatagagaagacatcttttttttttttttgataaactttttttattttcatagaccaggcatgtccatgggtggagcactgtaaaaaatgccgaaaagtaggcagagatttaaatgataaactagctaatgagggtgagaagacatctttagagagtcttagagctacctttcgggagccatttctgttgcccgttctacaaggtgcattttgtcttattttaaagagtctctgctttttaagtgaaatttttataaataacttttcattggcacataagaactgtaccgattctgtatcacactcaaagatacgagtttgataccctgaacaaagagaggaaggaatgggtggataactcagatggtacaatgtaatattttccatatatatgtaaattttataatgtccaaattggaataatcatacttatcctcctcaaccagtgatcacttggtcaaatgtttaaaacggtttctcccatttttttacttaaagagtagagcacattattgttacctggagtcatccttttctacagcagaacacccagacttgtttcttctgtcttactaatgcttagtatctgtacctgggcactaattcagcaacagtgtgttctctacccaaagcatttggtgtttgggaaagctactttagatcctgggatagaaaaggagttcattgaaattaggttcatctcaacaagcatgctcttaagtgtctaccaaaatgcattgaaaacctatacatgaatgtttttataatatgctcgttcatcataatcccaaattggagtcaaccaagatgccattaaaataagtgaataggcaatctggggttaaggtaatacattaggatattattcaagagtaaaaatgaaatgatatataaagtcaagcgtgagccaagcccatctaaaatgttgcttctggaaaaggcaaaactacaggactgtaaataagagaaaggaggtgtgaaggaggggtggactacaggcaattttaagacgctggcactaagctgtatgccacggtggtggcagacacagagccaccatacattggttaaaaccaataaaagtcgacaacacaaagcaggttttgagtgtgaccattggactttacttcctagtaataaatcaatcactactggcccatcaattatttttttatttattaggtattttcttcatttacatttccaatgctatccccaaagtcccccatataccgaccctcactcccctacccacccactcccacttcttggccctggctttcccctgtactgaggcatataaagtttgcaagaccaaggggcctctctttccaatgatggccaactaggccatcttctgatacacatgcagctagagacacaagctccgggggtactggttagttcatattgttgttccacctatagggttgcagacccctccaaacgctgacaccattgcatacactagcaagattttgctgaaaggaccctgatatagctgtctcttgtgaggctatgccggggcctagtaaacacagaagtggatgcttacagtcagctattggatggatcacagggcccccaattaatttttaaatgtgctgtatgaatgcagattggtaacaaggggagtacaatacagaaaaattctctgtacattttttcatttttctctaaaattaaaaatgaattctattcaaaattgttcatatgaatatgcctttcatcctaaaataaaataccatcaagcatcttgcttgtccatattcttcataggctacacctaagtatagcaaccccatattaccattgagccagtccctacaatatgctagagaacactcttttgttggggtagagataacagagcatattgtttttactttgcattcatctagaaaccacactgaacatgatggttaattatcaacttcactcacactgggaaagagtctcactgaagaattgtctagatcaggttggcccatgggcatgtctttgggggagagattgttctggttatattaactgatgtggaaaaaaaaccatcctaaatgtgggcggcaccatcccttaggtttggatcctggcttgtataagagtagagaaaagtaagctaatcactaggcatgcatgcacttattttctctctgttcttgactgaattctttgtaaatcattgcttcatgcttctgtcaccttaacttcctccacaatgatggacagtaacctgcaaccataagctgaaataaatcttttctcccctacattgctttttgtcatggtacttcatcttaccaccagcagaacgatcagaagttcaagagcaaccttggttacttaatgagcttgagatcactctgggctccacaatatcttgccttttaaacatattcagtgagtgtaagaaacagctaccctgaggaagagggaaagagatgactatgtacctgttatgctaggcctttgtctaggtccttagcttagttcctctccattatgcccacgttgttatgtatgctattattaaatgaagacagtgtggtattgtttaggtcacgagattcttcagactctcacctgtgttcttttccttgtctcgggaaagctcatggacagtggcaccaatgtcgttcctcaggctcttgatgatgctgcccaggacgggcttgctacgcttatccagataggtgaaaaactcatactcatctttgtttaaacgggaaggtctggattcaatgtgtgtcaggttgatctcattctcctgaaagagaaaattataggtgtgggagtctggtgttcattattaccacagtccaaatatacagagccagaacaactagagttgaagagcagggtttaaaaacattttgtattacatgagaataaggaaacccttaaatatttagactctgttttaccttctgcaaaaccaagcgccaattgacaagagataggaagaatgagtcaagtgcatccaaacttaatcacacagaaatctaataccagcctacagttgcctgtgtaaggcttgggtttggatcaaatgtctaagacaatggttgtaaaggtatggcatgggaaagtctcccttccacccaatgaaatgccacagaaatcaataaatcatatagacacaacattgttttgcttgaatataatccccagggcacaggctctgcattcataatctctaaattgtatcatctatgaaatgctagctattttattttcatgcttctgcatagcctcagtttccccatctacacatgggtggtctcattaataactgcaccatgagctctttgggggtcttggacaaattaatacatacatacactctgcaacataatttgtagaactactattaatatcatcatatgttatataactatgtaaggtatattatttgtattatatttgaaaatgcatgtacatatacatatataacctatataaatacatatgcagtattcactaaatgccaatcacaactcagacctagatgtttttttctttctaaagtttacattcaagttgaggtaataaagacagcagccataaaaagcaattaacttaagtattattttataatgtcaggggataaaaataaatacaaggcaggacagacaaaatggatgagctgccctggggtagcattaggatacagtctagtatttaagaggatctgcacatgaggtcttcttgaaaaagcaaaccatatgcacattctaaaggagttaacagacaggatgaccccatgggaatggtggatgggattgtcctagaagaagtaataaaagaagtctgataagttggaatagccacaaaagatgaaggacagctagacaaattatttgaatggatctggccttgattctgaaacttttaggggtccttatgaagttttgagcagacagaaaaccggatctcatggtattagaatgatcaatctgtcatccatgttgagaataacccttgtagacctggcagaaccactaagttctgccgcaaagttgcttctgaaatcccatatgatagtgggtgtaactatggtggcaagtgtgacagcgtcaggagtcacaggctgatatttcatgtaatgacctcaaagagtaaaatgataaggactatgagaggaatttgtagataacaaaatgggaaagggatcagtaggtcccatttcatcgtctgtttagaaacactgtgcagctgagtgagaattcagaattcctaaggggccagcacatacacaaaaatctccctagagtttcttctttgaattaaaaaaagaaaaaaatctatagcaaagctagagagatgaacaaatacttcttatttgtcattagccacatctaccatagctgtggatctcagagataaaaacaagtcatcagacttggcagaaaatgcctttacctgcagattcaatctgccagcggacccattatacaatttttcagcacttgctagagtacactatctagacgtgccttgatttctacaaccagtgttttagtgactggcaagtgactttcctcatatgctttgccactagaagcaatgactgacattgtctgcatgcttgtccctgattacctagatgatttcccaaattaaatgccttggggcctccatggtgaaccagaaagtattcaccccttaaagtttctgtatcttacttaccccgctgctctcaaaggggcaacatcatctgttctaccctccatgagagaacctatattctattttctgatcagtaatacttgtgtatagattgatattaattctactgtgtattattttttatgataatactatccttgtctatttttaaatatcttcacacaaacaatttttaagctttgatgtttcaaaagccgacaccaggcccaggttctccctctgggccttcatttcaggatgtagctgtcagctactgatccagcatatgctgtcatgttccctgccatgatgatattagaccaaacctctgaaactttatgcaagcttctaactaaatgctttctttcataagagctgcatttgtcatggtgtctcttcatgccaaataacaatgactaagacacacacacaaacacctacatatagaatcacttacatgggctcccaaatttaaaaatactttaaaaaacatatgctttacactatgactgattccaccagtacagctatgttagtgttcactaagtagaaaaccaggacacatcatgaattcataacttaaaaaaataaataccaatattcaaatggacaaagcttgtactgcaggtgcaggaacttgaatagatccaaaacttaaaataaaattcaccctttttgtggttgaagcagtgtatgtccagttataaacaatgcaatgctgaggagaacatatgtcactacaatggtgatagctcctcctctcaaataccacctatgaaggtcatttatgggcccttctttttggcctttgaggaaattgaggaagagaaacaataaaatcatagatgaaaaagctctgttgtgaagaacagaggaagaaagcacatgattcacagcaaagtcatttttcttttgtaaacactgccttctcttccagggatacagtaagctctcttaaaatgttgattttttttcattatcattaatatgacatcaaacacaaaagcatcagaatctctgggtacaaggaacagagtaatgaacctgacacatgctctctttctgccgagacttctttgtgtcccctgaggccccaggattttaccactggttacagcttcccttaaatgattctgtgcatatgtgtatgattgtgggtcttagtcactgttctattactatgaagagacattgtactggctagttttgtgtcaacttgacacagctggagttatcacagagaaaggagcttcagttgaggaaatgcctccatgagatccagctgtaaggcattttctcaattagtgatcaagggggaaaggccccttgtgggtgggacgatctcggggctggtagtcttggttcgataagagagcaggctgaggaggccaggagaggcaagctagtaaggaacatccctccatggcctctgcatcagctcctgcttcctgacctgcttgagttccagtcctgcatcctttggtgatgaacagcaatatggaaatgtaagctgaataaaccctttcctccctaacttgcttcttggtcatgatgtttgtgcaggaatagaaaccctgactaagacagacatcatgaccaatgcaactcttataaaagaaagcatttaaattagaagcttgcttatagtttcagaggtttggcagcatatgctggaacagcagctgagagctatatcctgatctgcagacaaagagaaccctgatctggtgtgggaaacatcaaaaccccaagcaggacagagaaatactgcagagggaggaccagagagacagctggaactcaaaagctactatgagcaaacagaggtcatttcctaaacaaagcaaaaagcaaggtcatgcttcttggcttaggaagaaagagaatttgtgaacccttcctggggtcacatcccctcccctattgacttctgttaaaatttaagaggcaaccaaggtctatgctgtatagagcaaagtggggagggtctgcgaggcatgaggggatggggaaatgtgatcaaaatatactgcatgataaaaattaataaataatggcaagaaagtttatgtatgtggcaaaaatcagagaaagggatacagtaaagccaagaagcaaggtgagctcatgtatttgtctaaccgtttgagaaggtacaaggacagaagagagaagatgtgtgtgcacatggtagaagacatgccagaaggcaaaccacactttaggacaacttgaccacccacccataagacatccctggaagtagccactttctccaagaagctctttgtactccagaagtggtagcatactagggaggtagaggcaggaggcctctgtatgaagccaacctgctctacatgagccccaggacagctaaagctatctaatgagacaccatcccaataaaaaacaaaaggagaagagaaaggaagagaagatggggaaggaggaggggagaataagaggaaaaggaggaggaagaggaagagatgggggagaaagaggaggaagaggaggaggaaaaagaagaggaggaagagggggagaagagaagaagcggaagcagtaccagctccttgctttgggaataaccacaaaacaacagtttatacagaatgacttcatttgttataatactggaaatctaactcagggaaaaaaattcacaaagtctttcaaccaaattttgtcatctaattaaacactctcagctggggaatggttaaatggattatagcacaatcatccaataaaatcctataaagcaagtaacaacagctttcgtaacacaagttaacaatgataactctatttgtattgcctggtagcaaggagtctaagtgctatagccaccaaggagggatgactagctcacttcagtgactccatcgtctctatagaacctaacagcagaatctacatccaacagtggaggggtggcaggagtgtgttccctggacgagagtagggcacaggaaatctgcgtaataaatgtagtcagtttcctttcaattgtttctaaaagatgaatcatatccacgaaagtggagtataaattcagaagcaatatccagctgagcctctccagatgttggcaacttgcttgtcctgaagctcttcgatgccaccgattaaacagtctagatgaggctgctggagaatgactgagatgacctcgcacaactcgggtttttgtggatctgtttctttgcttattcccagccattggattcccttctcccgacctggacttcctggttgggcctcagtgagagaggatgtgcagagtcccgctgagactttatgtcccggataggatggtacccaagggggggctccctatctctgaggagaagggcaggggtattggggggaagggatttgtaaaagtgggactgaggagagaggaggctatgatcaggatgcaaagctaataaaaataaattactggaaaatgaaacaaaaacaaataaatatgggctacattggtatgcattctgatgtagttaccagctgaagtctacaagcccaaagagaaaaaaaattggttcctttatgaggtggtggctttgaagttgaatggaaggtacgtaatcctgactaatccaagaggggcctacacacatactacaggcctttctttctctgagatgcctgcatgctttagtatgttctactagcagccaagtcaagaaagtgtccactttcagcaggccagaggacaaggtgatctagtctgacccttcgcattctagtctagagactgtacatcactgtgagtctctccttagtcctctgagtatttagtaagagttggctaattatccagttgtatgactgccatgctataagtattgagtgttggggctgctcattaagcctagagtcattataaggctatttaataagaaaagtatcagtagataggtgattatccccacatgaaatacttttccctctcagaccaatattgagaatatagatttttaccttctgtaaaagaaaaaaaaaataaaagtgtatttagatcacagtttttactctgatgttgttctttgggggtttaacttaacagaagggatacttgaaatgagcgcctcccattgtcctctatattaaagaatcacttgtaaatgatgtgaagtatattcccggtatttctactcattgaggtcttgacactaacaaatatctagaagtttccttccatggacaacctcaaacaggtgagcattcccatacagagtcttttcctttccaaccaaacgaacctcagtcttcaacaggttttcctatatccaagaatttaagagttctttaggctacagtacacagcaacaacttttgaaaaaaaatgctaattgagaacttactctatgacagttgctgttataattagttttcacaaatgatttggtttgatttttgtggaaaccctattggtgaaggtttaccactaccttcactttgaaactaaggaaactaagccaagaggttaaaagcttccttttgcccatctcgataacaagtggatcaactgagtttggttctaaacaatagactcttcactttggttctattcctcagtgccacaaattcaggctgctgaatggcagtttttccaaactgaaagattctatctaggagggagcaggaggctctggaaactctagagggaaacaaagagtcacatgacctggaaagtgacaactcagaagattctaaaaggtccccctcaggtttatagcatccactgtgctaggagagtgctctgacctactaagttgcaaagagcctggtatcctggaacagtgatcaccaggaagttttgcagtgaactccaggattgtaagttttgagagctgtcactcatatgatttgcccaggatgttttttgcttggttatgcaatggcttgactgcttttttttttttaaatcattcctgctttcctgctcctgtaactaacacctcccccgtacttgatatagtgaccccaacaaaaattcctttgttgcagtctttactttggtctttcatgtgctaagaggtctgcattgtctatgtgagttatgtctccccaggaaaagtctttcacaccacacatgctgttgctgatagtttagagctcaaaacttaagccaccacaatactgaaacctagatgttaagaaggtaccatggttgctgaaaggaccagatatagctcactcttgtgagactatgccggggcctagcaaacacagaagtggatgatcacagtcagctattggatgggtcacacggccccttatggaggagctagagaaattacccaaggagctaaagggaactgcaaccctataggtggaacaacaatatgaactaaccagtacccgggagctcttgtctttagctgcatatgtatcaaaagatggcctagtcggtcatcactgcaaagagaggcccattggacttgcaaactttatatgccccagtacaggggaacaccagggtcaaaaagggacagtgggtgggtaggggattgggggggtgggtatgggggacctttgggatagcattgaaaatgtaaacgaggaaaatacctaataaaaaaattaaaaaaaaaagaaggtaccatggtcaaatgtgtttaagaaatataaagtgtgaccacattgagtgggtctttccactgcaggcttcctggtcatgcaagtgtctgtgtgtgcactatggctctccaaaatccagatgtagaatggattgtcagaatgcttttttaacaatatagaatttgctagaatgttttttaaagatcatattgccttattgtacagttgagtctttttttttcatttgctctgttatttactcttttaagtttcactttttatgtccagaaactttgtcagaacatgatggtgtaataaaagatagaaacacacagatgcacagtgacctcagcagcttcccctcttcctcccgctgccaagctccctttgtttggcagaagggtgagtgttacagacagatcatggacttggaagcctggggttcggggttttaaacccacttctgcctgcacattccctgacttatcttcagtgaattgttcaacatttcttggagcctcagctccctcctccatacagtaaaagaatggcttccacctctgagtttcatggatatcaaatcaagagcctgatttatgcctggcatatatgtgtggtgccatgtgtagaagaatttgctttcttgattaacttgctcacttggagttatagtactatgaattttatcaggctgttaataagggtataaaagctgtaccaggatggggagtttccatgatagctgctgagggtgttttggagaaaaaaatcaatatacactaataacagccttccaccaaccaatcagcatgctgagtaccatatcttcctctgcaggatgggtacagtgagatcctcaaggaattgagatctggataatgtatcaaagaattcatggagagttcatacatgcatgcatgaatgtacacacacacacaaatacacacacaaacatgcacaaacatgcacacacacacctcttaggtgcacttcatccagttctgcttgtggtttgtttattatattgtcaacagtttcttcatttattattatttaatccattaactaactcagtccgaaggggcaactgctcaagaatatgtgattccctgatacaaaggctaagcaagtgcactggagtattttacaaaaacatcattttcaggagcagtttgtccctcagaaaacaccttttttttctccccactgccttctactcgctattaggcattcatttacccacaactatcaccaccactttagaaaactgggttttaagttctaaatacactccctttactagagcagatttagatgtctgaaatggagccatagggctgaaggtgtctctcagcattacagcacttgcctgacaggtgaaacactctggattttaaacacagtaccaagccattgttattgatattgtgttaattgcatctaatgtcatataatgatggccgatcttcattatcaatttgattggatttgcaatggcctagaaaacaaacatctggatgtgtttgtgaaggtctgtctgcaagtcataggctttgaggggagaacctccttacttttattcagctaaattgacataatattaaaccaatacttaataacgtatcactatcgtgcctacagatcagtgtatctctcaactattatcagataaacttctgtttgtggtagatggtggttaatagaagcccacagctggtcaagttttcgagaaagggggactaacatgctcaaccttcaatgagtcgtatgtatcacacccctccttggaaattgccagagtcattgcagaagaaccgggacaactgtaagagccaaaggaacgatgactaaagcaaaacagcactttccagacctagcagtgcaattatgcatatgaactcaaaacagttgtggtagcaggcaggagacctgtgcggagctcaagccaggcaaaactacactatagaaagtggaggtagaccagaagtgccactcttagctgaggcgctattgtcatataattgctggtagaggaggggagtttggtttttgttgttgttgttgttggttcttttgttttgttttgttctgtttttgtttgtttgtttgtttgtttgtttgtttgaggctgtggtcctggcaagtcaacaaagtttgatgttaagggtagagaagaagaaatagatcaagcagaaatcagaggaaggctgaatgtgatcgaaatatattacacacttacctcaaataagcgcaggaccttggccagggcaccaacttcctctttgagtgagaatatcagagatacagcaccattttgattggagttgtcttcgatgtaacttgtttcctacataattagatcacttggttaaaatgtttttcacagcttagcaattattctcttaaaacctctcaagaagagacgagcataacctttttctgctcgttaagctttggaacacagtgaaccacgtgtattccacagggaagtcagtgtgatcagaaataagtaagttgaaaacaatgagaggatgagtcactcctgggttagctttcaatttatagaaccttaaattatgcattgatgtcactagtcactgacaaaaatcaacattttttaatgagcaccctaataccagaccctagcccatatctgaaaggatataaacctgaattatgataaatacgcccatacttcagtgctaaaattctgaccatcagacacatgtacaagaagtcaggagattcttagaggaagagcaagtgatgcaaaaaaaaaaaaaaaatcctcaaaaagacactgggagacaaaatataaaaagcaataaaaatgggacatccgtaggctatggatccaagacctgggtgctattctttctcatccatttaccacctgaaccattctgagcagatcactttactcatgttctcaatgcttcatttacctcattacctcgaaataatagtaagaattagtcctggccaaataatatccaagtgttggggaaataaaagaaaatatatgtttaaatagaatattagggttattttaaaaatgataaaaatattattgcacatatgttaatggccttttgtgttttagcaaaaagcatcaagttgtcccatgtgcagcaataggtgatagctcattgctgaaatgagtcacaggaacacatagatactaagctatcagaaaatgggtgcctttaataagggaacaaactaagtcagaatacgggtgggcattccaaagtttgccaagacattttcttaaattttaaaataatacacgacattctgtatgtacccaccaatgcacagcatgtcccccaaaaggagtagaaaatgtgaagatcaattactctcttgtaagcaagttaattaagttagtggtgtggatggtccatcatcccagggacaggaggcaatggtgggaagattctagaagagtgggctttagaacactgaagactcttaggacaaaaatatttaagttcaggaaatttatagtttccttccagaaccttataataaagttggaagtaccaaatttatcagcaagttagaattataggacgcttcaaaataaattaggcatttgtccctacctggactatgttatcatctatcttctaaaaatagtaatgtgtaggggctgaagggatggctcagtggttaagagcacttgttgcccttataaaggaccttgattcaattcccaatatctacatggtggctaacaaccatcagtaactccagttctggggatctagagcctccagtgacctctatgggctcctgcttgcacacgcttgggcacatataaatacacataaagtaaataaatatttttaaagaaaaacactatattatttttaaaagactttgattttaatcaaggtcctcatttgatttgaacaatctcatttaactttgaaagcagtctaggaaatgggttttattaggtaacaagtccactctttcattgatggcaggattcaggcttagagacgccaaggaactgggttagagagataacttacccaaggaactgggttagagagataacttacccaaggaactgggttagagagataacttagatggagatctcaaagccaatcactggactgagcatggggttcccaatggaggagttagagaaagaaccaaaggggcggaaggggtttgcaacccataggaagaacaacaatatcaaccaaccagatcccccagagctcccaggaactaaaccaccaaccaaagagtacacatggagggacccatggctccagccacatttgtaacagaggatgaccttgtcagacatcaatgggaagagagtccttggtactgtcaaggctctatgccccagtgtaggggaatgccagggcagagaggggggagtgggtgggcgggtagatgagcgcccttacaggaacagggggagggagggtgggataggggttttcctgagggaaaaccaagacaggggataccatttgaaatgtaaataaatgaaatatccaataaaaaaaaaagagagagccaactcagacataaaattttagtcccaagatttaggagatggatccagatggatccctggagctccctggccattcaggctagctgtgtggcaagttccagaccactgagacaactgtctcaataaatatgatagaaggtgccaaagaaatgaagctcaaagttggcctttggctcatatatatttttacaactgcattcacatgaattctctctctttttctctcattctctctctctctctctctctctctctctctctctctctctctctctctctctctctcacacacacacacacacacacacacacacagggagacagagagagacaaagacagggagacagagacagagacagagagaatatcaagcaactggcccttaattctacaattaacattgaagttagtgtttaaactgggcctttagactatgtatgctatccatgagccatgacctactttggtactgcctctctttcttctaaagcctcccaggcacgcgcagatgagtctctttttcacagcagagagcccttagtcttttctggcttccttaaaacaacaaaggaattccctgtttctagtccactattgtcttgttgacctccaagaaaaaggaggcattcttggtgcatatcggcatgtgctacctctgactagggctgttcagagttgaagattcctgtaatagaaacccagagctctctctctctctctctctctctctctctctctctctctctctctctctctctctctcacacacacacacacacacacacacacacacacacacacacacagagacagggagacagagacagagagaatatcaagcaactggcccttaattctccagaaatgattcttaagagccaggttgttttctgttgttctcactgccattacatgcatatagctacaggtgcttcacaatgaccttatcctaacaaggttttcccacgtccttcatcaacaaaatctctgttaatgaattttaaccatggaaaatttcaaaaccactgataataaatatgtacataaattgtacctcttcccacagctgcctgcaaattcacatttatgatgtaacatggccctacgttgctgttattagtgacactgtcctgatctgcccctgaatgggcatccacttatttacaggaactaaaccatgtcatttcactcttgatacatgttgccaccggcagcggctactaccactctttgcatggtttaacctagaacagaccattcagtcctcacaaaagctatgagaggtgagagggtgctgctgttttgaaaagcctaggtttgtcctaggcaatccagctaacacgtaagaaagcctggtttagaacccatgttcagctttctcagcatcattactgtttcccagtgataggctcgatggacacaacagctccttcttttcaaagcataaaggactttacatgaaagaaagctcagaggagtttgtgaggtgctctgggctttggtggatctgaattcaaggtttacctagccaatcccggacccttgagcaaatctcttttatagattatttttgttggctcagaagctataccttatttgattctaacaggcatgtggattgacacacaagcaaaaatatctccaaaactgtctaggaagaaattacacaaagaaaagaatgaggaatcatagagtgaagagctttgatcactgagcaatgcattcagcaataaatcctgactgttctcttctattatctctggaaataatcatatgtcacatttataggcaatatgctctgtcaagggtgtttcagggtcaatattggtgatctggagcttgcaggagatatacgctcgtgtggtcacaagccccttgcatacatctacactgaagaactattacaagcaagatgcaatcatcctaagccatgtgtctctctgtggcagggtgtagacatatgtgtccgcatcagcattttcccacaggaggctatgttccagtaatccactgtgtttgcttggttgtaggaaacggattagatttgagcaccggctgccctgtctctcctgctggttagctctgagctccaccctgatccttctcctctgcctaagttttcttcacaacacttgtctctataagaagctataggatgcttttattctgttagttcctttatcatttatctcctgaaataaattagttttacaaatgaaaaatactgctgtgacttgcacacagtaggtgcttcttgatctattgggtgactgaaggtgttaaatcactcactccatcagactgcttatgcttgttaggtgggtatagctttgacctattatgcgccttcaacaaacagtggctcctccctgaaatgtcccttttattagaattaaatcaaatatatactgttcatctaggttagacgtgttaaagggatgtaaacagacctggcaagagagctcagtggataaaggacttgctcatcaagcctgatgacttgagttcaatacccaggacccacactgtgaaaggagagaggtaactccaaactgtcttctgtcttctgcatatgctccacctcctcacacacgtaaatataattgaaaatcctaagaatgcatacatgcgtctcttgcagactgacagagctagaagatgccctaactaagctatcccagcagcccacctcaattttacagacactaagcaaccccctcatcctagccaagcaacttctcagtacatagcttacatacgcaaatacgacacgcctgttgtcttgactgtgtgtgtggtggatttcccatgagtgagctataccaagcacagcatctgccttgctgtctgtctttcctgctcttcaagactcattctgttgaacaaactaaccaactttgaccaaaagcacatcagcagtttcaaatgttctaggaaatgtagtaagagattcgtagtcgatgttcagttgctttcatcttaatcctacaatatgggggtggggtattcttttttttttttttgaaggaaaatgttctgcttctgatgctgagcctataccaggacatgtttggaccctcttcgagtgtccctgtttttggtaggaacaatctgtagattcacaaacatctaagtgttttataagccactccccctagctccccactcccagatttctgtcttgagctccccagatggccaagggactgtgcagcctgcaatataggagcttaaaatagggtagagccagaatccttgggctgatctgcccgaccctcatatcaaccttctttaacacaaatttctctgactccaggcaaccctcaaccccttagtcctgtccaaggaaaagctagaaaaggcatattacctccagagactgaatctcagtgtacaaaccatgatttgcaatctggggaaagtacaaatatcacagaaaagaacatgttctgcaagccctccctagggaggacaatggattccctccacccccagcataatccccaaggtgcttcaggctccgggctaactcctgttcatttccctctctgtttaatttctccctccttggttctgagtaagtccccccccccaaattctcttcatgcgacatcacctcctgaaagccgaaagaggacagtttcttacaagcttgtcattttgatacccagaagaaaggattgaataagtatccctggagagatagggactcccaccccaggtgactaaggaccagccatttcctttcagtgtacagaagataaagccaataggcagaggataccaatgagccacccaaagacacacagatgttggtagcagctcagatccccaactttctgtatcctcaacttgttaagactagtctcatcagttgacttcctgggcattttcctcgcctctaaataaagtcatatttcttagtagccttaggagactggaaataccagcatttcccagactgctttcacatgtggggaaccaattctctcctagcagtggaagcccaacaggcttacctgcccaaagtctgagagttttctgctcaggactccgttctccaggacaacagctgccatgctggctctcagtaagtgaggtgtctagcttagcagcagggttaggaaaagtttgcactcaggatgcggggctgatggttttaacctggctctcaggacaggagaggagaggttttgaagggtgtctcccactgcagtctacaaggtcactctcagtgggtgttgccctgacgtagcagtggatagacatgaacagtccatacccaactccagtcctggactgacccaagcgggaggctttgtgggaggggtggcagccacaacatgattcttttggcagagtatcctggacaagaatagaaggcagagagcccagactacctacatcctgacgctcagacaggcctggcaatgctgagacattggaatacctggagtatggattctccgcaaccagagaaaaaccagaaataatcatgatgatgatggaggatagcaattaaggatgactgttccctgcaagcacagaaatagaggcaggattgcaatttaaacacgctccactctcaactcaccttttattcaatgccaagcaagttagtctccatgacatacttttccttaggcaaccacccagatgaccctatgaggcgaacatgagcaaaagcccggaggtatcggggctgaaatccagccagttctctaggtactagtatggtggctgggtctctgcaaagaggacagaagggccacctcgctgagatatgttatgtgcatgaatgacacagacgagatgatgctctgggtattcagtcggggctgttctcaccatttacactgcataaatggaagctaatgcttaaatgtctgtctaaaaaaagaaggaaggaaggaaggaaggaaggaagggagggagggagggagggagggagggaggaaggaaggaaggaaggaaggaagaaagaaagaaagaaagaaagaaagaaagaaagaaagaaagaaagaaagaaagaaagaaagaaagaaagaaagaaaagaaatgaaacaacagactgccatggagcatttgctctgtgtgtgtagtggtggggttctctgcactgggactacagcagaagcaagcaacctccccatcagcactgcaccattctagtggtcaggcaaaataagcaagttcagataggactaagcctcaggggaggggcaaatagaaacaggaacgaggagtgagctgagtaccaggtactgggaagtggtctcaagtggacatgaaggtggcatgtcagaaccccatttttcggagaaggaaactgaaggcagatattcattgctagcagagaaataaagtatgaaagtacaggaaggtcaatttcagaaagacagagaagtcgggggcatcaggggactcagagcctgcttaataattacccaggcaaagttaatgaactatgagggagcaggtcaataatagaagggactaggagtccaccccatcccctcccacaatcccttgatctaataaacaagtatctgccaaaagaaaaaagacaacatttcaagttggagactcaaagcaaatggattgcttcctcattggatggacagccactcctaccaataccccagtgtctttgcttttaaaatgtgcgtctaggggcattgcttaggatttcatgaacttccataatgcaaccgactttctcctgaatcccaagaatatcaatactgaaagaataatttctgtccaaaaggcatgcttagatatctattaatcttccctgtggtaagttaccagagcacatgtttaaatttcaacctgcctgtctgagtccagcatttctcctgagcaacagcctcaacccgcaagtcacaaccctttgtcaaactcctagctccaaaaaatttacattgcaactcctaacagtagcaaattacagttatgaagtagcaacaaaaatgaaggctgctgtgttagggaagttgagaactactgctctccagattgtagatatgaaatgggatgtgcactcagctcaggactgccttagaaatgtcactctgttatcgtatactacagagggcaatgtcaccaaaagaacctgcagcgtgaaagtgaagaaatgaatgaaggcaacagtgatggaggtcttatctgcatgcacattgtgtgctaaacaccaggcagcagtgatgaggccttatctgcatgcacactgtgcgctaagcaccaagccaagctcttcctatatgaggttttatttcttcctgccatccatcttgcagacaattcctctactctgtatagacaaagcaatggctgcccaacacatttaaatccacagctgtaattcaaacaatgtttgattcaagaccaaagccttggcttttaaaaatattctttctctccttttcgaaaaaagcacatgaccttttttgttattttttgttttgttttgttttgtttttttgtttcccttttttgtgttttgatttgttttgttcttaggagaacacagtgatgacccttctcttttctctgaacaccagttaaaaacagaaatctagggctggagagatgggtcacaagttaagaacactggctgctcttccagaggtcctgagttcaaatcccagagacacatggtggctcacaaccatgtgtaatgggatctgattcctgggtatatgtgacgacagacactcatacatagatagatagatagatagatagatagatagatagatagatagatagatagatagatagaggaaaatctttgtgggctgggatgtggtttatgagttagtatagttgcctagcatgctggaagtcctaggtttgatcaggaaacttggcttggtagtacatgcctgcaatctcagcaataagatagtataagcaggaaaatcagaaagtggagaatatccttggctctgaagtaagtttgaacctagcctgagctatatgaaaacgtgtctccaaaagcaaacaaaatttacttgggcaaaatgataacacttatctatggaccaacacaaaacttgacatcataggagatttctggtgaagcacacattgtagatgattggatgcagagtgtgctggaactaacagtggcagtggtgaacactaagaaaatccagtaaaaagcacagatctacaagtatttatgaggatgctctatcgaccactggggcatggtagtgggtgtgtggacgtcagcaccatgcagccagatgagcagctagctctgtacttggcaaccttagagctgacttaactgatttaaaagttgaagatttcccaacctttgctagcttatcagcttctttttacttaacttcatgctcacagggctgagttaatcataatccatgggttcatggcacataaccaaaacctacaagtcacttttcttaggagatttgttctttccctcttatcttgattactcaagatagagtaatgtccctggtaccttcactgccctgtttgatgtcagatgtacacctgttatataagaatatgttttcctgatatgtaatgctggtcaagaggtgtactatagagttcagattctgctttgaaaacataagcctggcctgggatgtggacttagttctctgatgatctacttggtgtaaaatgtcctctgtgtgcaactactattgttggtgtttgatgcaggtttatggtgtaaccttcattgactttgcaaagtccttctgagtgtagagaaatgttcatttgttttcaaaataatgtgttgagttggacaactgacatttagaaattgctaagtatggcacctattctgcttagtctgttaatgtggctaactattaacaaaataacatgttaatattataggcacaggtttttttcagacgttaagttgtttttgttctaaggtaacccttgtttgtggtttattcattttaatgctctatttttacatggtttattcatatattttaattttcttacatttatttatgcacttatttgtttatgtgtgtggtcccaagtctcccatgccacatgtatataggccagtgaacaacttgcacagtctgttttttcattccaccgtttggggtacagaggacatgcgcaagtcatcaggcgtggtggcaagagtctttccttcacccactgagacatctcacaggtccatcagtccatacttcatataggatctttctactgatgtttatgggaaaagaggaaccttcatttctttacttagatgtcatctcatgttgaaataacaattataactgctttatgtaagacccagcacagctttctgtgtgtttataattttgattctcatcaacagaaaatagacattgtttgttccttgagaatttggtggccttcttatatttgctgggcctgagataagggagtagggatgttatgggaaagttcaaggttacattcaggttctttaacagttatgtcattcctaaaatctatttcagccagttttatatttttccagaaactaacgcagcttcttaagggctccatgaaacgaataaattactgttcataatattattttcctacctatatttattttcattttttctgtattctattatttgttggtctgttggggaataggtgcatgcacacattttacctgcattttgatcctgaggctctctgattaagctggcttggttggctagcaaaccttaccggcctgtttaccctgtattgtgctttatttatctctcatcttgcctgatattggtccatgaagagcgggcatttcatcacaccggtctctgtgatgttctctctttcattgatgactctctgcttgtccttactatttccttgtatgctttgttagacctttcccaacttcttgggttgagcactaatttgttttcagtcatctgtgttttctttttttttttaaattttattttatttttattaggtattttcctcgtttacattttcaatgctatcccaaaagtccgccatacccacccccccaatccactacccacccactcccctgttttggccctggggttcccctgtactggggcatatacagtttgcaagtccactgggcctctctttgcagtgacatctgtgttttctaatcaatacatttaaaatgaaatataagtgctaccatagttgggttccatttatttggtttactattgttcagtttgaagttttgaatataattttctcaacgatttaagagtttgaaagaacacattatttaaattccagatacttgggatattctcagctttcctccttatttctaattggcttctaccaatttattgtctcctggcaaaatgcaatactttttttcctgaatctattctaacccaacatgagctggaatgtaacactagtgatgaatatcaataagttcagactcaaagaaagaccaatctttagttgagtgaatctcagcagcctgcttagccatttttcacagaaagaggccatttccatggtttgggacaatcttcacaaggtcagttccctgcagagacaacaccacctgtgtgaatgtcagacctcatggcagcttgcctccctgcatcacccccagattaatggaaagggcatcaaaggagttctgggagaaccttacctagatgcaaacacctggagcgaatataacatgtaaatatcatgtgtgtgctgcatggtcagatgaatagaatatagcattctccttatgctcaagcaaactctccccacttacagcagccagtccctgtaggatgaatgtaaaccattcaaagcaatagcctttttgaatttactgcatgggtgcggggccgtgggtgtgggggaaagaggggagtgggagagtgcccgtgtcccaccagagtttcgctgctttgggcaggcagacacgggaggactgccgcacattttccacgaggactgtggggtggggggcgagtctagctgtgttaagccactgaccccatctcagcgggtggtggacaagtgttagccctaggtaccaggttctcagccttgggcatcccatgctggataccgcggaagagctgagaacagaatgggggcccctgggaggggggtcattggccccagggctgaagggggagagggcaggggagaggggtgctggatggttcccacgcaggcaagagtccttggtcaggtgcgtggctggagcacaggatggccttctggtgggaggctagacgtggctagttaagagaaagcccatcccatcattcaggcacggcaggccttgatgagcagagacagtctatggttgtagagctttattgtagaaaggcagggagaaaggagagaaggtagagagagagaccggccatggccacgtagagagagaagagaagggaaagagagaaggagggctaaagagtaagaaaggtgagggcttaaaaagagcgaggaggggccaagcagcccctcttatagtgggatgggctatcttactgttgccaggtaactgtggggcggagcatacctggctatagtcaggtacctgtaggggtgcagtctagccagaaagccagaagcttgggacattgtctgcatgactgatagtcacagaattatggacagacacccgattctgggaatgtgtctcgcctttctgtcctttgtacatttctctattgggtcgcaggagcaagccccattcaactaaaataggctgcctatcacagtctcacacatggggccaaacaaatcttacatacatagacatgtagcctttagccattcataaaaatttcttaacttctatatcgataaaaagggcagagacctaagaatccttggaattcttagaacttatacattacattacttcataatgaaatcaattagtaaatcaagtatagcgtgaaatattaaaaagcagtccacactatcgctgacaaggcaccggcctattctcatctcatgacctggagctctgaaatctctccatcctggttcgctaatttcccatcagcaggtcactgctatgccacctccacacttccaaatctccatggccccttggagtgtacttctcgcaaacccacactttgccgctgtacttttctctctggaacccggttgtgtcaccgcttgaaggaaaacatcacacaaacttagctcagaattaataggtaactcaatcactggacacagcaactagcatcctaatttataagccattctaaaatcctctgatggacatcccattagggctgagcactttggggcctcttgtttgctacattttgtcctccaagcccgccccccatccccttcccccccccccacacacacttccccacccccactcccttgtacaaaagcaagtcaccttttcctgcctctcctcttcccctctctaaccaggaagtcctgcccactcctcacacaatgattggttcctagaaatctttattcactagagggaaggtccacaggaagtcacctgagtagcgagtgattcactcctcattccaggcagcccctcttggggaagcagaattagaatcaaaatacaaacagcagcagggctgtccacaacaatcaagtgtgtttggttgcaggtatattagttaataattctcatcatgttttatgcattgtgagtttaaattgcgatatcttttattttaagcaatgctttcatatacttaaatgtaatatttgtgatgctggggatttaacttgggatcttgcacatccttgataaatgctctaccacttagctatattcttgcttctataaatataatttattttcagttttctgcaaagtaaaaaagataaaaaaaaaaaaaagtatcagccaggataaaagatttgtctctacccagcaccacttccatatctaggtccactgaggcagaaaagaagtcccatagtagcaacacggcattggatgctttcttccttctttaacaatatttagcaaaatttttagaatttactactatgtgttttgaccatattcaccatatccactatctctagctcctctaataagcatcctcttcactctccttacccttcctacccaacttggaggtattttccccatcagtcaagtgtgtgttttccagttagtcttcagaatagggaggccccggcatctctgggtttctcaagcttccacccgatctttcaggagtcttggggcagaggggttgatatggacatcccacttagggctgagcacttggcatcctcttactctctgcacattgaccaactgggggatctgtgttagttgtcacctactgaaaggagaaacttctctggtttggattgaatgatgctctgatttatgggaagagcagtaagtccttcggagctgttttaagactatattcatggaggccatatcagtgtccatgagccatgctgtaggattccaggacctactacagctggcgtctgtgttgatgtctgtgggcagtgttaccatcaaaggtcatgaagatatctgtggtctgtgctgttgccttaagccaatttaatattcacagtgtccatgggccacacttccaccatgggccatactgttctgggtggcctgtgctgccacctgaggcccatactgcaccagaggacatgtctgggtctgtggtcctactatagccaaggactgtgttgatgtccatggtccacactaccaccaaaggccatgcagatgtctgtggtctctgctgcaacctgtagccatgtggatgtctataggccatgctgctgcctagattcatattgatgtgggtggcctgtactgccaccttgaggtcatgttgatgtctgtggtccagacagcccacaaggaccctgtctgagtccatggttgtactgcagcagggggccatgttcatggtctgcactctcaccagatactcatcagggtggtaaatgtgaaacttgcaaagaatcagtaagaaattttagggggggctataaccacttaacagaataattatattggtttctcttctaagacctatgatctacatagccacagggatattagacagttggaatttcctaacttttatagtgtgatagtacactgtcacctaaatttttctttttttttcttttcttttttaaatcttgactctatttctatgatgcagtattttatgagtgccctgatatcccatgttattaatgtctacctcttcctcaaaaagaaagaaagaaagaaagaaagaaagaaagaaagaaggaaggaaggaaggaaggaaggaaggaaggaaggaaggaaggaaggaaggaaggaaggagaaagaaaaaactttctttattctggagttaaacatcatgcctgtctttggaaaagaacattaagtagttgccctcagttcccactgcagaacattctaggcttagatcctacctgaaggtattccaaattgatgagagggaccaaggaaagtcatatcatctctttttttcccatttttattaggtatttagctcatttacatttccaatgctataccaaaagtcccccatacccacccacccccactcccctacccacccactccccctttttggccctggcgttcccctgtactggggcatataaagtttgcaagtccaatgggcctctctttgcagtgatggccgactagaccatcttttttttttttttttttgtcatatcatctcttatgctttcagtaacaactgagtccatttgtgctctctgttttccccacaagcccactttatggatgcatgaccagcccactttcaggaacgacagagttggctgatgggaaggcagggagctgcagcacacacacctacactgtacagctacattcttctcacttttcaaaaacagtaactggggtgtggggtgtagctgaaaatctttgtagagtaaacaggtgcaattctcagacttccttgtagctacaaatcaaatttgtgacccaagaaatgcaaggagaaaatctgcatgcctgctaggaagtgcttttacaaaggtatgcccttctccttttttttctccttaagggtttcagtgtggaaacactgttggggcagtagtcgccatgttgggttatgagataaatttaggaacatcatgtggcaggagtttttgctgcactgttttggctcccggcagatcacacgatcacacacacacacacacacacacacacacacacacacacacacacacattagcttgtttttttaacatgccttactagctcagtggttgggcacttctaagccttccaggactatcattctcttccctccagtactcctgggtcaacaccttctaaatctaattttaactttgcttccctgttacgttctgtgatgcccattggtctttgctgcccaagacacttctgggcagcccttcggggagctcttactctttacttctacatttcagatggttcccccctccagctctaaatctgcctatgtctccccggtcatgcagattctcctttccttctcctgcatcttagcctgtgcaactctaaggctcctgccccagctccttttgcccagccattggttgtatggcaattctttattaccaatcaaatccagctatggggcaagctttctttaactttgcaggacactgcaaacagggttatttggctaaagcaattagcgagagaacatcagccactaaaatgtcaaccatttctacttttcaaagcaaaaaaattggagtcaagagaggaagggtggggtagttgactgactggcattttgtagaaaagaaaaataaactgctagtttatctaaattcagggttttgaaggttgtttttttcacagctacatctaatcctaacaagatgagatgcaagggaaagacacatgaggtagatttaccgttaggagaactgctctgtcttcacaaggacttaaaggacacagtcacctcctaaagaattttgtttctctcatgtctttctgtttaatcttcttacccacatagacagcccagaaatctgtacatcattactgactaataccccgcatatacaaaatgtgattaagatatgaagtcatgctttttttgtcagaataatatttagggctagctattctgggaattcttagcagaacgtaggcattgttggcttataatgaaatcaattagtaaatcaagtgcctctgattaaaggtctattaaatgaaaagaagatgttcgtggatgtagcccagcttctggagcctttccatcagcatcctgtctctgcagcatcagaatgaggtcatcgggtatggtcatctgtccgctcatgtactcggtaaatgttttctgggtacatatttaaccaggcactgttctagacaatgatgatgaggactgtcagggttaccattcccgttgacttcacagtctaatcgggacataaatggttaaacatggagactagaaaggaaaaacaaagaagcaaaataaacctggcactgagtatgaccaagaagaaactaagttttatgaagagctattatgaaagaggttttaagggaggctggttaaaacaagagaggacttattgaacatagagactctgtattgaaaactgaagtttacaaataagcagattcgggagcaaaagggggtttcgaatagaaagaacccctgtatatgaaatctcgagggtagagttaaatgggacagttctcaggaacattcaggagtatacctaaaggtacttgtacctaggggaggagagaaaagtgtgagttggggtgagatgaccagccactgttcacacaactgaactgatgtaccataatcagtggcacactagggcaagcttagctaggctttgaagagctaacttttcaaacatttggtaagcctgatcctaactataattgtgacttaaagattaattacataaactcacagttgagtaaagcatatttatcaaaaatatgagactcaaccctgaagtggaagtttctagatacgtcaggtgatacatactcatgctgtattttactgagacaagacccgtgagaggacacgtgatgtttggactcagcagacagtgatggatcttgcatagatagttttgcaacactttgttggtctcgtgtcttcatttttgctgatcttcactttgttgagagaggcatggcagagaacttctcctggcatctcggttggacctggtgggtcctgctgacttatgccaatcaggtggaggcctggctgtttctgctagatagtgccactactgctgactc

SEQ ID NO: 868594 - DNA, 47 bp, Homo sapiens
tgtgggttttacagatagaaatggaattgcaagtacacatatctctg

SEQ ID NO: 868595 - DNA, 42 bp, Homo sapiens
ttcaggccaactctctaggacatattgaactgtcagttattg

SEQ ID NO: 868596 - DNA, 39 bp, Homo sapiens
cagatccaggctaagaatttgaatttggttcactctaaa

SEQ ID NO: 868597 - DNA, 78 bp, Homo sapiens
tctatggaggtttaagtcaagtgcttggtaaacagcaacctgtactaacaactctgccaactgcagggggcagcgggg

SEQ ID NO: 868598 - DNA, 103 bp, Homo sapiens
gaagcaagtctgaaatcctttaggtgctgcaaggcatcttcagatcccaactatctgactctgttcactctgcttcaacaacggctttctaactggctttgcg

SEQ ID NO: 868599 - DNA, 22 bp, Homo sapiens
acagaggctgtgacttgcctta

SEQ ID NO: 868600 - DNA, 45 bp, Homo sapiens
gcagaaactaagcagagaggaaaatgaccaagagttagccctggg

SEQ ID NO: 868601 - DNA, 4047 bp, Homo sapiens
aggtgctggacaagtggctttttcttcctcatctctaacaatgggatgcaatagctcatatcttgcccatctcaaaggcaactaaaaatttaactatttaaattgaattatttaaatttttgtgaacatgggtttttaaatgccagaggctacagagatacaaggagcggctttcaaagaagttacagagctagatagaatttctcatctctacaaagaaaataaacttggaagtcaaagcatcatgttatctgccataacaatattaaaatgacttatcaccaatgcgacttttctaaaaaattgttactgattgaaaaaatgttactgattggttgaggaacagtcctggattcttgctgcccttaatttgctgtgtaactacatgcatgttgccttaccttcctgggctgaagactcctcacctgtatgtgaggaggtcagactgactgagctctgacagccctcccaggtttaacattttctagtccaataaacagatgtaactaataacctacccctaattctccaaaactgtgactgtctccagcagctaactgagctctgggttcctcttagccccagaaccccaatattctttttttcaggccaactctctaggacatattgaactgtcagttattgaaagaaaagtacttggttatttgcataaatgcagtagttgacttcagaaacatccccaagttttagcatggatgatgggacattctcctcactgattctatcactacccagtctgctacctcccactgttgtgcctaatgagctctgccagcttcagagcatctgaggaacatctcagtctagttgacaccacagagaaaaaaacaaaagagatggaggagttcctgtcatatggagaacatattgttgggagcctccttttggggcttcttagtacctcctgatattttccatcatgctttacattcagccagcactcaacaggtgactagatagagtgagacacaggacacagagacgtgatcacaggtcatgctgattcagagaacaaacctgcacaggcttctacctgggcaatcctgtccatggcactggggcagttgctgccttctccttctttgaggtgtgtactagtcaaagatctccagagagaaagaaccagtgagatatatatagagagagaaagagagagagggaaatctgagaggggacttattaggggaattggcttacacagttatcaaggctgagaggtcccacgatatgctgcctgcaagctggagaacctgaaaagtcagtggcgtagattagtcaaagttcaaaagcctcagaaccatggaagttgatggtatagctctcagtctgagaccaaaggcctgagaacccctgggtggtggttgggtgcgagtcccagaatccaaaggccagaaagcctggagttctgatgtctaagggtaggagaaacagggtgtcctggttccaagagagatagaatacgtatgtggctttcctctgcctttttcttccatctgggattccagcccattgggtggttcccgcccacaatgaggaaagatcttccccactcagtccactgactcacatgccaatcccctccagaaacaccctcatagacatagacacaccccaaaataatgctttactatctattcaggtatcccttcatccagtcaaggtgacacataaaattaaccatcatagagtgtgctctcagattgactttccattccagatttactggtttactgtggagtttgggctctgcaaacaaggagactccataaaggcatatggtgctgggctcctgtcatcctttggtgaattacaggtatgaccttcacaggaaccaaggatagatttaaaagtggtgggtacagaaaaccattattgtgctttcaatattgttgaaaccctatttgtatccgttttgatatgcaacctgggaactcattctccagtgattggtaccttagcagctatgatttgatgatggctgtgggttttacagatagaaatggaattgcaagtacacatatctctggggagaaggggcctcctgattccaaggctgacctatgcatgcagccttgtgagtatgcaaacacatgccagaaagtgtggttggctcccacgtcatctattgaccaccttacttgaaagtaattggaatgaattactcctttctcccttggctgtaggttttagatgagctatgaagggtagaacctagtatgtgcaaagtaatttggctcacagcatttgggctgtgatgtagaaggaatcggggtgagatgagagaaggggcacaaatggcctatgggatgcagcagggaatactgatcctgatttaacagtgataataacttttcacttggggcctacagtactgcttatcagagaagccaaagcttctccccctggagctggagaagacagccatccaaaattacactgtcacggagttccagcccctctattacgtggcagagagttttaatgatgccaaggagaaagtaaggtgaggtggtgacaaaggtgagccactagctctgggggcctcctgactggtgccactcatctgtgggtggttggccaggagagtggactccaatgtctacagcaactttgtaccatagacagtttctctcccatgttctccaccctccttttcttccgttctctgttggaaggttgggcatgctgacctttgcacacacccctgccacctggtccctgttcaacgcaaccaccaagtcaagacactgaaccctcctgcatacagagtggccacagaagtctccccacaaaatcaaagaagtcttataacctaggaagtcctttcttcactttcttctcccaaacacctacaaaatttgcttcctcctttgtgtctttacccaaatttaatctctatatgtctttctctaaccaacttatttctactcatccctgccaccagtgcgtctgtaatacttattaacttgtaatatattacataaggtaagctccatgagggtagaaattttgttctttctattttctgtttttcctccagcccctggaacaatacctgacacagagtaagcactcaataaataattggtgaaggcattaatcccagaggcagttcagcaagaggctgatggagtggttctgggactctgagactgttggccctctgagtgcacagttcctgcacccaagcaggagacagactgggcagagggtccacctggacatgaatatcctaatactcactgtatgttaccacttaaaaaaatcttatcagtgatggatgacaggcatggaacatacaggcctttgggagtctatgacactgggtatgttagctttcaaccctatctatggcctctgagaggtcagaggaatggaggggagtggtgatagaataaatgacttctcaaagaaatccgcacttttgaaaagagagacatgagggaggaaagagagacataagggagaaagtcaaagacaaatgaacatacatcttagtccttcctttctaaatccaaattccatcccccccagacccctcacaaagaaaggtaaaaattatccttttgccagctcattcacttaccttacatttgcaaggtaagattgtgggacaagacaggtccagctaacatttgtttgagaaccctttggaataaagagacttcaaagaggactaactttctttcttttaaaatggatattccttaatttatgtctactatctttagataattaaaggtaaaatgctggcccacaaatccacttggtgtggcctaaaatgactatttctccagctctgtccagagctctcaagtccttctggctctgcttttttaattctctcctaaactgggagcctagcctccttccagcatcatccccctctccctccaaggcccaaggtttggacccaggcattggagcttagaggcagtgctgatgagcaccctgtcatgccaagatcacatttggatgggccctcctggagacaactctctaaccagcaagtgatcagtcccagac

SEQ ID NO: 868602 - DNA, 4042 bp, Homo sapiens
tggcacatcaaatgaacttaataaatattttgagagtgaattaatatatacagtaggaaagacacatacacacaaggcaggctgcagtaagtgctgtaaaagagacaatgagacagtagaggaattctgcaacagaagctgtggtgagaattaatctatgatgtgttagactctccagctatatatatgcctggaccgatgtcaccacttatctgcagttctcctgtgatgtttccagggtacatgattaagactcatttaacattccaggaatattctgctgatgaataatcactgagctggagtcaagagaagaagctttagatactaaccgaccctgtgatcatgagcaagtcacttcccttctctgtgcctcaatttcctcacttataaagtgaaaacaaagggccaagtgagggtggaaggatccccctaccctggagatctgtgattctataacatatgggcaggaaagacttgataacacactcagggtctatgtgggctgttctgaaggcatctggccacccatcacctttttatggccaagtactaggttggttctgtggttccaattacaggaacagaacaggttctattttcccccaattacaggaaattggccttgcctctctgggtgcacctgatgaatacattgaaaagctcgccacagtaagtcccttctctccctgggtggatggtggagtgctataggctatggccctcaggtctttgaaactttcctactcccctggaagccaggttatctggggaaaaaaatcagaatgtggtgggttacatttgcacaagtgaaacttcacattttgatagatttctccttaataatttgattttgaaatcagctacctacagatgtttacatctcttaaattttaagcagtatcttgaacccaccaacaggctataatagtagcccttgaaaacccttggcataaagtgtgtgtatgaagtaatctggatccagagctttgaacatggaatgtttacatctctacttttcacaccagagcatacattaggatcttttctttctcagacatgagggagaaatgggggtgggctttccccttcttgctgaacactttcctctcctgagtatatctgatgacacttgtccactggggctatagaagcaattctacatagcaggtgatttccttccttcatactcgtttctaattttagtacatcccaccccagccactagccacattgcctgtcctggaagttgaaaaataaacatttataattgaattgtggactgccaatgagtgcaaatctattattaagatatatcagtttagaagcttatgaactcgttccatcaaaaggctaaaaactcccagaaggttatcttctcactgacagctgctttcaggtgctggacaagtggctttttcttcctcatctctaacaatgggatgcaatagctcatatcttgcccatctcaaaggcaactaaaaatttaactatttaaattgaattatttaaatttttgtgaacatgggtttttaaatgccagaggctacagagatacaaggagcggctttcaaagaagttacagagctagatagaatttctcatctctacaaagaaaataaacttggaagtcaaagcatcatgttatctgccataacaatattaaaatgacttatcaccaatgcgacttttctaaaaaattgttactgattgaaaaaatgttactgattggttgaggaacagtcctggattcttgctgcccttaatttgctgtgtaactacatgcatgttgccttaccttcctgggctgaagactcctcacctgtatgtgaggaggtcagactgactgagctctgacagccctcccaggtttaacattttctagtccaataaacagatgtaactaataacctacccctaattctccaaaactgtgactgtctccagcagctaactgagctctgggttcctcttagccccagaaccccaatattctttttttcaggccaactctctaggacatattgaactgtcagttattgaaagaaaagtacttggttatttgcataaatgcagtagttgacttcagaaacatccccaagttttagcatggatgatgggacattctcctcactgattctatcactacccagtctgctacctcccactgttgtgcctaatgagctctgccagcttcagagcatctgaggaacatctcagtctagttgacaccacagagaaaaaaacaaaagagatggaggagttcctgtcatatggagaacatattgttgggagcctccttttggggcttcttagtacctcctgatattttccatcatgctttacattcagccagcactcaacaggtgactagatagagtgagacacaggacacagagacgtgatcacaggtcatgctgattcagagaacaaacctgcacaggcttctacctgggcaatcctgtccatggcactggggcagttgctgccttctccttctttgaggtgtgtactagtcaaagatctccagagagaaagaaccagtgagatatatatagagagagaaagagagagagggaaatctgagaggggacttattaggggaattggcttacacagttatcaaggctgagaggtcccacgatatgctgcctgcaagctggagaacctgaaaagtcagtggcgtagattagtcaaagttcaaaagcctcagaaccatggaagttgatggtatagctctcagtctgagaccaaaggcctgagaacccctgggtggtggttgggtgcgagtcccagaatccaaaggccagaaagcctggagttctgatgtctaagggtaggagaaacagggtgtcctggttccaagagagatagaatacgtatgtggctttcctctgcctttttcttccatctgggattccagcccattgggtggttcccgcccacaatgaggaaagatcttccccactcagtccactgactcacatgccaatcccctccagaaacaccctcatagacatagacacaccccaaaataatgctttactatctattcaggtatcccttcatccagtcaaggtgacacataaaattaaccatcatagagtgtgctctcagattgactttccattccagatttactggtttactgtggagtttgggctctgcaaacaaggagactccataaaggcatatggtgctgggctcctgtcatcctttggtgaattacaggtatgaccttcacaggaaccaaggatagatttaaaagtggtgggtacagaaaaccattattgtgctttcaatattgttgaaaccctatttgtatccgttttgatatgcaacctgggaactcattctccagtgattggtaccttagcagctatgatttgatgatggctgtgggttttacagatagaaatggaattgcaagtacacatatctctggggagaaggggcctcctgattccaaggctgacctatgcatgcagccttgtgagtatgcaaacacatgccagaaagtgtggttggctcccacgtcatctattgaccaccttacttgaaagtaattggaatgaattactcctttctcccttggctgtaggttttagatgagctatgaagggtagaacctagtatgtgcaaagtaatttggctcacagcatttgggctgtgatgtagaaggaatcggggtgagatgagagaaggggcacaaatggcctatgggatgcagcagggaatactgatcctgatttaacagtgataataacttttcacttggggcctacagtactgcttatcagagaagccaaagcttctccccctggagctggagaagacagccatccaaaattacactgtcacggagttccagcccctctattacgtggcagagagttttaatgatgccaaggagaaagtaaggtgaggtggtgacaaaggtgagccactagctctgggggcctcctgactggtgccactcatctgtgggtggttggccaggagagtggactccaatgtctacagcaactttgtaccatagaca

SEQ ID NO: 868603 - DNA, 4039 bp, Homo sapiens
tggattttttagccttctagttataggtctgtgacctgaatttctcaaatgagttgagcccagggaggggtcctcatgccctctgcaagagcggaaaccaggtacagttctatgatcccacctgaaatgggtgtgtggttctgggaagctaaatacccatttcggagatcaagcatggggttggtgaatcactcatcctctgaatcatatgtgtgttcttcagtgtactaatctcatttttcctgctagagcctttcatccatgaaagcctccctgattcccatgcaggaactacctcaccttcttccaatctcttagtacattccccttaccttttcagggctgttgcaactttctaccttgtcaggcagttatttgtgtatatgcttgaattaagtgaggtgacatttgccaagaatccaatgctgataccctgacttagagttaacaaagaaaaaaatgagctgaatatcttatcaccatcatcaaagctgcaaccctgcaacctagaatttcattcatctttcacagtggttaacaagctcaaaaaaaagctttctttttctttttctttcttttttttttcttttaaggcaaggtctcactctgtcacccaggctggactggagtgcagtggtataatcacggttcactgcagcctcagacttctgggctcaaacaatcctcccacctcagcctcctgagtggctgggactacaagcacatactttcatgcctggctgaatgttttaatttttgtggagacagagtctcactacattgctgaggctgacctcaaactcttggcctcaatcctcccatctcaccctcccaaagtgctaagattacaggcaagagccaccacacctggccaaaaaagaaagttttgggctgagtaaaataatgctaccaattctctccaggcactgagaggcagcctaaaaccatggtttggtagctgggatcatgagaaggttgaatggtgttctgatgtacctaggctccaaccctgccactaaccagctgtgtgacctggggttacattatcagccaccctgtgcctcagttttaataaaagtggatcagtcaaaagccctctccaccagtcatcttcctcacaaagaagcacaagaatcaaatggaatgacctatgagcaaatgctgagccaagtattgggatttcagaataatgggattgtgtgtgaatttaatgggcattttccctcagctggcagaaataaacattcccactgtcaaataaagaagctaccactaaatatttgaaacaaacaaacaaaaaagtggaatttattgcttgctaagtgagggaaaactgtacttgtaagatgcagcctctctaaacaaaaggaaaattacttttatgtgaggtttggggaattatggagttcaaagatcgttggacttttggaagtggaagtgtttcgggattagttgaactttaactgtagaagcatcaccaatgacattcagaagtgtggttactgctgccaagatatctttgattgcttgggacagttttaaaatctggatttgttactgtggccaaaaaacaatcagatttttccttgaagaataggaaccttttattcttaccaccagaagttagtttacgaagtcagaggctaagtggcagtcctccttaagccatttccactttggggaaccccacagaagagtggacagttgctcaagtcaacaaacaggagctcttggggcatcagtgtcacatggttccaactttgatctggacagttccaaggcagcaagtcatgttgaaagtttcctgagaacattcctttttgatcagaggcaggacttgcttcccactacagtacaggatggagtggggctggagcacagggaatgtggggccccccttgttgtaggcaaactctaggctcacaaagaatggtgactaagagaacaaggcgccattttggtcttggatttatcagtggtttctagttgaattgagagagcagatccaggctaagaatttgaatttggttcactctaaatcagaaagtattttataagcctaatctgaaccaggctctggacttggcccagggagtgatatagagatgcagaccatgtagcttcttgcttcaaagtgggtctaatcatagtcttcatctctgtctacaagcactcctctggtgatctcactcaatttcatggctttaaataccatctctactctgatgacggacacatttacatctgcagccaagacttcaatccccaaattcagacttgcatattgaattgcctattcaacatctccccttggatgtctataagacatctctaacatcctatccaaaactgagttctggatcttccttctcaaaccttctccagcacagctttttctattatcagttcataggaattccgcccttccagctgatcaaaccataagcactttgggacattaccaactcctttttctcttaaccccacagccaatctttcagaaaatcctgtgtgttctaccttcaaaatatgtgtagagtctgaccatttcaattatgtctactgctaccaacttggtctcagccactatcatttctcatcctagtgactgcggtagcctcctcagtggccccctctagtggtctctaccctggacccctccagtctccatgtgttctgtctacactcagcctctccagtctcctggtgtcccatttactctcaacctctccagtgtcctggtgtcccgtctacactcagcctctccagtctccttgtgttctgtctaccctccacctctccagtctcctggtgtccctttaaccctcagcctttcggtgccctggtattgtgtctacactcagcctctccagtctcctggtgtcctgtttaccctctacctctccagtctcctggtgacctgtctaccctcaacctctccagtctcctggtgtcctgtctactctccgcctctccagtgtcctggtgtcctgtctacactcagcctctccattctcctggtgtcctgtttaccctctacctctccagtgtcctggtgtcttgtctaccctcaacctctccagtctcctgatgtcctgtctacactcagcctctccagtctcctggtgtcctgtctaccctccacctctccagtctcctggtgtcctgtctatcctcaacctctccagtctcctggtgtcctgtctaccctccacctctccagtctcctggtgtcctgtctatcctcaacctctccagtctcctggtgtcccatctacactcagcctttctagtgtcctggtgtcccgtctaccctccacctcttcagtctcctggtatcctgtctaccctccacctctccagtctcctggtgtcctgtctacacttaacctctccagtctcctggtgtcctgtctatcctcaaccccttcagtctccttgttccctgtctaccctccagtctcctggtgtcctactctaccctcaacccctaccatctcttggtgtcctgcctctaccctcaactgctaccatctattctcatacagcaggcagaaggagtgcttggtaacacaagtgagatcatgaccatctatctgctcattaccctgcaatggctcctgtttcactgaaaggaaaaactcaagccctaaaacatctaaaaatattctacatgatctggctctggatccctctttgatatcacctgccactgccccctcactaattcttctccagccacattggttcctccctgtgtcttgacccaaacaacgctgccttttcttgggaaagaaatgcaagcttttgcactggctatatgcttggccaacagtgtgcttccctcagaagtcagtataaccaacaactccacttccttcaagtctgtgctcaaatatgaccttctcaatgatgcttaccctggaaccctatttaaaattgaagtctcccctgaatcccctggagctcttagtccctcttgtttatttcttcttttgtttcttctttccaaagaacttatattcttctaacatagtta

SEQ ID NO: 868604 - DNA, 4078 bp, Homo sapiens
tgtatcccagttgtttattcctcctcctcccggaggaggaactgagacacagagaggataagtaggcagatggaacccggattctaagccagaccgcatgctgattggaagttcagcatcttcccctcgacctcatttcaggggaagttctggaagccttgcactcacttcagggttcccaccacgtctattttggctctctggattctttttgaatctaccactttcttactcctggtgtgatctcaaatcagctatttaagcttttagagccccagtttcttacccgcgcaagaggggttatcatgccttccttattttgaaggtacgtcagaaatagcaactgtaccaaagcaggcactctggatggtggttactgctgtcaataccttaaatgttaacacaaccagggtgaatccattacttcccttctttcttccctccttttctttcttccttccttccttatcttgttttctccctcctttctttccttttcttccctccctctcttccctcttccttccctccttctttttctctttatgcccggtacaacaaagtacccatggtttctgccctcatgaaacttacggtccaaaatgcccttgtctctgttcattcctgggaaaatttcacctgcaatgtatcttgtttcctgtaacccacagggatgtcggtgctgccacctgcccttctccctgggcccctctctctgcaagacccaggtgttgtagtccaccccactcaagcccaaccccttccccactacactggctcagaagcaagtctgaaatcctttaggtgctgcaaggcatcttcagatcccaactatctgactctgttcactctgcttcaacaacggctttctaactggctttgcgatcgaaagattttgctgcagtgcctggggcctttgggagggaaacacataatgggaagatgggttctcatgagctcatttacagtagaacagtctggttttatataatttatattttgggcctatatgtaatattctgctgctaatggccggacgcagtggctcatgcctgtaatcccagcactttgggaggccaagggggtgggtcacctgaggtcaaaagtttgagaccagcctggtcaacatggtagaactctgcctctacctaaactacaaaaattgggcaggcatgatggcgtgcacctgtaatcccagctactcgggaggctgaggcaggagagtcacttgaacccaggaggcagaggtttcagtgagccaagatcacatgcaactgtactccagcctgggtgacagaagggaaaaaaattctgctgctaaagaaaaccatcaaagaaaactaccatgacgggtgggagggagatgagttttgagataattcagagaacatctccaggaaagagaatgtatttgggaatgggttttaaaaccggtttctaaggaaaatggagtttaacttttgaacgatagtaatttgggggttatctggaagccagcccacttgccatcaccattggctgggatccccacttctgatctcagcaaggcctttggccatgttctgccaatctgtactcaggacgttgccttctctgtgtttcagtgccctggttcccaagaaccattcaagagctggacagatttgccaatcagattctcagctatggagcggaactggatgctgaccaccctgtgagtccatggcccgtaggatgagattttttcagtgcctctcctccactcccctcccttcctcttaccttctctacttggagcaatgtacttgttcacttgttcaacaaacacttattgtgttcctatttacacgagggctgggaaaaattagcaagactttattgtcatcatcattatcatggtcattatttttgtaggagcaaatataaatcactgtccagaaactattgtctctatatactaggtctgtgtatgcacaaacacacacacagatgcaaatcatcattgtttctgcctgtgtacatctatggaggtttaagtcaagtgcttggtaaacagcaacctgtactaacaactctgccaactgcagggggcagcggggagtggcgacgttgaaactgaatcttaaaaactgagtaggagatgcgggtcagataaggaacggagagggcttatggctgaaagaacagtgtatgagaataccgagagtcttggaagcatccacaatactgtgggaatgactggttggtgcattaagtatgagaatgagagatgtggctggggcagtgggttgggatcagattgtaaaagggctaatggaccagaaagaggaacacggactgggcctgtgtcttgcagccatgggggcaggtcctttaatggtttttgagtagagggccggggtgggggatatttcatcgttccctctactctggggcagagggtctggggaggaacagcccaggctgcggtggctcagggccaggtctcacagcctccatcggtgggaagggccaccgtcctgttgcctgccctttattctctgccaggcaaatgactccttcatctttaaatgacttgcagccatttacatcggtgaaggttgagcagaacgcagaggaagcatttacacttccacaggagtctgttttctcctcacatttatgtgggtctttataatcagcaaagaatgttcgcaaaggcgcttttcaggaggcaaagcagatgcttccatcttacagaactagtgaggcccgaggagcctgatgacttttctaaggcccggtgctaaactgtgagtcctgagagctcatggtgcctgaagacaaaggcctagctagtggcagaaatccaggctcttttacagaggccaaaggcaagctatttcaggggcaagctggccttttgaaatatgaatgattgatgcttcttctaattcaaattgtaaaaccaattatagtgggcttgaaaacacagaggggcatgaggaggaagatgaaaagcaaccataatttcagttatttctatttttctctctggacagttctgcatttttcaaataatgagaaagcatatatcaacagaaacaaaggtgaatttcctccaatctcccagacttccaaacagaaaaaaaaaaatcacctattatcacactattctaaaataatcaataaatcaatattaatatttgggtgtgcctccatccttcctcctttctcgctctgtctatatatatatgtatatatatatatggtgtatatatatgcacacaaatatgtgtgtgtgtgtttgtgtgtattaactgtcacaacttactaaccagcacccaattgcaaacgtgtaggaagtttgagtctcacctatgtattttcacgtgaacttccaatggctgccttgaatattagttgtgaaattaaactaagttatatttaaactgaggataggaattaaatttaaagctcctagtgtatattacttaaatactctctctccccgaaaagtaaaggtaaatgtggggacttttgacccccattccatcctatataccatgtagcctactcccaggagccctggggcgccaaggttgctccaggtgggattctgctctgtgtacccgttcaacagatctctgtctggggcctcttagccatcaactctgtcagcaaagcatctccaaagatactggttctcagaaaagctgtctgttcacctctgacccatccaaggggtctgcccagcagggcgttattctcctcttaccaaactcctgtcttcctgccccaaaccggcattcttcccattcgtttcactcccttttcatttgggacagtggaagactccaatgcaaagagatggacatttttctccctgtatcctcaagtcccctccaaagcagctggcactggctttaaaactctctggaatgcattggtttttaaaagccacatctttgactccctgccctctcaatgttatgaattttattgtaaaaatacaacatatcaggtacacagttccctgaagacgaggcgccaggctctctctgttcctttcatttctcatcagatcccagggacgtgggccaaggacaaaacaaaccct

SEQ ID NO: 868605 - DNA, 4103 bp, Homo sapiens
agcaagaaagatcttttagaagatgctgagccctgggtgactctaaagtgctgattcctttctcaagcccatgcaaacctgggtgggaaacaactcccattcttggcactgacaacagaggttcagtgtacaacgcaaatgctggacccactgaggaaggagagcttggggaggagtgtaggtgacaaggcgggaagccacgttcctcaccaaatgaacagagcatggtattgagtcatccgagactccaaagtttcagcagttgggaccaaggaggtctatcaagagacttgccctcattgttcctcagtttcttcatctgtaaaacgggataataataatacctacctcaaaggactgttgcagaaattgaagggggtagcatatgtgaaatgtttagggcagtgtccaacacacagcaagtacgacagaagtgttacctggagtgatggctgcagcatctgcctctgttcttgctgtccatagggagccaatctggaaaagagggctgtgctttaggggcatggaaacttctgggcaggaaatctggcttcacagtcagccctccttatcagtatgctctgccaccttcccatgattggcaagatgcattgacgatcaagaccagaggccagagagtcagctggacctgcatttgaatcctgactccactgtttcttagcagtgtgtgtttgagtttgcactaaacctctctgtacctcagtgtcctcgtctttaaaatgggaacattaatagtaccccccccccacaggtaaaatatttagaacaccattcagtgttagttttattgctaacatgggtggtagagagcctaggttcctcagctctgcagaaacaagggtctaaatggacctttatgaactgctggaatcagctctccttgttttgctggaatgcagctgctgctcctcctgaggctcctgtttagatcacggagggaatttccccagattggccactagatagcacacatgctctttcctgccccatctaagcaggtcagaatcatgaatcatgggtgtcagattgaaagtcacgttttatgtaccagacgctgagcggcgccctttgcttgtttctcatcactgcccacagcaatcctcagattcaagtagctactccaccagaaatgctccaccagaagtgcctggcacgtaggaaggcttcaaaaacacgtttgctgttcttcctatagttgtgtatcccagttgtttattcctcctcctcccggaggaggaactgagacacagagaggataagtaggcagatggaacccggattctaagccagaccgcatgctgattggaagttcagcatcttcccctcgacctcatttcaggggaagttctggaagccttgcactcacttcagggttcccaccacgtctattttggctctctggattctttttgaatctaccactttcttactcctggtgtgatctcaaatcagctatttaagcttttagagccccagtttcttacccgcgcaagaggggttatcatgccttccttattttgaaggtacgtcagaaatagcaactgtaccaaagcaggcactctggatggtggttactgctgtcaataccttaaatgttaacacaaccagggtgaatccattacttcccttctttcttccctccttttctttcttccttccttccttatcttgttttctccctcctttctttccttttcttccctccctctcttccctcttccttccctccttctttttctctttatgcccggtacaacaaagtacccatggtttctgccctcatgaaacttacggtccaaaatgcccttgtctctgttcattcctgggaaaatttcacctgcaatgtatcttgtttcctgtaacccacagggatgtcggtgctgccacctgcccttctccctgggcccctctctctgcaagacccaggtgttgtagtccaccccactcaagcccaaccccttccccactacactggctcagaagcaagtctgaaatcctttaggtgctgcaaggcatcttcagatcccaactatctgactctgttcactctgcttcaacaacggctttctaactggctttgcgatcgaaagattttgctgcagtgcctggggcctttgggagggaaacacataatgggaagatgggttctcatgagctcatttacagtagaacagtctggttttatataatttatattttgggcctatatgtaatattctgctgctaatggccggacgcagtggctcatgcctgtaatcccagcactttgggaggccaagggggtgggtcacctgaggtcaaaagtttgagaccagcctggtcaacatggtagaactctgcctctacctaaactacaaaaattgggcaggcatgatggcgtgcacctgtaatcccagctactcgggaggctgaggcaggagagtcacttgaacccaggaggcagaggtttcagtgagccaagatcacatgcaactgtactccagcctgggtgacagaagggaaaaaaattctgctgctaaagaaaaccatcaaagaaaactaccatgacgggtgggagggagatgagttttgagataattcagagaacatctccaggaaagagaatgtatttgggaatgggttttaaaaccggtttctaaggaaaatggagtttaacttttgaacgatagtaatttgggggttatctggaagccagcccacttgccatcaccattggctgggatccccacttctgatctcagcaaggcctttggccatgttctgccaatctgtactcaggacgttgccttctctgtgtttcagtgccctggttcccaagaaccattcaagagctggacagatttgccaatcagattctcagctatggagcggaactggatgctgaccaccctgtgagtccatggcccgtaggatgagattttttcagtgcctctcctccactcccctcccttcctcttaccttctctacttggagcaatgtacttgttcacttgttcaacaaacacttattgtgttcctatttacacgagggctgggaaaaattagcaagactttattgtcatcatcattatcatggtcattatttttgtaggagcaaatataaatcactgtccagaaactattgtctctatatactaggtctgtgtatgcacaaacacacacacagatgcaaatcatcattgtttctgcctgtgtacatctatggaggtttaagtcaagtgcttggtaaacagcaacctgtactaacaactctgccaactgcagggggcagcggggagtggcgacgttgaaactgaatcttaaaaactgagtaggagatgcgggtcagataaggaacggagagggcttatggctgaaagaacagtgtatgagaataccgagagtcttggaagcatccacaatactgtgggaatgactggttggtgcattaagtatgagaatgagagatgtggctggggcagtgggttgggatcagattgtaaaagggctaatggaccagaaagaggaacacggactgggcctgtgtcttgcagccatgggggcaggtcctttaatggtttttgagtagagggccggggtgggggatatttcatcgttccctctactctggggcagagggtctggggaggaacagcccaggctgcggtggctcagggccaggtctcacagcctccatcggtgggaagggccaccgtcctgttgcctgccctttattctctgccaggcaaatgactccttcatctttaaatgacttgcagccatttacatcggtgaaggttgagcagaacgcagaggaagcatttacacttccacaggagtctgttttctcctcacatttatgtgggtctttataatcagcaaagaatgttcgcaaaggcgcttttcaggaggcaaagcagatgcttccatcttacagaactagtgaggcccgaggagcctgatgacttttctaaggcccggtgctaaactgtgagtcctgagagctcatggtgcctgaagacaaaggcctagctagtggcagaaatccaggctcttttacagaggccaaaggcaagctatttcaggggcaagctggccttttg

SEQ ID NO: 868606 - DNA, 4022 bp, Homo sapiens
ccaggctggagtgcaatggtgcgatctcagctcactgcaacctctgcctcctgggttcaggcaattctcctgcctcaacctcttgagtagctgggattacaggcatgccccaccacgcctggctaatttttgtattttccatagagacgggatttcaccatgtttgtcaagctggtctcaaactctcgacctcaggtgaaccacccgcctcagcctcccaaagtgttgggattacaggcatgagccactgtgcctggccttaatagactttttaaaagagcagtattaggtttacagaaaaactgcacagaaagtacagagagttcccaggtctttcatccctacctcagtttcttctattaacatcttgcatttgtgtggtatttttttttagaactgatgagccgatattgatatattatcactaattgaagtccatagtttatattcgggatcatgctttgtattttacagttttattggttttgacaaatgcgtaatgtcatgtatctaccatttcaatgtcatacagaatagtttcattgccctaaaaaatgccctgtgctccagctattcattccttcttctttacagactccttccagcaaccactgctctttttgctagctccatagttttgctttttcaagaatgtcacatagttgaaatcatacagtatgtagccttttcagactggcttcctccatttagcaatacatatttacaaatcctccatgtctttctgtgacttgatagctcatttctttttgttcctgaataatattccatggtcaagatgtaccacagtttgtttattcattcacctattgaaggacatcttggttgcttccaatttttgatgattatgaataaagctgtgaataaacatttatgtgcagtttttttgtgtgaagataagttttcaactgattcaagtaaatacctaagaatgtgattgctgaggttaacttctttaaaaaattattttttttctactgtaaaatcgagtttctttcaaaaacacttggaaagactttgggtcaagaggagttcaggcaccatagctgaaagaagcatttgaataggcagagatgctttaaaatgagacaagatccaccccgtaaaacaggccactgaaacattttttaaaaggtagctccatggcctttctaggagactcatctctgccttcattctcctgtaggtataaccaaggcaaggaaagcccactccagtgttctggccttgtggagagtggacagccatgcagatgggctcaggtccctggagggcaggcacttggaattcctccctggattagtcctatcctgccttctttccttttcagcctcccaagctgcttccccaatgactgccctcccttgcttttttccggccacctgctctcaacaggagctgcagaccctttggacaaagggcctgccagatcctggggcaattcagcctctggttggagcaggtggaggctgggccagctggggccatgaggaaggaaatcaaagcaattgacaggcagacagccagcccctggaggagccagggaatatatagtaaaccagctggagagccggcagcctgaactggaggctcagaaaggaggttcttagtggggacattgagggggagttaagagtgcagattcaggaagcacggcgaccacactcggtgtgactttgagcaaatcattgacccttgcagtctcccactgtatcaaaggggagtcacaagagcctctgccttataggattggtgaaatcacacaagtgaagcactgggaacagagcagagcatgtttaattaaggacttaaagttattctctattcttaccattatcatcattattattataaacactggcatgagcacaagagcgaccaaaatgcagcctgtacacagctactttttcagagtctggcaactggaaaatgacctgagaggtcatgcagccctacagaccccttcatttttcattgtgaaaacagaggctgtgacttgccttaaggcaaacagtgggttctggggggtcatgcgcaagggtgtgttgagagcagctctgtgccgggcacagtgctaggaaagaaagggtcaatctgcctgttcttaaggagctcacagcctggcaaaggggaagacacacccaggtaagtagaatagagggacaggtgctgtgacaaagacagggttggtgtgattccgcctgttctccactcatgtttagctctgaggatccaggaagtaagaaagtaaaaaagctaatgttttcctttttttgagatggagcctcactctgtcgcccaggctggagtacagtggcacaatctctgctcactgcaacctccgcctctcgggttcaagccattctcctgcctcagcctccccgagtagctgagattacaggcacatgacaccacgcccggctaatttttatatttttagtagagacggggtttcgccatgttgttcaggctggtctcacactcctgacctcaggtgatccgcccacctcggcctcccaaagtgctgagattacaagtgtgagccacagtgcccggcctaaaaagttaatgttttcacatagaggcatcatgtaataaaagttgggtttattggagcctggaggaagcacagattcaattccctaatggggcttctcgctttcttgctcaaaatgtcaaagttgttgatatttgaagtgggatgacattttccctagggaagaaaaactagctaagaccaaccctttaaaataacatgtgttttgtgacccttatttcttcagatgattggtcacccaatcccatagtggctgcccccacctgaccttaccatacctgtaatgagagagctgatgttgacatgccacgacctggcatctgccaagaaagactctttgggtttctgtggtagtttccgtgaagtggggtctgggccaagaaacaggtttttcttaaggggaacaaccattcctttgcaaagttgccctttctataggactcagtgggagaacagtcagaggaagaaaagcattgtagtagatctgaacctttgattctttctccggacaaaatgccctttttattgtggggctcagatctcagaggcgagtctgacagcaggttcaagtaggagatctgaacccctcaaatcaattaagctaaactactttccactctagtttttaaaccattcaaaaagccatgtgggtgatagaaaataaaagtttttcagtttcttaattgcgaaagttccccacccaaaacagcttaagagaaggttaattacagcgacatggtaaagaaaccccaaccttctcaaatgcctcctggagaagctgatgtgaatttaataggattttaatccagagagtcttttgaatacttgaggtctattctcctgctaccctctttcctgatgacttcaaatccttcttcaacccaacatgaaagagcattaatatctttcatcgatcaatctactaatccttttacctttccctttgagtcgactgcatgacattacatttagtgggggctagaaaattcctacgtggagagagattgcagccaggagaagcagacagacacaatgtcttgggtagacagaagttaggaacatcaccatttgagaaatatgtttgcagttattttccaagagcagataaatatctgttgggttttgtttaatctatggtgattataagggtcctggtggggaagaaaagtgagttcaaattgccagaacaactactggttctgtggaaagcagaaagacctatctgcctgtctatctatctatctatctatctgtctatctatctatccgtctatctatccatcatctatcatctacacctgtctatctatcatctatctacctatctatctgtccatcaatcatctatcatctatctatctatctatctatctatctatctatctatctatctatctatgttgtctgggaacacttatgattactgtgagaagacaaaagcaacatc

SEQ ID NO: 868607 - DNA, 4045 bp, Homo sapiens
ggcttgaccaaatcagtggtagaaccaagagttaaaccacttgttttgaatcctaaacctgagttttattttacttatttatttatttatttgtttatttattttcagatgcttggtcaaagaacagtgggaggagagggatgggcttccagcaacctttattattggcttattttcttacagcccattactttctcttgggaaaatattaagcaggcactcaaggcttgaggcccctgagttttcacatcctttctgaacctctgaacctgctttccagcattcttttatactttgttttacctcctggtcagtaatgcctcaccctcagtcttctctaaaagtgtggttaatggcatcttcctgactatttgaagaccactggccaaatcccaccagctcactcatagaccatccccctactttactttcttcaaaagacttagccctacctaaacttatttatatgtttattttctgcccaccagaatggcagcatagctggggaggcagagtctgttttgttcattgctgtattcccaaagactagaacaccaccaagcacacggtacaggtctcagtaattattgtcaaatttatgtggatttgcttttaaacaatatcttccatttactgagtgtttatgtggaagaactgtactaaattttaatgcatttctttattcctattcttaaaaccttccagcaaggtggctctaccaccctcttttccgagcttcaggagcagttgtgcgaatagctggagaacaccaggctggatttaaacccagatcgctcttacatttgctctttacctgctgtgctcagcgttcacgtgccctctagctgtagttttctgaagtcagcgcacagcaaggcagtgtgcttagaggttaacagaagggaaaacaacaacaacaaaaatctaaatgagaatcctgactgtttcagctgggggtaaggggggcggattattcatataattgttataccagacggtcgcaggcttagtccaattgcagagaactcgcttcccaggcttctgagagtcccggaagtgcctaaacctgtctaatcgacggggcttgggtggcccgtcgctccctggcttcttccctttacccagggcgggcagcgaagtggtgcctcctgcgtcccccacaccctccctcagcccctcccctccggcccgtcctgggcaggtgacctggagcatccggcaggctgccctggcctcctgcgtcaggacaacgcccacgaggggcgttactgtgcggagatgcaccacgcaagagacaccctttgtaactctcttctcctccctagtgcgaggttaaaaccttcagccccacgtgctgtttgcaaacctgcctgtacctgaggccctaaaaagccagagacctcactcccggggagccagcatgtccactgcggtcctggaaaacccaggcttgggcaggaaactctctgactttggacaggtgagccacggcagcctgagctgctcagttaggggaatttgggcctccagagaaagagatccgaagactgctggtgcttcctggtttcataagctcagtaagaagtctgaattcgttggaagctgatgagaatatccaggaagtcaacagacaaatgtcctcaacaattgtttctaagtaggagaacatctgtcctcggtggctttcacaggaatgaatgaccattgctttagggggttggggatctggcctccagaactgccaccaattagctgtgtgtctttggacaagttactgtccctctctgttgtctgtttactcttctgtacactgaaggggctggtccctaatgatctgggatgggatgtggaatccttctagatttcttttgtaatatttataaagtgctctcagcaaggtatcaaaatggcaaaattgtgagtaactatcctcctttcattttgggaagaagatgaggcatgaagagaattcagacagaaacttactcagaccaggggaggcagaaactaagcagagaggaaaatgaccaagagttagccctgggcatggaatgtgaaagaaccctaaacgtgacttggaaataatgcccaaggtatattccattctccgggatttgttggcattttcttgaggtgaagaattgcagaatacattctttaatgtgacctacatatttacccatgggaggaagtctgctcctggactcttgagattcagtcataaagcccaggccagggaaataatgtaagtctgcaggcccctgtcatcagtaggattagggagaagagttctcagtagaaaacagggaggctggagagaaaagaatggttaatgttaacgttaatataactagaaagactgcagaacttaggactgatttttatttgaatccttaaaaaaaaaaatttcttatgaaaatagtacatggctcttaggagacagaacttattgtacagaggaacagcgtgagagtcagagtgatcccagaacaggtcctggctccatcctgcacatagttttggtgctgctggcaatacggtccccacaactgtgggaaggggttaggggcagggatctcatcaggaaagcataggggtttaaagttctttatagagcacttagaagattgagaatccacaaattatattaataacaaacaaagtagtgtcgtgttatatagtaaatgtgaatttgcagacacatttagggaaaagttataattaaaaaaataggctgtatatatatcaatggttccaaaattttctatggttaagaatcacctgggatggttttgaaatggcagattctaagacaacttgattcaacaggtttaggtaaagcccagggaactgcattataagaaggaatcacctgtaattttggagtcaagatccaaggaacactcattgagaaacactgatttacaaagtgcatggagagaaatggagcaagtgaagggggatcagcatggtgaaatataggctgttaggagtgctattgactaactgtctggtgactggaccagagtaaatcttttactttgcaagaaacaggactaaattcccatattatgtccatagcaaagggaattatgtagaaaaattgataattaggagcctgagttcttgaccagcctccactacctatgtggcctcaggtgagttattttctccctttggctctaagttttccccatctgtaatgtaagggagtttaactagatgagcactaaggacaaatcaatttctgtgagtcaattattatgaaataccatgtgggcatcaaatgccaagtggaaagcatagataaagaagtgattgtgcacctgggctgaggggaacaaacatttcctaagagaattgagacccaaaagagcctttaaggaaggtgagatcttggaaagggaaatttggtgaatactctaatgaggagctaaaaaggcaagaaagaaagcagcttggctggaaaggaggttcctgtaggtgggcctccagagattcggtaccacagaaactgccaaacatcagcaagaagccatggggatggagcgtttgagggattctaaatagaaggacaagagtaaaaatgtcaggctggatcgatgcaggccactaagaaatggattcaggtgatggcagtgggaagaaaggacctgatgcccagaggcatttctggagaagatgagatcagacttgtgattggctgaacacacactgtagtggggtggggtttagggggtgactcaacttcaagcccaggtacattcaagtctgaattgccctagtcaaaagtggcatctgtggatgtgtatcagaaatatcttacttttcttggaagccaacaggagaaaagagtgctaccaagtgaactagagacaggaatatcttttgtcatttcaaggaaactggaaagaagaaggctcagtattctttagtaggaagaagacttaagtcagagactcatctgtacctctctggcagggtttaaaagggggaagaggaatagaggctgcaagagattgtgattcatggacagtatgcagag

SEQ ID NO: 868608 - DNA, 45 bp, Homo sapiens
tcagcatgcccaaccttccaacagagaacggaagaaaaggagggt

SEQ ID NO: 868609 - DNA, 23 bp, Homo sapiens
aggaaaaacaattttggatgttc

SEQ ID NO: 868610 - DNA, 27 bp, Homo sapiens
ctgcttggacccttactcccttcttta

SEQ ID NO: 868611 - DNA, 44 bp, Homo sapiens
caactcaagcaagtccaatttgatctttcaagcacccttatgca

SEQ ID NO: 868612 - DNA, 17 bp, Homo sapiens
agctgtgaaaggcacac

SEQ ID NO: 868613 - DNA, 4045 bp, Homo sapiens
tgtctattatggcccttgtgaccatgggcacaggggaccactcttctgtaccccaatttcctctgtaaaattggggcattagtggtacctgcctcagggggttgcagcaaatgctgttatactatggtgtaagtgccctatgagtgttagttgctatctttcatgaagaacaaatggccaagtatatatttccaccccttcttctctgaaaggagctgtctcaacccagctggtggcatgagccacatgttacacatctgtgattttgcctgctctgcacctcttcctccttcttcccataaagcagctcatttttgctttgggtgatttacccctaccctactaggtgtgtatcagtccagaagtcagtattcggtgccagccctcctctggaaaggaggtagcatgtgaaccatgctcagccaatcacatctctgcctacaacttgaatcttaaaactccaagtggttagaattggtttctcttggctgagatgctttgagggaatccaaagggatgtgcagattccttgttttgaactctgttctttagcattctctttgattctctgagccacttctcagcagaatggggttttcatggttgtttcccttgaggcctcggtactgacaggcctgtttcctggcaagctcttccctgctggtctgggactgatcacttgctggttagagagttgtctccaggagggcccatccaaatgtgatcttggcatgacagggtgctcatcagcactgcctctaagctccaatgcctgggtccaaaccttgggccttggagggagagggggatgatgctggaaggaggctaggctcccagtttaggagagaattaaaaaagcagagccagaaggacttgagagctctggacagagctggagaaatagtcattttaggccacaccaagtggatttgtgggccagcattttacctttaattatctaaagatagtagacataaattaaggaatatccattttaaaagaaagaaagttagtcctctttgaagtctctttattccaaagggttctcaaacaaatgttagctggacctgtcttgtcccacaatcttaccttgcaaatgtaaggtaagtgaatgagctggcaaaaggataatttttacctttctttgtgaggggtctgggggggatggaatttggatttagaaaggaaggactaagatgtatgttcatttgtctttgactttctcccttatgtctctctttcctccctcatgtctctcttttcaaaagtgcggatttctttgagaagtcatttattctatcaccactcccctccattcctctgacctctcagaggccatagatagggttgaaagctaacatacccagtgtcatagactcccaaaggcctgtatgttccatgcctgtcatccatcactgataagatttttttaagtggtaacatacagtgagtattaggatattcatgtccaggtggaccctctgcccagtctgtctcctgcttgggtgcaggaactgtgcactcagagggccaacagtctcagagtcccagaaccactccatcagcctcttgctgaactgcctctgggattaatgccttcaccaattatttattgagtgcttactctgtgtcaggtattgttccaggggctggaggaaaaacagaaaatagaaagaacaaaatttctaccctcatggagcttaccttatgtaatatattacaagttaataagtattacagacgcactggtggcagggatgagtagaaataagttggttagagaaagacatatagagattaaatttgggtaaagacacaaaggaggaagcaaattttgtaggtgtttgggagaagaaagtgaagaaaggacttcctaggttataagacttctttgattttgtggggagacttctgtggccactctgtatgcaggagggttcagtgtcttgacttggtggttgcgttgaacagggaccaggtggcaggggtgtgtgcaaaggtcagcatgcccaaccttccaacagagaacggaagaaaaggagggtggagaacatgggagagaaactgtctatggtacaaagttgctgtagacattggagtccactctcctggccaaccacccacagatgagtggcaccagtcaggaggcccccagagctagtggctcacctttgtcaccacctcaccttactttctccttggcatcattaaaactctctgccacgtaatagaggggctggaactccgtgacagtgtaattttggatggctgtcttctccagctccagggggagaagctttggcttctctgataagcagtactgtaggccccaagtgaaaagttattatcactgttaaatcaggatcagtattccctgctgcatcccataggccatttgtgccccttctctcatctcaccccgattccttctacatcacagcccaaatgctgtgagccaaattactttgcacatactaggttctacccttcatagctcatctaaaacctacagccaagggagaaaggagtaattcattccaattactttcaagtaaggtggtcaatagatgacgtgggagccaaccacactttctggcatgtgtttgcatactcacaaggctgcatgcataggtcagccttggaatcaggaggccccttctccccagagatatgtgtacttgcaattccatttctatctgtaaaacccacagccatcatcaaatcatagctgctaaggtaccaatcactggagaatgagttcccaggttgcatatcaaaacggatacaaatagggtttcaacaatattgaaagcacaataatggttttctgtacccaccacttttaaatctatccttggttcctgtgaaggtcatacctgtaattcaccaaaggatgacaggagcccagcaccatatgcctttatggagtctccttgtttgcagagcccaaactccacagtaaaccagtaaatctggaatggaaagtcaatctgagagcacactctatgatggttaattttatgtgtcaccttgactggatgaagggatacctgaatagatagtaaagcattattttggggtgtgtctatgtctatgagggtgtttctggaggggattggcatgtgagtcagtggactgagtggggaagatctttcctcattgtgggcgggaaccacccaatgggctggaatcccagatggaagaaaaaggcagaggaaagccacatacgtattctatctctcttggaaccaggacaccctgtttctcctacccttagacatcagaactccaggctttctggcctttggattctgggactcgcacccaaccaccacccaggggttctcaggcctttggtctcagactgagagctataccatcaacttccatggttctgaggcttttgaactttgactaatctacgccactgacttttcaggttctccagcttgcaggcagcatatcgtgggacctctcagccttgataactgtgtaagccaattcccctaataagtcccctctcagatttccctctctctctttctctctctatatatatctcactggttctttctctctggagatctttgactagtacacacctcaaagaaggagaaggcagcaactgccccagtgccatggacaggattgcccaggtagaagcctgtgcaggtttgttctctgaatcagcatgacctgtgatcacgtctctgtgtcctgtgtctcactctatctagtcacctgttgagtgctggctgaatgtaaagcatgatggaaaatatcaggaggtactaagaagccccaaaaggaggctcccaacaatatgttctccatatgacaggaactcctccatctcttttgtttttttctctgtggtgtcaactagactgagatgttcctcagatgctctgaagctggcagagctcattaggcacaacagtgggaggtagcagactgggtagtgatagaatcagtgaggagaatgtcccatcatccatgctaaaacttggggatgtttctgaagtcaactactgcatttatgcaa

SEQ ID NO: 868614 - DNA, 4023 bp, Homo sapiens
ttccttttgtttagagaggctgcatcttacaagtacagttttccctcacttagcaagcaataaattccacttttttgtttgtttgtttcaaatatttagtggtagcttctttatttgacagtgggaatgtttatttctgccagctgagggaaaatgcccattaaattcacacacaatcccattattctgaaatcccaatacttggctcagcatttgctcataggtcattccatttgattcttgtgcttctttgtgaggaagatgactggtggagagggcttttgactgatccacttttattaaaactgaggcacagggtggctgataatgtaaccccaggtcacacagctggttagtggcagggttggagcctaggtacatcagaacaccattcaaccttctcatgatcccagctaccaaaccatggttttaggctgcctctcagtgcctggagagaattggtagcattattttactcagcccaaaactttcttttttggccaggtgtggtggctcttgcctgtaatcttagcactttgggagggtgagatgggaggattgaggccaagagtttgaggtcagcctcagcaatgtagtgagactctgtctccacaaaaattaaaacattcagccaggcatgaaagtatgtgcttgtagtcccagccactcaggaggctgaggtgggaggattgtttgagcccagaagtctgaggctgcagtgaaccgtgattataccactgcactccagtccagcctgggtgacagagtgagaccttgccttaaaagaaaaaaaaaagaaagaaaaagaaaaagaaagcttttttttgagcttgttaaccactgtgaaagatgaatgaaattctaggttgcagggttgcagctttgatgatggtgataagatattcagctcatttttttctttgttaactctaagtcagggtatcagcattggattcttggcaaatgtcacctcacttaattcaagcatatacacaaataactgcctgacaaggtagaaagttgcaacagccctgaaaaggtaaggggaatgtactaagagattggaagaaggtgaggtagttcctgcatgggaatcagggaggctttcatggatgaaaggctctagcaggaaaaatgagattagtacactgaagaacacacatatgattcagaggatgagtgattcaccaaccccatgcttgatctccgaaatgggtatttagcttcccagaaccacacacccatttcaggtgggatcatagaactgtacctggtttccgctcttgcagagggcatgaggacccctccctgggctcaactcatttgagaaattcaggtcacagacctataactagaaggctaaaaaatccattccttacctgggaaaactgggcaaagctgcgatctgaaaacaagggcacatgtcccaacagctcatggcagatgtcactgaaagacagaaagcacagagagctcggaggggaggaggtttaagccaagccagactcagtctttctacatgaggaatgggcagaaagaatggaaataactcttttaggcttatgatccctctcccaggaataagtgatatgcagaggttgggatcataaaaggcagggtacaaggtaaaaagaagaaaaggaaggaaaaataagagacaggtgcagggtagggcacagcagccaagggtcttaagagtatccccagtggggtaccaggcagaagagctaatattcctgtggacatgctcccatatacctaagtgagctatgagtcatgaacacttctcatcctgtcttctccctggtattgacttccctgggcagatacaatatgctcagctattccactgggaactaaaacaaaaacagtgctgctcttctgttagtctggaggtggacagcagtgagggaagaaaacctacatttatttaacactgtatgtgctatgtccatttggaacaggtctttttggatttgtagcaatgaactttatgggcaaggaaaaacaattttggatgttccattaatttttttataagttgcataagttttatcagactaaggggataacgaaacacccaagtaagaagcataatggctgcaattctctacctctacccaatacacaatctaggcaaagaaagataagagtaatctagatgtatacttaggaagtattgagatagcttggctgccacttgttcctgttctcatttgcaacttcgtagctttgactttggaacttgattgggatctctcattctcactgccaagggagttctgagttattggatcacaggatgaccaaatctccaatcagtctggtctatctacttggatggagcaaatctccagaatagatgaattgtttttagtactaccagcaaacagtctagacaactagtcctgtggaccagccagcaatgaacccaaacctcattcttgcagcaggaaaagatggcgctcattgtgcctggcaactggtagctggaggacagtactcacggttcgggggtatacatgggcttggatccatgtctgatgtactgtgtgcagtggaagactcggaaggccaggccacccaagaaatcccgagaggaaagcaggccagccacaggtcggaggcggaaaccagtgcaagctgggatgaaaagaagaaagaaaactcaaagctcatcaccactgagtcagaggcactaggagacctttaggtagtggagtagtacacataactgcccagggacataggctttgacgctaggcagacttggcttcagatgtctgcctcgctgctttctagctaggtgatctggatcaagtaaattcccatttctgagcctcagtttcctcatctgcataatgtggatagatacttcttagaaatgttccaagaataaaaagagctaatgaatacaaagtacttagcacagagcctagcacattggaaacatgcaataaatttagctttcattaccatttgttagggtggaacaatgattccctacttctcctgcttctagagtgaagagggaatttgaacctcatttcccagaagggaagagtatggatagagtgcttccagcttctgtactgcacctcacacagtctaccccataagtagcagtgacctgtctgactggagcatttgggaagagaatatgaatattgtcaatttaactctttctgtactgctctttctctcttgattgttcacagaggacctcattccagtctgctcttggccatgcaatggactatgctctatgaattggcaggtaagtttacctaattaaggggtaaaatattagcaagtccatttgtgtgcatatctatatcacattctctaaatcgctcaattttaaagctgacctctgatcaccatctctatggttcctgtatctgtctctcagtttgttgcaaactttggaggataaggatagtgacagtgataatggtaataatagctaacactatatttgacctactgtatgtaagacactgttttaagctactttagatatgctactaatccccacaatagccctatgaagtagacacttttattatgcccactttaccgatgggaaagctgagacagagataggttaaaggttttattcaaggtcacagccacaggcagtctagcttcaaagtctgttctcttaattactattatgtagcttcccaactgctagtattactgttttattattcttattattggccatggcaatggaagtaattagctaaagaagtctttgagatccccttgcctcttgcccccatgttctctgtgtcttcaggctgaagcacactctgcttggacccttactcccttctttatctaagaagcaaagactttctaatggaagggacccaaaaggtcatctaactcacccccaaactgtcctggctacaacttcccttcctgccaagtaatttccctggctcattgcccccacagtggcccatctctgcacagctctgatatatagaaaattttgtaacctgtagtctgtct

SEQ ID NO: 868615 - DNA, 4027 bp, Homo sapiens
ctgggcagatacaatatgctcagctattccactgggaactaaaacaaaaacagtgctgctcttctgttagtctggaggtggacagcagtgagggaagaaaacctacatttatttaacactgtatgtgctatgtccatttggaacaggtctttttggatttgtagcaatgaactttatgggcaaggaaaaacaattttggatgttccattaatttttttataagttgcataagttttatcagactaaggggataacgaaacacccaagtaagaagcataatggctgcaattctctacctctacccaatacacaatctaggcaaagaaagataagagtaatctagatgtatacttaggaagtattgagatagcttggctgccacttgttcctgttctcatttgcaacttcgtagctttgactttggaacttgattgggatctctcattctcactgccaagggagttctgagttattggatcacaggatgaccaaatctccaatcagtctggtctatctacttggatggagcaaatctccagaatagatgaattgtttttagtactaccagcaaacagtctagacaactagtcctgtggaccagccagcaatgaacccaaacctcattcttgcagcaggaaaagatggcgctcattgtgcctggcaactggtagctggaggacagtactcacggttcgggggtatacatgggcttggatccatgtctgatgtactgtgtgcagtggaagactcggaaggccaggccacccaagaaatcccgagaggaaagcaggccagccacaggtcggaggcggaaaccagtgcaagctgggatgaaaagaagaaagaaaactcaaagctcatcaccactgagtcagaggcactaggagacctttaggtagtggagtagtacacataactgcccagggacataggctttgacgctaggcagacttggcttcagatgtctgcctcgctgctttctagctaggtgatctggatcaagtaaattcccatttctgagcctcagtttcctcatctgcataatgtggatagatacttcttagaaatgttccaagaataaaaagagctaatgaatacaaagtacttagcacagagcctagcacattggaaacatgcaataaatttagctttcattaccatttgttagggtggaacaatgattccctacttctcctgcttctagagtgaagagggaatttgaacctcatttcccagaagggaagagtatggatagagtgcttccagcttctgtactgcacctcacacagtctaccccataagtagcagtgacctgtctgactggagcatttgggaagagaatatgaatattgtcaatttaactctttctgtactgctctttctctcttgattgttcacagaggacctcattccagtctgctcttggccatgcaatggactatgctctatgaattggcaggtaagtttacctaattaaggggtaaaatattagcaagtccatttgtgtgcatatctatatcacattctctaaatcgctcaattttaaagctgacctctgatcaccatctctatggttcctgtatctgtctctcagtttgttgcaaactttggaggataaggatagtgacagtgataatggtaataatagctaacactatatttgacctactgtatgtaagacactgttttaagctactttagatatgctactaatccccacaatagccctatgaagtagacacttttattatgcccactttaccgatgggaaagctgagacagagataggttaaaggttttattcaaggtcacagccacaggcagtctagcttcaaagtctgttctcttaattactattatgtagcttcccaactgctagtattactgttttattattcttattattggccatggcaatggaagtaattagctaaagaagtctttgagatccccttgcctcttgcccccatgttctctgtgtcttcaggctgaagcacactctgcttggacccttactcccttctttatctaagaagcaaagactttctaatggaagggacccaaaaggtcatctaactcacccccaaactgtcctggctacaacttcccttcctgccaagtaatttccctggctcattgcccccacagtggcccatctctgcacagctctgatatatagaaaattttgtaacctgtagtctgtctccccacttctgcttattctacctggcacacagtaggtgttcaatatgtgctagttcattattttgtttttgctaaattaacatcctcttgacagaaagagtaacacccatttcacctggatatactgtacagagaggcttgcgactcaatgtacttacctattaagctactcagatttcaattcagtccaaattcactgaatacctgctgtatatgcaagactgtgctggttgtttccatatgcagcaccttacttcattctcataatttccctatgggaaaagctaaagagttgatacagtgtccatttgacagatgacaaaactgaggcaggtttactcagctggagaggattgaaggcaggattcataccagatgcacagactcagagctcagggctcttggcaccatccccgaaaatagcacatttcttacacaaacacacactcctaactcataacacagcaggaactacagggcaaacaaaacaaaacaaaacaaaaaaaaacctcagtgaagcaccttgggctttaagtgtgaaagaaaatacttttcagggacaggtacacggcaaaatccacagcctcaggtgtttgattgaatgaaagtggataaacacagtaggggctggagggaaggcagagcacagtgaaatttagttcttcctggaggaatcaacctgcatgcattcctacaagcacatgctttcatacttgcctccacatacttgtcttccccttccctctcctctgcctcaatcctcccccaactttctgcagggccattgaccctgatgtggacttactctgcaggaactgagaaacgtcttccagctggggaatgttatcttcatggaagccacagtacttttcaagaagtggaaaaatgtgattgtactcatagcaagcatgggttttatacaaggacttcagagtcttgaacactgtgccccatgttttcttttcttcctccatgtattccactcgagggatgggctgcccactagaatacaggcacaaaataggtgtctcaagcagggcaggggcacagcagaacgcaggttaggttagcagagggagtcggggaccagaacctgtgagctgccatcacttgctacagtgaatttcatacattatttgaaagagaaaaattccacatcttgatataggaaacattgttgttttgatttcccacatgaaagggtgatttggttaagcagtgatacaggctacaatgaggatttgctctcactttcgggaaatcacttggtttttctactcttctaattctctaattgcttacctggggtagaaattcacttacctgcacgggccagtcaggtatcacaaagctgtaaagttgcagagattggcaataaggagaatgggggctggcaggagaatatattccctttctaaaccagggcatctaagttaaagcaacacagtgtatttttatggtgttagctaaagcaattaaaccagtgggctaaactggatttaatatgtaggccacgaatctgagatcccctttgtttggtaggcatgcacttattgggtttgatatttctgctcctgggaagttataaaggtatttaaatacatactaattaagattccacattgtatacatatatcaaaacatcatgttgtacaccatattttatatacaattatataattatatacaattatataattgtatataattaaaaattatatacaatttttatttgtcaattagaaaactaaataaataagttctagatcaaggataataaataaatattggaacaaaggagagaaaataaatatataaatcc

SEQ ID NO: 868616 - DNA, 4044 bp, Homo sapiens
gtcggggtcaactgctcagccgggacgccaaggggtggctggctcaggagcaccactgagcaaaagaccccccaggcctggccagagcctgcttcctggccagtgggtcagaggaggcccattcaatttacagcagttcaaggtgcaggctgagtccaatcttagcccctccctccacccgatgttcaccagccccaggggttagccagcaaggcacccaggcttgcctccagcctgtctcagagagagcaataaatcctggtttcttgggtctgaaatagaaggctgttttcaccacctcctcccaggctcccggatgtctcctcttaggcaatggcctccagccccccagagaagcagtccctgtgtgctgatctccacagctcccacaaaggaagaagagatggcatgccaacatcctgcaggaggaagacttttgagggttttattcttctcttttaagtagcttctactttctttctggagaaggaatgctcttcaggaagctcttggcaagaatgatgagccaaaggctggctgatgatgcccagctattaccctctgcctcctggagacagcagtggtcagaagtcaggagtggtgattttaggacaaagcatctgttctctctgttcacatggaaaaataagaatccccaaaccagatgaataaaagggatctcacacatgaagtaaagagtgaaactgtgcttaataagcggagggagtgagtgaatagatatgagtggaattatgaataaataaaataacctgtagggctatttattccaaccacccacctaaattacaactaccctcccaatatcctttttaagatactatgtatctcataaacattatccattggcaggttggcccccatatccccaaatatctaattctgtcttctgagagctcaccattgcattgagatctggttacctgtcactgacaaccctagttatggtcaagcaacattgggtcaaacagaagacatctaaagcctcctccatgtattggttatgtcactccaggagcacttatttggccctgctccccttcttctcatcaactgaccccacgcctgggctcagtgccttggtgcacctcctaagactactgaggcatgccatcttctctatcattgccatgtattatgccatgtagccacaacctactagattacaaaatgcatgggtctaggcaccatgtctgtctttttcactattgcatcctatcatgtggctgacaccgagtgggcactcaatcaatatcggtagcataaatgatcaactgaattaggagatagatgtgaatgagagaggaagttggcaacgctgactctgtgctgtttgagaaggagtagtaagagaaggaagaaaatcccaacagtcaaggtttttaaaaagtaagggccacataattcataacatgctaaggaaagagagaattcctgggggatatttgtatcaaatgctacaaaaatgtcgaagaggatgaaaaaaagagaggctattggttttgagtattgtcagaatggtacaagagaaaggaagatgagaagaaaaaagggaaagaagaaagaaggaagcaaggaggaaagaggatggtggaagtagggaaggaacgaggaagaaagaagggaaggagaaagaaaagctgcatgaaaagctgaccttctatctcatatgccagtgccatgtgcaatctagcacaaagtcaagtggatgatgttaagcacaaaaaatatttggaaatgagagatcattcacagggaccctcatacaatcccacacatgaagttgtctccgtggctgctaggtaagcctggcttcaatgaggtggtggctgccaccaactctttatatattattattggcctgctaagtgtctatgtccacggagctggtggtgacaagtgacctgttattggctggggttatagatcatagagagctctccctattgaaacttaaggatgtctaagatcaagggcctattcaactcaagcaagtccaatttgatctttcaagcacccttatgcacagggtactccacataatcccctccatgagccacaggaattgggagagtgggtctttgctccatttcacagatgaaggagaagcggtcatccatctggaagggtgtcagatggaattcaaacctagctagtagtgtacaaaatggagacccaaatcctggctcttgactctaaattcatggcccttagtgcatcacgacaatactccctcaatccagcatgatggcaaagtgatatttagttagtcattccatgtccttttacttccttcttcaattgagagaacacacctgtcacacagagaaaatgtattcccagtctaaatttttctacctttcacaatcttttggactgacccaaatggcatttcacggttgcctttgtttatcaaacttcaggagttttgggagtttggacttgctcaaccctaagattcattgtgtacccttatgagagacttaagggtaagtttacttgtaaccttttgcatgggccctacacgctaggcactttatgcaaattatatcatataatccacacaaccacactggtacctggatttcttcatttgcagatgagaaaattgaggcctaaagagggaaagcaacttggccgaacagctacagcccaggaattgaactggaaaatccatgcaaccttttaattatacctttctgacttgttttctaatattgaaaacaagaataatactatgtttgctttagctgcctgagttggttgttgcaaagcttaaatgagataacctaatgcgaaagaatttggaaaacactgggtgtggcatatcactgagggattcctcttagaatgagagcctccttataattttgtaatcttcctgagcttgaagctctgtgacctggcaaactagatgggctgcagaaatagcatttgctcaggatcttcctttgccaatgaatagagttgcctgtgactgactgcagggagcagacagtctaccaaggatatgaagggactctgcttcccactcctgggttggtgtcacctccccctgaatgggctgatcctctcagctggagtctgcttgtctcagtgaggcagtttgctgaaacgagtgacctccccagctgccaggacttagtgctacatcagtgcatccagcaagcatccaggtaaagactgaaaaagacagccaatcctgtgtgtttttgcaaacatgcagatacttggtctcctgcagacacagagccacatacatctacagctgtgaaaggcacacatggaatgcacaaagtgaaatgcacgggagaaggtttagaactgagaagagggcaatgggaaggtggagacagaaaagccaagcagaggaaaggagagaggaaagaaaagtgcaggtggtgggagtggggaaaaactctaaccagatggattcccttccagccctaagcggcttctctctaaaaattcttaactctttgggaaccatagcccctttgaaaaatcttgtctcctaaaaattatgcatgcacacccatgtattatcttgcccacaatcccaggggcttttcagagccctctaaggaatcctatcctcccttcaaccccaattgatctgaaatgtcagctttactcagcacagttcttcaggtcagcaatgttgaagcagaagaaactcaagaaggcaaggaggggcaacaagagggaaggaatgactataatgatgttgcttttgtcttctcacagtaatcataagtgttcccagacaacatagatagatagatagatagatagatagatagatagatagatagatagatgatagatgattgatggacagatagataggtagatagatgatagatagacaggtgtagatgatagatgatggatagatagacggatagatagatagacagatagatagatagatagatagacaggcagataggtctttctgctttccacagaaccagtagttgttctggcaatttgaactcacttttcttccccaccaggaccctt

SEQ ID NO: 868617 - DNA, 4017 bp, Homo sapiens
atgatcaactgaattaggagatagatgtgaatgagagaggaagttggcaacgctgactctgtgctgtttgagaaggagtagtaagagaaggaagaaaatcccaacagtcaaggtttttaaaaagtaagggccacataattcataacatgctaaggaaagagagaattcctgggggatatttgtatcaaatgctacaaaaatgtcgaagaggatgaaaaaaagagaggctattggttttgagtattgtcagaatggtacaagagaaaggaagatgagaagaaaaaagggaaagaagaaagaaggaagcaaggaggaaagaggatggtggaagtagggaaggaacgaggaagaaagaagggaaggagaaagaaaagctgcatgaaaagctgaccttctatctcatatgccagtgccatgtgcaatctagcacaaagtcaagtggatgatgttaagcacaaaaaatatttggaaatgagagatcattcacagggaccctcatacaatcccacacatgaagttgtctccgtggctgctaggtaagcctggcttcaatgaggtggtggctgccaccaactctttatatattattattggcctgctaagtgtctatgtccacggagctggtggtgacaagtgacctgttattggctggggttatagatcatagagagctctccctattgaaacttaaggatgtctaagatcaagggcctattcaactcaagcaagtccaatttgatctttcaagcacccttatgcacagggtactccacataatcccctccatgagccacaggaattgggagagtgggtctttgctccatttcacagatgaaggagaagcggtcatccatctggaagggtgtcagatggaattcaaacctagctagtagtgtacaaaatggagacccaaatcctggctcttgactctaaattcatggcccttagtgcatcacgacaatactccctcaatccagcatgatggcaaagtgatatttagttagtcattccatgtccttttacttccttcttcaattgagagaacacacctgtcacacagagaaaatgtattcccagtctaaatttttctacctttcacaatcttttggactgacccaaatggcatttcacggttgcctttgtttatcaaacttcaggagttttgggagtttggacttgctcaaccctaagattcattgtgtacccttatgagagacttaagggtaagtttacttgtaaccttttgcatgggccctacacgctaggcactttatgcaaattatatcatataatccacacaaccacactggtacctggatttcttcatttgcagatgagaaaattgaggcctaaagagggaaagcaacttggccgaacagctacagcccaggaattgaactggaaaatccatgcaaccttttaattatacctttctgacttgttttctaatattgaaaacaagaataatactatgtttgctttagctgcctgagttggttgttgcaaagcttaaatgagataacctaatgcgaaagaatttggaaaacactgggtgtggcatatcactgagggattcctcttagaatgagagcctccttataattttgtaatcttcctgagcttgaagctctgtgacctggcaaactagatgggctgcagaaatagcatttgctcaggatcttcctttgccaatgaatagagttgcctgtgactgactgcagggagcagacagtctaccaaggatatgaagggactctgcttcccactcctgggttggtgtcacctccccctgaatgggctgatcctctcagctggagtctgcttgtctcagtgaggcagtttgctgaaacgagtgacctccccagctgccaggacttagtgctacatcagtgcatccagcaagcatccaggtaaagactgaaaaagacagccaatcctgtgtgtttttgcaaacatgcagatacttggtctcctgcagacacagagccacatacatctacagctgtgaaaggcacacatggaatgcacaaagtgaaatgcacgggagaaggtttagaactgagaagagggcaatgggaaggtggagacagaaaagccaagcagaggaaaggagagaggaaagaaaagtgcaggtggtgggagtggggaaaaactctaaccagatggattcccttccagccctaagcggcttctctctaaaaattcttaactctttgggaaccatagcccctttgaaaaatcttgtctcctaaaaattatgcatgcacacccatgtattatcttgcccacaatcccaggggcttttcagagccctctaaggaatcctatcctcccttcaaccccaattgatctgaaatgtcagctttactcagcacagttcttcaggtcagcaatgttgaagcagaagaaactcaagaaggcaaggaggggcaacaagagggaaggaatgactataatgatgttgcttttgtcttctcacagtaatcataagtgttcccagacaacatagatagatagatagatagatagatagatagatagatagatagatagatgatagatgattgatggacagatagataggtagatagatgatagatagacaggtgtagatgatagatgatggatagatagacggatagatagatagacagatagatagatagatagatagacaggcagataggtctttctgctttccacagaaccagtagttgttctggcaatttgaactcacttttcttccccaccaggacccttataatcaccatagattaaacaaaacccaacagatatttatctgctcttggaaaataactgcaaacatatttctcaaatggtgatgttcctaacttctgtctacccaagacattgtgtctgtctgcttctcctggctgcaatctctctccacgtaggaattttctagcccccactaaatgtaatgtcatgcagtcgactcaaagggaaaggtaaaaggattagtagattgatcgatgaaagatattaatgctctttcatgttgggttgaagaaggatttgaagtcatcaggaaagagggtagcaggagaatagacctcaagtattcaaaagactctctggattaaaatcctattaaattcacatcagcttctccaggaggcatttgagaaggttggggtttctttaccatgtcgctgtaattaaccttctcttaagctgttttgggtggggaactttcgcaattaagaaactgaaaaacttttattttctatcacccacatggctttttgaatggtttaaaaactagagtggaaagtagtttagcttaattgatttgaggggttcagatctcctacttgaacctgctgtcagactcgcctctgagatctgagccccacaataaaaagggcattttgtccggagaaagaatcaaaggttcagatctactacaatgcttttcttcctctgactgttctcccactgagtcctatagaaagggcaactttgcaaaggaatggttgttccccttaagaaaaacctgtttcttggcccagaccccacttcacggaaactaccacagaaacccaaagagtctttcttggcagatgccaggtcgtggcatgtcaacatcagctctctcattacaggtatggtaaggtcaggtgggggcagccactatgggattgggtgaccaatcatctgaagaaataagggtcacaaaacacatgttattttaaagggttggtcttagctagtttttcttccctagggaaaatgtcatcccacttcaaatatcaacaactttgacattttgagcaagaaagcgagaagccccattagggaattgaatctgtgcttcctccaggctccaataaacccaacttttattacatgatgcctctatgtgaaaacattaactttttaggccgggcactgtggctcacacttgtaatctcagcactttgggaggccgaggtgggcggatcacctgaggtcaggagtgtgagaccagcctgaacaacatggcgaaaccccgtc

SEQ ID NO: 868618 - DNA, 15 bp, Homo sapiens
ccatgcctcagtttt

SEQ ID NO: 868619 - DNA, 15 bp, Homo sapiens
cccatgcctcagttt

SEQ ID NO: 868620 - DNA, 15 bp, Homo sapiens
gcccatgcctcagtt

SEQ ID NO: 868621 - DNA, 15 bp, Homo sapiens
agcccatgcctcagt

SEQ ID NO: 868622 - DNA, 15 bp, Homo sapiens
aagcccatgcctcag

SEQ ID NO: 868623 - DNA, 15 bp, Homo sapiens
caagcccatgcctca

SEQ ID NO: 868624 - DNA, 15 bp, Homo sapiens
tcaagcccatgcctc

SEQ ID NO: 868625 - DNA, 15 bp, Homo sapiens
gtcaagcccatgcct

SEQ ID NO: 868626 - DNA, 15 bp, Homo sapiens
ggtcaagcccatgcc

SEQ ID NO: 868627 - DNA, 15 bp, Homo sapiens
tggtcaagcccatgc

SEQ ID NO: 868628 - DNA, 15 bp, Homo sapiens
ttggtcaagcccatg

SEQ ID NO: 868629 - DNA, 15 bp, Homo sapiens
tttggtcaagcccat

SEQ ID NO: 868630 - DNA, 15 bp, Homo sapiens
atttggtcaagccca

SEQ ID NO: 868631 - DNA, 15 bp, Homo sapiens
gatttggtcaagccc

SEQ ID NO: 868632 - DNA, 15 bp, Homo sapiens
tgatttggtcaagcc

SEQ ID NO: 868633 - DNA, 15 bp, Homo sapiens
ctgatttggtcaagc

SEQ ID NO: 868634 - DNA, 15 bp, Homo sapiens
actgatttggtcaag

SEQ ID NO: 868635 - DNA, 15 bp, Homo sapiens
cactgatttggtcaa

SEQ ID NO: 868636 - DNA, 15 bp, Homo sapiens
ccactgatttggtca

SEQ ID NO: 868637 - DNA, 15 bp, Homo sapiens
accactgatttggtc

SEQ ID NO: 868638 - DNA, 15 bp, Homo sapiens
taccactgatttggt

SEQ ID NO: 868639 - DNA, 15 bp, Homo sapiens
ctaccactgatttgg

SEQ ID NO: 868640 - DNA, 15 bp, Homo sapiens
tctaccactgatttg

SEQ ID NO: 868641 - DNA, 15 bp, Homo sapiens
ttctaccactgattt

SEQ ID NO: 868642 - DNA, 15 bp, Homo sapiens
gttctaccactgatt

SEQ ID NO: 868643 - DNA, 15 bp, Homo sapiens
ggttctaccactgat

SEQ ID NO: 868644 - DNA, 15 bp, Homo sapiens
tggttctaccactga

SEQ ID NO: 868645 - DNA, 15 bp, Homo sapiens
ttggttctaccactg

SEQ ID NO: 868646 - DNA, 15 bp, Homo sapiens
cttggttctaccact

SEQ ID NO: 868647 - DNA, 15 bp, Homo sapiens
tcttggttctaccac

SEQ ID NO: 868648 - DNA, 15 bp, Homo sapiens
ctcttggttctacca

SEQ ID NO: 868649 - DNA, 15 bp, Homo sapiens
actcttggttctacc

SEQ ID NO: 868650 - DNA, 15 bp, Homo sapiens
aactcttggttctac

SEQ ID NO: 868651 - DNA, 15 bp, Homo sapiens
taactcttggttcta

SEQ ID NO: 868652 - DNA, 15 bp, Homo sapiens
ttaactcttggttct

SEQ ID NO: 868653 - DNA, 15 bp, Homo sapiens
tttaactcttggttc

SEQ ID NO: 868654 - DNA, 15 bp, Homo sapiens
gtttaactcttggtt

SEQ ID NO: 868655 - DNA, 15 bp, Homo sapiens
ggtttaactcttggt

SEQ ID NO: 868656 - DNA, 15 bp, Homo sapiens
tggtttaactcttgg

SEQ ID NO: 868657 - DNA, 15 bp, Homo sapiens
gtggtttaactcttg

SEQ ID NO: 868658 - DNA, 15 bp, Homo sapiens
agtggtttaactctt

SEQ ID NO: 868659 - DNA, 15 bp, Homo sapiens
aagtggtttaactct

SEQ ID NO: 868660 - DNA, 15 bp, Homo sapiens
caagtggtttaactc

SEQ ID NO: 868661 - DNA, 15 bp, Homo sapiens
acaagtggtttaact

SEQ ID NO: 868662 - DNA, 15 bp, Homo sapiens
aacaagtggtttaac

SEQ ID NO: 868663 - DNA, 15 bp, Homo sapiens
aaacaagtggtttaa

SEQ ID NO: 868664 - DNA, 15 bp, Homo sapiens
aaaacaagtggttta

SEQ ID NO: 868665 - DNA, 15 bp, Homo sapiens
caaaacaagtggttt

SEQ ID NO: 868666 - DNA, 15 bp, Homo sapiens
tcaaaacaagtggtt

SEQ ID NO: 868667 - DNA, 15 bp, Homo sapiens
ttcaaaacaagtggt

SEQ ID NO: 868668 - DNA, 15 bp, Homo sapiens
attcaaaacaagtgg

SEQ ID NO: 868669 - DNA, 15 bp, Homo sapiens
gattcaaaacaagtg

SEQ ID NO: 868670 - DNA, 15 bp, Homo sapiens
ggattcaaaacaagt

SEQ ID NO: 868671 - DNA, 15 bp, Homo sapiens
aggattcaaaacaag

SEQ ID NO: 868672 - DNA, 15 bp, Homo sapiens
taggattcaaaacaa

SEQ ID NO: 868673 - DNA, 15 bp, Homo sapiens
ttaggattcaaaaca

SEQ ID NO: 868674 - DNA, 15 bp, Homo sapiens
tttaggattcaaaac

SEQ ID NO: 868675 - DNA, 15 bp, Homo sapiens
gtttaggattcaaaa

SEQ ID NO: 868676 - DNA, 15 bp, Homo sapiens
ggtttaggattcaaa

SEQ ID NO: 868677 - DNA, 15 bp, Homo sapiens
aggtttaggattcaa

SEQ ID NO: 868678 - DNA, 15 bp, Homo sapiens
caggtttaggattca

SEQ ID NO: 868679 - DNA, 15 bp, Homo sapiens
tcaggtttaggattc

SEQ ID NO: 868680 - DNA, 15 bp, Homo sapiens
ctcaggtttaggatt

SEQ ID NO: 868681 - DNA, 15 bp, Homo sapiens
actcaggtttaggat

SEQ ID NO: 868682 - DNA, 15 bp, Homo sapiens
aactcaggtttagga

SEQ ID NO: 868683 - DNA, 15 bp, Homo sapiens
aaactcaggtttagg

SEQ ID NO: 868684 - DNA, 15 bp, Homo sapiens
aaaactcaggtttag

SEQ ID NO: 868685 - DNA, 15 bp, Homo sapiens
taaaactcaggttta

SEQ ID NO: 868686 - DNA, 15 bp, Homo sapiens
ataaaactcaggttt

SEQ ID NO: 868687 - DNA, 15 bp, Homo sapiens
aataaaactcaggtt

SEQ ID NO: 868688 - DNA, 15 bp, Homo sapiens
aaataaaactcaggt

SEQ ID NO: 868689 - DNA, 15 bp, Homo sapiens
aaaataaaactcagg

SEQ ID NO: 868690 - DNA, 15 bp, Homo sapiens
taaaataaaactcag

SEQ ID NO: 868691 - DNA, 15 bp, Homo sapiens
gtaaaataaaactca

SEQ ID NO: 868692 - DNA, 15 bp, Homo sapiens
agtaaaataaaactc

SEQ ID NO: 868693 - DNA, 15 bp, Homo sapiens
aagtaaaataaaact

SEQ ID NO: 868694 - DNA, 15 bp, Homo sapiens
taagtaaaataaaac

SEQ ID NO: 868695 - DNA, 15 bp, Homo sapiens
ataagtaaaataaaa

SEQ ID NO: 868696 - DNA, 15 bp, Homo sapiens
aataagtaaaataaa

SEQ ID NO: 868697 - DNA, 15 bp, Homo sapiens
aaataagtaaaataa

SEQ ID NO: 868698 - DNA, 15 bp, Homo sapiens
taaataagtaaaata

SEQ ID NO: 868699 - DNA, 15 bp, Homo sapiens
ataaataagtaaaat

SEQ ID NO: 868700 - DNA, 15 bp, Homo sapiens
aataaataagtaaaa

SEQ ID NO: 868701 - DNA, 15 bp, Homo sapiens
aaataaataagtaaa

SEQ ID NO: 868702 - DNA, 15 bp, Homo sapiens
taaataaataagtaa

SEQ ID NO: 868703 - DNA, 15 bp, Homo sapiens
ataaataaataagta

SEQ ID NO: 868704 - DNA, 15 bp, Homo sapiens
aataaataaataagt

SEQ ID NO: 868705 - DNA, 15 bp, Homo sapiens
aaataaataaataag

SEQ ID NO: 868706 - DNA, 15 bp, Homo sapiens
taaataaataaataa

SEQ ID NO: 868707 - DNA, 15 bp, Homo sapiens
ataaataaataaata

SEQ ID NO: 868708 - DNA, 15 bp, Homo sapiens
aataaataaataaat

SEQ ID NO: 868709 - DNA, 15 bp, Homo sapiens
aaataaataaataaa

SEQ ID NO: 868710 - DNA, 15 bp, Homo sapiens
caaataaataaataa

SEQ ID NO: 868711 - DNA, 15 bp, Homo sapiens
acaaataaataaata

SEQ ID NO: 868712 - DNA, 15 bp, Homo sapiens
aacaaataaataaat

SEQ ID NO: 868713 - DNA, 15 bp, Homo sapiens
aaacaaataaataaa

SEQ ID NO: 868714 - DNA, 15 bp, Homo sapiens
taaacaaataaataa

SEQ ID NO: 868715 - DNA, 15 bp, Homo sapiens
ataaacaaataaata

SEQ ID NO: 868716 - DNA, 15 bp, Homo sapiens
aataaacaaataaat

SEQ ID NO: 868717 - DNA, 15 bp, Homo sapiens
aaataaacaaataaa

SEQ ID NO: 868718 - DNA, 15 bp, Homo sapiens
taaataaacaaataa

SEQ ID NO: 868719 - DNA, 15 bp, Homo sapiens
ataaataaacaaata

SEQ ID NO: 868720 - DNA, 15 bp, Homo sapiens
aataaataaacaaat

SEQ ID NO: 868721 - DNA, 15 bp, Homo sapiens
aaataaataaacaaa

SEQ ID NO: 868722 - DNA, 15 bp, Homo sapiens
aaaataaataaacaa

SEQ ID NO: 868723 - DNA, 15 bp, Homo sapiens
gaaaataaataaaca

SEQ ID NO: 868724 - DNA, 15 bp, Homo sapiens
tgaaaataaataaac

SEQ ID NO: 868725 - DNA, 15 bp, Homo sapiens
ctgaaaataaataaa

SEQ ID NO: 868726 - DNA, 15 bp, Homo sapiens
tctgaaaataaataa

SEQ ID NO: 868727 - DNA, 15 bp, Homo sapiens
atctgaaaataaata

SEQ ID NO: 868728 - DNA, 15 bp, Homo sapiens
catctgaaaataaat

SEQ ID NO: 868729 - DNA, 15 bp, Homo sapiens
gcatctgaaaataaa

SEQ ID NO: 868730 - DNA, 15 bp, Homo sapiens
agcatctgaaaataa

SEQ ID NO: 868731 - DNA, 15 bp, Homo sapiens
aagcatctgaaaata

SEQ ID NO: 868732 - DNA, 15 bp, Homo sapiens
caagcatctgaaaat

SEQ ID NO: 868733 - DNA, 15 bp, Homo sapiens
ccaagcatctgaaaa

SEQ ID NO: 868734 - DNA, 15 bp, Homo sapiens
accaagcatctgaaa

SEQ ID NO: 868735 - DNA, 15 bp, Homo sapiens
gaccaagcatctgaa

SEQ ID NO: 868736 - DNA, 15 bp, Homo sapiens
tgaccaagcatctga

SEQ ID NO: 868737 - DNA, 15 bp, Homo sapiens
ttgaccaagcatctg

SEQ ID NO: 868738 - DNA, 15 bp, Homo sapiens
tttgaccaagcatct

SEQ ID NO: 868739 - DNA, 15 bp, Homo sapiens
ctttgaccaagcatc

SEQ ID NO: 868740 - DNA, 15 bp, Homo sapiens
tctttgaccaagcat

SEQ ID NO: 868741 - DNA, 15 bp, Homo sapiens
ttctttgaccaagca

SEQ ID NO: 868742 - DNA, 15 bp, Homo sapiens
gttctttgaccaagc

SEQ ID NO: 868743 - DNA, 15 bp, Homo sapiens
tgttctttgaccaag

SEQ ID NO: 868744 - DNA, 15 bp, Homo sapiens
ctgttctttgaccaa

SEQ ID NO: 868745 - DNA, 15 bp, Homo sapiens
actgttctttgacca

SEQ ID NO: 868746 - DNA, 15 bp, Homo sapiens
cactgttctttgacc

SEQ ID NO: 868747 - DNA, 15 bp, Homo sapiens
ccactgttctttgac

SEQ ID NO: 868748 - DNA, 15 bp, Homo sapiens
cccactgttctttga

SEQ ID NO: 868749 - DNA, 15 bp, Homo sapiens
tcccactgttctttg

SEQ ID NO: 868750 - DNA, 15 bp, Homo sapiens
ctcccactgttcttt

SEQ ID NO: 868751 - DNA, 15 bp, Homo sapiens
cctcccactgttctt

SEQ ID NO: 868752 - DNA, 15 bp, Homo sapiens
tcctcccactgttct

SEQ ID NO: 868753 - DNA, 15 bp, Homo sapiens
ctcctcccactgttc

SEQ ID NO: 868754 - DNA, 15 bp, Homo sapiens
tctcctcccactgtt

SEQ ID NO: 868755 - DNA, 15 bp, Homo sapiens
ctctcctcccactgt

SEQ ID NO: 868756 - DNA, 15 bp, Homo sapiens
cctctcctcccactg

SEQ ID NO: 868757 - DNA, 15 bp, Homo sapiens
ccctctcctcccact

SEQ ID NO: 868758 - DNA, 15 bp, Homo sapiens
tccctctcctcccac

SEQ ID NO: 868759 - DNA, 15 bp, Homo sapiens
atccctctcctccca

SEQ ID NO: 868760 - DNA, 15 bp, Homo sapiens
catccctctcctccc

SEQ ID NO: 868761 - DNA, 15 bp, Homo sapiens
ccatccctctcctcc

SEQ ID NO: 868762 - DNA, 15 bp, Homo sapiens
cccatccctctcctc

SEQ ID NO: 868763 - DNA, 15 bp, Homo sapiens
gcccatccctctcct

SEQ ID NO: 868764 - DNA, 15 bp, Homo sapiens
agcccatccctctcc

SEQ ID NO: 868765 - DNA, 15 bp, Homo sapiens
aagcccatccctctc

SEQ ID NO: 868766 - DNA, 15 bp, Homo sapiens
gaagcccatccctct

SEQ ID NO: 868767 - DNA, 15 bp, Homo sapiens
ggaagcccatccctc

SEQ ID NO: 868768 - DNA, 15 bp, Homo sapiens
tggaagcccatccct

SEQ ID NO: 868769 - DNA, 15 bp, Homo sapiens
ctggaagcccatccc

SEQ ID NO: 868770 - DNA, 15 bp, Homo sapiens
gctggaagcccatcc

SEQ ID NO: 868771 - DNA, 15 bp, Homo sapiens
tgctggaagcccatc

SEQ ID NO: 868772 - DNA, 15 bp, Homo sapiens
ttgctggaagcccat

SEQ ID NO: 868773 - DNA, 15 bp, Homo sapiens
gttgctggaagccca

SEQ ID NO: 868774 - DNA, 15 bp, Homo sapiens
ggttgctggaagccc

SEQ ID NO: 868775 - DNA, 15 bp, Homo sapiens
aggttgctggaagcc

SEQ ID NO: 868776 - DNA, 15 bp, Homo sapiens
aaggttgctggaagc

SEQ ID NO: 868777 - DNA, 15 bp, Homo sapiens
aaaggttgctggaag

SEQ ID NO: 868778 - DNA, 15 bp, Homo sapiens
taaaggttgctggaa

SEQ ID NO: 868779 - DNA, 15 bp, Homo sapiens
ataaaggttgctgga

SEQ ID NO: 868780 - DNA, 15 bp, Homo sapiens
aataaaggttgctgg

SEQ ID NO: 868781 - DNA, 15 bp, Homo sapiens
taataaaggttgctg

SEQ ID NO: 868782 - DNA, 15 bp, Homo sapiens
ataataaaggttgct

SEQ ID NO: 868783 - DNA, 15 bp, Homo sapiens
aataataaaggttgc

SEQ ID NO: 868784 - DNA, 15 bp, Homo sapiens
caataataaaggttg

SEQ ID NO: 868785 - DNA, 15 bp, Homo sapiens
ccaataataaaggtt

SEQ ID NO: 868786 - DNA, 15 bp, Homo sapiens
gccaataataaaggt

SEQ ID NO: 868787 - DNA, 15 bp, Homo sapiens
agccaataataaagg

SEQ ID NO: 868788 - DNA, 15 bp, Homo sapiens
aagccaataataaag

SEQ ID NO: 868789 - DNA, 15 bp, Homo sapiens
taagccaataataaa

SEQ ID NO: 868790 - DNA, 15 bp, Homo sapiens
ataagccaataataa

SEQ ID NO: 868791 - DNA, 15 bp, Homo sapiens
aataagccaataata

SEQ ID NO: 868792 - DNA, 15 bp, Homo sapiens
aaataagccaataat

SEQ ID NO: 868793 - DNA, 15 bp, Homo sapiens
aaaataagccaataa

SEQ ID NO: 868794 - DNA, 15 bp, Homo sapiens
gaaaataagccaata

SEQ ID NO: 868795 - DNA, 15 bp, Homo sapiens
agaaaataagccaat

SEQ ID NO: 868796 - DNA, 15 bp, Homo sapiens
aagaaaataagccaa

SEQ ID NO: 868797 - DNA, 15 bp, Homo sapiens
taagaaaataagcca

SEQ ID NO: 868798 - DNA, 15 bp, Homo sapiens
gtaagaaaataagcc

SEQ ID NO: 868799 - DNA, 15 bp, Homo sapiens
tgtaagaaaataagc

SEQ ID NO: 868800 - DNA, 15 bp, Homo sapiens
ctgtaagaaaataag

SEQ ID NO: 868801 - DNA, 15 bp, Homo sapiens
gctgtaagaaaataa

SEQ ID NO: 868802 - DNA, 15 bp, Homo sapiens
ggctgtaagaaaata

SEQ ID NO: 868803 - DNA, 15 bp, Homo sapiens
gggctgtaagaaaat

SEQ ID NO: 868804 - DNA, 15 bp, Homo sapiens
tgggctgtaagaaaa

SEQ ID NO: 868805 - DNA, 15 bp, Homo sapiens
atgggctgtaagaaa

SEQ ID NO: 868806 - DNA, 15 bp, Homo sapiens
aatgggctgtaagaa

SEQ ID NO: 868807 - DNA, 15 bp, Homo sapiens
taatgggctgtaaga

SEQ ID NO: 868808 - DNA, 15 bp, Homo sapiens
gtaatgggctgtaag

SEQ ID NO: 868809 - DNA, 15 bp, Homo sapiens
agtaatgggctgtaa

SEQ ID NO: 868810 - DNA, 15 bp, Homo sapiens
aagtaatgggctgta

SEQ ID NO: 868811 - DNA, 15 bp, Homo sapiens
aaagtaatgggctgt

SEQ ID NO: 868812 - DNA, 15 bp, Homo sapiens
gaaagtaatgggctg

SEQ ID NO: 868813 - DNA, 15 bp, Homo sapiens
agaaagtaatgggct

SEQ ID NO: 868814 - DNA, 15 bp, Homo sapiens
gagaaagtaatgggc

SEQ ID NO: 868815 - DNA, 15 bp, Homo sapiens
agagaaagtaatggg

SEQ ID NO: 868816 - DNA, 15 bp, Homo sapiens
aagagaaagtaatgg

SEQ ID NO: 868817 - DNA, 15 bp, Homo sapiens
caagagaaagtaatg

SEQ ID NO: 868818 - DNA, 15 bp, Homo sapiens
ccaagagaaagtaat

SEQ ID NO: 868819 - DNA, 15 bp, Homo sapiens
cccaagagaaagtaa

SEQ ID NO: 868820 - DNA, 15 bp, Homo sapiens
tcccaagagaaagta

SEQ ID NO: 868821 - DNA, 15 bp, Homo sapiens
ttcccaagagaaagt

SEQ ID NO: 868822 - DNA, 15 bp, Homo sapiens
tttcccaagagaaag

SEQ ID NO: 868823 - DNA, 15 bp, Homo sapiens
ttttcccaagagaaa

SEQ ID NO: 868824 - DNA, 15 bp, Homo sapiens
attttcccaagagaa

SEQ ID NO: 868825 - DNA, 15 bp, Homo sapiens
tattttcccaagaga

SEQ ID NO: 868826 - DNA, 15 bp, Homo sapiens
atattttcccaagag

SEQ ID NO: 868827 - DNA, 15 bp, Homo sapiens
aatattttcccaaga

SEQ ID NO: 868828 - DNA, 15 bp, Homo sapiens
taatattttcccaag

SEQ ID NO: 868829 - DNA, 15 bp, Homo sapiens
ttaatattttcccaa

SEQ ID NO: 868830 - DNA, 15 bp, Homo sapiens
cttaatattttccca

SEQ ID NO: 868831 - DNA, 15 bp, Homo sapiens
gcttaatattttccc

SEQ ID NO: 868832 - DNA, 15 bp, Homo sapiens
tgcttaatattttcc

SEQ ID NO: 868833 - DNA, 15 bp, Homo sapiens
ctgcttaatattttc

SEQ ID NO: 868834 - DNA, 15 bp, Homo sapiens
cctgcttaatatttt

SEQ ID NO: 868835 - DNA, 15 bp, Homo sapiens
gcctgcttaatattt

SEQ ID NO: 868836 - DNA, 15 bp, Homo sapiens
tgcctgcttaatatt

SEQ ID NO: 868837 - DNA, 15 bp, Homo sapiens
gtgcctgcttaatat

SEQ ID NO: 868838 - DNA, 15 bp, Homo sapiens
agtgcctgcttaata

SEQ ID NO: 868839 - DNA, 15 bp, Homo sapiens
gagtgcctgcttaat

SEQ ID NO: 868840 - DNA, 15 bp, Homo sapiens
tgagtgcctgcttaa

SEQ ID NO: 868841 - DNA, 15 bp, Homo sapiens
ttgagtgcctgctta

SEQ ID NO: 868842 - DNA, 15 bp, Homo sapiens
cttgagtgcctgctt

SEQ ID NO: 868843 - DNA, 15 bp, Homo sapiens
ccttgagtgcctgct

SEQ ID NO: 868844 - DNA, 15 bp, Homo sapiens
gccttgagtgcctgc

SEQ ID NO: 868845 - DNA, 15 bp, Homo sapiens
agccttgagtgcctg

SEQ ID NO: 868846 - DNA, 15 bp, Homo sapiens
aagccttgagtgcct

SEQ ID NO: 868847 - DNA, 15 bp, Homo sapiens
caagccttgagtgcc

SEQ ID NO: 868848 - DNA, 15 bp, Homo sapiens
tcaagccttgagtgc

SEQ ID NO: 868849 - DNA, 15 bp, Homo sapiens
ctcaagccttgagtg

SEQ ID NO: 868850 - DNA, 15 bp, Homo sapiens
cctcaagccttgagt

SEQ ID NO: 868851 - DNA, 15 bp, Homo sapiens
gcctcaagccttgag

SEQ ID NO: 868852 - DNA, 15 bp, Homo sapiens
ggcctcaagccttga

SEQ ID NO: 868853 - DNA, 15 bp, Homo sapiens
gggcctcaagccttg

SEQ ID NO: 868854 - DNA, 15 bp, Homo sapiens
ggggcctcaagcctt

SEQ ID NO: 868855 - DNA, 15 bp, Homo sapiens
aggggcctcaagcct

SEQ ID NO: 868856 - DNA, 15 bp, Homo sapiens
caggggcctcaagcc

SEQ ID NO: 868857 - DNA, 15 bp, Homo sapiens
tcaggggcctcaagc

SEQ ID NO: 868858 - DNA, 15 bp, Homo sapiens
ctcaggggcctcaag

SEQ ID NO: 868859 - DNA, 15 bp, Homo sapiens
actcaggggcctcaa

SEQ ID NO: 868860 - DNA, 15 bp, Homo sapiens
aactcaggggcctca

SEQ ID NO: 868861 - DNA, 15 bp, Homo sapiens
aaactcaggggcctc

SEQ ID NO: 868862 - DNA, 15 bp, Homo sapiens
aaaactcaggggcct

SEQ ID NO: 868863 - DNA, 15 bp, Homo sapiens
gaaaactcaggggcc

SEQ ID NO: 868864 - DNA, 15 bp, Homo sapiens
tgaaaactcaggggc

SEQ ID NO: 868865 - DNA, 15 bp, Homo sapiens
gtgaaaactcagggg

SEQ ID NO: 868866 - DNA, 15 bp, Homo sapiens
tgtgaaaactcaggg

SEQ ID NO: 868867 - DNA, 15 bp, Homo sapiens
atgtgaaaactcagg

SEQ ID NO: 868868 - DNA, 15 bp, Homo sapiens
gatgtgaaaactcag

SEQ ID NO: 868869 - DNA, 15 bp, Homo sapiens
ggatgtgaaaactca

SEQ ID NO: 868870 - DNA, 15 bp, Homo sapiens
aggatgtgaaaactc

SEQ ID NO: 868871 - DNA, 15 bp, Homo sapiens
aaggatgtgaaaact

SEQ ID NO: 868872 - DNA, 15 bp, Homo sapiens
aaaggatgtgaaaac

SEQ ID NO: 868873 - DNA, 15 bp, Homo sapiens
gaaaggatgtgaaaa

SEQ ID NO: 868874 - DNA, 15 bp, Homo sapiens
agaaaggatgtgaaa

SEQ ID NO: 868875 - DNA, 15 bp, Homo sapiens
cagaaaggatgtgaa

SEQ ID NO: 868876 - DNA, 15 bp, Homo sapiens
tcagaaaggatgtga

SEQ ID NO: 868877 - DNA, 15 bp, Homo sapiens
ttcagaaaggatgtg

SEQ ID NO: 868878 - DNA, 15 bp, Homo sapiens
gttcagaaaggatgt

SEQ ID NO: 868879 - DNA, 15 bp, Homo sapiens
ggttcagaaaggatg

SEQ ID NO: 868880 - DNA, 15 bp, Homo sapiens
aggttcagaaaggat

SEQ ID NO: 868881 - DNA, 15 bp, Homo sapiens
gaggttcagaaagga

SEQ ID NO: 868882 - DNA, 15 bp, Homo sapiens
agaggttcagaaagg

SEQ ID NO: 868883 - DNA, 15 bp, Homo sapiens
cagaggttcagaaag

SEQ ID NO: 868884 - DNA, 15 bp, Homo sapiens
tcagaggttcagaaa

SEQ ID NO: 868885 - DNA, 15 bp, Homo sapiens
ttcagaggttcagaa

SEQ ID NO: 868886 - DNA, 15 bp, Homo sapiens
gttcagaggttcaga

SEQ ID NO: 868887 - DNA, 15 bp, Homo sapiens
ggttcagaggttcag

SEQ ID NO: 868888 - DNA, 15 bp, Homo sapiens
aggttcagaggttca

SEQ ID NO: 868889 - DNA, 15 bp, Homo sapiens
caggttcagaggttc

SEQ ID NO: 868890 - DNA, 15 bp, Homo sapiens
gcaggttcagaggtt

SEQ ID NO: 868891 - DNA, 15 bp, Homo sapiens
agcaggttcagaggt

SEQ ID NO: 868892 - DNA, 15 bp, Homo sapiens
aagcaggttcagagg

SEQ ID NO: 868893 - DNA, 15 bp, Homo sapiens
aaagcaggttcagag

SEQ ID NO: 868894 - DNA, 15 bp, Homo sapiens
gaaagcaggttcaga

SEQ ID NO: 868895 - DNA, 15 bp, Homo sapiens
ggaaagcaggttcag

SEQ ID NO: 868896 - DNA, 15 bp, Homo sapiens
tggaaagcaggttca

SEQ ID NO: 868897 - DNA, 15 bp, Homo sapiens
ctggaaagcaggttc

SEQ ID NO: 868898 - DNA, 15 bp, Homo sapiens
gctggaaagcaggtt

SEQ ID NO: 868899 - DNA, 15 bp, Homo sapiens
tgctggaaagcaggt

SEQ ID NO: 868900 - DNA, 15 bp, Homo sapiens
atgctggaaagcagg

SEQ ID NO: 868901 - DNA, 15 bp, Homo sapiens
aatgctggaaagcag

SEQ ID NO: 868902 - DNA, 15 bp, Homo sapiens
gaatgctggaaagca

SEQ ID NO: 868903 - DNA, 15 bp, Homo sapiens
agaatgctggaaagc

SEQ ID NO: 868904 - DNA, 15 bp, Homo sapiens
aagaatgctggaaag

SEQ ID NO: 868905 - DNA, 15 bp, Homo sapiens
aaagaatgctggaaa

SEQ ID NO: 868906 - DNA, 15 bp, Homo sapiens
aaaagaatgctggaa

SEQ ID NO: 868907 - DNA, 15 bp, Homo sapiens
taaaagaatgctgga

SEQ ID NO: 868908 - DNA, 15 bp, Homo sapiens
ataaaagaatgctgg

SEQ ID NO: 868909 - DNA, 15 bp, Homo sapiens
tataaaagaatgctg

SEQ ID NO: 868910 - DNA, 15 bp, Homo sapiens
gtataaaagaatgct

SEQ ID NO: 868911 - DNA, 15 bp, Homo sapiens
agtataaaagaatgc

SEQ ID NO: 868912 - DNA, 15 bp, Homo sapiens
aagtataaaagaatg

SEQ ID NO: 868913 - DNA, 15 bp, Homo sapiens
aaagtataaaagaat

SEQ ID NO: 868914 - DNA, 15 bp, Homo sapiens
caaagtataaaagaa

SEQ ID NO: 868915 - DNA, 15 bp, Homo sapiens
acaaagtataaaaga

SEQ ID NO: 868916 - DNA, 15 bp, Homo sapiens
aacaaagtataaaag

SEQ ID NO: 868917 - DNA, 15 bp, Homo sapiens
aaacaaagtataaaa

SEQ ID NO: 868918 - DNA, 15 bp, Homo sapiens
aaaacaaagtataaa

SEQ ID NO: 868919 - DNA, 15 bp, Homo sapiens
taaaacaaagtataa

SEQ ID NO: 868920 - DNA, 15 bp, Homo sapiens
gtaaaacaaagtata

SEQ ID NO: 868921 - DNA, 15 bp, Homo sapiens
ggtaaaacaaagtat

SEQ ID NO: 868922 - DNA, 15 bp, Homo sapiens
aggtaaaacaaagta

SEQ ID NO: 868923 - DNA, 15 bp, Homo sapiens
gaggtaaaacaaagt

SEQ ID NO: 868924 - DNA, 15 bp, Homo sapiens
ggaggtaaaacaaag

SEQ ID NO: 868925 - DNA, 15 bp, Homo sapiens
aggaggtaaaacaaa

SEQ ID NO: 868926 - DNA, 15 bp, Homo sapiens
caggaggtaaaacaa

SEQ ID NO: 868927 - DNA, 15 bp, Homo sapiens
ccaggaggtaaaaca

SEQ ID NO: 868928 - DNA, 15 bp, Homo sapiens
accaggaggtaaaac

SEQ ID NO: 868929 - DNA, 15 bp, Homo sapiens
gaccaggaggtaaaa

SEQ ID NO: 868930 - DNA, 15 bp, Homo sapiens
tgaccaggaggtaaa

SEQ ID NO: 868931 - DNA, 15 bp, Homo sapiens
ctgaccaggaggtaa

SEQ ID NO: 868932 - DNA, 15 bp, Homo sapiens
actgaccaggaggta

SEQ ID NO: 868933 - DNA, 15 bp, Homo sapiens
tactgaccaggaggt

SEQ ID NO: 868934 - DNA, 15 bp, Homo sapiens
ttactgaccaggagg

SEQ ID NO: 868935 - DNA, 15 bp, Homo sapiens
attactgaccaggag

SEQ ID NO: 868936 - DNA, 15 bp, Homo sapiens
cattactgaccagga

SEQ ID NO: 868937 - DNA, 15 bp, Homo sapiens
gcattactgaccagg

SEQ ID NO: 868938 - DNA, 15 bp, Homo sapiens
ggcattactgaccag

SEQ ID NO: 868939 - DNA, 15 bp, Homo sapiens
aggcattactgacca

SEQ ID NO: 868940 - DNA, 15 bp, Homo sapiens
gaggcattactgacc

SEQ ID NO: 868941 - DNA, 15 bp, Homo sapiens
tgaggcattactgac

SEQ ID NO: 868942 - DNA, 15 bp, Homo sapiens
gtgaggcattactga

SEQ ID NO: 868943 - DNA, 15 bp, Homo sapiens
ggtgaggcattactg

SEQ ID NO: 868944 - DNA, 15 bp, Homo sapiens
gggtgaggcattact

SEQ ID NO: 868945 - DNA, 15 bp, Homo sapiens
agggtgaggcattac

SEQ ID NO: 868946 - DNA, 15 bp, Homo sapiens
gagggtgaggcatta

SEQ ID NO: 868947 - DNA, 15 bp, Homo sapiens
tgagggtgaggcatt

SEQ ID NO: 868948 - DNA, 15 bp, Homo sapiens
ctgagggtgaggcat

SEQ ID NO: 868949 - DNA, 15 bp, Homo sapiens
actgagggtgaggca

SEQ ID NO: 868950 - DNA, 15 bp, Homo sapiens
gactgagggtgaggc

SEQ ID NO: 868951 - DNA, 15 bp, Homo sapiens
agactgagggtgagg

SEQ ID NO: 868952 - DNA, 15 bp, Homo sapiens
aagactgagggtgag

SEQ ID NO: 868953 - DNA, 15 bp, Homo sapiens
gaagactgagggtga

SEQ ID NO: 868954 - DNA, 15 bp, Homo sapiens
agaagactgagggtg

SEQ ID NO: 868955 - DNA, 15 bp, Homo sapiens
gagaagactgagggt

SEQ ID NO: 868956 - DNA, 15 bp, Homo sapiens
agagaagactgaggg

SEQ ID NO: 868957 - DNA, 15 bp, Homo sapiens
tagagaagactgagg

SEQ ID NO: 868958 - DNA, 15 bp, Homo sapiens
ttagagaagactgag

SEQ ID NO: 868959 - DNA, 15 bp, Homo sapiens
tttagagaagactga

SEQ ID NO: 868960 - DNA, 15 bp, Homo sapiens
ttttagagaagactg

SEQ ID NO: 868961 - DNA, 15 bp, Homo sapiens
cttttagagaagact

SEQ ID NO: 868962 - DNA, 15 bp, Homo sapiens
acttttagagaagac

SEQ ID NO: 868963 - DNA, 15 bp, Homo sapiens
cacttttagagaaga

SEQ ID NO: 868964 - DNA, 15 bp, Homo sapiens
acacttttagagaag

SEQ ID NO: 868965 - DNA, 15 bp, Homo sapiens
cacacttttagagaa

SEQ ID NO: 868966 - DNA, 15 bp, Homo sapiens
ccacacttttagaga

SEQ ID NO: 868967 - DNA, 15 bp, Homo sapiens
accacacttttagag

SEQ ID NO: 868968 - DNA, 15 bp, Homo sapiens
aaccacacttttaga

SEQ ID NO: 868969 - DNA, 15 bp, Homo sapiens
taaccacacttttag

SEQ ID NO: 868970 - DNA, 15 bp, Homo sapiens
ttaaccacactttta

SEQ ID NO: 868971 - DNA, 15 bp, Homo sapiens
attaaccacactttt

SEQ ID NO: 868972 - DNA, 15 bp, Homo sapiens
cattaaccacacttt

SEQ ID NO: 868973 - DNA, 15 bp, Homo sapiens
ccattaaccacactt

SEQ ID NO: 868974 - DNA, 15 bp, Homo sapiens
gccattaaccacact

SEQ ID NO: 868975 - DNA, 15 bp, Homo sapiens
tgccattaaccacac

SEQ ID NO: 868976 - DNA, 15 bp, Homo sapiens
atgccattaaccaca

SEQ ID NO: 868977 - DNA, 15 bp, Homo sapiens
gatgccattaaccac

SEQ ID NO: 868978 - DNA, 15 bp, Homo sapiens
agatgccattaacca

SEQ ID NO: 868979 - DNA, 15 bp, Homo sapiens
aagatgccattaacc

SEQ ID NO: 868980 - DNA, 15 bp, Homo sapiens
gaagatgccattaac

SEQ ID NO: 868981 - DNA, 15 bp, Homo sapiens
ggaagatgccattaa

SEQ ID NO: 868982 - DNA, 15 bp, Homo sapiens
aggaagatgccatta

SEQ ID NO: 868983 - DNA, 15 bp, Homo sapiens
caggaagatgccatt

SEQ ID NO: 868984 - DNA, 15 bp, Homo sapiens
tcaggaagatgccat

SEQ ID NO: 868985 - DNA, 15 bp, Homo sapiens
gtcaggaagatgcca

SEQ ID NO: 868986 - DNA, 15 bp, Homo sapiens
agtcaggaagatgcc

SEQ ID NO: 868987 - DNA, 15 bp, Homo sapiens
tagtcaggaagatgc

SEQ ID NO: 868988 - DNA, 15 bp, Homo sapiens
atagtcaggaagatg

SEQ ID NO: 868989 - DNA, 15 bp, Homo sapiens
aatagtcaggaagat

SEQ ID NO: 868990 - DNA, 15 bp, Homo sapiens
aaatagtcaggaaga

SEQ ID NO: 868991 - DNA, 15 bp, Homo sapiens
caaatagtcaggaag

SEQ ID NO: 868992 - DNA, 15 bp, Homo sapiens
tcaaatagtcaggaa

SEQ ID NO: 868993 - DNA, 15 bp, Homo sapiens
ttcaaatagtcagga

SEQ ID NO: 868994 - DNA, 15 bp, Homo sapiens
cttcaaatagtcagg

SEQ ID NO: 868995 - DNA, 15 bp, Homo sapiens
tcttcaaatagtcag

SEQ ID NO: 868996 - DNA, 15 bp, Homo sapiens
gtcttcaaatagtca

SEQ ID NO: 868997 - DNA, 15 bp, Homo sapiens
ggtcttcaaatagtc

SEQ ID NO: 868998 - DNA, 15 bp, Homo sapiens
tggtcttcaaatagt

SEQ ID NO: 868999 - DNA, 15 bp, Homo sapiens
gtggtcttcaaatag

SEQ ID NO: 869000 - DNA, 15 bp, Homo sapiens
agtggtcttcaaata

SEQ ID NO: 869001 - DNA, 15 bp, Homo sapiens
cagtggtcttcaaat

SEQ ID NO: 869002 - DNA, 15 bp, Homo sapiens
ccagtggtcttcaaa

SEQ ID NO: 869003 - DNA, 15 bp, Homo sapiens
gccagtggtcttcaa

SEQ ID NO: 869004 - DNA, 15 bp, Homo sapiens
ggccagtggtcttca

SEQ ID NO: 869005 - DNA, 15 bp, Homo sapiens
tggccagtggtcttc

SEQ ID NO: 869006 - DNA, 15 bp, Homo sapiens
ttggccagtggtctt

SEQ ID NO: 869007 - DNA, 15 bp, Homo sapiens
tttggccagtggtct

SEQ ID NO: 869008 - DNA, 15 bp, Homo sapiens
atttggccagtggtc

SEQ ID NO: 869009 - DNA, 15 bp, Homo sapiens
gatttggccagtggt

SEQ ID NO: 869010 - DNA, 15 bp, Homo sapiens
ggatttggccagtgg

SEQ ID NO: 869011 - DNA, 15 bp, Homo sapiens
gggatttggccagtg

SEQ ID NO: 869012 - DNA, 15 bp, Homo sapiens
tgggatttggccagt

SEQ ID NO: 869013 - DNA, 15 bp, Homo sapiens
gtgggatttggccag

SEQ ID NO: 869014 - DNA, 15 bp, Homo sapiens
ggtgggatttggcca

SEQ ID NO: 869015 - DNA, 15 bp, Homo sapiens
tggtgggatttggcc

SEQ ID NO: 869016 - DNA, 15 bp, Homo sapiens
ctggtgggatttggc

SEQ ID NO: 869017 - DNA, 15 bp, Homo sapiens
gctggtgggatttgg

SEQ ID NO: 869018 - DNA, 15 bp, Homo sapiens
agctggtgggatttg

SEQ ID NO: 869019 - DNA, 15 bp, Homo sapiens
gagctggtgggattt

SEQ ID NO: 869020 - DNA, 15 bp, Homo sapiens
tgagctggtgggatt

SEQ ID NO: 869021 - DNA, 15 bp, Homo sapiens
gtgagctggtgggat

SEQ ID NO: 869022 - DNA, 15 bp, Homo sapiens
agtgagctggtggga

SEQ ID NO: 869023 - DNA, 15 bp, Homo sapiens
gagtgagctggtggg

SEQ ID NO: 869024 - DNA, 15 bp, Homo sapiens
tgagtgagctggtgg

SEQ ID NO: 869025 - DNA, 15 bp, Homo sapiens
atgagtgagctggtg

SEQ ID NO: 869026 - DNA, 15 bp, Homo sapiens
tatgagtgagctggt

SEQ ID NO: 869027 - DNA, 15 bp, Homo sapiens
ctatgagtgagctgg

SEQ ID NO: 869028 - DNA, 15 bp, Homo sapiens
tctatgagtgagctg

SEQ ID NO: 869029 - DNA, 15 bp, Homo sapiens
gtctatgagtgagct

SEQ ID NO: 869030 - DNA, 15 bp, Homo sapiens
ggtctatgagtgagc

SEQ ID NO: 869031 - DNA, 15 bp, Homo sapiens
tggtctatgagtgag

SEQ ID NO: 869032 - DNA, 15 bp, Homo sapiens
atggtctatgagtga

SEQ ID NO: 869033 - DNA, 15 bp, Homo sapiens
gatggtctatgagtg

SEQ ID NO: 869034 - DNA, 15 bp, Homo sapiens
ggatggtctatgagt

SEQ ID NO: 869035 - DNA, 15 bp, Homo sapiens
gggatggtctatgag

SEQ ID NO: 869036 - DNA, 15 bp, Homo sapiens
ggggatggtctatga

SEQ ID NO: 869037 - DNA, 15 bp, Homo sapiens
gggggatggtctatg

SEQ ID NO: 869038 - DNA, 15 bp, Homo sapiens
agggggatggtctat

SEQ ID NO: 869039 - DNA, 15 bp, Homo sapiens
tagggggatggtcta

SEQ ID NO: 869040 - DNA, 15 bp, Homo sapiens
gtagggggatggtct

SEQ ID NO: 869041 - DNA, 15 bp, Homo sapiens
agtagggggatggtc

SEQ ID NO: 869042 - DNA, 15 bp, Homo sapiens
aagtagggggatggt

SEQ ID NO: 869043 - DNA, 15 bp, Homo sapiens
aaagtagggggatgg

SEQ ID NO: 869044 - DNA, 15 bp, Homo sapiens
taaagtagggggatg

SEQ ID NO: 869045 - DNA, 15 bp, Homo sapiens
gtaaagtagggggat

SEQ ID NO: 869046 - DNA, 15 bp, Homo sapiens
agtaaagtaggggga

SEQ ID NO: 869047 - DNA, 15 bp, Homo sapiens
aagtaaagtaggggg

SEQ ID NO: 869048 - DNA, 15 bp, Homo sapiens
aaagtaaagtagggg

SEQ ID NO: 869049 - DNA, 15 bp, Homo sapiens
gaaagtaaagtaggg

SEQ ID NO: 869050 - DNA, 15 bp, Homo sapiens
agaaagtaaagtagg

SEQ ID NO: 869051 - DNA, 15 bp, Homo sapiens
aagaaagtaaagtag

SEQ ID NO: 869052 - DNA, 15 bp, Homo sapiens
gaagaaagtaaagta

SEQ ID NO: 869053 - DNA, 15 bp, Homo sapiens
tgaagaaagtaaagt

SEQ ID NO: 869054 - DNA, 15 bp, Homo sapiens
ttgaagaaagtaaag

SEQ ID NO: 869055 - DNA, 15 bp, Homo sapiens
tttgaagaaagtaaa

SEQ ID NO: 869056 - DNA, 15 bp, Homo sapiens
ttttgaagaaagtaa

SEQ ID NO: 869057 - DNA, 15 bp, Homo sapiens
cttttgaagaaagta

SEQ ID NO: 869058 - DNA, 15 bp, Homo sapiens
tcttttgaagaaagt

SEQ ID NO: 869059 - DNA, 15 bp, Homo sapiens
gtcttttgaagaaag

SEQ ID NO: 869060 - DNA, 15 bp, Homo sapiens
agtcttttgaagaaa

SEQ ID NO: 869061 - DNA, 15 bp, Homo sapiens
aagtcttttgaagaa

SEQ ID NO: 869062 - DNA, 15 bp, Homo sapiens
taagtcttttgaaga

SEQ ID NO: 869063 - DNA, 15 bp, Homo sapiens
ctaagtcttttgaag

SEQ ID NO: 869064 - DNA, 15 bp, Homo sapiens
gctaagtcttttgaa

SEQ ID NO: 869065 - DNA, 15 bp, Homo sapiens
ggctaagtcttttga

SEQ ID NO: 869066 - DNA, 15 bp, Homo sapiens
gggctaagtcttttg

SEQ ID NO: 869067 - DNA, 15 bp, Homo sapiens
agggctaagtctttt

SEQ ID NO: 869068 - DNA, 15 bp, Homo sapiens
tagggctaagtcttt

SEQ ID NO: 869069 - DNA, 15 bp, Homo sapiens
gtagggctaagtctt

SEQ ID NO: 869070 - DNA, 15 bp, Homo sapiens
ggtagggctaagtct

SEQ ID NO: 869071 - DNA, 15 bp, Homo sapiens
aggtagggctaagtc

SEQ ID NO: 869072 - DNA, 15 bp, Homo sapiens
taggtagggctaagt

SEQ ID NO: 869073 - DNA, 15 bp, Homo sapiens
ttaggtagggctaag

SEQ ID NO: 869074 - DNA, 15 bp, Homo sapiens
tttaggtagggctaa

SEQ ID NO: 869075 - DNA, 15 bp, Homo sapiens
gtttaggtagggcta

SEQ ID NO: 869076 - DNA, 15 bp, Homo sapiens
agtttaggtagggct

SEQ ID NO: 869077 - DNA, 15 bp, Homo sapiens
aagtttaggtagggc

SEQ ID NO: 869078 - DNA, 15 bp, Homo sapiens
taagtttaggtaggg

SEQ ID NO: 869079 - DNA, 15 bp, Homo sapiens
ataagtttaggtagg

SEQ ID NO: 869080 - DNA, 15 bp, Homo sapiens
aataagtttaggtag

SEQ ID NO: 869081 - DNA, 15 bp, Homo sapiens
aaataagtttaggta

SEQ ID NO: 869082 - DNA, 15 bp, Homo sapiens
taaataagtttaggt

SEQ ID NO: 869083 - DNA, 15 bp, Homo sapiens
ataaataagtttagg

SEQ ID NO: 869084 - DNA, 15 bp, Homo sapiens
tataaataagtttag

SEQ ID NO: 869085 - DNA, 15 bp, Homo sapiens
atataaataagttta

SEQ ID NO: 869086 - DNA, 15 bp, Homo sapiens
catataaataagttt

SEQ ID NO: 869087 - DNA, 15 bp, Homo sapiens
acatataaataagtt

SEQ ID NO: 869088 - DNA, 15 bp, Homo sapiens
aacatataaataagt

SEQ ID NO: 869089 - DNA, 15 bp, Homo sapiens
aaacatataaataag

SEQ ID NO: 869090 - DNA, 15 bp, Homo sapiens
taaacatataaataa

SEQ ID NO: 869091 - DNA, 15 bp, Homo sapiens
ataaacatataaata

SEQ ID NO: 869092 - DNA, 15 bp, Homo sapiens
aataaacatataaat

SEQ ID NO: 869093 - DNA, 15 bp, Homo sapiens
aaataaacatataaa

SEQ ID NO: 869094 - DNA, 15 bp, Homo sapiens
aaaataaacatataa

SEQ ID NO: 869095 - DNA, 15 bp, Homo sapiens
gaaaataaacatata

SEQ ID NO: 869096 - DNA, 15 bp, Homo sapiens
agaaaataaacatat

SEQ ID NO: 869097 - DNA, 15 bp, Homo sapiens
cagaaaataaacata

SEQ ID NO: 869098 - DNA, 15 bp, Homo sapiens
gcagaaaataaacat

SEQ ID NO: 869099 - DNA, 15 bp, Homo sapiens
ggcagaaaataaaca

SEQ ID NO: 869100 - DNA, 15 bp, Homo sapiens
gggcagaaaataaac

SEQ ID NO: 869101 - DNA, 15 bp, Homo sapiens
tgggcagaaaataaa

SEQ ID NO: 869102 - DNA, 15 bp, Homo sapiens
gtgggcagaaaataa

SEQ ID NO: 869103 - DNA, 15 bp, Homo sapiens
ggtgggcagaaaata

SEQ ID NO: 869104 - DNA, 15 bp, Homo sapiens
tggtgggcagaaaat

SEQ ID NO: 869105 - DNA, 15 bp, Homo sapiens
ctggtgggcagaaaa

SEQ ID NO: 869106 - DNA, 15 bp, Homo sapiens
tctggtgggcagaaa

SEQ ID NO: 869107 - DNA, 15 bp, Homo sapiens
ttctggtgggcagaa

SEQ ID NO: 869108 - DNA, 15 bp, Homo sapiens
attctggtgggcaga

SEQ ID NO: 869109 - DNA, 15 bp, Homo sapiens
cattctggtgggcag

SEQ ID NO: 869110 - DNA, 15 bp, Homo sapiens
ccattctggtgggca

SEQ ID NO: 869111 - DNA, 15 bp, Homo sapiens
gccattctggtgggc

SEQ ID NO: 869112 - DNA, 15 bp, Homo sapiens
tgccattctggtggg

SEQ ID NO: 869113 - DNA, 15 bp, Homo sapiens
ctgccattctggtgg

SEQ ID NO: 869114 - DNA, 15 bp, Homo sapiens
gctgccattctggtg

SEQ ID NO: 869115 - DNA, 15 bp, Homo sapiens
tgctgccattctggt

SEQ ID NO: 869116 - DNA, 15 bp, Homo sapiens
atgctgccattctgg

SEQ ID NO: 869117 - DNA, 15 bp, Homo sapiens
tatgctgccattctg

SEQ ID NO: 869118 - DNA, 15 bp, Homo sapiens
ctatgctgccattct

SEQ ID NO: 869119 - DNA, 15 bp, Homo sapiens
gctatgctgccattc

SEQ ID NO: 869120 - DNA, 15 bp, Homo sapiens
agctatgctgccatt

SEQ ID NO: 869121 - DNA, 15 bp, Homo sapiens
cagctatgctgccat

SEQ ID NO: 869122 - DNA, 15 bp, Homo sapiens
ccagctatgctgcca

SEQ ID NO: 869123 - DNA, 15 bp, Homo sapiens
cccagctatgctgcc

SEQ ID NO: 869124 - DNA, 15 bp, Homo sapiens
ccccagctatgctgc

SEQ ID NO: 869125 - DNA, 15 bp, Homo sapiens
tccccagctatgctg

SEQ ID NO: 869126 - DNA, 15 bp, Homo sapiens
ctccccagctatgct

SEQ ID NO: 869127 - DNA, 15 bp, Homo sapiens
cctccccagctatgc

SEQ ID NO: 869128 - DNA, 15 bp, Homo sapiens
gcctccccagctatg

SEQ ID NO: 869129 - DNA, 15 bp, Homo sapiens
tgcctccccagctat

SEQ ID NO: 869130 - DNA, 15 bp, Homo sapiens
ctgcctccccagcta

SEQ ID NO: 869131 - DNA, 15 bp, Homo sapiens
tctgcctccccagct

SEQ ID NO: 869132 - DNA, 15 bp, Homo sapiens
ctctgcctccccagc

SEQ ID NO: 869133 - DNA, 15 bp, Homo sapiens
actctgcctccccag

SEQ ID NO: 869134 - DNA, 15 bp, Homo sapiens
gactctgcctcccca

SEQ ID NO: 869135 - DNA, 15 bp, Homo sapiens
agactctgcctcccc

SEQ ID NO: 869136 - DNA, 15 bp, Homo sapiens
cagactctgcctccc

SEQ ID NO: 869137 - DNA, 15 bp, Homo sapiens
acagactctgcctcc

SEQ ID NO: 869138 - DNA, 15 bp, Homo sapiens
aacagactctgcctc

SEQ ID NO: 869139 - DNA, 15 bp, Homo sapiens
aaacagactctgcct

SEQ ID NO: 869140 - DNA, 15 bp, Homo sapiens
aaaacagactctgcc

SEQ ID NO: 869141 - DNA, 15 bp, Homo sapiens
caaaacagactctgc

SEQ ID NO: 869142 - DNA, 15 bp, Homo sapiens
acaaaacagactctg

SEQ ID NO: 869143 - DNA, 15 bp, Homo sapiens
aacaaaacagactct

SEQ ID NO: 869144 - DNA, 15 bp, Homo sapiens
gaacaaaacagactc

SEQ ID NO: 869145 - DNA, 15 bp, Homo sapiens
tgaacaaaacagact

SEQ ID NO: 869146 - DNA, 15 bp, Homo sapiens
atgaacaaaacagac

SEQ ID NO: 869147 - DNA, 15 bp, Homo sapiens
aatgaacaaaacaga

SEQ ID NO: 869148 - DNA, 15 bp, Homo sapiens
caatgaacaaaacag

SEQ ID NO: 869149 - DNA, 15 bp, Homo sapiens
gcaatgaacaaaaca

SEQ ID NO: 869150 - DNA, 15 bp, Homo sapiens
agcaatgaacaaaac

SEQ ID NO: 869151 - DNA, 15 bp, Homo sapiens
cagcaatgaacaaaa

SEQ ID NO: 869152 - DNA, 15 bp, Homo sapiens
acagcaatgaacaaa

SEQ ID NO: 869153 - DNA, 15 bp, Homo sapiens
tacagcaatgaacaa

SEQ ID NO: 869154 - DNA, 15 bp, Homo sapiens
atacagcaatgaaca

SEQ ID NO: 869155 - DNA, 15 bp, Homo sapiens
aatacagcaatgaac

SEQ ID NO: 869156 - DNA, 15 bp, Homo sapiens
gaatacagcaatgaa

SEQ ID NO: 869157 - DNA, 15 bp, Homo sapiens
ggaatacagcaatga

SEQ ID NO: 869158 - DNA, 15 bp, Homo sapiens
gggaatacagcaatg

SEQ ID NO: 869159 - DNA, 15 bp, Homo sapiens
tgggaatacagcaat

SEQ ID NO: 869160 - DNA, 15 bp, Homo sapiens
ttgggaatacagcaa

SEQ ID NO: 869161 - DNA, 15 bp, Homo sapiens
tttgggaatacagca

SEQ ID NO: 869162 - DNA, 15 bp, Homo sapiens
ctttgggaatacagc

SEQ ID NO: 869163 - DNA, 15 bp, Homo sapiens
tctttgggaatacag

SEQ ID NO: 869164 - DNA, 15 bp, Homo sapiens
gtctttgggaataca

SEQ ID NO: 869165 - DNA, 15 bp, Homo sapiens
agtctttgggaatac

SEQ ID NO: 869166 - DNA, 15 bp, Homo sapiens
tagtctttgggaata

SEQ ID NO: 869167 - DNA, 15 bp, Homo sapiens
ctagtctttgggaat

SEQ ID NO: 869168 - DNA, 15 bp, Homo sapiens
tctagtctttgggaa

SEQ ID NO: 869169 - DNA, 15 bp, Homo sapiens
ttctagtctttggga

SEQ ID NO: 869170 - DNA, 15 bp, Homo sapiens
gttctagtctttggg

SEQ ID NO: 869171 - DNA, 15 bp, Homo sapiens
tgttctagtctttgg

SEQ ID NO: 869172 - DNA, 15 bp, Homo sapiens
gtgttctagtctttg

SEQ ID NO: 869173 - DNA, 15 bp, Homo sapiens
ggtgttctagtcttt

SEQ ID NO: 869174 - DNA, 15 bp, Homo sapiens
tggtgttctagtctt

SEQ ID NO: 869175 - DNA, 15 bp, Homo sapiens
gtggtgttctagtct

SEQ ID NO: 869176 - DNA, 15 bp, Homo sapiens
ggtggtgttctagtc

SEQ ID NO: 869177 - DNA, 15 bp, Homo sapiens
tggtggtgttctagt

SEQ ID NO: 869178 - DNA, 15 bp, Homo sapiens
ttggtggtgttctag

SEQ ID NO: 869179 - DNA, 15 bp, Homo sapiens
cttggtggtgttcta

SEQ ID NO: 869180 - DNA, 15 bp, Homo sapiens
gcttggtggtgttct

SEQ ID NO: 869181 - DNA, 15 bp, Homo sapiens
tgcttggtggtgttc

SEQ ID NO: 869182 - DNA, 15 bp, Homo sapiens
gtgcttggtggtgtt

SEQ ID NO: 869183 - DNA, 15 bp, Homo sapiens
tgtgcttggtggtgt

SEQ ID NO: 869184 - DNA, 15 bp, Homo sapiens
gtgtgcttggtggtg

SEQ ID NO: 869185 - DNA, 15 bp, Homo sapiens
cgtgtgcttggtggt

SEQ ID NO: 869186 - DNA, 15 bp, Homo sapiens
ccgtgtgcttggtgg

SEQ ID NO: 869187 - DNA, 15 bp, Homo sapiens
accgtgtgcttggtg

SEQ ID NO: 869188 - DNA, 15 bp, Homo sapiens
taccgtgtgcttggt

SEQ ID NO: 869189 - DNA, 15 bp, Homo sapiens
gtaccgtgtgcttgg

SEQ ID NO: 869190 - DNA, 15 bp, Homo sapiens
tgtaccgtgtgcttg

SEQ ID NO: 869191 - DNA, 15 bp, Homo sapiens
ctgtaccgtgtgctt

SEQ ID NO: 869192 - DNA, 15 bp, Homo sapiens
cctgtaccgtgtgct

SEQ ID NO: 869193 - DNA, 15 bp, Homo sapiens
acctgtaccgtgtgc

SEQ ID NO: 869194 - DNA, 15 bp, Homo sapiens
gacctgtaccgtgtg

SEQ ID NO: 869195 - DNA, 15 bp, Homo sapiens
agacctgtaccgtgt

SEQ ID NO: 869196 - DNA, 15 bp, Homo sapiens
gagacctgtaccgtg

SEQ ID NO: 869197 - DNA, 15 bp, Homo sapiens
tgagacctgtaccgt

SEQ ID NO: 869198 - DNA, 15 bp, Homo sapiens
ctgagacctgtaccg

SEQ ID NO: 869199 - DNA, 15 bp, Homo sapiens
actgagacctgtacc

SEQ ID NO: 869200 - DNA, 15 bp, Homo sapiens
tactgagacctgtac

SEQ ID NO: 869201 - DNA, 15 bp, Homo sapiens
ttactgagacctgta

SEQ ID NO: 869202 - DNA, 15 bp, Homo sapiens
attactgagacctgt

SEQ ID NO: 869203 - DNA, 15 bp, Homo sapiens
aattactgagacctg

SEQ ID NO: 869204 - DNA, 15 bp, Homo sapiens
taattactgagacct

SEQ ID NO: 869205 - DNA, 15 bp, Homo sapiens
ataattactgagacc

SEQ ID NO: 869206 - DNA, 15 bp, Homo sapiens
aataattactgagac

SEQ ID NO: 869207 - DNA, 15 bp, Homo sapiens
caataattactgaga

SEQ ID NO: 869208 - DNA, 15 bp, Homo sapiens
acaataattactgag

SEQ ID NO: 869209 - DNA, 15 bp, Homo sapiens
gacaataattactga

SEQ ID NO: 869210 - DNA, 15 bp, Homo sapiens
tgacaataattactg

SEQ ID NO: 869211 - DNA, 15 bp, Homo sapiens
ttgacaataattact

SEQ ID NO: 869212 - DNA, 15 bp, Homo sapiens
tttgacaataattac

SEQ ID NO: 869213 - DNA, 15 bp, Homo sapiens
atttgacaataatta

SEQ ID NO: 869214 - DNA, 15 bp, Homo sapiens
aatttgacaataatt

SEQ ID NO: 869215 - DNA, 15 bp, Homo sapiens
aaatttgacaataat

SEQ ID NO: 869216 - DNA, 15 bp, Homo sapiens
taaatttgacaataa

SEQ ID NO: 869217 - DNA, 15 bp, Homo sapiens
ataaatttgacaata

SEQ ID NO: 869218 - DNA, 15 bp, Homo sapiens
cataaatttgacaat

SEQ ID NO: 869219 - DNA, 15 bp, Homo sapiens
acataaatttgacaa

SEQ ID NO: 869220 - DNA, 15 bp, Homo sapiens
cacataaatttgaca

SEQ ID NO: 869221 - DNA, 15 bp, Homo sapiens
ccacataaatttgac

SEQ ID NO: 869222 - DNA, 15 bp, Homo sapiens
tccacataaatttga

SEQ ID NO: 869223 - DNA, 15 bp, Homo sapiens
atccacataaatttg

SEQ ID NO: 869224 - DNA, 15 bp, Homo sapiens
aatccacataaattt

SEQ ID NO: 869225 - DNA, 15 bp, Homo sapiens
aaatccacataaatt

SEQ ID NO: 869226 - DNA, 15 bp, Homo sapiens
caaatccacataaat

SEQ ID NO: 869227 - DNA, 15 bp, Homo sapiens
gcaaatccacataaa

SEQ ID NO: 869228 - DNA, 15 bp, Homo sapiens
agcaaatccacataa

SEQ ID NO: 869229 - DNA, 15 bp, Homo sapiens
aagcaaatccacata

SEQ ID NO: 869230 - DNA, 15 bp, Homo sapiens
aaagcaaatccacat

SEQ ID NO: 869231 - DNA, 15 bp, Homo sapiens
aaaagcaaatccaca

SEQ ID NO: 869232 - DNA, 15 bp, Homo sapiens
taaaagcaaatccac

SEQ ID NO: 869233 - DNA, 15 bp, Homo sapiens
ttaaaagcaaatcca

SEQ ID NO: 869234 - DNA, 15 bp, Homo sapiens
tttaaaagcaaatcc

SEQ ID NO: 869235 - DNA, 15 bp, Homo sapiens
gtttaaaagcaaatc

SEQ ID NO: 869236 - DNA, 15 bp, Homo sapiens
tgtttaaaagcaaat

SEQ ID NO: 869237 - DNA, 15 bp, Homo sapiens
ttgtttaaaagcaaa

SEQ ID NO: 869238 - DNA, 15 bp, Homo sapiens
attgtttaaaagcaa

SEQ ID NO: 869239 - DNA, 15 bp, Homo sapiens
tattgtttaaaagca

SEQ ID NO: 869240 - DNA, 15 bp, Homo sapiens
atattgtttaaaagc

SEQ ID NO: 869241 - DNA, 15 bp, Homo sapiens
gatattgtttaaaag

SEQ ID NO: 869242 - DNA, 15 bp, Homo sapiens
agatattgtttaaaa

SEQ ID NO: 869243 - DNA, 15 bp, Homo sapiens
aagatattgtttaaa

SEQ ID NO: 869244 - DNA, 15 bp, Homo sapiens
gaagatattgtttaa

SEQ ID NO: 869245 - DNA, 15 bp, Homo sapiens
ggaagatattgttta

SEQ ID NO: 869246 - DNA, 15 bp, Homo sapiens
tggaagatattgttt

SEQ ID NO: 869247 - DNA, 15 bp, Homo sapiens
atggaagatattgtt

SEQ ID NO: 869248 - DNA, 15 bp, Homo sapiens
aatggaagatattgt

SEQ ID NO: 869249 - DNA, 15 bp, Homo sapiens
aaatggaagatattg

SEQ ID NO: 869250 - DNA, 15 bp, Homo sapiens
taaatggaagatatt

SEQ ID NO: 869251 - DNA, 15 bp, Homo sapiens
gtaaatggaagatat

SEQ ID NO: 869252 - DNA, 15 bp, Homo sapiens
agtaaatggaagata

SEQ ID NO: 869253 - DNA, 15 bp, Homo sapiens
cagtaaatggaagat

SEQ ID NO: 869254 - DNA, 15 bp, Homo sapiens
tcagtaaatggaaga

SEQ ID NO: 869255 - DNA, 15 bp, Homo sapiens
ctcagtaaatggaag

SEQ ID NO: 869256 - DNA, 15 bp, Homo sapiens
actcagtaaatggaa

SEQ ID NO: 869257 - DNA, 15 bp, Homo sapiens
cactcagtaaatgga

SEQ ID NO: 869258 - DNA, 15 bp, Homo sapiens
acactcagtaaatgg

SEQ ID NO: 869259 - DNA, 15 bp, Homo sapiens
aacactcagtaaatg

SEQ ID NO: 869260 - DNA, 15 bp, Homo sapiens
aaacactcagtaaat

SEQ ID NO: 869261 - DNA, 15 bp, Homo sapiens
taaacactcagtaaa

SEQ ID NO: 869262 - DNA, 15 bp, Homo sapiens
ataaacactcagtaa

SEQ ID NO: 869263 - DNA, 15 bp, Homo sapiens
cataaacactcagta

SEQ ID NO: 869264 - DNA, 15 bp, Homo sapiens
acataaacactcagt

SEQ ID NO: 869265 - DNA, 15 bp, Homo sapiens
cacataaacactcag

SEQ ID NO: 869266 - DNA, 15 bp, Homo sapiens
ccacataaacactca

SEQ ID NO: 869267 - DNA, 15 bp, Homo sapiens
tccacataaacactc

SEQ ID NO: 869268 - DNA, 15 bp, Homo sapiens
ttccacataaacact

SEQ ID NO: 869269 - DNA, 15 bp, Homo sapiens
cttccacataaacac

SEQ ID NO: 869270 - DNA, 15 bp, Homo sapiens
tcttccacataaaca

SEQ ID NO: 869271 - DNA, 15 bp, Homo sapiens
ttcttccacataaac

SEQ ID NO: 869272 - DNA, 15 bp, Homo sapiens
gttcttccacataaa

SEQ ID NO: 869273 - DNA, 15 bp, Homo sapiens
agttcttccacataa

SEQ ID NO: 869274 - DNA, 15 bp, Homo sapiens
cagttcttccacata

SEQ ID NO: 869275 - DNA, 15 bp, Homo sapiens
acagttcttccacat

SEQ ID NO: 869276 - DNA, 15 bp, Homo sapiens
tacagttcttccaca

SEQ ID NO: 869277 - DNA, 15 bp, Homo sapiens
gtacagttcttccac

SEQ ID NO: 869278 - DNA, 15 bp, Homo sapiens
agtacagttcttcca

SEQ ID NO: 869279 - DNA, 15 bp, Homo sapiens
tagtacagttcttcc

SEQ ID NO: 869280 - DNA, 15 bp, Homo sapiens
ttagtacagttcttc

SEQ ID NO: 869281 - DNA, 15 bp, Homo sapiens
tttagtacagttctt

SEQ ID NO: 869282 - DNA, 15 bp, Homo sapiens
atttagtacagttct

SEQ ID NO: 869283 - DNA, 15 bp, Homo sapiens
aatttagtacagttc

SEQ ID NO: 869284 - DNA, 15 bp, Homo sapiens
aaatttagtacagtt

SEQ ID NO: 869285 - DNA, 15 bp, Homo sapiens
aaaatttagtacagt

SEQ ID NO: 869286 - DNA, 15 bp, Homo sapiens
taaaatttagtacag

SEQ ID NO: 869287 - DNA, 15 bp, Homo sapiens
ttaaaatttagtaca

SEQ ID NO: 869288 - DNA, 15 bp, Homo sapiens
attaaaatttagtac

SEQ ID NO: 869289 - DNA, 15 bp, Homo sapiens
cattaaaatttagta

SEQ ID NO: 869290 - DNA, 15 bp, Homo sapiens
gcattaaaatttagt

SEQ ID NO: 869291 - DNA, 15 bp, Homo sapiens
tgcattaaaatttag

SEQ ID NO: 869292 - DNA, 15 bp, Homo sapiens
atgcattaaaattta

SEQ ID NO: 869293 - DNA, 15 bp, Homo sapiens
aatgcattaaaattt

SEQ ID NO: 869294 - DNA, 15 bp, Homo sapiens
aaatgcattaaaatt

SEQ ID NO: 869295 - DNA, 15 bp, Homo sapiens
gaaatgcattaaaat

SEQ ID NO: 869296 - DNA, 15 bp, Homo sapiens
agaaatgcattaaaa

SEQ ID NO: 869297 - DNA, 15 bp, Homo sapiens
aagaaatgcattaaa

SEQ ID NO: 869298 - DNA, 15 bp, Homo sapiens
aaagaaatgcattaa

SEQ ID NO: 869299 - DNA, 15 bp, Homo sapiens
taaagaaatgcatta

SEQ ID NO: 869300 - DNA, 15 bp, Homo sapiens
ataaagaaatgcatt

SEQ ID NO: 869301 - DNA, 15 bp, Homo sapiens
aataaagaaatgcat

SEQ ID NO: 869302 - DNA, 15 bp, Homo sapiens
gaataaagaaatgca

SEQ ID NO: 869303 - DNA, 15 bp, Homo sapiens
ggaataaagaaatgc

SEQ ID NO: 869304 - DNA, 15 bp, Homo sapiens
aggaataaagaaatg

SEQ ID NO: 869305 - DNA, 15 bp, Homo sapiens
taggaataaagaaat

SEQ ID NO: 869306 - DNA, 15 bp, Homo sapiens
ataggaataaagaaa

SEQ ID NO: 869307 - DNA, 15 bp, Homo sapiens
aataggaataaagaa

SEQ ID NO: 869308 - DNA, 15 bp, Homo sapiens
gaataggaataaaga

SEQ ID NO: 869309 - DNA, 15 bp, Homo sapiens
agaataggaataaag

SEQ ID NO: 869310 - DNA, 15 bp, Homo sapiens
aagaataggaataaa

SEQ ID NO: 869311 - DNA, 15 bp, Homo sapiens
taagaataggaataa

SEQ ID NO: 869312 - DNA, 15 bp, Homo sapiens
ttaagaataggaata

SEQ ID NO: 869313 - DNA, 15 bp, Homo sapiens
tttaagaataggaat

SEQ ID NO: 869314 - DNA, 15 bp, Homo sapiens
ttttaagaataggaa

SEQ ID NO: 869315 - DNA, 15 bp, Homo sapiens
gttttaagaatagga

SEQ ID NO: 869316 - DNA, 15 bp, Homo sapiens
ggttttaagaatagg

SEQ ID NO: 869317 - DNA, 15 bp, Homo sapiens
aggttttaagaatag

SEQ ID NO: 869318 - DNA, 15 bp, Homo sapiens
aaggttttaagaata

SEQ ID NO: 869319 - DNA, 15 bp, Homo sapiens
gaaggttttaagaat

SEQ ID NO: 869320 - DNA, 15 bp, Homo sapiens
ggaaggttttaagaa

SEQ ID NO: 869321 - DNA, 15 bp, Homo sapiens
tggaaggttttaaga

SEQ ID NO: 869322 - DNA, 15 bp, Homo sapiens
ctggaaggttttaag

SEQ ID NO: 869323 - DNA, 15 bp, Homo sapiens
gctggaaggttttaa

SEQ ID NO: 869324 - DNA, 15 bp, Homo sapiens
tgctggaaggtttta

SEQ ID NO: 869325 - DNA, 15 bp, Homo sapiens
ttgctggaaggtttt

SEQ ID NO: 869326 - DNA, 15 bp, Homo sapiens
cttgctggaaggttt

SEQ ID NO: 869327 - DNA, 15 bp, Homo sapiens
ccttgctggaaggtt

SEQ ID NO: 869328 - DNA, 15 bp, Homo sapiens
accttgctggaaggt

SEQ ID NO: 869329 - DNA, 15 bp, Homo sapiens
caccttgctggaagg

SEQ ID NO: 869330 - DNA, 15 bp, Homo sapiens
ccaccttgctggaag

SEQ ID NO: 869331 - DNA, 15 bp, Homo sapiens
gccaccttgctggaa

SEQ ID NO: 869332 - DNA, 15 bp, Homo sapiens
agccaccttgctgga

SEQ ID NO: 869333 - DNA, 15 bp, Homo sapiens
gagccaccttgctgg

SEQ ID NO: 869334 - DNA, 15 bp, Homo sapiens
agagccaccttgctg

SEQ ID NO: 869335 - DNA, 15 bp, Homo sapiens
tagagccaccttgct

SEQ ID NO: 869336 - DNA, 15 bp, Homo sapiens
gtagagccaccttgc

SEQ ID NO: 869337 - DNA, 15 bp, Homo sapiens
ggtagagccaccttg

SEQ ID NO: 869338 - DNA, 15 bp, Homo sapiens
tggtagagccacctt

SEQ ID NO: 869339 - DNA, 15 bp, Homo sapiens
gtggtagagccacct

SEQ ID NO: 869340 - DNA, 15 bp, Homo sapiens
ggtggtagagccacc

SEQ ID NO: 869341 - DNA, 15 bp, Homo sapiens
gggtggtagagccac

SEQ ID NO: 869342 - DNA, 15 bp, Homo sapiens
agggtggtagagcca

SEQ ID NO: 869343 - DNA, 15 bp, Homo sapiens
gagggtggtagagcc

SEQ ID NO: 869344 - DNA, 15 bp, Homo sapiens
agagggtggtagagc

SEQ ID NO: 869345 - DNA, 15 bp, Homo sapiens
aagagggtggtagag

SEQ ID NO: 869346 - DNA, 15 bp, Homo sapiens
aaagagggtggtaga

SEQ ID NO: 869347 - DNA, 15 bp, Homo sapiens
aaaagagggtggtag

SEQ ID NO: 869348 - DNA, 15 bp, Homo sapiens
gaaaagagggtggta

SEQ ID NO: 869349 - DNA, 15 bp, Homo sapiens
ggaaaagagggtggt

SEQ ID NO: 869350 - DNA, 15 bp, Homo sapiens
cggaaaagagggtgg

SEQ ID NO: 869351 - DNA, 15 bp, Homo sapiens
tcggaaaagagggtg

SEQ ID NO: 869352 - DNA, 15 bp, Homo sapiens
ctcggaaaagagggt

SEQ ID NO: 869353 - DNA, 15 bp, Homo sapiens
gctcggaaaagaggg

SEQ ID NO: 869354 - DNA, 15 bp, Homo sapiens
agctcggaaaagagg

SEQ ID NO: 869355 - DNA, 15 bp, Homo sapiens
aagctcggaaaagag

SEQ ID NO: 869356 - DNA, 15 bp, Homo sapiens
gaagctcggaaaaga

SEQ ID NO: 869357 - DNA, 15 bp, Homo sapiens
tgaagctcggaaaag

SEQ ID NO: 869358 - DNA, 15 bp, Homo sapiens
ctgaagctcggaaaa

SEQ ID NO: 869359 - DNA, 15 bp, Homo sapiens
cctgaagctcggaaa

SEQ ID NO: 869360 - DNA, 15 bp, Homo sapiens
tcctgaagctcggaa

SEQ ID NO: 869361 - DNA, 15 bp, Homo sapiens
ctcctgaagctcgga

SEQ ID NO: 869362 - DNA, 15 bp, Homo sapiens
gctcctgaagctcgg

SEQ ID NO: 869363 - DNA, 15 bp, Homo sapiens
tgctcctgaagctcg

SEQ ID NO: 869364 - DNA, 15 bp, Homo sapiens
ctgctcctgaagctc

SEQ ID NO: 869365 - DNA, 15 bp, Homo sapiens
actgctcctgaagct

SEQ ID NO: 869366 - DNA, 15 bp, Homo sapiens
aactgctcctgaagc

SEQ ID NO: 869367 - DNA, 15 bp, Homo sapiens
caactgctcctgaag

SEQ ID NO: 869368 - DNA, 15 bp, Homo sapiens
acaactgctcctgaa

SEQ ID NO: 869369 - DNA, 15 bp, Homo sapiens
cacaactgctcctga

SEQ ID NO: 869370 - DNA, 15 bp, Homo sapiens
gcacaactgctcctg

SEQ ID NO: 869371 - DNA, 15 bp, Homo sapiens
cgcacaactgctcct

SEQ ID NO: 869372 - DNA, 15 bp, Homo sapiens
tcgcacaactgctcc

SEQ ID NO: 869373 - DNA, 15 bp, Homo sapiens
ttcgcacaactgctc

SEQ ID NO: 869374 - DNA, 15 bp, Homo sapiens
attcgcacaactgct

SEQ ID NO: 869375 - DNA, 15 bp, Homo sapiens
tattcgcacaactgc

SEQ ID NO: 869376 - DNA, 15 bp, Homo sapiens
ctattcgcacaactg

SEQ ID NO: 869377 - DNA, 15 bp, Homo sapiens
gctattcgcacaact

SEQ ID NO: 869378 - DNA, 15 bp, Homo sapiens
agctattcgcacaac

SEQ ID NO: 869379 - DNA, 15 bp, Homo sapiens
cagctattcgcacaa

SEQ ID NO: 869380 - DNA, 15 bp, Homo sapiens
ccagctattcgcaca

SEQ ID NO: 869381 - DNA, 15 bp, Homo sapiens
tccagctattcgcac

SEQ ID NO: 869382 - DNA, 15 bp, Homo sapiens
ctccagctattcgca

SEQ ID NO: 869383 - DNA, 15 bp, Homo sapiens
tctccagctattcgc

SEQ ID NO: 869384 - DNA, 15 bp, Homo sapiens
ttctccagctattcg

SEQ ID NO: 869385 - DNA, 15 bp, Homo sapiens
gttctccagctattc

SEQ ID NO: 869386 - DNA, 15 bp, Homo sapiens
tgttctccagctatt

SEQ ID NO: 869387 - DNA, 15 bp, Homo sapiens
gtgttctccagctat

SEQ ID NO: 869388 - DNA, 15 bp, Homo sapiens
ggtgttctccagcta

SEQ ID NO: 869389 - DNA, 15 bp, Homo sapiens
tggtgttctccagct

SEQ ID NO: 869390 - DNA, 15 bp, Homo sapiens
ctggtgttctccagc

SEQ ID NO: 869391 - DNA, 15 bp, Homo sapiens
cctggtgttctccag

SEQ ID NO: 869392 - DNA, 15 bp, Homo sapiens
gcctggtgttctcca

SEQ ID NO: 869393 - DNA, 15 bp, Homo sapiens
agcctggtgttctcc

SEQ ID NO: 869394 - DNA, 15 bp, Homo sapiens
cagcctggtgttctc

SEQ ID NO: 869395 - DNA, 15 bp, Homo sapiens
ccagcctggtgttct

SEQ ID NO: 869396 - DNA, 15 bp, Homo sapiens
tccagcctggtgttc

SEQ ID NO: 869397 - DNA, 15 bp, Homo sapiens
atccagcctggtgtt

SEQ ID NO: 869398 - DNA, 15 bp, Homo sapiens
aatccagcctggtgt

SEQ ID NO: 869399 - DNA, 15 bp, Homo sapiens
aaatccagcctggtg

SEQ ID NO: 869400 - DNA, 15 bp, Homo sapiens
taaatccagcctggt

SEQ ID NO: 869401 - DNA, 15 bp, Homo sapiens
ttaaatccagcctgg

SEQ ID NO: 869402 - DNA, 15 bp, Homo sapiens
tttaaatccagcctg

SEQ ID NO: 869403 - DNA, 15 bp, Homo sapiens
gtttaaatccagcct

SEQ ID NO: 869404 - DNA, 15 bp, Homo sapiens
ggtttaaatccagcc

SEQ ID NO: 869405 - DNA, 15 bp, Homo sapiens
gggtttaaatccagc

SEQ ID NO: 869406 - DNA, 15 bp, Homo sapiens
tgggtttaaatccag

SEQ ID NO: 869407 - DNA, 15 bp, Homo sapiens
ctgggtttaaatcca

SEQ ID NO: 869408 - DNA, 15 bp, Homo sapiens
tctgggtttaaatcc

SEQ ID NO: 869409 - DNA, 15 bp, Homo sapiens
atctgggtttaaatc

SEQ ID NO: 869410 - DNA, 15 bp, Homo sapiens
gatctgggtttaaat

SEQ ID NO: 869411 - DNA, 15 bp, Homo sapiens
cgatctgggtttaaa

SEQ ID NO: 869412 - DNA, 15 bp, Homo sapiens
gcgatctgggtttaa

SEQ ID NO: 869413 - DNA, 15 bp, Homo sapiens
agcgatctgggttta

SEQ ID NO: 869414 - DNA, 15 bp, Homo sapiens
gagcgatctgggttt

SEQ ID NO: 869415 - DNA, 15 bp, Homo sapiens
agagcgatctgggtt

SEQ ID NO: 869416 - DNA, 15 bp, Homo sapiens
aagagcgatctgggt

SEQ ID NO: 869417 - DNA, 15 bp, Homo sapiens
taagagcgatctggg

SEQ ID NO: 869418 - DNA, 15 bp, Homo sapiens
gtaagagcgatctgg

SEQ ID NO: 869419 - DNA, 15 bp, Homo sapiens
tgtaagagcgatctg

SEQ ID NO: 869420 - DNA, 15 bp, Homo sapiens
atgtaagagcgatct

SEQ ID NO: 869421 - DNA, 15 bp, Homo sapiens
aatgtaagagcgatc

SEQ ID NO: 869422 - DNA, 15 bp, Homo sapiens
aaatgtaagagcgat

SEQ ID NO: 869423 - DNA, 15 bp, Homo sapiens
caaatgtaagagcga

SEQ ID NO: 869424 - DNA, 15 bp, Homo sapiens
gcaaatgtaagagcg

SEQ ID NO: 869425 - DNA, 15 bp, Homo sapiens
agcaaatgtaagagc

SEQ ID NO: 869426 - DNA, 15 bp, Homo sapiens
gagcaaatgtaagag

SEQ ID NO: 869427 - DNA, 15 bp, Homo sapiens
agagcaaatgtaaga

SEQ ID NO: 869428 - DNA, 15 bp, Homo sapiens
aagagcaaatgtaag

SEQ ID NO: 869429 - DNA, 15 bp, Homo sapiens
aaagagcaaatgtaa

SEQ ID NO: 869430 - DNA, 15 bp, Homo sapiens
taaagagcaaatgta

SEQ ID NO: 869431 - DNA, 15 bp, Homo sapiens
gtaaagagcaaatgt

SEQ ID NO: 869432 - DNA, 15 bp, Homo sapiens
ggtaaagagcaaatg

SEQ ID NO: 869433 - DNA, 15 bp, Homo sapiens
aggtaaagagcaaat

SEQ ID NO: 869434 - DNA, 15 bp, Homo sapiens
caggtaaagagcaaa

SEQ ID NO: 869435 - DNA, 15 bp, Homo sapiens
gcaggtaaagagcaa

SEQ ID NO: 869436 - DNA, 15 bp, Homo sapiens
agcaggtaaagagca

SEQ ID NO: 869437 - DNA, 15 bp, Homo sapiens
cagcaggtaaagagc

SEQ ID NO: 869438 - DNA, 15 bp, Homo sapiens
acagcaggtaaagag

SEQ ID NO: 869439 - DNA, 15 bp, Homo sapiens
cacagcaggtaaaga

SEQ ID NO: 869440 - DNA, 15 bp, Homo sapiens
gcacagcaggtaaag

SEQ ID NO: 869441 - DNA, 15 bp, Homo sapiens
agcacagcaggtaaa

SEQ ID NO: 869442 - DNA, 15 bp, Homo sapiens
gagcacagcaggtaa

SEQ ID NO: 869443 - DNA, 15 bp, Homo sapiens
tgagcacagcaggta

SEQ ID NO: 869444 - DNA, 15 bp, Homo sapiens
ctgagcacagcaggt

SEQ ID NO: 869445 - DNA, 15 bp, Homo sapiens
gctgagcacagcagg

SEQ ID NO: 869446 - DNA, 15 bp, Homo sapiens
cgctgagcacagcag

SEQ ID NO: 869447 - DNA, 15 bp, Homo sapiens
acgctgagcacagca

SEQ ID NO: 869448 - DNA, 15 bp, Homo sapiens
aacgctgagcacagc

SEQ ID NO: 869449 - DNA, 15 bp, Homo sapiens
gaacgctgagcacag

SEQ ID NO: 869450 - DNA, 15 bp, Homo sapiens
tgaacgctgagcaca

SEQ ID NO: 869451 - DNA, 15 bp, Homo sapiens
gtgaacgctgagcac

SEQ ID NO: 869452 - DNA, 15 bp, Homo sapiens
cgtgaacgctgagca

SEQ ID NO: 869453 - DNA, 15 bp, Homo sapiens
acgtgaacgctgagc

SEQ ID NO: 869454 - DNA, 15 bp, Homo sapiens
cacgtgaacgctgag

SEQ ID NO: 869455 - DNA, 15 bp, Homo sapiens
gcacgtgaacgctga

SEQ ID NO: 869456 - DNA, 15 bp, Homo sapiens
ggcacgtgaacgctg

SEQ ID NO: 869457 - DNA, 15 bp, Homo sapiens
gggcacgtgaacgct

SEQ ID NO: 869458 - DNA, 15 bp, Homo sapiens
agggcacgtgaacgc

SEQ ID NO: 869459 - DNA, 15 bp, Homo sapiens
gagggcacgtgaacg

SEQ ID NO: 869460 - DNA, 15 bp, Homo sapiens
agagggcacgtgaac

SEQ ID NO: 869461 - DNA, 15 bp, Homo sapiens
tagagggcacgtgaa

SEQ ID NO: 869462 - DNA, 15 bp, Homo sapiens
ctagagggcacgtga

SEQ ID NO: 869463 - DNA, 15 bp, Homo sapiens
gctagagggcacgtg

SEQ ID NO: 869464 - DNA, 15 bp, Homo sapiens
agctagagggcacgt

SEQ ID NO: 869465 - DNA, 15 bp, Homo sapiens
cagctagagggcacg

SEQ ID NO: 869466 - DNA, 15 bp, Homo sapiens
acagctagagggcac

SEQ ID NO: 869467 - DNA, 15 bp, Homo sapiens
tacagctagagggca

SEQ ID NO: 869468 - DNA, 15 bp, Homo sapiens
ctacagctagagggc

SEQ ID NO: 869469 - DNA, 15 bp, Homo sapiens
actacagctagaggg

SEQ ID NO: 869470 - DNA, 15 bp, Homo sapiens
aactacagctagagg

SEQ ID NO: 869471 - DNA, 15 bp, Homo sapiens
aaactacagctagag

SEQ ID NO: 869472 - DNA, 15 bp, Homo sapiens
aaaactacagctaga

SEQ ID NO: 869473 - DNA, 15 bp, Homo sapiens
gaaaactacagctag

SEQ ID NO: 869474 - DNA, 15 bp, Homo sapiens
agaaaactacagcta

SEQ ID NO: 869475 - DNA, 15 bp, Homo sapiens
cagaaaactacagct

SEQ ID NO: 869476 - DNA, 15 bp, Homo sapiens
tcagaaaactacagc

SEQ ID NO: 869477 - DNA, 15 bp, Homo sapiens
ttcagaaaactacag

SEQ ID NO: 869478 - DNA, 15 bp, Homo sapiens
cttcagaaaactaca

SEQ ID NO: 869479 - DNA, 15 bp, Homo sapiens
acttcagaaaactac

SEQ ID NO: 869480 - DNA, 15 bp, Homo sapiens
gacttcagaaaacta

SEQ ID NO: 869481 - DNA, 15 bp, Homo sapiens
tgacttcagaaaact

SEQ ID NO: 869482 - DNA, 15 bp, Homo sapiens
ctgacttcagaaaac

SEQ ID NO: 869483 - DNA, 15 bp, Homo sapiens
gctgacttcagaaaa

SEQ ID NO: 869484 - DNA, 15 bp, Homo sapiens
cgctgacttcagaaa

SEQ ID NO: 869485 - DNA, 15 bp, Homo sapiens
gcgctgacttcagaa

SEQ ID NO: 869486 - DNA, 15 bp, Homo sapiens
tgcgctgacttcaga

SEQ ID NO: 869487 - DNA, 15 bp, Homo sapiens
gtgcgctgacttcag

SEQ ID NO: 869488 - DNA, 15 bp, Homo sapiens
tgtgcgctgacttca

SEQ ID NO: 869489 - DNA, 15 bp, Homo sapiens
ctgtgcgctgacttc

SEQ ID NO: 869490 - DNA, 15 bp, Homo sapiens
gctgtgcgctgactt

SEQ ID NO: 869491 - DNA, 15 bp, Homo sapiens
tgctgtgcgctgact

SEQ ID NO: 869492 - DNA, 15 bp, Homo sapiens
ttgctgtgcgctgac

SEQ ID NO: 869493 - DNA, 15 bp, Homo sapiens
cttgctgtgcgctga

SEQ ID NO: 869494 - DNA, 15 bp, Homo sapiens
ccttgctgtgcgctg

SEQ ID NO: 869495 - DNA, 15 bp, Homo sapiens
gccttgctgtgcgct

SEQ ID NO: 869496 - DNA, 15 bp, Homo sapiens
tgccttgctgtgcgc

SEQ ID NO: 869497 - DNA, 15 bp, Homo sapiens
ctgccttgctgtgcg

SEQ ID NO: 869498 - DNA, 15 bp, Homo sapiens
actgccttgctgtgc

SEQ ID NO: 869499 - DNA, 15 bp, Homo sapiens
cactgccttgctgtg

SEQ ID NO: 869500 - DNA, 15 bp, Homo sapiens
acactgccttgctgt

SEQ ID NO: 869501 - DNA, 15 bp, Homo sapiens
cacactgccttgctg

SEQ ID NO: 869502 - DNA, 15 bp, Homo sapiens
gcacactgccttgct

SEQ ID NO: 869503 - DNA, 15 bp, Homo sapiens
agcacactgccttgc

SEQ ID NO: 869504 - DNA, 15 bp, Homo sapiens
aagcacactgccttg

SEQ ID NO: 869505 - DNA, 15 bp, Homo sapiens
taagcacactgcctt

SEQ ID NO: 869506 - DNA, 15 bp, Homo sapiens
ctaagcacactgcct

SEQ ID NO: 869507 - DNA, 15 bp, Homo sapiens
tctaagcacactgcc

SEQ ID NO: 869508 - DNA, 15 bp, Homo sapiens
ctctaagcacactgc

SEQ ID NO: 869509 - DNA, 15 bp, Homo sapiens
cctctaagcacactg

SEQ ID NO: 869510 - DNA, 15 bp, Homo sapiens
acctctaagcacact

SEQ ID NO: 869511 - DNA, 15 bp, Homo sapiens
aacctctaagcacac

SEQ ID NO: 869512 - DNA, 15 bp, Homo sapiens
taacctctaagcaca

SEQ ID NO: 869513 - DNA, 15 bp, Homo sapiens
ttaacctctaagcac

SEQ ID NO: 869514 - DNA, 15 bp, Homo sapiens
gttaacctctaagca

SEQ ID NO: 869515 - DNA, 15 bp, Homo sapiens
tgttaacctctaagc

SEQ ID NO: 869516 - DNA, 15 bp, Homo sapiens
ctgttaacctctaag

SEQ ID NO: 869517 - DNA, 15 bp, Homo sapiens
tctgttaacctctaa

SEQ ID NO: 869518 - DNA, 15 bp, Homo sapiens
ttctgttaacctcta

SEQ ID NO: 869519 - DNA, 15 bp, Homo sapiens
cttctgttaacctct

SEQ ID NO: 869520 - DNA, 15 bp, Homo sapiens
ccttctgttaacctc

SEQ ID NO: 869521 - DNA, 15 bp, Homo sapiens
cccttctgttaacct

SEQ ID NO: 869522 - DNA, 15 bp, Homo sapiens
tcccttctgttaacc

SEQ ID NO: 869523 - DNA, 15 bp, Homo sapiens
ttcccttctgttaac

SEQ ID NO: 869524 - DNA, 15 bp, Homo sapiens
tttcccttctgttaa

SEQ ID NO: 869525 - DNA, 15 bp, Homo sapiens
ttttcccttctgtta

SEQ ID NO: 869526 - DNA, 15 bp, Homo sapiens
gttttcccttctgtt

SEQ ID NO: 869527 - DNA, 15 bp, Homo sapiens
tgttttcccttctgt

SEQ ID NO: 869528 - DNA, 15 bp, Homo sapiens
ttgttttcccttctg

SEQ ID NO: 869529 - DNA, 15 bp, Homo sapiens
gttgttttcccttct

SEQ ID NO: 869530 - DNA, 15 bp, Homo sapiens
tgttgttttcccttc

SEQ ID NO: 869531 - DNA, 15 bp, Homo sapiens
ttgttgttttccctt

SEQ ID NO: 869532 - DNA, 15 bp, Homo sapiens
gttgttgttttccct

SEQ ID NO: 869533 - DNA, 15 bp, Homo sapiens
tgttgttgttttccc

SEQ ID NO: 869534 - DNA, 15 bp, Homo sapiens
ttgttgttgttttcc

SEQ ID NO: 869535 - DNA, 15 bp, Homo sapiens
gttgttgttgttttc

SEQ ID NO: 869536 - DNA, 15 bp, Homo sapiens
tgttgttgttgtttt

SEQ ID NO: 869537 - DNA, 15 bp, Homo sapiens
ttgttgttgttgttt

SEQ ID NO: 869538 - DNA, 15 bp, Homo sapiens
tttgttgttgttgtt

SEQ ID NO: 869539 - DNA, 15 bp, Homo sapiens
ttttgttgttgttgt

SEQ ID NO: 869540 - DNA, 15 bp, Homo sapiens
tttttgttgttgttg

SEQ ID NO: 869541 - DNA, 15 bp, Homo sapiens
atttttgttgttgtt

SEQ ID NO: 869542 - DNA, 15 bp, Homo sapiens
gatttttgttgttgt

SEQ ID NO: 869543 - DNA, 15 bp, Homo sapiens
agatttttgttgttg

SEQ ID NO: 869544 - DNA, 15 bp, Homo sapiens
tagatttttgttgtt

SEQ ID NO: 869545 - DNA, 15 bp, Homo sapiens
ttagatttttgttgt

SEQ ID NO: 869546 - DNA, 15 bp, Homo sapiens
tttagatttttgttg

SEQ ID NO: 869547 - DNA, 15 bp, Homo sapiens
atttagatttttgtt

SEQ ID NO: 869548 - DNA, 15 bp, Homo sapiens
catttagatttttgt

SEQ ID NO: 869549 - DNA, 15 bp, Homo sapiens
tcatttagatttttg

SEQ ID NO: 869550 - DNA, 15 bp, Homo sapiens
ctcatttagattttt

SEQ ID NO: 869551 - DNA, 15 bp, Homo sapiens
tctcatttagatttt

SEQ ID NO: 869552 - DNA, 15 bp, Homo sapiens
ttctcatttagattt

SEQ ID NO: 869553 - DNA, 15 bp, Homo sapiens
attctcatttagatt

SEQ ID NO: 869554 - DNA, 15 bp, Homo sapiens
gattctcatttagat

SEQ ID NO: 869555 - DNA, 15 bp, Homo sapiens
ggattctcatttaga

SEQ ID NO: 869556 - DNA, 15 bp, Homo sapiens
aggattctcatttag

SEQ ID NO: 869557 - DNA, 15 bp, Homo sapiens
caggattctcattta

SEQ ID NO: 869558 - DNA, 15 bp, Homo sapiens
tcaggattctcattt

SEQ ID NO: 869559 - DNA, 15 bp, Homo sapiens
gtcaggattctcatt

SEQ ID NO: 869560 - DNA, 15 bp, Homo sapiens
agtcaggattctcat

SEQ ID NO: 869561 - DNA, 15 bp, Homo sapiens
cagtcaggattctca

SEQ ID NO: 869562 - DNA, 15 bp, Homo sapiens
acagtcaggattctc

SEQ ID NO: 869563 - DNA, 15 bp, Homo sapiens
aacagtcaggattct

SEQ ID NO: 869564 - DNA, 15 bp, Homo sapiens
aaacagtcaggattc

SEQ ID NO: 869565 - DNA, 15 bp, Homo sapiens
gaaacagtcaggatt

SEQ ID NO: 869566 - DNA, 15 bp, Homo sapiens
tgaaacagtcaggat

SEQ ID NO: 869567 - DNA, 15 bp, Homo sapiens
ctgaaacagtcagga

SEQ ID NO: 869568 - DNA, 15 bp, Homo sapiens
gctgaaacagtcagg

SEQ ID NO: 869569 - DNA, 15 bp, Homo sapiens
agctgaaacagtcag

SEQ ID NO: 869570 - DNA, 15 bp, Homo sapiens
cagctgaaacagtca

SEQ ID NO: 869571 - DNA, 15 bp, Homo sapiens
ccagctgaaacagtc

SEQ ID NO: 869572 - DNA, 15 bp, Homo sapiens
cccagctgaaacagt

SEQ ID NO: 869573 - DNA, 15 bp, Homo sapiens
ccccagctgaaacag

SEQ ID NO: 869574 - DNA, 15 bp, Homo sapiens
cccccagctgaaaca

SEQ ID NO: 869575 - DNA, 15 bp, Homo sapiens
acccccagctgaaac

SEQ ID NO: 869576 - DNA, 15 bp, Homo sapiens
tacccccagctgaaa

SEQ ID NO: 869577 - DNA, 15 bp, Homo sapiens
ttacccccagctgaa

SEQ ID NO: 869578 - DNA, 15 bp, Homo sapiens
cttacccccagctga

SEQ ID NO: 869579 - DNA, 15 bp, Homo sapiens
ccttacccccagctg

SEQ ID NO: 869580 - DNA, 15 bp, Homo sapiens
cccttacccccagct

SEQ ID NO: 869581 - DNA, 15 bp, Homo sapiens
ccccttacccccagc

SEQ ID NO: 869582 - DNA, 15 bp, Homo sapiens
cccccttacccccag

SEQ ID NO: 869583 - DNA, 15 bp, Homo sapiens
ccccccttaccccca

SEQ ID NO: 869584 - DNA, 15 bp, Homo sapiens
gccccccttaccccc

SEQ ID NO: 869585 - DNA, 15 bp, Homo sapiens
cgccccccttacccc

SEQ ID NO: 869586 - DNA, 15 bp, Homo sapiens
ccgccccccttaccc

SEQ ID NO: 869587 - DNA, 15 bp, Homo sapiens
tccgccccccttacc

SEQ ID NO: 869588 - DNA, 15 bp, Homo sapiens
atccgccccccttac

SEQ ID NO: 869589 - DNA, 15 bp, Homo sapiens
aatccgcccccctta

SEQ ID NO: 869590 - DNA, 15 bp, Homo sapiens
taatccgcccccctt

SEQ ID NO: 869591 - DNA, 15 bp, Homo sapiens
ataatccgcccccct

SEQ ID NO: 869592 - DNA, 15 bp, Homo sapiens
aataatccgcccccc

SEQ ID NO: 869593 - DNA, 15 bp, Homo sapiens
gaataatccgccccc

SEQ ID NO: 869594 - DNA, 15 bp, Homo sapiens
tgaataatccgcccc

SEQ ID NO: 869595 - DNA, 15 bp, Homo sapiens
atgaataatccgccc

SEQ ID NO: 869596 - DNA, 15 bp, Homo sapiens
tatgaataatccgcc

SEQ ID NO: 869597 - DNA, 15 bp, Homo sapiens
atatgaataatccgc

SEQ ID NO: 869598 - DNA, 15 bp, Homo sapiens
tatatgaataatccg

SEQ ID NO: 869599 - DNA, 15 bp, Homo sapiens
ttatatgaataatcc

SEQ ID NO: 869600 - DNA, 15 bp, Homo sapiens
attatatgaataatc

SEQ ID NO: 869601 - DNA, 15 bp, Homo sapiens
aattatatgaataat

SEQ ID NO: 869602 - DNA, 15 bp, Homo sapiens
caattatatgaataa

SEQ ID NO: 869603 - DNA, 15 bp, Homo sapiens
acaattatatgaata

SEQ ID NO: 869604 - DNA, 15 bp, Homo sapiens
aacaattatatgaat

SEQ ID NO: 869605 - DNA, 15 bp, Homo sapiens
taacaattatatgaa

SEQ ID NO: 869606 - DNA, 15 bp, Homo sapiens
ataacaattatatga

SEQ ID NO: 869607 - DNA, 15 bp, Homo sapiens
tataacaattatatg

SEQ ID NO: 869608 - DNA, 15 bp, Homo sapiens
gtataacaattatat

SEQ ID NO: 869609 - DNA, 15 bp, Homo sapiens
ggtataacaattata

SEQ ID NO: 869610 - DNA, 15 bp, Homo sapiens
tggtataacaattat

SEQ ID NO: 869611 - DNA, 15 bp, Homo sapiens
ctggtataacaatta

SEQ ID NO: 869612 - DNA, 15 bp, Homo sapiens
tctggtataacaatt

SEQ ID NO: 869613 - DNA, 15 bp, Homo sapiens
gtctggtataacaat

SEQ ID NO: 869614 - DNA, 15 bp, Homo sapiens
cgtctggtataacaa

SEQ ID NO: 869615 - DNA, 15 bp, Homo sapiens
ccgtctggtataaca

SEQ ID NO: 869616 - DNA, 15 bp, Homo sapiens
accgtctggtataac

SEQ ID NO: 869617 - DNA, 15 bp, Homo sapiens
gaccgtctggtataa

SEQ ID NO: 869618 - DNA, 15 bp, Homo sapiens
cgaccgtctggtata

SEQ ID NO: 869619 - DNA, 15 bp, Homo sapiens
gcgaccgtctggtat

SEQ ID NO: 869620 - DNA, 15 bp, Homo sapiens
tgcgaccgtctggta

SEQ ID NO: 869621 - DNA, 15 bp, Homo sapiens
ctgcgaccgtctggt

SEQ ID NO: 869622 - DNA, 15 bp, Homo sapiens
cctgcgaccgtctgg

SEQ ID NO: 869623 - DNA, 15 bp, Homo sapiens
gcctgcgaccgtctg

SEQ ID NO: 869624 - DNA, 15 bp, Homo sapiens
agcctgcgaccgtct

SEQ ID NO: 869625 - DNA, 15 bp, Homo sapiens
aagcctgcgaccgtc

SEQ ID NO: 869626 - DNA, 15 bp, Homo sapiens
taagcctgcgaccgt

SEQ ID NO: 869627 - DNA, 15 bp, Homo sapiens
ctaagcctgcgaccg

SEQ ID NO: 869628 - DNA, 15 bp, Homo sapiens
actaagcctgcgacc

SEQ ID NO: 869629 - DNA, 15 bp, Homo sapiens
gactaagcctgcgac

SEQ ID NO: 869630 - DNA, 15 bp, Homo sapiens
ggactaagcctgcga

SEQ ID NO: 869631 - DNA, 15 bp, Homo sapiens
tggactaagcctgcg

SEQ ID NO: 869632 - DNA, 15 bp, Homo sapiens
ttggactaagcctgc

SEQ ID NO: 869633 - DNA, 15 bp, Homo sapiens
attggactaagcctg

SEQ ID NO: 869634 - DNA, 15 bp, Homo sapiens
aattggactaagcct

SEQ ID NO: 869635 - DNA, 15 bp, Homo sapiens
caattggactaagcc

SEQ ID NO: 869636 - DNA, 15 bp, Homo sapiens
gcaattggactaagc

SEQ ID NO: 869637 - DNA, 15 bp, Homo sapiens
tgcaattggactaag

SEQ ID NO: 869638 - DNA, 15 bp, Homo sapiens
ctgcaattggactaa

SEQ ID NO: 869639 - DNA, 15 bp, Homo sapiens
tctgcaattggacta

SEQ ID NO: 869640 - DNA, 15 bp, Homo sapiens
ctctgcaattggact

SEQ ID NO: 869641 - DNA, 15 bp, Homo sapiens
tctctgcaattggac

SEQ ID NO: 869642 - DNA, 15 bp, Homo sapiens
ttctctgcaattgga

SEQ ID NO: 869643 - DNA, 15 bp, Homo sapiens
gttctctgcaattgg

SEQ ID NO: 869644 - DNA, 15 bp, Homo sapiens
agttctctgcaattg

SEQ ID NO: 869645 - DNA, 15 bp, Homo sapiens
gagttctctgcaatt

SEQ ID NO: 869646 - DNA, 15 bp, Homo sapiens
cgagttctctgcaat

SEQ ID NO: 869647 - DNA, 15 bp, Homo sapiens
gcgagttctctgcaa

SEQ ID NO: 869648 - DNA, 15 bp, Homo sapiens
agcgagttctctgca

SEQ ID NO: 869649 - DNA, 15 bp, Homo sapiens
aagcgagttctctgc

SEQ ID NO: 869650 - DNA, 15 bp, Homo sapiens
gaagcgagttctctg

SEQ ID NO: 869651 - DNA, 15 bp, Homo sapiens
ggaagcgagttctct

SEQ ID NO: 869652 - DNA, 15 bp, Homo sapiens
gggaagcgagttctc

SEQ ID NO: 869653 - DNA, 15 bp, Homo sapiens
tgggaagcgagttct

SEQ ID NO: 869654 - DNA, 15 bp, Homo sapiens
ctgggaagcgagttc

SEQ ID NO: 869655 - DNA, 15 bp, Homo sapiens
cctgggaagcgagtt

SEQ ID NO: 869656 - DNA, 15 bp, Homo sapiens
gcctgggaagcgagt

SEQ ID NO: 869657 - DNA, 15 bp, Homo sapiens
agcctgggaagcgag

SEQ ID NO: 869658 - DNA, 15 bp, Homo sapiens
aagcctgggaagcga

SEQ ID NO: 869659 - DNA, 15 bp, Homo sapiens
gaagcctgggaagcg

SEQ ID NO: 869660 - DNA, 15 bp, Homo sapiens
agaagcctgggaagc

SEQ ID NO: 869661 - DNA, 15 bp, Homo sapiens
cagaagcctgggaag

SEQ ID NO: 869662 - DNA, 15 bp, Homo sapiens
tcagaagcctgggaa

SEQ ID NO: 869663 - DNA, 15 bp, Homo sapiens
ctcagaagcctggga

SEQ ID NO: 869664 - DNA, 15 bp, Homo sapiens
tctcagaagcctggg

SEQ ID NO: 869665 - DNA, 15 bp, Homo sapiens
ctctcagaagcctgg

SEQ ID NO: 869666 - DNA, 15 bp, Homo sapiens
actctcagaagcctg

SEQ ID NO: 869667 - DNA, 15 bp, Homo sapiens
gactctcagaagcct

SEQ ID NO: 869668 - DNA, 15 bp, Homo sapiens
ggactctcagaagcc

SEQ ID NO: 869669 - DNA, 15 bp, Homo sapiens
gggactctcagaagc

SEQ ID NO: 869670 - DNA, 15 bp, Homo sapiens
cgggactctcagaag

SEQ ID NO: 869671 - DNA, 15 bp, Homo sapiens
ccgggactctcagaa

SEQ ID NO: 869672 - DNA, 15 bp, Homo sapiens
tccgggactctcaga

SEQ ID NO: 869673 - DNA, 15 bp, Homo sapiens
ttccgggactctcag

SEQ ID NO: 869674 - DNA, 15 bp, Homo sapiens
cttccgggactctca

SEQ ID NO: 869675 - DNA, 15 bp, Homo sapiens
acttccgggactctc

SEQ ID NO: 869676 - DNA, 15 bp, Homo sapiens
cacttccgggactct

SEQ ID NO: 869677 - DNA, 15 bp, Homo sapiens
gcacttccgggactc

SEQ ID NO: 869678 - DNA, 15 bp, Homo sapiens
ggcacttccgggact

SEQ ID NO: 869679 - DNA, 15 bp, Homo sapiens
aggcacttccgggac

SEQ ID NO: 869680 - DNA, 15 bp, Homo sapiens
taggcacttccggga

SEQ ID NO: 869681 - DNA, 15 bp, Homo sapiens
ttaggcacttccggg

SEQ ID NO: 869682 - DNA, 15 bp, Homo sapiens
tttaggcacttccgg

SEQ ID NO: 869683 - DNA, 15 bp, Homo sapiens
gtttaggcacttccg

SEQ ID NO: 869684 - DNA, 15 bp, Homo sapiens
ggtttaggcacttcc

SEQ ID NO: 869685 - DNA, 15 bp, Homo sapiens
aggtttaggcacttc

SEQ ID NO: 869686 - DNA, 15 bp, Homo sapiens
caggtttaggcactt

SEQ ID NO: 869687 - DNA, 15 bp, Homo sapiens
acaggtttaggcact

SEQ ID NO: 869688 - DNA, 15 bp, Homo sapiens
gacaggtttaggcac

SEQ ID NO: 869689 - DNA, 15 bp, Homo sapiens
agacaggtttaggca

SEQ ID NO: 869690 - DNA, 15 bp, Homo sapiens
tagacaggtttaggc

SEQ ID NO: 869691 - DNA, 15 bp, Homo sapiens
ttagacaggtttagg

SEQ ID NO: 869692 - DNA, 15 bp, Homo sapiens
attagacaggtttag

SEQ ID NO: 869693 - DNA, 15 bp, Homo sapiens
gattagacaggttta

SEQ ID NO: 869694 - DNA, 15 bp, Homo sapiens
cgattagacaggttt

SEQ ID NO: 869695 - DNA, 15 bp, Homo sapiens
tcgattagacaggtt

SEQ ID NO: 869696 - DNA, 15 bp, Homo sapiens
gtcgattagacaggt

SEQ ID NO: 869697 - DNA, 15 bp, Homo sapiens
cgtcgattagacagg

SEQ ID NO: 869698 - DNA, 15 bp, Homo sapiens
ccgtcgattagacag

SEQ ID NO: 869699 - DNA, 15 bp, Homo sapiens
cccgtcgattagaca

SEQ ID NO: 869700 - DNA, 15 bp, Homo sapiens
ccccgtcgattagac

SEQ ID NO: 869701 - DNA, 15 bp, Homo sapiens
gccccgtcgattaga

SEQ ID NO: 869702 - DNA, 15 bp, Homo sapiens
agccccgtcgattag

SEQ ID NO: 869703 - DNA, 15 bp, Homo sapiens
aagccccgtcgatta

SEQ ID NO: 869704 - DNA, 15 bp, Homo sapiens
caagccccgtcgatt

SEQ ID NO: 869705 - DNA, 15 bp, Homo sapiens
ccaagccccgtcgat

SEQ ID NO: 869706 - DNA, 15 bp, Homo sapiens
cccaagccccgtcga

SEQ ID NO: 869707 - DNA, 15 bp, Homo sapiens
acccaagccccgtcg

SEQ ID NO: 869708 - DNA, 15 bp, Homo sapiens
cacccaagccccgtc

SEQ ID NO: 869709 - DNA, 15 bp, Homo sapiens
ccacccaagccccgt

SEQ ID NO: 869710 - DNA, 15 bp, Homo sapiens
gccacccaagccccg

SEQ ID NO: 869711 - DNA, 15 bp, Homo sapiens
ggccacccaagcccc

SEQ ID NO: 869712 - DNA, 15 bp, Homo sapiens
gggccacccaagccc

SEQ ID NO: 869713 - DNA, 15 bp, Homo sapiens
cgggccacccaagcc

SEQ ID NO: 869714 - DNA, 15 bp, Homo sapiens
acgggccacccaagc

SEQ ID NO: 869715 - DNA, 15 bp, Homo sapiens
gacgggccacccaag

SEQ ID NO: 869716 - DNA, 15 bp, Homo sapiens
cgacgggccacccaa

SEQ ID NO: 869717 - DNA, 15 bp, Homo sapiens
gcgacgggccaccca

SEQ ID NO: 869718 - DNA, 15 bp, Homo sapiens
agcgacgggccaccc

SEQ ID NO: 869719 - DNA, 15 bp, Homo sapiens
gagcgacgggccacc

SEQ ID NO: 869720 - DNA, 15 bp, Homo sapiens
ggagcgacgggccac

SEQ ID NO: 869721 - DNA, 15 bp, Homo sapiens
gggagcgacgggcca

SEQ ID NO: 869722 - DNA, 15 bp, Homo sapiens
agggagcgacgggcc

SEQ ID NO: 869723 - DNA, 15 bp, Homo sapiens
cagggagcgacgggc

SEQ ID NO: 869724 - DNA, 15 bp, Homo sapiens
ccagggagcgacggg

SEQ ID NO: 869725 - DNA, 15 bp, Homo sapiens
gccagggagcgacgg

SEQ ID NO: 869726 - DNA, 15 bp, Homo sapiens
agccagggagcgacg

SEQ ID NO: 869727 - DNA, 15 bp, Homo sapiens
aagccagggagcgac

SEQ ID NO: 869728 - DNA, 15 bp, Homo sapiens
gaagccagggagcga

SEQ ID NO: 869729 - DNA, 15 bp, Homo sapiens
agaagccagggagcg

SEQ ID NO: 869730 - DNA, 15 bp, Homo sapiens
aagaagccagggagc

SEQ ID NO: 869731 - DNA, 15 bp, Homo sapiens
gaagaagccagggag

SEQ ID NO: 869732 - DNA, 15 bp, Homo sapiens
ggaagaagccaggga

SEQ ID NO: 869733 - DNA, 15 bp, Homo sapiens
gggaagaagccaggg

SEQ ID NO: 869734 - DNA, 15 bp, Homo sapiens
agggaagaagccagg

SEQ ID NO: 869735 - DNA, 15 bp, Homo sapiens
aagggaagaagccag

SEQ ID NO: 869736 - DNA, 15 bp, Homo sapiens
aaagggaagaagcca

SEQ ID NO: 869737 - DNA, 15 bp, Homo sapiens
taaagggaagaagcc

SEQ ID NO: 869738 - DNA, 15 bp, Homo sapiens
gtaaagggaagaagc

SEQ ID NO: 869739 - DNA, 15 bp, Homo sapiens
ggtaaagggaagaag

SEQ ID NO: 869740 - DNA, 15 bp, Homo sapiens
gggtaaagggaagaa

SEQ ID NO: 869741 - DNA, 15 bp, Homo sapiens
tgggtaaagggaaga

SEQ ID NO: 869742 - DNA, 15 bp, Homo sapiens
ctgggtaaagggaag

SEQ ID NO: 869743 - DNA, 15 bp, Homo sapiens
cctgggtaaagggaa

SEQ ID NO: 869744 - DNA, 15 bp, Homo sapiens
ccctgggtaaaggga

SEQ ID NO: 869745 - DNA, 15 bp, Homo sapiens
gccctgggtaaaggg

SEQ ID NO: 869746 - DNA, 15 bp, Homo sapiens
cgccctgggtaaagg

SEQ ID NO: 869747 - DNA, 15 bp, Homo sapiens
ccgccctgggtaaag

SEQ ID NO: 869748 - DNA, 15 bp, Homo sapiens
cccgccctgggtaaa

SEQ ID NO: 869749 - DNA, 15 bp, Homo sapiens
gcccgccctgggtaa

SEQ ID NO: 869750 - DNA, 15 bp, Homo sapiens
tgcccgccctgggta

SEQ ID NO: 869751 - DNA, 15 bp, Homo sapiens
ctgcccgccctgggt

SEQ ID NO: 869752 - DNA, 15 bp, Homo sapiens
gctgcccgccctggg

SEQ ID NO: 869753 - DNA, 15 bp, Homo sapiens
cgctgcccgccctgg

SEQ ID NO: 869754 - DNA, 15 bp, Homo sapiens
tcgctgcccgccctg

SEQ ID NO: 869755 - DNA, 15 bp, Homo sapiens
ttcgctgcccgccct

SEQ ID NO: 869756 - DNA, 15 bp, Homo sapiens
cttcgctgcccgccc

SEQ ID NO: 869757 - DNA, 15 bp, Homo sapiens
acttcgctgcccgcc

SEQ ID NO: 869758 - DNA, 15 bp, Homo sapiens
cacttcgctgcccgc

SEQ ID NO: 869759 - DNA, 15 bp, Homo sapiens
ccacttcgctgcccg

SEQ ID NO: 869760 - DNA, 15 bp, Homo sapiens
accacttcgctgccc

SEQ ID NO: 869761 - DNA, 15 bp, Homo sapiens
caccacttcgctgcc

SEQ ID NO: 869762 - DNA, 15 bp, Homo sapiens
gcaccacttcgctgc

SEQ ID NO: 869763 - DNA, 15 bp, Homo sapiens
ggcaccacttcgctg

SEQ ID NO: 869764 - DNA, 15 bp, Homo sapiens
aggcaccacttcgct

SEQ ID NO: 869765 - DNA, 15 bp, Homo sapiens
gaggcaccacttcgc

SEQ ID NO: 869766 - DNA, 15 bp, Homo sapiens
ggaggcaccacttcg

SEQ ID NO: 869767 - DNA, 15 bp, Homo sapiens
aggaggcaccacttc

SEQ ID NO: 869768 - DNA, 15 bp, Homo sapiens
caggaggcaccactt

SEQ ID NO: 869769 - DNA, 15 bp, Homo sapiens
gcaggaggcaccact

SEQ ID NO: 869770 - DNA, 15 bp, Homo sapiens
cgcaggaggcaccac

SEQ ID NO: 869771 - DNA, 15 bp, Homo sapiens
acgcaggaggcacca

SEQ ID NO: 869772 - DNA, 15 bp, Homo sapiens
gacgcaggaggcacc

SEQ ID NO: 869773 - DNA, 15 bp, Homo sapiens
ggacgcaggaggcac

SEQ ID NO: 869774 - DNA, 15 bp, Homo sapiens
gggacgcaggaggca

SEQ ID NO: 869775 - DNA, 15 bp, Homo sapiens
ggggacgcaggaggc

SEQ ID NO: 869776 - DNA, 15 bp, Homo sapiens
gggggacgcaggagg

SEQ ID NO: 869777 - DNA, 15 bp, Homo sapiens
tgggggacgcaggag

SEQ ID NO: 869778 - DNA, 15 bp, Homo sapiens
gtgggggacgcagga

SEQ ID NO: 869779 - DNA, 15 bp, Homo sapiens
tgtgggggacgcagg

SEQ ID NO: 869780 - DNA, 15 bp, Homo sapiens
gtgtgggggacgcag

SEQ ID NO: 869781 - DNA, 15 bp, Homo sapiens
ggtgtgggggacgca

SEQ ID NO: 869782 - DNA, 15 bp, Homo sapiens
gggtgtgggggacgc

SEQ ID NO: 869783 - DNA, 15 bp, Homo sapiens
agggtgtgggggacg

SEQ ID NO: 869784 - DNA, 15 bp, Homo sapiens
gagggtgtgggggac

SEQ ID NO: 869785 - DNA, 15 bp, Homo sapiens
ggagggtgtggggga

SEQ ID NO: 869786 - DNA, 15 bp, Homo sapiens
gggagggtgtggggg

SEQ ID NO: 869787 - DNA, 15 bp, Homo sapiens
agggagggtgtgggg

SEQ ID NO: 869788 - DNA, 15 bp, Homo sapiens
gagggagggtgtggg

SEQ ID NO: 869789 - DNA, 15 bp, Homo sapiens
tgagggagggtgtgg

SEQ ID NO: 869790 - DNA, 15 bp, Homo sapiens
ctgagggagggtgtg

SEQ ID NO: 869791 - DNA, 15 bp, Homo sapiens
gctgagggagggtgt

SEQ ID NO: 869792 - DNA, 15 bp, Homo sapiens
ggctgagggagggtg

SEQ ID NO: 869793 - DNA, 15 bp, Homo sapiens
gggctgagggagggt

SEQ ID NO: 869794 - DNA, 15 bp, Homo sapiens
ggggctgagggaggg

SEQ ID NO: 869795 - DNA, 15 bp, Homo sapiens
aggggctgagggagg

SEQ ID NO: 869796 - DNA, 15 bp, Homo sapiens
gaggggctgagggag

SEQ ID NO: 869797 - DNA, 15 bp, Homo sapiens
ggaggggctgaggga

SEQ ID NO: 869798 - DNA, 15 bp, Homo sapiens
gggaggggctgaggg

SEQ ID NO: 869799 - DNA, 15 bp, Homo sapiens
ggggaggggctgagg

SEQ ID NO: 869800 - DNA, 15 bp, Homo sapiens
aggggaggggctgag

SEQ ID NO: 869801 - DNA, 15 bp, Homo sapiens
gaggggaggggctga

SEQ ID NO: 869802 - DNA, 15 bp, Homo sapiens
ggaggggaggggctg

SEQ ID NO: 869803 - DNA, 15 bp, Homo sapiens
cggaggggaggggct

SEQ ID NO: 869804 - DNA, 15 bp, Homo sapiens
ccggaggggaggggc

SEQ ID NO: 869805 - DNA, 15 bp, Homo sapiens
gccggaggggagggg

SEQ ID NO: 869806 - DNA, 15 bp, Homo sapiens
ggccggaggggaggg

SEQ ID NO: 869807 - DNA, 15 bp, Homo sapiens
gggccggaggggagg

SEQ ID NO: 869808 - DNA, 15 bp, Homo sapiens
cgggccggaggggag

SEQ ID NO: 869809 - DNA, 15 bp, Homo sapiens
acgggccggagggga

SEQ ID NO: 869810 - DNA, 15 bp, Homo sapiens
gacgggccggagggg

SEQ ID NO: 869811 - DNA, 15 bp, Homo sapiens
ggacgggccggaggg

SEQ ID NO: 869812 - DNA, 15 bp, Homo sapiens
aggacgggccggagg

SEQ ID NO: 869813 - DNA, 15 bp, Homo sapiens
caggacgggccggag

SEQ ID NO: 869814 - DNA, 15 bp, Homo sapiens
ccaggacgggccgga

SEQ ID NO: 869815 - DNA, 15 bp, Homo sapiens
cccaggacgggccgg

SEQ ID NO: 869816 - DNA, 15 bp, Homo sapiens
gcccaggacgggccg

SEQ ID NO: 869817 - DNA, 15 bp, Homo sapiens
tgcccaggacgggcc

SEQ ID NO: 869818 - DNA, 15 bp, Homo sapiens
ctgcccaggacgggc

SEQ ID NO: 869819 - DNA, 15 bp, Homo sapiens
cctgcccaggacggg

SEQ ID NO: 869820 - DNA, 15 bp, Homo sapiens
acctgcccaggacgg

SEQ ID NO: 869821 - DNA, 15 bp, Homo sapiens
cacctgcccaggacg

SEQ ID NO: 869822 - DNA, 15 bp, Homo sapiens
tcacctgcccaggac

SEQ ID NO: 869823 - DNA, 15 bp, Homo sapiens
gtcacctgcccagga

SEQ ID NO: 869824 - DNA, 15 bp, Homo sapiens
ggtcacctgcccagg

SEQ ID NO: 869825 - DNA, 15 bp, Homo sapiens
aggtcacctgcccag

SEQ ID NO: 869826 - DNA, 15 bp, Homo sapiens
caggtcacctgccca

SEQ ID NO: 869827 - DNA, 15 bp, Homo sapiens
ccaggtcacctgccc

SEQ ID NO: 869828 - DNA, 15 bp, Homo sapiens
tccaggtcacctgcc

SEQ ID NO: 869829 - DNA, 15 bp, Homo sapiens
ctccaggtcacctgc

SEQ ID NO: 869830 - DNA, 15 bp, Homo sapiens
gctccaggtcacctg

SEQ ID NO: 869831 - DNA, 15 bp, Homo sapiens
tgctccaggtcacct

SEQ ID NO: 869832 - DNA, 15 bp, Homo sapiens
atgctccaggtcacc

SEQ ID NO: 869833 - DNA, 15 bp, Homo sapiens
gatgctccaggtcac

SEQ ID NO: 869834 - DNA, 15 bp, Homo sapiens
ggatgctccaggtca

SEQ ID NO: 869835 - DNA, 15 bp, Homo sapiens
cggatgctccaggtc

SEQ ID NO: 869836 - DNA, 15 bp, Homo sapiens
ccggatgctccaggt

SEQ ID NO: 869837 - DNA, 15 bp, Homo sapiens
gccggatgctccagg

SEQ ID NO: 869838 - DNA, 15 bp, Homo sapiens
tgccggatgctccag

SEQ ID NO: 869839 - DNA, 15 bp, Homo sapiens
ctgccggatgctcca

SEQ ID NO: 869840 - DNA, 15 bp, Homo sapiens
cctgccggatgctcc

SEQ ID NO: 869841 - DNA, 15 bp, Homo sapiens
gcctgccggatgctc

SEQ ID NO: 869842 - DNA, 15 bp, Homo sapiens
agcctgccggatgct

SEQ ID NO: 869843 - DNA, 15 bp, Homo sapiens
cagcctgccggatgc

SEQ ID NO: 869844 - DNA, 15 bp, Homo sapiens
gcagcctgccggatg

SEQ ID NO: 869845 - DNA, 15 bp, Homo sapiens
ggcagcctgccggat

SEQ ID NO: 869846 - DNA, 15 bp, Homo sapiens
gggcagcctgccgga

SEQ ID NO: 869847 - DNA, 15 bp, Homo sapiens
agggcagcctgccgg

SEQ ID NO: 869848 - DNA, 15 bp, Homo sapiens
cagggcagcctgccg

SEQ ID NO: 869849 - DNA, 15 bp, Homo sapiens
ccagggcagcctgcc

SEQ ID NO: 869850 - DNA, 15 bp, Homo sapiens
gccagggcagcctgc

SEQ ID NO: 869851 - DNA, 15 bp, Homo sapiens
ggccagggcagcctg

SEQ ID NO: 869852 - DNA, 15 bp, Homo sapiens
aggccagggcagcct

SEQ ID NO: 869853 - DNA, 15 bp, Homo sapiens
gaggccagggcagcc

SEQ ID NO: 869854 - DNA, 15 bp, Homo sapiens
ggaggccagggcagc

SEQ ID NO: 869855 - DNA, 15 bp, Homo sapiens
aggaggccagggcag

SEQ ID NO: 869856 - DNA, 15 bp, Homo sapiens
caggaggccagggca

SEQ ID NO: 869857 - DNA, 15 bp, Homo sapiens
gcaggaggccagggc

SEQ ID NO: 869858 - DNA, 15 bp, Homo sapiens
cgcaggaggccaggg

SEQ ID NO: 869859 - DNA, 15 bp, Homo sapiens
acgcaggaggccagg

SEQ ID NO: 869860 - DNA, 15 bp, Homo sapiens
gacgcaggaggccag

SEQ ID NO: 869861 - DNA, 15 bp, Homo sapiens
tgacgcaggaggcca

SEQ ID NO: 869862 - DNA, 15 bp, Homo sapiens
ctgacgcaggaggcc

SEQ ID NO: 869863 - DNA, 15 bp, Homo sapiens
cctgacgcaggaggc

SEQ ID NO: 869864 - DNA, 15 bp, Homo sapiens
tcctgacgcaggagg

SEQ ID NO: 869865 - DNA, 15 bp, Homo sapiens
gtcctgacgcaggag

SEQ ID NO: 869866 - DNA, 15 bp, Homo sapiens
tgtcctgacgcagga

SEQ ID NO: 869867 - DNA, 15 bp, Homo sapiens
ttgtcctgacgcagg

SEQ ID NO: 869868 - DNA, 15 bp, Homo sapiens
gttgtcctgacgcag

SEQ ID NO: 869869 - DNA, 15 bp, Homo sapiens
cgttgtcctgacgca

SEQ ID NO: 869870 - DNA, 15 bp, Homo sapiens
gcgttgtcctgacgc

SEQ ID NO: 869871 - DNA, 15 bp, Homo sapiens
ggcgttgtcctgacg

SEQ ID NO: 869872 - DNA, 15 bp, Homo sapiens
gggcgttgtcctgac

SEQ ID NO: 869873 - DNA, 15 bp, Homo sapiens
tgggcgttgtcctga

SEQ ID NO: 869874 - DNA, 15 bp, Homo sapiens
gtgggcgttgtcctg

SEQ ID NO: 869875 - DNA, 15 bp, Homo sapiens
cgtgggcgttgtcct

SEQ ID NO: 869876 - DNA, 15 bp, Homo sapiens
tcgtgggcgttgtcc

SEQ ID NO: 869877 - DNA, 15 bp, Homo sapiens
ctcgtgggcgttgtc

SEQ ID NO: 869878 - DNA, 15 bp, Homo sapiens
cctcgtgggcgttgt

SEQ ID NO: 869879 - DNA, 15 bp, Homo sapiens
ccctcgtgggcgttg

SEQ ID NO: 869880 - DNA, 15 bp, Homo sapiens
cccctcgtgggcgtt

SEQ ID NO: 869881 - DNA, 15 bp, Homo sapiens
gcccctcgtgggcgt

SEQ ID NO: 869882 - DNA, 15 bp, Homo sapiens
cgcccctcgtgggcg

SEQ ID NO: 869883 - DNA, 15 bp, Homo sapiens
acgcccctcgtgggc

SEQ ID NO: 869884 - DNA, 15 bp, Homo sapiens
aacgcccctcgtggg

SEQ ID NO: 869885 - DNA, 15 bp, Homo sapiens
taacgcccctcgtgg

SEQ ID NO: 869886 - DNA, 15 bp, Homo sapiens
gtaacgcccctcgtg

SEQ ID NO: 869887 - DNA, 15 bp, Homo sapiens
agtaacgcccctcgt

SEQ ID NO: 869888 - DNA, 15 bp, Homo sapiens
cagtaacgcccctcg

SEQ ID NO: 869889 - DNA, 15 bp, Homo sapiens
acagtaacgcccctc

SEQ ID NO: 869890 - DNA, 15 bp, Homo sapiens
cacagtaacgcccct

SEQ ID NO: 869891 - DNA, 15 bp, Homo sapiens
gcacagtaacgcccc

SEQ ID NO: 869892 - DNA, 15 bp, Homo sapiens
cgcacagtaacgccc

SEQ ID NO: 869893 - DNA, 15 bp, Homo sapiens
ccgcacagtaacgcc

SEQ ID NO: 869894 - DNA, 15 bp, Homo sapiens
tccgcacagtaacgc

SEQ ID NO: 869895 - DNA, 15 bp, Homo sapiens
ctccgcacagtaacg

SEQ ID NO: 869896 - DNA, 15 bp, Homo sapiens
tctccgcacagtaac

SEQ ID NO: 869897 - DNA, 15 bp, Homo sapiens
atctccgcacagtaa

SEQ ID NO: 869898 - DNA, 15 bp, Homo sapiens
catctccgcacagta

SEQ ID NO: 869899 - DNA, 15 bp, Homo sapiens
gcatctccgcacagt

SEQ ID NO: 869900 - DNA, 15 bp, Homo sapiens
tgcatctccgcacag

SEQ ID NO: 869901 - DNA, 15 bp, Homo sapiens
gtgcatctccgcaca

SEQ ID NO: 869902 - DNA, 15 bp, Homo sapiens
ggtgcatctccgcac

SEQ ID NO: 869903 - DNA, 15 bp, Homo sapiens
tggtgcatctccgca

SEQ ID NO: 869904 - DNA, 15 bp, Homo sapiens
gtggtgcatctccgc

SEQ ID NO: 869905 - DNA, 15 bp, Homo sapiens
cgtggtgcatctccg

SEQ ID NO: 869906 - DNA, 15 bp, Homo sapiens
gcgtggtgcatctcc

SEQ ID NO: 869907 - DNA, 15 bp, Homo sapiens
tgcgtggtgcatctc

SEQ ID NO: 869908 - DNA, 15 bp, Homo sapiens
ttgcgtggtgcatct

SEQ ID NO: 869909 - DNA, 15 bp, Homo sapiens
cttgcgtggtgcatc

SEQ ID NO: 869910 - DNA, 15 bp, Homo sapiens
tcttgcgtggtgcat

SEQ ID NO: 869911 - DNA, 15 bp, Homo sapiens
ctcttgcgtggtgca

SEQ ID NO: 869912 - DNA, 15 bp, Homo sapiens
tctcttgcgtggtgc

SEQ ID NO: 869913 - DNA, 15 bp, Homo sapiens
gtctcttgcgtggtg

SEQ ID NO: 869914 - DNA, 15 bp, Homo sapiens
tgtctcttgcgtggt

SEQ ID NO: 869915 - DNA, 15 bp, Homo sapiens
gtgtctcttgcgtgg

SEQ ID NO: 869916 - DNA, 15 bp, Homo sapiens
ggtgtctcttgcgtg

SEQ ID NO: 869917 - DNA, 15 bp, Homo sapiens
gggtgtctcttgcgt

SEQ ID NO: 869918 - DNA, 15 bp, Homo sapiens
agggtgtctcttgcg

SEQ ID NO: 869919 - DNA, 15 bp, Homo sapiens
aagggtgtctcttgc

SEQ ID NO: 869920 - DNA, 15 bp, Homo sapiens
aaagggtgtctcttg

SEQ ID NO: 869921 - DNA, 15 bp, Homo sapiens
caaagggtgtctctt

SEQ ID NO: 869922 - DNA, 15 bp, Homo sapiens
acaaagggtgtctct

SEQ ID NO: 869923 - DNA, 15 bp, Homo sapiens
tacaaagggtgtctc

SEQ ID NO: 869924 - DNA, 15 bp, Homo sapiens
ttacaaagggtgtct

SEQ ID NO: 869925 - DNA, 15 bp, Homo sapiens
gttacaaagggtgtc

SEQ ID NO: 869926 - DNA, 15 bp, Homo sapiens
agttacaaagggtgt

SEQ ID NO: 869927 - DNA, 15 bp, Homo sapiens
gagttacaaagggtg

SEQ ID NO: 869928 - DNA, 15 bp, Homo sapiens
agagttacaaagggt

SEQ ID NO: 869929 - DNA, 15 bp, Homo sapiens
gagagttacaaaggg

SEQ ID NO: 869930 - DNA, 15 bp, Homo sapiens
agagagttacaaagg

SEQ ID NO: 869931 - DNA, 15 bp, Homo sapiens
aagagagttacaaag

SEQ ID NO: 869932 - DNA, 15 bp, Homo sapiens
gaagagagttacaaa

SEQ ID NO: 869933 - DNA, 15 bp, Homo sapiens
agaagagagttacaa

SEQ ID NO: 869934 - DNA, 15 bp, Homo sapiens
gagaagagagttaca

SEQ ID NO: 869935 - DNA, 15 bp, Homo sapiens
ggagaagagagttac

SEQ ID NO: 869936 - DNA, 15 bp, Homo sapiens
aggagaagagagtta

SEQ ID NO: 869937 - DNA, 15 bp, Homo sapiens
gaggagaagagagtt

SEQ ID NO: 869938 - DNA, 15 bp, Homo sapiens
ggaggagaagagagt

SEQ ID NO: 869939 - DNA, 15 bp, Homo sapiens
gggaggagaagagag

SEQ ID NO: 869940 - DNA, 15 bp, Homo sapiens
agggaggagaagaga

SEQ ID NO: 869941 - DNA, 15 bp, Homo sapiens
tagggaggagaagag

SEQ ID NO: 869942 - DNA, 15 bp, Homo sapiens
ctagggaggagaaga

SEQ ID NO: 869943 - DNA, 15 bp, Homo sapiens
actagggaggagaag

SEQ ID NO: 869944 - DNA, 15 bp, Homo sapiens
cactagggaggagaa

SEQ ID NO: 869945 - DNA, 15 bp, Homo sapiens
gcactagggaggaga

SEQ ID NO: 869946 - DNA, 15 bp, Homo sapiens
cgcactagggaggag

SEQ ID NO: 869947 - DNA, 15 bp, Homo sapiens
tcgcactagggagga

SEQ ID NO: 869948 - DNA, 15 bp, Homo sapiens
ctcgcactagggagg

SEQ ID NO: 869949 - DNA, 15 bp, Homo sapiens
cctcgcactagggag

SEQ ID NO: 869950 - DNA, 15 bp, Homo sapiens
acctcgcactaggga

SEQ ID NO: 869951 - DNA, 15 bp, Homo sapiens
aacctcgcactaggg

SEQ ID NO: 869952 - DNA, 15 bp, Homo sapiens
taacctcgcactagg

SEQ ID NO: 869953 - DNA, 15 bp, Homo sapiens
ttaacctcgcactag

SEQ ID NO: 869954 - DNA, 15 bp, Homo sapiens
tttaacctcgcacta

SEQ ID NO: 869955 - DNA, 15 bp, Homo sapiens
ttttaacctcgcact

SEQ ID NO: 869956 - DNA, 15 bp, Homo sapiens
gttttaacctcgcac

SEQ ID NO: 869957 - DNA, 15 bp, Homo sapiens
ggttttaacctcgca

SEQ ID NO: 869958 - DNA, 15 bp, Homo sapiens
aggttttaacctcgc

SEQ ID NO: 869959 - DNA, 15 bp, Homo sapiens
aaggttttaacctcg

SEQ ID NO: 869960 - DNA, 15 bp, Homo sapiens
gaaggttttaacctc

SEQ ID NO: 869961 - DNA, 15 bp, Homo sapiens
tgaaggttttaacct

SEQ ID NO: 869962 - DNA, 15 bp, Homo sapiens
ctgaaggttttaacc

SEQ ID NO: 869963 - DNA, 15 bp, Homo sapiens
gctgaaggttttaac

SEQ ID NO: 869964 - DNA, 15 bp, Homo sapiens
ggctgaaggttttaa

SEQ ID NO: 869965 - DNA, 15 bp, Homo sapiens
gggctgaaggtttta

SEQ ID NO: 869966 - DNA, 15 bp, Homo sapiens
ggggctgaaggtttt

SEQ ID NO: 869967 - DNA, 15 bp, Homo sapiens
tggggctgaaggttt

SEQ ID NO: 869968 - DNA, 15 bp, Homo sapiens
gtggggctgaaggtt

SEQ ID NO: 869969 - DNA, 15 bp, Homo sapiens
cgtggggctgaaggt

SEQ ID NO: 869970 - DNA, 15 bp, Homo sapiens
acgtggggctgaagg

SEQ ID NO: 869971 - DNA, 15 bp, Homo sapiens
cacgtggggctgaag

SEQ ID NO: 869972 - DNA, 15 bp, Homo sapiens
gcacgtggggctgaa

SEQ ID NO: 869973 - DNA, 15 bp, Homo sapiens
agcacgtggggctga

SEQ ID NO: 869974 - DNA, 15 bp, Homo sapiens
cagcacgtggggctg

SEQ ID NO: 869975 - DNA, 15 bp, Homo sapiens
acagcacgtggggct

SEQ ID NO: 869976 - DNA, 15 bp, Homo sapiens
aacagcacgtggggc

SEQ ID NO: 869977 - DNA, 15 bp, Homo sapiens
aaacagcacgtgggg

SEQ ID NO: 869978 - DNA, 15 bp, Homo sapiens
caaacagcacgtggg

SEQ ID NO: 869979 - DNA, 15 bp, Homo sapiens
gcaaacagcacgtgg

SEQ ID NO: 869980 - DNA, 15 bp, Homo sapiens
tgcaaacagcacgtg

SEQ ID NO: 869981 - DNA, 15 bp, Homo sapiens
ttgcaaacagcacgt

SEQ ID NO: 869982 - DNA, 15 bp, Homo sapiens
tttgcaaacagcacg

SEQ ID NO: 869983 - DNA, 15 bp, Homo sapiens
gtttgcaaacagcac

SEQ ID NO: 869984 - DNA, 15 bp, Homo sapiens
ggtttgcaaacagca

SEQ ID NO: 869985 - DNA, 15 bp, Homo sapiens
aggtttgcaaacagc

SEQ ID NO: 869986 - DNA, 15 bp, Homo sapiens
caggtttgcaaacag

SEQ ID NO: 869987 - DNA, 15 bp, Homo sapiens
gcaggtttgcaaaca

SEQ ID NO: 869988 - DNA, 15 bp, Homo sapiens
ggcaggtttgcaaac

SEQ ID NO: 869989 - DNA, 15 bp, Homo sapiens
aggcaggtttgcaaa

SEQ ID NO: 869990 - DNA, 15 bp, Homo sapiens
caggcaggtttgcaa

SEQ ID NO: 869991 - DNA, 15 bp, Homo sapiens
acaggcaggtttgca

SEQ ID NO: 869992 - DNA, 15 bp, Homo sapiens
tacaggcaggtttgc

SEQ ID NO: 869993 - DNA, 15 bp, Homo sapiens
gtacaggcaggtttg

SEQ ID NO: 869994 - DNA, 15 bp, Homo sapiens
ggtacaggcaggttt

SEQ ID NO: 869995 - DNA, 15 bp, Homo sapiens
aggtacaggcaggtt

SEQ ID NO: 869996 - DNA, 15 bp, Homo sapiens
caggtacaggcaggt

SEQ ID NO: 869997 - DNA, 15 bp, Homo sapiens
tcaggtacaggcagg

SEQ ID NO: 869998 - DNA, 15 bp, Homo sapiens
ctcaggtacaggcag

SEQ ID NO: 869999 - DNA, 15 bp, Homo sapiens
cctcaggtacaggca

SEQ ID NO: 870000 - DNA, 15 bp, Homo sapiens
gcctcaggtacaggc

SEQ ID NO: 870001 - DNA, 15 bp, Homo sapiens
ggcctcaggtacagg

SEQ ID NO: 870002 - DNA, 15 bp, Homo sapiens
gggcctcaggtacag

SEQ ID NO: 870003 - DNA, 15 bp, Homo sapiens
agggcctcaggtaca

SEQ ID NO: 870004 - DNA, 15 bp, Homo sapiens
tagggcctcaggtac

SEQ ID NO: 870005 - DNA, 15 bp, Homo sapiens
ttagggcctcaggta

SEQ ID NO: 870006 - DNA, 15 bp, Homo sapiens
tttagggcctcaggt

SEQ ID NO: 870007 - DNA, 15 bp, Homo sapiens
ttttagggcctcagg

SEQ ID NO: 870008 - DNA, 15 bp, Homo sapiens
tttttagggcctcag

SEQ ID NO: 870009 - DNA, 15 bp, Homo sapiens
ctttttagggcctca

SEQ ID NO: 870010 - DNA, 15 bp, Homo sapiens
gctttttagggcctc

SEQ ID NO: 870011 - DNA, 15 bp, Homo sapiens
ggctttttagggcct

SEQ ID NO: 870012 - DNA, 15 bp, Homo sapiens
tggctttttagggcc

SEQ ID NO: 870013 - DNA, 15 bp, Homo sapiens
ctggctttttagggc

SEQ ID NO: 870014 - DNA, 15 bp, Homo sapiens
tctggctttttaggg

SEQ ID NO: 870015 - DNA, 15 bp, Homo sapiens
ctctggctttttagg

SEQ ID NO: 870016 - DNA, 15 bp, Homo sapiens
tctctggctttttag

SEQ ID NO: 870017 - DNA, 15 bp, Homo sapiens
gtctctggcttttta

SEQ ID NO: 870018 - DNA, 15 bp, Homo sapiens
ggtctctggcttttt

SEQ ID NO: 870019 - DNA, 15 bp, Homo sapiens
aggtctctggctttt

SEQ ID NO: 870020 - DNA, 15 bp, Homo sapiens
gaggtctctggcttt

SEQ ID NO: 870021 - DNA, 15 bp, Homo sapiens
tgaggtctctggctt

SEQ ID NO: 870022 - DNA, 15 bp, Homo sapiens
gtgaggtctctggct

SEQ ID NO: 870023 - DNA, 15 bp, Homo sapiens
agtgaggtctctggc

SEQ ID NO: 870024 - DNA, 15 bp, Homo sapiens
gagtgaggtctctgg

SEQ ID NO: 870025 - DNA, 15 bp, Homo sapiens
ggagtgaggtctctg

SEQ ID NO: 870026 - DNA, 15 bp, Homo sapiens
gggagtgaggtctct

SEQ ID NO: 870027 - DNA, 15 bp, Homo sapiens
cgggagtgaggtctc

SEQ ID NO: 870028 - DNA, 15 bp, Homo sapiens
ccgggagtgaggtct

SEQ ID NO: 870029 - DNA, 15 bp, Homo sapiens
cccgggagtgaggtc

SEQ ID NO: 870030 - DNA, 15 bp, Homo sapiens
ccccgggagtgaggt

SEQ ID NO: 870031 - DNA, 15 bp, Homo sapiens
tccccgggagtgagg

SEQ ID NO: 870032 - DNA, 15 bp, Homo sapiens
ctccccgggagtgag

SEQ ID NO: 870033 - DNA, 15 bp, Homo sapiens
gctccccgggagtga

SEQ ID NO: 870034 - DNA, 15 bp, Homo sapiens
ggctccccgggagtg

SEQ ID NO: 870035 - DNA, 15 bp, Homo sapiens
tggctccccgggagt

SEQ ID NO: 870036 - DNA, 15 bp, Homo sapiens
ctggctccccgggag

SEQ ID NO: 870037 - DNA, 15 bp, Homo sapiens
gctggctccccggga

SEQ ID NO: 870038 - DNA, 15 bp, Homo sapiens
tgctggctccccggg

SEQ ID NO: 870039 - DNA, 15 bp, Homo sapiens
atgctggctccccgg

SEQ ID NO: 870040 - DNA, 15 bp, Homo sapiens
catgctggctccccg

SEQ ID NO: 870041 - DNA, 15 bp, Homo sapiens
acatgctggctcccc

SEQ ID NO: 870042 - DNA, 15 bp, Homo sapiens
gacatgctggctccc

SEQ ID NO: 870043 - DNA, 15 bp, Homo sapiens
ggacatgctggctcc

SEQ ID NO: 870044 - DNA, 15 bp, Homo sapiens
tggacatgctggctc

SEQ ID NO: 870045 - DNA, 15 bp, Homo sapiens
gtggacatgctggct

SEQ ID NO: 870046 - DNA, 15 bp, Homo sapiens
agtggacatgctggc

SEQ ID NO: 870047 - DNA, 15 bp, Homo sapiens
cagtggacatgctgg

SEQ ID NO: 870048 - DNA, 15 bp, Homo sapiens
gcagtggacatgctg

SEQ ID NO: 870049 - DNA, 15 bp, Homo sapiens
cgcagtggacatgct

SEQ ID NO: 870050 - DNA, 15 bp, Homo sapiens
ccgcagtggacatgc

SEQ ID NO: 870051 - DNA, 15 bp, Homo sapiens
accgcagtggacatg

SEQ ID NO: 870052 - DNA, 15 bp, Homo sapiens
gaccgcagtggacat

SEQ ID NO: 870053 - DNA, 15 bp, Homo sapiens
ggaccgcagtggaca

SEQ ID NO: 870054 - DNA, 15 bp, Homo sapiens
aggaccgcagtggac

SEQ ID NO: 870055 - DNA, 15 bp, Homo sapiens
caggaccgcagtgga

SEQ ID NO: 870056 - DNA, 15 bp, Homo sapiens
ccaggaccgcagtgg

SEQ ID NO: 870057 - DNA, 15 bp, Homo sapiens
tccaggaccgcagtg

SEQ ID NO: 870058 - DNA, 15 bp, Homo sapiens
ttccaggaccgcagt

SEQ ID NO: 870059 - DNA, 15 bp, Homo sapiens
tttccaggaccgcag

SEQ ID NO: 870060 - DNA, 15 bp, Homo sapiens
ttttccaggaccgca

SEQ ID NO: 870061 - DNA, 15 bp, Homo sapiens
gttttccaggaccgc

SEQ ID NO: 870062 - DNA, 15 bp, Homo sapiens
ggttttccaggaccg

SEQ ID NO: 870063 - DNA, 15 bp, Homo sapiens
gggttttccaggacc

SEQ ID NO: 870064 - DNA, 15 bp, Homo sapiens
tgggttttccaggac

SEQ ID NO: 870065 - DNA, 15 bp, Homo sapiens
ctgggttttccagga

SEQ ID NO: 870066 - DNA, 15 bp, Homo sapiens
cctgggttttccagg

SEQ ID NO: 870067 - DNA, 15 bp, Homo sapiens
gcctgggttttccag

SEQ ID NO: 870068 - DNA, 15 bp, Homo sapiens
agcctgggttttcca

SEQ ID NO: 870069 - DNA, 15 bp, Homo sapiens
aagcctgggttttcc

SEQ ID NO: 870070 - DNA, 15 bp, Homo sapiens
caagcctgggttttc

SEQ ID NO: 870071 - DNA, 15 bp, Homo sapiens
ccaagcctgggtttt

SEQ ID NO: 870072 - DNA, 15 bp, Homo sapiens
cccaagcctgggttt

SEQ ID NO: 870073 - DNA, 15 bp, Homo sapiens
gcccaagcctgggtt

SEQ ID NO: 870074 - DNA, 15 bp, Homo sapiens
tgcccaagcctgggt

SEQ ID NO: 870075 - DNA, 15 bp, Homo sapiens
ctgcccaagcctggg

SEQ ID NO: 870076 - DNA, 15 bp, Homo sapiens
cctgcccaagcctgg

SEQ ID NO: 870077 - DNA, 15 bp, Homo sapiens
tcctgcccaagcctg

SEQ ID NO: 870078 - DNA, 15 bp, Homo sapiens
ttcctgcccaagcct

SEQ ID NO: 870079 - DNA, 15 bp, Homo sapiens
tttcctgcccaagcc

SEQ ID NO: 870080 - DNA, 15 bp, Homo sapiens
gtttcctgcccaagc

SEQ ID NO: 870081 - DNA, 15 bp, Homo sapiens
agtttcctgcccaag

SEQ ID NO: 870082 - DNA, 15 bp, Homo sapiens
gagtttcctgcccaa

SEQ ID NO: 870083 - DNA, 15 bp, Homo sapiens
agagtttcctgccca

SEQ ID NO: 870084 - DNA, 15 bp, Homo sapiens
gagagtttcctgccc

SEQ ID NO: 870085 - DNA, 15 bp, Homo sapiens
agagagtttcctgcc

SEQ ID NO: 870086 - DNA, 15 bp, Homo sapiens
cagagagtttcctgc

SEQ ID NO: 870087 - DNA, 15 bp, Homo sapiens
tcagagagtttcctg

SEQ ID NO: 870088 - DNA, 15 bp, Homo sapiens
gtcagagagtttcct

SEQ ID NO: 870089 - DNA, 15 bp, Homo sapiens
agtcagagagtttcc

SEQ ID NO: 870090 - DNA, 15 bp, Homo sapiens
aagtcagagagtttc

SEQ ID NO: 870091 - DNA, 15 bp, Homo sapiens
aaagtcagagagttt

SEQ ID NO: 870092 - DNA, 15 bp, Homo sapiens
caaagtcagagagtt

SEQ ID NO: 870093 - DNA, 15 bp, Homo sapiens
ccaaagtcagagagt

SEQ ID NO: 870094 - DNA, 15 bp, Homo sapiens
tccaaagtcagagag

SEQ ID NO: 870095 - DNA, 15 bp, Homo sapiens
gtccaaagtcagaga

SEQ ID NO: 870096 - DNA, 15 bp, Homo sapiens
tgtccaaagtcagag

SEQ ID NO: 870097 - DNA, 15 bp, Homo sapiens
ctgtccaaagtcaga

SEQ ID NO: 870098 - DNA, 15 bp, Homo sapiens
cctgtccaaagtcag

SEQ ID NO: 870099 - DNA, 15 bp, Homo sapiens
acctgtccaaagtca

SEQ ID NO: 870100 - DNA, 15 bp, Homo sapiens
cacctgtccaaagtc

SEQ ID NO: 870101 - DNA, 15 bp, Homo sapiens
tcacctgtccaaagt

SEQ ID NO: 870102 - DNA, 15 bp, Homo sapiens
ctcacctgtccaaag

SEQ ID NO: 870103 - DNA, 15 bp, Homo sapiens
gctcacctgtccaaa

SEQ ID NO: 870104 - DNA, 15 bp, Homo sapiens
ggctcacctgtccaa

SEQ ID NO: 870105 - DNA, 15 bp, Homo sapiens
tggctcacctgtcca

SEQ ID NO: 870106 - DNA, 15 bp, Homo sapiens
gtggctcacctgtcc

SEQ ID NO: 870107 - DNA, 15 bp, Homo sapiens
cgtggctcacctgtc

SEQ ID NO: 870108 - DNA, 15 bp, Homo sapiens
ccgtggctcacctgt

SEQ ID NO: 870109 - DNA, 15 bp, Homo sapiens
gccgtggctcacctg

SEQ ID NO: 870110 - DNA, 15 bp, Homo sapiens
tgccgtggctcacct

SEQ ID NO: 870111 - DNA, 15 bp, Homo sapiens
ctgccgtggctcacc

SEQ ID NO: 870112 - DNA, 15 bp, Homo sapiens
gctgccgtggctcac

SEQ ID NO: 870113 - DNA, 15 bp, Homo sapiens
ggctgccgtggctca

SEQ ID NO: 870114 - DNA, 15 bp, Homo sapiens
aggctgccgtggctc

SEQ ID NO: 870115 - DNA, 15 bp, Homo sapiens
caggctgccgtggct

SEQ ID NO: 870116 - DNA, 15 bp, Homo sapiens
tcaggctgccgtggc

SEQ ID NO: 870117 - DNA, 15 bp, Homo sapiens
ctcaggctgccgtgg

SEQ ID NO: 870118 - DNA, 15 bp, Homo sapiens
gctcaggctgccgtg

SEQ ID NO: 870119 - DNA, 15 bp, Homo sapiens
agctcaggctgccgt

SEQ ID NO: 870120 - DNA, 15 bp, Homo sapiens
cagctcaggctgccg

SEQ ID NO: 870121 - DNA, 15 bp, Homo sapiens
gcagctcaggctgcc

SEQ ID NO: 870122 - DNA, 15 bp, Homo sapiens
agcagctcaggctgc

SEQ ID NO: 870123 - DNA, 15 bp, Homo sapiens
gagcagctcaggctg

SEQ ID NO: 870124 - DNA, 15 bp, Homo sapiens
tgagcagctcaggct

SEQ ID NO: 870125 - DNA, 15 bp, Homo sapiens
ctgagcagctcaggc

SEQ ID NO: 870126 - DNA, 15 bp, Homo sapiens
actgagcagctcagg

SEQ ID NO: 870127 - DNA, 15 bp, Homo sapiens
aactgagcagctcag

SEQ ID NO: 870128 - DNA, 15 bp, Homo sapiens
taactgagcagctca

SEQ ID NO: 870129 - DNA, 15 bp, Homo sapiens
ctaactgagcagctc

SEQ ID NO: 870130 - DNA, 15 bp, Homo sapiens
cctaactgagcagct

SEQ ID NO: 870131 - DNA, 15 bp, Homo sapiens
ccctaactgagcagc

SEQ ID NO: 870132 - DNA, 15 bp, Homo sapiens
cccctaactgagcag

SEQ ID NO: 870133 - DNA, 15 bp, Homo sapiens
tcccctaactgagca

SEQ ID NO: 870134 - DNA, 15 bp, Homo sapiens
ttcccctaactgagc

SEQ ID NO: 870135 - DNA, 15 bp, Homo sapiens
attcccctaactgag

SEQ ID NO: 870136 - DNA, 15 bp, Homo sapiens
aattcccctaactga

SEQ ID NO: 870137 - DNA, 15 bp, Homo sapiens
aaattcccctaactg

SEQ ID NO: 870138 - DNA, 15 bp, Homo sapiens
caaattcccctaact

SEQ ID NO: 870139 - DNA, 15 bp, Homo sapiens
ccaaattcccctaac

SEQ ID NO: 870140 - DNA, 15 bp, Homo sapiens
cccaaattcccctaa

SEQ ID NO: 870141 - DNA, 15 bp, Homo sapiens
gcccaaattccccta

SEQ ID NO: 870142 - DNA, 15 bp, Homo sapiens
ggcccaaattcccct

SEQ ID NO: 870143 - DNA, 15 bp, Homo sapiens
aggcccaaattcccc

SEQ ID NO: 870144 - DNA, 15 bp, Homo sapiens
gaggcccaaattccc

SEQ ID NO: 870145 - DNA, 15 bp, Homo sapiens
ggaggcccaaattcc

SEQ ID NO: 870146 - DNA, 15 bp, Homo sapiens
tggaggcccaaattc

SEQ ID NO: 870147 - DNA, 15 bp, Homo sapiens
ctggaggcccaaatt

SEQ ID NO: 870148 - DNA, 15 bp, Homo sapiens
tctggaggcccaaat

SEQ ID NO: 870149 - DNA, 15 bp, Homo sapiens
ctctggaggcccaaa

SEQ ID NO: 870150 - DNA, 15 bp, Homo sapiens
tctctggaggcccaa

SEQ ID NO: 870151 - DNA, 15 bp, Homo sapiens
ttctctggaggccca

SEQ ID NO: 870152 - DNA, 15 bp, Homo sapiens
tttctctggaggccc

SEQ ID NO: 870153 - DNA, 15 bp, Homo sapiens
ctttctctggaggcc

SEQ ID NO: 870154 - DNA, 15 bp, Homo sapiens
tctttctctggaggc

SEQ ID NO: 870155 - DNA, 15 bp, Homo sapiens
ctctttctctggagg

SEQ ID NO: 870156 - DNA, 15 bp, Homo sapiens
tctctttctctggag

SEQ ID NO: 870157 - DNA, 15 bp, Homo sapiens
atctctttctctgga

SEQ ID NO: 870158 - DNA, 15 bp, Homo sapiens
gatctctttctctgg

SEQ ID NO: 870159 - DNA, 15 bp, Homo sapiens
ggatctctttctctg

SEQ ID NO: 870160 - DNA, 15 bp, Homo sapiens
cggatctctttctct

SEQ ID NO: 870161 - DNA, 15 bp, Homo sapiens
tcggatctctttctc

SEQ ID NO: 870162 - DNA, 15 bp, Homo sapiens
ttcggatctctttct

SEQ ID NO: 870163 - DNA, 15 bp, Homo sapiens
cttcggatctctttc

SEQ ID NO: 870164 - DNA, 15 bp, Homo sapiens
tcttcggatctcttt

SEQ ID NO: 870165 - DNA, 15 bp, Homo sapiens
gtcttcggatctctt

SEQ ID NO: 870166 - DNA, 15 bp, Homo sapiens
agtcttcggatctct

SEQ ID NO: 870167 - DNA, 15 bp, Homo sapiens
cagtcttcggatctc

SEQ ID NO: 870168 - DNA, 15 bp, Homo sapiens
gcagtcttcggatct

SEQ ID NO: 870169 - DNA, 15 bp, Homo sapiens
agcagtcttcggatc

SEQ ID NO: 870170 - DNA, 15 bp, Homo sapiens
cagcagtcttcggat

SEQ ID NO: 870171 - DNA, 15 bp, Homo sapiens
ccagcagtcttcgga

SEQ ID NO: 870172 - DNA, 15 bp, Homo sapiens
accagcagtcttcgg

SEQ ID NO: 870173 - DNA, 15 bp, Homo sapiens
caccagcagtcttcg

SEQ ID NO: 870174 - DNA, 15 bp, Homo sapiens
gcaccagcagtcttc

SEQ ID NO: 870175 - DNA, 15 bp, Homo sapiens
agcaccagcagtctt

SEQ ID NO: 870176 - DNA, 15 bp, Homo sapiens
aagcaccagcagtct

SEQ ID NO: 870177 - DNA, 15 bp, Homo sapiens
gaagcaccagcagtc

SEQ ID NO: 870178 - DNA, 15 bp, Homo sapiens
ggaagcaccagcagt

SEQ ID NO: 870179 - DNA, 15 bp, Homo sapiens
aggaagcaccagcag

SEQ ID NO: 870180 - DNA, 15 bp, Homo sapiens
caggaagcaccagca

SEQ ID NO: 870181 - DNA, 15 bp, Homo sapiens
ccaggaagcaccagc

SEQ ID NO: 870182 - DNA, 15 bp, Homo sapiens
accaggaagcaccag

SEQ ID NO: 870183 - DNA, 15 bp, Homo sapiens
aaccaggaagcacca

SEQ ID NO: 870184 - DNA, 15 bp, Homo sapiens
aaaccaggaagcacc

SEQ ID NO: 870185 - DNA, 15 bp, Homo sapiens
gaaaccaggaagcac

SEQ ID NO: 870186 - DNA, 15 bp, Homo sapiens
tgaaaccaggaagca

SEQ ID NO: 870187 - DNA, 15 bp, Homo sapiens
atgaaaccaggaagc

SEQ ID NO: 870188 - DNA, 15 bp, Homo sapiens
tatgaaaccaggaag

SEQ ID NO: 870189 - DNA, 15 bp, Homo sapiens
ttatgaaaccaggaa

SEQ ID NO: 870190 - DNA, 15 bp, Homo sapiens
cttatgaaaccagga

SEQ ID NO: 870191 - DNA, 15 bp, Homo sapiens
gcttatgaaaccagg

SEQ ID NO: 870192 - DNA, 15 bp, Homo sapiens
agcttatgaaaccag

SEQ ID NO: 870193 - DNA, 15 bp, Homo sapiens
gagcttatgaaacca

SEQ ID NO: 870194 - DNA, 15 bp, Homo sapiens
tgagcttatgaaacc

SEQ ID NO: 870195 - DNA, 15 bp, Homo sapiens
ctgagcttatgaaac

SEQ ID NO: 870196 - DNA, 15 bp, Homo sapiens
actgagcttatgaaa

SEQ ID NO: 870197 - DNA, 15 bp, Homo sapiens
tactgagcttatgaa

SEQ ID NO: 870198 - DNA, 15 bp, Homo sapiens
ttactgagcttatga

SEQ ID NO: 870199 - DNA, 15 bp, Homo sapiens
cttactgagcttatg

SEQ ID NO: 870200 - DNA, 15 bp, Homo sapiens
tcttactgagcttat

SEQ ID NO: 870201 - DNA, 15 bp, Homo sapiens
ttcttactgagctta

SEQ ID NO: 870202 - DNA, 15 bp, Homo sapiens
cttcttactgagctt

SEQ ID NO: 870203 - DNA, 15 bp, Homo sapiens
acttcttactgagct

SEQ ID NO: 870204 - DNA, 15 bp, Homo sapiens
gacttcttactgagc

SEQ ID NO: 870205 - DNA, 15 bp, Homo sapiens
agacttcttactgag

SEQ ID NO: 870206 - DNA, 15 bp, Homo sapiens
cagacttcttactga

SEQ ID NO: 870207 - DNA, 15 bp, Homo sapiens
tcagacttcttactg

SEQ ID NO: 870208 - DNA, 15 bp, Homo sapiens
ttcagacttcttact

SEQ ID NO: 870209 - DNA, 15 bp, Homo sapiens
attcagacttcttac

SEQ ID NO: 870210 - DNA, 15 bp, Homo sapiens
aattcagacttctta

SEQ ID NO: 870211 - DNA, 15 bp, Homo sapiens
gaattcagacttctt

SEQ ID NO: 870212 - DNA, 15 bp, Homo sapiens
cgaattcagacttct

SEQ ID NO: 870213 - DNA, 15 bp, Homo sapiens
acgaattcagacttc

SEQ ID NO: 870214 - DNA, 15 bp, Homo sapiens
aacgaattcagactt

SEQ ID NO: 870215 - DNA, 15 bp, Homo sapiens
caacgaattcagact

SEQ ID NO: 870216 - DNA, 15 bp, Homo sapiens
ccaacgaattcagac

SEQ ID NO: 870217 - DNA, 15 bp, Homo sapiens
tccaacgaattcaga

SEQ ID NO: 870218 - DNA, 15 bp, Homo sapiens
ttccaacgaattcag

SEQ ID NO: 870219 - DNA, 15 bp, Homo sapiens
cttccaacgaattca

SEQ ID NO: 870220 - DNA, 15 bp, Homo sapiens
gcttccaacgaattc

SEQ ID NO: 870221 - DNA, 15 bp, Homo sapiens
agcttccaacgaatt

SEQ ID NO: 870222 - DNA, 15 bp, Homo sapiens
cagcttccaacgaat

SEQ ID NO: 870223 - DNA, 15 bp, Homo sapiens
tcagcttccaacgaa

SEQ ID NO: 870224 - DNA, 15 bp, Homo sapiens
atcagcttccaacga

SEQ ID NO: 870225 - DNA, 15 bp, Homo sapiens
catcagcttccaacg

SEQ ID NO: 870226 - DNA, 15 bp, Homo sapiens
tcatcagcttccaac

SEQ ID NO: 870227 - DNA, 15 bp, Homo sapiens
ctcatcagcttccaa

SEQ ID NO: 870228 - DNA, 15 bp, Homo sapiens
tctcatcagcttcca

SEQ ID NO: 870229 - DNA, 15 bp, Homo sapiens
ttctcatcagcttcc

SEQ ID NO: 870230 - DNA, 15 bp, Homo sapiens
attctcatcagcttc

SEQ ID NO: 870231 - DNA, 15 bp, Homo sapiens
tattctcatcagctt

SEQ ID NO: 870232 - DNA, 15 bp, Homo sapiens
atattctcatcagct

SEQ ID NO: 870233 - DNA, 15 bp, Homo sapiens
gatattctcatcagc

SEQ ID NO: 870234 - DNA, 15 bp, Homo sapiens
ggatattctcatcag

SEQ ID NO: 870235 - DNA, 15 bp, Homo sapiens
tggatattctcatca

SEQ ID NO: 870236 - DNA, 15 bp, Homo sapiens
ctggatattctcatc

SEQ ID NO: 870237 - DNA, 15 bp, Homo sapiens
cctggatattctcat

SEQ ID NO: 870238 - DNA, 15 bp, Homo sapiens
tcctggatattctca

SEQ ID NO: 870239 - DNA, 15 bp, Homo sapiens
ttcctggatattctc

SEQ ID NO: 870240 - DNA, 15 bp, Homo sapiens
cttcctggatattct

SEQ ID NO: 870241 - DNA, 15 bp, Homo sapiens
acttcctggatattc

SEQ ID NO: 870242 - DNA, 15 bp, Homo sapiens
gacttcctggatatt

SEQ ID NO: 870243 - DNA, 15 bp, Homo sapiens
tgacttcctggatat

SEQ ID NO: 870244 - DNA, 15 bp, Homo sapiens
ttgacttcctggata

SEQ ID NO: 870245 - DNA, 15 bp, Homo sapiens
gttgacttcctggat

SEQ ID NO: 870246 - DNA, 15 bp, Homo sapiens
tgttgacttcctgga

SEQ ID NO: 870247 - DNA, 15 bp, Homo sapiens
ctgttgacttcctgg

SEQ ID NO: 870248 - DNA, 15 bp, Homo sapiens
tctgttgacttcctg

SEQ ID NO: 870249 - DNA, 15 bp, Homo sapiens
gtctgttgacttcct

SEQ ID NO: 870250 - DNA, 15 bp, Homo sapiens
tgtctgttgacttcc

SEQ ID NO: 870251 - DNA, 15 bp, Homo sapiens
ttgtctgttgacttc

SEQ ID NO: 870252 - DNA, 15 bp, Homo sapiens
tttgtctgttgactt

SEQ ID NO: 870253 - DNA, 15 bp, Homo sapiens
atttgtctgttgact

SEQ ID NO: 870254 - DNA, 15 bp, Homo sapiens
catttgtctgttgac

SEQ ID NO: 870255 - DNA, 15 bp, Homo sapiens
acatttgtctgttga

SEQ ID NO: 870256 - DNA, 15 bp, Homo sapiens
gacatttgtctgttg

SEQ ID NO: 870257 - DNA, 15 bp, Homo sapiens
ggacatttgtctgtt

SEQ ID NO: 870258 - DNA, 15 bp, Homo sapiens
aggacatttgtctgt

SEQ ID NO: 870259 - DNA, 15 bp, Homo sapiens
gaggacatttgtctg

SEQ ID NO: 870260 - DNA, 15 bp, Homo sapiens
tgaggacatttgtct

SEQ ID NO: 870261 - DNA, 15 bp, Homo sapiens
ttgaggacatttgtc

SEQ ID NO: 870262 - DNA, 15 bp, Homo sapiens
gttgaggacatttgt

SEQ ID NO: 870263 - DNA, 15 bp, Homo sapiens
tgttgaggacatttg

SEQ ID NO: 870264 - DNA, 15 bp, Homo sapiens
ttgttgaggacattt

SEQ ID NO: 870265 - DNA, 15 bp, Homo sapiens
attgttgaggacatt

SEQ ID NO: 870266 - DNA, 15 bp, Homo sapiens
aattgttgaggacat

SEQ ID NO: 870267 - DNA, 15 bp, Homo sapiens
caattgttgaggaca

SEQ ID NO: 870268 - DNA, 15 bp, Homo sapiens
acaattgttgaggac

SEQ ID NO: 870269 - DNA, 15 bp, Homo sapiens
aacaattgttgagga

SEQ ID NO: 870270 - DNA, 15 bp, Homo sapiens
aaacaattgttgagg

SEQ ID NO: 870271 - DNA, 15 bp, Homo sapiens
gaaacaattgttgag

SEQ ID NO: 870272 - DNA, 15 bp, Homo sapiens
agaaacaattgttga

SEQ ID NO: 870273 - DNA, 15 bp, Homo sapiens
tagaaacaattgttg

SEQ ID NO: 870274 - DNA, 15 bp, Homo sapiens
ttagaaacaattgtt

SEQ ID NO: 870275 - DNA, 15 bp, Homo sapiens
cttagaaacaattgt

SEQ ID NO: 870276 - DNA, 15 bp, Homo sapiens
acttagaaacaattg

SEQ ID NO: 870277 - DNA, 15 bp, Homo sapiens
tacttagaaacaatt

SEQ ID NO: 870278 - DNA, 15 bp, Homo sapiens
ctacttagaaacaat

SEQ ID NO: 870279 - DNA, 15 bp, Homo sapiens
cctacttagaaacaa

SEQ ID NO: 870280 - DNA, 15 bp, Homo sapiens
tcctacttagaaaca

SEQ ID NO: 870281 - DNA, 15 bp, Homo sapiens
ctcctacttagaaac

SEQ ID NO: 870282 - DNA, 15 bp, Homo sapiens
tctcctacttagaaa

SEQ ID NO: 870283 - DNA, 15 bp, Homo sapiens
ttctcctacttagaa

SEQ ID NO: 870284 - DNA, 15 bp, Homo sapiens
gttctcctacttaga

SEQ ID NO: 870285 - DNA, 15 bp, Homo sapiens
tgttctcctacttag

SEQ ID NO: 870286 - DNA, 15 bp, Homo sapiens
atgttctcctactta

SEQ ID NO: 870287 - DNA, 15 bp, Homo sapiens
gatgttctcctactt

SEQ ID NO: 870288 - DNA, 15 bp, Homo sapiens
agatgttctcctact

SEQ ID NO: 870289 - DNA, 15 bp, Homo sapiens
cagatgttctcctac

SEQ ID NO: 870290 - DNA, 15 bp, Homo sapiens
acagatgttctccta

SEQ ID NO: 870291 - DNA, 15 bp, Homo sapiens
gacagatgttctcct

SEQ ID NO: 870292 - DNA, 15 bp, Homo sapiens
ggacagatgttctcc

SEQ ID NO: 870293 - DNA, 15 bp, Homo sapiens
aggacagatgttctc

SEQ ID NO: 870294 - DNA, 15 bp, Homo sapiens
gaggacagatgttct

SEQ ID NO: 870295 - DNA, 15 bp, Homo sapiens
cgaggacagatgttc

SEQ ID NO: 870296 - DNA, 15 bp, Homo sapiens
ccgaggacagatgtt

SEQ ID NO: 870297 - DNA, 15 bp, Homo sapiens
accgaggacagatgt

SEQ ID NO: 870298 - DNA, 15 bp, Homo sapiens
caccgaggacagatg

SEQ ID NO: 870299 - DNA, 15 bp, Homo sapiens
ccaccgaggacagat

SEQ ID NO: 870300 - DNA, 15 bp, Homo sapiens
gccaccgaggacaga

SEQ ID NO: 870301 - DNA, 15 bp, Homo sapiens
agccaccgaggacag

SEQ ID NO: 870302 - DNA, 15 bp, Homo sapiens
aagccaccgaggaca

SEQ ID NO: 870303 - DNA, 15 bp, Homo sapiens
aaagccaccgaggac

SEQ ID NO: 870304 - DNA, 15 bp, Homo sapiens
gaaagccaccgagga

SEQ ID NO: 870305 - DNA, 15 bp, Homo sapiens
tgaaagccaccgagg

SEQ ID NO: 870306 - DNA, 15 bp, Homo sapiens
gtgaaagccaccgag

SEQ ID NO: 870307 - DNA, 15 bp, Homo sapiens
tgtgaaagccaccga

SEQ ID NO: 870308 - DNA, 15 bp, Homo sapiens
ctgtgaaagccaccg

SEQ ID NO: 870309 - DNA, 15 bp, Homo sapiens
cctgtgaaagccacc

SEQ ID NO: 870310 - DNA, 15 bp, Homo sapiens
tcctgtgaaagccac

SEQ ID NO: 870311 - DNA, 15 bp, Homo sapiens
ttcctgtgaaagcca

SEQ ID NO: 870312 - DNA, 15 bp, Homo sapiens
attcctgtgaaagcc

SEQ ID NO: 870313 - DNA, 15 bp, Homo sapiens
cattcctgtgaaagc

SEQ ID NO: 870314 - DNA, 15 bp, Homo sapiens
tcattcctgtgaaag

SEQ ID NO: 870315 - DNA, 15 bp, Homo sapiens
ttcattcctgtgaaa

SEQ ID NO: 870316 - DNA, 15 bp, Homo sapiens
attcattcctgtgaa

SEQ ID NO: 870317 - DNA, 15 bp, Homo sapiens
cattcattcctgtga

SEQ ID NO: 870318 - DNA, 15 bp, Homo sapiens
tcattcattcctgtg

SEQ ID NO: 870319 - DNA, 15 bp, Homo sapiens
gtcattcattcctgt

SEQ ID NO: 870320 - DNA, 15 bp, Homo sapiens
ggtcattcattcctg

SEQ ID NO: 870321 - DNA, 15 bp, Homo sapiens
tggtcattcattcct

SEQ ID NO: 870322 - DNA, 15 bp, Homo sapiens
atggtcattcattcc

SEQ ID NO: 870323 - DNA, 15 bp, Homo sapiens
aatggtcattcattc

SEQ ID NO: 870324 - DNA, 15 bp, Homo sapiens
caatggtcattcatt

SEQ ID NO: 870325 - DNA, 15 bp, Homo sapiens
gcaatggtcattcat

SEQ ID NO: 870326 - DNA, 15 bp, Homo sapiens
agcaatggtcattca

SEQ ID NO: 870327 - DNA, 15 bp, Homo sapiens
aagcaatggtcattc

SEQ ID NO: 870328 - DNA, 15 bp, Homo sapiens
aaagcaatggtcatt

SEQ ID NO: 870329 - DNA, 15 bp, Homo sapiens
taaagcaatggtcat

SEQ ID NO: 870330 - DNA, 15 bp, Homo sapiens
ctaaagcaatggtca

SEQ ID NO: 870331 - DNA, 15 bp, Homo sapiens
cctaaagcaatggtc

SEQ ID NO: 870332 - DNA, 15 bp, Homo sapiens
ccctaaagcaatggt

SEQ ID NO: 870333 - DNA, 15 bp, Homo sapiens
cccctaaagcaatgg

SEQ ID NO: 870334 - DNA, 15 bp, Homo sapiens
ccccctaaagcaatg

SEQ ID NO: 870335 - DNA, 15 bp, Homo sapiens
accccctaaagcaat

SEQ ID NO: 870336 - DNA, 15 bp, Homo sapiens
aaccccctaaagcaa

SEQ ID NO: 870337 - DNA, 15 bp, Homo sapiens
caaccccctaaagca

SEQ ID NO: 870338 - DNA, 15 bp, Homo sapiens
ccaaccccctaaagc

SEQ ID NO: 870339 - DNA, 15 bp, Homo sapiens
cccaaccccctaaag

SEQ ID NO: 870340 - DNA, 15 bp, Homo sapiens
ccccaaccccctaaa

SEQ ID NO: 870341 - DNA, 15 bp, Homo sapiens
tccccaaccccctaa

SEQ ID NO: 870342 - DNA, 15 bp, Homo sapiens
atccccaacccccta

SEQ ID NO: 870343 - DNA, 15 bp, Homo sapiens
gatccccaaccccct

SEQ ID NO: 870344 - DNA, 15 bp, Homo sapiens
agatccccaaccccc

SEQ ID NO: 870345 - DNA, 15 bp, Homo sapiens
cagatccccaacccc

SEQ ID NO: 870346 - DNA, 15 bp, Homo sapiens
ccagatccccaaccc

SEQ ID NO: 870347 - DNA, 15 bp, Homo sapiens
gccagatccccaacc

SEQ ID NO: 870348 - DNA, 15 bp, Homo sapiens
ggccagatccccaac

SEQ ID NO: 870349 - DNA, 15 bp, Homo sapiens
aggccagatccccaa

SEQ ID NO: 870350 - DNA, 15 bp, Homo sapiens
gaggccagatcccca

SEQ ID NO: 870351 - DNA, 15 bp, Homo sapiens
ggaggccagatcccc

SEQ ID NO: 870352 - DNA, 15 bp, Homo sapiens
tggaggccagatccc

SEQ ID NO: 870353 - DNA, 15 bp, Homo sapiens
ctggaggccagatcc

SEQ ID NO: 870354 - DNA, 15 bp, Homo sapiens
tctggaggccagatc

SEQ ID NO: 870355 - DNA, 15 bp, Homo sapiens
ttctggaggccagat

SEQ ID NO: 870356 - DNA, 15 bp, Homo sapiens
gttctggaggccaga

SEQ ID NO: 870357 - DNA, 15 bp, Homo sapiens
agttctggaggccag

SEQ ID NO: 870358 - DNA, 15 bp, Homo sapiens
cagttctggaggcca

SEQ ID NO: 870359 - DNA, 15 bp, Homo sapiens
gcagttctggaggcc

SEQ ID NO: 870360 - DNA, 15 bp, Homo sapiens
ggcagttctggaggc

SEQ ID NO: 870361 - DNA, 15 bp, Homo sapiens
tggcagttctggagg

SEQ ID NO: 870362 - DNA, 15 bp, Homo sapiens
gtggcagttctggag

SEQ ID NO: 870363 - DNA, 15 bp, Homo sapiens
ggtggcagttctgga

SEQ ID NO: 870364 - DNA, 15 bp, Homo sapiens
tggtggcagttctgg

SEQ ID NO: 870365 - DNA, 15 bp, Homo sapiens
ttggtggcagttctg

SEQ ID NO: 870366 - DNA, 15 bp, Homo sapiens
attggtggcagttct

SEQ ID NO: 870367 - DNA, 15 bp, Homo sapiens
aattggtggcagttc

SEQ ID NO: 870368 - DNA, 15 bp, Homo sapiens
taattggtggcagtt

SEQ ID NO: 870369 - DNA, 15 bp, Homo sapiens
ctaattggtggcagt

SEQ ID NO: 870370 - DNA, 15 bp, Homo sapiens
gctaattggtggcag

SEQ ID NO: 870371 - DNA, 15 bp, Homo sapiens
agctaattggtggca

SEQ ID NO: 870372 - DNA, 15 bp, Homo sapiens
cagctaattggtggc

SEQ ID NO: 870373 - DNA, 15 bp, Homo sapiens
acagctaattggtgg

SEQ ID NO: 870374 - DNA, 15 bp, Homo sapiens
cacagctaattggtg

SEQ ID NO: 870375 - DNA, 15 bp, Homo sapiens
acacagctaattggt

SEQ ID NO: 870376 - DNA, 15 bp, Homo sapiens
cacacagctaattgg

SEQ ID NO: 870377 - DNA, 15 bp, Homo sapiens
acacacagctaattg

SEQ ID NO: 870378 - DNA, 15 bp, Homo sapiens
gacacacagctaatt

SEQ ID NO: 870379 - DNA, 15 bp, Homo sapiens
agacacacagctaat

SEQ ID NO: 870380 - DNA, 15 bp, Homo sapiens
aagacacacagctaa

SEQ ID NO: 870381 - DNA, 15 bp, Homo sapiens
aaagacacacagcta

SEQ ID NO: 870382 - DNA, 15 bp, Homo sapiens
caaagacacacagct

SEQ ID NO: 870383 - DNA, 15 bp, Homo sapiens
ccaaagacacacagc

SEQ ID NO: 870384 - DNA, 15 bp, Homo sapiens
tccaaagacacacag

SEQ ID NO: 870385 - DNA, 15 bp, Homo sapiens
gtccaaagacacaca

SEQ ID NO: 870386 - DNA, 15 bp, Homo sapiens
tgtccaaagacacac

SEQ ID NO: 870387 - DNA, 15 bp, Homo sapiens
ttgtccaaagacaca

SEQ ID NO: 870388 - DNA, 15 bp, Homo sapiens
cttgtccaaagacac

SEQ ID NO: 870389 - DNA, 15 bp, Homo sapiens
acttgtccaaagaca

SEQ ID NO: 870390 - DNA, 15 bp, Homo sapiens
aacttgtccaaagac

SEQ ID NO: 870391 - DNA, 15 bp, Homo sapiens
taacttgtccaaaga

SEQ ID NO: 870392 - DNA, 15 bp, Homo sapiens
gtaacttgtccaaag

SEQ ID NO: 870393 - DNA, 15 bp, Homo sapiens
agtaacttgtccaaa

SEQ ID NO: 870394 - DNA, 15 bp, Homo sapiens
cagtaacttgtccaa

SEQ ID NO: 870395 - DNA, 15 bp, Homo sapiens
acagtaacttgtcca

SEQ ID NO: 870396 - DNA, 15 bp, Homo sapiens
gacagtaacttgtcc

SEQ ID NO: 870397 - DNA, 15 bp, Homo sapiens
ggacagtaacttgtc

SEQ ID NO: 870398 - DNA, 15 bp, Homo sapiens
gggacagtaacttgt

SEQ ID NO: 870399 - DNA, 15 bp, Homo sapiens
agggacagtaacttg

SEQ ID NO: 870400 - DNA, 15 bp, Homo sapiens
gagggacagtaactt

SEQ ID NO: 870401 - DNA, 15 bp, Homo sapiens
agagggacagtaact

SEQ ID NO: 870402 - DNA, 15 bp, Homo sapiens
gagagggacagtaac

SEQ ID NO: 870403 - DNA, 15 bp, Homo sapiens
agagagggacagtaa

SEQ ID NO: 870404 - DNA, 15 bp, Homo sapiens
cagagagggacagta

SEQ ID NO: 870405 - DNA, 15 bp, Homo sapiens
acagagagggacagt

SEQ ID NO: 870406 - DNA, 15 bp, Homo sapiens
aacagagagggacag

SEQ ID NO: 870407 - DNA, 15 bp, Homo sapiens
caacagagagggaca

SEQ ID NO: 870408 - DNA, 15 bp, Homo sapiens
acaacagagagggac

SEQ ID NO: 870409 - DNA, 15 bp, Homo sapiens
gacaacagagaggga

SEQ ID NO: 870410 - DNA, 15 bp, Homo sapiens
agacaacagagaggg

SEQ ID NO: 870411 - DNA, 15 bp, Homo sapiens
cagacaacagagagg

SEQ ID NO: 870412 - DNA, 15 bp, Homo sapiens
acagacaacagagag

SEQ ID NO: 870413 - DNA, 15 bp, Homo sapiens
aacagacaacagaga

SEQ ID NO: 870414 - DNA, 15 bp, Homo sapiens
aaacagacaacagag

SEQ ID NO: 870415 - DNA, 15 bp, Homo sapiens
taaacagacaacaga

SEQ ID NO: 870416 - DNA, 15 bp, Homo sapiens
gtaaacagacaacag

SEQ ID NO: 870417 - DNA, 15 bp, Homo sapiens
agtaaacagacaaca

SEQ ID NO: 870418 - DNA, 15 bp, Homo sapiens
gagtaaacagacaac

SEQ ID NO: 870419 - DNA, 15 bp, Homo sapiens
agagtaaacagacaa

SEQ ID NO: 870420 - DNA, 15 bp, Homo sapiens
aagagtaaacagaca

SEQ ID NO: 870421 - DNA, 15 bp, Homo sapiens
gaagagtaaacagac

SEQ ID NO: 870422 - DNA, 15 bp, Homo sapiens
agaagagtaaacaga

SEQ ID NO: 870423 - DNA, 15 bp, Homo sapiens
cagaagagtaaacag

SEQ ID NO: 870424 - DNA, 15 bp, Homo sapiens
acagaagagtaaaca

SEQ ID NO: 870425 - DNA, 15 bp, Homo sapiens
tacagaagagtaaac

SEQ ID NO: 870426 - DNA, 15 bp, Homo sapiens
gtacagaagagtaaa

SEQ ID NO: 870427 - DNA, 15 bp, Homo sapiens
tgtacagaagagtaa

SEQ ID NO: 870428 - DNA, 15 bp, Homo sapiens
gtgtacagaagagta

SEQ ID NO: 870429 - DNA, 15 bp, Homo sapiens
agtgtacagaagagt

SEQ ID NO: 870430 - DNA, 15 bp, Homo sapiens
cagtgtacagaagag

SEQ ID NO: 870431 - DNA, 15 bp, Homo sapiens
tcagtgtacagaaga

SEQ ID NO: 870432 - DNA, 15 bp, Homo sapiens
ttcagtgtacagaag

SEQ ID NO: 870433 - DNA, 15 bp, Homo sapiens
cttcagtgtacagaa

SEQ ID NO: 870434 - DNA, 15 bp, Homo sapiens
ccttcagtgtacaga

SEQ ID NO: 870435 - DNA, 15 bp, Homo sapiens
cccttcagtgtacag

SEQ ID NO: 870436 - DNA, 15 bp, Homo sapiens
ccccttcagtgtaca

SEQ ID NO: 870437 - DNA, 15 bp, Homo sapiens
gccccttcagtgtac

SEQ ID NO: 870438 - DNA, 15 bp, Homo sapiens
agccccttcagtgta

SEQ ID NO: 870439 - DNA, 15 bp, Homo sapiens
cagccccttcagtgt

SEQ ID NO: 870440 - DNA, 15 bp, Homo sapiens
ccagccccttcagtg

SEQ ID NO: 870441 - DNA, 15 bp, Homo sapiens
accagccccttcagt

SEQ ID NO: 870442 - DNA, 15 bp, Homo sapiens
gaccagccccttcag

SEQ ID NO: 870443 - DNA, 15 bp, Homo sapiens
ggaccagccccttca

SEQ ID NO: 870444 - DNA, 15 bp, Homo sapiens
gggaccagccccttc

SEQ ID NO: 870445 - DNA, 15 bp, Homo sapiens
agggaccagcccctt

SEQ ID NO: 870446 - DNA, 15 bp, Homo sapiens
tagggaccagcccct

SEQ ID NO: 870447 - DNA, 15 bp, Homo sapiens
ttagggaccagcccc

SEQ ID NO: 870448 - DNA, 15 bp, Homo sapiens
attagggaccagccc

SEQ ID NO: 870449 - DNA, 15 bp, Homo sapiens
cattagggaccagcc

SEQ ID NO: 870450 - DNA, 15 bp, Homo sapiens
tcattagggaccagc

SEQ ID NO: 870451 - DNA, 15 bp, Homo sapiens
atcattagggaccag

SEQ ID NO: 870452 - DNA, 15 bp, Homo sapiens
gatcattagggacca

SEQ ID NO: 870453 - DNA, 15 bp, Homo sapiens
agatcattagggacc

SEQ ID NO: 870454 - DNA, 15 bp, Homo sapiens
cagatcattagggac

SEQ ID NO: 870455 - DNA, 15 bp, Homo sapiens
ccagatcattaggga

SEQ ID NO: 870456 - DNA, 15 bp, Homo sapiens
cccagatcattaggg

SEQ ID NO: 870457 - DNA, 15 bp, Homo sapiens
tcccagatcattagg

SEQ ID NO: 870458 - DNA, 15 bp, Homo sapiens
atcccagatcattag

SEQ ID NO: 870459 - DNA, 15 bp, Homo sapiens
catcccagatcatta

SEQ ID NO: 870460 - DNA, 15 bp, Homo sapiens
ccatcccagatcatt

SEQ ID NO: 870461 - DNA, 15 bp, Homo sapiens
cccatcccagatcat

SEQ ID NO: 870462 - DNA, 15 bp, Homo sapiens
tcccatcccagatca

SEQ ID NO: 870463 - DNA, 15 bp, Homo sapiens
atcccatcccagatc

SEQ ID NO: 870464 - DNA, 15 bp, Homo sapiens
catcccatcccagat

SEQ ID NO: 870465 - DNA, 15 bp, Homo sapiens
acatcccatcccaga

SEQ ID NO: 870466 - DNA, 15 bp, Homo sapiens
cacatcccatcccag

SEQ ID NO: 870467 - DNA, 15 bp, Homo sapiens
ccacatcccatccca

SEQ ID NO: 870468 - DNA, 15 bp, Homo sapiens
tccacatcccatccc

SEQ ID NO: 870469 - DNA, 15 bp, Homo sapiens
ttccacatcccatcc

SEQ ID NO: 870470 - DNA, 15 bp, Homo sapiens
attccacatcccatc

SEQ ID NO: 870471 - DNA, 15 bp, Homo sapiens
gattccacatcccat

SEQ ID NO: 870472 - DNA, 15 bp, Homo sapiens
ggattccacatccca

SEQ ID NO: 870473 - DNA, 15 bp, Homo sapiens
aggattccacatccc

SEQ ID NO: 870474 - DNA, 15 bp, Homo sapiens
aaggattccacatcc

SEQ ID NO: 870475 - DNA, 15 bp, Homo sapiens
gaaggattccacatc

SEQ ID NO: 870476 - DNA, 15 bp, Homo sapiens
agaaggattccacat

SEQ ID NO: 870477 - DNA, 15 bp, Homo sapiens
tagaaggattccaca

SEQ ID NO: 870478 - DNA, 15 bp, Homo sapiens
ctagaaggattccac

SEQ ID NO: 870479 - DNA, 15 bp, Homo sapiens
tctagaaggattcca

SEQ ID NO: 870480 - DNA, 15 bp, Homo sapiens
atctagaaggattcc

SEQ ID NO: 870481 - DNA, 15 bp, Homo sapiens
aatctagaaggattc

SEQ ID NO: 870482 - DNA, 15 bp, Homo sapiens
aaatctagaaggatt

SEQ ID NO: 870483 - DNA, 15 bp, Homo sapiens
gaaatctagaaggat

SEQ ID NO: 870484 - DNA, 15 bp, Homo sapiens
agaaatctagaagga

SEQ ID NO: 870485 - DNA, 15 bp, Homo sapiens
aagaaatctagaagg

SEQ ID NO: 870486 - DNA, 15 bp, Homo sapiens
aaagaaatctagaag

SEQ ID NO: 870487 - DNA, 15 bp, Homo sapiens
aaaagaaatctagaa

SEQ ID NO: 870488 - DNA, 15 bp, Homo sapiens
caaaagaaatctaga

SEQ ID NO: 870489 - DNA, 15 bp, Homo sapiens
acaaaagaaatctag

SEQ ID NO: 870490 - DNA, 15 bp, Homo sapiens
tacaaaagaaatcta

SEQ ID NO: 870491 - DNA, 15 bp, Homo sapiens
ttacaaaagaaatct

SEQ ID NO: 870492 - DNA, 15 bp, Homo sapiens
attacaaaagaaatc

SEQ ID NO: 870493 - DNA, 15 bp, Homo sapiens
tattacaaaagaaat

SEQ ID NO: 870494 - DNA, 15 bp, Homo sapiens
atattacaaaagaaa

SEQ ID NO: 870495 - DNA, 15 bp, Homo sapiens
aatattacaaaagaa

SEQ ID NO: 870496 - DNA, 15 bp, Homo sapiens
aaatattacaaaaga

SEQ ID NO: 870497 - DNA, 15 bp, Homo sapiens
taaatattacaaaag

SEQ ID NO: 870498 - DNA, 15 bp, Homo sapiens
ataaatattacaaaa

SEQ ID NO: 870499 - DNA, 15 bp, Homo sapiens
tataaatattacaaa

SEQ ID NO: 870500 - DNA, 15 bp, Homo sapiens
ttataaatattacaa

SEQ ID NO: 870501 - DNA, 15 bp, Homo sapiens
tttataaatattaca

SEQ ID NO: 870502 - DNA, 15 bp, Homo sapiens
ctttataaatattac

SEQ ID NO: 870503 - DNA, 15 bp, Homo sapiens
actttataaatatta

SEQ ID NO: 870504 - DNA, 15 bp, Homo sapiens
cactttataaatatt

SEQ ID NO: 870505 - DNA, 15 bp, Homo sapiens
gcactttataaatat

SEQ ID NO: 870506 - DNA, 15 bp, Homo sapiens
agcactttataaata

SEQ ID NO: 870507 - DNA, 15 bp, Homo sapiens
gagcactttataaat

SEQ ID NO: 870508 - DNA, 15 bp, Homo sapiens
agagcactttataaa

SEQ ID NO: 870509 - DNA, 15 bp, Homo sapiens
gagagcactttataa

SEQ ID NO: 870510 - DNA, 15 bp, Homo sapiens
tgagagcactttata

SEQ ID NO: 870511 - DNA, 15 bp, Homo sapiens
ctgagagcactttat

SEQ ID NO: 870512 - DNA, 15 bp, Homo sapiens
gctgagagcacttta

SEQ ID NO: 870513 - DNA, 15 bp, Homo sapiens
tgctgagagcacttt

SEQ ID NO: 870514 - DNA, 15 bp, Homo sapiens
ttgctgagagcactt

SEQ ID NO: 870515 - DNA, 15 bp, Homo sapiens
cttgctgagagcact

SEQ ID NO: 870516 - DNA, 15 bp, Homo sapiens
ccttgctgagagcac

SEQ ID NO: 870517 - DNA, 15 bp, Homo sapiens
accttgctgagagca

SEQ ID NO: 870518 - DNA, 15 bp, Homo sapiens
taccttgctgagagc

SEQ ID NO: 870519 - DNA, 15 bp, Homo sapiens
ataccttgctgagag

SEQ ID NO: 870520 - DNA, 15 bp, Homo sapiens
gataccttgctgaga

SEQ ID NO: 870521 - DNA, 15 bp, Homo sapiens
tgataccttgctgag

SEQ ID NO: 870522 - DNA, 15 bp, Homo sapiens
ttgataccttgctga

SEQ ID NO: 870523 - DNA, 15 bp, Homo sapiens
tttgataccttgctg

SEQ ID NO: 870524 - DNA, 15 bp, Homo sapiens
ttttgataccttgct

SEQ ID NO: 870525 - DNA, 15 bp, Homo sapiens
attttgataccttgc

SEQ ID NO: 870526 - DNA, 15 bp, Homo sapiens
cattttgataccttg

SEQ ID NO: 870527 - DNA, 15 bp, Homo sapiens
ccattttgatacctt

SEQ ID NO: 870528 - DNA, 15 bp, Homo sapiens
gccattttgatacct

SEQ ID NO: 870529 - DNA, 15 bp, Homo sapiens
tgccattttgatacc

SEQ ID NO: 870530 - DNA, 15 bp, Homo sapiens
ttgccattttgatac

SEQ ID NO: 870531 - DNA, 15 bp, Homo sapiens
tttgccattttgata

SEQ ID NO: 870532 - DNA, 15 bp, Homo sapiens
ttttgccattttgat

SEQ ID NO: 870533 - DNA, 15 bp, Homo sapiens
attttgccattttga

SEQ ID NO: 870534 - DNA, 15 bp, Homo sapiens
aattttgccattttg

SEQ ID NO: 870535 - DNA, 15 bp, Homo sapiens
caattttgccatttt

SEQ ID NO: 870536 - DNA, 15 bp, Homo sapiens
acaattttgccattt

SEQ ID NO: 870537 - DNA, 15 bp, Homo sapiens
cacaattttgccatt

SEQ ID NO: 870538 - DNA, 15 bp, Homo sapiens
tcacaattttgccat

SEQ ID NO: 870539 - DNA, 15 bp, Homo sapiens
ctcacaattttgcca

SEQ ID NO: 870540 - DNA, 15 bp, Homo sapiens
actcacaattttgcc

SEQ ID NO: 870541 - DNA, 15 bp, Homo sapiens
tactcacaattttgc

SEQ ID NO: 870542 - DNA, 15 bp, Homo sapiens
ttactcacaattttg

SEQ ID NO: 870543 - DNA, 15 bp, Homo sapiens
gttactcacaatttt

SEQ ID NO: 870544 - DNA, 15 bp, Homo sapiens
agttactcacaattt

SEQ ID NO: 870545 - DNA, 15 bp, Homo sapiens
tagttactcacaatt

SEQ ID NO: 870546 - DNA, 15 bp, Homo sapiens
atagttactcacaat

SEQ ID NO: 870547 - DNA, 15 bp, Homo sapiens
gatagttactcacaa

SEQ ID NO: 870548 - DNA, 15 bp, Homo sapiens
ggatagttactcaca

SEQ ID NO: 870549 - DNA, 15 bp, Homo sapiens
aggatagttactcac

SEQ ID NO: 870550 - DNA, 15 bp, Homo sapiens
gaggatagttactca

SEQ ID NO: 870551 - DNA, 15 bp, Homo sapiens
ggaggatagttactc

SEQ ID NO: 870552 - DNA, 15 bp, Homo sapiens
aggaggatagttact

SEQ ID NO: 870553 - DNA, 15 bp, Homo sapiens
aaggaggatagttac

SEQ ID NO: 870554 - DNA, 15 bp, Homo sapiens
aaaggaggatagtta

SEQ ID NO: 870555 - DNA, 15 bp, Homo sapiens
gaaaggaggatagtt

SEQ ID NO: 870556 - DNA, 15 bp, Homo sapiens
tgaaaggaggatagt

SEQ ID NO: 870557 - DNA, 15 bp, Homo sapiens
atgaaaggaggatag

SEQ ID NO: 870558 - DNA, 15 bp, Homo sapiens
aatgaaaggaggata

SEQ ID NO: 870559 - DNA, 15 bp, Homo sapiens
aaatgaaaggaggat

SEQ ID NO: 870560 - DNA, 15 bp, Homo sapiens
aaaatgaaaggagga

SEQ ID NO: 870561 - DNA, 15 bp, Homo sapiens
caaaatgaaaggagg

SEQ ID NO: 870562 - DNA, 15 bp, Homo sapiens
ccaaaatgaaaggag

SEQ ID NO: 870563 - DNA, 15 bp, Homo sapiens
cccaaaatgaaagga

SEQ ID NO: 870564 - DNA, 15 bp, Homo sapiens
tcccaaaatgaaagg

SEQ ID NO: 870565 - DNA, 15 bp, Homo sapiens
ttcccaaaatgaaag

SEQ ID NO: 870566 - DNA, 15 bp, Homo sapiens
cttcccaaaatgaaa

SEQ ID NO: 870567 - DNA, 15 bp, Homo sapiens
tcttcccaaaatgaa

SEQ ID NO: 870568 - DNA, 15 bp, Homo sapiens
ttcttcccaaaatga

SEQ ID NO: 870569 - DNA, 15 bp, Homo sapiens
cttcttcccaaaatg

SEQ ID NO: 870570 - DNA, 15 bp, Homo sapiens
tcttcttcccaaaat

SEQ ID NO: 870571 - DNA, 15 bp, Homo sapiens
atcttcttcccaaaa

SEQ ID NO: 870572 - DNA, 15 bp, Homo sapiens
catcttcttcccaaa

SEQ ID NO: 870573 - DNA, 15 bp, Homo sapiens
tcatcttcttcccaa

SEQ ID NO: 870574 - DNA, 15 bp, Homo sapiens
ctcatcttcttccca

SEQ ID NO: 870575 - DNA, 15 bp, Homo sapiens
cctcatcttcttccc

SEQ ID NO: 870576 - DNA, 15 bp, Homo sapiens
gcctcatcttcttcc

SEQ ID NO: 870577 - DNA, 15 bp, Homo sapiens
tgcctcatcttcttc

SEQ ID NO: 870578 - DNA, 15 bp, Homo sapiens
atgcctcatcttctt

SEQ ID NO: 870579 - DNA, 15 bp, Homo sapiens
catgcctcatcttct

SEQ ID NO: 870580 - DNA, 15 bp, Homo sapiens
tcatgcctcatcttc

SEQ ID NO: 870581 - DNA, 15 bp, Homo sapiens
ttcatgcctcatctt

SEQ ID NO: 870582 - DNA, 15 bp, Homo sapiens
cttcatgcctcatct

SEQ ID NO: 870583 - DNA, 15 bp, Homo sapiens
tcttcatgcctcatc

SEQ ID NO: 870584 - DNA, 15 bp, Homo sapiens
ctcttcatgcctcat

SEQ ID NO: 870585 - DNA, 15 bp, Homo sapiens
tctcttcatgcctca

SEQ ID NO: 870586 - DNA, 15 bp, Homo sapiens
ttctcttcatgcctc

SEQ ID NO: 870587 - DNA, 15 bp, Homo sapiens
attctcttcatgcct

SEQ ID NO: 870588 - DNA, 15 bp, Homo sapiens
aattctcttcatgcc

SEQ ID NO: 870589 - DNA, 15 bp, Homo sapiens
gaattctcttcatgc

SEQ ID NO: 870590 - DNA, 15 bp, Homo sapiens
tgaattctcttcatg

SEQ ID NO: 870591 - DNA, 15 bp, Homo sapiens
ctgaattctcttcat

SEQ ID NO: 870592 - DNA, 15 bp, Homo sapiens
tctgaattctcttca

SEQ ID NO: 870593 - DNA, 15 bp, Homo sapiens
gtctgaattctcttc

SEQ ID NO: 870594 - DNA, 15 bp, Homo sapiens
tgtctgaattctctt

SEQ ID NO: 870595 - DNA, 15 bp, Homo sapiens
ctgtctgaattctct

SEQ ID NO: 870596 - DNA, 15 bp, Homo sapiens
tctgtctgaattctc

SEQ ID NO: 870597 - DNA, 15 bp, Homo sapiens
ttctgtctgaattct

SEQ ID NO: 870598 - DNA, 15 bp, Homo sapiens
tttctgtctgaattc

SEQ ID NO: 870599 - DNA, 15 bp, Homo sapiens
gtttctgtctgaatt

SEQ ID NO: 870600 - DNA, 15 bp, Homo sapiens
agtttctgtctgaat

SEQ ID NO: 870601 - DNA, 15 bp, Homo sapiens
aagtttctgtctgaa

SEQ ID NO: 870602 - DNA, 15 bp, Homo sapiens
taagtttctgtctga

SEQ ID NO: 870603 - DNA, 15 bp, Homo sapiens
gtaagtttctgtctg

SEQ ID NO: 870604 - DNA, 15 bp, Homo sapiens
agtaagtttctgtct

SEQ ID NO: 870605 - DNA, 15 bp, Homo sapiens
gagtaagtttctgtc

SEQ ID NO: 870606 - DNA, 15 bp, Homo sapiens
tgagtaagtttctgt

SEQ ID NO: 870607 - DNA, 15 bp, Homo sapiens
ctgagtaagtttctg

SEQ ID NO: 870608 - DNA, 15 bp, Homo sapiens
tctgagtaagtttct

SEQ ID NO: 870609 - DNA, 15 bp, Homo sapiens
gtctgagtaagtttc

SEQ ID NO: 870610 - DNA, 15 bp, Homo sapiens
ggtctgagtaagttt

SEQ ID NO: 870611 - DNA, 15 bp, Homo sapiens
tggtctgagtaagtt

SEQ ID NO: 870612 - DNA, 15 bp, Homo sapiens
ctggtctgagtaagt

SEQ ID NO: 870613 - DNA, 15 bp, Homo sapiens
cctggtctgagtaag

SEQ ID NO: 870614 - DNA, 15 bp, Homo sapiens
ccctggtctgagtaa

SEQ ID NO: 870615 - DNA, 15 bp, Homo sapiens
cccctggtctgagta

SEQ ID NO: 870616 - DNA, 15 bp, Homo sapiens
tcccctggtctgagt

SEQ ID NO: 870617 - DNA, 15 bp, Homo sapiens
ctcccctggtctgag

SEQ ID NO: 870618 - DNA, 15 bp, Homo sapiens
cctcccctggtctga

SEQ ID NO: 870619 - DNA, 15 bp, Homo sapiens
gcctcccctggtctg

SEQ ID NO: 870620 - DNA, 15 bp, Homo sapiens
tgcctcccctggtct

SEQ ID NO: 870621 - DNA, 15 bp, Homo sapiens
ctgcctcccctggtc

SEQ ID NO: 870622 - DNA, 15 bp, Homo sapiens
tctgcctcccctggt

SEQ ID NO: 870623 - DNA, 15 bp, Homo sapiens
ttctgcctcccctgg

SEQ ID NO: 870624 - DNA, 15 bp, Homo sapiens
tttctgcctcccctg

SEQ ID NO: 870625 - DNA, 15 bp, Homo sapiens
gtttctgcctcccct

SEQ ID NO: 870626 - DNA, 15 bp, Homo sapiens
agtttctgcctcccc

SEQ ID NO: 870627 - DNA, 15 bp, Homo sapiens
tagtttctgcctccc

SEQ ID NO: 870628 - DNA, 15 bp, Homo sapiens
ttagtttctgcctcc

SEQ ID NO: 870629 - DNA, 15 bp, Homo sapiens
cttagtttctgcctc

SEQ ID NO: 870630 - DNA, 15 bp, Homo sapiens
gcttagtttctgcct

SEQ ID NO: 870631 - DNA, 15 bp, Homo sapiens
tgcttagtttctgcc

SEQ ID NO: 870632 - DNA, 15 bp, Homo sapiens
ctgcttagtttctgc

SEQ ID NO: 870633 - DNA, 15 bp, Homo sapiens
tctgcttagtttctg

SEQ ID NO: 870634 - DNA, 15 bp, Homo sapiens
ctctgcttagtttct

SEQ ID NO: 870635 - DNA, 15 bp, Homo sapiens
tctctgcttagtttc

SEQ ID NO: 870636 - DNA, 15 bp, Homo sapiens
ctctctgcttagttt

SEQ ID NO: 870637 - DNA, 15 bp, Homo sapiens
cctctctgcttagtt

SEQ ID NO: 870638 - DNA, 15 bp, Homo sapiens
tcctctctgcttagt

SEQ ID NO: 870639 - DNA, 15 bp, Homo sapiens
ttcctctctgcttag

SEQ ID NO: 870640 - DNA, 15 bp, Homo sapiens
tttcctctctgctta

SEQ ID NO: 870641 - DNA, 15 bp, Homo sapiens
ttttcctctctgctt

SEQ ID NO: 870642 - DNA, 15 bp, Homo sapiens
attttcctctctgct

SEQ ID NO: 870643 - DNA, 15 bp, Homo sapiens
cattttcctctctgc

SEQ ID NO: 870644 - DNA, 15 bp, Homo sapiens
tcattttcctctctg

SEQ ID NO: 870645 - DNA, 15 bp, Homo sapiens
gtcattttcctctct

SEQ ID NO: 870646 - DNA, 15 bp, Homo sapiens
ggtcattttcctctc

SEQ ID NO: 870647 - DNA, 15 bp, Homo sapiens
tggtcattttcctct

SEQ ID NO: 870648 - DNA, 15 bp, Homo sapiens
ttggtcattttcctc

SEQ ID NO: 870649 - DNA, 15 bp, Homo sapiens
cttggtcattttcct

SEQ ID NO: 870650 - DNA, 15 bp, Homo sapiens
tcttggtcattttcc

SEQ ID NO: 870651 - DNA, 15 bp, Homo sapiens
ctcttggtcattttc

SEQ ID NO: 870652 - DNA, 15 bp, Homo sapiens
actcttggtcatttt

SEQ ID NO: 870653 - DNA, 15 bp, Homo sapiens
aactcttggtcattt

SEQ ID NO: 870654 - DNA, 15 bp, Homo sapiens
taactcttggtcatt

SEQ ID NO: 870655 - DNA, 15 bp, Homo sapiens
ctaactcttggtcat

SEQ ID NO: 870656 - DNA, 15 bp, Homo sapiens
gctaactcttggtca

SEQ ID NO: 870657 - DNA, 15 bp, Homo sapiens
ggctaactcttggtc

SEQ ID NO: 870658 - DNA, 15 bp, Homo sapiens
gggctaactcttggt

SEQ ID NO: 870659 - DNA, 15 bp, Homo sapiens
agggctaactcttgg

SEQ ID NO: 870660 - DNA, 15 bp, Homo sapiens
cagggctaactcttg

SEQ ID NO: 870661 - DNA, 15 bp, Homo sapiens
ccagggctaactctt

SEQ ID NO: 870662 - DNA, 15 bp, Homo sapiens
cccagggctaactct

SEQ ID NO: 870663 - DNA, 15 bp, Homo sapiens
gcccagggctaactc

SEQ ID NO: 870664 - DNA, 15 bp, Homo sapiens
tgcccagggctaact

SEQ ID NO: 870665 - DNA, 15 bp, Homo sapiens
atgcccagggctaac

SEQ ID NO: 870666 - DNA, 15 bp, Homo sapiens
catgcccagggctaa

SEQ ID NO: 870667 - DNA, 15 bp, Homo sapiens
ccatgcccagggcta

SEQ ID NO: 870668 - DNA, 15 bp, Homo sapiens
tccatgcccagggct

SEQ ID NO: 870669 - DNA, 15 bp, Homo sapiens
ttccatgcccagggc

SEQ ID NO: 870670 - DNA, 15 bp, Homo sapiens
attccatgcccaggg

SEQ ID NO: 870671 - DNA, 15 bp, Homo sapiens
cattccatgcccagg

SEQ ID NO: 870672 - DNA, 15 bp, Homo sapiens
acattccatgcccag

SEQ ID NO: 870673 - DNA, 15 bp, Homo sapiens
cacattccatgccca

SEQ ID NO: 870674 - DNA, 15 bp, Homo sapiens
tcacattccatgccc

SEQ ID NO: 870675 - DNA, 15 bp, Homo sapiens
ttcacattccatgcc

SEQ ID NO: 870676 - DNA, 15 bp, Homo sapiens
tttcacattccatgc

SEQ ID NO: 870677 - DNA, 15 bp, Homo sapiens
ctttcacattccatg

SEQ ID NO: 870678 - DNA, 15 bp, Homo sapiens
tctttcacattccat

SEQ ID NO: 870679 - DNA, 15 bp, Homo sapiens
ttctttcacattcca

SEQ ID NO: 870680 - DNA, 15 bp, Homo sapiens
gttctttcacattcc

SEQ ID NO: 870681 - DNA, 15 bp, Homo sapiens
ggttctttcacattc

SEQ ID NO: 870682 - DNA, 15 bp, Homo sapiens
gggttctttcacatt

SEQ ID NO: 870683 - DNA, 15 bp, Homo sapiens
agggttctttcacat

SEQ ID NO: 870684 - DNA, 15 bp, Homo sapiens
tagggttctttcaca

SEQ ID NO: 870685 - DNA, 15 bp, Homo sapiens
ttagggttctttcac

SEQ ID NO: 870686 - DNA, 15 bp, Homo sapiens
tttagggttctttca

SEQ ID NO: 870687 - DNA, 15 bp, Homo sapiens
gtttagggttctttc

SEQ ID NO: 870688 - DNA, 15 bp, Homo sapiens
cgtttagggttcttt

SEQ ID NO: 870689 - DNA, 15 bp, Homo sapiens
acgtttagggttctt

SEQ ID NO: 870690 - DNA, 15 bp, Homo sapiens
cacgtttagggttct

SEQ ID NO: 870691 - DNA, 15 bp, Homo sapiens
tcacgtttagggttc

SEQ ID NO: 870692 - DNA, 15 bp, Homo sapiens
gtcacgtttagggtt

SEQ ID NO: 870693 - DNA, 15 bp, Homo sapiens
agtcacgtttagggt

SEQ ID NO: 870694 - DNA, 15 bp, Homo sapiens
aagtcacgtttaggg

SEQ ID NO: 870695 - DNA, 15 bp, Homo sapiens
caagtcacgtttagg

SEQ ID NO: 870696 - DNA, 15 bp, Homo sapiens
ccaagtcacgtttag

SEQ ID NO: 870697 - DNA, 15 bp, Homo sapiens
tccaagtcacgttta

SEQ ID NO: 870698 - DNA, 15 bp, Homo sapiens
ttccaagtcacgttt

SEQ ID NO: 870699 - DNA, 15 bp, Homo sapiens
tttccaagtcacgtt

SEQ ID NO: 870700 - DNA, 15 bp, Homo sapiens
atttccaagtcacgt

SEQ ID NO: 870701 - DNA, 15 bp, Homo sapiens
tatttccaagtcacg

SEQ ID NO: 870702 - DNA, 15 bp, Homo sapiens
ttatttccaagtcac

SEQ ID NO: 870703 - DNA, 15 bp, Homo sapiens
attatttccaagtca

SEQ ID NO: 870704 - DNA, 15 bp, Homo sapiens
cattatttccaagtc

SEQ ID NO: 870705 - DNA, 15 bp, Homo sapiens
gcattatttccaagt

SEQ ID NO: 870706 - DNA, 15 bp, Homo sapiens
ggcattatttccaag

SEQ ID NO: 870707 - DNA, 15 bp, Homo sapiens
gggcattatttccaa

SEQ ID NO: 870708 - DNA, 15 bp, Homo sapiens
tgggcattatttcca

SEQ ID NO: 870709 - DNA, 15 bp, Homo sapiens
ttgggcattatttcc

SEQ ID NO: 870710 - DNA, 15 bp, Homo sapiens
cttgggcattatttc

SEQ ID NO: 870711 - DNA, 15 bp, Homo sapiens
ccttgggcattattt

SEQ ID NO: 870712 - DNA, 15 bp, Homo sapiens
accttgggcattatt

SEQ ID NO: 870713 - DNA, 15 bp, Homo sapiens
taccttgggcattat

SEQ ID NO: 870714 - DNA, 15 bp, Homo sapiens
ataccttgggcatta

SEQ ID NO: 870715 - DNA, 15 bp, Homo sapiens
tataccttgggcatt

SEQ ID NO: 870716 - DNA, 15 bp, Homo sapiens
atataccttgggcat

SEQ ID NO: 870717 - DNA, 15 bp, Homo sapiens
aatataccttgggca

SEQ ID NO: 870718 - DNA, 15 bp, Homo sapiens
gaatataccttgggc

SEQ ID NO: 870719 - DNA, 15 bp, Homo sapiens
ggaatataccttggg

SEQ ID NO: 870720 - DNA, 15 bp, Homo sapiens
tggaatataccttgg

SEQ ID NO: 870721 - DNA, 15 bp, Homo sapiens
atggaatataccttg

SEQ ID NO: 870722 - DNA, 15 bp, Homo sapiens
aatggaatatacctt

SEQ ID NO: 870723 - DNA, 15 bp, Homo sapiens
gaatggaatatacct

SEQ ID NO: 870724 - DNA, 15 bp, Homo sapiens
agaatggaatatacc

SEQ ID NO: 870725 - DNA, 15 bp, Homo sapiens
gagaatggaatatac

SEQ ID NO: 870726 - DNA, 15 bp, Homo sapiens
ggagaatggaatata

SEQ ID NO: 870727 - DNA, 15 bp, Homo sapiens
cggagaatggaatat

SEQ ID NO: 870728 - DNA, 15 bp, Homo sapiens
ccggagaatggaata

SEQ ID NO: 870729 - DNA, 15 bp, Homo sapiens
cccggagaatggaat

SEQ ID NO: 870730 - DNA, 15 bp, Homo sapiens
tcccggagaatggaa

SEQ ID NO: 870731 - DNA, 15 bp, Homo sapiens
atcccggagaatgga

SEQ ID NO: 870732 - DNA, 15 bp, Homo sapiens
aatcccggagaatgg

SEQ ID NO: 870733 - DNA, 15 bp, Homo sapiens
aaatcccggagaatg

SEQ ID NO: 870734 - DNA, 15 bp, Homo sapiens
caaatcccggagaat

SEQ ID NO: 870735 - DNA, 15 bp, Homo sapiens
acaaatcccggagaa

SEQ ID NO: 870736 - DNA, 15 bp, Homo sapiens
aacaaatcccggaga

SEQ ID NO: 870737 - DNA, 15 bp, Homo sapiens
caacaaatcccggag

SEQ ID NO: 870738 - DNA, 15 bp, Homo sapiens
ccaacaaatcccgga

SEQ ID NO: 870739 - DNA, 15 bp, Homo sapiens
gccaacaaatcccgg

SEQ ID NO: 870740 - DNA, 15 bp, Homo sapiens
tgccaacaaatcccg

SEQ ID NO: 870741 - DNA, 15 bp, Homo sapiens
atgccaacaaatccc

SEQ ID NO: 870742 - DNA, 15 bp, Homo sapiens
aatgccaacaaatcc

SEQ ID NO: 870743 - DNA, 15 bp, Homo sapiens
aaatgccaacaaatc

SEQ ID NO: 870744 - DNA, 15 bp, Homo sapiens
aaaatgccaacaaat

SEQ ID NO: 870745 - DNA, 15 bp, Homo sapiens
gaaaatgccaacaaa

SEQ ID NO: 870746 - DNA, 15 bp, Homo sapiens
agaaaatgccaacaa

SEQ ID NO: 870747 - DNA, 15 bp, Homo sapiens
aagaaaatgccaaca

SEQ ID NO: 870748 - DNA, 15 bp, Homo sapiens
caagaaaatgccaac

SEQ ID NO: 870749 - DNA, 15 bp, Homo sapiens
tcaagaaaatgccaa

SEQ ID NO: 870750 - DNA, 15 bp, Homo sapiens
ctcaagaaaatgcca

SEQ ID NO: 870751 - DNA, 15 bp, Homo sapiens
cctcaagaaaatgcc

SEQ ID NO: 870752 - DNA, 15 bp, Homo sapiens
acctcaagaaaatgc

SEQ ID NO: 870753 - DNA, 15 bp, Homo sapiens
cacctcaagaaaatg

SEQ ID NO: 870754 - DNA, 15 bp, Homo sapiens
tcacctcaagaaaat

SEQ ID NO: 870755 - DNA, 15 bp, Homo sapiens
ttcacctcaagaaaa

SEQ ID NO: 870756 - DNA, 15 bp, Homo sapiens
cttcacctcaagaaa

SEQ ID NO: 870757 - DNA, 15 bp, Homo sapiens
tcttcacctcaagaa

SEQ ID NO: 870758 - DNA, 15 bp, Homo sapiens
ttcttcacctcaaga

SEQ ID NO: 870759 - DNA, 15 bp, Homo sapiens
attcttcacctcaag

SEQ ID NO: 870760 - DNA, 15 bp, Homo sapiens
aattcttcacctcaa

SEQ ID NO: 870761 - DNA, 15 bp, Homo sapiens
caattcttcacctca

SEQ ID NO: 870762 - DNA, 15 bp, Homo sapiens
gcaattcttcacctc

SEQ ID NO: 870763 - DNA, 15 bp, Homo sapiens
tgcaattcttcacct

SEQ ID NO: 870764 - DNA, 15 bp, Homo sapiens
ctgcaattcttcacc

SEQ ID NO: 870765 - DNA, 15 bp, Homo sapiens
tctgcaattcttcac

SEQ ID NO: 870766 - DNA, 15 bp, Homo sapiens
ttctgcaattcttca

SEQ ID NO: 870767 - DNA, 15 bp, Homo sapiens
attctgcaattcttc

SEQ ID NO: 870768 - DNA, 15 bp, Homo sapiens
tattctgcaattctt

SEQ ID NO: 870769 - DNA, 15 bp, Homo sapiens
gtattctgcaattct

SEQ ID NO: 870770 - DNA, 15 bp, Homo sapiens
tgtattctgcaattc

SEQ ID NO: 870771 - DNA, 15 bp, Homo sapiens
atgtattctgcaatt

SEQ ID NO: 870772 - DNA, 15 bp, Homo sapiens
aatgtattctgcaat

SEQ ID NO: 870773 - DNA, 15 bp, Homo sapiens
gaatgtattctgcaa

SEQ ID NO: 870774 - DNA, 15 bp, Homo sapiens
agaatgtattctgca

SEQ ID NO: 870775 - DNA, 15 bp, Homo sapiens
aagaatgtattctgc

SEQ ID NO: 870776 - DNA, 15 bp, Homo sapiens
aaagaatgtattctg

SEQ ID NO: 870777 - DNA, 15 bp, Homo sapiens
taaagaatgtattct

SEQ ID NO: 870778 - DNA, 15 bp, Homo sapiens
ttaaagaatgtattc

SEQ ID NO: 870779 - DNA, 15 bp, Homo sapiens
attaaagaatgtatt

SEQ ID NO: 870780 - DNA, 15 bp, Homo sapiens
cattaaagaatgtat

SEQ ID NO: 870781 - DNA, 15 bp, Homo sapiens
acattaaagaatgta

SEQ ID NO: 870782 - DNA, 15 bp, Homo sapiens
cacattaaagaatgt

SEQ ID NO: 870783 - DNA, 15 bp, Homo sapiens
tcacattaaagaatg

SEQ ID NO: 870784 - DNA, 15 bp, Homo sapiens
gtcacattaaagaat

SEQ ID NO: 870785 - DNA, 15 bp, Homo sapiens
ggtcacattaaagaa

SEQ ID NO: 870786 - DNA, 15 bp, Homo sapiens
aggtcacattaaaga

SEQ ID NO: 870787 - DNA, 15 bp, Homo sapiens
taggtcacattaaag

SEQ ID NO: 870788 - DNA, 15 bp, Homo sapiens
gtaggtcacattaaa

SEQ ID NO: 870789 - DNA, 15 bp, Homo sapiens
tgtaggtcacattaa

SEQ ID NO: 870790 - DNA, 15 bp, Homo sapiens
atgtaggtcacatta

SEQ ID NO: 870791 - DNA, 15 bp, Homo sapiens
tatgtaggtcacatt

SEQ ID NO: 870792 - DNA, 15 bp, Homo sapiens
atatgtaggtcacat

SEQ ID NO: 870793 - DNA, 15 bp, Homo sapiens
aatatgtaggtcaca

SEQ ID NO: 870794 - DNA, 15 bp, Homo sapiens
aaatatgtaggtcac

SEQ ID NO: 870795 - DNA, 15 bp, Homo sapiens
taaatatgtaggtca

SEQ ID NO: 870796 - DNA, 15 bp, Homo sapiens
gtaaatatgtaggtc

SEQ ID NO: 870797 - DNA, 15 bp, Homo sapiens
ggtaaatatgtaggt

SEQ ID NO: 870798 - DNA, 15 bp, Homo sapiens
gggtaaatatgtagg

SEQ ID NO: 870799 - DNA, 15 bp, Homo sapiens
tgggtaaatatgtag

SEQ ID NO: 870800 - DNA, 15 bp, Homo sapiens
atgggtaaatatgta

SEQ ID NO: 870801 - DNA, 15 bp, Homo sapiens
catgggtaaatatgt

SEQ ID NO: 870802 - DNA, 15 bp, Homo sapiens
ccatgggtaaatatg

SEQ ID NO: 870803 - DNA, 15 bp, Homo sapiens
cccatgggtaaatat

SEQ ID NO: 870804 - DNA, 15 bp, Homo sapiens
tcccatgggtaaata

SEQ ID NO: 870805 - DNA, 15 bp, Homo sapiens
ctcccatgggtaaat

SEQ ID NO: 870806 - DNA, 15 bp, Homo sapiens
cctcccatgggtaaa

SEQ ID NO: 870807 - DNA, 15 bp, Homo sapiens
tcctcccatgggtaa

SEQ ID NO: 870808 - DNA, 15 bp, Homo sapiens
ttcctcccatgggta

SEQ ID NO: 870809 - DNA, 15 bp, Homo sapiens
cttcctcccatgggt

SEQ ID NO: 870810 - DNA, 15 bp, Homo sapiens
acttcctcccatggg

SEQ ID NO: 870811 - DNA, 15 bp, Homo sapiens
gacttcctcccatgg

SEQ ID NO: 870812 - DNA, 15 bp, Homo sapiens
agacttcctcccatg

SEQ ID NO: 870813 - DNA, 15 bp, Homo sapiens
cagacttcctcccat

SEQ ID NO: 870814 - DNA, 15 bp, Homo sapiens
gcagacttcctccca

SEQ ID NO: 870815 - DNA, 15 bp, Homo sapiens
agcagacttcctccc

SEQ ID NO: 870816 - DNA, 15 bp, Homo sapiens
gagcagacttcctcc

SEQ ID NO: 870817 - DNA, 15 bp, Homo sapiens
ggagcagacttcctc

SEQ ID NO: 870818 - DNA, 15 bp, Homo sapiens
aggagcagacttcct

SEQ ID NO: 870819 - DNA, 15 bp, Homo sapiens
caggagcagacttcc

SEQ ID NO: 870820 - DNA, 15 bp, Homo sapiens
ccaggagcagacttc

SEQ ID NO: 870821 - DNA, 15 bp, Homo sapiens
tccaggagcagactt

SEQ ID NO: 870822 - DNA, 15 bp, Homo sapiens
gtccaggagcagact

SEQ ID NO: 870823 - DNA, 15 bp, Homo sapiens
agtccaggagcagac

SEQ ID NO: 870824 - DNA, 15 bp, Homo sapiens
gagtccaggagcaga

SEQ ID NO: 870825 - DNA, 15 bp, Homo sapiens
agagtccaggagcag

SEQ ID NO: 870826 - DNA, 15 bp, Homo sapiens
aagagtccaggagca

SEQ ID NO: 870827 - DNA, 15 bp, Homo sapiens
caagagtccaggagc

SEQ ID NO: 870828 - DNA, 15 bp, Homo sapiens
tcaagagtccaggag

SEQ ID NO: 870829 - DNA, 15 bp, Homo sapiens
ctcaagagtccagga

SEQ ID NO: 870830 - DNA, 15 bp, Homo sapiens
tctcaagagtccagg

SEQ ID NO: 870831 - DNA, 15 bp, Homo sapiens
atctcaagagtccag

SEQ ID NO: 870832 - DNA, 15 bp, Homo sapiens
aatctcaagagtcca

SEQ ID NO: 870833 - DNA, 15 bp, Homo sapiens
gaatctcaagagtcc

SEQ ID NO: 870834 - DNA, 15 bp, Homo sapiens
tgaatctcaagagtc

SEQ ID NO: 870835 - DNA, 15 bp, Homo sapiens
ctgaatctcaagagt

SEQ ID NO: 870836 - DNA, 15 bp, Homo sapiens
actgaatctcaagag

SEQ ID NO: 870837 - DNA, 15 bp, Homo sapiens
gactgaatctcaaga

SEQ ID NO: 870838 - DNA, 15 bp, Homo sapiens
tgactgaatctcaag

SEQ ID NO: 870839 - DNA, 15 bp, Homo sapiens
atgactgaatctcaa

SEQ ID NO: 870840 - DNA, 15 bp, Homo sapiens
tatgactgaatctca

SEQ ID NO: 870841 - DNA, 15 bp, Homo sapiens
ttatgactgaatctc

SEQ ID NO: 870842 - DNA, 15 bp, Homo sapiens
tttatgactgaatct

SEQ ID NO: 870843 - DNA, 15 bp, Homo sapiens
ctttatgactgaatc

SEQ ID NO: 870844 - DNA, 15 bp, Homo sapiens
gctttatgactgaat

SEQ ID NO: 870845 - DNA, 15 bp, Homo sapiens
ggctttatgactgaa

SEQ ID NO: 870846 - DNA, 15 bp, Homo sapiens
gggctttatgactga

SEQ ID NO: 870847 - DNA, 15 bp, Homo sapiens
tgggctttatgactg

SEQ ID NO: 870848 - DNA, 15 bp, Homo sapiens
ctgggctttatgact

SEQ ID NO: 870849 - DNA, 15 bp, Homo sapiens
cctgggctttatgac

SEQ ID NO: 870850 - DNA, 15 bp, Homo sapiens
gcctgggctttatga

SEQ ID NO: 870851 - DNA, 15 bp, Homo sapiens
ggcctgggctttatg

SEQ ID NO: 870852 - DNA, 15 bp, Homo sapiens
tggcctgggctttat

SEQ ID NO: 870853 - DNA, 15 bp, Homo sapiens
ctggcctgggcttta

SEQ ID NO: 870854 - DNA, 15 bp, Homo sapiens
cctggcctgggcttt

SEQ ID NO: 870855 - DNA, 15 bp, Homo sapiens
ccctggcctgggctt

SEQ ID NO: 870856 - DNA, 15 bp, Homo sapiens
tccctggcctgggct

SEQ ID NO: 870857 - DNA, 15 bp, Homo sapiens
ttccctggcctgggc

SEQ ID NO: 870858 - DNA, 15 bp, Homo sapiens
tttccctggcctggg

SEQ ID NO: 870859 - DNA, 15 bp, Homo sapiens
atttccctggcctgg

SEQ ID NO: 870860 - DNA, 15 bp, Homo sapiens
tatttccctggcctg

SEQ ID NO: 870861 - DNA, 15 bp, Homo sapiens
ttatttccctggcct

SEQ ID NO: 870862 - DNA, 15 bp, Homo sapiens
attatttccctggcc

SEQ ID NO: 870863 - DNA, 15 bp, Homo sapiens
cattatttccctggc

SEQ ID NO: 870864 - DNA, 15 bp, Homo sapiens
acattatttccctgg

SEQ ID NO: 870865 - DNA, 15 bp, Homo sapiens
tacattatttccctg

SEQ ID NO: 870866 - DNA, 15 bp, Homo sapiens
ttacattatttccct

SEQ ID NO: 870867 - DNA, 15 bp, Homo sapiens
cttacattatttccc

SEQ ID NO: 870868 - DNA, 15 bp, Homo sapiens
acttacattatttcc

SEQ ID NO: 870869 - DNA, 15 bp, Homo sapiens
gacttacattatttc

SEQ ID NO: 870870 - DNA, 15 bp, Homo sapiens
agacttacattattt

SEQ ID NO: 870871 - DNA, 15 bp, Homo sapiens
cagacttacattatt

SEQ ID NO: 870872 - DNA, 15 bp, Homo sapiens
gcagacttacattat

SEQ ID NO: 870873 - DNA, 15 bp, Homo sapiens
tgcagacttacatta

SEQ ID NO: 870874 - DNA, 15 bp, Homo sapiens
ctgcagacttacatt

SEQ ID NO: 870875 - DNA, 15 bp, Homo sapiens
cctgcagacttacat

SEQ ID NO: 870876 - DNA, 15 bp, Homo sapiens
gcctgcagacttaca

SEQ ID NO: 870877 - DNA, 15 bp, Homo sapiens
ggcctgcagacttac

SEQ ID NO: 870878 - DNA, 15 bp, Homo sapiens
gggcctgcagactta

SEQ ID NO: 870879 - DNA, 15 bp, Homo sapiens
ggggcctgcagactt

SEQ ID NO: 870880 - DNA, 15 bp, Homo sapiens
aggggcctgcagact

SEQ ID NO: 870881 - DNA, 15 bp, Homo sapiens
caggggcctgcagac

SEQ ID NO: 870882 - DNA, 15 bp, Homo sapiens
acaggggcctgcaga

SEQ ID NO: 870883 - DNA, 15 bp, Homo sapiens
gacaggggcctgcag

SEQ ID NO: 870884 - DNA, 15 bp, Homo sapiens
tgacaggggcctgca

SEQ ID NO: 870885 - DNA, 15 bp, Homo sapiens
atgacaggggcctgc

SEQ ID NO: 870886 - DNA, 15 bp, Homo sapiens
gatgacaggggcctg

SEQ ID NO: 870887 - DNA, 15 bp, Homo sapiens
tgatgacaggggcct

SEQ ID NO: 870888 - DNA, 15 bp, Homo sapiens
ctgatgacaggggcc

SEQ ID NO: 870889 - DNA, 15 bp, Homo sapiens
actgatgacaggggc

SEQ ID NO: 870890 - DNA, 15 bp, Homo sapiens
tactgatgacagggg

SEQ ID NO: 870891 - DNA, 15 bp, Homo sapiens
ctactgatgacaggg

SEQ ID NO: 870892 - DNA, 15 bp, Homo sapiens
cctactgatgacagg

SEQ ID NO: 870893 - DNA, 15 bp, Homo sapiens
tcctactgatgacag

SEQ ID NO: 870894 - DNA, 15 bp, Homo sapiens
atcctactgatgaca

SEQ ID NO: 870895 - DNA, 15 bp, Homo sapiens
aatcctactgatgac

SEQ ID NO: 870896 - DNA, 15 bp, Homo sapiens
taatcctactgatga

SEQ ID NO: 870897 - DNA, 15 bp, Homo sapiens
ctaatcctactgatg

SEQ ID NO: 870898 - DNA, 15 bp, Homo sapiens
cctaatcctactgat

SEQ ID NO: 870899 - DNA, 15 bp, Homo sapiens
ccctaatcctactga

SEQ ID NO: 870900 - DNA, 15 bp, Homo sapiens
tccctaatcctactg

SEQ ID NO: 870901 - DNA, 15 bp, Homo sapiens
ctccctaatcctact

SEQ ID NO: 870902 - DNA, 15 bp, Homo sapiens
tctccctaatcctac

SEQ ID NO: 870903 - DNA, 15 bp, Homo sapiens
ttctccctaatccta

SEQ ID NO: 870904 - DNA, 15 bp, Homo sapiens
cttctccctaatcct

SEQ ID NO: 870905 - DNA, 15 bp, Homo sapiens
tcttctccctaatcc

SEQ ID NO: 870906 - DNA, 15 bp, Homo sapiens
ctcttctccctaatc

SEQ ID NO: 870907 - DNA, 15 bp, Homo sapiens
actcttctccctaat

SEQ ID NO: 870908 - DNA, 15 bp, Homo sapiens
aactcttctccctaa

SEQ ID NO: 870909 - DNA, 15 bp, Homo sapiens
gaactcttctcccta

SEQ ID NO: 870910 - DNA, 15 bp, Homo sapiens
agaactcttctccct

SEQ ID NO: 870911 - DNA, 15 bp, Homo sapiens
gagaactcttctccc

SEQ ID NO: 870912 - DNA, 15 bp, Homo sapiens
tgagaactcttctcc

SEQ ID NO: 870913 - DNA, 15 bp, Homo sapiens
ctgagaactcttctc

SEQ ID NO: 870914 - DNA, 15 bp, Homo sapiens
actgagaactcttct

SEQ ID NO: 870915 - DNA, 15 bp, Homo sapiens
tactgagaactcttc

SEQ ID NO: 870916 - DNA, 15 bp, Homo sapiens
ctactgagaactctt

SEQ ID NO: 870917 - DNA, 15 bp, Homo sapiens
tctactgagaactct

SEQ ID NO: 870918 - DNA, 15 bp, Homo sapiens
ttctactgagaactc

SEQ ID NO: 870919 - DNA, 15 bp, Homo sapiens
tttctactgagaact

SEQ ID NO: 870920 - DNA, 15 bp, Homo sapiens
ttttctactgagaac

SEQ ID NO: 870921 - DNA, 15 bp, Homo sapiens
gttttctactgagaa

SEQ ID NO: 870922 - DNA, 15 bp, Homo sapiens
tgttttctactgaga

SEQ ID NO: 870923 - DNA, 15 bp, Homo sapiens
ctgttttctactgag

SEQ ID NO: 870924 - DNA, 15 bp, Homo sapiens
cctgttttctactga

SEQ ID NO: 870925 - DNA, 15 bp, Homo sapiens
ccctgttttctactg

SEQ ID NO: 870926 - DNA, 15 bp, Homo sapiens
tccctgttttctact

SEQ ID NO: 870927 - DNA, 15 bp, Homo sapiens
ctccctgttttctac

SEQ ID NO: 870928 - DNA, 15 bp, Homo sapiens
cctccctgttttcta

SEQ ID NO: 870929 - DNA, 15 bp, Homo sapiens
gcctccctgttttct

SEQ ID NO: 870930 - DNA, 15 bp, Homo sapiens
agcctccctgttttc

SEQ ID NO: 870931 - DNA, 15 bp, Homo sapiens
cagcctccctgtttt

SEQ ID NO: 870932 - DNA, 15 bp, Homo sapiens
ccagcctccctgttt

SEQ ID NO: 870933 - DNA, 15 bp, Homo sapiens
tccagcctccctgtt

SEQ ID NO: 870934 - DNA, 15 bp, Homo sapiens
ctccagcctccctgt

SEQ ID NO: 870935 - DNA, 15 bp, Homo sapiens
tctccagcctccctg

SEQ ID NO: 870936 - DNA, 15 bp, Homo sapiens
ctctccagcctccct

SEQ ID NO: 870937 - DNA, 15 bp, Homo sapiens
tctctccagcctccc

SEQ ID NO: 870938 - DNA, 15 bp, Homo sapiens
ttctctccagcctcc

SEQ ID NO: 870939 - DNA, 15 bp, Homo sapiens
tttctctccagcctc

SEQ ID NO: 870940 - DNA, 15 bp, Homo sapiens
ttttctctccagcct

SEQ ID NO: 870941 - DNA, 15 bp, Homo sapiens
cttttctctccagcc

SEQ ID NO: 870942 - DNA, 15 bp, Homo sapiens
tcttttctctccagc

SEQ ID NO: 870943 - DNA, 15 bp, Homo sapiens
ttcttttctctccag

SEQ ID NO: 870944 - DNA, 15 bp, Homo sapiens
attcttttctctcca

SEQ ID NO: 870945 - DNA, 15 bp, Homo sapiens
cattcttttctctcc

SEQ ID NO: 870946 - DNA, 15 bp, Homo sapiens
ccattcttttctctc

SEQ ID NO: 870947 - DNA, 15 bp, Homo sapiens
accattcttttctct

SEQ ID NO: 870948 - DNA, 15 bp, Homo sapiens
aaccattcttttctc

SEQ ID NO: 870949 - DNA, 15 bp, Homo sapiens
taaccattcttttct

SEQ ID NO: 870950 - DNA, 15 bp, Homo sapiens
ttaaccattcttttc

SEQ ID NO: 870951 - DNA, 15 bp, Homo sapiens
attaaccattctttt

SEQ ID NO: 870952 - DNA, 15 bp, Homo sapiens
cattaaccattcttt

SEQ ID NO: 870953 - DNA, 15 bp, Homo sapiens
acattaaccattctt

SEQ ID NO: 870954 - DNA, 15 bp, Homo sapiens
aacattaaccattct

SEQ ID NO: 870955 - DNA, 15 bp, Homo sapiens
taacattaaccattc

SEQ ID NO: 870956 - DNA, 15 bp, Homo sapiens
ttaacattaaccatt

SEQ ID NO: 870957 - DNA, 15 bp, Homo sapiens
gttaacattaaccat

SEQ ID NO: 870958 - DNA, 15 bp, Homo sapiens
cgttaacattaacca

SEQ ID NO: 870959 - DNA, 15 bp, Homo sapiens
acgttaacattaacc

SEQ ID NO: 870960 - DNA, 15 bp, Homo sapiens
aacgttaacattaac

SEQ ID NO: 870961 - DNA, 15 bp, Homo sapiens
taacgttaacattaa

SEQ ID NO: 870962 - DNA, 15 bp, Homo sapiens
ttaacgttaacatta

SEQ ID NO: 870963 - DNA, 15 bp, Homo sapiens
attaacgttaacatt

SEQ ID NO: 870964 - DNA, 15 bp, Homo sapiens
tattaacgttaacat

SEQ ID NO: 870965 - DNA, 15 bp, Homo sapiens
atattaacgttaaca

SEQ ID NO: 870966 - DNA, 15 bp, Homo sapiens
tatattaacgttaac

SEQ ID NO: 870967 - DNA, 15 bp, Homo sapiens
ttatattaacgttaa

SEQ ID NO: 870968 - DNA, 15 bp, Homo sapiens
gttatattaacgtta

SEQ ID NO: 870969 - DNA, 15 bp, Homo sapiens
agttatattaacgtt

SEQ ID NO: 870970 - DNA, 15 bp, Homo sapiens
tagttatattaacgt

SEQ ID NO: 870971 - DNA, 15 bp, Homo sapiens
ctagttatattaacg

SEQ ID NO: 870972 - DNA, 15 bp, Homo sapiens
tctagttatattaac

SEQ ID NO: 870973 - DNA, 15 bp, Homo sapiens
ttctagttatattaa

SEQ ID NO: 870974 - DNA, 15 bp, Homo sapiens
tttctagttatatta

SEQ ID NO: 870975 - DNA, 15 bp, Homo sapiens
ctttctagttatatt

SEQ ID NO: 870976 - DNA, 15 bp, Homo sapiens
tctttctagttatat

SEQ ID NO: 870977 - DNA, 15 bp, Homo sapiens
gtctttctagttata

SEQ ID NO: 870978 - DNA, 15 bp, Homo sapiens
agtctttctagttat

SEQ ID NO: 870979 - DNA, 15 bp, Homo sapiens
cagtctttctagtta

SEQ ID NO: 870980 - DNA, 15 bp, Homo sapiens
gcagtctttctagtt

SEQ ID NO: 870981 - DNA, 15 bp, Homo sapiens
tgcagtctttctagt

SEQ ID NO: 870982 - DNA, 15 bp, Homo sapiens
ctgcagtctttctag

SEQ ID NO: 870983 - DNA, 15 bp, Homo sapiens
tctgcagtctttcta

SEQ ID NO: 870984 - DNA, 15 bp, Homo sapiens
ttctgcagtctttct

SEQ ID NO: 870985 - DNA, 15 bp, Homo sapiens
gttctgcagtctttc

SEQ ID NO: 870986 - DNA, 15 bp, Homo sapiens
agttctgcagtcttt

SEQ ID NO: 870987 - DNA, 15 bp, Homo sapiens
aagttctgcagtctt

SEQ ID NO: 870988 - DNA, 15 bp, Homo sapiens
taagttctgcagtct

SEQ ID NO: 870989 - DNA, 15 bp, Homo sapiens
ctaagttctgcagtc

SEQ ID NO: 870990 - DNA, 15 bp, Homo sapiens
cctaagttctgcagt

SEQ ID NO: 870991 - DNA, 15 bp, Homo sapiens
tcctaagttctgcag

SEQ ID NO: 870992 - DNA, 15 bp, Homo sapiens
gtcctaagttctgca

SEQ ID NO: 870993 - DNA, 15 bp, Homo sapiens
agtcctaagttctgc

SEQ ID NO: 870994 - DNA, 15 bp, Homo sapiens
cagtcctaagttctg

SEQ ID NO: 870995 - DNA, 15 bp, Homo sapiens
tcagtcctaagttct

SEQ ID NO: 870996 - DNA, 15 bp, Homo sapiens
atcagtcctaagttc

SEQ ID NO: 870997 - DNA, 15 bp, Homo sapiens
aatcagtcctaagtt

SEQ ID NO: 870998 - DNA, 15 bp, Homo sapiens
aaatcagtcctaagt

SEQ ID NO: 870999 - DNA, 15 bp, Homo sapiens
aaaatcagtcctaag

SEQ ID NO: 871000 - DNA, 15 bp, Homo sapiens
aaaaatcagtcctaa

SEQ ID NO: 871001 - DNA, 15 bp, Homo sapiens
taaaaatcagtccta

SEQ ID NO: 871002 - DNA, 15 bp, Homo sapiens
ataaaaatcagtcct

SEQ ID NO: 871003 - DNA, 15 bp, Homo sapiens
aataaaaatcagtcc

SEQ ID NO: 871004 - DNA, 15 bp, Homo sapiens
aaataaaaatcagtc

SEQ ID NO: 871005 - DNA, 15 bp, Homo sapiens
caaataaaaatcagt

SEQ ID NO: 871006 - DNA, 15 bp, Homo sapiens
tcaaataaaaatcag

SEQ ID NO: 871007 - DNA, 15 bp, Homo sapiens
ttcaaataaaaatca

SEQ ID NO: 871008 - DNA, 15 bp, Homo sapiens
attcaaataaaaatc

SEQ ID NO: 871009 - DNA, 15 bp, Homo sapiens
gattcaaataaaaat

SEQ ID NO: 871010 - DNA, 15 bp, Homo sapiens
ggattcaaataaaaa

SEQ ID NO: 871011 - DNA, 15 bp, Homo sapiens
aggattcaaataaaa

SEQ ID NO: 871012 - DNA, 15 bp, Homo sapiens
aaggattcaaataaa

SEQ ID NO: 871013 - DNA, 15 bp, Homo sapiens
taaggattcaaataa

SEQ ID NO: 871014 - DNA, 15 bp, Homo sapiens
ttaaggattcaaata

SEQ ID NO: 871015 - DNA, 15 bp, Homo sapiens
tttaaggattcaaat

SEQ ID NO: 871016 - DNA, 15 bp, Homo sapiens
ttttaaggattcaaa

SEQ ID NO: 871017 - DNA, 15 bp, Homo sapiens
tttttaaggattcaa

SEQ ID NO: 871018 - DNA, 15 bp, Homo sapiens
ttttttaaggattca

SEQ ID NO: 871019 - DNA, 15 bp, Homo sapiens
tttttttaaggattc

SEQ ID NO: 871020 - DNA, 15 bp, Homo sapiens
ttttttttaaggatt

SEQ ID NO: 871021 - DNA, 15 bp, Homo sapiens
tttttttttaaggat

SEQ ID NO: 871022 - DNA, 15 bp, Homo sapiens
ttttttttttaagga

SEQ ID NO: 871023 - DNA, 15 bp, Homo sapiens
tttttttttttaagg

SEQ ID NO: 871024 - DNA, 15 bp, Homo sapiens
atttttttttttaag

SEQ ID NO: 871025 - DNA, 15 bp, Homo sapiens
aatttttttttttaa

SEQ ID NO: 871026 - DNA, 15 bp, Homo sapiens
aaattttttttttta

SEQ ID NO: 871027 - DNA, 15 bp, Homo sapiens
gaaattttttttttt

SEQ ID NO: 871028 - DNA, 15 bp, Homo sapiens
agaaatttttttttt

SEQ ID NO: 871029 - DNA, 15 bp, Homo sapiens
aagaaattttttttt

SEQ ID NO: 871030 - DNA, 15 bp, Homo sapiens
taagaaatttttttt

SEQ ID NO: 871031 - DNA, 15 bp, Homo sapiens
ataagaaattttttt

SEQ ID NO: 871032 - DNA, 15 bp, Homo sapiens
cataagaaatttttt

SEQ ID NO: 871033 - DNA, 15 bp, Homo sapiens
tcataagaaattttt

SEQ ID NO: 871034 - DNA, 15 bp, Homo sapiens
ttcataagaaatttt

SEQ ID NO: 871035 - DNA, 15 bp, Homo sapiens
tttcataagaaattt

SEQ ID NO: 871036 - DNA, 15 bp, Homo sapiens
ttttcataagaaatt

SEQ ID NO: 871037 - DNA, 15 bp, Homo sapiens
attttcataagaaat

SEQ ID NO: 871038 - DNA, 15 bp, Homo sapiens
tattttcataagaaa

SEQ ID NO: 871039 - DNA, 15 bp, Homo sapiens
ctattttcataagaa

SEQ ID NO: 871040 - DNA, 15 bp, Homo sapiens
actattttcataaga

SEQ ID NO: 871041 - DNA, 15 bp, Homo sapiens
tactattttcataag

SEQ ID NO: 871042 - DNA, 15 bp, Homo sapiens
gtactattttcataa

SEQ ID NO: 871043 - DNA, 15 bp, Homo sapiens
tgtactattttcata

SEQ ID NO: 871044 - DNA, 15 bp, Homo sapiens
atgtactattttcat

SEQ ID NO: 871045 - DNA, 15 bp, Homo sapiens
catgtactattttca

SEQ ID NO: 871046 - DNA, 15 bp, Homo sapiens
ccatgtactattttc

SEQ ID NO: 871047 - DNA, 15 bp, Homo sapiens
gccatgtactatttt

SEQ ID NO: 871048 - DNA, 15 bp, Homo sapiens
agccatgtactattt

SEQ ID NO: 871049 - DNA, 15 bp, Homo sapiens
gagccatgtactatt

SEQ ID NO: 871050 - DNA, 15 bp, Homo sapiens
agagccatgtactat

SEQ ID NO: 871051 - DNA, 15 bp, Homo sapiens
aagagccatgtacta

SEQ ID NO: 871052 - DNA, 15 bp, Homo sapiens
taagagccatgtact

SEQ ID NO: 871053 - DNA, 15 bp, Homo sapiens
ctaagagccatgtac

SEQ ID NO: 871054 - DNA, 15 bp, Homo sapiens
cctaagagccatgta

SEQ ID NO: 871055 - DNA, 15 bp, Homo sapiens
tcctaagagccatgt

SEQ ID NO: 871056 - DNA, 15 bp, Homo sapiens
ctcctaagagccatg

SEQ ID NO: 871057 - DNA, 15 bp, Homo sapiens
tctcctaagagccat

SEQ ID NO: 871058 - DNA, 15 bp, Homo sapiens
gtctcctaagagcca

SEQ ID NO: 871059 - DNA, 15 bp, Homo sapiens
tgtctcctaagagcc

SEQ ID NO: 871060 - DNA, 15 bp, Homo sapiens
ctgtctcctaagagc

SEQ ID NO: 871061 - DNA, 15 bp, Homo sapiens
tctgtctcctaagag

SEQ ID NO: 871062 - DNA, 15 bp, Homo sapiens
ttctgtctcctaaga

SEQ ID NO: 871063 - DNA, 15 bp, Homo sapiens
gttctgtctcctaag

SEQ ID NO: 871064 - DNA, 15 bp, Homo sapiens
agttctgtctcctaa

SEQ ID NO: 871065 - DNA, 15 bp, Homo sapiens
aagttctgtctccta

SEQ ID NO: 871066 - DNA, 15 bp, Homo sapiens
taagttctgtctcct

SEQ ID NO: 871067 - DNA, 15 bp, Homo sapiens
ataagttctgtctcc

SEQ ID NO: 871068 - DNA, 15 bp, Homo sapiens
aataagttctgtctc

SEQ ID NO: 871069 - DNA, 15 bp, Homo sapiens
caataagttctgtct

SEQ ID NO: 871070 - DNA, 15 bp, Homo sapiens
acaataagttctgtc

SEQ ID NO: 871071 - DNA, 15 bp, Homo sapiens
tacaataagttctgt

SEQ ID NO: 871072 - DNA, 15 bp, Homo sapiens
gtacaataagttctg

SEQ ID NO: 871073 - DNA, 15 bp, Homo sapiens
tgtacaataagttct

SEQ ID NO: 871074 - DNA, 15 bp, Homo sapiens
ctgtacaataagttc

SEQ ID NO: 871075 - DNA, 15 bp, Homo sapiens
tctgtacaataagtt

SEQ ID NO: 871076 - DNA, 15 bp, Homo sapiens
ctctgtacaataagt

SEQ ID NO: 871077 - DNA, 15 bp, Homo sapiens
cctctgtacaataag

SEQ ID NO: 871078 - DNA, 15 bp, Homo sapiens
tcctctgtacaataa

SEQ ID NO: 871079 - DNA, 15 bp, Homo sapiens
ttcctctgtacaata

SEQ ID NO: 871080 - DNA, 15 bp, Homo sapiens
gttcctctgtacaat

SEQ ID NO: 871081 - DNA, 15 bp, Homo sapiens
tgttcctctgtacaa

SEQ ID NO: 871082 - DNA, 15 bp, Homo sapiens
ctgttcctctgtaca

SEQ ID NO: 871083 - DNA, 15 bp, Homo sapiens
gctgttcctctgtac

SEQ ID NO: 871084 - DNA, 15 bp, Homo sapiens
cgctgttcctctgta

SEQ ID NO: 871085 - DNA, 15 bp, Homo sapiens
acgctgttcctctgt

SEQ ID NO: 871086 - DNA, 15 bp, Homo sapiens
cacgctgttcctctg

SEQ ID NO: 871087 - DNA, 15 bp, Homo sapiens
tcacgctgttcctct

SEQ ID NO: 871088 - DNA, 15 bp, Homo sapiens
ctcacgctgttcctc

SEQ ID NO: 871089 - DNA, 15 bp, Homo sapiens
tctcacgctgttcct

SEQ ID NO: 871090 - DNA, 15 bp, Homo sapiens
ctctcacgctgttcc

SEQ ID NO: 871091 - DNA, 15 bp, Homo sapiens
actctcacgctgttc

SEQ ID NO: 871092 - DNA, 15 bp, Homo sapiens
gactctcacgctgtt

SEQ ID NO: 871093 - DNA, 15 bp, Homo sapiens
tgactctcacgctgt

SEQ ID NO: 871094 - DNA, 15 bp, Homo sapiens
ctgactctcacgctg

SEQ ID NO: 871095 - DNA, 15 bp, Homo sapiens
tctgactctcacgct

SEQ ID NO: 871096 - DNA, 15 bp, Homo sapiens
ctctgactctcacgc

SEQ ID NO: 871097 - DNA, 15 bp, Homo sapiens
actctgactctcacg

SEQ ID NO: 871098 - DNA, 15 bp, Homo sapiens
cactctgactctcac

SEQ ID NO: 871099 - DNA, 15 bp, Homo sapiens
tcactctgactctca

SEQ ID NO: 871100 - DNA, 15 bp, Homo sapiens
atcactctgactctc

SEQ ID NO: 871101 - DNA, 15 bp, Homo sapiens
gatcactctgactct

SEQ ID NO: 871102 - DNA, 15 bp, Homo sapiens
ggatcactctgactc

SEQ ID NO: 871103 - DNA, 15 bp, Homo sapiens
gggatcactctgact

SEQ ID NO: 871104 - DNA, 15 bp, Homo sapiens
tgggatcactctgac

SEQ ID NO: 871105 - DNA, 15 bp, Homo sapiens
ctgggatcactctga

SEQ ID NO: 871106 - DNA, 15 bp, Homo sapiens
tctgggatcactctg

SEQ ID NO: 871107 - DNA, 15 bp, Homo sapiens
ttctgggatcactct

SEQ ID NO: 871108 - DNA, 15 bp, Homo sapiens
gttctgggatcactc

SEQ ID NO: 871109 - DNA, 15 bp, Homo sapiens
tgttctgggatcact

SEQ ID NO: 871110 - DNA, 15 bp, Homo sapiens
ctgttctgggatcac

SEQ ID NO: 871111 - DNA, 15 bp, Homo sapiens
cctgttctgggatca

SEQ ID NO: 871112 - DNA, 15 bp, Homo sapiens
acctgttctgggatc

SEQ ID NO: 871113 - DNA, 15 bp, Homo sapiens
gacctgttctgggat

SEQ ID NO: 871114 - DNA, 15 bp, Homo sapiens
ggacctgttctggga

SEQ ID NO: 871115 - DNA, 15 bp, Homo sapiens
aggacctgttctggg

SEQ ID NO: 871116 - DNA, 15 bp, Homo sapiens
caggacctgttctgg

SEQ ID NO: 871117 - DNA, 15 bp, Homo sapiens
ccaggacctgttctg

SEQ ID NO: 871118 - DNA, 15 bp, Homo sapiens
gccaggacctgttct

SEQ ID NO: 871119 - DNA, 15 bp, Homo sapiens
agccaggacctgttc

SEQ ID NO: 871120 - DNA, 15 bp, Homo sapiens
gagccaggacctgtt

SEQ ID NO: 871121 - DNA, 15 bp, Homo sapiens
ggagccaggacctgt

SEQ ID NO: 871122 - DNA, 15 bp, Homo sapiens
tggagccaggacctg

SEQ ID NO: 871123 - DNA, 15 bp, Homo sapiens
atggagccaggacct

SEQ ID NO: 871124 - DNA, 15 bp, Homo sapiens
gatggagccaggacc

SEQ ID NO: 871125 - DNA, 15 bp, Homo sapiens
ggatggagccaggac

SEQ ID NO: 871126 - DNA, 15 bp, Homo sapiens
aggatggagccagga

SEQ ID NO: 871127 - DNA, 15 bp, Homo sapiens
caggatggagccagg

SEQ ID NO: 871128 - DNA, 15 bp, Homo sapiens
gcaggatggagccag

SEQ ID NO: 871129 - DNA, 15 bp, Homo sapiens
tgcaggatggagcca

SEQ ID NO: 871130 - DNA, 15 bp, Homo sapiens
gtgcaggatggagcc

SEQ ID NO: 871131 - DNA, 15 bp, Homo sapiens
tgtgcaggatggagc

SEQ ID NO: 871132 - DNA, 15 bp, Homo sapiens
atgtgcaggatggag

SEQ ID NO: 871133 - DNA, 15 bp, Homo sapiens
tatgtgcaggatgga

SEQ ID NO: 871134 - DNA, 15 bp, Homo sapiens
ctatgtgcaggatgg

SEQ ID NO: 871135 - DNA, 15 bp, Homo sapiens
actatgtgcaggatg

SEQ ID NO: 871136 - DNA, 15 bp, Homo sapiens
aactatgtgcaggat

SEQ ID NO: 871137 - DNA, 15 bp, Homo sapiens
aaactatgtgcagga

SEQ ID NO: 871138 - DNA, 15 bp, Homo sapiens
aaaactatgtgcagg

SEQ ID NO: 871139 - DNA, 15 bp, Homo sapiens
caaaactatgtgcag

SEQ ID NO: 871140 - DNA, 15 bp, Homo sapiens
ccaaaactatgtgca

SEQ ID NO: 871141 - DNA, 15 bp, Homo sapiens
accaaaactatgtgc

SEQ ID NO: 871142 - DNA, 15 bp, Homo sapiens
caccaaaactatgtg

SEQ ID NO: 871143 - DNA, 15 bp, Homo sapiens
gcaccaaaactatgt

SEQ ID NO: 871144 - DNA, 15 bp, Homo sapiens
agcaccaaaactatg

SEQ ID NO: 871145 - DNA, 15 bp, Homo sapiens
cagcaccaaaactat

SEQ ID NO: 871146 - DNA, 15 bp, Homo sapiens
gcagcaccaaaacta

SEQ ID NO: 871147 - DNA, 15 bp, Homo sapiens
agcagcaccaaaact

SEQ ID NO: 871148 - DNA, 15 bp, Homo sapiens
cagcagcaccaaaac

SEQ ID NO: 871149 - DNA, 15 bp, Homo sapiens
ccagcagcaccaaaa

SEQ ID NO: 871150 - DNA, 15 bp, Homo sapiens
gccagcagcaccaaa

SEQ ID NO: 871151 - DNA, 15 bp, Homo sapiens
tgccagcagcaccaa

SEQ ID NO: 871152 - DNA, 15 bp, Homo sapiens
ttgccagcagcacca

SEQ ID NO: 871153 - DNA, 15 bp, Homo sapiens
attgccagcagcacc

SEQ ID NO: 871154 - DNA, 15 bp, Homo sapiens
tattgccagcagcac

SEQ ID NO: 871155 - DNA, 15 bp, Homo sapiens
gtattgccagcagca

SEQ ID NO: 871156 - DNA, 15 bp, Homo sapiens
cgtattgccagcagc

SEQ ID NO: 871157 - DNA, 15 bp, Homo sapiens
ccgtattgccagcag

SEQ ID NO: 871158 - DNA, 15 bp, Homo sapiens
accgtattgccagca

SEQ ID NO: 871159 - DNA, 15 bp, Homo sapiens
gaccgtattgccagc

SEQ ID NO: 871160 - DNA, 15 bp, Homo sapiens
ggaccgtattgccag

SEQ ID NO: 871161 - DNA, 15 bp, Homo sapiens
gggaccgtattgcca

SEQ ID NO: 871162 - DNA, 15 bp, Homo sapiens
ggggaccgtattgcc

SEQ ID NO: 871163 - DNA, 15 bp, Homo sapiens
tggggaccgtattgc

SEQ ID NO: 871164 - DNA, 15 bp, Homo sapiens
gtggggaccgtattg

SEQ ID NO: 871165 - DNA, 15 bp, Homo sapiens
tgtggggaccgtatt

SEQ ID NO: 871166 - DNA, 15 bp, Homo sapiens
ttgtggggaccgtat

SEQ ID NO: 871167 - DNA, 15 bp, Homo sapiens
gttgtggggaccgta

SEQ ID NO: 871168 - DNA, 15 bp, Homo sapiens
agttgtggggaccgt

SEQ ID NO: 871169 - DNA, 15 bp, Homo sapiens
cagttgtggggaccg

SEQ ID NO: 871170 - DNA, 15 bp, Homo sapiens
acagttgtggggacc

SEQ ID NO: 871171 - DNA, 15 bp, Homo sapiens
cacagttgtggggac

SEQ ID NO: 871172 - DNA, 15 bp, Homo sapiens
ccacagttgtgggga

SEQ ID NO: 871173 - DNA, 15 bp, Homo sapiens
cccacagttgtgggg

SEQ ID NO: 871174 - DNA, 15 bp, Homo sapiens
tcccacagttgtggg

SEQ ID NO: 871175 - DNA, 15 bp, Homo sapiens
ttcccacagttgtgg

SEQ ID NO: 871176 - DNA, 15 bp, Homo sapiens
cttcccacagttgtg

SEQ ID NO: 871177 - DNA, 15 bp, Homo sapiens
ccttcccacagttgt

SEQ ID NO: 871178 - DNA, 15 bp, Homo sapiens
cccttcccacagttg

SEQ ID NO: 871179 - DNA, 15 bp, Homo sapiens
ccccttcccacagtt

SEQ ID NO: 871180 - DNA, 15 bp, Homo sapiens
accccttcccacagt

SEQ ID NO: 871181 - DNA, 15 bp, Homo sapiens
aaccccttcccacag

SEQ ID NO: 871182 - DNA, 15 bp, Homo sapiens
taaccccttcccaca

SEQ ID NO: 871183 - DNA, 15 bp, Homo sapiens
ctaaccccttcccac

SEQ ID NO: 871184 - DNA, 15 bp, Homo sapiens
cctaaccccttccca

SEQ ID NO: 871185 - DNA, 15 bp, Homo sapiens
ccctaaccccttccc

SEQ ID NO: 871186 - DNA, 15 bp, Homo sapiens
cccctaaccccttcc

SEQ ID NO: 871187 - DNA, 15 bp, Homo sapiens
gcccctaaccccttc

SEQ ID NO: 871188 - DNA, 15 bp, Homo sapiens
tgcccctaacccctt

SEQ ID NO: 871189 - DNA, 15 bp, Homo sapiens
ctgcccctaacccct

SEQ ID NO: 871190 - DNA, 15 bp, Homo sapiens
cctgcccctaacccc

SEQ ID NO: 871191 - DNA, 15 bp, Homo sapiens
ccctgcccctaaccc

SEQ ID NO: 871192 - DNA, 15 bp, Homo sapiens
tccctgcccctaacc

SEQ ID NO: 871193 - DNA, 15 bp, Homo sapiens
atccctgcccctaac

SEQ ID NO: 871194 - DNA, 15 bp, Homo sapiens
gatccctgcccctaa

SEQ ID NO: 871195 - DNA, 15 bp, Homo sapiens
agatccctgccccta

SEQ ID NO: 871196 - DNA, 15 bp, Homo sapiens
gagatccctgcccct

SEQ ID NO: 871197 - DNA, 15 bp, Homo sapiens
tgagatccctgcccc

SEQ ID NO: 871198 - DNA, 15 bp, Homo sapiens
atgagatccctgccc

SEQ ID NO: 871199 - DNA, 15 bp, Homo sapiens
gatgagatccctgcc

SEQ ID NO: 871200 - DNA, 15 bp, Homo sapiens
tgatgagatccctgc

SEQ ID NO: 871201 - DNA, 15 bp, Homo sapiens
ctgatgagatccctg

SEQ ID NO: 871202 - DNA, 15 bp, Homo sapiens
cctgatgagatccct

SEQ ID NO: 871203 - DNA, 15 bp, Homo sapiens
tcctgatgagatccc

SEQ ID NO: 871204 - DNA, 15 bp, Homo sapiens
ttcctgatgagatcc

SEQ ID NO: 871205 - DNA, 15 bp, Homo sapiens
tttcctgatgagatc

SEQ ID NO: 871206 - DNA, 15 bp, Homo sapiens
ctttcctgatgagat

SEQ ID NO: 871207 - DNA, 15 bp, Homo sapiens
gctttcctgatgaga

SEQ ID NO: 871208 - DNA, 15 bp, Homo sapiens
tgctttcctgatgag

SEQ ID NO: 871209 - DNA, 15 bp, Homo sapiens
atgctttcctgatga

SEQ ID NO: 871210 - DNA, 15 bp, Homo sapiens
tatgctttcctgatg

SEQ ID NO: 871211 - DNA, 15 bp, Homo sapiens
ctatgctttcctgat

SEQ ID NO: 871212 - DNA, 15 bp, Homo sapiens
cctatgctttcctga

SEQ ID NO: 871213 - DNA, 15 bp, Homo sapiens
ccctatgctttcctg

SEQ ID NO: 871214 - DNA, 15 bp, Homo sapiens
cccctatgctttcct

SEQ ID NO: 871215 - DNA, 15 bp, Homo sapiens
acccctatgctttcc

SEQ ID NO: 871216 - DNA, 15 bp, Homo sapiens
aacccctatgctttc

SEQ ID NO: 871217 - DNA, 15 bp, Homo sapiens
aaacccctatgcttt

SEQ ID NO: 871218 - DNA, 15 bp, Homo sapiens
taaacccctatgctt

SEQ ID NO: 871219 - DNA, 15 bp, Homo sapiens
ttaaacccctatgct

SEQ ID NO: 871220 - DNA, 15 bp, Homo sapiens
tttaaacccctatgc

SEQ ID NO: 871221 - DNA, 15 bp, Homo sapiens
ctttaaacccctatg

SEQ ID NO: 871222 - DNA, 15 bp, Homo sapiens
actttaaacccctat

SEQ ID NO: 871223 - DNA, 15 bp, Homo sapiens
aactttaaaccccta

SEQ ID NO: 871224 - DNA, 15 bp, Homo sapiens
gaactttaaacccct

SEQ ID NO: 871225 - DNA, 15 bp, Homo sapiens
agaactttaaacccc

SEQ ID NO: 871226 - DNA, 15 bp, Homo sapiens
aagaactttaaaccc

SEQ ID NO: 871227 - DNA, 15 bp, Homo sapiens
aaagaactttaaacc

SEQ ID NO: 871228 - DNA, 15 bp, Homo sapiens
taaagaactttaaac

SEQ ID NO: 871229 - DNA, 15 bp, Homo sapiens
ataaagaactttaaa

SEQ ID NO: 871230 - DNA, 15 bp, Homo sapiens
tataaagaactttaa

SEQ ID NO: 871231 - DNA, 15 bp, Homo sapiens
ctataaagaacttta

SEQ ID NO: 871232 - DNA, 15 bp, Homo sapiens
tctataaagaacttt

SEQ ID NO: 871233 - DNA, 15 bp, Homo sapiens
ctctataaagaactt

SEQ ID NO: 871234 - DNA, 15 bp, Homo sapiens
gctctataaagaact

SEQ ID NO: 871235 - DNA, 15 bp, Homo sapiens
tgctctataaagaac

SEQ ID NO: 871236 - DNA, 15 bp, Homo sapiens
gtgctctataaagaa

SEQ ID NO: 871237 - DNA, 15 bp, Homo sapiens
agtgctctataaaga

SEQ ID NO: 871238 - DNA, 15 bp, Homo sapiens
aagtgctctataaag

SEQ ID NO: 871239 - DNA, 15 bp, Homo sapiens
taagtgctctataaa

SEQ ID NO: 871240 - DNA, 15 bp, Homo sapiens
ctaagtgctctataa

SEQ ID NO: 871241 - DNA, 15 bp, Homo sapiens
tctaagtgctctata

SEQ ID NO: 871242 - DNA, 15 bp, Homo sapiens
ttctaagtgctctat

SEQ ID NO: 871243 - DNA, 15 bp, Homo sapiens
cttctaagtgctcta

SEQ ID NO: 871244 - DNA, 15 bp, Homo sapiens
tcttctaagtgctct

SEQ ID NO: 871245 - DNA, 15 bp, Homo sapiens
atcttctaagtgctc

SEQ ID NO: 871246 - DNA, 15 bp, Homo sapiens
aatcttctaagtgct

SEQ ID NO: 871247 - DNA, 15 bp, Homo sapiens
caatcttctaagtgc

SEQ ID NO: 871248 - DNA, 15 bp, Homo sapiens
tcaatcttctaagtg

SEQ ID NO: 871249 - DNA, 15 bp, Homo sapiens
ctcaatcttctaagt

SEQ ID NO: 871250 - DNA, 15 bp, Homo sapiens
tctcaatcttctaag

SEQ ID NO: 871251 - DNA, 15 bp, Homo sapiens
ttctcaatcttctaa

SEQ ID NO: 871252 - DNA, 15 bp, Homo sapiens
attctcaatcttcta

SEQ ID NO: 871253 - DNA, 15 bp, Homo sapiens
gattctcaatcttct

SEQ ID NO: 871254 - DNA, 15 bp, Homo sapiens
ggattctcaatcttc

SEQ ID NO: 871255 - DNA, 15 bp, Homo sapiens
tggattctcaatctt

SEQ ID NO: 871256 - DNA, 15 bp, Homo sapiens
gtggattctcaatct

SEQ ID NO: 871257 - DNA, 15 bp, Homo sapiens
tgtggattctcaatc

SEQ ID NO: 871258 - DNA, 15 bp, Homo sapiens
ttgtggattctcaat

SEQ ID NO: 871259 - DNA, 15 bp, Homo sapiens
tttgtggattctcaa

SEQ ID NO: 871260 - DNA, 15 bp, Homo sapiens
atttgtggattctca

SEQ ID NO: 871261 - DNA, 15 bp, Homo sapiens
aatttgtggattctc

SEQ ID NO: 871262 - DNA, 15 bp, Homo sapiens
taatttgtggattct

SEQ ID NO: 871263 - DNA, 15 bp, Homo sapiens
ataatttgtggattc

SEQ ID NO: 871264 - DNA, 15 bp, Homo sapiens
tataatttgtggatt

SEQ ID NO: 871265 - DNA, 15 bp, Homo sapiens
atataatttgtggat

SEQ ID NO: 871266 - DNA, 15 bp, Homo sapiens
aatataatttgtgga

SEQ ID NO: 871267 - DNA, 15 bp, Homo sapiens
taatataatttgtgg

SEQ ID NO: 871268 - DNA, 15 bp, Homo sapiens
ttaatataatttgtg

SEQ ID NO: 871269 - DNA, 15 bp, Homo sapiens
attaatataatttgt

SEQ ID NO: 871270 - DNA, 15 bp, Homo sapiens
tattaatataatttg

SEQ ID NO: 871271 - DNA, 15 bp, Homo sapiens
ttattaatataattt

SEQ ID NO: 871272 - DNA, 15 bp, Homo sapiens
gttattaatataatt

SEQ ID NO: 871273 - DNA, 15 bp, Homo sapiens
tgttattaatataat

SEQ ID NO: 871274 - DNA, 15 bp, Homo sapiens
ttgttattaatataa

SEQ ID NO: 871275 - DNA, 15 bp, Homo sapiens
tttgttattaatata

SEQ ID NO: 871276 - DNA, 15 bp, Homo sapiens
gtttgttattaatat

SEQ ID NO: 871277 - DNA, 15 bp, Homo sapiens
tgtttgttattaata

SEQ ID NO: 871278 - DNA, 15 bp, Homo sapiens
ttgtttgttattaat

SEQ ID NO: 871279 - DNA, 15 bp, Homo sapiens
tttgtttgttattaa

SEQ ID NO: 871280 - DNA, 15 bp, Homo sapiens
ctttgtttgttatta

SEQ ID NO: 871281 - DNA, 15 bp, Homo sapiens
actttgtttgttatt

SEQ ID NO: 871282 - DNA, 15 bp, Homo sapiens
tactttgtttgttat

SEQ ID NO: 871283 - DNA, 15 bp, Homo sapiens
ctactttgtttgtta

SEQ ID NO: 871284 - DNA, 15 bp, Homo sapiens
actactttgtttgtt

SEQ ID NO: 871285 - DNA, 15 bp, Homo sapiens
cactactttgtttgt

SEQ ID NO: 871286 - DNA, 15 bp, Homo sapiens
acactactttgtttg

SEQ ID NO: 871287 - DNA, 15 bp, Homo sapiens
gacactactttgttt

SEQ ID NO: 871288 - DNA, 15 bp, Homo sapiens
cgacactactttgtt

SEQ ID NO: 871289 - DNA, 15 bp, Homo sapiens
acgacactactttgt

SEQ ID NO: 871290 - DNA, 15 bp, Homo sapiens
cacgacactactttg

SEQ ID NO: 871291 - DNA, 15 bp, Homo sapiens
acacgacactacttt

SEQ ID NO: 871292 - DNA, 15 bp, Homo sapiens
aacacgacactactt

SEQ ID NO: 871293 - DNA, 15 bp, Homo sapiens
taacacgacactact

SEQ ID NO: 871294 - DNA, 15 bp, Homo sapiens
ataacacgacactac

SEQ ID NO: 871295 - DNA, 15 bp, Homo sapiens
tataacacgacacta

SEQ ID NO: 871296 - DNA, 15 bp, Homo sapiens
atataacacgacact

SEQ ID NO: 871297 - DNA, 15 bp, Homo sapiens
tatataacacgacac

SEQ ID NO: 871298 - DNA, 15 bp, Homo sapiens
ctatataacacgaca

SEQ ID NO: 871299 - DNA, 15 bp, Homo sapiens
actatataacacgac

SEQ ID NO: 871300 - DNA, 15 bp, Homo sapiens
tactatataacacga

SEQ ID NO: 871301 - DNA, 15 bp, Homo sapiens
ttactatataacacg

SEQ ID NO: 871302 - DNA, 15 bp, Homo sapiens
tttactatataacac

SEQ ID NO: 871303 - DNA, 15 bp, Homo sapiens
atttactatataaca

SEQ ID NO: 871304 - DNA, 15 bp, Homo sapiens
catttactatataac

SEQ ID NO: 871305 - DNA, 15 bp, Homo sapiens
acatttactatataa

SEQ ID NO: 871306 - DNA, 15 bp, Homo sapiens
cacatttactatata

SEQ ID NO: 871307 - DNA, 15 bp, Homo sapiens
tcacatttactatat

SEQ ID NO: 871308 - DNA, 15 bp, Homo sapiens
ttcacatttactata

SEQ ID NO: 871309 - DNA, 15 bp, Homo sapiens
attcacatttactat

SEQ ID NO: 871310 - DNA, 15 bp, Homo sapiens
aattcacatttacta

SEQ ID NO: 871311 - DNA, 15 bp, Homo sapiens
aaattcacatttact

SEQ ID NO: 871312 - DNA, 15 bp, Homo sapiens
caaattcacatttac

SEQ ID NO: 871313 - DNA, 15 bp, Homo sapiens
gcaaattcacattta

SEQ ID NO: 871314 - DNA, 15 bp, Homo sapiens
tgcaaattcacattt

SEQ ID NO: 871315 - DNA, 15 bp, Homo sapiens
ctgcaaattcacatt

SEQ ID NO: 871316 - DNA, 15 bp, Homo sapiens
tctgcaaattcacat

SEQ ID NO: 871317 - DNA, 15 bp, Homo sapiens
gtctgcaaattcaca

SEQ ID NO: 871318 - DNA, 15 bp, Homo sapiens
tgtctgcaaattcac

SEQ ID NO: 871319 - DNA, 15 bp, Homo sapiens
gtgtctgcaaattca

SEQ ID NO: 871320 - DNA, 15 bp, Homo sapiens
tgtgtctgcaaattc

SEQ ID NO: 871321 - DNA, 15 bp, Homo sapiens
atgtgtctgcaaatt

SEQ ID NO: 871322 - DNA, 15 bp, Homo sapiens
aatgtgtctgcaaat

SEQ ID NO: 871323 - DNA, 15 bp, Homo sapiens
aaatgtgtctgcaaa

SEQ ID NO: 871324 - DNA, 15 bp, Homo sapiens
taaatgtgtctgcaa

SEQ ID NO: 871325 - DNA, 15 bp, Homo sapiens
ctaaatgtgtctgca

SEQ ID NO: 871326 - DNA, 15 bp, Homo sapiens
cctaaatgtgtctgc

SEQ ID NO: 871327 - DNA, 15 bp, Homo sapiens
ccctaaatgtgtctg

SEQ ID NO: 871328 - DNA, 15 bp, Homo sapiens
tccctaaatgtgtct

SEQ ID NO: 871329 - DNA, 15 bp, Homo sapiens
ttccctaaatgtgtc

SEQ ID NO: 871330 - DNA, 15 bp, Homo sapiens
tttccctaaatgtgt

SEQ ID NO: 871331 - DNA, 15 bp, Homo sapiens
ttttccctaaatgtg

SEQ ID NO: 871332 - DNA, 15 bp, Homo sapiens
cttttccctaaatgt

SEQ ID NO: 871333 - DNA, 15 bp, Homo sapiens
acttttccctaaatg

SEQ ID NO: 871334 - DNA, 15 bp, Homo sapiens
aacttttccctaaat

SEQ ID NO: 871335 - DNA, 15 bp, Homo sapiens
taacttttccctaaa

SEQ ID NO: 871336 - DNA, 15 bp, Homo sapiens
ataacttttccctaa

SEQ ID NO: 871337 - DNA, 15 bp, Homo sapiens
tataacttttcccta

SEQ ID NO: 871338 - DNA, 15 bp, Homo sapiens
ttataacttttccct

SEQ ID NO: 871339 - DNA, 15 bp, Homo sapiens
attataacttttccc

SEQ ID NO: 871340 - DNA, 15 bp, Homo sapiens
aattataacttttcc

SEQ ID NO: 871341 - DNA, 15 bp, Homo sapiens
taattataacttttc

SEQ ID NO: 871342 - DNA, 15 bp, Homo sapiens
ttaattataactttt

SEQ ID NO: 871343 - DNA, 15 bp, Homo sapiens
tttaattataacttt

SEQ ID NO: 871344 - DNA, 15 bp, Homo sapiens
ttttaattataactt

SEQ ID NO: 871345 - DNA, 15 bp, Homo sapiens
tttttaattataact

SEQ ID NO: 871346 - DNA, 15 bp, Homo sapiens
ttttttaattataac

SEQ ID NO: 871347 - DNA, 15 bp, Homo sapiens
tttttttaattataa

SEQ ID NO: 871348 - DNA, 15 bp, Homo sapiens
atttttttaattata

SEQ ID NO: 871349 - DNA, 15 bp, Homo sapiens
tatttttttaattat

SEQ ID NO: 871350 - DNA, 15 bp, Homo sapiens
ctatttttttaatta

SEQ ID NO: 871351 - DNA, 15 bp, Homo sapiens
cctatttttttaatt

SEQ ID NO: 871352 - DNA, 15 bp, Homo sapiens
gcctatttttttaat

SEQ ID NO: 871353 - DNA, 15 bp, Homo sapiens
agcctatttttttaa

SEQ ID NO: 871354 - DNA, 15 bp, Homo sapiens
cagcctattttttta

SEQ ID NO: 871355 - DNA, 15 bp, Homo sapiens
acagcctattttttt

SEQ ID NO: 871356 - DNA, 15 bp, Homo sapiens
tacagcctatttttt

SEQ ID NO: 871357 - DNA, 15 bp, Homo sapiens
atacagcctattttt

SEQ ID NO: 871358 - DNA, 15 bp, Homo sapiens
tatacagcctatttt

SEQ ID NO: 871359 - DNA, 15 bp, Homo sapiens
atatacagcctattt

SEQ ID NO: 871360 - DNA, 15 bp, Homo sapiens
tatatacagcctatt

SEQ ID NO: 871361 - DNA, 15 bp, Homo sapiens
atatatacagcctat

SEQ ID NO: 871362 - DNA, 15 bp, Homo sapiens
tatatatacagccta

SEQ ID NO: 871363 - DNA, 15 bp, Homo sapiens
atatatatacagcct

SEQ ID NO: 871364 - DNA, 15 bp, Homo sapiens
gatatatatacagcc

SEQ ID NO: 871365 - DNA, 15 bp, Homo sapiens
tgatatatatacagc

SEQ ID NO: 871366 - DNA, 15 bp, Homo sapiens
ttgatatatatacag

SEQ ID NO: 871367 - DNA, 15 bp, Homo sapiens
attgatatatataca

SEQ ID NO: 871368 - DNA, 15 bp, Homo sapiens
cattgatatatatac

SEQ ID NO: 871369 - DNA, 15 bp, Homo sapiens
ccattgatatatata

SEQ ID NO: 871370 - DNA, 15 bp, Homo sapiens
accattgatatatat

SEQ ID NO: 871371 - DNA, 15 bp, Homo sapiens
aaccattgatatata

SEQ ID NO: 871372 - DNA, 15 bp, Homo sapiens
gaaccattgatatat

SEQ ID NO: 871373 - DNA, 15 bp, Homo sapiens
ggaaccattgatata

SEQ ID NO: 871374 - DNA, 15 bp, Homo sapiens
tggaaccattgatat

SEQ ID NO: 871375 - DNA, 15 bp, Homo sapiens
ttggaaccattgata

SEQ ID NO: 871376 - DNA, 15 bp, Homo sapiens
tttggaaccattgat

SEQ ID NO: 871377 - DNA, 15 bp, Homo sapiens
ttttggaaccattga

SEQ ID NO: 871378 - DNA, 15 bp, Homo sapiens
attttggaaccattg

SEQ ID NO: 871379 - DNA, 15 bp, Homo sapiens
aattttggaaccatt

SEQ ID NO: 871380 - DNA, 15 bp, Homo sapiens
aaattttggaaccat

SEQ ID NO: 871381 - DNA, 15 bp, Homo sapiens
aaaattttggaacca

SEQ ID NO: 871382 - DNA, 15 bp, Homo sapiens
gaaaattttggaacc

SEQ ID NO: 871383 - DNA, 15 bp, Homo sapiens
agaaaattttggaac

SEQ ID NO: 871384 - DNA, 15 bp, Homo sapiens
tagaaaattttggaa

SEQ ID NO: 871385 - DNA, 15 bp, Homo sapiens
atagaaaattttgga

SEQ ID NO: 871386 - DNA, 15 bp, Homo sapiens
catagaaaattttgg

SEQ ID NO: 871387 - DNA, 15 bp, Homo sapiens
ccatagaaaattttg

SEQ ID NO: 871388 - DNA, 15 bp, Homo sapiens
accatagaaaatttt

SEQ ID NO: 871389 - DNA, 15 bp, Homo sapiens
aaccatagaaaattt

SEQ ID NO: 871390 - DNA, 15 bp, Homo sapiens
taaccatagaaaatt

SEQ ID NO: 871391 - DNA, 15 bp, Homo sapiens
ttaaccatagaaaat

SEQ ID NO: 871392 - DNA, 15 bp, Homo sapiens
cttaaccatagaaaa

SEQ ID NO: 871393 - DNA, 15 bp, Homo sapiens
tcttaaccatagaaa

SEQ ID NO: 871394 - DNA, 15 bp, Homo sapiens
ttcttaaccatagaa

SEQ ID NO: 871395 - DNA, 15 bp, Homo sapiens
attcttaaccataga

SEQ ID NO: 871396 - DNA, 15 bp, Homo sapiens
gattcttaaccatag

SEQ ID NO: 871397 - DNA, 15 bp, Homo sapiens
tgattcttaaccata

SEQ ID NO: 871398 - DNA, 15 bp, Homo sapiens
gtgattcttaaccat

SEQ ID NO: 871399 - DNA, 15 bp, Homo sapiens
ggtgattcttaacca

SEQ ID NO: 871400 - DNA, 15 bp, Homo sapiens
aggtgattcttaacc

SEQ ID NO: 871401 - DNA, 15 bp, Homo sapiens
caggtgattcttaac

SEQ ID NO: 871402 - DNA, 15 bp, Homo sapiens
ccaggtgattcttaa

SEQ ID NO: 871403 - DNA, 15 bp, Homo sapiens
cccaggtgattctta

SEQ ID NO: 871404 - DNA, 15 bp, Homo sapiens
tcccaggtgattctt

SEQ ID NO: 871405 - DNA, 15 bp, Homo sapiens
atcccaggtgattct

SEQ ID NO: 871406 - DNA, 15 bp, Homo sapiens
catcccaggtgattc

SEQ ID NO: 871407 - DNA, 15 bp, Homo sapiens
ccatcccaggtgatt

SEQ ID NO: 871408 - DNA, 15 bp, Homo sapiens
accatcccaggtgat

SEQ ID NO: 871409 - DNA, 15 bp, Homo sapiens
aaccatcccaggtga

SEQ ID NO: 871410 - DNA, 15 bp, Homo sapiens
aaaccatcccaggtg

SEQ ID NO: 871411 - DNA, 15 bp, Homo sapiens
aaaaccatcccaggt

SEQ ID NO: 871412 - DNA, 15 bp, Homo sapiens
caaaaccatcccagg

SEQ ID NO: 871413 - DNA, 15 bp, Homo sapiens
tcaaaaccatcccag

SEQ ID NO: 871414 - DNA, 15 bp, Homo sapiens
ttcaaaaccatccca

SEQ ID NO: 871415 - DNA, 15 bp, Homo sapiens
tttcaaaaccatccc

SEQ ID NO: 871416 - DNA, 15 bp, Homo sapiens
atttcaaaaccatcc

SEQ ID NO: 871417 - DNA, 15 bp, Homo sapiens
catttcaaaaccatc

SEQ ID NO: 871418 - DNA, 15 bp, Homo sapiens
ccatttcaaaaccat

SEQ ID NO: 871419 - DNA, 15 bp, Homo sapiens
gccatttcaaaacca

SEQ ID NO: 871420 - DNA, 15 bp, Homo sapiens
tgccatttcaaaacc

SEQ ID NO: 871421 - DNA, 15 bp, Homo sapiens
ctgccatttcaaaac

SEQ ID NO: 871422 - DNA, 15 bp, Homo sapiens
tctgccatttcaaaa

SEQ ID NO: 871423 - DNA, 15 bp, Homo sapiens
atctgccatttcaaa

SEQ ID NO: 871424 - DNA, 15 bp, Homo sapiens
aatctgccatttcaa

SEQ ID NO: 871425 - DNA, 15 bp, Homo sapiens
gaatctgccatttca

SEQ ID NO: 871426 - DNA, 15 bp, Homo sapiens
agaatctgccatttc

SEQ ID NO: 871427 - DNA, 15 bp, Homo sapiens
tagaatctgccattt

SEQ ID NO: 871428 - DNA, 15 bp, Homo sapiens
ttagaatctgccatt

SEQ ID NO: 871429 - DNA, 15 bp, Homo sapiens
cttagaatctgccat

SEQ ID NO: 871430 - DNA, 15 bp, Homo sapiens
tcttagaatctgcca

SEQ ID NO: 871431 - DNA, 15 bp, Homo sapiens
gtcttagaatctgcc

SEQ ID NO: 871432 - DNA, 15 bp, Homo sapiens
tgtcttagaatctgc

SEQ ID NO: 871433 - DNA, 15 bp, Homo sapiens
ttgtcttagaatctg

SEQ ID NO: 871434 - DNA, 15 bp, Homo sapiens
gttgtcttagaatct

SEQ ID NO: 871435 - DNA, 15 bp, Homo sapiens
agttgtcttagaatc

SEQ ID NO: 871436 - DNA, 15 bp, Homo sapiens
aagttgtcttagaat

SEQ ID NO: 871437 - DNA, 15 bp, Homo sapiens
caagttgtcttagaa

SEQ ID NO: 871438 - DNA, 15 bp, Homo sapiens
tcaagttgtcttaga

SEQ ID NO: 871439 - DNA, 15 bp, Homo sapiens
atcaagttgtcttag

SEQ ID NO: 871440 - DNA, 15 bp, Homo sapiens
aatcaagttgtctta

SEQ ID NO: 871441 - DNA, 15 bp, Homo sapiens
gaatcaagttgtctt

SEQ ID NO: 871442 - DNA, 15 bp, Homo sapiens
tgaatcaagttgtct

SEQ ID NO: 871443 - DNA, 15 bp, Homo sapiens
ttgaatcaagttgtc

SEQ ID NO: 871444 - DNA, 15 bp, Homo sapiens
gttgaatcaagttgt

SEQ ID NO: 871445 - DNA, 15 bp, Homo sapiens
tgttgaatcaagttg

SEQ ID NO: 871446 - DNA, 15 bp, Homo sapiens
ctgttgaatcaagtt

SEQ ID NO: 871447 - DNA, 15 bp, Homo sapiens
cctgttgaatcaagt

SEQ ID NO: 871448 - DNA, 15 bp, Homo sapiens
acctgttgaatcaag

SEQ ID NO: 871449 - DNA, 15 bp, Homo sapiens
aacctgttgaatcaa

SEQ ID NO: 871450 - DNA, 15 bp, Homo sapiens
aaacctgttgaatca

SEQ ID NO: 871451 - DNA, 15 bp, Homo sapiens
taaacctgttgaatc

SEQ ID NO: 871452 - DNA, 15 bp, Homo sapiens
ctaaacctgttgaat

SEQ ID NO: 871453 - DNA, 15 bp, Homo sapiens
cctaaacctgttgaa

SEQ ID NO: 871454 - DNA, 15 bp, Homo sapiens
acctaaacctgttga

SEQ ID NO: 871455 - DNA, 15 bp, Homo sapiens
tacctaaacctgttg

SEQ ID NO: 871456 - DNA, 15 bp, Homo sapiens
ttacctaaacctgtt

SEQ ID NO: 871457 - DNA, 15 bp, Homo sapiens
tttacctaaacctgt

SEQ ID NO: 871458 - DNA, 15 bp, Homo sapiens
ctttacctaaacctg

SEQ ID NO: 871459 - DNA, 15 bp, Homo sapiens
gctttacctaaacct

SEQ ID NO: 871460 - DNA, 15 bp, Homo sapiens
ggctttacctaaacc

SEQ ID NO: 871461 - DNA, 15 bp, Homo sapiens
gggctttacctaaac

SEQ ID NO: 871462 - DNA, 15 bp, Homo sapiens
tgggctttacctaaa

SEQ ID NO: 871463 - DNA, 15 bp, Homo sapiens
ctgggctttacctaa

SEQ ID NO: 871464 - DNA, 15 bp, Homo sapiens
cctgggctttaccta

SEQ ID NO: 871465 - DNA, 15 bp, Homo sapiens
ccctgggctttacct

SEQ ID NO: 871466 - DNA, 15 bp, Homo sapiens
tccctgggctttacc

SEQ ID NO: 871467 - DNA, 15 bp, Homo sapiens
ttccctgggctttac

SEQ ID NO: 871468 - DNA, 15 bp, Homo sapiens
gttccctgggcttta

SEQ ID NO: 871469 - DNA, 15 bp, Homo sapiens
agttccctgggcttt

SEQ ID NO: 871470 - DNA, 15 bp, Homo sapiens
cagttccctgggctt

SEQ ID NO: 871471 - DNA, 15 bp, Homo sapiens
gcagttccctgggct

SEQ ID NO: 871472 - DNA, 15 bp, Homo sapiens
tgcagttccctgggc

SEQ ID NO: 871473 - DNA, 15 bp, Homo sapiens
atgcagttccctggg

SEQ ID NO: 871474 - DNA, 15 bp, Homo sapiens
aatgcagttccctgg

SEQ ID NO: 871475 - DNA, 15 bp, Homo sapiens
taatgcagttccctg

SEQ ID NO: 871476 - DNA, 15 bp, Homo sapiens
ataatgcagttccct

SEQ ID NO: 871477 - DNA, 15 bp, Homo sapiens
tataatgcagttccc

SEQ ID NO: 871478 - DNA, 15 bp, Homo sapiens
ttataatgcagttcc

SEQ ID NO: 871479 - DNA, 15 bp, Homo sapiens
cttataatgcagttc

SEQ ID NO: 871480 - DNA, 15 bp, Homo sapiens
tcttataatgcagtt

SEQ ID NO: 871481 - DNA, 15 bp, Homo sapiens
ttcttataatgcagt

SEQ ID NO: 871482 - DNA, 15 bp, Homo sapiens
cttcttataatgcag

SEQ ID NO: 871483 - DNA, 15 bp, Homo sapiens
ccttcttataatgca

SEQ ID NO: 871484 - DNA, 15 bp, Homo sapiens
tccttcttataatgc

SEQ ID NO: 871485 - DNA, 15 bp, Homo sapiens
ttccttcttataatg

SEQ ID NO: 871486 - DNA, 15 bp, Homo sapiens
attccttcttataat

SEQ ID NO: 871487 - DNA, 15 bp, Homo sapiens
gattccttcttataa

SEQ ID NO: 871488 - DNA, 15 bp, Homo sapiens
tgattccttcttata

SEQ ID NO: 871489 - DNA, 15 bp, Homo sapiens
gtgattccttcttat

SEQ ID NO: 871490 - DNA, 15 bp, Homo sapiens
ggtgattccttctta

SEQ ID NO: 871491 - DNA, 15 bp, Homo sapiens
aggtgattccttctt

SEQ ID NO: 871492 - DNA, 15 bp, Homo sapiens
caggtgattccttct

SEQ ID NO: 871493 - DNA, 15 bp, Homo sapiens
acaggtgattccttc

SEQ ID NO: 871494 - DNA, 15 bp, Homo sapiens
tacaggtgattcctt

SEQ ID NO: 871495 - DNA, 15 bp, Homo sapiens
ttacaggtgattcct

SEQ ID NO: 871496 - DNA, 15 bp, Homo sapiens
attacaggtgattcc

SEQ ID NO: 871497 - DNA, 15 bp, Homo sapiens
aattacaggtgattc

SEQ ID NO: 871498 - DNA, 15 bp, Homo sapiens
aaattacaggtgatt

SEQ ID NO: 871499 - DNA, 15 bp, Homo sapiens
aaaattacaggtgat

SEQ ID NO: 871500 - DNA, 15 bp, Homo sapiens
caaaattacaggtga

SEQ ID NO: 871501 - DNA, 15 bp, Homo sapiens
ccaaaattacaggtg

SEQ ID NO: 871502 - DNA, 15 bp, Homo sapiens
tccaaaattacaggt

SEQ ID NO: 871503 - DNA, 15 bp, Homo sapiens
ctccaaaattacagg

SEQ ID NO: 871504 - DNA, 15 bp, Homo sapiens
actccaaaattacag

SEQ ID NO: 871505 - DNA, 15 bp, Homo sapiens
gactccaaaattaca

SEQ ID NO: 871506 - DNA, 15 bp, Homo sapiens
tgactccaaaattac

SEQ ID NO: 871507 - DNA, 15 bp, Homo sapiens
ttgactccaaaatta

SEQ ID NO: 871508 - DNA, 15 bp, Homo sapiens
cttgactccaaaatt

SEQ ID NO: 871509 - DNA, 15 bp, Homo sapiens
tcttgactccaaaat

SEQ ID NO: 871510 - DNA, 15 bp, Homo sapiens
atcttgactccaaaa

SEQ ID NO: 871511 - DNA, 15 bp, Homo sapiens
gatcttgactccaaa

SEQ ID NO: 871512 - DNA, 15 bp, Homo sapiens
ggatcttgactccaa

SEQ ID NO: 871513 - DNA, 15 bp, Homo sapiens
tggatcttgactcca

SEQ ID NO: 871514 - DNA, 15 bp, Homo sapiens
ttggatcttgactcc

SEQ ID NO: 871515 - DNA, 15 bp, Homo sapiens
cttggatcttgactc

SEQ ID NO: 871516 - DNA, 15 bp, Homo sapiens
ccttggatcttgact

SEQ ID NO: 871517 - DNA, 15 bp, Homo sapiens
tccttggatcttgac

SEQ ID NO: 871518 - DNA, 15 bp, Homo sapiens
ttccttggatcttga

SEQ ID NO: 871519 - DNA, 15 bp, Homo sapiens
gttccttggatcttg

SEQ ID NO: 871520 - DNA, 15 bp, Homo sapiens
tgttccttggatctt

SEQ ID NO: 871521 - DNA, 15 bp, Homo sapiens
gtgttccttggatct

SEQ ID NO: 871522 - DNA, 15 bp, Homo sapiens
agtgttccttggatc

SEQ ID NO: 871523 - DNA, 15 bp, Homo sapiens
gagtgttccttggat

SEQ ID NO: 871524 - DNA, 15 bp, Homo sapiens
tgagtgttccttgga

SEQ ID NO: 871525 - DNA, 15 bp, Homo sapiens
atgagtgttccttgg

SEQ ID NO: 871526 - DNA, 15 bp, Homo sapiens
aatgagtgttccttg

SEQ ID NO: 871527 - DNA, 15 bp, Homo sapiens
caatgagtgttcctt

SEQ ID NO: 871528 - DNA, 15 bp, Homo sapiens
tcaatgagtgttcct

SEQ ID NO: 871529 - DNA, 15 bp, Homo sapiens
ctcaatgagtgttcc

SEQ ID NO: 871530 - DNA, 15 bp, Homo sapiens
tctcaatgagtgttc

SEQ ID NO: 871531 - DNA, 15 bp, Homo sapiens
ttctcaatgagtgtt

SEQ ID NO: 871532 - DNA, 15 bp, Homo sapiens
tttctcaatgagtgt

SEQ ID NO: 871533 - DNA, 15 bp, Homo sapiens
gtttctcaatgagtg

SEQ ID NO: 871534 - DNA, 15 bp, Homo sapiens
tgtttctcaatgagt

SEQ ID NO: 871535 - DNA, 15 bp, Homo sapiens
gtgtttctcaatgag

SEQ ID NO: 871536 - DNA, 15 bp, Homo sapiens
agtgtttctcaatga

SEQ ID NO: 871537 - DNA, 15 bp, Homo sapiens
cagtgtttctcaatg

SEQ ID NO: 871538 - DNA, 15 bp, Homo sapiens
tcagtgtttctcaat

SEQ ID NO: 871539 - DNA, 15 bp, Homo sapiens
atcagtgtttctcaa

SEQ ID NO: 871540 - DNA, 15 bp, Homo sapiens
aatcagtgtttctca

SEQ ID NO: 871541 - DNA, 15 bp, Homo sapiens
aaatcagtgtttctc

SEQ ID NO: 871542 - DNA, 15 bp, Homo sapiens
taaatcagtgtttct

SEQ ID NO: 871543 - DNA, 15 bp, Homo sapiens
gtaaatcagtgtttc

SEQ ID NO: 871544 - DNA, 15 bp, Homo sapiens
tgtaaatcagtgttt

SEQ ID NO: 871545 - DNA, 15 bp, Homo sapiens
ttgtaaatcagtgtt

SEQ ID NO: 871546 - DNA, 15 bp, Homo sapiens
tttgtaaatcagtgt

SEQ ID NO: 871547 - DNA, 15 bp, Homo sapiens
ctttgtaaatcagtg

SEQ ID NO: 871548 - DNA, 15 bp, Homo sapiens
actttgtaaatcagt

SEQ ID NO: 871549 - DNA, 15 bp, Homo sapiens
cactttgtaaatcag

SEQ ID NO: 871550 - DNA, 15 bp, Homo sapiens
gcactttgtaaatca

SEQ ID NO: 871551 - DNA, 15 bp, Homo sapiens
tgcactttgtaaatc

SEQ ID NO: 871552 - DNA, 15 bp, Homo sapiens
atgcactttgtaaat

SEQ ID NO: 871553 - DNA, 15 bp, Homo sapiens
catgcactttgtaaa

SEQ ID NO: 871554 - DNA, 15 bp, Homo sapiens
ccatgcactttgtaa

SEQ ID NO: 871555 - DNA, 15 bp, Homo sapiens
tccatgcactttgta

SEQ ID NO: 871556 - DNA, 15 bp, Homo sapiens
ctccatgcactttgt

SEQ ID NO: 871557 - DNA, 15 bp, Homo sapiens
tctccatgcactttg

SEQ ID NO: 871558 - DNA, 15 bp, Homo sapiens
ctctccatgcacttt

SEQ ID NO: 871559 - DNA, 15 bp, Homo sapiens
tctctccatgcactt

SEQ ID NO: 871560 - DNA, 15 bp, Homo sapiens
ttctctccatgcact

SEQ ID NO: 871561 - DNA, 15 bp, Homo sapiens
tttctctccatgcac

SEQ ID NO: 871562 - DNA, 15 bp, Homo sapiens
atttctctccatgca

SEQ ID NO: 871563 - DNA, 15 bp, Homo sapiens
catttctctccatgc

SEQ ID NO: 871564 - DNA, 15 bp, Homo sapiens
ccatttctctccatg

SEQ ID NO: 871565 - DNA, 15 bp, Homo sapiens
tccatttctctccat

SEQ ID NO: 871566 - DNA, 15 bp, Homo sapiens
ctccatttctctcca

SEQ ID NO: 871567 - DNA, 15 bp, Homo sapiens
gctccatttctctcc

SEQ ID NO: 871568 - DNA, 15 bp, Homo sapiens
tgctccatttctctc

SEQ ID NO: 871569 - DNA, 15 bp, Homo sapiens
ttgctccatttctct

SEQ ID NO: 871570 - DNA, 15 bp, Homo sapiens
cttgctccatttctc

SEQ ID NO: 871571 - DNA, 15 bp, Homo sapiens
acttgctccatttct

SEQ ID NO: 871572 - DNA, 15 bp, Homo sapiens
cacttgctccatttc

SEQ ID NO: 871573 - DNA, 15 bp, Homo sapiens
tcacttgctccattt

SEQ ID NO: 871574 - DNA, 15 bp, Homo sapiens
ttcacttgctccatt

SEQ ID NO: 871575 - DNA, 15 bp, Homo sapiens
cttcacttgctccat

SEQ ID NO: 871576 - DNA, 15 bp, Homo sapiens
ccttcacttgctcca

SEQ ID NO: 871577 - DNA, 15 bp, Homo sapiens
cccttcacttgctcc

SEQ ID NO: 871578 - DNA, 15 bp, Homo sapiens
ccccttcacttgctc

SEQ ID NO: 871579 - DNA, 15 bp, Homo sapiens
cccccttcacttgct

SEQ ID NO: 871580 - DNA, 15 bp, Homo sapiens
tcccccttcacttgc

SEQ ID NO: 871581 - DNA, 15 bp, Homo sapiens
atcccccttcacttg

SEQ ID NO: 871582 - DNA, 15 bp, Homo sapiens
gatcccccttcactt

SEQ ID NO: 871583 - DNA, 15 bp, Homo sapiens
tgatcccccttcact

SEQ ID NO: 871584 - DNA, 15 bp, Homo sapiens
ctgatcccccttcac

SEQ ID NO: 871585 - DNA, 15 bp, Homo sapiens
gctgatcccccttca

SEQ ID NO: 871586 - DNA, 15 bp, Homo sapiens
tgctgatcccccttc

SEQ ID NO: 871587 - DNA, 15 bp, Homo sapiens
atgctgatccccctt

SEQ ID NO: 871588 - DNA, 15 bp, Homo sapiens
catgctgatccccct

SEQ ID NO: 871589 - DNA, 15 bp, Homo sapiens
ccatgctgatccccc

SEQ ID NO: 871590 - DNA, 15 bp, Homo sapiens
accatgctgatcccc

SEQ ID NO: 871591 - DNA, 15 bp, Homo sapiens
caccatgctgatccc

SEQ ID NO: 871592 - DNA, 15 bp, Homo sapiens
tcaccatgctgatcc

SEQ ID NO: 871593 - DNA, 15 bp, Homo sapiens
ttcaccatgctgatc

SEQ ID NO: 871594 - DNA, 15 bp, Homo sapiens
tttcaccatgctgat

SEQ ID NO: 871595 - DNA, 15 bp, Homo sapiens
atttcaccatgctga

SEQ ID NO: 871596 - DNA, 15 bp, Homo sapiens
tatttcaccatgctg

SEQ ID NO: 871597 - DNA, 15 bp, Homo sapiens
atatttcaccatgct

SEQ ID NO: 871598 - DNA, 15 bp, Homo sapiens
tatatttcaccatgc

SEQ ID NO: 871599 - DNA, 15 bp, Homo sapiens
ctatatttcaccatg

SEQ ID NO: 871600 - DNA, 15 bp, Homo sapiens
cctatatttcaccat

SEQ ID NO: 871601 - DNA, 15 bp, Homo sapiens
gcctatatttcacca

SEQ ID NO: 871602 - DNA, 15 bp, Homo sapiens
agcctatatttcacc

SEQ ID NO: 871603 - DNA, 15 bp, Homo sapiens
cagcctatatttcac

SEQ ID NO: 871604 - DNA, 15 bp, Homo sapiens
acagcctatatttca

SEQ ID NO: 871605 - DNA, 15 bp, Homo sapiens
aacagcctatatttc

SEQ ID NO: 871606 - DNA, 15 bp, Homo sapiens
taacagcctatattt

SEQ ID NO: 871607 - DNA, 15 bp, Homo sapiens
ctaacagcctatatt

SEQ ID NO: 871608 - DNA, 15 bp, Homo sapiens
cctaacagcctatat

SEQ ID NO: 871609 - DNA, 15 bp, Homo sapiens
tcctaacagcctata

SEQ ID NO: 871610 - DNA, 15 bp, Homo sapiens
ctcctaacagcctat

SEQ ID NO: 871611 - DNA, 15 bp, Homo sapiens
actcctaacagccta

SEQ ID NO: 871612 - DNA, 15 bp, Homo sapiens
cactcctaacagcct

SEQ ID NO: 871613 - DNA, 15 bp, Homo sapiens
gcactcctaacagcc

SEQ ID NO: 871614 - DNA, 15 bp, Homo sapiens
agcactcctaacagc

SEQ ID NO: 871615 - DNA, 15 bp, Homo sapiens
tagcactcctaacag

SEQ ID NO: 871616 - DNA, 15 bp, Homo sapiens
atagcactcctaaca

SEQ ID NO: 871617 - DNA, 15 bp, Homo sapiens
aatagcactcctaac

SEQ ID NO: 871618 - DNA, 15 bp, Homo sapiens
caatagcactcctaa

SEQ ID NO: 871619 - DNA, 15 bp, Homo sapiens
tcaatagcactccta

SEQ ID NO: 871620 - DNA, 15 bp, Homo sapiens
gtcaatagcactcct

SEQ ID NO: 871621 - DNA, 15 bp, Homo sapiens
agtcaatagcactcc

SEQ ID NO: 871622 - DNA, 15 bp, Homo sapiens
tagtcaatagcactc

SEQ ID NO: 871623 - DNA, 15 bp, Homo sapiens
ttagtcaatagcact

SEQ ID NO: 871624 - DNA, 15 bp, Homo sapiens
gttagtcaatagcac

SEQ ID NO: 871625 - DNA, 15 bp, Homo sapiens
agttagtcaatagca

SEQ ID NO: 871626 - DNA, 15 bp, Homo sapiens
cagttagtcaatagc

SEQ ID NO: 871627 - DNA, 15 bp, Homo sapiens
acagttagtcaatag

SEQ ID NO: 871628 - DNA, 15 bp, Homo sapiens
gacagttagtcaata

SEQ ID NO: 871629 - DNA, 15 bp, Homo sapiens
agacagttagtcaat

SEQ ID NO: 871630 - DNA, 15 bp, Homo sapiens
cagacagttagtcaa

SEQ ID NO: 871631 - DNA, 15 bp, Homo sapiens
ccagacagttagtca

SEQ ID NO: 871632 - DNA, 15 bp, Homo sapiens
accagacagttagtc

SEQ ID NO: 871633 - DNA, 15 bp, Homo sapiens
caccagacagttagt

SEQ ID NO: 871634 - DNA, 15 bp, Homo sapiens
tcaccagacagttag

SEQ ID NO: 871635 - DNA, 15 bp, Homo sapiens
gtcaccagacagtta

SEQ ID NO: 871636 - DNA, 15 bp, Homo sapiens
agtcaccagacagtt

SEQ ID NO: 871637 - DNA, 15 bp, Homo sapiens
cagtcaccagacagt

SEQ ID NO: 871638 - DNA, 15 bp, Homo sapiens
ccagtcaccagacag

SEQ ID NO: 871639 - DNA, 15 bp, Homo sapiens
tccagtcaccagaca

SEQ ID NO: 871640 - DNA, 15 bp, Homo sapiens
gtccagtcaccagac

SEQ ID NO: 871641 - DNA, 15 bp, Homo sapiens
ggtccagtcaccaga

SEQ ID NO: 871642 - DNA, 15 bp, Homo sapiens
tggtccagtcaccag

SEQ ID NO: 871643 - DNA, 15 bp, Homo sapiens
ctggtccagtcacca

SEQ ID NO: 871644 - DNA, 15 bp, Homo sapiens
tctggtccagtcacc

SEQ ID NO: 871645 - DNA, 15 bp, Homo sapiens
ctctggtccagtcac

SEQ ID NO: 871646 - DNA, 15 bp, Homo sapiens
actctggtccagtca

SEQ ID NO: 871647 - DNA, 15 bp, Homo sapiens
tactctggtccagtc

SEQ ID NO: 871648 - DNA, 15 bp, Homo sapiens
ttactctggtccagt

SEQ ID NO: 871649 - DNA, 15 bp, Homo sapiens
tttactctggtccag

SEQ ID NO: 871650 - DNA, 15 bp, Homo sapiens
atttactctggtcca

SEQ ID NO: 871651 - DNA, 15 bp, Homo sapiens
gatttactctggtcc

SEQ ID NO: 871652 - DNA, 15 bp, Homo sapiens
agatttactctggtc

SEQ ID NO: 871653 - DNA, 15 bp, Homo sapiens
aagatttactctggt

SEQ ID NO: 871654 - DNA, 15 bp, Homo sapiens
aaagatttactctgg

SEQ ID NO: 871655 - DNA, 15 bp, Homo sapiens
aaaagatttactctg

SEQ ID NO: 871656 - DNA, 15 bp, Homo sapiens
taaaagatttactct

SEQ ID NO: 871657 - DNA, 15 bp, Homo sapiens
gtaaaagatttactc

SEQ ID NO: 871658 - DNA, 15 bp, Homo sapiens
agtaaaagatttact

SEQ ID NO: 871659 - DNA, 15 bp, Homo sapiens
aagtaaaagatttac

SEQ ID NO: 871660 - DNA, 15 bp, Homo sapiens
aaagtaaaagattta

SEQ ID NO: 871661 - DNA, 15 bp, Homo sapiens
caaagtaaaagattt

SEQ ID NO: 871662 - DNA, 15 bp, Homo sapiens
gcaaagtaaaagatt

SEQ ID NO: 871663 - DNA, 15 bp, Homo sapiens
tgcaaagtaaaagat

SEQ ID NO: 871664 - DNA, 15 bp, Homo sapiens
ttgcaaagtaaaaga

SEQ ID NO: 871665 - DNA, 15 bp, Homo sapiens
cttgcaaagtaaaag

SEQ ID NO: 871666 - DNA, 15 bp, Homo sapiens
tcttgcaaagtaaaa

SEQ ID NO: 871667 - DNA, 15 bp, Homo sapiens
ttcttgcaaagtaaa

SEQ ID NO: 871668 - DNA, 15 bp, Homo sapiens
tttcttgcaaagtaa

SEQ ID NO: 871669 - DNA, 15 bp, Homo sapiens
gtttcttgcaaagta

SEQ ID NO: 871670 - DNA, 15 bp, Homo sapiens
tgtttcttgcaaagt

SEQ ID NO: 871671 - DNA, 15 bp, Homo sapiens
ctgtttcttgcaaag

SEQ ID NO: 871672 - DNA, 15 bp, Homo sapiens
cctgtttcttgcaaa

SEQ ID NO: 871673 - DNA, 15 bp, Homo sapiens
tcctgtttcttgcaa

SEQ ID NO: 871674 - DNA, 15 bp, Homo sapiens
gtcctgtttcttgca

SEQ ID NO: 871675 - DNA, 15 bp, Homo sapiens
agtcctgtttcttgc

SEQ ID NO: 871676 - DNA, 15 bp, Homo sapiens
tagtcctgtttcttg

SEQ ID NO: 871677 - DNA, 15 bp, Homo sapiens
ttagtcctgtttctt

SEQ ID NO: 871678 - DNA, 15 bp, Homo sapiens
tttagtcctgtttct

SEQ ID NO: 871679 - DNA, 15 bp, Homo sapiens
atttagtcctgtttc

SEQ ID NO: 871680 - DNA, 15 bp, Homo sapiens
aatttagtcctgttt

SEQ ID NO: 871681 - DNA, 15 bp, Homo sapiens
gaatttagtcctgtt

SEQ ID NO: 871682 - DNA, 15 bp, Homo sapiens
ggaatttagtcctgt

SEQ ID NO: 871683 - DNA, 15 bp, Homo sapiens
gggaatttagtcctg

SEQ ID NO: 871684 - DNA, 15 bp, Homo sapiens
tgggaatttagtcct

SEQ ID NO: 871685 - DNA, 15 bp, Homo sapiens
atgggaatttagtcc

SEQ ID NO: 871686 - DNA, 15 bp, Homo sapiens
tatgggaatttagtc

SEQ ID NO: 871687 - DNA, 15 bp, Homo sapiens
atatgggaatttagt

SEQ ID NO: 871688 - DNA, 15 bp, Homo sapiens
aatatgggaatttag

SEQ ID NO: 871689 - DNA, 15 bp, Homo sapiens
taatatgggaattta

SEQ ID NO: 871690 - DNA, 15 bp, Homo sapiens
ataatatgggaattt

SEQ ID NO: 871691 - DNA, 15 bp, Homo sapiens
cataatatgggaatt

SEQ ID NO: 871692 - DNA, 15 bp, Homo sapiens
acataatatgggaat

SEQ ID NO: 871693 - DNA, 15 bp, Homo sapiens
gacataatatgggaa

SEQ ID NO: 871694 - DNA, 15 bp, Homo sapiens
ggacataatatggga

SEQ ID NO: 871695 - DNA, 15 bp, Homo sapiens
tggacataatatggg

SEQ ID NO: 871696 - DNA, 15 bp, Homo sapiens
atggacataatatgg

SEQ ID NO: 871697 - DNA, 15 bp, Homo sapiens
tatggacataatatg

SEQ ID NO: 871698 - DNA, 15 bp, Homo sapiens
ctatggacataatat

SEQ ID NO: 871699 - DNA, 15 bp, Homo sapiens
gctatggacataata

SEQ ID NO: 871700 - DNA, 15 bp, Homo sapiens
tgctatggacataat

SEQ ID NO: 871701 - DNA, 15 bp, Homo sapiens
ttgctatggacataa

SEQ ID NO: 871702 - DNA, 15 bp, Homo sapiens
tttgctatggacata

SEQ ID NO: 871703 - DNA, 15 bp, Homo sapiens
ctttgctatggacat

SEQ ID NO: 871704 - DNA, 15 bp, Homo sapiens
cctttgctatggaca

SEQ ID NO: 871705 - DNA, 15 bp, Homo sapiens
ccctttgctatggac

SEQ ID NO: 871706 - DNA, 15 bp, Homo sapiens
tccctttgctatgga

SEQ ID NO: 871707 - DNA, 15 bp, Homo sapiens
ttccctttgctatgg

SEQ ID NO: 871708 - DNA, 15 bp, Homo sapiens
attccctttgctatg

SEQ ID NO: 871709 - DNA, 15 bp, Homo sapiens
aattccctttgctat

SEQ ID NO: 871710 - DNA, 15 bp, Homo sapiens
taattccctttgcta

SEQ ID NO: 871711 - DNA, 15 bp, Homo sapiens
ataattccctttgct

SEQ ID NO: 871712 - DNA, 15 bp, Homo sapiens
cataattccctttgc

SEQ ID NO: 871713 - DNA, 15 bp, Homo sapiens
acataattccctttg

SEQ ID NO: 871714 - DNA, 15 bp, Homo sapiens
tacataattcccttt

SEQ ID NO: 871715 - DNA, 15 bp, Homo sapiens
ctacataattccctt

SEQ ID NO: 871716 - DNA, 15 bp, Homo sapiens
tctacataattccct

SEQ ID NO: 871717 - DNA, 15 bp, Homo sapiens
ttctacataattccc

SEQ ID NO: 871718 - DNA, 15 bp, Homo sapiens
tttctacataattcc

SEQ ID NO: 871719 - DNA, 15 bp, Homo sapiens
ttttctacataattc

SEQ ID NO: 871720 - DNA, 15 bp, Homo sapiens
tttttctacataatt

SEQ ID NO: 871721 - DNA, 15 bp, Homo sapiens
atttttctacataat

SEQ ID NO: 871722 - DNA, 15 bp, Homo sapiens
aatttttctacataa

SEQ ID NO: 871723 - DNA, 15 bp, Homo sapiens
caatttttctacata

SEQ ID NO: 871724 - DNA, 15 bp, Homo sapiens
tcaatttttctacat

SEQ ID NO: 871725 - DNA, 15 bp, Homo sapiens
atcaatttttctaca

SEQ ID NO: 871726 - DNA, 15 bp, Homo sapiens
tatcaatttttctac

SEQ ID NO: 871727 - DNA, 15 bp, Homo sapiens
ttatcaatttttcta

SEQ ID NO: 871728 - DNA, 15 bp, Homo sapiens
attatcaatttttct

SEQ ID NO: 871729 - DNA, 15 bp, Homo sapiens
aattatcaatttttc

SEQ ID NO: 871730 - DNA, 15 bp, Homo sapiens
taattatcaattttt

SEQ ID NO: 871731 - DNA, 15 bp, Homo sapiens
ctaattatcaatttt

SEQ ID NO: 871732 - DNA, 15 bp, Homo sapiens
cctaattatcaattt

SEQ ID NO: 871733 - DNA, 15 bp, Homo sapiens
tcctaattatcaatt

SEQ ID NO: 871734 - DNA, 15 bp, Homo sapiens
ctcctaattatcaat

SEQ ID NO: 871735 - DNA, 15 bp, Homo sapiens
gctcctaattatcaa

SEQ ID NO: 871736 - DNA, 15 bp, Homo sapiens
ggctcctaattatca

SEQ ID NO: 871737 - DNA, 15 bp, Homo sapiens
aggctcctaattatc

SEQ ID NO: 871738 - DNA, 15 bp, Homo sapiens
caggctcctaattat

SEQ ID NO: 871739 - DNA, 15 bp, Homo sapiens
tcaggctcctaatta

SEQ ID NO: 871740 - DNA, 15 bp, Homo sapiens
ctcaggctcctaatt

SEQ ID NO: 871741 - DNA, 15 bp, Homo sapiens
actcaggctcctaat

SEQ ID NO: 871742 - DNA, 15 bp, Homo sapiens
aactcaggctcctaa

SEQ ID NO: 871743 - DNA, 15 bp, Homo sapiens
gaactcaggctccta

SEQ ID NO: 871744 - DNA, 15 bp, Homo sapiens
agaactcaggctcct

SEQ ID NO: 871745 - DNA, 15 bp, Homo sapiens
aagaactcaggctcc

SEQ ID NO: 871746 - DNA, 15 bp, Homo sapiens
caagaactcaggctc

SEQ ID NO: 871747 - DNA, 15 bp, Homo sapiens
tcaagaactcaggct

SEQ ID NO: 871748 - DNA, 15 bp, Homo sapiens
gtcaagaactcaggc

SEQ ID NO: 871749 - DNA, 15 bp, Homo sapiens
ggtcaagaactcagg

SEQ ID NO: 871750 - DNA, 15 bp, Homo sapiens
tggtcaagaactcag

SEQ ID NO: 871751 - DNA, 15 bp, Homo sapiens
ctggtcaagaactca

SEQ ID NO: 871752 - DNA, 15 bp, Homo sapiens
gctggtcaagaactc

SEQ ID NO: 871753 - DNA, 15 bp, Homo sapiens
ggctggtcaagaact

SEQ ID NO: 871754 - DNA, 15 bp, Homo sapiens
aggctggtcaagaac

SEQ ID NO: 871755 - DNA, 15 bp, Homo sapiens
gaggctggtcaagaa

SEQ ID NO: 871756 - DNA, 15 bp, Homo sapiens
ggaggctggtcaaga

SEQ ID NO: 871757 - DNA, 15 bp, Homo sapiens
tggaggctggtcaag

SEQ ID NO: 871758 - DNA, 15 bp, Homo sapiens
gtggaggctggtcaa

SEQ ID NO: 871759 - DNA, 15 bp, Homo sapiens
agtggaggctggtca

SEQ ID NO: 871760 - DNA, 15 bp, Homo sapiens
tagtggaggctggtc

SEQ ID NO: 871761 - DNA, 15 bp, Homo sapiens
gtagtggaggctggt

SEQ ID NO: 871762 - DNA, 15 bp, Homo sapiens
ggtagtggaggctgg

SEQ ID NO: 871763 - DNA, 15 bp, Homo sapiens
aggtagtggaggctg

SEQ ID NO: 871764 - DNA, 15 bp, Homo sapiens
taggtagtggaggct

SEQ ID NO: 871765 - DNA, 15 bp, Homo sapiens
ataggtagtggaggc

SEQ ID NO: 871766 - DNA, 15 bp, Homo sapiens
cataggtagtggagg

SEQ ID NO: 871767 - DNA, 15 bp, Homo sapiens
acataggtagtggag

SEQ ID NO: 871768 - DNA, 15 bp, Homo sapiens
cacataggtagtgga

SEQ ID NO: 871769 - DNA, 15 bp, Homo sapiens
ccacataggtagtgg

SEQ ID NO: 871770 - DNA, 15 bp, Homo sapiens
gccacataggtagtg

SEQ ID NO: 871771 - DNA, 15 bp, Homo sapiens
ggccacataggtagt

SEQ ID NO: 871772 - DNA, 15 bp, Homo sapiens
aggccacataggtag

SEQ ID NO: 871773 - DNA, 15 bp, Homo sapiens
gaggccacataggta

SEQ ID NO: 871774 - DNA, 15 bp, Homo sapiens
tgaggccacataggt

SEQ ID NO: 871775 - DNA, 15 bp, Homo sapiens
ctgaggccacatagg

SEQ ID NO: 871776 - DNA, 15 bp, Homo sapiens
cctgaggccacatag

SEQ ID NO: 871777 - DNA, 15 bp, Homo sapiens
acctgaggccacata

SEQ ID NO: 871778 - DNA, 15 bp, Homo sapiens
cacctgaggccacat

SEQ ID NO: 871779 - DNA, 15 bp, Homo sapiens
tcacctgaggccaca

SEQ ID NO: 871780 - DNA, 15 bp, Homo sapiens
ctcacctgaggccac

SEQ ID NO: 871781 - DNA, 15 bp, Homo sapiens
actcacctgaggcca

SEQ ID NO: 871782 - DNA, 15 bp, Homo sapiens
aactcacctgaggcc

SEQ ID NO: 871783 - DNA, 15 bp, Homo sapiens
taactcacctgaggc

SEQ ID NO: 871784 - DNA, 15 bp, Homo sapiens
ataactcacctgagg

SEQ ID NO: 871785 - DNA, 15 bp, Homo sapiens
aataactcacctgag

SEQ ID NO: 871786 - DNA, 15 bp, Homo sapiens
aaataactcacctga

SEQ ID NO: 871787 - DNA, 15 bp, Homo sapiens
aaaataactcacctg

SEQ ID NO: 871788 - DNA, 15 bp, Homo sapiens
gaaaataactcacct

SEQ ID NO: 871789 - DNA, 15 bp, Homo sapiens
agaaaataactcacc

SEQ ID NO: 871790 - DNA, 15 bp, Homo sapiens
gagaaaataactcac

SEQ ID NO: 871791 - DNA, 15 bp, Homo sapiens
ggagaaaataactca

SEQ ID NO: 871792 - DNA, 15 bp, Homo sapiens
gggagaaaataactc

SEQ ID NO: 871793 - DNA, 15 bp, Homo sapiens
agggagaaaataact

SEQ ID NO: 871794 - DNA, 15 bp, Homo sapiens
aagggagaaaataac

SEQ ID NO: 871795 - DNA, 15 bp, Homo sapiens
aaagggagaaaataa

SEQ ID NO: 871796 - DNA, 15 bp, Homo sapiens
caaagggagaaaata

SEQ ID NO: 871797 - DNA, 15 bp, Homo sapiens
ccaaagggagaaaat

SEQ ID NO: 871798 - DNA, 15 bp, Homo sapiens
gccaaagggagaaaa

SEQ ID NO: 871799 - DNA, 15 bp, Homo sapiens
agccaaagggagaaa

SEQ ID NO: 871800 - DNA, 15 bp, Homo sapiens
gagccaaagggagaa

SEQ ID NO: 871801 - DNA, 15 bp, Homo sapiens
agagccaaagggaga

SEQ ID NO: 871802 - DNA, 15 bp, Homo sapiens
tagagccaaagggag

SEQ ID NO: 871803 - DNA, 15 bp, Homo sapiens
ttagagccaaaggga

SEQ ID NO: 871804 - DNA, 15 bp, Homo sapiens
cttagagccaaaggg

SEQ ID NO: 871805 - DNA, 15 bp, Homo sapiens
acttagagccaaagg

SEQ ID NO: 871806 - DNA, 15 bp, Homo sapiens
aacttagagccaaag

SEQ ID NO: 871807 - DNA, 15 bp, Homo sapiens
aaacttagagccaaa

SEQ ID NO: 871808 - DNA, 15 bp, Homo sapiens
aaaacttagagccaa

SEQ ID NO: 871809 - DNA, 15 bp, Homo sapiens
gaaaacttagagcca

SEQ ID NO: 871810 - DNA, 15 bp, Homo sapiens
ggaaaacttagagcc

SEQ ID NO: 871811 - DNA, 15 bp, Homo sapiens
gggaaaacttagagc

SEQ ID NO: 871812 - DNA, 15 bp, Homo sapiens
ggggaaaacttagag

SEQ ID NO: 871813 - DNA, 15 bp, Homo sapiens
tggggaaaacttaga

SEQ ID NO: 871814 - DNA, 15 bp, Homo sapiens
atggggaaaacttag

SEQ ID NO: 871815 - DNA, 15 bp, Homo sapiens
gatggggaaaactta

SEQ ID NO: 871816 - DNA, 15 bp, Homo sapiens
agatggggaaaactt

SEQ ID NO: 871817 - DNA, 15 bp, Homo sapiens
cagatggggaaaact

SEQ ID NO: 871818 - DNA, 15 bp, Homo sapiens
acagatggggaaaac

SEQ ID NO: 871819 - DNA, 15 bp, Homo sapiens
tacagatggggaaaa

SEQ ID NO: 871820 - DNA, 15 bp, Homo sapiens
ttacagatggggaaa

SEQ ID NO: 871821 - DNA, 15 bp, Homo sapiens
attacagatggggaa

SEQ ID NO: 871822 - DNA, 15 bp, Homo sapiens
cattacagatgggga

SEQ ID NO: 871823 - DNA, 15 bp, Homo sapiens
acattacagatgggg

SEQ ID NO: 871824 - DNA, 15 bp, Homo sapiens
tacattacagatggg

SEQ ID NO: 871825 - DNA, 15 bp, Homo sapiens
ttacattacagatgg

SEQ ID NO: 871826 - DNA, 15 bp, Homo sapiens
cttacattacagatg

SEQ ID NO: 871827 - DNA, 15 bp, Homo sapiens
ccttacattacagat

SEQ ID NO: 871828 - DNA, 15 bp, Homo sapiens
cccttacattacaga

SEQ ID NO: 871829 - DNA, 15 bp, Homo sapiens
tcccttacattacag

SEQ ID NO: 871830 - DNA, 15 bp, Homo sapiens
ctcccttacattaca

SEQ ID NO: 871831 - DNA, 15 bp, Homo sapiens
actcccttacattac

SEQ ID NO: 871832 - DNA, 15 bp, Homo sapiens
aactcccttacatta

SEQ ID NO: 871833 - DNA, 15 bp, Homo sapiens
aaactcccttacatt

SEQ ID NO: 871834 - DNA, 15 bp, Homo sapiens
taaactcccttacat

SEQ ID NO: 871835 - DNA, 15 bp, Homo sapiens
ttaaactcccttaca

SEQ ID NO: 871836 - DNA, 15 bp, Homo sapiens
gttaaactcccttac

SEQ ID NO: 871837 - DNA, 15 bp, Homo sapiens
agttaaactccctta

SEQ ID NO: 871838 - DNA, 15 bp, Homo sapiens
tagttaaactccctt

SEQ ID NO: 871839 - DNA, 15 bp, Homo sapiens
ctagttaaactccct

SEQ ID NO: 871840 - DNA, 15 bp, Homo sapiens
tctagttaaactccc

SEQ ID NO: 871841 - DNA, 15 bp, Homo sapiens
atctagttaaactcc

SEQ ID NO: 871842 - DNA, 15 bp, Homo sapiens
catctagttaaactc

SEQ ID NO: 871843 - DNA, 15 bp, Homo sapiens
tcatctagttaaact

SEQ ID NO: 871844 - DNA, 15 bp, Homo sapiens
ctcatctagttaaac

SEQ ID NO: 871845 - DNA, 15 bp, Homo sapiens
gctcatctagttaaa

SEQ ID NO: 871846 - DNA, 15 bp, Homo sapiens
tgctcatctagttaa

SEQ ID NO: 871847 - DNA, 15 bp, Homo sapiens
gtgctcatctagtta

SEQ ID NO: 871848 - DNA, 15 bp, Homo sapiens
agtgctcatctagtt

SEQ ID NO: 871849 - DNA, 15 bp, Homo sapiens
tagtgctcatctagt

SEQ ID NO: 871850 - DNA, 15 bp, Homo sapiens
ttagtgctcatctag

SEQ ID NO: 871851 - DNA, 15 bp, Homo sapiens
cttagtgctcatcta

SEQ ID NO: 871852 - DNA, 15 bp, Homo sapiens
ccttagtgctcatct

SEQ ID NO: 871853 - DNA, 15 bp, Homo sapiens
tccttagtgctcatc

SEQ ID NO: 871854 - DNA, 15 bp, Homo sapiens
gtccttagtgctcat

SEQ ID NO: 871855 - DNA, 15 bp, Homo sapiens
tgtccttagtgctca

SEQ ID NO: 871856 - DNA, 15 bp, Homo sapiens
ttgtccttagtgctc

SEQ ID NO: 871857 - DNA, 15 bp, Homo sapiens
tttgtccttagtgct

SEQ ID NO: 871858 - DNA, 15 bp, Homo sapiens
atttgtccttagtgc

SEQ ID NO: 871859 - DNA, 15 bp, Homo sapiens
gatttgtccttagtg

SEQ ID NO: 871860 - DNA, 15 bp, Homo sapiens
tgatttgtccttagt

SEQ ID NO: 871861 - DNA, 15 bp, Homo sapiens
ttgatttgtccttag

SEQ ID NO: 871862 - DNA, 15 bp, Homo sapiens
attgatttgtcctta

SEQ ID NO: 871863 - DNA, 15 bp, Homo sapiens
aattgatttgtcctt

SEQ ID NO: 871864 - DNA, 15 bp, Homo sapiens
aaattgatttgtcct

SEQ ID NO: 871865 - DNA, 15 bp, Homo sapiens
gaaattgatttgtcc

SEQ ID NO: 871866 - DNA, 15 bp, Homo sapiens
agaaattgatttgtc

SEQ ID NO: 871867 - DNA, 15 bp, Homo sapiens
cagaaattgatttgt

SEQ ID NO: 871868 - DNA, 15 bp, Homo sapiens
acagaaattgatttg

SEQ ID NO: 871869 - DNA, 15 bp, Homo sapiens
cacagaaattgattt

SEQ ID NO: 871870 - DNA, 15 bp, Homo sapiens
tcacagaaattgatt

SEQ ID NO: 871871 - DNA, 15 bp, Homo sapiens
ctcacagaaattgat

SEQ ID NO: 871872 - DNA, 15 bp, Homo sapiens
actcacagaaattga

SEQ ID NO: 871873 - DNA, 15 bp, Homo sapiens
gactcacagaaattg

SEQ ID NO: 871874 - DNA, 15 bp, Homo sapiens
tgactcacagaaatt

SEQ ID NO: 871875 - DNA, 15 bp, Homo sapiens
ttgactcacagaaat

SEQ ID NO: 871876 - DNA, 15 bp, Homo sapiens
attgactcacagaaa

SEQ ID NO: 871877 - DNA, 15 bp, Homo sapiens
aattgactcacagaa

SEQ ID NO: 871878 - DNA, 15 bp, Homo sapiens
taattgactcacaga

SEQ ID NO: 871879 - DNA, 15 bp, Homo sapiens
ataattgactcacag

SEQ ID NO: 871880 - DNA, 15 bp, Homo sapiens
aataattgactcaca

SEQ ID NO: 871881 - DNA, 15 bp, Homo sapiens
taataattgactcac

SEQ ID NO: 871882 - DNA, 15 bp, Homo sapiens
ataataattgactca

SEQ ID NO: 871883 - DNA, 15 bp, Homo sapiens
cataataattgactc

SEQ ID NO: 871884 - DNA, 15 bp, Homo sapiens
tcataataattgact

SEQ ID NO: 871885 - DNA, 15 bp, Homo sapiens
ttcataataattgac

SEQ ID NO: 871886 - DNA, 15 bp, Homo sapiens
tttcataataattga

SEQ ID NO: 871887 - DNA, 15 bp, Homo sapiens
atttcataataattg

SEQ ID NO: 871888 - DNA, 15 bp, Homo sapiens
tatttcataataatt

SEQ ID NO: 871889 - DNA, 15 bp, Homo sapiens
gtatttcataataat

SEQ ID NO: 871890 - DNA, 15 bp, Homo sapiens
ggtatttcataataa

SEQ ID NO: 871891 - DNA, 15 bp, Homo sapiens
tggtatttcataata

SEQ ID NO: 871892 - DNA, 15 bp, Homo sapiens
atggtatttcataat

SEQ ID NO: 871893 - DNA, 15 bp, Homo sapiens
catggtatttcataa

SEQ ID NO: 871894 - DNA, 15 bp, Homo sapiens
acatggtatttcata

SEQ ID NO: 871895 - DNA, 15 bp, Homo sapiens
cacatggtatttcat

SEQ ID NO: 871896 - DNA, 15 bp, Homo sapiens
ccacatggtatttca

SEQ ID NO: 871897 - DNA, 15 bp, Homo sapiens
cccacatggtatttc

SEQ ID NO: 871898 - DNA, 15 bp, Homo sapiens
gcccacatggtattt

SEQ ID NO: 871899 - DNA, 15 bp, Homo sapiens
tgcccacatggtatt

SEQ ID NO: 871900 - DNA, 15 bp, Homo sapiens
atgcccacatggtat

SEQ ID NO: 871901 - DNA, 15 bp, Homo sapiens
gatgcccacatggta

SEQ ID NO: 871902 - DNA, 15 bp, Homo sapiens
tgatgcccacatggt

SEQ ID NO: 871903 - DNA, 15 bp, Homo sapiens
ttgatgcccacatgg

SEQ ID NO: 871904 - DNA, 15 bp, Homo sapiens
tttgatgcccacatg

SEQ ID NO: 871905 - DNA, 15 bp, Homo sapiens
atttgatgcccacat

SEQ ID NO: 871906 - DNA, 15 bp, Homo sapiens
catttgatgcccaca

SEQ ID NO: 871907 - DNA, 15 bp, Homo sapiens
gcatttgatgcccac

SEQ ID NO: 871908 - DNA, 15 bp, Homo sapiens
ggcatttgatgccca

SEQ ID NO: 871909 - DNA, 15 bp, Homo sapiens
tggcatttgatgccc

SEQ ID NO: 871910 - DNA, 15 bp, Homo sapiens
ttggcatttgatgcc

SEQ ID NO: 871911 - DNA, 15 bp, Homo sapiens
cttggcatttgatgc

SEQ ID NO: 871912 - DNA, 15 bp, Homo sapiens
acttggcatttgatg

SEQ ID NO: 871913 - DNA, 15 bp, Homo sapiens
cacttggcatttgat

SEQ ID NO: 871914 - DNA, 15 bp, Homo sapiens
ccacttggcatttga

SEQ ID NO: 871915 - DNA, 15 bp, Homo sapiens
tccacttggcatttg

SEQ ID NO: 871916 - DNA, 15 bp, Homo sapiens
ttccacttggcattt

SEQ ID NO: 871917 - DNA, 15 bp, Homo sapiens
tttccacttggcatt

SEQ ID NO: 871918 - DNA, 15 bp, Homo sapiens
ctttccacttggcat

SEQ ID NO: 871919 - DNA, 15 bp, Homo sapiens
gctttccacttggca

SEQ ID NO: 871920 - DNA, 15 bp, Homo sapiens
tgctttccacttggc

SEQ ID NO: 871921 - DNA, 15 bp, Homo sapiens
atgctttccacttgg

SEQ ID NO: 871922 - DNA, 15 bp, Homo sapiens
tatgctttccacttg

SEQ ID NO: 871923 - DNA, 15 bp, Homo sapiens
ctatgctttccactt

SEQ ID NO: 871924 - DNA, 15 bp, Homo sapiens
tctatgctttccact

SEQ ID NO: 871925 - DNA, 15 bp, Homo sapiens
atctatgctttccac

SEQ ID NO: 871926 - DNA, 15 bp, Homo sapiens
tatctatgctttcca

SEQ ID NO: 871927 - DNA, 15 bp, Homo sapiens
ttatctatgctttcc

SEQ ID NO: 871928 - DNA, 15 bp, Homo sapiens
tttatctatgctttc

SEQ ID NO: 871929 - DNA, 15 bp, Homo sapiens
ctttatctatgcttt

SEQ ID NO: 871930 - DNA, 15 bp, Homo sapiens
tctttatctatgctt

SEQ ID NO: 871931 - DNA, 15 bp, Homo sapiens
ttctttatctatgct

SEQ ID NO: 871932 - DNA, 15 bp, Homo sapiens
cttctttatctatgc

SEQ ID NO: 871933 - DNA, 15 bp, Homo sapiens
acttctttatctatg

SEQ ID NO: 871934 - DNA, 15 bp, Homo sapiens
cacttctttatctat

SEQ ID NO: 871935 - DNA, 15 bp, Homo sapiens
tcacttctttatcta

SEQ ID NO: 871936 - DNA, 15 bp, Homo sapiens
atcacttctttatct

SEQ ID NO: 871937 - DNA, 15 bp, Homo sapiens
aatcacttctttatc

SEQ ID NO: 871938 - DNA, 15 bp, Homo sapiens
caatcacttctttat

SEQ ID NO: 871939 - DNA, 15 bp, Homo sapiens
acaatcacttcttta

SEQ ID NO: 871940 - DNA, 15 bp, Homo sapiens
cacaatcacttcttt

SEQ ID NO: 871941 - DNA, 15 bp, Homo sapiens
gcacaatcacttctt

SEQ ID NO: 871942 - DNA, 15 bp, Homo sapiens
tgcacaatcacttct

SEQ ID NO: 871943 - DNA, 15 bp, Homo sapiens
gtgcacaatcacttc

SEQ ID NO: 871944 - DNA, 15 bp, Homo sapiens
ggtgcacaatcactt

SEQ ID NO: 871945 - DNA, 15 bp, Homo sapiens
aggtgcacaatcact

SEQ ID NO: 871946 - DNA, 15 bp, Homo sapiens
caggtgcacaatcac

SEQ ID NO: 871947 - DNA, 15 bp, Homo sapiens
ccaggtgcacaatca

SEQ ID NO: 871948 - DNA, 15 bp, Homo sapiens
cccaggtgcacaatc

SEQ ID NO: 871949 - DNA, 15 bp, Homo sapiens
gcccaggtgcacaat

SEQ ID NO: 871950 - DNA, 15 bp, Homo sapiens
agcccaggtgcacaa

SEQ ID NO: 871951 - DNA, 15 bp, Homo sapiens
cagcccaggtgcaca

SEQ ID NO: 871952 - DNA, 15 bp, Homo sapiens
tcagcccaggtgcac

SEQ ID NO: 871953 - DNA, 15 bp, Homo sapiens
ctcagcccaggtgca

SEQ ID NO: 871954 - DNA, 15 bp, Homo sapiens
cctcagcccaggtgc

SEQ ID NO: 871955 - DNA, 15 bp, Homo sapiens
ccctcagcccaggtg

SEQ ID NO: 871956 - DNA, 15 bp, Homo sapiens
cccctcagcccaggt

SEQ ID NO: 871957 - DNA, 15 bp, Homo sapiens
tcccctcagcccagg

SEQ ID NO: 871958 - DNA, 15 bp, Homo sapiens
ttcccctcagcccag

SEQ ID NO: 871959 - DNA, 15 bp, Homo sapiens
gttcccctcagccca

SEQ ID NO: 871960 - DNA, 15 bp, Homo sapiens
tgttcccctcagccc

SEQ ID NO: 871961 - DNA, 15 bp, Homo sapiens
ttgttcccctcagcc

SEQ ID NO: 871962 - DNA, 15 bp, Homo sapiens
tttgttcccctcagc

SEQ ID NO: 871963 - DNA, 15 bp, Homo sapiens
gtttgttcccctcag

SEQ ID NO: 871964 - DNA, 15 bp, Homo sapiens
tgtttgttcccctca

SEQ ID NO: 871965 - DNA, 15 bp, Homo sapiens
atgtttgttcccctc

SEQ ID NO: 871966 - DNA, 15 bp, Homo sapiens
aatgtttgttcccct

SEQ ID NO: 871967 - DNA, 15 bp, Homo sapiens
aaatgtttgttcccc

SEQ ID NO: 871968 - DNA, 15 bp, Homo sapiens
gaaatgtttgttccc

SEQ ID NO: 871969 - DNA, 15 bp, Homo sapiens
ggaaatgtttgttcc

SEQ ID NO: 871970 - DNA, 15 bp, Homo sapiens
aggaaatgtttgttc

SEQ ID NO: 871971 - DNA, 15 bp, Homo sapiens
taggaaatgtttgtt

SEQ ID NO: 871972 - DNA, 15 bp, Homo sapiens
ttaggaaatgtttgt

SEQ ID NO: 871973 - DNA, 15 bp, Homo sapiens
cttaggaaatgtttg

SEQ ID NO: 871974 - DNA, 15 bp, Homo sapiens
tcttaggaaatgttt

SEQ ID NO: 871975 - DNA, 15 bp, Homo sapiens
ctcttaggaaatgtt

SEQ ID NO: 871976 - DNA, 15 bp, Homo sapiens
tctcttaggaaatgt

SEQ ID NO: 871977 - DNA, 15 bp, Homo sapiens
ttctcttaggaaatg

SEQ ID NO: 871978 - DNA, 15 bp, Homo sapiens
attctcttaggaaat

SEQ ID NO: 871979 - DNA, 15 bp, Homo sapiens
aattctcttaggaaa

SEQ ID NO: 871980 - DNA, 15 bp, Homo sapiens
caattctcttaggaa

SEQ ID NO: 871981 - DNA, 15 bp, Homo sapiens
tcaattctcttagga

SEQ ID NO: 871982 - DNA, 15 bp, Homo sapiens
ctcaattctcttagg

SEQ ID NO: 871983 - DNA, 15 bp, Homo sapiens
tctcaattctcttag

SEQ ID NO: 871984 - DNA, 15 bp, Homo sapiens
gtctcaattctctta

SEQ ID NO: 871985 - DNA, 15 bp, Homo sapiens
ggtctcaattctctt

SEQ ID NO: 871986 - DNA, 15 bp, Homo sapiens
gggtctcaattctct

SEQ ID NO: 871987 - DNA, 15 bp, Homo sapiens
tgggtctcaattctc

SEQ ID NO: 871988 - DNA, 15 bp, Homo sapiens
ttgggtctcaattct

SEQ ID NO: 871989 - DNA, 15 bp, Homo sapiens
tttgggtctcaattc

SEQ ID NO: 871990 - DNA, 15 bp, Homo sapiens
ttttgggtctcaatt

SEQ ID NO: 871991 - DNA, 15 bp, Homo sapiens
cttttgggtctcaat

SEQ ID NO: 871992 - DNA, 15 bp, Homo sapiens
tcttttgggtctcaa

SEQ ID NO: 871993 - DNA, 15 bp, Homo sapiens
ctcttttgggtctca

SEQ ID NO: 871994 - DNA, 15 bp, Homo sapiens
gctcttttgggtctc

SEQ ID NO: 871995 - DNA, 15 bp, Homo sapiens
ggctcttttgggtct

SEQ ID NO: 871996 - DNA, 15 bp, Homo sapiens
aggctcttttgggtc

SEQ ID NO: 871997 - DNA, 15 bp, Homo sapiens
aaggctcttttgggt

SEQ ID NO: 871998 - DNA, 15 bp, Homo sapiens
aaaggctcttttggg

SEQ ID NO: 871999 - DNA, 15 bp, Homo sapiens
taaaggctcttttgg

SEQ ID NO: 872000 - DNA, 15 bp, Homo sapiens
ttaaaggctcttttg

SEQ ID NO: 872001 - DNA, 15 bp, Homo sapiens
cttaaaggctctttt

SEQ ID NO: 872002 - DNA, 15 bp, Homo sapiens
ccttaaaggctcttt

SEQ ID NO: 872003 - DNA, 15 bp, Homo sapiens
tccttaaaggctctt

SEQ ID NO: 872004 - DNA, 15 bp, Homo sapiens
ttccttaaaggctct

SEQ ID NO: 872005 - DNA, 15 bp, Homo sapiens
cttccttaaaggctc

SEQ ID NO: 872006 - DNA, 15 bp, Homo sapiens
ccttccttaaaggct

SEQ ID NO: 872007 - DNA, 15 bp, Homo sapiens
accttccttaaaggc

SEQ ID NO: 872008 - DNA, 15 bp, Homo sapiens
caccttccttaaagg

SEQ ID NO: 872009 - DNA, 15 bp, Homo sapiens
tcaccttccttaaag

SEQ ID NO: 872010 - DNA, 15 bp, Homo sapiens
ctcaccttccttaaa

SEQ ID NO: 872011 - DNA, 15 bp, Homo sapiens
tctcaccttccttaa

SEQ ID NO: 872012 - DNA, 15 bp, Homo sapiens
atctcaccttcctta

SEQ ID NO: 872013 - DNA, 15 bp, Homo sapiens
gatctcaccttcctt

SEQ ID NO: 872014 - DNA, 15 bp, Homo sapiens
agatctcaccttcct

SEQ ID NO: 872015 - DNA, 15 bp, Homo sapiens
aagatctcaccttcc

SEQ ID NO: 872016 - DNA, 15 bp, Homo sapiens
caagatctcaccttc

SEQ ID NO: 872017 - DNA, 15 bp, Homo sapiens
ccaagatctcacctt

SEQ ID NO: 872018 - DNA, 15 bp, Homo sapiens
tccaagatctcacct

SEQ ID NO: 872019 - DNA, 15 bp, Homo sapiens
ttccaagatctcacc

SEQ ID NO: 872020 - DNA, 15 bp, Homo sapiens
tttccaagatctcac

SEQ ID NO: 872021 - DNA, 15 bp, Homo sapiens
ctttccaagatctca

SEQ ID NO: 872022 - DNA, 15 bp, Homo sapiens
cctttccaagatctc

SEQ ID NO: 872023 - DNA, 15 bp, Homo sapiens
ccctttccaagatct

SEQ ID NO: 872024 - DNA, 15 bp, Homo sapiens
tccctttccaagatc

SEQ ID NO: 872025 - DNA, 15 bp, Homo sapiens
ttccctttccaagat

SEQ ID NO: 872026 - DNA, 15 bp, Homo sapiens
tttccctttccaaga

SEQ ID NO: 872027 - DNA, 15 bp, Homo sapiens
atttccctttccaag

SEQ ID NO: 872028 - DNA, 15 bp, Homo sapiens
aatttccctttccaa

SEQ ID NO: 872029 - DNA, 15 bp, Homo sapiens
aaatttccctttcca

SEQ ID NO: 872030 - DNA, 15 bp, Homo sapiens
caaatttccctttcc

SEQ ID NO: 872031 - DNA, 15 bp, Homo sapiens
ccaaatttccctttc

SEQ ID NO: 872032 - DNA, 15 bp, Homo sapiens
accaaatttcccttt

SEQ ID NO: 872033 - DNA, 15 bp, Homo sapiens
caccaaatttccctt

SEQ ID NO: 872034 - DNA, 15 bp, Homo sapiens
tcaccaaatttccct

SEQ ID NO: 872035 - DNA, 15 bp, Homo sapiens
ttcaccaaatttccc

SEQ ID NO: 872036 - DNA, 15 bp, Homo sapiens
attcaccaaatttcc

SEQ ID NO: 872037 - DNA, 15 bp, Homo sapiens
tattcaccaaatttc

SEQ ID NO: 872038 - DNA, 15 bp, Homo sapiens
gtattcaccaaattt

SEQ ID NO: 872039 - DNA, 15 bp, Homo sapiens
agtattcaccaaatt

SEQ ID NO: 872040 - DNA, 15 bp, Homo sapiens
gagtattcaccaaat

SEQ ID NO: 872041 - DNA, 15 bp, Homo sapiens
agagtattcaccaaa

SEQ ID NO: 872042 - DNA, 15 bp, Homo sapiens
tagagtattcaccaa

SEQ ID NO: 872043 - DNA, 15 bp, Homo sapiens
ttagagtattcacca

SEQ ID NO: 872044 - DNA, 15 bp, Homo sapiens
attagagtattcacc

SEQ ID NO: 872045 - DNA, 15 bp, Homo sapiens
cattagagtattcac

SEQ ID NO: 872046 - DNA, 15 bp, Homo sapiens
tcattagagtattca

SEQ ID NO: 872047 - DNA, 15 bp, Homo sapiens
ctcattagagtattc

SEQ ID NO: 872048 - DNA, 15 bp, Homo sapiens
cctcattagagtatt

SEQ ID NO: 872049 - DNA, 15 bp, Homo sapiens
tcctcattagagtat

SEQ ID NO: 872050 - DNA, 15 bp, Homo sapiens
ctcctcattagagta

SEQ ID NO: 872051 - DNA, 15 bp, Homo sapiens
gctcctcattagagt

SEQ ID NO: 872052 - DNA, 15 bp, Homo sapiens
agctcctcattagag

SEQ ID NO: 872053 - DNA, 15 bp, Homo sapiens
tagctcctcattaga

SEQ ID NO: 872054 - DNA, 15 bp, Homo sapiens
ttagctcctcattag

SEQ ID NO: 872055 - DNA, 15 bp, Homo sapiens
tttagctcctcatta

SEQ ID NO: 872056 - DNA, 15 bp, Homo sapiens
ttttagctcctcatt

SEQ ID NO: 872057 - DNA, 15 bp, Homo sapiens
tttttagctcctcat

SEQ ID NO: 872058 - DNA, 15 bp, Homo sapiens
ctttttagctcctca

SEQ ID NO: 872059 - DNA, 15 bp, Homo sapiens
cctttttagctcctc

SEQ ID NO: 872060 - DNA, 15 bp, Homo sapiens
gcctttttagctcct

SEQ ID NO: 872061 - DNA, 15 bp, Homo sapiens
tgcctttttagctcc

SEQ ID NO: 872062 - DNA, 15 bp, Homo sapiens
ttgcctttttagctc

SEQ ID NO: 872063 - DNA, 15 bp, Homo sapiens
cttgcctttttagct

SEQ ID NO: 872064 - DNA, 15 bp, Homo sapiens
tcttgcctttttagc

SEQ ID NO: 872065 - DNA, 15 bp, Homo sapiens
ttcttgcctttttag

SEQ ID NO: 872066 - DNA, 15 bp, Homo sapiens
tttcttgccttttta

SEQ ID NO: 872067 - DNA, 15 bp, Homo sapiens
ctttcttgccttttt

SEQ ID NO: 872068 - DNA, 15 bp, Homo sapiens
tctttcttgcctttt

SEQ ID NO: 872069 - DNA, 15 bp, Homo sapiens
ttctttcttgccttt

SEQ ID NO: 872070 - DNA, 15 bp, Homo sapiens
tttctttcttgcctt

SEQ ID NO: 872071 - DNA, 15 bp, Homo sapiens
ctttctttcttgcct

SEQ ID NO: 872072 - DNA, 15 bp, Homo sapiens
gctttctttcttgcc

SEQ ID NO: 872073 - DNA, 15 bp, Homo sapiens
tgctttctttcttgc

SEQ ID NO: 872074 - DNA, 15 bp, Homo sapiens
ctgctttctttcttg

SEQ ID NO: 872075 - DNA, 15 bp, Homo sapiens
gctgctttctttctt

SEQ ID NO: 872076 - DNA, 15 bp, Homo sapiens
agctgctttctttct

SEQ ID NO: 872077 - DNA, 15 bp, Homo sapiens
aagctgctttctttc

SEQ ID NO: 872078 - DNA, 15 bp, Homo sapiens
caagctgctttcttt

SEQ ID NO: 872079 - DNA, 15 bp, Homo sapiens
ccaagctgctttctt

SEQ ID NO: 872080 - DNA, 15 bp, Homo sapiens
gccaagctgctttct

SEQ ID NO: 872081 - DNA, 15 bp, Homo sapiens
agccaagctgctttc

SEQ ID NO: 872082 - DNA, 15 bp, Homo sapiens
cagccaagctgcttt

SEQ ID NO: 872083 - DNA, 15 bp, Homo sapiens
ccagccaagctgctt

SEQ ID NO: 872084 - DNA, 15 bp, Homo sapiens
tccagccaagctgct

SEQ ID NO: 872085 - DNA, 15 bp, Homo sapiens
ttccagccaagctgc

SEQ ID NO: 872086 - DNA, 15 bp, Homo sapiens
tttccagccaagctg

SEQ ID NO: 872087 - DNA, 15 bp, Homo sapiens
ctttccagccaagct

SEQ ID NO: 872088 - DNA, 15 bp, Homo sapiens
cctttccagccaagc

SEQ ID NO: 872089 - DNA, 15 bp, Homo sapiens
tcctttccagccaag

SEQ ID NO: 872090 - DNA, 15 bp, Homo sapiens
ctcctttccagccaa

SEQ ID NO: 872091 - DNA, 15 bp, Homo sapiens
cctcctttccagcca

SEQ ID NO: 872092 - DNA, 15 bp, Homo sapiens
acctcctttccagcc

SEQ ID NO: 872093 - DNA, 15 bp, Homo sapiens
aacctcctttccagc

SEQ ID NO: 872094 - DNA, 15 bp, Homo sapiens
gaacctcctttccag

SEQ ID NO: 872095 - DNA, 15 bp, Homo sapiens
ggaacctcctttcca

SEQ ID NO: 872096 - DNA, 15 bp, Homo sapiens
aggaacctcctttcc

SEQ ID NO: 872097 - DNA, 15 bp, Homo sapiens
caggaacctcctttc

SEQ ID NO: 872098 - DNA, 15 bp, Homo sapiens
acaggaacctccttt

SEQ ID NO: 872099 - DNA, 15 bp, Homo sapiens
tacaggaacctcctt

SEQ ID NO: 872100 - DNA, 15 bp, Homo sapiens
ctacaggaacctcct

SEQ ID NO: 872101 - DNA, 15 bp, Homo sapiens
cctacaggaacctcc

SEQ ID NO: 872102 - DNA, 15 bp, Homo sapiens
acctacaggaacctc

SEQ ID NO: 872103 - DNA, 15 bp, Homo sapiens
cacctacaggaacct

SEQ ID NO: 872104 - DNA, 15 bp, Homo sapiens
ccacctacaggaacc

SEQ ID NO: 872105 - DNA, 15 bp, Homo sapiens
cccacctacaggaac

SEQ ID NO: 872106 - DNA, 15 bp, Homo sapiens
gcccacctacaggaa

SEQ ID NO: 872107 - DNA, 15 bp, Homo sapiens
ggcccacctacagga

SEQ ID NO: 872108 - DNA, 15 bp, Homo sapiens
aggcccacctacagg

SEQ ID NO: 872109 - DNA, 15 bp, Homo sapiens
gaggcccacctacag

SEQ ID NO: 872110 - DNA, 15 bp, Homo sapiens
ggaggcccacctaca

SEQ ID NO: 872111 - DNA, 15 bp, Homo sapiens
tggaggcccacctac

SEQ ID NO: 872112 - DNA, 15 bp, Homo sapiens
ctggaggcccaccta

SEQ ID NO: 872113 - DNA, 15 bp, Homo sapiens
tctggaggcccacct

SEQ ID NO: 872114 - DNA, 15 bp, Homo sapiens
ctctggaggcccacc

SEQ ID NO: 872115 - DNA, 15 bp, Homo sapiens
tctctggaggcccac

SEQ ID NO: 872116 - DNA, 15 bp, Homo sapiens
atctctggaggccca

SEQ ID NO: 872117 - DNA, 15 bp, Homo sapiens
aatctctggaggccc

SEQ ID NO: 872118 - DNA, 15 bp, Homo sapiens
gaatctctggaggcc

SEQ ID NO: 872119 - DNA, 15 bp, Homo sapiens
cgaatctctggaggc

SEQ ID NO: 872120 - DNA, 15 bp, Homo sapiens
ccgaatctctggagg

SEQ ID NO: 872121 - DNA, 15 bp, Homo sapiens
accgaatctctggag

SEQ ID NO: 872122 - DNA, 15 bp, Homo sapiens
taccgaatctctgga

SEQ ID NO: 872123 - DNA, 15 bp, Homo sapiens
gtaccgaatctctgg

SEQ ID NO: 872124 - DNA, 15 bp, Homo sapiens
ggtaccgaatctctg

SEQ ID NO: 872125 - DNA, 15 bp, Homo sapiens
tggtaccgaatctct

SEQ ID NO: 872126 - DNA, 15 bp, Homo sapiens
gtggtaccgaatctc

SEQ ID NO: 872127 - DNA, 15 bp, Homo sapiens
tgtggtaccgaatct

SEQ ID NO: 872128 - DNA, 15 bp, Homo sapiens
ctgtggtaccgaatc

SEQ ID NO: 872129 - DNA, 15 bp, Homo sapiens
tctgtggtaccgaat

SEQ ID NO: 872130 - DNA, 15 bp, Homo sapiens
ttctgtggtaccgaa

SEQ ID NO: 872131 - DNA, 15 bp, Homo sapiens
tttctgtggtaccga

SEQ ID NO: 872132 - DNA, 15 bp, Homo sapiens
gtttctgtggtaccg

SEQ ID NO: 872133 - DNA, 15 bp, Homo sapiens
agtttctgtggtacc

SEQ ID NO: 872134 - DNA, 15 bp, Homo sapiens
cagtttctgtggtac

SEQ ID NO: 872135 - DNA, 15 bp, Homo sapiens
gcagtttctgtggta

SEQ ID NO: 872136 - DNA, 15 bp, Homo sapiens
ggcagtttctgtggt

SEQ ID NO: 872137 - DNA, 15 bp, Homo sapiens
tggcagtttctgtgg

SEQ ID NO: 872138 - DNA, 15 bp, Homo sapiens
ttggcagtttctgtg

SEQ ID NO: 872139 - DNA, 15 bp, Homo sapiens
tttggcagtttctgt

SEQ ID NO: 872140 - DNA, 15 bp, Homo sapiens
gtttggcagtttctg

SEQ ID NO: 872141 - DNA, 15 bp, Homo sapiens
tgtttggcagtttct

SEQ ID NO: 872142 - DNA, 15 bp, Homo sapiens
atgtttggcagtttc

SEQ ID NO: 872143 - DNA, 15 bp, Homo sapiens
gatgtttggcagttt

SEQ ID NO: 872144 - DNA, 15 bp, Homo sapiens
tgatgtttggcagtt

SEQ ID NO: 872145 - DNA, 15 bp, Homo sapiens
ctgatgtttggcagt

SEQ ID NO: 872146 - DNA, 15 bp, Homo sapiens
gctgatgtttggcag

SEQ ID NO: 872147 - DNA, 15 bp, Homo sapiens
tgctgatgtttggca

SEQ ID NO: 872148 - DNA, 15 bp, Homo sapiens
ttgctgatgtttggc

SEQ ID NO: 872149 - DNA, 15 bp, Homo sapiens
cttgctgatgtttgg

SEQ ID NO: 872150 - DNA, 15 bp, Homo sapiens
tcttgctgatgtttg

SEQ ID NO: 872151 - DNA, 15 bp, Homo sapiens
ttcttgctgatgttt

SEQ ID NO: 872152 - DNA, 15 bp, Homo sapiens
cttcttgctgatgtt

SEQ ID NO: 872153 - DNA, 15 bp, Homo sapiens
gcttcttgctgatgt

SEQ ID NO: 872154 - DNA, 15 bp, Homo sapiens
ggcttcttgctgatg

SEQ ID NO: 872155 - DNA, 15 bp, Homo sapiens
tggcttcttgctgat

SEQ ID NO: 872156 - DNA, 15 bp, Homo sapiens
atggcttcttgctga

SEQ ID NO: 872157 - DNA, 15 bp, Homo sapiens
catggcttcttgctg

SEQ ID NO: 872158 - DNA, 15 bp, Homo sapiens
ccatggcttcttgct

SEQ ID NO: 872159 - DNA, 15 bp, Homo sapiens
cccatggcttcttgc

SEQ ID NO: 872160 - DNA, 15 bp, Homo sapiens
ccccatggcttcttg

SEQ ID NO: 872161 - DNA, 15 bp, Homo sapiens
tccccatggcttctt

SEQ ID NO: 872162 - DNA, 15 bp, Homo sapiens
atccccatggcttct

SEQ ID NO: 872163 - DNA, 15 bp, Homo sapiens
catccccatggcttc

SEQ ID NO: 872164 - DNA, 15 bp, Homo sapiens
ccatccccatggctt

SEQ ID NO: 872165 - DNA, 15 bp, Homo sapiens
tccatccccatggct

SEQ ID NO: 872166 - DNA, 15 bp, Homo sapiens
ctccatccccatggc

SEQ ID NO: 872167 - DNA, 15 bp, Homo sapiens
gctccatccccatgg

SEQ ID NO: 872168 - DNA, 15 bp, Homo sapiens
cgctccatccccatg

SEQ ID NO: 872169 - DNA, 15 bp, Homo sapiens
acgctccatccccat

SEQ ID NO: 872170 - DNA, 15 bp, Homo sapiens
aacgctccatcccca

SEQ ID NO: 872171 - DNA, 15 bp, Homo sapiens
aaacgctccatcccc

SEQ ID NO: 872172 - DNA, 15 bp, Homo sapiens
caaacgctccatccc

SEQ ID NO: 872173 - DNA, 15 bp, Homo sapiens
tcaaacgctccatcc

SEQ ID NO: 872174 - DNA, 15 bp, Homo sapiens
ctcaaacgctccatc

SEQ ID NO: 872175 - DNA, 15 bp, Homo sapiens
cctcaaacgctccat

SEQ ID NO: 872176 - DNA, 15 bp, Homo sapiens
ccctcaaacgctcca

SEQ ID NO: 872177 - DNA, 15 bp, Homo sapiens
tccctcaaacgctcc

SEQ ID NO: 872178 - DNA, 15 bp, Homo sapiens
atccctcaaacgctc

SEQ ID NO: 872179 - DNA, 15 bp, Homo sapiens
aatccctcaaacgct

SEQ ID NO: 872180 - DNA, 15 bp, Homo sapiens
gaatccctcaaacgc

SEQ ID NO: 872181 - DNA, 15 bp, Homo sapiens
agaatccctcaaacg

SEQ ID NO: 872182 - DNA, 15 bp, Homo sapiens
tagaatccctcaaac

SEQ ID NO: 872183 - DNA, 15 bp, Homo sapiens
ttagaatccctcaaa

SEQ ID NO: 872184 - DNA, 15 bp, Homo sapiens
tttagaatccctcaa

SEQ ID NO: 872185 - DNA, 15 bp, Homo sapiens
atttagaatccctca

SEQ ID NO: 872186 - DNA, 15 bp, Homo sapiens
tatttagaatccctc

SEQ ID NO: 872187 - DNA, 15 bp, Homo sapiens
ctatttagaatccct

SEQ ID NO: 872188 - DNA, 15 bp, Homo sapiens
tctatttagaatccc

SEQ ID NO: 872189 - DNA, 15 bp, Homo sapiens
ttctatttagaatcc

SEQ ID NO: 872190 - DNA, 15 bp, Homo sapiens
cttctatttagaatc

SEQ ID NO: 872191 - DNA, 15 bp, Homo sapiens
ccttctatttagaat

SEQ ID NO: 872192 - DNA, 15 bp, Homo sapiens
tccttctatttagaa

SEQ ID NO: 872193 - DNA, 15 bp, Homo sapiens
gtccttctatttaga

SEQ ID NO: 872194 - DNA, 15 bp, Homo sapiens
tgtccttctatttag

SEQ ID NO: 872195 - DNA, 15 bp, Homo sapiens
ttgtccttctattta

SEQ ID NO: 872196 - DNA, 15 bp, Homo sapiens
cttgtccttctattt

SEQ ID NO: 872197 - DNA, 15 bp, Homo sapiens
tcttgtccttctatt

SEQ ID NO: 872198 - DNA, 15 bp, Homo sapiens
ctcttgtccttctat

SEQ ID NO: 872199 - DNA, 15 bp, Homo sapiens
actcttgtccttcta

SEQ ID NO: 872200 - DNA, 15 bp, Homo sapiens
tactcttgtccttct

SEQ ID NO: 872201 - DNA, 15 bp, Homo sapiens
ttactcttgtccttc

SEQ ID NO: 872202 - DNA, 15 bp, Homo sapiens
tttactcttgtcctt

SEQ ID NO: 872203 - DNA, 15 bp, Homo sapiens
ttttactcttgtcct

SEQ ID NO: 872204 - DNA, 15 bp, Homo sapiens
tttttactcttgtcc

SEQ ID NO: 872205 - DNA, 15 bp, Homo sapiens
atttttactcttgtc

SEQ ID NO: 872206 - DNA, 15 bp, Homo sapiens
catttttactcttgt

SEQ ID NO: 872207 - DNA, 15 bp, Homo sapiens
acatttttactcttg

SEQ ID NO: 872208 - DNA, 15 bp, Homo sapiens
gacatttttactctt

SEQ ID NO: 872209 - DNA, 15 bp, Homo sapiens
tgacatttttactct

SEQ ID NO: 872210 - DNA, 15 bp, Homo sapiens
ctgacatttttactc

SEQ ID NO: 872211 - DNA, 15 bp, Homo sapiens
cctgacatttttact

SEQ ID NO: 872212 - DNA, 15 bp, Homo sapiens
gcctgacatttttac

SEQ ID NO: 872213 - DNA, 15 bp, Homo sapiens
agcctgacattttta

SEQ ID NO: 872214 - DNA, 15 bp, Homo sapiens
cagcctgacattttt

SEQ ID NO: 872215 - DNA, 15 bp, Homo sapiens
ccagcctgacatttt

SEQ ID NO: 872216 - DNA, 15 bp, Homo sapiens
tccagcctgacattt

SEQ ID NO: 872217 - DNA, 15 bp, Homo sapiens
atccagcctgacatt

SEQ ID NO: 872218 - DNA, 15 bp, Homo sapiens
gatccagcctgacat

SEQ ID NO: 872219 - DNA, 15 bp, Homo sapiens
cgatccagcctgaca

SEQ ID NO: 872220 - DNA, 15 bp, Homo sapiens
tcgatccagcctgac

SEQ ID NO: 872221 - DNA, 15 bp, Homo sapiens
atcgatccagcctga

SEQ ID NO: 872222 - DNA, 15 bp, Homo sapiens
catcgatccagcctg

SEQ ID NO: 872223 - DNA, 15 bp, Homo sapiens
gcatcgatccagcct

SEQ ID NO: 872224 - DNA, 15 bp, Homo sapiens
tgcatcgatccagcc

SEQ ID NO: 872225 - DNA, 15 bp, Homo sapiens
ctgcatcgatccagc

SEQ ID NO: 872226 - DNA, 15 bp, Homo sapiens
cctgcatcgatccag

SEQ ID NO: 872227 - DNA, 15 bp, Homo sapiens
gcctgcatcgatcca

SEQ ID NO: 872228 - DNA, 15 bp, Homo sapiens
ggcctgcatcgatcc

SEQ ID NO: 872229 - DNA, 15 bp, Homo sapiens
tggcctgcatcgatc

SEQ ID NO: 872230 - DNA, 15 bp, Homo sapiens
gtggcctgcatcgat

SEQ ID NO: 872231 - DNA, 15 bp, Homo sapiens
agtggcctgcatcga

SEQ ID NO: 872232 - DNA, 15 bp, Homo sapiens
tagtggcctgcatcg

SEQ ID NO: 872233 - DNA, 15 bp, Homo sapiens
ttagtggcctgcatc

SEQ ID NO: 872234 - DNA, 15 bp, Homo sapiens
cttagtggcctgcat

SEQ ID NO: 872235 - DNA, 15 bp, Homo sapiens
tcttagtggcctgca

SEQ ID NO: 872236 - DNA, 15 bp, Homo sapiens
ttcttagtggcctgc

SEQ ID NO: 872237 - DNA, 15 bp, Homo sapiens
tttcttagtggcctg

SEQ ID NO: 872238 - DNA, 15 bp, Homo sapiens
atttcttagtggcct

SEQ ID NO: 872239 - DNA, 15 bp, Homo sapiens
catttcttagtggcc

SEQ ID NO: 872240 - DNA, 15 bp, Homo sapiens
ccatttcttagtggc

SEQ ID NO: 872241 - DNA, 15 bp, Homo sapiens
tccatttcttagtgg

SEQ ID NO: 872242 - DNA, 15 bp, Homo sapiens
atccatttcttagtg

SEQ ID NO: 872243 - DNA, 15 bp, Homo sapiens
aatccatttcttagt

SEQ ID NO: 872244 - DNA, 15 bp, Homo sapiens
gaatccatttcttag

SEQ ID NO: 872245 - DNA, 15 bp, Homo sapiens
tgaatccatttctta

SEQ ID NO: 872246 - DNA, 15 bp, Homo sapiens
ctgaatccatttctt

SEQ ID NO: 872247 - DNA, 15 bp, Homo sapiens
cctgaatccatttct

SEQ ID NO: 872248 - DNA, 15 bp, Homo sapiens
acctgaatccatttc

SEQ ID NO: 872249 - DNA, 15 bp, Homo sapiens
cacctgaatccattt

SEQ ID NO: 872250 - DNA, 15 bp, Homo sapiens
tcacctgaatccatt

SEQ ID NO: 872251 - DNA, 15 bp, Homo sapiens
atcacctgaatccat

SEQ ID NO: 872252 - DNA, 15 bp, Homo sapiens
catcacctgaatcca

SEQ ID NO: 872253 - DNA, 15 bp, Homo sapiens
ccatcacctgaatcc

SEQ ID NO: 872254 - DNA, 15 bp, Homo sapiens
gccatcacctgaatc

SEQ ID NO: 872255 - DNA, 15 bp, Homo sapiens
tgccatcacctgaat

SEQ ID NO: 872256 - DNA, 15 bp, Homo sapiens
ctgccatcacctgaa

SEQ ID NO: 872257 - DNA, 15 bp, Homo sapiens
actgccatcacctga

SEQ ID NO: 872258 - DNA, 15 bp, Homo sapiens
cactgccatcacctg

SEQ ID NO: 872259 - DNA, 15 bp, Homo sapiens
ccactgccatcacct

SEQ ID NO: 872260 - DNA, 15 bp, Homo sapiens
cccactgccatcacc

SEQ ID NO: 872261 - DNA, 15 bp, Homo sapiens
tcccactgccatcac

SEQ ID NO: 872262 - DNA, 15 bp, Homo sapiens
ttcccactgccatca

SEQ ID NO: 872263 - DNA, 15 bp, Homo sapiens
cttcccactgccatc

SEQ ID NO: 872264 - DNA, 15 bp, Homo sapiens
tcttcccactgccat

SEQ ID NO: 872265 - DNA, 15 bp, Homo sapiens
ttcttcccactgcca

SEQ ID NO: 872266 - DNA, 15 bp, Homo sapiens
tttcttcccactgcc

SEQ ID NO: 872267 - DNA, 15 bp, Homo sapiens
ctttcttcccactgc

SEQ ID NO: 872268 - DNA, 15 bp, Homo sapiens
cctttcttcccactg

SEQ ID NO: 872269 - DNA, 15 bp, Homo sapiens
tcctttcttcccact

SEQ ID NO: 872270 - DNA, 15 bp, Homo sapiens
gtcctttcttcccac

SEQ ID NO: 872271 - DNA, 15 bp, Homo sapiens
ggtcctttcttccca

SEQ ID NO: 872272 - DNA, 15 bp, Homo sapiens
aggtcctttcttccc

SEQ ID NO: 872273 - DNA, 15 bp, Homo sapiens
caggtcctttcttcc

SEQ ID NO: 872274 - DNA, 15 bp, Homo sapiens
tcaggtcctttcttc

SEQ ID NO: 872275 - DNA, 15 bp, Homo sapiens
atcaggtcctttctt

SEQ ID NO: 872276 - DNA, 15 bp, Homo sapiens
catcaggtcctttct

SEQ ID NO: 872277 - DNA, 15 bp, Homo sapiens
gcatcaggtcctttc

SEQ ID NO: 872278 - DNA, 15 bp, Homo sapiens
ggcatcaggtccttt

SEQ ID NO: 872279 - DNA, 15 bp, Homo sapiens
gggcatcaggtcctt

SEQ ID NO: 872280 - DNA, 15 bp, Homo sapiens
tgggcatcaggtcct

SEQ ID NO: 872281 - DNA, 15 bp, Homo sapiens
ctgggcatcaggtcc

SEQ ID NO: 872282 - DNA, 15 bp, Homo sapiens
tctgggcatcaggtc

SEQ ID NO: 872283 - DNA, 15 bp, Homo sapiens
ctctgggcatcaggt

SEQ ID NO: 872284 - DNA, 15 bp, Homo sapiens
cctctgggcatcagg

SEQ ID NO: 872285 - DNA, 15 bp, Homo sapiens
gcctctgggcatcag

SEQ ID NO: 872286 - DNA, 15 bp, Homo sapiens
tgcctctgggcatca

SEQ ID NO: 872287 - DNA, 15 bp, Homo sapiens
atgcctctgggcatc

SEQ ID NO: 872288 - DNA, 15 bp, Homo sapiens
aatgcctctgggcat

SEQ ID NO: 872289 - DNA, 15 bp, Homo sapiens
aaatgcctctgggca

SEQ ID NO: 872290 - DNA, 15 bp, Homo sapiens
gaaatgcctctgggc

SEQ ID NO: 872291 - DNA, 15 bp, Homo sapiens
agaaatgcctctggg

SEQ ID NO: 872292 - DNA, 15 bp, Homo sapiens
cagaaatgcctctgg

SEQ ID NO: 872293 - DNA, 15 bp, Homo sapiens
ccagaaatgcctctg

SEQ ID NO: 872294 - DNA, 15 bp, Homo sapiens
tccagaaatgcctct

SEQ ID NO: 872295 - DNA, 15 bp, Homo sapiens
ctccagaaatgcctc

SEQ ID NO: 872296 - DNA, 15 bp, Homo sapiens
tctccagaaatgcct

SEQ ID NO: 872297 - DNA, 15 bp, Homo sapiens
ttctccagaaatgcc

SEQ ID NO: 872298 - DNA, 15 bp, Homo sapiens
cttctccagaaatgc

SEQ ID NO: 872299 - DNA, 15 bp, Homo sapiens
tcttctccagaaatg

SEQ ID NO: 872300 - DNA, 15 bp, Homo sapiens
atcttctccagaaat

SEQ ID NO: 872301 - DNA, 15 bp, Homo sapiens
catcttctccagaaa

SEQ ID NO: 872302 - DNA, 15 bp, Homo sapiens
tcatcttctccagaa

SEQ ID NO: 872303 - DNA, 15 bp, Homo sapiens
ctcatcttctccaga

SEQ ID NO: 872304 - DNA, 15 bp, Homo sapiens
tctcatcttctccag

SEQ ID NO: 872305 - DNA, 15 bp, Homo sapiens
atctcatcttctcca

SEQ ID NO: 872306 - DNA, 15 bp, Homo sapiens
gatctcatcttctcc

SEQ ID NO: 872307 - DNA, 15 bp, Homo sapiens
tgatctcatcttctc

SEQ ID NO: 872308 - DNA, 15 bp, Homo sapiens
ctgatctcatcttct

SEQ ID NO: 872309 - DNA, 15 bp, Homo sapiens
tctgatctcatcttc

SEQ ID NO: 872310 - DNA, 15 bp, Homo sapiens
gtctgatctcatctt

SEQ ID NO: 872311 - DNA, 15 bp, Homo sapiens
agtctgatctcatct

SEQ ID NO: 872312 - DNA, 15 bp, Homo sapiens
aagtctgatctcatc

SEQ ID NO: 872313 - DNA, 15 bp, Homo sapiens
caagtctgatctcat

SEQ ID NO: 872314 - DNA, 15 bp, Homo sapiens
acaagtctgatctca

SEQ ID NO: 872315 - DNA, 15 bp, Homo sapiens
cacaagtctgatctc

SEQ ID NO: 872316 - DNA, 15 bp, Homo sapiens
tcacaagtctgatct

SEQ ID NO: 872317 - DNA, 15 bp, Homo sapiens
atcacaagtctgatc

SEQ ID NO: 872318 - DNA, 15 bp, Homo sapiens
aatcacaagtctgat

SEQ ID NO: 872319 - DNA, 15 bp, Homo sapiens
caatcacaagtctga

SEQ ID NO: 872320 - DNA, 15 bp, Homo sapiens
ccaatcacaagtctg

SEQ ID NO: 872321 - DNA, 15 bp, Homo sapiens
gccaatcacaagtct

SEQ ID NO: 872322 - DNA, 15 bp, Homo sapiens
agccaatcacaagtc

SEQ ID NO: 872323 - DNA, 15 bp, Homo sapiens
cagccaatcacaagt

SEQ ID NO: 872324 - DNA, 15 bp, Homo sapiens
tcagccaatcacaag

SEQ ID NO: 872325 - DNA, 15 bp, Homo sapiens
ttcagccaatcacaa

SEQ ID NO: 872326 - DNA, 15 bp, Homo sapiens
gttcagccaatcaca

SEQ ID NO: 872327 - DNA, 15 bp, Homo sapiens
tgttcagccaatcac

SEQ ID NO: 872328 - DNA, 15 bp, Homo sapiens
gtgttcagccaatca

SEQ ID NO: 872329 - DNA, 15 bp, Homo sapiens
tgtgttcagccaatc

SEQ ID NO: 872330 - DNA, 15 bp, Homo sapiens
gtgtgttcagccaat

SEQ ID NO: 872331 - DNA, 15 bp, Homo sapiens
tgtgtgttcagccaa

SEQ ID NO: 872332 - DNA, 15 bp, Homo sapiens
gtgtgtgttcagcca

SEQ ID NO: 872333 - DNA, 15 bp, Homo sapiens
agtgtgtgttcagcc

SEQ ID NO: 872334 - DNA, 15 bp, Homo sapiens
cagtgtgtgttcagc

SEQ ID NO: 872335 - DNA, 15 bp, Homo sapiens
acagtgtgtgttcag

SEQ ID NO: 872336 - DNA, 15 bp, Homo sapiens
tacagtgtgtgttca

SEQ ID NO: 872337 - DNA, 15 bp, Homo sapiens
ctacagtgtgtgttc

SEQ ID NO: 872338 - DNA, 15 bp, Homo sapiens
actacagtgtgtgtt

SEQ ID NO: 872339 - DNA, 15 bp, Homo sapiens
cactacagtgtgtgt

SEQ ID NO: 872340 - DNA, 15 bp, Homo sapiens
ccactacagtgtgtg

SEQ ID NO: 872341 - DNA, 15 bp, Homo sapiens
cccactacagtgtgt

SEQ ID NO: 872342 - DNA, 15 bp, Homo sapiens
ccccactacagtgtg

SEQ ID NO: 872343 - DNA, 15 bp, Homo sapiens
accccactacagtgt

SEQ ID NO: 872344 - DNA, 15 bp, Homo sapiens
caccccactacagtg

SEQ ID NO: 872345 - DNA, 15 bp, Homo sapiens
ccaccccactacagt

SEQ ID NO: 872346 - DNA, 15 bp, Homo sapiens
cccaccccactacag

SEQ ID NO: 872347 - DNA, 15 bp, Homo sapiens
ccccaccccactaca

SEQ ID NO: 872348 - DNA, 15 bp, Homo sapiens
accccaccccactac

SEQ ID NO: 872349 - DNA, 15 bp, Homo sapiens
aaccccaccccacta

SEQ ID NO: 872350 - DNA, 15 bp, Homo sapiens
aaaccccaccccact

SEQ ID NO: 872351 - DNA, 15 bp, Homo sapiens
taaaccccaccccac

SEQ ID NO: 872352 - DNA, 15 bp, Homo sapiens
ctaaaccccacccca

SEQ ID NO: 872353 - DNA, 15 bp, Homo sapiens
cctaaaccccacccc

SEQ ID NO: 872354 - DNA, 15 bp, Homo sapiens
ccctaaaccccaccc

SEQ ID NO: 872355 - DNA, 15 bp, Homo sapiens
cccctaaaccccacc

SEQ ID NO: 872356 - DNA, 15 bp, Homo sapiens
ccccctaaaccccac

SEQ ID NO: 872357 - DNA, 15 bp, Homo sapiens
accccctaaacccca

SEQ ID NO: 872358 - DNA, 15 bp, Homo sapiens
caccccctaaacccc

SEQ ID NO: 872359 - DNA, 15 bp, Homo sapiens
tcaccccctaaaccc

SEQ ID NO: 872360 - DNA, 15 bp, Homo sapiens
gtcaccccctaaacc

SEQ ID NO: 872361 - DNA, 15 bp, Homo sapiens
agtcaccccctaaac

SEQ ID NO: 872362 - DNA, 15 bp, Homo sapiens
gagtcaccccctaaa

SEQ ID NO: 872363 - DNA, 15 bp, Homo sapiens
tgagtcaccccctaa

SEQ ID NO: 872364 - DNA, 15 bp, Homo sapiens
ttgagtcacccccta

SEQ ID NO: 872365 - DNA, 15 bp, Homo sapiens
gttgagtcaccccct

SEQ ID NO: 872366 - DNA, 15 bp, Homo sapiens
agttgagtcaccccc

SEQ ID NO: 872367 - DNA, 15 bp, Homo sapiens
aagttgagtcacccc

SEQ ID NO: 872368 - DNA, 15 bp, Homo sapiens
gaagttgagtcaccc

SEQ ID NO: 872369 - DNA, 15 bp, Homo sapiens
tgaagttgagtcacc

SEQ ID NO: 872370 - DNA, 15 bp, Homo sapiens
ttgaagttgagtcac

SEQ ID NO: 872371 - DNA, 15 bp, Homo sapiens
cttgaagttgagtca

SEQ ID NO: 872372 - DNA, 15 bp, Homo sapiens
gcttgaagttgagtc

SEQ ID NO: 872373 - DNA, 15 bp, Homo sapiens
ggcttgaagttgagt

SEQ ID NO: 872374 - DNA, 15 bp, Homo sapiens
gggcttgaagttgag

SEQ ID NO: 872375 - DNA, 15 bp, Homo sapiens
tgggcttgaagttga

SEQ ID NO: 872376 - DNA, 15 bp, Homo sapiens
ctgggcttgaagttg

SEQ ID NO: 872377 - DNA, 15 bp, Homo sapiens
cctgggcttgaagtt

SEQ ID NO: 872378 - DNA, 15 bp, Homo sapiens
acctgggcttgaagt

SEQ ID NO: 872379 - DNA, 15 bp, Homo sapiens
tacctgggcttgaag

SEQ ID NO: 872380 - DNA, 15 bp, Homo sapiens
gtacctgggcttgaa

SEQ ID NO: 872381 - DNA, 15 bp, Homo sapiens
tgtacctgggcttga

SEQ ID NO: 872382 - DNA, 15 bp, Homo sapiens
atgtacctgggcttg

SEQ ID NO: 872383 - DNA, 15 bp, Homo sapiens
aatgtacctgggctt

SEQ ID NO: 872384 - DNA, 15 bp, Homo sapiens
gaatgtacctgggct

SEQ ID NO: 872385 - DNA, 15 bp, Homo sapiens
tgaatgtacctgggc

SEQ ID NO: 872386 - DNA, 15 bp, Homo sapiens
ttgaatgtacctggg

SEQ ID NO: 872387 - DNA, 15 bp, Homo sapiens
cttgaatgtacctgg

SEQ ID NO: 872388 - DNA, 15 bp, Homo sapiens
acttgaatgtacctg

SEQ ID NO: 872389 - DNA, 15 bp, Homo sapiens
gacttgaatgtacct

SEQ ID NO: 872390 - DNA, 15 bp, Homo sapiens
agacttgaatgtacc

SEQ ID NO: 872391 - DNA, 15 bp, Homo sapiens
cagacttgaatgtac

SEQ ID NO: 872392 - DNA, 15 bp, Homo sapiens
tcagacttgaatgta

SEQ ID NO: 872393 - DNA, 15 bp, Homo sapiens
ttcagacttgaatgt

SEQ ID NO: 872394 - DNA, 15 bp, Homo sapiens
attcagacttgaatg

SEQ ID NO: 872395 - DNA, 15 bp, Homo sapiens
aattcagacttgaat

SEQ ID NO: 872396 - DNA, 15 bp, Homo sapiens
caattcagacttgaa

SEQ ID NO: 872397 - DNA, 15 bp, Homo sapiens
gcaattcagacttga

SEQ ID NO: 872398 - DNA, 15 bp, Homo sapiens
ggcaattcagacttg

SEQ ID NO: 872399 - DNA, 15 bp, Homo sapiens
gggcaattcagactt

SEQ ID NO: 872400 - DNA, 15 bp, Homo sapiens
agggcaattcagact

SEQ ID NO: 872401 - DNA, 15 bp, Homo sapiens
tagggcaattcagac

SEQ ID NO: 872402 - DNA, 15 bp, Homo sapiens
ctagggcaattcaga

SEQ ID NO: 872403 - DNA, 15 bp, Homo sapiens
actagggcaattcag

SEQ ID NO: 872404 - DNA, 15 bp, Homo sapiens
gactagggcaattca

SEQ ID NO: 872405 - DNA, 15 bp, Homo sapiens
tgactagggcaattc

SEQ ID NO: 872406 - DNA, 15 bp, Homo sapiens
ttgactagggcaatt

SEQ ID NO: 872407 - DNA, 15 bp, Homo sapiens
tttgactagggcaat

SEQ ID NO: 872408 - DNA, 15 bp, Homo sapiens
ttttgactagggcaa

SEQ ID NO: 872409 - DNA, 15 bp, Homo sapiens
cttttgactagggca

SEQ ID NO: 872410 - DNA, 15 bp, Homo sapiens
acttttgactagggc

SEQ ID NO: 872411 - DNA, 15 bp, Homo sapiens
cacttttgactaggg

SEQ ID NO: 872412 - DNA, 15 bp, Homo sapiens
ccacttttgactagg

SEQ ID NO: 872413 - DNA, 15 bp, Homo sapiens
gccacttttgactag

SEQ ID NO: 872414 - DNA, 15 bp, Homo sapiens
tgccacttttgacta

SEQ ID NO: 872415 - DNA, 15 bp, Homo sapiens
atgccacttttgact

SEQ ID NO: 872416 - DNA, 15 bp, Homo sapiens
gatgccacttttgac

SEQ ID NO: 872417 - DNA, 15 bp, Homo sapiens
agatgccacttttga

SEQ ID NO: 872418 - DNA, 15 bp, Homo sapiens
cagatgccacttttg

SEQ ID NO: 872419 - DNA, 15 bp, Homo sapiens
acagatgccactttt

SEQ ID NO: 872420 - DNA, 15 bp, Homo sapiens
cacagatgccacttt

SEQ ID NO: 872421 - DNA, 15 bp, Homo sapiens
ccacagatgccactt

SEQ ID NO: 872422 - DNA, 15 bp, Homo sapiens
tccacagatgccact

SEQ ID NO: 872423 - DNA, 15 bp, Homo sapiens
atccacagatgccac

SEQ ID NO: 872424 - DNA, 15 bp, Homo sapiens
catccacagatgcca

SEQ ID NO: 872425 - DNA, 15 bp, Homo sapiens
acatccacagatgcc

SEQ ID NO: 872426 - DNA, 15 bp, Homo sapiens
cacatccacagatgc

SEQ ID NO: 872427 - DNA, 15 bp, Homo sapiens
acacatccacagatg

SEQ ID NO: 872428 - DNA, 15 bp, Homo sapiens
tacacatccacagat

SEQ ID NO: 872429 - DNA, 15 bp, Homo sapiens
atacacatccacaga

SEQ ID NO: 872430 - DNA, 15 bp, Homo sapiens
gatacacatccacag

SEQ ID NO: 872431 - DNA, 15 bp, Homo sapiens
tgatacacatccaca

SEQ ID NO: 872432 - DNA, 15 bp, Homo sapiens
ctgatacacatccac

SEQ ID NO: 872433 - DNA, 15 bp, Homo sapiens
tctgatacacatcca

SEQ ID NO: 872434 - DNA, 15 bp, Homo sapiens
ttctgatacacatcc

SEQ ID NO: 872435 - DNA, 15 bp, Homo sapiens
tttctgatacacatc

SEQ ID NO: 872436 - DNA, 15 bp, Homo sapiens
atttctgatacacat

SEQ ID NO: 872437 - DNA, 15 bp, Homo sapiens
tatttctgatacaca

SEQ ID NO: 872438 - DNA, 15 bp, Homo sapiens
atatttctgatacac

SEQ ID NO: 872439 - DNA, 15 bp, Homo sapiens
gatatttctgataca

SEQ ID NO: 872440 - DNA, 15 bp, Homo sapiens
agatatttctgatac

SEQ ID NO: 872441 - DNA, 15 bp, Homo sapiens
aagatatttctgata

SEQ ID NO: 872442 - DNA, 15 bp, Homo sapiens
taagatatttctgat

SEQ ID NO: 872443 - DNA, 15 bp, Homo sapiens
gtaagatatttctga

SEQ ID NO: 872444 - DNA, 15 bp, Homo sapiens
agtaagatatttctg

SEQ ID NO: 872445 - DNA, 15 bp, Homo sapiens
aagtaagatatttct

SEQ ID NO: 872446 - DNA, 15 bp, Homo sapiens
aaagtaagatatttc

SEQ ID NO: 872447 - DNA, 15 bp, Homo sapiens
aaaagtaagatattt

SEQ ID NO: 872448 - DNA, 15 bp, Homo sapiens
gaaaagtaagatatt

SEQ ID NO: 872449 - DNA, 15 bp, Homo sapiens
agaaaagtaagatat

SEQ ID NO: 872450 - DNA, 15 bp, Homo sapiens
aagaaaagtaagata

SEQ ID NO: 872451 - DNA, 15 bp, Homo sapiens
caagaaaagtaagat

SEQ ID NO: 872452 - DNA, 15 bp, Homo sapiens
ccaagaaaagtaaga

SEQ ID NO: 872453 - DNA, 15 bp, Homo sapiens
tccaagaaaagtaag

SEQ ID NO: 872454 - DNA, 15 bp, Homo sapiens
ttccaagaaaagtaa

SEQ ID NO: 872455 - DNA, 15 bp, Homo sapiens
cttccaagaaaagta

SEQ ID NO: 872456 - DNA, 15 bp, Homo sapiens
gcttccaagaaaagt

SEQ ID NO: 872457 - DNA, 15 bp, Homo sapiens
ggcttccaagaaaag

SEQ ID NO: 872458 - DNA, 15 bp, Homo sapiens
tggcttccaagaaaa

SEQ ID NO: 872459 - DNA, 15 bp, Homo sapiens
ttggcttccaagaaa

SEQ ID NO: 872460 - DNA, 15 bp, Homo sapiens
gttggcttccaagaa

SEQ ID NO: 872461 - DNA, 15 bp, Homo sapiens
tgttggcttccaaga

SEQ ID NO: 872462 - DNA, 15 bp, Homo sapiens
ctgttggcttccaag

SEQ ID NO: 872463 - DNA, 15 bp, Homo sapiens
cctgttggcttccaa

SEQ ID NO: 872464 - DNA, 15 bp, Homo sapiens
tcctgttggcttcca

SEQ ID NO: 872465 - DNA, 15 bp, Homo sapiens
ctcctgttggcttcc

SEQ ID NO: 872466 - DNA, 15 bp, Homo sapiens
tctcctgttggcttc

SEQ ID NO: 872467 - DNA, 15 bp, Homo sapiens
ttctcctgttggctt

SEQ ID NO: 872468 - DNA, 15 bp, Homo sapiens
tttctcctgttggct

SEQ ID NO: 872469 - DNA, 15 bp, Homo sapiens
ttttctcctgttggc

SEQ ID NO: 872470 - DNA, 15 bp, Homo sapiens
cttttctcctgttgg

SEQ ID NO: 872471 - DNA, 15 bp, Homo sapiens
tcttttctcctgttg

SEQ ID NO: 872472 - DNA, 15 bp, Homo sapiens
ctcttttctcctgtt

SEQ ID NO: 872473 - DNA, 15 bp, Homo sapiens
actcttttctcctgt

SEQ ID NO: 872474 - DNA, 15 bp, Homo sapiens
cactcttttctcctg

SEQ ID NO: 872475 - DNA, 15 bp, Homo sapiens
gcactcttttctcct

SEQ ID NO: 872476 - DNA, 15 bp, Homo sapiens
agcactcttttctcc

SEQ ID NO: 872477 - DNA, 15 bp, Homo sapiens
tagcactcttttctc

SEQ ID NO: 872478 - DNA, 15 bp, Homo sapiens
gtagcactcttttct

SEQ ID NO: 872479 - DNA, 15 bp, Homo sapiens
ggtagcactcttttc

SEQ ID NO: 872480 - DNA, 15 bp, Homo sapiens
tggtagcactctttt

SEQ ID NO: 872481 - DNA, 15 bp, Homo sapiens
ttggtagcactcttt

SEQ ID NO: 872482 - DNA, 15 bp, Homo sapiens
cttggtagcactctt

SEQ ID NO: 872483 - DNA, 15 bp, Homo sapiens
acttggtagcactct

SEQ ID NO: 872484 - DNA, 15 bp, Homo sapiens
cacttggtagcactc

SEQ ID NO: 872485 - DNA, 15 bp, Homo sapiens
tcacttggtagcact

SEQ ID NO: 872486 - DNA, 15 bp, Homo sapiens
ttcacttggtagcac

SEQ ID NO: 872487 - DNA, 15 bp, Homo sapiens
gttcacttggtagca

SEQ ID NO: 872488 - DNA, 15 bp, Homo sapiens
agttcacttggtagc

SEQ ID NO: 872489 - DNA, 15 bp, Homo sapiens
tagttcacttggtag

SEQ ID NO: 872490 - DNA, 15 bp, Homo sapiens
ctagttcacttggta

SEQ ID NO: 872491 - DNA, 15 bp, Homo sapiens
tctagttcacttggt

SEQ ID NO: 872492 - DNA, 15 bp, Homo sapiens
ctctagttcacttgg

SEQ ID NO: 872493 - DNA, 15 bp, Homo sapiens
tctctagttcacttg

SEQ ID NO: 872494 - DNA, 15 bp, Homo sapiens
gtctctagttcactt

SEQ ID NO: 872495 - DNA, 15 bp, Homo sapiens
tgtctctagttcact

SEQ ID NO: 872496 - DNA, 15 bp, Homo sapiens
ctgtctctagttcac

SEQ ID NO: 872497 - DNA, 15 bp, Homo sapiens
cctgtctctagttca

SEQ ID NO: 872498 - DNA, 15 bp, Homo sapiens
tcctgtctctagttc

SEQ ID NO: 872499 - DNA, 15 bp, Homo sapiens
ttcctgtctctagtt

SEQ ID NO: 872500 - DNA, 15 bp, Homo sapiens
attcctgtctctagt

SEQ ID NO: 872501 - DNA, 15 bp, Homo sapiens
tattcctgtctctag

SEQ ID NO: 872502 - DNA, 15 bp, Homo sapiens
atattcctgtctcta

SEQ ID NO: 872503 - DNA, 15 bp, Homo sapiens
gatattcctgtctct

SEQ ID NO: 872504 - DNA, 15 bp, Homo sapiens
agatattcctgtctc

SEQ ID NO: 872505 - DNA, 15 bp, Homo sapiens
aagatattcctgtct

SEQ ID NO: 872506 - DNA, 15 bp, Homo sapiens
aaagatattcctgtc

SEQ ID NO: 872507 - DNA, 15 bp, Homo sapiens
aaaagatattcctgt

SEQ ID NO: 872508 - DNA, 15 bp, Homo sapiens
caaaagatattcctg

SEQ ID NO: 872509 - DNA, 15 bp, Homo sapiens
acaaaagatattcct

SEQ ID NO: 872510 - DNA, 15 bp, Homo sapiens
gacaaaagatattcc

SEQ ID NO: 872511 - DNA, 15 bp, Homo sapiens
tgacaaaagatattc

SEQ ID NO: 872512 - DNA, 15 bp, Homo sapiens
atgacaaaagatatt

SEQ ID NO: 872513 - DNA, 15 bp, Homo sapiens
aatgacaaaagatat

SEQ ID NO: 872514 - DNA, 15 bp, Homo sapiens
aaatgacaaaagata

SEQ ID NO: 872515 - DNA, 15 bp, Homo sapiens
gaaatgacaaaagat

SEQ ID NO: 872516 - DNA, 15 bp, Homo sapiens
tgaaatgacaaaaga

SEQ ID NO: 872517 - DNA, 15 bp, Homo sapiens
ttgaaatgacaaaag

SEQ ID NO: 872518 - DNA, 15 bp, Homo sapiens
cttgaaatgacaaaa

SEQ ID NO: 872519 - DNA, 15 bp, Homo sapiens
ccttgaaatgacaaa

SEQ ID NO: 872520 - DNA, 15 bp, Homo sapiens
tccttgaaatgacaa

SEQ ID NO: 872521 - DNA, 15 bp, Homo sapiens
ttccttgaaatgaca

SEQ ID NO: 872522 - DNA, 15 bp, Homo sapiens
tttccttgaaatgac

SEQ ID NO: 872523 - DNA, 15 bp, Homo sapiens
gtttccttgaaatga

SEQ ID NO: 872524 - DNA, 15 bp, Homo sapiens
agtttccttgaaatg

SEQ ID NO: 872525 - DNA, 15 bp, Homo sapiens
cagtttccttgaaat

SEQ ID NO: 872526 - DNA, 15 bp, Homo sapiens
ccagtttccttgaaa

SEQ ID NO: 872527 - DNA, 15 bp, Homo sapiens
tccagtttccttgaa

SEQ ID NO: 872528 - DNA, 15 bp, Homo sapiens
ttccagtttccttga

SEQ ID NO: 872529 - DNA, 15 bp, Homo sapiens
tttccagtttccttg

SEQ ID NO: 872530 - DNA, 15 bp, Homo sapiens
ctttccagtttcctt

SEQ ID NO: 872531 - DNA, 15 bp, Homo sapiens
tctttccagtttcct

SEQ ID NO: 872532 - DNA, 15 bp, Homo sapiens
ttctttccagtttcc

SEQ ID NO: 872533 - DNA, 15 bp, Homo sapiens
cttctttccagtttc

SEQ ID NO: 872534 - DNA, 15 bp, Homo sapiens
tcttctttccagttt

SEQ ID NO: 872535 - DNA, 15 bp, Homo sapiens
ttcttctttccagtt

SEQ ID NO: 872536 - DNA, 15 bp, Homo sapiens
cttcttctttccagt

SEQ ID NO: 872537 - DNA, 15 bp, Homo sapiens
ccttcttctttccag

SEQ ID NO: 872538 - DNA, 15 bp, Homo sapiens
gccttcttctttcca

SEQ ID NO: 872539 - DNA, 15 bp, Homo sapiens
agccttcttctttcc

SEQ ID NO: 872540 - DNA, 15 bp, Homo sapiens
gagccttcttctttc

SEQ ID NO: 872541 - DNA, 15 bp, Homo sapiens
tgagccttcttcttt

SEQ ID NO: 872542 - DNA, 15 bp, Homo sapiens
ctgagccttcttctt

SEQ ID NO: 872543 - DNA, 15 bp, Homo sapiens
actgagccttcttct

SEQ ID NO: 872544 - DNA, 15 bp, Homo sapiens
tactgagccttcttc

SEQ ID NO: 872545 - DNA, 15 bp, Homo sapiens
atactgagccttctt

SEQ ID NO: 872546 - DNA, 15 bp, Homo sapiens
aatactgagccttct

SEQ ID NO: 872547 - DNA, 15 bp, Homo sapiens
gaatactgagccttc

SEQ ID NO: 872548 - DNA, 15 bp, Homo sapiens
agaatactgagcctt

SEQ ID NO: 872549 - DNA, 15 bp, Homo sapiens
aagaatactgagcct

SEQ ID NO: 872550 - DNA, 15 bp, Homo sapiens
aaagaatactgagcc

SEQ ID NO: 872551 - DNA, 15 bp, Homo sapiens
taaagaatactgagc

SEQ ID NO: 872552 - DNA, 15 bp, Homo sapiens
ctaaagaatactgag

SEQ ID NO: 872553 - DNA, 15 bp, Homo sapiens
actaaagaatactga

SEQ ID NO: 872554 - DNA, 15 bp, Homo sapiens
tactaaagaatactg

SEQ ID NO: 872555 - DNA, 15 bp, Homo sapiens
ctactaaagaatact

SEQ ID NO: 872556 - DNA, 15 bp, Homo sapiens
cctactaaagaatac

SEQ ID NO: 872557 - DNA, 15 bp, Homo sapiens
tcctactaaagaata

SEQ ID NO: 872558 - DNA, 15 bp, Homo sapiens
ttcctactaaagaat

SEQ ID NO: 872559 - DNA, 15 bp, Homo sapiens
cttcctactaaagaa

SEQ ID NO: 872560 - DNA, 15 bp, Homo sapiens
tcttcctactaaaga

SEQ ID NO: 872561 - DNA, 15 bp, Homo sapiens
ttcttcctactaaag

SEQ ID NO: 872562 - DNA, 15 bp, Homo sapiens
cttcttcctactaaa

SEQ ID NO: 872563 - DNA, 15 bp, Homo sapiens
tcttcttcctactaa

SEQ ID NO: 872564 - DNA, 15 bp, Homo sapiens
gtcttcttcctacta

SEQ ID NO: 872565 - DNA, 15 bp, Homo sapiens
agtcttcttcctact

SEQ ID NO: 872566 - DNA, 15 bp, Homo sapiens
aagtcttcttcctac

SEQ ID NO: 872567 - DNA, 15 bp, Homo sapiens
taagtcttcttccta

SEQ ID NO: 872568 - DNA, 15 bp, Homo sapiens
ttaagtcttcttcct

SEQ ID NO: 872569 - DNA, 15 bp, Homo sapiens
cttaagtcttcttcc

SEQ ID NO: 872570 - DNA, 15 bp, Homo sapiens
acttaagtcttcttc

SEQ ID NO: 872571 - DNA, 15 bp, Homo sapiens
gacttaagtcttctt

SEQ ID NO: 872572 - DNA, 15 bp, Homo sapiens
tgacttaagtcttct

SEQ ID NO: 872573 - DNA, 15 bp, Homo sapiens
ctgacttaagtcttc

SEQ ID NO: 872574 - DNA, 15 bp, Homo sapiens
tctgacttaagtctt

SEQ ID NO: 872575 - DNA, 15 bp, Homo sapiens
ctctgacttaagtct

SEQ ID NO: 872576 - DNA, 15 bp, Homo sapiens
tctctgacttaagtc

SEQ ID NO: 872577 - DNA, 15 bp, Homo sapiens
gtctctgacttaagt

SEQ ID NO: 872578 - DNA, 15 bp, Homo sapiens
agtctctgacttaag

SEQ ID NO: 872579 - DNA, 15 bp, Homo sapiens
gagtctctgacttaa

SEQ ID NO: 872580 - DNA, 15 bp, Homo sapiens
tgagtctctgactta

SEQ ID NO: 872581 - DNA, 15 bp, Homo sapiens
atgagtctctgactt

SEQ ID NO: 872582 - DNA, 15 bp, Homo sapiens
gatgagtctctgact

SEQ ID NO: 872583 - DNA, 15 bp, Homo sapiens
agatgagtctctgac

SEQ ID NO: 872584 - DNA, 15 bp, Homo sapiens
cagatgagtctctga

SEQ ID NO: 872585 - DNA, 15 bp, Homo sapiens
acagatgagtctctg

SEQ ID NO: 872586 - DNA, 15 bp, Homo sapiens
tacagatgagtctct

SEQ ID NO: 872587 - DNA, 15 bp, Homo sapiens
gtacagatgagtctc

SEQ ID NO: 872588 - DNA, 15 bp, Homo sapiens
ggtacagatgagtct

SEQ ID NO: 872589 - DNA, 15 bp, Homo sapiens
aggtacagatgagtc

SEQ ID NO: 872590 - DNA, 15 bp, Homo sapiens
gaggtacagatgagt

SEQ ID NO: 872591 - DNA, 15 bp, Homo sapiens
agaggtacagatgag

SEQ ID NO: 872592 - DNA, 15 bp, Homo sapiens
gagaggtacagatga

SEQ ID NO: 872593 - DNA, 15 bp, Homo sapiens
agagaggtacagatg

SEQ ID NO: 872594 - DNA, 15 bp, Homo sapiens
cagagaggtacagat

SEQ ID NO: 872595 - DNA, 15 bp, Homo sapiens
ccagagaggtacaga

SEQ ID NO: 872596 - DNA, 15 bp, Homo sapiens
gccagagaggtacag

SEQ ID NO: 872597 - DNA, 15 bp, Homo sapiens
tgccagagaggtaca

SEQ ID NO: 872598 - DNA, 15 bp, Homo sapiens
ctgccagagaggtac

SEQ ID NO: 872599 - DNA, 15 bp, Homo sapiens
cctgccagagaggta

SEQ ID NO: 872600 - DNA, 15 bp, Homo sapiens
ccctgccagagaggt

SEQ ID NO: 872601 - DNA, 15 bp, Homo sapiens
accctgccagagagg

SEQ ID NO: 872602 - DNA, 15 bp, Homo sapiens
aaccctgccagagag

SEQ ID NO: 872603 - DNA, 15 bp, Homo sapiens
aaaccctgccagaga

SEQ ID NO: 872604 - DNA, 15 bp, Homo sapiens
taaaccctgccagag

SEQ ID NO: 872605 - DNA, 15 bp, Homo sapiens
ttaaaccctgccaga

SEQ ID NO: 872606 - DNA, 15 bp, Homo sapiens
tttaaaccctgccag

SEQ ID NO: 872607 - DNA, 15 bp, Homo sapiens
ttttaaaccctgcca

SEQ ID NO: 872608 - DNA, 15 bp, Homo sapiens
cttttaaaccctgcc

SEQ ID NO: 872609 - DNA, 15 bp, Homo sapiens
ccttttaaaccctgc

SEQ ID NO: 872610 - DNA, 15 bp, Homo sapiens
cccttttaaaccctg

SEQ ID NO: 872611 - DNA, 15 bp, Homo sapiens
ccccttttaaaccct

SEQ ID NO: 872612 - DNA, 15 bp, Homo sapiens
cccccttttaaaccc

SEQ ID NO: 872613 - DNA, 15 bp, Homo sapiens
tcccccttttaaacc

SEQ ID NO: 872614 - DNA, 15 bp, Homo sapiens
ttcccccttttaaac

SEQ ID NO: 872615 - DNA, 15 bp, Homo sapiens
cttcccccttttaaa

SEQ ID NO: 872616 - DNA, 15 bp, Homo sapiens
tcttcccccttttaa

SEQ ID NO: 872617 - DNA, 15 bp, Homo sapiens
ctcttccccctttta

SEQ ID NO: 872618 - DNA, 15 bp, Homo sapiens
cctcttccccctttt

SEQ ID NO: 872619 - DNA, 15 bp, Homo sapiens
tcctcttcccccttt

SEQ ID NO: 872620 - DNA, 15 bp, Homo sapiens
ttcctcttccccctt

SEQ ID NO: 872621 - DNA, 15 bp, Homo sapiens
attcctcttccccct

SEQ ID NO: 872622 - DNA, 15 bp, Homo sapiens
tattcctcttccccc

SEQ ID NO: 872623 - DNA, 15 bp, Homo sapiens
ctattcctcttcccc

SEQ ID NO: 872624 - DNA, 15 bp, Homo sapiens
tctattcctcttccc

SEQ ID NO: 872625 - DNA, 15 bp, Homo sapiens
ctctattcctcttcc

SEQ ID NO: 872626 - DNA, 15 bp, Homo sapiens
cctctattcctcttc

SEQ ID NO: 872627 - DNA, 15 bp, Homo sapiens
gcctctattcctctt

SEQ ID NO: 872628 - DNA, 15 bp, Homo sapiens
agcctctattcctct

SEQ ID NO: 872629 - DNA, 15 bp, Homo sapiens
cagcctctattcctc

SEQ ID NO: 872630 - DNA, 15 bp, Homo sapiens
gcagcctctattcct

SEQ ID NO: 872631 - DNA, 15 bp, Homo sapiens
tgcagcctctattcc

SEQ ID NO: 872632 - DNA, 15 bp, Homo sapiens
ttgcagcctctattc

SEQ ID NO: 872633 - DNA, 15 bp, Homo sapiens
cttgcagcctctatt

SEQ ID NO: 872634 - DNA, 15 bp, Homo sapiens
tcttgcagcctctat

SEQ ID NO: 872635 - DNA, 15 bp, Homo sapiens
ctcttgcagcctcta

SEQ ID NO: 872636 - DNA, 15 bp, Homo sapiens
tctcttgcagcctct

SEQ ID NO: 872637 - DNA, 15 bp, Homo sapiens
atctcttgcagcctc

SEQ ID NO: 872638 - DNA, 15 bp, Homo sapiens
aatctcttgcagcct

SEQ ID NO: 872639 - DNA, 15 bp, Homo sapiens
caatctcttgcagcc

SEQ ID NO: 872640 - DNA, 15 bp, Homo sapiens
acaatctcttgcagc

SEQ ID NO: 872641 - DNA, 15 bp, Homo sapiens
cacaatctcttgcag

SEQ ID NO: 872642 - DNA, 15 bp, Homo sapiens
tcacaatctcttgca

SEQ ID NO: 872643 - DNA, 15 bp, Homo sapiens
atcacaatctcttgc

SEQ ID NO: 872644 - DNA, 15 bp, Homo sapiens
aatcacaatctcttg

SEQ ID NO: 872645 - DNA, 15 bp, Homo sapiens
gaatcacaatctctt

SEQ ID NO: 872646 - DNA, 15 bp, Homo sapiens
tgaatcacaatctct

SEQ ID NO: 872647 - DNA, 15 bp, Homo sapiens
atgaatcacaatctc

SEQ ID NO: 872648 - DNA, 15 bp, Homo sapiens
catgaatcacaatct

SEQ ID NO: 872649 - DNA, 15 bp, Homo sapiens
ccatgaatcacaatc

SEQ ID NO: 872650 - DNA, 15 bp, Homo sapiens
tccatgaatcacaat

SEQ ID NO: 872651 - DNA, 15 bp, Homo sapiens
gtccatgaatcacaa

SEQ ID NO: 872652 - DNA, 15 bp, Homo sapiens
tgtccatgaatcaca

SEQ ID NO: 872653 - DNA, 15 bp, Homo sapiens
ctgtccatgaatcac

SEQ ID NO: 872654 - DNA, 15 bp, Homo sapiens
actgtccatgaatca

SEQ ID NO: 872655 - DNA, 15 bp, Homo sapiens
tactgtccatgaatc

SEQ ID NO: 872656 - DNA, 15 bp, Homo sapiens
atactgtccatgaat

SEQ ID NO: 872657 - DNA, 15 bp, Homo sapiens
catactgtccatgaa

SEQ ID NO: 872658 - DNA, 15 bp, Homo sapiens
gcatactgtccatga

SEQ ID NO: 872659 - DNA, 15 bp, Homo sapiens
tgcatactgtccatg

SEQ ID NO: 872660 - DNA, 15 bp, Homo sapiens
ctgcatactgtccat

SEQ ID NO: 872661 - DNA, 15 bp, Homo sapiens
tctgcatactgtcca

SEQ ID NO: 872662 - DNA, 15 bp, Homo sapiens
ctctgcatactgtcc

SEQ ID NO: 872663 - DNA, 15 bp, Homo sapiens
tctctgcatactgtc

SEQ ID NO: 872664 - DNA, 15 bp, Homo sapiens
atctctgcatactgt

SEQ ID NO: 872665 - DNA, 15 bp, Homo sapiens
gatctctgcatactg

SEQ ID NO: 872666 - DNA, 15 bp, Homo sapiens
tgatctctgcatact

SEQ ID NO: 872667 - DNA, 15 bp, Homo sapiens
ttgatctctgcatac

SEQ ID NO: 872668 - DNA, 15 bp, Homo sapiens
tttgatctctgcata

SEQ ID NO: 872669 - DNA, 15 bp, Homo sapiens
atttgatctctgcat

SEQ ID NO: 872670 - DNA, 15 bp, Homo sapiens
catttgatctctgca

SEQ ID NO: 872671 - DNA, 15 bp, Homo sapiens
tcatttgatctctgc

SEQ ID NO: 872672 - DNA, 15 bp, Homo sapiens
gtcatttgatctctg

SEQ ID NO: 872673 - DNA, 15 bp, Homo sapiens
ggtcatttgatctct

SEQ ID NO: 872674 - DNA, 15 bp, Homo sapiens
aggtcatttgatctc

SEQ ID NO: 872675 - DNA, 15 bp, Homo sapiens
caggtcatttgatct

SEQ ID NO: 872676 - DNA, 15 bp, Homo sapiens
ccaggtcatttgatc

SEQ ID NO: 872677 - DNA, 15 bp, Homo sapiens
cccaggtcatttgat

SEQ ID NO: 872678 - DNA, 15 bp, Homo sapiens
ggcaacaagaacgaa

SEQ ID NO: 872679 - DNA, 15 bp, Homo sapiens
gggcaacaagaacga

SEQ ID NO: 872680 - DNA, 15 bp, Homo sapiens
tgggcaacaagaacg

SEQ ID NO: 872681 - DNA, 15 bp, Homo sapiens
ctgggcaacaagaac

SEQ ID NO: 872682 - DNA, 15 bp, Homo sapiens
cctgggcaacaagaa

SEQ ID NO: 872683 - DNA, 15 bp, Homo sapiens
gcctgggcaacaaga

SEQ ID NO: 872684 - DNA, 15 bp, Homo sapiens
agcctgggcaacaag

SEQ ID NO: 872685 - DNA, 15 bp, Homo sapiens
cagcctgggcaacaa

SEQ ID NO: 872686 - DNA, 15 bp, Homo sapiens
ccagcctgggcaaca

SEQ ID NO: 872687 - DNA, 15 bp, Homo sapiens
tccagcctgggcaac

SEQ ID NO: 872688 - DNA, 15 bp, Homo sapiens
ctccagcctgggcaa

SEQ ID NO: 872689 - DNA, 15 bp, Homo sapiens
actccagcctgggca

SEQ ID NO: 872690 - DNA, 15 bp, Homo sapiens
ttgcactccagcctg

SEQ ID NO: 872691 - DNA, 15 bp, Homo sapiens
attgcactccagcct

SEQ ID NO: 872692 - DNA, 15 bp, Homo sapiens
cattgcactccagcc

SEQ ID NO: 872693 - DNA, 15 bp, Homo sapiens
ccattgcactccagc

SEQ ID NO: 872694 - DNA, 15 bp, Homo sapiens
accattgcactccag

SEQ ID NO: 872695 - DNA, 15 bp, Homo sapiens
caccattgcactcca

SEQ ID NO: 872696 - DNA, 15 bp, Homo sapiens
gcaccattgcactcc

SEQ ID NO: 872697 - DNA, 15 bp, Homo sapiens
cgcaccattgcactc

SEQ ID NO: 872698 - DNA, 15 bp, Homo sapiens
tcgcaccattgcact

SEQ ID NO: 872699 - DNA, 15 bp, Homo sapiens
atcgcaccattgcac

SEQ ID NO: 872700 - DNA, 15 bp, Homo sapiens
gatcgcaccattgca

SEQ ID NO: 872701 - DNA, 15 bp, Homo sapiens
agatcgcaccattgc

SEQ ID NO: 872702 - DNA, 15 bp, Homo sapiens
gagatcgcaccattg

SEQ ID NO: 872703 - DNA, 15 bp, Homo sapiens
tgagatcgcaccatt

SEQ ID NO: 872704 - DNA, 15 bp, Homo sapiens
ctgagatcgcaccat

SEQ ID NO: 872705 - DNA, 15 bp, Homo sapiens
agaggttgcagtgag

SEQ ID NO: 872706 - DNA, 15 bp, Homo sapiens
cagaggttgcagtga

SEQ ID NO: 872707 - DNA, 15 bp, Homo sapiens
gcagaggttgcagtg

SEQ ID NO: 872708 - DNA, 15 bp, Homo sapiens
ggcagaggttgcagt

SEQ ID NO: 872709 - DNA, 15 bp, Homo sapiens
aggcagaggttgcag

SEQ ID NO: 872710 - DNA, 15 bp, Homo sapiens
gaggcagaggttgca

SEQ ID NO: 872711 - DNA, 15 bp, Homo sapiens
ggaggcagaggttgc

SEQ ID NO: 872712 - DNA, 15 bp, Homo sapiens
aggaggcagaggttg

SEQ ID NO: 872713 - DNA, 15 bp, Homo sapiens
caggaggcagaggtt

SEQ ID NO: 872714 - DNA, 15 bp, Homo sapiens
ccaggaggcagaggt

SEQ ID NO: 872715 - DNA, 15 bp, Homo sapiens
cccaggaggcagagg

SEQ ID NO: 872716 - DNA, 15 bp, Homo sapiens
acccaggaggcagag

SEQ ID NO: 872717 - DNA, 15 bp, Homo sapiens
aacccaggaggcaga

SEQ ID NO: 872718 - DNA, 15 bp, Homo sapiens
gaacccaggaggcag

SEQ ID NO: 872719 - DNA, 15 bp, Homo sapiens
tgaacccaggaggca

SEQ ID NO: 872720 - DNA, 15 bp, Homo sapiens
ctgaacccaggaggc

SEQ ID NO: 872721 - DNA, 15 bp, Homo sapiens
cctgaacccaggagg

SEQ ID NO: 872722 - DNA, 15 bp, Homo sapiens
gcctgaacccaggag

SEQ ID NO: 872723 - DNA, 15 bp, Homo sapiens
tgcctgaacccagga

SEQ ID NO: 872724 - DNA, 15 bp, Homo sapiens
ttgcctgaacccagg

SEQ ID NO: 872725 - DNA, 15 bp, Homo sapiens
attgcctgaacccag

SEQ ID NO: 872726 - DNA, 15 bp, Homo sapiens
aattgcctgaaccca

SEQ ID NO: 872727 - DNA, 15 bp, Homo sapiens
gaattgcctgaaccc

SEQ ID NO: 872728 - DNA, 15 bp, Homo sapiens
agaattgcctgaacc

SEQ ID NO: 872729 - DNA, 15 bp, Homo sapiens
gagaattgcctgaac

SEQ ID NO: 872730 - DNA, 15 bp, Homo sapiens
ggagaattgcctgaa

SEQ ID NO: 872731 - DNA, 15 bp, Homo sapiens
aggagaattgcctga

SEQ ID NO: 872732 - DNA, 15 bp, Homo sapiens
caggagaattgcctg

SEQ ID NO: 872733 - DNA, 15 bp, Homo sapiens
gcaggagaattgcct

SEQ ID NO: 872734 - DNA, 15 bp, Homo sapiens
ggcaggagaattgcc

SEQ ID NO: 872735 - DNA, 15 bp, Homo sapiens
aggcaggagaattgc

SEQ ID NO: 872736 - DNA, 15 bp, Homo sapiens
gaggcaggagaattg

SEQ ID NO: 872737 - DNA, 15 bp, Homo sapiens
tgaggcaggagaatt

SEQ ID NO: 872738 - DNA, 15 bp, Homo sapiens
ttgaggcaggagaat

SEQ ID NO: 872739 - DNA, 15 bp, Homo sapiens
gttgaggcaggagaa

SEQ ID NO: 872740 - DNA, 15 bp, Homo sapiens
ggttgaggcaggaga

SEQ ID NO: 872741 - DNA, 15 bp, Homo sapiens
aggttgaggcaggag

SEQ ID NO: 872742 - DNA, 15 bp, Homo sapiens
gaggttgaggcagga

SEQ ID NO: 872743 - DNA, 15 bp, Homo sapiens
agaggttgaggcagg

SEQ ID NO: 872744 - DNA, 15 bp, Homo sapiens
aagaggttgaggcag

SEQ ID NO: 872745 - DNA, 15 bp, Homo sapiens
caagaggttgaggca

SEQ ID NO: 872746 - DNA, 15 bp, Homo sapiens
tcaagaggttgaggc

SEQ ID NO: 872747 - DNA, 15 bp, Homo sapiens
ctcaagaggttgagg

SEQ ID NO: 872748 - DNA, 15 bp, Homo sapiens
actcaagaggttgag

SEQ ID NO: 872749 - DNA, 15 bp, Homo sapiens
tactcaagaggttga

SEQ ID NO: 872750 - DNA, 15 bp, Homo sapiens
ctactcaagaggttg

SEQ ID NO: 872751 - DNA, 15 bp, Homo sapiens
gctactcaagaggtt

SEQ ID NO: 872752 - DNA, 15 bp, Homo sapiens
agctactcaagaggt

SEQ ID NO: 872753 - DNA, 15 bp, Homo sapiens
cagctactcaagagg

SEQ ID NO: 872754 - DNA, 15 bp, Homo sapiens
ccagctactcaagag

SEQ ID NO: 872755 - DNA, 15 bp, Homo sapiens
cccagctactcaaga

SEQ ID NO: 872756 - DNA, 15 bp, Homo sapiens
tcccagctactcaag

SEQ ID NO: 872757 - DNA, 15 bp, Homo sapiens
atcccagctactcaa

SEQ ID NO: 872758 - DNA, 15 bp, Homo sapiens
atgcctgtaatccca

SEQ ID NO: 872759 - DNA, 15 bp, Homo sapiens
catgcctgtaatccc

SEQ ID NO: 872760 - DNA, 15 bp, Homo sapiens
gcatgcctgtaatcc

SEQ ID NO: 872761 - DNA, 15 bp, Homo sapiens
ggcatgcctgtaatc

SEQ ID NO: 872762 - DNA, 15 bp, Homo sapiens
gggcatgcctgtaat

SEQ ID NO: 872763 - DNA, 15 bp, Homo sapiens
ggggcatgcctgtaa

SEQ ID NO: 872764 - DNA, 15 bp, Homo sapiens
tggggcatgcctgta

SEQ ID NO: 872765 - DNA, 15 bp, Homo sapiens
gtggggcatgcctgt

SEQ ID NO: 872766 - DNA, 15 bp, Homo sapiens
ggtggggcatgcctg

SEQ ID NO: 872767 - DNA, 15 bp, Homo sapiens
tggtggggcatgcct

SEQ ID NO: 872768 - DNA, 15 bp, Homo sapiens
gtggtggggcatgcc

SEQ ID NO: 872769 - DNA, 15 bp, Homo sapiens
cgtggtggggcatgc

SEQ ID NO: 872770 - DNA, 15 bp, Homo sapiens
gcgtggtggggcatg

SEQ ID NO: 872771 - DNA, 15 bp, Homo sapiens
ggcgtggtggggcat

SEQ ID NO: 872772 - DNA, 15 bp, Homo sapiens
aggcgtggtggggca

SEQ ID NO: 872773 - DNA, 15 bp, Homo sapiens
caggcgtggtggggc

SEQ ID NO: 872774 - DNA, 15 bp, Homo sapiens
ccaggcgtggtgggg

SEQ ID NO: 872775 - DNA, 15 bp, Homo sapiens
gccaggcgtggtggg

SEQ ID NO: 872776 - DNA, 15 bp, Homo sapiens
agccaggcgtggtgg

SEQ ID NO: 872777 - DNA, 15 bp, Homo sapiens
tagccaggcgtggtg

SEQ ID NO: 872778 - DNA, 15 bp, Homo sapiens
ttagccaggcgtggt

SEQ ID NO: 872779 - DNA, 15 bp, Homo sapiens
attagccaggcgtgg

SEQ ID NO: 872780 - DNA, 15 bp, Homo sapiens
aattagccaggcgtg

SEQ ID NO: 872781 - DNA, 15 bp, Homo sapiens
aaattagccaggcgt

SEQ ID NO: 872782 - DNA, 15 bp, Homo sapiens
aaaattagccaggcg

SEQ ID NO: 872783 - DNA, 15 bp, Homo sapiens
gaaaatacaaaaatt

SEQ ID NO: 872784 - DNA, 15 bp, Homo sapiens
ggaaaatacaaaaat

SEQ ID NO: 872785 - DNA, 15 bp, Homo sapiens
tggaaaatacaaaaa

SEQ ID NO: 872786 - DNA, 15 bp, Homo sapiens
atggaaaatacaaaa

SEQ ID NO: 872787 - DNA, 15 bp, Homo sapiens
tatggaaaatacaaa

SEQ ID NO: 872788 - DNA, 15 bp, Homo sapiens
ctatggaaaatacaa

SEQ ID NO: 872789 - DNA, 15 bp, Homo sapiens
tctatggaaaataca

SEQ ID NO: 872790 - DNA, 15 bp, Homo sapiens
ctctatggaaaatac

SEQ ID NO: 872791 - DNA, 15 bp, Homo sapiens
tctctatggaaaata

SEQ ID NO: 872792 - DNA, 15 bp, Homo sapiens
gtctctatggaaaat

SEQ ID NO: 872793 - DNA, 15 bp, Homo sapiens
cgtctctatggaaaa

SEQ ID NO: 872794 - DNA, 15 bp, Homo sapiens
ccgtctctatggaaa

SEQ ID NO: 872795 - DNA, 15 bp, Homo sapiens
cccgtctctatggaa

SEQ ID NO: 872796 - DNA, 15 bp, Homo sapiens
tcccgtctctatgga

SEQ ID NO: 872797 - DNA, 15 bp, Homo sapiens
atcccgtctctatgg

SEQ ID NO: 872798 - DNA, 15 bp, Homo sapiens
aatcccgtctctatg

SEQ ID NO: 872799 - DNA, 15 bp, Homo sapiens
aaatcccgtctctat

SEQ ID NO: 872800 - DNA, 15 bp, Homo sapiens
gaaatcccgtctcta

SEQ ID NO: 872801 - DNA, 15 bp, Homo sapiens
tgaaatcccgtctct

SEQ ID NO: 872802 - DNA, 15 bp, Homo sapiens
gtgaaatcccgtctc

SEQ ID NO: 872803 - DNA, 15 bp, Homo sapiens
ggtgaaatcccgtct

SEQ ID NO: 872804 - DNA, 15 bp, Homo sapiens
tggtgaaatcccgtc

SEQ ID NO: 872805 - DNA, 15 bp, Homo sapiens
atggtgaaatcccgt

SEQ ID NO: 872806 - DNA, 15 bp, Homo sapiens
catggtgaaatcccg

SEQ ID NO: 872807 - DNA, 15 bp, Homo sapiens
acatggtgaaatccc

SEQ ID NO: 872808 - DNA, 15 bp, Homo sapiens
aacatggtgaaatcc

SEQ ID NO: 872809 - DNA, 15 bp, Homo sapiens
aaacatggtgaaatc

SEQ ID NO: 872810 - DNA, 15 bp, Homo sapiens
caaacatggtgaaat

SEQ ID NO: 872811 - DNA, 15 bp, Homo sapiens
acaaacatggtgaaa

SEQ ID NO: 872812 - DNA, 15 bp, Homo sapiens
gacaaacatggtgaa

SEQ ID NO: 872813 - DNA, 15 bp, Homo sapiens
tgacaaacatggtga

SEQ ID NO: 872814 - DNA, 15 bp, Homo sapiens
ttgacaaacatggtg

SEQ ID NO: 872815 - DNA, 15 bp, Homo sapiens
cttgacaaacatggt

SEQ ID NO: 872816 - DNA, 15 bp, Homo sapiens
gcttgacaaacatgg

SEQ ID NO: 872817 - DNA, 15 bp, Homo sapiens
agcttgacaaacatg

SEQ ID NO: 872818 - DNA, 15 bp, Homo sapiens
cagcttgacaaacat

SEQ ID NO: 872819 - DNA, 15 bp, Homo sapiens
ccagcttgacaaaca

SEQ ID NO: 872820 - DNA, 15 bp, Homo sapiens
accagcttgacaaac

SEQ ID NO: 872821 - DNA, 15 bp, Homo sapiens
gaccagcttgacaaa

SEQ ID NO: 872822 - DNA, 15 bp, Homo sapiens
agaccagcttgacaa

SEQ ID NO: 872823 - DNA, 15 bp, Homo sapiens
gagaccagcttgaca

SEQ ID NO: 872824 - DNA, 15 bp, Homo sapiens
tgagaccagcttgac

SEQ ID NO: 872825 - DNA, 15 bp, Homo sapiens
ttgagaccagcttga

SEQ ID NO: 872826 - DNA, 15 bp, Homo sapiens
tttgagaccagcttg

SEQ ID NO: 872827 - DNA, 15 bp, Homo sapiens
gtttgagaccagctt

SEQ ID NO: 872828 - DNA, 15 bp, Homo sapiens
agtttgagaccagct

SEQ ID NO: 872829 - DNA, 15 bp, Homo sapiens
gagtttgagaccagc

SEQ ID NO: 872830 - DNA, 15 bp, Homo sapiens
agagtttgagaccag

SEQ ID NO: 872831 - DNA, 15 bp, Homo sapiens
gagagtttgagacca

SEQ ID NO: 872832 - DNA, 15 bp, Homo sapiens
cgagagtttgagacc

SEQ ID NO: 872833 - DNA, 15 bp, Homo sapiens
tcgagagtttgagac

SEQ ID NO: 872834 - DNA, 15 bp, Homo sapiens
gtcgagagtttgaga

SEQ ID NO: 872835 - DNA, 15 bp, Homo sapiens
ggtcgagagtttgag

SEQ ID NO: 872836 - DNA, 15 bp, Homo sapiens
aggtcgagagtttga

SEQ ID NO: 872837 - DNA, 15 bp, Homo sapiens
gaggtcgagagtttg

SEQ ID NO: 872838 - DNA, 15 bp, Homo sapiens
tgaggtcgagagttt

SEQ ID NO: 872839 - DNA, 15 bp, Homo sapiens
ctgaggtcgagagtt

SEQ ID NO: 872840 - DNA, 15 bp, Homo sapiens
cctgaggtcgagagt

SEQ ID NO: 872841 - DNA, 15 bp, Homo sapiens
acctgaggtcgagag

SEQ ID NO: 872842 - DNA, 15 bp, Homo sapiens
cacctgaggtcgaga

SEQ ID NO: 872843 - DNA, 15 bp, Homo sapiens
tcacctgaggtcgag

SEQ ID NO: 872844 - DNA, 15 bp, Homo sapiens
ttcacctgaggtcga

SEQ ID NO: 872845 - DNA, 15 bp, Homo sapiens
gttcacctgaggtcg

SEQ ID NO: 872846 - DNA, 15 bp, Homo sapiens
ggttcacctgaggtc

SEQ ID NO: 872847 - DNA, 15 bp, Homo sapiens
tggttcacctgaggt

SEQ ID NO: 872848 - DNA, 15 bp, Homo sapiens
gtggttcacctgagg

SEQ ID NO: 872849 - DNA, 15 bp, Homo sapiens
ggtggttcacctgag

SEQ ID NO: 872850 - DNA, 15 bp, Homo sapiens
gggtggttcacctga

SEQ ID NO: 872851 - DNA, 15 bp, Homo sapiens
cgggtggttcacctg

SEQ ID NO: 872852 - DNA, 15 bp, Homo sapiens
gcgggtggttcacct

SEQ ID NO: 872853 - DNA, 15 bp, Homo sapiens
ggcgggtggttcacc

SEQ ID NO: 872854 - DNA, 15 bp, Homo sapiens
aggcgggtggttcac

SEQ ID NO: 872855 - DNA, 15 bp, Homo sapiens
gaggcgggtggttca

SEQ ID NO: 872856 - DNA, 15 bp, Homo sapiens
tgaggcgggtggttc

SEQ ID NO: 872857 - DNA, 15 bp, Homo sapiens
ctgaggcgggtggtt

SEQ ID NO: 872858 - DNA, 15 bp, Homo sapiens
gctgaggcgggtggt

SEQ ID NO: 872859 - DNA, 15 bp, Homo sapiens
ggctgaggcgggtgg

SEQ ID NO: 872860 - DNA, 15 bp, Homo sapiens
aggctgaggcgggtg

SEQ ID NO: 872861 - DNA, 15 bp, Homo sapiens
gaggctgaggcgggt

SEQ ID NO: 872862 - DNA, 15 bp, Homo sapiens
ggaggctgaggcggg

SEQ ID NO: 872863 - DNA, 15 bp, Homo sapiens
gggaggctgaggcgg

SEQ ID NO: 872864 - DNA, 15 bp, Homo sapiens
tgggaggctgaggcg

SEQ ID NO: 872865 - DNA, 15 bp, Homo sapiens
tttgggaggctgagg

SEQ ID NO: 872866 - DNA, 15 bp, Homo sapiens
ctttgggaggctgag

SEQ ID NO: 872867 - DNA, 15 bp, Homo sapiens
actttgggaggctga

SEQ ID NO: 872868 - DNA, 15 bp, Homo sapiens
cactttgggaggctg

SEQ ID NO: 872869 - DNA, 15 bp, Homo sapiens
acactttgggaggct

SEQ ID NO: 872870 - DNA, 15 bp, Homo sapiens
aacactttgggaggc

SEQ ID NO: 872871 - DNA, 15 bp, Homo sapiens
caacactttgggagg

SEQ ID NO: 872872 - DNA, 15 bp, Homo sapiens
ccaacactttgggag

SEQ ID NO: 872873 - DNA, 15 bp, Homo sapiens
cccaacactttggga

SEQ ID NO: 872874 - DNA, 15 bp, Homo sapiens
tcccaacactttggg

SEQ ID NO: 872875 - DNA, 15 bp, Homo sapiens
atcccaacactttgg

SEQ ID NO: 872876 - DNA, 15 bp, Homo sapiens
aatcccaacactttg

SEQ ID NO: 872877 - DNA, 15 bp, Homo sapiens
taatcccaacacttt

SEQ ID NO: 872878 - DNA, 15 bp, Homo sapiens
gtaatcccaacactt

SEQ ID NO: 872879 - DNA, 15 bp, Homo sapiens
tgtaatcccaacact

SEQ ID NO: 872880 - DNA, 15 bp, Homo sapiens
ctgtaatcccaacac

SEQ ID NO: 872881 - DNA, 15 bp, Homo sapiens
cctgtaatcccaaca

SEQ ID NO: 872882 - DNA, 15 bp, Homo sapiens
gcctgtaatcccaac

SEQ ID NO: 872883 - DNA, 15 bp, Homo sapiens
tcatgcctgtaatcc

SEQ ID NO: 872884 - DNA, 15 bp, Homo sapiens
ctcatgcctgtaatc

SEQ ID NO: 872885 - DNA, 15 bp, Homo sapiens
gctcatgcctgtaat

SEQ ID NO: 872886 - DNA, 15 bp, Homo sapiens
ggctcatgcctgtaa

SEQ ID NO: 872887 - DNA, 15 bp, Homo sapiens
tggctcatgcctgta

SEQ ID NO: 872888 - DNA, 15 bp, Homo sapiens
gtggctcatgcctgt

SEQ ID NO: 872889 - DNA, 15 bp, Homo sapiens
agtggctcatgcctg

SEQ ID NO: 872890 - DNA, 15 bp, Homo sapiens
cagtggctcatgcct

SEQ ID NO: 872891 - DNA, 15 bp, Homo sapiens
acagtggctcatgcc

SEQ ID NO: 872892 - DNA, 15 bp, Homo sapiens
cacagtggctcatgc

SEQ ID NO: 872893 - DNA, 15 bp, Homo sapiens
gcacagtggctcatg

SEQ ID NO: 872894 - DNA, 15 bp, Homo sapiens
ggcacagtggctcat

SEQ ID NO: 872895 - DNA, 15 bp, Homo sapiens
aggcacagtggctca

SEQ ID NO: 872896 - DNA, 15 bp, Homo sapiens
caggcacagtggctc

SEQ ID NO: 872897 - DNA, 15 bp, Homo sapiens
ccaggcacagtggct

SEQ ID NO: 872898 - DNA, 15 bp, Homo sapiens
gccaggcacagtggc

SEQ ID NO: 872899 - DNA, 15 bp, Homo sapiens
ggccaggcacagtgg

SEQ ID NO: 872900 - DNA, 15 bp, Homo sapiens
aggccaggcacagtg

SEQ ID NO: 872901 - DNA, 15 bp, Homo sapiens
aaggccaggcacagt

SEQ ID NO: 872902 - DNA, 15 bp, Homo sapiens
taaggccaggcacag

SEQ ID NO: 872903 - DNA, 15 bp, Homo sapiens
ttaaggccaggcaca

SEQ ID NO: 872904 - DNA, 15 bp, Homo sapiens
attaaggccaggcac

SEQ ID NO: 872905 - DNA, 15 bp, Homo sapiens
tattaaggccaggca

SEQ ID NO: 872906 - DNA, 15 bp, Homo sapiens
ctattaaggccaggc

SEQ ID NO: 872907 - DNA, 15 bp, Homo sapiens
tctattaaggccagg

SEQ ID NO: 872908 - DNA, 15 bp, Homo sapiens
gtctattaaggccag

SEQ ID NO: 872909 - DNA, 15 bp, Homo sapiens
agtctattaaggcca

SEQ ID NO: 872910 - DNA, 15 bp, Homo sapiens
aagtctattaaggcc

SEQ ID NO: 872911 - DNA, 15 bp, Homo sapiens
aaagtctattaaggc

SEQ ID NO: 872912 - DNA, 15 bp, Homo sapiens
aaaagtctattaagg

SEQ ID NO: 872913 - DNA, 15 bp, Homo sapiens
aaaaagtctattaag

SEQ ID NO: 872914 - DNA, 15 bp, Homo sapiens
ttaaaaagtctatta

SEQ ID NO: 872915 - DNA, 15 bp, Homo sapiens
tttaaaaagtctatt

SEQ ID NO: 872916 - DNA, 15 bp, Homo sapiens
ttttaaaaagtctat

SEQ ID NO: 872917 - DNA, 15 bp, Homo sapiens
cttttaaaaagtcta

SEQ ID NO: 872918 - DNA, 15 bp, Homo sapiens
tcttttaaaaagtct

SEQ ID NO: 872919 - DNA, 15 bp, Homo sapiens
ctcttttaaaaagtc

SEQ ID NO: 872920 - DNA, 15 bp, Homo sapiens
gctcttttaaaaagt

SEQ ID NO: 872921 - DNA, 15 bp, Homo sapiens
tgctcttttaaaaag

SEQ ID NO: 872922 - DNA, 15 bp, Homo sapiens
ctgctcttttaaaaa

SEQ ID NO: 872923 - DNA, 15 bp, Homo sapiens
actgctcttttaaaa

SEQ ID NO: 872924 - DNA, 15 bp, Homo sapiens
tactgctcttttaaa

SEQ ID NO: 872925 - DNA, 15 bp, Homo sapiens
atactgctcttttaa

SEQ ID NO: 872926 - DNA, 15 bp, Homo sapiens
aatactgctctttta

SEQ ID NO: 872927 - DNA, 15 bp, Homo sapiens
taatactgctctttt

SEQ ID NO: 872928 - DNA, 15 bp, Homo sapiens
ctaatactgctcttt

SEQ ID NO: 872929 - DNA, 15 bp, Homo sapiens
cctaatactgctctt

SEQ ID NO: 872930 - DNA, 15 bp, Homo sapiens
acctaatactgctct

SEQ ID NO: 872931 - DNA, 15 bp, Homo sapiens
aacctaatactgctc

SEQ ID NO: 872932 - DNA, 15 bp, Homo sapiens
aaacctaatactgct

SEQ ID NO: 872933 - DNA, 15 bp, Homo sapiens
taaacctaatactgc

SEQ ID NO: 872934 - DNA, 15 bp, Homo sapiens
gtaaacctaatactg

SEQ ID NO: 872935 - DNA, 15 bp, Homo sapiens
tgtaaacctaatact

SEQ ID NO: 872936 - DNA, 15 bp, Homo sapiens
ctgtaaacctaatac

SEQ ID NO: 872937 - DNA, 15 bp, Homo sapiens
tctgtaaacctaata

SEQ ID NO: 872938 - DNA, 15 bp, Homo sapiens
ttctgtaaacctaat

SEQ ID NO: 872939 - DNA, 15 bp, Homo sapiens
tttctgtaaacctaa

SEQ ID NO: 872940 - DNA, 15 bp, Homo sapiens
ttttctgtaaaccta

SEQ ID NO: 872941 - DNA, 15 bp, Homo sapiens
tttttctgtaaacct

SEQ ID NO: 872942 - DNA, 15 bp, Homo sapiens
gtttttctgtaaacc

SEQ ID NO: 872943 - DNA, 15 bp, Homo sapiens
agtttttctgtaaac

SEQ ID NO: 872944 - DNA, 15 bp, Homo sapiens
cagtttttctgtaaa

SEQ ID NO: 872945 - DNA, 15 bp, Homo sapiens
gcagtttttctgtaa

SEQ ID NO: 872946 - DNA, 15 bp, Homo sapiens
tgcagtttttctgta

SEQ ID NO: 872947 - DNA, 15 bp, Homo sapiens
gtgcagtttttctgt

SEQ ID NO: 872948 - DNA, 15 bp, Homo sapiens
tgtgcagtttttctg

SEQ ID NO: 872949 - DNA, 15 bp, Homo sapiens
ctgtgcagtttttct

SEQ ID NO: 872950 - DNA, 15 bp, Homo sapiens
tctgtgcagtttttc

SEQ ID NO: 872951 - DNA, 15 bp, Homo sapiens
ttctgtgcagttttt

SEQ ID NO: 872952 - DNA, 15 bp, Homo sapiens
tttctgtgcagtttt

SEQ ID NO: 872953 - DNA, 15 bp, Homo sapiens
ctttctgtgcagttt

SEQ ID NO: 872954 - DNA, 15 bp, Homo sapiens
actttctgtgcagtt

SEQ ID NO: 872955 - DNA, 15 bp, Homo sapiens
tactttctgtgcagt

SEQ ID NO: 872956 - DNA, 15 bp, Homo sapiens
gtactttctgtgcag

SEQ ID NO: 872957 - DNA, 15 bp, Homo sapiens
tgtactttctgtgca

SEQ ID NO: 872958 - DNA, 15 bp, Homo sapiens
ctgtactttctgtgc

SEQ ID NO: 872959 - DNA, 15 bp, Homo sapiens
tctgtactttctgtg

SEQ ID NO: 872960 - DNA, 15 bp, Homo sapiens
ctctgtactttctgt

SEQ ID NO: 872961 - DNA, 15 bp, Homo sapiens
tctctgtactttctg

SEQ ID NO: 872962 - DNA, 15 bp, Homo sapiens
ctctctgtactttct

SEQ ID NO: 872963 - DNA, 15 bp, Homo sapiens
actctctgtactttc

SEQ ID NO: 872964 - DNA, 15 bp, Homo sapiens
aactctctgtacttt

SEQ ID NO: 872965 - DNA, 15 bp, Homo sapiens
gaactctctgtactt

SEQ ID NO: 872966 - DNA, 15 bp, Homo sapiens
ggaactctctgtact

SEQ ID NO: 872967 - DNA, 15 bp, Homo sapiens
gggaactctctgtac

SEQ ID NO: 872968 - DNA, 15 bp, Homo sapiens
tgggaactctctgta

SEQ ID NO: 872969 - DNA, 15 bp, Homo sapiens
ctgggaactctctgt

SEQ ID NO: 872970 - DNA, 15 bp, Homo sapiens
cctgggaactctctg

SEQ ID NO: 872971 - DNA, 15 bp, Homo sapiens
acctgggaactctct

SEQ ID NO: 872972 - DNA, 15 bp, Homo sapiens
gacctgggaactctc

SEQ ID NO: 872973 - DNA, 15 bp, Homo sapiens
agacctgggaactct

SEQ ID NO: 872974 - DNA, 15 bp, Homo sapiens
aagacctgggaactc

SEQ ID NO: 872975 - DNA, 15 bp, Homo sapiens
aaagacctgggaact

SEQ ID NO: 872976 - DNA, 15 bp, Homo sapiens
gaaagacctgggaac

SEQ ID NO: 872977 - DNA, 15 bp, Homo sapiens
tgaaagacctgggaa

SEQ ID NO: 872978 - DNA, 15 bp, Homo sapiens
atgaaagacctggga

SEQ ID NO: 872979 - DNA, 15 bp, Homo sapiens
gatgaaagacctggg

SEQ ID NO: 872980 - DNA, 15 bp, Homo sapiens
ggatgaaagacctgg

SEQ ID NO: 872981 - DNA, 15 bp, Homo sapiens
gggatgaaagacctg

SEQ ID NO: 872982 - DNA, 15 bp, Homo sapiens
agggatgaaagacct

SEQ ID NO: 872983 - DNA, 15 bp, Homo sapiens
tagggatgaaagacc

SEQ ID NO: 872984 - DNA, 15 bp, Homo sapiens
gtagggatgaaagac

SEQ ID NO: 872985 - DNA, 15 bp, Homo sapiens
ggtagggatgaaaga

SEQ ID NO: 872986 - DNA, 15 bp, Homo sapiens
aggtagggatgaaag

SEQ ID NO: 872987 - DNA, 15 bp, Homo sapiens
gaggtagggatgaaa

SEQ ID NO: 872988 - DNA, 15 bp, Homo sapiens
tgaggtagggatgaa

SEQ ID NO: 872989 - DNA, 15 bp, Homo sapiens
ctgaggtagggatga

SEQ ID NO: 872990 - DNA, 15 bp, Homo sapiens
actgaggtagggatg

SEQ ID NO: 872991 - DNA, 15 bp, Homo sapiens
aactgaggtagggat

SEQ ID NO: 872992 - DNA, 15 bp, Homo sapiens
aaactgaggtaggga

SEQ ID NO: 872993 - DNA, 15 bp, Homo sapiens
gaaactgaggtaggg

SEQ ID NO: 872994 - DNA, 15 bp, Homo sapiens
agaaactgaggtagg

SEQ ID NO: 872995 - DNA, 15 bp, Homo sapiens
aagaaactgaggtag

SEQ ID NO: 872996 - DNA, 15 bp, Homo sapiens
gaagaaactgaggta

SEQ ID NO: 872997 - DNA, 15 bp, Homo sapiens
agaagaaactgaggt

SEQ ID NO: 872998 - DNA, 15 bp, Homo sapiens
tagaagaaactgagg

SEQ ID NO: 872999 - DNA, 15 bp, Homo sapiens
atagaagaaactgag

SEQ ID NO: 873000 - DNA, 15 bp, Homo sapiens
aatagaagaaactga

SEQ ID NO: 873001 - DNA, 15 bp, Homo sapiens
taatagaagaaactg

SEQ ID NO: 873002 - DNA, 15 bp, Homo sapiens
ttaatagaagaaact

SEQ ID NO: 873003 - DNA, 15 bp, Homo sapiens
gttaatagaagaaac

SEQ ID NO: 873004 - DNA, 15 bp, Homo sapiens
tgttaatagaagaaa

SEQ ID NO: 873005 - DNA, 15 bp, Homo sapiens
atgttaatagaagaa

SEQ ID NO: 873006 - DNA, 15 bp, Homo sapiens
gatgttaatagaaga

SEQ ID NO: 873007 - DNA, 15 bp, Homo sapiens
agatgttaatagaag

SEQ ID NO: 873008 - DNA, 15 bp, Homo sapiens
aagatgttaatagaa

SEQ ID NO: 873009 - DNA, 15 bp, Homo sapiens
caagatgttaataga

SEQ ID NO: 873010 - DNA, 15 bp, Homo sapiens
gcaagatgttaatag

SEQ ID NO: 873011 - DNA, 15 bp, Homo sapiens
tgcaagatgttaata

SEQ ID NO: 873012 - DNA, 15 bp, Homo sapiens
atgcaagatgttaat

SEQ ID NO: 873013 - DNA, 15 bp, Homo sapiens
aatgcaagatgttaa

SEQ ID NO: 873014 - DNA, 15 bp, Homo sapiens
aaatgcaagatgtta

SEQ ID NO: 873015 - DNA, 15 bp, Homo sapiens
caaatgcaagatgtt

SEQ ID NO: 873016 - DNA, 15 bp, Homo sapiens
acaaatgcaagatgt

SEQ ID NO: 873017 - DNA, 15 bp, Homo sapiens
cacaaatgcaagatg

SEQ ID NO: 873018 - DNA, 15 bp, Homo sapiens
acacaaatgcaagat

SEQ ID NO: 873019 - DNA, 15 bp, Homo sapiens
cacacaaatgcaaga

SEQ ID NO: 873020 - DNA, 15 bp, Homo sapiens
ccacacaaatgcaag

SEQ ID NO: 873021 - DNA, 15 bp, Homo sapiens
accacacaaatgcaa

SEQ ID NO: 873022 - DNA, 15 bp, Homo sapiens
taccacacaaatgca

SEQ ID NO: 873023 - DNA, 15 bp, Homo sapiens
ataccacacaaatgc

SEQ ID NO: 873024 - DNA, 15 bp, Homo sapiens
aataccacacaaatg

SEQ ID NO: 873025 - DNA, 15 bp, Homo sapiens
aaataccacacaaat

SEQ ID NO: 873026 - DNA, 15 bp, Homo sapiens
aaaataccacacaaa

SEQ ID NO: 873027 - DNA, 15 bp, Homo sapiens
aaaaataccacacaa

SEQ ID NO: 873028 - DNA, 15 bp, Homo sapiens
aaaaaataccacaca

SEQ ID NO: 873029 - DNA, 15 bp, Homo sapiens
aaaaaaataccacac

SEQ ID NO: 873030 - DNA, 15 bp, Homo sapiens
aaaaaaaataccaca

SEQ ID NO: 873031 - DNA, 15 bp, Homo sapiens
aaaaaaaaataccac

SEQ ID NO: 873032 - DNA, 15 bp, Homo sapiens
taaaaaaaaatacca

SEQ ID NO: 873033 - DNA, 15 bp, Homo sapiens
ctaaaaaaaaatacc

SEQ ID NO: 873034 - DNA, 15 bp, Homo sapiens
tctaaaaaaaaatac

SEQ ID NO: 873035 - DNA, 15 bp, Homo sapiens
ttctaaaaaaaaata

SEQ ID NO: 873036 - DNA, 15 bp, Homo sapiens
gttctaaaaaaaaat

SEQ ID NO: 873037 - DNA, 15 bp, Homo sapiens
agttctaaaaaaaaa

SEQ ID NO: 873038 - DNA, 15 bp, Homo sapiens
cagttctaaaaaaaa

SEQ ID NO: 873039 - DNA, 15 bp, Homo sapiens
tcagttctaaaaaaa

SEQ ID NO: 873040 - DNA, 15 bp, Homo sapiens
atcagttctaaaaaa

SEQ ID NO: 873041 - DNA, 15 bp, Homo sapiens
catcagttctaaaaa

SEQ ID NO: 873042 - DNA, 15 bp, Homo sapiens
tcatcagttctaaaa

SEQ ID NO: 873043 - DNA, 15 bp, Homo sapiens
ctcatcagttctaaa

SEQ ID NO: 873044 - DNA, 15 bp, Homo sapiens
gctcatcagttctaa

SEQ ID NO: 873045 - DNA, 15 bp, Homo sapiens
ggctcatcagttcta

SEQ ID NO: 873046 - DNA, 15 bp, Homo sapiens
cggctcatcagttct

SEQ ID NO: 873047 - DNA, 15 bp, Homo sapiens
tcggctcatcagttc

SEQ ID NO: 873048 - DNA, 15 bp, Homo sapiens
atcggctcatcagtt

SEQ ID NO: 873049 - DNA, 15 bp, Homo sapiens
tatcggctcatcagt

SEQ ID NO: 873050 - DNA, 15 bp, Homo sapiens
atatcggctcatcag

SEQ ID NO: 873051 - DNA, 15 bp, Homo sapiens
aatatcggctcatca

SEQ ID NO: 873052 - DNA, 15 bp, Homo sapiens
caatatcggctcatc

SEQ ID NO: 873053 - DNA, 15 bp, Homo sapiens
tcaatatcggctcat

SEQ ID NO: 873054 - DNA, 15 bp, Homo sapiens
atcaatatcggctca

SEQ ID NO: 873055 - DNA, 15 bp, Homo sapiens
tatcaatatcggctc

SEQ ID NO: 873056 - DNA, 15 bp, Homo sapiens
atatcaatatcggct

SEQ ID NO: 873057 - DNA, 15 bp, Homo sapiens
tatatcaatatcggc

SEQ ID NO: 873058 - DNA, 15 bp, Homo sapiens
atatatcaatatcgg

SEQ ID NO: 873059 - DNA, 15 bp, Homo sapiens
aatatatcaatatcg

SEQ ID NO: 873060 - DNA, 15 bp, Homo sapiens
taatatatcaatatc

SEQ ID NO: 873061 - DNA, 15 bp, Homo sapiens
ataatatatcaatat

SEQ ID NO: 873062 - DNA, 15 bp, Homo sapiens
gataatatatcaata

SEQ ID NO: 873063 - DNA, 15 bp, Homo sapiens
tgataatatatcaat

SEQ ID NO: 873064 - DNA, 15 bp, Homo sapiens
gtgataatatatcaa

SEQ ID NO: 873065 - DNA, 15 bp, Homo sapiens
agtgataatatatca

SEQ ID NO: 873066 - DNA, 15 bp, Homo sapiens
tagtgataatatatc

SEQ ID NO: 873067 - DNA, 15 bp, Homo sapiens
ttagtgataatatat

SEQ ID NO: 873068 - DNA, 15 bp, Homo sapiens
attagtgataatata

SEQ ID NO: 873069 - DNA, 15 bp, Homo sapiens
aattagtgataatat

SEQ ID NO: 873070 - DNA, 15 bp, Homo sapiens
caattagtgataata

SEQ ID NO: 873071 - DNA, 15 bp, Homo sapiens
tcaattagtgataat

SEQ ID NO: 873072 - DNA, 15 bp, Homo sapiens
ttcaattagtgataa

SEQ ID NO: 873073 - DNA, 15 bp, Homo sapiens
cttcaattagtgata

SEQ ID NO: 873074 - DNA, 15 bp, Homo sapiens
acttcaattagtgat

SEQ ID NO: 873075 - DNA, 15 bp, Homo sapiens
gacttcaattagtga

SEQ ID NO: 873076 - DNA, 15 bp, Homo sapiens
ggacttcaattagtg

SEQ ID NO: 873077 - DNA, 15 bp, Homo sapiens
tggacttcaattagt

SEQ ID NO: 873078 - DNA, 15 bp, Homo sapiens
atggacttcaattag

SEQ ID NO: 873079 - DNA, 15 bp, Homo sapiens
tatggacttcaatta

SEQ ID NO: 873080 - DNA, 15 bp, Homo sapiens
ctatggacttcaatt

SEQ ID NO: 873081 - DNA, 15 bp, Homo sapiens
actatggacttcaat

SEQ ID NO: 873082 - DNA, 15 bp, Homo sapiens
aactatggacttcaa

SEQ ID NO: 873083 - DNA, 15 bp, Homo sapiens
aaactatggacttca

SEQ ID NO: 873084 - DNA, 15 bp, Homo sapiens
taaactatggacttc

SEQ ID NO: 873085 - DNA, 15 bp, Homo sapiens
ataaactatggactt

SEQ ID NO: 873086 - DNA, 15 bp, Homo sapiens
tataaactatggact

SEQ ID NO: 873087 - DNA, 15 bp, Homo sapiens
atataaactatggac

SEQ ID NO: 873088 - DNA, 15 bp, Homo sapiens
aatataaactatgga

SEQ ID NO: 873089 - DNA, 15 bp, Homo sapiens
gaatataaactatgg

SEQ ID NO: 873090 - DNA, 15 bp, Homo sapiens
cgaatataaactatg

SEQ ID NO: 873091 - DNA, 15 bp, Homo sapiens
ccgaatataaactat

SEQ ID NO: 873092 - DNA, 15 bp, Homo sapiens
cccgaatataaacta

SEQ ID NO: 873093 - DNA, 15 bp, Homo sapiens
tcccgaatataaact

SEQ ID NO: 873094 - DNA, 15 bp, Homo sapiens
atcccgaatataaac

SEQ ID NO: 873095 - DNA, 15 bp, Homo sapiens
gatcccgaatataaa

SEQ ID NO: 873096 - DNA, 15 bp, Homo sapiens
tgatcccgaatataa

SEQ ID NO: 873097 - DNA, 15 bp, Homo sapiens
atgatcccgaatata

SEQ ID NO: 873098 - DNA, 15 bp, Homo sapiens
catgatcccgaatat

SEQ ID NO: 873099 - DNA, 15 bp, Homo sapiens
gcatgatcccgaata

SEQ ID NO: 873100 - DNA, 15 bp, Homo sapiens
agcatgatcccgaat

SEQ ID NO: 873101 - DNA, 15 bp, Homo sapiens
aagcatgatcccgaa

SEQ ID NO: 873102 - DNA, 15 bp, Homo sapiens
aaagcatgatcccga

SEQ ID NO: 873103 - DNA, 15 bp, Homo sapiens
caaagcatgatcccg

SEQ ID NO: 873104 - DNA, 15 bp, Homo sapiens
acaaagcatgatccc

SEQ ID NO: 873105 - DNA, 15 bp, Homo sapiens
tacaaagcatgatcc

SEQ ID NO: 873106 - DNA, 15 bp, Homo sapiens
atacaaagcatgatc

SEQ ID NO: 873107 - DNA, 15 bp, Homo sapiens
aatacaaagcatgat

SEQ ID NO: 873108 - DNA, 15 bp, Homo sapiens
aaatacaaagcatga

SEQ ID NO: 873109 - DNA, 15 bp, Homo sapiens
aaaatacaaagcatg

SEQ ID NO: 873110 - DNA, 15 bp, Homo sapiens
taaaatacaaagcat

SEQ ID NO: 873111 - DNA, 15 bp, Homo sapiens
gtaaaatacaaagca

SEQ ID NO: 873112 - DNA, 15 bp, Homo sapiens
tgtaaaatacaaagc

SEQ ID NO: 873113 - DNA, 15 bp, Homo sapiens
ctgtaaaatacaaag

SEQ ID NO: 873114 - DNA, 15 bp, Homo sapiens
actgtaaaatacaaa

SEQ ID NO: 873115 - DNA, 15 bp, Homo sapiens
aactgtaaaatacaa

SEQ ID NO: 873116 - DNA, 15 bp, Homo sapiens
aaactgtaaaataca

SEQ ID NO: 873117 - DNA, 15 bp, Homo sapiens
aaaactgtaaaatac

SEQ ID NO: 873118 - DNA, 15 bp, Homo sapiens
taaaactgtaaaata

SEQ ID NO: 873119 - DNA, 15 bp, Homo sapiens
ataaaactgtaaaat

SEQ ID NO: 873120 - DNA, 15 bp, Homo sapiens
aataaaactgtaaaa

SEQ ID NO: 873121 - DNA, 15 bp, Homo sapiens
caataaaactgtaaa

SEQ ID NO: 873122 - DNA, 15 bp, Homo sapiens
ccaataaaactgtaa

SEQ ID NO: 873123 - DNA, 15 bp, Homo sapiens
accaataaaactgta

SEQ ID NO: 873124 - DNA, 15 bp, Homo sapiens
aaccaataaaactgt

SEQ ID NO: 873125 - DNA, 15 bp, Homo sapiens
aaaccaataaaactg

SEQ ID NO: 873126 - DNA, 15 bp, Homo sapiens
aaaaccaataaaact

SEQ ID NO: 873127 - DNA, 15 bp, Homo sapiens
caaaaccaataaaac

SEQ ID NO: 873128 - DNA, 15 bp, Homo sapiens
tcaaaaccaataaaa

SEQ ID NO: 873129 - DNA, 15 bp, Homo sapiens
gtcaaaaccaataaa

SEQ ID NO: 873130 - DNA, 15 bp, Homo sapiens
tgtcaaaaccaataa

SEQ ID NO: 873131 - DNA, 15 bp, Homo sapiens
ttgtcaaaaccaata

SEQ ID NO: 873132 - DNA, 15 bp, Homo sapiens
tttgtcaaaaccaat

SEQ ID NO: 873133 - DNA, 15 bp, Homo sapiens
atttgtcaaaaccaa

SEQ ID NO: 873134 - DNA, 15 bp, Homo sapiens
catttgtcaaaacca

SEQ ID NO: 873135 - DNA, 15 bp, Homo sapiens
gcatttgtcaaaacc

SEQ ID NO: 873136 - DNA, 15 bp, Homo sapiens
cgcatttgtcaaaac

SEQ ID NO: 873137 - DNA, 15 bp, Homo sapiens
acgcatttgtcaaaa

SEQ ID NO: 873138 - DNA, 15 bp, Homo sapiens
tacgcatttgtcaaa

SEQ ID NO: 873139 - DNA, 15 bp, Homo sapiens
ttacgcatttgtcaa

SEQ ID NO: 873140 - DNA, 15 bp, Homo sapiens
attacgcatttgtca

SEQ ID NO: 873141 - DNA, 15 bp, Homo sapiens
cattacgcatttgtc

SEQ ID NO: 873142 - DNA, 15 bp, Homo sapiens
acattacgcatttgt

SEQ ID NO: 873143 - DNA, 15 bp, Homo sapiens
gacattacgcatttg

SEQ ID NO: 873144 - DNA, 15 bp, Homo sapiens
tgacattacgcattt

SEQ ID NO: 873145 - DNA, 15 bp, Homo sapiens
atgacattacgcatt

SEQ ID NO: 873146 - DNA, 15 bp, Homo sapiens
catgacattacgcat

SEQ ID NO: 873147 - DNA, 15 bp, Homo sapiens
acatgacattacgca

SEQ ID NO: 873148 - DNA, 15 bp, Homo sapiens
tacatgacattacgc

SEQ ID NO: 873149 - DNA, 15 bp, Homo sapiens
atacatgacattacg

SEQ ID NO: 873150 - DNA, 15 bp, Homo sapiens
gatacatgacattac

SEQ ID NO: 873151 - DNA, 15 bp, Homo sapiens
agatacatgacatta

SEQ ID NO: 873152 - DNA, 15 bp, Homo sapiens
tagatacatgacatt

SEQ ID NO: 873153 - DNA, 15 bp, Homo sapiens
gtagatacatgacat

SEQ ID NO: 873154 - DNA, 15 bp, Homo sapiens
ggtagatacatgaca

SEQ ID NO: 873155 - DNA, 15 bp, Homo sapiens
tggtagatacatgac

SEQ ID NO: 873156 - DNA, 15 bp, Homo sapiens
atggtagatacatga

SEQ ID NO: 873157 - DNA, 15 bp, Homo sapiens
aatggtagatacatg

SEQ ID NO: 873158 - DNA, 15 bp, Homo sapiens
aaatggtagatacat

SEQ ID NO: 873159 - DNA, 15 bp, Homo sapiens
gaaatggtagataca

SEQ ID NO: 873160 - DNA, 15 bp, Homo sapiens
tgaaatggtagatac

SEQ ID NO: 873161 - DNA, 15 bp, Homo sapiens
ttgaaatggtagata

SEQ ID NO: 873162 - DNA, 15 bp, Homo sapiens
attgaaatggtagat

SEQ ID NO: 873163 - DNA, 15 bp, Homo sapiens
cattgaaatggtaga

SEQ ID NO: 873164 - DNA, 15 bp, Homo sapiens
acattgaaatggtag

SEQ ID NO: 873165 - DNA, 15 bp, Homo sapiens
gacattgaaatggta

SEQ ID NO: 873166 - DNA, 15 bp, Homo sapiens
tgacattgaaatggt

SEQ ID NO: 873167 - DNA, 15 bp, Homo sapiens
atgacattgaaatgg

SEQ ID NO: 873168 - DNA, 15 bp, Homo sapiens
tatgacattgaaatg

SEQ ID NO: 873169 - DNA, 15 bp, Homo sapiens
gtatgacattgaaat

SEQ ID NO: 873170 - DNA, 15 bp, Homo sapiens
tgtatgacattgaaa

SEQ ID NO: 873171 - DNA, 15 bp, Homo sapiens
ctgtatgacattgaa

SEQ ID NO: 873172 - DNA, 15 bp, Homo sapiens
tctgtatgacattga

SEQ ID NO: 873173 - DNA, 15 bp, Homo sapiens
ttctgtatgacattg

SEQ ID NO: 873174 - DNA, 15 bp, Homo sapiens
attctgtatgacatt

SEQ ID NO: 873175 - DNA, 15 bp, Homo sapiens
tattctgtatgacat

SEQ ID NO: 873176 - DNA, 15 bp, Homo sapiens
ctattctgtatgaca

SEQ ID NO: 873177 - DNA, 15 bp, Homo sapiens
actattctgtatgac

SEQ ID NO: 873178 - DNA, 15 bp, Homo sapiens
aactattctgtatga

SEQ ID NO: 873179 - DNA, 15 bp, Homo sapiens
aaactattctgtatg

SEQ ID NO: 873180 - DNA, 15 bp, Homo sapiens
gaaactattctgtat

SEQ ID NO: 873181 - DNA, 15 bp, Homo sapiens
tgaaactattctgta

SEQ ID NO: 873182 - DNA, 15 bp, Homo sapiens
atgaaactattctgt

SEQ ID NO: 873183 - DNA, 15 bp, Homo sapiens
aatgaaactattctg

SEQ ID NO: 873184 - DNA, 15 bp, Homo sapiens
caatgaaactattct

SEQ ID NO: 873185 - DNA, 15 bp, Homo sapiens
gcaatgaaactattc

SEQ ID NO: 873186 - DNA, 15 bp, Homo sapiens
ggcaatgaaactatt

SEQ ID NO: 873187 - DNA, 15 bp, Homo sapiens
gggcaatgaaactat

SEQ ID NO: 873188 - DNA, 15 bp, Homo sapiens
agggcaatgaaacta

SEQ ID NO: 873189 - DNA, 15 bp, Homo sapiens
tagggcaatgaaact

SEQ ID NO: 873190 - DNA, 15 bp, Homo sapiens
ttagggcaatgaaac

SEQ ID NO: 873191 - DNA, 15 bp, Homo sapiens
tttagggcaatgaaa

SEQ ID NO: 873192 - DNA, 15 bp, Homo sapiens
ttttagggcaatgaa

SEQ ID NO: 873193 - DNA, 15 bp, Homo sapiens
tttttagggcaatga

SEQ ID NO: 873194 - DNA, 15 bp, Homo sapiens
ttttttagggcaatg

SEQ ID NO: 873195 - DNA, 15 bp, Homo sapiens
attttttagggcaat

SEQ ID NO: 873196 - DNA, 15 bp, Homo sapiens
cattttttagggcaa

SEQ ID NO: 873197 - DNA, 15 bp, Homo sapiens
gcattttttagggca

SEQ ID NO: 873198 - DNA, 15 bp, Homo sapiens
ggcattttttagggc

SEQ ID NO: 873199 - DNA, 15 bp, Homo sapiens
gggcattttttaggg

SEQ ID NO: 873200 - DNA, 15 bp, Homo sapiens
agggcattttttagg

SEQ ID NO: 873201 - DNA, 15 bp, Homo sapiens
cagggcattttttag

SEQ ID NO: 873202 - DNA, 15 bp, Homo sapiens
acagggcatttttta

SEQ ID NO: 873203 - DNA, 15 bp, Homo sapiens
cacagggcatttttt

SEQ ID NO: 873204 - DNA, 15 bp, Homo sapiens
gcacagggcattttt

SEQ ID NO: 873205 - DNA, 15 bp, Homo sapiens
agcacagggcatttt

SEQ ID NO: 873206 - DNA, 15 bp, Homo sapiens
gagcacagggcattt

SEQ ID NO: 873207 - DNA, 15 bp, Homo sapiens
ggagcacagggcatt

SEQ ID NO: 873208 - DNA, 15 bp, Homo sapiens
tggagcacagggcat

SEQ ID NO: 873209 - DNA, 15 bp, Homo sapiens
ctggagcacagggca

SEQ ID NO: 873210 - DNA, 15 bp, Homo sapiens
gctggagcacagggc

SEQ ID NO: 873211 - DNA, 15 bp, Homo sapiens
agctggagcacaggg

SEQ ID NO: 873212 - DNA, 15 bp, Homo sapiens
tagctggagcacagg

SEQ ID NO: 873213 - DNA, 15 bp, Homo sapiens
atagctggagcacag

SEQ ID NO: 873214 - DNA, 15 bp, Homo sapiens
aatagctggagcaca

SEQ ID NO: 873215 - DNA, 15 bp, Homo sapiens
gaatagctggagcac

SEQ ID NO: 873216 - DNA, 15 bp, Homo sapiens
tgaatagctggagca

SEQ ID NO: 873217 - DNA, 15 bp, Homo sapiens
atgaatagctggagc

SEQ ID NO: 873218 - DNA, 15 bp, Homo sapiens
aatgaatagctggag

SEQ ID NO: 873219 - DNA, 15 bp, Homo sapiens
gaatgaatagctgga

SEQ ID NO: 873220 - DNA, 15 bp, Homo sapiens
ggaatgaatagctgg

SEQ ID NO: 873221 - DNA, 15 bp, Homo sapiens
aggaatgaatagctg

SEQ ID NO: 873222 - DNA, 15 bp, Homo sapiens
aaggaatgaatagct

SEQ ID NO: 873223 - DNA, 15 bp, Homo sapiens
gaaggaatgaatagc

SEQ ID NO: 873224 - DNA, 15 bp, Homo sapiens
agaaggaatgaatag

SEQ ID NO: 873225 - DNA, 15 bp, Homo sapiens
aagaaggaatgaata

SEQ ID NO: 873226 - DNA, 15 bp, Homo sapiens
gaagaaggaatgaat

SEQ ID NO: 873227 - DNA, 15 bp, Homo sapiens
agaagaaggaatgaa

SEQ ID NO: 873228 - DNA, 15 bp, Homo sapiens
aagaagaaggaatga

SEQ ID NO: 873229 - DNA, 15 bp, Homo sapiens
aaagaagaaggaatg

SEQ ID NO: 873230 - DNA, 15 bp, Homo sapiens
taaagaagaaggaat

SEQ ID NO: 873231 - DNA, 15 bp, Homo sapiens
gtaaagaagaaggaa

SEQ ID NO: 873232 - DNA, 15 bp, Homo sapiens
tgtaaagaagaagga

SEQ ID NO: 873233 - DNA, 15 bp, Homo sapiens
ctgtaaagaagaagg

SEQ ID NO: 873234 - DNA, 15 bp, Homo sapiens
tctgtaaagaagaag

SEQ ID NO: 873235 - DNA, 15 bp, Homo sapiens
gtctgtaaagaagaa

SEQ ID NO: 873236 - DNA, 15 bp, Homo sapiens
agtctgtaaagaaga

SEQ ID NO: 873237 - DNA, 15 bp, Homo sapiens
gagtctgtaaagaag

SEQ ID NO: 873238 - DNA, 15 bp, Homo sapiens
ggagtctgtaaagaa

SEQ ID NO: 873239 - DNA, 15 bp, Homo sapiens
aggagtctgtaaaga

SEQ ID NO: 873240 - DNA, 15 bp, Homo sapiens
aaggagtctgtaaag

SEQ ID NO: 873241 - DNA, 15 bp, Homo sapiens
gaaggagtctgtaaa

SEQ ID NO: 873242 - DNA, 15 bp, Homo sapiens
ggaaggagtctgtaa

SEQ ID NO: 873243 - DNA, 15 bp, Homo sapiens
tggaaggagtctgta

SEQ ID NO: 873244 - DNA, 15 bp, Homo sapiens
ctggaaggagtctgt

SEQ ID NO: 873245 - DNA, 15 bp, Homo sapiens
gctggaaggagtctg

SEQ ID NO: 873246 - DNA, 15 bp, Homo sapiens
tgctggaaggagtct

SEQ ID NO: 873247 - DNA, 15 bp, Homo sapiens
ttgctggaaggagtc

SEQ ID NO: 873248 - DNA, 15 bp, Homo sapiens
gttgctggaaggagt

SEQ ID NO: 873249 - DNA, 15 bp, Homo sapiens
ggttgctggaaggag

SEQ ID NO: 873250 - DNA, 15 bp, Homo sapiens
tggttgctggaagga

SEQ ID NO: 873251 - DNA, 15 bp, Homo sapiens
gtggttgctggaagg

SEQ ID NO: 873252 - DNA, 15 bp, Homo sapiens
agtggttgctggaag

SEQ ID NO: 873253 - DNA, 15 bp, Homo sapiens
cagtggttgctggaa

SEQ ID NO: 873254 - DNA, 15 bp, Homo sapiens
gcagtggttgctgga

SEQ ID NO: 873255 - DNA, 15 bp, Homo sapiens
agcagtggttgctgg

SEQ ID NO: 873256 - DNA, 15 bp, Homo sapiens
gagcagtggttgctg

SEQ ID NO: 873257 - DNA, 15 bp, Homo sapiens
agagcagtggttgct

SEQ ID NO: 873258 - DNA, 15 bp, Homo sapiens
aagagcagtggttgc

SEQ ID NO: 873259 - DNA, 15 bp, Homo sapiens
aaagagcagtggttg

SEQ ID NO: 873260 - DNA, 15 bp, Homo sapiens
aaaagagcagtggtt

SEQ ID NO: 873261 - DNA, 15 bp, Homo sapiens
aaaaagagcagtggt

SEQ ID NO: 873262 - DNA, 15 bp, Homo sapiens
caaaaagagcagtgg

SEQ ID NO: 873263 - DNA, 15 bp, Homo sapiens
gcaaaaagagcagtg

SEQ ID NO: 873264 - DNA, 15 bp, Homo sapiens
agcaaaaagagcagt

SEQ ID NO: 873265 - DNA, 15 bp, Homo sapiens
tagcaaaaagagcag

SEQ ID NO: 873266 - DNA, 15 bp, Homo sapiens
ctagcaaaaagagca

SEQ ID NO: 873267 - DNA, 15 bp, Homo sapiens
gctagcaaaaagagc

SEQ ID NO: 873268 - DNA, 15 bp, Homo sapiens
agctagcaaaaagag

SEQ ID NO: 873269 - DNA, 15 bp, Homo sapiens
gagctagcaaaaaga

SEQ ID NO: 873270 - DNA, 15 bp, Homo sapiens
ggagctagcaaaaag

SEQ ID NO: 873271 - DNA, 15 bp, Homo sapiens
tggagctagcaaaaa

SEQ ID NO: 873272 - DNA, 15 bp, Homo sapiens
atggagctagcaaaa

SEQ ID NO: 873273 - DNA, 15 bp, Homo sapiens
tatggagctagcaaa

SEQ ID NO: 873274 - DNA, 15 bp, Homo sapiens
ctatggagctagcaa

SEQ ID NO: 873275 - DNA, 15 bp, Homo sapiens
actatggagctagca

SEQ ID NO: 873276 - DNA, 15 bp, Homo sapiens
aactatggagctagc

SEQ ID NO: 873277 - DNA, 15 bp, Homo sapiens
aaactatggagctag

SEQ ID NO: 873278 - DNA, 15 bp, Homo sapiens
aaaactatggagcta

SEQ ID NO: 873279 - DNA, 15 bp, Homo sapiens
caaaactatggagct

SEQ ID NO: 873280 - DNA, 15 bp, Homo sapiens
gcaaaactatggagc

SEQ ID NO: 873281 - DNA, 15 bp, Homo sapiens
agcaaaactatggag

SEQ ID NO: 873282 - DNA, 15 bp, Homo sapiens
aagcaaaactatgga

SEQ ID NO: 873283 - DNA, 15 bp, Homo sapiens
aaagcaaaactatgg

SEQ ID NO: 873284 - DNA, 15 bp, Homo sapiens
aaaagcaaaactatg

SEQ ID NO: 873285 - DNA, 15 bp, Homo sapiens
aaaaagcaaaactat

SEQ ID NO: 873286 - DNA, 15 bp, Homo sapiens
gaaaaagcaaaacta

SEQ ID NO: 873287 - DNA, 15 bp, Homo sapiens
tgaaaaagcaaaact

SEQ ID NO: 873288 - DNA, 15 bp, Homo sapiens
ttgaaaaagcaaaac

SEQ ID NO: 873289 - DNA, 15 bp, Homo sapiens
cttgaaaaagcaaaa

SEQ ID NO: 873290 - DNA, 15 bp, Homo sapiens
tcttgaaaaagcaaa

SEQ ID NO: 873291 - DNA, 15 bp, Homo sapiens
ttcttgaaaaagcaa

SEQ ID NO: 873292 - DNA, 15 bp, Homo sapiens
attcttgaaaaagca

SEQ ID NO: 873293 - DNA, 15 bp, Homo sapiens
cattcttgaaaaagc

SEQ ID NO: 873294 - DNA, 15 bp, Homo sapiens
acattcttgaaaaag

SEQ ID NO: 873295 - DNA, 15 bp, Homo sapiens
gacattcttgaaaaa

SEQ ID NO: 873296 - DNA, 15 bp, Homo sapiens
tgacattcttgaaaa

SEQ ID NO: 873297 - DNA, 15 bp, Homo sapiens
gtgacattcttgaaa

SEQ ID NO: 873298 - DNA, 15 bp, Homo sapiens
tgtgacattcttgaa

SEQ ID NO: 873299 - DNA, 15 bp, Homo sapiens
atgtgacattcttga

SEQ ID NO: 873300 - DNA, 15 bp, Homo sapiens
tatgtgacattcttg

SEQ ID NO: 873301 - DNA, 15 bp, Homo sapiens
ctatgtgacattctt

SEQ ID NO: 873302 - DNA, 15 bp, Homo sapiens
actatgtgacattct

SEQ ID NO: 873303 - DNA, 15 bp, Homo sapiens
aactatgtgacattc

SEQ ID NO: 873304 - DNA, 15 bp, Homo sapiens
caactatgtgacatt

SEQ ID NO: 873305 - DNA, 15 bp, Homo sapiens
tcaactatgtgacat

SEQ ID NO: 873306 - DNA, 15 bp, Homo sapiens
ttcaactatgtgaca

SEQ ID NO: 873307 - DNA, 15 bp, Homo sapiens
tttcaactatgtgac

SEQ ID NO: 873308 - DNA, 15 bp, Homo sapiens
atttcaactatgtga

SEQ ID NO: 873309 - DNA, 15 bp, Homo sapiens
gatttcaactatgtg

SEQ ID NO: 873310 - DNA, 15 bp, Homo sapiens
tgatttcaactatgt

SEQ ID NO: 873311 - DNA, 15 bp, Homo sapiens
atgatttcaactatg

SEQ ID NO: 873312 - DNA, 15 bp, Homo sapiens
tatgatttcaactat

SEQ ID NO: 873313 - DNA, 15 bp, Homo sapiens
gtatgatttcaacta

SEQ ID NO: 873314 - DNA, 15 bp, Homo sapiens
tgtatgatttcaact

SEQ ID NO: 873315 - DNA, 15 bp, Homo sapiens
ctgtatgatttcaac

SEQ ID NO: 873316 - DNA, 15 bp, Homo sapiens
actgtatgatttcaa

SEQ ID NO: 873317 - DNA, 15 bp, Homo sapiens
tactgtatgatttca

SEQ ID NO: 873318 - DNA, 15 bp, Homo sapiens
atactgtatgatttc

SEQ ID NO: 873319 - DNA, 15 bp, Homo sapiens
catactgtatgattt

SEQ ID NO: 873320 - DNA, 15 bp, Homo sapiens
acatactgtatgatt

SEQ ID NO: 873321 - DNA, 15 bp, Homo sapiens
tacatactgtatgat

SEQ ID NO: 873322 - DNA, 15 bp, Homo sapiens
ctacatactgtatga

SEQ ID NO: 873323 - DNA, 15 bp, Homo sapiens
gctacatactgtatg

SEQ ID NO: 873324 - DNA, 15 bp, Homo sapiens
ggctacatactgtat

SEQ ID NO: 873325 - DNA, 15 bp, Homo sapiens
aggctacatactgta

SEQ ID NO: 873326 - DNA, 15 bp, Homo sapiens
aaggctacatactgt

SEQ ID NO: 873327 - DNA, 15 bp, Homo sapiens
aaaggctacatactg

SEQ ID NO: 873328 - DNA, 15 bp, Homo sapiens
aaaaggctacatact

SEQ ID NO: 873329 - DNA, 15 bp, Homo sapiens
gaaaaggctacatac

SEQ ID NO: 873330 - DNA, 15 bp, Homo sapiens
tgaaaaggctacata

SEQ ID NO: 873331 - DNA, 15 bp, Homo sapiens
ctgaaaaggctacat

SEQ ID NO: 873332 - DNA, 15 bp, Homo sapiens
tctgaaaaggctaca

SEQ ID NO: 873333 - DNA, 15 bp, Homo sapiens
gtctgaaaaggctac

SEQ ID NO: 873334 - DNA, 15 bp, Homo sapiens
agtctgaaaaggcta

SEQ ID NO: 873335 - DNA, 15 bp, Homo sapiens
cagtctgaaaaggct

SEQ ID NO: 873336 - DNA, 15 bp, Homo sapiens
ccagtctgaaaaggc

SEQ ID NO: 873337 - DNA, 15 bp, Homo sapiens
gccagtctgaaaagg

SEQ ID NO: 873338 - DNA, 15 bp, Homo sapiens
agccagtctgaaaag

SEQ ID NO: 873339 - DNA, 15 bp, Homo sapiens
aagccagtctgaaaa

SEQ ID NO: 873340 - DNA, 15 bp, Homo sapiens
gaagccagtctgaaa

SEQ ID NO: 873341 - DNA, 15 bp, Homo sapiens
ggaagccagtctgaa

SEQ ID NO: 873342 - DNA, 15 bp, Homo sapiens
aggaagccagtctga

SEQ ID NO: 873343 - DNA, 15 bp, Homo sapiens
gaggaagccagtctg

SEQ ID NO: 873344 - DNA, 15 bp, Homo sapiens
ggaggaagccagtct

SEQ ID NO: 873345 - DNA, 15 bp, Homo sapiens
tggaggaagccagtc

SEQ ID NO: 873346 - DNA, 15 bp, Homo sapiens
atggaggaagccagt

SEQ ID NO: 873347 - DNA, 15 bp, Homo sapiens
aatggaggaagccag

SEQ ID NO: 873348 - DNA, 15 bp, Homo sapiens
aaatggaggaagcca

SEQ ID NO: 873349 - DNA, 15 bp, Homo sapiens
taaatggaggaagcc

SEQ ID NO: 873350 - DNA, 15 bp, Homo sapiens
ctaaatggaggaagc

SEQ ID NO: 873351 - DNA, 15 bp, Homo sapiens
gctaaatggaggaag

SEQ ID NO: 873352 - DNA, 15 bp, Homo sapiens
tgctaaatggaggaa

SEQ ID NO: 873353 - DNA, 15 bp, Homo sapiens
ttgctaaatggagga

SEQ ID NO: 873354 - DNA, 15 bp, Homo sapiens
attgctaaatggagg

SEQ ID NO: 873355 - DNA, 15 bp, Homo sapiens
tattgctaaatggag

SEQ ID NO: 873356 - DNA, 15 bp, Homo sapiens
gtattgctaaatgga

SEQ ID NO: 873357 - DNA, 15 bp, Homo sapiens
tgtattgctaaatgg

SEQ ID NO: 873358 - DNA, 15 bp, Homo sapiens
atgtattgctaaatg

SEQ ID NO: 873359 - DNA, 15 bp, Homo sapiens
tatgtattgctaaat

SEQ ID NO: 873360 - DNA, 15 bp, Homo sapiens
atatgtattgctaaa

SEQ ID NO: 873361 - DNA, 15 bp, Homo sapiens
aatatgtattgctaa

SEQ ID NO: 873362 - DNA, 15 bp, Homo sapiens
aaatatgtattgcta

SEQ ID NO: 873363 - DNA, 15 bp, Homo sapiens
taaatatgtattgct

SEQ ID NO: 873364 - DNA, 15 bp, Homo sapiens
gtaaatatgtattgc

SEQ ID NO: 873365 - DNA, 15 bp, Homo sapiens
tgtaaatatgtattg

SEQ ID NO: 873366 - DNA, 15 bp, Homo sapiens
ttgtaaatatgtatt

SEQ ID NO: 873367 - DNA, 15 bp, Homo sapiens
tttgtaaatatgtat

SEQ ID NO: 873368 - DNA, 15 bp, Homo sapiens
atttgtaaatatgta

SEQ ID NO: 873369 - DNA, 15 bp, Homo sapiens
gatttgtaaatatgt

SEQ ID NO: 873370 - DNA, 15 bp, Homo sapiens
ggatttgtaaatatg

SEQ ID NO: 873371 - DNA, 15 bp, Homo sapiens
aggatttgtaaatat

SEQ ID NO: 873372 - DNA, 15 bp, Homo sapiens
gaggatttgtaaata

SEQ ID NO: 873373 - DNA, 15 bp, Homo sapiens
ggaggatttgtaaat

SEQ ID NO: 873374 - DNA, 15 bp, Homo sapiens
tggaggatttgtaaa

SEQ ID NO: 873375 - DNA, 15 bp, Homo sapiens
atggaggatttgtaa

SEQ ID NO: 873376 - DNA, 15 bp, Homo sapiens
catggaggatttgta

SEQ ID NO: 873377 - DNA, 15 bp, Homo sapiens
acatggaggatttgt

SEQ ID NO: 873378 - DNA, 15 bp, Homo sapiens
gacatggaggatttg

SEQ ID NO: 873379 - DNA, 15 bp, Homo sapiens
agacatggaggattt

SEQ ID NO: 873380 - DNA, 15 bp, Homo sapiens
aagacatggaggatt

SEQ ID NO: 873381 - DNA, 15 bp, Homo sapiens
aaagacatggaggat

SEQ ID NO: 873382 - DNA, 15 bp, Homo sapiens
gaaagacatggagga

SEQ ID NO: 873383 - DNA, 15 bp, Homo sapiens
agaaagacatggagg

SEQ ID NO: 873384 - DNA, 15 bp, Homo sapiens
cagaaagacatggag

SEQ ID NO: 873385 - DNA, 15 bp, Homo sapiens
acagaaagacatgga

SEQ ID NO: 873386 - DNA, 15 bp, Homo sapiens
cacagaaagacatgg

SEQ ID NO: 873387 - DNA, 15 bp, Homo sapiens
tcacagaaagacatg

SEQ ID NO: 873388 - DNA, 15 bp, Homo sapiens
gtcacagaaagacat

SEQ ID NO: 873389 - DNA, 15 bp, Homo sapiens
agtcacagaaagaca

SEQ ID NO: 873390 - DNA, 15 bp, Homo sapiens
aagtcacagaaagac

SEQ ID NO: 873391 - DNA, 15 bp, Homo sapiens
caagtcacagaaaga

SEQ ID NO: 873392 - DNA, 15 bp, Homo sapiens
tcaagtcacagaaag

SEQ ID NO: 873393 - DNA, 15 bp, Homo sapiens
atcaagtcacagaaa

SEQ ID NO: 873394 - DNA, 15 bp, Homo sapiens
tatcaagtcacagaa

SEQ ID NO: 873395 - DNA, 15 bp, Homo sapiens
ctatcaagtcacaga

SEQ ID NO: 873396 - DNA, 15 bp, Homo sapiens
gctatcaagtcacag

SEQ ID NO: 873397 - DNA, 15 bp, Homo sapiens
agctatcaagtcaca

SEQ ID NO: 873398 - DNA, 15 bp, Homo sapiens
gagctatcaagtcac

SEQ ID NO: 873399 - DNA, 15 bp, Homo sapiens
tgagctatcaagtca

SEQ ID NO: 873400 - DNA, 15 bp, Homo sapiens
atgagctatcaagtc

SEQ ID NO: 873401 - DNA, 15 bp, Homo sapiens
aatgagctatcaagt

SEQ ID NO: 873402 - DNA, 15 bp, Homo sapiens
aaatgagctatcaag

SEQ ID NO: 873403 - DNA, 15 bp, Homo sapiens
gaaatgagctatcaa

SEQ ID NO: 873404 - DNA, 15 bp, Homo sapiens
agaaatgagctatca

SEQ ID NO: 873405 - DNA, 15 bp, Homo sapiens
aagaaatgagctatc

SEQ ID NO: 873406 - DNA, 15 bp, Homo sapiens
aaagaaatgagctat

SEQ ID NO: 873407 - DNA, 15 bp, Homo sapiens
aaaagaaatgagcta

SEQ ID NO: 873408 - DNA, 15 bp, Homo sapiens
aaaaagaaatgagct

SEQ ID NO: 873409 - DNA, 15 bp, Homo sapiens
caaaaagaaatgagc

SEQ ID NO: 873410 - DNA, 15 bp, Homo sapiens
acaaaaagaaatgag

SEQ ID NO: 873411 - DNA, 15 bp, Homo sapiens
aacaaaaagaaatga

SEQ ID NO: 873412 - DNA, 15 bp, Homo sapiens
gaacaaaaagaaatg

SEQ ID NO: 873413 - DNA, 15 bp, Homo sapiens
ggaacaaaaagaaat

SEQ ID NO: 873414 - DNA, 15 bp, Homo sapiens
aggaacaaaaagaaa

SEQ ID NO: 873415 - DNA, 15 bp, Homo sapiens
caggaacaaaaagaa

SEQ ID NO: 873416 - DNA, 15 bp, Homo sapiens
tcaggaacaaaaaga

SEQ ID NO: 873417 - DNA, 15 bp, Homo sapiens
ttcaggaacaaaaag

SEQ ID NO: 873418 - DNA, 15 bp, Homo sapiens
attcaggaacaaaaa

SEQ ID NO: 873419 - DNA, 15 bp, Homo sapiens
tattcaggaacaaaa

SEQ ID NO: 873420 - DNA, 15 bp, Homo sapiens
ttattcaggaacaaa

SEQ ID NO: 873421 - DNA, 15 bp, Homo sapiens
attattcaggaacaa

SEQ ID NO: 873422 - DNA, 15 bp, Homo sapiens
tattattcaggaaca

SEQ ID NO: 873423 - DNA, 15 bp, Homo sapiens
atattattcaggaac

SEQ ID NO: 873424 - DNA, 15 bp, Homo sapiens
aatattattcaggaa

SEQ ID NO: 873425 - DNA, 15 bp, Homo sapiens
gaatattattcagga

SEQ ID NO: 873426 - DNA, 15 bp, Homo sapiens
ggaatattattcagg

SEQ ID NO: 873427 - DNA, 15 bp, Homo sapiens
tggaatattattcag

SEQ ID NO: 873428 - DNA, 15 bp, Homo sapiens
atggaatattattca

SEQ ID NO: 873429 - DNA, 15 bp, Homo sapiens
catggaatattattc

SEQ ID NO: 873430 - DNA, 15 bp, Homo sapiens
ccatggaatattatt

SEQ ID NO: 873431 - DNA, 15 bp, Homo sapiens
accatggaatattat

SEQ ID NO: 873432 - DNA, 15 bp, Homo sapiens
gaccatggaatatta

SEQ ID NO: 873433 - DNA, 15 bp, Homo sapiens
tgaccatggaatatt

SEQ ID NO: 873434 - DNA, 15 bp, Homo sapiens
ttgaccatggaatat

SEQ ID NO: 873435 - DNA, 15 bp, Homo sapiens
cttgaccatggaata

SEQ ID NO: 873436 - DNA, 15 bp, Homo sapiens
tcttgaccatggaat

SEQ ID NO: 873437 - DNA, 15 bp, Homo sapiens
atcttgaccatggaa

SEQ ID NO: 873438 - DNA, 15 bp, Homo sapiens
catcttgaccatgga

SEQ ID NO: 873439 - DNA, 15 bp, Homo sapiens
acatcttgaccatgg

SEQ ID NO: 873440 - DNA, 15 bp, Homo sapiens
tacatcttgaccatg

SEQ ID NO: 873441 - DNA, 15 bp, Homo sapiens
gtacatcttgaccat

SEQ ID NO: 873442 - DNA, 15 bp, Homo sapiens
ggtacatcttgacca

SEQ ID NO: 873443 - DNA, 15 bp, Homo sapiens
tggtacatcttgacc

SEQ ID NO: 873444 - DNA, 15 bp, Homo sapiens
gtggtacatcttgac

SEQ ID NO: 873445 - DNA, 15 bp, Homo sapiens
tgtggtacatcttga

SEQ ID NO: 873446 - DNA, 15 bp, Homo sapiens
ctgtggtacatcttg

SEQ ID NO: 873447 - DNA, 15 bp, Homo sapiens
actgtggtacatctt

SEQ ID NO: 873448 - DNA, 15 bp, Homo sapiens
aactgtggtacatct

SEQ ID NO: 873449 - DNA, 15 bp, Homo sapiens
aaactgtggtacatc

SEQ ID NO: 873450 - DNA, 15 bp, Homo sapiens
caaactgtggtacat

SEQ ID NO: 873451 - DNA, 15 bp, Homo sapiens
acaaactgtggtaca

SEQ ID NO: 873452 - DNA, 15 bp, Homo sapiens
aacaaactgtggtac

SEQ ID NO: 873453 - DNA, 15 bp, Homo sapiens
aaacaaactgtggta

SEQ ID NO: 873454 - DNA, 15 bp, Homo sapiens
taaacaaactgtggt

SEQ ID NO: 873455 - DNA, 15 bp, Homo sapiens
ataaacaaactgtgg

SEQ ID NO: 873456 - DNA, 15 bp, Homo sapiens
aataaacaaactgtg

SEQ ID NO: 873457 - DNA, 15 bp, Homo sapiens
gaataaacaaactgt

SEQ ID NO: 873458 - DNA, 15 bp, Homo sapiens
tgaataaacaaactg

SEQ ID NO: 873459 - DNA, 15 bp, Homo sapiens
atgaataaacaaact

SEQ ID NO: 873460 - DNA, 15 bp, Homo sapiens
aatgaataaacaaac

SEQ ID NO: 873461 - DNA, 15 bp, Homo sapiens
gaatgaataaacaaa

SEQ ID NO: 873462 - DNA, 15 bp, Homo sapiens
tgaatgaataaacaa

SEQ ID NO: 873463 - DNA, 15 bp, Homo sapiens
gtgaatgaataaaca

SEQ ID NO: 873464 - DNA, 15 bp, Homo sapiens
ggtgaatgaataaac

SEQ ID NO: 873465 - DNA, 15 bp, Homo sapiens
aggtgaatgaataaa

SEQ ID NO: 873466 - DNA, 15 bp, Homo sapiens
taggtgaatgaataa

SEQ ID NO: 873467 - DNA, 15 bp, Homo sapiens
ataggtgaatgaata

SEQ ID NO: 873468 - DNA, 15 bp, Homo sapiens
aataggtgaatgaat

SEQ ID NO: 873469 - DNA, 15 bp, Homo sapiens
caataggtgaatgaa

SEQ ID NO: 873470 - DNA, 15 bp, Homo sapiens
tcaataggtgaatga

SEQ ID NO: 873471 - DNA, 15 bp, Homo sapiens
ttcaataggtgaatg

SEQ ID NO: 873472 - DNA, 15 bp, Homo sapiens
cttcaataggtgaat

SEQ ID NO: 873473 - DNA, 15 bp, Homo sapiens
ccttcaataggtgaa

SEQ ID NO: 873474 - DNA, 15 bp, Homo sapiens
tccttcaataggtga

SEQ ID NO: 873475 - DNA, 15 bp, Homo sapiens
gtccttcaataggtg

SEQ ID NO: 873476 - DNA, 15 bp, Homo sapiens
tgtccttcaataggt

SEQ ID NO: 873477 - DNA, 15 bp, Homo sapiens
atgtccttcaatagg

SEQ ID NO: 873478 - DNA, 15 bp, Homo sapiens
gatgtccttcaatag

SEQ ID NO: 873479 - DNA, 15 bp, Homo sapiens
agatgtccttcaata

SEQ ID NO: 873480 - DNA, 15 bp, Homo sapiens
aagatgtccttcaat

SEQ ID NO: 873481 - DNA, 15 bp, Homo sapiens
caagatgtccttcaa

SEQ ID NO: 873482 - DNA, 15 bp, Homo sapiens
ccaagatgtccttca

SEQ ID NO: 873483 - DNA, 15 bp, Homo sapiens
accaagatgtccttc

SEQ ID NO: 873484 - DNA, 15 bp, Homo sapiens
aaccaagatgtcctt

SEQ ID NO: 873485 - DNA, 15 bp, Homo sapiens
caaccaagatgtcct

SEQ ID NO: 873486 - DNA, 15 bp, Homo sapiens
gcaaccaagatgtcc

SEQ ID NO: 873487 - DNA, 15 bp, Homo sapiens
agcaaccaagatgtc

SEQ ID NO: 873488 - DNA, 15 bp, Homo sapiens
aagcaaccaagatgt

SEQ ID NO: 873489 - DNA, 15 bp, Homo sapiens
gaagcaaccaagatg

SEQ ID NO: 873490 - DNA, 15 bp, Homo sapiens
ggaagcaaccaagat

SEQ ID NO: 873491 - DNA, 15 bp, Homo sapiens
tggaagcaaccaaga

SEQ ID NO: 873492 - DNA, 15 bp, Homo sapiens
ttggaagcaaccaag

SEQ ID NO: 873493 - DNA, 15 bp, Homo sapiens
attggaagcaaccaa

SEQ ID NO: 873494 - DNA, 15 bp, Homo sapiens
aattggaagcaacca

SEQ ID NO: 873495 - DNA, 15 bp, Homo sapiens
aaattggaagcaacc

SEQ ID NO: 873496 - DNA, 15 bp, Homo sapiens
aaaattggaagcaac

SEQ ID NO: 873497 - DNA, 15 bp, Homo sapiens
aaaaattggaagcaa

SEQ ID NO: 873498 - DNA, 15 bp, Homo sapiens
caaaaattggaagca

SEQ ID NO: 873499 - DNA, 15 bp, Homo sapiens
tcaaaaattggaagc

SEQ ID NO: 873500 - DNA, 15 bp, Homo sapiens
atcaaaaattggaag

SEQ ID NO: 873501 - DNA, 15 bp, Homo sapiens
catcaaaaattggaa

SEQ ID NO: 873502 - DNA, 15 bp, Homo sapiens
tcatcaaaaattgga

SEQ ID NO: 873503 - DNA, 15 bp, Homo sapiens
atcatcaaaaattgg

SEQ ID NO: 873504 - DNA, 15 bp, Homo sapiens
aatcatcaaaaattg

SEQ ID NO: 873505 - DNA, 15 bp, Homo sapiens
taatcatcaaaaatt

SEQ ID NO: 873506 - DNA, 15 bp, Homo sapiens
ataatcatcaaaaat

SEQ ID NO: 873507 - DNA, 15 bp, Homo sapiens
cataatcatcaaaaa

SEQ ID NO: 873508 - DNA, 15 bp, Homo sapiens
tcataatcatcaaaa

SEQ ID NO: 873509 - DNA, 15 bp, Homo sapiens
ttcataatcatcaaa

SEQ ID NO: 873510 - DNA, 15 bp, Homo sapiens
attcataatcatcaa

SEQ ID NO: 873511 - DNA, 15 bp, Homo sapiens
tattcataatcatca

SEQ ID NO: 873512 - DNA, 15 bp, Homo sapiens
ttattcataatcatc

SEQ ID NO: 873513 - DNA, 15 bp, Homo sapiens
tttattcataatcat

SEQ ID NO: 873514 - DNA, 15 bp, Homo sapiens
ctttattcataatca

SEQ ID NO: 873515 - DNA, 15 bp, Homo sapiens
gctttattcataatc

SEQ ID NO: 873516 - DNA, 15 bp, Homo sapiens
agctttattcataat

SEQ ID NO: 873517 - DNA, 15 bp, Homo sapiens
cagctttattcataa

SEQ ID NO: 873518 - DNA, 15 bp, Homo sapiens
acagctttattcata

SEQ ID NO: 873519 - DNA, 15 bp, Homo sapiens
cacagctttattcat

SEQ ID NO: 873520 - DNA, 15 bp, Homo sapiens
tcacagctttattca

SEQ ID NO: 873521 - DNA, 15 bp, Homo sapiens
ttcacagctttattc

SEQ ID NO: 873522 - DNA, 15 bp, Homo sapiens
attcacagctttatt

SEQ ID NO: 873523 - DNA, 15 bp, Homo sapiens
tattcacagctttat

SEQ ID NO: 873524 - DNA, 15 bp, Homo sapiens
ttattcacagcttta

SEQ ID NO: 873525 - DNA, 15 bp, Homo sapiens
tttattcacagcttt

SEQ ID NO: 873526 - DNA, 15 bp, Homo sapiens
gtttattcacagctt

SEQ ID NO: 873527 - DNA, 15 bp, Homo sapiens
tgtttattcacagct

SEQ ID NO: 873528 - DNA, 15 bp, Homo sapiens
atgtttattcacagc

SEQ ID NO: 873529 - DNA, 15 bp, Homo sapiens
aatgtttattcacag

SEQ ID NO: 873530 - DNA, 15 bp, Homo sapiens
aaatgtttattcaca

SEQ ID NO: 873531 - DNA, 15 bp, Homo sapiens
taaatgtttattcac

SEQ ID NO: 873532 - DNA, 15 bp, Homo sapiens
ataaatgtttattca

SEQ ID NO: 873533 - DNA, 15 bp, Homo sapiens
cataaatgtttattc

SEQ ID NO: 873534 - DNA, 15 bp, Homo sapiens
acataaatgtttatt

SEQ ID NO: 873535 - DNA, 15 bp, Homo sapiens
cacataaatgtttat

SEQ ID NO: 873536 - DNA, 15 bp, Homo sapiens
gcacataaatgttta

SEQ ID NO: 873537 - DNA, 15 bp, Homo sapiens
tgcacataaatgttt

SEQ ID NO: 873538 - DNA, 15 bp, Homo sapiens
ctgcacataaatgtt

SEQ ID NO: 873539 - DNA, 15 bp, Homo sapiens
actgcacataaatgt

SEQ ID NO: 873540 - DNA, 15 bp, Homo sapiens
aactgcacataaatg

SEQ ID NO: 873541 - DNA, 15 bp, Homo sapiens
aaactgcacataaat

SEQ ID NO: 873542 - DNA, 15 bp, Homo sapiens
aaaactgcacataaa

SEQ ID NO: 873543 - DNA, 15 bp, Homo sapiens
aaaaactgcacataa

SEQ ID NO: 873544 - DNA, 15 bp, Homo sapiens
aaaaaactgcacata

SEQ ID NO: 873545 - DNA, 15 bp, Homo sapiens
aaaaaaactgcacat

SEQ ID NO: 873546 - DNA, 15 bp, Homo sapiens
caaaaaaactgcaca

SEQ ID NO: 873547 - DNA, 15 bp, Homo sapiens
acaaaaaaactgcac

SEQ ID NO: 873548 - DNA, 15 bp, Homo sapiens
cacaaaaaaactgca

SEQ ID NO: 873549 - DNA, 15 bp, Homo sapiens
acacaaaaaaactgc

SEQ ID NO: 873550 - DNA, 15 bp, Homo sapiens
cacacaaaaaaactg

SEQ ID NO: 873551 - DNA, 15 bp, Homo sapiens
tcacacaaaaaaact

SEQ ID NO: 873552 - DNA, 15 bp, Homo sapiens
ttcacacaaaaaaac

SEQ ID NO: 873553 - DNA, 15 bp, Homo sapiens
cttcacacaaaaaaa

SEQ ID NO: 873554 - DNA, 15 bp, Homo sapiens
tcttcacacaaaaaa

SEQ ID NO: 873555 - DNA, 15 bp, Homo sapiens
atcttcacacaaaaa

SEQ ID NO: 873556 - DNA, 15 bp, Homo sapiens
tatcttcacacaaaa

SEQ ID NO: 873557 - DNA, 15 bp, Homo sapiens
ttatcttcacacaaa

SEQ ID NO: 873558 - DNA, 15 bp, Homo sapiens
cttatcttcacacaa

SEQ ID NO: 873559 - DNA, 15 bp, Homo sapiens
acttatcttcacaca

SEQ ID NO: 873560 - DNA, 15 bp, Homo sapiens
aacttatcttcacac

SEQ ID NO: 873561 - DNA, 15 bp, Homo sapiens
aaacttatcttcaca

SEQ ID NO: 873562 - DNA, 15 bp, Homo sapiens
aaaacttatcttcac

SEQ ID NO: 873563 - DNA, 15 bp, Homo sapiens
gaaaacttatcttca

SEQ ID NO: 873564 - DNA, 15 bp, Homo sapiens
tgaaaacttatcttc

SEQ ID NO: 873565 - DNA, 15 bp, Homo sapiens
ttgaaaacttatctt

SEQ ID NO: 873566 - DNA, 15 bp, Homo sapiens
gttgaaaacttatct

SEQ ID NO: 873567 - DNA, 15 bp, Homo sapiens
agttgaaaacttatc

SEQ ID NO: 873568 - DNA, 15 bp, Homo sapiens
cagttgaaaacttat

SEQ ID NO: 873569 - DNA, 15 bp, Homo sapiens
tcagttgaaaactta

SEQ ID NO: 873570 - DNA, 15 bp, Homo sapiens
atcagttgaaaactt

SEQ ID NO: 873571 - DNA, 15 bp, Homo sapiens
aatcagttgaaaact

SEQ ID NO: 873572 - DNA, 15 bp, Homo sapiens
gaatcagttgaaaac

SEQ ID NO: 873573 - DNA, 15 bp, Homo sapiens
tgaatcagttgaaaa

SEQ ID NO: 873574 - DNA, 15 bp, Homo sapiens
ttgaatcagttgaaa

SEQ ID NO: 873575 - DNA, 15 bp, Homo sapiens
cttgaatcagttgaa

SEQ ID NO: 873576 - DNA, 15 bp, Homo sapiens
acttgaatcagttga

SEQ ID NO: 873577 - DNA, 15 bp, Homo sapiens
tacttgaatcagttg

SEQ ID NO: 873578 - DNA, 15 bp, Homo sapiens
ttacttgaatcagtt

SEQ ID NO: 873579 - DNA, 15 bp, Homo sapiens
tttacttgaatcagt

SEQ ID NO: 873580 - DNA, 15 bp, Homo sapiens
atttacttgaatcag

SEQ ID NO: 873581 - DNA, 15 bp, Homo sapiens
tatttacttgaatca

SEQ ID NO: 873582 - DNA, 15 bp, Homo sapiens
gtatttacttgaatc

SEQ ID NO: 873583 - DNA, 15 bp, Homo sapiens
ggtatttacttgaat

SEQ ID NO: 873584 - DNA, 15 bp, Homo sapiens
aggtatttacttgaa

SEQ ID NO: 873585 - DNA, 15 bp, Homo sapiens
taggtatttacttga

SEQ ID NO: 873586 - DNA, 15 bp, Homo sapiens
ttaggtatttacttg

SEQ ID NO: 873587 - DNA, 15 bp, Homo sapiens
cttaggtatttactt

SEQ ID NO: 873588 - DNA, 15 bp, Homo sapiens
tcttaggtatttact

SEQ ID NO: 873589 - DNA, 15 bp, Homo sapiens
ttcttaggtatttac

SEQ ID NO: 873590 - DNA, 15 bp, Homo sapiens
attcttaggtattta

SEQ ID NO: 873591 - DNA, 15 bp, Homo sapiens
cattcttaggtattt

SEQ ID NO: 873592 - DNA, 15 bp, Homo sapiens
acattcttaggtatt

SEQ ID NO: 873593 - DNA, 15 bp, Homo sapiens
cacattcttaggtat

SEQ ID NO: 873594 - DNA, 15 bp, Homo sapiens
tcacattcttaggta

SEQ ID NO: 873595 - DNA, 15 bp, Homo sapiens
atcacattcttaggt

SEQ ID NO: 873596 - DNA, 15 bp, Homo sapiens
aatcacattcttagg

SEQ ID NO: 873597 - DNA, 15 bp, Homo sapiens
caatcacattcttag

SEQ ID NO: 873598 - DNA, 15 bp, Homo sapiens
gcaatcacattctta

SEQ ID NO: 873599 - DNA, 15 bp, Homo sapiens
agcaatcacattctt

SEQ ID NO: 873600 - DNA, 15 bp, Homo sapiens
cagcaatcacattct

SEQ ID NO: 873601 - DNA, 15 bp, Homo sapiens
tcagcaatcacattc

SEQ ID NO: 873602 - DNA, 15 bp, Homo sapiens
ctcagcaatcacatt

SEQ ID NO: 873603 - DNA, 15 bp, Homo sapiens
cctcagcaatcacat

SEQ ID NO: 873604 - DNA, 15 bp, Homo sapiens
acctcagcaatcaca

SEQ ID NO: 873605 - DNA, 15 bp, Homo sapiens
aacctcagcaatcac

SEQ ID NO: 873606 - DNA, 15 bp, Homo sapiens
taacctcagcaatca

SEQ ID NO: 873607 - DNA, 15 bp, Homo sapiens
ttaacctcagcaatc

SEQ ID NO: 873608 - DNA, 15 bp, Homo sapiens
gttaacctcagcaat

SEQ ID NO: 873609 - DNA, 15 bp, Homo sapiens
agttaacctcagcaa

SEQ ID NO: 873610 - DNA, 15 bp, Homo sapiens
aagttaacctcagca

SEQ ID NO: 873611 - DNA, 15 bp, Homo sapiens
gaagttaacctcagc

SEQ ID NO: 873612 - DNA, 15 bp, Homo sapiens
agaagttaacctcag

SEQ ID NO: 873613 - DNA, 15 bp, Homo sapiens
aagaagttaacctca

SEQ ID NO: 873614 - DNA, 15 bp, Homo sapiens
aaagaagttaacctc

SEQ ID NO: 873615 - DNA, 15 bp, Homo sapiens
taaagaagttaacct

SEQ ID NO: 873616 - DNA, 15 bp, Homo sapiens
ttaaagaagttaacc

SEQ ID NO: 873617 - DNA, 15 bp, Homo sapiens
tttaaagaagttaac

SEQ ID NO: 873618 - DNA, 15 bp, Homo sapiens
ttttaaagaagttaa

SEQ ID NO: 873619 - DNA, 15 bp, Homo sapiens
tttttaaagaagtta

SEQ ID NO: 873620 - DNA, 15 bp, Homo sapiens
ttttttaaagaagtt

SEQ ID NO: 873621 - DNA, 15 bp, Homo sapiens
attttttaaagaagt

SEQ ID NO: 873622 - DNA, 15 bp, Homo sapiens
aattttttaaagaag

SEQ ID NO: 873623 - DNA, 15 bp, Homo sapiens
taattttttaaagaa

SEQ ID NO: 873624 - DNA, 15 bp, Homo sapiens
ataattttttaaaga

SEQ ID NO: 873625 - DNA, 15 bp, Homo sapiens
aataattttttaaag

SEQ ID NO: 873626 - DNA, 15 bp, Homo sapiens
aaataattttttaaa

SEQ ID NO: 873627 - DNA, 15 bp, Homo sapiens
aaaataattttttaa

SEQ ID NO: 873628 - DNA, 15 bp, Homo sapiens
aaaaataatttttta

SEQ ID NO: 873629 - DNA, 15 bp, Homo sapiens
aaaaaataatttttt

SEQ ID NO: 873630 - DNA, 15 bp, Homo sapiens
aaaaaaataattttt

SEQ ID NO: 873631 - DNA, 15 bp, Homo sapiens
aaaaaaaataatttt

SEQ ID NO: 873632 - DNA, 15 bp, Homo sapiens
gaaaaaaaataattt

SEQ ID NO: 873633 - DNA, 15 bp, Homo sapiens
agaaaaaaaataatt

SEQ ID NO: 873634 - DNA, 15 bp, Homo sapiens
tagaaaaaaaataat

SEQ ID NO: 873635 - DNA, 15 bp, Homo sapiens
gtagaaaaaaaataa

SEQ ID NO: 873636 - DNA, 15 bp, Homo sapiens
agtagaaaaaaaata

SEQ ID NO: 873637 - DNA, 15 bp, Homo sapiens
cagtagaaaaaaaat

SEQ ID NO: 873638 - DNA, 15 bp, Homo sapiens
acagtagaaaaaaaa

SEQ ID NO: 873639 - DNA, 15 bp, Homo sapiens
tacagtagaaaaaaa

SEQ ID NO: 873640 - DNA, 15 bp, Homo sapiens
ttacagtagaaaaaa

SEQ ID NO: 873641 - DNA, 15 bp, Homo sapiens
tttacagtagaaaaa

SEQ ID NO: 873642 - DNA, 15 bp, Homo sapiens
ttttacagtagaaaa

SEQ ID NO: 873643 - DNA, 15 bp, Homo sapiens
attttacagtagaaa

SEQ ID NO: 873644 - DNA, 15 bp, Homo sapiens
gattttacagtagaa

SEQ ID NO: 873645 - DNA, 15 bp, Homo sapiens
cgattttacagtaga

SEQ ID NO: 873646 - DNA, 15 bp, Homo sapiens
tcgattttacagtag

SEQ ID NO: 873647 - DNA, 15 bp, Homo sapiens
ctcgattttacagta

SEQ ID NO: 873648 - DNA, 15 bp, Homo sapiens
actcgattttacagt

SEQ ID NO: 873649 - DNA, 15 bp, Homo sapiens
aactcgattttacag

SEQ ID NO: 873650 - DNA, 15 bp, Homo sapiens
aaactcgattttaca

SEQ ID NO: 873651 - DNA, 15 bp, Homo sapiens
gaaactcgattttac

SEQ ID NO: 873652 - DNA, 15 bp, Homo sapiens
agaaactcgatttta

SEQ ID NO: 873653 - DNA, 15 bp, Homo sapiens
aagaaactcgatttt

SEQ ID NO: 873654 - DNA, 15 bp, Homo sapiens
aaagaaactcgattt

SEQ ID NO: 873655 - DNA, 15 bp, Homo sapiens
gaaagaaactcgatt

SEQ ID NO: 873656 - DNA, 15 bp, Homo sapiens
tgaaagaaactcgat

SEQ ID NO: 873657 - DNA, 15 bp, Homo sapiens
ttgaaagaaactcga

SEQ ID NO: 873658 - DNA, 15 bp, Homo sapiens
tttgaaagaaactcg

SEQ ID NO: 873659 - DNA, 15 bp, Homo sapiens
ttttgaaagaaactc

SEQ ID NO: 873660 - DNA, 15 bp, Homo sapiens
tttttgaaagaaact

SEQ ID NO: 873661 - DNA, 15 bp, Homo sapiens
gtttttgaaagaaac

SEQ ID NO: 873662 - DNA, 15 bp, Homo sapiens
tgtttttgaaagaaa

SEQ ID NO: 873663 - DNA, 15 bp, Homo sapiens
gtgtttttgaaagaa

SEQ ID NO: 873664 - DNA, 15 bp, Homo sapiens
agtgtttttgaaaga

SEQ ID NO: 873665 - DNA, 15 bp, Homo sapiens
aagtgtttttgaaag

SEQ ID NO: 873666 - DNA, 15 bp, Homo sapiens
caagtgtttttgaaa

SEQ ID NO: 873667 - DNA, 15 bp, Homo sapiens
ccaagtgtttttgaa

SEQ ID NO: 873668 - DNA, 15 bp, Homo sapiens
tccaagtgtttttga

SEQ ID NO: 873669 - DNA, 15 bp, Homo sapiens
ttccaagtgtttttg

SEQ ID NO: 873670 - DNA, 15 bp, Homo sapiens
tttccaagtgttttt

SEQ ID NO: 873671 - DNA, 15 bp, Homo sapiens
ctttccaagtgtttt

SEQ ID NO: 873672 - DNA, 15 bp, Homo sapiens
tctttccaagtgttt

SEQ ID NO: 873673 - DNA, 15 bp, Homo sapiens
gtctttccaagtgtt

SEQ ID NO: 873674 - DNA, 15 bp, Homo sapiens
agtctttccaagtgt

SEQ ID NO: 873675 - DNA, 15 bp, Homo sapiens
aagtctttccaagtg

SEQ ID NO: 873676 - DNA, 15 bp, Homo sapiens
aaagtctttccaagt

SEQ ID NO: 873677 - DNA, 15 bp, Homo sapiens
caaagtctttccaag

SEQ ID NO: 873678 - DNA, 15 bp, Homo sapiens
ccaaagtctttccaa

SEQ ID NO: 873679 - DNA, 15 bp, Homo sapiens
cccaaagtctttcca

SEQ ID NO: 873680 - DNA, 15 bp, Homo sapiens
acccaaagtctttcc

SEQ ID NO: 873681 - DNA, 15 bp, Homo sapiens
gacccaaagtctttc

SEQ ID NO: 873682 - DNA, 15 bp, Homo sapiens
tgacccaaagtcttt

SEQ ID NO: 873683 - DNA, 15 bp, Homo sapiens
ttgacccaaagtctt

SEQ ID NO: 873684 - DNA, 15 bp, Homo sapiens
cttgacccaaagtct

SEQ ID NO: 873685 - DNA, 15 bp, Homo sapiens
tcttgacccaaagtc

SEQ ID NO: 873686 - DNA, 15 bp, Homo sapiens
ctcttgacccaaagt

SEQ ID NO: 873687 - DNA, 15 bp, Homo sapiens
cctcttgacccaaag

SEQ ID NO: 873688 - DNA, 15 bp, Homo sapiens
tcctcttgacccaaa

SEQ ID NO: 873689 - DNA, 15 bp, Homo sapiens
ctcctcttgacccaa

SEQ ID NO: 873690 - DNA, 15 bp, Homo sapiens
actcctcttgaccca

SEQ ID NO: 873691 - DNA, 15 bp, Homo sapiens
aactcctcttgaccc

SEQ ID NO: 873692 - DNA, 15 bp, Homo sapiens
gaactcctcttgacc

SEQ ID NO: 873693 - DNA, 15 bp, Homo sapiens
tgaactcctcttgac

SEQ ID NO: 873694 - DNA, 15 bp, Homo sapiens
ctgaactcctcttga

SEQ ID NO: 873695 - DNA, 15 bp, Homo sapiens
cctgaactcctcttg

SEQ ID NO: 873696 - DNA, 15 bp, Homo sapiens
gcctgaactcctctt

SEQ ID NO: 873697 - DNA, 15 bp, Homo sapiens
tgcctgaactcctct

SEQ ID NO: 873698 - DNA, 15 bp, Homo sapiens
gtgcctgaactcctc

SEQ ID NO: 873699 - DNA, 15 bp, Homo sapiens
ggtgcctgaactcct

SEQ ID NO: 873700 - DNA, 15 bp, Homo sapiens
tggtgcctgaactcc

SEQ ID NO: 873701 - DNA, 15 bp, Homo sapiens
atggtgcctgaactc

SEQ ID NO: 873702 - DNA, 15 bp, Homo sapiens
tatggtgcctgaact

SEQ ID NO: 873703 - DNA, 15 bp, Homo sapiens
ctatggtgcctgaac

SEQ ID NO: 873704 - DNA, 15 bp, Homo sapiens
gctatggtgcctgaa

SEQ ID NO: 873705 - DNA, 15 bp, Homo sapiens
agctatggtgcctga

SEQ ID NO: 873706 - DNA, 15 bp, Homo sapiens
cagctatggtgcctg

SEQ ID NO: 873707 - DNA, 15 bp, Homo sapiens
tcagctatggtgcct

SEQ ID NO: 873708 - DNA, 15 bp, Homo sapiens
ttcagctatggtgcc

SEQ ID NO: 873709 - DNA, 15 bp, Homo sapiens
tttcagctatggtgc

SEQ ID NO: 873710 - DNA, 15 bp, Homo sapiens
ctttcagctatggtg

SEQ ID NO: 873711 - DNA, 15 bp, Homo sapiens
tctttcagctatggt

SEQ ID NO: 873712 - DNA, 15 bp, Homo sapiens
ttctttcagctatgg

SEQ ID NO: 873713 - DNA, 15 bp, Homo sapiens
cttctttcagctatg

SEQ ID NO: 873714 - DNA, 15 bp, Homo sapiens
gcttctttcagctat

SEQ ID NO: 873715 - DNA, 15 bp, Homo sapiens
tgcttctttcagcta

SEQ ID NO: 873716 - DNA, 15 bp, Homo sapiens
atgcttctttcagct

SEQ ID NO: 873717 - DNA, 15 bp, Homo sapiens
aatgcttctttcagc

SEQ ID NO: 873718 - DNA, 15 bp, Homo sapiens
aaatgcttctttcag

SEQ ID NO: 873719 - DNA, 15 bp, Homo sapiens
caaatgcttctttca

SEQ ID NO: 873720 - DNA, 15 bp, Homo sapiens
tcaaatgcttctttc

SEQ ID NO: 873721 - DNA, 15 bp, Homo sapiens
ttcaaatgcttcttt

SEQ ID NO: 873722 - DNA, 15 bp, Homo sapiens
attcaaatgcttctt

SEQ ID NO: 873723 - DNA, 15 bp, Homo sapiens
tattcaaatgcttct

SEQ ID NO: 873724 - DNA, 15 bp, Homo sapiens
ctattcaaatgcttc

SEQ ID NO: 873725 - DNA, 15 bp, Homo sapiens
cctattcaaatgctt

SEQ ID NO: 873726 - DNA, 15 bp, Homo sapiens
gcctattcaaatgct

SEQ ID NO: 873727 - DNA, 15 bp, Homo sapiens
tgcctattcaaatgc

SEQ ID NO: 873728 - DNA, 15 bp, Homo sapiens
ctgcctattcaaatg

SEQ ID NO: 873729 - DNA, 15 bp, Homo sapiens
tctgcctattcaaat

SEQ ID NO: 873730 - DNA, 15 bp, Homo sapiens
ctctgcctattcaaa

SEQ ID NO: 873731 - DNA, 15 bp, Homo sapiens
tctctgcctattcaa

SEQ ID NO: 873732 - DNA, 15 bp, Homo sapiens
atctctgcctattca

SEQ ID NO: 873733 - DNA, 15 bp, Homo sapiens
catctctgcctattc

SEQ ID NO: 873734 - DNA, 15 bp, Homo sapiens
gcatctctgcctatt

SEQ ID NO: 873735 - DNA, 15 bp, Homo sapiens
agcatctctgcctat

SEQ ID NO: 873736 - DNA, 15 bp, Homo sapiens
aagcatctctgccta

SEQ ID NO: 873737 - DNA, 15 bp, Homo sapiens
aaagcatctctgcct

SEQ ID NO: 873738 - DNA, 15 bp, Homo sapiens
taaagcatctctgcc

SEQ ID NO: 873739 - DNA, 15 bp, Homo sapiens
ttaaagcatctctgc

SEQ ID NO: 873740 - DNA, 15 bp, Homo sapiens
tttaaagcatctctg

SEQ ID NO: 873741 - DNA, 15 bp, Homo sapiens
ttttaaagcatctct

SEQ ID NO: 873742 - DNA, 15 bp, Homo sapiens
attttaaagcatctc

SEQ ID NO: 873743 - DNA, 15 bp, Homo sapiens
cattttaaagcatct

SEQ ID NO: 873744 - DNA, 15 bp, Homo sapiens
tcattttaaagcatc

SEQ ID NO: 873745 - DNA, 15 bp, Homo sapiens
ctcattttaaagcat

SEQ ID NO: 873746 - DNA, 15 bp, Homo sapiens
tctcattttaaagca

SEQ ID NO: 873747 - DNA, 15 bp, Homo sapiens
gtctcattttaaagc

SEQ ID NO: 873748 - DNA, 15 bp, Homo sapiens
tgtctcattttaaag

SEQ ID NO: 873749 - DNA, 15 bp, Homo sapiens
ttgtctcattttaaa

SEQ ID NO: 873750 - DNA, 15 bp, Homo sapiens
cttgtctcattttaa

SEQ ID NO: 873751 - DNA, 15 bp, Homo sapiens
tcttgtctcatttta

SEQ ID NO: 873752 - DNA, 15 bp, Homo sapiens
atcttgtctcatttt

SEQ ID NO: 873753 - DNA, 15 bp, Homo sapiens
gatcttgtctcattt

SEQ ID NO: 873754 - DNA, 15 bp, Homo sapiens
ggatcttgtctcatt

SEQ ID NO: 873755 - DNA, 15 bp, Homo sapiens
tggatcttgtctcat

SEQ ID NO: 873756 - DNA, 15 bp, Homo sapiens
gtggatcttgtctca

SEQ ID NO: 873757 - DNA, 15 bp, Homo sapiens
ggtggatcttgtctc

SEQ ID NO: 873758 - DNA, 15 bp, Homo sapiens
gggtggatcttgtct

SEQ ID NO: 873759 - DNA, 15 bp, Homo sapiens
ggggtggatcttgtc

SEQ ID NO: 873760 - DNA, 15 bp, Homo sapiens
cggggtggatcttgt

SEQ ID NO: 873761 - DNA, 15 bp, Homo sapiens
acggggtggatcttg

SEQ ID NO: 873762 - DNA, 15 bp, Homo sapiens
tacggggtggatctt

SEQ ID NO: 873763 - DNA, 15 bp, Homo sapiens
ttacggggtggatct

SEQ ID NO: 873764 - DNA, 15 bp, Homo sapiens
tttacggggtggatc

SEQ ID NO: 873765 - DNA, 15 bp, Homo sapiens
ttttacggggtggat

SEQ ID NO: 873766 - DNA, 15 bp, Homo sapiens
gttttacggggtgga

SEQ ID NO: 873767 - DNA, 15 bp, Homo sapiens
tgttttacggggtgg

SEQ ID NO: 873768 - DNA, 15 bp, Homo sapiens
ctgttttacggggtg

SEQ ID NO: 873769 - DNA, 15 bp, Homo sapiens
cctgttttacggggt

SEQ ID NO: 873770 - DNA, 15 bp, Homo sapiens
gcctgttttacgggg

SEQ ID NO: 873771 - DNA, 15 bp, Homo sapiens
ggcctgttttacggg

SEQ ID NO: 873772 - DNA, 15 bp, Homo sapiens
tggcctgttttacgg

SEQ ID NO: 873773 - DNA, 15 bp, Homo sapiens
gtggcctgttttacg

SEQ ID NO: 873774 - DNA, 15 bp, Homo sapiens
agtggcctgttttac

SEQ ID NO: 873775 - DNA, 15 bp, Homo sapiens
cagtggcctgtttta

SEQ ID NO: 873776 - DNA, 15 bp, Homo sapiens
tcagtggcctgtttt

SEQ ID NO: 873777 - DNA, 15 bp, Homo sapiens
ttcagtggcctgttt

SEQ ID NO: 873778 - DNA, 15 bp, Homo sapiens
tttcagtggcctgtt

SEQ ID NO: 873779 - DNA, 15 bp, Homo sapiens
gtttcagtggcctgt

SEQ ID NO: 873780 - DNA, 15 bp, Homo sapiens
tgtttcagtggcctg

SEQ ID NO: 873781 - DNA, 15 bp, Homo sapiens
atgtttcagtggcct

SEQ ID NO: 873782 - DNA, 15 bp, Homo sapiens
aatgtttcagtggcc

SEQ ID NO: 873783 - DNA, 15 bp, Homo sapiens
aaatgtttcagtggc

SEQ ID NO: 873784 - DNA, 15 bp, Homo sapiens
aaaatgtttcagtgg

SEQ ID NO: 873785 - DNA, 15 bp, Homo sapiens
aaaaatgtttcagtg

SEQ ID NO: 873786 - DNA, 15 bp, Homo sapiens
aaaaaatgtttcagt

SEQ ID NO: 873787 - DNA, 15 bp, Homo sapiens
taaaaaatgtttcag

SEQ ID NO: 873788 - DNA, 15 bp, Homo sapiens
ttaaaaaatgtttca

SEQ ID NO: 873789 - DNA, 15 bp, Homo sapiens
tttaaaaaatgtttc

SEQ ID NO: 873790 - DNA, 15 bp, Homo sapiens
ttttaaaaaatgttt

SEQ ID NO: 873791 - DNA, 15 bp, Homo sapiens
cttttaaaaaatgtt

SEQ ID NO: 873792 - DNA, 15 bp, Homo sapiens
ccttttaaaaaatgt

SEQ ID NO: 873793 - DNA, 15 bp, Homo sapiens
accttttaaaaaatg

SEQ ID NO: 873794 - DNA, 15 bp, Homo sapiens
taccttttaaaaaat

SEQ ID NO: 873795 - DNA, 15 bp, Homo sapiens
ctaccttttaaaaaa

SEQ ID NO: 873796 - DNA, 15 bp, Homo sapiens
gctaccttttaaaaa

SEQ ID NO: 873797 - DNA, 15 bp, Homo sapiens
agctaccttttaaaa

SEQ ID NO: 873798 - DNA, 15 bp, Homo sapiens
gagctaccttttaaa

SEQ ID NO: 873799 - DNA, 15 bp, Homo sapiens
ggagctaccttttaa

SEQ ID NO: 873800 - DNA, 15 bp, Homo sapiens
tggagctacctttta

SEQ ID NO: 873801 - DNA, 15 bp, Homo sapiens
atggagctacctttt

SEQ ID NO: 873802 - DNA, 15 bp, Homo sapiens
catggagctaccttt

SEQ ID NO: 873803 - DNA, 15 bp, Homo sapiens
ccatggagctacctt

SEQ ID NO: 873804 - DNA, 15 bp, Homo sapiens
gccatggagctacct

SEQ ID NO: 873805 - DNA, 15 bp, Homo sapiens
ggccatggagctacc

SEQ ID NO: 873806 - DNA, 15 bp, Homo sapiens
aggccatggagctac

SEQ ID NO: 873807 - DNA, 15 bp, Homo sapiens
aaggccatggagcta

SEQ ID NO: 873808 - DNA, 15 bp, Homo sapiens
aaaggccatggagct

SEQ ID NO: 873809 - DNA, 15 bp, Homo sapiens
gaaaggccatggagc

SEQ ID NO: 873810 - DNA, 15 bp, Homo sapiens
agaaaggccatggag

SEQ ID NO: 873811 - DNA, 15 bp, Homo sapiens
tagaaaggccatgga

SEQ ID NO: 873812 - DNA, 15 bp, Homo sapiens
ctagaaaggccatgg

SEQ ID NO: 873813 - DNA, 15 bp, Homo sapiens
cctagaaaggccatg

SEQ ID NO: 873814 - DNA, 15 bp, Homo sapiens
tcctagaaaggccat

SEQ ID NO: 873815 - DNA, 15 bp, Homo sapiens
ctcctagaaaggcca

SEQ ID NO: 873816 - DNA, 15 bp, Homo sapiens
tctcctagaaaggcc

SEQ ID NO: 873817 - DNA, 15 bp, Homo sapiens
gtctcctagaaaggc

SEQ ID NO: 873818 - DNA, 15 bp, Homo sapiens
agtctcctagaaagg

SEQ ID NO: 873819 - DNA, 15 bp, Homo sapiens
gagtctcctagaaag

SEQ ID NO: 873820 - DNA, 15 bp, Homo sapiens
tgagtctcctagaaa

SEQ ID NO: 873821 - DNA, 15 bp, Homo sapiens
atgagtctcctagaa

SEQ ID NO: 873822 - DNA, 15 bp, Homo sapiens
gatgagtctcctaga

SEQ ID NO: 873823 - DNA, 15 bp, Homo sapiens
agatgagtctcctag

SEQ ID NO: 873824 - DNA, 15 bp, Homo sapiens
gagatgagtctccta

SEQ ID NO: 873825 - DNA, 15 bp, Homo sapiens
agagatgagtctcct

SEQ ID NO: 873826 - DNA, 15 bp, Homo sapiens
cagagatgagtctcc

SEQ ID NO: 873827 - DNA, 15 bp, Homo sapiens
gcagagatgagtctc

SEQ ID NO: 873828 - DNA, 15 bp, Homo sapiens
ggcagagatgagtct

SEQ ID NO: 873829 - DNA, 15 bp, Homo sapiens
aggcagagatgagtc

SEQ ID NO: 873830 - DNA, 15 bp, Homo sapiens
aaggcagagatgagt

SEQ ID NO: 873831 - DNA, 15 bp, Homo sapiens
gaaggcagagatgag

SEQ ID NO: 873832 - DNA, 15 bp, Homo sapiens
tgaaggcagagatga

SEQ ID NO: 873833 - DNA, 15 bp, Homo sapiens
atgaaggcagagatg

SEQ ID NO: 873834 - DNA, 15 bp, Homo sapiens
aatgaaggcagagat

SEQ ID NO: 873835 - DNA, 15 bp, Homo sapiens
gaatgaaggcagaga

SEQ ID NO: 873836 - DNA, 15 bp, Homo sapiens
agaatgaaggcagag

SEQ ID NO: 873837 - DNA, 15 bp, Homo sapiens
gagaatgaaggcaga

SEQ ID NO: 873838 - DNA, 15 bp, Homo sapiens
ggagaatgaaggcag

SEQ ID NO: 873839 - DNA, 15 bp, Homo sapiens
aggagaatgaaggca

SEQ ID NO: 873840 - DNA, 15 bp, Homo sapiens
caggagaatgaaggc

SEQ ID NO: 873841 - DNA, 15 bp, Homo sapiens
acaggagaatgaagg

SEQ ID NO: 873842 - DNA, 15 bp, Homo sapiens
tacaggagaatgaag

SEQ ID NO: 873843 - DNA, 15 bp, Homo sapiens
ctacaggagaatgaa

SEQ ID NO: 873844 - DNA, 15 bp, Homo sapiens
cctacaggagaatga

SEQ ID NO: 873845 - DNA, 15 bp, Homo sapiens
acctacaggagaatg

SEQ ID NO: 873846 - DNA, 15 bp, Homo sapiens
tacctacaggagaat

SEQ ID NO: 873847 - DNA, 15 bp, Homo sapiens
atacctacaggagaa

SEQ ID NO: 873848 - DNA, 15 bp, Homo sapiens
tatacctacaggaga

SEQ ID NO: 873849 - DNA, 15 bp, Homo sapiens
ttatacctacaggag

SEQ ID NO: 873850 - DNA, 15 bp, Homo sapiens
gttatacctacagga

SEQ ID NO: 873851 - DNA, 15 bp, Homo sapiens
ggttatacctacagg

SEQ ID NO: 873852 - DNA, 15 bp, Homo sapiens
tggttatacctacag

SEQ ID NO: 873853 - DNA, 15 bp, Homo sapiens
ttggttatacctaca

SEQ ID NO: 873854 - DNA, 15 bp, Homo sapiens
cttggttatacctac

SEQ ID NO: 873855 - DNA, 15 bp, Homo sapiens
ccttggttataccta

SEQ ID NO: 873856 - DNA, 15 bp, Homo sapiens
gccttggttatacct

SEQ ID NO: 873857 - DNA, 15 bp, Homo sapiens
tgccttggttatacc

SEQ ID NO: 873858 - DNA, 15 bp, Homo sapiens
ttgccttggttatac

SEQ ID NO: 873859 - DNA, 15 bp, Homo sapiens
cttgccttggttata

SEQ ID NO: 873860 - DNA, 15 bp, Homo sapiens
ccttgccttggttat

SEQ ID NO: 873861 - DNA, 15 bp, Homo sapiens
tccttgccttggtta

SEQ ID NO: 873862 - DNA, 15 bp, Homo sapiens
ttccttgccttggtt

SEQ ID NO: 873863 - DNA, 15 bp, Homo sapiens
tttccttgccttggt

SEQ ID NO: 873864 - DNA, 15 bp, Homo sapiens
ctttccttgccttgg

SEQ ID NO: 873865 - DNA, 15 bp, Homo sapiens
gctttccttgccttg

SEQ ID NO: 873866 - DNA, 15 bp, Homo sapiens
ggctttccttgcctt

SEQ ID NO: 873867 - DNA, 15 bp, Homo sapiens
gggctttccttgcct

SEQ ID NO: 873868 - DNA, 15 bp, Homo sapiens
tgggctttccttgcc

SEQ ID NO: 873869 - DNA, 15 bp, Homo sapiens
gtgggctttccttgc

SEQ ID NO: 873870 - DNA, 15 bp, Homo sapiens
agtgggctttccttg

SEQ ID NO: 873871 - DNA, 15 bp, Homo sapiens
gagtgggctttcctt

SEQ ID NO: 873872 - DNA, 15 bp, Homo sapiens
ggagtgggctttcct

SEQ ID NO: 873873 - DNA, 15 bp, Homo sapiens
tggagtgggctttcc

SEQ ID NO: 873874 - DNA, 15 bp, Homo sapiens
ctggagtgggctttc

SEQ ID NO: 873875 - DNA, 15 bp, Homo sapiens
actggagtgggcttt

SEQ ID NO: 873876 - DNA, 15 bp, Homo sapiens
cactggagtgggctt

SEQ ID NO: 873877 - DNA, 15 bp, Homo sapiens
acactggagtgggct

SEQ ID NO: 873878 - DNA, 15 bp, Homo sapiens
aacactggagtgggc

SEQ ID NO: 873879 - DNA, 15 bp, Homo sapiens
gaacactggagtggg

SEQ ID NO: 873880 - DNA, 15 bp, Homo sapiens
agaacactggagtgg

SEQ ID NO: 873881 - DNA, 15 bp, Homo sapiens
cagaacactggagtg

SEQ ID NO: 873882 - DNA, 15 bp, Homo sapiens
ccagaacactggagt

SEQ ID NO: 873883 - DNA, 15 bp, Homo sapiens
gccagaacactggag

SEQ ID NO: 873884 - DNA, 15 bp, Homo sapiens
ggccagaacactgga

SEQ ID NO: 873885 - DNA, 15 bp, Homo sapiens
aggccagaacactgg

SEQ ID NO: 873886 - DNA, 15 bp, Homo sapiens
aaggccagaacactg

SEQ ID NO: 873887 - DNA, 15 bp, Homo sapiens
caaggccagaacact

SEQ ID NO: 873888 - DNA, 15 bp, Homo sapiens
acaaggccagaacac

SEQ ID NO: 873889 - DNA, 15 bp, Homo sapiens
cacaaggccagaaca

SEQ ID NO: 873890 - DNA, 15 bp, Homo sapiens
ccacaaggccagaac

SEQ ID NO: 873891 - DNA, 15 bp, Homo sapiens
tccacaaggccagaa

SEQ ID NO: 873892 - DNA, 15 bp, Homo sapiens
ctccacaaggccaga

SEQ ID NO: 873893 - DNA, 15 bp, Homo sapiens
tctccacaaggccag

SEQ ID NO: 873894 - DNA, 15 bp, Homo sapiens
ctctccacaaggcca

SEQ ID NO: 873895 - DNA, 15 bp, Homo sapiens
actctccacaaggcc

SEQ ID NO: 873896 - DNA, 15 bp, Homo sapiens
cactctccacaaggc

SEQ ID NO: 873897 - DNA, 15 bp, Homo sapiens
ccactctccacaagg

SEQ ID NO: 873898 - DNA, 15 bp, Homo sapiens
tccactctccacaag

SEQ ID NO: 873899 - DNA, 15 bp, Homo sapiens
gtccactctccacaa

SEQ ID NO: 873900 - DNA, 15 bp, Homo sapiens
tgtccactctccaca

SEQ ID NO: 873901 - DNA, 15 bp, Homo sapiens
ctgtccactctccac

SEQ ID NO: 873902 - DNA, 15 bp, Homo sapiens
gctgtccactctcca

SEQ ID NO: 873903 - DNA, 15 bp, Homo sapiens
ggctgtccactctcc

SEQ ID NO: 873904 - DNA, 15 bp, Homo sapiens
tggctgtccactctc

SEQ ID NO: 873905 - DNA, 15 bp, Homo sapiens
atggctgtccactct

SEQ ID NO: 873906 - DNA, 15 bp, Homo sapiens
catggctgtccactc

SEQ ID NO: 873907 - DNA, 15 bp, Homo sapiens
gcatggctgtccact

SEQ ID NO: 873908 - DNA, 15 bp, Homo sapiens
tgcatggctgtccac

SEQ ID NO: 873909 - DNA, 15 bp, Homo sapiens
ctgcatggctgtcca

SEQ ID NO: 873910 - DNA, 15 bp, Homo sapiens
tctgcatggctgtcc

SEQ ID NO: 873911 - DNA, 15 bp, Homo sapiens
atctgcatggctgtc

SEQ ID NO: 873912 - DNA, 15 bp, Homo sapiens
catctgcatggctgt

SEQ ID NO: 873913 - DNA, 15 bp, Homo sapiens
ccatctgcatggctg

SEQ ID NO: 873914 - DNA, 15 bp, Homo sapiens
cccatctgcatggct

SEQ ID NO: 873915 - DNA, 15 bp, Homo sapiens
gcccatctgcatggc

SEQ ID NO: 873916 - DNA, 15 bp, Homo sapiens
agcccatctgcatgg

SEQ ID NO: 873917 - DNA, 15 bp, Homo sapiens
gagcccatctgcatg

SEQ ID NO: 873918 - DNA, 15 bp, Homo sapiens
tgagcccatctgcat

SEQ ID NO: 873919 - DNA, 15 bp, Homo sapiens
ctgagcccatctgca

SEQ ID NO: 873920 - DNA, 15 bp, Homo sapiens
cctgagcccatctgc

SEQ ID NO: 873921 - DNA, 15 bp, Homo sapiens
acctgagcccatctg

SEQ ID NO: 873922 - DNA, 15 bp, Homo sapiens
gacctgagcccatct

SEQ ID NO: 873923 - DNA, 15 bp, Homo sapiens
ggacctgagcccatc

SEQ ID NO: 873924 - DNA, 15 bp, Homo sapiens
gggacctgagcccat

SEQ ID NO: 873925 - DNA, 15 bp, Homo sapiens
agggacctgagccca

SEQ ID NO: 873926 - DNA, 15 bp, Homo sapiens
cagggacctgagccc

SEQ ID NO: 873927 - DNA, 15 bp, Homo sapiens
ccagggacctgagcc

SEQ ID NO: 873928 - DNA, 15 bp, Homo sapiens
tccagggacctgagc

SEQ ID NO: 873929 - DNA, 15 bp, Homo sapiens
ctccagggacctgag

SEQ ID NO: 873930 - DNA, 15 bp, Homo sapiens
cctccagggacctga

SEQ ID NO: 873931 - DNA, 15 bp, Homo sapiens
ccctccagggacctg

SEQ ID NO: 873932 - DNA, 15 bp, Homo sapiens
gccctccagggacct

SEQ ID NO: 873933 - DNA, 15 bp, Homo sapiens
tgccctccagggacc

SEQ ID NO: 873934 - DNA, 15 bp, Homo sapiens
ctgccctccagggac

SEQ ID NO: 873935 - DNA, 15 bp, Homo sapiens
cctgccctccaggga

SEQ ID NO: 873936 - DNA, 15 bp, Homo sapiens
gcctgccctccaggg

SEQ ID NO: 873937 - DNA, 15 bp, Homo sapiens
tgcctgccctccagg

SEQ ID NO: 873938 - DNA, 15 bp, Homo sapiens
gtgcctgccctccag

SEQ ID NO: 873939 - DNA, 15 bp, Homo sapiens
agtgcctgccctcca

SEQ ID NO: 873940 - DNA, 15 bp, Homo sapiens
aagtgcctgccctcc

SEQ ID NO: 873941 - DNA, 15 bp, Homo sapiens
caagtgcctgccctc

SEQ ID NO: 873942 - DNA, 15 bp, Homo sapiens
ccaagtgcctgccct

SEQ ID NO: 873943 - DNA, 15 bp, Homo sapiens
tccaagtgcctgccc

SEQ ID NO: 873944 - DNA, 15 bp, Homo sapiens
ttccaagtgcctgcc

SEQ ID NO: 873945 - DNA, 15 bp, Homo sapiens
attccaagtgcctgc

SEQ ID NO: 873946 - DNA, 15 bp, Homo sapiens
aattccaagtgcctg

SEQ ID NO: 873947 - DNA, 15 bp, Homo sapiens
gaattccaagtgcct

SEQ ID NO: 873948 - DNA, 15 bp, Homo sapiens
ggaattccaagtgcc

SEQ ID NO: 873949 - DNA, 15 bp, Homo sapiens
aggaattccaagtgc

SEQ ID NO: 873950 - DNA, 15 bp, Homo sapiens
gaggaattccaagtg

SEQ ID NO: 873951 - DNA, 15 bp, Homo sapiens
ggaggaattccaagt

SEQ ID NO: 873952 - DNA, 15 bp, Homo sapiens
gggaggaattccaag

SEQ ID NO: 873953 - DNA, 15 bp, Homo sapiens
agggaggaattccaa

SEQ ID NO: 873954 - DNA, 15 bp, Homo sapiens
cagggaggaattcca

SEQ ID NO: 873955 - DNA, 15 bp, Homo sapiens
ccagggaggaattcc

SEQ ID NO: 873956 - DNA, 15 bp, Homo sapiens
tccagggaggaattc

SEQ ID NO: 873957 - DNA, 15 bp, Homo sapiens
atccagggaggaatt

SEQ ID NO: 873958 - DNA, 15 bp, Homo sapiens
aatccagggaggaat

SEQ ID NO: 873959 - DNA, 15 bp, Homo sapiens
taatccagggaggaa

SEQ ID NO: 873960 - DNA, 15 bp, Homo sapiens
ctaatccagggagga

SEQ ID NO: 873961 - DNA, 15 bp, Homo sapiens
actaatccagggagg

SEQ ID NO: 873962 - DNA, 15 bp, Homo sapiens
gactaatccagggag

SEQ ID NO: 873963 - DNA, 15 bp, Homo sapiens
ggactaatccaggga

SEQ ID NO: 873964 - DNA, 15 bp, Homo sapiens
aggactaatccaggg

SEQ ID NO: 873965 - DNA, 15 bp, Homo sapiens
taggactaatccagg

SEQ ID NO: 873966 - DNA, 15 bp, Homo sapiens
ataggactaatccag

SEQ ID NO: 873967 - DNA, 15 bp, Homo sapiens
gataggactaatcca

SEQ ID NO: 873968 - DNA, 15 bp, Homo sapiens
ggataggactaatcc

SEQ ID NO: 873969 - DNA, 15 bp, Homo sapiens
aggataggactaatc

SEQ ID NO: 873970 - DNA, 15 bp, Homo sapiens
caggataggactaat

SEQ ID NO: 873971 - DNA, 15 bp, Homo sapiens
gcaggataggactaa

SEQ ID NO: 873972 - DNA, 15 bp, Homo sapiens
ggcaggataggacta

SEQ ID NO: 873973 - DNA, 15 bp, Homo sapiens
aggcaggataggact

SEQ ID NO: 873974 - DNA, 15 bp, Homo sapiens
aaggcaggataggac

SEQ ID NO: 873975 - DNA, 15 bp, Homo sapiens
gaaggcaggatagga

SEQ ID NO: 873976 - DNA, 15 bp, Homo sapiens
agaaggcaggatagg

SEQ ID NO: 873977 - DNA, 15 bp, Homo sapiens
aagaaggcaggatag

SEQ ID NO: 873978 - DNA, 15 bp, Homo sapiens
aaagaaggcaggata

SEQ ID NO: 873979 - DNA, 15 bp, Homo sapiens
gaaagaaggcaggat

SEQ ID NO: 873980 - DNA, 15 bp, Homo sapiens
ggaaagaaggcagga

SEQ ID NO: 873981 - DNA, 15 bp, Homo sapiens
aggaaagaaggcagg

SEQ ID NO: 873982 - DNA, 15 bp, Homo sapiens
aaggaaagaaggcag

SEQ ID NO: 873983 - DNA, 15 bp, Homo sapiens
aaaggaaagaaggca

SEQ ID NO: 873984 - DNA, 15 bp, Homo sapiens
aaaaggaaagaaggc

SEQ ID NO: 873985 - DNA, 15 bp, Homo sapiens
gaaaaggaaagaagg

SEQ ID NO: 873986 - DNA, 15 bp, Homo sapiens
tgaaaaggaaagaag

SEQ ID NO: 873987 - DNA, 15 bp, Homo sapiens
ctgaaaaggaaagaa

SEQ ID NO: 873988 - DNA, 15 bp, Homo sapiens
gctgaaaaggaaaga

SEQ ID NO: 873989 - DNA, 15 bp, Homo sapiens
ggctgaaaaggaaag

SEQ ID NO: 873990 - DNA, 15 bp, Homo sapiens
aggctgaaaaggaaa

SEQ ID NO: 873991 - DNA, 15 bp, Homo sapiens
gaggctgaaaaggaa

SEQ ID NO: 873992 - DNA, 15 bp, Homo sapiens
ggaggctgaaaagga

SEQ ID NO: 873993 - DNA, 15 bp, Homo sapiens
gggaggctgaaaagg

SEQ ID NO: 873994 - DNA, 15 bp, Homo sapiens
tgggaggctgaaaag

SEQ ID NO: 873995 - DNA, 15 bp, Homo sapiens
ttgggaggctgaaaa

SEQ ID NO: 873996 - DNA, 15 bp, Homo sapiens
cttgggaggctgaaa

SEQ ID NO: 873997 - DNA, 15 bp, Homo sapiens
gcttgggaggctgaa

SEQ ID NO: 873998 - DNA, 15 bp, Homo sapiens
agcttgggaggctga

SEQ ID NO: 873999 - DNA, 15 bp, Homo sapiens
cagcttgggaggctg

SEQ ID NO: 874000 - DNA, 15 bp, Homo sapiens
gcagcttgggaggct

SEQ ID NO: 874001 - DNA, 15 bp, Homo sapiens
agcagcttgggaggc

SEQ ID NO: 874002 - DNA, 15 bp, Homo sapiens
aagcagcttgggagg

SEQ ID NO: 874003 - DNA, 15 bp, Homo sapiens
gaagcagcttgggag

SEQ ID NO: 874004 - DNA, 15 bp, Homo sapiens
ggaagcagcttggga

SEQ ID NO: 874005 - DNA, 15 bp, Homo sapiens
gggaagcagcttggg

SEQ ID NO: 874006 - DNA, 15 bp, Homo sapiens
ggggaagcagcttgg

SEQ ID NO: 874007 - DNA, 15 bp, Homo sapiens
tggggaagcagcttg

SEQ ID NO: 874008 - DNA, 15 bp, Homo sapiens
ttggggaagcagctt

SEQ ID NO: 874009 - DNA, 15 bp, Homo sapiens
attggggaagcagct

SEQ ID NO: 874010 - DNA, 15 bp, Homo sapiens
cattggggaagcagc

SEQ ID NO: 874011 - DNA, 15 bp, Homo sapiens
tcattggggaagcag

SEQ ID NO: 874012 - DNA, 15 bp, Homo sapiens
gtcattggggaagca

SEQ ID NO: 874013 - DNA, 15 bp, Homo sapiens
agtcattggggaagc

SEQ ID NO: 874014 - DNA, 15 bp, Homo sapiens
cagtcattggggaag

SEQ ID NO: 874015 - DNA, 15 bp, Homo sapiens
gcagtcattggggaa

SEQ ID NO: 874016 - DNA, 15 bp, Homo sapiens
ggcagtcattgggga

SEQ ID NO: 874017 - DNA, 15 bp, Homo sapiens
gggcagtcattgggg

SEQ ID NO: 874018 - DNA, 15 bp, Homo sapiens
agggcagtcattggg

SEQ ID NO: 874019 - DNA, 15 bp, Homo sapiens
gagggcagtcattgg

SEQ ID NO: 874020 - DNA, 15 bp, Homo sapiens
ggagggcagtcattg

SEQ ID NO: 874021 - DNA, 15 bp, Homo sapiens
gggagggcagtcatt

SEQ ID NO: 874022 - DNA, 15 bp, Homo sapiens
agggagggcagtcat

SEQ ID NO: 874023 - DNA, 15 bp, Homo sapiens
aagggagggcagtca

SEQ ID NO: 874024 - DNA, 15 bp, Homo sapiens
caagggagggcagtc

SEQ ID NO: 874025 - DNA, 15 bp, Homo sapiens
gcaagggagggcagt

SEQ ID NO: 874026 - DNA, 15 bp, Homo sapiens
agcaagggagggcag

SEQ ID NO: 874027 - DNA, 15 bp, Homo sapiens
aagcaagggagggca

SEQ ID NO: 874028 - DNA, 15 bp, Homo sapiens
aaagcaagggagggc

SEQ ID NO: 874029 - DNA, 15 bp, Homo sapiens
aaaagcaagggaggg

SEQ ID NO: 874030 - DNA, 15 bp, Homo sapiens
aaaaagcaagggagg

SEQ ID NO: 874031 - DNA, 15 bp, Homo sapiens
aaaaaagcaagggag

SEQ ID NO: 874032 - DNA, 15 bp, Homo sapiens
gaaaaaagcaaggga

SEQ ID NO: 874033 - DNA, 15 bp, Homo sapiens
ggaaaaaagcaaggg

SEQ ID NO: 874034 - DNA, 15 bp, Homo sapiens
cggaaaaaagcaagg

SEQ ID NO: 874035 - DNA, 15 bp, Homo sapiens
ccggaaaaaagcaag

SEQ ID NO: 874036 - DNA, 15 bp, Homo sapiens
gccggaaaaaagcaa

SEQ ID NO: 874037 - DNA, 15 bp, Homo sapiens
ggccggaaaaaagca

SEQ ID NO: 874038 - DNA, 15 bp, Homo sapiens
tggccggaaaaaagc

SEQ ID NO: 874039 - DNA, 15 bp, Homo sapiens
gtggccggaaaaaag

SEQ ID NO: 874040 - DNA, 15 bp, Homo sapiens
ggtggccggaaaaaa

SEQ ID NO: 874041 - DNA, 15 bp, Homo sapiens
aggtggccggaaaaa

SEQ ID NO: 874042 - DNA, 15 bp, Homo sapiens
caggtggccggaaaa

SEQ ID NO: 874043 - DNA, 15 bp, Homo sapiens
gcaggtggccggaaa

SEQ ID NO: 874044 - DNA, 15 bp, Homo sapiens
agcaggtggccggaa

SEQ ID NO: 874045 - DNA, 15 bp, Homo sapiens
gagcaggtggccgga

SEQ ID NO: 874046 - DNA, 15 bp, Homo sapiens
agagcaggtggccgg

SEQ ID NO: 874047 - DNA, 15 bp, Homo sapiens
gagagcaggtggccg

SEQ ID NO: 874048 - DNA, 15 bp, Homo sapiens
tgagagcaggtggcc

SEQ ID NO: 874049 - DNA, 15 bp, Homo sapiens
ttgagagcaggtggc

SEQ ID NO: 874050 - DNA, 15 bp, Homo sapiens
gttgagagcaggtgg

SEQ ID NO: 874051 - DNA, 15 bp, Homo sapiens
tgttgagagcaggtg

SEQ ID NO: 874052 - DNA, 15 bp, Homo sapiens
ctgttgagagcaggt

SEQ ID NO: 874053 - DNA, 15 bp, Homo sapiens
cctgttgagagcagg

SEQ ID NO: 874054 - DNA, 15 bp, Homo sapiens
tcctgttgagagcag

SEQ ID NO: 874055 - DNA, 15 bp, Homo sapiens
ctcctgttgagagca

SEQ ID NO: 874056 - DNA, 15 bp, Homo sapiens
gctcctgttgagagc

SEQ ID NO: 874057 - DNA, 15 bp, Homo sapiens
agctcctgttgagag

SEQ ID NO: 874058 - DNA, 15 bp, Homo sapiens
cagctcctgttgaga

SEQ ID NO: 874059 - DNA, 15 bp, Homo sapiens
gcagctcctgttgag

SEQ ID NO: 874060 - DNA, 15 bp, Homo sapiens
tgcagctcctgttga

SEQ ID NO: 874061 - DNA, 15 bp, Homo sapiens
ctgcagctcctgttg

SEQ ID NO: 874062 - DNA, 15 bp, Homo sapiens
tctgcagctcctgtt

SEQ ID NO: 874063 - DNA, 15 bp, Homo sapiens
gtctgcagctcctgt

SEQ ID NO: 874064 - DNA, 15 bp, Homo sapiens
ggtctgcagctcctg

SEQ ID NO: 874065 - DNA, 15 bp, Homo sapiens
gggtctgcagctcct

SEQ ID NO: 874066 - DNA, 15 bp, Homo sapiens
agggtctgcagctcc

SEQ ID NO: 874067 - DNA, 15 bp, Homo sapiens
aagggtctgcagctc

SEQ ID NO: 874068 - DNA, 15 bp, Homo sapiens
aaagggtctgcagct

SEQ ID NO: 874069 - DNA, 15 bp, Homo sapiens
caaagggtctgcagc

SEQ ID NO: 874070 - DNA, 15 bp, Homo sapiens
ccaaagggtctgcag

SEQ ID NO: 874071 - DNA, 15 bp, Homo sapiens
tccaaagggtctgca

SEQ ID NO: 874072 - DNA, 15 bp, Homo sapiens
gtccaaagggtctgc

SEQ ID NO: 874073 - DNA, 15 bp, Homo sapiens
tgtccaaagggtctg

SEQ ID NO: 874074 - DNA, 15 bp, Homo sapiens
ttgtccaaagggtct

SEQ ID NO: 874075 - DNA, 15 bp, Homo sapiens
tttgtccaaagggtc

SEQ ID NO: 874076 - DNA, 15 bp, Homo sapiens
ctttgtccaaagggt

SEQ ID NO: 874077 - DNA, 15 bp, Homo sapiens
cctttgtccaaaggg

SEQ ID NO: 874078 - DNA, 15 bp, Homo sapiens
ccctttgtccaaagg

SEQ ID NO: 874079 - DNA, 15 bp, Homo sapiens
gccctttgtccaaag

SEQ ID NO: 874080 - DNA, 15 bp, Homo sapiens
ggccctttgtccaaa

SEQ ID NO: 874081 - DNA, 15 bp, Homo sapiens
aggccctttgtccaa

SEQ ID NO: 874082 - DNA, 15 bp, Homo sapiens
caggccctttgtcca

SEQ ID NO: 874083 - DNA, 15 bp, Homo sapiens
gcaggccctttgtcc

SEQ ID NO: 874084 - DNA, 15 bp, Homo sapiens
ggcaggccctttgtc

SEQ ID NO: 874085 - DNA, 15 bp, Homo sapiens
tggcaggccctttgt

SEQ ID NO: 874086 - DNA, 15 bp, Homo sapiens
ctggcaggccctttg

SEQ ID NO: 874087 - DNA, 15 bp, Homo sapiens
tctggcaggcccttt

SEQ ID NO: 874088 - DNA, 15 bp, Homo sapiens
atctggcaggccctt

SEQ ID NO: 874089 - DNA, 15 bp, Homo sapiens
gatctggcaggccct

SEQ ID NO: 874090 - DNA, 15 bp, Homo sapiens
ggatctggcaggccc

SEQ ID NO: 874091 - DNA, 15 bp, Homo sapiens
aggatctggcaggcc

SEQ ID NO: 874092 - DNA, 15 bp, Homo sapiens
caggatctggcaggc

SEQ ID NO: 874093 - DNA, 15 bp, Homo sapiens
ccaggatctggcagg

SEQ ID NO: 874094 - DNA, 15 bp, Homo sapiens
cccaggatctggcag

SEQ ID NO: 874095 - DNA, 15 bp, Homo sapiens
ccccaggatctggca

SEQ ID NO: 874096 - DNA, 15 bp, Homo sapiens
gccccaggatctggc

SEQ ID NO: 874097 - DNA, 15 bp, Homo sapiens
tgccccaggatctgg

SEQ ID NO: 874098 - DNA, 15 bp, Homo sapiens
ttgccccaggatctg

SEQ ID NO: 874099 - DNA, 15 bp, Homo sapiens
attgccccaggatct

SEQ ID NO: 874100 - DNA, 15 bp, Homo sapiens
aattgccccaggatc

SEQ ID NO: 874101 - DNA, 15 bp, Homo sapiens
gaattgccccaggat

SEQ ID NO: 874102 - DNA, 15 bp, Homo sapiens
tgaattgccccagga

SEQ ID NO: 874103 - DNA, 15 bp, Homo sapiens
ctgaattgccccagg

SEQ ID NO: 874104 - DNA, 15 bp, Homo sapiens
gctgaattgccccag

SEQ ID NO: 874105 - DNA, 15 bp, Homo sapiens
ggctgaattgcccca

SEQ ID NO: 874106 - DNA, 15 bp, Homo sapiens
aggctgaattgcccc

SEQ ID NO: 874107 - DNA, 15 bp, Homo sapiens
gaggctgaattgccc

SEQ ID NO: 874108 - DNA, 15 bp, Homo sapiens
agaggctgaattgcc

SEQ ID NO: 874109 - DNA, 15 bp, Homo sapiens
cagaggctgaattgc

SEQ ID NO: 874110 - DNA, 15 bp, Homo sapiens
ccagaggctgaattg

SEQ ID NO: 874111 - DNA, 15 bp, Homo sapiens
accagaggctgaatt

SEQ ID NO: 874112 - DNA, 15 bp, Homo sapiens
aaccagaggctgaat

SEQ ID NO: 874113 - DNA, 15 bp, Homo sapiens
caaccagaggctgaa

SEQ ID NO: 874114 - DNA, 15 bp, Homo sapiens
ccaaccagaggctga

SEQ ID NO: 874115 - DNA, 15 bp, Homo sapiens
tccaaccagaggctg

SEQ ID NO: 874116 - DNA, 15 bp, Homo sapiens
ctccaaccagaggct

SEQ ID NO: 874117 - DNA, 15 bp, Homo sapiens
gctccaaccagaggc

SEQ ID NO: 874118 - DNA, 15 bp, Homo sapiens
tgctccaaccagagg

SEQ ID NO: 874119 - DNA, 15 bp, Homo sapiens
ctgctccaaccagag

SEQ ID NO: 874120 - DNA, 15 bp, Homo sapiens
cctgctccaaccaga

SEQ ID NO: 874121 - DNA, 15 bp, Homo sapiens
acctgctccaaccag

SEQ ID NO: 874122 - DNA, 15 bp, Homo sapiens
cacctgctccaacca

SEQ ID NO: 874123 - DNA, 15 bp, Homo sapiens
ccacctgctccaacc

SEQ ID NO: 874124 - DNA, 15 bp, Homo sapiens
tccacctgctccaac

SEQ ID NO: 874125 - DNA, 15 bp, Homo sapiens
ctccacctgctccaa

SEQ ID NO: 874126 - DNA, 15 bp, Homo sapiens
cctccacctgctcca

SEQ ID NO: 874127 - DNA, 15 bp, Homo sapiens
gcctccacctgctcc

SEQ ID NO: 874128 - DNA, 15 bp, Homo sapiens
agcctccacctgctc

SEQ ID NO: 874129 - DNA, 15 bp, Homo sapiens
cagcctccacctgct

SEQ ID NO: 874130 - DNA, 15 bp, Homo sapiens
ccagcctccacctgc

SEQ ID NO: 874131 - DNA, 15 bp, Homo sapiens
cccagcctccacctg

SEQ ID NO: 874132 - DNA, 15 bp, Homo sapiens
gcccagcctccacct

SEQ ID NO: 874133 - DNA, 15 bp, Homo sapiens
ggcccagcctccacc

SEQ ID NO: 874134 - DNA, 15 bp, Homo sapiens
tggcccagcctccac

SEQ ID NO: 874135 - DNA, 15 bp, Homo sapiens
ctggcccagcctcca

SEQ ID NO: 874136 - DNA, 15 bp, Homo sapiens
gctggcccagcctcc

SEQ ID NO: 874137 - DNA, 15 bp, Homo sapiens
agctggcccagcctc

SEQ ID NO: 874138 - DNA, 15 bp, Homo sapiens
cagctggcccagcct

SEQ ID NO: 874139 - DNA, 15 bp, Homo sapiens
ccagctggcccagcc

SEQ ID NO: 874140 - DNA, 15 bp, Homo sapiens
cccagctggcccagc

SEQ ID NO: 874141 - DNA, 15 bp, Homo sapiens
ccccagctggcccag

SEQ ID NO: 874142 - DNA, 15 bp, Homo sapiens
gccccagctggccca

SEQ ID NO: 874143 - DNA, 15 bp, Homo sapiens
ggccccagctggccc

SEQ ID NO: 874144 - DNA, 15 bp, Homo sapiens
tggccccagctggcc

SEQ ID NO: 874145 - DNA, 15 bp, Homo sapiens
atggccccagctggc

SEQ ID NO: 874146 - DNA, 15 bp, Homo sapiens
catggccccagctgg

SEQ ID NO: 874147 - DNA, 15 bp, Homo sapiens
tcatggccccagctg

SEQ ID NO: 874148 - DNA, 15 bp, Homo sapiens
ctcatggccccagct

SEQ ID NO: 874149 - DNA, 15 bp, Homo sapiens
cctcatggccccagc

SEQ ID NO: 874150 - DNA, 15 bp, Homo sapiens
tcctcatggccccag

SEQ ID NO: 874151 - DNA, 15 bp, Homo sapiens
ttcctcatggcccca

SEQ ID NO: 874152 - DNA, 15 bp, Homo sapiens
cttcctcatggcccc

SEQ ID NO: 874153 - DNA, 15 bp, Homo sapiens
ccttcctcatggccc

SEQ ID NO: 874154 - DNA, 15 bp, Homo sapiens
tccttcctcatggcc

SEQ ID NO: 874155 - DNA, 15 bp, Homo sapiens
ttccttcctcatggc

SEQ ID NO: 874156 - DNA, 15 bp, Homo sapiens
tttccttcctcatgg

SEQ ID NO: 874157 - DNA, 15 bp, Homo sapiens
atttccttcctcatg

SEQ ID NO: 874158 - DNA, 15 bp, Homo sapiens
gatttccttcctcat

SEQ ID NO: 874159 - DNA, 15 bp, Homo sapiens
tgatttccttcctca

SEQ ID NO: 874160 - DNA, 15 bp, Homo sapiens
ttgatttccttcctc

SEQ ID NO: 874161 - DNA, 15 bp, Homo sapiens
tttgatttccttcct

SEQ ID NO: 874162 - DNA, 15 bp, Homo sapiens
ctttgatttccttcc

SEQ ID NO: 874163 - DNA, 15 bp, Homo sapiens
gctttgatttccttc

SEQ ID NO: 874164 - DNA, 15 bp, Homo sapiens
tgctttgatttcctt

SEQ ID NO: 874165 - DNA, 15 bp, Homo sapiens
ttgctttgatttcct

SEQ ID NO: 874166 - DNA, 15 bp, Homo sapiens
attgctttgatttcc

SEQ ID NO: 874167 - DNA, 15 bp, Homo sapiens
aattgctttgatttc

SEQ ID NO: 874168 - DNA, 15 bp, Homo sapiens
caattgctttgattt

SEQ ID NO: 874169 - DNA, 15 bp, Homo sapiens
tcaattgctttgatt

SEQ ID NO: 874170 - DNA, 15 bp, Homo sapiens
gtcaattgctttgat

SEQ ID NO: 874171 - DNA, 15 bp, Homo sapiens
tgtcaattgctttga

SEQ ID NO: 874172 - DNA, 15 bp, Homo sapiens
ctgtcaattgctttg

SEQ ID NO: 874173 - DNA, 15 bp, Homo sapiens
cctgtcaattgcttt

SEQ ID NO: 874174 - DNA, 15 bp, Homo sapiens
gcctgtcaattgctt

SEQ ID NO: 874175 - DNA, 15 bp, Homo sapiens
tgcctgtcaattgct

SEQ ID NO: 874176 - DNA, 15 bp, Homo sapiens
ctgcctgtcaattgc

SEQ ID NO: 874177 - DNA, 15 bp, Homo sapiens
tctgcctgtcaattg

SEQ ID NO: 874178 - DNA, 15 bp, Homo sapiens
gtctgcctgtcaatt

SEQ ID NO: 874179 - DNA, 15 bp, Homo sapiens
tgtctgcctgtcaat

SEQ ID NO: 874180 - DNA, 15 bp, Homo sapiens
ctgtctgcctgtcaa

SEQ ID NO: 874181 - DNA, 15 bp, Homo sapiens
gctgtctgcctgtca

SEQ ID NO: 874182 - DNA, 15 bp, Homo sapiens
ggctgtctgcctgtc

SEQ ID NO: 874183 - DNA, 15 bp, Homo sapiens
tggctgtctgcctgt

SEQ ID NO: 874184 - DNA, 15 bp, Homo sapiens
ctggctgtctgcctg

SEQ ID NO: 874185 - DNA, 15 bp, Homo sapiens
gctggctgtctgcct

SEQ ID NO: 874186 - DNA, 15 bp, Homo sapiens
ggctggctgtctgcc

SEQ ID NO: 874187 - DNA, 15 bp, Homo sapiens
gggctggctgtctgc

SEQ ID NO: 874188 - DNA, 15 bp, Homo sapiens
ggggctggctgtctg

SEQ ID NO: 874189 - DNA, 15 bp, Homo sapiens
aggggctggctgtct

SEQ ID NO: 874190 - DNA, 15 bp, Homo sapiens
caggggctggctgtc

SEQ ID NO: 874191 - DNA, 15 bp, Homo sapiens
ccaggggctggctgt

SEQ ID NO: 874192 - DNA, 15 bp, Homo sapiens
tccaggggctggctg

SEQ ID NO: 874193 - DNA, 15 bp, Homo sapiens
ctccaggggctggct

SEQ ID NO: 874194 - DNA, 15 bp, Homo sapiens
cctccaggggctggc

SEQ ID NO: 874195 - DNA, 15 bp, Homo sapiens
tcctccaggggctgg

SEQ ID NO: 874196 - DNA, 15 bp, Homo sapiens
ctcctccaggggctg

SEQ ID NO: 874197 - DNA, 15 bp, Homo sapiens
gctcctccaggggct

SEQ ID NO: 874198 - DNA, 15 bp, Homo sapiens
ggctcctccaggggc

SEQ ID NO: 874199 - DNA, 15 bp, Homo sapiens
tggctcctccagggg

SEQ ID NO: 874200 - DNA, 15 bp, Homo sapiens
ctggctcctccaggg

SEQ ID NO: 874201 - DNA, 15 bp, Homo sapiens
cctggctcctccagg

SEQ ID NO: 874202 - DNA, 15 bp, Homo sapiens
ccctggctcctccag

SEQ ID NO: 874203 - DNA, 15 bp, Homo sapiens
tccctggctcctcca

SEQ ID NO: 874204 - DNA, 15 bp, Homo sapiens
ttccctggctcctcc

SEQ ID NO: 874205 - DNA, 15 bp, Homo sapiens
attccctggctcctc

SEQ ID NO: 874206 - DNA, 15 bp, Homo sapiens
tattccctggctcct

SEQ ID NO: 874207 - DNA, 15 bp, Homo sapiens
atattccctggctcc

SEQ ID NO: 874208 - DNA, 15 bp, Homo sapiens
tatattccctggctc

SEQ ID NO: 874209 - DNA, 15 bp, Homo sapiens
atatattccctggct

SEQ ID NO: 874210 - DNA, 15 bp, Homo sapiens
tatatattccctggc

SEQ ID NO: 874211 - DNA, 15 bp, Homo sapiens
ctatatattccctgg

SEQ ID NO: 874212 - DNA, 15 bp, Homo sapiens
actatatattccctg

SEQ ID NO: 874213 - DNA, 15 bp, Homo sapiens
tactatatattccct

SEQ ID NO: 874214 - DNA, 15 bp, Homo sapiens
ttactatatattccc

SEQ ID NO: 874215 - DNA, 15 bp, Homo sapiens
tttactatatattcc

SEQ ID NO: 874216 - DNA, 15 bp, Homo sapiens
gtttactatatattc

SEQ ID NO: 874217 - DNA, 15 bp, Homo sapiens
ggtttactatatatt

SEQ ID NO: 874218 - DNA, 15 bp, Homo sapiens
tggtttactatatat

SEQ ID NO: 874219 - DNA, 15 bp, Homo sapiens
ctggtttactatata

SEQ ID NO: 874220 - DNA, 15 bp, Homo sapiens
gctggtttactatat

SEQ ID NO: 874221 - DNA, 15 bp, Homo sapiens
agctggtttactata

SEQ ID NO: 874222 - DNA, 15 bp, Homo sapiens
cagctggtttactat

SEQ ID NO: 874223 - DNA, 15 bp, Homo sapiens
ccagctggtttacta

SEQ ID NO: 874224 - DNA, 15 bp, Homo sapiens
tccagctggtttact

SEQ ID NO: 874225 - DNA, 15 bp, Homo sapiens
ctccagctggtttac

SEQ ID NO: 874226 - DNA, 15 bp, Homo sapiens
tctccagctggttta

SEQ ID NO: 874227 - DNA, 15 bp, Homo sapiens
ctctccagctggttt

SEQ ID NO: 874228 - DNA, 15 bp, Homo sapiens
gctctccagctggtt

SEQ ID NO: 874229 - DNA, 15 bp, Homo sapiens
ggctctccagctggt

SEQ ID NO: 874230 - DNA, 15 bp, Homo sapiens
cggctctccagctgg

SEQ ID NO: 874231 - DNA, 15 bp, Homo sapiens
ccggctctccagctg

SEQ ID NO: 874232 - DNA, 15 bp, Homo sapiens
gccggctctccagct

SEQ ID NO: 874233 - DNA, 15 bp, Homo sapiens
tgccggctctccagc

SEQ ID NO: 874234 - DNA, 15 bp, Homo sapiens
ctgccggctctccag

SEQ ID NO: 874235 - DNA, 15 bp, Homo sapiens
gctgccggctctcca

SEQ ID NO: 874236 - DNA, 15 bp, Homo sapiens
ggctgccggctctcc

SEQ ID NO: 874237 - DNA, 15 bp, Homo sapiens
aggctgccggctctc

SEQ ID NO: 874238 - DNA, 15 bp, Homo sapiens
caggctgccggctct

SEQ ID NO: 874239 - DNA, 15 bp, Homo sapiens
tcaggctgccggctc

SEQ ID NO: 874240 - DNA, 15 bp, Homo sapiens
ttcaggctgccggct

SEQ ID NO: 874241 - DNA, 15 bp, Homo sapiens
gttcaggctgccggc

SEQ ID NO: 874242 - DNA, 15 bp, Homo sapiens
agttcaggctgccgg

SEQ ID NO: 874243 - DNA, 15 bp, Homo sapiens
cagttcaggctgccg

SEQ ID NO: 874244 - DNA, 15 bp, Homo sapiens
ccagttcaggctgcc

SEQ ID NO: 874245 - DNA, 15 bp, Homo sapiens
tccagttcaggctgc

SEQ ID NO: 874246 - DNA, 15 bp, Homo sapiens
ctccagttcaggctg

SEQ ID NO: 874247 - DNA, 15 bp, Homo sapiens
cctccagttcaggct

SEQ ID NO: 874248 - DNA, 15 bp, Homo sapiens
gcctccagttcaggc

SEQ ID NO: 874249 - DNA, 15 bp, Homo sapiens
agcctccagttcagg

SEQ ID NO: 874250 - DNA, 15 bp, Homo sapiens
gagcctccagttcag

SEQ ID NO: 874251 - DNA, 15 bp, Homo sapiens
tgagcctccagttca

SEQ ID NO: 874252 - DNA, 15 bp, Homo sapiens
ctgagcctccagttc

SEQ ID NO: 874253 - DNA, 15 bp, Homo sapiens
tctgagcctccagtt

SEQ ID NO: 874254 - DNA, 15 bp, Homo sapiens
ttctgagcctccagt

SEQ ID NO: 874255 - DNA, 15 bp, Homo sapiens
tttctgagcctccag

SEQ ID NO: 874256 - DNA, 15 bp, Homo sapiens
ctttctgagcctcca

SEQ ID NO: 874257 - DNA, 15 bp, Homo sapiens
cctttctgagcctcc

SEQ ID NO: 874258 - DNA, 15 bp, Homo sapiens
tcctttctgagcctc

SEQ ID NO: 874259 - DNA, 15 bp, Homo sapiens
ctcctttctgagcct

SEQ ID NO: 874260 - DNA, 15 bp, Homo sapiens
cctcctttctgagcc

SEQ ID NO: 874261 - DNA, 15 bp, Homo sapiens
acctcctttctgagc

SEQ ID NO: 874262 - DNA, 15 bp, Homo sapiens
aacctcctttctgag

SEQ ID NO: 874263 - DNA, 15 bp, Homo sapiens
gaacctcctttctga

SEQ ID NO: 874264 - DNA, 15 bp, Homo sapiens
agaacctcctttctg

SEQ ID NO: 874265 - DNA, 15 bp, Homo sapiens
aagaacctcctttct

SEQ ID NO: 874266 - DNA, 15 bp, Homo sapiens
taagaacctcctttc

SEQ ID NO: 874267 - DNA, 15 bp, Homo sapiens
ctaagaacctccttt

SEQ ID NO: 874268 - DNA, 15 bp, Homo sapiens
actaagaacctcctt

SEQ ID NO: 874269 - DNA, 15 bp, Homo sapiens
cactaagaacctcct

SEQ ID NO: 874270 - DNA, 15 bp, Homo sapiens
ccactaagaacctcc

SEQ ID NO: 874271 - DNA, 15 bp, Homo sapiens
cccactaagaacctc

SEQ ID NO: 874272 - DNA, 15 bp, Homo sapiens
ccccactaagaacct

SEQ ID NO: 874273 - DNA, 15 bp, Homo sapiens
tccccactaagaacc

SEQ ID NO: 874274 - DNA, 15 bp, Homo sapiens
gtccccactaagaac

SEQ ID NO: 874275 - DNA, 15 bp, Homo sapiens
tgtccccactaagaa

SEQ ID NO: 874276 - DNA, 15 bp, Homo sapiens
atgtccccactaaga

SEQ ID NO: 874277 - DNA, 15 bp, Homo sapiens
aatgtccccactaag

SEQ ID NO: 874278 - DNA, 15 bp, Homo sapiens
caatgtccccactaa

SEQ ID NO: 874279 - DNA, 15 bp, Homo sapiens
tcaatgtccccacta

SEQ ID NO: 874280 - DNA, 15 bp, Homo sapiens
ctcaatgtccccact

SEQ ID NO: 874281 - DNA, 15 bp, Homo sapiens
cctcaatgtccccac

SEQ ID NO: 874282 - DNA, 15 bp, Homo sapiens
ccctcaatgtcccca

SEQ ID NO: 874283 - DNA, 15 bp, Homo sapiens
cccctcaatgtcccc

SEQ ID NO: 874284 - DNA, 15 bp, Homo sapiens
ccccctcaatgtccc

SEQ ID NO: 874285 - DNA, 15 bp, Homo sapiens
tccccctcaatgtcc

SEQ ID NO: 874286 - DNA, 15 bp, Homo sapiens
ctccccctcaatgtc

SEQ ID NO: 874287 - DNA, 15 bp, Homo sapiens
actccccctcaatgt

SEQ ID NO: 874288 - DNA, 15 bp, Homo sapiens
aactccccctcaatg

SEQ ID NO: 874289 - DNA, 15 bp, Homo sapiens
taactccccctcaat

SEQ ID NO: 874290 - DNA, 15 bp, Homo sapiens
ttaactccccctcaa

SEQ ID NO: 874291 - DNA, 15 bp, Homo sapiens
cttaactccccctca

SEQ ID NO: 874292 - DNA, 15 bp, Homo sapiens
tcttaactccccctc

SEQ ID NO: 874293 - DNA, 15 bp, Homo sapiens
ctcttaactccccct

SEQ ID NO: 874294 - DNA, 15 bp, Homo sapiens
actcttaactccccc

SEQ ID NO: 874295 - DNA, 15 bp, Homo sapiens
cactcttaactcccc

SEQ ID NO: 874296 - DNA, 15 bp, Homo sapiens
gcactcttaactccc

SEQ ID NO: 874297 - DNA, 15 bp, Homo sapiens
tgcactcttaactcc

SEQ ID NO: 874298 - DNA, 15 bp, Homo sapiens
ctgcactcttaactc

SEQ ID NO: 874299 - DNA, 15 bp, Homo sapiens
tctgcactcttaact

SEQ ID NO: 874300 - DNA, 15 bp, Homo sapiens
atctgcactcttaac

SEQ ID NO: 874301 - DNA, 15 bp, Homo sapiens
aatctgcactcttaa

SEQ ID NO: 874302 - DNA, 15 bp, Homo sapiens
gaatctgcactctta

SEQ ID NO: 874303 - DNA, 15 bp, Homo sapiens
tgaatctgcactctt

SEQ ID NO: 874304 - DNA, 15 bp, Homo sapiens
ctgaatctgcactct

SEQ ID NO: 874305 - DNA, 15 bp, Homo sapiens
cctgaatctgcactc

SEQ ID NO: 874306 - DNA, 15 bp, Homo sapiens
tcctgaatctgcact

SEQ ID NO: 874307 - DNA, 15 bp, Homo sapiens
ttcctgaatctgcac

SEQ ID NO: 874308 - DNA, 15 bp, Homo sapiens
cttcctgaatctgca

SEQ ID NO: 874309 - DNA, 15 bp, Homo sapiens
gcttcctgaatctgc

SEQ ID NO: 874310 - DNA, 15 bp, Homo sapiens
tgcttcctgaatctg

SEQ ID NO: 874311 - DNA, 15 bp, Homo sapiens
gtgcttcctgaatct

SEQ ID NO: 874312 - DNA, 15 bp, Homo sapiens
cgtgcttcctgaatc

SEQ ID NO: 874313 - DNA, 15 bp, Homo sapiens
ccgtgcttcctgaat

SEQ ID NO: 874314 - DNA, 15 bp, Homo sapiens
gccgtgcttcctgaa

SEQ ID NO: 874315 - DNA, 15 bp, Homo sapiens
cgccgtgcttcctga

SEQ ID NO: 874316 - DNA, 15 bp, Homo sapiens
tcgccgtgcttcctg

SEQ ID NO: 874317 - DNA, 15 bp, Homo sapiens
gtcgccgtgcttcct

SEQ ID NO: 874318 - DNA, 15 bp, Homo sapiens
ggtcgccgtgcttcc

SEQ ID NO: 874319 - DNA, 15 bp, Homo sapiens
tggtcgccgtgcttc

SEQ ID NO: 874320 - DNA, 15 bp, Homo sapiens
gtggtcgccgtgctt

SEQ ID NO: 874321 - DNA, 15 bp, Homo sapiens
tgtggtcgccgtgct

SEQ ID NO: 874322 - DNA, 15 bp, Homo sapiens
gtgtggtcgccgtgc

SEQ ID NO: 874323 - DNA, 15 bp, Homo sapiens
agtgtggtcgccgtg

SEQ ID NO: 874324 - DNA, 15 bp, Homo sapiens
gagtgtggtcgccgt

SEQ ID NO: 874325 - DNA, 15 bp, Homo sapiens
cgagtgtggtcgccg

SEQ ID NO: 874326 - DNA, 15 bp, Homo sapiens
ccgagtgtggtcgcc

SEQ ID NO: 874327 - DNA, 15 bp, Homo sapiens
accgagtgtggtcgc

SEQ ID NO: 874328 - DNA, 15 bp, Homo sapiens
caccgagtgtggtcg

SEQ ID NO: 874329 - DNA, 15 bp, Homo sapiens
acaccgagtgtggtc

SEQ ID NO: 874330 - DNA, 15 bp, Homo sapiens
cacaccgagtgtggt

SEQ ID NO: 874331 - DNA, 15 bp, Homo sapiens
tcacaccgagtgtgg

SEQ ID NO: 874332 - DNA, 15 bp, Homo sapiens
gtcacaccgagtgtg

SEQ ID NO: 874333 - DNA, 15 bp, Homo sapiens
agtcacaccgagtgt

SEQ ID NO: 874334 - DNA, 15 bp, Homo sapiens
aagtcacaccgagtg

SEQ ID NO: 874335 - DNA, 15 bp, Homo sapiens
aaagtcacaccgagt

SEQ ID NO: 874336 - DNA, 15 bp, Homo sapiens
caaagtcacaccgag

SEQ ID NO: 874337 - DNA, 15 bp, Homo sapiens
tcaaagtcacaccga

SEQ ID NO: 874338 - DNA, 15 bp, Homo sapiens
ctcaaagtcacaccg

SEQ ID NO: 874339 - DNA, 15 bp, Homo sapiens
gctcaaagtcacacc

SEQ ID NO: 874340 - DNA, 15 bp, Homo sapiens
tgctcaaagtcacac

SEQ ID NO: 874341 - DNA, 15 bp, Homo sapiens
ttgctcaaagtcaca

SEQ ID NO: 874342 - DNA, 15 bp, Homo sapiens
tttgctcaaagtcac

SEQ ID NO: 874343 - DNA, 15 bp, Homo sapiens
atttgctcaaagtca

SEQ ID NO: 874344 - DNA, 15 bp, Homo sapiens
gatttgctcaaagtc

SEQ ID NO: 874345 - DNA, 15 bp, Homo sapiens
tgatttgctcaaagt

SEQ ID NO: 874346 - DNA, 15 bp, Homo sapiens
atgatttgctcaaag

SEQ ID NO: 874347 - DNA, 15 bp, Homo sapiens
aatgatttgctcaaa

SEQ ID NO: 874348 - DNA, 15 bp, Homo sapiens
caatgatttgctcaa

SEQ ID NO: 874349 - DNA, 15 bp, Homo sapiens
tcaatgatttgctca

SEQ ID NO: 874350 - DNA, 15 bp, Homo sapiens
gtcaatgatttgctc

SEQ ID NO: 874351 - DNA, 15 bp, Homo sapiens
ggtcaatgatttgct

SEQ ID NO: 874352 - DNA, 15 bp, Homo sapiens
gggtcaatgatttgc

SEQ ID NO: 874353 - DNA, 15 bp, Homo sapiens
agggtcaatgatttg

SEQ ID NO: 874354 - DNA, 15 bp, Homo sapiens
aagggtcaatgattt

SEQ ID NO: 874355 - DNA, 15 bp, Homo sapiens
caagggtcaatgatt

SEQ ID NO: 874356 - DNA, 15 bp, Homo sapiens
gcaagggtcaatgat

SEQ ID NO: 874357 - DNA, 15 bp, Homo sapiens
tgcaagggtcaatga

SEQ ID NO: 874358 - DNA, 15 bp, Homo sapiens
ctgcaagggtcaatg

SEQ ID NO: 874359 - DNA, 15 bp, Homo sapiens
actgcaagggtcaat

SEQ ID NO: 874360 - DNA, 15 bp, Homo sapiens
gactgcaagggtcaa

SEQ ID NO: 874361 - DNA, 15 bp, Homo sapiens
agactgcaagggtca

SEQ ID NO: 874362 - DNA, 15 bp, Homo sapiens
gagactgcaagggtc

SEQ ID NO: 874363 - DNA, 15 bp, Homo sapiens
ggagactgcaagggt

SEQ ID NO: 874364 - DNA, 15 bp, Homo sapiens
gggagactgcaaggg

SEQ ID NO: 874365 - DNA, 15 bp, Homo sapiens
tgggagactgcaagg

SEQ ID NO: 874366 - DNA, 15 bp, Homo sapiens
gtgggagactgcaag

SEQ ID NO: 874367 - DNA, 15 bp, Homo sapiens
agtgggagactgcaa

SEQ ID NO: 874368 - DNA, 15 bp, Homo sapiens
cagtgggagactgca

SEQ ID NO: 874369 - DNA, 15 bp, Homo sapiens
acagtgggagactgc

SEQ ID NO: 874370 - DNA, 15 bp, Homo sapiens
tacagtgggagactg

SEQ ID NO: 874371 - DNA, 15 bp, Homo sapiens
atacagtgggagact

SEQ ID NO: 874372 - DNA, 15 bp, Homo sapiens
gatacagtgggagac

SEQ ID NO: 874373 - DNA, 15 bp, Homo sapiens
tgatacagtgggaga

SEQ ID NO: 874374 - DNA, 15 bp, Homo sapiens
ttgatacagtgggag

SEQ ID NO: 874375 - DNA, 15 bp, Homo sapiens
tttgatacagtggga

SEQ ID NO: 874376 - DNA, 15 bp, Homo sapiens
ctttgatacagtggg

SEQ ID NO: 874377 - DNA, 15 bp, Homo sapiens
cctttgatacagtgg

SEQ ID NO: 874378 - DNA, 15 bp, Homo sapiens
ccctttgatacagtg

SEQ ID NO: 874379 - DNA, 15 bp, Homo sapiens
cccctttgatacagt

SEQ ID NO: 874380 - DNA, 15 bp, Homo sapiens
tcccctttgatacag

SEQ ID NO: 874381 - DNA, 15 bp, Homo sapiens
ctcccctttgataca

SEQ ID NO: 874382 - DNA, 15 bp, Homo sapiens
actcccctttgatac

SEQ ID NO: 874383 - DNA, 15 bp, Homo sapiens
gactcccctttgata

SEQ ID NO: 874384 - DNA, 15 bp, Homo sapiens
tgactcccctttgat

SEQ ID NO: 874385 - DNA, 15 bp, Homo sapiens
gtgactcccctttga

SEQ ID NO: 874386 - DNA, 15 bp, Homo sapiens
tgtgactcccctttg

SEQ ID NO: 874387 - DNA, 15 bp, Homo sapiens
ttgtgactccccttt

SEQ ID NO: 874388 - DNA, 15 bp, Homo sapiens
cttgtgactcccctt

SEQ ID NO: 874389 - DNA, 15 bp, Homo sapiens
tcttgtgactcccct

SEQ ID NO: 874390 - DNA, 15 bp, Homo sapiens
ctcttgtgactcccc

SEQ ID NO: 874391 - DNA, 15 bp, Homo sapiens
gctcttgtgactccc

SEQ ID NO: 874392 - DNA, 15 bp, Homo sapiens
ggctcttgtgactcc

SEQ ID NO: 874393 - DNA, 15 bp, Homo sapiens
aggctcttgtgactc

SEQ ID NO: 874394 - DNA, 15 bp, Homo sapiens
gaggctcttgtgact

SEQ ID NO: 874395 - DNA, 15 bp, Homo sapiens
agaggctcttgtgac

SEQ ID NO: 874396 - DNA, 15 bp, Homo sapiens
cagaggctcttgtga

SEQ ID NO: 874397 - DNA, 15 bp, Homo sapiens
gcagaggctcttgtg

SEQ ID NO: 874398 - DNA, 15 bp, Homo sapiens
ggcagaggctcttgt

SEQ ID NO: 874399 - DNA, 15 bp, Homo sapiens
aggcagaggctcttg

SEQ ID NO: 874400 - DNA, 15 bp, Homo sapiens
aaggcagaggctctt

SEQ ID NO: 874401 - DNA, 15 bp, Homo sapiens
taaggcagaggctct

SEQ ID NO: 874402 - DNA, 15 bp, Homo sapiens
ataaggcagaggctc

SEQ ID NO: 874403 - DNA, 15 bp, Homo sapiens
tataaggcagaggct

SEQ ID NO: 874404 - DNA, 15 bp, Homo sapiens
ctataaggcagaggc

SEQ ID NO: 874405 - DNA, 15 bp, Homo sapiens
cctataaggcagagg

SEQ ID NO: 874406 - DNA, 15 bp, Homo sapiens
tcctataaggcagag

SEQ ID NO: 874407 - DNA, 15 bp, Homo sapiens
atcctataaggcaga

SEQ ID NO: 874408 - DNA, 15 bp, Homo sapiens
aatcctataaggcag

SEQ ID NO: 874409 - DNA, 15 bp, Homo sapiens
caatcctataaggca

SEQ ID NO: 874410 - DNA, 15 bp, Homo sapiens
ccaatcctataaggc

SEQ ID NO: 874411 - DNA, 15 bp, Homo sapiens
accaatcctataagg

SEQ ID NO: 874412 - DNA, 15 bp, Homo sapiens
caccaatcctataag

SEQ ID NO: 874413 - DNA, 15 bp, Homo sapiens
tcaccaatcctataa

SEQ ID NO: 874414 - DNA, 15 bp, Homo sapiens
ttcaccaatcctata

SEQ ID NO: 874415 - DNA, 15 bp, Homo sapiens
tttcaccaatcctat

SEQ ID NO: 874416 - DNA, 15 bp, Homo sapiens
atttcaccaatccta

SEQ ID NO: 874417 - DNA, 15 bp, Homo sapiens
gatttcaccaatcct

SEQ ID NO: 874418 - DNA, 15 bp, Homo sapiens
tgatttcaccaatcc

SEQ ID NO: 874419 - DNA, 15 bp, Homo sapiens
gtgatttcaccaatc

SEQ ID NO: 874420 - DNA, 15 bp, Homo sapiens
tgtgatttcaccaat

SEQ ID NO: 874421 - DNA, 15 bp, Homo sapiens
gtgtgatttcaccaa

SEQ ID NO: 874422 - DNA, 15 bp, Homo sapiens
tgtgtgatttcacca

SEQ ID NO: 874423 - DNA, 15 bp, Homo sapiens
ttgtgtgatttcacc

SEQ ID NO: 874424 - DNA, 15 bp, Homo sapiens
cttgtgtgatttcac

SEQ ID NO: 874425 - DNA, 15 bp, Homo sapiens
acttgtgtgatttca

SEQ ID NO: 874426 - DNA, 15 bp, Homo sapiens
cacttgtgtgatttc

SEQ ID NO: 874427 - DNA, 15 bp, Homo sapiens
tcacttgtgtgattt

SEQ ID NO: 874428 - DNA, 15 bp, Homo sapiens
ttcacttgtgtgatt

SEQ ID NO: 874429 - DNA, 15 bp, Homo sapiens
cttcacttgtgtgat

SEQ ID NO: 874430 - DNA, 15 bp, Homo sapiens
gcttcacttgtgtga

SEQ ID NO: 874431 - DNA, 15 bp, Homo sapiens
tgcttcacttgtgtg

SEQ ID NO: 874432 - DNA, 15 bp, Homo sapiens
gtgcttcacttgtgt

SEQ ID NO: 874433 - DNA, 15 bp, Homo sapiens
agtgcttcacttgtg

SEQ ID NO: 874434 - DNA, 15 bp, Homo sapiens
cagtgcttcacttgt

SEQ ID NO: 874435 - DNA, 15 bp, Homo sapiens
ccagtgcttcacttg

SEQ ID NO: 874436 - DNA, 15 bp, Homo sapiens
cccagtgcttcactt

SEQ ID NO: 874437 - DNA, 15 bp, Homo sapiens
tcccagtgcttcact

SEQ ID NO: 874438 - DNA, 15 bp, Homo sapiens
ttcccagtgcttcac

SEQ ID NO: 874439 - DNA, 15 bp, Homo sapiens
gttcccagtgcttca

SEQ ID NO: 874440 - DNA, 15 bp, Homo sapiens
tgttcccagtgcttc

SEQ ID NO: 874441 - DNA, 15 bp, Homo sapiens
ctgttcccagtgctt

SEQ ID NO: 874442 - DNA, 15 bp, Homo sapiens
tctgttcccagtgct

SEQ ID NO: 874443 - DNA, 15 bp, Homo sapiens
ctctgttcccagtgc

SEQ ID NO: 874444 - DNA, 15 bp, Homo sapiens
gctctgttcccagtg

SEQ ID NO: 874445 - DNA, 15 bp, Homo sapiens
tgctctgttcccagt

SEQ ID NO: 874446 - DNA, 15 bp, Homo sapiens
ctgctctgttcccag

SEQ ID NO: 874447 - DNA, 15 bp, Homo sapiens
tctgctctgttccca

SEQ ID NO: 874448 - DNA, 15 bp, Homo sapiens
ctctgctctgttccc

SEQ ID NO: 874449 - DNA, 15 bp, Homo sapiens
gctctgctctgttcc

SEQ ID NO: 874450 - DNA, 15 bp, Homo sapiens
tgctctgctctgttc

SEQ ID NO: 874451 - DNA, 15 bp, Homo sapiens
atgctctgctctgtt

SEQ ID NO: 874452 - DNA, 15 bp, Homo sapiens
catgctctgctctgt

SEQ ID NO: 874453 - DNA, 15 bp, Homo sapiens
acatgctctgctctg

SEQ ID NO: 874454 - DNA, 15 bp, Homo sapiens
aacatgctctgctct

SEQ ID NO: 874455 - DNA, 15 bp, Homo sapiens
aaacatgctctgctc

SEQ ID NO: 874456 - DNA, 15 bp, Homo sapiens
taaacatgctctgct

SEQ ID NO: 874457 - DNA, 15 bp, Homo sapiens
ttaaacatgctctgc

SEQ ID NO: 874458 - DNA, 15 bp, Homo sapiens
attaaacatgctctg

SEQ ID NO: 874459 - DNA, 15 bp, Homo sapiens
aattaaacatgctct

SEQ ID NO: 874460 - DNA, 15 bp, Homo sapiens
taattaaacatgctc

SEQ ID NO: 874461 - DNA, 15 bp, Homo sapiens
ttaattaaacatgct

SEQ ID NO: 874462 - DNA, 15 bp, Homo sapiens
cttaattaaacatgc

SEQ ID NO: 874463 - DNA, 15 bp, Homo sapiens
ccttaattaaacatg

SEQ ID NO: 874464 - DNA, 15 bp, Homo sapiens
tccttaattaaacat

SEQ ID NO: 874465 - DNA, 15 bp, Homo sapiens
gtccttaattaaaca

SEQ ID NO: 874466 - DNA, 15 bp, Homo sapiens
agtccttaattaaac

SEQ ID NO: 874467 - DNA, 15 bp, Homo sapiens
aagtccttaattaaa

SEQ ID NO: 874468 - DNA, 15 bp, Homo sapiens
taagtccttaattaa

SEQ ID NO: 874469 - DNA, 15 bp, Homo sapiens
ttaagtccttaatta

SEQ ID NO: 874470 - DNA, 15 bp, Homo sapiens
tttaagtccttaatt

SEQ ID NO: 874471 - DNA, 15 bp, Homo sapiens
ctttaagtccttaat

SEQ ID NO: 874472 - DNA, 15 bp, Homo sapiens
actttaagtccttaa

SEQ ID NO: 874473 - DNA, 15 bp, Homo sapiens
aactttaagtcctta

SEQ ID NO: 874474 - DNA, 15 bp, Homo sapiens
taactttaagtcctt

SEQ ID NO: 874475 - DNA, 15 bp, Homo sapiens
ataactttaagtcct

SEQ ID NO: 874476 - DNA, 15 bp, Homo sapiens
aataactttaagtcc

SEQ ID NO: 874477 - DNA, 15 bp, Homo sapiens
gaataactttaagtc

SEQ ID NO: 874478 - DNA, 15 bp, Homo sapiens
agaataactttaagt

SEQ ID NO: 874479 - DNA, 15 bp, Homo sapiens
gagaataactttaag

SEQ ID NO: 874480 - DNA, 15 bp, Homo sapiens
agagaataactttaa

SEQ ID NO: 874481 - DNA, 15 bp, Homo sapiens
tagagaataacttta

SEQ ID NO: 874482 - DNA, 15 bp, Homo sapiens
atagagaataacttt

SEQ ID NO: 874483 - DNA, 15 bp, Homo sapiens
aatagagaataactt

SEQ ID NO: 874484 - DNA, 15 bp, Homo sapiens
gaatagagaataact

SEQ ID NO: 874485 - DNA, 15 bp, Homo sapiens
agaatagagaataac

SEQ ID NO: 874486 - DNA, 15 bp, Homo sapiens
aagaatagagaataa

SEQ ID NO: 874487 - DNA, 15 bp, Homo sapiens
taagaatagagaata

SEQ ID NO: 874488 - DNA, 15 bp, Homo sapiens
gtaagaatagagaat

SEQ ID NO: 874489 - DNA, 15 bp, Homo sapiens
ggtaagaatagagaa

SEQ ID NO: 874490 - DNA, 15 bp, Homo sapiens
tggtaagaatagaga

SEQ ID NO: 874491 - DNA, 15 bp, Homo sapiens
atggtaagaatagag

SEQ ID NO: 874492 - DNA, 15 bp, Homo sapiens
aatggtaagaataga

SEQ ID NO: 874493 - DNA, 15 bp, Homo sapiens
taatggtaagaatag

SEQ ID NO: 874494 - DNA, 15 bp, Homo sapiens
ataatggtaagaata

SEQ ID NO: 874495 - DNA, 15 bp, Homo sapiens
gataatggtaagaat

SEQ ID NO: 874496 - DNA, 15 bp, Homo sapiens
tgataatggtaagaa

SEQ ID NO: 874497 - DNA, 15 bp, Homo sapiens
atgataatggtaaga

SEQ ID NO: 874498 - DNA, 15 bp, Homo sapiens
gatgataatggtaag

SEQ ID NO: 874499 - DNA, 15 bp, Homo sapiens
tgatgataatggtaa

SEQ ID NO: 874500 - DNA, 15 bp, Homo sapiens
atgatgataatggta

SEQ ID NO: 874501 - DNA, 15 bp, Homo sapiens
aatgatgataatggt

SEQ ID NO: 874502 - DNA, 15 bp, Homo sapiens
taatgatgataatgg

SEQ ID NO: 874503 - DNA, 15 bp, Homo sapiens
ataatgatgataatg

SEQ ID NO: 874504 - DNA, 15 bp, Homo sapiens
aataatgatgataat

SEQ ID NO: 874505 - DNA, 15 bp, Homo sapiens
taataatgatgataa

SEQ ID NO: 874506 - DNA, 15 bp, Homo sapiens
ataataatgatgata

SEQ ID NO: 874507 - DNA, 15 bp, Homo sapiens
aataataatgatgat

SEQ ID NO: 874508 - DNA, 15 bp, Homo sapiens
taataataatgatga

SEQ ID NO: 874509 - DNA, 15 bp, Homo sapiens
ataataataatgatg

SEQ ID NO: 874510 - DNA, 15 bp, Homo sapiens
tataataataatgat

SEQ ID NO: 874511 - DNA, 15 bp, Homo sapiens
ttataataataatga

SEQ ID NO: 874512 - DNA, 15 bp, Homo sapiens
tttataataataatg

SEQ ID NO: 874513 - DNA, 15 bp, Homo sapiens
gtttataataataat

SEQ ID NO: 874514 - DNA, 15 bp, Homo sapiens
tgtttataataataa

SEQ ID NO: 874515 - DNA, 15 bp, Homo sapiens
gtgtttataataata

SEQ ID NO: 874516 - DNA, 15 bp, Homo sapiens
agtgtttataataat

SEQ ID NO: 874517 - DNA, 15 bp, Homo sapiens
cagtgtttataataa

SEQ ID NO: 874518 - DNA, 15 bp, Homo sapiens
ccagtgtttataata

SEQ ID NO: 874519 - DNA, 15 bp, Homo sapiens
gccagtgtttataat

SEQ ID NO: 874520 - DNA, 15 bp, Homo sapiens
tgccagtgtttataa

SEQ ID NO: 874521 - DNA, 15 bp, Homo sapiens
atgccagtgtttata

SEQ ID NO: 874522 - DNA, 15 bp, Homo sapiens
catgccagtgtttat

SEQ ID NO: 874523 - DNA, 15 bp, Homo sapiens
tcatgccagtgttta

SEQ ID NO: 874524 - DNA, 15 bp, Homo sapiens
ctcatgccagtgttt

SEQ ID NO: 874525 - DNA, 15 bp, Homo sapiens
gctcatgccagtgtt

SEQ ID NO: 874526 - DNA, 15 bp, Homo sapiens
tgctcatgccagtgt

SEQ ID NO: 874527 - DNA, 15 bp, Homo sapiens
gtgctcatgccagtg

SEQ ID NO: 874528 - DNA, 15 bp, Homo sapiens
tgtgctcatgccagt

SEQ ID NO: 874529 - DNA, 15 bp, Homo sapiens
ttgtgctcatgccag

SEQ ID NO: 874530 - DNA, 15 bp, Homo sapiens
cttgtgctcatgcca

SEQ ID NO: 874531 - DNA, 15 bp, Homo sapiens
tcttgtgctcatgcc

SEQ ID NO: 874532 - DNA, 15 bp, Homo sapiens
ctcttgtgctcatgc

SEQ ID NO: 874533 - DNA, 15 bp, Homo sapiens
gctcttgtgctcatg

SEQ ID NO: 874534 - DNA, 15 bp, Homo sapiens
cgctcttgtgctcat

SEQ ID NO: 874535 - DNA, 15 bp, Homo sapiens
tcgctcttgtgctca

SEQ ID NO: 874536 - DNA, 15 bp, Homo sapiens
gtcgctcttgtgctc

SEQ ID NO: 874537 - DNA, 15 bp, Homo sapiens
ggtcgctcttgtgct

SEQ ID NO: 874538 - DNA, 15 bp, Homo sapiens
tggtcgctcttgtgc

SEQ ID NO: 874539 - DNA, 15 bp, Homo sapiens
ttggtcgctcttgtg

SEQ ID NO: 874540 - DNA, 15 bp, Homo sapiens
tttggtcgctcttgt

SEQ ID NO: 874541 - DNA, 15 bp, Homo sapiens
ttttggtcgctcttg

SEQ ID NO: 874542 - DNA, 15 bp, Homo sapiens
attttggtcgctctt

SEQ ID NO: 874543 - DNA, 15 bp, Homo sapiens
cattttggtcgctct

SEQ ID NO: 874544 - DNA, 15 bp, Homo sapiens
gcattttggtcgctc

SEQ ID NO: 874545 - DNA, 15 bp, Homo sapiens
tgcattttggtcgct

SEQ ID NO: 874546 - DNA, 15 bp, Homo sapiens
ctgcattttggtcgc

SEQ ID NO: 874547 - DNA, 15 bp, Homo sapiens
gctgcattttggtcg

SEQ ID NO: 874548 - DNA, 15 bp, Homo sapiens
ggctgcattttggtc

SEQ ID NO: 874549 - DNA, 15 bp, Homo sapiens
aggctgcattttggt

SEQ ID NO: 874550 - DNA, 15 bp, Homo sapiens
caggctgcattttgg

SEQ ID NO: 874551 - DNA, 15 bp, Homo sapiens
acaggctgcattttg

SEQ ID NO: 874552 - DNA, 15 bp, Homo sapiens
tacaggctgcatttt

SEQ ID NO: 874553 - DNA, 15 bp, Homo sapiens
gtacaggctgcattt

SEQ ID NO: 874554 - DNA, 15 bp, Homo sapiens
tgtacaggctgcatt

SEQ ID NO: 874555 - DNA, 15 bp, Homo sapiens
gtgtacaggctgcat

SEQ ID NO: 874556 - DNA, 15 bp, Homo sapiens
tgtgtacaggctgca

SEQ ID NO: 874557 - DNA, 15 bp, Homo sapiens
ctgtgtacaggctgc

SEQ ID NO: 874558 - DNA, 15 bp, Homo sapiens
gctgtgtacaggctg

SEQ ID NO: 874559 - DNA, 15 bp, Homo sapiens
agctgtgtacaggct

SEQ ID NO: 874560 - DNA, 15 bp, Homo sapiens
tagctgtgtacaggc

SEQ ID NO: 874561 - DNA, 15 bp, Homo sapiens
gtagctgtgtacagg

SEQ ID NO: 874562 - DNA, 15 bp, Homo sapiens
agtagctgtgtacag

SEQ ID NO: 874563 - DNA, 15 bp, Homo sapiens
aagtagctgtgtaca

SEQ ID NO: 874564 - DNA, 15 bp, Homo sapiens
aaagtagctgtgtac

SEQ ID NO: 874565 - DNA, 15 bp, Homo sapiens
aaaagtagctgtgta

SEQ ID NO: 874566 - DNA, 15 bp, Homo sapiens
aaaaagtagctgtgt

SEQ ID NO: 874567 - DNA, 15 bp, Homo sapiens
gaaaaagtagctgtg

SEQ ID NO: 874568 - DNA, 15 bp, Homo sapiens
tgaaaaagtagctgt

SEQ ID NO: 874569 - DNA, 15 bp, Homo sapiens
ctgaaaaagtagctg

SEQ ID NO: 874570 - DNA, 15 bp, Homo sapiens
tctgaaaaagtagct

SEQ ID NO: 874571 - DNA, 15 bp, Homo sapiens
ctctgaaaaagtagc

SEQ ID NO: 874572 - DNA, 15 bp, Homo sapiens
actctgaaaaagtag

SEQ ID NO: 874573 - DNA, 15 bp, Homo sapiens
gactctgaaaaagta

SEQ ID NO: 874574 - DNA, 15 bp, Homo sapiens
agactctgaaaaagt

SEQ ID NO: 874575 - DNA, 15 bp, Homo sapiens
cagactctgaaaaag

SEQ ID NO: 874576 - DNA, 15 bp, Homo sapiens
ccagactctgaaaaa

SEQ ID NO: 874577 - DNA, 15 bp, Homo sapiens
gccagactctgaaaa

SEQ ID NO: 874578 - DNA, 15 bp, Homo sapiens
tgccagactctgaaa

SEQ ID NO: 874579 - DNA, 15 bp, Homo sapiens
ttgccagactctgaa

SEQ ID NO: 874580 - DNA, 15 bp, Homo sapiens
gttgccagactctga

SEQ ID NO: 874581 - DNA, 15 bp, Homo sapiens
agttgccagactctg

SEQ ID NO: 874582 - DNA, 15 bp, Homo sapiens
cagttgccagactct

SEQ ID NO: 874583 - DNA, 15 bp, Homo sapiens
ccagttgccagactc

SEQ ID NO: 874584 - DNA, 15 bp, Homo sapiens
tccagttgccagact

SEQ ID NO: 874585 - DNA, 15 bp, Homo sapiens
ttccagttgccagac

SEQ ID NO: 874586 - DNA, 15 bp, Homo sapiens
tttccagttgccaga

SEQ ID NO: 874587 - DNA, 15 bp, Homo sapiens
ttttccagttgccag

SEQ ID NO: 874588 - DNA, 15 bp, Homo sapiens
attttccagttgcca

SEQ ID NO: 874589 - DNA, 15 bp, Homo sapiens
cattttccagttgcc

SEQ ID NO: 874590 - DNA, 15 bp, Homo sapiens
tcattttccagttgc

SEQ ID NO: 874591 - DNA, 15 bp, Homo sapiens
gtcattttccagttg

SEQ ID NO: 874592 - DNA, 15 bp, Homo sapiens
ggtcattttccagtt

SEQ ID NO: 874593 - DNA, 15 bp, Homo sapiens
aggtcattttccagt

SEQ ID NO: 874594 - DNA, 15 bp, Homo sapiens
caggtcattttccag

SEQ ID NO: 874595 - DNA, 15 bp, Homo sapiens
tcaggtcattttcca

SEQ ID NO: 874596 - DNA, 15 bp, Homo sapiens
ctcaggtcattttcc

SEQ ID NO: 874597 - DNA, 15 bp, Homo sapiens
tctcaggtcattttc

SEQ ID NO: 874598 - DNA, 15 bp, Homo sapiens
ctctcaggtcatttt

SEQ ID NO: 874599 - DNA, 15 bp, Homo sapiens
cctctcaggtcattt

SEQ ID NO: 874600 - DNA, 15 bp, Homo sapiens
acctctcaggtcatt

SEQ ID NO: 874601 - DNA, 15 bp, Homo sapiens
gacctctcaggtcat

SEQ ID NO: 874602 - DNA, 15 bp, Homo sapiens
tgacctctcaggtca

SEQ ID NO: 874603 - DNA, 15 bp, Homo sapiens
atgacctctcaggtc

SEQ ID NO: 874604 - DNA, 15 bp, Homo sapiens
catgacctctcaggt

SEQ ID NO: 874605 - DNA, 15 bp, Homo sapiens
gcatgacctctcagg

SEQ ID NO: 874606 - DNA, 15 bp, Homo sapiens
tgcatgacctctcag

SEQ ID NO: 874607 - DNA, 15 bp, Homo sapiens
ctgcatgacctctca

SEQ ID NO: 874608 - DNA, 15 bp, Homo sapiens
gctgcatgacctctc

SEQ ID NO: 874609 - DNA, 15 bp, Homo sapiens
ggctgcatgacctct

SEQ ID NO: 874610 - DNA, 15 bp, Homo sapiens
gggctgcatgacctc

SEQ ID NO: 874611 - DNA, 15 bp, Homo sapiens
agggctgcatgacct

SEQ ID NO: 874612 - DNA, 15 bp, Homo sapiens
tagggctgcatgacc

SEQ ID NO: 874613 - DNA, 15 bp, Homo sapiens
gtagggctgcatgac

SEQ ID NO: 874614 - DNA, 15 bp, Homo sapiens
tgtagggctgcatga

SEQ ID NO: 874615 - DNA, 15 bp, Homo sapiens
ctgtagggctgcatg

SEQ ID NO: 874616 - DNA, 15 bp, Homo sapiens
tctgtagggctgcat

SEQ ID NO: 874617 - DNA, 15 bp, Homo sapiens
gtctgtagggctgca

SEQ ID NO: 874618 - DNA, 15 bp, Homo sapiens
ggtctgtagggctgc

SEQ ID NO: 874619 - DNA, 15 bp, Homo sapiens
gggtctgtagggctg

SEQ ID NO: 874620 - DNA, 15 bp, Homo sapiens
ggggtctgtagggct

SEQ ID NO: 874621 - DNA, 15 bp, Homo sapiens
aggggtctgtagggc

SEQ ID NO: 874622 - DNA, 15 bp, Homo sapiens
aaggggtctgtaggg

SEQ ID NO: 874623 - DNA, 15 bp, Homo sapiens
gaaggggtctgtagg

SEQ ID NO: 874624 - DNA, 15 bp, Homo sapiens
tgaaggggtctgtag

SEQ ID NO: 874625 - DNA, 15 bp, Homo sapiens
atgaaggggtctgta

SEQ ID NO: 874626 - DNA, 15 bp, Homo sapiens
aatgaaggggtctgt

SEQ ID NO: 874627 - DNA, 15 bp, Homo sapiens
aaatgaaggggtctg

SEQ ID NO: 874628 - DNA, 15 bp, Homo sapiens
aaaatgaaggggtct

SEQ ID NO: 874629 - DNA, 15 bp, Homo sapiens
aaaaatgaaggggtc

SEQ ID NO: 874630 - DNA, 15 bp, Homo sapiens
gaaaaatgaaggggt

SEQ ID NO: 874631 - DNA, 15 bp, Homo sapiens
tgaaaaatgaagggg

SEQ ID NO: 874632 - DNA, 15 bp, Homo sapiens
atgaaaaatgaaggg

SEQ ID NO: 874633 - DNA, 15 bp, Homo sapiens
aatgaaaaatgaagg

SEQ ID NO: 874634 - DNA, 15 bp, Homo sapiens
caatgaaaaatgaag

SEQ ID NO: 874635 - DNA, 15 bp, Homo sapiens
acaatgaaaaatgaa

SEQ ID NO: 874636 - DNA, 15 bp, Homo sapiens
cacaatgaaaaatga

SEQ ID NO: 874637 - DNA, 15 bp, Homo sapiens
tcacaatgaaaaatg

SEQ ID NO: 874638 - DNA, 15 bp, Homo sapiens
ttcacaatgaaaaat

SEQ ID NO: 874639 - DNA, 15 bp, Homo sapiens
tttcacaatgaaaaa

SEQ ID NO: 874640 - DNA, 15 bp, Homo sapiens
ttttcacaatgaaaa

SEQ ID NO: 874641 - DNA, 15 bp, Homo sapiens
gttttcacaatgaaa

SEQ ID NO: 874642 - DNA, 15 bp, Homo sapiens
tgttttcacaatgaa

SEQ ID NO: 874643 - DNA, 15 bp, Homo sapiens
ctgttttcacaatga

SEQ ID NO: 874644 - DNA, 15 bp, Homo sapiens
tctgttttcacaatg

SEQ ID NO: 874645 - DNA, 15 bp, Homo sapiens
ctctgttttcacaat

SEQ ID NO: 874646 - DNA, 15 bp, Homo sapiens
cctctgttttcacaa

SEQ ID NO: 874647 - DNA, 15 bp, Homo sapiens
gcctctgttttcaca

SEQ ID NO: 874648 - DNA, 15 bp, Homo sapiens
agcctctgttttcac

SEQ ID NO: 874649 - DNA, 15 bp, Homo sapiens
cagcctctgttttca

SEQ ID NO: 874650 - DNA, 15 bp, Homo sapiens
acagcctctgttttc

SEQ ID NO: 874651 - DNA, 15 bp, Homo sapiens
cacagcctctgtttt

SEQ ID NO: 874652 - DNA, 15 bp, Homo sapiens
tcacagcctctgttt

SEQ ID NO: 874653 - DNA, 15 bp, Homo sapiens
gtcacagcctctgtt

SEQ ID NO: 874654 - DNA, 15 bp, Homo sapiens
agtcacagcctctgt

SEQ ID NO: 874655 - DNA, 15 bp, Homo sapiens
aagtcacagcctctg

SEQ ID NO: 874656 - DNA, 15 bp, Homo sapiens
caagtcacagcctct

SEQ ID NO: 874657 - DNA, 15 bp, Homo sapiens
gcaagtcacagcctc

SEQ ID NO: 874658 - DNA, 15 bp, Homo sapiens
ggcaagtcacagcct

SEQ ID NO: 874659 - DNA, 15 bp, Homo sapiens
aggcaagtcacagcc

SEQ ID NO: 874660 - DNA, 15 bp, Homo sapiens
aaggcaagtcacagc

SEQ ID NO: 874661 - DNA, 15 bp, Homo sapiens
taaggcaagtcacag

SEQ ID NO: 874662 - DNA, 15 bp, Homo sapiens
ttaaggcaagtcaca

SEQ ID NO: 874663 - DNA, 15 bp, Homo sapiens
cttaaggcaagtcac

SEQ ID NO: 874664 - DNA, 15 bp, Homo sapiens
ccttaaggcaagtca

SEQ ID NO: 874665 - DNA, 15 bp, Homo sapiens
gccttaaggcaagtc

SEQ ID NO: 874666 - DNA, 15 bp, Homo sapiens
tgccttaaggcaagt

SEQ ID NO: 874667 - DNA, 15 bp, Homo sapiens
ttgccttaaggcaag

SEQ ID NO: 874668 - DNA, 15 bp, Homo sapiens
tttgccttaaggcaa

SEQ ID NO: 874669 - DNA, 15 bp, Homo sapiens
gtttgccttaaggca

SEQ ID NO: 874670 - DNA, 15 bp, Homo sapiens
tgtttgccttaaggc

SEQ ID NO: 874671 - DNA, 15 bp, Homo sapiens
ctgtttgccttaagg

SEQ ID NO: 874672 - DNA, 15 bp, Homo sapiens
actgtttgccttaag

SEQ ID NO: 874673 - DNA, 15 bp, Homo sapiens
cactgtttgccttaa

SEQ ID NO: 874674 - DNA, 15 bp, Homo sapiens
ccactgtttgcctta

SEQ ID NO: 874675 - DNA, 15 bp, Homo sapiens
cccactgtttgcctt

SEQ ID NO: 874676 - DNA, 15 bp, Homo sapiens
acccactgtttgcct

SEQ ID NO: 874677 - DNA, 15 bp, Homo sapiens
aacccactgtttgcc

SEQ ID NO: 874678 - DNA, 15 bp, Homo sapiens
gaacccactgtttgc

SEQ ID NO: 874679 - DNA, 15 bp, Homo sapiens
agaacccactgtttg

SEQ ID NO: 874680 - DNA, 15 bp, Homo sapiens
cagaacccactgttt

SEQ ID NO: 874681 - DNA, 15 bp, Homo sapiens
ccagaacccactgtt

SEQ ID NO: 874682 - DNA, 15 bp, Homo sapiens
cccagaacccactgt

SEQ ID NO: 874683 - DNA, 15 bp, Homo sapiens
ccccagaacccactg

SEQ ID NO: 874684 - DNA, 15 bp, Homo sapiens
cccccagaacccact

SEQ ID NO: 874685 - DNA, 15 bp, Homo sapiens
ccccccagaacccac

SEQ ID NO: 874686 - DNA, 15 bp, Homo sapiens
accccccagaaccca

SEQ ID NO: 874687 - DNA, 15 bp, Homo sapiens
gaccccccagaaccc

SEQ ID NO: 874688 - DNA, 15 bp, Homo sapiens
tgaccccccagaacc

SEQ ID NO: 874689 - DNA, 15 bp, Homo sapiens
atgaccccccagaac

SEQ ID NO: 874690 - DNA, 15 bp, Homo sapiens
catgaccccccagaa

SEQ ID NO: 874691 - DNA, 15 bp, Homo sapiens
gcatgaccccccaga

SEQ ID NO: 874692 - DNA, 15 bp, Homo sapiens
cgcatgaccccccag

SEQ ID NO: 874693 - DNA, 15 bp, Homo sapiens
gcgcatgacccccca

SEQ ID NO: 874694 - DNA, 15 bp, Homo sapiens
tgcgcatgacccccc

SEQ ID NO: 874695 - DNA, 15 bp, Homo sapiens
ttgcgcatgaccccc

SEQ ID NO: 874696 - DNA, 15 bp, Homo sapiens
cttgcgcatgacccc

SEQ ID NO: 874697 - DNA, 15 bp, Homo sapiens
ccttgcgcatgaccc

SEQ ID NO: 874698 - DNA, 15 bp, Homo sapiens
cccttgcgcatgacc

SEQ ID NO: 874699 - DNA, 15 bp, Homo sapiens
acccttgcgcatgac

SEQ ID NO: 874700 - DNA, 15 bp, Homo sapiens
cacccttgcgcatga

SEQ ID NO: 874701 - DNA, 15 bp, Homo sapiens
acacccttgcgcatg

SEQ ID NO: 874702 - DNA, 15 bp, Homo sapiens
cacacccttgcgcat

SEQ ID NO: 874703 - DNA, 15 bp, Homo sapiens
acacacccttgcgca

SEQ ID NO: 874704 - DNA, 15 bp, Homo sapiens
aacacacccttgcgc

SEQ ID NO: 874705 - DNA, 15 bp, Homo sapiens
caacacacccttgcg

SEQ ID NO: 874706 - DNA, 15 bp, Homo sapiens
tcaacacacccttgc

SEQ ID NO: 874707 - DNA, 15 bp, Homo sapiens
ctcaacacacccttg

SEQ ID NO: 874708 - DNA, 15 bp, Homo sapiens
tctcaacacaccctt

SEQ ID NO: 874709 - DNA, 15 bp, Homo sapiens
ctctcaacacaccct

SEQ ID NO: 874710 - DNA, 15 bp, Homo sapiens
gctctcaacacaccc

SEQ ID NO: 874711 - DNA, 15 bp, Homo sapiens
tgctctcaacacacc

SEQ ID NO: 874712 - DNA, 15 bp, Homo sapiens
ctgctctcaacacac

SEQ ID NO: 874713 - DNA, 15 bp, Homo sapiens
gctgctctcaacaca

SEQ ID NO: 874714 - DNA, 15 bp, Homo sapiens
agctgctctcaacac

SEQ ID NO: 874715 - DNA, 15 bp, Homo sapiens
gagctgctctcaaca

SEQ ID NO: 874716 - DNA, 15 bp, Homo sapiens
agagctgctctcaac

SEQ ID NO: 874717 - DNA, 15 bp, Homo sapiens
cagagctgctctcaa

SEQ ID NO: 874718 - DNA, 15 bp, Homo sapiens
acagagctgctctca

SEQ ID NO: 874719 - DNA, 15 bp, Homo sapiens
cacagagctgctctc

SEQ ID NO: 874720 - DNA, 15 bp, Homo sapiens
gcacagagctgctct

SEQ ID NO: 874721 - DNA, 15 bp, Homo sapiens
ggcacagagctgctc

SEQ ID NO: 874722 - DNA, 15 bp, Homo sapiens
cggcacagagctgct

SEQ ID NO: 874723 - DNA, 15 bp, Homo sapiens
ccggcacagagctgc

SEQ ID NO: 874724 - DNA, 15 bp, Homo sapiens
cccggcacagagctg

SEQ ID NO: 874725 - DNA, 15 bp, Homo sapiens
gcccggcacagagct

SEQ ID NO: 874726 - DNA, 15 bp, Homo sapiens
tgcccggcacagagc

SEQ ID NO: 874727 - DNA, 15 bp, Homo sapiens
gtgcccggcacagag

SEQ ID NO: 874728 - DNA, 15 bp, Homo sapiens
tgtgcccggcacaga

SEQ ID NO: 874729 - DNA, 15 bp, Homo sapiens
ctgtgcccggcacag

SEQ ID NO: 874730 - DNA, 15 bp, Homo sapiens
actgtgcccggcaca

SEQ ID NO: 874731 - DNA, 15 bp, Homo sapiens
cactgtgcccggcac

SEQ ID NO: 874732 - DNA, 15 bp, Homo sapiens
gcactgtgcccggca

SEQ ID NO: 874733 - DNA, 15 bp, Homo sapiens
agcactgtgcccggc

SEQ ID NO: 874734 - DNA, 15 bp, Homo sapiens
tagcactgtgcccgg

SEQ ID NO: 874735 - DNA, 15 bp, Homo sapiens
ctagcactgtgcccg

SEQ ID NO: 874736 - DNA, 15 bp, Homo sapiens
cctagcactgtgccc

SEQ ID NO: 874737 - DNA, 15 bp, Homo sapiens
tcctagcactgtgcc

SEQ ID NO: 874738 - DNA, 15 bp, Homo sapiens
ttcctagcactgtgc

SEQ ID NO: 874739 - DNA, 15 bp, Homo sapiens
tttcctagcactgtg

SEQ ID NO: 874740 - DNA, 15 bp, Homo sapiens
ctttcctagcactgt

SEQ ID NO: 874741 - DNA, 15 bp, Homo sapiens
tctttcctagcactg

SEQ ID NO: 874742 - DNA, 15 bp, Homo sapiens
ttctttcctagcact

SEQ ID NO: 874743 - DNA, 15 bp, Homo sapiens
tttctttcctagcac

SEQ ID NO: 874744 - DNA, 15 bp, Homo sapiens
ctttctttcctagca

SEQ ID NO: 874745 - DNA, 15 bp, Homo sapiens
cctttctttcctagc

SEQ ID NO: 874746 - DNA, 15 bp, Homo sapiens
ccctttctttcctag

SEQ ID NO: 874747 - DNA, 15 bp, Homo sapiens
accctttctttccta

SEQ ID NO: 874748 - DNA, 15 bp, Homo sapiens
gaccctttctttcct

SEQ ID NO: 874749 - DNA, 15 bp, Homo sapiens
tgaccctttctttcc

SEQ ID NO: 874750 - DNA, 15 bp, Homo sapiens
ttgaccctttctttc

SEQ ID NO: 874751 - DNA, 15 bp, Homo sapiens
attgaccctttcttt

SEQ ID NO: 874752 - DNA, 15 bp, Homo sapiens
gattgaccctttctt

SEQ ID NO: 874753 - DNA, 15 bp, Homo sapiens
agattgaccctttct

SEQ ID NO: 874754 - DNA, 15 bp, Homo sapiens
cagattgaccctttc

SEQ ID NO: 874755 - DNA, 15 bp, Homo sapiens
gcagattgacccttt

SEQ ID NO: 874756 - DNA, 15 bp, Homo sapiens
ggcagattgaccctt

SEQ ID NO: 874757 - DNA, 15 bp, Homo sapiens
aggcagattgaccct

SEQ ID NO: 874758 - DNA, 15 bp, Homo sapiens
caggcagattgaccc

SEQ ID NO: 874759 - DNA, 15 bp, Homo sapiens
acaggcagattgacc

SEQ ID NO: 874760 - DNA, 15 bp, Homo sapiens
aacaggcagattgac

SEQ ID NO: 874761 - DNA, 15 bp, Homo sapiens
gaacaggcagattga

SEQ ID NO: 874762 - DNA, 15 bp, Homo sapiens
agaacaggcagattg

SEQ ID NO: 874763 - DNA, 15 bp, Homo sapiens
aagaacaggcagatt

SEQ ID NO: 874764 - DNA, 15 bp, Homo sapiens
taagaacaggcagat

SEQ ID NO: 874765 - DNA, 15 bp, Homo sapiens
ttaagaacaggcaga

SEQ ID NO: 874766 - DNA, 15 bp, Homo sapiens
cttaagaacaggcag

SEQ ID NO: 874767 - DNA, 15 bp, Homo sapiens
ccttaagaacaggca

SEQ ID NO: 874768 - DNA, 15 bp, Homo sapiens
tccttaagaacaggc

SEQ ID NO: 874769 - DNA, 15 bp, Homo sapiens
ctccttaagaacagg

SEQ ID NO: 874770 - DNA, 15 bp, Homo sapiens
gctccttaagaacag

SEQ ID NO: 874771 - DNA, 15 bp, Homo sapiens
agctccttaagaaca

SEQ ID NO: 874772 - DNA, 15 bp, Homo sapiens
gagctccttaagaac

SEQ ID NO: 874773 - DNA, 15 bp, Homo sapiens
tgagctccttaagaa

SEQ ID NO: 874774 - DNA, 15 bp, Homo sapiens
gtgagctccttaaga

SEQ ID NO: 874775 - DNA, 15 bp, Homo sapiens
tgtgagctccttaag

SEQ ID NO: 874776 - DNA, 15 bp, Homo sapiens
ctgtgagctccttaa

SEQ ID NO: 874777 - DNA, 15 bp, Homo sapiens
gctgtgagctcctta

SEQ ID NO: 874778 - DNA, 15 bp, Homo sapiens
ggctgtgagctcctt

SEQ ID NO: 874779 - DNA, 15 bp, Homo sapiens
aggctgtgagctcct

SEQ ID NO: 874780 - DNA, 15 bp, Homo sapiens
caggctgtgagctcc

SEQ ID NO: 874781 - DNA, 15 bp, Homo sapiens
ccaggctgtgagctc

SEQ ID NO: 874782 - DNA, 15 bp, Homo sapiens
gccaggctgtgagct

SEQ ID NO: 874783 - DNA, 15 bp, Homo sapiens
tgccaggctgtgagc

SEQ ID NO: 874784 - DNA, 15 bp, Homo sapiens
ttgccaggctgtgag

SEQ ID NO: 874785 - DNA, 15 bp, Homo sapiens
tttgccaggctgtga

SEQ ID NO: 874786 - DNA, 15 bp, Homo sapiens
ctttgccaggctgtg

SEQ ID NO: 874787 - DNA, 15 bp, Homo sapiens
cctttgccaggctgt

SEQ ID NO: 874788 - DNA, 15 bp, Homo sapiens
ccctttgccaggctg

SEQ ID NO: 874789 - DNA, 15 bp, Homo sapiens
cccctttgccaggct

SEQ ID NO: 874790 - DNA, 15 bp, Homo sapiens
tcccctttgccaggc

SEQ ID NO: 874791 - DNA, 15 bp, Homo sapiens
ttcccctttgccagg

SEQ ID NO: 874792 - DNA, 15 bp, Homo sapiens
cttcccctttgccag

SEQ ID NO: 874793 - DNA, 15 bp, Homo sapiens
tcttcccctttgcca

SEQ ID NO: 874794 - DNA, 15 bp, Homo sapiens
gtcttcccctttgcc

SEQ ID NO: 874795 - DNA, 15 bp, Homo sapiens
tgtcttcccctttgc

SEQ ID NO: 874796 - DNA, 15 bp, Homo sapiens
gtgtcttcccctttg

SEQ ID NO: 874797 - DNA, 15 bp, Homo sapiens
tgtgtcttccccttt

SEQ ID NO: 874798 - DNA, 15 bp, Homo sapiens
gtgtgtcttcccctt

SEQ ID NO: 874799 - DNA, 15 bp, Homo sapiens
ggtgtgtcttcccct

SEQ ID NO: 874800 - DNA, 15 bp, Homo sapiens
gggtgtgtcttcccc

SEQ ID NO: 874801 - DNA, 15 bp, Homo sapiens
tgggtgtgtcttccc

SEQ ID NO: 874802 - DNA, 15 bp, Homo sapiens
ctgggtgtgtcttcc

SEQ ID NO: 874803 - DNA, 15 bp, Homo sapiens
cctgggtgtgtcttc

SEQ ID NO: 874804 - DNA, 15 bp, Homo sapiens
acctgggtgtgtctt

SEQ ID NO: 874805 - DNA, 15 bp, Homo sapiens
tacctgggtgtgtct

SEQ ID NO: 874806 - DNA, 15 bp, Homo sapiens
ttacctgggtgtgtc

SEQ ID NO: 874807 - DNA, 15 bp, Homo sapiens
cttacctgggtgtgt

SEQ ID NO: 874808 - DNA, 15 bp, Homo sapiens
acttacctgggtgtg

SEQ ID NO: 874809 - DNA, 15 bp, Homo sapiens
tacttacctgggtgt

SEQ ID NO: 874810 - DNA, 15 bp, Homo sapiens
ctacttacctgggtg

SEQ ID NO: 874811 - DNA, 15 bp, Homo sapiens
tctacttacctgggt

SEQ ID NO: 874812 - DNA, 15 bp, Homo sapiens
ttctacttacctggg

SEQ ID NO: 874813 - DNA, 15 bp, Homo sapiens
attctacttacctgg

SEQ ID NO: 874814 - DNA, 15 bp, Homo sapiens
tattctacttacctg

SEQ ID NO: 874815 - DNA, 15 bp, Homo sapiens
ctattctacttacct

SEQ ID NO: 874816 - DNA, 15 bp, Homo sapiens
tctattctacttacc

SEQ ID NO: 874817 - DNA, 15 bp, Homo sapiens
ctctattctacttac

SEQ ID NO: 874818 - DNA, 15 bp, Homo sapiens
cctctattctactta

SEQ ID NO: 874819 - DNA, 15 bp, Homo sapiens
ccctctattctactt

SEQ ID NO: 874820 - DNA, 15 bp, Homo sapiens
tccctctattctact

SEQ ID NO: 874821 - DNA, 15 bp, Homo sapiens
gtccctctattctac

SEQ ID NO: 874822 - DNA, 15 bp, Homo sapiens
tgtccctctattcta

SEQ ID NO: 874823 - DNA, 15 bp, Homo sapiens
ctgtccctctattct

SEQ ID NO: 874824 - DNA, 15 bp, Homo sapiens
cctgtccctctattc

SEQ ID NO: 874825 - DNA, 15 bp, Homo sapiens
acctgtccctctatt

SEQ ID NO: 874826 - DNA, 15 bp, Homo sapiens
cacctgtccctctat

SEQ ID NO: 874827 - DNA, 15 bp, Homo sapiens
gcacctgtccctcta

SEQ ID NO: 874828 - DNA, 15 bp, Homo sapiens
agcacctgtccctct

SEQ ID NO: 874829 - DNA, 15 bp, Homo sapiens
cagcacctgtccctc

SEQ ID NO: 874830 - DNA, 15 bp, Homo sapiens
acagcacctgtccct

SEQ ID NO: 874831 - DNA, 15 bp, Homo sapiens
cacagcacctgtccc

SEQ ID NO: 874832 - DNA, 15 bp, Homo sapiens
tcacagcacctgtcc

SEQ ID NO: 874833 - DNA, 15 bp, Homo sapiens
gtcacagcacctgtc

SEQ ID NO: 874834 - DNA, 15 bp, Homo sapiens
tgtcacagcacctgt

SEQ ID NO: 874835 - DNA, 15 bp, Homo sapiens
ttgtcacagcacctg

SEQ ID NO: 874836 - DNA, 15 bp, Homo sapiens
tttgtcacagcacct

SEQ ID NO: 874837 - DNA, 15 bp, Homo sapiens
ctttgtcacagcacc

SEQ ID NO: 874838 - DNA, 15 bp, Homo sapiens
tctttgtcacagcac

SEQ ID NO: 874839 - DNA, 15 bp, Homo sapiens
gtctttgtcacagca

SEQ ID NO: 874840 - DNA, 15 bp, Homo sapiens
tgtctttgtcacagc

SEQ ID NO: 874841 - DNA, 15 bp, Homo sapiens
ctgtctttgtcacag

SEQ ID NO: 874842 - DNA, 15 bp, Homo sapiens
cctgtctttgtcaca

SEQ ID NO: 874843 - DNA, 15 bp, Homo sapiens
ccctgtctttgtcac

SEQ ID NO: 874844 - DNA, 15 bp, Homo sapiens
accctgtctttgtca

SEQ ID NO: 874845 - DNA, 15 bp, Homo sapiens
aaccctgtctttgtc

SEQ ID NO: 874846 - DNA, 15 bp, Homo sapiens
caaccctgtctttgt

SEQ ID NO: 874847 - DNA, 15 bp, Homo sapiens
ccaaccctgtctttg

SEQ ID NO: 874848 - DNA, 15 bp, Homo sapiens
accaaccctgtcttt

SEQ ID NO: 874849 - DNA, 15 bp, Homo sapiens
caccaaccctgtctt

SEQ ID NO: 874850 - DNA, 15 bp, Homo sapiens
acaccaaccctgtct

SEQ ID NO: 874851 - DNA, 15 bp, Homo sapiens
cacaccaaccctgtc

SEQ ID NO: 874852 - DNA, 15 bp, Homo sapiens
tcacaccaaccctgt

SEQ ID NO: 874853 - DNA, 15 bp, Homo sapiens
atcacaccaaccctg

SEQ ID NO: 874854 - DNA, 15 bp, Homo sapiens
aatcacaccaaccct

SEQ ID NO: 874855 - DNA, 15 bp, Homo sapiens
gaatcacaccaaccc

SEQ ID NO: 874856 - DNA, 15 bp, Homo sapiens
ggaatcacaccaacc

SEQ ID NO: 874857 - DNA, 15 bp, Homo sapiens
cggaatcacaccaac

SEQ ID NO: 874858 - DNA, 15 bp, Homo sapiens
gcggaatcacaccaa

SEQ ID NO: 874859 - DNA, 15 bp, Homo sapiens
ggcggaatcacacca

SEQ ID NO: 874860 - DNA, 15 bp, Homo sapiens
aggcggaatcacacc

SEQ ID NO: 874861 - DNA, 15 bp, Homo sapiens
caggcggaatcacac

SEQ ID NO: 874862 - DNA, 15 bp, Homo sapiens
acaggcggaatcaca

SEQ ID NO: 874863 - DNA, 15 bp, Homo sapiens
aacaggcggaatcac

SEQ ID NO: 874864 - DNA, 15 bp, Homo sapiens
gaacaggcggaatca

SEQ ID NO: 874865 - DNA, 15 bp, Homo sapiens
agaacaggcggaatc

SEQ ID NO: 874866 - DNA, 15 bp, Homo sapiens
gagaacaggcggaat

SEQ ID NO: 874867 - DNA, 15 bp, Homo sapiens
ggagaacaggcggaa

SEQ ID NO: 874868 - DNA, 15 bp, Homo sapiens
tggagaacaggcgga

SEQ ID NO: 874869 - DNA, 15 bp, Homo sapiens
gtggagaacaggcgg

SEQ ID NO: 874870 - DNA, 15 bp, Homo sapiens
agtggagaacaggcg

SEQ ID NO: 874871 - DNA, 15 bp, Homo sapiens
gagtggagaacaggc

SEQ ID NO: 874872 - DNA, 15 bp, Homo sapiens
tgagtggagaacagg

SEQ ID NO: 874873 - DNA, 15 bp, Homo sapiens
atgagtggagaacag

SEQ ID NO: 874874 - DNA, 15 bp, Homo sapiens
catgagtggagaaca

SEQ ID NO: 874875 - DNA, 15 bp, Homo sapiens
acatgagtggagaac

SEQ ID NO: 874876 - DNA, 15 bp, Homo sapiens
aacatgagtggagaa

SEQ ID NO: 874877 - DNA, 15 bp, Homo sapiens
aaacatgagtggaga

SEQ ID NO: 874878 - DNA, 15 bp, Homo sapiens
taaacatgagtggag

SEQ ID NO: 874879 - DNA, 15 bp, Homo sapiens
ctaaacatgagtgga

SEQ ID NO: 874880 - DNA, 15 bp, Homo sapiens
gctaaacatgagtgg

SEQ ID NO: 874881 - DNA, 15 bp, Homo sapiens
agctaaacatgagtg

SEQ ID NO: 874882 - DNA, 15 bp, Homo sapiens
gagctaaacatgagt

SEQ ID NO: 874883 - DNA, 15 bp, Homo sapiens
agagctaaacatgag

SEQ ID NO: 874884 - DNA, 15 bp, Homo sapiens
cagagctaaacatga

SEQ ID NO: 874885 - DNA, 15 bp, Homo sapiens
tcagagctaaacatg

SEQ ID NO: 874886 - DNA, 15 bp, Homo sapiens
ctcagagctaaacat

SEQ ID NO: 874887 - DNA, 15 bp, Homo sapiens
cctcagagctaaaca

SEQ ID NO: 874888 - DNA, 15 bp, Homo sapiens
tcctcagagctaaac

SEQ ID NO: 874889 - DNA, 15 bp, Homo sapiens
atcctcagagctaaa

SEQ ID NO: 874890 - DNA, 15 bp, Homo sapiens
gatcctcagagctaa

SEQ ID NO: 874891 - DNA, 15 bp, Homo sapiens
ggatcctcagagcta

SEQ ID NO: 874892 - DNA, 15 bp, Homo sapiens
tggatcctcagagct

SEQ ID NO: 874893 - DNA, 15 bp, Homo sapiens
ctggatcctcagagc

SEQ ID NO: 874894 - DNA, 15 bp, Homo sapiens
cctggatcctcagag

SEQ ID NO: 874895 - DNA, 15 bp, Homo sapiens
tcctggatcctcaga

SEQ ID NO: 874896 - DNA, 15 bp, Homo sapiens
ttcctggatcctcag

SEQ ID NO: 874897 - DNA, 15 bp, Homo sapiens
cttcctggatcctca

SEQ ID NO: 874898 - DNA, 15 bp, Homo sapiens
acttcctggatcctc

SEQ ID NO: 874899 - DNA, 15 bp, Homo sapiens
tacttcctggatcct

SEQ ID NO: 874900 - DNA, 15 bp, Homo sapiens
ttacttcctggatcc

SEQ ID NO: 874901 - DNA, 15 bp, Homo sapiens
cttacttcctggatc

SEQ ID NO: 874902 - DNA, 15 bp, Homo sapiens
tcttacttcctggat

SEQ ID NO: 874903 - DNA, 15 bp, Homo sapiens
ttcttacttcctgga

SEQ ID NO: 874904 - DNA, 15 bp, Homo sapiens
tttcttacttcctgg

SEQ ID NO: 874905 - DNA, 15 bp, Homo sapiens
ctttcttacttcctg

SEQ ID NO: 874906 - DNA, 15 bp, Homo sapiens
actttcttacttcct

SEQ ID NO: 874907 - DNA, 15 bp, Homo sapiens
tactttcttacttcc

SEQ ID NO: 874908 - DNA, 15 bp, Homo sapiens
ttactttcttacttc

SEQ ID NO: 874909 - DNA, 15 bp, Homo sapiens
tttactttcttactt

SEQ ID NO: 874910 - DNA, 15 bp, Homo sapiens
ttttactttcttact

SEQ ID NO: 874911 - DNA, 15 bp, Homo sapiens
tttttactttcttac

SEQ ID NO: 874912 - DNA, 15 bp, Homo sapiens
ttttttactttctta

SEQ ID NO: 874913 - DNA, 15 bp, Homo sapiens
cttttttactttctt

SEQ ID NO: 874914 - DNA, 15 bp, Homo sapiens
gcttttttactttct

SEQ ID NO: 874915 - DNA, 15 bp, Homo sapiens
agcttttttactttc

SEQ ID NO: 874916 - DNA, 15 bp, Homo sapiens
tagcttttttacttt

SEQ ID NO: 874917 - DNA, 15 bp, Homo sapiens
ttagcttttttactt

SEQ ID NO: 874918 - DNA, 15 bp, Homo sapiens
attagcttttttact

SEQ ID NO: 874919 - DNA, 15 bp, Homo sapiens
cattagcttttttac

SEQ ID NO: 874920 - DNA, 15 bp, Homo sapiens
acattagctttttta

SEQ ID NO: 874921 - DNA, 15 bp, Homo sapiens
aacattagctttttt

SEQ ID NO: 874922 - DNA, 15 bp, Homo sapiens
aaacattagcttttt

SEQ ID NO: 874923 - DNA, 15 bp, Homo sapiens
aaaacattagctttt

SEQ ID NO: 874924 - DNA, 15 bp, Homo sapiens
gaaaacattagcttt

SEQ ID NO: 874925 - DNA, 15 bp, Homo sapiens
ggaaaacattagctt

SEQ ID NO: 874926 - DNA, 15 bp, Homo sapiens
aggaaaacattagct

SEQ ID NO: 874927 - DNA, 15 bp, Homo sapiens
aaggaaaacattagc

SEQ ID NO: 874928 - DNA, 15 bp, Homo sapiens
aaaggaaaacattag

SEQ ID NO: 874929 - DNA, 15 bp, Homo sapiens
aaaaggaaaacatta

SEQ ID NO: 874930 - DNA, 15 bp, Homo sapiens
aaaaaggaaaacatt

SEQ ID NO: 874931 - DNA, 15 bp, Homo sapiens
aaaaaaggaaaacat

SEQ ID NO: 874932 - DNA, 15 bp, Homo sapiens
aaaaaaaggaaaaca

SEQ ID NO: 874933 - DNA, 15 bp, Homo sapiens
caaaaaaaggaaaac

SEQ ID NO: 874934 - DNA, 15 bp, Homo sapiens
tcaaaaaaaggaaaa

SEQ ID NO: 874935 - DNA, 15 bp, Homo sapiens
ctcaaaaaaaggaaa

SEQ ID NO: 874936 - DNA, 15 bp, Homo sapiens
tctcaaaaaaaggaa

SEQ ID NO: 874937 - DNA, 15 bp, Homo sapiens
atctcaaaaaaagga

SEQ ID NO: 874938 - DNA, 15 bp, Homo sapiens
catctcaaaaaaagg

SEQ ID NO: 874939 - DNA, 15 bp, Homo sapiens
ccatctcaaaaaaag

SEQ ID NO: 874940 - DNA, 15 bp, Homo sapiens
tccatctcaaaaaaa

SEQ ID NO: 874941 - DNA, 15 bp, Homo sapiens
ctccatctcaaaaaa

SEQ ID NO: 874942 - DNA, 15 bp, Homo sapiens
gctccatctcaaaaa

SEQ ID NO: 874943 - DNA, 15 bp, Homo sapiens
ggctccatctcaaaa

SEQ ID NO: 874944 - DNA, 15 bp, Homo sapiens
aggctccatctcaaa

SEQ ID NO: 874945 - DNA, 15 bp, Homo sapiens
gaggctccatctcaa

SEQ ID NO: 874946 - DNA, 15 bp, Homo sapiens
tgaggctccatctca

SEQ ID NO: 874947 - DNA, 15 bp, Homo sapiens
gtgaggctccatctc

SEQ ID NO: 874948 - DNA, 15 bp, Homo sapiens
agtgaggctccatct

SEQ ID NO: 874949 - DNA, 15 bp, Homo sapiens
gagtgaggctccatc

SEQ ID NO: 874950 - DNA, 15 bp, Homo sapiens
agagtgaggctccat

SEQ ID NO: 874951 - DNA, 15 bp, Homo sapiens
cagagtgaggctcca

SEQ ID NO: 874952 - DNA, 15 bp, Homo sapiens
acagagtgaggctcc

SEQ ID NO: 874953 - DNA, 15 bp, Homo sapiens
gacagagtgaggctc

SEQ ID NO: 874954 - DNA, 15 bp, Homo sapiens
cgacagagtgaggct

SEQ ID NO: 874955 - DNA, 15 bp, Homo sapiens
gcgacagagtgaggc

SEQ ID NO: 874956 - DNA, 15 bp, Homo sapiens
ggcgacagagtgagg

SEQ ID NO: 874957 - DNA, 15 bp, Homo sapiens
gggcgacagagtgag

SEQ ID NO: 874958 - DNA, 15 bp, Homo sapiens
tgggcgacagagtga

SEQ ID NO: 874959 - DNA, 15 bp, Homo sapiens
ctgggcgacagagtg

SEQ ID NO: 874960 - DNA, 15 bp, Homo sapiens
cctgggcgacagagt

SEQ ID NO: 874961 - DNA, 15 bp, Homo sapiens
tactccagcctgggc

SEQ ID NO: 874962 - DNA, 15 bp, Homo sapiens
gtactccagcctggg

SEQ ID NO: 874963 - DNA, 15 bp, Homo sapiens
tgtactccagcctgg

SEQ ID NO: 874964 - DNA, 15 bp, Homo sapiens
ctgtactccagcctg

SEQ ID NO: 874965 - DNA, 15 bp, Homo sapiens
actgtactccagcct

SEQ ID NO: 874966 - DNA, 15 bp, Homo sapiens
cactgtactccagcc

SEQ ID NO: 874967 - DNA, 15 bp, Homo sapiens
ccactgtactccagc

SEQ ID NO: 874968 - DNA, 15 bp, Homo sapiens
gccactgtactccag

SEQ ID NO: 874969 - DNA, 15 bp, Homo sapiens
tgccactgtactcca

SEQ ID NO: 874970 - DNA, 15 bp, Homo sapiens
gtgccactgtactcc

SEQ ID NO: 874971 - DNA, 15 bp, Homo sapiens
tgtgccactgtactc

SEQ ID NO: 874972 - DNA, 15 bp, Homo sapiens
ttgtgccactgtact

SEQ ID NO: 874973 - DNA, 15 bp, Homo sapiens
attgtgccactgtac

SEQ ID NO: 874974 - DNA, 15 bp, Homo sapiens
gattgtgccactgta

SEQ ID NO: 874975 - DNA, 15 bp, Homo sapiens
agattgtgccactgt

SEQ ID NO: 874976 - DNA, 15 bp, Homo sapiens
gagattgtgccactg

SEQ ID NO: 874977 - DNA, 15 bp, Homo sapiens
agagattgtgccact

SEQ ID NO: 874978 - DNA, 15 bp, Homo sapiens
cagagattgtgccac

SEQ ID NO: 874979 - DNA, 15 bp, Homo sapiens
gcagagattgtgcca

SEQ ID NO: 874980 - DNA, 15 bp, Homo sapiens
agcagagattgtgcc

SEQ ID NO: 874981 - DNA, 15 bp, Homo sapiens
gagcagagattgtgc

SEQ ID NO: 874982 - DNA, 15 bp, Homo sapiens
tgagcagagattgtg

SEQ ID NO: 874983 - DNA, 15 bp, Homo sapiens
gtgagcagagattgt

SEQ ID NO: 874984 - DNA, 15 bp, Homo sapiens
agtgagcagagattg

SEQ ID NO: 874985 - DNA, 15 bp, Homo sapiens
cagtgagcagagatt

SEQ ID NO: 874986 - DNA, 15 bp, Homo sapiens
gcagtgagcagagat

SEQ ID NO: 874987 - DNA, 15 bp, Homo sapiens
tgcagtgagcagaga

SEQ ID NO: 874988 - DNA, 15 bp, Homo sapiens
ttgcagtgagcagag

SEQ ID NO: 874989 - DNA, 15 bp, Homo sapiens
gttgcagtgagcaga

SEQ ID NO: 874990 - DNA, 15 bp, Homo sapiens
ggttgcagtgagcag

SEQ ID NO: 874991 - DNA, 15 bp, Homo sapiens
aggttgcagtgagca

SEQ ID NO: 874992 - DNA, 15 bp, Homo sapiens
agaggcggaggttgc

SEQ ID NO: 874993 - DNA, 15 bp, Homo sapiens
gagaggcggaggttg

SEQ ID NO: 874994 - DNA, 15 bp, Homo sapiens
cgagaggcggaggtt

SEQ ID NO: 874995 - DNA, 15 bp, Homo sapiens
ccgagaggcggaggt

SEQ ID NO: 874996 - DNA, 15 bp, Homo sapiens
cccgagaggcggagg

SEQ ID NO: 874997 - DNA, 15 bp, Homo sapiens
acccgagaggcggag

SEQ ID NO: 874998 - DNA, 15 bp, Homo sapiens
aacccgagaggcgga

SEQ ID NO: 874999 - DNA, 15 bp, Homo sapiens
gaacccgagaggcgg

SEQ ID NO: 875000 - DNA, 15 bp, Homo sapiens
tgaacccgagaggcg

SEQ ID NO: 875001 - DNA, 15 bp, Homo sapiens
ttgaacccgagaggc

SEQ ID NO: 875002 - DNA, 15 bp, Homo sapiens
cttgaacccgagagg

SEQ ID NO: 875003 - DNA, 15 bp, Homo sapiens
gcttgaacccgagag

SEQ ID NO: 875004 - DNA, 15 bp, Homo sapiens
ggcttgaacccgaga

SEQ ID NO: 875005 - DNA, 15 bp, Homo sapiens
tggcttgaacccgag

SEQ ID NO: 875006 - DNA, 15 bp, Homo sapiens
atggcttgaacccga

SEQ ID NO: 875007 - DNA, 15 bp, Homo sapiens
aatggcttgaacccg

SEQ ID NO: 875008 - DNA, 15 bp, Homo sapiens
gaatggcttgaaccc

SEQ ID NO: 875009 - DNA, 15 bp, Homo sapiens
agaatggcttgaacc

SEQ ID NO: 875010 - DNA, 15 bp, Homo sapiens
gagaatggcttgaac

SEQ ID NO: 875011 - DNA, 15 bp, Homo sapiens
ggagaatggcttgaa

SEQ ID NO: 875012 - DNA, 15 bp, Homo sapiens
aggagaatggcttga

SEQ ID NO: 875013 - DNA, 15 bp, Homo sapiens
caggagaatggcttg

SEQ ID NO: 875014 - DNA, 15 bp, Homo sapiens
gcaggagaatggctt

SEQ ID NO: 875015 - DNA, 15 bp, Homo sapiens
ggcaggagaatggct

SEQ ID NO: 875016 - DNA, 15 bp, Homo sapiens
cggggaggctgaggc

SEQ ID NO: 875017 - DNA, 15 bp, Homo sapiens
tcggggaggctgagg

SEQ ID NO: 875018 - DNA, 15 bp, Homo sapiens
ctcggggaggctgag

SEQ ID NO: 875019 - DNA, 15 bp, Homo sapiens
actcggggaggctga

SEQ ID NO: 875020 - DNA, 15 bp, Homo sapiens
tactcggggaggctg

SEQ ID NO: 875021 - DNA, 15 bp, Homo sapiens
ctactcggggaggct

SEQ ID NO: 875022 - DNA, 15 bp, Homo sapiens
gctactcggggaggc

SEQ ID NO: 875023 - DNA, 15 bp, Homo sapiens
agctactcggggagg

SEQ ID NO: 875024 - DNA, 15 bp, Homo sapiens
cagctactcggggag

SEQ ID NO: 875025 - DNA, 15 bp, Homo sapiens
tcagctactcgggga

SEQ ID NO: 875026 - DNA, 15 bp, Homo sapiens
ctcagctactcgggg

SEQ ID NO: 875027 - DNA, 15 bp, Homo sapiens
tctcagctactcggg

SEQ ID NO: 875028 - DNA, 15 bp, Homo sapiens
atctcagctactcgg

SEQ ID NO: 875029 - DNA, 15 bp, Homo sapiens
aatctcagctactcg

SEQ ID NO: 875030 - DNA, 15 bp, Homo sapiens
taatctcagctactc

SEQ ID NO: 875031 - DNA, 15 bp, Homo sapiens
gtaatctcagctact

SEQ ID NO: 875032 - DNA, 15 bp, Homo sapiens
tgtaatctcagctac

SEQ ID NO: 875033 - DNA, 15 bp, Homo sapiens
ctgtaatctcagcta

SEQ ID NO: 875034 - DNA, 15 bp, Homo sapiens
cctgtaatctcagct

SEQ ID NO: 875035 - DNA, 15 bp, Homo sapiens
gcctgtaatctcagc

SEQ ID NO: 875036 - DNA, 15 bp, Homo sapiens
tgcctgtaatctcag

SEQ ID NO: 875037 - DNA, 15 bp, Homo sapiens
gtgcctgtaatctca

SEQ ID NO: 875038 - DNA, 15 bp, Homo sapiens
tgtgcctgtaatctc

SEQ ID NO: 875039 - DNA, 15 bp, Homo sapiens
atgtgcctgtaatct

SEQ ID NO: 875040 - DNA, 15 bp, Homo sapiens
catgtgcctgtaatc

SEQ ID NO: 875041 - DNA, 15 bp, Homo sapiens
tcatgtgcctgtaat

SEQ ID NO: 875042 - DNA, 15 bp, Homo sapiens
gtcatgtgcctgtaa

SEQ ID NO: 875043 - DNA, 15 bp, Homo sapiens
tgtcatgtgcctgta

SEQ ID NO: 875044 - DNA, 15 bp, Homo sapiens
gtgtcatgtgcctgt

SEQ ID NO: 875045 - DNA, 15 bp, Homo sapiens
ggtgtcatgtgcctg

SEQ ID NO: 875046 - DNA, 15 bp, Homo sapiens
tggtgtcatgtgcct

SEQ ID NO: 875047 - DNA, 15 bp, Homo sapiens
gtggtgtcatgtgcc

SEQ ID NO: 875048 - DNA, 15 bp, Homo sapiens
cgtggtgtcatgtgc

SEQ ID NO: 875049 - DNA, 15 bp, Homo sapiens
gcgtggtgtcatgtg

SEQ ID NO: 875050 - DNA, 15 bp, Homo sapiens
ggcgtggtgtcatgt

SEQ ID NO: 875051 - DNA, 15 bp, Homo sapiens
gggcgtggtgtcatg

SEQ ID NO: 875052 - DNA, 15 bp, Homo sapiens
cgggcgtggtgtcat

SEQ ID NO: 875053 - DNA, 15 bp, Homo sapiens
ccgggcgtggtgtca

SEQ ID NO: 875054 - DNA, 15 bp, Homo sapiens
gccgggcgtggtgtc

SEQ ID NO: 875055 - DNA, 15 bp, Homo sapiens
agccgggcgtggtgt

SEQ ID NO: 875056 - DNA, 15 bp, Homo sapiens
tagccgggcgtggtg

SEQ ID NO: 875057 - DNA, 15 bp, Homo sapiens
ttagccgggcgtggt

SEQ ID NO: 875058 - DNA, 15 bp, Homo sapiens
attagccgggcgtgg

SEQ ID NO: 875059 - DNA, 15 bp, Homo sapiens
aattagccgggcgtg

SEQ ID NO: 875060 - DNA, 15 bp, Homo sapiens
taaaaattagccggg

SEQ ID NO: 875061 - DNA, 15 bp, Homo sapiens
ataaaaattagccgg

SEQ ID NO: 875062 - DNA, 15 bp, Homo sapiens
tataaaaattagccg

SEQ ID NO: 875063 - DNA, 15 bp, Homo sapiens
atataaaaattagcc

SEQ ID NO: 875064 - DNA, 15 bp, Homo sapiens
aatataaaaattagc

SEQ ID NO: 875065 - DNA, 15 bp, Homo sapiens
aaatataaaaattag

SEQ ID NO: 875066 - DNA, 15 bp, Homo sapiens
aaaatataaaaatta

SEQ ID NO: 875067 - DNA, 15 bp, Homo sapiens
aaaaatataaaaatt

SEQ ID NO: 875068 - DNA, 15 bp, Homo sapiens
taaaaatataaaaat

SEQ ID NO: 875069 - DNA, 15 bp, Homo sapiens
ctaaaaatataaaaa

SEQ ID NO: 875070 - DNA, 15 bp, Homo sapiens
actaaaaatataaaa

SEQ ID NO: 875071 - DNA, 15 bp, Homo sapiens
tactaaaaatataaa

SEQ ID NO: 875072 - DNA, 15 bp, Homo sapiens
ctactaaaaatataa

SEQ ID NO: 875073 - DNA, 15 bp, Homo sapiens
tctactaaaaatata

SEQ ID NO: 875074 - DNA, 15 bp, Homo sapiens
ctctactaaaaatat

SEQ ID NO: 875075 - DNA, 15 bp, Homo sapiens
cgaaaccccgtctct

SEQ ID NO: 875076 - DNA, 15 bp, Homo sapiens
gcgaaaccccgtctc

SEQ ID NO: 875077 - DNA, 15 bp, Homo sapiens
ggcgaaaccccgtct

SEQ ID NO: 875078 - DNA, 15 bp, Homo sapiens
tggcgaaaccccgtc

SEQ ID NO: 875079 - DNA, 15 bp, Homo sapiens
atggcgaaaccccgt

SEQ ID NO: 875080 - DNA, 15 bp, Homo sapiens
catggcgaaaccccg

SEQ ID NO: 875081 - DNA, 15 bp, Homo sapiens
acatggcgaaacccc

SEQ ID NO: 875082 - DNA, 15 bp, Homo sapiens
aacatggcgaaaccc

SEQ ID NO: 875083 - DNA, 15 bp, Homo sapiens
caacatggcgaaacc

SEQ ID NO: 875084 - DNA, 15 bp, Homo sapiens
acaacatggcgaaac

SEQ ID NO: 875085 - DNA, 15 bp, Homo sapiens
aacaacatggcgaaa

SEQ ID NO: 875086 - DNA, 15 bp, Homo sapiens
gaacaacatggcgaa

SEQ ID NO: 875087 - DNA, 15 bp, Homo sapiens
tgaacaacatggcga

SEQ ID NO: 875088 - DNA, 15 bp, Homo sapiens
ctgaacaacatggcg

SEQ ID NO: 875089 - DNA, 15 bp, Homo sapiens
cctgaacaacatggc

SEQ ID NO: 875090 - DNA, 15 bp, Homo sapiens
gcctgaacaacatgg

SEQ ID NO: 875091 - DNA, 15 bp, Homo sapiens
agcctgaacaacatg

SEQ ID NO: 875092 - DNA, 15 bp, Homo sapiens
cagcctgaacaacat

SEQ ID NO: 875093 - DNA, 15 bp, Homo sapiens
ccagcctgaacaaca

SEQ ID NO: 875094 - DNA, 15 bp, Homo sapiens
accagcctgaacaac

SEQ ID NO: 875095 - DNA, 15 bp, Homo sapiens
gaccagcctgaacaa

SEQ ID NO: 875096 - DNA, 15 bp, Homo sapiens
agaccagcctgaaca

SEQ ID NO: 875097 - DNA, 15 bp, Homo sapiens
gagaccagcctgaac

SEQ ID NO: 875098 - DNA, 15 bp, Homo sapiens
tgagaccagcctgaa

SEQ ID NO: 875099 - DNA, 15 bp, Homo sapiens
gtgagaccagcctga

SEQ ID NO: 875100 - DNA, 15 bp, Homo sapiens
tgtgagaccagcctg

SEQ ID NO: 875101 - DNA, 15 bp, Homo sapiens
gtgtgagaccagcct

SEQ ID NO: 875102 - DNA, 15 bp, Homo sapiens
agtgtgagaccagcc

SEQ ID NO: 875103 - DNA, 15 bp, Homo sapiens
gagtgtgagaccagc

SEQ ID NO: 875104 - DNA, 15 bp, Homo sapiens
ggagtgtgagaccag

SEQ ID NO: 875105 - DNA, 15 bp, Homo sapiens
aggagtgtgagacca

SEQ ID NO: 875106 - DNA, 15 bp, Homo sapiens
caggagtgtgagacc

SEQ ID NO: 875107 - DNA, 15 bp, Homo sapiens
tcaggagtgtgagac

SEQ ID NO: 875108 - DNA, 15 bp, Homo sapiens
gtcaggagtgtgaga

SEQ ID NO: 875109 - DNA, 15 bp, Homo sapiens
ggtcaggagtgtgag

SEQ ID NO: 875110 - DNA, 15 bp, Homo sapiens
aggtcaggagtgtga

SEQ ID NO: 875111 - DNA, 15 bp, Homo sapiens
gaggtcaggagtgtg

SEQ ID NO: 875112 - DNA, 15 bp, Homo sapiens
tgaggtcaggagtgt

SEQ ID NO: 875113 - DNA, 15 bp, Homo sapiens
ctgaggtcaggagtg

SEQ ID NO: 875114 - DNA, 15 bp, Homo sapiens
cggatcacctgaggt

SEQ ID NO: 875115 - DNA, 15 bp, Homo sapiens
gcggatcacctgagg

SEQ ID NO: 875116 - DNA, 15 bp, Homo sapiens
ggcggatcacctgag

SEQ ID NO: 875117 - DNA, 15 bp, Homo sapiens
gggcggatcacctga

SEQ ID NO: 875118 - DNA, 15 bp, Homo sapiens
tgggcggatcacctg

SEQ ID NO: 875119 - DNA, 15 bp, Homo sapiens
gtgggcggatcacct

SEQ ID NO: 875120 - DNA, 15 bp, Homo sapiens
ggtgggcggatcacc

SEQ ID NO: 875121 - DNA, 15 bp, Homo sapiens
aggtgggcggatcac

SEQ ID NO: 875122 - DNA, 15 bp, Homo sapiens
gaggtgggcggatca

SEQ ID NO: 875123 - DNA, 15 bp, Homo sapiens
cgaggtgggcggatc

SEQ ID NO: 875124 - DNA, 15 bp, Homo sapiens
ccgaggtgggcggat

SEQ ID NO: 875125 - DNA, 15 bp, Homo sapiens
gccgaggtgggcgga

SEQ ID NO: 875126 - DNA, 15 bp, Homo sapiens
ggccgaggtgggcgg

SEQ ID NO: 875127 - DNA, 15 bp, Homo sapiens
aggccgaggtgggcg

SEQ ID NO: 875128 - DNA, 15 bp, Homo sapiens
gaggccgaggtgggc

SEQ ID NO: 875129 - DNA, 15 bp, Homo sapiens
ggaggccgaggtggg

SEQ ID NO: 875130 - DNA, 15 bp, Homo sapiens
gggaggccgaggtgg

SEQ ID NO: 875131 - DNA, 15 bp, Homo sapiens
tgggaggccgaggtg

SEQ ID NO: 875132 - DNA, 15 bp, Homo sapiens
ttgggaggccgaggt

SEQ ID NO: 875133 - DNA, 15 bp, Homo sapiens
tcagcactttgggag

SEQ ID NO: 875134 - DNA, 15 bp, Homo sapiens
ctcagcactttggga

SEQ ID NO: 875135 - DNA, 15 bp, Homo sapiens
tctcagcactttggg

SEQ ID NO: 875136 - DNA, 15 bp, Homo sapiens
atctcagcactttgg

SEQ ID NO: 875137 - DNA, 15 bp, Homo sapiens
aatctcagcactttg

SEQ ID NO: 875138 - DNA, 15 bp, Homo sapiens
taatctcagcacttt

SEQ ID NO: 875139 - DNA, 15 bp, Homo sapiens
gtaatctcagcactt

SEQ ID NO: 875140 - DNA, 15 bp, Homo sapiens
tgtaatctcagcact

SEQ ID NO: 875141 - DNA, 15 bp, Homo sapiens
ttgtaatctcagcac

SEQ ID NO: 875142 - DNA, 15 bp, Homo sapiens
cttgtaatctcagca

SEQ ID NO: 875143 - DNA, 15 bp, Homo sapiens
acttgtaatctcagc

SEQ ID NO: 875144 - DNA, 15 bp, Homo sapiens
cacttgtaatctcag

SEQ ID NO: 875145 - DNA, 15 bp, Homo sapiens
acacttgtaatctca

SEQ ID NO: 875146 - DNA, 15 bp, Homo sapiens
cacacttgtaatctc

SEQ ID NO: 875147 - DNA, 15 bp, Homo sapiens
tcacacttgtaatct

SEQ ID NO: 875148 - DNA, 15 bp, Homo sapiens
ctcacacttgtaatc

SEQ ID NO: 875149 - DNA, 15 bp, Homo sapiens
gctcacacttgtaat

SEQ ID NO: 875150 - DNA, 15 bp, Homo sapiens
ggctcacacttgtaa

SEQ ID NO: 875151 - DNA, 15 bp, Homo sapiens
tggctcacacttgta

SEQ ID NO: 875152 - DNA, 15 bp, Homo sapiens
gtggctcacacttgt

SEQ ID NO: 875153 - DNA, 15 bp, Homo sapiens
tgtggctcacacttg

SEQ ID NO: 875154 - DNA, 15 bp, Homo sapiens
ctgtggctcacactt

SEQ ID NO: 875155 - DNA, 15 bp, Homo sapiens
actgtggctcacact

SEQ ID NO: 875156 - DNA, 15 bp, Homo sapiens
cactgtggctcacac

SEQ ID NO: 875157 - DNA, 15 bp, Homo sapiens
gcactgtggctcaca

SEQ ID NO: 875158 - DNA, 15 bp, Homo sapiens
ggcactgtggctcac

SEQ ID NO: 875159 - DNA, 15 bp, Homo sapiens
gggcactgtggctca

SEQ ID NO: 875160 - DNA, 15 bp, Homo sapiens
cgggcactgtggctc

SEQ ID NO: 875161 - DNA, 15 bp, Homo sapiens
ccgggcactgtggct

SEQ ID NO: 875162 - DNA, 15 bp, Homo sapiens
gccgggcactgtggc

SEQ ID NO: 875163 - DNA, 15 bp, Homo sapiens
ggccgggcactgtgg

SEQ ID NO: 875164 - DNA, 15 bp, Homo sapiens
aggccgggcactgtg

SEQ ID NO: 875165 - DNA, 15 bp, Homo sapiens
taggccgggcactgt

SEQ ID NO: 875166 - DNA, 15 bp, Homo sapiens
ttaggccgggcactg

SEQ ID NO: 875167 - DNA, 15 bp, Homo sapiens
tttaggccgggcact

SEQ ID NO: 875168 - DNA, 15 bp, Homo sapiens
ttttaggccgggcac

SEQ ID NO: 875169 - DNA, 15 bp, Homo sapiens
tttttaggccgggca

SEQ ID NO: 875170 - DNA, 15 bp, Homo sapiens
ctttttaggccgggc

SEQ ID NO: 875171 - DNA, 15 bp, Homo sapiens
actttttaggccggg

SEQ ID NO: 875172 - DNA, 15 bp, Homo sapiens
aactttttaggccgg

SEQ ID NO: 875173 - DNA, 15 bp, Homo sapiens
taactttttaggccg

SEQ ID NO: 875174 - DNA, 15 bp, Homo sapiens
ttaactttttaggcc

SEQ ID NO: 875175 - DNA, 15 bp, Homo sapiens
attaactttttaggc

SEQ ID NO: 875176 - DNA, 15 bp, Homo sapiens
cattaactttttagg

SEQ ID NO: 875177 - DNA, 15 bp, Homo sapiens
acattaactttttag

SEQ ID NO: 875178 - DNA, 15 bp, Homo sapiens
aacattaacttttta

SEQ ID NO: 875179 - DNA, 15 bp, Homo sapiens
aaacattaacttttt

SEQ ID NO: 875180 - DNA, 15 bp, Homo sapiens
aaaacattaactttt

SEQ ID NO: 875181 - DNA, 15 bp, Homo sapiens
gaaaacattaacttt

SEQ ID NO: 875182 - DNA, 15 bp, Homo sapiens
tgaaaacattaactt

SEQ ID NO: 875183 - DNA, 15 bp, Homo sapiens
gtgaaaacattaact

SEQ ID NO: 875184 - DNA, 15 bp, Homo sapiens
tgtgaaaacattaac

SEQ ID NO: 875185 - DNA, 15 bp, Homo sapiens
atgtgaaaacattaa

SEQ ID NO: 875186 - DNA, 15 bp, Homo sapiens
tatgtgaaaacatta

SEQ ID NO: 875187 - DNA, 15 bp, Homo sapiens
ctatgtgaaaacatt

SEQ ID NO: 875188 - DNA, 15 bp, Homo sapiens
tctatgtgaaaacat

SEQ ID NO: 875189 - DNA, 15 bp, Homo sapiens
ctctatgtgaaaaca

SEQ ID NO: 875190 - DNA, 15 bp, Homo sapiens
cctctatgtgaaaac

SEQ ID NO: 875191 - DNA, 15 bp, Homo sapiens
gcctctatgtgaaaa

SEQ ID NO: 875192 - DNA, 15 bp, Homo sapiens
tgcctctatgtgaaa

SEQ ID NO: 875193 - DNA, 15 bp, Homo sapiens
atgcctctatgtgaa

SEQ ID NO: 875194 - DNA, 15 bp, Homo sapiens
gatgcctctatgtga

SEQ ID NO: 875195 - DNA, 15 bp, Homo sapiens
tgatgcctctatgtg

SEQ ID NO: 875196 - DNA, 15 bp, Homo sapiens
atgatgcctctatgt

SEQ ID NO: 875197 - DNA, 15 bp, Homo sapiens
catgatgcctctatg

SEQ ID NO: 875198 - DNA, 15 bp, Homo sapiens
acatgatgcctctat

SEQ ID NO: 875199 - DNA, 15 bp, Homo sapiens
tacatgatgcctcta

SEQ ID NO: 875200 - DNA, 15 bp, Homo sapiens
ttacatgatgcctct

SEQ ID NO: 875201 - DNA, 15 bp, Homo sapiens
attacatgatgcctc

SEQ ID NO: 875202 - DNA, 15 bp, Homo sapiens
tattacatgatgcct

SEQ ID NO: 875203 - DNA, 15 bp, Homo sapiens
ttattacatgatgcc

SEQ ID NO: 875204 - DNA, 15 bp, Homo sapiens
tttattacatgatgc

SEQ ID NO: 875205 - DNA, 15 bp, Homo sapiens
ttttattacatgatg

SEQ ID NO: 875206 - DNA, 15 bp, Homo sapiens
cttttattacatgat

SEQ ID NO: 875207 - DNA, 15 bp, Homo sapiens
acttttattacatga

SEQ ID NO: 875208 - DNA, 15 bp, Homo sapiens
aacttttattacatg

SEQ ID NO: 875209 - DNA, 15 bp, Homo sapiens
caacttttattacat

SEQ ID NO: 875210 - DNA, 15 bp, Homo sapiens
ccaacttttattaca

SEQ ID NO: 875211 - DNA, 15 bp, Homo sapiens
cccaacttttattac

SEQ ID NO: 875212 - DNA, 15 bp, Homo sapiens
acccaacttttatta

SEQ ID NO: 875213 - DNA, 15 bp, Homo sapiens
aacccaacttttatt

SEQ ID NO: 875214 - DNA, 15 bp, Homo sapiens
aaacccaacttttat

SEQ ID NO: 875215 - DNA, 15 bp, Homo sapiens
taaacccaactttta

SEQ ID NO: 875216 - DNA, 15 bp, Homo sapiens
ataaacccaactttt

SEQ ID NO: 875217 - DNA, 15 bp, Homo sapiens
aataaacccaacttt

SEQ ID NO: 875218 - DNA, 15 bp, Homo sapiens
caataaacccaactt

SEQ ID NO: 875219 - DNA, 15 bp, Homo sapiens
ccaataaacccaact

SEQ ID NO: 875220 - DNA, 15 bp, Homo sapiens
tccaataaacccaac

SEQ ID NO: 875221 - DNA, 15 bp, Homo sapiens
ctccaataaacccaa

SEQ ID NO: 875222 - DNA, 15 bp, Homo sapiens
gctccaataaaccca

SEQ ID NO: 875223 - DNA, 15 bp, Homo sapiens
ggctccaataaaccc

SEQ ID NO: 875224 - DNA, 15 bp, Homo sapiens
aggctccaataaacc

SEQ ID NO: 875225 - DNA, 15 bp, Homo sapiens
caggctccaataaac

SEQ ID NO: 875226 - DNA, 15 bp, Homo sapiens
ccaggctccaataaa

SEQ ID NO: 875227 - DNA, 15 bp, Homo sapiens
tccaggctccaataa

SEQ ID NO: 875228 - DNA, 15 bp, Homo sapiens
ctccaggctccaata

SEQ ID NO: 875229 - DNA, 15 bp, Homo sapiens
cctccaggctccaat

SEQ ID NO: 875230 - DNA, 15 bp, Homo sapiens
tcctccaggctccaa

SEQ ID NO: 875231 - DNA, 15 bp, Homo sapiens
ttcctccaggctcca

SEQ ID NO: 875232 - DNA, 15 bp, Homo sapiens
cttcctccaggctcc

SEQ ID NO: 875233 - DNA, 15 bp, Homo sapiens
gcttcctccaggctc

SEQ ID NO: 875234 - DNA, 15 bp, Homo sapiens
tgcttcctccaggct

SEQ ID NO: 875235 - DNA, 15 bp, Homo sapiens
gtgcttcctccaggc

SEQ ID NO: 875236 - DNA, 15 bp, Homo sapiens
tgtgcttcctccagg

SEQ ID NO: 875237 - DNA, 15 bp, Homo sapiens
ctgtgcttcctccag

SEQ ID NO: 875238 - DNA, 15 bp, Homo sapiens
tctgtgcttcctcca

SEQ ID NO: 875239 - DNA, 15 bp, Homo sapiens
atctgtgcttcctcc

SEQ ID NO: 875240 - DNA, 15 bp, Homo sapiens
aatctgtgcttcctc

SEQ ID NO: 875241 - DNA, 15 bp, Homo sapiens
gaatctgtgcttcct

SEQ ID NO: 875242 - DNA, 15 bp, Homo sapiens
tgaatctgtgcttcc

SEQ ID NO: 875243 - DNA, 15 bp, Homo sapiens
ttgaatctgtgcttc

SEQ ID NO: 875244 - DNA, 15 bp, Homo sapiens
attgaatctgtgctt

SEQ ID NO: 875245 - DNA, 15 bp, Homo sapiens
aattgaatctgtgct

SEQ ID NO: 875246 - DNA, 15 bp, Homo sapiens
gaattgaatctgtgc

SEQ ID NO: 875247 - DNA, 15 bp, Homo sapiens
ggaattgaatctgtg

SEQ ID NO: 875248 - DNA, 15 bp, Homo sapiens
gggaattgaatctgt

SEQ ID NO: 875249 - DNA, 15 bp, Homo sapiens
agggaattgaatctg

SEQ ID NO: 875250 - DNA, 15 bp, Homo sapiens
tagggaattgaatct

SEQ ID NO: 875251 - DNA, 15 bp, Homo sapiens
ttagggaattgaatc

SEQ ID NO: 875252 - DNA, 15 bp, Homo sapiens
attagggaattgaat

SEQ ID NO: 875253 - DNA, 15 bp, Homo sapiens
cattagggaattgaa

SEQ ID NO: 875254 - DNA, 15 bp, Homo sapiens
ccattagggaattga

SEQ ID NO: 875255 - DNA, 15 bp, Homo sapiens
cccattagggaattg

SEQ ID NO: 875256 - DNA, 15 bp, Homo sapiens
ccccattagggaatt

SEQ ID NO: 875257 - DNA, 15 bp, Homo sapiens
gccccattagggaat

SEQ ID NO: 875258 - DNA, 15 bp, Homo sapiens
agccccattagggaa

SEQ ID NO: 875259 - DNA, 15 bp, Homo sapiens
aagccccattaggga

SEQ ID NO: 875260 - DNA, 15 bp, Homo sapiens
gaagccccattaggg

SEQ ID NO: 875261 - DNA, 15 bp, Homo sapiens
agaagccccattagg

SEQ ID NO: 875262 - DNA, 15 bp, Homo sapiens
gagaagccccattag

SEQ ID NO: 875263 - DNA, 15 bp, Homo sapiens
cgagaagccccatta

SEQ ID NO: 875264 - DNA, 15 bp, Homo sapiens
gcgagaagccccatt

SEQ ID NO: 875265 - DNA, 15 bp, Homo sapiens
agcgagaagccccat

SEQ ID NO: 875266 - DNA, 15 bp, Homo sapiens
aagcgagaagcccca

SEQ ID NO: 875267 - DNA, 15 bp, Homo sapiens
aaagcgagaagcccc

SEQ ID NO: 875268 - DNA, 15 bp, Homo sapiens
gaaagcgagaagccc

SEQ ID NO: 875269 - DNA, 15 bp, Homo sapiens
agaaagcgagaagcc

SEQ ID NO: 875270 - DNA, 15 bp, Homo sapiens
aagaaagcgagaagc

SEQ ID NO: 875271 - DNA, 15 bp, Homo sapiens
caagaaagcgagaag

SEQ ID NO: 875272 - DNA, 15 bp, Homo sapiens
gcaagaaagcgagaa

SEQ ID NO: 875273 - DNA, 15 bp, Homo sapiens
agcaagaaagcgaga

SEQ ID NO: 875274 - DNA, 15 bp, Homo sapiens
gagcaagaaagcgag

SEQ ID NO: 875275 - DNA, 15 bp, Homo sapiens
tgagcaagaaagcga

SEQ ID NO: 875276 - DNA, 15 bp, Homo sapiens
ttgagcaagaaagcg

SEQ ID NO: 875277 - DNA, 15 bp, Homo sapiens
tttgagcaagaaagc

SEQ ID NO: 875278 - DNA, 15 bp, Homo sapiens
ttttgagcaagaaag

SEQ ID NO: 875279 - DNA, 15 bp, Homo sapiens
attttgagcaagaaa

SEQ ID NO: 875280 - DNA, 15 bp, Homo sapiens
cattttgagcaagaa

SEQ ID NO: 875281 - DNA, 15 bp, Homo sapiens
acattttgagcaaga

SEQ ID NO: 875282 - DNA, 15 bp, Homo sapiens
gacattttgagcaag

SEQ ID NO: 875283 - DNA, 15 bp, Homo sapiens
tgacattttgagcaa

SEQ ID NO: 875284 - DNA, 15 bp, Homo sapiens
ttgacattttgagca

SEQ ID NO: 875285 - DNA, 15 bp, Homo sapiens
tttgacattttgagc

SEQ ID NO: 875286 - DNA, 15 bp, Homo sapiens
ctttgacattttgag

SEQ ID NO: 875287 - DNA, 15 bp, Homo sapiens
actttgacattttga

SEQ ID NO: 875288 - DNA, 15 bp, Homo sapiens
aactttgacattttg

SEQ ID NO: 875289 - DNA, 15 bp, Homo sapiens
caactttgacatttt

SEQ ID NO: 875290 - DNA, 15 bp, Homo sapiens
acaactttgacattt

SEQ ID NO: 875291 - DNA, 15 bp, Homo sapiens
aacaactttgacatt

SEQ ID NO: 875292 - DNA, 15 bp, Homo sapiens
caacaactttgacat

SEQ ID NO: 875293 - DNA, 15 bp, Homo sapiens
tcaacaactttgaca

SEQ ID NO: 875294 - DNA, 15 bp, Homo sapiens
atcaacaactttgac

SEQ ID NO: 875295 - DNA, 15 bp, Homo sapiens
tatcaacaactttga

SEQ ID NO: 875296 - DNA, 15 bp, Homo sapiens
atatcaacaactttg

SEQ ID NO: 875297 - DNA, 15 bp, Homo sapiens
aatatcaacaacttt

SEQ ID NO: 875298 - DNA, 15 bp, Homo sapiens
aaatatcaacaactt

SEQ ID NO: 875299 - DNA, 15 bp, Homo sapiens
caaatatcaacaact

SEQ ID NO: 875300 - DNA, 15 bp, Homo sapiens
tcaaatatcaacaac

SEQ ID NO: 875301 - DNA, 15 bp, Homo sapiens
ttcaaatatcaacaa

SEQ ID NO: 875302 - DNA, 15 bp, Homo sapiens
cttcaaatatcaaca

SEQ ID NO: 875303 - DNA, 15 bp, Homo sapiens
acttcaaatatcaac

SEQ ID NO: 875304 - DNA, 15 bp, Homo sapiens
cacttcaaatatcaa

SEQ ID NO: 875305 - DNA, 15 bp, Homo sapiens
ccacttcaaatatca

SEQ ID NO: 875306 - DNA, 15 bp, Homo sapiens
cccacttcaaatatc

SEQ ID NO: 875307 - DNA, 15 bp, Homo sapiens
tcccacttcaaatat

SEQ ID NO: 875308 - DNA, 15 bp, Homo sapiens
atcccacttcaaata

SEQ ID NO: 875309 - DNA, 15 bp, Homo sapiens
catcccacttcaaat

SEQ ID NO: 875310 - DNA, 15 bp, Homo sapiens
tcatcccacttcaaa

SEQ ID NO: 875311 - DNA, 15 bp, Homo sapiens
gtcatcccacttcaa

SEQ ID NO: 875312 - DNA, 15 bp, Homo sapiens
tgtcatcccacttca

SEQ ID NO: 875313 - DNA, 15 bp, Homo sapiens
atgtcatcccacttc

SEQ ID NO: 875314 - DNA, 15 bp, Homo sapiens
aatgtcatcccactt

SEQ ID NO: 875315 - DNA, 15 bp, Homo sapiens
aaatgtcatcccact

SEQ ID NO: 875316 - DNA, 15 bp, Homo sapiens
aaaatgtcatcccac

SEQ ID NO: 875317 - DNA, 15 bp, Homo sapiens
gaaaatgtcatccca

SEQ ID NO: 875318 - DNA, 15 bp, Homo sapiens
ggaaaatgtcatccc

SEQ ID NO: 875319 - DNA, 15 bp, Homo sapiens
gggaaaatgtcatcc

SEQ ID NO: 875320 - DNA, 15 bp, Homo sapiens
agggaaaatgtcatc

SEQ ID NO: 875321 - DNA, 15 bp, Homo sapiens
tagggaaaatgtcat

SEQ ID NO: 875322 - DNA, 15 bp, Homo sapiens
ctagggaaaatgtca

SEQ ID NO: 875323 - DNA, 15 bp, Homo sapiens
cctagggaaaatgtc

SEQ ID NO: 875324 - DNA, 15 bp, Homo sapiens
ccctagggaaaatgt

SEQ ID NO: 875325 - DNA, 15 bp, Homo sapiens
tccctagggaaaatg

SEQ ID NO: 875326 - DNA, 15 bp, Homo sapiens
ttccctagggaaaat

SEQ ID NO: 875327 - DNA, 15 bp, Homo sapiens
cttccctagggaaaa

SEQ ID NO: 875328 - DNA, 15 bp, Homo sapiens
tcttccctagggaaa

SEQ ID NO: 875329 - DNA, 15 bp, Homo sapiens
ttcttccctagggaa

SEQ ID NO: 875330 - DNA, 15 bp, Homo sapiens
tttcttccctaggga

SEQ ID NO: 875331 - DNA, 15 bp, Homo sapiens
ttttcttccctaggg

SEQ ID NO: 875332 - DNA, 15 bp, Homo sapiens
tttttcttccctagg

SEQ ID NO: 875333 - DNA, 15 bp, Homo sapiens
gtttttcttccctag

SEQ ID NO: 875334 - DNA, 15 bp, Homo sapiens
agtttttcttcccta

SEQ ID NO: 875335 - DNA, 15 bp, Homo sapiens
tagtttttcttccct

SEQ ID NO: 875336 - DNA, 15 bp, Homo sapiens
ctagtttttcttccc

SEQ ID NO: 875337 - DNA, 15 bp, Homo sapiens
gctagtttttcttcc

SEQ ID NO: 875338 - DNA, 15 bp, Homo sapiens
agctagtttttcttc

SEQ ID NO: 875339 - DNA, 15 bp, Homo sapiens
tagctagtttttctt

SEQ ID NO: 875340 - DNA, 15 bp, Homo sapiens
ttagctagtttttct

SEQ ID NO: 875341 - DNA, 15 bp, Homo sapiens
cttagctagtttttc

SEQ ID NO: 875342 - DNA, 15 bp, Homo sapiens
tcttagctagttttt

SEQ ID NO: 875343 - DNA, 15 bp, Homo sapiens
gtcttagctagtttt

SEQ ID NO: 875344 - DNA, 15 bp, Homo sapiens
ggtcttagctagttt

SEQ ID NO: 875345 - DNA, 15 bp, Homo sapiens
tggtcttagctagtt

SEQ ID NO: 875346 - DNA, 15 bp, Homo sapiens
ttggtcttagctagt

SEQ ID NO: 875347 - DNA, 15 bp, Homo sapiens
gttggtcttagctag

SEQ ID NO: 875348 - DNA, 15 bp, Homo sapiens
ggttggtcttagcta

SEQ ID NO: 875349 - DNA, 15 bp, Homo sapiens
gggttggtcttagct

SEQ ID NO: 875350 - DNA, 15 bp, Homo sapiens
agggttggtcttagc

SEQ ID NO: 875351 - DNA, 15 bp, Homo sapiens
aagggttggtcttag

SEQ ID NO: 875352 - DNA, 15 bp, Homo sapiens
aaagggttggtctta

SEQ ID NO: 875353 - DNA, 15 bp, Homo sapiens
taaagggttggtctt

SEQ ID NO: 875354 - DNA, 15 bp, Homo sapiens
ttaaagggttggtct

SEQ ID NO: 875355 - DNA, 15 bp, Homo sapiens
tttaaagggttggtc

SEQ ID NO: 875356 - DNA, 15 bp, Homo sapiens
ttttaaagggttggt

SEQ ID NO: 875357 - DNA, 15 bp, Homo sapiens
attttaaagggttgg

SEQ ID NO: 875358 - DNA, 15 bp, Homo sapiens
tattttaaagggttg

SEQ ID NO: 875359 - DNA, 15 bp, Homo sapiens
ttattttaaagggtt

SEQ ID NO: 875360 - DNA, 15 bp, Homo sapiens
gttattttaaagggt

SEQ ID NO: 875361 - DNA, 15 bp, Homo sapiens
tgttattttaaaggg

SEQ ID NO: 875362 - DNA, 15 bp, Homo sapiens
atgttattttaaagg

SEQ ID NO: 875363 - DNA, 15 bp, Homo sapiens
catgttattttaaag

SEQ ID NO: 875364 - DNA, 15 bp, Homo sapiens
acatgttattttaaa

SEQ ID NO: 875365 - DNA, 15 bp, Homo sapiens
cacatgttattttaa

SEQ ID NO: 875366 - DNA, 15 bp, Homo sapiens
acacatgttatttta

SEQ ID NO: 875367 - DNA, 15 bp, Homo sapiens
aacacatgttatttt

SEQ ID NO: 875368 - DNA, 15 bp, Homo sapiens
aaacacatgttattt

SEQ ID NO: 875369 - DNA, 15 bp, Homo sapiens
aaaacacatgttatt

SEQ ID NO: 875370 - DNA, 15 bp, Homo sapiens
caaaacacatgttat

SEQ ID NO: 875371 - DNA, 15 bp, Homo sapiens
acaaaacacatgtta

SEQ ID NO: 875372 - DNA, 15 bp, Homo sapiens
cacaaaacacatgtt

SEQ ID NO: 875373 - DNA, 15 bp, Homo sapiens
tcacaaaacacatgt

SEQ ID NO: 875374 - DNA, 15 bp, Homo sapiens
gtcacaaaacacatg

SEQ ID NO: 875375 - DNA, 15 bp, Homo sapiens
ggtcacaaaacacat

SEQ ID NO: 875376 - DNA, 15 bp, Homo sapiens
gggtcacaaaacaca

SEQ ID NO: 875377 - DNA, 15 bp, Homo sapiens
agggtcacaaaacac

SEQ ID NO: 875378 - DNA, 15 bp, Homo sapiens
aagggtcacaaaaca

SEQ ID NO: 875379 - DNA, 15 bp, Homo sapiens
taagggtcacaaaac

SEQ ID NO: 875380 - DNA, 15 bp, Homo sapiens
ataagggtcacaaaa

SEQ ID NO: 875381 - DNA, 15 bp, Homo sapiens
aataagggtcacaaa

SEQ ID NO: 875382 - DNA, 15 bp, Homo sapiens
aaataagggtcacaa

SEQ ID NO: 875383 - DNA, 15 bp, Homo sapiens
gaaataagggtcaca

SEQ ID NO: 875384 - DNA, 15 bp, Homo sapiens
agaaataagggtcac

SEQ ID NO: 875385 - DNA, 15 bp, Homo sapiens
aagaaataagggtca

SEQ ID NO: 875386 - DNA, 15 bp, Homo sapiens
gaagaaataagggtc

SEQ ID NO: 875387 - DNA, 15 bp, Homo sapiens
tgaagaaataagggt

SEQ ID NO: 875388 - DNA, 15 bp, Homo sapiens
ctgaagaaataaggg

SEQ ID NO: 875389 - DNA, 15 bp, Homo sapiens
tctgaagaaataagg

SEQ ID NO: 875390 - DNA, 15 bp, Homo sapiens
atctgaagaaataag

SEQ ID NO: 875391 - DNA, 15 bp, Homo sapiens
catctgaagaaataa

SEQ ID NO: 875392 - DNA, 15 bp, Homo sapiens
tcatctgaagaaata

SEQ ID NO: 875393 - DNA, 15 bp, Homo sapiens
atcatctgaagaaat

SEQ ID NO: 875394 - DNA, 15 bp, Homo sapiens
aatcatctgaagaaa

SEQ ID NO: 875395 - DNA, 15 bp, Homo sapiens
caatcatctgaagaa

SEQ ID NO: 875396 - DNA, 15 bp, Homo sapiens
ccaatcatctgaaga

SEQ ID NO: 875397 - DNA, 15 bp, Homo sapiens
accaatcatctgaag

SEQ ID NO: 875398 - DNA, 15 bp, Homo sapiens
gaccaatcatctgaa

SEQ ID NO: 875399 - DNA, 15 bp, Homo sapiens
tgaccaatcatctga

SEQ ID NO: 875400 - DNA, 15 bp, Homo sapiens
gtgaccaatcatctg

SEQ ID NO: 875401 - DNA, 15 bp, Homo sapiens
ggtgaccaatcatct

SEQ ID NO: 875402 - DNA, 15 bp, Homo sapiens
gggtgaccaatcatc

SEQ ID NO: 875403 - DNA, 15 bp, Homo sapiens
tgggtgaccaatcat

SEQ ID NO: 875404 - DNA, 15 bp, Homo sapiens
ttgggtgaccaatca

SEQ ID NO: 875405 - DNA, 15 bp, Homo sapiens
attgggtgaccaatc

SEQ ID NO: 875406 - DNA, 15 bp, Homo sapiens
gattgggtgaccaat

SEQ ID NO: 875407 - DNA, 15 bp, Homo sapiens
ggattgggtgaccaa

SEQ ID NO: 875408 - DNA, 15 bp, Homo sapiens
gggattgggtgacca

SEQ ID NO: 875409 - DNA, 15 bp, Homo sapiens
tgggattgggtgacc

SEQ ID NO: 875410 - DNA, 15 bp, Homo sapiens
atgggattgggtgac

SEQ ID NO: 875411 - DNA, 15 bp, Homo sapiens
tatgggattgggtga

SEQ ID NO: 875412 - DNA, 15 bp, Homo sapiens
ctatgggattgggtg

SEQ ID NO: 875413 - DNA, 15 bp, Homo sapiens
actatgggattgggt

SEQ ID NO: 875414 - DNA, 15 bp, Homo sapiens
cactatgggattggg

SEQ ID NO: 875415 - DNA, 15 bp, Homo sapiens
ccactatgggattgg

SEQ ID NO: 875416 - DNA, 15 bp, Homo sapiens
gccactatgggattg

SEQ ID NO: 875417 - DNA, 15 bp, Homo sapiens
agccactatgggatt

SEQ ID NO: 875418 - DNA, 15 bp, Homo sapiens
cagccactatgggat

SEQ ID NO: 875419 - DNA, 15 bp, Homo sapiens
gcagccactatggga

SEQ ID NO: 875420 - DNA, 15 bp, Homo sapiens
ggcagccactatggg

SEQ ID NO: 875421 - DNA, 15 bp, Homo sapiens
gggcagccactatgg

SEQ ID NO: 875422 - DNA, 15 bp, Homo sapiens
ggggcagccactatg

SEQ ID NO: 875423 - DNA, 15 bp, Homo sapiens
gggggcagccactat

SEQ ID NO: 875424 - DNA, 15 bp, Homo sapiens
tgggggcagccacta

SEQ ID NO: 875425 - DNA, 15 bp, Homo sapiens
gtgggggcagccact

SEQ ID NO: 875426 - DNA, 15 bp, Homo sapiens
ggtgggggcagccac

SEQ ID NO: 875427 - DNA, 15 bp, Homo sapiens
aggtgggggcagcca

SEQ ID NO: 875428 - DNA, 15 bp, Homo sapiens
caggtgggggcagcc

SEQ ID NO: 875429 - DNA, 15 bp, Homo sapiens
tcaggtgggggcagc

SEQ ID NO: 875430 - DNA, 15 bp, Homo sapiens
gtcaggtgggggcag

SEQ ID NO: 875431 - DNA, 15 bp, Homo sapiens
ggtcaggtgggggca

SEQ ID NO: 875432 - DNA, 15 bp, Homo sapiens
aggtcaggtgggggc

SEQ ID NO: 875433 - DNA, 15 bp, Homo sapiens
aaggtcaggtggggg

SEQ ID NO: 875434 - DNA, 15 bp, Homo sapiens
taaggtcaggtgggg

SEQ ID NO: 875435 - DNA, 15 bp, Homo sapiens
gtaaggtcaggtggg

SEQ ID NO: 875436 - DNA, 15 bp, Homo sapiens
ggtaaggtcaggtgg

SEQ ID NO: 875437 - DNA, 15 bp, Homo sapiens
tggtaaggtcaggtg

SEQ ID NO: 875438 - DNA, 15 bp, Homo sapiens
atggtaaggtcaggt

SEQ ID NO: 875439 - DNA, 15 bp, Homo sapiens
tatggtaaggtcagg

SEQ ID NO: 875440 - DNA, 15 bp, Homo sapiens
gtatggtaaggtcag

SEQ ID NO: 875441 - DNA, 15 bp, Homo sapiens
ggtatggtaaggtca

SEQ ID NO: 875442 - DNA, 15 bp, Homo sapiens
aggtatggtaaggtc

SEQ ID NO: 875443 - DNA, 15 bp, Homo sapiens
caggtatggtaaggt

SEQ ID NO: 875444 - DNA, 15 bp, Homo sapiens
acaggtatggtaagg

SEQ ID NO: 875445 - DNA, 15 bp, Homo sapiens
tacaggtatggtaag

SEQ ID NO: 875446 - DNA, 15 bp, Homo sapiens
ttacaggtatggtaa

SEQ ID NO: 875447 - DNA, 15 bp, Homo sapiens
attacaggtatggta

SEQ ID NO: 875448 - DNA, 15 bp, Homo sapiens
cattacaggtatggt

SEQ ID NO: 875449 - DNA, 15 bp, Homo sapiens
tcattacaggtatgg

SEQ ID NO: 875450 - DNA, 15 bp, Homo sapiens
ctcattacaggtatg

SEQ ID NO: 875451 - DNA, 15 bp, Homo sapiens
tctcattacaggtat

SEQ ID NO: 875452 - DNA, 15 bp, Homo sapiens
ctctcattacaggta

SEQ ID NO: 875453 - DNA, 15 bp, Homo sapiens
tctctcattacaggt

SEQ ID NO: 875454 - DNA, 15 bp, Homo sapiens
ctctctcattacagg

SEQ ID NO: 875455 - DNA, 15 bp, Homo sapiens
gctctctcattacag

SEQ ID NO: 875456 - DNA, 15 bp, Homo sapiens
agctctctcattaca

SEQ ID NO: 875457 - DNA, 15 bp, Homo sapiens
cagctctctcattac

SEQ ID NO: 875458 - DNA, 15 bp, Homo sapiens
tcagctctctcatta

SEQ ID NO: 875459 - DNA, 15 bp, Homo sapiens
atcagctctctcatt

SEQ ID NO: 875460 - DNA, 15 bp, Homo sapiens
catcagctctctcat

SEQ ID NO: 875461 - DNA, 15 bp, Homo sapiens
acatcagctctctca

SEQ ID NO: 875462 - DNA, 15 bp, Homo sapiens
aacatcagctctctc

SEQ ID NO: 875463 - DNA, 15 bp, Homo sapiens
caacatcagctctct

SEQ ID NO: 875464 - DNA, 15 bp, Homo sapiens
tcaacatcagctctc

SEQ ID NO: 875465 - DNA, 15 bp, Homo sapiens
gtcaacatcagctct

SEQ ID NO: 875466 - DNA, 15 bp, Homo sapiens
tgtcaacatcagctc

SEQ ID NO: 875467 - DNA, 15 bp, Homo sapiens
atgtcaacatcagct

SEQ ID NO: 875468 - DNA, 15 bp, Homo sapiens
catgtcaacatcagc

SEQ ID NO: 875469 - DNA, 15 bp, Homo sapiens
gcatgtcaacatcag

SEQ ID NO: 875470 - DNA, 15 bp, Homo sapiens
ggcatgtcaacatca

SEQ ID NO: 875471 - DNA, 15 bp, Homo sapiens
tggcatgtcaacatc

SEQ ID NO: 875472 - DNA, 15 bp, Homo sapiens
gtggcatgtcaacat

SEQ ID NO: 875473 - DNA, 15 bp, Homo sapiens
cgtggcatgtcaaca

SEQ ID NO: 875474 - DNA, 15 bp, Homo sapiens
tcgtggcatgtcaac

SEQ ID NO: 875475 - DNA, 15 bp, Homo sapiens
gtcgtggcatgtcaa

SEQ ID NO: 875476 - DNA, 15 bp, Homo sapiens
ggtcgtggcatgtca

SEQ ID NO: 875477 - DNA, 15 bp, Homo sapiens
aggtcgtggcatgtc

SEQ ID NO: 875478 - DNA, 15 bp, Homo sapiens
caggtcgtggcatgt

SEQ ID NO: 875479 - DNA, 15 bp, Homo sapiens
ccaggtcgtggcatg

SEQ ID NO: 875480 - DNA, 15 bp, Homo sapiens
gccaggtcgtggcat

SEQ ID NO: 875481 - DNA, 15 bp, Homo sapiens
tgccaggtcgtggca

SEQ ID NO: 875482 - DNA, 15 bp, Homo sapiens
atgccaggtcgtggc

SEQ ID NO: 875483 - DNA, 15 bp, Homo sapiens
gatgccaggtcgtgg

SEQ ID NO: 875484 - DNA, 15 bp, Homo sapiens
agatgccaggtcgtg

SEQ ID NO: 875485 - DNA, 15 bp, Homo sapiens
cagatgccaggtcgt

SEQ ID NO: 875486 - DNA, 15 bp, Homo sapiens
gcagatgccaggtcg

SEQ ID NO: 875487 - DNA, 15 bp, Homo sapiens
ggcagatgccaggtc

SEQ ID NO: 875488 - DNA, 15 bp, Homo sapiens
tggcagatgccaggt

SEQ ID NO: 875489 - DNA, 15 bp, Homo sapiens
ttggcagatgccagg

SEQ ID NO: 875490 - DNA, 15 bp, Homo sapiens
cttggcagatgccag

SEQ ID NO: 875491 - DNA, 15 bp, Homo sapiens
tcttggcagatgcca

SEQ ID NO: 875492 - DNA, 15 bp, Homo sapiens
ttcttggcagatgcc

SEQ ID NO: 875493 - DNA, 15 bp, Homo sapiens
tttcttggcagatgc

SEQ ID NO: 875494 - DNA, 15 bp, Homo sapiens
ctttcttggcagatg

SEQ ID NO: 875495 - DNA, 15 bp, Homo sapiens
tctttcttggcagat

SEQ ID NO: 875496 - DNA, 15 bp, Homo sapiens
gtctttcttggcaga

SEQ ID NO: 875497 - DNA, 15 bp, Homo sapiens
agtctttcttggcag

SEQ ID NO: 875498 - DNA, 15 bp, Homo sapiens
gagtctttcttggca

SEQ ID NO: 875499 - DNA, 15 bp, Homo sapiens
agagtctttcttggc

SEQ ID NO: 875500 - DNA, 15 bp, Homo sapiens
aagagtctttcttgg

SEQ ID NO: 875501 - DNA, 15 bp, Homo sapiens
aaagagtctttcttg

SEQ ID NO: 875502 - DNA, 15 bp, Homo sapiens
caaagagtctttctt

SEQ ID NO: 875503 - DNA, 15 bp, Homo sapiens
ccaaagagtctttct

SEQ ID NO: 875504 - DNA, 15 bp, Homo sapiens
cccaaagagtctttc

SEQ ID NO: 875505 - DNA, 15 bp, Homo sapiens
acccaaagagtcttt

SEQ ID NO: 875506 - DNA, 15 bp, Homo sapiens
aacccaaagagtctt

SEQ ID NO: 875507 - DNA, 15 bp, Homo sapiens
aaacccaaagagtct

SEQ ID NO: 875508 - DNA, 15 bp, Homo sapiens
gaaacccaaagagtc

SEQ ID NO: 875509 - DNA, 15 bp, Homo sapiens
agaaacccaaagagt

SEQ ID NO: 875510 - DNA, 15 bp, Homo sapiens
cagaaacccaaagag

SEQ ID NO: 875511 - DNA, 15 bp, Homo sapiens
acagaaacccaaaga

SEQ ID NO: 875512 - DNA, 15 bp, Homo sapiens
cacagaaacccaaag

SEQ ID NO: 875513 - DNA, 15 bp, Homo sapiens
ccacagaaacccaaa

SEQ ID NO: 875514 - DNA, 15 bp, Homo sapiens
accacagaaacccaa

SEQ ID NO: 875515 - DNA, 15 bp, Homo sapiens
taccacagaaaccca

SEQ ID NO: 875516 - DNA, 15 bp, Homo sapiens
ctaccacagaaaccc

SEQ ID NO: 875517 - DNA, 15 bp, Homo sapiens
actaccacagaaacc

SEQ ID NO: 875518 - DNA, 15 bp, Homo sapiens
aactaccacagaaac

SEQ ID NO: 875519 - DNA, 15 bp, Homo sapiens
aaactaccacagaaa

SEQ ID NO: 875520 - DNA, 15 bp, Homo sapiens
gaaactaccacagaa

SEQ ID NO: 875521 - DNA, 15 bp, Homo sapiens
ggaaactaccacaga

SEQ ID NO: 875522 - DNA, 15 bp, Homo sapiens
cggaaactaccacag

SEQ ID NO: 875523 - DNA, 15 bp, Homo sapiens
acggaaactaccaca

SEQ ID NO: 875524 - DNA, 15 bp, Homo sapiens
cacggaaactaccac

SEQ ID NO: 875525 - DNA, 15 bp, Homo sapiens
tcacggaaactacca

SEQ ID NO: 875526 - DNA, 15 bp, Homo sapiens
ttcacggaaactacc

SEQ ID NO: 875527 - DNA, 15 bp, Homo sapiens
cttcacggaaactac

SEQ ID NO: 875528 - DNA, 15 bp, Homo sapiens
acttcacggaaacta

SEQ ID NO: 875529 - DNA, 15 bp, Homo sapiens
cacttcacggaaact

SEQ ID NO: 875530 - DNA, 15 bp, Homo sapiens
ccacttcacggaaac

SEQ ID NO: 875531 - DNA, 15 bp, Homo sapiens
cccacttcacggaaa

SEQ ID NO: 875532 - DNA, 15 bp, Homo sapiens
ccccacttcacggaa

SEQ ID NO: 875533 - DNA, 15 bp, Homo sapiens
accccacttcacgga

SEQ ID NO: 875534 - DNA, 15 bp, Homo sapiens
gaccccacttcacgg

SEQ ID NO: 875535 - DNA, 15 bp, Homo sapiens
agaccccacttcacg

SEQ ID NO: 875536 - DNA, 15 bp, Homo sapiens
cagaccccacttcac

SEQ ID NO: 875537 - DNA, 15 bp, Homo sapiens
ccagaccccacttca

SEQ ID NO: 875538 - DNA, 15 bp, Homo sapiens
cccagaccccacttc

SEQ ID NO: 875539 - DNA, 15 bp, Homo sapiens
gcccagaccccactt

SEQ ID NO: 875540 - DNA, 15 bp, Homo sapiens
ggcccagaccccact

SEQ ID NO: 875541 - DNA, 15 bp, Homo sapiens
tggcccagaccccac

SEQ ID NO: 875542 - DNA, 15 bp, Homo sapiens
ttggcccagacccca

SEQ ID NO: 875543 - DNA, 15 bp, Homo sapiens
cttggcccagacccc

SEQ ID NO: 875544 - DNA, 15 bp, Homo sapiens
tcttggcccagaccc

SEQ ID NO: 875545 - DNA, 15 bp, Homo sapiens
ttcttggcccagacc

SEQ ID NO: 875546 - DNA, 15 bp, Homo sapiens
tttcttggcccagac

SEQ ID NO: 875547 - DNA, 15 bp, Homo sapiens
gtttcttggcccaga

SEQ ID NO: 875548 - DNA, 15 bp, Homo sapiens
tgtttcttggcccag

SEQ ID NO: 875549 - DNA, 15 bp, Homo sapiens
ctgtttcttggccca

SEQ ID NO: 875550 - DNA, 15 bp, Homo sapiens
cctgtttcttggccc

SEQ ID NO: 875551 - DNA, 15 bp, Homo sapiens
acctgtttcttggcc

SEQ ID NO: 875552 - DNA, 15 bp, Homo sapiens
aacctgtttcttggc

SEQ ID NO: 875553 - DNA, 15 bp, Homo sapiens
aaacctgtttcttgg

SEQ ID NO: 875554 - DNA, 15 bp, Homo sapiens
aaaacctgtttcttg

SEQ ID NO: 875555 - DNA, 15 bp, Homo sapiens
aaaaacctgtttctt

SEQ ID NO: 875556 - DNA, 15 bp, Homo sapiens
gaaaaacctgtttct

SEQ ID NO: 875557 - DNA, 15 bp, Homo sapiens
agaaaaacctgtttc

SEQ ID NO: 875558 - DNA, 15 bp, Homo sapiens
aagaaaaacctgttt

SEQ ID NO: 875559 - DNA, 15 bp, Homo sapiens
taagaaaaacctgtt

SEQ ID NO: 875560 - DNA, 15 bp, Homo sapiens
ttaagaaaaacctgt

SEQ ID NO: 875561 - DNA, 15 bp, Homo sapiens
cttaagaaaaacctg

SEQ ID NO: 875562 - DNA, 15 bp, Homo sapiens
ccttaagaaaaacct

SEQ ID NO: 875563 - DNA, 15 bp, Homo sapiens
cccttaagaaaaacc

SEQ ID NO: 875564 - DNA, 15 bp, Homo sapiens
ccccttaagaaaaac

SEQ ID NO: 875565 - DNA, 15 bp, Homo sapiens
tccccttaagaaaaa

SEQ ID NO: 875566 - DNA, 15 bp, Homo sapiens
ttccccttaagaaaa

SEQ ID NO: 875567 - DNA, 15 bp, Homo sapiens
gttccccttaagaaa

SEQ ID NO: 875568 - DNA, 15 bp, Homo sapiens
tgttccccttaagaa

SEQ ID NO: 875569 - DNA, 15 bp, Homo sapiens
ttgttccccttaaga

SEQ ID NO: 875570 - DNA, 15 bp, Homo sapiens
gttgttccccttaag

SEQ ID NO: 875571 - DNA, 15 bp, Homo sapiens
ggttgttccccttaa

SEQ ID NO: 875572 - DNA, 15 bp, Homo sapiens
tggttgttcccctta

SEQ ID NO: 875573 - DNA, 15 bp, Homo sapiens
atggttgttcccctt

SEQ ID NO: 875574 - DNA, 15 bp, Homo sapiens
aatggttgttcccct

SEQ ID NO: 875575 - DNA, 15 bp, Homo sapiens
gaatggttgttcccc

SEQ ID NO: 875576 - DNA, 15 bp, Homo sapiens
ggaatggttgttccc

SEQ ID NO: 875577 - DNA, 15 bp, Homo sapiens
aggaatggttgttcc

SEQ ID NO: 875578 - DNA, 15 bp, Homo sapiens
aaggaatggttgttc

SEQ ID NO: 875579 - DNA, 15 bp, Homo sapiens
aaaggaatggttgtt

SEQ ID NO: 875580 - DNA, 15 bp, Homo sapiens
caaaggaatggttgt

SEQ ID NO: 875581 - DNA, 15 bp, Homo sapiens
gcaaaggaatggttg

SEQ ID NO: 875582 - DNA, 15 bp, Homo sapiens
tgcaaaggaatggtt

SEQ ID NO: 875583 - DNA, 15 bp, Homo sapiens
ttgcaaaggaatggt

SEQ ID NO: 875584 - DNA, 15 bp, Homo sapiens
tttgcaaaggaatgg

SEQ ID NO: 875585 - DNA, 15 bp, Homo sapiens
ctttgcaaaggaatg

SEQ ID NO: 875586 - DNA, 15 bp, Homo sapiens
actttgcaaaggaat

SEQ ID NO: 875587 - DNA, 15 bp, Homo sapiens
aactttgcaaaggaa

SEQ ID NO: 875588 - DNA, 15 bp, Homo sapiens
caactttgcaaagga

SEQ ID NO: 875589 - DNA, 15 bp, Homo sapiens
gcaactttgcaaagg

SEQ ID NO: 875590 - DNA, 15 bp, Homo sapiens
ggcaactttgcaaag

SEQ ID NO: 875591 - DNA, 15 bp, Homo sapiens
gggcaactttgcaaa

SEQ ID NO: 875592 - DNA, 15 bp, Homo sapiens
agggcaactttgcaa

SEQ ID NO: 875593 - DNA, 15 bp, Homo sapiens
aagggcaactttgca

SEQ ID NO: 875594 - DNA, 15 bp, Homo sapiens
aaagggcaactttgc

SEQ ID NO: 875595 - DNA, 15 bp, Homo sapiens
gaaagggcaactttg

SEQ ID NO: 875596 - DNA, 15 bp, Homo sapiens
agaaagggcaacttt

SEQ ID NO: 875597 - DNA, 15 bp, Homo sapiens
tagaaagggcaactt

SEQ ID NO: 875598 - DNA, 15 bp, Homo sapiens
atagaaagggcaact

SEQ ID NO: 875599 - DNA, 15 bp, Homo sapiens
tatagaaagggcaac

SEQ ID NO: 875600 - DNA, 15 bp, Homo sapiens
ctatagaaagggcaa

SEQ ID NO: 875601 - DNA, 15 bp, Homo sapiens
cctatagaaagggca

SEQ ID NO: 875602 - DNA, 15 bp, Homo sapiens
tcctatagaaagggc

SEQ ID NO: 875603 - DNA, 15 bp, Homo sapiens
gtcctatagaaaggg

SEQ ID NO: 875604 - DNA, 15 bp, Homo sapiens
agtcctatagaaagg

SEQ ID NO: 875605 - DNA, 15 bp, Homo sapiens
gagtcctatagaaag

SEQ ID NO: 875606 - DNA, 15 bp, Homo sapiens
tgagtcctatagaaa

SEQ ID NO: 875607 - DNA, 15 bp, Homo sapiens
ctgagtcctatagaa

SEQ ID NO: 875608 - DNA, 15 bp, Homo sapiens
actgagtcctataga

SEQ ID NO: 875609 - DNA, 15 bp, Homo sapiens
cactgagtcctatag

SEQ ID NO: 875610 - DNA, 15 bp, Homo sapiens
ccactgagtcctata

SEQ ID NO: 875611 - DNA, 15 bp, Homo sapiens
cccactgagtcctat

SEQ ID NO: 875612 - DNA, 15 bp, Homo sapiens
tcccactgagtccta

SEQ ID NO: 875613 - DNA, 15 bp, Homo sapiens
ctcccactgagtcct

SEQ ID NO: 875614 - DNA, 15 bp, Homo sapiens
tctcccactgagtcc

SEQ ID NO: 875615 - DNA, 15 bp, Homo sapiens
ttctcccactgagtc

SEQ ID NO: 875616 - DNA, 15 bp, Homo sapiens
gttctcccactgagt

SEQ ID NO: 875617 - DNA, 15 bp, Homo sapiens
tgttctcccactgag

SEQ ID NO: 875618 - DNA, 15 bp, Homo sapiens
ctgttctcccactga

SEQ ID NO: 875619 - DNA, 15 bp, Homo sapiens
actgttctcccactg

SEQ ID NO: 875620 - DNA, 15 bp, Homo sapiens
gactgttctcccact

SEQ ID NO: 875621 - DNA, 15 bp, Homo sapiens
tgactgttctcccac

SEQ ID NO: 875622 - DNA, 15 bp, Homo sapiens
ctgactgttctccca

SEQ ID NO: 875623 - DNA, 15 bp, Homo sapiens
tctgactgttctccc

SEQ ID NO: 875624 - DNA, 15 bp, Homo sapiens
ctctgactgttctcc

SEQ ID NO: 875625 - DNA, 15 bp, Homo sapiens
cctctgactgttctc

SEQ ID NO: 875626 - DNA, 15 bp, Homo sapiens
tcctctgactgttct

SEQ ID NO: 875627 - DNA, 15 bp, Homo sapiens
ttcctctgactgttc

SEQ ID NO: 875628 - DNA, 15 bp, Homo sapiens
cttcctctgactgtt

SEQ ID NO: 875629 - DNA, 15 bp, Homo sapiens
tcttcctctgactgt

SEQ ID NO: 875630 - DNA, 15 bp, Homo sapiens
ttcttcctctgactg

SEQ ID NO: 875631 - DNA, 15 bp, Homo sapiens
tttcttcctctgact

SEQ ID NO: 875632 - DNA, 15 bp, Homo sapiens
ttttcttcctctgac

SEQ ID NO: 875633 - DNA, 15 bp, Homo sapiens
cttttcttcctctga

SEQ ID NO: 875634 - DNA, 15 bp, Homo sapiens
gcttttcttcctctg

SEQ ID NO: 875635 - DNA, 15 bp, Homo sapiens
tgcttttcttcctct

SEQ ID NO: 875636 - DNA, 15 bp, Homo sapiens
atgcttttcttcctc

SEQ ID NO: 875637 - DNA, 15 bp, Homo sapiens
aatgcttttcttcct

SEQ ID NO: 875638 - DNA, 15 bp, Homo sapiens
caatgcttttcttcc

SEQ ID NO: 875639 - DNA, 15 bp, Homo sapiens
acaatgcttttcttc

SEQ ID NO: 875640 - DNA, 15 bp, Homo sapiens
tacaatgcttttctt

SEQ ID NO: 875641 - DNA, 15 bp, Homo sapiens
ctacaatgcttttct

SEQ ID NO: 875642 - DNA, 15 bp, Homo sapiens
actacaatgcttttc

SEQ ID NO: 875643 - DNA, 15 bp, Homo sapiens
tactacaatgctttt

SEQ ID NO: 875644 - DNA, 15 bp, Homo sapiens
ctactacaatgcttt

SEQ ID NO: 875645 - DNA, 15 bp, Homo sapiens
tctactacaatgctt

SEQ ID NO: 875646 - DNA, 15 bp, Homo sapiens
atctactacaatgct

SEQ ID NO: 875647 - DNA, 15 bp, Homo sapiens
gatctactacaatgc

SEQ ID NO: 875648 - DNA, 15 bp, Homo sapiens
agatctactacaatg

SEQ ID NO: 875649 - DNA, 15 bp, Homo sapiens
cagatctactacaat

SEQ ID NO: 875650 - DNA, 15 bp, Homo sapiens
tcagatctactacaa

SEQ ID NO: 875651 - DNA, 15 bp, Homo sapiens
ttcagatctactaca

SEQ ID NO: 875652 - DNA, 15 bp, Homo sapiens
gttcagatctactac

SEQ ID NO: 875653 - DNA, 15 bp, Homo sapiens
ggttcagatctacta

SEQ ID NO: 875654 - DNA, 15 bp, Homo sapiens
aggttcagatctact

SEQ ID NO: 875655 - DNA, 15 bp, Homo sapiens
aaggttcagatctac

SEQ ID NO: 875656 - DNA, 15 bp, Homo sapiens
aaaggttcagatcta

SEQ ID NO: 875657 - DNA, 15 bp, Homo sapiens
caaaggttcagatct

SEQ ID NO: 875658 - DNA, 15 bp, Homo sapiens
tcaaaggttcagatc

SEQ ID NO: 875659 - DNA, 15 bp, Homo sapiens
atcaaaggttcagat

SEQ ID NO: 875660 - DNA, 15 bp, Homo sapiens
aatcaaaggttcaga

SEQ ID NO: 875661 - DNA, 15 bp, Homo sapiens
gaatcaaaggttcag

SEQ ID NO: 875662 - DNA, 15 bp, Homo sapiens
agaatcaaaggttca

SEQ ID NO: 875663 - DNA, 15 bp, Homo sapiens
aagaatcaaaggttc

SEQ ID NO: 875664 - DNA, 15 bp, Homo sapiens
aaagaatcaaaggtt

SEQ ID NO: 875665 - DNA, 15 bp, Homo sapiens
gaaagaatcaaaggt

SEQ ID NO: 875666 - DNA, 15 bp, Homo sapiens
agaaagaatcaaagg

SEQ ID NO: 875667 - DNA, 15 bp, Homo sapiens
gagaaagaatcaaag

SEQ ID NO: 875668 - DNA, 15 bp, Homo sapiens
ggagaaagaatcaaa

SEQ ID NO: 875669 - DNA, 15 bp, Homo sapiens
cggagaaagaatcaa

SEQ ID NO: 875670 - DNA, 15 bp, Homo sapiens
ccggagaaagaatca

SEQ ID NO: 875671 - DNA, 15 bp, Homo sapiens
tccggagaaagaatc

SEQ ID NO: 875672 - DNA, 15 bp, Homo sapiens
gtccggagaaagaat

SEQ ID NO: 875673 - DNA, 15 bp, Homo sapiens
tgtccggagaaagaa

SEQ ID NO: 875674 - DNA, 15 bp, Homo sapiens
ttgtccggagaaaga

SEQ ID NO: 875675 - DNA, 15 bp, Homo sapiens
tttgtccggagaaag

SEQ ID NO: 875676 - DNA, 15 bp, Homo sapiens
ttttgtccggagaaa

SEQ ID NO: 875677 - DNA, 15 bp, Homo sapiens
attttgtccggagaa

SEQ ID NO: 875678 - DNA, 15 bp, Homo sapiens
cattttgtccggaga

SEQ ID NO: 875679 - DNA, 15 bp, Homo sapiens
gcattttgtccggag

SEQ ID NO: 875680 - DNA, 15 bp, Homo sapiens
ggcattttgtccgga

SEQ ID NO: 875681 - DNA, 15 bp, Homo sapiens
gggcattttgtccgg

SEQ ID NO: 875682 - DNA, 15 bp, Homo sapiens
agggcattttgtccg

SEQ ID NO: 875683 - DNA, 15 bp, Homo sapiens
aagggcattttgtcc

SEQ ID NO: 875684 - DNA, 15 bp, Homo sapiens
aaagggcattttgtc

SEQ ID NO: 875685 - DNA, 15 bp, Homo sapiens
aaaagggcattttgt

SEQ ID NO: 875686 - DNA, 15 bp, Homo sapiens
aaaaagggcattttg

SEQ ID NO: 875687 - DNA, 15 bp, Homo sapiens
taaaaagggcatttt

SEQ ID NO: 875688 - DNA, 15 bp, Homo sapiens
ataaaaagggcattt

SEQ ID NO: 875689 - DNA, 15 bp, Homo sapiens
aataaaaagggcatt

SEQ ID NO: 875690 - DNA, 15 bp, Homo sapiens
caataaaaagggcat

SEQ ID NO: 875691 - DNA, 15 bp, Homo sapiens
acaataaaaagggca

SEQ ID NO: 875692 - DNA, 15 bp, Homo sapiens
cacaataaaaagggc

SEQ ID NO: 875693 - DNA, 15 bp, Homo sapiens
ccacaataaaaaggg

SEQ ID NO: 875694 - DNA, 15 bp, Homo sapiens
cccacaataaaaagg

SEQ ID NO: 875695 - DNA, 15 bp, Homo sapiens
ccccacaataaaaag

SEQ ID NO: 875696 - DNA, 15 bp, Homo sapiens
gccccacaataaaaa

SEQ ID NO: 875697 - DNA, 15 bp, Homo sapiens
agccccacaataaaa

SEQ ID NO: 875698 - DNA, 15 bp, Homo sapiens
gagccccacaataaa

SEQ ID NO: 875699 - DNA, 15 bp, Homo sapiens
tgagccccacaataa

SEQ ID NO: 875700 - DNA, 15 bp, Homo sapiens
ctgagccccacaata

SEQ ID NO: 875701 - DNA, 15 bp, Homo sapiens
tctgagccccacaat

SEQ ID NO: 875702 - DNA, 15 bp, Homo sapiens
atctgagccccacaa

SEQ ID NO: 875703 - DNA, 15 bp, Homo sapiens
gatctgagccccaca

SEQ ID NO: 875704 - DNA, 15 bp, Homo sapiens
agatctgagccccac

SEQ ID NO: 875705 - DNA, 15 bp, Homo sapiens
gagatctgagcccca

SEQ ID NO: 875706 - DNA, 15 bp, Homo sapiens
tgagatctgagcccc

SEQ ID NO: 875707 - DNA, 15 bp, Homo sapiens
ctgagatctgagccc

SEQ ID NO: 875708 - DNA, 15 bp, Homo sapiens
tctgagatctgagcc

SEQ ID NO: 875709 - DNA, 15 bp, Homo sapiens
ctctgagatctgagc

SEQ ID NO: 875710 - DNA, 15 bp, Homo sapiens
cctctgagatctgag

SEQ ID NO: 875711 - DNA, 15 bp, Homo sapiens
gcctctgagatctga

SEQ ID NO: 875712 - DNA, 15 bp, Homo sapiens
cgcctctgagatctg

SEQ ID NO: 875713 - DNA, 15 bp, Homo sapiens
tcgcctctgagatct

SEQ ID NO: 875714 - DNA, 15 bp, Homo sapiens
ctcgcctctgagatc

SEQ ID NO: 875715 - DNA, 15 bp, Homo sapiens
actcgcctctgagat

SEQ ID NO: 875716 - DNA, 15 bp, Homo sapiens
gactcgcctctgaga

SEQ ID NO: 875717 - DNA, 15 bp, Homo sapiens
agactcgcctctgag

SEQ ID NO: 875718 - DNA, 15 bp, Homo sapiens
cagactcgcctctga

SEQ ID NO: 875719 - DNA, 15 bp, Homo sapiens
tcagactcgcctctg

SEQ ID NO: 875720 - DNA, 15 bp, Homo sapiens
gtcagactcgcctct

SEQ ID NO: 875721 - DNA, 15 bp, Homo sapiens
tgtcagactcgcctc

SEQ ID NO: 875722 - DNA, 15 bp, Homo sapiens
ctgtcagactcgcct

SEQ ID NO: 875723 - DNA, 15 bp, Homo sapiens
gctgtcagactcgcc

SEQ ID NO: 875724 - DNA, 15 bp, Homo sapiens
tgctgtcagactcgc

SEQ ID NO: 875725 - DNA, 15 bp, Homo sapiens
ctgctgtcagactcg

SEQ ID NO: 875726 - DNA, 15 bp, Homo sapiens
cctgctgtcagactc

SEQ ID NO: 875727 - DNA, 15 bp, Homo sapiens
acctgctgtcagact

SEQ ID NO: 875728 - DNA, 15 bp, Homo sapiens
aacctgctgtcagac

SEQ ID NO: 875729 - DNA, 15 bp, Homo sapiens
gaacctgctgtcaga

SEQ ID NO: 875730 - DNA, 15 bp, Homo sapiens
tgaacctgctgtcag

SEQ ID NO: 875731 - DNA, 15 bp, Homo sapiens
ttgaacctgctgtca

SEQ ID NO: 875732 - DNA, 15 bp, Homo sapiens
cttgaacctgctgtc

SEQ ID NO: 875733 - DNA, 15 bp, Homo sapiens
acttgaacctgctgt

SEQ ID NO: 875734 - DNA, 15 bp, Homo sapiens
tacttgaacctgctg

SEQ ID NO: 875735 - DNA, 15 bp, Homo sapiens
ctacttgaacctgct

SEQ ID NO: 875736 - DNA, 15 bp, Homo sapiens
cctacttgaacctgc

SEQ ID NO: 875737 - DNA, 15 bp, Homo sapiens
tcctacttgaacctg

SEQ ID NO: 875738 - DNA, 15 bp, Homo sapiens
ctcctacttgaacct

SEQ ID NO: 875739 - DNA, 15 bp, Homo sapiens
tctcctacttgaacc

SEQ ID NO: 875740 - DNA, 15 bp, Homo sapiens
atctcctacttgaac

SEQ ID NO: 875741 - DNA, 15 bp, Homo sapiens
gatctcctacttgaa

SEQ ID NO: 875742 - DNA, 15 bp, Homo sapiens
agatctcctacttga

SEQ ID NO: 875743 - DNA, 15 bp, Homo sapiens
cagatctcctacttg

SEQ ID NO: 875744 - DNA, 15 bp, Homo sapiens
tcagatctcctactt

SEQ ID NO: 875745 - DNA, 15 bp, Homo sapiens
ttcagatctcctact

SEQ ID NO: 875746 - DNA, 15 bp, Homo sapiens
gttcagatctcctac

SEQ ID NO: 875747 - DNA, 15 bp, Homo sapiens
ggttcagatctccta

SEQ ID NO: 875748 - DNA, 15 bp, Homo sapiens
gggttcagatctcct

SEQ ID NO: 875749 - DNA, 15 bp, Homo sapiens
ggggttcagatctcc

SEQ ID NO: 875750 - DNA, 15 bp, Homo sapiens
aggggttcagatctc

SEQ ID NO: 875751 - DNA, 15 bp, Homo sapiens
gaggggttcagatct

SEQ ID NO: 875752 - DNA, 15 bp, Homo sapiens
tgaggggttcagatc

SEQ ID NO: 875753 - DNA, 15 bp, Homo sapiens
ttgaggggttcagat

SEQ ID NO: 875754 - DNA, 15 bp, Homo sapiens
tttgaggggttcaga

SEQ ID NO: 875755 - DNA, 15 bp, Homo sapiens
atttgaggggttcag

SEQ ID NO: 875756 - DNA, 15 bp, Homo sapiens
gatttgaggggttca

SEQ ID NO: 875757 - DNA, 15 bp, Homo sapiens
tgatttgaggggttc

SEQ ID NO: 875758 - DNA, 15 bp, Homo sapiens
ttgatttgaggggtt

SEQ ID NO: 875759 - DNA, 15 bp, Homo sapiens
attgatttgaggggt

SEQ ID NO: 875760 - DNA, 15 bp, Homo sapiens
aattgatttgagggg

SEQ ID NO: 875761 - DNA, 15 bp, Homo sapiens
taattgatttgaggg

SEQ ID NO: 875762 - DNA, 15 bp, Homo sapiens
ttaattgatttgagg

SEQ ID NO: 875763 - DNA, 15 bp, Homo sapiens
cttaattgatttgag

SEQ ID NO: 875764 - DNA, 15 bp, Homo sapiens
gcttaattgatttga

SEQ ID NO: 875765 - DNA, 15 bp, Homo sapiens
agcttaattgatttg

SEQ ID NO: 875766 - DNA, 15 bp, Homo sapiens
tagcttaattgattt

SEQ ID NO: 875767 - DNA, 15 bp, Homo sapiens
ttagcttaattgatt

SEQ ID NO: 875768 - DNA, 15 bp, Homo sapiens
tttagcttaattgat

SEQ ID NO: 875769 - DNA, 15 bp, Homo sapiens
gtttagcttaattga

SEQ ID NO: 875770 - DNA, 15 bp, Homo sapiens
agtttagcttaattg

SEQ ID NO: 875771 - DNA, 15 bp, Homo sapiens
tagtttagcttaatt

SEQ ID NO: 875772 - DNA, 15 bp, Homo sapiens
gtagtttagcttaat

SEQ ID NO: 875773 - DNA, 15 bp, Homo sapiens
agtagtttagcttaa

SEQ ID NO: 875774 - DNA, 15 bp, Homo sapiens
aagtagtttagctta

SEQ ID NO: 875775 - DNA, 15 bp, Homo sapiens
aaagtagtttagctt

SEQ ID NO: 875776 - DNA, 15 bp, Homo sapiens
gaaagtagtttagct

SEQ ID NO: 875777 - DNA, 15 bp, Homo sapiens
ggaaagtagtttagc

SEQ ID NO: 875778 - DNA, 15 bp, Homo sapiens
tggaaagtagtttag

SEQ ID NO: 875779 - DNA, 15 bp, Homo sapiens
gtggaaagtagttta

SEQ ID NO: 875780 - DNA, 15 bp, Homo sapiens
agtggaaagtagttt

SEQ ID NO: 875781 - DNA, 15 bp, Homo sapiens
gagtggaaagtagtt

SEQ ID NO: 875782 - DNA, 15 bp, Homo sapiens
agagtggaaagtagt

SEQ ID NO: 875783 - DNA, 15 bp, Homo sapiens
tagagtggaaagtag

SEQ ID NO: 875784 - DNA, 15 bp, Homo sapiens
ctagagtggaaagta

SEQ ID NO: 875785 - DNA, 15 bp, Homo sapiens
actagagtggaaagt

SEQ ID NO: 875786 - DNA, 15 bp, Homo sapiens
aactagagtggaaag

SEQ ID NO: 875787 - DNA, 15 bp, Homo sapiens
aaactagagtggaaa

SEQ ID NO: 875788 - DNA, 15 bp, Homo sapiens
aaaactagagtggaa

SEQ ID NO: 875789 - DNA, 15 bp, Homo sapiens
aaaaactagagtgga

SEQ ID NO: 875790 - DNA, 15 bp, Homo sapiens
taaaaactagagtgg

SEQ ID NO: 875791 - DNA, 15 bp, Homo sapiens
ttaaaaactagagtg

SEQ ID NO: 875792 - DNA, 15 bp, Homo sapiens
tttaaaaactagagt

SEQ ID NO: 875793 - DNA, 15 bp, Homo sapiens
gtttaaaaactagag

SEQ ID NO: 875794 - DNA, 15 bp, Homo sapiens
ggtttaaaaactaga

SEQ ID NO: 875795 - DNA, 15 bp, Homo sapiens
tggtttaaaaactag

SEQ ID NO: 875796 - DNA, 15 bp, Homo sapiens
atggtttaaaaacta

SEQ ID NO: 875797 - DNA, 15 bp, Homo sapiens
aatggtttaaaaact

SEQ ID NO: 875798 - DNA, 15 bp, Homo sapiens
gaatggtttaaaaac

SEQ ID NO: 875799 - DNA, 15 bp, Homo sapiens
tgaatggtttaaaaa

SEQ ID NO: 875800 - DNA, 15 bp, Homo sapiens
ttgaatggtttaaaa

SEQ ID NO: 875801 - DNA, 15 bp, Homo sapiens
tttgaatggtttaaa

SEQ ID NO: 875802 - DNA, 15 bp, Homo sapiens
ttttgaatggtttaa

SEQ ID NO: 875803 - DNA, 15 bp, Homo sapiens
tttttgaatggttta

SEQ ID NO: 875804 - DNA, 15 bp, Homo sapiens
ctttttgaatggttt

SEQ ID NO: 875805 - DNA, 15 bp, Homo sapiens
gctttttgaatggtt

SEQ ID NO: 875806 - DNA, 15 bp, Homo sapiens
ggctttttgaatggt

SEQ ID NO: 875807 - DNA, 15 bp, Homo sapiens
tggctttttgaatgg

SEQ ID NO: 875808 - DNA, 15 bp, Homo sapiens
atggctttttgaatg

SEQ ID NO: 875809 - DNA, 15 bp, Homo sapiens
catggctttttgaat

SEQ ID NO: 875810 - DNA, 15 bp, Homo sapiens
acatggctttttgaa

SEQ ID NO: 875811 - DNA, 15 bp, Homo sapiens
cacatggctttttga

SEQ ID NO: 875812 - DNA, 15 bp, Homo sapiens
ccacatggctttttg

SEQ ID NO: 875813 - DNA, 15 bp, Homo sapiens
cccacatggcttttt

SEQ ID NO: 875814 - DNA, 15 bp, Homo sapiens
acccacatggctttt

SEQ ID NO: 875815 - DNA, 15 bp, Homo sapiens
cacccacatggcttt

SEQ ID NO: 875816 - DNA, 15 bp, Homo sapiens
tcacccacatggctt

SEQ ID NO: 875817 - DNA, 15 bp, Homo sapiens
atcacccacatggct

SEQ ID NO: 875818 - DNA, 15 bp, Homo sapiens
tatcacccacatggc

SEQ ID NO: 875819 - DNA, 15 bp, Homo sapiens
ctatcacccacatgg

SEQ ID NO: 875820 - DNA, 15 bp, Homo sapiens
tctatcacccacatg

SEQ ID NO: 875821 - DNA, 15 bp, Homo sapiens
ttctatcacccacat

SEQ ID NO: 875822 - DNA, 15 bp, Homo sapiens
tttctatcacccaca

SEQ ID NO: 875823 - DNA, 15 bp, Homo sapiens
ttttctatcacccac

SEQ ID NO: 875824 - DNA, 15 bp, Homo sapiens
attttctatcaccca

SEQ ID NO: 875825 - DNA, 15 bp, Homo sapiens
tattttctatcaccc

SEQ ID NO: 875826 - DNA, 15 bp, Homo sapiens
ttattttctatcacc

SEQ ID NO: 875827 - DNA, 15 bp, Homo sapiens
tttattttctatcac

SEQ ID NO: 875828 - DNA, 15 bp, Homo sapiens
ttttattttctatca

SEQ ID NO: 875829 - DNA, 15 bp, Homo sapiens
cttttattttctatc

SEQ ID NO: 875830 - DNA, 15 bp, Homo sapiens
acttttattttctat

SEQ ID NO: 875831 - DNA, 15 bp, Homo sapiens
aacttttattttcta

SEQ ID NO: 875832 - DNA, 15 bp, Homo sapiens
aaacttttattttct

SEQ ID NO: 875833 - DNA, 15 bp, Homo sapiens
aaaacttttattttc

SEQ ID NO: 875834 - DNA, 15 bp, Homo sapiens
aaaaacttttatttt

SEQ ID NO: 875835 - DNA, 15 bp, Homo sapiens
gaaaaacttttattt

SEQ ID NO: 875836 - DNA, 15 bp, Homo sapiens
tgaaaaacttttatt

SEQ ID NO: 875837 - DNA, 15 bp, Homo sapiens
ttctccaggacattg

SEQ ID NO: 875838 - DNA, 15 bp, Homo sapiens
cttctccaggacatt

SEQ ID NO: 875839 - DNA, 15 bp, Homo sapiens
gcttctccaggacat

SEQ ID NO: 875840 - DNA, 15 bp, Homo sapiens
tgcttctccaggaca

SEQ ID NO: 875841 - DNA, 15 bp, Homo sapiens
ttgcttctccaggac

SEQ ID NO: 875842 - DNA, 15 bp, Homo sapiens
cttgcttctccagga

SEQ ID NO: 875843 - DNA, 15 bp, Homo sapiens
tcttgcttctccagg

SEQ ID NO: 875844 - DNA, 15 bp, Homo sapiens
ttcttgcttctccag

SEQ ID NO: 875845 - DNA, 15 bp, Homo sapiens
tttcttgcttctcca

SEQ ID NO: 875846 - DNA, 15 bp, Homo sapiens
ctttcttgcttctcc

SEQ ID NO: 875847 - DNA, 15 bp, Homo sapiens
tctttcttgcttctc

SEQ ID NO: 875848 - DNA, 15 bp, Homo sapiens
atctttcttgcttct

SEQ ID NO: 875849 - DNA, 15 bp, Homo sapiens
gatctttcttgcttc

SEQ ID NO: 875850 - DNA, 15 bp, Homo sapiens
agatctttcttgctt

SEQ ID NO: 875851 - DNA, 15 bp, Homo sapiens
aagatctttcttgct

SEQ ID NO: 875852 - DNA, 15 bp, Homo sapiens
aaagatctttcttgc

SEQ ID NO: 875853 - DNA, 15 bp, Homo sapiens
aaaagatctttcttg

SEQ ID NO: 875854 - DNA, 15 bp, Homo sapiens
taaaagatctttctt

SEQ ID NO: 875855 - DNA, 15 bp, Homo sapiens
ctaaaagatctttct

SEQ ID NO: 875856 - DNA, 15 bp, Homo sapiens
tctaaaagatctttc

SEQ ID NO: 875857 - DNA, 15 bp, Homo sapiens
ttctaaaagatcttt

SEQ ID NO: 875858 - DNA, 15 bp, Homo sapiens
cttctaaaagatctt

SEQ ID NO: 875859 - DNA, 15 bp, Homo sapiens
tcttctaaaagatct

SEQ ID NO: 875860 - DNA, 15 bp, Homo sapiens
atcttctaaaagatc

SEQ ID NO: 875861 - DNA, 15 bp, Homo sapiens
catcttctaaaagat

SEQ ID NO: 875862 - DNA, 15 bp, Homo sapiens
gcatcttctaaaaga

SEQ ID NO: 875863 - DNA, 15 bp, Homo sapiens
agcatcttctaaaag

SEQ ID NO: 875864 - DNA, 15 bp, Homo sapiens
cagcatcttctaaaa

SEQ ID NO: 875865 - DNA, 15 bp, Homo sapiens
tcagcatcttctaaa

SEQ ID NO: 875866 - DNA, 15 bp, Homo sapiens
ctcagcatcttctaa

SEQ ID NO: 875867 - DNA, 15 bp, Homo sapiens
gctcagcatcttcta

SEQ ID NO: 875868 - DNA, 15 bp, Homo sapiens
ggctcagcatcttct

SEQ ID NO: 875869 - DNA, 15 bp, Homo sapiens
gggctcagcatcttc

SEQ ID NO: 875870 - DNA, 15 bp, Homo sapiens
agggctcagcatctt

SEQ ID NO: 875871 - DNA, 15 bp, Homo sapiens
cagggctcagcatct

SEQ ID NO: 875872 - DNA, 15 bp, Homo sapiens
ccagggctcagcatc

SEQ ID NO: 875873 - DNA, 15 bp, Homo sapiens
cccagggctcagcat

SEQ ID NO: 875874 - DNA, 15 bp, Homo sapiens
acccagggctcagca

SEQ ID NO: 875875 - DNA, 15 bp, Homo sapiens
cacccagggctcagc

SEQ ID NO: 875876 - DNA, 15 bp, Homo sapiens
tcacccagggctcag

SEQ ID NO: 875877 - DNA, 15 bp, Homo sapiens
gtcacccagggctca

SEQ ID NO: 875878 - DNA, 15 bp, Homo sapiens
agtcacccagggctc

SEQ ID NO: 875879 - DNA, 15 bp, Homo sapiens
gagtcacccagggct

SEQ ID NO: 875880 - DNA, 15 bp, Homo sapiens
agagtcacccagggc

SEQ ID NO: 875881 - DNA, 15 bp, Homo sapiens
tagagtcacccaggg

SEQ ID NO: 875882 - DNA, 15 bp, Homo sapiens
ttagagtcacccagg

SEQ ID NO: 875883 - DNA, 15 bp, Homo sapiens
tttagagtcacccag

SEQ ID NO: 875884 - DNA, 15 bp, Homo sapiens
ctttagagtcaccca

SEQ ID NO: 875885 - DNA, 15 bp, Homo sapiens
actttagagtcaccc

SEQ ID NO: 875886 - DNA, 15 bp, Homo sapiens
cactttagagtcacc

SEQ ID NO: 875887 - DNA, 15 bp, Homo sapiens
gcactttagagtcac

SEQ ID NO: 875888 - DNA, 15 bp, Homo sapiens
agcactttagagtca

SEQ ID NO: 875889 - DNA, 15 bp, Homo sapiens
cagcactttagagtc

SEQ ID NO: 875890 - DNA, 15 bp, Homo sapiens
tcagcactttagagt

SEQ ID NO: 875891 - DNA, 15 bp, Homo sapiens
atcagcactttagag

SEQ ID NO: 875892 - DNA, 15 bp, Homo sapiens
aatcagcactttaga

SEQ ID NO: 875893 - DNA, 15 bp, Homo sapiens
gaatcagcactttag

SEQ ID NO: 875894 - DNA, 15 bp, Homo sapiens
ggaatcagcacttta

SEQ ID NO: 875895 - DNA, 15 bp, Homo sapiens
aggaatcagcacttt

SEQ ID NO: 875896 - DNA, 15 bp, Homo sapiens
aaggaatcagcactt

SEQ ID NO: 875897 - DNA, 15 bp, Homo sapiens
aaaggaatcagcact

SEQ ID NO: 875898 - DNA, 15 bp, Homo sapiens
gaaaggaatcagcac

SEQ ID NO: 875899 - DNA, 15 bp, Homo sapiens
agaaaggaatcagca

SEQ ID NO: 875900 - DNA, 15 bp, Homo sapiens
gagaaaggaatcagc

SEQ ID NO: 875901 - DNA, 15 bp, Homo sapiens
tgagaaaggaatcag

SEQ ID NO: 875902 - DNA, 15 bp, Homo sapiens
ttgagaaaggaatca

SEQ ID NO: 875903 - DNA, 15 bp, Homo sapiens
cttgagaaaggaatc

SEQ ID NO: 875904 - DNA, 15 bp, Homo sapiens
gcttgagaaaggaat

SEQ ID NO: 875905 - DNA, 15 bp, Homo sapiens
ggcttgagaaaggaa

SEQ ID NO: 875906 - DNA, 15 bp, Homo sapiens
gggcttgagaaagga

SEQ ID NO: 875907 - DNA, 15 bp, Homo sapiens
tgggcttgagaaagg

SEQ ID NO: 875908 - DNA, 15 bp, Homo sapiens
atgggcttgagaaag

SEQ ID NO: 875909 - DNA, 15 bp, Homo sapiens
catgggcttgagaaa

SEQ ID NO: 875910 - DNA, 15 bp, Homo sapiens
gcatgggcttgagaa

SEQ ID NO: 875911 - DNA, 15 bp, Homo sapiens
tgcatgggcttgaga

SEQ ID NO: 875912 - DNA, 15 bp, Homo sapiens
ttgcatgggcttgag

SEQ ID NO: 875913 - DNA, 15 bp, Homo sapiens
tttgcatgggcttga

SEQ ID NO: 875914 - DNA, 15 bp, Homo sapiens
gtttgcatgggcttg

SEQ ID NO: 875915 - DNA, 15 bp, Homo sapiens
ggtttgcatgggctt

SEQ ID NO: 875916 - DNA, 15 bp, Homo sapiens
aggtttgcatgggct

SEQ ID NO: 875917 - DNA, 15 bp, Homo sapiens
caggtttgcatgggc

SEQ ID NO: 875918 - DNA, 15 bp, Homo sapiens
ccaggtttgcatggg

SEQ ID NO: 875919 - DNA, 15 bp, Homo sapiens
cccaggtttgcatgg

SEQ ID NO: 875920 - DNA, 15 bp, Homo sapiens
acccaggtttgcatg

SEQ ID NO: 875921 - DNA, 15 bp, Homo sapiens
cacccaggtttgcat

SEQ ID NO: 875922 - DNA, 15 bp, Homo sapiens
ccacccaggtttgca

SEQ ID NO: 875923 - DNA, 15 bp, Homo sapiens
cccacccaggtttgc

SEQ ID NO: 875924 - DNA, 15 bp, Homo sapiens
tcccacccaggtttg

SEQ ID NO: 875925 - DNA, 15 bp, Homo sapiens
ttcccacccaggttt

SEQ ID NO: 875926 - DNA, 15 bp, Homo sapiens
tttcccacccaggtt

SEQ ID NO: 875927 - DNA, 15 bp, Homo sapiens
gtttcccacccaggt

SEQ ID NO: 875928 - DNA, 15 bp, Homo sapiens
tgtttcccacccagg

SEQ ID NO: 875929 - DNA, 15 bp, Homo sapiens
ttgtttcccacccag

SEQ ID NO: 875930 - DNA, 15 bp, Homo sapiens
gttgtttcccaccca

SEQ ID NO: 875931 - DNA, 15 bp, Homo sapiens
agttgtttcccaccc

SEQ ID NO: 875932 - DNA, 15 bp, Homo sapiens
gagttgtttcccacc

SEQ ID NO: 875933 - DNA, 15 bp, Homo sapiens
ggagttgtttcccac

SEQ ID NO: 875934 - DNA, 15 bp, Homo sapiens
gggagttgtttccca

SEQ ID NO: 875935 - DNA, 15 bp, Homo sapiens
tgggagttgtttccc

SEQ ID NO: 875936 - DNA, 15 bp, Homo sapiens
atgggagttgtttcc

SEQ ID NO: 875937 - DNA, 15 bp, Homo sapiens
aatgggagttgtttc

SEQ ID NO: 875938 - DNA, 15 bp, Homo sapiens
gaatgggagttgttt

SEQ ID NO: 875939 - DNA, 15 bp, Homo sapiens
agaatgggagttgtt

SEQ ID NO: 875940 - DNA, 15 bp, Homo sapiens
aagaatgggagttgt

SEQ ID NO: 875941 - DNA, 15 bp, Homo sapiens
caagaatgggagttg

SEQ ID NO: 875942 - DNA, 15 bp, Homo sapiens
ccaagaatgggagtt

SEQ ID NO: 875943 - DNA, 15 bp, Homo sapiens
gccaagaatgggagt

SEQ ID NO: 875944 - DNA, 15 bp, Homo sapiens
tgccaagaatgggag

SEQ ID NO: 875945 - DNA, 15 bp, Homo sapiens
gtgccaagaatggga

SEQ ID NO: 875946 - DNA, 15 bp, Homo sapiens
agtgccaagaatggg

SEQ ID NO: 875947 - DNA, 15 bp, Homo sapiens
cagtgccaagaatgg

SEQ ID NO: 875948 - DNA, 15 bp, Homo sapiens
tcagtgccaagaatg

SEQ ID NO: 875949 - DNA, 15 bp, Homo sapiens
gtcagtgccaagaat

SEQ ID NO: 875950 - DNA, 15 bp, Homo sapiens
tgtcagtgccaagaa

SEQ ID NO: 875951 - DNA, 15 bp, Homo sapiens
ttgtcagtgccaaga

SEQ ID NO: 875952 - DNA, 15 bp, Homo sapiens
gttgtcagtgccaag

SEQ ID NO: 875953 - DNA, 15 bp, Homo sapiens
tgttgtcagtgccaa

SEQ ID NO: 875954 - DNA, 15 bp, Homo sapiens
ctgttgtcagtgcca

SEQ ID NO: 875955 - DNA, 15 bp, Homo sapiens
tctgttgtcagtgcc

SEQ ID NO: 875956 - DNA, 15 bp, Homo sapiens
ctctgttgtcagtgc

SEQ ID NO: 875957 - DNA, 15 bp, Homo sapiens
cctctgttgtcagtg

SEQ ID NO: 875958 - DNA, 15 bp, Homo sapiens
acctctgttgtcagt

SEQ ID NO: 875959 - DNA, 15 bp, Homo sapiens
aacctctgttgtcag

SEQ ID NO: 875960 - DNA, 15 bp, Homo sapiens
gaacctctgttgtca

SEQ ID NO: 875961 - DNA, 15 bp, Homo sapiens
tgaacctctgttgtc

SEQ ID NO: 875962 - DNA, 15 bp, Homo sapiens
ctgaacctctgttgt

SEQ ID NO: 875963 - DNA, 15 bp, Homo sapiens
actgaacctctgttg

SEQ ID NO: 875964 - DNA, 15 bp, Homo sapiens
cactgaacctctgtt

SEQ ID NO: 875965 - DNA, 15 bp, Homo sapiens
acactgaacctctgt

SEQ ID NO: 875966 - DNA, 15 bp, Homo sapiens
tacactgaacctctg

SEQ ID NO: 875967 - DNA, 15 bp, Homo sapiens
gtacactgaacctct

SEQ ID NO: 875968 - DNA, 15 bp, Homo sapiens
tgtacactgaacctc

SEQ ID NO: 875969 - DNA, 15 bp, Homo sapiens
ttgtacactgaacct

SEQ ID NO: 875970 - DNA, 15 bp, Homo sapiens
gttgtacactgaacc

SEQ ID NO: 875971 - DNA, 15 bp, Homo sapiens
cgttgtacactgaac

SEQ ID NO: 875972 - DNA, 15 bp, Homo sapiens
gcgttgtacactgaa

SEQ ID NO: 875973 - DNA, 15 bp, Homo sapiens
tgcgttgtacactga

SEQ ID NO: 875974 - DNA, 15 bp, Homo sapiens
ttgcgttgtacactg

SEQ ID NO: 875975 - DNA, 15 bp, Homo sapiens
tttgcgttgtacact

SEQ ID NO: 875976 - DNA, 15 bp, Homo sapiens
atttgcgttgtacac

SEQ ID NO: 875977 - DNA, 15 bp, Homo sapiens
catttgcgttgtaca

SEQ ID NO: 875978 - DNA, 15 bp, Homo sapiens
gcatttgcgttgtac

SEQ ID NO: 875979 - DNA, 15 bp, Homo sapiens
agcatttgcgttgta

SEQ ID NO: 875980 - DNA, 15 bp, Homo sapiens
cagcatttgcgttgt

SEQ ID NO: 875981 - DNA, 15 bp, Homo sapiens
ccagcatttgcgttg

SEQ ID NO: 875982 - DNA, 15 bp, Homo sapiens
tccagcatttgcgtt

SEQ ID NO: 875983 - DNA, 15 bp, Homo sapiens
gtccagcatttgcgt

SEQ ID NO: 875984 - DNA, 15 bp, Homo sapiens
ggtccagcatttgcg

SEQ ID NO: 875985 - DNA, 15 bp, Homo sapiens
gggtccagcatttgc

SEQ ID NO: 875986 - DNA, 15 bp, Homo sapiens
tgggtccagcatttg

SEQ ID NO: 875987 - DNA, 15 bp, Homo sapiens
gtgggtccagcattt

SEQ ID NO: 875988 - DNA, 15 bp, Homo sapiens
agtgggtccagcatt

SEQ ID NO: 875989 - DNA, 15 bp, Homo sapiens
cagtgggtccagcat

SEQ ID NO: 875990 - DNA, 15 bp, Homo sapiens
tcagtgggtccagca

SEQ ID NO: 875991 - DNA, 15 bp, Homo sapiens
ctcagtgggtccagc

SEQ ID NO: 875992 - DNA, 15 bp, Homo sapiens
cctcagtgggtccag

SEQ ID NO: 875993 - DNA, 15 bp, Homo sapiens
tcctcagtgggtcca

SEQ ID NO: 875994 - DNA, 15 bp, Homo sapiens
ttcctcagtgggtcc

SEQ ID NO: 875995 - DNA, 15 bp, Homo sapiens
cttcctcagtgggtc

SEQ ID NO: 875996 - DNA, 15 bp, Homo sapiens
ccttcctcagtgggt

SEQ ID NO: 875997 - DNA, 15 bp, Homo sapiens
tccttcctcagtggg

SEQ ID NO: 875998 - DNA, 15 bp, Homo sapiens
ctccttcctcagtgg

SEQ ID NO: 875999 - DNA, 15 bp, Homo sapiens
tctccttcctcagtg

SEQ ID NO: 876000 - DNA, 15 bp, Homo sapiens
ctctccttcctcagt

SEQ ID NO: 876001 - DNA, 15 bp, Homo sapiens
gctctccttcctcag

SEQ ID NO: 876002 - DNA, 15 bp, Homo sapiens
agctctccttcctca

SEQ ID NO: 876003 - DNA, 15 bp, Homo sapiens
aagctctccttcctc

SEQ ID NO: 876004 - DNA, 15 bp, Homo sapiens
caagctctccttcct

SEQ ID NO: 876005 - DNA, 15 bp, Homo sapiens
ccaagctctccttcc

SEQ ID NO: 876006 - DNA, 15 bp, Homo sapiens
cccaagctctccttc

SEQ ID NO: 876007 - DNA, 15 bp, Homo sapiens
ccccaagctctcctt

SEQ ID NO: 876008 - DNA, 15 bp, Homo sapiens
tccccaagctctcct

SEQ ID NO: 876009 - DNA, 15 bp, Homo sapiens
ctccccaagctctcc

SEQ ID NO: 876010 - DNA, 15 bp, Homo sapiens
cctccccaagctctc

SEQ ID NO: 876011 - DNA, 15 bp, Homo sapiens
tcctccccaagctct

SEQ ID NO: 876012 - DNA, 15 bp, Homo sapiens
ctcctccccaagctc

SEQ ID NO: 876013 - DNA, 15 bp, Homo sapiens
actcctccccaagct

SEQ ID NO: 876014 - DNA, 15 bp, Homo sapiens
cactcctccccaagc

SEQ ID NO: 876015 - DNA, 15 bp, Homo sapiens
acactcctccccaag

SEQ ID NO: 876016 - DNA, 15 bp, Homo sapiens
tacactcctccccaa

SEQ ID NO: 876017 - DNA, 15 bp, Homo sapiens
ctacactcctcccca

SEQ ID NO: 876018 - DNA, 15 bp, Homo sapiens
cctacactcctcccc

SEQ ID NO: 876019 - DNA, 15 bp, Homo sapiens
acctacactcctccc

SEQ ID NO: 876020 - DNA, 15 bp, Homo sapiens
cacctacactcctcc

SEQ ID NO: 876021 - DNA, 15 bp, Homo sapiens
tcacctacactcctc

SEQ ID NO: 876022 - DNA, 15 bp, Homo sapiens
gtcacctacactcct

SEQ ID NO: 876023 - DNA, 15 bp, Homo sapiens
tgtcacctacactcc

SEQ ID NO: 876024 - DNA, 15 bp, Homo sapiens
ttgtcacctacactc

SEQ ID NO: 876025 - DNA, 15 bp, Homo sapiens
cttgtcacctacact

SEQ ID NO: 876026 - DNA, 15 bp, Homo sapiens
ccttgtcacctacac

SEQ ID NO: 876027 - DNA, 15 bp, Homo sapiens
gccttgtcacctaca

SEQ ID NO: 876028 - DNA, 15 bp, Homo sapiens
cgccttgtcacctac

SEQ ID NO: 876029 - DNA, 15 bp, Homo sapiens
ccgccttgtcaccta

SEQ ID NO: 876030 - DNA, 15 bp, Homo sapiens
cccgccttgtcacct

SEQ ID NO: 876031 - DNA, 15 bp, Homo sapiens
tcccgccttgtcacc

SEQ ID NO: 876032 - DNA, 15 bp, Homo sapiens
ttcccgccttgtcac

SEQ ID NO: 876033 - DNA, 15 bp, Homo sapiens
cttcccgccttgtca

SEQ ID NO: 876034 - DNA, 15 bp, Homo sapiens
gcttcccgccttgtc

SEQ ID NO: 876035 - DNA, 15 bp, Homo sapiens
ggcttcccgccttgt

SEQ ID NO: 876036 - DNA, 15 bp, Homo sapiens
tggcttcccgccttg

SEQ ID NO: 876037 - DNA, 15 bp, Homo sapiens
gtggcttcccgcctt

SEQ ID NO: 876038 - DNA, 15 bp, Homo sapiens
cgtggcttcccgcct

SEQ ID NO: 876039 - DNA, 15 bp, Homo sapiens
acgtggcttcccgcc

SEQ ID NO: 876040 - DNA, 15 bp, Homo sapiens
aacgtggcttcccgc

SEQ ID NO: 876041 - DNA, 15 bp, Homo sapiens
gaacgtggcttcccg

SEQ ID NO: 876042 - DNA, 15 bp, Homo sapiens
ggaacgtggcttccc

SEQ ID NO: 876043 - DNA, 15 bp, Homo sapiens
aggaacgtggcttcc

SEQ ID NO: 876044 - DNA, 15 bp, Homo sapiens
gaggaacgtggcttc

SEQ ID NO: 876045 - DNA, 15 bp, Homo sapiens
tgaggaacgtggctt

SEQ ID NO: 876046 - DNA, 15 bp, Homo sapiens
gtgaggaacgtggct

SEQ ID NO: 876047 - DNA, 15 bp, Homo sapiens
ggtgaggaacgtggc

SEQ ID NO: 876048 - DNA, 15 bp, Homo sapiens
tggtgaggaacgtgg

SEQ ID NO: 876049 - DNA, 15 bp, Homo sapiens
ttggtgaggaacgtg

SEQ ID NO: 876050 - DNA, 15 bp, Homo sapiens
tttggtgaggaacgt

SEQ ID NO: 876051 - DNA, 15 bp, Homo sapiens
atttggtgaggaacg

SEQ ID NO: 876052 - DNA, 15 bp, Homo sapiens
catttggtgaggaac

SEQ ID NO: 876053 - DNA, 15 bp, Homo sapiens
tcatttggtgaggaa

SEQ ID NO: 876054 - DNA, 15 bp, Homo sapiens
ttcatttggtgagga

SEQ ID NO: 876055 - DNA, 15 bp, Homo sapiens
gttcatttggtgagg

SEQ ID NO: 876056 - DNA, 15 bp, Homo sapiens
tgttcatttggtgag

SEQ ID NO: 876057 - DNA, 15 bp, Homo sapiens
ctgttcatttggtga

SEQ ID NO: 876058 - DNA, 15 bp, Homo sapiens
tctgttcatttggtg

SEQ ID NO: 876059 - DNA, 15 bp, Homo sapiens
ctctgttcatttggt

SEQ ID NO: 876060 - DNA, 15 bp, Homo sapiens
gctctgttcatttgg

SEQ ID NO: 876061 - DNA, 15 bp, Homo sapiens
tgctctgttcatttg

SEQ ID NO: 876062 - DNA, 15 bp, Homo sapiens
atgctctgttcattt

SEQ ID NO: 876063 - DNA, 15 bp, Homo sapiens
catgctctgttcatt

SEQ ID NO: 876064 - DNA, 15 bp, Homo sapiens
ccatgctctgttcat

SEQ ID NO: 876065 - DNA, 15 bp, Homo sapiens
accatgctctgttca

SEQ ID NO: 876066 - DNA, 15 bp, Homo sapiens
taccatgctctgttc

SEQ ID NO: 876067 - DNA, 15 bp, Homo sapiens
ataccatgctctgtt

SEQ ID NO: 876068 - DNA, 15 bp, Homo sapiens
aataccatgctctgt

SEQ ID NO: 876069 - DNA, 15 bp, Homo sapiens
caataccatgctctg

SEQ ID NO: 876070 - DNA, 15 bp, Homo sapiens
tcaataccatgctct

SEQ ID NO: 876071 - DNA, 15 bp, Homo sapiens
ctcaataccatgctc

SEQ ID NO: 876072 - DNA, 15 bp, Homo sapiens
actcaataccatgct

SEQ ID NO: 876073 - DNA, 15 bp, Homo sapiens
gactcaataccatgc

SEQ ID NO: 876074 - DNA, 15 bp, Homo sapiens
tgactcaataccatg

SEQ ID NO: 876075 - DNA, 15 bp, Homo sapiens
atgactcaataccat

SEQ ID NO: 876076 - DNA, 15 bp, Homo sapiens
gatgactcaatacca

SEQ ID NO: 876077 - DNA, 15 bp, Homo sapiens
ggatgactcaatacc

SEQ ID NO: 876078 - DNA, 15 bp, Homo sapiens
cggatgactcaatac

SEQ ID NO: 876079 - DNA, 15 bp, Homo sapiens
tcggatgactcaata

SEQ ID NO: 876080 - DNA, 15 bp, Homo sapiens
ctcggatgactcaat

SEQ ID NO: 876081 - DNA, 15 bp, Homo sapiens
tctcggatgactcaa

SEQ ID NO: 876082 - DNA, 15 bp, Homo sapiens
gtctcggatgactca

SEQ ID NO: 876083 - DNA, 15 bp, Homo sapiens
agtctcggatgactc

SEQ ID NO: 876084 - DNA, 15 bp, Homo sapiens
gagtctcggatgact

SEQ ID NO: 876085 - DNA, 15 bp, Homo sapiens
ggagtctcggatgac

SEQ ID NO: 876086 - DNA, 15 bp, Homo sapiens
tggagtctcggatga

SEQ ID NO: 876087 - DNA, 15 bp, Homo sapiens
ttggagtctcggatg

SEQ ID NO: 876088 - DNA, 15 bp, Homo sapiens
tttggagtctcggat

SEQ ID NO: 876089 - DNA, 15 bp, Homo sapiens
ctttggagtctcgga

SEQ ID NO: 876090 - DNA, 15 bp, Homo sapiens
actttggagtctcgg

SEQ ID NO: 876091 - DNA, 15 bp, Homo sapiens
aactttggagtctcg

SEQ ID NO: 876092 - DNA, 15 bp, Homo sapiens
aaactttggagtctc

SEQ ID NO: 876093 - DNA, 15 bp, Homo sapiens
gaaactttggagtct

SEQ ID NO: 876094 - DNA, 15 bp, Homo sapiens
tgaaactttggagtc

SEQ ID NO: 876095 - DNA, 15 bp, Homo sapiens
ctgaaactttggagt

SEQ ID NO: 876096 - DNA, 15 bp, Homo sapiens
gctgaaactttggag

SEQ ID NO: 876097 - DNA, 15 bp, Homo sapiens
tgctgaaactttgga

SEQ ID NO: 876098 - DNA, 15 bp, Homo sapiens
ctgctgaaactttgg

SEQ ID NO: 876099 - DNA, 15 bp, Homo sapiens
actgctgaaactttg

SEQ ID NO: 876100 - DNA, 15 bp, Homo sapiens
aactgctgaaacttt

SEQ ID NO: 876101 - DNA, 15 bp, Homo sapiens
caactgctgaaactt

SEQ ID NO: 876102 - DNA, 15 bp, Homo sapiens
ccaactgctgaaact

SEQ ID NO: 876103 - DNA, 15 bp, Homo sapiens
cccaactgctgaaac

SEQ ID NO: 876104 - DNA, 15 bp, Homo sapiens
tcccaactgctgaaa

SEQ ID NO: 876105 - DNA, 15 bp, Homo sapiens
gtcccaactgctgaa

SEQ ID NO: 876106 - DNA, 15 bp, Homo sapiens
ggtcccaactgctga

SEQ ID NO: 876107 - DNA, 15 bp, Homo sapiens
tggtcccaactgctg

SEQ ID NO: 876108 - DNA, 15 bp, Homo sapiens
ttggtcccaactgct

SEQ ID NO: 876109 - DNA, 15 bp, Homo sapiens
cttggtcccaactgc

SEQ ID NO: 876110 - DNA, 15 bp, Homo sapiens
ccttggtcccaactg

SEQ ID NO: 876111 - DNA, 15 bp, Homo sapiens
tccttggtcccaact

SEQ ID NO: 876112 - DNA, 15 bp, Homo sapiens
ctccttggtcccaac

SEQ ID NO: 876113 - DNA, 15 bp, Homo sapiens
cctccttggtcccaa

SEQ ID NO: 876114 - DNA, 15 bp, Homo sapiens
acctccttggtccca

SEQ ID NO: 876115 - DNA, 15 bp, Homo sapiens
gacctccttggtccc

SEQ ID NO: 876116 - DNA, 15 bp, Homo sapiens
agacctccttggtcc

SEQ ID NO: 876117 - DNA, 15 bp, Homo sapiens
tagacctccttggtc

SEQ ID NO: 876118 - DNA, 15 bp, Homo sapiens
atagacctccttggt

SEQ ID NO: 876119 - DNA, 15 bp, Homo sapiens
gatagacctccttgg

SEQ ID NO: 876120 - DNA, 15 bp, Homo sapiens
tgatagacctccttg

SEQ ID NO: 876121 - DNA, 15 bp, Homo sapiens
ttgatagacctcctt

SEQ ID NO: 876122 - DNA, 15 bp, Homo sapiens
cttgatagacctcct

SEQ ID NO: 876123 - DNA, 15 bp, Homo sapiens
tcttgatagacctcc

SEQ ID NO: 876124 - DNA, 15 bp, Homo sapiens
ctcttgatagacctc

SEQ ID NO: 876125 - DNA, 15 bp, Homo sapiens
tctcttgatagacct

SEQ ID NO: 876126 - DNA, 15 bp, Homo sapiens
gtctcttgatagacc

SEQ ID NO: 876127 - DNA, 15 bp, Homo sapiens
agtctcttgatagac

SEQ ID NO: 876128 - DNA, 15 bp, Homo sapiens
aagtctcttgataga

SEQ ID NO: 876129 - DNA, 15 bp, Homo sapiens
caagtctcttgatag

SEQ ID NO: 876130 - DNA, 15 bp, Homo sapiens
gcaagtctcttgata

SEQ ID NO: 876131 - DNA, 15 bp, Homo sapiens
ggcaagtctcttgat

SEQ ID NO: 876132 - DNA, 15 bp, Homo sapiens
gggcaagtctcttga

SEQ ID NO: 876133 - DNA, 15 bp, Homo sapiens
agggcaagtctcttg

SEQ ID NO: 876134 - DNA, 15 bp, Homo sapiens
gagggcaagtctctt

SEQ ID NO: 876135 - DNA, 15 bp, Homo sapiens
tgagggcaagtctct

SEQ ID NO: 876136 - DNA, 15 bp, Homo sapiens
atgagggcaagtctc

SEQ ID NO: 876137 - DNA, 15 bp, Homo sapiens
aatgagggcaagtct

SEQ ID NO: 876138 - DNA, 15 bp, Homo sapiens
caatgagggcaagtc

SEQ ID NO: 876139 - DNA, 15 bp, Homo sapiens
acaatgagggcaagt

SEQ ID NO: 876140 - DNA, 15 bp, Homo sapiens
aacaatgagggcaag

SEQ ID NO: 876141 - DNA, 15 bp, Homo sapiens
gaacaatgagggcaa

SEQ ID NO: 876142 - DNA, 15 bp, Homo sapiens
ggaacaatgagggca

SEQ ID NO: 876143 - DNA, 15 bp, Homo sapiens
aggaacaatgagggc

SEQ ID NO: 876144 - DNA, 15 bp, Homo sapiens
gaggaacaatgaggg

SEQ ID NO: 876145 - DNA, 15 bp, Homo sapiens
tgaggaacaatgagg

SEQ ID NO: 876146 - DNA, 15 bp, Homo sapiens
ctgaggaacaatgag

SEQ ID NO: 876147 - DNA, 15 bp, Homo sapiens
actgaggaacaatga

SEQ ID NO: 876148 - DNA, 15 bp, Homo sapiens
aactgaggaacaatg

SEQ ID NO: 876149 - DNA, 15 bp, Homo sapiens
aaactgaggaacaat

SEQ ID NO: 876150 - DNA, 15 bp, Homo sapiens
gaaactgaggaacaa

SEQ ID NO: 876151 - DNA, 15 bp, Homo sapiens
agaaactgaggaaca

SEQ ID NO: 876152 - DNA, 15 bp, Homo sapiens
aagaaactgaggaac

SEQ ID NO: 876153 - DNA, 15 bp, Homo sapiens
gaagaaactgaggaa

SEQ ID NO: 876154 - DNA, 15 bp, Homo sapiens
tgaagaaactgagga

SEQ ID NO: 876155 - DNA, 15 bp, Homo sapiens
atgaagaaactgagg

SEQ ID NO: 876156 - DNA, 15 bp, Homo sapiens
gatgaagaaactgag

SEQ ID NO: 876157 - DNA, 15 bp, Homo sapiens
agatgaagaaactga

SEQ ID NO: 876158 - DNA, 15 bp, Homo sapiens
cagatgaagaaactg

SEQ ID NO: 876159 - DNA, 15 bp, Homo sapiens
acagatgaagaaact

SEQ ID NO: 876160 - DNA, 15 bp, Homo sapiens
tacagatgaagaaac

SEQ ID NO: 876161 - DNA, 15 bp, Homo sapiens
ttacagatgaagaaa

SEQ ID NO: 876162 - DNA, 15 bp, Homo sapiens
tttacagatgaagaa

SEQ ID NO: 876163 - DNA, 15 bp, Homo sapiens
ttttacagatgaaga

SEQ ID NO: 876164 - DNA, 15 bp, Homo sapiens
gttttacagatgaag

SEQ ID NO: 876165 - DNA, 15 bp, Homo sapiens
cgttttacagatgaa

SEQ ID NO: 876166 - DNA, 15 bp, Homo sapiens
ccgttttacagatga

SEQ ID NO: 876167 - DNA, 15 bp, Homo sapiens
cccgttttacagatg

SEQ ID NO: 876168 - DNA, 15 bp, Homo sapiens
tcccgttttacagat

SEQ ID NO: 876169 - DNA, 15 bp, Homo sapiens
atcccgttttacaga

SEQ ID NO: 876170 - DNA, 15 bp, Homo sapiens
tatcccgttttacag

SEQ ID NO: 876171 - DNA, 15 bp, Homo sapiens
ttatcccgttttaca

SEQ ID NO: 876172 - DNA, 15 bp, Homo sapiens
attatcccgttttac

SEQ ID NO: 876173 - DNA, 15 bp, Homo sapiens
tattatcccgtttta

SEQ ID NO: 876174 - DNA, 15 bp, Homo sapiens
ttattatcccgtttt

SEQ ID NO: 876175 - DNA, 15 bp, Homo sapiens
attattatcccgttt

SEQ ID NO: 876176 - DNA, 15 bp, Homo sapiens
tattattatcccgtt

SEQ ID NO: 876177 - DNA, 15 bp, Homo sapiens
ttattattatcccgt

SEQ ID NO: 876178 - DNA, 15 bp, Homo sapiens
attattattatcccg

SEQ ID NO: 876179 - DNA, 15 bp, Homo sapiens
tattattattatccc

SEQ ID NO: 876180 - DNA, 15 bp, Homo sapiens
gtattattattatcc

SEQ ID NO: 876181 - DNA, 15 bp, Homo sapiens
ggtattattattatc

SEQ ID NO: 876182 - DNA, 15 bp, Homo sapiens
aggtattattattat

SEQ ID NO: 876183 - DNA, 15 bp, Homo sapiens
taggtattattatta

SEQ ID NO: 876184 - DNA, 15 bp, Homo sapiens
gtaggtattattatt

SEQ ID NO: 876185 - DNA, 15 bp, Homo sapiens
ggtaggtattattat

SEQ ID NO: 876186 - DNA, 15 bp, Homo sapiens
aggtaggtattatta

SEQ ID NO: 876187 - DNA, 15 bp, Homo sapiens
gaggtaggtattatt

SEQ ID NO: 876188 - DNA, 15 bp, Homo sapiens
tgaggtaggtattat

SEQ ID NO: 876189 - DNA, 15 bp, Homo sapiens
ttgaggtaggtatta

SEQ ID NO: 876190 - DNA, 15 bp, Homo sapiens
tttgaggtaggtatt

SEQ ID NO: 876191 - DNA, 15 bp, Homo sapiens
ctttgaggtaggtat

SEQ ID NO: 876192 - DNA, 15 bp, Homo sapiens
cctttgaggtaggta

SEQ ID NO: 876193 - DNA, 15 bp, Homo sapiens
tcctttgaggtaggt

SEQ ID NO: 876194 - DNA, 15 bp, Homo sapiens
gtcctttgaggtagg

SEQ ID NO: 876195 - DNA, 15 bp, Homo sapiens
agtcctttgaggtag

SEQ ID NO: 876196 - DNA, 15 bp, Homo sapiens
cagtcctttgaggta

SEQ ID NO: 876197 - DNA, 15 bp, Homo sapiens
acagtcctttgaggt

SEQ ID NO: 876198 - DNA, 15 bp, Homo sapiens
aacagtcctttgagg

SEQ ID NO: 876199 - DNA, 15 bp, Homo sapiens
caacagtcctttgag

SEQ ID NO: 876200 - DNA, 15 bp, Homo sapiens
gcaacagtcctttga

SEQ ID NO: 876201 - DNA, 15 bp, Homo sapiens
tgcaacagtcctttg

SEQ ID NO: 876202 - DNA, 15 bp, Homo sapiens
ctgcaacagtccttt

SEQ ID NO: 876203 - DNA, 15 bp, Homo sapiens
tctgcaacagtcctt

SEQ ID NO: 876204 - DNA, 15 bp, Homo sapiens
ttctgcaacagtcct

SEQ ID NO: 876205 - DNA, 15 bp, Homo sapiens
tttctgcaacagtcc

SEQ ID NO: 876206 - DNA, 15 bp, Homo sapiens
atttctgcaacagtc

SEQ ID NO: 876207 - DNA, 15 bp, Homo sapiens
aatttctgcaacagt

SEQ ID NO: 876208 - DNA, 15 bp, Homo sapiens
caatttctgcaacag

SEQ ID NO: 876209 - DNA, 15 bp, Homo sapiens
tcaatttctgcaaca

SEQ ID NO: 876210 - DNA, 15 bp, Homo sapiens
ttcaatttctgcaac

SEQ ID NO: 876211 - DNA, 15 bp, Homo sapiens
cttcaatttctgcaa

SEQ ID NO: 876212 - DNA, 15 bp, Homo sapiens
ccttcaatttctgca

SEQ ID NO: 876213 - DNA, 15 bp, Homo sapiens
cccttcaatttctgc

SEQ ID NO: 876214 - DNA, 15 bp, Homo sapiens
ccccttcaatttctg

SEQ ID NO: 876215 - DNA, 15 bp, Homo sapiens
cccccttcaatttct

SEQ ID NO: 876216 - DNA, 15 bp, Homo sapiens
acccccttcaatttc

SEQ ID NO: 876217 - DNA, 15 bp, Homo sapiens
tacccccttcaattt

SEQ ID NO: 876218 - DNA, 15 bp, Homo sapiens
ctacccccttcaatt

SEQ ID NO: 876219 - DNA, 15 bp, Homo sapiens
gctacccccttcaat

SEQ ID NO: 876220 - DNA, 15 bp, Homo sapiens
tgctacccccttcaa

SEQ ID NO: 876221 - DNA, 15 bp, Homo sapiens
atgctacccccttca

SEQ ID NO: 876222 - DNA, 15 bp, Homo sapiens
tatgctacccccttc

SEQ ID NO: 876223 - DNA, 15 bp, Homo sapiens
atatgctaccccctt

SEQ ID NO: 876224 - DNA, 15 bp, Homo sapiens
catatgctaccccct

SEQ ID NO: 876225 - DNA, 15 bp, Homo sapiens
acatatgctaccccc

SEQ ID NO: 876226 - DNA, 15 bp, Homo sapiens
cacatatgctacccc

SEQ ID NO: 876227 - DNA, 15 bp, Homo sapiens
tcacatatgctaccc

SEQ ID NO: 876228 - DNA, 15 bp, Homo sapiens
ttcacatatgctacc

SEQ ID NO: 876229 - DNA, 15 bp, Homo sapiens
tttcacatatgctac

SEQ ID NO: 876230 - DNA, 15 bp, Homo sapiens
atttcacatatgcta

SEQ ID NO: 876231 - DNA, 15 bp, Homo sapiens
catttcacatatgct

SEQ ID NO: 876232 - DNA, 15 bp, Homo sapiens
acatttcacatatgc

SEQ ID NO: 876233 - DNA, 15 bp, Homo sapiens
aacatttcacatatg

SEQ ID NO: 876234 - DNA, 15 bp, Homo sapiens
aaacatttcacatat

SEQ ID NO: 876235 - DNA, 15 bp, Homo sapiens
taaacatttcacata

SEQ ID NO: 876236 - DNA, 15 bp, Homo sapiens
ctaaacatttcacat

SEQ ID NO: 876237 - DNA, 15 bp, Homo sapiens
cctaaacatttcaca

SEQ ID NO: 876238 - DNA, 15 bp, Homo sapiens
ccctaaacatttcac

SEQ ID NO: 876239 - DNA, 15 bp, Homo sapiens
gccctaaacatttca

SEQ ID NO: 876240 - DNA, 15 bp, Homo sapiens
tgccctaaacatttc

SEQ ID NO: 876241 - DNA, 15 bp, Homo sapiens
ctgccctaaacattt

SEQ ID NO: 876242 - DNA, 15 bp, Homo sapiens
actgccctaaacatt

SEQ ID NO: 876243 - DNA, 15 bp, Homo sapiens
cactgccctaaacat

SEQ ID NO: 876244 - DNA, 15 bp, Homo sapiens
acactgccctaaaca

SEQ ID NO: 876245 - DNA, 15 bp, Homo sapiens
gacactgccctaaac

SEQ ID NO: 876246 - DNA, 15 bp, Homo sapiens
ggacactgccctaaa

SEQ ID NO: 876247 - DNA, 15 bp, Homo sapiens
tggacactgccctaa

SEQ ID NO: 876248 - DNA, 15 bp, Homo sapiens
ttggacactgcccta

SEQ ID NO: 876249 - DNA, 15 bp, Homo sapiens
gttggacactgccct

SEQ ID NO: 876250 - DNA, 15 bp, Homo sapiens
tgttggacactgccc

SEQ ID NO: 876251 - DNA, 15 bp, Homo sapiens
gtgttggacactgcc

SEQ ID NO: 876252 - DNA, 15 bp, Homo sapiens
tgtgttggacactgc

SEQ ID NO: 876253 - DNA, 15 bp, Homo sapiens
gtgtgttggacactg

SEQ ID NO: 876254 - DNA, 15 bp, Homo sapiens
tgtgtgttggacact

SEQ ID NO: 876255 - DNA, 15 bp, Homo sapiens
ctgtgtgttggacac

SEQ ID NO: 876256 - DNA, 15 bp, Homo sapiens
gctgtgtgttggaca

SEQ ID NO: 876257 - DNA, 15 bp, Homo sapiens
tgctgtgtgttggac

SEQ ID NO: 876258 - DNA, 15 bp, Homo sapiens
ttgctgtgtgttgga

SEQ ID NO: 876259 - DNA, 15 bp, Homo sapiens
cttgctgtgtgttgg

SEQ ID NO: 876260 - DNA, 15 bp, Homo sapiens
acttgctgtgtgttg

SEQ ID NO: 876261 - DNA, 15 bp, Homo sapiens
tacttgctgtgtgtt

SEQ ID NO: 876262 - DNA, 15 bp, Homo sapiens
gtacttgctgtgtgt

SEQ ID NO: 876263 - DNA, 15 bp, Homo sapiens
cgtacttgctgtgtg

SEQ ID NO: 876264 - DNA, 15 bp, Homo sapiens
tcgtacttgctgtgt

SEQ ID NO: 876265 - DNA, 15 bp, Homo sapiens
gtcgtacttgctgtg

SEQ ID NO: 876266 - DNA, 15 bp, Homo sapiens
tgtcgtacttgctgt

SEQ ID NO: 876267 - DNA, 15 bp, Homo sapiens
ctgtcgtacttgctg

SEQ ID NO: 876268 - DNA, 15 bp, Homo sapiens
tctgtcgtacttgct

SEQ ID NO: 876269 - DNA, 15 bp, Homo sapiens
ttctgtcgtacttgc

SEQ ID NO: 876270 - DNA, 15 bp, Homo sapiens
cttctgtcgtacttg

SEQ ID NO: 876271 - DNA, 15 bp, Homo sapiens
acttctgtcgtactt

SEQ ID NO: 876272 - DNA, 15 bp, Homo sapiens
cacttctgtcgtact

SEQ ID NO: 876273 - DNA, 15 bp, Homo sapiens
acacttctgtcgtac

SEQ ID NO: 876274 - DNA, 15 bp, Homo sapiens
aacacttctgtcgta

SEQ ID NO: 876275 - DNA, 15 bp, Homo sapiens
taacacttctgtcgt

SEQ ID NO: 876276 - DNA, 15 bp, Homo sapiens
gtaacacttctgtcg

SEQ ID NO: 876277 - DNA, 15 bp, Homo sapiens
ggtaacacttctgtc

SEQ ID NO: 876278 - DNA, 15 bp, Homo sapiens
aggtaacacttctgt

SEQ ID NO: 876279 - DNA, 15 bp, Homo sapiens
caggtaacacttctg

SEQ ID NO: 876280 - DNA, 15 bp, Homo sapiens
ccaggtaacacttct

SEQ ID NO: 876281 - DNA, 15 bp, Homo sapiens
tccaggtaacacttc

SEQ ID NO: 876282 - DNA, 15 bp, Homo sapiens
ctccaggtaacactt

SEQ ID NO: 876283 - DNA, 15 bp, Homo sapiens
actccaggtaacact

SEQ ID NO: 876284 - DNA, 15 bp, Homo sapiens
cactccaggtaacac

SEQ ID NO: 876285 - DNA, 15 bp, Homo sapiens
tcactccaggtaaca

SEQ ID NO: 876286 - DNA, 15 bp, Homo sapiens
atcactccaggtaac

SEQ ID NO: 876287 - DNA, 15 bp, Homo sapiens
catcactccaggtaa

SEQ ID NO: 876288 - DNA, 15 bp, Homo sapiens
ccatcactccaggta

SEQ ID NO: 876289 - DNA, 15 bp, Homo sapiens
gccatcactccaggt

SEQ ID NO: 876290 - DNA, 15 bp, Homo sapiens
agccatcactccagg

SEQ ID NO: 876291 - DNA, 15 bp, Homo sapiens
cagccatcactccag

SEQ ID NO: 876292 - DNA, 15 bp, Homo sapiens
gcagccatcactcca

SEQ ID NO: 876293 - DNA, 15 bp, Homo sapiens
tgcagccatcactcc

SEQ ID NO: 876294 - DNA, 15 bp, Homo sapiens
ctgcagccatcactc

SEQ ID NO: 876295 - DNA, 15 bp, Homo sapiens
gctgcagccatcact

SEQ ID NO: 876296 - DNA, 15 bp, Homo sapiens
tgctgcagccatcac

SEQ ID NO: 876297 - DNA, 15 bp, Homo sapiens
atgctgcagccatca

SEQ ID NO: 876298 - DNA, 15 bp, Homo sapiens
gatgctgcagccatc

SEQ ID NO: 876299 - DNA, 15 bp, Homo sapiens
agatgctgcagccat

SEQ ID NO: 876300 - DNA, 15 bp, Homo sapiens
cagatgctgcagcca

SEQ ID NO: 876301 - DNA, 15 bp, Homo sapiens
gcagatgctgcagcc

SEQ ID NO: 876302 - DNA, 15 bp, Homo sapiens
ggcagatgctgcagc

SEQ ID NO: 876303 - DNA, 15 bp, Homo sapiens
aggcagatgctgcag

SEQ ID NO: 876304 - DNA, 15 bp, Homo sapiens
gaggcagatgctgca

SEQ ID NO: 876305 - DNA, 15 bp, Homo sapiens
agaggcagatgctgc

SEQ ID NO: 876306 - DNA, 15 bp, Homo sapiens
cagaggcagatgctg

SEQ ID NO: 876307 - DNA, 15 bp, Homo sapiens
acagaggcagatgct

SEQ ID NO: 876308 - DNA, 15 bp, Homo sapiens
aacagaggcagatgc

SEQ ID NO: 876309 - DNA, 15 bp, Homo sapiens
gaacagaggcagatg

SEQ ID NO: 876310 - DNA, 15 bp, Homo sapiens
agaacagaggcagat

SEQ ID NO: 876311 - DNA, 15 bp, Homo sapiens
aagaacagaggcaga

SEQ ID NO: 876312 - DNA, 15 bp, Homo sapiens
caagaacagaggcag

SEQ ID NO: 876313 - DNA, 15 bp, Homo sapiens
gcaagaacagaggca

SEQ ID NO: 876314 - DNA, 15 bp, Homo sapiens
agcaagaacagaggc

SEQ ID NO: 876315 - DNA, 15 bp, Homo sapiens
cagcaagaacagagg

SEQ ID NO: 876316 - DNA, 15 bp, Homo sapiens
acagcaagaacagag

SEQ ID NO: 876317 - DNA, 15 bp, Homo sapiens
gacagcaagaacaga

SEQ ID NO: 876318 - DNA, 15 bp, Homo sapiens
ggacagcaagaacag

SEQ ID NO: 876319 - DNA, 15 bp, Homo sapiens
tggacagcaagaaca

SEQ ID NO: 876320 - DNA, 15 bp, Homo sapiens
atggacagcaagaac

SEQ ID NO: 876321 - DNA, 15 bp, Homo sapiens
tatggacagcaagaa

SEQ ID NO: 876322 - DNA, 15 bp, Homo sapiens
ctatggacagcaaga

SEQ ID NO: 876323 - DNA, 15 bp, Homo sapiens
cctatggacagcaag

SEQ ID NO: 876324 - DNA, 15 bp, Homo sapiens
ccctatggacagcaa

SEQ ID NO: 876325 - DNA, 15 bp, Homo sapiens
tccctatggacagca

SEQ ID NO: 876326 - DNA, 15 bp, Homo sapiens
ctccctatggacagc

SEQ ID NO: 876327 - DNA, 15 bp, Homo sapiens
gctccctatggacag

SEQ ID NO: 876328 - DNA, 15 bp, Homo sapiens
ggctccctatggaca

SEQ ID NO: 876329 - DNA, 15 bp, Homo sapiens
tggctccctatggac

SEQ ID NO: 876330 - DNA, 15 bp, Homo sapiens
ttggctccctatgga

SEQ ID NO: 876331 - DNA, 15 bp, Homo sapiens
attggctccctatgg

SEQ ID NO: 876332 - DNA, 15 bp, Homo sapiens
gattggctccctatg

SEQ ID NO: 876333 - DNA, 15 bp, Homo sapiens
agattggctccctat

SEQ ID NO: 876334 - DNA, 15 bp, Homo sapiens
cagattggctcccta

SEQ ID NO: 876335 - DNA, 15 bp, Homo sapiens
ccagattggctccct

SEQ ID NO: 876336 - DNA, 15 bp, Homo sapiens
tccagattggctccc

SEQ ID NO: 876337 - DNA, 15 bp, Homo sapiens
ttccagattggctcc

SEQ ID NO: 876338 - DNA, 15 bp, Homo sapiens
tttccagattggctc

SEQ ID NO: 876339 - DNA, 15 bp, Homo sapiens
ttttccagattggct

SEQ ID NO: 876340 - DNA, 15 bp, Homo sapiens
cttttccagattggc

SEQ ID NO: 876341 - DNA, 15 bp, Homo sapiens
tcttttccagattgg

SEQ ID NO: 876342 - DNA, 15 bp, Homo sapiens
ctcttttccagattg

SEQ ID NO: 876343 - DNA, 15 bp, Homo sapiens
cctcttttccagatt

SEQ ID NO: 876344 - DNA, 15 bp, Homo sapiens
ccctcttttccagat

SEQ ID NO: 876345 - DNA, 15 bp, Homo sapiens
gccctcttttccaga

SEQ ID NO: 876346 - DNA, 15 bp, Homo sapiens
agccctcttttccag

SEQ ID NO: 876347 - DNA, 15 bp, Homo sapiens
cagccctcttttcca

SEQ ID NO: 876348 - DNA, 15 bp, Homo sapiens
acagccctcttttcc

SEQ ID NO: 876349 - DNA, 15 bp, Homo sapiens
cacagccctcttttc

SEQ ID NO: 876350 - DNA, 15 bp, Homo sapiens
gcacagccctctttt

SEQ ID NO: 876351 - DNA, 15 bp, Homo sapiens
agcacagccctcttt

SEQ ID NO: 876352 - DNA, 15 bp, Homo sapiens
aagcacagccctctt

SEQ ID NO: 876353 - DNA, 15 bp, Homo sapiens
aaagcacagccctct

SEQ ID NO: 876354 - DNA, 15 bp, Homo sapiens
taaagcacagccctc

SEQ ID NO: 876355 - DNA, 15 bp, Homo sapiens
ctaaagcacagccct

SEQ ID NO: 876356 - DNA, 15 bp, Homo sapiens
cctaaagcacagccc

SEQ ID NO: 876357 - DNA, 15 bp, Homo sapiens
ccctaaagcacagcc

SEQ ID NO: 876358 - DNA, 15 bp, Homo sapiens
cccctaaagcacagc

SEQ ID NO: 876359 - DNA, 15 bp, Homo sapiens
gcccctaaagcacag

SEQ ID NO: 876360 - DNA, 15 bp, Homo sapiens
tgcccctaaagcaca

SEQ ID NO: 876361 - DNA, 15 bp, Homo sapiens
atgcccctaaagcac

SEQ ID NO: 876362 - DNA, 15 bp, Homo sapiens
catgcccctaaagca

SEQ ID NO: 876363 - DNA, 15 bp, Homo sapiens
ccatgcccctaaagc

SEQ ID NO: 876364 - DNA, 15 bp, Homo sapiens
tccatgcccctaaag

SEQ ID NO: 876365 - DNA, 15 bp, Homo sapiens
ttccatgcccctaaa

SEQ ID NO: 876366 - DNA, 15 bp, Homo sapiens
tttccatgcccctaa

SEQ ID NO: 876367 - DNA, 15 bp, Homo sapiens
gtttccatgccccta

SEQ ID NO: 876368 - DNA, 15 bp, Homo sapiens
agtttccatgcccct

SEQ ID NO: 876369 - DNA, 15 bp, Homo sapiens
aagtttccatgcccc

SEQ ID NO: 876370 - DNA, 15 bp, Homo sapiens
gaagtttccatgccc

SEQ ID NO: 876371 - DNA, 15 bp, Homo sapiens
agaagtttccatgcc

SEQ ID NO: 876372 - DNA, 15 bp, Homo sapiens
cagaagtttccatgc

SEQ ID NO: 876373 - DNA, 15 bp, Homo sapiens
ccagaagtttccatg

SEQ ID NO: 876374 - DNA, 15 bp, Homo sapiens
cccagaagtttccat

SEQ ID NO: 876375 - DNA, 15 bp, Homo sapiens
gcccagaagtttcca

SEQ ID NO: 876376 - DNA, 15 bp, Homo sapiens
tgcccagaagtttcc

SEQ ID NO: 876377 - DNA, 15 bp, Homo sapiens
ctgcccagaagtttc

SEQ ID NO: 876378 - DNA, 15 bp, Homo sapiens
cctgcccagaagttt

SEQ ID NO: 876379 - DNA, 15 bp, Homo sapiens
tcctgcccagaagtt

SEQ ID NO: 876380 - DNA, 15 bp, Homo sapiens
ttcctgcccagaagt

SEQ ID NO: 876381 - DNA, 15 bp, Homo sapiens
tttcctgcccagaag

SEQ ID NO: 876382 - DNA, 15 bp, Homo sapiens
atttcctgcccagaa

SEQ ID NO: 876383 - DNA, 15 bp, Homo sapiens
gatttcctgcccaga

SEQ ID NO: 876384 - DNA, 15 bp, Homo sapiens
agatttcctgcccag

SEQ ID NO: 876385 - DNA, 15 bp, Homo sapiens
cagatttcctgccca

SEQ ID NO: 876386 - DNA, 15 bp, Homo sapiens
ccagatttcctgccc

SEQ ID NO: 876387 - DNA, 15 bp, Homo sapiens
gccagatttcctgcc

SEQ ID NO: 876388 - DNA, 15 bp, Homo sapiens
agccagatttcctgc

SEQ ID NO: 876389 - DNA, 15 bp, Homo sapiens
aagccagatttcctg

SEQ ID NO: 876390 - DNA, 15 bp, Homo sapiens
gaagccagatttcct

SEQ ID NO: 876391 - DNA, 15 bp, Homo sapiens
tgaagccagatttcc

SEQ ID NO: 876392 - DNA, 15 bp, Homo sapiens
gtgaagccagatttc

SEQ ID NO: 876393 - DNA, 15 bp, Homo sapiens
tgtgaagccagattt

SEQ ID NO: 876394 - DNA, 15 bp, Homo sapiens
ctgtgaagccagatt

SEQ ID NO: 876395 - DNA, 15 bp, Homo sapiens
actgtgaagccagat

SEQ ID NO: 876396 - DNA, 15 bp, Homo sapiens
gactgtgaagccaga

SEQ ID NO: 876397 - DNA, 15 bp, Homo sapiens
tgactgtgaagccag

SEQ ID NO: 876398 - DNA, 15 bp, Homo sapiens
ctgactgtgaagcca

SEQ ID NO: 876399 - DNA, 15 bp, Homo sapiens
gctgactgtgaagcc

SEQ ID NO: 876400 - DNA, 15 bp, Homo sapiens
ggctgactgtgaagc

SEQ ID NO: 876401 - DNA, 15 bp, Homo sapiens
gggctgactgtgaag

SEQ ID NO: 876402 - DNA, 15 bp, Homo sapiens
agggctgactgtgaa

SEQ ID NO: 876403 - DNA, 15 bp, Homo sapiens
gagggctgactgtga

SEQ ID NO: 876404 - DNA, 15 bp, Homo sapiens
ggagggctgactgtg

SEQ ID NO: 876405 - DNA, 15 bp, Homo sapiens
aggagggctgactgt

SEQ ID NO: 876406 - DNA, 15 bp, Homo sapiens
aaggagggctgactg

SEQ ID NO: 876407 - DNA, 15 bp, Homo sapiens
taaggagggctgact

SEQ ID NO: 876408 - DNA, 15 bp, Homo sapiens
ataaggagggctgac

SEQ ID NO: 876409 - DNA, 15 bp, Homo sapiens
gataaggagggctga

SEQ ID NO: 876410 - DNA, 15 bp, Homo sapiens
tgataaggagggctg

SEQ ID NO: 876411 - DNA, 15 bp, Homo sapiens
ctgataaggagggct

SEQ ID NO: 876412 - DNA, 15 bp, Homo sapiens
actgataaggagggc

SEQ ID NO: 876413 - DNA, 15 bp, Homo sapiens
tactgataaggaggg

SEQ ID NO: 876414 - DNA, 15 bp, Homo sapiens
atactgataaggagg

SEQ ID NO: 876415 - DNA, 15 bp, Homo sapiens
catactgataaggag

SEQ ID NO: 876416 - DNA, 15 bp, Homo sapiens
gcatactgataagga

SEQ ID NO: 876417 - DNA, 15 bp, Homo sapiens
agcatactgataagg

SEQ ID NO: 876418 - DNA, 15 bp, Homo sapiens
gagcatactgataag

SEQ ID NO: 876419 - DNA, 15 bp, Homo sapiens
agagcatactgataa

SEQ ID NO: 876420 - DNA, 15 bp, Homo sapiens
cagagcatactgata

SEQ ID NO: 876421 - DNA, 15 bp, Homo sapiens
gcagagcatactgat

SEQ ID NO: 876422 - DNA, 15 bp, Homo sapiens
ggcagagcatactga

SEQ ID NO: 876423 - DNA, 15 bp, Homo sapiens
tggcagagcatactg

SEQ ID NO: 876424 - DNA, 15 bp, Homo sapiens
gtggcagagcatact

SEQ ID NO: 876425 - DNA, 15 bp, Homo sapiens
ggtggcagagcatac

SEQ ID NO: 876426 - DNA, 15 bp, Homo sapiens
aggtggcagagcata

SEQ ID NO: 876427 - DNA, 15 bp, Homo sapiens
aaggtggcagagcat

SEQ ID NO: 876428 - DNA, 15 bp, Homo sapiens
gaaggtggcagagca

SEQ ID NO: 876429 - DNA, 15 bp, Homo sapiens
ggaaggtggcagagc

SEQ ID NO: 876430 - DNA, 15 bp, Homo sapiens
gggaaggtggcagag

SEQ ID NO: 876431 - DNA, 15 bp, Homo sapiens
tgggaaggtggcaga

SEQ ID NO: 876432 - DNA, 15 bp, Homo sapiens
atgggaaggtggcag

SEQ ID NO: 876433 - DNA, 15 bp, Homo sapiens
catgggaaggtggca

SEQ ID NO: 876434 - DNA, 15 bp, Homo sapiens
tcatgggaaggtggc

SEQ ID NO: 876435 - DNA, 15 bp, Homo sapiens
atcatgggaaggtgg

SEQ ID NO: 876436 - DNA, 15 bp, Homo sapiens
aatcatgggaaggtg

SEQ ID NO: 876437 - DNA, 15 bp, Homo sapiens
caatcatgggaaggt

SEQ ID NO: 876438 - DNA, 15 bp, Homo sapiens
ccaatcatgggaagg

SEQ ID NO: 876439 - DNA, 15 bp, Homo sapiens
gccaatcatgggaag

SEQ ID NO: 876440 - DNA, 15 bp, Homo sapiens
tgccaatcatgggaa

SEQ ID NO: 876441 - DNA, 15 bp, Homo sapiens
ttgccaatcatggga

SEQ ID NO: 876442 - DNA, 15 bp, Homo sapiens
cttgccaatcatggg

SEQ ID NO: 876443 - DNA, 15 bp, Homo sapiens
tcttgccaatcatgg

SEQ ID NO: 876444 - DNA, 15 bp, Homo sapiens
atcttgccaatcatg

SEQ ID NO: 876445 - DNA, 15 bp, Homo sapiens
catcttgccaatcat

SEQ ID NO: 876446 - DNA, 15 bp, Homo sapiens
gcatcttgccaatca

SEQ ID NO: 876447 - DNA, 15 bp, Homo sapiens
tgcatcttgccaatc

SEQ ID NO: 876448 - DNA, 15 bp, Homo sapiens
atgcatcttgccaat

SEQ ID NO: 876449 - DNA, 15 bp, Homo sapiens
aatgcatcttgccaa

SEQ ID NO: 876450 - DNA, 15 bp, Homo sapiens
caatgcatcttgcca

SEQ ID NO: 876451 - DNA, 15 bp, Homo sapiens
tcaatgcatcttgcc

SEQ ID NO: 876452 - DNA, 15 bp, Homo sapiens
gtcaatgcatcttgc

SEQ ID NO: 876453 - DNA, 15 bp, Homo sapiens
cgtcaatgcatcttg

SEQ ID NO: 876454 - DNA, 15 bp, Homo sapiens
tcgtcaatgcatctt

SEQ ID NO: 876455 - DNA, 15 bp, Homo sapiens
atcgtcaatgcatct

SEQ ID NO: 876456 - DNA, 15 bp, Homo sapiens
gatcgtcaatgcatc

SEQ ID NO: 876457 - DNA, 15 bp, Homo sapiens
tgatcgtcaatgcat

SEQ ID NO: 876458 - DNA, 15 bp, Homo sapiens
ttgatcgtcaatgca

SEQ ID NO: 876459 - DNA, 15 bp, Homo sapiens
cttgatcgtcaatgc

SEQ ID NO: 876460 - DNA, 15 bp, Homo sapiens
tcttgatcgtcaatg

SEQ ID NO: 876461 - DNA, 15 bp, Homo sapiens
gtcttgatcgtcaat

SEQ ID NO: 876462 - DNA, 15 bp, Homo sapiens
ggtcttgatcgtcaa

SEQ ID NO: 876463 - DNA, 15 bp, Homo sapiens
tggtcttgatcgtca

SEQ ID NO: 876464 - DNA, 15 bp, Homo sapiens
ctggtcttgatcgtc

SEQ ID NO: 876465 - DNA, 15 bp, Homo sapiens
tctggtcttgatcgt

SEQ ID NO: 876466 - DNA, 15 bp, Homo sapiens
ctctggtcttgatcg

SEQ ID NO: 876467 - DNA, 15 bp, Homo sapiens
cctctggtcttgatc

SEQ ID NO: 876468 - DNA, 15 bp, Homo sapiens
gcctctggtcttgat

SEQ ID NO: 876469 - DNA, 15 bp, Homo sapiens
ggcctctggtcttga

SEQ ID NO: 876470 - DNA, 15 bp, Homo sapiens
tggcctctggtcttg

SEQ ID NO: 876471 - DNA, 15 bp, Homo sapiens
ctggcctctggtctt

SEQ ID NO: 876472 - DNA, 15 bp, Homo sapiens
tctggcctctggtct

SEQ ID NO: 876473 - DNA, 15 bp, Homo sapiens
ctctggcctctggtc

SEQ ID NO: 876474 - DNA, 15 bp, Homo sapiens
tctctggcctctggt

SEQ ID NO: 876475 - DNA, 15 bp, Homo sapiens
ctctctggcctctgg

SEQ ID NO: 876476 - DNA, 15 bp, Homo sapiens
actctctggcctctg

SEQ ID NO: 876477 - DNA, 15 bp, Homo sapiens
gactctctggcctct

SEQ ID NO: 876478 - DNA, 15 bp, Homo sapiens
tgactctctggcctc

SEQ ID NO: 876479 - DNA, 15 bp, Homo sapiens
ctgactctctggcct

SEQ ID NO: 876480 - DNA, 15 bp, Homo sapiens
gctgactctctggcc

SEQ ID NO: 876481 - DNA, 15 bp, Homo sapiens
agctgactctctggc

SEQ ID NO: 876482 - DNA, 15 bp, Homo sapiens
cagctgactctctgg

SEQ ID NO: 876483 - DNA, 15 bp, Homo sapiens
ccagctgactctctg

SEQ ID NO: 876484 - DNA, 15 bp, Homo sapiens
tccagctgactctct

SEQ ID NO: 876485 - DNA, 15 bp, Homo sapiens
gtccagctgactctc

SEQ ID NO: 876486 - DNA, 15 bp, Homo sapiens
ggtccagctgactct

SEQ ID NO: 876487 - DNA, 15 bp, Homo sapiens
aggtccagctgactc

SEQ ID NO: 876488 - DNA, 15 bp, Homo sapiens
caggtccagctgact

SEQ ID NO: 876489 - DNA, 15 bp, Homo sapiens
gcaggtccagctgac

SEQ ID NO: 876490 - DNA, 15 bp, Homo sapiens
tgcaggtccagctga

SEQ ID NO: 876491 - DNA, 15 bp, Homo sapiens
atgcaggtccagctg

SEQ ID NO: 876492 - DNA, 15 bp, Homo sapiens
aatgcaggtccagct

SEQ ID NO: 876493 - DNA, 15 bp, Homo sapiens
aaatgcaggtccagc

SEQ ID NO: 876494 - DNA, 15 bp, Homo sapiens
caaatgcaggtccag

SEQ ID NO: 876495 - DNA, 15 bp, Homo sapiens
tcaaatgcaggtcca

SEQ ID NO: 876496 - DNA, 15 bp, Homo sapiens
ttcaaatgcaggtcc

SEQ ID NO: 876497 - DNA, 15 bp, Homo sapiens
attcaaatgcaggtc

SEQ ID NO: 876498 - DNA, 15 bp, Homo sapiens
gattcaaatgcaggt

SEQ ID NO: 876499 - DNA, 15 bp, Homo sapiens
ggattcaaatgcagg

SEQ ID NO: 876500 - DNA, 15 bp, Homo sapiens
aggattcaaatgcag

SEQ ID NO: 876501 - DNA, 15 bp, Homo sapiens
caggattcaaatgca

SEQ ID NO: 876502 - DNA, 15 bp, Homo sapiens
tcaggattcaaatgc

SEQ ID NO: 876503 - DNA, 15 bp, Homo sapiens
gtcaggattcaaatg

SEQ ID NO: 876504 - DNA, 15 bp, Homo sapiens
agtcaggattcaaat

SEQ ID NO: 876505 - DNA, 15 bp, Homo sapiens
gagtcaggattcaaa

SEQ ID NO: 876506 - DNA, 15 bp, Homo sapiens
ggagtcaggattcaa

SEQ ID NO: 876507 - DNA, 15 bp, Homo sapiens
tggagtcaggattca

SEQ ID NO: 876508 - DNA, 15 bp, Homo sapiens
gtggagtcaggattc

SEQ ID NO: 876509 - DNA, 15 bp, Homo sapiens
agtggagtcaggatt

SEQ ID NO: 876510 - DNA, 15 bp, Homo sapiens
cagtggagtcaggat

SEQ ID NO: 876511 - DNA, 15 bp, Homo sapiens
acagtggagtcagga

SEQ ID NO: 876512 - DNA, 15 bp, Homo sapiens
aacagtggagtcagg

SEQ ID NO: 876513 - DNA, 15 bp, Homo sapiens
aaacagtggagtcag

SEQ ID NO: 876514 - DNA, 15 bp, Homo sapiens
gaaacagtggagtca

SEQ ID NO: 876515 - DNA, 15 bp, Homo sapiens
agaaacagtggagtc

SEQ ID NO: 876516 - DNA, 15 bp, Homo sapiens
aagaaacagtggagt

SEQ ID NO: 876517 - DNA, 15 bp, Homo sapiens
taagaaacagtggag

SEQ ID NO: 876518 - DNA, 15 bp, Homo sapiens
ctaagaaacagtgga

SEQ ID NO: 876519 - DNA, 15 bp, Homo sapiens
gctaagaaacagtgg

SEQ ID NO: 876520 - DNA, 15 bp, Homo sapiens
tgctaagaaacagtg

SEQ ID NO: 876521 - DNA, 15 bp, Homo sapiens
ctgctaagaaacagt

SEQ ID NO: 876522 - DNA, 15 bp, Homo sapiens
actgctaagaaacag

SEQ ID NO: 876523 - DNA, 15 bp, Homo sapiens
cactgctaagaaaca

SEQ ID NO: 876524 - DNA, 15 bp, Homo sapiens
acactgctaagaaac

SEQ ID NO: 876525 - DNA, 15 bp, Homo sapiens
cacactgctaagaaa

SEQ ID NO: 876526 - DNA, 15 bp, Homo sapiens
acacactgctaagaa

SEQ ID NO: 876527 - DNA, 15 bp, Homo sapiens
cacacactgctaaga

SEQ ID NO: 876528 - DNA, 15 bp, Homo sapiens
acacacactgctaag

SEQ ID NO: 876529 - DNA, 15 bp, Homo sapiens
aacacacactgctaa

SEQ ID NO: 876530 - DNA, 15 bp, Homo sapiens
aaacacacactgcta

SEQ ID NO: 876531 - DNA, 15 bp, Homo sapiens
caaacacacactgct

SEQ ID NO: 876532 - DNA, 15 bp, Homo sapiens
tcaaacacacactgc

SEQ ID NO: 876533 - DNA, 15 bp, Homo sapiens
ctcaaacacacactg

SEQ ID NO: 876534 - DNA, 15 bp, Homo sapiens
actcaaacacacact

SEQ ID NO: 876535 - DNA, 15 bp, Homo sapiens
aactcaaacacacac

SEQ ID NO: 876536 - DNA, 15 bp, Homo sapiens
aaactcaaacacaca

SEQ ID NO: 876537 - DNA, 15 bp, Homo sapiens
caaactcaaacacac

SEQ ID NO: 876538 - DNA, 15 bp, Homo sapiens
gcaaactcaaacaca

SEQ ID NO: 876539 - DNA, 15 bp, Homo sapiens
tgcaaactcaaacac

SEQ ID NO: 876540 - DNA, 15 bp, Homo sapiens
gtgcaaactcaaaca

SEQ ID NO: 876541 - DNA, 15 bp, Homo sapiens
agtgcaaactcaaac

SEQ ID NO: 876542 - DNA, 15 bp, Homo sapiens
tagtgcaaactcaaa

SEQ ID NO: 876543 - DNA, 15 bp, Homo sapiens
ttagtgcaaactcaa

SEQ ID NO: 876544 - DNA, 15 bp, Homo sapiens
tttagtgcaaactca

SEQ ID NO: 876545 - DNA, 15 bp, Homo sapiens
gtttagtgcaaactc

SEQ ID NO: 876546 - DNA, 15 bp, Homo sapiens
ggtttagtgcaaact

SEQ ID NO: 876547 - DNA, 15 bp, Homo sapiens
aggtttagtgcaaac

SEQ ID NO: 876548 - DNA, 15 bp, Homo sapiens
gaggtttagtgcaaa

SEQ ID NO: 876549 - DNA, 15 bp, Homo sapiens
agaggtttagtgcaa

SEQ ID NO: 876550 - DNA, 15 bp, Homo sapiens
gagaggtttagtgca

SEQ ID NO: 876551 - DNA, 15 bp, Homo sapiens
agagaggtttagtgc

SEQ ID NO: 876552 - DNA, 15 bp, Homo sapiens
cagagaggtttagtg

SEQ ID NO: 876553 - DNA, 15 bp, Homo sapiens
acagagaggtttagt

SEQ ID NO: 876554 - DNA, 15 bp, Homo sapiens
tacagagaggtttag

SEQ ID NO: 876555 - DNA, 15 bp, Homo sapiens
gtacagagaggttta

SEQ ID NO: 876556 - DNA, 15 bp, Homo sapiens
ggtacagagaggttt

SEQ ID NO: 876557 - DNA, 15 bp, Homo sapiens
aggtacagagaggtt

SEQ ID NO: 876558 - DNA, 15 bp, Homo sapiens
gaggtacagagaggt

SEQ ID NO: 876559 - DNA, 15 bp, Homo sapiens
tgaggtacagagagg

SEQ ID NO: 876560 - DNA, 15 bp, Homo sapiens
ctgaggtacagagag

SEQ ID NO: 876561 - DNA, 15 bp, Homo sapiens
actgaggtacagaga

SEQ ID NO: 876562 - DNA, 15 bp, Homo sapiens
cactgaggtacagag

SEQ ID NO: 876563 - DNA, 15 bp, Homo sapiens
acactgaggtacaga

SEQ ID NO: 876564 - DNA, 15 bp, Homo sapiens
gacactgaggtacag

SEQ ID NO: 876565 - DNA, 15 bp, Homo sapiens
ggacactgaggtaca

SEQ ID NO: 876566 - DNA, 15 bp, Homo sapiens
aggacactgaggtac

SEQ ID NO: 876567 - DNA, 15 bp, Homo sapiens
gaggacactgaggta

SEQ ID NO: 876568 - DNA, 15 bp, Homo sapiens
cgaggacactgaggt

SEQ ID NO: 876569 - DNA, 15 bp, Homo sapiens
acgaggacactgagg

SEQ ID NO: 876570 - DNA, 15 bp, Homo sapiens
gacgaggacactgag

SEQ ID NO: 876571 - DNA, 15 bp, Homo sapiens
agacgaggacactga

SEQ ID NO: 876572 - DNA, 15 bp, Homo sapiens
aagacgaggacactg

SEQ ID NO: 876573 - DNA, 15 bp, Homo sapiens
aaagacgaggacact

SEQ ID NO: 876574 - DNA, 15 bp, Homo sapiens
taaagacgaggacac

SEQ ID NO: 876575 - DNA, 15 bp, Homo sapiens
ttaaagacgaggaca

SEQ ID NO: 876576 - DNA, 15 bp, Homo sapiens
tttaaagacgaggac

SEQ ID NO: 876577 - DNA, 15 bp, Homo sapiens
ttttaaagacgagga

SEQ ID NO: 876578 - DNA, 15 bp, Homo sapiens
attttaaagacgagg

SEQ ID NO: 876579 - DNA, 15 bp, Homo sapiens
cattttaaagacgag

SEQ ID NO: 876580 - DNA, 15 bp, Homo sapiens
ccattttaaagacga

SEQ ID NO: 876581 - DNA, 15 bp, Homo sapiens
cccattttaaagacg

SEQ ID NO: 876582 - DNA, 15 bp, Homo sapiens
tcccattttaaagac

SEQ ID NO: 876583 - DNA, 15 bp, Homo sapiens
ttcccattttaaaga

SEQ ID NO: 876584 - DNA, 15 bp, Homo sapiens
gttcccattttaaag

SEQ ID NO: 876585 - DNA, 15 bp, Homo sapiens
tgttcccattttaaa

SEQ ID NO: 876586 - DNA, 15 bp, Homo sapiens
atgttcccattttaa

SEQ ID NO: 876587 - DNA, 15 bp, Homo sapiens
aatgttcccatttta

SEQ ID NO: 876588 - DNA, 15 bp, Homo sapiens
taatgttcccatttt

SEQ ID NO: 876589 - DNA, 15 bp, Homo sapiens
ttaatgttcccattt

SEQ ID NO: 876590 - DNA, 15 bp, Homo sapiens
attaatgttcccatt

SEQ ID NO: 876591 - DNA, 15 bp, Homo sapiens
tattaatgttcccat

SEQ ID NO: 876592 - DNA, 15 bp, Homo sapiens
ctattaatgttccca

SEQ ID NO: 876593 - DNA, 15 bp, Homo sapiens
actattaatgttccc

SEQ ID NO: 876594 - DNA, 15 bp, Homo sapiens
tactattaatgttcc

SEQ ID NO: 876595 - DNA, 15 bp, Homo sapiens
gtactattaatgttc

SEQ ID NO: 876596 - DNA, 15 bp, Homo sapiens
ggtactattaatgtt

SEQ ID NO: 876597 - DNA, 15 bp, Homo sapiens
gggtactattaatgt

SEQ ID NO: 876598 - DNA, 15 bp, Homo sapiens
ggggtactattaatg

SEQ ID NO: 876599 - DNA, 15 bp, Homo sapiens
gggggtactattaat

SEQ ID NO: 876600 - DNA, 15 bp, Homo sapiens
ggggggtactattaa

SEQ ID NO: 876601 - DNA, 15 bp, Homo sapiens
gggggggtactatta

SEQ ID NO: 876602 - DNA, 15 bp, Homo sapiens
ggggggggtactatt

SEQ ID NO: 876603 - DNA, 15 bp, Homo sapiens
gggggggggtactat

SEQ ID NO: 876604 - DNA, 15 bp, Homo sapiens
ggggggggggtacta

SEQ ID NO: 876605 - DNA, 15 bp, Homo sapiens
tggggggggggtact

SEQ ID NO: 876606 - DNA, 15 bp, Homo sapiens
gtggggggggggtac

SEQ ID NO: 876607 - DNA, 15 bp, Homo sapiens
tgtggggggggggta

SEQ ID NO: 876608 - DNA, 15 bp, Homo sapiens
ctgtggggggggggt

SEQ ID NO: 876609 - DNA, 15 bp, Homo sapiens
cctgtgggggggggg

SEQ ID NO: 876610 - DNA, 15 bp, Homo sapiens
acctgtggggggggg

SEQ ID NO: 876611 - DNA, 15 bp, Homo sapiens
tacctgtgggggggg

SEQ ID NO: 876612 - DNA, 15 bp, Homo sapiens
ttacctgtggggggg

SEQ ID NO: 876613 - DNA, 15 bp, Homo sapiens
tttacctgtgggggg

SEQ ID NO: 876614 - DNA, 15 bp, Homo sapiens
ttttacctgtggggg

SEQ ID NO: 876615 - DNA, 15 bp, Homo sapiens
attttacctgtgggg

SEQ ID NO: 876616 - DNA, 15 bp, Homo sapiens
tattttacctgtggg

SEQ ID NO: 876617 - DNA, 15 bp, Homo sapiens
atattttacctgtgg

SEQ ID NO: 876618 - DNA, 15 bp, Homo sapiens
aatattttacctgtg

SEQ ID NO: 876619 - DNA, 15 bp, Homo sapiens
aaatattttacctgt

SEQ ID NO: 876620 - DNA, 15 bp, Homo sapiens
taaatattttacctg

SEQ ID NO: 876621 - DNA, 15 bp, Homo sapiens
ctaaatattttacct

SEQ ID NO: 876622 - DNA, 15 bp, Homo sapiens
tctaaatattttacc

SEQ ID NO: 876623 - DNA, 15 bp, Homo sapiens
ttctaaatattttac

SEQ ID NO: 876624 - DNA, 15 bp, Homo sapiens
gttctaaatatttta

SEQ ID NO: 876625 - DNA, 15 bp, Homo sapiens
tgttctaaatatttt

SEQ ID NO: 876626 - DNA, 15 bp, Homo sapiens
gtgttctaaatattt

SEQ ID NO: 876627 - DNA, 15 bp, Homo sapiens
ggtgttctaaatatt

SEQ ID NO: 876628 - DNA, 15 bp, Homo sapiens
tggtgttctaaatat

SEQ ID NO: 876629 - DNA, 15 bp, Homo sapiens
atggtgttctaaata

SEQ ID NO: 876630 - DNA, 15 bp, Homo sapiens
aatggtgttctaaat

SEQ ID NO: 876631 - DNA, 15 bp, Homo sapiens
gaatggtgttctaaa

SEQ ID NO: 876632 - DNA, 15 bp, Homo sapiens
tgaatggtgttctaa

SEQ ID NO: 876633 - DNA, 15 bp, Homo sapiens
ctgaatggtgttcta

SEQ ID NO: 876634 - DNA, 15 bp, Homo sapiens
actgaatggtgttct

SEQ ID NO: 876635 - DNA, 15 bp, Homo sapiens
cactgaatggtgttc

SEQ ID NO: 876636 - DNA, 15 bp, Homo sapiens
acactgaatggtgtt

SEQ ID NO: 876637 - DNA, 15 bp, Homo sapiens
aacactgaatggtgt

SEQ ID NO: 876638 - DNA, 15 bp, Homo sapiens
taacactgaatggtg

SEQ ID NO: 876639 - DNA, 15 bp, Homo sapiens
ctaacactgaatggt

SEQ ID NO: 876640 - DNA, 15 bp, Homo sapiens
actaacactgaatgg

SEQ ID NO: 876641 - DNA, 15 bp, Homo sapiens
aactaacactgaatg

SEQ ID NO: 876642 - DNA, 15 bp, Homo sapiens
aaactaacactgaat

SEQ ID NO: 876643 - DNA, 15 bp, Homo sapiens
aaaactaacactgaa

SEQ ID NO: 876644 - DNA, 15 bp, Homo sapiens
taaaactaacactga

SEQ ID NO: 876645 - DNA, 15 bp, Homo sapiens
ataaaactaacactg

SEQ ID NO: 876646 - DNA, 15 bp, Homo sapiens
aataaaactaacact

SEQ ID NO: 876647 - DNA, 15 bp, Homo sapiens
caataaaactaacac

SEQ ID NO: 876648 - DNA, 15 bp, Homo sapiens
gcaataaaactaaca

SEQ ID NO: 876649 - DNA, 15 bp, Homo sapiens
agcaataaaactaac

SEQ ID NO: 876650 - DNA, 15 bp, Homo sapiens
tagcaataaaactaa

SEQ ID NO: 876651 - DNA, 15 bp, Homo sapiens
ttagcaataaaacta

SEQ ID NO: 876652 - DNA, 15 bp, Homo sapiens
gttagcaataaaact

SEQ ID NO: 876653 - DNA, 15 bp, Homo sapiens
tgttagcaataaaac

SEQ ID NO: 876654 - DNA, 15 bp, Homo sapiens
atgttagcaataaaa

SEQ ID NO: 876655 - DNA, 15 bp, Homo sapiens
catgttagcaataaa

SEQ ID NO: 876656 - DNA, 15 bp, Homo sapiens
ccatgttagcaataa

SEQ ID NO: 876657 - DNA, 15 bp, Homo sapiens
cccatgttagcaata

SEQ ID NO: 876658 - DNA, 15 bp, Homo sapiens
acccatgttagcaat

SEQ ID NO: 876659 - DNA, 15 bp, Homo sapiens
cacccatgttagcaa

SEQ ID NO: 876660 - DNA, 15 bp, Homo sapiens
ccacccatgttagca

SEQ ID NO: 876661 - DNA, 15 bp, Homo sapiens
accacccatgttagc

SEQ ID NO: 876662 - DNA, 15 bp, Homo sapiens
taccacccatgttag

SEQ ID NO: 876663 - DNA, 15 bp, Homo sapiens
ctaccacccatgtta

SEQ ID NO: 876664 - DNA, 15 bp, Homo sapiens
tctaccacccatgtt

SEQ ID NO: 876665 - DNA, 15 bp, Homo sapiens
ctctaccacccatgt

SEQ ID NO: 876666 - DNA, 15 bp, Homo sapiens
tctctaccacccatg

SEQ ID NO: 876667 - DNA, 15 bp, Homo sapiens
ctctctaccacccat

SEQ ID NO: 876668 - DNA, 15 bp, Homo sapiens
gctctctaccaccca

SEQ ID NO: 876669 - DNA, 15 bp, Homo sapiens
ggctctctaccaccc

SEQ ID NO: 876670 - DNA, 15 bp, Homo sapiens
aggctctctaccacc

SEQ ID NO: 876671 - DNA, 15 bp, Homo sapiens
taggctctctaccac

SEQ ID NO: 876672 - DNA, 15 bp, Homo sapiens
ctaggctctctacca

SEQ ID NO: 876673 - DNA, 15 bp, Homo sapiens
cctaggctctctacc

SEQ ID NO: 876674 - DNA, 15 bp, Homo sapiens
acctaggctctctac

SEQ ID NO: 876675 - DNA, 15 bp, Homo sapiens
aacctaggctctcta

SEQ ID NO: 876676 - DNA, 15 bp, Homo sapiens
gaacctaggctctct

SEQ ID NO: 876677 - DNA, 15 bp, Homo sapiens
ggaacctaggctctc

SEQ ID NO: 876678 - DNA, 15 bp, Homo sapiens
aggaacctaggctct

SEQ ID NO: 876679 - DNA, 15 bp, Homo sapiens
gaggaacctaggctc

SEQ ID NO: 876680 - DNA, 15 bp, Homo sapiens
tgaggaacctaggct

SEQ ID NO: 876681 - DNA, 15 bp, Homo sapiens
ctgaggaacctaggc

SEQ ID NO: 876682 - DNA, 15 bp, Homo sapiens
gctgaggaacctagg

SEQ ID NO: 876683 - DNA, 15 bp, Homo sapiens
agctgaggaacctag

SEQ ID NO: 876684 - DNA, 15 bp, Homo sapiens
gagctgaggaaccta

SEQ ID NO: 876685 - DNA, 15 bp, Homo sapiens
agagctgaggaacct

SEQ ID NO: 876686 - DNA, 15 bp, Homo sapiens
cagagctgaggaacc

SEQ ID NO: 876687 - DNA, 15 bp, Homo sapiens
gcagagctgaggaac

SEQ ID NO: 876688 - DNA, 15 bp, Homo sapiens
tgcagagctgaggaa

SEQ ID NO: 876689 - DNA, 15 bp, Homo sapiens
ctgcagagctgagga

SEQ ID NO: 876690 - DNA, 15 bp, Homo sapiens
tctgcagagctgagg

SEQ ID NO: 876691 - DNA, 15 bp, Homo sapiens
ttctgcagagctgag

SEQ ID NO: 876692 - DNA, 15 bp, Homo sapiens
tttctgcagagctga

SEQ ID NO: 876693 - DNA, 15 bp, Homo sapiens
gtttctgcagagctg

SEQ ID NO: 876694 - DNA, 15 bp, Homo sapiens
tgtttctgcagagct

SEQ ID NO: 876695 - DNA, 15 bp, Homo sapiens
ttgtttctgcagagc

SEQ ID NO: 876696 - DNA, 15 bp, Homo sapiens
cttgtttctgcagag

SEQ ID NO: 876697 - DNA, 15 bp, Homo sapiens
ccttgtttctgcaga

SEQ ID NO: 876698 - DNA, 15 bp, Homo sapiens
cccttgtttctgcag

SEQ ID NO: 876699 - DNA, 15 bp, Homo sapiens
acccttgtttctgca

SEQ ID NO: 876700 - DNA, 15 bp, Homo sapiens
gacccttgtttctgc

SEQ ID NO: 876701 - DNA, 15 bp, Homo sapiens
agacccttgtttctg

SEQ ID NO: 876702 - DNA, 15 bp, Homo sapiens
tagacccttgtttct

SEQ ID NO: 876703 - DNA, 15 bp, Homo sapiens
ttagacccttgtttc

SEQ ID NO: 876704 - DNA, 15 bp, Homo sapiens
tttagacccttgttt

SEQ ID NO: 876705 - DNA, 15 bp, Homo sapiens
atttagacccttgtt

SEQ ID NO: 876706 - DNA, 15 bp, Homo sapiens
catttagacccttgt

SEQ ID NO: 876707 - DNA, 15 bp, Homo sapiens
ccatttagacccttg

SEQ ID NO: 876708 - DNA, 15 bp, Homo sapiens
tccatttagaccctt

SEQ ID NO: 876709 - DNA, 15 bp, Homo sapiens
gtccatttagaccct

SEQ ID NO: 876710 - DNA, 15 bp, Homo sapiens
ggtccatttagaccc

SEQ ID NO: 876711 - DNA, 15 bp, Homo sapiens
aggtccatttagacc

SEQ ID NO: 876712 - DNA, 15 bp, Homo sapiens
aaggtccatttagac

SEQ ID NO: 876713 - DNA, 15 bp, Homo sapiens
aaaggtccatttaga

SEQ ID NO: 876714 - DNA, 15 bp, Homo sapiens
taaaggtccatttag

SEQ ID NO: 876715 - DNA, 15 bp, Homo sapiens
ataaaggtccattta

SEQ ID NO: 876716 - DNA, 15 bp, Homo sapiens
cataaaggtccattt

SEQ ID NO: 876717 - DNA, 15 bp, Homo sapiens
tcataaaggtccatt

SEQ ID NO: 876718 - DNA, 15 bp, Homo sapiens
ttcataaaggtccat

SEQ ID NO: 876719 - DNA, 15 bp, Homo sapiens
gttcataaaggtcca

SEQ ID NO: 876720 - DNA, 15 bp, Homo sapiens
agttcataaaggtcc

SEQ ID NO: 876721 - DNA, 15 bp, Homo sapiens
cagttcataaaggtc

SEQ ID NO: 876722 - DNA, 15 bp, Homo sapiens
gcagttcataaaggt

SEQ ID NO: 876723 - DNA, 15 bp, Homo sapiens
agcagttcataaagg

SEQ ID NO: 876724 - DNA, 15 bp, Homo sapiens
cagcagttcataaag

SEQ ID NO: 876725 - DNA, 15 bp, Homo sapiens
ccagcagttcataaa

SEQ ID NO: 876726 - DNA, 15 bp, Homo sapiens
tccagcagttcataa

SEQ ID NO: 876727 - DNA, 15 bp, Homo sapiens
ttccagcagttcata

SEQ ID NO: 876728 - DNA, 15 bp, Homo sapiens
attccagcagttcat

SEQ ID NO: 876729 - DNA, 15 bp, Homo sapiens
gattccagcagttca

SEQ ID NO: 876730 - DNA, 15 bp, Homo sapiens
tgattccagcagttc

SEQ ID NO: 876731 - DNA, 15 bp, Homo sapiens
ctgattccagcagtt

SEQ ID NO: 876732 - DNA, 15 bp, Homo sapiens
gctgattccagcagt

SEQ ID NO: 876733 - DNA, 15 bp, Homo sapiens
agctgattccagcag

SEQ ID NO: 876734 - DNA, 15 bp, Homo sapiens
gagctgattccagca

SEQ ID NO: 876735 - DNA, 15 bp, Homo sapiens
agagctgattccagc

SEQ ID NO: 876736 - DNA, 15 bp, Homo sapiens
gagagctgattccag

SEQ ID NO: 876737 - DNA, 15 bp, Homo sapiens
ggagagctgattcca

SEQ ID NO: 876738 - DNA, 15 bp, Homo sapiens
aggagagctgattcc

SEQ ID NO: 876739 - DNA, 15 bp, Homo sapiens
aaggagagctgattc

SEQ ID NO: 876740 - DNA, 15 bp, Homo sapiens
caaggagagctgatt

SEQ ID NO: 876741 - DNA, 15 bp, Homo sapiens
acaaggagagctgat

SEQ ID NO: 876742 - DNA, 15 bp, Homo sapiens
aacaaggagagctga

SEQ ID NO: 876743 - DNA, 15 bp, Homo sapiens
aaacaaggagagctg

SEQ ID NO: 876744 - DNA, 15 bp, Homo sapiens
aaaacaaggagagct

SEQ ID NO: 876745 - DNA, 15 bp, Homo sapiens
caaaacaaggagagc

SEQ ID NO: 876746 - DNA, 15 bp, Homo sapiens
gcaaaacaaggagag

SEQ ID NO: 876747 - DNA, 15 bp, Homo sapiens
agcaaaacaaggaga

SEQ ID NO: 876748 - DNA, 15 bp, Homo sapiens
cagcaaaacaaggag

SEQ ID NO: 876749 - DNA, 15 bp, Homo sapiens
ccagcaaaacaagga

SEQ ID NO: 876750 - DNA, 15 bp, Homo sapiens
tccagcaaaacaagg

SEQ ID NO: 876751 - DNA, 15 bp, Homo sapiens
ttccagcaaaacaag

SEQ ID NO: 876752 - DNA, 15 bp, Homo sapiens
attccagcaaaacaa

SEQ ID NO: 876753 - DNA, 15 bp, Homo sapiens
cattccagcaaaaca

SEQ ID NO: 876754 - DNA, 15 bp, Homo sapiens
gcattccagcaaaac

SEQ ID NO: 876755 - DNA, 15 bp, Homo sapiens
tgcattccagcaaaa

SEQ ID NO: 876756 - DNA, 15 bp, Homo sapiens
ctgcattccagcaaa

SEQ ID NO: 876757 - DNA, 15 bp, Homo sapiens
gctgcattccagcaa

SEQ ID NO: 876758 - DNA, 15 bp, Homo sapiens
agctgcattccagca

SEQ ID NO: 876759 - DNA, 15 bp, Homo sapiens
cagctgcattccagc

SEQ ID NO: 876760 - DNA, 15 bp, Homo sapiens
gcagctgcattccag

SEQ ID NO: 876761 - DNA, 15 bp, Homo sapiens
agcagctgcattcca

SEQ ID NO: 876762 - DNA, 15 bp, Homo sapiens
cagcagctgcattcc

SEQ ID NO: 876763 - DNA, 15 bp, Homo sapiens
gcagcagctgcattc

SEQ ID NO: 876764 - DNA, 15 bp, Homo sapiens
agcagcagctgcatt

SEQ ID NO: 876765 - DNA, 15 bp, Homo sapiens
gagcagcagctgcat

SEQ ID NO: 876766 - DNA, 15 bp, Homo sapiens
ggagcagcagctgca

SEQ ID NO: 876767 - DNA, 15 bp, Homo sapiens
aggagcagcagctgc

SEQ ID NO: 876768 - DNA, 15 bp, Homo sapiens
gaggagcagcagctg

SEQ ID NO: 876769 - DNA, 15 bp, Homo sapiens
ggaggagcagcagct

SEQ ID NO: 876770 - DNA, 15 bp, Homo sapiens
aggaggagcagcagc

SEQ ID NO: 876771 - DNA, 15 bp, Homo sapiens
caggaggagcagcag

SEQ ID NO: 876772 - DNA, 15 bp, Homo sapiens
tcaggaggagcagca

SEQ ID NO: 876773 - DNA, 15 bp, Homo sapiens
ctcaggaggagcagc

SEQ ID NO: 876774 - DNA, 15 bp, Homo sapiens
cctcaggaggagcag

SEQ ID NO: 876775 - DNA, 15 bp, Homo sapiens
gcctcaggaggagca

SEQ ID NO: 876776 - DNA, 15 bp, Homo sapiens
agcctcaggaggagc

SEQ ID NO: 876777 - DNA, 15 bp, Homo sapiens
gagcctcaggaggag

SEQ ID NO: 876778 - DNA, 15 bp, Homo sapiens
ggagcctcaggagga

SEQ ID NO: 876779 - DNA, 15 bp, Homo sapiens
aggagcctcaggagg

SEQ ID NO: 876780 - DNA, 15 bp, Homo sapiens
caggagcctcaggag

SEQ ID NO: 876781 - DNA, 15 bp, Homo sapiens
acaggagcctcagga

SEQ ID NO: 876782 - DNA, 15 bp, Homo sapiens
aacaggagcctcagg

SEQ ID NO: 876783 - DNA, 15 bp, Homo sapiens
aaacaggagcctcag

SEQ ID NO: 876784 - DNA, 15 bp, Homo sapiens
taaacaggagcctca

SEQ ID NO: 876785 - DNA, 15 bp, Homo sapiens
ctaaacaggagcctc

SEQ ID NO: 876786 - DNA, 15 bp, Homo sapiens
tctaaacaggagcct

SEQ ID NO: 876787 - DNA, 15 bp, Homo sapiens
atctaaacaggagcc

SEQ ID NO: 876788 - DNA, 15 bp, Homo sapiens
gatctaaacaggagc

SEQ ID NO: 876789 - DNA, 15 bp, Homo sapiens
tgatctaaacaggag

SEQ ID NO: 876790 - DNA, 15 bp, Homo sapiens
gtgatctaaacagga

SEQ ID NO: 876791 - DNA, 15 bp, Homo sapiens
cgtgatctaaacagg

SEQ ID NO: 876792 - DNA, 15 bp, Homo sapiens
ccgtgatctaaacag

SEQ ID NO: 876793 - DNA, 15 bp, Homo sapiens
tccgtgatctaaaca

SEQ ID NO: 876794 - DNA, 15 bp, Homo sapiens
ctccgtgatctaaac

SEQ ID NO: 876795 - DNA, 15 bp, Homo sapiens
cctccgtgatctaaa

SEQ ID NO: 876796 - DNA, 15 bp, Homo sapiens
ccctccgtgatctaa

SEQ ID NO: 876797 - DNA, 15 bp, Homo sapiens
tccctccgtgatcta

SEQ ID NO: 876798 - DNA, 15 bp, Homo sapiens
ttccctccgtgatct

SEQ ID NO: 876799 - DNA, 15 bp, Homo sapiens
attccctccgtgatc

SEQ ID NO: 876800 - DNA, 15 bp, Homo sapiens
aattccctccgtgat

SEQ ID NO: 876801 - DNA, 15 bp, Homo sapiens
aaattccctccgtga

SEQ ID NO: 876802 - DNA, 15 bp, Homo sapiens
gaaattccctccgtg

SEQ ID NO: 876803 - DNA, 15 bp, Homo sapiens
ggaaattccctccgt

SEQ ID NO: 876804 - DNA, 15 bp, Homo sapiens
gggaaattccctccg

SEQ ID NO: 876805 - DNA, 15 bp, Homo sapiens
ggggaaattccctcc

SEQ ID NO: 876806 - DNA, 15 bp, Homo sapiens
tggggaaattccctc

SEQ ID NO: 876807 - DNA, 15 bp, Homo sapiens
ctggggaaattccct

SEQ ID NO: 876808 - DNA, 15 bp, Homo sapiens
tctggggaaattccc

SEQ ID NO: 876809 - DNA, 15 bp, Homo sapiens
atctggggaaattcc

SEQ ID NO: 876810 - DNA, 15 bp, Homo sapiens
aatctggggaaattc

SEQ ID NO: 876811 - DNA, 15 bp, Homo sapiens
caatctggggaaatt

SEQ ID NO: 876812 - DNA, 15 bp, Homo sapiens
ccaatctggggaaat

SEQ ID NO: 876813 - DNA, 15 bp, Homo sapiens
gccaatctggggaaa

SEQ ID NO: 876814 - DNA, 15 bp, Homo sapiens
ggccaatctggggaa

SEQ ID NO: 876815 - DNA, 15 bp, Homo sapiens
tggccaatctgggga

SEQ ID NO: 876816 - DNA, 15 bp, Homo sapiens
gtggccaatctgggg

SEQ ID NO: 876817 - DNA, 15 bp, Homo sapiens
agtggccaatctggg

SEQ ID NO: 876818 - DNA, 15 bp, Homo sapiens
tagtggccaatctgg

SEQ ID NO: 876819 - DNA, 15 bp, Homo sapiens
ctagtggccaatctg

SEQ ID NO: 876820 - DNA, 15 bp, Homo sapiens
tctagtggccaatct

SEQ ID NO: 876821 - DNA, 15 bp, Homo sapiens
atctagtggccaatc

SEQ ID NO: 876822 - DNA, 15 bp, Homo sapiens
tatctagtggccaat

SEQ ID NO: 876823 - DNA, 15 bp, Homo sapiens
ctatctagtggccaa

SEQ ID NO: 876824 - DNA, 15 bp, Homo sapiens
gctatctagtggcca

SEQ ID NO: 876825 - DNA, 15 bp, Homo sapiens
tgctatctagtggcc

SEQ ID NO: 876826 - DNA, 15 bp, Homo sapiens
gtgctatctagtggc

SEQ ID NO: 876827 - DNA, 15 bp, Homo sapiens
tgtgctatctagtgg

SEQ ID NO: 876828 - DNA, 15 bp, Homo sapiens
gtgtgctatctagtg

SEQ ID NO: 876829 - DNA, 15 bp, Homo sapiens
tgtgtgctatctagt

SEQ ID NO: 876830 - DNA, 15 bp, Homo sapiens
atgtgtgctatctag

SEQ ID NO: 876831 - DNA, 15 bp, Homo sapiens
catgtgtgctatcta

SEQ ID NO: 876832 - DNA, 15 bp, Homo sapiens
gcatgtgtgctatct

SEQ ID NO: 876833 - DNA, 15 bp, Homo sapiens
agcatgtgtgctatc

SEQ ID NO: 876834 - DNA, 15 bp, Homo sapiens
gagcatgtgtgctat

SEQ ID NO: 876835 - DNA, 15 bp, Homo sapiens
agagcatgtgtgcta

SEQ ID NO: 876836 - DNA, 15 bp, Homo sapiens
aagagcatgtgtgct

SEQ ID NO: 876837 - DNA, 15 bp, Homo sapiens
aaagagcatgtgtgc

SEQ ID NO: 876838 - DNA, 15 bp, Homo sapiens
gaaagagcatgtgtg

SEQ ID NO: 876839 - DNA, 15 bp, Homo sapiens
ggaaagagcatgtgt

SEQ ID NO: 876840 - DNA, 15 bp, Homo sapiens
aggaaagagcatgtg

SEQ ID NO: 876841 - DNA, 15 bp, Homo sapiens
caggaaagagcatgt

SEQ ID NO: 876842 - DNA, 15 bp, Homo sapiens
gcaggaaagagcatg

SEQ ID NO: 876843 - DNA, 15 bp, Homo sapiens
ggcaggaaagagcat

SEQ ID NO: 876844 - DNA, 15 bp, Homo sapiens
gggcaggaaagagca

SEQ ID NO: 876845 - DNA, 15 bp, Homo sapiens
ggggcaggaaagagc

SEQ ID NO: 876846 - DNA, 15 bp, Homo sapiens
tggggcaggaaagag

SEQ ID NO: 876847 - DNA, 15 bp, Homo sapiens
atggggcaggaaaga

SEQ ID NO: 876848 - DNA, 15 bp, Homo sapiens
gatggggcaggaaag

SEQ ID NO: 876849 - DNA, 15 bp, Homo sapiens
agatggggcaggaaa

SEQ ID NO: 876850 - DNA, 15 bp, Homo sapiens
tagatggggcaggaa

SEQ ID NO: 876851 - DNA, 15 bp, Homo sapiens
ttagatggggcagga

SEQ ID NO: 876852 - DNA, 15 bp, Homo sapiens
cttagatggggcagg

SEQ ID NO: 876853 - DNA, 15 bp, Homo sapiens
gcttagatggggcag

SEQ ID NO: 876854 - DNA, 15 bp, Homo sapiens
tgcttagatggggca

SEQ ID NO: 876855 - DNA, 15 bp, Homo sapiens
ctgcttagatggggc

SEQ ID NO: 876856 - DNA, 15 bp, Homo sapiens
cctgcttagatgggg

SEQ ID NO: 876857 - DNA, 15 bp, Homo sapiens
acctgcttagatggg

SEQ ID NO: 876858 - DNA, 15 bp, Homo sapiens
gacctgcttagatgg

SEQ ID NO: 876859 - DNA, 15 bp, Homo sapiens
tgacctgcttagatg

SEQ ID NO: 876860 - DNA, 15 bp, Homo sapiens
ctgacctgcttagat

SEQ ID NO: 876861 - DNA, 15 bp, Homo sapiens
tctgacctgcttaga

SEQ ID NO: 876862 - DNA, 15 bp, Homo sapiens
ttctgacctgcttag

SEQ ID NO: 876863 - DNA, 15 bp, Homo sapiens
attctgacctgctta

SEQ ID NO: 876864 - DNA, 15 bp, Homo sapiens
gattctgacctgctt

SEQ ID NO: 876865 - DNA, 15 bp, Homo sapiens
tgattctgacctgct

SEQ ID NO: 876866 - DNA, 15 bp, Homo sapiens
atgattctgacctgc

SEQ ID NO: 876867 - DNA, 15 bp, Homo sapiens
catgattctgacctg

SEQ ID NO: 876868 - DNA, 15 bp, Homo sapiens
tcatgattctgacct

SEQ ID NO: 876869 - DNA, 15 bp, Homo sapiens
ttcatgattctgacc

SEQ ID NO: 876870 - DNA, 15 bp, Homo sapiens
attcatgattctgac

SEQ ID NO: 876871 - DNA, 15 bp, Homo sapiens
gattcatgattctga

SEQ ID NO: 876872 - DNA, 15 bp, Homo sapiens
tgattcatgattctg

SEQ ID NO: 876873 - DNA, 15 bp, Homo sapiens
atgattcatgattct

SEQ ID NO: 876874 - DNA, 15 bp, Homo sapiens
catgattcatgattc

SEQ ID NO: 876875 - DNA, 15 bp, Homo sapiens
ccatgattcatgatt

SEQ ID NO: 876876 - DNA, 15 bp, Homo sapiens
cccatgattcatgat

SEQ ID NO: 876877 - DNA, 15 bp, Homo sapiens
acccatgattcatga

SEQ ID NO: 876878 - DNA, 15 bp, Homo sapiens
cacccatgattcatg

SEQ ID NO: 876879 - DNA, 15 bp, Homo sapiens
acacccatgattcat

SEQ ID NO: 876880 - DNA, 15 bp, Homo sapiens
gacacccatgattca

SEQ ID NO: 876881 - DNA, 15 bp, Homo sapiens
tgacacccatgattc

SEQ ID NO: 876882 - DNA, 15 bp, Homo sapiens
ctgacacccatgatt

SEQ ID NO: 876883 - DNA, 15 bp, Homo sapiens
tctgacacccatgat

SEQ ID NO: 876884 - DNA, 15 bp, Homo sapiens
atctgacacccatga

SEQ ID NO: 876885 - DNA, 15 bp, Homo sapiens
aatctgacacccatg

SEQ ID NO: 876886 - DNA, 15 bp, Homo sapiens
caatctgacacccat

SEQ ID NO: 876887 - DNA, 15 bp, Homo sapiens
tcaatctgacaccca

SEQ ID NO: 876888 - DNA, 15 bp, Homo sapiens
ttcaatctgacaccc

SEQ ID NO: 876889 - DNA, 15 bp, Homo sapiens
tttcaatctgacacc

SEQ ID NO: 876890 - DNA, 15 bp, Homo sapiens
ctttcaatctgacac

SEQ ID NO: 876891 - DNA, 15 bp, Homo sapiens
actttcaatctgaca

SEQ ID NO: 876892 - DNA, 15 bp, Homo sapiens
gactttcaatctgac

SEQ ID NO: 876893 - DNA, 15 bp, Homo sapiens
tgactttcaatctga

SEQ ID NO: 876894 - DNA, 15 bp, Homo sapiens
gtgactttcaatctg

SEQ ID NO: 876895 - DNA, 15 bp, Homo sapiens
cgtgactttcaatct

SEQ ID NO: 876896 - DNA, 15 bp, Homo sapiens
acgtgactttcaatc

SEQ ID NO: 876897 - DNA, 15 bp, Homo sapiens
aacgtgactttcaat

SEQ ID NO: 876898 - DNA, 15 bp, Homo sapiens
aaacgtgactttcaa

SEQ ID NO: 876899 - DNA, 15 bp, Homo sapiens
aaaacgtgactttca

SEQ ID NO: 876900 - DNA, 15 bp, Homo sapiens
taaaacgtgactttc

SEQ ID NO: 876901 - DNA, 15 bp, Homo sapiens
ataaaacgtgacttt

SEQ ID NO: 876902 - DNA, 15 bp, Homo sapiens
cataaaacgtgactt

SEQ ID NO: 876903 - DNA, 15 bp, Homo sapiens
acataaaacgtgact

SEQ ID NO: 876904 - DNA, 15 bp, Homo sapiens
tacataaaacgtgac

SEQ ID NO: 876905 - DNA, 15 bp, Homo sapiens
gtacataaaacgtga

SEQ ID NO: 876906 - DNA, 15 bp, Homo sapiens
ggtacataaaacgtg

SEQ ID NO: 876907 - DNA, 15 bp, Homo sapiens
tggtacataaaacgt

SEQ ID NO: 876908 - DNA, 15 bp, Homo sapiens
ctggtacataaaacg

SEQ ID NO: 876909 - DNA, 15 bp, Homo sapiens
tctggtacataaaac

SEQ ID NO: 876910 - DNA, 15 bp, Homo sapiens
gtctggtacataaaa

SEQ ID NO: 876911 - DNA, 15 bp, Homo sapiens
cgtctggtacataaa

SEQ ID NO: 876912 - DNA, 15 bp, Homo sapiens
gcgtctggtacataa

SEQ ID NO: 876913 - DNA, 15 bp, Homo sapiens
agcgtctggtacata

SEQ ID NO: 876914 - DNA, 15 bp, Homo sapiens
cagcgtctggtacat

SEQ ID NO: 876915 - DNA, 15 bp, Homo sapiens
tcagcgtctggtaca

SEQ ID NO: 876916 - DNA, 15 bp, Homo sapiens
ctcagcgtctggtac

SEQ ID NO: 876917 - DNA, 15 bp, Homo sapiens
gctcagcgtctggta

SEQ ID NO: 876918 - DNA, 15 bp, Homo sapiens
cgctcagcgtctggt

SEQ ID NO: 876919 - DNA, 15 bp, Homo sapiens
ccgctcagcgtctgg

SEQ ID NO: 876920 - DNA, 15 bp, Homo sapiens
gccgctcagcgtctg

SEQ ID NO: 876921 - DNA, 15 bp, Homo sapiens
cgccgctcagcgtct

SEQ ID NO: 876922 - DNA, 15 bp, Homo sapiens
gcgccgctcagcgtc

SEQ ID NO: 876923 - DNA, 15 bp, Homo sapiens
ggcgccgctcagcgt

SEQ ID NO: 876924 - DNA, 15 bp, Homo sapiens
gggcgccgctcagcg

SEQ ID NO: 876925 - DNA, 15 bp, Homo sapiens
agggcgccgctcagc

SEQ ID NO: 876926 - DNA, 15 bp, Homo sapiens
aagggcgccgctcag

SEQ ID NO: 876927 - DNA, 15 bp, Homo sapiens
aaagggcgccgctca

SEQ ID NO: 876928 - DNA, 15 bp, Homo sapiens
caaagggcgccgctc

SEQ ID NO: 876929 - DNA, 15 bp, Homo sapiens
gcaaagggcgccgct

SEQ ID NO: 876930 - DNA, 15 bp, Homo sapiens
agcaaagggcgccgc

SEQ ID NO: 876931 - DNA, 15 bp, Homo sapiens
aagcaaagggcgccg

SEQ ID NO: 876932 - DNA, 15 bp, Homo sapiens
caagcaaagggcgcc

SEQ ID NO: 876933 - DNA, 15 bp, Homo sapiens
acaagcaaagggcgc

SEQ ID NO: 876934 - DNA, 15 bp, Homo sapiens
aacaagcaaagggcg

SEQ ID NO: 876935 - DNA, 15 bp, Homo sapiens
aaacaagcaaagggc

SEQ ID NO: 876936 - DNA, 15 bp, Homo sapiens
gaaacaagcaaaggg

SEQ ID NO: 876937 - DNA, 15 bp, Homo sapiens
agaaacaagcaaagg

SEQ ID NO: 876938 - DNA, 15 bp, Homo sapiens
gagaaacaagcaaag

SEQ ID NO: 876939 - DNA, 15 bp, Homo sapiens
tgagaaacaagcaaa

SEQ ID NO: 876940 - DNA, 15 bp, Homo sapiens
atgagaaacaagcaa

SEQ ID NO: 876941 - DNA, 15 bp, Homo sapiens
gatgagaaacaagca

SEQ ID NO: 876942 - DNA, 15 bp, Homo sapiens
tgatgagaaacaagc

SEQ ID NO: 876943 - DNA, 15 bp, Homo sapiens
gtgatgagaaacaag

SEQ ID NO: 876944 - DNA, 15 bp, Homo sapiens
agtgatgagaaacaa

SEQ ID NO: 876945 - DNA, 15 bp, Homo sapiens
cagtgatgagaaaca

SEQ ID NO: 876946 - DNA, 15 bp, Homo sapiens
gcagtgatgagaaac

SEQ ID NO: 876947 - DNA, 15 bp, Homo sapiens
ggcagtgatgagaaa

SEQ ID NO: 876948 - DNA, 15 bp, Homo sapiens
gggcagtgatgagaa

SEQ ID NO: 876949 - DNA, 15 bp, Homo sapiens
tgggcagtgatgaga

SEQ ID NO: 876950 - DNA, 15 bp, Homo sapiens
gtgggcagtgatgag

SEQ ID NO: 876951 - DNA, 15 bp, Homo sapiens
tgtgggcagtgatga

SEQ ID NO: 876952 - DNA, 15 bp, Homo sapiens
ctgtgggcagtgatg

SEQ ID NO: 876953 - DNA, 15 bp, Homo sapiens
gctgtgggcagtgat

SEQ ID NO: 876954 - DNA, 15 bp, Homo sapiens
tgctgtgggcagtga

SEQ ID NO: 876955 - DNA, 15 bp, Homo sapiens
ttgctgtgggcagtg

SEQ ID NO: 876956 - DNA, 15 bp, Homo sapiens
attgctgtgggcagt

SEQ ID NO: 876957 - DNA, 15 bp, Homo sapiens
gattgctgtgggcag

SEQ ID NO: 876958 - DNA, 15 bp, Homo sapiens
ggattgctgtgggca

SEQ ID NO: 876959 - DNA, 15 bp, Homo sapiens
aggattgctgtgggc

SEQ ID NO: 876960 - DNA, 15 bp, Homo sapiens
gaggattgctgtggg

SEQ ID NO: 876961 - DNA, 15 bp, Homo sapiens
tgaggattgctgtgg

SEQ ID NO: 876962 - DNA, 15 bp, Homo sapiens
ctgaggattgctgtg

SEQ ID NO: 876963 - DNA, 15 bp, Homo sapiens
tctgaggattgctgt

SEQ ID NO: 876964 - DNA, 15 bp, Homo sapiens
atctgaggattgctg

SEQ ID NO: 876965 - DNA, 15 bp, Homo sapiens
aatctgaggattgct

SEQ ID NO: 876966 - DNA, 15 bp, Homo sapiens
gaatctgaggattgc

SEQ ID NO: 876967 - DNA, 15 bp, Homo sapiens
tgaatctgaggattg

SEQ ID NO: 876968 - DNA, 15 bp, Homo sapiens
ttgaatctgaggatt

SEQ ID NO: 876969 - DNA, 15 bp, Homo sapiens
cttgaatctgaggat

SEQ ID NO: 876970 - DNA, 15 bp, Homo sapiens
acttgaatctgagga

SEQ ID NO: 876971 - DNA, 15 bp, Homo sapiens
tacttgaatctgagg

SEQ ID NO: 876972 - DNA, 15 bp, Homo sapiens
ctacttgaatctgag

SEQ ID NO: 876973 - DNA, 15 bp, Homo sapiens
gctacttgaatctga

SEQ ID NO: 876974 - DNA, 15 bp, Homo sapiens
agctacttgaatctg

SEQ ID NO: 876975 - DNA, 15 bp, Homo sapiens
tagctacttgaatct

SEQ ID NO: 876976 - DNA, 15 bp, Homo sapiens
gtagctacttgaatc

SEQ ID NO: 876977 - DNA, 15 bp, Homo sapiens
agtagctacttgaat

SEQ ID NO: 876978 - DNA, 15 bp, Homo sapiens
gagtagctacttgaa

SEQ ID NO: 876979 - DNA, 15 bp, Homo sapiens
ggagtagctacttga

SEQ ID NO: 876980 - DNA, 15 bp, Homo sapiens
tggagtagctacttg

SEQ ID NO: 876981 - DNA, 15 bp, Homo sapiens
gtggagtagctactt

SEQ ID NO: 876982 - DNA, 15 bp, Homo sapiens
ggtggagtagctact

SEQ ID NO: 876983 - DNA, 15 bp, Homo sapiens
tggtggagtagctac

SEQ ID NO: 876984 - DNA, 15 bp, Homo sapiens
ctggtggagtagcta

SEQ ID NO: 876985 - DNA, 15 bp, Homo sapiens
tctggtggagtagct

SEQ ID NO: 876986 - DNA, 15 bp, Homo sapiens
ttctggtggagtagc

SEQ ID NO: 876987 - DNA, 15 bp, Homo sapiens
tttctggtggagtag

SEQ ID NO: 876988 - DNA, 15 bp, Homo sapiens
atttctggtggagta

SEQ ID NO: 876989 - DNA, 15 bp, Homo sapiens
catttctggtggagt

SEQ ID NO: 876990 - DNA, 15 bp, Homo sapiens
gcatttctggtggag

SEQ ID NO: 876991 - DNA, 15 bp, Homo sapiens
agcatttctggtgga

SEQ ID NO: 876992 - DNA, 15 bp, Homo sapiens
gagcatttctggtgg

SEQ ID NO: 876993 - DNA, 15 bp, Homo sapiens
ggagcatttctggtg

SEQ ID NO: 876994 - DNA, 15 bp, Homo sapiens
tggagcatttctggt

SEQ ID NO: 876995 - DNA, 15 bp, Homo sapiens
gtggagcatttctgg

SEQ ID NO: 876996 - DNA, 15 bp, Homo sapiens
ggtggagcatttctg

SEQ ID NO: 876997 - DNA, 15 bp, Homo sapiens
tggtggagcatttct

SEQ ID NO: 876998 - DNA, 15 bp, Homo sapiens
ctggtggagcatttc

SEQ ID NO: 876999 - DNA, 15 bp, Homo sapiens
tctggtggagcattt

SEQ ID NO: 877000 - DNA, 15 bp, Homo sapiens
ttctggtggagcatt

SEQ ID NO: 877001 - DNA, 15 bp, Homo sapiens
cttctggtggagcat

SEQ ID NO: 877002 - DNA, 15 bp, Homo sapiens
acttctggtggagca

SEQ ID NO: 877003 - DNA, 15 bp, Homo sapiens
cacttctggtggagc

SEQ ID NO: 877004 - DNA, 15 bp, Homo sapiens
gcacttctggtggag

SEQ ID NO: 877005 - DNA, 15 bp, Homo sapiens
ggcacttctggtgga

SEQ ID NO: 877006 - DNA, 15 bp, Homo sapiens
aggcacttctggtgg

SEQ ID NO: 877007 - DNA, 15 bp, Homo sapiens
caggcacttctggtg

SEQ ID NO: 877008 - DNA, 15 bp, Homo sapiens
ccaggcacttctggt

SEQ ID NO: 877009 - DNA, 15 bp, Homo sapiens
gccaggcacttctgg

SEQ ID NO: 877010 - DNA, 15 bp, Homo sapiens
tgccaggcacttctg

SEQ ID NO: 877011 - DNA, 15 bp, Homo sapiens
gtgccaggcacttct

SEQ ID NO: 877012 - DNA, 15 bp, Homo sapiens
cgtgccaggcacttc

SEQ ID NO: 877013 - DNA, 15 bp, Homo sapiens
acgtgccaggcactt

SEQ ID NO: 877014 - DNA, 15 bp, Homo sapiens
tacgtgccaggcact

SEQ ID NO: 877015 - DNA, 15 bp, Homo sapiens
ctacgtgccaggcac

SEQ ID NO: 877016 - DNA, 15 bp, Homo sapiens
cctacgtgccaggca

SEQ ID NO: 877017 - DNA, 15 bp, Homo sapiens
tcctacgtgccaggc

SEQ ID NO: 877018 - DNA, 15 bp, Homo sapiens
ttcctacgtgccagg

SEQ ID NO: 877019 - DNA, 15 bp, Homo sapiens
cttcctacgtgccag

SEQ ID NO: 877020 - DNA, 15 bp, Homo sapiens
ccttcctacgtgcca

SEQ ID NO: 877021 - DNA, 15 bp, Homo sapiens
gccttcctacgtgcc

SEQ ID NO: 877022 - DNA, 15 bp, Homo sapiens
agccttcctacgtgc

SEQ ID NO: 877023 - DNA, 15 bp, Homo sapiens
aagccttcctacgtg

SEQ ID NO: 877024 - DNA, 15 bp, Homo sapiens
gaagccttcctacgt

SEQ ID NO: 877025 - DNA, 15 bp, Homo sapiens
tgaagccttcctacg

SEQ ID NO: 877026 - DNA, 15 bp, Homo sapiens
ttgaagccttcctac

SEQ ID NO: 877027 - DNA, 15 bp, Homo sapiens
tttgaagccttccta

SEQ ID NO: 877028 - DNA, 15 bp, Homo sapiens
ttttgaagccttcct

SEQ ID NO: 877029 - DNA, 15 bp, Homo sapiens
tttttgaagccttcc

SEQ ID NO: 877030 - DNA, 15 bp, Homo sapiens
gtttttgaagccttc

SEQ ID NO: 877031 - DNA, 15 bp, Homo sapiens
tgtttttgaagcctt

SEQ ID NO: 877032 - DNA, 15 bp, Homo sapiens
gtgtttttgaagcct

SEQ ID NO: 877033 - DNA, 15 bp, Homo sapiens
cgtgtttttgaagcc

SEQ ID NO: 877034 - DNA, 15 bp, Homo sapiens
acgtgtttttgaagc

SEQ ID NO: 877035 - DNA, 15 bp, Homo sapiens
aacgtgtttttgaag

SEQ ID NO: 877036 - DNA, 15 bp, Homo sapiens
aaacgtgtttttgaa

SEQ ID NO: 877037 - DNA, 15 bp, Homo sapiens
caaacgtgtttttga

SEQ ID NO: 877038 - DNA, 15 bp, Homo sapiens
gcaaacgtgtttttg

SEQ ID NO: 877039 - DNA, 15 bp, Homo sapiens
agcaaacgtgttttt

SEQ ID NO: 877040 - DNA, 15 bp, Homo sapiens
cagcaaacgtgtttt

SEQ ID NO: 877041 - DNA, 15 bp, Homo sapiens
acagcaaacgtgttt

SEQ ID NO: 877042 - DNA, 15 bp, Homo sapiens
aacagcaaacgtgtt

SEQ ID NO: 877043 - DNA, 15 bp, Homo sapiens
gaacagcaaacgtgt

SEQ ID NO: 877044 - DNA, 15 bp, Homo sapiens
agaacagcaaacgtg

SEQ ID NO: 877045 - DNA, 15 bp, Homo sapiens
aagaacagcaaacgt

SEQ ID NO: 877046 - DNA, 15 bp, Homo sapiens
gaagaacagcaaacg

SEQ ID NO: 877047 - DNA, 15 bp, Homo sapiens
ggaagaacagcaaac

SEQ ID NO: 877048 - DNA, 15 bp, Homo sapiens
aggaagaacagcaaa

SEQ ID NO: 877049 - DNA, 15 bp, Homo sapiens
taggaagaacagcaa

SEQ ID NO: 877050 - DNA, 15 bp, Homo sapiens
ataggaagaacagca

SEQ ID NO: 877051 - DNA, 15 bp, Homo sapiens
tataggaagaacagc

SEQ ID NO: 877052 - DNA, 15 bp, Homo sapiens
ctataggaagaacag

SEQ ID NO: 877053 - DNA, 15 bp, Homo sapiens
actataggaagaaca

SEQ ID NO: 877054 - DNA, 15 bp, Homo sapiens
aactataggaagaac

SEQ ID NO: 877055 - DNA, 15 bp, Homo sapiens
caactataggaagaa

SEQ ID NO: 877056 - DNA, 15 bp, Homo sapiens
acaactataggaaga

SEQ ID NO: 877057 - DNA, 15 bp, Homo sapiens
cacaactataggaag

SEQ ID NO: 877058 - DNA, 15 bp, Homo sapiens
acacaactataggaa

SEQ ID NO: 877059 - DNA, 15 bp, Homo sapiens
tacacaactatagga

SEQ ID NO: 877060 - DNA, 15 bp, Homo sapiens
atacacaactatagg

SEQ ID NO: 877061 - DNA, 15 bp, Homo sapiens
gatacacaactatag

SEQ ID NO: 877062 - DNA, 15 bp, Homo sapiens
ggatacacaactata

SEQ ID NO: 877063 - DNA, 15 bp, Homo sapiens
gggatacacaactat

SEQ ID NO: 877064 - DNA, 15 bp, Homo sapiens
tgggatacacaacta

SEQ ID NO: 877065 - DNA, 15 bp, Homo sapiens
ctgggatacacaact

SEQ ID NO: 877066 - DNA, 15 bp, Homo sapiens
actgggatacacaac

SEQ ID NO: 877067 - DNA, 15 bp, Homo sapiens
aactgggatacacaa

SEQ ID NO: 877068 - DNA, 15 bp, Homo sapiens
caactgggatacaca

SEQ ID NO: 877069 - DNA, 15 bp, Homo sapiens
acaactgggatacac

SEQ ID NO: 877070 - DNA, 15 bp, Homo sapiens
aacaactgggataca

SEQ ID NO: 877071 - DNA, 15 bp, Homo sapiens
aaacaactgggatac

SEQ ID NO: 877072 - DNA, 15 bp, Homo sapiens
taaacaactgggata

SEQ ID NO: 877073 - DNA, 15 bp, Homo sapiens
ataaacaactgggat

SEQ ID NO: 877074 - DNA, 15 bp, Homo sapiens
aataaacaactggga

SEQ ID NO: 877075 - DNA, 15 bp, Homo sapiens
gaataaacaactggg

SEQ ID NO: 877076 - DNA, 15 bp, Homo sapiens
ggaataaacaactgg

SEQ ID NO: 877077 - DNA, 15 bp, Homo sapiens
aggaataaacaactg

SEQ ID NO: 877078 - DNA, 15 bp, Homo sapiens
gaggaataaacaact

SEQ ID NO: 877079 - DNA, 15 bp, Homo sapiens
ggaggaataaacaac

SEQ ID NO: 877080 - DNA, 15 bp, Homo sapiens
aggaggaataaacaa

SEQ ID NO: 877081 - DNA, 15 bp, Homo sapiens
gaggaggaataaaca

SEQ ID NO: 877082 - DNA, 15 bp, Homo sapiens
ggaggaggaataaac

SEQ ID NO: 877083 - DNA, 15 bp, Homo sapiens
aggaggaggaataaa

SEQ ID NO: 877084 - DNA, 15 bp, Homo sapiens
gaggaggaggaataa

SEQ ID NO: 877085 - DNA, 15 bp, Homo sapiens
ggaggaggaggaata

SEQ ID NO: 877086 - DNA, 15 bp, Homo sapiens
gggaggaggaggaat

SEQ ID NO: 877087 - DNA, 15 bp, Homo sapiens
cgggaggaggaggaa

SEQ ID NO: 877088 - DNA, 15 bp, Homo sapiens
ccgggaggaggagga

SEQ ID NO: 877089 - DNA, 15 bp, Homo sapiens
tccgggaggaggagg

SEQ ID NO: 877090 - DNA, 15 bp, Homo sapiens
ctccgggaggaggag

SEQ ID NO: 877091 - DNA, 15 bp, Homo sapiens
cctccgggaggagga

SEQ ID NO: 877092 - DNA, 15 bp, Homo sapiens
tcctccgggaggagg

SEQ ID NO: 877093 - DNA, 15 bp, Homo sapiens
ctcctccgggaggag

SEQ ID NO: 877094 - DNA, 15 bp, Homo sapiens
cctcctccgggagga

SEQ ID NO: 877095 - DNA, 15 bp, Homo sapiens
tcctcctccgggagg

SEQ ID NO: 877096 - DNA, 15 bp, Homo sapiens
ttcctcctccgggag

SEQ ID NO: 877097 - DNA, 15 bp, Homo sapiens
gttcctcctccggga

SEQ ID NO: 877098 - DNA, 15 bp, Homo sapiens
agttcctcctccggg

SEQ ID NO: 877099 - DNA, 15 bp, Homo sapiens
cagttcctcctccgg

SEQ ID NO: 877100 - DNA, 15 bp, Homo sapiens
tcagttcctcctccg

SEQ ID NO: 877101 - DNA, 15 bp, Homo sapiens
ctcagttcctcctcc

SEQ ID NO: 877102 - DNA, 15 bp, Homo sapiens
tctcagttcctcctc

SEQ ID NO: 877103 - DNA, 15 bp, Homo sapiens
gtctcagttcctcct

SEQ ID NO: 877104 - DNA, 15 bp, Homo sapiens
tgtctcagttcctcc

SEQ ID NO: 877105 - DNA, 15 bp, Homo sapiens
gtgtctcagttcctc

SEQ ID NO: 877106 - DNA, 15 bp, Homo sapiens
tgtgtctcagttcct

SEQ ID NO: 877107 - DNA, 15 bp, Homo sapiens
ctgtgtctcagttcc

SEQ ID NO: 877108 - DNA, 15 bp, Homo sapiens
tctgtgtctcagttc

SEQ ID NO: 877109 - DNA, 15 bp, Homo sapiens
ctctgtgtctcagtt

SEQ ID NO: 877110 - DNA, 15 bp, Homo sapiens
tctctgtgtctcagt

SEQ ID NO: 877111 - DNA, 15 bp, Homo sapiens
ctctctgtgtctcag

SEQ ID NO: 877112 - DNA, 15 bp, Homo sapiens
cctctctgtgtctca

SEQ ID NO: 877113 - DNA, 15 bp, Homo sapiens
tcctctctgtgtctc

SEQ ID NO: 877114 - DNA, 15 bp, Homo sapiens
atcctctctgtgtct

SEQ ID NO: 877115 - DNA, 15 bp, Homo sapiens
tatcctctctgtgtc

SEQ ID NO: 877116 - DNA, 15 bp, Homo sapiens
ttatcctctctgtgt

SEQ ID NO: 877117 - DNA, 15 bp, Homo sapiens
cttatcctctctgtg

SEQ ID NO: 877118 - DNA, 15 bp, Homo sapiens
acttatcctctctgt

SEQ ID NO: 877119 - DNA, 15 bp, Homo sapiens
tacttatcctctctg

SEQ ID NO: 877120 - DNA, 15 bp, Homo sapiens
ctacttatcctctct

SEQ ID NO: 877121 - DNA, 15 bp, Homo sapiens
cctacttatcctctc

SEQ ID NO: 877122 - DNA, 15 bp, Homo sapiens
gcctacttatcctct

SEQ ID NO: 877123 - DNA, 15 bp, Homo sapiens
tgcctacttatcctc

SEQ ID NO: 877124 - DNA, 15 bp, Homo sapiens
ctgcctacttatcct

SEQ ID NO: 877125 - DNA, 15 bp, Homo sapiens
tctgcctacttatcc

SEQ ID NO: 877126 - DNA, 15 bp, Homo sapiens
atctgcctacttatc

SEQ ID NO: 877127 - DNA, 15 bp, Homo sapiens
catctgcctacttat

SEQ ID NO: 877128 - DNA, 15 bp, Homo sapiens
ccatctgcctactta

SEQ ID NO: 877129 - DNA, 15 bp, Homo sapiens
tccatctgcctactt

SEQ ID NO: 877130 - DNA, 15 bp, Homo sapiens
ttccatctgcctact

SEQ ID NO: 877131 - DNA, 15 bp, Homo sapiens
gttccatctgcctac

SEQ ID NO: 877132 - DNA, 15 bp, Homo sapiens
ggttccatctgccta

SEQ ID NO: 877133 - DNA, 15 bp, Homo sapiens
gggttccatctgcct

SEQ ID NO: 877134 - DNA, 15 bp, Homo sapiens
cgggttccatctgcc

SEQ ID NO: 877135 - DNA, 15 bp, Homo sapiens
ccgggttccatctgc

SEQ ID NO: 877136 - DNA, 15 bp, Homo sapiens
tccgggttccatctg

SEQ ID NO: 877137 - DNA, 15 bp, Homo sapiens
atccgggttccatct

SEQ ID NO: 877138 - DNA, 15 bp, Homo sapiens
aatccgggttccatc

SEQ ID NO: 877139 - DNA, 15 bp, Homo sapiens
gaatccgggttccat

SEQ ID NO: 877140 - DNA, 15 bp, Homo sapiens
agaatccgggttcca

SEQ ID NO: 877141 - DNA, 15 bp, Homo sapiens
tagaatccgggttcc

SEQ ID NO: 877142 - DNA, 15 bp, Homo sapiens
ttagaatccgggttc

SEQ ID NO: 877143 - DNA, 15 bp, Homo sapiens
cttagaatccgggtt

SEQ ID NO: 877144 - DNA, 15 bp, Homo sapiens
gcttagaatccgggt

SEQ ID NO: 877145 - DNA, 15 bp, Homo sapiens
ggcttagaatccggg

SEQ ID NO: 877146 - DNA, 15 bp, Homo sapiens
tggcttagaatccgg

SEQ ID NO: 877147 - DNA, 15 bp, Homo sapiens
ctggcttagaatccg

SEQ ID NO: 877148 - DNA, 15 bp, Homo sapiens
tctggcttagaatcc

SEQ ID NO: 877149 - DNA, 15 bp, Homo sapiens
gtctggcttagaatc

SEQ ID NO: 877150 - DNA, 15 bp, Homo sapiens
ggtctggcttagaat

SEQ ID NO: 877151 - DNA, 15 bp, Homo sapiens
cggtctggcttagaa

SEQ ID NO: 877152 - DNA, 15 bp, Homo sapiens
gcggtctggcttaga

SEQ ID NO: 877153 - DNA, 15 bp, Homo sapiens
tgcggtctggcttag

SEQ ID NO: 877154 - DNA, 15 bp, Homo sapiens
atgcggtctggctta

SEQ ID NO: 877155 - DNA, 15 bp, Homo sapiens
catgcggtctggctt

SEQ ID NO: 877156 - DNA, 15 bp, Homo sapiens
gcatgcggtctggct

SEQ ID NO: 877157 - DNA, 15 bp, Homo sapiens
agcatgcggtctggc

SEQ ID NO: 877158 - DNA, 15 bp, Homo sapiens
cagcatgcggtctgg

SEQ ID NO: 877159 - DNA, 15 bp, Homo sapiens
tcagcatgcggtctg

SEQ ID NO: 877160 - DNA, 15 bp, Homo sapiens
atcagcatgcggtct

SEQ ID NO: 877161 - DNA, 15 bp, Homo sapiens
aatcagcatgcggtc

SEQ ID NO: 877162 - DNA, 15 bp, Homo sapiens
caatcagcatgcggt

SEQ ID NO: 877163 - DNA, 15 bp, Homo sapiens
ccaatcagcatgcgg

SEQ ID NO: 877164 - DNA, 15 bp, Homo sapiens
tccaatcagcatgcg

SEQ ID NO: 877165 - DNA, 15 bp, Homo sapiens
ttccaatcagcatgc

SEQ ID NO: 877166 - DNA, 15 bp, Homo sapiens
cttccaatcagcatg

SEQ ID NO: 877167 - DNA, 15 bp, Homo sapiens
acttccaatcagcat

SEQ ID NO: 877168 - DNA, 15 bp, Homo sapiens
aacttccaatcagca

SEQ ID NO: 877169 - DNA, 15 bp, Homo sapiens
gaacttccaatcagc

SEQ ID NO: 877170 - DNA, 15 bp, Homo sapiens
tgaacttccaatcag

SEQ ID NO: 877171 - DNA, 15 bp, Homo sapiens
ctgaacttccaatca

SEQ ID NO: 877172 - DNA, 15 bp, Homo sapiens
gctgaacttccaatc

SEQ ID NO: 877173 - DNA, 15 bp, Homo sapiens
tgctgaacttccaat

SEQ ID NO: 877174 - DNA, 15 bp, Homo sapiens
atgctgaacttccaa

SEQ ID NO: 877175 - DNA, 15 bp, Homo sapiens
gatgctgaacttcca

SEQ ID NO: 877176 - DNA, 15 bp, Homo sapiens
agatgctgaacttcc

SEQ ID NO: 877177 - DNA, 15 bp, Homo sapiens
aagatgctgaacttc

SEQ ID NO: 877178 - DNA, 15 bp, Homo sapiens
gaagatgctgaactt

SEQ ID NO: 877179 - DNA, 15 bp, Homo sapiens
ggaagatgctgaact

SEQ ID NO: 877180 - DNA, 15 bp, Homo sapiens
gggaagatgctgaac

SEQ ID NO: 877181 - DNA, 15 bp, Homo sapiens
ggggaagatgctgaa

SEQ ID NO: 877182 - DNA, 15 bp, Homo sapiens
aggggaagatgctga

SEQ ID NO: 877183 - DNA, 15 bp, Homo sapiens
gaggggaagatgctg

SEQ ID NO: 877184 - DNA, 15 bp, Homo sapiens
cgaggggaagatgct

SEQ ID NO: 877185 - DNA, 15 bp, Homo sapiens
tcgaggggaagatgc

SEQ ID NO: 877186 - DNA, 15 bp, Homo sapiens
gtcgaggggaagatg

SEQ ID NO: 877187 - DNA, 15 bp, Homo sapiens
ggtcgaggggaagat

SEQ ID NO: 877188 - DNA, 15 bp, Homo sapiens
aggtcgaggggaaga

SEQ ID NO: 877189 - DNA, 15 bp, Homo sapiens
gaggtcgaggggaag

SEQ ID NO: 877190 - DNA, 15 bp, Homo sapiens
tgaggtcgaggggaa

SEQ ID NO: 877191 - DNA, 15 bp, Homo sapiens
atgaggtcgagggga

SEQ ID NO: 877192 - DNA, 15 bp, Homo sapiens
aatgaggtcgagggg

SEQ ID NO: 877193 - DNA, 15 bp, Homo sapiens
aaatgaggtcgaggg

SEQ ID NO: 877194 - DNA, 15 bp, Homo sapiens
gaaatgaggtcgagg

SEQ ID NO: 877195 - DNA, 15 bp, Homo sapiens
tgaaatgaggtcgag

SEQ ID NO: 877196 - DNA, 15 bp, Homo sapiens
ctgaaatgaggtcga

SEQ ID NO: 877197 - DNA, 15 bp, Homo sapiens
cctgaaatgaggtcg

SEQ ID NO: 877198 - DNA, 15 bp, Homo sapiens
ccctgaaatgaggtc

SEQ ID NO: 877199 - DNA, 15 bp, Homo sapiens
cccctgaaatgaggt

SEQ ID NO: 877200 - DNA, 15 bp, Homo sapiens
tcccctgaaatgagg

SEQ ID NO: 877201 - DNA, 15 bp, Homo sapiens
ttcccctgaaatgag

SEQ ID NO: 877202 - DNA, 15 bp, Homo sapiens
cttcccctgaaatga

SEQ ID NO: 877203 - DNA, 15 bp, Homo sapiens
acttcccctgaaatg

SEQ ID NO: 877204 - DNA, 15 bp, Homo sapiens
aacttcccctgaaat

SEQ ID NO: 877205 - DNA, 15 bp, Homo sapiens
gaacttcccctgaaa

SEQ ID NO: 877206 - DNA, 15 bp, Homo sapiens
agaacttcccctgaa

SEQ ID NO: 877207 - DNA, 15 bp, Homo sapiens
cagaacttcccctga

SEQ ID NO: 877208 - DNA, 15 bp, Homo sapiens
ccagaacttcccctg

SEQ ID NO: 877209 - DNA, 15 bp, Homo sapiens
tccagaacttcccct

SEQ ID NO: 877210 - DNA, 15 bp, Homo sapiens
ttccagaacttcccc

SEQ ID NO: 877211 - DNA, 15 bp, Homo sapiens
cttccagaacttccc

SEQ ID NO: 877212 - DNA, 15 bp, Homo sapiens
gcttccagaacttcc

SEQ ID NO: 877213 - DNA, 15 bp, Homo sapiens
ggcttccagaacttc

SEQ ID NO: 877214 - DNA, 15 bp, Homo sapiens
aggcttccagaactt

SEQ ID NO: 877215 - DNA, 15 bp, Homo sapiens
aaggcttccagaact

SEQ ID NO: 877216 - DNA, 15 bp, Homo sapiens
caaggcttccagaac

SEQ ID NO: 877217 - DNA, 15 bp, Homo sapiens
gcaaggcttccagaa

SEQ ID NO: 877218 - DNA, 15 bp, Homo sapiens
tgcaaggcttccaga

SEQ ID NO: 877219 - DNA, 15 bp, Homo sapiens
gtgcaaggcttccag

SEQ ID NO: 877220 - DNA, 15 bp, Homo sapiens
agtgcaaggcttcca

SEQ ID NO: 877221 - DNA, 15 bp, Homo sapiens
gagtgcaaggcttcc

SEQ ID NO: 877222 - DNA, 15 bp, Homo sapiens
tgagtgcaaggcttc

SEQ ID NO: 877223 - DNA, 15 bp, Homo sapiens
gtgagtgcaaggctt

SEQ ID NO: 877224 - DNA, 15 bp, Homo sapiens
agtgagtgcaaggct

SEQ ID NO: 877225 - DNA, 15 bp, Homo sapiens
aagtgagtgcaaggc

SEQ ID NO: 877226 - DNA, 15 bp, Homo sapiens
gaagtgagtgcaagg

SEQ ID NO: 877227 - DNA, 15 bp, Homo sapiens
tgaagtgagtgcaag

SEQ ID NO: 877228 - DNA, 15 bp, Homo sapiens
ctgaagtgagtgcaa

SEQ ID NO: 877229 - DNA, 15 bp, Homo sapiens
cctgaagtgagtgca

SEQ ID NO: 877230 - DNA, 15 bp, Homo sapiens
ccctgaagtgagtgc

SEQ ID NO: 877231 - DNA, 15 bp, Homo sapiens
accctgaagtgagtg

SEQ ID NO: 877232 - DNA, 15 bp, Homo sapiens
aaccctgaagtgagt

SEQ ID NO: 877233 - DNA, 15 bp, Homo sapiens
gaaccctgaagtgag

SEQ ID NO: 877234 - DNA, 15 bp, Homo sapiens
ggaaccctgaagtga

SEQ ID NO: 877235 - DNA, 15 bp, Homo sapiens
gggaaccctgaagtg

SEQ ID NO: 877236 - DNA, 15 bp, Homo sapiens
tgggaaccctgaagt

SEQ ID NO: 877237 - DNA, 15 bp, Homo sapiens
gtgggaaccctgaag

SEQ ID NO: 877238 - DNA, 15 bp, Homo sapiens
ggtgggaaccctgaa

SEQ ID NO: 877239 - DNA, 15 bp, Homo sapiens
tggtgggaaccctga

SEQ ID NO: 877240 - DNA, 15 bp, Homo sapiens
gtggtgggaaccctg

SEQ ID NO: 877241 - DNA, 15 bp, Homo sapiens
cgtggtgggaaccct

SEQ ID NO: 877242 - DNA, 15 bp, Homo sapiens
acgtggtgggaaccc

SEQ ID NO: 877243 - DNA, 15 bp, Homo sapiens
gacgtggtgggaacc

SEQ ID NO: 877244 - DNA, 15 bp, Homo sapiens
agacgtggtgggaac

SEQ ID NO: 877245 - DNA, 15 bp, Homo sapiens
tagacgtggtgggaa

SEQ ID NO: 877246 - DNA, 15 bp, Homo sapiens
atagacgtggtggga

SEQ ID NO: 877247 - DNA, 15 bp, Homo sapiens
aatagacgtggtggg

SEQ ID NO: 877248 - DNA, 15 bp, Homo sapiens
aaatagacgtggtgg

SEQ ID NO: 877249 - DNA, 15 bp, Homo sapiens
aaaatagacgtggtg

SEQ ID NO: 877250 - DNA, 15 bp, Homo sapiens
caaaatagacgtggt

SEQ ID NO: 877251 - DNA, 15 bp, Homo sapiens
ccaaaatagacgtgg

SEQ ID NO: 877252 - DNA, 15 bp, Homo sapiens
gccaaaatagacgtg

SEQ ID NO: 877253 - DNA, 15 bp, Homo sapiens
agccaaaatagacgt

SEQ ID NO: 877254 - DNA, 15 bp, Homo sapiens
gagccaaaatagacg

SEQ ID NO: 877255 - DNA, 15 bp, Homo sapiens
agagccaaaatagac

SEQ ID NO: 877256 - DNA, 15 bp, Homo sapiens
gagagccaaaataga

SEQ ID NO: 877257 - DNA, 15 bp, Homo sapiens
agagagccaaaatag

SEQ ID NO: 877258 - DNA, 15 bp, Homo sapiens
cagagagccaaaata

SEQ ID NO: 877259 - DNA, 15 bp, Homo sapiens
ccagagagccaaaat

SEQ ID NO: 877260 - DNA, 15 bp, Homo sapiens
tccagagagccaaaa

SEQ ID NO: 877261 - DNA, 15 bp, Homo sapiens
atccagagagccaaa

SEQ ID NO: 877262 - DNA, 15 bp, Homo sapiens
aatccagagagccaa

SEQ ID NO: 877263 - DNA, 15 bp, Homo sapiens
gaatccagagagcca

SEQ ID NO: 877264 - DNA, 15 bp, Homo sapiens
agaatccagagagcc

SEQ ID NO: 877265 - DNA, 15 bp, Homo sapiens
aagaatccagagagc

SEQ ID NO: 877266 - DNA, 15 bp, Homo sapiens
aaagaatccagagag

SEQ ID NO: 877267 - DNA, 15 bp, Homo sapiens
aaaagaatccagaga

SEQ ID NO: 877268 - DNA, 15 bp, Homo sapiens
aaaaagaatccagag

SEQ ID NO: 877269 - DNA, 15 bp, Homo sapiens
caaaaagaatccaga

SEQ ID NO: 877270 - DNA, 15 bp, Homo sapiens
tcaaaaagaatccag

SEQ ID NO: 877271 - DNA, 15 bp, Homo sapiens
ttcaaaaagaatcca

SEQ ID NO: 877272 - DNA, 15 bp, Homo sapiens
attcaaaaagaatcc

SEQ ID NO: 877273 - DNA, 15 bp, Homo sapiens
gattcaaaaagaatc

SEQ ID NO: 877274 - DNA, 15 bp, Homo sapiens
agattcaaaaagaat

SEQ ID NO: 877275 - DNA, 15 bp, Homo sapiens
tagattcaaaaagaa

SEQ ID NO: 877276 - DNA, 15 bp, Homo sapiens
gtagattcaaaaaga

SEQ ID NO: 877277 - DNA, 15 bp, Homo sapiens
ggtagattcaaaaag

SEQ ID NO: 877278 - DNA, 15 bp, Homo sapiens
tggtagattcaaaaa

SEQ ID NO: 877279 - DNA, 15 bp, Homo sapiens
gtggtagattcaaaa

SEQ ID NO: 877280 - DNA, 15 bp, Homo sapiens
agtggtagattcaaa

SEQ ID NO: 877281 - DNA, 15 bp, Homo sapiens
aagtggtagattcaa

SEQ ID NO: 877282 - DNA, 15 bp, Homo sapiens
aaagtggtagattca

SEQ ID NO: 877283 - DNA, 15 bp, Homo sapiens
gaaagtggtagattc

SEQ ID NO: 877284 - DNA, 15 bp, Homo sapiens
agaaagtggtagatt

SEQ ID NO: 877285 - DNA, 15 bp, Homo sapiens
aagaaagtggtagat

SEQ ID NO: 877286 - DNA, 15 bp, Homo sapiens
taagaaagtggtaga

SEQ ID NO: 877287 - DNA, 15 bp, Homo sapiens
gtaagaaagtggtag

SEQ ID NO: 877288 - DNA, 15 bp, Homo sapiens
agtaagaaagtggta

SEQ ID NO: 877289 - DNA, 15 bp, Homo sapiens
gagtaagaaagtggt

SEQ ID NO: 877290 - DNA, 15 bp, Homo sapiens
ggagtaagaaagtgg

SEQ ID NO: 877291 - DNA, 15 bp, Homo sapiens
aggagtaagaaagtg

SEQ ID NO: 877292 - DNA, 15 bp, Homo sapiens
caggagtaagaaagt

SEQ ID NO: 877293 - DNA, 15 bp, Homo sapiens
ccaggagtaagaaag

SEQ ID NO: 877294 - DNA, 15 bp, Homo sapiens
accaggagtaagaaa

SEQ ID NO: 877295 - DNA, 15 bp, Homo sapiens
caccaggagtaagaa

SEQ ID NO: 877296 - DNA, 15 bp, Homo sapiens
acaccaggagtaaga

SEQ ID NO: 877297 - DNA, 15 bp, Homo sapiens
cacaccaggagtaag

SEQ ID NO: 877298 - DNA, 15 bp, Homo sapiens
tcacaccaggagtaa

SEQ ID NO: 877299 - DNA, 15 bp, Homo sapiens
atcacaccaggagta

SEQ ID NO: 877300 - DNA, 15 bp, Homo sapiens
gatcacaccaggagt

SEQ ID NO: 877301 - DNA, 15 bp, Homo sapiens
agatcacaccaggag

SEQ ID NO: 877302 - DNA, 15 bp, Homo sapiens
gagatcacaccagga

SEQ ID NO: 877303 - DNA, 15 bp, Homo sapiens
tgagatcacaccagg

SEQ ID NO: 877304 - DNA, 15 bp, Homo sapiens
ttgagatcacaccag

SEQ ID NO: 877305 - DNA, 15 bp, Homo sapiens
tttgagatcacacca

SEQ ID NO: 877306 - DNA, 15 bp, Homo sapiens
atttgagatcacacc

SEQ ID NO: 877307 - DNA, 15 bp, Homo sapiens
gatttgagatcacac

SEQ ID NO: 877308 - DNA, 15 bp, Homo sapiens
tgatttgagatcaca

SEQ ID NO: 877309 - DNA, 15 bp, Homo sapiens
ctgatttgagatcac

SEQ ID NO: 877310 - DNA, 15 bp, Homo sapiens
gctgatttgagatca

SEQ ID NO: 877311 - DNA, 15 bp, Homo sapiens
agctgatttgagatc

SEQ ID NO: 877312 - DNA, 15 bp, Homo sapiens
tagctgatttgagat

SEQ ID NO: 877313 - DNA, 15 bp, Homo sapiens
atagctgatttgaga

SEQ ID NO: 877314 - DNA, 15 bp, Homo sapiens
aatagctgatttgag

SEQ ID NO: 877315 - DNA, 15 bp, Homo sapiens
aaatagctgatttga

SEQ ID NO: 877316 - DNA, 15 bp, Homo sapiens
taaatagctgatttg

SEQ ID NO: 877317 - DNA, 15 bp, Homo sapiens
ttaaatagctgattt

SEQ ID NO: 877318 - DNA, 15 bp, Homo sapiens
cttaaatagctgatt

SEQ ID NO: 877319 - DNA, 15 bp, Homo sapiens
gcttaaatagctgat

SEQ ID NO: 877320 - DNA, 15 bp, Homo sapiens
agcttaaatagctga

SEQ ID NO: 877321 - DNA, 15 bp, Homo sapiens
aagcttaaatagctg

SEQ ID NO: 877322 - DNA, 15 bp, Homo sapiens
aaagcttaaatagct

SEQ ID NO: 877323 - DNA, 15 bp, Homo sapiens
aaaagcttaaatagc

SEQ ID NO: 877324 - DNA, 15 bp, Homo sapiens
taaaagcttaaatag

SEQ ID NO: 877325 - DNA, 15 bp, Homo sapiens
ctaaaagcttaaata

SEQ ID NO: 877326 - DNA, 15 bp, Homo sapiens
tctaaaagcttaaat

SEQ ID NO: 877327 - DNA, 15 bp, Homo sapiens
ctctaaaagcttaaa

SEQ ID NO: 877328 - DNA, 15 bp, Homo sapiens
gctctaaaagcttaa

SEQ ID NO: 877329 - DNA, 15 bp, Homo sapiens
ggctctaaaagctta

SEQ ID NO: 877330 - DNA, 15 bp, Homo sapiens
gggctctaaaagctt

SEQ ID NO: 877331 - DNA, 15 bp, Homo sapiens
ggggctctaaaagct

SEQ ID NO: 877332 - DNA, 15 bp, Homo sapiens
tggggctctaaaagc

SEQ ID NO: 877333 - DNA, 15 bp, Homo sapiens
ctggggctctaaaag

SEQ ID NO: 877334 - DNA, 15 bp, Homo sapiens
actggggctctaaaa

SEQ ID NO: 877335 - DNA, 15 bp, Homo sapiens
aactggggctctaaa

SEQ ID NO: 877336 - DNA, 15 bp, Homo sapiens
aaactggggctctaa

SEQ ID NO: 877337 - DNA, 15 bp, Homo sapiens
gaaactggggctcta

SEQ ID NO: 877338 - DNA, 15 bp, Homo sapiens
agaaactggggctct

SEQ ID NO: 877339 - DNA, 15 bp, Homo sapiens
aagaaactggggctc

SEQ ID NO: 877340 - DNA, 15 bp, Homo sapiens
taagaaactggggct

SEQ ID NO: 877341 - DNA, 15 bp, Homo sapiens
gtaagaaactggggc

SEQ ID NO: 877342 - DNA, 15 bp, Homo sapiens
ggtaagaaactgggg

SEQ ID NO: 877343 - DNA, 15 bp, Homo sapiens
gggtaagaaactggg

SEQ ID NO: 877344 - DNA, 15 bp, Homo sapiens
cgggtaagaaactgg

SEQ ID NO: 877345 - DNA, 15 bp, Homo sapiens
gcgggtaagaaactg

SEQ ID NO: 877346 - DNA, 15 bp, Homo sapiens
cgcgggtaagaaact

SEQ ID NO: 877347 - DNA, 15 bp, Homo sapiens
gcgcgggtaagaaac

SEQ ID NO: 877348 - DNA, 15 bp, Homo sapiens
tgcgcgggtaagaaa

SEQ ID NO: 877349 - DNA, 15 bp, Homo sapiens
ttgcgcgggtaagaa

SEQ ID NO: 877350 - DNA, 15 bp, Homo sapiens
cttgcgcgggtaaga

SEQ ID NO: 877351 - DNA, 15 bp, Homo sapiens
tcttgcgcgggtaag

SEQ ID NO: 877352 - DNA, 15 bp, Homo sapiens
ctcttgcgcgggtaa

SEQ ID NO: 877353 - DNA, 15 bp, Homo sapiens
cctcttgcgcgggta

SEQ ID NO: 877354 - DNA, 15 bp, Homo sapiens
ccctcttgcgcgggt

SEQ ID NO: 877355 - DNA, 15 bp, Homo sapiens
cccctcttgcgcggg

SEQ ID NO: 877356 - DNA, 15 bp, Homo sapiens
acccctcttgcgcgg

SEQ ID NO: 877357 - DNA, 15 bp, Homo sapiens
aacccctcttgcgcg

SEQ ID NO: 877358 - DNA, 15 bp, Homo sapiens
taacccctcttgcgc

SEQ ID NO: 877359 - DNA, 15 bp, Homo sapiens
ataacccctcttgcg

SEQ ID NO: 877360 - DNA, 15 bp, Homo sapiens
gataacccctcttgc

SEQ ID NO: 877361 - DNA, 15 bp, Homo sapiens
tgataacccctcttg

SEQ ID NO: 877362 - DNA, 15 bp, Homo sapiens
atgataacccctctt

SEQ ID NO: 877363 - DNA, 15 bp, Homo sapiens
catgataacccctct

SEQ ID NO: 877364 - DNA, 15 bp, Homo sapiens
gcatgataacccctc

SEQ ID NO: 877365 - DNA, 15 bp, Homo sapiens
ggcatgataacccct

SEQ ID NO: 877366 - DNA, 15 bp, Homo sapiens
aggcatgataacccc

SEQ ID NO: 877367 - DNA, 15 bp, Homo sapiens
aaggcatgataaccc

SEQ ID NO: 877368 - DNA, 15 bp, Homo sapiens
gaaggcatgataacc

SEQ ID NO: 877369 - DNA, 15 bp, Homo sapiens
ggaaggcatgataac

SEQ ID NO: 877370 - DNA, 15 bp, Homo sapiens
aggaaggcatgataa

SEQ ID NO: 877371 - DNA, 15 bp, Homo sapiens
aaggaaggcatgata

SEQ ID NO: 877372 - DNA, 15 bp, Homo sapiens
taaggaaggcatgat

SEQ ID NO: 877373 - DNA, 15 bp, Homo sapiens
ataaggaaggcatga

SEQ ID NO: 877374 - DNA, 15 bp, Homo sapiens
aataaggaaggcatg

SEQ ID NO: 877375 - DNA, 15 bp, Homo sapiens
aaataaggaaggcat

SEQ ID NO: 877376 - DNA, 15 bp, Homo sapiens
aaaataaggaaggca

SEQ ID NO: 877377 - DNA, 15 bp, Homo sapiens
caaaataaggaaggc

SEQ ID NO: 877378 - DNA, 15 bp, Homo sapiens
tcaaaataaggaagg

SEQ ID NO: 877379 - DNA, 15 bp, Homo sapiens
ttcaaaataaggaag

SEQ ID NO: 877380 - DNA, 15 bp, Homo sapiens
cttcaaaataaggaa

SEQ ID NO: 877381 - DNA, 15 bp, Homo sapiens
ccttcaaaataagga

SEQ ID NO: 877382 - DNA, 15 bp, Homo sapiens
accttcaaaataagg

SEQ ID NO: 877383 - DNA, 15 bp, Homo sapiens
taccttcaaaataag

SEQ ID NO: 877384 - DNA, 15 bp, Homo sapiens
gtaccttcaaaataa

SEQ ID NO: 877385 - DNA, 15 bp, Homo sapiens
cgtaccttcaaaata

SEQ ID NO: 877386 - DNA, 15 bp, Homo sapiens
acgtaccttcaaaat

SEQ ID NO: 877387 - DNA, 15 bp, Homo sapiens
gacgtaccttcaaaa

SEQ ID NO: 877388 - DNA, 15 bp, Homo sapiens
tgacgtaccttcaaa

SEQ ID NO: 877389 - DNA, 15 bp, Homo sapiens
ctgacgtaccttcaa

SEQ ID NO: 877390 - DNA, 15 bp, Homo sapiens
tctgacgtaccttca

SEQ ID NO: 877391 - DNA, 15 bp, Homo sapiens
ttctgacgtaccttc

SEQ ID NO: 877392 - DNA, 15 bp, Homo sapiens
tttctgacgtacctt

SEQ ID NO: 877393 - DNA, 15 bp, Homo sapiens
atttctgacgtacct

SEQ ID NO: 877394 - DNA, 15 bp, Homo sapiens
tatttctgacgtacc

SEQ ID NO: 877395 - DNA, 15 bp, Homo sapiens
ctatttctgacgtac

SEQ ID NO: 877396 - DNA, 15 bp, Homo sapiens
gctatttctgacgta

SEQ ID NO: 877397 - DNA, 15 bp, Homo sapiens
tgctatttctgacgt

SEQ ID NO: 877398 - DNA, 15 bp, Homo sapiens
ttgctatttctgacg

SEQ ID NO: 877399 - DNA, 15 bp, Homo sapiens
gttgctatttctgac

SEQ ID NO: 877400 - DNA, 15 bp, Homo sapiens
agttgctatttctga

SEQ ID NO: 877401 - DNA, 15 bp, Homo sapiens
cagttgctatttctg

SEQ ID NO: 877402 - DNA, 15 bp, Homo sapiens
acagttgctatttct

SEQ ID NO: 877403 - DNA, 15 bp, Homo sapiens
tacagttgctatttc

SEQ ID NO: 877404 - DNA, 15 bp, Homo sapiens
gtacagttgctattt

SEQ ID NO: 877405 - DNA, 15 bp, Homo sapiens
ggtacagttgctatt

SEQ ID NO: 877406 - DNA, 15 bp, Homo sapiens
tggtacagttgctat

SEQ ID NO: 877407 - DNA, 15 bp, Homo sapiens
ttggtacagttgcta

SEQ ID NO: 877408 - DNA, 15 bp, Homo sapiens
tttggtacagttgct

SEQ ID NO: 877409 - DNA, 15 bp, Homo sapiens
ctttggtacagttgc

SEQ ID NO: 877410 - DNA, 15 bp, Homo sapiens
gctttggtacagttg

SEQ ID NO: 877411 - DNA, 15 bp, Homo sapiens
tgctttggtacagtt

SEQ ID NO: 877412 - DNA, 15 bp, Homo sapiens
ctgctttggtacagt

SEQ ID NO: 877413 - DNA, 15 bp, Homo sapiens
cctgctttggtacag

SEQ ID NO: 877414 - DNA, 15 bp, Homo sapiens
gcctgctttggtaca

SEQ ID NO: 877415 - DNA, 15 bp, Homo sapiens
tgcctgctttggtac

SEQ ID NO: 877416 - DNA, 15 bp, Homo sapiens
gtgcctgctttggta

SEQ ID NO: 877417 - DNA, 15 bp, Homo sapiens
agtgcctgctttggt

SEQ ID NO: 877418 - DNA, 15 bp, Homo sapiens
gagtgcctgctttgg

SEQ ID NO: 877419 - DNA, 15 bp, Homo sapiens
agagtgcctgctttg

SEQ ID NO: 877420 - DNA, 15 bp, Homo sapiens
cagagtgcctgcttt

SEQ ID NO: 877421 - DNA, 15 bp, Homo sapiens
ccagagtgcctgctt

SEQ ID NO: 877422 - DNA, 15 bp, Homo sapiens
tccagagtgcctgct

SEQ ID NO: 877423 - DNA, 15 bp, Homo sapiens
atccagagtgcctgc

SEQ ID NO: 877424 - DNA, 15 bp, Homo sapiens
catccagagtgcctg

SEQ ID NO: 877425 - DNA, 15 bp, Homo sapiens
ccatccagagtgcct

SEQ ID NO: 877426 - DNA, 15 bp, Homo sapiens
accatccagagtgcc

SEQ ID NO: 877427 - DNA, 15 bp, Homo sapiens
caccatccagagtgc

SEQ ID NO: 877428 - DNA, 15 bp, Homo sapiens
ccaccatccagagtg

SEQ ID NO: 877429 - DNA, 15 bp, Homo sapiens
accaccatccagagt

SEQ ID NO: 877430 - DNA, 15 bp, Homo sapiens
aaccaccatccagag

SEQ ID NO: 877431 - DNA, 15 bp, Homo sapiens
taaccaccatccaga

SEQ ID NO: 877432 - DNA, 15 bp, Homo sapiens
gtaaccaccatccag

SEQ ID NO: 877433 - DNA, 15 bp, Homo sapiens
agtaaccaccatcca

SEQ ID NO: 877434 - DNA, 15 bp, Homo sapiens
cagtaaccaccatcc

SEQ ID NO: 877435 - DNA, 15 bp, Homo sapiens
gcagtaaccaccatc

SEQ ID NO: 877436 - DNA, 15 bp, Homo sapiens
agcagtaaccaccat

SEQ ID NO: 877437 - DNA, 15 bp, Homo sapiens
cagcagtaaccacca

SEQ ID NO: 877438 - DNA, 15 bp, Homo sapiens
acagcagtaaccacc

SEQ ID NO: 877439 - DNA, 15 bp, Homo sapiens
gacagcagtaaccac

SEQ ID NO: 877440 - DNA, 15 bp, Homo sapiens
tgacagcagtaacca

SEQ ID NO: 877441 - DNA, 15 bp, Homo sapiens
ttgacagcagtaacc

SEQ ID NO: 877442 - DNA, 15 bp, Homo sapiens
attgacagcagtaac

SEQ ID NO: 877443 - DNA, 15 bp, Homo sapiens
tattgacagcagtaa

SEQ ID NO: 877444 - DNA, 15 bp, Homo sapiens
gtattgacagcagta

SEQ ID NO: 877445 - DNA, 15 bp, Homo sapiens
ggtattgacagcagt

SEQ ID NO: 877446 - DNA, 15 bp, Homo sapiens
aggtattgacagcag

SEQ ID NO: 877447 - DNA, 15 bp, Homo sapiens
aaggtattgacagca

SEQ ID NO: 877448 - DNA, 15 bp, Homo sapiens
taaggtattgacagc

SEQ ID NO: 877449 - DNA, 15 bp, Homo sapiens
ttaaggtattgacag

SEQ ID NO: 877450 - DNA, 15 bp, Homo sapiens
tttaaggtattgaca

SEQ ID NO: 877451 - DNA, 15 bp, Homo sapiens
atttaaggtattgac

SEQ ID NO: 877452 - DNA, 15 bp, Homo sapiens
catttaaggtattga

SEQ ID NO: 877453 - DNA, 15 bp, Homo sapiens
acatttaaggtattg

SEQ ID NO: 877454 - DNA, 15 bp, Homo sapiens
aacatttaaggtatt

SEQ ID NO: 877455 - DNA, 15 bp, Homo sapiens
taacatttaaggtat

SEQ ID NO: 877456 - DNA, 15 bp, Homo sapiens
ttaacatttaaggta

SEQ ID NO: 877457 - DNA, 15 bp, Homo sapiens
gttaacatttaaggt

SEQ ID NO: 877458 - DNA, 15 bp, Homo sapiens
tgttaacatttaagg

SEQ ID NO: 877459 - DNA, 15 bp, Homo sapiens
gtgttaacatttaag

SEQ ID NO: 877460 - DNA, 15 bp, Homo sapiens
tgtgttaacatttaa

SEQ ID NO: 877461 - DNA, 15 bp, Homo sapiens
ttgtgttaacattta

SEQ ID NO: 877462 - DNA, 15 bp, Homo sapiens
gttgtgttaacattt

SEQ ID NO: 877463 - DNA, 15 bp, Homo sapiens
ggttgtgttaacatt

SEQ ID NO: 877464 - DNA, 15 bp, Homo sapiens
tggttgtgttaacat

SEQ ID NO: 877465 - DNA, 15 bp, Homo sapiens
ctggttgtgttaaca

SEQ ID NO: 877466 - DNA, 15 bp, Homo sapiens
cctggttgtgttaac

SEQ ID NO: 877467 - DNA, 15 bp, Homo sapiens
ccctggttgtgttaa

SEQ ID NO: 877468 - DNA, 15 bp, Homo sapiens
accctggttgtgtta

SEQ ID NO: 877469 - DNA, 15 bp, Homo sapiens
caccctggttgtgtt

SEQ ID NO: 877470 - DNA, 15 bp, Homo sapiens
tcaccctggttgtgt

SEQ ID NO: 877471 - DNA, 15 bp, Homo sapiens
ttcaccctggttgtg

SEQ ID NO: 877472 - DNA, 15 bp, Homo sapiens
attcaccctggttgt

SEQ ID NO: 877473 - DNA, 15 bp, Homo sapiens
gattcaccctggttg

SEQ ID NO: 877474 - DNA, 15 bp, Homo sapiens
ggattcaccctggtt

SEQ ID NO: 877475 - DNA, 15 bp, Homo sapiens
tggattcaccctggt

SEQ ID NO: 877476 - DNA, 15 bp, Homo sapiens
atggattcaccctgg

SEQ ID NO: 877477 - DNA, 15 bp, Homo sapiens
aatggattcaccctg

SEQ ID NO: 877478 - DNA, 15 bp, Homo sapiens
taatggattcaccct

SEQ ID NO: 877479 - DNA, 15 bp, Homo sapiens
gtaatggattcaccc

SEQ ID NO: 877480 - DNA, 15 bp, Homo sapiens
agtaatggattcacc

SEQ ID NO: 877481 - DNA, 15 bp, Homo sapiens
aagtaatggattcac

SEQ ID NO: 877482 - DNA, 15 bp, Homo sapiens
gaagtaatggattca

SEQ ID NO: 877483 - DNA, 15 bp, Homo sapiens
ggaagtaatggattc

SEQ ID NO: 877484 - DNA, 15 bp, Homo sapiens
gggaagtaatggatt

SEQ ID NO: 877485 - DNA, 15 bp, Homo sapiens
agggaagtaatggat

SEQ ID NO: 877486 - DNA, 15 bp, Homo sapiens
aagggaagtaatgga

SEQ ID NO: 877487 - DNA, 15 bp, Homo sapiens
gaagggaagtaatgg

SEQ ID NO: 877488 - DNA, 15 bp, Homo sapiens
agaagggaagtaatg

SEQ ID NO: 877489 - DNA, 15 bp, Homo sapiens
aagaagggaagtaat

SEQ ID NO: 877490 - DNA, 15 bp, Homo sapiens
aaagaagggaagtaa

SEQ ID NO: 877491 - DNA, 15 bp, Homo sapiens
gaaagaagggaagta

SEQ ID NO: 877492 - DNA, 15 bp, Homo sapiens
agaaagaagggaagt

SEQ ID NO: 877493 - DNA, 15 bp, Homo sapiens
gggaagaaagaaggg

SEQ ID NO: 877494 - DNA, 15 bp, Homo sapiens
agggaagaaagaagg

SEQ ID NO: 877495 - DNA, 15 bp, Homo sapiens
gagggaagaaagaag

SEQ ID NO: 877496 - DNA, 15 bp, Homo sapiens
ggagggaagaaagaa

SEQ ID NO: 877497 - DNA, 15 bp, Homo sapiens
aggagggaagaaaga

SEQ ID NO: 877498 - DNA, 15 bp, Homo sapiens
aaggagggaagaaag

SEQ ID NO: 877499 - DNA, 15 bp, Homo sapiens
aaaggagggaagaaa

SEQ ID NO: 877500 - DNA, 15 bp, Homo sapiens
aaaaggagggaagaa

SEQ ID NO: 877501 - DNA, 15 bp, Homo sapiens
gaaaaggagggaaga

SEQ ID NO: 877502 - DNA, 15 bp, Homo sapiens
agaaaaggagggaag

SEQ ID NO: 877503 - DNA, 15 bp, Homo sapiens
aagaaaaggagggaa

SEQ ID NO: 877504 - DNA, 15 bp, Homo sapiens
aaagaaaaggaggga

SEQ ID NO: 877505 - DNA, 15 bp, Homo sapiens
gaaagaaaaggaggg

SEQ ID NO: 877506 - DNA, 15 bp, Homo sapiens
agaaagaaaaggagg

SEQ ID NO: 877507 - DNA, 15 bp, Homo sapiens
aagaaagaaaaggag

SEQ ID NO: 877508 - DNA, 15 bp, Homo sapiens
gaagaaagaaaagga

SEQ ID NO: 877509 - DNA, 15 bp, Homo sapiens
ggaagaaagaaaagg

SEQ ID NO: 877510 - DNA, 15 bp, Homo sapiens
aggaagaaagaaaag

SEQ ID NO: 877511 - DNA, 15 bp, Homo sapiens
aaggaagaaagaaaa

SEQ ID NO: 877512 - DNA, 15 bp, Homo sapiens
gaaggaagaaagaaa

SEQ ID NO: 877513 - DNA, 15 bp, Homo sapiens
ggaaggaagaaagaa

SEQ ID NO: 877514 - DNA, 15 bp, Homo sapiens
aggaaggaagaaaga

SEQ ID NO: 877515 - DNA, 15 bp, Homo sapiens
aaggaaggaagaaag

SEQ ID NO: 877516 - DNA, 15 bp, Homo sapiens
gaaggaaggaagaaa

SEQ ID NO: 877517 - DNA, 15 bp, Homo sapiens
ggaaggaaggaagaa

SEQ ID NO: 877518 - DNA, 15 bp, Homo sapiens
aggaaggaaggaaga

SEQ ID NO: 877519 - DNA, 15 bp, Homo sapiens
aaggaaggaaggaag

SEQ ID NO: 877520 - DNA, 15 bp, Homo sapiens
taaggaaggaaggaa

SEQ ID NO: 877521 - DNA, 15 bp, Homo sapiens
ataaggaaggaagga

SEQ ID NO: 877522 - DNA, 15 bp, Homo sapiens
gataaggaaggaagg

SEQ ID NO: 877523 - DNA, 15 bp, Homo sapiens
agataaggaaggaag

SEQ ID NO: 877524 - DNA, 15 bp, Homo sapiens
aagataaggaaggaa

SEQ ID NO: 877525 - DNA, 15 bp, Homo sapiens
caagataaggaagga

SEQ ID NO: 877526 - DNA, 15 bp, Homo sapiens
acaagataaggaagg

SEQ ID NO: 877527 - DNA, 15 bp, Homo sapiens
aacaagataaggaag

SEQ ID NO: 877528 - DNA, 15 bp, Homo sapiens
aaacaagataaggaa

SEQ ID NO: 877529 - DNA, 15 bp, Homo sapiens
aaaacaagataagga

SEQ ID NO: 877530 - DNA, 15 bp, Homo sapiens
gaaaacaagataagg

SEQ ID NO: 877531 - DNA, 15 bp, Homo sapiens
agaaaacaagataag

SEQ ID NO: 877532 - DNA, 15 bp, Homo sapiens
gagaaaacaagataa

SEQ ID NO: 877533 - DNA, 15 bp, Homo sapiens
ggagaaaacaagata

SEQ ID NO: 877534 - DNA, 15 bp, Homo sapiens
gggagaaaacaagat

SEQ ID NO: 877535 - DNA, 15 bp, Homo sapiens
agggagaaaacaaga

SEQ ID NO: 877536 - DNA, 15 bp, Homo sapiens
gagggagaaaacaag

SEQ ID NO: 877537 - DNA, 15 bp, Homo sapiens
ggagggagaaaacaa

SEQ ID NO: 877538 - DNA, 15 bp, Homo sapiens
aggagggagaaaaca

SEQ ID NO: 877539 - DNA, 15 bp, Homo sapiens
aaggagggagaaaac

SEQ ID NO: 877540 - DNA, 15 bp, Homo sapiens
aaaggagggagaaaa

SEQ ID NO: 877541 - DNA, 15 bp, Homo sapiens
gaaaggagggagaaa

SEQ ID NO: 877542 - DNA, 15 bp, Homo sapiens
agaaaggagggagaa

SEQ ID NO: 877543 - DNA, 15 bp, Homo sapiens
aagaaaggagggaga

SEQ ID NO: 877544 - DNA, 15 bp, Homo sapiens
aaagaaaggagggag

SEQ ID NO: 877545 - DNA, 15 bp, Homo sapiens
gaaagaaaggaggga

SEQ ID NO: 877546 - DNA, 15 bp, Homo sapiens
ggaaagaaaggaggg

SEQ ID NO: 877547 - DNA, 15 bp, Homo sapiens
aggaaagaaaggagg

SEQ ID NO: 877548 - DNA, 15 bp, Homo sapiens
aaggaaagaaaggag

SEQ ID NO: 877549 - DNA, 15 bp, Homo sapiens
aaaggaaagaaagga

SEQ ID NO: 877550 - DNA, 15 bp, Homo sapiens
aaaaggaaagaaagg

SEQ ID NO: 877551 - DNA, 15 bp, Homo sapiens
gaaaaggaaagaaag

SEQ ID NO: 877552 - DNA, 15 bp, Homo sapiens
agaaaaggaaagaaa

SEQ ID NO: 877553 - DNA, 15 bp, Homo sapiens
aagaaaaggaaagaa

SEQ ID NO: 877554 - DNA, 15 bp, Homo sapiens
gaagaaaaggaaaga

SEQ ID NO: 877555 - DNA, 15 bp, Homo sapiens
ggaagaaaaggaaag

SEQ ID NO: 877556 - DNA, 15 bp, Homo sapiens
gggaagaaaaggaaa

SEQ ID NO: 877557 - DNA, 15 bp, Homo sapiens
agggaagaaaaggaa

SEQ ID NO: 877558 - DNA, 15 bp, Homo sapiens
gagggaagaaaagga

SEQ ID NO: 877559 - DNA, 15 bp, Homo sapiens
ggagggaagaaaagg

SEQ ID NO: 877560 - DNA, 15 bp, Homo sapiens
gggagggaagaaaag

SEQ ID NO: 877561 - DNA, 15 bp, Homo sapiens
agggagggaagaaaa

SEQ ID NO: 877562 - DNA, 15 bp, Homo sapiens
gagggagggaagaaa

SEQ ID NO: 877563 - DNA, 15 bp, Homo sapiens
agagggagggaagaa

SEQ ID NO: 877564 - DNA, 15 bp, Homo sapiens
gagagggagggaaga

SEQ ID NO: 877565 - DNA, 15 bp, Homo sapiens
agagagggagggaag

SEQ ID NO: 877566 - DNA, 15 bp, Homo sapiens
aagagagggagggaa

SEQ ID NO: 877567 - DNA, 15 bp, Homo sapiens
gaagagagggaggga

SEQ ID NO: 877568 - DNA, 15 bp, Homo sapiens
ggaagagagggaggg

SEQ ID NO: 877569 - DNA, 15 bp, Homo sapiens
gggaagagagggagg

SEQ ID NO: 877570 - DNA, 15 bp, Homo sapiens
agggaagagagggag

SEQ ID NO: 877571 - DNA, 15 bp, Homo sapiens
gagggaagagaggga

SEQ ID NO: 877572 - DNA, 15 bp, Homo sapiens
agagggaagagaggg

SEQ ID NO: 877573 - DNA, 15 bp, Homo sapiens
aagagggaagagagg

SEQ ID NO: 877574 - DNA, 15 bp, Homo sapiens
gaagagggaagagag

SEQ ID NO: 877575 - DNA, 15 bp, Homo sapiens
ggaagagggaagaga

SEQ ID NO: 877576 - DNA, 15 bp, Homo sapiens
aggaagagggaagag

SEQ ID NO: 877577 - DNA, 15 bp, Homo sapiens
aaggaagagggaaga

SEQ ID NO: 877578 - DNA, 15 bp, Homo sapiens
gaaggaagagggaag

SEQ ID NO: 877579 - DNA, 15 bp, Homo sapiens
ggaaggaagagggaa

SEQ ID NO: 877580 - DNA, 15 bp, Homo sapiens
gggaaggaagaggga

SEQ ID NO: 877581 - DNA, 15 bp, Homo sapiens
agggaaggaagaggg

SEQ ID NO: 877582 - DNA, 15 bp, Homo sapiens
gagggaaggaagagg

SEQ ID NO: 877583 - DNA, 15 bp, Homo sapiens
ggagggaaggaagag

SEQ ID NO: 877584 - DNA, 15 bp, Homo sapiens
aggagggaaggaaga

SEQ ID NO: 877585 - DNA, 15 bp, Homo sapiens
aaggagggaaggaag

SEQ ID NO: 877586 - DNA, 15 bp, Homo sapiens
gaaggagggaaggaa

SEQ ID NO: 877587 - DNA, 15 bp, Homo sapiens
agaaggagggaagga

SEQ ID NO: 877588 - DNA, 15 bp, Homo sapiens
aagaaggagggaagg

SEQ ID NO: 877589 - DNA, 15 bp, Homo sapiens
aaagaaggagggaag

SEQ ID NO: 877590 - DNA, 15 bp, Homo sapiens
aaaagaaggagggaa

SEQ ID NO: 877591 - DNA, 15 bp, Homo sapiens
aaaaagaaggaggga

SEQ ID NO: 877592 - DNA, 15 bp, Homo sapiens
gaaaaagaaggaggg

SEQ ID NO: 877593 - DNA, 15 bp, Homo sapiens
agaaaaagaaggagg

SEQ ID NO: 877594 - DNA, 15 bp, Homo sapiens
gagaaaaagaaggag

SEQ ID NO: 877595 - DNA, 15 bp, Homo sapiens
agagaaaaagaagga

SEQ ID NO: 877596 - DNA, 15 bp, Homo sapiens
aagagaaaaagaagg

SEQ ID NO: 877597 - DNA, 15 bp, Homo sapiens
aaagagaaaaagaag

SEQ ID NO: 877598 - DNA, 15 bp, Homo sapiens
taaagagaaaaagaa

SEQ ID NO: 877599 - DNA, 15 bp, Homo sapiens
ataaagagaaaaaga

SEQ ID NO: 877600 - DNA, 15 bp, Homo sapiens
cataaagagaaaaag

SEQ ID NO: 877601 - DNA, 15 bp, Homo sapiens
gcataaagagaaaaa

SEQ ID NO: 877602 - DNA, 15 bp, Homo sapiens
ggcataaagagaaaa

SEQ ID NO: 877603 - DNA, 15 bp, Homo sapiens
gggcataaagagaaa

SEQ ID NO: 877604 - DNA, 15 bp, Homo sapiens
cgggcataaagagaa

SEQ ID NO: 877605 - DNA, 15 bp, Homo sapiens
ccgggcataaagaga

SEQ ID NO: 877606 - DNA, 15 bp, Homo sapiens
accgggcataaagag

SEQ ID NO: 877607 - DNA, 15 bp, Homo sapiens
taccgggcataaaga

SEQ ID NO: 877608 - DNA, 15 bp, Homo sapiens
gtaccgggcataaag

SEQ ID NO: 877609 - DNA, 15 bp, Homo sapiens
tgtaccgggcataaa

SEQ ID NO: 877610 - DNA, 15 bp, Homo sapiens
ttgtaccgggcataa

SEQ ID NO: 877611 - DNA, 15 bp, Homo sapiens
gttgtaccgggcata

SEQ ID NO: 877612 - DNA, 15 bp, Homo sapiens
tgttgtaccgggcat

SEQ ID NO: 877613 - DNA, 15 bp, Homo sapiens
ttgttgtaccgggca

SEQ ID NO: 877614 - DNA, 15 bp, Homo sapiens
tttgttgtaccgggc

SEQ ID NO: 877615 - DNA, 15 bp, Homo sapiens
ctttgttgtaccggg

SEQ ID NO: 877616 - DNA, 15 bp, Homo sapiens
actttgttgtaccgg

SEQ ID NO: 877617 - DNA, 15 bp, Homo sapiens
tactttgttgtaccg

SEQ ID NO: 877618 - DNA, 15 bp, Homo sapiens
gtactttgttgtacc

SEQ ID NO: 877619 - DNA, 15 bp, Homo sapiens
ggtactttgttgtac

SEQ ID NO: 877620 - DNA, 15 bp, Homo sapiens
gggtactttgttgta

SEQ ID NO: 877621 - DNA, 15 bp, Homo sapiens
tgggtactttgttgt

SEQ ID NO: 877622 - DNA, 15 bp, Homo sapiens
atgggtactttgttg

SEQ ID NO: 877623 - DNA, 15 bp, Homo sapiens
catgggtactttgtt

SEQ ID NO: 877624 - DNA, 15 bp, Homo sapiens
ccatgggtactttgt

SEQ ID NO: 877625 - DNA, 15 bp, Homo sapiens
accatgggtactttg

SEQ ID NO: 877626 - DNA, 15 bp, Homo sapiens
aaccatgggtacttt

SEQ ID NO: 877627 - DNA, 15 bp, Homo sapiens
aaaccatgggtactt

SEQ ID NO: 877628 - DNA, 15 bp, Homo sapiens
gaaaccatgggtact

SEQ ID NO: 877629 - DNA, 15 bp, Homo sapiens
agaaaccatgggtac

SEQ ID NO: 877630 - DNA, 15 bp, Homo sapiens
cagaaaccatgggta

SEQ ID NO: 877631 - DNA, 15 bp, Homo sapiens
gcagaaaccatgggt

SEQ ID NO: 877632 - DNA, 15 bp, Homo sapiens
ggcagaaaccatggg

SEQ ID NO: 877633 - DNA, 15 bp, Homo sapiens
gggcagaaaccatgg

SEQ ID NO: 877634 - DNA, 15 bp, Homo sapiens
agggcagaaaccatg

SEQ ID NO: 877635 - DNA, 15 bp, Homo sapiens
gagggcagaaaccat

SEQ ID NO: 877636 - DNA, 15 bp, Homo sapiens
tgagggcagaaacca

SEQ ID NO: 877637 - DNA, 15 bp, Homo sapiens
atgagggcagaaacc

SEQ ID NO: 877638 - DNA, 15 bp, Homo sapiens
catgagggcagaaac

SEQ ID NO: 877639 - DNA, 15 bp, Homo sapiens
tcatgagggcagaaa

SEQ ID NO: 877640 - DNA, 15 bp, Homo sapiens
ttcatgagggcagaa

SEQ ID NO: 877641 - DNA, 15 bp, Homo sapiens
tttcatgagggcaga

SEQ ID NO: 877642 - DNA, 15 bp, Homo sapiens
gtttcatgagggcag

SEQ ID NO: 877643 - DNA, 15 bp, Homo sapiens
agtttcatgagggca

SEQ ID NO: 877644 - DNA, 15 bp, Homo sapiens
aagtttcatgagggc

SEQ ID NO: 877645 - DNA, 15 bp, Homo sapiens
taagtttcatgaggg

SEQ ID NO: 877646 - DNA, 15 bp, Homo sapiens
gtaagtttcatgagg

SEQ ID NO: 877647 - DNA, 15 bp, Homo sapiens
cgtaagtttcatgag

SEQ ID NO: 877648 - DNA, 15 bp, Homo sapiens
ccgtaagtttcatga

SEQ ID NO: 877649 - DNA, 15 bp, Homo sapiens
accgtaagtttcatg

SEQ ID NO: 877650 - DNA, 15 bp, Homo sapiens
gaccgtaagtttcat

SEQ ID NO: 877651 - DNA, 15 bp, Homo sapiens
ggaccgtaagtttca

SEQ ID NO: 877652 - DNA, 15 bp, Homo sapiens
tggaccgtaagtttc

SEQ ID NO: 877653 - DNA, 15 bp, Homo sapiens
ttggaccgtaagttt

SEQ ID NO: 877654 - DNA, 15 bp, Homo sapiens
tttggaccgtaagtt

SEQ ID NO: 877655 - DNA, 15 bp, Homo sapiens
ttttggaccgtaagt

SEQ ID NO: 877656 - DNA, 15 bp, Homo sapiens
attttggaccgtaag

SEQ ID NO: 877657 - DNA, 15 bp, Homo sapiens
cattttggaccgtaa

SEQ ID NO: 877658 - DNA, 15 bp, Homo sapiens
gcattttggaccgta

SEQ ID NO: 877659 - DNA, 15 bp, Homo sapiens
ggcattttggaccgt

SEQ ID NO: 877660 - DNA, 15 bp, Homo sapiens
gggcattttggaccg

SEQ ID NO: 877661 - DNA, 15 bp, Homo sapiens
agggcattttggacc

SEQ ID NO: 877662 - DNA, 15 bp, Homo sapiens
aagggcattttggac

SEQ ID NO: 877663 - DNA, 15 bp, Homo sapiens
caagggcattttgga

SEQ ID NO: 877664 - DNA, 15 bp, Homo sapiens
acaagggcattttgg

SEQ ID NO: 877665 - DNA, 15 bp, Homo sapiens
gacaagggcattttg

SEQ ID NO: 877666 - DNA, 15 bp, Homo sapiens
agacaagggcatttt

SEQ ID NO: 877667 - DNA, 15 bp, Homo sapiens
gagacaagggcattt

SEQ ID NO: 877668 - DNA, 15 bp, Homo sapiens
agagacaagggcatt

SEQ ID NO: 877669 - DNA, 15 bp, Homo sapiens
cagagacaagggcat

SEQ ID NO: 877670 - DNA, 15 bp, Homo sapiens
acagagacaagggca

SEQ ID NO: 877671 - DNA, 15 bp, Homo sapiens
aacagagacaagggc

SEQ ID NO: 877672 - DNA, 15 bp, Homo sapiens
gaacagagacaaggg

SEQ ID NO: 877673 - DNA, 15 bp, Homo sapiens
tgaacagagacaagg

SEQ ID NO: 877674 - DNA, 15 bp, Homo sapiens
atgaacagagacaag

SEQ ID NO: 877675 - DNA, 15 bp, Homo sapiens
aatgaacagagacaa

SEQ ID NO: 877676 - DNA, 15 bp, Homo sapiens
gaatgaacagagaca

SEQ ID NO: 877677 - DNA, 15 bp, Homo sapiens
ggaatgaacagagac

SEQ ID NO: 877678 - DNA, 15 bp, Homo sapiens
aggaatgaacagaga

SEQ ID NO: 877679 - DNA, 15 bp, Homo sapiens
caggaatgaacagag

SEQ ID NO: 877680 - DNA, 15 bp, Homo sapiens
ccaggaatgaacaga

SEQ ID NO: 877681 - DNA, 15 bp, Homo sapiens
cccaggaatgaacag

SEQ ID NO: 877682 - DNA, 15 bp, Homo sapiens
tcccaggaatgaaca

SEQ ID NO: 877683 - DNA, 15 bp, Homo sapiens
ttcccaggaatgaac

SEQ ID NO: 877684 - DNA, 15 bp, Homo sapiens
tttcccaggaatgaa

SEQ ID NO: 877685 - DNA, 15 bp, Homo sapiens
ttttcccaggaatga

SEQ ID NO: 877686 - DNA, 15 bp, Homo sapiens
attttcccaggaatg

SEQ ID NO: 877687 - DNA, 15 bp, Homo sapiens
aattttcccaggaat

SEQ ID NO: 877688 - DNA, 15 bp, Homo sapiens
aaattttcccaggaa

SEQ ID NO: 877689 - DNA, 15 bp, Homo sapiens
gaaattttcccagga

SEQ ID NO: 877690 - DNA, 15 bp, Homo sapiens
tgaaattttcccagg

SEQ ID NO: 877691 - DNA, 15 bp, Homo sapiens
gtgaaattttcccag

SEQ ID NO: 877692 - DNA, 15 bp, Homo sapiens
ggtgaaattttccca

SEQ ID NO: 877693 - DNA, 15 bp, Homo sapiens
aggtgaaattttccc

SEQ ID NO: 877694 - DNA, 15 bp, Homo sapiens
caggtgaaattttcc

SEQ ID NO: 877695 - DNA, 15 bp, Homo sapiens
gcaggtgaaattttc

SEQ ID NO: 877696 - DNA, 15 bp, Homo sapiens
tgcaggtgaaatttt

SEQ ID NO: 877697 - DNA, 15 bp, Homo sapiens
ttgcaggtgaaattt

SEQ ID NO: 877698 - DNA, 15 bp, Homo sapiens
attgcaggtgaaatt

SEQ ID NO: 877699 - DNA, 15 bp, Homo sapiens
cattgcaggtgaaat

SEQ ID NO: 877700 - DNA, 15 bp, Homo sapiens
acattgcaggtgaaa

SEQ ID NO: 877701 - DNA, 15 bp, Homo sapiens
tacattgcaggtgaa

SEQ ID NO: 877702 - DNA, 15 bp, Homo sapiens
atacattgcaggtga

SEQ ID NO: 877703 - DNA, 15 bp, Homo sapiens
gatacattgcaggtg

SEQ ID NO: 877704 - DNA, 15 bp, Homo sapiens
agatacattgcaggt

SEQ ID NO: 877705 - DNA, 15 bp, Homo sapiens
aagatacattgcagg

SEQ ID NO: 877706 - DNA, 15 bp, Homo sapiens
caagatacattgcag

SEQ ID NO: 877707 - DNA, 15 bp, Homo sapiens
acaagatacattgca

SEQ ID NO: 877708 - DNA, 15 bp, Homo sapiens
aacaagatacattgc

SEQ ID NO: 877709 - DNA, 15 bp, Homo sapiens
aaacaagatacattg

SEQ ID NO: 877710 - DNA, 15 bp, Homo sapiens
gaaacaagatacatt

SEQ ID NO: 877711 - DNA, 15 bp, Homo sapiens
ggaaacaagatacat

SEQ ID NO: 877712 - DNA, 15 bp, Homo sapiens
aggaaacaagataca

SEQ ID NO: 877713 - DNA, 15 bp, Homo sapiens
caggaaacaagatac

SEQ ID NO: 877714 - DNA, 15 bp, Homo sapiens
acaggaaacaagata

SEQ ID NO: 877715 - DNA, 15 bp, Homo sapiens
tacaggaaacaagat

SEQ ID NO: 877716 - DNA, 15 bp, Homo sapiens
ttacaggaaacaaga

SEQ ID NO: 877717 - DNA, 15 bp, Homo sapiens
gttacaggaaacaag

SEQ ID NO: 877718 - DNA, 15 bp, Homo sapiens
ggttacaggaaacaa

SEQ ID NO: 877719 - DNA, 15 bp, Homo sapiens
gggttacaggaaaca

SEQ ID NO: 877720 - DNA, 15 bp, Homo sapiens
tgggttacaggaaac

SEQ ID NO: 877721 - DNA, 15 bp, Homo sapiens
gtgggttacaggaaa

SEQ ID NO: 877722 - DNA, 15 bp, Homo sapiens
tgtgggttacaggaa

SEQ ID NO: 877723 - DNA, 15 bp, Homo sapiens
ctgtgggttacagga

SEQ ID NO: 877724 - DNA, 15 bp, Homo sapiens
cctgtgggttacagg

SEQ ID NO: 877725 - DNA, 15 bp, Homo sapiens
ccctgtgggttacag

SEQ ID NO: 877726 - DNA, 15 bp, Homo sapiens
tccctgtgggttaca

SEQ ID NO: 877727 - DNA, 15 bp, Homo sapiens
atccctgtgggttac

SEQ ID NO: 877728 - DNA, 15 bp, Homo sapiens
catccctgtgggtta

SEQ ID NO: 877729 - DNA, 15 bp, Homo sapiens
acatccctgtgggtt

SEQ ID NO: 877730 - DNA, 15 bp, Homo sapiens
gacatccctgtgggt

SEQ ID NO: 877731 - DNA, 15 bp, Homo sapiens
cgacatccctgtggg

SEQ ID NO: 877732 - DNA, 15 bp, Homo sapiens
ccgacatccctgtgg

SEQ ID NO: 877733 - DNA, 15 bp, Homo sapiens
accgacatccctgtg

SEQ ID NO: 877734 - DNA, 15 bp, Homo sapiens
caccgacatccctgt

SEQ ID NO: 877735 - DNA, 15 bp, Homo sapiens
gcaccgacatccctg

SEQ ID NO: 877736 - DNA, 15 bp, Homo sapiens
agcaccgacatccct

SEQ ID NO: 877737 - DNA, 15 bp, Homo sapiens
cagcaccgacatccc

SEQ ID NO: 877738 - DNA, 15 bp, Homo sapiens
gcagcaccgacatcc

SEQ ID NO: 877739 - DNA, 15 bp, Homo sapiens
ggcagcaccgacatc

SEQ ID NO: 877740 - DNA, 15 bp, Homo sapiens
tggcagcaccgacat

SEQ ID NO: 877741 - DNA, 15 bp, Homo sapiens
gtggcagcaccgaca

SEQ ID NO: 877742 - DNA, 15 bp, Homo sapiens
ggtggcagcaccgac

SEQ ID NO: 877743 - DNA, 15 bp, Homo sapiens
aggtggcagcaccga

SEQ ID NO: 877744 - DNA, 15 bp, Homo sapiens
caggtggcagcaccg

SEQ ID NO: 877745 - DNA, 15 bp, Homo sapiens
gcaggtggcagcacc

SEQ ID NO: 877746 - DNA, 15 bp, Homo sapiens
ggcaggtggcagcac

SEQ ID NO: 877747 - DNA, 15 bp, Homo sapiens
gggcaggtggcagca

SEQ ID NO: 877748 - DNA, 15 bp, Homo sapiens
agggcaggtggcagc

SEQ ID NO: 877749 - DNA, 15 bp, Homo sapiens
aagggcaggtggcag

SEQ ID NO: 877750 - DNA, 15 bp, Homo sapiens
gaagggcaggtggca

SEQ ID NO: 877751 - DNA, 15 bp, Homo sapiens
agaagggcaggtggc

SEQ ID NO: 877752 - DNA, 15 bp, Homo sapiens
gagaagggcaggtgg

SEQ ID NO: 877753 - DNA, 15 bp, Homo sapiens
ggagaagggcaggtg

SEQ ID NO: 877754 - DNA, 15 bp, Homo sapiens
gggagaagggcaggt

SEQ ID NO: 877755 - DNA, 15 bp, Homo sapiens
agggagaagggcagg

SEQ ID NO: 877756 - DNA, 15 bp, Homo sapiens
cagggagaagggcag

SEQ ID NO: 877757 - DNA, 15 bp, Homo sapiens
ccagggagaagggca

SEQ ID NO: 877758 - DNA, 15 bp, Homo sapiens
cccagggagaagggc

SEQ ID NO: 877759 - DNA, 15 bp, Homo sapiens
gcccagggagaaggg

SEQ ID NO: 877760 - DNA, 15 bp, Homo sapiens
ggcccagggagaagg

SEQ ID NO: 877761 - DNA, 15 bp, Homo sapiens
gggcccagggagaag

SEQ ID NO: 877762 - DNA, 15 bp, Homo sapiens
ggggcccagggagaa

SEQ ID NO: 877763 - DNA, 15 bp, Homo sapiens
aggggcccagggaga

SEQ ID NO: 877764 - DNA, 15 bp, Homo sapiens
gaggggcccagggag

SEQ ID NO: 877765 - DNA, 15 bp, Homo sapiens
agaggggcccaggga

SEQ ID NO: 877766 - DNA, 15 bp, Homo sapiens
gagaggggcccaggg

SEQ ID NO: 877767 - DNA, 15 bp, Homo sapiens
agagaggggcccagg

SEQ ID NO: 877768 - DNA, 15 bp, Homo sapiens
gagagaggggcccag

SEQ ID NO: 877769 - DNA, 15 bp, Homo sapiens
agagagaggggccca

SEQ ID NO: 877770 - DNA, 15 bp, Homo sapiens
cagagagaggggccc

SEQ ID NO: 877771 - DNA, 15 bp, Homo sapiens
gcagagagaggggcc

SEQ ID NO: 877772 - DNA, 15 bp, Homo sapiens
tgcagagagaggggc

SEQ ID NO: 877773 - DNA, 15 bp, Homo sapiens
ttgcagagagagggg

SEQ ID NO: 877774 - DNA, 15 bp, Homo sapiens
cttgcagagagaggg

SEQ ID NO: 877775 - DNA, 15 bp, Homo sapiens
tcttgcagagagagg

SEQ ID NO: 877776 - DNA, 15 bp, Homo sapiens
gtcttgcagagagag

SEQ ID NO: 877777 - DNA, 15 bp, Homo sapiens
ggtcttgcagagaga

SEQ ID NO: 877778 - DNA, 15 bp, Homo sapiens
gggtcttgcagagag

SEQ ID NO: 877779 - DNA, 15 bp, Homo sapiens
tgggtcttgcagaga

SEQ ID NO: 877780 - DNA, 15 bp, Homo sapiens
ctgggtcttgcagag

SEQ ID NO: 877781 - DNA, 15 bp, Homo sapiens
cctgggtcttgcaga

SEQ ID NO: 877782 - DNA, 15 bp, Homo sapiens
acctgggtcttgcag

SEQ ID NO: 877783 - DNA, 15 bp, Homo sapiens
cacctgggtcttgca

SEQ ID NO: 877784 - DNA, 15 bp, Homo sapiens
acacctgggtcttgc

SEQ ID NO: 877785 - DNA, 15 bp, Homo sapiens
aacacctgggtcttg

SEQ ID NO: 877786 - DNA, 15 bp, Homo sapiens
caacacctgggtctt

SEQ ID NO: 877787 - DNA, 15 bp, Homo sapiens
acaacacctgggtct

SEQ ID NO: 877788 - DNA, 15 bp, Homo sapiens
tacaacacctgggtc

SEQ ID NO: 877789 - DNA, 15 bp, Homo sapiens
ctacaacacctgggt

SEQ ID NO: 877790 - DNA, 15 bp, Homo sapiens
actacaacacctggg

SEQ ID NO: 877791 - DNA, 15 bp, Homo sapiens
gactacaacacctgg

SEQ ID NO: 877792 - DNA, 15 bp, Homo sapiens
ggactacaacacctg

SEQ ID NO: 877793 - DNA, 15 bp, Homo sapiens
tggactacaacacct

SEQ ID NO: 877794 - DNA, 15 bp, Homo sapiens
gtggactacaacacc

SEQ ID NO: 877795 - DNA, 15 bp, Homo sapiens
ggtggactacaacac

SEQ ID NO: 877796 - DNA, 15 bp, Homo sapiens
gggtggactacaaca

SEQ ID NO: 877797 - DNA, 15 bp, Homo sapiens
ggggtggactacaac

SEQ ID NO: 877798 - DNA, 15 bp, Homo sapiens
tggggtggactacaa

SEQ ID NO: 877799 - DNA, 15 bp, Homo sapiens
gtggggtggactaca

SEQ ID NO: 877800 - DNA, 15 bp, Homo sapiens
agtggggtggactac

SEQ ID NO: 877801 - DNA, 15 bp, Homo sapiens
gagtggggtggacta

SEQ ID NO: 877802 - DNA, 15 bp, Homo sapiens
tgagtggggtggact

SEQ ID NO: 877803 - DNA, 15 bp, Homo sapiens
ttgagtggggtggac

SEQ ID NO: 877804 - DNA, 15 bp, Homo sapiens
cttgagtggggtgga

SEQ ID NO: 877805 - DNA, 15 bp, Homo sapiens
gcttgagtggggtgg

SEQ ID NO: 877806 - DNA, 15 bp, Homo sapiens
ggcttgagtggggtg

SEQ ID NO: 877807 - DNA, 15 bp, Homo sapiens
gggcttgagtggggt

SEQ ID NO: 877808 - DNA, 15 bp, Homo sapiens
tgggcttgagtgggg

SEQ ID NO: 877809 - DNA, 15 bp, Homo sapiens
ttgggcttgagtggg

SEQ ID NO: 877810 - DNA, 15 bp, Homo sapiens
gttgggcttgagtgg

SEQ ID NO: 877811 - DNA, 15 bp, Homo sapiens
ggttgggcttgagtg

SEQ ID NO: 877812 - DNA, 15 bp, Homo sapiens
gggttgggcttgagt

SEQ ID NO: 877813 - DNA, 15 bp, Homo sapiens
ggggttgggcttgag

SEQ ID NO: 877814 - DNA, 15 bp, Homo sapiens
aggggttgggcttga

SEQ ID NO: 877815 - DNA, 15 bp, Homo sapiens
aaggggttgggcttg

SEQ ID NO: 877816 - DNA, 15 bp, Homo sapiens
gaaggggttgggctt

SEQ ID NO: 877817 - DNA, 15 bp, Homo sapiens
ggaaggggttgggct

SEQ ID NO: 877818 - DNA, 15 bp, Homo sapiens
gggaaggggttgggc

SEQ ID NO: 877819 - DNA, 15 bp, Homo sapiens
ggggaaggggttggg

SEQ ID NO: 877820 - DNA, 15 bp, Homo sapiens
tggggaaggggttgg

SEQ ID NO: 877821 - DNA, 15 bp, Homo sapiens
gtggggaaggggttg

SEQ ID NO: 877822 - DNA, 15 bp, Homo sapiens
agtggggaaggggtt

SEQ ID NO: 877823 - DNA, 15 bp, Homo sapiens
tagtggggaaggggt

SEQ ID NO: 877824 - DNA, 15 bp, Homo sapiens
gtagtggggaagggg

SEQ ID NO: 877825 - DNA, 15 bp, Homo sapiens
tgtagtggggaaggg

SEQ ID NO: 877826 - DNA, 15 bp, Homo sapiens
gtgtagtggggaagg

SEQ ID NO: 877827 - DNA, 15 bp, Homo sapiens
agtgtagtggggaag

SEQ ID NO: 877828 - DNA, 15 bp, Homo sapiens
cagtgtagtggggaa

SEQ ID NO: 877829 - DNA, 15 bp, Homo sapiens
ccagtgtagtgggga

SEQ ID NO: 877830 - DNA, 15 bp, Homo sapiens
gccagtgtagtgggg

SEQ ID NO: 877831 - DNA, 15 bp, Homo sapiens
agccagtgtagtggg

SEQ ID NO: 877832 - DNA, 15 bp, Homo sapiens
gagccagtgtagtgg

SEQ ID NO: 877833 - DNA, 15 bp, Homo sapiens
tgagccagtgtagtg

SEQ ID NO: 877834 - DNA, 15 bp, Homo sapiens
ctgagccagtgtagt

SEQ ID NO: 877835 - DNA, 15 bp, Homo sapiens
tctgagccagtgtag

SEQ ID NO: 877836 - DNA, 15 bp, Homo sapiens
ttctgagccagtgta

SEQ ID NO: 877837 - DNA, 15 bp, Homo sapiens
cttctgagccagtgt

SEQ ID NO: 877838 - DNA, 15 bp, Homo sapiens
gcttctgagccagtg

SEQ ID NO: 877839 - DNA, 15 bp, Homo sapiens
tgcttctgagccagt

SEQ ID NO: 877840 - DNA, 15 bp, Homo sapiens
ttgcttctgagccag

SEQ ID NO: 877841 - DNA, 15 bp, Homo sapiens
cttgcttctgagcca

SEQ ID NO: 877842 - DNA, 15 bp, Homo sapiens
acttgcttctgagcc

SEQ ID NO: 877843 - DNA, 15 bp, Homo sapiens
gacttgcttctgagc

SEQ ID NO: 877844 - DNA, 15 bp, Homo sapiens
agacttgcttctgag

SEQ ID NO: 877845 - DNA, 15 bp, Homo sapiens
cagacttgcttctga

SEQ ID NO: 877846 - DNA, 15 bp, Homo sapiens
tcagacttgcttctg

SEQ ID NO: 877847 - DNA, 15 bp, Homo sapiens
ttcagacttgcttct

SEQ ID NO: 877848 - DNA, 15 bp, Homo sapiens
tttcagacttgcttc

SEQ ID NO: 877849 - DNA, 15 bp, Homo sapiens
atttcagacttgctt

SEQ ID NO: 877850 - DNA, 15 bp, Homo sapiens
gatttcagacttgct

SEQ ID NO: 877851 - DNA, 15 bp, Homo sapiens
ggatttcagacttgc

SEQ ID NO: 877852 - DNA, 15 bp, Homo sapiens
aggatttcagacttg

SEQ ID NO: 877853 - DNA, 15 bp, Homo sapiens
aaggatttcagactt

SEQ ID NO: 877854 - DNA, 15 bp, Homo sapiens
aaaggatttcagact

SEQ ID NO: 877855 - DNA, 15 bp, Homo sapiens
taaaggatttcagac

SEQ ID NO: 877856 - DNA, 15 bp, Homo sapiens
ctaaaggatttcaga

SEQ ID NO: 877857 - DNA, 15 bp, Homo sapiens
cctaaaggatttcag

SEQ ID NO: 877858 - DNA, 15 bp, Homo sapiens
acctaaaggatttca

SEQ ID NO: 877859 - DNA, 15 bp, Homo sapiens
cacctaaaggatttc

SEQ ID NO: 877860 - DNA, 15 bp, Homo sapiens
gcacctaaaggattt

SEQ ID NO: 877861 - DNA, 15 bp, Homo sapiens
agcacctaaaggatt

SEQ ID NO: 877862 - DNA, 15 bp, Homo sapiens
cagcacctaaaggat

SEQ ID NO: 877863 - DNA, 15 bp, Homo sapiens
gcagcacctaaagga

SEQ ID NO: 877864 - DNA, 15 bp, Homo sapiens
tgcagcacctaaagg

SEQ ID NO: 877865 - DNA, 15 bp, Homo sapiens
ttgcagcacctaaag

SEQ ID NO: 877866 - DNA, 15 bp, Homo sapiens
cttgcagcacctaaa

SEQ ID NO: 877867 - DNA, 15 bp, Homo sapiens
ccttgcagcacctaa

SEQ ID NO: 877868 - DNA, 15 bp, Homo sapiens
gccttgcagcaccta

SEQ ID NO: 877869 - DNA, 15 bp, Homo sapiens
tgccttgcagcacct

SEQ ID NO: 877870 - DNA, 15 bp, Homo sapiens
atgccttgcagcacc

SEQ ID NO: 877871 - DNA, 15 bp, Homo sapiens
gatgccttgcagcac

SEQ ID NO: 877872 - DNA, 15 bp, Homo sapiens
agatgccttgcagca

SEQ ID NO: 877873 - DNA, 15 bp, Homo sapiens
aagatgccttgcagc

SEQ ID NO: 877874 - DNA, 15 bp, Homo sapiens
gaagatgccttgcag

SEQ ID NO: 877875 - DNA, 15 bp, Homo sapiens
tgaagatgccttgca

SEQ ID NO: 877876 - DNA, 15 bp, Homo sapiens
ctgaagatgccttgc

SEQ ID NO: 877877 - DNA, 15 bp, Homo sapiens
tctgaagatgccttg

SEQ ID NO: 877878 - DNA, 15 bp, Homo sapiens
atctgaagatgcctt

SEQ ID NO: 877879 - DNA, 15 bp, Homo sapiens
gatctgaagatgcct

SEQ ID NO: 877880 - DNA, 15 bp, Homo sapiens
ggatctgaagatgcc

SEQ ID NO: 877881 - DNA, 15 bp, Homo sapiens
gggatctgaagatgc

SEQ ID NO: 877882 - DNA, 15 bp, Homo sapiens
tgggatctgaagatg

SEQ ID NO: 877883 - DNA, 15 bp, Homo sapiens
ttgggatctgaagat

SEQ ID NO: 877884 - DNA, 15 bp, Homo sapiens
gttgggatctgaaga

SEQ ID NO: 877885 - DNA, 15 bp, Homo sapiens
agttgggatctgaag

SEQ ID NO: 877886 - DNA, 15 bp, Homo sapiens
tagttgggatctgaa

SEQ ID NO: 877887 - DNA, 15 bp, Homo sapiens
atagttgggatctga

SEQ ID NO: 877888 - DNA, 15 bp, Homo sapiens
gatagttgggatctg

SEQ ID NO: 877889 - DNA, 15 bp, Homo sapiens
agatagttgggatct

SEQ ID NO: 877890 - DNA, 15 bp, Homo sapiens
cagatagttgggatc

SEQ ID NO: 877891 - DNA, 15 bp, Homo sapiens
tcagatagttgggat

SEQ ID NO: 877892 - DNA, 15 bp, Homo sapiens
gtcagatagttggga

SEQ ID NO: 877893 - DNA, 15 bp, Homo sapiens
agtcagatagttggg

SEQ ID NO: 877894 - DNA, 15 bp, Homo sapiens
gagtcagatagttgg

SEQ ID NO: 877895 - DNA, 15 bp, Homo sapiens
agagtcagatagttg

SEQ ID NO: 877896 - DNA, 15 bp, Homo sapiens
cagagtcagatagtt

SEQ ID NO: 877897 - DNA, 15 bp, Homo sapiens
acagagtcagatagt

SEQ ID NO: 877898 - DNA, 15 bp, Homo sapiens
aacagagtcagatag

SEQ ID NO: 877899 - DNA, 15 bp, Homo sapiens
gaacagagtcagata

SEQ ID NO: 877900 - DNA, 15 bp, Homo sapiens
tgaacagagtcagat

SEQ ID NO: 877901 - DNA, 15 bp, Homo sapiens
gtgaacagagtcaga

SEQ ID NO: 877902 - DNA, 15 bp, Homo sapiens
agtgaacagagtcag

SEQ ID NO: 877903 - DNA, 15 bp, Homo sapiens
gagtgaacagagtca

SEQ ID NO: 877904 - DNA, 15 bp, Homo sapiens
agagtgaacagagtc

SEQ ID NO: 877905 - DNA, 15 bp, Homo sapiens
cagagtgaacagagt

SEQ ID NO: 877906 - DNA, 15 bp, Homo sapiens
gcagagtgaacagag

SEQ ID NO: 877907 - DNA, 15 bp, Homo sapiens
agcagagtgaacaga

SEQ ID NO: 877908 - DNA, 15 bp, Homo sapiens
aagcagagtgaacag

SEQ ID NO: 877909 - DNA, 15 bp, Homo sapiens
gaagcagagtgaaca

SEQ ID NO: 877910 - DNA, 15 bp, Homo sapiens
tgaagcagagtgaac

SEQ ID NO: 877911 - DNA, 15 bp, Homo sapiens
ttgaagcagagtgaa

SEQ ID NO: 877912 - DNA, 15 bp, Homo sapiens
gttgaagcagagtga

SEQ ID NO: 877913 - DNA, 15 bp, Homo sapiens
tgttgaagcagagtg

SEQ ID NO: 877914 - DNA, 15 bp, Homo sapiens
ttgttgaagcagagt

SEQ ID NO: 877915 - DNA, 15 bp, Homo sapiens
gttgttgaagcagag

SEQ ID NO: 877916 - DNA, 15 bp, Homo sapiens
cgttgttgaagcaga

SEQ ID NO: 877917 - DNA, 15 bp, Homo sapiens
ccgttgttgaagcag

SEQ ID NO: 877918 - DNA, 15 bp, Homo sapiens
gccgttgttgaagca

SEQ ID NO: 877919 - DNA, 15 bp, Homo sapiens
agccgttgttgaagc

SEQ ID NO: 877920 - DNA, 15 bp, Homo sapiens
aagccgttgttgaag

SEQ ID NO: 877921 - DNA, 15 bp, Homo sapiens
aaagccgttgttgaa

SEQ ID NO: 877922 - DNA, 15 bp, Homo sapiens
gaaagccgttgttga

SEQ ID NO: 877923 - DNA, 15 bp, Homo sapiens
agaaagccgttgttg

SEQ ID NO: 877924 - DNA, 15 bp, Homo sapiens
tagaaagccgttgtt

SEQ ID NO: 877925 - DNA, 15 bp, Homo sapiens
ttagaaagccgttgt

SEQ ID NO: 877926 - DNA, 15 bp, Homo sapiens
gttagaaagccgttg

SEQ ID NO: 877927 - DNA, 15 bp, Homo sapiens
agttagaaagccgtt

SEQ ID NO: 877928 - DNA, 15 bp, Homo sapiens
cagttagaaagccgt

SEQ ID NO: 877929 - DNA, 15 bp, Homo sapiens
ccagttagaaagccg

SEQ ID NO: 877930 - DNA, 15 bp, Homo sapiens
gccagttagaaagcc

SEQ ID NO: 877931 - DNA, 15 bp, Homo sapiens
agccagttagaaagc

SEQ ID NO: 877932 - DNA, 15 bp, Homo sapiens
aagccagttagaaag

SEQ ID NO: 877933 - DNA, 15 bp, Homo sapiens
aaagccagttagaaa

SEQ ID NO: 877934 - DNA, 15 bp, Homo sapiens
caaagccagttagaa

SEQ ID NO: 877935 - DNA, 15 bp, Homo sapiens
gcaaagccagttaga

SEQ ID NO: 877936 - DNA, 15 bp, Homo sapiens
cgcaaagccagttag

SEQ ID NO: 877937 - DNA, 15 bp, Homo sapiens
tcgcaaagccagtta

SEQ ID NO: 877938 - DNA, 15 bp, Homo sapiens
atcgcaaagccagtt

SEQ ID NO: 877939 - DNA, 15 bp, Homo sapiens
gatcgcaaagccagt

SEQ ID NO: 877940 - DNA, 15 bp, Homo sapiens
cgatcgcaaagccag

SEQ ID NO: 877941 - DNA, 15 bp, Homo sapiens
tcgatcgcaaagcca

SEQ ID NO: 877942 - DNA, 15 bp, Homo sapiens
ttcgatcgcaaagcc

SEQ ID NO: 877943 - DNA, 15 bp, Homo sapiens
tttcgatcgcaaagc

SEQ ID NO: 877944 - DNA, 15 bp, Homo sapiens
ctttcgatcgcaaag

SEQ ID NO: 877945 - DNA, 15 bp, Homo sapiens
tctttcgatcgcaaa

SEQ ID NO: 877946 - DNA, 15 bp, Homo sapiens
atctttcgatcgcaa

SEQ ID NO: 877947 - DNA, 15 bp, Homo sapiens
aatctttcgatcgca

SEQ ID NO: 877948 - DNA, 15 bp, Homo sapiens
aaatctttcgatcgc

SEQ ID NO: 877949 - DNA, 15 bp, Homo sapiens
aaaatctttcgatcg

SEQ ID NO: 877950 - DNA, 15 bp, Homo sapiens
caaaatctttcgatc

SEQ ID NO: 877951 - DNA, 15 bp, Homo sapiens
gcaaaatctttcgat

SEQ ID NO: 877952 - DNA, 15 bp, Homo sapiens
agcaaaatctttcga

SEQ ID NO: 877953 - DNA, 15 bp, Homo sapiens
cagcaaaatctttcg

SEQ ID NO: 877954 - DNA, 15 bp, Homo sapiens
gcagcaaaatctttc

SEQ ID NO: 877955 - DNA, 15 bp, Homo sapiens
tgcagcaaaatcttt

SEQ ID NO: 877956 - DNA, 15 bp, Homo sapiens
ctgcagcaaaatctt

SEQ ID NO: 877957 - DNA, 15 bp, Homo sapiens
actgcagcaaaatct

SEQ ID NO: 877958 - DNA, 15 bp, Homo sapiens
cactgcagcaaaatc

SEQ ID NO: 877959 - DNA, 15 bp, Homo sapiens
gcactgcagcaaaat

SEQ ID NO: 877960 - DNA, 15 bp, Homo sapiens
ggcactgcagcaaaa

SEQ ID NO: 877961 - DNA, 15 bp, Homo sapiens
aggcactgcagcaaa

SEQ ID NO: 877962 - DNA, 15 bp, Homo sapiens
caggcactgcagcaa

SEQ ID NO: 877963 - DNA, 15 bp, Homo sapiens
ccaggcactgcagca

SEQ ID NO: 877964 - DNA, 15 bp, Homo sapiens
cccaggcactgcagc

SEQ ID NO: 877965 - DNA, 15 bp, Homo sapiens
ccccaggcactgcag

SEQ ID NO: 877966 - DNA, 15 bp, Homo sapiens
gccccaggcactgca

SEQ ID NO: 877967 - DNA, 15 bp, Homo sapiens
ggccccaggcactgc

SEQ ID NO: 877968 - DNA, 15 bp, Homo sapiens
aggccccaggcactg

SEQ ID NO: 877969 - DNA, 15 bp, Homo sapiens
aaggccccaggcact

SEQ ID NO: 877970 - DNA, 15 bp, Homo sapiens
aaaggccccaggcac

SEQ ID NO: 877971 - DNA, 15 bp, Homo sapiens
caaaggccccaggca

SEQ ID NO: 877972 - DNA, 15 bp, Homo sapiens
ccaaaggccccaggc

SEQ ID NO: 877973 - DNA, 15 bp, Homo sapiens
cccaaaggccccagg

SEQ ID NO: 877974 - DNA, 15 bp, Homo sapiens
tcccaaaggccccag

SEQ ID NO: 877975 - DNA, 15 bp, Homo sapiens
ctcccaaaggcccca

SEQ ID NO: 877976 - DNA, 15 bp, Homo sapiens
cctcccaaaggcccc

SEQ ID NO: 877977 - DNA, 15 bp, Homo sapiens
ccctcccaaaggccc

SEQ ID NO: 877978 - DNA, 15 bp, Homo sapiens
tccctcccaaaggcc

SEQ ID NO: 877979 - DNA, 15 bp, Homo sapiens
ttccctcccaaaggc

SEQ ID NO: 877980 - DNA, 15 bp, Homo sapiens
tttccctcccaaagg

SEQ ID NO: 877981 - DNA, 15 bp, Homo sapiens
gtttccctcccaaag

SEQ ID NO: 877982 - DNA, 15 bp, Homo sapiens
tgtttccctcccaaa

SEQ ID NO: 877983 - DNA, 15 bp, Homo sapiens
gtgtttccctcccaa

SEQ ID NO: 877984 - DNA, 15 bp, Homo sapiens
tgtgtttccctccca

SEQ ID NO: 877985 - DNA, 15 bp, Homo sapiens
atgtgtttccctccc

SEQ ID NO: 877986 - DNA, 15 bp, Homo sapiens
tatgtgtttccctcc

SEQ ID NO: 877987 - DNA, 15 bp, Homo sapiens
ttatgtgtttccctc

SEQ ID NO: 877988 - DNA, 15 bp, Homo sapiens
attatgtgtttccct

SEQ ID NO: 877989 - DNA, 15 bp, Homo sapiens
cattatgtgtttccc

SEQ ID NO: 877990 - DNA, 15 bp, Homo sapiens
ccattatgtgtttcc

SEQ ID NO: 877991 - DNA, 15 bp, Homo sapiens
cccattatgtgtttc

SEQ ID NO: 877992 - DNA, 15 bp, Homo sapiens
tcccattatgtgttt

SEQ ID NO: 877993 - DNA, 15 bp, Homo sapiens
ttcccattatgtgtt

SEQ ID NO: 877994 - DNA, 15 bp, Homo sapiens
cttcccattatgtgt

SEQ ID NO: 877995 - DNA, 15 bp, Homo sapiens
tcttcccattatgtg

SEQ ID NO: 877996 - DNA, 15 bp, Homo sapiens
atcttcccattatgt

SEQ ID NO: 877997 - DNA, 15 bp, Homo sapiens
catcttcccattatg

SEQ ID NO: 877998 - DNA, 15 bp, Homo sapiens
ccatcttcccattat

SEQ ID NO: 877999 - DNA, 15 bp, Homo sapiens
cccatcttcccatta

SEQ ID NO: 878000 - DNA, 15 bp, Homo sapiens
acccatcttcccatt

SEQ ID NO: 878001 - DNA, 15 bp, Homo sapiens
aacccatcttcccat

SEQ ID NO: 878002 - DNA, 15 bp, Homo sapiens
gaacccatcttccca

SEQ ID NO: 878003 - DNA, 15 bp, Homo sapiens
agaacccatcttccc

SEQ ID NO: 878004 - DNA, 15 bp, Homo sapiens
gagaacccatcttcc

SEQ ID NO: 878005 - DNA, 15 bp, Homo sapiens
tgagaacccatcttc

SEQ ID NO: 878006 - DNA, 15 bp, Homo sapiens
atgagaacccatctt

SEQ ID NO: 878007 - DNA, 15 bp, Homo sapiens
catgagaacccatct

SEQ ID NO: 878008 - DNA, 15 bp, Homo sapiens
tcatgagaacccatc

SEQ ID NO: 878009 - DNA, 15 bp, Homo sapiens
ctcatgagaacccat

SEQ ID NO: 878010 - DNA, 15 bp, Homo sapiens
gctcatgagaaccca

SEQ ID NO: 878011 - DNA, 15 bp, Homo sapiens
agctcatgagaaccc

SEQ ID NO: 878012 - DNA, 15 bp, Homo sapiens
gagctcatgagaacc

SEQ ID NO: 878013 - DNA, 15 bp, Homo sapiens
tgagctcatgagaac

SEQ ID NO: 878014 - DNA, 15 bp, Homo sapiens
atgagctcatgagaa

SEQ ID NO: 878015 - DNA, 15 bp, Homo sapiens
aatgagctcatgaga

SEQ ID NO: 878016 - DNA, 15 bp, Homo sapiens
aaatgagctcatgag

SEQ ID NO: 878017 - DNA, 15 bp, Homo sapiens
taaatgagctcatga

SEQ ID NO: 878018 - DNA, 15 bp, Homo sapiens
gtaaatgagctcatg

SEQ ID NO: 878019 - DNA, 15 bp, Homo sapiens
tgtaaatgagctcat

SEQ ID NO: 878020 - DNA, 15 bp, Homo sapiens
ctgtaaatgagctca

SEQ ID NO: 878021 - DNA, 15 bp, Homo sapiens
actgtaaatgagctc

SEQ ID NO: 878022 - DNA, 15 bp, Homo sapiens
tactgtaaatgagct

SEQ ID NO: 878023 - DNA, 15 bp, Homo sapiens
ctactgtaaatgagc

SEQ ID NO: 878024 - DNA, 15 bp, Homo sapiens
tctactgtaaatgag

SEQ ID NO: 878025 - DNA, 15 bp, Homo sapiens
ttctactgtaaatga

SEQ ID NO: 878026 - DNA, 15 bp, Homo sapiens
gttctactgtaaatg

SEQ ID NO: 878027 - DNA, 15 bp, Homo sapiens
tgttctactgtaaat

SEQ ID NO: 878028 - DNA, 15 bp, Homo sapiens
ctgttctactgtaaa

SEQ ID NO: 878029 - DNA, 15 bp, Homo sapiens
actgttctactgtaa

SEQ ID NO: 878030 - DNA, 15 bp, Homo sapiens
gactgttctactgta

SEQ ID NO: 878031 - DNA, 15 bp, Homo sapiens
agactgttctactgt

SEQ ID NO: 878032 - DNA, 15 bp, Homo sapiens
cagactgttctactg

SEQ ID NO: 878033 - DNA, 15 bp, Homo sapiens
ccagactgttctact

SEQ ID NO: 878034 - DNA, 15 bp, Homo sapiens
accagactgttctac

SEQ ID NO: 878035 - DNA, 15 bp, Homo sapiens
aaccagactgttcta

SEQ ID NO: 878036 - DNA, 15 bp, Homo sapiens
aaaccagactgttct

SEQ ID NO: 878037 - DNA, 15 bp, Homo sapiens
aaaaccagactgttc

SEQ ID NO: 878038 - DNA, 15 bp, Homo sapiens
taaaaccagactgtt

SEQ ID NO: 878039 - DNA, 15 bp, Homo sapiens
ataaaaccagactgt

SEQ ID NO: 878040 - DNA, 15 bp, Homo sapiens
tataaaaccagactg

SEQ ID NO: 878041 - DNA, 15 bp, Homo sapiens
atataaaaccagact

SEQ ID NO: 878042 - DNA, 15 bp, Homo sapiens
tatataaaaccagac

SEQ ID NO: 878043 - DNA, 15 bp, Homo sapiens
ttatataaaaccaga

SEQ ID NO: 878044 - DNA, 15 bp, Homo sapiens
attatataaaaccag

SEQ ID NO: 878045 - DNA, 15 bp, Homo sapiens
aattatataaaacca

SEQ ID NO: 878046 - DNA, 15 bp, Homo sapiens
aaattatataaaacc

SEQ ID NO: 878047 - DNA, 15 bp, Homo sapiens
taaattatataaaac

SEQ ID NO: 878048 - DNA, 15 bp, Homo sapiens
ataaattatataaaa

SEQ ID NO: 878049 - DNA, 15 bp, Homo sapiens
tataaattatataaa

SEQ ID NO: 878050 - DNA, 15 bp, Homo sapiens
atataaattatataa

SEQ ID NO: 878051 - DNA, 15 bp, Homo sapiens
aatataaattatata

SEQ ID NO: 878052 - DNA, 15 bp, Homo sapiens
aaatataaattatat

SEQ ID NO: 878053 - DNA, 15 bp, Homo sapiens
aaaatataaattata

SEQ ID NO: 878054 - DNA, 15 bp, Homo sapiens
caaaatataaattat

SEQ ID NO: 878055 - DNA, 15 bp, Homo sapiens
ccaaaatataaatta

SEQ ID NO: 878056 - DNA, 15 bp, Homo sapiens
cccaaaatataaatt

SEQ ID NO: 878057 - DNA, 15 bp, Homo sapiens
gcccaaaatataaat

SEQ ID NO: 878058 - DNA, 15 bp, Homo sapiens
ggcccaaaatataaa

SEQ ID NO: 878059 - DNA, 15 bp, Homo sapiens
aggcccaaaatataa

SEQ ID NO: 878060 - DNA, 15 bp, Homo sapiens
taggcccaaaatata

SEQ ID NO: 878061 - DNA, 15 bp, Homo sapiens
ataggcccaaaatat

SEQ ID NO: 878062 - DNA, 15 bp, Homo sapiens
tataggcccaaaata

SEQ ID NO: 878063 - DNA, 15 bp, Homo sapiens
atataggcccaaaat

SEQ ID NO: 878064 - DNA, 15 bp, Homo sapiens
catataggcccaaaa

SEQ ID NO: 878065 - DNA, 15 bp, Homo sapiens
acatataggcccaaa

SEQ ID NO: 878066 - DNA, 15 bp, Homo sapiens
tacatataggcccaa

SEQ ID NO: 878067 - DNA, 15 bp, Homo sapiens
ttacatataggccca

SEQ ID NO: 878068 - DNA, 15 bp, Homo sapiens
attacatataggccc

SEQ ID NO: 878069 - DNA, 15 bp, Homo sapiens
tattacatataggcc

SEQ ID NO: 878070 - DNA, 15 bp, Homo sapiens
atattacatataggc

SEQ ID NO: 878071 - DNA, 15 bp, Homo sapiens
aatattacatatagg

SEQ ID NO: 878072 - DNA, 15 bp, Homo sapiens
gaatattacatatag

SEQ ID NO: 878073 - DNA, 15 bp, Homo sapiens
agaatattacatata

SEQ ID NO: 878074 - DNA, 15 bp, Homo sapiens
cagaatattacatat

SEQ ID NO: 878075 - DNA, 15 bp, Homo sapiens
gcagaatattacata

SEQ ID NO: 878076 - DNA, 15 bp, Homo sapiens
agcagaatattacat

SEQ ID NO: 878077 - DNA, 15 bp, Homo sapiens
cagcagaatattaca

SEQ ID NO: 878078 - DNA, 15 bp, Homo sapiens
gcagcagaatattac

SEQ ID NO: 878079 - DNA, 15 bp, Homo sapiens
agcagcagaatatta

SEQ ID NO: 878080 - DNA, 15 bp, Homo sapiens
tagcagcagaatatt

SEQ ID NO: 878081 - DNA, 15 bp, Homo sapiens
ttagcagcagaatat

SEQ ID NO: 878082 - DNA, 15 bp, Homo sapiens
attagcagcagaata

SEQ ID NO: 878083 - DNA, 15 bp, Homo sapiens
cattagcagcagaat

SEQ ID NO: 878084 - DNA, 15 bp, Homo sapiens
ccattagcagcagaa

SEQ ID NO: 878085 - DNA, 15 bp, Homo sapiens
gccattagcagcaga

SEQ ID NO: 878086 - DNA, 15 bp, Homo sapiens
ggccattagcagcag

SEQ ID NO: 878087 - DNA, 15 bp, Homo sapiens
cggccattagcagca

SEQ ID NO: 878088 - DNA, 15 bp, Homo sapiens
ccggccattagcagc

SEQ ID NO: 878089 - DNA, 15 bp, Homo sapiens
tccggccattagcag

SEQ ID NO: 878090 - DNA, 15 bp, Homo sapiens
gtccggccattagca

SEQ ID NO: 878091 - DNA, 15 bp, Homo sapiens
cgtccggccattagc

SEQ ID NO: 878092 - DNA, 15 bp, Homo sapiens
gcgtccggccattag

SEQ ID NO: 878093 - DNA, 15 bp, Homo sapiens
tgcgtccggccatta

SEQ ID NO: 878094 - DNA, 15 bp, Homo sapiens
ctgcgtccggccatt

SEQ ID NO: 878095 - DNA, 15 bp, Homo sapiens
actgcgtccggccat

SEQ ID NO: 878096 - DNA, 15 bp, Homo sapiens
cactgcgtccggcca

SEQ ID NO: 878097 - DNA, 15 bp, Homo sapiens
ccactgcgtccggcc

SEQ ID NO: 878098 - DNA, 15 bp, Homo sapiens
gccactgcgtccggc

SEQ ID NO: 878099 - DNA, 15 bp, Homo sapiens
agccactgcgtccgg

SEQ ID NO: 878100 - DNA, 15 bp, Homo sapiens
gagccactgcgtccg

SEQ ID NO: 878101 - DNA, 15 bp, Homo sapiens
tgagccactgcgtcc

SEQ ID NO: 878102 - DNA, 15 bp, Homo sapiens
atgagccactgcgtc

SEQ ID NO: 878103 - DNA, 15 bp, Homo sapiens
catgagccactgcgt

SEQ ID NO: 878104 - DNA, 15 bp, Homo sapiens
gcatgagccactgcg

SEQ ID NO: 878105 - DNA, 15 bp, Homo sapiens
ggcatgagccactgc

SEQ ID NO: 878106 - DNA, 15 bp, Homo sapiens
aggcatgagccactg

SEQ ID NO: 878107 - DNA, 15 bp, Homo sapiens
caggcatgagccact

SEQ ID NO: 878108 - DNA, 15 bp, Homo sapiens
acaggcatgagccac

SEQ ID NO: 878109 - DNA, 15 bp, Homo sapiens
tacaggcatgagcca

SEQ ID NO: 878110 - DNA, 15 bp, Homo sapiens
ttacaggcatgagcc

SEQ ID NO: 878111 - DNA, 15 bp, Homo sapiens
attacaggcatgagc

SEQ ID NO: 878112 - DNA, 15 bp, Homo sapiens
gattacaggcatgag

SEQ ID NO: 878113 - DNA, 15 bp, Homo sapiens
ggattacaggcatga

SEQ ID NO: 878114 - DNA, 15 bp, Homo sapiens
gggattacaggcatg

SEQ ID NO: 878115 - DNA, 15 bp, Homo sapiens
tgggattacaggcat

SEQ ID NO: 878116 - DNA, 15 bp, Homo sapiens
ctgggattacaggca

SEQ ID NO: 878117 - DNA, 15 bp, Homo sapiens
ggcctcccaaagtgc

SEQ ID NO: 878118 - DNA, 15 bp, Homo sapiens
tggcctcccaaagtg

SEQ ID NO: 878119 - DNA, 15 bp, Homo sapiens
ttggcctcccaaagt

SEQ ID NO: 878120 - DNA, 15 bp, Homo sapiens
cttggcctcccaaag

SEQ ID NO: 878121 - DNA, 15 bp, Homo sapiens
cccttggcctcccaa

SEQ ID NO: 878122 - DNA, 15 bp, Homo sapiens
ccccttggcctccca

SEQ ID NO: 878123 - DNA, 15 bp, Homo sapiens
cccccttggcctccc

SEQ ID NO: 878124 - DNA, 15 bp, Homo sapiens
acccccttggcctcc

SEQ ID NO: 878125 - DNA, 15 bp, Homo sapiens
cacccccttggcctc

SEQ ID NO: 878126 - DNA, 15 bp, Homo sapiens
ccacccccttggcct

SEQ ID NO: 878127 - DNA, 15 bp, Homo sapiens
cccacccccttggcc

SEQ ID NO: 878128 - DNA, 15 bp, Homo sapiens
acccacccccttggc

SEQ ID NO: 878129 - DNA, 15 bp, Homo sapiens
gacccacccccttgg

SEQ ID NO: 878130 - DNA, 15 bp, Homo sapiens
tgacccacccccttg

SEQ ID NO: 878131 - DNA, 15 bp, Homo sapiens
gtgacccaccccctt

SEQ ID NO: 878132 - DNA, 15 bp, Homo sapiens
ggtgacccaccccct

SEQ ID NO: 878133 - DNA, 15 bp, Homo sapiens
aggtgacccaccccc

SEQ ID NO: 878134 - DNA, 15 bp, Homo sapiens
caggtgacccacccc

SEQ ID NO: 878135 - DNA, 15 bp, Homo sapiens
tcaggtgacccaccc

SEQ ID NO: 878136 - DNA, 15 bp, Homo sapiens
ctcaggtgacccacc

SEQ ID NO: 878137 - DNA, 15 bp, Homo sapiens
cctcaggtgacccac

SEQ ID NO: 878138 - DNA, 15 bp, Homo sapiens
acctcaggtgaccca

SEQ ID NO: 878139 - DNA, 15 bp, Homo sapiens
gacctcaggtgaccc

SEQ ID NO: 878140 - DNA, 15 bp, Homo sapiens
tgacctcaggtgacc

SEQ ID NO: 878141 - DNA, 15 bp, Homo sapiens
ttgacctcaggtgac

SEQ ID NO: 878142 - DNA, 15 bp, Homo sapiens
tttgacctcaggtga

SEQ ID NO: 878143 - DNA, 15 bp, Homo sapiens
ttttgacctcaggtg

SEQ ID NO: 878144 - DNA, 15 bp, Homo sapiens
cttttgacctcaggt

SEQ ID NO: 878145 - DNA, 15 bp, Homo sapiens
acttttgacctcagg

SEQ ID NO: 878146 - DNA, 15 bp, Homo sapiens
aacttttgacctcag

SEQ ID NO: 878147 - DNA, 15 bp, Homo sapiens
aaacttttgacctca

SEQ ID NO: 878148 - DNA, 15 bp, Homo sapiens
caaacttttgacctc

SEQ ID NO: 878149 - DNA, 15 bp, Homo sapiens
tcaaacttttgacct

SEQ ID NO: 878150 - DNA, 15 bp, Homo sapiens
ctcaaacttttgacc

SEQ ID NO: 878151 - DNA, 15 bp, Homo sapiens
tctcaaacttttgac

SEQ ID NO: 878152 - DNA, 15 bp, Homo sapiens
gtctcaaacttttga

SEQ ID NO: 878153 - DNA, 15 bp, Homo sapiens
ggtctcaaacttttg

SEQ ID NO: 878154 - DNA, 15 bp, Homo sapiens
tggtctcaaactttt

SEQ ID NO: 878155 - DNA, 15 bp, Homo sapiens
ctggtctcaaacttt

SEQ ID NO: 878156 - DNA, 15 bp, Homo sapiens
gctggtctcaaactt

SEQ ID NO: 878157 - DNA, 15 bp, Homo sapiens
ggctggtctcaaact

SEQ ID NO: 878158 - DNA, 15 bp, Homo sapiens
aggctggtctcaaac

SEQ ID NO: 878159 - DNA, 15 bp, Homo sapiens
caggctggtctcaaa

SEQ ID NO: 878160 - DNA, 15 bp, Homo sapiens
ccaggctggtctcaa

SEQ ID NO: 878161 - DNA, 15 bp, Homo sapiens
accaggctggtctca

SEQ ID NO: 878162 - DNA, 15 bp, Homo sapiens
gaccaggctggtctc

SEQ ID NO: 878163 - DNA, 15 bp, Homo sapiens
tgaccaggctggtct

SEQ ID NO: 878164 - DNA, 15 bp, Homo sapiens
ttgaccaggctggtc

SEQ ID NO: 878165 - DNA, 15 bp, Homo sapiens
gttgaccaggctggt

SEQ ID NO: 878166 - DNA, 15 bp, Homo sapiens
tgttgaccaggctgg

SEQ ID NO: 878167 - DNA, 15 bp, Homo sapiens
atgttgaccaggctg

SEQ ID NO: 878168 - DNA, 15 bp, Homo sapiens
catgttgaccaggct

SEQ ID NO: 878169 - DNA, 15 bp, Homo sapiens
ccatgttgaccaggc

SEQ ID NO: 878170 - DNA, 15 bp, Homo sapiens
accatgttgaccagg

SEQ ID NO: 878171 - DNA, 15 bp, Homo sapiens
taccatgttgaccag

SEQ ID NO: 878172 - DNA, 15 bp, Homo sapiens
ctaccatgttgacca

SEQ ID NO: 878173 - DNA, 15 bp, Homo sapiens
tctaccatgttgacc

SEQ ID NO: 878174 - DNA, 15 bp, Homo sapiens
ttctaccatgttgac

SEQ ID NO: 878175 - DNA, 15 bp, Homo sapiens
gttctaccatgttga

SEQ ID NO: 878176 - DNA, 15 bp, Homo sapiens
agttctaccatgttg

SEQ ID NO: 878177 - DNA, 15 bp, Homo sapiens
gagttctaccatgtt

SEQ ID NO: 878178 - DNA, 15 bp, Homo sapiens
agagttctaccatgt

SEQ ID NO: 878179 - DNA, 15 bp, Homo sapiens
cagagttctaccatg

SEQ ID NO: 878180 - DNA, 15 bp, Homo sapiens
gcagagttctaccat

SEQ ID NO: 878181 - DNA, 15 bp, Homo sapiens
ggcagagttctacca

SEQ ID NO: 878182 - DNA, 15 bp, Homo sapiens
aggcagagttctacc

SEQ ID NO: 878183 - DNA, 15 bp, Homo sapiens
gaggcagagttctac

SEQ ID NO: 878184 - DNA, 15 bp, Homo sapiens
agaggcagagttcta

SEQ ID NO: 878185 - DNA, 15 bp, Homo sapiens
tagaggcagagttct

SEQ ID NO: 878186 - DNA, 15 bp, Homo sapiens
gtagaggcagagttc

SEQ ID NO: 878187 - DNA, 15 bp, Homo sapiens
ggtagaggcagagtt

SEQ ID NO: 878188 - DNA, 15 bp, Homo sapiens
aggtagaggcagagt

SEQ ID NO: 878189 - DNA, 15 bp, Homo sapiens
taggtagaggcagag

SEQ ID NO: 878190 - DNA, 15 bp, Homo sapiens
ttaggtagaggcaga

SEQ ID NO: 878191 - DNA, 15 bp, Homo sapiens
tttaggtagaggcag

SEQ ID NO: 878192 - DNA, 15 bp, Homo sapiens
gtttaggtagaggca

SEQ ID NO: 878193 - DNA, 15 bp, Homo sapiens
agtttaggtagaggc

SEQ ID NO: 878194 - DNA, 15 bp, Homo sapiens
tagtttaggtagagg

SEQ ID NO: 878195 - DNA, 15 bp, Homo sapiens
gtagtttaggtagag

SEQ ID NO: 878196 - DNA, 15 bp, Homo sapiens
tgtagtttaggtaga

SEQ ID NO: 878197 - DNA, 15 bp, Homo sapiens
ttgtagtttaggtag

SEQ ID NO: 878198 - DNA, 15 bp, Homo sapiens
tttgtagtttaggta

SEQ ID NO: 878199 - DNA, 15 bp, Homo sapiens
ttttgtagtttaggt

SEQ ID NO: 878200 - DNA, 15 bp, Homo sapiens
tttttgtagtttagg

SEQ ID NO: 878201 - DNA, 15 bp, Homo sapiens
atttttgtagtttag

SEQ ID NO: 878202 - DNA, 15 bp, Homo sapiens
aatttttgtagttta

SEQ ID NO: 878203 - DNA, 15 bp, Homo sapiens
caatttttgtagttt

SEQ ID NO: 878204 - DNA, 15 bp, Homo sapiens
ccaatttttgtagtt

SEQ ID NO: 878205 - DNA, 15 bp, Homo sapiens
cccaatttttgtagt

SEQ ID NO: 878206 - DNA, 15 bp, Homo sapiens
gcccaatttttgtag

SEQ ID NO: 878207 - DNA, 15 bp, Homo sapiens
tgcccaatttttgta

SEQ ID NO: 878208 - DNA, 15 bp, Homo sapiens
ctgcccaatttttgt

SEQ ID NO: 878209 - DNA, 15 bp, Homo sapiens
cctgcccaatttttg

SEQ ID NO: 878210 - DNA, 15 bp, Homo sapiens
gcctgcccaattttt

SEQ ID NO: 878211 - DNA, 15 bp, Homo sapiens
tgcctgcccaatttt

SEQ ID NO: 878212 - DNA, 15 bp, Homo sapiens
atgcctgcccaattt

SEQ ID NO: 878213 - DNA, 15 bp, Homo sapiens
catgcctgcccaatt

SEQ ID NO: 878214 - DNA, 15 bp, Homo sapiens
tcatgcctgcccaat

SEQ ID NO: 878215 - DNA, 15 bp, Homo sapiens
atcatgcctgcccaa

SEQ ID NO: 878216 - DNA, 15 bp, Homo sapiens
catcatgcctgccca

SEQ ID NO: 878217 - DNA, 15 bp, Homo sapiens
ccatcatgcctgccc

SEQ ID NO: 878218 - DNA, 15 bp, Homo sapiens
gccatcatgcctgcc

SEQ ID NO: 878219 - DNA, 15 bp, Homo sapiens
cgccatcatgcctgc

SEQ ID NO: 878220 - DNA, 15 bp, Homo sapiens
acgccatcatgcctg

SEQ ID NO: 878221 - DNA, 15 bp, Homo sapiens
cacgccatcatgcct

SEQ ID NO: 878222 - DNA, 15 bp, Homo sapiens
gcacgccatcatgcc

SEQ ID NO: 878223 - DNA, 15 bp, Homo sapiens
tgcacgccatcatgc

SEQ ID NO: 878224 - DNA, 15 bp, Homo sapiens
gtgcacgccatcatg

SEQ ID NO: 878225 - DNA, 15 bp, Homo sapiens
ggtgcacgccatcat

SEQ ID NO: 878226 - DNA, 15 bp, Homo sapiens
aggtgcacgccatca

SEQ ID NO: 878227 - DNA, 15 bp, Homo sapiens
caggtgcacgccatc

SEQ ID NO: 878228 - DNA, 15 bp, Homo sapiens
acaggtgcacgccat

SEQ ID NO: 878229 - DNA, 15 bp, Homo sapiens
tacaggtgcacgcca

SEQ ID NO: 878230 - DNA, 15 bp, Homo sapiens
ttacaggtgcacgcc

SEQ ID NO: 878231 - DNA, 15 bp, Homo sapiens
attacaggtgcacgc

SEQ ID NO: 878232 - DNA, 15 bp, Homo sapiens
gattacaggtgcacg

SEQ ID NO: 878233 - DNA, 15 bp, Homo sapiens
ggattacaggtgcac

SEQ ID NO: 878234 - DNA, 15 bp, Homo sapiens
gggattacaggtgca

SEQ ID NO: 878235 - DNA, 15 bp, Homo sapiens
tgggattacaggtgc

SEQ ID NO: 878236 - DNA, 15 bp, Homo sapiens
gctgggattacaggt

SEQ ID NO: 878237 - DNA, 15 bp, Homo sapiens
agctgggattacagg

SEQ ID NO: 878238 - DNA, 15 bp, Homo sapiens
tagctgggattacag

SEQ ID NO: 878239 - DNA, 15 bp, Homo sapiens
gagtagctgggatta

SEQ ID NO: 878240 - DNA, 15 bp, Homo sapiens
cgagtagctgggatt

SEQ ID NO: 878241 - DNA, 15 bp, Homo sapiens
ccgagtagctgggat

SEQ ID NO: 878242 - DNA, 15 bp, Homo sapiens
cccgagtagctggga

SEQ ID NO: 878243 - DNA, 15 bp, Homo sapiens
tcccgagtagctggg

SEQ ID NO: 878244 - DNA, 15 bp, Homo sapiens
ctcccgagtagctgg

SEQ ID NO: 878245 - DNA, 15 bp, Homo sapiens
cctcccgagtagctg

SEQ ID NO: 878246 - DNA, 15 bp, Homo sapiens
gcctcccgagtagct

SEQ ID NO: 878247 - DNA, 15 bp, Homo sapiens
agcctcccgagtagc

SEQ ID NO: 878248 - DNA, 15 bp, Homo sapiens
cagcctcccgagtag

SEQ ID NO: 878249 - DNA, 15 bp, Homo sapiens
tcagcctcccgagta

SEQ ID NO: 878250 - DNA, 15 bp, Homo sapiens
ctcagcctcccgagt

SEQ ID NO: 878251 - DNA, 15 bp, Homo sapiens
cctcagcctcccgag

SEQ ID NO: 878252 - DNA, 15 bp, Homo sapiens
gcctcagcctcccga

SEQ ID NO: 878253 - DNA, 15 bp, Homo sapiens
tgcctcagcctcccg

SEQ ID NO: 878254 - DNA, 15 bp, Homo sapiens
ctctcctgcctcagc

SEQ ID NO: 878255 - DNA, 15 bp, Homo sapiens
actctcctgcctcag

SEQ ID NO: 878256 - DNA, 15 bp, Homo sapiens
gactctcctgcctca

SEQ ID NO: 878257 - DNA, 15 bp, Homo sapiens
tgactctcctgcctc

SEQ ID NO: 878258 - DNA, 15 bp, Homo sapiens
gtgactctcctgcct

SEQ ID NO: 878259 - DNA, 15 bp, Homo sapiens
agtgactctcctgcc

SEQ ID NO: 878260 - DNA, 15 bp, Homo sapiens
aagtgactctcctgc

SEQ ID NO: 878261 - DNA, 15 bp, Homo sapiens
caagtgactctcctg

SEQ ID NO: 878262 - DNA, 15 bp, Homo sapiens
tcaagtgactctcct

SEQ ID NO: 878263 - DNA, 15 bp, Homo sapiens
ttcaagtgactctcc

SEQ ID NO: 878264 - DNA, 15 bp, Homo sapiens
gttcaagtgactctc

SEQ ID NO: 878265 - DNA, 15 bp, Homo sapiens
ggttcaagtgactct

SEQ ID NO: 878266 - DNA, 15 bp, Homo sapiens
gggttcaagtgactc

SEQ ID NO: 878267 - DNA, 15 bp, Homo sapiens
tgggttcaagtgact

SEQ ID NO: 878268 - DNA, 15 bp, Homo sapiens
ctgggttcaagtgac

SEQ ID NO: 878269 - DNA, 15 bp, Homo sapiens
cctgggttcaagtga

SEQ ID NO: 878270 - DNA, 15 bp, Homo sapiens
tcctgggttcaagtg

SEQ ID NO: 878271 - DNA, 15 bp, Homo sapiens
ctcctgggttcaagt

SEQ ID NO: 878272 - DNA, 15 bp, Homo sapiens
cctctgcctcctggg

SEQ ID NO: 878273 - DNA, 15 bp, Homo sapiens
acctctgcctcctgg

SEQ ID NO: 878274 - DNA, 15 bp, Homo sapiens
aacctctgcctcctg

SEQ ID NO: 878275 - DNA, 15 bp, Homo sapiens
aaacctctgcctcct

SEQ ID NO: 878276 - DNA, 15 bp, Homo sapiens
gaaacctctgcctcc

SEQ ID NO: 878277 - DNA, 15 bp, Homo sapiens
tgaaacctctgcctc

SEQ ID NO: 878278 - DNA, 15 bp, Homo sapiens
ctgaaacctctgcct

SEQ ID NO: 878279 - DNA, 15 bp, Homo sapiens
actgaaacctctgcc

SEQ ID NO: 878280 - DNA, 15 bp, Homo sapiens
cactgaaacctctgc

SEQ ID NO: 878281 - DNA, 15 bp, Homo sapiens
tcactgaaacctctg

SEQ ID NO: 878282 - DNA, 15 bp, Homo sapiens
ctcactgaaacctct

SEQ ID NO: 878283 - DNA, 15 bp, Homo sapiens
gctcactgaaacctc

SEQ ID NO: 878284 - DNA, 15 bp, Homo sapiens
ggctcactgaaacct

SEQ ID NO: 878285 - DNA, 15 bp, Homo sapiens
tggctcactgaaacc

SEQ ID NO: 878286 - DNA, 15 bp, Homo sapiens
ttggctcactgaaac

SEQ ID NO: 878287 - DNA, 15 bp, Homo sapiens
cttggctcactgaaa

SEQ ID NO: 878288 - DNA, 15 bp, Homo sapiens
tcttggctcactgaa

SEQ ID NO: 878289 - DNA, 15 bp, Homo sapiens
atcttggctcactga

SEQ ID NO: 878290 - DNA, 15 bp, Homo sapiens
gatcttggctcactg

SEQ ID NO: 878291 - DNA, 15 bp, Homo sapiens
tgatcttggctcact

SEQ ID NO: 878292 - DNA, 15 bp, Homo sapiens
gtgatcttggctcac

SEQ ID NO: 878293 - DNA, 15 bp, Homo sapiens
tgtgatcttggctca

SEQ ID NO: 878294 - DNA, 15 bp, Homo sapiens
atgtgatcttggctc

SEQ ID NO: 878295 - DNA, 15 bp, Homo sapiens
catgtgatcttggct

SEQ ID NO: 878296 - DNA, 15 bp, Homo sapiens
gcatgtgatcttggc

SEQ ID NO: 878297 - DNA, 15 bp, Homo sapiens
tgcatgtgatcttgg

SEQ ID NO: 878298 - DNA, 15 bp, Homo sapiens
ttgcatgtgatcttg

SEQ ID NO: 878299 - DNA, 15 bp, Homo sapiens
gttgcatgtgatctt

SEQ ID NO: 878300 - DNA, 15 bp, Homo sapiens
agttgcatgtgatct

SEQ ID NO: 878301 - DNA, 15 bp, Homo sapiens
cagttgcatgtgatc

SEQ ID NO: 878302 - DNA, 15 bp, Homo sapiens
acagttgcatgtgat

SEQ ID NO: 878303 - DNA, 15 bp, Homo sapiens
tacagttgcatgtga

SEQ ID NO: 878304 - DNA, 15 bp, Homo sapiens
gtacagttgcatgtg

SEQ ID NO: 878305 - DNA, 15 bp, Homo sapiens
agtacagttgcatgt

SEQ ID NO: 878306 - DNA, 15 bp, Homo sapiens
gagtacagttgcatg

SEQ ID NO: 878307 - DNA, 15 bp, Homo sapiens
ggagtacagttgcat

SEQ ID NO: 878308 - DNA, 15 bp, Homo sapiens
tggagtacagttgca

SEQ ID NO: 878309 - DNA, 15 bp, Homo sapiens
ctggagtacagttgc

SEQ ID NO: 878310 - DNA, 15 bp, Homo sapiens
gctggagtacagttg

SEQ ID NO: 878311 - DNA, 15 bp, Homo sapiens
ggctggagtacagtt

SEQ ID NO: 878312 - DNA, 15 bp, Homo sapiens
aggctggagtacagt

SEQ ID NO: 878313 - DNA, 15 bp, Homo sapiens
caggctggagtacag

SEQ ID NO: 878314 - DNA, 15 bp, Homo sapiens
ccaggctggagtaca

SEQ ID NO: 878315 - DNA, 15 bp, Homo sapiens
cccaggctggagtac

SEQ ID NO: 878316 - DNA, 15 bp, Homo sapiens
acccaggctggagta

SEQ ID NO: 878317 - DNA, 15 bp, Homo sapiens
gtcacccaggctgga

SEQ ID NO: 878318 - DNA, 15 bp, Homo sapiens
tgtcacccaggctgg

SEQ ID NO: 878319 - DNA, 15 bp, Homo sapiens
ctgtcacccaggctg

SEQ ID NO: 878320 - DNA, 15 bp, Homo sapiens
ttctgtcacccaggc

SEQ ID NO: 878321 - DNA, 15 bp, Homo sapiens
cttctgtcacccagg

SEQ ID NO: 878322 - DNA, 15 bp, Homo sapiens
ccttctgtcacccag

SEQ ID NO: 878323 - DNA, 15 bp, Homo sapiens
cccttctgtcaccca

SEQ ID NO: 878324 - DNA, 15 bp, Homo sapiens
tcccttctgtcaccc

SEQ ID NO: 878325 - DNA, 15 bp, Homo sapiens
ttcccttctgtcacc

SEQ ID NO: 878326 - DNA, 15 bp, Homo sapiens
tttcccttctgtcac

SEQ ID NO: 878327 - DNA, 15 bp, Homo sapiens
ttttcccttctgtca

SEQ ID NO: 878328 - DNA, 15 bp, Homo sapiens
tttttcccttctgtc

SEQ ID NO: 878329 - DNA, 15 bp, Homo sapiens
ttttttcccttctgt

SEQ ID NO: 878330 - DNA, 15 bp, Homo sapiens
tttttttcccttctg

SEQ ID NO: 878331 - DNA, 15 bp, Homo sapiens
atttttttcccttct

SEQ ID NO: 878332 - DNA, 15 bp, Homo sapiens
aatttttttcccttc

SEQ ID NO: 878333 - DNA, 15 bp, Homo sapiens
gaatttttttccctt

SEQ ID NO: 878334 - DNA, 15 bp, Homo sapiens
agaatttttttccct

SEQ ID NO: 878335 - DNA, 15 bp, Homo sapiens
cagaatttttttccc

SEQ ID NO: 878336 - DNA, 15 bp, Homo sapiens
gcagaatttttttcc

SEQ ID NO: 878337 - DNA, 15 bp, Homo sapiens
agcagaatttttttc

SEQ ID NO: 878338 - DNA, 15 bp, Homo sapiens
cagcagaattttttt

SEQ ID NO: 878339 - DNA, 15 bp, Homo sapiens
gcagcagaatttttt

SEQ ID NO: 878340 - DNA, 15 bp, Homo sapiens
agcagcagaattttt

SEQ ID NO: 878341 - DNA, 15 bp, Homo sapiens
tagcagcagaatttt

SEQ ID NO: 878342 - DNA, 15 bp, Homo sapiens
ttagcagcagaattt

SEQ ID NO: 878343 - DNA, 15 bp, Homo sapiens
tttagcagcagaatt

SEQ ID NO: 878344 - DNA, 15 bp, Homo sapiens
ctttagcagcagaat

SEQ ID NO: 878345 - DNA, 15 bp, Homo sapiens
tctttagcagcagaa

SEQ ID NO: 878346 - DNA, 15 bp, Homo sapiens
ttctttagcagcaga

SEQ ID NO: 878347 - DNA, 15 bp, Homo sapiens
tttctttagcagcag

SEQ ID NO: 878348 - DNA, 15 bp, Homo sapiens
ttttctttagcagca

SEQ ID NO: 878349 - DNA, 15 bp, Homo sapiens
gttttctttagcagc

SEQ ID NO: 878350 - DNA, 15 bp, Homo sapiens
ggttttctttagcag

SEQ ID NO: 878351 - DNA, 15 bp, Homo sapiens
tggttttctttagca

SEQ ID NO: 878352 - DNA, 15 bp, Homo sapiens
atggttttctttagc

SEQ ID NO: 878353 - DNA, 15 bp, Homo sapiens
gatggttttctttag

SEQ ID NO: 878354 - DNA, 15 bp, Homo sapiens
tgatggttttcttta

SEQ ID NO: 878355 - DNA, 15 bp, Homo sapiens
ttgatggttttcttt

SEQ ID NO: 878356 - DNA, 15 bp, Homo sapiens
tttgatggttttctt

SEQ ID NO: 878357 - DNA, 15 bp, Homo sapiens
ctttgatggttttct

SEQ ID NO: 878358 - DNA, 15 bp, Homo sapiens
tctttgatggttttc

SEQ ID NO: 878359 - DNA, 15 bp, Homo sapiens
ttctttgatggtttt

SEQ ID NO: 878360 - DNA, 15 bp, Homo sapiens
tttctttgatggttt

SEQ ID NO: 878361 - DNA, 15 bp, Homo sapiens
ttttctttgatggtt

SEQ ID NO: 878362 - DNA, 15 bp, Homo sapiens
gttttctttgatggt

SEQ ID NO: 878363 - DNA, 15 bp, Homo sapiens
agttttctttgatgg

SEQ ID NO: 878364 - DNA, 15 bp, Homo sapiens
tagttttctttgatg

SEQ ID NO: 878365 - DNA, 15 bp, Homo sapiens
gtagttttctttgat

SEQ ID NO: 878366 - DNA, 15 bp, Homo sapiens
ggtagttttctttga

SEQ ID NO: 878367 - DNA, 15 bp, Homo sapiens
tggtagttttctttg

SEQ ID NO: 878368 - DNA, 15 bp, Homo sapiens
atggtagttttcttt

SEQ ID NO: 878369 - DNA, 15 bp, Homo sapiens
catggtagttttctt

SEQ ID NO: 878370 - DNA, 15 bp, Homo sapiens
tcatggtagttttct

SEQ ID NO: 878371 - DNA, 15 bp, Homo sapiens
gtcatggtagttttc

SEQ ID NO: 878372 - DNA, 15 bp, Homo sapiens
cgtcatggtagtttt

SEQ ID NO: 878373 - DNA, 15 bp, Homo sapiens
ccgtcatggtagttt

SEQ ID NO: 878374 - DNA, 15 bp, Homo sapiens
cccgtcatggtagtt

SEQ ID NO: 878375 - DNA, 15 bp, Homo sapiens
acccgtcatggtagt

SEQ ID NO: 878376 - DNA, 15 bp, Homo sapiens
cacccgtcatggtag

SEQ ID NO: 878377 - DNA, 15 bp, Homo sapiens
ccacccgtcatggta

SEQ ID NO: 878378 - DNA, 15 bp, Homo sapiens
cccacccgtcatggt

SEQ ID NO: 878379 - DNA, 15 bp, Homo sapiens
tcccacccgtcatgg

SEQ ID NO: 878380 - DNA, 15 bp, Homo sapiens
ctcccacccgtcatg

SEQ ID NO: 878381 - DNA, 15 bp, Homo sapiens
cctcccacccgtcat

SEQ ID NO: 878382 - DNA, 15 bp, Homo sapiens
ccctcccacccgtca

SEQ ID NO: 878383 - DNA, 15 bp, Homo sapiens
tccctcccacccgtc

SEQ ID NO: 878384 - DNA, 15 bp, Homo sapiens
ctccctcccacccgt

SEQ ID NO: 878385 - DNA, 15 bp, Homo sapiens
tctccctcccacccg

SEQ ID NO: 878386 - DNA, 15 bp, Homo sapiens
atctccctcccaccc

SEQ ID NO: 878387 - DNA, 15 bp, Homo sapiens
catctccctcccacc

SEQ ID NO: 878388 - DNA, 15 bp, Homo sapiens
tcatctccctcccac

SEQ ID NO: 878389 - DNA, 15 bp, Homo sapiens
ctcatctccctccca

SEQ ID NO: 878390 - DNA, 15 bp, Homo sapiens
actcatctccctccc

SEQ ID NO: 878391 - DNA, 15 bp, Homo sapiens
aactcatctccctcc

SEQ ID NO: 878392 - DNA, 15 bp, Homo sapiens
aaactcatctccctc

SEQ ID NO: 878393 - DNA, 15 bp, Homo sapiens
aaaactcatctccct

SEQ ID NO: 878394 - DNA, 15 bp, Homo sapiens
caaaactcatctccc

SEQ ID NO: 878395 - DNA, 15 bp, Homo sapiens
tcaaaactcatctcc

SEQ ID NO: 878396 - DNA, 15 bp, Homo sapiens
ctcaaaactcatctc

SEQ ID NO: 878397 - DNA, 15 bp, Homo sapiens
tctcaaaactcatct

SEQ ID NO: 878398 - DNA, 15 bp, Homo sapiens
atctcaaaactcatc

SEQ ID NO: 878399 - DNA, 15 bp, Homo sapiens
tatctcaaaactcat

SEQ ID NO: 878400 - DNA, 15 bp, Homo sapiens
ttatctcaaaactca

SEQ ID NO: 878401 - DNA, 15 bp, Homo sapiens
attatctcaaaactc

SEQ ID NO: 878402 - DNA, 15 bp, Homo sapiens
aattatctcaaaact

SEQ ID NO: 878403 - DNA, 15 bp, Homo sapiens
gaattatctcaaaac

SEQ ID NO: 878404 - DNA, 15 bp, Homo sapiens
tgaattatctcaaaa

SEQ ID NO: 878405 - DNA, 15 bp, Homo sapiens
ctgaattatctcaaa

SEQ ID NO: 878406 - DNA, 15 bp, Homo sapiens
tctgaattatctcaa

SEQ ID NO: 878407 - DNA, 15 bp, Homo sapiens
ctctgaattatctca

SEQ ID NO: 878408 - DNA, 15 bp, Homo sapiens
tctctgaattatctc

SEQ ID NO: 878409 - DNA, 15 bp, Homo sapiens
ttctctgaattatct

SEQ ID NO: 878410 - DNA, 15 bp, Homo sapiens
gttctctgaattatc

SEQ ID NO: 878411 - DNA, 15 bp, Homo sapiens
tgttctctgaattat

SEQ ID NO: 878412 - DNA, 15 bp, Homo sapiens
atgttctctgaatta

SEQ ID NO: 878413 - DNA, 15 bp, Homo sapiens
gatgttctctgaatt

SEQ ID NO: 878414 - DNA, 15 bp, Homo sapiens
agatgttctctgaat

SEQ ID NO: 878415 - DNA, 15 bp, Homo sapiens
gagatgttctctgaa

SEQ ID NO: 878416 - DNA, 15 bp, Homo sapiens
ggagatgttctctga

SEQ ID NO: 878417 - DNA, 15 bp, Homo sapiens
tggagatgttctctg

SEQ ID NO: 878418 - DNA, 15 bp, Homo sapiens
ctggagatgttctct

SEQ ID NO: 878419 - DNA, 15 bp, Homo sapiens
cctggagatgttctc

SEQ ID NO: 878420 - DNA, 15 bp, Homo sapiens
tcctggagatgttct

SEQ ID NO: 878421 - DNA, 15 bp, Homo sapiens
ttcctggagatgttc

SEQ ID NO: 878422 - DNA, 15 bp, Homo sapiens
tttcctggagatgtt

SEQ ID NO: 878423 - DNA, 15 bp, Homo sapiens
ctttcctggagatgt

SEQ ID NO: 878424 - DNA, 15 bp, Homo sapiens
tctttcctggagatg

SEQ ID NO: 878425 - DNA, 15 bp, Homo sapiens
ctctttcctggagat

SEQ ID NO: 878426 - DNA, 15 bp, Homo sapiens
tctctttcctggaga

SEQ ID NO: 878427 - DNA, 15 bp, Homo sapiens
ttctctttcctggag

SEQ ID NO: 878428 - DNA, 15 bp, Homo sapiens
attctctttcctgga

SEQ ID NO: 878429 - DNA, 15 bp, Homo sapiens
cattctctttcctgg

SEQ ID NO: 878430 - DNA, 15 bp, Homo sapiens
acattctctttcctg

SEQ ID NO: 878431 - DNA, 15 bp, Homo sapiens
tacattctctttcct

SEQ ID NO: 878432 - DNA, 15 bp, Homo sapiens
atacattctctttcc

SEQ ID NO: 878433 - DNA, 15 bp, Homo sapiens
aatacattctctttc

SEQ ID NO: 878434 - DNA, 15 bp, Homo sapiens
aaatacattctcttt

SEQ ID NO: 878435 - DNA, 15 bp, Homo sapiens
caaatacattctctt

SEQ ID NO: 878436 - DNA, 15 bp, Homo sapiens
ccaaatacattctct

SEQ ID NO: 878437 - DNA, 15 bp, Homo sapiens
cccaaatacattctc

SEQ ID NO: 878438 - DNA, 15 bp, Homo sapiens
tcccaaatacattct

SEQ ID NO: 878439 - DNA, 15 bp, Homo sapiens
ttcccaaatacattc

SEQ ID NO: 878440 - DNA, 15 bp, Homo sapiens
attcccaaatacatt

SEQ ID NO: 878441 - DNA, 15 bp, Homo sapiens
cattcccaaatacat

SEQ ID NO: 878442 - DNA, 15 bp, Homo sapiens
ccattcccaaataca

SEQ ID NO: 878443 - DNA, 15 bp, Homo sapiens
cccattcccaaatac

SEQ ID NO: 878444 - DNA, 15 bp, Homo sapiens
acccattcccaaata

SEQ ID NO: 878445 - DNA, 15 bp, Homo sapiens
aacccattcccaaat

SEQ ID NO: 878446 - DNA, 15 bp, Homo sapiens
aaacccattcccaaa

SEQ ID NO: 878447 - DNA, 15 bp, Homo sapiens
aaaacccattcccaa

SEQ ID NO: 878448 - DNA, 15 bp, Homo sapiens
taaaacccattccca

SEQ ID NO: 878449 - DNA, 15 bp, Homo sapiens
ttaaaacccattccc

SEQ ID NO: 878450 - DNA, 15 bp, Homo sapiens
tttaaaacccattcc

SEQ ID NO: 878451 - DNA, 15 bp, Homo sapiens
ttttaaaacccattc

SEQ ID NO: 878452 - DNA, 15 bp, Homo sapiens
gttttaaaacccatt

SEQ ID NO: 878453 - DNA, 15 bp, Homo sapiens
ggttttaaaacccat

SEQ ID NO: 878454 - DNA, 15 bp, Homo sapiens
cggttttaaaaccca

SEQ ID NO: 878455 - DNA, 15 bp, Homo sapiens
ccggttttaaaaccc

SEQ ID NO: 878456 - DNA, 15 bp, Homo sapiens
accggttttaaaacc

SEQ ID NO: 878457 - DNA, 15 bp, Homo sapiens
aaccggttttaaaac

SEQ ID NO: 878458 - DNA, 15 bp, Homo sapiens
aaaccggttttaaaa

SEQ ID NO: 878459 - DNA, 15 bp, Homo sapiens
gaaaccggttttaaa

SEQ ID NO: 878460 - DNA, 15 bp, Homo sapiens
agaaaccggttttaa

SEQ ID NO: 878461 - DNA, 15 bp, Homo sapiens
tagaaaccggtttta

SEQ ID NO: 878462 - DNA, 15 bp, Homo sapiens
ttagaaaccggtttt

SEQ ID NO: 878463 - DNA, 15 bp, Homo sapiens
cttagaaaccggttt

SEQ ID NO: 878464 - DNA, 15 bp, Homo sapiens
ccttagaaaccggtt

SEQ ID NO: 878465 - DNA, 15 bp, Homo sapiens
tccttagaaaccggt

SEQ ID NO: 878466 - DNA, 15 bp, Homo sapiens
ttccttagaaaccgg

SEQ ID NO: 878467 - DNA, 15 bp, Homo sapiens
tttccttagaaaccg

SEQ ID NO: 878468 - DNA, 15 bp, Homo sapiens
ttttccttagaaacc

SEQ ID NO: 878469 - DNA, 15 bp, Homo sapiens
attttccttagaaac

SEQ ID NO: 878470 - DNA, 15 bp, Homo sapiens
cattttccttagaaa

SEQ ID NO: 878471 - DNA, 15 bp, Homo sapiens
ccattttccttagaa

SEQ ID NO: 878472 - DNA, 15 bp, Homo sapiens
tccattttccttaga

SEQ ID NO: 878473 - DNA, 15 bp, Homo sapiens
ctccattttccttag

SEQ ID NO: 878474 - DNA, 15 bp, Homo sapiens
actccattttcctta

SEQ ID NO: 878475 - DNA, 15 bp, Homo sapiens
aactccattttcctt

SEQ ID NO: 878476 - DNA, 15 bp, Homo sapiens
aaactccattttcct

SEQ ID NO: 878477 - DNA, 15 bp, Homo sapiens
taaactccattttcc

SEQ ID NO: 878478 - DNA, 15 bp, Homo sapiens
ttaaactccattttc

SEQ ID NO: 878479 - DNA, 15 bp, Homo sapiens
gttaaactccatttt

SEQ ID NO: 878480 - DNA, 15 bp, Homo sapiens
agttaaactccattt

SEQ ID NO: 878481 - DNA, 15 bp, Homo sapiens
aagttaaactccatt

SEQ ID NO: 878482 - DNA, 15 bp, Homo sapiens
aaagttaaactccat

SEQ ID NO: 878483 - DNA, 15 bp, Homo sapiens
aaaagttaaactcca

SEQ ID NO: 878484 - DNA, 15 bp, Homo sapiens
caaaagttaaactcc

SEQ ID NO: 878485 - DNA, 15 bp, Homo sapiens
tcaaaagttaaactc

SEQ ID NO: 878486 - DNA, 15 bp, Homo sapiens
ttcaaaagttaaact

SEQ ID NO: 878487 - DNA, 15 bp, Homo sapiens
gttcaaaagttaaac

SEQ ID NO: 878488 - DNA, 15 bp, Homo sapiens
cgttcaaaagttaaa

SEQ ID NO: 878489 - DNA, 15 bp, Homo sapiens
tcgttcaaaagttaa

SEQ ID NO: 878490 - DNA, 15 bp, Homo sapiens
atcgttcaaaagtta

SEQ ID NO: 878491 - DNA, 15 bp, Homo sapiens
tatcgttcaaaagtt

SEQ ID NO: 878492 - DNA, 15 bp, Homo sapiens
ctatcgttcaaaagt

SEQ ID NO: 878493 - DNA, 15 bp, Homo sapiens
actatcgttcaaaag

SEQ ID NO: 878494 - DNA, 15 bp, Homo sapiens
tactatcgttcaaaa

SEQ ID NO: 878495 - DNA, 15 bp, Homo sapiens
ttactatcgttcaaa

SEQ ID NO: 878496 - DNA, 15 bp, Homo sapiens
attactatcgttcaa

SEQ ID NO: 878497 - DNA, 15 bp, Homo sapiens
aattactatcgttca

SEQ ID NO: 878498 - DNA, 15 bp, Homo sapiens
aaattactatcgttc

SEQ ID NO: 878499 - DNA, 15 bp, Homo sapiens
caaattactatcgtt

SEQ ID NO: 878500 - DNA, 15 bp, Homo sapiens
ccaaattactatcgt

SEQ ID NO: 878501 - DNA, 15 bp, Homo sapiens
cccaaattactatcg

SEQ ID NO: 878502 - DNA, 15 bp, Homo sapiens
ccccaaattactatc

SEQ ID NO: 878503 - DNA, 15 bp, Homo sapiens
cccccaaattactat

SEQ ID NO: 878504 - DNA, 15 bp, Homo sapiens
acccccaaattacta

SEQ ID NO: 878505 - DNA, 15 bp, Homo sapiens
aacccccaaattact

SEQ ID NO: 878506 - DNA, 15 bp, Homo sapiens
taacccccaaattac

SEQ ID NO: 878507 - DNA, 15 bp, Homo sapiens
ataacccccaaatta

SEQ ID NO: 878508 - DNA, 15 bp, Homo sapiens
gataacccccaaatt

SEQ ID NO: 878509 - DNA, 15 bp, Homo sapiens
agataacccccaaat

SEQ ID NO: 878510 - DNA, 15 bp, Homo sapiens
cagataacccccaaa

SEQ ID NO: 878511 - DNA, 15 bp, Homo sapiens
ccagataacccccaa

SEQ ID NO: 878512 - DNA, 15 bp, Homo sapiens
tccagataaccccca

SEQ ID NO: 878513 - DNA, 15 bp, Homo sapiens
ttccagataaccccc

SEQ ID NO: 878514 - DNA, 15 bp, Homo sapiens
cttccagataacccc

SEQ ID NO: 878515 - DNA, 15 bp, Homo sapiens
gcttccagataaccc

SEQ ID NO: 878516 - DNA, 15 bp, Homo sapiens
ggcttccagataacc

SEQ ID NO: 878517 - DNA, 15 bp, Homo sapiens
tggcttccagataac

SEQ ID NO: 878518 - DNA, 15 bp, Homo sapiens
ctggcttccagataa

SEQ ID NO: 878519 - DNA, 15 bp, Homo sapiens
gctggcttccagata

SEQ ID NO: 878520 - DNA, 15 bp, Homo sapiens
ggctggcttccagat

SEQ ID NO: 878521 - DNA, 15 bp, Homo sapiens
gggctggcttccaga

SEQ ID NO: 878522 - DNA, 15 bp, Homo sapiens
tgggctggcttccag

SEQ ID NO: 878523 - DNA, 15 bp, Homo sapiens
gtgggctggcttcca

SEQ ID NO: 878524 - DNA, 15 bp, Homo sapiens
agtgggctggcttcc

SEQ ID NO: 878525 - DNA, 15 bp, Homo sapiens
aagtgggctggcttc

SEQ ID NO: 878526 - DNA, 15 bp, Homo sapiens
caagtgggctggctt

SEQ ID NO: 878527 - DNA, 15 bp, Homo sapiens
gcaagtgggctggct

SEQ ID NO: 878528 - DNA, 15 bp, Homo sapiens
ggcaagtgggctggc

SEQ ID NO: 878529 - DNA, 15 bp, Homo sapiens
tggcaagtgggctgg

SEQ ID NO: 878530 - DNA, 15 bp, Homo sapiens
atggcaagtgggctg

SEQ ID NO: 878531 - DNA, 15 bp, Homo sapiens
gatggcaagtgggct

SEQ ID NO: 878532 - DNA, 15 bp, Homo sapiens
tgatggcaagtgggc

SEQ ID NO: 878533 - DNA, 15 bp, Homo sapiens
gtgatggcaagtggg

SEQ ID NO: 878534 - DNA, 15 bp, Homo sapiens
ggtgatggcaagtgg

SEQ ID NO: 878535 - DNA, 15 bp, Homo sapiens
tggtgatggcaagtg

SEQ ID NO: 878536 - DNA, 15 bp, Homo sapiens
atggtgatggcaagt

SEQ ID NO: 878537 - DNA, 15 bp, Homo sapiens
aatggtgatggcaag

SEQ ID NO: 878538 - DNA, 15 bp, Homo sapiens
caatggtgatggcaa

SEQ ID NO: 878539 - DNA, 15 bp, Homo sapiens
ccaatggtgatggca

SEQ ID NO: 878540 - DNA, 15 bp, Homo sapiens
gccaatggtgatggc

SEQ ID NO: 878541 - DNA, 15 bp, Homo sapiens
agccaatggtgatgg

SEQ ID NO: 878542 - DNA, 15 bp, Homo sapiens
cagccaatggtgatg

SEQ ID NO: 878543 - DNA, 15 bp, Homo sapiens
ccagccaatggtgat

SEQ ID NO: 878544 - DNA, 15 bp, Homo sapiens
cccagccaatggtga

SEQ ID NO: 878545 - DNA, 15 bp, Homo sapiens
tcccagccaatggtg

SEQ ID NO: 878546 - DNA, 15 bp, Homo sapiens
atcccagccaatggt

SEQ ID NO: 878547 - DNA, 15 bp, Homo sapiens
gatcccagccaatgg

SEQ ID NO: 878548 - DNA, 15 bp, Homo sapiens
ggatcccagccaatg

SEQ ID NO: 878549 - DNA, 15 bp, Homo sapiens
gggatcccagccaat

SEQ ID NO: 878550 - DNA, 15 bp, Homo sapiens
ggggatcccagccaa

SEQ ID NO: 878551 - DNA, 15 bp, Homo sapiens
tggggatcccagcca

SEQ ID NO: 878552 - DNA, 15 bp, Homo sapiens
gtggggatcccagcc

SEQ ID NO: 878553 - DNA, 15 bp, Homo sapiens
agtggggatcccagc

SEQ ID NO: 878554 - DNA, 15 bp, Homo sapiens
aagtggggatcccag

SEQ ID NO: 878555 - DNA, 15 bp, Homo sapiens
gaagtggggatccca

SEQ ID NO: 878556 - DNA, 15 bp, Homo sapiens
agaagtggggatccc

SEQ ID NO: 878557 - DNA, 15 bp, Homo sapiens
cagaagtggggatcc

SEQ ID NO: 878558 - DNA, 15 bp, Homo sapiens
tcagaagtggggatc

SEQ ID NO: 878559 - DNA, 15 bp, Homo sapiens
atcagaagtggggat

SEQ ID NO: 878560 - DNA, 15 bp, Homo sapiens
gatcagaagtgggga

SEQ ID NO: 878561 - DNA, 15 bp, Homo sapiens
agatcagaagtgggg

SEQ ID NO: 878562 - DNA, 15 bp, Homo sapiens
gagatcagaagtggg

SEQ ID NO: 878563 - DNA, 15 bp, Homo sapiens
tgagatcagaagtgg

SEQ ID NO: 878564 - DNA, 15 bp, Homo sapiens
ctgagatcagaagtg

SEQ ID NO: 878565 - DNA, 15 bp, Homo sapiens
gctgagatcagaagt

SEQ ID NO: 878566 - DNA, 15 bp, Homo sapiens
tgctgagatcagaag

SEQ ID NO: 878567 - DNA, 15 bp, Homo sapiens
ttgctgagatcagaa

SEQ ID NO: 878568 - DNA, 15 bp, Homo sapiens
cttgctgagatcaga

SEQ ID NO: 878569 - DNA, 15 bp, Homo sapiens
ccttgctgagatcag

SEQ ID NO: 878570 - DNA, 15 bp, Homo sapiens
gccttgctgagatca

SEQ ID NO: 878571 - DNA, 15 bp, Homo sapiens
ggccttgctgagatc

SEQ ID NO: 878572 - DNA, 15 bp, Homo sapiens
aggccttgctgagat

SEQ ID NO: 878573 - DNA, 15 bp, Homo sapiens
aaggccttgctgaga

SEQ ID NO: 878574 - DNA, 15 bp, Homo sapiens
aaaggccttgctgag

SEQ ID NO: 878575 - DNA, 15 bp, Homo sapiens
caaaggccttgctga

SEQ ID NO: 878576 - DNA, 15 bp, Homo sapiens
ccaaaggccttgctg

SEQ ID NO: 878577 - DNA, 15 bp, Homo sapiens
gccaaaggccttgct

SEQ ID NO: 878578 - DNA, 15 bp, Homo sapiens
ggccaaaggccttgc

SEQ ID NO: 878579 - DNA, 15 bp, Homo sapiens
tggccaaaggccttg

SEQ ID NO: 878580 - DNA, 15 bp, Homo sapiens
atggccaaaggcctt

SEQ ID NO: 878581 - DNA, 15 bp, Homo sapiens
catggccaaaggcct

SEQ ID NO: 878582 - DNA, 15 bp, Homo sapiens
acatggccaaaggcc

SEQ ID NO: 878583 - DNA, 15 bp, Homo sapiens
aacatggccaaaggc

SEQ ID NO: 878584 - DNA, 15 bp, Homo sapiens
gaacatggccaaagg

SEQ ID NO: 878585 - DNA, 15 bp, Homo sapiens
agaacatggccaaag

SEQ ID NO: 878586 - DNA, 15 bp, Homo sapiens
cagaacatggccaaa

SEQ ID NO: 878587 - DNA, 15 bp, Homo sapiens
gcagaacatggccaa

SEQ ID NO: 878588 - DNA, 15 bp, Homo sapiens
ggcagaacatggcca

SEQ ID NO: 878589 - DNA, 15 bp, Homo sapiens
tggcagaacatggcc

SEQ ID NO: 878590 - DNA, 15 bp, Homo sapiens
ttggcagaacatggc

SEQ ID NO: 878591 - DNA, 15 bp, Homo sapiens
attggcagaacatgg

SEQ ID NO: 878592 - DNA, 15 bp, Homo sapiens
gattggcagaacatg

SEQ ID NO: 878593 - DNA, 15 bp, Homo sapiens
agattggcagaacat

SEQ ID NO: 878594 - DNA, 15 bp, Homo sapiens
cagattggcagaaca

SEQ ID NO: 878595 - DNA, 15 bp, Homo sapiens
acagattggcagaac

SEQ ID NO: 878596 - DNA, 15 bp, Homo sapiens
tacagattggcagaa

SEQ ID NO: 878597 - DNA, 15 bp, Homo sapiens
gtacagattggcaga

SEQ ID NO: 878598 - DNA, 15 bp, Homo sapiens
agtacagattggcag

SEQ ID NO: 878599 - DNA, 15 bp, Homo sapiens
gagtacagattggca

SEQ ID NO: 878600 - DNA, 15 bp, Homo sapiens
tgagtacagattggc

SEQ ID NO: 878601 - DNA, 15 bp, Homo sapiens
ctgagtacagattgg

SEQ ID NO: 878602 - DNA, 15 bp, Homo sapiens
cctgagtacagattg

SEQ ID NO: 878603 - DNA, 15 bp, Homo sapiens
tcctgagtacagatt

SEQ ID NO: 878604 - DNA, 15 bp, Homo sapiens
gtcctgagtacagat

SEQ ID NO: 878605 - DNA, 15 bp, Homo sapiens
cgtcctgagtacaga

SEQ ID NO: 878606 - DNA, 15 bp, Homo sapiens
acgtcctgagtacag

SEQ ID NO: 878607 - DNA, 15 bp, Homo sapiens
aacgtcctgagtaca

SEQ ID NO: 878608 - DNA, 15 bp, Homo sapiens
caacgtcctgagtac

SEQ ID NO: 878609 - DNA, 15 bp, Homo sapiens
gcaacgtcctgagta

SEQ ID NO: 878610 - DNA, 15 bp, Homo sapiens
ggcaacgtcctgagt

SEQ ID NO: 878611 - DNA, 15 bp, Homo sapiens
aggcaacgtcctgag

SEQ ID NO: 878612 - DNA, 15 bp, Homo sapiens
aaggcaacgtcctga

SEQ ID NO: 878613 - DNA, 15 bp, Homo sapiens
gaaggcaacgtcctg

SEQ ID NO: 878614 - DNA, 15 bp, Homo sapiens
agaaggcaacgtcct

SEQ ID NO: 878615 - DNA, 15 bp, Homo sapiens
gagaaggcaacgtcc

SEQ ID NO: 878616 - DNA, 15 bp, Homo sapiens
agagaaggcaacgtc

SEQ ID NO: 878617 - DNA, 15 bp, Homo sapiens
cagagaaggcaacgt

SEQ ID NO: 878618 - DNA, 15 bp, Homo sapiens
acagagaaggcaacg

SEQ ID NO: 878619 - DNA, 15 bp, Homo sapiens
cacagagaaggcaac

SEQ ID NO: 878620 - DNA, 15 bp, Homo sapiens
acacagagaaggcaa

SEQ ID NO: 878621 - DNA, 15 bp, Homo sapiens
aacacagagaaggca

SEQ ID NO: 878622 - DNA, 15 bp, Homo sapiens
aaacacagagaaggc

SEQ ID NO: 878623 - DNA, 15 bp, Homo sapiens
gaaacacagagaagg

SEQ ID NO: 878624 - DNA, 15 bp, Homo sapiens
tgaaacacagagaag

SEQ ID NO: 878625 - DNA, 15 bp, Homo sapiens
ctgaaacacagagaa

SEQ ID NO: 878626 - DNA, 15 bp, Homo sapiens
actgaaacacagaga

SEQ ID NO: 878627 - DNA, 15 bp, Homo sapiens
cactgaaacacagag

SEQ ID NO: 878628 - DNA, 15 bp, Homo sapiens
gcactgaaacacaga

SEQ ID NO: 878629 - DNA, 15 bp, Homo sapiens
ggcactgaaacacag

SEQ ID NO: 878630 - DNA, 15 bp, Homo sapiens
gggcactgaaacaca

SEQ ID NO: 878631 - DNA, 15 bp, Homo sapiens
agggcactgaaacac

SEQ ID NO: 878632 - DNA, 15 bp, Homo sapiens
cagggcactgaaaca

SEQ ID NO: 878633 - DNA, 15 bp, Homo sapiens
ccagggcactgaaac

SEQ ID NO: 878634 - DNA, 15 bp, Homo sapiens
accagggcactgaaa

SEQ ID NO: 878635 - DNA, 15 bp, Homo sapiens
aaccagggcactgaa

SEQ ID NO: 878636 - DNA, 15 bp, Homo sapiens
gaaccagggcactga

SEQ ID NO: 878637 - DNA, 15 bp, Homo sapiens
ggaaccagggcactg

SEQ ID NO: 878638 - DNA, 15 bp, Homo sapiens
gggaaccagggcact

SEQ ID NO: 878639 - DNA, 15 bp, Homo sapiens
tgggaaccagggcac

SEQ ID NO: 878640 - DNA, 15 bp, Homo sapiens
ttgggaaccagggca

SEQ ID NO: 878641 - DNA, 15 bp, Homo sapiens
cttgggaaccagggc

SEQ ID NO: 878642 - DNA, 15 bp, Homo sapiens
tcttgggaaccaggg

SEQ ID NO: 878643 - DNA, 15 bp, Homo sapiens
ttcttgggaaccagg

SEQ ID NO: 878644 - DNA, 15 bp, Homo sapiens
gttcttgggaaccag

SEQ ID NO: 878645 - DNA, 15 bp, Homo sapiens
ggttcttgggaacca

SEQ ID NO: 878646 - DNA, 15 bp, Homo sapiens
tggttcttgggaacc

SEQ ID NO: 878647 - DNA, 15 bp, Homo sapiens
atggttcttgggaac

SEQ ID NO: 878648 - DNA, 15 bp, Homo sapiens
aatggttcttgggaa

SEQ ID NO: 878649 - DNA, 15 bp, Homo sapiens
gaatggttcttggga

SEQ ID NO: 878650 - DNA, 15 bp, Homo sapiens
tgaatggttcttggg

SEQ ID NO: 878651 - DNA, 15 bp, Homo sapiens
ttgaatggttcttgg

SEQ ID NO: 878652 - DNA, 15 bp, Homo sapiens
cttgaatggttcttg

SEQ ID NO: 878653 - DNA, 15 bp, Homo sapiens
tcttgaatggttctt

SEQ ID NO: 878654 - DNA, 15 bp, Homo sapiens
ctcttgaatggttct

SEQ ID NO: 878655 - DNA, 15 bp, Homo sapiens
gctcttgaatggttc

SEQ ID NO: 878656 - DNA, 15 bp, Homo sapiens
agctcttgaatggtt

SEQ ID NO: 878657 - DNA, 15 bp, Homo sapiens
cagctcttgaatggt

SEQ ID NO: 878658 - DNA, 15 bp, Homo sapiens
ccagctcttgaatgg

SEQ ID NO: 878659 - DNA, 15 bp, Homo sapiens
tccagctcttgaatg

SEQ ID NO: 878660 - DNA, 15 bp, Homo sapiens
gtccagctcttgaat

SEQ ID NO: 878661 - DNA, 15 bp, Homo sapiens
tgtccagctcttgaa

SEQ ID NO: 878662 - DNA, 15 bp, Homo sapiens
ctgtccagctcttga

SEQ ID NO: 878663 - DNA, 15 bp, Homo sapiens
tctgtccagctcttg

SEQ ID NO: 878664 - DNA, 15 bp, Homo sapiens
atctgtccagctctt

SEQ ID NO: 878665 - DNA, 15 bp, Homo sapiens
aatctgtccagctct

SEQ ID NO: 878666 - DNA, 15 bp, Homo sapiens
aaatctgtccagctc

SEQ ID NO: 878667 - DNA, 15 bp, Homo sapiens
caaatctgtccagct

SEQ ID NO: 878668 - DNA, 15 bp, Homo sapiens
gcaaatctgtccagc

SEQ ID NO: 878669 - DNA, 15 bp, Homo sapiens
ggcaaatctgtccag

SEQ ID NO: 878670 - DNA, 15 bp, Homo sapiens
tggcaaatctgtcca

SEQ ID NO: 878671 - DNA, 15 bp, Homo sapiens
ttggcaaatctgtcc

SEQ ID NO: 878672 - DNA, 15 bp, Homo sapiens
attggcaaatctgtc

SEQ ID NO: 878673 - DNA, 15 bp, Homo sapiens
gattggcaaatctgt

SEQ ID NO: 878674 - DNA, 15 bp, Homo sapiens
tgattggcaaatctg

SEQ ID NO: 878675 - DNA, 15 bp, Homo sapiens
ctgattggcaaatct

SEQ ID NO: 878676 - DNA, 15 bp, Homo sapiens
tctgattggcaaatc

SEQ ID NO: 878677 - DNA, 15 bp, Homo sapiens
atctgattggcaaat

SEQ ID NO: 878678 - DNA, 15 bp, Homo sapiens
aatctgattggcaaa

SEQ ID NO: 878679 - DNA, 15 bp, Homo sapiens
gaatctgattggcaa

SEQ ID NO: 878680 - DNA, 15 bp, Homo sapiens
agaatctgattggca

SEQ ID NO: 878681 - DNA, 15 bp, Homo sapiens
gagaatctgattggc

SEQ ID NO: 878682 - DNA, 15 bp, Homo sapiens
tgagaatctgattgg

SEQ ID NO: 878683 - DNA, 15 bp, Homo sapiens
ctgagaatctgattg

SEQ ID NO: 878684 - DNA, 15 bp, Homo sapiens
gctgagaatctgatt

SEQ ID NO: 878685 - DNA, 15 bp, Homo sapiens
agctgagaatctgat

SEQ ID NO: 878686 - DNA, 15 bp, Homo sapiens
tagctgagaatctga

SEQ ID NO: 878687 - DNA, 15 bp, Homo sapiens
atagctgagaatctg

SEQ ID NO: 878688 - DNA, 15 bp, Homo sapiens
catagctgagaatct

SEQ ID NO: 878689 - DNA, 15 bp, Homo sapiens
ccatagctgagaatc

SEQ ID NO: 878690 - DNA, 15 bp, Homo sapiens
tccatagctgagaat

SEQ ID NO: 878691 - DNA, 15 bp, Homo sapiens
ctccatagctgagaa

SEQ ID NO: 878692 - DNA, 15 bp, Homo sapiens
gctccatagctgaga

SEQ ID NO: 878693 - DNA, 15 bp, Homo sapiens
cgctccatagctgag

SEQ ID NO: 878694 - DNA, 15 bp, Homo sapiens
ccgctccatagctga

SEQ ID NO: 878695 - DNA, 15 bp, Homo sapiens
tccgctccatagctg

SEQ ID NO: 878696 - DNA, 15 bp, Homo sapiens
ttccgctccatagct

SEQ ID NO: 878697 - DNA, 15 bp, Homo sapiens
gttccgctccatagc

SEQ ID NO: 878698 - DNA, 15 bp, Homo sapiens
agttccgctccatag

SEQ ID NO: 878699 - DNA, 15 bp, Homo sapiens
cagttccgctccata

SEQ ID NO: 878700 - DNA, 15 bp, Homo sapiens
ccagttccgctccat

SEQ ID NO: 878701 - DNA, 15 bp, Homo sapiens
tccagttccgctcca

SEQ ID NO: 878702 - DNA, 15 bp, Homo sapiens
atccagttccgctcc

SEQ ID NO: 878703 - DNA, 15 bp, Homo sapiens
catccagttccgctc

SEQ ID NO: 878704 - DNA, 15 bp, Homo sapiens
gcatccagttccgct

SEQ ID NO: 878705 - DNA, 15 bp, Homo sapiens
agcatccagttccgc

SEQ ID NO: 878706 - DNA, 15 bp, Homo sapiens
cagcatccagttccg

SEQ ID NO: 878707 - DNA, 15 bp, Homo sapiens
tcagcatccagttcc

SEQ ID NO: 878708 - DNA, 15 bp, Homo sapiens
gtcagcatccagttc

SEQ ID NO: 878709 - DNA, 15 bp, Homo sapiens
ggtcagcatccagtt

SEQ ID NO: 878710 - DNA, 15 bp, Homo sapiens
tggtcagcatccagt

SEQ ID NO: 878711 - DNA, 15 bp, Homo sapiens
gtggtcagcatccag

SEQ ID NO: 878712 - DNA, 15 bp, Homo sapiens
ggtggtcagcatcca

SEQ ID NO: 878713 - DNA, 15 bp, Homo sapiens
gggtggtcagcatcc

SEQ ID NO: 878714 - DNA, 15 bp, Homo sapiens
agggtggtcagcatc

SEQ ID NO: 878715 - DNA, 15 bp, Homo sapiens
cagggtggtcagcat

SEQ ID NO: 878716 - DNA, 15 bp, Homo sapiens
acagggtggtcagca

SEQ ID NO: 878717 - DNA, 15 bp, Homo sapiens
cacagggtggtcagc

SEQ ID NO: 878718 - DNA, 15 bp, Homo sapiens
tcacagggtggtcag

SEQ ID NO: 878719 - DNA, 15 bp, Homo sapiens
ctcacagggtggtca

SEQ ID NO: 878720 - DNA, 15 bp, Homo sapiens
actcacagggtggtc

SEQ ID NO: 878721 - DNA, 15 bp, Homo sapiens
gactcacagggtggt

SEQ ID NO: 878722 - DNA, 15 bp, Homo sapiens
ggactcacagggtgg

SEQ ID NO: 878723 - DNA, 15 bp, Homo sapiens
tggactcacagggtg

SEQ ID NO: 878724 - DNA, 15 bp, Homo sapiens
atggactcacagggt

SEQ ID NO: 878725 - DNA, 15 bp, Homo sapiens
catggactcacaggg

SEQ ID NO: 878726 - DNA, 15 bp, Homo sapiens
ccatggactcacagg

SEQ ID NO: 878727 - DNA, 15 bp, Homo sapiens
gccatggactcacag

SEQ ID NO: 878728 - DNA, 15 bp, Homo sapiens
ggccatggactcaca

SEQ ID NO: 878729 - DNA, 15 bp, Homo sapiens
gggccatggactcac

SEQ ID NO: 878730 - DNA, 15 bp, Homo sapiens
cgggccatggactca

SEQ ID NO: 878731 - DNA, 15 bp, Homo sapiens
acgggccatggactc

SEQ ID NO: 878732 - DNA, 15 bp, Homo sapiens
tacgggccatggact

SEQ ID NO: 878733 - DNA, 15 bp, Homo sapiens
ctacgggccatggac

SEQ ID NO: 878734 - DNA, 15 bp, Homo sapiens
cctacgggccatgga

SEQ ID NO: 878735 - DNA, 15 bp, Homo sapiens
tcctacgggccatgg

SEQ ID NO: 878736 - DNA, 15 bp, Homo sapiens
atcctacgggccatg

SEQ ID NO: 878737 - DNA, 15 bp, Homo sapiens
catcctacgggccat

SEQ ID NO: 878738 - DNA, 15 bp, Homo sapiens
tcatcctacgggcca

SEQ ID NO: 878739 - DNA, 15 bp, Homo sapiens
ctcatcctacgggcc

SEQ ID NO: 878740 - DNA, 15 bp, Homo sapiens
tctcatcctacgggc

SEQ ID NO: 878741 - DNA, 15 bp, Homo sapiens
atctcatcctacggg

SEQ ID NO: 878742 - DNA, 15 bp, Homo sapiens
aatctcatcctacgg

SEQ ID NO: 878743 - DNA, 15 bp, Homo sapiens
aaatctcatcctacg

SEQ ID NO: 878744 - DNA, 15 bp, Homo sapiens
aaaatctcatcctac

SEQ ID NO: 878745 - DNA, 15 bp, Homo sapiens
aaaaatctcatccta

SEQ ID NO: 878746 - DNA, 15 bp, Homo sapiens
aaaaaatctcatcct

SEQ ID NO: 878747 - DNA, 15 bp, Homo sapiens
gaaaaaatctcatcc

SEQ ID NO: 878748 - DNA, 15 bp, Homo sapiens
tgaaaaaatctcatc

SEQ ID NO: 878749 - DNA, 15 bp, Homo sapiens
ctgaaaaaatctcat

SEQ ID NO: 878750 - DNA, 15 bp, Homo sapiens
actgaaaaaatctca

SEQ ID NO: 878751 - DNA, 15 bp, Homo sapiens
cactgaaaaaatctc

SEQ ID NO: 878752 - DNA, 15 bp, Homo sapiens
gcactgaaaaaatct

SEQ ID NO: 878753 - DNA, 15 bp, Homo sapiens
ggcactgaaaaaatc

SEQ ID NO: 878754 - DNA, 15 bp, Homo sapiens
aggcactgaaaaaat

SEQ ID NO: 878755 - DNA, 15 bp, Homo sapiens
gaggcactgaaaaaa

SEQ ID NO: 878756 - DNA, 15 bp, Homo sapiens
agaggcactgaaaaa

SEQ ID NO: 878757 - DNA, 15 bp, Homo sapiens
gagaggcactgaaaa

SEQ ID NO: 878758 - DNA, 15 bp, Homo sapiens
ggagaggcactgaaa

SEQ ID NO: 878759 - DNA, 15 bp, Homo sapiens
aggagaggcactgaa

SEQ ID NO: 878760 - DNA, 15 bp, Homo sapiens
gaggagaggcactga

SEQ ID NO: 878761 - DNA, 15 bp, Homo sapiens
ggaggagaggcactg

SEQ ID NO: 878762 - DNA, 15 bp, Homo sapiens
tggaggagaggcact

SEQ ID NO: 878763 - DNA, 15 bp, Homo sapiens
gtggaggagaggcac

SEQ ID NO: 878764 - DNA, 15 bp, Homo sapiens
agtggaggagaggca

SEQ ID NO: 878765 - DNA, 15 bp, Homo sapiens
gagtggaggagaggc

SEQ ID NO: 878766 - DNA, 15 bp, Homo sapiens
ggagtggaggagagg

SEQ ID NO: 878767 - DNA, 15 bp, Homo sapiens
gggagtggaggagag

SEQ ID NO: 878768 - DNA, 15 bp, Homo sapiens
ggggagtggaggaga

SEQ ID NO: 878769 - DNA, 15 bp, Homo sapiens
aggggagtggaggag

SEQ ID NO: 878770 - DNA, 15 bp, Homo sapiens
gaggggagtggagga

SEQ ID NO: 878771 - DNA, 15 bp, Homo sapiens
ggaggggagtggagg

SEQ ID NO: 878772 - DNA, 15 bp, Homo sapiens
gggaggggagtggag

SEQ ID NO: 878773 - DNA, 15 bp, Homo sapiens
agggaggggagtgga

SEQ ID NO: 878774 - DNA, 15 bp, Homo sapiens
aagggaggggagtgg

SEQ ID NO: 878775 - DNA, 15 bp, Homo sapiens
gaagggaggggagtg

SEQ ID NO: 878776 - DNA, 15 bp, Homo sapiens
ggaagggaggggagt

SEQ ID NO: 878777 - DNA, 15 bp, Homo sapiens
aggaagggaggggag

SEQ ID NO: 878778 - DNA, 15 bp, Homo sapiens
gaggaagggagggga

SEQ ID NO: 878779 - DNA, 15 bp, Homo sapiens
agaggaagggagggg

SEQ ID NO: 878780 - DNA, 15 bp, Homo sapiens
aagaggaagggaggg

SEQ ID NO: 878781 - DNA, 15 bp, Homo sapiens
taagaggaagggagg

SEQ ID NO: 878782 - DNA, 15 bp, Homo sapiens
gtaagaggaagggag

SEQ ID NO: 878783 - DNA, 15 bp, Homo sapiens
ggtaagaggaaggga

SEQ ID NO: 878784 - DNA, 15 bp, Homo sapiens
aggtaagaggaaggg

SEQ ID NO: 878785 - DNA, 15 bp, Homo sapiens
aaggtaagaggaagg

SEQ ID NO: 878786 - DNA, 15 bp, Homo sapiens
gaaggtaagaggaag

SEQ ID NO: 878787 - DNA, 15 bp, Homo sapiens
agaaggtaagaggaa

SEQ ID NO: 878788 - DNA, 15 bp, Homo sapiens
gagaaggtaagagga

SEQ ID NO: 878789 - DNA, 15 bp, Homo sapiens
agagaaggtaagagg

SEQ ID NO: 878790 - DNA, 15 bp, Homo sapiens
tagagaaggtaagag

SEQ ID NO: 878791 - DNA, 15 bp, Homo sapiens
gtagagaaggtaaga

SEQ ID NO: 878792 - DNA, 15 bp, Homo sapiens
agtagagaaggtaag

SEQ ID NO: 878793 - DNA, 15 bp, Homo sapiens
aagtagagaaggtaa

SEQ ID NO: 878794 - DNA, 15 bp, Homo sapiens
caagtagagaaggta

SEQ ID NO: 878795 - DNA, 15 bp, Homo sapiens
ccaagtagagaaggt

SEQ ID NO: 878796 - DNA, 15 bp, Homo sapiens
tccaagtagagaagg

SEQ ID NO: 878797 - DNA, 15 bp, Homo sapiens
ctccaagtagagaag

SEQ ID NO: 878798 - DNA, 15 bp, Homo sapiens
gctccaagtagagaa

SEQ ID NO: 878799 - DNA, 15 bp, Homo sapiens
tgctccaagtagaga

SEQ ID NO: 878800 - DNA, 15 bp, Homo sapiens
ttgctccaagtagag

SEQ ID NO: 878801 - DNA, 15 bp, Homo sapiens
attgctccaagtaga

SEQ ID NO: 878802 - DNA, 15 bp, Homo sapiens
cattgctccaagtag

SEQ ID NO: 878803 - DNA, 15 bp, Homo sapiens
acattgctccaagta

SEQ ID NO: 878804 - DNA, 15 bp, Homo sapiens
tacattgctccaagt

SEQ ID NO: 878805 - DNA, 15 bp, Homo sapiens
gtacattgctccaag

SEQ ID NO: 878806 - DNA, 15 bp, Homo sapiens
agtacattgctccaa

SEQ ID NO: 878807 - DNA, 15 bp, Homo sapiens
aagtacattgctcca

SEQ ID NO: 878808 - DNA, 15 bp, Homo sapiens
caagtacattgctcc

SEQ ID NO: 878809 - DNA, 15 bp, Homo sapiens
acaagtacattgctc

SEQ ID NO: 878810 - DNA, 15 bp, Homo sapiens
aacaagtacattgct

SEQ ID NO: 878811 - DNA, 15 bp, Homo sapiens
gaacaagtacattgc

SEQ ID NO: 878812 - DNA, 15 bp, Homo sapiens
tgaacaagtacattg

SEQ ID NO: 878813 - DNA, 15 bp, Homo sapiens
gtgaacaagtacatt

SEQ ID NO: 878814 - DNA, 15 bp, Homo sapiens
agtgaacaagtacat

SEQ ID NO: 878815 - DNA, 15 bp, Homo sapiens
aagtgaacaagtaca

SEQ ID NO: 878816 - DNA, 15 bp, Homo sapiens
caagtgaacaagtac

SEQ ID NO: 878817 - DNA, 15 bp, Homo sapiens
acaagtgaacaagta

SEQ ID NO: 878818 - DNA, 15 bp, Homo sapiens
aacaagtgaacaagt

SEQ ID NO: 878819 - DNA, 15 bp, Homo sapiens
gaacaagtgaacaag

SEQ ID NO: 878820 - DNA, 15 bp, Homo sapiens
tgaacaagtgaacaa

SEQ ID NO: 878821 - DNA, 15 bp, Homo sapiens
ttgaacaagtgaaca

SEQ ID NO: 878822 - DNA, 15 bp, Homo sapiens
gttgaacaagtgaac

SEQ ID NO: 878823 - DNA, 15 bp, Homo sapiens
tgttgaacaagtgaa

SEQ ID NO: 878824 - DNA, 15 bp, Homo sapiens
ttgttgaacaagtga

SEQ ID NO: 878825 - DNA, 15 bp, Homo sapiens
tttgttgaacaagtg

SEQ ID NO: 878826 - DNA, 15 bp, Homo sapiens
gtttgttgaacaagt

SEQ ID NO: 878827 - DNA, 15 bp, Homo sapiens
tgtttgttgaacaag

SEQ ID NO: 878828 - DNA, 15 bp, Homo sapiens
gtgtttgttgaacaa

SEQ ID NO: 878829 - DNA, 15 bp, Homo sapiens
agtgtttgttgaaca

SEQ ID NO: 878830 - DNA, 15 bp, Homo sapiens
aagtgtttgttgaac

SEQ ID NO: 878831 - DNA, 15 bp, Homo sapiens
taagtgtttgttgaa

SEQ ID NO: 878832 - DNA, 15 bp, Homo sapiens
ataagtgtttgttga

SEQ ID NO: 878833 - DNA, 15 bp, Homo sapiens
aataagtgtttgttg

SEQ ID NO: 878834 - DNA, 15 bp, Homo sapiens
caataagtgtttgtt

SEQ ID NO: 878835 - DNA, 15 bp, Homo sapiens
acaataagtgtttgt

SEQ ID NO: 878836 - DNA, 15 bp, Homo sapiens
cacaataagtgtttg

SEQ ID NO: 878837 - DNA, 15 bp, Homo sapiens
acacaataagtgttt

SEQ ID NO: 878838 - DNA, 15 bp, Homo sapiens
aacacaataagtgtt

SEQ ID NO: 878839 - DNA, 15 bp, Homo sapiens
gaacacaataagtgt

SEQ ID NO: 878840 - DNA, 15 bp, Homo sapiens
ggaacacaataagtg

SEQ ID NO: 878841 - DNA, 15 bp, Homo sapiens
aggaacacaataagt

SEQ ID NO: 878842 - DNA, 15 bp, Homo sapiens
taggaacacaataag

SEQ ID NO: 878843 - DNA, 15 bp, Homo sapiens
ataggaacacaataa

SEQ ID NO: 878844 - DNA, 15 bp, Homo sapiens
aataggaacacaata

SEQ ID NO: 878845 - DNA, 15 bp, Homo sapiens
aaataggaacacaat

SEQ ID NO: 878846 - DNA, 15 bp, Homo sapiens
taaataggaacacaa

SEQ ID NO: 878847 - DNA, 15 bp, Homo sapiens
gtaaataggaacaca

SEQ ID NO: 878848 - DNA, 15 bp, Homo sapiens
tgtaaataggaacac

SEQ ID NO: 878849 - DNA, 15 bp, Homo sapiens
gtgtaaataggaaca

SEQ ID NO: 878850 - DNA, 15 bp, Homo sapiens
cgtgtaaataggaac

SEQ ID NO: 878851 - DNA, 15 bp, Homo sapiens
tcgtgtaaataggaa

SEQ ID NO: 878852 - DNA, 15 bp, Homo sapiens
ctcgtgtaaatagga

SEQ ID NO: 878853 - DNA, 15 bp, Homo sapiens
cctcgtgtaaatagg

SEQ ID NO: 878854 - DNA, 15 bp, Homo sapiens
ccctcgtgtaaatag

SEQ ID NO: 878855 - DNA, 15 bp, Homo sapiens
gccctcgtgtaaata

SEQ ID NO: 878856 - DNA, 15 bp, Homo sapiens
agccctcgtgtaaat

SEQ ID NO: 878857 - DNA, 15 bp, Homo sapiens
cagccctcgtgtaaa

SEQ ID NO: 878858 - DNA, 15 bp, Homo sapiens
ccagccctcgtgtaa

SEQ ID NO: 878859 - DNA, 15 bp, Homo sapiens
cccagccctcgtgta

SEQ ID NO: 878860 - DNA, 15 bp, Homo sapiens
tcccagccctcgtgt

SEQ ID NO: 878861 - DNA, 15 bp, Homo sapiens
ttcccagccctcgtg

SEQ ID NO: 878862 - DNA, 15 bp, Homo sapiens
tttcccagccctcgt

SEQ ID NO: 878863 - DNA, 15 bp, Homo sapiens
ttttcccagccctcg

SEQ ID NO: 878864 - DNA, 15 bp, Homo sapiens
tttttcccagccctc

SEQ ID NO: 878865 - DNA, 15 bp, Homo sapiens
atttttcccagccct

SEQ ID NO: 878866 - DNA, 15 bp, Homo sapiens
aatttttcccagccc

SEQ ID NO: 878867 - DNA, 15 bp, Homo sapiens
taatttttcccagcc

SEQ ID NO: 878868 - DNA, 15 bp, Homo sapiens
ctaatttttcccagc

SEQ ID NO: 878869 - DNA, 15 bp, Homo sapiens
gctaatttttcccag

SEQ ID NO: 878870 - DNA, 15 bp, Homo sapiens
tgctaatttttccca

SEQ ID NO: 878871 - DNA, 15 bp, Homo sapiens
ttgctaatttttccc

SEQ ID NO: 878872 - DNA, 15 bp, Homo sapiens
cttgctaatttttcc

SEQ ID NO: 878873 - DNA, 15 bp, Homo sapiens
tcttgctaatttttc

SEQ ID NO: 878874 - DNA, 15 bp, Homo sapiens
gtcttgctaattttt

SEQ ID NO: 878875 - DNA, 15 bp, Homo sapiens
agtcttgctaatttt

SEQ ID NO: 878876 - DNA, 15 bp, Homo sapiens
aagtcttgctaattt

SEQ ID NO: 878877 - DNA, 15 bp, Homo sapiens
aaagtcttgctaatt

SEQ ID NO: 878878 - DNA, 15 bp, Homo sapiens
taaagtcttgctaat

SEQ ID NO: 878879 - DNA, 15 bp, Homo sapiens
ataaagtcttgctaa

SEQ ID NO: 878880 - DNA, 15 bp, Homo sapiens
aataaagtcttgcta

SEQ ID NO: 878881 - DNA, 15 bp, Homo sapiens
caataaagtcttgct

SEQ ID NO: 878882 - DNA, 15 bp, Homo sapiens
acaataaagtcttgc

SEQ ID NO: 878883 - DNA, 15 bp, Homo sapiens
gacaataaagtcttg

SEQ ID NO: 878884 - DNA, 15 bp, Homo sapiens
tgacaataaagtctt

SEQ ID NO: 878885 - DNA, 15 bp, Homo sapiens
atgacaataaagtct

SEQ ID NO: 878886 - DNA, 15 bp, Homo sapiens
gatgacaataaagtc

SEQ ID NO: 878887 - DNA, 15 bp, Homo sapiens
tgatgacaataaagt

SEQ ID NO: 878888 - DNA, 15 bp, Homo sapiens
atgatgacaataaag

SEQ ID NO: 878889 - DNA, 15 bp, Homo sapiens
gatgatgacaataaa

SEQ ID NO: 878890 - DNA, 15 bp, Homo sapiens
tgatgatgacaataa

SEQ ID NO: 878891 - DNA, 15 bp, Homo sapiens
atgatgatgacaata

SEQ ID NO: 878892 - DNA, 15 bp, Homo sapiens
aatgatgatgacaat

SEQ ID NO: 878893 - DNA, 15 bp, Homo sapiens
taatgatgatgacaa

SEQ ID NO: 878894 - DNA, 15 bp, Homo sapiens
ataatgatgatgaca

SEQ ID NO: 878895 - DNA, 15 bp, Homo sapiens
gataatgatgatgac

SEQ ID NO: 878896 - DNA, 15 bp, Homo sapiens
tgataatgatgatga

SEQ ID NO: 878897 - DNA, 15 bp, Homo sapiens
atgataatgatgatg

SEQ ID NO: 878898 - DNA, 15 bp, Homo sapiens
catgataatgatgat

SEQ ID NO: 878899 - DNA, 15 bp, Homo sapiens
ccatgataatgatga

SEQ ID NO: 878900 - DNA, 15 bp, Homo sapiens
accatgataatgatg

SEQ ID NO: 878901 - DNA, 15 bp, Homo sapiens
gaccatgataatgat

SEQ ID NO: 878902 - DNA, 15 bp, Homo sapiens
tgaccatgataatga

SEQ ID NO: 878903 - DNA, 15 bp, Homo sapiens
atgaccatgataatg

SEQ ID NO: 878904 - DNA, 15 bp, Homo sapiens
aatgaccatgataat

SEQ ID NO: 878905 - DNA, 15 bp, Homo sapiens
taatgaccatgataa

SEQ ID NO: 878906 - DNA, 15 bp, Homo sapiens
ataatgaccatgata

SEQ ID NO: 878907 - DNA, 15 bp, Homo sapiens
aataatgaccatgat

SEQ ID NO: 878908 - DNA, 15 bp, Homo sapiens
aaataatgaccatga

SEQ ID NO: 878909 - DNA, 15 bp, Homo sapiens
aaaataatgaccatg

SEQ ID NO: 878910 - DNA, 15 bp, Homo sapiens
aaaaataatgaccat

SEQ ID NO: 878911 - DNA, 15 bp, Homo sapiens
caaaaataatgacca

SEQ ID NO: 878912 - DNA, 15 bp, Homo sapiens
acaaaaataatgacc

SEQ ID NO: 878913 - DNA, 15 bp, Homo sapiens
tacaaaaataatgac

SEQ ID NO: 878914 - DNA, 15 bp, Homo sapiens
ctacaaaaataatga

SEQ ID NO: 878915 - DNA, 15 bp, Homo sapiens
cctacaaaaataatg

SEQ ID NO: 878916 - DNA, 15 bp, Homo sapiens
tcctacaaaaataat

SEQ ID NO: 878917 - DNA, 15 bp, Homo sapiens
ctcctacaaaaataa

SEQ ID NO: 878918 - DNA, 15 bp, Homo sapiens
gctcctacaaaaata

SEQ ID NO: 878919 - DNA, 15 bp, Homo sapiens
tgctcctacaaaaat

SEQ ID NO: 878920 - DNA, 15 bp, Homo sapiens
ttgctcctacaaaaa

SEQ ID NO: 878921 - DNA, 15 bp, Homo sapiens
tttgctcctacaaaa

SEQ ID NO: 878922 - DNA, 15 bp, Homo sapiens
atttgctcctacaaa

SEQ ID NO: 878923 - DNA, 15 bp, Homo sapiens
tatttgctcctacaa

SEQ ID NO: 878924 - DNA, 15 bp, Homo sapiens
atatttgctcctaca

SEQ ID NO: 878925 - DNA, 15 bp, Homo sapiens
tatatttgctcctac

SEQ ID NO: 878926 - DNA, 15 bp, Homo sapiens
ttatatttgctccta

SEQ ID NO: 878927 - DNA, 15 bp, Homo sapiens
tttatatttgctcct

SEQ ID NO: 878928 - DNA, 15 bp, Homo sapiens
atttatatttgctcc

SEQ ID NO: 878929 - DNA, 15 bp, Homo sapiens
gatttatatttgctc

SEQ ID NO: 878930 - DNA, 15 bp, Homo sapiens
tgatttatatttgct

SEQ ID NO: 878931 - DNA, 15 bp, Homo sapiens
gtgatttatatttgc

SEQ ID NO: 878932 - DNA, 15 bp, Homo sapiens
agtgatttatatttg

SEQ ID NO: 878933 - DNA, 15 bp, Homo sapiens
cagtgatttatattt

SEQ ID NO: 878934 - DNA, 15 bp, Homo sapiens
acagtgatttatatt

SEQ ID NO: 878935 - DNA, 15 bp, Homo sapiens
gacagtgatttatat

SEQ ID NO: 878936 - DNA, 15 bp, Homo sapiens
ggacagtgatttata

SEQ ID NO: 878937 - DNA, 15 bp, Homo sapiens
tggacagtgatttat

SEQ ID NO: 878938 - DNA, 15 bp, Homo sapiens
ctggacagtgattta

SEQ ID NO: 878939 - DNA, 15 bp, Homo sapiens
tctggacagtgattt

SEQ ID NO: 878940 - DNA, 15 bp, Homo sapiens
ttctggacagtgatt

SEQ ID NO: 878941 - DNA, 15 bp, Homo sapiens
tttctggacagtgat

SEQ ID NO: 878942 - DNA, 15 bp, Homo sapiens
gtttctggacagtga

SEQ ID NO: 878943 - DNA, 15 bp, Homo sapiens
agtttctggacagtg

SEQ ID NO: 878944 - DNA, 15 bp, Homo sapiens
tagtttctggacagt

SEQ ID NO: 878945 - DNA, 15 bp, Homo sapiens
atagtttctggacag

SEQ ID NO: 878946 - DNA, 15 bp, Homo sapiens
aatagtttctggaca

SEQ ID NO: 878947 - DNA, 15 bp, Homo sapiens
caatagtttctggac

SEQ ID NO: 878948 - DNA, 15 bp, Homo sapiens
acaatagtttctgga

SEQ ID NO: 878949 - DNA, 15 bp, Homo sapiens
gacaatagtttctgg

SEQ ID NO: 878950 - DNA, 15 bp, Homo sapiens
agacaatagtttctg

SEQ ID NO: 878951 - DNA, 15 bp, Homo sapiens
gagacaatagtttct

SEQ ID NO: 878952 - DNA, 15 bp, Homo sapiens
agagacaatagtttc

SEQ ID NO: 878953 - DNA, 15 bp, Homo sapiens
tagagacaatagttt

SEQ ID NO: 878954 - DNA, 15 bp, Homo sapiens
atagagacaatagtt

SEQ ID NO: 878955 - DNA, 15 bp, Homo sapiens
tatagagacaatagt

SEQ ID NO: 878956 - DNA, 15 bp, Homo sapiens
atatagagacaatag

SEQ ID NO: 878957 - DNA, 15 bp, Homo sapiens
tatatagagacaata

SEQ ID NO: 878958 - DNA, 15 bp, Homo sapiens
gtatatagagacaat

SEQ ID NO: 878959 - DNA, 15 bp, Homo sapiens
agtatatagagacaa

SEQ ID NO: 878960 - DNA, 15 bp, Homo sapiens
tagtatatagagaca

SEQ ID NO: 878961 - DNA, 15 bp, Homo sapiens
ctagtatatagagac

SEQ ID NO: 878962 - DNA, 15 bp, Homo sapiens
cctagtatatagaga

SEQ ID NO: 878963 - DNA, 15 bp, Homo sapiens
acctagtatatagag

SEQ ID NO: 878964 - DNA, 15 bp, Homo sapiens
gacctagtatataga

SEQ ID NO: 878965 - DNA, 15 bp, Homo sapiens
agacctagtatatag

SEQ ID NO: 878966 - DNA, 15 bp, Homo sapiens
cagacctagtatata

SEQ ID NO: 878967 - DNA, 15 bp, Homo sapiens
acagacctagtatat

SEQ ID NO: 878968 - DNA, 15 bp, Homo sapiens
cacagacctagtata

SEQ ID NO: 878969 - DNA, 15 bp, Homo sapiens
acacagacctagtat

SEQ ID NO: 878970 - DNA, 15 bp, Homo sapiens
tacacagacctagta

SEQ ID NO: 878971 - DNA, 15 bp, Homo sapiens
atacacagacctagt

SEQ ID NO: 878972 - DNA, 15 bp, Homo sapiens
catacacagacctag

SEQ ID NO: 878973 - DNA, 15 bp, Homo sapiens
gcatacacagaccta

SEQ ID NO: 878974 - DNA, 15 bp, Homo sapiens
tgcatacacagacct

SEQ ID NO: 878975 - DNA, 15 bp, Homo sapiens
gtgcatacacagacc

SEQ ID NO: 878976 - DNA, 15 bp, Homo sapiens
tgtgcatacacagac

SEQ ID NO: 878977 - DNA, 15 bp, Homo sapiens
ttgtgcatacacaga

SEQ ID NO: 878978 - DNA, 15 bp, Homo sapiens
tttgtgcatacacag

SEQ ID NO: 878979 - DNA, 15 bp, Homo sapiens
gtttgtgcatacaca

SEQ ID NO: 878980 - DNA, 15 bp, Homo sapiens
tgtttgtgcatacac

SEQ ID NO: 878981 - DNA, 15 bp, Homo sapiens
gtgtttgtgcataca

SEQ ID NO: 878982 - DNA, 15 bp, Homo sapiens
tgtgtttgtgcatac

SEQ ID NO: 878983 - DNA, 15 bp, Homo sapiens
gtgtgtttgtgcata

SEQ ID NO: 878984 - DNA, 15 bp, Homo sapiens
tgtgtgtttgtgcat

SEQ ID NO: 878985 - DNA, 15 bp, Homo sapiens
gtgtgtgtttgtgca

SEQ ID NO: 878986 - DNA, 15 bp, Homo sapiens
tgtgtgtgtttgtgc

SEQ ID NO: 878987 - DNA, 15 bp, Homo sapiens
gtgtgtgtgtttgtg

SEQ ID NO: 878988 - DNA, 15 bp, Homo sapiens
tgtgtgtgtgtttgt

SEQ ID NO: 878989 - DNA, 15 bp, Homo sapiens
ctgtgtgtgtgtttg

SEQ ID NO: 878990 - DNA, 15 bp, Homo sapiens
tctgtgtgtgtgttt

SEQ ID NO: 878991 - DNA, 15 bp, Homo sapiens
atctgtgtgtgtgtt

SEQ ID NO: 878992 - DNA, 15 bp, Homo sapiens
catctgtgtgtgtgt

SEQ ID NO: 878993 - DNA, 15 bp, Homo sapiens
gcatctgtgtgtgtg

SEQ ID NO: 878994 - DNA, 15 bp, Homo sapiens
tgcatctgtgtgtgt

SEQ ID NO: 878995 - DNA, 15 bp, Homo sapiens
ttgcatctgtgtgtg

SEQ ID NO: 878996 - DNA, 15 bp, Homo sapiens
tttgcatctgtgtgt

SEQ ID NO: 878997 - DNA, 15 bp, Homo sapiens
atttgcatctgtgtg

SEQ ID NO: 878998 - DNA, 15 bp, Homo sapiens
gatttgcatctgtgt

SEQ ID NO: 878999 - DNA, 15 bp, Homo sapiens
tgatttgcatctgtg

SEQ ID NO: 879000 - DNA, 15 bp, Homo sapiens
atgatttgcatctgt

SEQ ID NO: 879001 - DNA, 15 bp, Homo sapiens
gatgatttgcatctg

SEQ ID NO: 879002 - DNA, 15 bp, Homo sapiens
tgatgatttgcatct

SEQ ID NO: 879003 - DNA, 15 bp, Homo sapiens
atgatgatttgcatc

SEQ ID NO: 879004 - DNA, 15 bp, Homo sapiens
aatgatgatttgcat

SEQ ID NO: 879005 - DNA, 15 bp, Homo sapiens
caatgatgatttgca

SEQ ID NO: 879006 - DNA, 15 bp, Homo sapiens
acaatgatgatttgc

SEQ ID NO: 879007 - DNA, 15 bp, Homo sapiens
aacaatgatgatttg

SEQ ID NO: 879008 - DNA, 15 bp, Homo sapiens
aaacaatgatgattt

SEQ ID NO: 879009 - DNA, 15 bp, Homo sapiens
gaaacaatgatgatt

SEQ ID NO: 879010 - DNA, 15 bp, Homo sapiens
agaaacaatgatgat

SEQ ID NO: 879011 - DNA, 15 bp, Homo sapiens
cagaaacaatgatga

SEQ ID NO: 879012 - DNA, 15 bp, Homo sapiens
gcagaaacaatgatg

SEQ ID NO: 879013 - DNA, 15 bp, Homo sapiens
ggcagaaacaatgat

SEQ ID NO: 879014 - DNA, 15 bp, Homo sapiens
aggcagaaacaatga

SEQ ID NO: 879015 - DNA, 15 bp, Homo sapiens
caggcagaaacaatg

SEQ ID NO: 879016 - DNA, 15 bp, Homo sapiens
acaggcagaaacaat

SEQ ID NO: 879017 - DNA, 15 bp, Homo sapiens
cacaggcagaaacaa

SEQ ID NO: 879018 - DNA, 15 bp, Homo sapiens
acacaggcagaaaca

SEQ ID NO: 879019 - DNA, 15 bp, Homo sapiens
tacacaggcagaaac

SEQ ID NO: 879020 - DNA, 15 bp, Homo sapiens
gtacacaggcagaaa

SEQ ID NO: 879021 - DNA, 15 bp, Homo sapiens
tgtacacaggcagaa

SEQ ID NO: 879022 - DNA, 15 bp, Homo sapiens
atgtacacaggcaga

SEQ ID NO: 879023 - DNA, 15 bp, Homo sapiens
gatgtacacaggcag

SEQ ID NO: 879024 - DNA, 15 bp, Homo sapiens
agatgtacacaggca

SEQ ID NO: 879025 - DNA, 15 bp, Homo sapiens
tagatgtacacaggc

SEQ ID NO: 879026 - DNA, 15 bp, Homo sapiens
atagatgtacacagg

SEQ ID NO: 879027 - DNA, 15 bp, Homo sapiens
catagatgtacacag

SEQ ID NO: 879028 - DNA, 15 bp, Homo sapiens
ccatagatgtacaca

SEQ ID NO: 879029 - DNA, 15 bp, Homo sapiens
tccatagatgtacac

SEQ ID NO: 879030 - DNA, 15 bp, Homo sapiens
ctccatagatgtaca

SEQ ID NO: 879031 - DNA, 15 bp, Homo sapiens
cctccatagatgtac

SEQ ID NO: 879032 - DNA, 15 bp, Homo sapiens
acctccatagatgta

SEQ ID NO: 879033 - DNA, 15 bp, Homo sapiens
aacctccatagatgt

SEQ ID NO: 879034 - DNA, 15 bp, Homo sapiens
aaacctccatagatg

SEQ ID NO: 879035 - DNA, 15 bp, Homo sapiens
taaacctccatagat

SEQ ID NO: 879036 - DNA, 15 bp, Homo sapiens
ttaaacctccataga

SEQ ID NO: 879037 - DNA, 15 bp, Homo sapiens
cttaaacctccatag

SEQ ID NO: 879038 - DNA, 15 bp, Homo sapiens
acttaaacctccata

SEQ ID NO: 879039 - DNA, 15 bp, Homo sapiens
gacttaaacctccat

SEQ ID NO: 879040 - DNA, 15 bp, Homo sapiens
tgacttaaacctcca

SEQ ID NO: 879041 - DNA, 15 bp, Homo sapiens
ttgacttaaacctcc

SEQ ID NO: 879042 - DNA, 15 bp, Homo sapiens
cttgacttaaacctc

SEQ ID NO: 879043 - DNA, 15 bp, Homo sapiens
acttgacttaaacct

SEQ ID NO: 879044 - DNA, 15 bp, Homo sapiens
cacttgacttaaacc

SEQ ID NO: 879045 - DNA, 15 bp, Homo sapiens
gcacttgacttaaac

SEQ ID NO: 879046 - DNA, 15 bp, Homo sapiens
agcacttgacttaaa

SEQ ID NO: 879047 - DNA, 15 bp, Homo sapiens
aagcacttgacttaa

SEQ ID NO: 879048 - DNA, 15 bp, Homo sapiens
caagcacttgactta

SEQ ID NO: 879049 - DNA, 15 bp, Homo sapiens
ccaagcacttgactt

SEQ ID NO: 879050 - DNA, 15 bp, Homo sapiens
accaagcacttgact

SEQ ID NO: 879051 - DNA, 15 bp, Homo sapiens
taccaagcacttgac

SEQ ID NO: 879052 - DNA, 15 bp, Homo sapiens
ttaccaagcacttga

SEQ ID NO: 879053 - DNA, 15 bp, Homo sapiens
tttaccaagcacttg

SEQ ID NO: 879054 - DNA, 15 bp, Homo sapiens
gtttaccaagcactt

SEQ ID NO: 879055 - DNA, 15 bp, Homo sapiens
tgtttaccaagcact

SEQ ID NO: 879056 - DNA, 15 bp, Homo sapiens
ctgtttaccaagcac

SEQ ID NO: 879057 - DNA, 15 bp, Homo sapiens
gctgtttaccaagca

SEQ ID NO: 879058 - DNA, 15 bp, Homo sapiens
tgctgtttaccaagc

SEQ ID NO: 879059 - DNA, 15 bp, Homo sapiens
ttgctgtttaccaag

SEQ ID NO: 879060 - DNA, 15 bp, Homo sapiens
gttgctgtttaccaa

SEQ ID NO: 879061 - DNA, 15 bp, Homo sapiens
ggttgctgtttacca

SEQ ID NO: 879062 - DNA, 15 bp, Homo sapiens
aggttgctgtttacc

SEQ ID NO: 879063 - DNA, 15 bp, Homo sapiens
caggttgctgtttac

SEQ ID NO: 879064 - DNA, 15 bp, Homo sapiens
acaggttgctgttta

SEQ ID NO: 879065 - DNA, 15 bp, Homo sapiens
tacaggttgctgttt

SEQ ID NO: 879066 - DNA, 15 bp, Homo sapiens
gtacaggttgctgtt

SEQ ID NO: 879067 - DNA, 15 bp, Homo sapiens
agtacaggttgctgt

SEQ ID NO: 879068 - DNA, 15 bp, Homo sapiens
tagtacaggttgctg

SEQ ID NO: 879069 - DNA, 15 bp, Homo sapiens
ttagtacaggttgct

SEQ ID NO: 879070 - DNA, 15 bp, Homo sapiens
gttagtacaggttgc

SEQ ID NO: 879071 - DNA, 15 bp, Homo sapiens
tgttagtacaggttg

SEQ ID NO: 879072 - DNA, 15 bp, Homo sapiens
ttgttagtacaggtt

SEQ ID NO: 879073 - DNA, 15 bp, Homo sapiens
gttgttagtacaggt

SEQ ID NO: 879074 - DNA, 15 bp, Homo sapiens
agttgttagtacagg

SEQ ID NO: 879075 - DNA, 15 bp, Homo sapiens
gagttgttagtacag

SEQ ID NO: 879076 - DNA, 15 bp, Homo sapiens
agagttgttagtaca

SEQ ID NO: 879077 - DNA, 15 bp, Homo sapiens
cagagttgttagtac

SEQ ID NO: 879078 - DNA, 15 bp, Homo sapiens
gcagagttgttagta

SEQ ID NO: 879079 - DNA, 15 bp, Homo sapiens
ggcagagttgttagt

SEQ ID NO: 879080 - DNA, 15 bp, Homo sapiens
tggcagagttgttag

SEQ ID NO: 879081 - DNA, 15 bp, Homo sapiens
ttggcagagttgtta

SEQ ID NO: 879082 - DNA, 15 bp, Homo sapiens
gttggcagagttgtt

SEQ ID NO: 879083 - DNA, 15 bp, Homo sapiens
agttggcagagttgt

SEQ ID NO: 879084 - DNA, 15 bp, Homo sapiens
cagttggcagagttg

SEQ ID NO: 879085 - DNA, 15 bp, Homo sapiens
gcagttggcagagtt

SEQ ID NO: 879086 - DNA, 15 bp, Homo sapiens
tgcagttggcagagt

SEQ ID NO: 879087 - DNA, 15 bp, Homo sapiens
ctgcagttggcagag

SEQ ID NO: 879088 - DNA, 15 bp, Homo sapiens
cctgcagttggcaga

SEQ ID NO: 879089 - DNA, 15 bp, Homo sapiens
ccctgcagttggcag

SEQ ID NO: 879090 - DNA, 15 bp, Homo sapiens
cccctgcagttggca

SEQ ID NO: 879091 - DNA, 15 bp, Homo sapiens
ccccctgcagttggc

SEQ ID NO: 879092 - DNA, 15 bp, Homo sapiens
gccccctgcagttgg

SEQ ID NO: 879093 - DNA, 15 bp, Homo sapiens
tgccccctgcagttg

SEQ ID NO: 879094 - DNA, 15 bp, Homo sapiens
ctgccccctgcagtt

SEQ ID NO: 879095 - DNA, 15 bp, Homo sapiens
gctgccccctgcagt

SEQ ID NO: 879096 - DNA, 15 bp, Homo sapiens
cgctgccccctgcag

SEQ ID NO: 879097 - DNA, 15 bp, Homo sapiens
ccgctgccccctgca

SEQ ID NO: 879098 - DNA, 15 bp, Homo sapiens
cccgctgccccctgc

SEQ ID NO: 879099 - DNA, 15 bp, Homo sapiens
ccccgctgccccctg

SEQ ID NO: 879100 - DNA, 15 bp, Homo sapiens
tccccgctgccccct

SEQ ID NO: 879101 - DNA, 15 bp, Homo sapiens
ctccccgctgccccc

SEQ ID NO: 879102 - DNA, 15 bp, Homo sapiens
actccccgctgcccc

SEQ ID NO: 879103 - DNA, 15 bp, Homo sapiens
cactccccgctgccc

SEQ ID NO: 879104 - DNA, 15 bp, Homo sapiens
ccactccccgctgcc

SEQ ID NO: 879105 - DNA, 15 bp, Homo sapiens
gccactccccgctgc

SEQ ID NO: 879106 - DNA, 15 bp, Homo sapiens
cgccactccccgctg

SEQ ID NO: 879107 - DNA, 15 bp, Homo sapiens
tcgccactccccgct

SEQ ID NO: 879108 - DNA, 15 bp, Homo sapiens
gtcgccactccccgc

SEQ ID NO: 879109 - DNA, 15 bp, Homo sapiens
cgtcgccactccccg

SEQ ID NO: 879110 - DNA, 15 bp, Homo sapiens
acgtcgccactcccc

SEQ ID NO: 879111 - DNA, 15 bp, Homo sapiens
aacgtcgccactccc

SEQ ID NO: 879112 - DNA, 15 bp, Homo sapiens
caacgtcgccactcc

SEQ ID NO: 879113 - DNA, 15 bp, Homo sapiens
tcaacgtcgccactc

SEQ ID NO: 879114 - DNA, 15 bp, Homo sapiens
ttcaacgtcgccact

SEQ ID NO: 879115 - DNA, 15 bp, Homo sapiens
tttcaacgtcgccac

SEQ ID NO: 879116 - DNA, 15 bp, Homo sapiens
gtttcaacgtcgcca

SEQ ID NO: 879117 - DNA, 15 bp, Homo sapiens
agtttcaacgtcgcc

SEQ ID NO: 879118 - DNA, 15 bp, Homo sapiens
cagtttcaacgtcgc

SEQ ID NO: 879119 - DNA, 15 bp, Homo sapiens
tcagtttcaacgtcg

SEQ ID NO: 879120 - DNA, 15 bp, Homo sapiens
ttcagtttcaacgtc

SEQ ID NO: 879121 - DNA, 15 bp, Homo sapiens
attcagtttcaacgt

SEQ ID NO: 879122 - DNA, 15 bp, Homo sapiens
gattcagtttcaacg

SEQ ID NO: 879123 - DNA, 15 bp, Homo sapiens
agattcagtttcaac

SEQ ID NO: 879124 - DNA, 15 bp, Homo sapiens
aagattcagtttcaa

SEQ ID NO: 879125 - DNA, 15 bp, Homo sapiens
taagattcagtttca

SEQ ID NO: 879126 - DNA, 15 bp, Homo sapiens
ttaagattcagtttc

SEQ ID NO: 879127 - DNA, 15 bp, Homo sapiens
tttaagattcagttt

SEQ ID NO: 879128 - DNA, 15 bp, Homo sapiens
ttttaagattcagtt

SEQ ID NO: 879129 - DNA, 15 bp, Homo sapiens
tttttaagattcagt

SEQ ID NO: 879130 - DNA, 15 bp, Homo sapiens
gtttttaagattcag

SEQ ID NO: 879131 - DNA, 15 bp, Homo sapiens
agtttttaagattca

SEQ ID NO: 879132 - DNA, 15 bp, Homo sapiens
cagtttttaagattc

SEQ ID NO: 879133 - DNA, 15 bp, Homo sapiens
tcagtttttaagatt

SEQ ID NO: 879134 - DNA, 15 bp, Homo sapiens
ctcagtttttaagat

SEQ ID NO: 879135 - DNA, 15 bp, Homo sapiens
actcagtttttaaga

SEQ ID NO: 879136 - DNA, 15 bp, Homo sapiens
tactcagtttttaag

SEQ ID NO: 879137 - DNA, 15 bp, Homo sapiens
ctactcagtttttaa

SEQ ID NO: 879138 - DNA, 15 bp, Homo sapiens
cctactcagttttta

SEQ ID NO: 879139 - DNA, 15 bp, Homo sapiens
tcctactcagttttt

SEQ ID NO: 879140 - DNA, 15 bp, Homo sapiens
ctcctactcagtttt

SEQ ID NO: 879141 - DNA, 15 bp, Homo sapiens
tctcctactcagttt

SEQ ID NO: 879142 - DNA, 15 bp, Homo sapiens
atctcctactcagtt

SEQ ID NO: 879143 - DNA, 15 bp, Homo sapiens
catctcctactcagt

SEQ ID NO: 879144 - DNA, 15 bp, Homo sapiens
gcatctcctactcag

SEQ ID NO: 879145 - DNA, 15 bp, Homo sapiens
cgcatctcctactca

SEQ ID NO: 879146 - DNA, 15 bp, Homo sapiens
ccgcatctcctactc

SEQ ID NO: 879147 - DNA, 15 bp, Homo sapiens
cccgcatctcctact

SEQ ID NO: 879148 - DNA, 15 bp, Homo sapiens
acccgcatctcctac

SEQ ID NO: 879149 - DNA, 15 bp, Homo sapiens
gacccgcatctccta

SEQ ID NO: 879150 - DNA, 15 bp, Homo sapiens
tgacccgcatctcct

SEQ ID NO: 879151 - DNA, 15 bp, Homo sapiens
ctgacccgcatctcc

SEQ ID NO: 879152 - DNA, 15 bp, Homo sapiens
tctgacccgcatctc

SEQ ID NO: 879153 - DNA, 15 bp, Homo sapiens
atctgacccgcatct

SEQ ID NO: 879154 - DNA, 15 bp, Homo sapiens
tatctgacccgcatc

SEQ ID NO: 879155 - DNA, 15 bp, Homo sapiens
ttatctgacccgcat

SEQ ID NO: 879156 - DNA, 15 bp, Homo sapiens
cttatctgacccgca

SEQ ID NO: 879157 - DNA, 15 bp, Homo sapiens
ccttatctgacccgc

SEQ ID NO: 879158 - DNA, 15 bp, Homo sapiens
tccttatctgacccg

SEQ ID NO: 879159 - DNA, 15 bp, Homo sapiens
ttccttatctgaccc

SEQ ID NO: 879160 - DNA, 15 bp, Homo sapiens
gttccttatctgacc

SEQ ID NO: 879161 - DNA, 15 bp, Homo sapiens
cgttccttatctgac

SEQ ID NO: 879162 - DNA, 15 bp, Homo sapiens
ccgttccttatctga

SEQ ID NO: 879163 - DNA, 15 bp, Homo sapiens
tccgttccttatctg

SEQ ID NO: 879164 - DNA, 15 bp, Homo sapiens
ctccgttccttatct

SEQ ID NO: 879165 - DNA, 15 bp, Homo sapiens
tctccgttccttatc

SEQ ID NO: 879166 - DNA, 15 bp, Homo sapiens
ctctccgttccttat

SEQ ID NO: 879167 - DNA, 15 bp, Homo sapiens
cctctccgttcctta

SEQ ID NO: 879168 - DNA, 15 bp, Homo sapiens
ccctctccgttcctt

SEQ ID NO: 879169 - DNA, 15 bp, Homo sapiens
gccctctccgttcct

SEQ ID NO: 879170 - DNA, 15 bp, Homo sapiens
agccctctccgttcc

SEQ ID NO: 879171 - DNA, 15 bp, Homo sapiens
aagccctctccgttc

SEQ ID NO: 879172 - DNA, 15 bp, Homo sapiens
taagccctctccgtt

SEQ ID NO: 879173 - DNA, 15 bp, Homo sapiens
ataagccctctccgt

SEQ ID NO: 879174 - DNA, 15 bp, Homo sapiens
cataagccctctccg

SEQ ID NO: 879175 - DNA, 15 bp, Homo sapiens
ccataagccctctcc

SEQ ID NO: 879176 - DNA, 15 bp, Homo sapiens
gccataagccctctc

SEQ ID NO: 879177 - DNA, 15 bp, Homo sapiens
agccataagccctct

SEQ ID NO: 879178 - DNA, 15 bp, Homo sapiens
cagccataagccctc

SEQ ID NO: 879179 - DNA, 15 bp, Homo sapiens
tcagccataagccct

SEQ ID NO: 879180 - DNA, 15 bp, Homo sapiens
ttcagccataagccc

SEQ ID NO: 879181 - DNA, 15 bp, Homo sapiens
tttcagccataagcc

SEQ ID NO: 879182 - DNA, 15 bp, Homo sapiens
ctttcagccataagc

SEQ ID NO: 879183 - DNA, 15 bp, Homo sapiens
tctttcagccataag

SEQ ID NO: 879184 - DNA, 15 bp, Homo sapiens
ttctttcagccataa

SEQ ID NO: 879185 - DNA, 15 bp, Homo sapiens
gttctttcagccata

SEQ ID NO: 879186 - DNA, 15 bp, Homo sapiens
tgttctttcagccat

SEQ ID NO: 879187 - DNA, 15 bp, Homo sapiens
ctgttctttcagcca

SEQ ID NO: 879188 - DNA, 15 bp, Homo sapiens
actgttctttcagcc

SEQ ID NO: 879189 - DNA, 15 bp, Homo sapiens
cactgttctttcagc

SEQ ID NO: 879190 - DNA, 15 bp, Homo sapiens
acactgttctttcag

SEQ ID NO: 879191 - DNA, 15 bp, Homo sapiens
tacactgttctttca

SEQ ID NO: 879192 - DNA, 15 bp, Homo sapiens
atacactgttctttc

SEQ ID NO: 879193 - DNA, 15 bp, Homo sapiens
catacactgttcttt

SEQ ID NO: 879194 - DNA, 15 bp, Homo sapiens
tcatacactgttctt

SEQ ID NO: 879195 - DNA, 15 bp, Homo sapiens
ctcatacactgttct

SEQ ID NO: 879196 - DNA, 15 bp, Homo sapiens
tctcatacactgttc

SEQ ID NO: 879197 - DNA, 15 bp, Homo sapiens
ttctcatacactgtt

SEQ ID NO: 879198 - DNA, 15 bp, Homo sapiens
attctcatacactgt

SEQ ID NO: 879199 - DNA, 15 bp, Homo sapiens
tattctcatacactg

SEQ ID NO: 879200 - DNA, 15 bp, Homo sapiens
gtattctcatacact

SEQ ID NO: 879201 - DNA, 15 bp, Homo sapiens
ggtattctcatacac

SEQ ID NO: 879202 - DNA, 15 bp, Homo sapiens
cggtattctcataca

SEQ ID NO: 879203 - DNA, 15 bp, Homo sapiens
tcggtattctcatac

SEQ ID NO: 879204 - DNA, 15 bp, Homo sapiens
ctcggtattctcata

SEQ ID NO: 879205 - DNA, 15 bp, Homo sapiens
tctcggtattctcat

SEQ ID NO: 879206 - DNA, 15 bp, Homo sapiens
ctctcggtattctca

SEQ ID NO: 879207 - DNA, 15 bp, Homo sapiens
actctcggtattctc

SEQ ID NO: 879208 - DNA, 15 bp, Homo sapiens
gactctcggtattct

SEQ ID NO: 879209 - DNA, 15 bp, Homo sapiens
agactctcggtattc

SEQ ID NO: 879210 - DNA, 15 bp, Homo sapiens
aagactctcggtatt

SEQ ID NO: 879211 - DNA, 15 bp, Homo sapiens
caagactctcggtat

SEQ ID NO: 879212 - DNA, 15 bp, Homo sapiens
ccaagactctcggta

SEQ ID NO: 879213 - DNA, 15 bp, Homo sapiens
tccaagactctcggt

SEQ ID NO: 879214 - DNA, 15 bp, Homo sapiens
ttccaagactctcgg

SEQ ID NO: 879215 - DNA, 15 bp, Homo sapiens
cttccaagactctcg

SEQ ID NO: 879216 - DNA, 15 bp, Homo sapiens
gcttccaagactctc

SEQ ID NO: 879217 - DNA, 15 bp, Homo sapiens
tgcttccaagactct

SEQ ID NO: 879218 - DNA, 15 bp, Homo sapiens
atgcttccaagactc

SEQ ID NO: 879219 - DNA, 15 bp, Homo sapiens
gatgcttccaagact

SEQ ID NO: 879220 - DNA, 15 bp, Homo sapiens
ggatgcttccaagac

SEQ ID NO: 879221 - DNA, 15 bp, Homo sapiens
tggatgcttccaaga

SEQ ID NO: 879222 - DNA, 15 bp, Homo sapiens
gtggatgcttccaag

SEQ ID NO: 879223 - DNA, 15 bp, Homo sapiens
tgtggatgcttccaa

SEQ ID NO: 879224 - DNA, 15 bp, Homo sapiens
ttgtggatgcttcca

SEQ ID NO: 879225 - DNA, 15 bp, Homo sapiens
attgtggatgcttcc

SEQ ID NO: 879226 - DNA, 15 bp, Homo sapiens
tattgtggatgcttc

SEQ ID NO: 879227 - DNA, 15 bp, Homo sapiens
gtattgtggatgctt

SEQ ID NO: 879228 - DNA, 15 bp, Homo sapiens
agtattgtggatgct

SEQ ID NO: 879229 - DNA, 15 bp, Homo sapiens
cagtattgtggatgc

SEQ ID NO: 879230 - DNA, 15 bp, Homo sapiens
acagtattgtggatg

SEQ ID NO: 879231 - DNA, 15 bp, Homo sapiens
cacagtattgtggat

SEQ ID NO: 879232 - DNA, 15 bp, Homo sapiens
ccacagtattgtgga

SEQ ID NO: 879233 - DNA, 15 bp, Homo sapiens
cccacagtattgtgg

SEQ ID NO: 879234 - DNA, 15 bp, Homo sapiens
tcccacagtattgtg

SEQ ID NO: 879235 - DNA, 15 bp, Homo sapiens
ttcccacagtattgt

SEQ ID NO: 879236 - DNA, 15 bp, Homo sapiens
attcccacagtattg

SEQ ID NO: 879237 - DNA, 15 bp, Homo sapiens
cattcccacagtatt

SEQ ID NO: 879238 - DNA, 15 bp, Homo sapiens
tcattcccacagtat

SEQ ID NO: 879239 - DNA, 15 bp, Homo sapiens
gtcattcccacagta

SEQ ID NO: 879240 - DNA, 15 bp, Homo sapiens
agtcattcccacagt

SEQ ID NO: 879241 - DNA, 15 bp, Homo sapiens
cagtcattcccacag

SEQ ID NO: 879242 - DNA, 15 bp, Homo sapiens
ccagtcattcccaca

SEQ ID NO: 879243 - DNA, 15 bp, Homo sapiens
accagtcattcccac

SEQ ID NO: 879244 - DNA, 15 bp, Homo sapiens
aaccagtcattccca

SEQ ID NO: 879245 - DNA, 15 bp, Homo sapiens
caaccagtcattccc

SEQ ID NO: 879246 - DNA, 15 bp, Homo sapiens
ccaaccagtcattcc

SEQ ID NO: 879247 - DNA, 15 bp, Homo sapiens
accaaccagtcattc

SEQ ID NO: 879248 - DNA, 15 bp, Homo sapiens
caccaaccagtcatt

SEQ ID NO: 879249 - DNA, 15 bp, Homo sapiens
gcaccaaccagtcat

SEQ ID NO: 879250 - DNA, 15 bp, Homo sapiens
tgcaccaaccagtca

SEQ ID NO: 879251 - DNA, 15 bp, Homo sapiens
atgcaccaaccagtc

SEQ ID NO: 879252 - DNA, 15 bp, Homo sapiens
aatgcaccaaccagt

SEQ ID NO: 879253 - DNA, 15 bp, Homo sapiens
taatgcaccaaccag

SEQ ID NO: 879254 - DNA, 15 bp, Homo sapiens
ttaatgcaccaacca

SEQ ID NO: 879255 - DNA, 15 bp, Homo sapiens
cttaatgcaccaacc

SEQ ID NO: 879256 - DNA, 15 bp, Homo sapiens
acttaatgcaccaac

SEQ ID NO: 879257 - DNA, 15 bp, Homo sapiens
tacttaatgcaccaa

SEQ ID NO: 879258 - DNA, 15 bp, Homo sapiens
atacttaatgcacca

SEQ ID NO: 879259 - DNA, 15 bp, Homo sapiens
catacttaatgcacc

SEQ ID NO: 879260 - DNA, 15 bp, Homo sapiens
tcatacttaatgcac

SEQ ID NO: 879261 - DNA, 15 bp, Homo sapiens
ctcatacttaatgca

SEQ ID NO: 879262 - DNA, 15 bp, Homo sapiens
tctcatacttaatgc

SEQ ID NO: 879263 - DNA, 15 bp, Homo sapiens
ttctcatacttaatg

SEQ ID NO: 879264 - DNA, 15 bp, Homo sapiens
attctcatacttaat

SEQ ID NO: 879265 - DNA, 15 bp, Homo sapiens
cattctcatacttaa

SEQ ID NO: 879266 - DNA, 15 bp, Homo sapiens
tcattctcatactta

SEQ ID NO: 879267 - DNA, 15 bp, Homo sapiens
ctcattctcatactt

SEQ ID NO: 879268 - DNA, 15 bp, Homo sapiens
tctcattctcatact

SEQ ID NO: 879269 - DNA, 15 bp, Homo sapiens
ctctcattctcatac

SEQ ID NO: 879270 - DNA, 15 bp, Homo sapiens
tctctcattctcata

SEQ ID NO: 879271 - DNA, 15 bp, Homo sapiens
atctctcattctcat

SEQ ID NO: 879272 - DNA, 15 bp, Homo sapiens
catctctcattctca

SEQ ID NO: 879273 - DNA, 15 bp, Homo sapiens
acatctctcattctc

SEQ ID NO: 879274 - DNA, 15 bp, Homo sapiens
cacatctctcattct

SEQ ID NO: 879275 - DNA, 15 bp, Homo sapiens
ccacatctctcattc

SEQ ID NO: 879276 - DNA, 15 bp, Homo sapiens
gccacatctctcatt

SEQ ID NO: 879277 - DNA, 15 bp, Homo sapiens
agccacatctctcat

SEQ ID NO: 879278 - DNA, 15 bp, Homo sapiens
cagccacatctctca

SEQ ID NO: 879279 - DNA, 15 bp, Homo sapiens
ccagccacatctctc

SEQ ID NO: 879280 - DNA, 15 bp, Homo sapiens
cccagccacatctct

SEQ ID NO: 879281 - DNA, 15 bp, Homo sapiens
ccccagccacatctc

SEQ ID NO: 879282 - DNA, 15 bp, Homo sapiens
gccccagccacatct

SEQ ID NO: 879283 - DNA, 15 bp, Homo sapiens
tgccccagccacatc

SEQ ID NO: 879284 - DNA, 15 bp, Homo sapiens
ctgccccagccacat

SEQ ID NO: 879285 - DNA, 15 bp, Homo sapiens
actgccccagccaca

SEQ ID NO: 879286 - DNA, 15 bp, Homo sapiens
cactgccccagccac

SEQ ID NO: 879287 - DNA, 15 bp, Homo sapiens
ccactgccccagcca

SEQ ID NO: 879288 - DNA, 15 bp, Homo sapiens
cccactgccccagcc

SEQ ID NO: 879289 - DNA, 15 bp, Homo sapiens
acccactgccccagc

SEQ ID NO: 879290 - DNA, 15 bp, Homo sapiens
aacccactgccccag

SEQ ID NO: 879291 - DNA, 15 bp, Homo sapiens
caacccactgcccca

SEQ ID NO: 879292 - DNA, 15 bp, Homo sapiens
ccaacccactgcccc

SEQ ID NO: 879293 - DNA, 15 bp, Homo sapiens
cccaacccactgccc

SEQ ID NO: 879294 - DNA, 15 bp, Homo sapiens
tcccaacccactgcc

SEQ ID NO: 879295 - DNA, 15 bp, Homo sapiens
atcccaacccactgc

SEQ ID NO: 879296 - DNA, 15 bp, Homo sapiens
gatcccaacccactg

SEQ ID NO: 879297 - DNA, 15 bp, Homo sapiens
tgatcccaacccact

SEQ ID NO: 879298 - DNA, 15 bp, Homo sapiens
ctgatcccaacccac

SEQ ID NO: 879299 - DNA, 15 bp, Homo sapiens
tctgatcccaaccca

SEQ ID NO: 879300 - DNA, 15 bp, Homo sapiens
atctgatcccaaccc

SEQ ID NO: 879301 - DNA, 15 bp, Homo sapiens
aatctgatcccaacc

SEQ ID NO: 879302 - DNA, 15 bp, Homo sapiens
caatctgatcccaac

SEQ ID NO: 879303 - DNA, 15 bp, Homo sapiens
acaatctgatcccaa

SEQ ID NO: 879304 - DNA, 15 bp, Homo sapiens
tacaatctgatccca

SEQ ID NO: 879305 - DNA, 15 bp, Homo sapiens
ttacaatctgatccc

SEQ ID NO: 879306 - DNA, 15 bp, Homo sapiens
tttacaatctgatcc

SEQ ID NO: 879307 - DNA, 15 bp, Homo sapiens
ttttacaatctgatc

SEQ ID NO: 879308 - DNA, 15 bp, Homo sapiens
cttttacaatctgat

SEQ ID NO: 879309 - DNA, 15 bp, Homo sapiens
ccttttacaatctga

SEQ ID NO: 879310 - DNA, 15 bp, Homo sapiens
cccttttacaatctg

SEQ ID NO: 879311 - DNA, 15 bp, Homo sapiens
gcccttttacaatct

SEQ ID NO: 879312 - DNA, 15 bp, Homo sapiens
agcccttttacaatc

SEQ ID NO: 879313 - DNA, 15 bp, Homo sapiens
tagcccttttacaat

SEQ ID NO: 879314 - DNA, 15 bp, Homo sapiens
ttagcccttttacaa

SEQ ID NO: 879315 - DNA, 15 bp, Homo sapiens
attagcccttttaca

SEQ ID NO: 879316 - DNA, 15 bp, Homo sapiens
cattagcccttttac

SEQ ID NO: 879317 - DNA, 15 bp, Homo sapiens
ccattagccctttta

SEQ ID NO: 879318 - DNA, 15 bp, Homo sapiens
tccattagccctttt

SEQ ID NO: 879319 - DNA, 15 bp, Homo sapiens
gtccattagcccttt

SEQ ID NO: 879320 - DNA, 15 bp, Homo sapiens
ggtccattagccctt

SEQ ID NO: 879321 - DNA, 15 bp, Homo sapiens
tggtccattagccct

SEQ ID NO: 879322 - DNA, 15 bp, Homo sapiens
ctggtccattagccc

SEQ ID NO: 879323 - DNA, 15 bp, Homo sapiens
tctggtccattagcc

SEQ ID NO: 879324 - DNA, 15 bp, Homo sapiens
ttctggtccattagc

SEQ ID NO: 879325 - DNA, 15 bp, Homo sapiens
tttctggtccattag

SEQ ID NO: 879326 - DNA, 15 bp, Homo sapiens
ctttctggtccatta

SEQ ID NO: 879327 - DNA, 15 bp, Homo sapiens
tctttctggtccatt

SEQ ID NO: 879328 - DNA, 15 bp, Homo sapiens
ctctttctggtccat

SEQ ID NO: 879329 - DNA, 15 bp, Homo sapiens
cctctttctggtcca

SEQ ID NO: 879330 - DNA, 15 bp, Homo sapiens
tcctctttctggtcc

SEQ ID NO: 879331 - DNA, 15 bp, Homo sapiens
ttcctctttctggtc

SEQ ID NO: 879332 - DNA, 15 bp, Homo sapiens
gttcctctttctggt

SEQ ID NO: 879333 - DNA, 15 bp, Homo sapiens
tgttcctctttctgg

SEQ ID NO: 879334 - DNA, 15 bp, Homo sapiens
gtgttcctctttctg

SEQ ID NO: 879335 - DNA, 15 bp, Homo sapiens
cgtgttcctctttct

SEQ ID NO: 879336 - DNA, 15 bp, Homo sapiens
ccgtgttcctctttc

SEQ ID NO: 879337 - DNA, 15 bp, Homo sapiens
tccgtgttcctcttt

SEQ ID NO: 879338 - DNA, 15 bp, Homo sapiens
gtccgtgttcctctt

SEQ ID NO: 879339 - DNA, 15 bp, Homo sapiens
agtccgtgttcctct

SEQ ID NO: 879340 - DNA, 15 bp, Homo sapiens
cagtccgtgttcctc

SEQ ID NO: 879341 - DNA, 15 bp, Homo sapiens
ccagtccgtgttcct

SEQ ID NO: 879342 - DNA, 15 bp, Homo sapiens
cccagtccgtgttcc

SEQ ID NO: 879343 - DNA, 15 bp, Homo sapiens
gcccagtccgtgttc

SEQ ID NO: 879344 - DNA, 15 bp, Homo sapiens
ggcccagtccgtgtt

SEQ ID NO: 879345 - DNA, 15 bp, Homo sapiens
aggcccagtccgtgt

SEQ ID NO: 879346 - DNA, 15 bp, Homo sapiens
caggcccagtccgtg

SEQ ID NO: 879347 - DNA, 15 bp, Homo sapiens
acaggcccagtccgt

SEQ ID NO: 879348 - DNA, 15 bp, Homo sapiens
cacaggcccagtccg

SEQ ID NO: 879349 - DNA, 15 bp, Homo sapiens
acacaggcccagtcc

SEQ ID NO: 879350 - DNA, 15 bp, Homo sapiens
gacacaggcccagtc

SEQ ID NO: 879351 - DNA, 15 bp, Homo sapiens
agacacaggcccagt

SEQ ID NO: 879352 - DNA, 15 bp, Homo sapiens
aagacacaggcccag

SEQ ID NO: 879353 - DNA, 15 bp, Homo sapiens
caagacacaggccca

SEQ ID NO: 879354 - DNA, 15 bp, Homo sapiens
gcaagacacaggccc

SEQ ID NO: 879355 - DNA, 15 bp, Homo sapiens
tgcaagacacaggcc

SEQ ID NO: 879356 - DNA, 15 bp, Homo sapiens
ctgcaagacacaggc

SEQ ID NO: 879357 - DNA, 15 bp, Homo sapiens
gctgcaagacacagg

SEQ ID NO: 879358 - DNA, 15 bp, Homo sapiens
ggctgcaagacacag

SEQ ID NO: 879359 - DNA, 15 bp, Homo sapiens
tggctgcaagacaca

SEQ ID NO: 879360 - DNA, 15 bp, Homo sapiens
atggctgcaagacac

SEQ ID NO: 879361 - DNA, 15 bp, Homo sapiens
catggctgcaagaca

SEQ ID NO: 879362 - DNA, 15 bp, Homo sapiens
ccatggctgcaagac

SEQ ID NO: 879363 - DNA, 15 bp, Homo sapiens
cccatggctgcaaga

SEQ ID NO: 879364 - DNA, 15 bp, Homo sapiens
ccccatggctgcaag

SEQ ID NO: 879365 - DNA, 15 bp, Homo sapiens
cccccatggctgcaa

SEQ ID NO: 879366 - DNA, 15 bp, Homo sapiens
gcccccatggctgca

SEQ ID NO: 879367 - DNA, 15 bp, Homo sapiens
tgcccccatggctgc

SEQ ID NO: 879368 - DNA, 15 bp, Homo sapiens
ctgcccccatggctg

SEQ ID NO: 879369 - DNA, 15 bp, Homo sapiens
cctgcccccatggct

SEQ ID NO: 879370 - DNA, 15 bp, Homo sapiens
acctgcccccatggc

SEQ ID NO: 879371 - DNA, 15 bp, Homo sapiens
gacctgcccccatgg

SEQ ID NO: 879372 - DNA, 15 bp, Homo sapiens
ggacctgcccccatg

SEQ ID NO: 879373 - DNA, 15 bp, Homo sapiens
aggacctgcccccat

SEQ ID NO: 879374 - DNA, 15 bp, Homo sapiens
aaggacctgccccca

SEQ ID NO: 879375 - DNA, 15 bp, Homo sapiens
aaaggacctgccccc

SEQ ID NO: 879376 - DNA, 15 bp, Homo sapiens
taaaggacctgcccc

SEQ ID NO: 879377 - DNA, 15 bp, Homo sapiens
ttaaaggacctgccc

SEQ ID NO: 879378 - DNA, 15 bp, Homo sapiens
attaaaggacctgcc

SEQ ID NO: 879379 - DNA, 15 bp, Homo sapiens
cattaaaggacctgc

SEQ ID NO: 879380 - DNA, 15 bp, Homo sapiens
ccattaaaggacctg

SEQ ID NO: 879381 - DNA, 15 bp, Homo sapiens
accattaaaggacct

SEQ ID NO: 879382 - DNA, 15 bp, Homo sapiens
aaccattaaaggacc

SEQ ID NO: 879383 - DNA, 15 bp, Homo sapiens
aaaccattaaaggac

SEQ ID NO: 879384 - DNA, 15 bp, Homo sapiens
aaaaccattaaagga

SEQ ID NO: 879385 - DNA, 15 bp, Homo sapiens
aaaaaccattaaagg

SEQ ID NO: 879386 - DNA, 15 bp, Homo sapiens
caaaaaccattaaag

SEQ ID NO: 879387 - DNA, 15 bp, Homo sapiens
tcaaaaaccattaaa

SEQ ID NO: 879388 - DNA, 15 bp, Homo sapiens
ctcaaaaaccattaa

SEQ ID NO: 879389 - DNA, 15 bp, Homo sapiens
actcaaaaaccatta

SEQ ID NO: 879390 - DNA, 15 bp, Homo sapiens
tactcaaaaaccatt

SEQ ID NO: 879391 - DNA, 15 bp, Homo sapiens
ctactcaaaaaccat

SEQ ID NO: 879392 - DNA, 15 bp, Homo sapiens
tctactcaaaaacca

SEQ ID NO: 879393 - DNA, 15 bp, Homo sapiens
ctctactcaaaaacc

SEQ ID NO: 879394 - DNA, 15 bp, Homo sapiens
cctctactcaaaaac

SEQ ID NO: 879395 - DNA, 15 bp, Homo sapiens
ccctctactcaaaaa

SEQ ID NO: 879396 - DNA, 15 bp, Homo sapiens
gccctctactcaaaa

SEQ ID NO: 879397 - DNA, 15 bp, Homo sapiens
ggccctctactcaaa

SEQ ID NO: 879398 - DNA, 15 bp, Homo sapiens
cggccctctactcaa

SEQ ID NO: 879399 - DNA, 15 bp, Homo sapiens
ccggccctctactca

SEQ ID NO: 879400 - DNA, 15 bp, Homo sapiens
cccggccctctactc

SEQ ID NO: 879401 - DNA, 15 bp, Homo sapiens
ccccggccctctact

SEQ ID NO: 879402 - DNA, 15 bp, Homo sapiens
accccggccctctac

SEQ ID NO: 879403 - DNA, 15 bp, Homo sapiens
caccccggccctcta

SEQ ID NO: 879404 - DNA, 15 bp, Homo sapiens
ccaccccggccctct

SEQ ID NO: 879405 - DNA, 15 bp, Homo sapiens
cccaccccggccctc

SEQ ID NO: 879406 - DNA, 15 bp, Homo sapiens
ccccaccccggccct

SEQ ID NO: 879407 - DNA, 15 bp, Homo sapiens
cccccaccccggccc

SEQ ID NO: 879408 - DNA, 15 bp, Homo sapiens
tcccccaccccggcc

SEQ ID NO: 879409 - DNA, 15 bp, Homo sapiens
atcccccaccccggc

SEQ ID NO: 879410 - DNA, 15 bp, Homo sapiens
tatcccccaccccgg

SEQ ID NO: 879411 - DNA, 15 bp, Homo sapiens
atatcccccaccccg

SEQ ID NO: 879412 - DNA, 15 bp, Homo sapiens
aatatcccccacccc

SEQ ID NO: 879413 - DNA, 15 bp, Homo sapiens
aaatatcccccaccc

SEQ ID NO: 879414 - DNA, 15 bp, Homo sapiens
gaaatatcccccacc

SEQ ID NO: 879415 - DNA, 15 bp, Homo sapiens
tgaaatatcccccac

SEQ ID NO: 879416 - DNA, 15 bp, Homo sapiens
atgaaatatccccca

SEQ ID NO: 879417 - DNA, 15 bp, Homo sapiens
gatgaaatatccccc

SEQ ID NO: 879418 - DNA, 15 bp, Homo sapiens
cgatgaaatatcccc

SEQ ID NO: 879419 - DNA, 15 bp, Homo sapiens
acgatgaaatatccc

SEQ ID NO: 879420 - DNA, 15 bp, Homo sapiens
aacgatgaaatatcc

SEQ ID NO: 879421 - DNA, 15 bp, Homo sapiens
gaacgatgaaatatc

SEQ ID NO: 879422 - DNA, 15 bp, Homo sapiens
ggaacgatgaaatat

SEQ ID NO: 879423 - DNA, 15 bp, Homo sapiens
gggaacgatgaaata

SEQ ID NO: 879424 - DNA, 15 bp, Homo sapiens
agggaacgatgaaat

SEQ ID NO: 879425 - DNA, 15 bp, Homo sapiens
gagggaacgatgaaa

SEQ ID NO: 879426 - DNA, 15 bp, Homo sapiens
agagggaacgatgaa

SEQ ID NO: 879427 - DNA, 15 bp, Homo sapiens
tagagggaacgatga

SEQ ID NO: 879428 - DNA, 15 bp, Homo sapiens
gtagagggaacgatg

SEQ ID NO: 879429 - DNA, 15 bp, Homo sapiens
agtagagggaacgat

SEQ ID NO: 879430 - DNA, 15 bp, Homo sapiens
gagtagagggaacga

SEQ ID NO: 879431 - DNA, 15 bp, Homo sapiens
agagtagagggaacg

SEQ ID NO: 879432 - DNA, 15 bp, Homo sapiens
cagagtagagggaac

SEQ ID NO: 879433 - DNA, 15 bp, Homo sapiens
ccagagtagagggaa

SEQ ID NO: 879434 - DNA, 15 bp, Homo sapiens
cccagagtagaggga

SEQ ID NO: 879435 - DNA, 15 bp, Homo sapiens
ccccagagtagaggg

SEQ ID NO: 879436 - DNA, 15 bp, Homo sapiens
gccccagagtagagg

SEQ ID NO: 879437 - DNA, 15 bp, Homo sapiens
tgccccagagtagag

SEQ ID NO: 879438 - DNA, 15 bp, Homo sapiens
ctgccccagagtaga

SEQ ID NO: 879439 - DNA, 15 bp, Homo sapiens
tctgccccagagtag

SEQ ID NO: 879440 - DNA, 15 bp, Homo sapiens
ctctgccccagagta

SEQ ID NO: 879441 - DNA, 15 bp, Homo sapiens
cctctgccccagagt

SEQ ID NO: 879442 - DNA, 15 bp, Homo sapiens
ccctctgccccagag

SEQ ID NO: 879443 - DNA, 15 bp, Homo sapiens
accctctgccccaga

SEQ ID NO: 879444 - DNA, 15 bp, Homo sapiens
gaccctctgccccag

SEQ ID NO: 879445 - DNA, 15 bp, Homo sapiens
agaccctctgcccca

SEQ ID NO: 879446 - DNA, 15 bp, Homo sapiens
cagaccctctgcccc

SEQ ID NO: 879447 - DNA, 15 bp, Homo sapiens
ccagaccctctgccc

SEQ ID NO: 879448 - DNA, 15 bp, Homo sapiens
cccagaccctctgcc

SEQ ID NO: 879449 - DNA, 15 bp, Homo sapiens
ccccagaccctctgc

SEQ ID NO: 879450 - DNA, 15 bp, Homo sapiens
tccccagaccctctg

SEQ ID NO: 879451 - DNA, 15 bp, Homo sapiens
ctccccagaccctct

SEQ ID NO: 879452 - DNA, 15 bp, Homo sapiens
cctccccagaccctc

SEQ ID NO: 879453 - DNA, 15 bp, Homo sapiens
tcctccccagaccct

SEQ ID NO: 879454 - DNA, 15 bp, Homo sapiens
ttcctccccagaccc

SEQ ID NO: 879455 - DNA, 15 bp, Homo sapiens
gttcctccccagacc

SEQ ID NO: 879456 - DNA, 15 bp, Homo sapiens
tgttcctccccagac

SEQ ID NO: 879457 - DNA, 15 bp, Homo sapiens
ctgttcctccccaga

SEQ ID NO: 879458 - DNA, 15 bp, Homo sapiens
gctgttcctccccag

SEQ ID NO: 879459 - DNA, 15 bp, Homo sapiens
ggctgttcctcccca

SEQ ID NO: 879460 - DNA, 15 bp, Homo sapiens
gggctgttcctcccc

SEQ ID NO: 879461 - DNA, 15 bp, Homo sapiens
tgggctgttcctccc

SEQ ID NO: 879462 - DNA, 15 bp, Homo sapiens
ctgggctgttcctcc

SEQ ID NO: 879463 - DNA, 15 bp, Homo sapiens
cctgggctgttcctc

SEQ ID NO: 879464 - DNA, 15 bp, Homo sapiens
gcctgggctgttcct

SEQ ID NO: 879465 - DNA, 15 bp, Homo sapiens
agcctgggctgttcc

SEQ ID NO: 879466 - DNA, 15 bp, Homo sapiens
cagcctgggctgttc

SEQ ID NO: 879467 - DNA, 15 bp, Homo sapiens
gcagcctgggctgtt

SEQ ID NO: 879468 - DNA, 15 bp, Homo sapiens
cgcagcctgggctgt

SEQ ID NO: 879469 - DNA, 15 bp, Homo sapiens
ccgcagcctgggctg

SEQ ID NO: 879470 - DNA, 15 bp, Homo sapiens
accgcagcctgggct

SEQ ID NO: 879471 - DNA, 15 bp, Homo sapiens
caccgcagcctgggc

SEQ ID NO: 879472 - DNA, 15 bp, Homo sapiens
ccaccgcagcctggg

SEQ ID NO: 879473 - DNA, 15 bp, Homo sapiens
gccaccgcagcctgg

SEQ ID NO: 879474 - DNA, 15 bp, Homo sapiens
agccaccgcagcctg

SEQ ID NO: 879475 - DNA, 15 bp, Homo sapiens
gagccaccgcagcct

SEQ ID NO: 879476 - DNA, 15 bp, Homo sapiens
tgagccaccgcagcc

SEQ ID NO: 879477 - DNA, 15 bp, Homo sapiens
ctgagccaccgcagc

SEQ ID NO: 879478 - DNA, 15 bp, Homo sapiens
cctgagccaccgcag

SEQ ID NO: 879479 - DNA, 15 bp, Homo sapiens
ccctgagccaccgca

SEQ ID NO: 879480 - DNA, 15 bp, Homo sapiens
gccctgagccaccgc

SEQ ID NO: 879481 - DNA, 15 bp, Homo sapiens
ggccctgagccaccg

SEQ ID NO: 879482 - DNA, 15 bp, Homo sapiens
tggccctgagccacc

SEQ ID NO: 879483 - DNA, 15 bp, Homo sapiens
ctggccctgagccac

SEQ ID NO: 879484 - DNA, 15 bp, Homo sapiens
cctggccctgagcca

SEQ ID NO: 879485 - DNA, 15 bp, Homo sapiens
acctggccctgagcc

SEQ ID NO: 879486 - DNA, 15 bp, Homo sapiens
gacctggccctgagc

SEQ ID NO: 879487 - DNA, 15 bp, Homo sapiens
agacctggccctgag

SEQ ID NO: 879488 - DNA, 15 bp, Homo sapiens
gagacctggccctga

SEQ ID NO: 879489 - DNA, 15 bp, Homo sapiens
tgagacctggccctg

SEQ ID NO: 879490 - DNA, 15 bp, Homo sapiens
gtgagacctggccct

SEQ ID NO: 879491 - DNA, 15 bp, Homo sapiens
tgtgagacctggccc

SEQ ID NO: 879492 - DNA, 15 bp, Homo sapiens
ctgtgagacctggcc

SEQ ID NO: 879493 - DNA, 15 bp, Homo sapiens
gctgtgagacctggc

SEQ ID NO: 879494 - DNA, 15 bp, Homo sapiens
ggctgtgagacctgg

SEQ ID NO: 879495 - DNA, 15 bp, Homo sapiens
aggctgtgagacctg

SEQ ID NO: 879496 - DNA, 15 bp, Homo sapiens
gaggctgtgagacct

SEQ ID NO: 879497 - DNA, 15 bp, Homo sapiens
ggaggctgtgagacc

SEQ ID NO: 879498 - DNA, 15 bp, Homo sapiens
tggaggctgtgagac

SEQ ID NO: 879499 - DNA, 15 bp, Homo sapiens
atggaggctgtgaga

SEQ ID NO: 879500 - DNA, 15 bp, Homo sapiens
gatggaggctgtgag

SEQ ID NO: 879501 - DNA, 15 bp, Homo sapiens
cgatggaggctgtga

SEQ ID NO: 879502 - DNA, 15 bp, Homo sapiens
ccgatggaggctgtg

SEQ ID NO: 879503 - DNA, 15 bp, Homo sapiens
accgatggaggctgt

SEQ ID NO: 879504 - DNA, 15 bp, Homo sapiens
caccgatggaggctg

SEQ ID NO: 879505 - DNA, 15 bp, Homo sapiens
ccaccgatggaggct

SEQ ID NO: 879506 - DNA, 15 bp, Homo sapiens
cccaccgatggaggc

SEQ ID NO: 879507 - DNA, 15 bp, Homo sapiens
tcccaccgatggagg

SEQ ID NO: 879508 - DNA, 15 bp, Homo sapiens
ttcccaccgatggag

SEQ ID NO: 879509 - DNA, 15 bp, Homo sapiens
cttcccaccgatgga

SEQ ID NO: 879510 - DNA, 15 bp, Homo sapiens
ccttcccaccgatgg

SEQ ID NO: 879511 - DNA, 15 bp, Homo sapiens
cccttcccaccgatg

SEQ ID NO: 879512 - DNA, 15 bp, Homo sapiens
gcccttcccaccgat

SEQ ID NO: 879513 - DNA, 15 bp, Homo sapiens
ggcccttcccaccga

SEQ ID NO: 879514 - DNA, 15 bp, Homo sapiens
tggcccttcccaccg

SEQ ID NO: 879515 - DNA, 15 bp, Homo sapiens
gtggcccttcccacc

SEQ ID NO: 879516 - DNA, 15 bp, Homo sapiens
ggtggcccttcccac

SEQ ID NO: 879517 - DNA, 15 bp, Homo sapiens
cggtggcccttccca

SEQ ID NO: 879518 - DNA, 15 bp, Homo sapiens
acggtggcccttccc

SEQ ID NO: 879519 - DNA, 15 bp, Homo sapiens
gacggtggcccttcc

SEQ ID NO: 879520 - DNA, 15 bp, Homo sapiens
ggacggtggcccttc

SEQ ID NO: 879521 - DNA, 15 bp, Homo sapiens
aggacggtggccctt

SEQ ID NO: 879522 - DNA, 15 bp, Homo sapiens
caggacggtggccct

SEQ ID NO: 879523 - DNA, 15 bp, Homo sapiens
acaggacggtggccc

SEQ ID NO: 879524 - DNA, 15 bp, Homo sapiens
aacaggacggtggcc

SEQ ID NO: 879525 - DNA, 15 bp, Homo sapiens
caacaggacggtggc

SEQ ID NO: 879526 - DNA, 15 bp, Homo sapiens
gcaacaggacggtgg

SEQ ID NO: 879527 - DNA, 15 bp, Homo sapiens
ggcaacaggacggtg

SEQ ID NO: 879528 - DNA, 15 bp, Homo sapiens
aggcaacaggacggt

SEQ ID NO: 879529 - DNA, 15 bp, Homo sapiens
caggcaacaggacgg

SEQ ID NO: 879530 - DNA, 15 bp, Homo sapiens
gcaggcaacaggacg

SEQ ID NO: 879531 - DNA, 15 bp, Homo sapiens
ggcaggcaacaggac

SEQ ID NO: 879532 - DNA, 15 bp, Homo sapiens
gggcaggcaacagga

SEQ ID NO: 879533 - DNA, 15 bp, Homo sapiens
agggcaggcaacagg

SEQ ID NO: 879534 - DNA, 15 bp, Homo sapiens
aagggcaggcaacag

SEQ ID NO: 879535 - DNA, 15 bp, Homo sapiens
aaagggcaggcaaca

SEQ ID NO: 879536 - DNA, 15 bp, Homo sapiens
taaagggcaggcaac

SEQ ID NO: 879537 - DNA, 15 bp, Homo sapiens
ataaagggcaggcaa

SEQ ID NO: 879538 - DNA, 15 bp, Homo sapiens
aataaagggcaggca

SEQ ID NO: 879539 - DNA, 15 bp, Homo sapiens
gaataaagggcaggc

SEQ ID NO: 879540 - DNA, 15 bp, Homo sapiens
agaataaagggcagg

SEQ ID NO: 879541 - DNA, 15 bp, Homo sapiens
gagaataaagggcag

SEQ ID NO: 879542 - DNA, 15 bp, Homo sapiens
agagaataaagggca

SEQ ID NO: 879543 - DNA, 15 bp, Homo sapiens
cagagaataaagggc

SEQ ID NO: 879544 - DNA, 15 bp, Homo sapiens
gcagagaataaaggg

SEQ ID NO: 879545 - DNA, 15 bp, Homo sapiens
ggcagagaataaagg

SEQ ID NO: 879546 - DNA, 15 bp, Homo sapiens
tggcagagaataaag

SEQ ID NO: 879547 - DNA, 15 bp, Homo sapiens
ctggcagagaataaa

SEQ ID NO: 879548 - DNA, 15 bp, Homo sapiens
cctggcagagaataa

SEQ ID NO: 879549 - DNA, 15 bp, Homo sapiens
gcctggcagagaata

SEQ ID NO: 879550 - DNA, 15 bp, Homo sapiens
tgcctggcagagaat

SEQ ID NO: 879551 - DNA, 15 bp, Homo sapiens
ttgcctggcagagaa

SEQ ID NO: 879552 - DNA, 15 bp, Homo sapiens
tttgcctggcagaga

SEQ ID NO: 879553 - DNA, 15 bp, Homo sapiens
atttgcctggcagag

SEQ ID NO: 879554 - DNA, 15 bp, Homo sapiens
catttgcctggcaga

SEQ ID NO: 879555 - DNA, 15 bp, Homo sapiens
tcatttgcctggcag

SEQ ID NO: 879556 - DNA, 15 bp, Homo sapiens
gtcatttgcctggca

SEQ ID NO: 879557 - DNA, 15 bp, Homo sapiens
agtcatttgcctggc

SEQ ID NO: 879558 - DNA, 15 bp, Homo sapiens
gagtcatttgcctgg

SEQ ID NO: 879559 - DNA, 15 bp, Homo sapiens
ggagtcatttgcctg

SEQ ID NO: 879560 - DNA, 15 bp, Homo sapiens
aggagtcatttgcct

SEQ ID NO: 879561 - DNA, 15 bp, Homo sapiens
aaggagtcatttgcc

SEQ ID NO: 879562 - DNA, 15 bp, Homo sapiens
gaaggagtcatttgc

SEQ ID NO: 879563 - DNA, 15 bp, Homo sapiens
tgaaggagtcatttg

SEQ ID NO: 879564 - DNA, 15 bp, Homo sapiens
atgaaggagtcattt

SEQ ID NO: 879565 - DNA, 15 bp, Homo sapiens
gatgaaggagtcatt

SEQ ID NO: 879566 - DNA, 15 bp, Homo sapiens
agatgaaggagtcat

SEQ ID NO: 879567 - DNA, 15 bp, Homo sapiens
aagatgaaggagtca

SEQ ID NO: 879568 - DNA, 15 bp, Homo sapiens
aaagatgaaggagtc

SEQ ID NO: 879569 - DNA, 15 bp, Homo sapiens
taaagatgaaggagt

SEQ ID NO: 879570 - DNA, 15 bp, Homo sapiens
ttaaagatgaaggag

SEQ ID NO: 879571 - DNA, 15 bp, Homo sapiens
tttaaagatgaagga

SEQ ID NO: 879572 - DNA, 15 bp, Homo sapiens
atttaaagatgaagg

SEQ ID NO: 879573 - DNA, 15 bp, Homo sapiens
catttaaagatgaag

SEQ ID NO: 879574 - DNA, 15 bp, Homo sapiens
tcatttaaagatgaa

SEQ ID NO: 879575 - DNA, 15 bp, Homo sapiens
gtcatttaaagatga

SEQ ID NO: 879576 - DNA, 15 bp, Homo sapiens
agtcatttaaagatg

SEQ ID NO: 879577 - DNA, 15 bp, Homo sapiens
aagtcatttaaagat

SEQ ID NO: 879578 - DNA, 15 bp, Homo sapiens
caagtcatttaaaga

SEQ ID NO: 879579 - DNA, 15 bp, Homo sapiens
gcaagtcatttaaag

SEQ ID NO: 879580 - DNA, 15 bp, Homo sapiens
tgcaagtcatttaaa

SEQ ID NO: 879581 - DNA, 15 bp, Homo sapiens
ctgcaagtcatttaa

SEQ ID NO: 879582 - DNA, 15 bp, Homo sapiens
gctgcaagtcattta

SEQ ID NO: 879583 - DNA, 15 bp, Homo sapiens
ggctgcaagtcattt

SEQ ID NO: 879584 - DNA, 15 bp, Homo sapiens
tggctgcaagtcatt

SEQ ID NO: 879585 - DNA, 15 bp, Homo sapiens
atggctgcaagtcat

SEQ ID NO: 879586 - DNA, 15 bp, Homo sapiens
aatggctgcaagtca

SEQ ID NO: 879587 - DNA, 15 bp, Homo sapiens
aaatggctgcaagtc

SEQ ID NO: 879588 - DNA, 15 bp, Homo sapiens
taaatggctgcaagt

SEQ ID NO: 879589 - DNA, 15 bp, Homo sapiens
gtaaatggctgcaag

SEQ ID NO: 879590 - DNA, 15 bp, Homo sapiens
tgtaaatggctgcaa

SEQ ID NO: 879591 - DNA, 15 bp, Homo sapiens
atgtaaatggctgca

SEQ ID NO: 879592 - DNA, 15 bp, Homo sapiens
gatgtaaatggctgc

SEQ ID NO: 879593 - DNA, 15 bp, Homo sapiens
cgatgtaaatggctg

SEQ ID NO: 879594 - DNA, 15 bp, Homo sapiens
ccgatgtaaatggct

SEQ ID NO: 879595 - DNA, 15 bp, Homo sapiens
accgatgtaaatggc

SEQ ID NO: 879596 - DNA, 15 bp, Homo sapiens
caccgatgtaaatgg

SEQ ID NO: 879597 - DNA, 15 bp, Homo sapiens
tcaccgatgtaaatg

SEQ ID NO: 879598 - DNA, 15 bp, Homo sapiens
ttcaccgatgtaaat

SEQ ID NO: 879599 - DNA, 15 bp, Homo sapiens
cttcaccgatgtaaa

SEQ ID NO: 879600 - DNA, 15 bp, Homo sapiens
ccttcaccgatgtaa

SEQ ID NO: 879601 - DNA, 15 bp, Homo sapiens
accttcaccgatgta

SEQ ID NO: 879602 - DNA, 15 bp, Homo sapiens
aaccttcaccgatgt

SEQ ID NO: 879603 - DNA, 15 bp, Homo sapiens
caaccttcaccgatg

SEQ ID NO: 879604 - DNA, 15 bp, Homo sapiens
tcaaccttcaccgat

SEQ ID NO: 879605 - DNA, 15 bp, Homo sapiens
ctcaaccttcaccga

SEQ ID NO: 879606 - DNA, 15 bp, Homo sapiens
gctcaaccttcaccg

SEQ ID NO: 879607 - DNA, 15 bp, Homo sapiens
tgctcaaccttcacc

SEQ ID NO: 879608 - DNA, 15 bp, Homo sapiens
ctgctcaaccttcac

SEQ ID NO: 879609 - DNA, 15 bp, Homo sapiens
tctgctcaaccttca

SEQ ID NO: 879610 - DNA, 15 bp, Homo sapiens
ttctgctcaaccttc

SEQ ID NO: 879611 - DNA, 15 bp, Homo sapiens
gttctgctcaacctt

SEQ ID NO: 879612 - DNA, 15 bp, Homo sapiens
cgttctgctcaacct

SEQ ID NO: 879613 - DNA, 15 bp, Homo sapiens
gcgttctgctcaacc

SEQ ID NO: 879614 - DNA, 15 bp, Homo sapiens
tgcgttctgctcaac

SEQ ID NO: 879615 - DNA, 15 bp, Homo sapiens
ctgcgttctgctcaa

SEQ ID NO: 879616 - DNA, 15 bp, Homo sapiens
tctgcgttctgctca

SEQ ID NO: 879617 - DNA, 15 bp, Homo sapiens
ctctgcgttctgctc

SEQ ID NO: 879618 - DNA, 15 bp, Homo sapiens
cctctgcgttctgct

SEQ ID NO: 879619 - DNA, 15 bp, Homo sapiens
tcctctgcgttctgc

SEQ ID NO: 879620 - DNA, 15 bp, Homo sapiens
ttcctctgcgttctg

SEQ ID NO: 879621 - DNA, 15 bp, Homo sapiens
cttcctctgcgttct

SEQ ID NO: 879622 - DNA, 15 bp, Homo sapiens
gcttcctctgcgttc

SEQ ID NO: 879623 - DNA, 15 bp, Homo sapiens
tgcttcctctgcgtt

SEQ ID NO: 879624 - DNA, 15 bp, Homo sapiens
atgcttcctctgcgt

SEQ ID NO: 879625 - DNA, 15 bp, Homo sapiens
aatgcttcctctgcg

SEQ ID NO: 879626 - DNA, 15 bp, Homo sapiens
aaatgcttcctctgc

SEQ ID NO: 879627 - DNA, 15 bp, Homo sapiens
taaatgcttcctctg

SEQ ID NO: 879628 - DNA, 15 bp, Homo sapiens
gtaaatgcttcctct

SEQ ID NO: 879629 - DNA, 15 bp, Homo sapiens
tgtaaatgcttcctc

SEQ ID NO: 879630 - DNA, 15 bp, Homo sapiens
gtgtaaatgcttcct

SEQ ID NO: 879631 - DNA, 15 bp, Homo sapiens
agtgtaaatgcttcc

SEQ ID NO: 879632 - DNA, 15 bp, Homo sapiens
aagtgtaaatgcttc

SEQ ID NO: 879633 - DNA, 15 bp, Homo sapiens
gaagtgtaaatgctt

SEQ ID NO: 879634 - DNA, 15 bp, Homo sapiens
ggaagtgtaaatgct

SEQ ID NO: 879635 - DNA, 15 bp, Homo sapiens
tggaagtgtaaatgc

SEQ ID NO: 879636 - DNA, 15 bp, Homo sapiens
gtggaagtgtaaatg

SEQ ID NO: 879637 - DNA, 15 bp, Homo sapiens
tgtggaagtgtaaat

SEQ ID NO: 879638 - DNA, 15 bp, Homo sapiens
ctgtggaagtgtaaa

SEQ ID NO: 879639 - DNA, 15 bp, Homo sapiens
cctgtggaagtgtaa

SEQ ID NO: 879640 - DNA, 15 bp, Homo sapiens
tcctgtggaagtgta

SEQ ID NO: 879641 - DNA, 15 bp, Homo sapiens
ctcctgtggaagtgt

SEQ ID NO: 879642 - DNA, 15 bp, Homo sapiens
actcctgtggaagtg

SEQ ID NO: 879643 - DNA, 15 bp, Homo sapiens
gactcctgtggaagt

SEQ ID NO: 879644 - DNA, 15 bp, Homo sapiens
agactcctgtggaag

SEQ ID NO: 879645 - DNA, 15 bp, Homo sapiens
cagactcctgtggaa

SEQ ID NO: 879646 - DNA, 15 bp, Homo sapiens
acagactcctgtgga

SEQ ID NO: 879647 - DNA, 15 bp, Homo sapiens
aacagactcctgtgg

SEQ ID NO: 879648 - DNA, 15 bp, Homo sapiens
aaacagactcctgtg

SEQ ID NO: 879649 - DNA, 15 bp, Homo sapiens
aaaacagactcctgt

SEQ ID NO: 879650 - DNA, 15 bp, Homo sapiens
gaaaacagactcctg

SEQ ID NO: 879651 - DNA, 15 bp, Homo sapiens
agaaaacagactcct

SEQ ID NO: 879652 - DNA, 15 bp, Homo sapiens
gagaaaacagactcc

SEQ ID NO: 879653 - DNA, 15 bp, Homo sapiens
ggagaaaacagactc

SEQ ID NO: 879654 - DNA, 15 bp, Homo sapiens
aggagaaaacagact

SEQ ID NO: 879655 - DNA, 15 bp, Homo sapiens
gaggagaaaacagac

SEQ ID NO: 879656 - DNA, 15 bp, Homo sapiens
tgaggagaaaacaga

SEQ ID NO: 879657 - DNA, 15 bp, Homo sapiens
gtgaggagaaaacag

SEQ ID NO: 879658 - DNA, 15 bp, Homo sapiens
tgtgaggagaaaaca

SEQ ID NO: 879659 - DNA, 15 bp, Homo sapiens
atgtgaggagaaaac

SEQ ID NO: 879660 - DNA, 15 bp, Homo sapiens
aatgtgaggagaaaa

SEQ ID NO: 879661 - DNA, 15 bp, Homo sapiens
aaatgtgaggagaaa

SEQ ID NO: 879662 - DNA, 15 bp, Homo sapiens
taaatgtgaggagaa

SEQ ID NO: 879663 - DNA, 15 bp, Homo sapiens
ataaatgtgaggaga

SEQ ID NO: 879664 - DNA, 15 bp, Homo sapiens
cataaatgtgaggag

SEQ ID NO: 879665 - DNA, 15 bp, Homo sapiens
acataaatgtgagga

SEQ ID NO: 879666 - DNA, 15 bp, Homo sapiens
cacataaatgtgagg

SEQ ID NO: 879667 - DNA, 15 bp, Homo sapiens
ccacataaatgtgag

SEQ ID NO: 879668 - DNA, 15 bp, Homo sapiens
cccacataaatgtga

SEQ ID NO: 879669 - DNA, 15 bp, Homo sapiens
acccacataaatgtg

SEQ ID NO: 879670 - DNA, 15 bp, Homo sapiens
gacccacataaatgt

SEQ ID NO: 879671 - DNA, 15 bp, Homo sapiens
agacccacataaatg

SEQ ID NO: 879672 - DNA, 15 bp, Homo sapiens
aagacccacataaat

SEQ ID NO: 879673 - DNA, 15 bp, Homo sapiens
aaagacccacataaa

SEQ ID NO: 879674 - DNA, 15 bp, Homo sapiens
taaagacccacataa

SEQ ID NO: 879675 - DNA, 15 bp, Homo sapiens
ataaagacccacata

SEQ ID NO: 879676 - DNA, 15 bp, Homo sapiens
tataaagacccacat

SEQ ID NO: 879677 - DNA, 15 bp, Homo sapiens
ttataaagacccaca

SEQ ID NO: 879678 - DNA, 15 bp, Homo sapiens
attataaagacccac

SEQ ID NO: 879679 - DNA, 15 bp, Homo sapiens
gattataaagaccca

SEQ ID NO: 879680 - DNA, 15 bp, Homo sapiens
tgattataaagaccc

SEQ ID NO: 879681 - DNA, 15 bp, Homo sapiens
ctgattataaagacc

SEQ ID NO: 879682 - DNA, 15 bp, Homo sapiens
gctgattataaagac

SEQ ID NO: 879683 - DNA, 15 bp, Homo sapiens
tgctgattataaaga

SEQ ID NO: 879684 - DNA, 15 bp, Homo sapiens
ttgctgattataaag

SEQ ID NO: 879685 - DNA, 15 bp, Homo sapiens
tttgctgattataaa

SEQ ID NO: 879686 - DNA, 15 bp, Homo sapiens
ctttgctgattataa

SEQ ID NO: 879687 - DNA, 15 bp, Homo sapiens
tctttgctgattata

SEQ ID NO: 879688 - DNA, 15 bp, Homo sapiens
ttctttgctgattat

SEQ ID NO: 879689 - DNA, 15 bp, Homo sapiens
attctttgctgatta

SEQ ID NO: 879690 - DNA, 15 bp, Homo sapiens
cattctttgctgatt

SEQ ID NO: 879691 - DNA, 15 bp, Homo sapiens
acattctttgctgat

SEQ ID NO: 879692 - DNA, 15 bp, Homo sapiens
aacattctttgctga

SEQ ID NO: 879693 - DNA, 15 bp, Homo sapiens
gaacattctttgctg

SEQ ID NO: 879694 - DNA, 15 bp, Homo sapiens
cgaacattctttgct

SEQ ID NO: 879695 - DNA, 15 bp, Homo sapiens
gcgaacattctttgc

SEQ ID NO: 879696 - DNA, 15 bp, Homo sapiens
tgcgaacattctttg

SEQ ID NO: 879697 - DNA, 15 bp, Homo sapiens
ttgcgaacattcttt

SEQ ID NO: 879698 - DNA, 15 bp, Homo sapiens
tttgcgaacattctt

SEQ ID NO: 879699 - DNA, 15 bp, Homo sapiens
ctttgcgaacattct

SEQ ID NO: 879700 - DNA, 15 bp, Homo sapiens
cctttgcgaacattc

SEQ ID NO: 879701 - DNA, 15 bp, Homo sapiens
gcctttgcgaacatt

SEQ ID NO: 879702 - DNA, 15 bp, Homo sapiens
cgcctttgcgaacat

SEQ ID NO: 879703 - DNA, 15 bp, Homo sapiens
gcgcctttgcgaaca

SEQ ID NO: 879704 - DNA, 15 bp, Homo sapiens
agcgcctttgcgaac

SEQ ID NO: 879705 - DNA, 15 bp, Homo sapiens
aagcgcctttgcgaa

SEQ ID NO: 879706 - DNA, 15 bp, Homo sapiens
aaagcgcctttgcga

SEQ ID NO: 879707 - DNA, 15 bp, Homo sapiens
aaaagcgcctttgcg

SEQ ID NO: 879708 - DNA, 15 bp, Homo sapiens
gaaaagcgcctttgc

SEQ ID NO: 879709 - DNA, 15 bp, Homo sapiens
tgaaaagcgcctttg

SEQ ID NO: 879710 - DNA, 15 bp, Homo sapiens
ctgaaaagcgccttt

SEQ ID NO: 879711 - DNA, 15 bp, Homo sapiens
cctgaaaagcgcctt

SEQ ID NO: 879712 - DNA, 15 bp, Homo sapiens
tcctgaaaagcgcct

SEQ ID NO: 879713 - DNA, 15 bp, Homo sapiens
ctcctgaaaagcgcc

SEQ ID NO: 879714 - DNA, 15 bp, Homo sapiens
cctcctgaaaagcgc

SEQ ID NO: 879715 - DNA, 15 bp, Homo sapiens
gcctcctgaaaagcg

SEQ ID NO: 879716 - DNA, 15 bp, Homo sapiens
tgcctcctgaaaagc

SEQ ID NO: 879717 - DNA, 15 bp, Homo sapiens
ttgcctcctgaaaag

SEQ ID NO: 879718 - DNA, 15 bp, Homo sapiens
tttgcctcctgaaaa

SEQ ID NO: 879719 - DNA, 15 bp, Homo sapiens
ctttgcctcctgaaa

SEQ ID NO: 879720 - DNA, 15 bp, Homo sapiens
gctttgcctcctgaa

SEQ ID NO: 879721 - DNA, 15 bp, Homo sapiens
tgctttgcctcctga

SEQ ID NO: 879722 - DNA, 15 bp, Homo sapiens
ctgctttgcctcctg

SEQ ID NO: 879723 - DNA, 15 bp, Homo sapiens
tctgctttgcctcct
